United States Patent Application Publication US 2019/0048337 A1 - sequence listing, part 20

SEQ ID NO: 659431 - RNA, 19 nt, Artificial Sequence
  Synthetic
gaggguccaagacuuuagu

SEQ ID NO: 659432 - RNA, 20 nt, Artificial Sequence
  Synthetic
ugaggguccaagacuuuagu

SEQ ID NO: 659433 - RNA, 21 nt, Artificial Sequence
  Synthetic
augaggguccaagacuuuagu

SEQ ID NO: 659434 - RNA, 22 nt, Artificial Sequence
  Synthetic
uaugaggguccaagacuuuagu

SEQ ID NO: 659435 - RNA, 23 nt, Artificial Sequence
  Synthetic
cuaugaggguccaagacuuuagu

SEQ ID NO: 659436 - RNA, 24 nt, Artificial Sequence
  Synthetic
ccuaugaggguccaagacuuuagu

SEQ ID NO: 659437 - RNA, 18 nt, Artificial Sequence
  Synthetic
uaaaacuaacauuuuagu

SEQ ID NO: 659438 - RNA, 19 nt, Artificial Sequence
  Synthetic
auaaaacuaacauuuuagu

SEQ ID NO: 659439 - RNA, 20 nt, Artificial Sequence
  Synthetic
cauaaaacuaacauuuuagu

SEQ ID NO: 659440 - RNA, 21 nt, Artificial Sequence
  Synthetic
acauaaaacuaacauuuuagu

SEQ ID NO: 659441 - RNA, 22 nt, Artificial Sequence
  Synthetic
cacauaaaacuaacauuuuagu

SEQ ID NO: 659442 - RNA, 23 nt, Artificial Sequence
  Synthetic
acacauaaaacuaacauuuuagu

SEQ ID NO: 659443 - RNA, 24 nt, Artificial Sequence
  Synthetic
cacacauaaaacuaacauuuuagu

SEQ ID NO: 659444 - RNA, 18 nt, Artificial Sequence
  Synthetic
uucuggagacauuuuagu

SEQ ID NO: 659445 - RNA, 19 nt, Artificial Sequence
  Synthetic
auucuggagacauuuuagu

SEQ ID NO: 659446 - RNA, 20 nt, Artificial Sequence
  Synthetic
uauucuggagacauuuuagu

SEQ ID NO: 659447 - RNA, 21 nt, Artificial Sequence
  Synthetic
cuauucuggagacauuuuagu

SEQ ID NO: 659448 - RNA, 22 nt, Artificial Sequence
  Synthetic
ucuauucuggagacauuuuagu

SEQ ID NO: 659449 - RNA, 23 nt, Artificial Sequence
  Synthetic
uucuauucuggagacauuuuagu

SEQ ID NO: 659450 - RNA, 24 nt, Artificial Sequence
  Synthetic
uuucuauucuggagacauuuuagu

SEQ ID NO: 659451 - RNA, 18 nt, Artificial Sequence
  Synthetic
aaaguucuugauuuuagu

SEQ ID NO: 659452 - RNA, 19 nt, Artificial Sequence
  Synthetic
uaaaguucuugauuuuagu

SEQ ID NO: 659453 - RNA, 20 nt, Artificial Sequence
  Synthetic
guaaaguucuugauuuuagu

SEQ ID NO: 659454 - RNA, 21 nt, Artificial Sequence
  Synthetic
gguaaaguucuugauuuuagu

SEQ ID NO: 659455 - RNA, 22 nt, Artificial Sequence
  Synthetic
cgguaaaguucuugauuuuagu

SEQ ID NO: 659456 - RNA, 23 nt, Artificial Sequence
  Synthetic
acgguaaaguucuugauuuuagu

SEQ ID NO: 659457 - RNA, 24 nt, Artificial Sequence
  Synthetic
gacgguaaaguucuugauuuuagu

SEQ ID NO: 659458 - RNA, 18 nt, Artificial Sequence
  Synthetic
auaaagauuacuuuuagu

SEQ ID NO: 659459 - RNA, 19 nt, Artificial Sequence
  Synthetic
cauaaagauuacuuuuagu

SEQ ID NO: 659460 - RNA, 20 nt, Artificial Sequence
  Synthetic
acauaaagauuacuuuuagu

SEQ ID NO: 659461 - RNA, 21 nt, Artificial Sequence
  Synthetic
gacauaaagauuacuuuuagu

SEQ ID NO: 659462 - RNA, 22 nt, Artificial Sequence
  Synthetic
ugacauaaagauuacuuuuagu

SEQ ID NO: 659463 - RNA, 23 nt, Artificial Sequence
  Synthetic
uugacauaaagauuacuuuuagu

SEQ ID NO: 659464 - RNA, 24 nt, Artificial Sequence
  Synthetic
uuugacauaaagauuacuuuuagu

SEQ ID NO: 659465 - RNA, 18 nt, Artificial Sequence
  Synthetic
aaaguaucaucuuuuagu

SEQ ID NO: 659466 - RNA, 19 nt, Artificial Sequence
  Synthetic
caaaguaucaucuuuuagu

SEQ ID NO: 659467 - RNA, 20 nt, Artificial Sequence
  Synthetic
ccaaaguaucaucuuuuagu

SEQ ID NO: 659468 - RNA, 21 nt, Artificial Sequence
  Synthetic
cccaaaguaucaucuuuuagu

SEQ ID NO: 659469 - RNA, 22 nt, Artificial Sequence
  Synthetic
ucccaaaguaucaucuuuuagu

SEQ ID NO: 659470 - RNA, 23 nt, Artificial Sequence
  Synthetic
cucccaaaguaucaucuuuuagu

SEQ ID NO: 659471 - RNA, 24 nt, Artificial Sequence
  Synthetic
acucccaaaguaucaucuuuuagu

SEQ ID NO: 659472 - RNA, 18 nt, Artificial Sequence
  Synthetic
ucacuggagauuuuuagu

SEQ ID NO: 659473 - RNA, 19 nt, Artificial Sequence
  Synthetic
uucacuggagauuuuuagu

SEQ ID NO: 659474 - RNA, 20 nt, Artificial Sequence
  Synthetic
auucacuggagauuuuuagu

SEQ ID NO: 659475 - RNA, 21 nt, Artificial Sequence
  Synthetic
aauucacuggagauuuuuagu

SEQ ID NO: 659476 - RNA, 22 nt, Artificial Sequence
  Synthetic
caauucacuggagauuuuuagu

SEQ ID NO: 659477 - RNA, 23 nt, Artificial Sequence
  Synthetic
ccaauucacuggagauuuuuagu

SEQ ID NO: 659478 - RNA, 24 nt, Artificial Sequence
  Synthetic
cccaauucacuggagauuuuuagu

SEQ ID NO: 659479 - RNA, 18 nt, Artificial Sequence
  Synthetic
uaaucagagcaaaaacgu

SEQ ID NO: 659480 - RNA, 19 nt, Artificial Sequence
  Synthetic
uuaaucagagcaaaaacgu

SEQ ID NO: 659481 - RNA, 20 nt, Artificial Sequence
  Synthetic
guuaaucagagcaaaaacgu

SEQ ID NO: 659482 - RNA, 21 nt, Artificial Sequence
  Synthetic
aguuaaucagagcaaaaacgu

SEQ ID NO: 659483 - RNA, 22 nt, Artificial Sequence
  Synthetic
caguuaaucagagcaaaaacgu

SEQ ID NO: 659484 - RNA, 23 nt, Artificial Sequence
  Synthetic
ccaguuaaucagagcaaaaacgu

SEQ ID NO: 659485 - RNA, 24 nt, Artificial Sequence
  Synthetic
uccaguuaaucagagcaaaaacgu

SEQ ID NO: 659486 - RNA, 18 nt, Artificial Sequence
  Synthetic
guauuuggcucaaaacgu

SEQ ID NO: 659487 - RNA, 19 nt, Artificial Sequence
  Synthetic
uguauuuggcucaaaacgu

SEQ ID NO: 659488 - RNA, 20 nt, Artificial Sequence
  Synthetic
auguauuuggcucaaaacgu

SEQ ID NO: 659489 - RNA, 21 nt, Artificial Sequence
  Synthetic
gauguauuuggcucaaaacgu

SEQ ID NO: 659490 - RNA, 22 nt, Artificial Sequence
  Synthetic
agauguauuuggcucaaaacgu

SEQ ID NO: 659491 - RNA, 23 nt, Artificial Sequence
  Synthetic
aagauguauuuggcucaaaacgu

SEQ ID NO: 659492 - RNA, 24 nt, Artificial Sequence
  Synthetic
aaagauguauuuggcucaaaacgu

SEQ ID NO: 659493 - RNA, 18 nt, Artificial Sequence
  Synthetic
uauuuggcauguaaacgu

SEQ ID NO: 659494 - RNA, 19 nt, Artificial Sequence
  Synthetic
guauuuggcauguaaacgu

SEQ ID NO: 659495 - RNA, 20 nt, Artificial Sequence
  Synthetic
gguauuuggcauguaaacgu

SEQ ID NO: 659496 - RNA, 21 nt, Artificial Sequence
  Synthetic
ugguauuuggcauguaaacgu

SEQ ID NO: 659497 - RNA, 22 nt, Artificial Sequence
  Synthetic
cugguauuuggcauguaaacgu

SEQ ID NO: 659498 - RNA, 23 nt, Artificial Sequence
  Synthetic
ccugguauuuggcauguaaacgu

SEQ ID NO: 659499 - RNA, 24 nt, Artificial Sequence
  Synthetic
accugguauuuggcauguaaacgu

SEQ ID NO: 659500 - RNA, 18 nt, Artificial Sequence
  Synthetic
ucgccaaguagacaacgu

SEQ ID NO: 659501 - RNA, 19 nt, Artificial Sequence
  Synthetic
uucgccaaguagacaacgu

SEQ ID NO: 659502 - RNA, 20 nt, Artificial Sequence
  Synthetic
auucgccaaguagacaacgu

SEQ ID NO: 659503 - RNA, 21 nt, Artificial Sequence
  Synthetic
aauucgccaaguagacaacgu

SEQ ID NO: 659504 - RNA, 22 nt, Artificial Sequence
  Synthetic
gaauucgccaaguagacaacgu

SEQ ID NO: 659505 - RNA, 23 nt, Artificial Sequence
  Synthetic
agaauucgccaaguagacaacgu

SEQ ID NO: 659506 - RNA, 24 nt, Artificial Sequence
  Synthetic
gagaauucgccaaguagacaacgu

SEQ ID NO: 659507 - RNA, 18 nt, Artificial Sequence
  Synthetic
cagcagcaccagcaacgu

SEQ ID NO: 659508 - RNA, 19 nt, Artificial Sequence
  Synthetic
ccagcagcaccagcaacgu

SEQ ID NO: 659509 - RNA, 20 nt, Artificial Sequence
  Synthetic
accagcagcaccagcaacgu

SEQ ID NO: 659510 - RNA, 21 nt, Artificial Sequence
  Synthetic
gaccagcagcaccagcaacgu

SEQ ID NO: 659511 - RNA, 22 nt, Artificial Sequence
  Synthetic
ggaccagcagcaccagcaacgu

SEQ ID NO: 659512 - RNA, 23 nt, Artificial Sequence
  Synthetic
uggaccagcagcaccagcaacgu

SEQ ID NO: 659513 - RNA, 24 nt, Artificial Sequence
  Synthetic
auggaccagcagcaccagcaacgu

SEQ ID NO: 659514 - RNA, 18 nt, Artificial Sequence
  Synthetic
caaauucuuuuugaacgu

SEQ ID NO: 659515 - RNA, 19 nt, Artificial Sequence
  Synthetic
ucaaauucuuuuugaacgu

SEQ ID NO: 659516 - RNA, 20 nt, Artificial Sequence
  Synthetic
cucaaauucuuuuugaacgu

SEQ ID NO: 659517 - RNA, 21 nt, Artificial Sequence
  Synthetic
ucucaaauucuuuuugaacgu

SEQ ID NO: 659518 - RNA, 22 nt, Artificial Sequence
  Synthetic
aucucaaauucuuuuugaacgu

SEQ ID NO: 659519 - RNA, 23 nt, Artificial Sequence
  Synthetic
caucucaaauucuuuuugaacgu

SEQ ID NO: 659520 - RNA, 24 nt, Artificial Sequence
  Synthetic
ccaucucaaauucuuuuugaacgu

SEQ ID NO: 659521 - RNA, 18 nt, Artificial Sequence
  Synthetic
aguagcucagaaccacgu

SEQ ID NO: 659522 - RNA, 19 nt, Artificial Sequence
  Synthetic
aaguagcucagaaccacgu

SEQ ID NO: 659523 - RNA, 20 nt, Artificial Sequence
  Synthetic
gaaguagcucagaaccacgu

SEQ ID NO: 659524 - RNA, 21 nt, Artificial Sequence
  Synthetic
agaaguagcucagaaccacgu

SEQ ID NO: 659525 - RNA, 22 nt, Artificial Sequence
  Synthetic
uagaaguagcucagaaccacgu

SEQ ID NO: 659526 - RNA, 23 nt, Artificial Sequence
  Synthetic
auagaaguagcucagaaccacgu

SEQ ID NO: 659527 - RNA, 24 nt, Artificial Sequence
  Synthetic
aauagaaguagcucagaaccacgu

SEQ ID NO: 659528 - RNA, 18 nt, Artificial Sequence
  Synthetic
gaauauuugaggccacgu

SEQ ID NO: 659529 - RNA, 19 nt, Artificial Sequence
  Synthetic
agaauauuugaggccacgu

SEQ ID NO: 659530 - RNA, 20 nt, Artificial Sequence
  Synthetic
uagaauauuugaggccacgu

SEQ ID NO: 659531 - RNA, 21 nt, Artificial Sequence
  Synthetic
uuagaauauuugaggccacgu

SEQ ID NO: 659532 - RNA, 22 nt, Artificial Sequence
  Synthetic
auuagaauauuugaggccacgu

SEQ ID NO: 659533 - RNA, 23 nt, Artificial Sequence
  Synthetic
cauuagaauauuugaggccacgu

SEQ ID NO: 659534 - RNA, 24 nt, Artificial Sequence
  Synthetic
ccauuagaauauuugaggccacgu

SEQ ID NO: 659535 - RNA, 18 nt, Artificial Sequence
  Synthetic
guuuccugaaaagcacgu

SEQ ID NO: 659536 - RNA, 19 nt, Artificial Sequence
  Synthetic
uguuuccugaaaagcacgu

SEQ ID NO: 659537 - RNA, 20 nt, Artificial Sequence
  Synthetic
cuguuuccugaaaagcacgu

SEQ ID NO: 659538 - RNA, 21 nt, Artificial Sequence
  Synthetic
acuguuuccugaaaagcacgu

SEQ ID NO: 659539 - RNA, 22 nt, Artificial Sequence
  Synthetic
cacuguuuccugaaaagcacgu

SEQ ID NO: 659540 - RNA, 23 nt, Artificial Sequence
  Synthetic
ccacuguuuccugaaaagcacgu

SEQ ID NO: 659541 - RNA, 24 nt, Artificial Sequence
  Synthetic
accacuguuuccugaaaagcacgu

SEQ ID NO: 659542 - RNA, 18 nt, Artificial Sequence
  Synthetic
caaaccuggcuugcacgu

SEQ ID NO: 659543 - RNA, 19 nt, Artificial Sequence
  Synthetic
ucaaaccuggcuugcacgu

SEQ ID NO: 659544 - RNA, 20 nt, Artificial Sequence
  Synthetic
uucaaaccuggcuugcacgu

SEQ ID NO: 659545 - RNA, 21 nt, Artificial Sequence
  Synthetic
uuucaaaccuggcuugcacgu

SEQ ID NO: 659546 - RNA, 22 nt, Artificial Sequence
  Synthetic
uuuucaaaccuggcuugcacgu

SEQ ID NO: 659547 - RNA, 23 nt, Artificial Sequence
  Synthetic
guuuucaaaccuggcuugcacgu

SEQ ID NO: 659548 - RNA, 24 nt, Artificial Sequence
  Synthetic
uguuuucaaaccuggcuugcacgu

SEQ ID NO: 659549 - RNA, 18 nt, Artificial Sequence
  Synthetic
aggcauuaucaaucacgu

SEQ ID NO: 659550 - RNA, 19 nt, Artificial Sequence
  Synthetic
uaggcauuaucaaucacgu

SEQ ID NO: 659551 - RNA, 20 nt, Artificial Sequence
  Synthetic
auaggcauuaucaaucacgu

SEQ ID NO: 659552 - RNA, 21 nt, Artificial Sequence
  Synthetic
uauaggcauuaucaaucacgu

SEQ ID NO: 659553 - RNA, 22 nt, Artificial Sequence
  Synthetic
guauaggcauuaucaaucacgu

SEQ ID NO: 659554 - RNA, 23 nt, Artificial Sequence
  Synthetic
aguauaggcauuaucaaucacgu

SEQ ID NO: 659555 - RNA, 24 nt, Artificial Sequence
  Synthetic
gaguauaggcauuaucaaucacgu

SEQ ID NO: 659556 - RNA, 18 nt, Artificial Sequence
  Synthetic
aguacggagcuaucacgu

SEQ ID NO: 659557 - RNA, 19 nt, Artificial Sequence
  Synthetic
aaguacggagcuaucacgu

SEQ ID NO: 659558 - RNA, 20 nt, Artificial Sequence
  Synthetic
gaaguacggagcuaucacgu

SEQ ID NO: 659559 - RNA, 21 nt, Artificial Sequence
  Synthetic
agaaguacggagcuaucacgu

SEQ ID NO: 659560 - RNA, 22 nt, Artificial Sequence
  Synthetic
aagaaguacggagcuaucacgu

SEQ ID NO: 659561 - RNA, 23 nt, Artificial Sequence
  Synthetic
gaagaaguacggagcuaucacgu

SEQ ID NO: 659562 - RNA, 24 nt, Artificial Sequence
  Synthetic
agaagaaguacggagcuaucacgu

SEQ ID NO: 659563 - RNA, 18 nt, Artificial Sequence
  Synthetic
gggcgcgguggcucacgu

SEQ ID NO: 659564 - RNA, 19 nt, Artificial Sequence
  Synthetic
ugggcgcgguggcucacgu

SEQ ID NO: 659565 - RNA, 20 nt, Artificial Sequence
  Synthetic
cugggcgcgguggcucacgu

SEQ ID NO: 659566 - RNA, 21 nt, Artificial Sequence
  Synthetic
gcugggcgcgguggcucacgu

SEQ ID NO: 659567 - RNA, 22 nt, Artificial Sequence
  Synthetic
ggcugggcgcgguggcucacgu

SEQ ID NO: 659568 - RNA, 23 nt, Artificial Sequence
  Synthetic
gggcugggcgcgguggcucacgu

SEQ ID NO: 659569 - RNA, 24 nt, Artificial Sequence
  Synthetic
cgggcugggcgcgguggcucacgu

SEQ ID NO: 659570 - RNA, 18 nt, Artificial Sequence
  Synthetic
cagcuaaugcugucacgu

SEQ ID NO: 659571 - RNA, 19 nt, Artificial Sequence
  Synthetic
acagcuaaugcugucacgu

SEQ ID NO: 659572 - RNA, 20 nt, Artificial Sequence
  Synthetic
aacagcuaaugcugucacgu

SEQ ID NO: 659573 - RNA, 21 nt, Artificial Sequence
  Synthetic
aaacagcuaaugcugucacgu

SEQ ID NO: 659574 - RNA, 22 nt, Artificial Sequence
  Synthetic
aaaacagcuaaugcugucacgu

SEQ ID NO: 659575 - RNA, 23 nt, Artificial Sequence
  Synthetic
caaaacagcuaaugcugucacgu

SEQ ID NO: 659576 - RNA, 24 nt, Artificial Sequence
  Synthetic
acaaaacagcuaaugcugucacgu

SEQ ID NO: 659577 - RNA, 18 nt, Artificial Sequence
  Synthetic
uuaaaaaaggugucacgu

SEQ ID NO: 659578 - RNA, 19 nt, Artificial Sequence
  Synthetic
uuuaaaaaaggugucacgu

SEQ ID NO: 659579 - RNA, 20 nt, Artificial Sequence
  Synthetic
uuuuaaaaaaggugucacgu

SEQ ID NO: 659580 - RNA, 21 nt, Artificial Sequence
  Synthetic
uuuuuaaaaaaggugucacgu

SEQ ID NO: 659581 - RNA, 22 nt, Artificial Sequence
  Synthetic
uuuuuuaaaaaaggugucacgu

SEQ ID NO: 659582 - RNA, 23 nt, Artificial Sequence
  Synthetic
cuuuuuuaaaaaaggugucacgu

SEQ ID NO: 659583 - RNA, 24 nt, Artificial Sequence
  Synthetic
ucuuuuuuaaaaaaggugucacgu

SEQ ID NO: 659584 - RNA, 18 nt, Artificial Sequence
  Synthetic
acugaugaacaaauacgu

SEQ ID NO: 659585 - RNA, 19 nt, Artificial Sequence
  Synthetic
aacugaugaacaaauacgu

SEQ ID NO: 659586 - RNA, 20 nt, Artificial Sequence
  Synthetic
caacugaugaacaaauacgu

SEQ ID NO: 659587 - RNA, 21 nt, Artificial Sequence
  Synthetic
ccaacugaugaacaaauacgu

SEQ ID NO: 659588 - RNA, 22 nt, Artificial Sequence
  Synthetic
accaacugaugaacaaauacgu

SEQ ID NO: 659589 - RNA, 23 nt, Artificial Sequence
  Synthetic
aaccaacugaugaacaaauacgu

SEQ ID NO: 659590 - RNA, 24 nt, Artificial Sequence
  Synthetic
uaaccaacugaugaacaaauacgu

SEQ ID NO: 659591 - RNA, 18 nt, Artificial Sequence
  Synthetic
auuacauagcaaauacgu

SEQ ID NO: 659592 - RNA, 19 nt, Artificial Sequence
  Synthetic
cauuacauagcaaauacgu

SEQ ID NO: 659593 - RNA, 20 nt, Artificial Sequence
  Synthetic
ucauuacauagcaaauacgu

SEQ ID NO: 659594 - RNA, 21 nt, Artificial Sequence
  Synthetic
gucauuacauagcaaauacgu

SEQ ID NO: 659595 - RNA, 22 nt, Artificial Sequence
  Synthetic
ugucauuacauagcaaauacgu

SEQ ID NO: 659596 - RNA, 23 nt, Artificial Sequence
  Synthetic
cugucauuacauagcaaauacgu

SEQ ID NO: 659597 - RNA, 24 nt, Artificial Sequence
  Synthetic
acugucauuacauagcaaauacgu

SEQ ID NO: 659598 - RNA, 18 nt, Artificial Sequence
  Synthetic
cucaggcuucaaauacgu

SEQ ID NO: 659599 - RNA, 19 nt, Artificial Sequence
  Synthetic
ucucaggcuucaaauacgu

SEQ ID NO: 659600 - RNA, 20 nt, Artificial Sequence
  Synthetic
uucucaggcuucaaauacgu

SEQ ID NO: 659601 - RNA, 21 nt, Artificial Sequence
  Synthetic
guucucaggcuucaaauacgu

SEQ ID NO: 659602 - RNA, 22 nt, Artificial Sequence
  Synthetic
uguucucaggcuucaaauacgu

SEQ ID NO: 659603 - RNA, 23 nt, Artificial Sequence
  Synthetic
uuguucucaggcuucaaauacgu

SEQ ID NO: 659604 - RNA, 24 nt, Artificial Sequence
  Synthetic
cuuguucucaggcuucaaauacgu

SEQ ID NO: 659605 - RNA, 18 nt, Artificial Sequence
  Synthetic
auguucucacugauacgu

SEQ ID NO: 659606 - RNA, 19 nt, Artificial Sequence
  Synthetic
uauguucucacugauacgu

SEQ ID NO: 659607 - RNA, 20 nt, Artificial Sequence
  Synthetic
auauguucucacugauacgu

SEQ ID NO: 659608 - RNA, 21 nt, Artificial Sequence
  Synthetic
cauauguucucacugauacgu

SEQ ID NO: 659609 - RNA, 22 nt, Artificial Sequence
  Synthetic
gcauauguucucacugauacgu

SEQ ID NO: 659610 - RNA, 23 nt, Artificial Sequence
  Synthetic
agcauauguucucacugauacgu

SEQ ID NO: 659611 - RNA, 24 nt, Artificial Sequence
  Synthetic
cagcauauguucucacugauacgu

SEQ ID NO: 659612 - RNA, 18 nt, Artificial Sequence
  Synthetic
auagcuguauguauacgu

SEQ ID NO: 659613 - RNA, 19 nt, Artificial Sequence
  Synthetic
cauagcuguauguauacgu

SEQ ID NO: 659614 - RNA, 20 nt, Artificial Sequence
  Synthetic
acauagcuguauguauacgu

SEQ ID NO: 659615 - RNA, 21 nt, Artificial Sequence
  Synthetic
cacauagcuguauguauacgu

SEQ ID NO: 659616 - RNA, 22 nt, Artificial Sequence
  Synthetic
gcacauagcuguauguauacgu

SEQ ID NO: 659617 - RNA, 23 nt, Artificial Sequence
  Synthetic
agcacauagcuguauguauacgu

SEQ ID NO: 659618 - RNA, 24 nt, Artificial Sequence
  Synthetic
uagcacauagcuguauguauacgu

SEQ ID NO: 659619 - RNA, 18 nt, Artificial Sequence
  Synthetic
aacagguaacacuuacgu

SEQ ID NO: 659620 - RNA, 19 nt, Artificial Sequence
  Synthetic
aaacagguaacacuuacgu

SEQ ID NO: 659621 - RNA, 20 nt, Artificial Sequence
  Synthetic
aaaacagguaacacuuacgu

SEQ ID NO: 659622 - RNA, 21 nt, Artificial Sequence
  Synthetic
gaaaacagguaacacuuacgu

SEQ ID NO: 659623 - RNA, 22 nt, Artificial Sequence
  Synthetic
agaaaacagguaacacuuacgu

SEQ ID NO: 659624 - RNA, 23 nt, Artificial Sequence
  Synthetic
gagaaaacagguaacacuuacgu

SEQ ID NO: 659625 - RNA, 24 nt, Artificial Sequence
  Synthetic
ggagaaaacagguaacacuuacgu

SEQ ID NO: 659626 - RNA, 18 nt, Artificial Sequence
  Synthetic
gccacuauggaaaaccgu

SEQ ID NO: 659627 - RNA, 19 nt, Artificial Sequence
  Synthetic
agccacuauggaaaaccgu

SEQ ID NO: 659628 - RNA, 20 nt, Artificial Sequence
  Synthetic
uagccacuauggaaaaccgu

SEQ ID NO: 659629 - RNA, 21 nt, Artificial Sequence
  Synthetic
guagccacuauggaaaaccgu

SEQ ID NO: 659630 - RNA, 22 nt, Artificial Sequence
  Synthetic
uguagccacuauggaaaaccgu

SEQ ID NO: 659631 - RNA, 23 nt, Artificial Sequence
  Synthetic
guguagccacuauggaaaaccgu

SEQ ID NO: 659632 - RNA, 24 nt, Artificial Sequence
  Synthetic
gguguagccacuauggaaaaccgu

SEQ ID NO: 659633 - RNA, 18 nt, Artificial Sequence
  Synthetic
accacuauggagaaccgu

SEQ ID NO: 659634 - RNA, 19 nt, Artificial Sequence
  Synthetic
aaccacuauggagaaccgu

SEQ ID NO: 659635 - RNA, 20 nt, Artificial Sequence
  Synthetic
caaccacuauggagaaccgu

SEQ ID NO: 659636 - RNA, 21 nt, Artificial Sequence
  Synthetic
acaaccacuauggagaaccgu

SEQ ID NO: 659637 - RNA, 22 nt, Artificial Sequence
  Synthetic
cacaaccacuauggagaaccgu

SEQ ID NO: 659638 - RNA, 23 nt, Artificial Sequence
  Synthetic
gcacaaccacuauggagaaccgu

SEQ ID NO: 659639 - RNA, 24 nt, Artificial Sequence
  Synthetic
agcacaaccacuauggagaaccgu

SEQ ID NO: 659640 - RNA, 18 nt, Artificial Sequence
  Synthetic
acuucuagaaguaaccgu

SEQ ID NO: 659641 - RNA, 19 nt, Artificial Sequence
  Synthetic
uacuucuagaaguaaccgu

SEQ ID NO: 659642 - RNA, 20 nt, Artificial Sequence
  Synthetic
cuacuucuagaaguaaccgu

SEQ ID NO: 659643 - RNA, 21 nt, Artificial Sequence
  Synthetic
ccuacuucuagaaguaaccgu

SEQ ID NO: 659644 - RNA, 22 nt, Artificial Sequence
  Synthetic
gccuacuucuagaaguaaccgu

SEQ ID NO: 659645 - RNA, 23 nt, Artificial Sequence
  Synthetic
ugccuacuucuagaaguaaccgu

SEQ ID NO: 659646 - RNA, 24 nt, Artificial Sequence
  Synthetic
augccuacuucuagaaguaaccgu

SEQ ID NO: 659647 - RNA, 18 nt, Artificial Sequence
  Synthetic
caggugcccucucaccgu

SEQ ID NO: 659648 - RNA, 19 nt, Artificial Sequence
  Synthetic
ccaggugcccucucaccgu

SEQ ID NO: 659649 - RNA, 20 nt, Artificial Sequence
  Synthetic
cccaggugcccucucaccgu

SEQ ID NO: 659650 - RNA, 21 nt, Artificial Sequence
  Synthetic
acccaggugcccucucaccgu

SEQ ID NO: 659651 - RNA, 22 nt, Artificial Sequence
  Synthetic
cacccaggugcccucucaccgu

SEQ ID NO: 659652 - RNA, 23 nt, Artificial Sequence
  Synthetic
gcacccaggugcccucucaccgu

SEQ ID NO: 659653 - RNA, 24 nt, Artificial Sequence
  Synthetic
ugcacccaggugcccucucaccgu

SEQ ID NO: 659654 - RNA, 18 nt, Artificial Sequence
  Synthetic
ucuccuggggcuacccgu

SEQ ID NO: 659655 - RNA, 19 nt, Artificial Sequence
  Synthetic
uucuccuggggcuacccgu

SEQ ID NO: 659656 - RNA, 20 nt, Artificial Sequence
  Synthetic
uuucuccuggggcuacccgu

SEQ ID NO: 659657 - RNA, 21 nt, Artificial Sequence
  Synthetic
uuuucuccuggggcuacccgu

SEQ ID NO: 659658 - RNA, 22 nt, Artificial Sequence
  Synthetic
cuuuucuccuggggcuacccgu

SEQ ID NO: 659659 - RNA, 23 nt, Artificial Sequence
  Synthetic
ucuuuucuccuggggcuacccgu

SEQ ID NO: 659660 - RNA, 24 nt, Artificial Sequence
  Synthetic
cucuuuucuccuggggcuacccgu

SEQ ID NO: 659661 - RNA, 18 nt, Artificial Sequence
  Synthetic
ggaaaauaauucccccgu

SEQ ID NO: 659662 - RNA, 19 nt, Artificial Sequence
  Synthetic
aggaaaauaauucccccgu

SEQ ID NO: 659663 - RNA, 20 nt, Artificial Sequence
  Synthetic
uaggaaaauaauucccccgu

SEQ ID NO: 659664 - RNA, 21 nt, Artificial Sequence
  Synthetic
cuaggaaaauaauucccccgu

SEQ ID NO: 659665 - RNA, 22 nt, Artificial Sequence
  Synthetic
gcuaggaaaauaauucccccgu

SEQ ID NO: 659666 - RNA, 23 nt, Artificial Sequence
  Synthetic
ugcuaggaaaauaauucccccgu

SEQ ID NO: 659667 - RNA, 24 nt, Artificial Sequence
  Synthetic
augcuaggaaaauaauucccccgu

SEQ ID NO: 659668 - RNA, 18 nt, Artificial Sequence
  Synthetic
auggugacaaaaucccgu

SEQ ID NO: 659669 - RNA, 19 nt, Artificial Sequence
  Synthetic
gauggugacaaaaucccgu

SEQ ID NO: 659670 - RNA, 20 nt, Artificial Sequence
  Synthetic
agauggugacaaaaucccgu

SEQ ID NO: 659671 - RNA, 21 nt, Artificial Sequence
  Synthetic
aagauggugacaaaaucccgu

SEQ ID NO: 659672 - RNA, 22 nt, Artificial Sequence
  Synthetic
aaagauggugacaaaaucccgu

SEQ ID NO: 659673 - RNA, 23 nt, Artificial Sequence
  Synthetic
aaaagauggugacaaaaucccgu

SEQ ID NO: 659674 - RNA, 24 nt, Artificial Sequence
  Synthetic
aaaaagauggugacaaaaucccgu

SEQ ID NO: 659675 - RNA, 18 nt, Artificial Sequence
  Synthetic
ugcauaucuaacucccgu

SEQ ID NO: 659676 - RNA, 19 nt, Artificial Sequence
  Synthetic
gugcauaucuaacucccgu

SEQ ID NO: 659677 - RNA, 20 nt, Artificial Sequence
  Synthetic
agugcauaucuaacucccgu

SEQ ID NO: 659678 - RNA, 21 nt, Artificial Sequence
  Synthetic
aagugcauaucuaacucccgu

SEQ ID NO: 659679 - RNA, 22 nt, Artificial Sequence
  Synthetic
gaagugcauaucuaacucccgu

SEQ ID NO: 659680 - RNA, 23 nt, Artificial Sequence
  Synthetic
agaagugcauaucuaacucccgu

SEQ ID NO: 659681 - RNA, 24 nt, Artificial Sequence
  Synthetic
aagaagugcauaucuaacucccgu

SEQ ID NO: 659682 - RNA, 18 nt, Artificial Sequence
  Synthetic
uguugugacagcggccgu

SEQ ID NO: 659683 - RNA, 19 nt, Artificial Sequence
  Synthetic
cuguugugacagcggccgu

SEQ ID NO: 659684 - RNA, 20 nt, Artificial Sequence
  Synthetic
acuguugugacagcggccgu

SEQ ID NO: 659685 - RNA, 21 nt, Artificial Sequence
  Synthetic
aacuguugugacagcggccgu

SEQ ID NO: 659686 - RNA, 22 nt, Artificial Sequence
  Synthetic
uaacuguugugacagcggccgu

SEQ ID NO: 659687 - RNA, 23 nt, Artificial Sequence
  Synthetic
guaacuguugugacagcggccgu

SEQ ID NO: 659688 - RNA, 24 nt, Artificial Sequence
  Synthetic
aguaacuguugugacagcggccgu

SEQ ID NO: 659689 - RNA, 18 nt, Artificial Sequence
  Synthetic
aguagguuaacacuccgu

SEQ ID NO: 659690 - RNA, 19 nt, Artificial Sequence
  Synthetic
uaguagguuaacacuccgu

SEQ ID NO: 659691 - RNA, 20 nt, Artificial Sequence
  Synthetic
cuaguagguuaacacuccgu

SEQ ID NO: 659692 - RNA, 21 nt, Artificial Sequence
  Synthetic
ucuaguagguuaacacuccgu

SEQ ID NO: 659693 - RNA, 22 nt, Artificial Sequence
  Synthetic
uucuaguagguuaacacuccgu

SEQ ID NO: 659694 - RNA, 23 nt, Artificial Sequence
  Synthetic
uuucuaguagguuaacacuccgu

SEQ ID NO: 659695 - RNA, 24 nt, Artificial Sequence
  Synthetic
cuuucuaguagguuaacacuccgu

SEQ ID NO: 659696 - RNA, 18 nt, Artificial Sequence
  Synthetic
uagcuggcugggcuccgu

SEQ ID NO: 659697 - RNA, 19 nt, Artificial Sequence
  Synthetic
uuagcuggcugggcuccgu

SEQ ID NO: 659698 - RNA, 20 nt, Artificial Sequence
  Synthetic
cuuagcuggcugggcuccgu

SEQ ID NO: 659699 - RNA, 21 nt, Artificial Sequence
  Synthetic
ucuuagcuggcugggcuccgu

SEQ ID NO: 659700 - RNA, 22 nt, Artificial Sequence
  Synthetic
aucuuagcuggcugggcuccgu

SEQ ID NO: 659701 - RNA, 23 nt, Artificial Sequence
  Synthetic
gaucuuagcuggcugggcuccgu

SEQ ID NO: 659702 - RNA, 24 nt, Artificial Sequence
  Synthetic
ggaucuuagcuggcugggcuccgu

SEQ ID NO: 659703 - RNA, 18 nt, Artificial Sequence
  Synthetic
uagcaaccuuaauuccgu

SEQ ID NO: 659704 - RNA, 19 nt, Artificial Sequence
  Synthetic
uuagcaaccuuaauuccgu

SEQ ID NO: 659705 - RNA, 20 nt, Artificial Sequence
  Synthetic
cuuagcaaccuuaauuccgu

SEQ ID NO: 659706 - RNA, 21 nt, Artificial Sequence
  Synthetic
gcuuagcaaccuuaauuccgu

SEQ ID NO: 659707 - RNA, 22 nt, Artificial Sequence
  Synthetic
ugcuuagcaaccuuaauuccgu

SEQ ID NO: 659708 - RNA, 23 nt, Artificial Sequence
  Synthetic
cugcuuagcaaccuuaauuccgu

SEQ ID NO: 659709 - RNA, 24 nt, Artificial Sequence
  Synthetic
ccugcuuagcaaccuuaauuccgu

SEQ ID NO: 659710 - RNA, 18 nt, Artificial Sequence
  Synthetic
aauauuuuaagcaagcgu

SEQ ID NO: 659711 - RNA, 19 nt, Artificial Sequence
  Synthetic
aaauauuuuaagcaagcgu

SEQ ID NO: 659712 - RNA, 20 nt, Artificial Sequence
  Synthetic
caaauauuuuaagcaagcgu

SEQ ID NO: 659713 - RNA, 21 nt, Artificial Sequence
  Synthetic
acaaauauuuuaagcaagcgu

SEQ ID NO: 659714 - RNA, 22 nt, Artificial Sequence
  Synthetic
aacaaauauuuuaagcaagcgu

SEQ ID NO: 659715 - RNA, 23 nt, Artificial Sequence
  Synthetic
gaacaaauauuuuaagcaagcgu

SEQ ID NO: 659716 - RNA, 24 nt, Artificial Sequence
  Synthetic
ugaacaaauauuuuaagcaagcgu

SEQ ID NO: 659717 - RNA, 18 nt, Artificial Sequence
  Synthetic
gccaacuguuagaagcgu

SEQ ID NO: 659718 - RNA, 19 nt, Artificial Sequence
  Synthetic
cgccaacuguuagaagcgu

SEQ ID NO: 659719 - RNA, 20 nt, Artificial Sequence
  Synthetic
acgccaacuguuagaagcgu

SEQ ID NO: 659720 - RNA, 21 nt, Artificial Sequence
  Synthetic
aacgccaacuguuagaagcgu

SEQ ID NO: 659721 - RNA, 22 nt, Artificial Sequence
  Synthetic
aaacgccaacuguuagaagcgu

SEQ ID NO: 659722 - RNA, 23 nt, Artificial Sequence
  Synthetic
aaaacgccaacuguuagaagcgu

SEQ ID NO: 659723 - RNA, 24 nt, Artificial Sequence
  Synthetic
caaaacgccaacuguuagaagcgu

SEQ ID NO: 659724 - RNA, 18 nt, Artificial Sequence
  Synthetic
agaugguagcauaagcgu

SEQ ID NO: 659725 - RNA, 19 nt, Artificial Sequence
  Synthetic
cagaugguagcauaagcgu

SEQ ID NO: 659726 - RNA, 20 nt, Artificial Sequence
  Synthetic
ucagaugguagcauaagcgu

SEQ ID NO: 659727 - RNA, 21 nt, Artificial Sequence
  Synthetic
uucagaugguagcauaagcgu

SEQ ID NO: 659728 - RNA, 22 nt, Artificial Sequence
  Synthetic
auucagaugguagcauaagcgu

SEQ ID NO: 659729 - RNA, 23 nt, Artificial Sequence
  Synthetic
uauucagaugguagcauaagcgu

SEQ ID NO: 659730 - RNA, 24 nt, Artificial Sequence
  Synthetic
auauucagaugguagcauaagcgu

SEQ ID NO: 659731 - RNA, 18 nt, Artificial Sequence
  Synthetic
uuuauaucauaagagcgu

SEQ ID NO: 659732 - RNA, 19 nt, Artificial Sequence
  Synthetic
guuuauaucauaagagcgu

SEQ ID NO: 659733 - RNA, 20 nt, Artificial Sequence
  Synthetic
gguuuauaucauaagagcgu

SEQ ID NO: 659734 - RNA, 21 nt, Artificial Sequence
  Synthetic
ugguuuauaucauaagagcgu

SEQ ID NO: 659735 - RNA, 22 nt, Artificial Sequence
  Synthetic
augguuuauaucauaagagcgu

SEQ ID NO: 659736 - RNA, 23 nt, Artificial Sequence
  Synthetic
aaugguuuauaucauaagagcgu

SEQ ID NO: 659737 - RNA, 24 nt, Artificial Sequence
  Synthetic
gaaugguuuauaucauaagagcgu

SEQ ID NO: 659738 - RNA, 18 nt, Artificial Sequence
  Synthetic
agcuugggaggugagcgu

SEQ ID NO: 659739 - RNA, 19 nt, Artificial Sequence
  Synthetic
cagcuugggaggugagcgu

SEQ ID NO: 659740 - RNA, 20 nt, Artificial Sequence
  Synthetic
ucagcuugggaggugagcgu

SEQ ID NO: 659741 - RNA, 21 nt, Artificial Sequence
  Synthetic
cucagcuugggaggugagcgu

SEQ ID NO: 659742 - RNA, 22 nt, Artificial Sequence
  Synthetic
acucagcuugggaggugagcgu

SEQ ID NO: 659743 - RNA, 23 nt, Artificial Sequence
  Synthetic
aacucagcuugggaggugagcgu

SEQ ID NO: 659744 - RNA, 24 nt, Artificial Sequence
  Synthetic
gaacucagcuugggaggugagcgu

SEQ ID NO: 659745 - RNA, 18 nt, Artificial Sequence
  Synthetic
auccuguggugugagcgu

SEQ ID NO: 659746 - RNA, 19 nt, Artificial Sequence
  Synthetic
gauccuguggugugagcgu

SEQ ID NO: 659747 - RNA, 20 nt, Artificial Sequence
  Synthetic
agauccuguggugugagcgu

SEQ ID NO: 659748 - RNA, 21 nt, Artificial Sequence
  Synthetic
gagauccuguggugugagcgu

SEQ ID NO: 659749 - RNA, 22 nt, Artificial Sequence
  Synthetic
agagauccuguggugugagcgu

SEQ ID NO: 659750 - RNA, 23 nt, Artificial Sequence
  Synthetic
gagagauccuguggugugagcgu

SEQ ID NO: 659751 - RNA, 24 nt, Artificial Sequence
  Synthetic
agagagauccuguggugugagcgu

SEQ ID NO: 659752 - RNA, 18 nt, Artificial Sequence
  Synthetic
uagagaaagggaaggcgu

SEQ ID NO: 659753 - RNA, 19 nt, Artificial Sequence
  Synthetic
auagagaaagggaaggcgu

SEQ ID NO: 659754 - RNA, 20 nt, Artificial Sequence
  Synthetic
aauagagaaagggaaggcgu

SEQ ID NO: 659755 - RNA, 21 nt, Artificial Sequence
  Synthetic
caauagagaaagggaaggcgu

SEQ ID NO: 659756 - RNA, 22 nt, Artificial Sequence
  Synthetic
ucaauagagaaagggaaggcgu

SEQ ID NO: 659757 - RNA, 23 nt, Artificial Sequence
  Synthetic
uucaauagagaaagggaaggcgu

SEQ ID NO: 659758 - RNA, 24 nt, Artificial Sequence
  Synthetic
auucaauagagaaagggaaggcgu

SEQ ID NO: 659759 - RNA, 18 nt, Artificial Sequence
  Synthetic
cuguaugagagcaggcgu

SEQ ID NO: 659760 - RNA, 19 nt, Artificial Sequence
  Synthetic
acuguaugagagcaggcgu

SEQ ID NO: 659761 - RNA, 20 nt, Artificial Sequence
  Synthetic
cacuguaugagagcaggcgu

SEQ ID NO: 659762 - RNA, 21 nt, Artificial Sequence
  Synthetic
ccacuguaugagagcaggcgu

SEQ ID NO: 659763 - RNA, 22 nt, Artificial Sequence
  Synthetic
gccacuguaugagagcaggcgu

SEQ ID NO: 659764 - RNA, 23 nt, Artificial Sequence
  Synthetic
ugccacuguaugagagcaggcgu

SEQ ID NO: 659765 - RNA, 24 nt, Artificial Sequence
  Synthetic
augccacuguaugagagcaggcgu

SEQ ID NO: 659766 - RNA, 18 nt, Artificial Sequence
  Synthetic
ucacuugaggucaggcgu

SEQ ID NO: 659767 - RNA, 19 nt, Artificial Sequence
  Synthetic
aucacuugaggucaggcgu

SEQ ID NO: 659768 - RNA, 20 nt, Artificial Sequence
  Synthetic
gaucacuugaggucaggcgu

SEQ ID NO: 659769 - RNA, 21 nt, Artificial Sequence
  Synthetic
agaucacuugaggucaggcgu

SEQ ID NO: 659770 - RNA, 22 nt, Artificial Sequence
  Synthetic
cagaucacuugaggucaggcgu

SEQ ID NO: 659771 - RNA, 23 nt, Artificial Sequence
  Synthetic
gcagaucacuugaggucaggcgu

SEQ ID NO: 659772 - RNA, 24 nt, Artificial Sequence
  Synthetic
ggcagaucacuugaggucaggcgu

SEQ ID NO: 659773 - RNA, 18 nt, Artificial Sequence
  Synthetic
gaaauaugucagaggcgu

SEQ ID NO: 659774 - RNA, 19 nt, Artificial Sequence
  Synthetic
ggaaauaugucagaggcgu

SEQ ID NO: 659775 - RNA, 20 nt, Artificial Sequence
  Synthetic
gggaaauaugucagaggcgu

SEQ ID NO: 659776 - RNA, 21 nt, Artificial Sequence
  Synthetic
ggggaaauaugucagaggcgu

SEQ ID NO: 659777 - RNA, 22 nt, Artificial Sequence
  Synthetic
aggggaaauaugucagaggcgu

SEQ ID NO: 659778 - RNA, 23 nt, Artificial Sequence
  Synthetic
gaggggaaauaugucagaggcgu

SEQ ID NO: 659779 - RNA, 24 nt, Artificial Sequence
  Synthetic
agaggggaaauaugucagaggcgu

SEQ ID NO: 659780 - RNA, 18 nt, Artificial Sequence
  Synthetic
ggaauaaaauauuggcgu

SEQ ID NO: 659781 - RNA, 19 nt, Artificial Sequence
  Synthetic
uggaauaaaauauuggcgu

SEQ ID NO: 659782 - RNA, 20 nt, Artificial Sequence
  Synthetic
cuggaauaaaauauuggcgu

SEQ ID NO: 659783 - RNA, 21 nt, Artificial Sequence
  Synthetic
acuggaauaaaauauuggcgu

SEQ ID NO: 659784 - RNA, 22 nt, Artificial Sequence
  Synthetic
aacuggaauaaaauauuggcgu

SEQ ID NO: 659785 - RNA, 23 nt, Artificial Sequence
  Synthetic
gaacuggaauaaaauauuggcgu

SEQ ID NO: 659786 - RNA, 24 nt, Artificial Sequence
  Synthetic
agaacuggaauaaaauauuggcgu

SEQ ID NO: 659787 - RNA, 18 nt, Artificial Sequence
  Synthetic
ccagacauguuuuggcgu

SEQ ID NO: 659788 - RNA, 19 nt, Artificial Sequence
  Synthetic
cccagacauguuuuggcgu

SEQ ID NO: 659789 - RNA, 20 nt, Artificial Sequence
  Synthetic
ucccagacauguuuuggcgu

SEQ ID NO: 659790 - RNA, 21 nt, Artificial Sequence
  Synthetic
gucccagacauguuuuggcgu

SEQ ID NO: 659791 - RNA, 22 nt, Artificial Sequence
  Synthetic
ggucccagacauguuuuggcgu

SEQ ID NO: 659792 - RNA, 23 nt, Artificial Sequence
  Synthetic
uggucccagacauguuuuggcgu

SEQ ID NO: 659793 - RNA, 24 nt, Artificial Sequence
  Synthetic
cuggucccagacauguuuuggcgu

SEQ ID NO: 659794 - RNA, 18 nt, Artificial Sequence
  Synthetic
cccuuacuaagacugcgu

SEQ ID NO: 659795 - RNA, 19 nt, Artificial Sequence
  Synthetic
gcccuuacuaagacugcgu

SEQ ID NO: 659796 - RNA, 20 nt, Artificial Sequence
  Synthetic
ggcccuuacuaagacugcgu

SEQ ID NO: 659797 - RNA, 21 nt, Artificial Sequence
  Synthetic
aggcccuuacuaagacugcgu

SEQ ID NO: 659798 - RNA, 22 nt, Artificial Sequence
  Synthetic
gaggcccuuacuaagacugcgu

SEQ ID NO: 659799 - RNA, 23 nt, Artificial Sequence
  Synthetic
ugaggcccuuacuaagacugcgu

SEQ ID NO: 659800 - RNA, 24 nt, Artificial Sequence
  Synthetic
cugaggcccuuacuaagacugcgu

SEQ ID NO: 659801 - RNA, 18 nt, Artificial Sequence
  Synthetic
uuguggggagaggugcgu

SEQ ID NO: 659802 - RNA, 19 nt, Artificial Sequence
  Synthetic
guuguggggagaggugcgu

SEQ ID NO: 659803 - RNA, 20 nt, Artificial Sequence
  Synthetic
gguuguggggagaggugcgu

SEQ ID NO: 659804 - RNA, 21 nt, Artificial Sequence
  Synthetic
ggguuguggggagaggugcgu

SEQ ID NO: 659805 - RNA, 22 nt, Artificial Sequence
  Synthetic
gggguuguggggagaggugcgu

SEQ ID NO: 659806 - RNA, 23 nt, Artificial Sequence
  Synthetic
ugggguuguggggagaggugcgu

SEQ ID NO: 659807 - RNA, 24 nt, Artificial Sequence
  Synthetic
gugggguuguggggagaggugcgu

SEQ ID NO: 659808 - RNA, 18 nt, Artificial Sequence
  Synthetic
cugcauguuugugugcgu

SEQ ID NO: 659809 - RNA, 19 nt, Artificial Sequence
  Synthetic
ucugcauguuugugugcgu

SEQ ID NO: 659810 - RNA, 20 nt, Artificial Sequence
  Synthetic
uucugcauguuugugugcgu

SEQ ID NO: 659811 - RNA, 21 nt, Artificial Sequence
  Synthetic
guucugcauguuugugugcgu

SEQ ID NO: 659812 - RNA, 22 nt, Artificial Sequence
  Synthetic
uguucugcauguuugugugcgu

SEQ ID NO: 659813 - RNA, 23 nt, Artificial Sequence
  Synthetic
auguucugcauguuugugugcgu

SEQ ID NO: 659814 - RNA, 24 nt, Artificial Sequence
  Synthetic
aauguucugcauguuugugugcgu

SEQ ID NO: 659815 - RNA, 18 nt, Artificial Sequence
  Synthetic
cacacacacaaauugcgu

SEQ ID NO: 659816 - RNA, 19 nt, Artificial Sequence
  Synthetic
acacacacacaaauugcgu

SEQ ID NO: 659817 - RNA, 20 nt, Artificial Sequence
  Synthetic
uacacacacacaaauugcgu

SEQ ID NO: 659818 - RNA, 21 nt, Artificial Sequence
  Synthetic
guacacacacacaaauugcgu

SEQ ID NO: 659819 - RNA, 22 nt, Artificial Sequence
  Synthetic
uguacacacacacaaauugcgu

SEQ ID NO: 659820 - RNA, 23 nt, Artificial Sequence
  Synthetic
auguacacacacacaaauugcgu

SEQ ID NO: 659821 - RNA, 24 nt, Artificial Sequence
  Synthetic
uauguacacacacacaaauugcgu

SEQ ID NO: 659822 - RNA, 18 nt, Artificial Sequence
  Synthetic
caggggcaggacuugcgu

SEQ ID NO: 659823 - RNA, 19 nt, Artificial Sequence
  Synthetic
acaggggcaggacuugcgu

SEQ ID NO: 659824 - RNA, 20 nt, Artificial Sequence
  Synthetic
uacaggggcaggacuugcgu

SEQ ID NO: 659825 - RNA, 21 nt, Artificial Sequence
  Synthetic
guacaggggcaggacuugcgu

SEQ ID NO: 659826 - RNA, 22 nt, Artificial Sequence
  Synthetic
gguacaggggcaggacuugcgu

SEQ ID NO: 659827 - RNA, 23 nt, Artificial Sequence
  Synthetic
ggguacaggggcaggacuugcgu

SEQ ID NO: 659828 - RNA, 24 nt, Artificial Sequence
  Synthetic
aggguacaggggcaggacuugcgu

SEQ ID NO: 659829 - RNA, 18 nt, Artificial Sequence
  Synthetic
agagagaaauauuugcgu

SEQ ID NO: 659830 - RNA, 19 nt, Artificial Sequence
  Synthetic
cagagagaaauauuugcgu

SEQ ID NO: 659831 - RNA, 20 nt, Artificial Sequence
  Synthetic
ucagagagaaauauuugcgu

SEQ ID NO: 659832 - RNA, 21 nt, Artificial Sequence
  Synthetic
gucagagagaaauauuugcgu

SEQ ID NO: 659833 - RNA, 22 nt, Artificial Sequence
  Synthetic
ugucagagagaaauauuugcgu

SEQ ID NO: 659834 - RNA, 23 nt, Artificial Sequence
  Synthetic
gugucagagagaaauauuugcgu

SEQ ID NO: 659835 - RNA, 24 nt, Artificial Sequence
  Synthetic
ugugucagagagaaauauuugcgu

SEQ ID NO: 659836 - RNA, 18 nt, Artificial Sequence
  Synthetic
aguuaauucaaaaaucgu

SEQ ID NO: 659837 - RNA, 19 nt, Artificial Sequence
  Synthetic
caguuaauucaaaaaucgu

SEQ ID NO: 659838 - RNA, 20 nt, Artificial Sequence
  Synthetic
ucaguuaauucaaaaaucgu

SEQ ID NO: 659839 - RNA, 21 nt, Artificial Sequence
  Synthetic
gucaguuaauucaaaaaucgu

SEQ ID NO: 659840 - RNA, 22 nt, Artificial Sequence
  Synthetic
ugucaguuaauucaaaaaucgu

SEQ ID NO: 659841 - RNA, 23 nt, Artificial Sequence
  Synthetic
cugucaguuaauucaaaaaucgu

SEQ ID NO: 659842 - RNA, 24 nt, Artificial Sequence
  Synthetic
acugucaguuaauucaaaaaucgu

SEQ ID NO: 659843 - RNA, 18 nt, Artificial Sequence
  Synthetic
cuaaaaguagccaaucgu

SEQ ID NO: 659844 - RNA, 19 nt, Artificial Sequence
  Synthetic
ucuaaaaguagccaaucgu

SEQ ID NO: 659845 - RNA, 20 nt, Artificial Sequence
  Synthetic
uucuaaaaguagccaaucgu

SEQ ID NO: 659846 - RNA, 21 nt, Artificial Sequence
  Synthetic
auucuaaaaguagccaaucgu

SEQ ID NO: 659847 - RNA, 22 nt, Artificial Sequence
  Synthetic
gauucuaaaaguagccaaucgu

SEQ ID NO: 659848 - RNA, 23 nt, Artificial Sequence
  Synthetic
ggauucuaaaaguagccaaucgu

SEQ ID NO: 659849 - RNA, 24 nt, Artificial Sequence
  Synthetic
aggauucuaaaaguagccaaucgu

SEQ ID NO: 659850 - RNA, 18 nt, Artificial Sequence
  Synthetic
aucuugcauauacaucgu

SEQ ID NO: 659851 - RNA, 19 nt, Artificial Sequence
  Synthetic
gaucuugcauauacaucgu

SEQ ID NO: 659852 - RNA, 20 nt, Artificial Sequence
  Synthetic
agaucuugcauauacaucgu

SEQ ID NO: 659853 - RNA, 21 nt, Artificial Sequence
  Synthetic
uagaucuugcauauacaucgu

SEQ ID NO: 659854 - RNA, 22 nt, Artificial Sequence
  Synthetic
cuagaucuugcauauacaucgu

SEQ ID NO: 659855 - RNA, 23 nt, Artificial Sequence
  Synthetic
acuagaucuugcauauacaucgu

SEQ ID NO: 659856 - RNA, 24 nt, Artificial Sequence
  Synthetic
uacuagaucuugcauauacaucgu

SEQ ID NO: 659857 - RNA, 18 nt, Artificial Sequence
  Synthetic
augaaauuccgucaucgu

SEQ ID NO: 659858 - RNA, 19 nt, Artificial Sequence
  Synthetic
uaugaaauuccgucaucgu

SEQ ID NO: 659859 - RNA, 20 nt, Artificial Sequence
  Synthetic
guaugaaauuccgucaucgu

SEQ ID NO: 659860 - RNA, 21 nt, Artificial Sequence
  Synthetic
gguaugaaauuccgucaucgu

SEQ ID NO: 659861 - RNA, 22 nt, Artificial Sequence
  Synthetic
ggguaugaaauuccgucaucgu

SEQ ID NO: 659862 - RNA, 23 nt, Artificial Sequence
  Synthetic
aggguaugaaauuccgucaucgu

SEQ ID NO: 659863 - RNA, 24 nt, Artificial Sequence
  Synthetic
gaggguaugaaauuccgucaucgu

SEQ ID NO: 659864 - RNA, 18 nt, Artificial Sequence
  Synthetic
gaaauaauuggucaucgu

SEQ ID NO: 659865 - RNA, 19 nt, Artificial Sequence
  Synthetic
agaaauaauuggucaucgu

SEQ ID NO: 659866 - RNA, 20 nt, Artificial Sequence
  Synthetic
aagaaauaauuggucaucgu

SEQ ID NO: 659867 - RNA, 21 nt, Artificial Sequence
  Synthetic
aaagaaauaauuggucaucgu

SEQ ID NO: 659868 - RNA, 22 nt, Artificial Sequence
  Synthetic
caaagaaauaauuggucaucgu

SEQ ID NO: 659869 - RNA, 23 nt, Artificial Sequence
  Synthetic
acaaagaaauaauuggucaucgu

SEQ ID NO: 659870 - RNA, 24 nt, Artificial Sequence
  Synthetic
aacaaagaaauaauuggucaucgu

SEQ ID NO: 659871 - RNA, 18 nt, Artificial Sequence
  Synthetic
ugccaaauacaugaucgu

SEQ ID NO: 659872 - RNA, 19 nt, Artificial Sequence
  Synthetic
augccaaauacaugaucgu

SEQ ID NO: 659873 - RNA, 20 nt, Artificial Sequence
  Synthetic
aaugccaaauacaugaucgu

SEQ ID NO: 659874 - RNA, 21 nt, Artificial Sequence
  Synthetic
caaugccaaauacaugaucgu

SEQ ID NO: 659875 - RNA, 22 nt, Artificial Sequence
  Synthetic
acaaugccaaauacaugaucgu

SEQ ID NO: 659876 - RNA, 23 nt, Artificial Sequence
  Synthetic
uacaaugccaaauacaugaucgu

SEQ ID NO: 659877 - RNA, 24 nt, Artificial Sequence
  Synthetic
uuacaaugccaaauacaugaucgu

SEQ ID NO: 659878 - RNA, 18 nt, Artificial Sequence
  Synthetic
accuuauaaaguuaucgu

SEQ ID NO: 659879 - RNA, 19 nt, Artificial Sequence
  Synthetic
aaccuuauaaaguuaucgu

SEQ ID NO: 659880 - RNA, 20 nt, Artificial Sequence
  Synthetic
caaccuuauaaaguuaucgu

SEQ ID NO: 659881 - RNA, 21 nt, Artificial Sequence
  Synthetic
ucaaccuuauaaaguuaucgu

SEQ ID NO: 659882 - RNA, 22 nt, Artificial Sequence
  Synthetic
gucaaccuuauaaaguuaucgu

SEQ ID NO: 659883 - RNA, 23 nt, Artificial Sequence
  Synthetic
ugucaaccuuauaaaguuaucgu

SEQ ID NO: 659884 - RNA, 24 nt, Artificial Sequence
  Synthetic
cugucaaccuuauaaaguuaucgu

SEQ ID NO: 659885 - RNA, 18 nt, Artificial Sequence
  Synthetic
cauuaaucucacacucgu

SEQ ID NO: 659886 - RNA, 19 nt, Artificial Sequence
  Synthetic
ccauuaaucucacacucgu

SEQ ID NO: 659887 - RNA, 20 nt, Artificial Sequence
  Synthetic
uccauuaaucucacacucgu

SEQ ID NO: 659888 - RNA, 21 nt, Artificial Sequence
  Synthetic
uuccauuaaucucacacucgu

SEQ ID NO: 659889 - RNA, 22 nt, Artificial Sequence
  Synthetic
cuuccauuaaucucacacucgu

SEQ ID NO: 659890 - RNA, 23 nt, Artificial Sequence
  Synthetic
ucuuccauuaaucucacacucgu

SEQ ID NO: 659891 - RNA, 24 nt, Artificial Sequence
  Synthetic
uucuuccauuaaucucacacucgu

SEQ ID NO: 659892 - RNA, 18 nt, Artificial Sequence
  Synthetic
uugugggaaggaccucgu

SEQ ID NO: 659893 - RNA, 19 nt, Artificial Sequence
  Synthetic
guugugggaaggaccucgu

SEQ ID NO: 659894 - RNA, 20 nt, Artificial Sequence
  Synthetic
uguugugggaaggaccucgu

SEQ ID NO: 659895 - RNA, 21 nt, Artificial Sequence
  Synthetic
auguugugggaaggaccucgu

SEQ ID NO: 659896 - RNA, 22 nt, Artificial Sequence
  Synthetic
cauguugugggaaggaccucgu

SEQ ID NO: 659897 - RNA, 23 nt, Artificial Sequence
  Synthetic
acauguugugggaaggaccucgu

SEQ ID NO: 659898 - RNA, 24 nt, Artificial Sequence
  Synthetic
uacauguugugggaaggaccucgu

SEQ ID NO: 659899 - RNA, 18 nt, Artificial Sequence
  Synthetic
acaaccuagaucccucgu

SEQ ID NO: 659900 - RNA, 19 nt, Artificial Sequence
  Synthetic
cacaaccuagaucccucgu

SEQ ID NO: 659901 - RNA, 20 nt, Artificial Sequence
  Synthetic
acacaaccuagaucccucgu

SEQ ID NO: 659902 - RNA, 21 nt, Artificial Sequence
  Synthetic
cacacaaccuagaucccucgu

SEQ ID NO: 659903 - RNA, 22 nt, Artificial Sequence
  Synthetic
gcacacaaccuagaucccucgu

SEQ ID NO: 659904 - RNA, 23 nt, Artificial Sequence
  Synthetic
agcacacaaccuagaucccucgu

SEQ ID NO: 659905 - RNA, 24 nt, Artificial Sequence
  Synthetic
gagcacacaaccuagaucccucgu

SEQ ID NO: 659906 - RNA, 18 nt, Artificial Sequence
  Synthetic
acgugacaaagaggucgu

SEQ ID NO: 659907 - RNA, 19 nt, Artificial Sequence
  Synthetic
gacgugacaaagaggucgu

SEQ ID NO: 659908 - RNA, 20 nt, Artificial Sequence
  Synthetic
ugacgugacaaagaggucgu

SEQ ID NO: 659909 - RNA, 21 nt, Artificial Sequence
  Synthetic
uugacgugacaaagaggucgu

SEQ ID NO: 659910 - RNA, 22 nt, Artificial Sequence
  Synthetic
guugacgugacaaagaggucgu

SEQ ID NO: 659911 - RNA, 23 nt, Artificial Sequence
  Synthetic
uguugacgugacaaagaggucgu

SEQ ID NO: 659912 - RNA, 24 nt, Artificial Sequence
  Synthetic
cuguugacgugacaaagaggucgu

SEQ ID NO: 659913 - RNA, 18 nt, Artificial Sequence
  Synthetic
gaggaugggaagggucgu

SEQ ID NO: 659914 - RNA, 19 nt, Artificial Sequence
  Synthetic
ugaggaugggaagggucgu

SEQ ID NO: 659915 - RNA, 20 nt, Artificial Sequence
  Synthetic
cugaggaugggaagggucgu

SEQ ID NO: 659916 - RNA, 21 nt, Artificial Sequence
  Synthetic
ccugaggaugggaagggucgu

SEQ ID NO: 659917 - RNA, 22 nt, Artificial Sequence
  Synthetic
accugaggaugggaagggucgu

SEQ ID NO: 659918 - RNA, 23 nt, Artificial Sequence
  Synthetic
uaccugaggaugggaagggucgu

SEQ ID NO: 659919 - RNA, 24 nt, Artificial Sequence
  Synthetic
uuaccugaggaugggaagggucgu

SEQ ID NO: 659920 - RNA, 18 nt, Artificial Sequence
  Synthetic
uugggcacacucugucgu

SEQ ID NO: 659921 - RNA, 19 nt, Artificial Sequence
  Synthetic
cuugggcacacucugucgu

SEQ ID NO: 659922 - RNA, 20 nt, Artificial Sequence
  Synthetic
ccuugggcacacucugucgu

SEQ ID NO: 659923 - RNA, 21 nt, Artificial Sequence
  Synthetic
gccuugggcacacucugucgu

SEQ ID NO: 659924 - RNA, 22 nt, Artificial Sequence
  Synthetic
ggccuugggcacacucugucgu

SEQ ID NO: 659925 - RNA, 23 nt, Artificial Sequence
  Synthetic
uggccuugggcacacucugucgu

SEQ ID NO: 659926 - RNA, 24 nt, Artificial Sequence
  Synthetic
uuggccuugggcacacucugucgu

SEQ ID NO: 659927 - RNA, 18 nt, Artificial Sequence
  Synthetic
ugggccuggcuuugucgu

SEQ ID NO: 659928 - RNA, 19 nt, Artificial Sequence
  Synthetic
uugggccuggcuuugucgu

SEQ ID NO: 659929 - RNA, 20 nt, Artificial Sequence
  Synthetic
guugggccuggcuuugucgu

SEQ ID NO: 659930 - RNA, 21 nt, Artificial Sequence
  Synthetic
uguugggccuggcuuugucgu

SEQ ID NO: 659931 - RNA, 22 nt, Artificial Sequence
  Synthetic
auguugggccuggcuuugucgu

SEQ ID NO: 659932 - RNA, 23 nt, Artificial Sequence
  Synthetic
aauguugggccuggcuuugucgu

SEQ ID NO: 659933 - RNA, 24 nt, Artificial Sequence
  Synthetic
aaauguugggccuggcuuugucgu

SEQ ID NO: 659934 - RNA, 18 nt, Artificial Sequence
  Synthetic
cucauguucuacauucgu

SEQ ID NO: 659935 - RNA, 19 nt, Artificial Sequence
  Synthetic
ccucauguucuacauucgu

SEQ ID NO: 659936 - RNA, 20 nt, Artificial Sequence
  Synthetic
uccucauguucuacauucgu

SEQ ID NO: 659937 - RNA, 21 nt, Artificial Sequence
  Synthetic
cuccucauguucuacauucgu

SEQ ID NO: 659938 - RNA, 22 nt, Artificial Sequence
  Synthetic
gcuccucauguucuacauucgu

SEQ ID NO: 659939 - RNA, 23 nt, Artificial Sequence
  Synthetic
ggcuccucauguucuacauucgu

SEQ ID NO: 659940 - RNA, 24 nt, Artificial Sequence
  Synthetic
uggcuccucauguucuacauucgu

SEQ ID NO: 659941 - RNA, 18 nt, Artificial Sequence
  Synthetic
aaugucccuuggauucgu

SEQ ID NO: 659942 - RNA, 19 nt, Artificial Sequence
  Synthetic
aaaugucccuuggauucgu

SEQ ID NO: 659943 - RNA, 20 nt, Artificial Sequence
  Synthetic
aaaaugucccuuggauucgu

SEQ ID NO: 659944 - RNA, 21 nt, Artificial Sequence
  Synthetic
aaaaaugucccuuggauucgu

SEQ ID NO: 659945 - RNA, 22 nt, Artificial Sequence
  Synthetic
gaaaaaugucccuuggauucgu

SEQ ID NO: 659946 - RNA, 23 nt, Artificial Sequence
  Synthetic
agaaaaaugucccuuggauucgu

SEQ ID NO: 659947 - RNA, 24 nt, Artificial Sequence
  Synthetic
cagaaaaaugucccuuggauucgu

SEQ ID NO: 659948 - RNA, 18 nt, Artificial Sequence
  Synthetic
aaaguaacuucucuucgu

SEQ ID NO: 659949 - RNA, 19 nt, Artificial Sequence
  Synthetic
caaaguaacuucucuucgu

SEQ ID NO: 659950 - RNA, 20 nt, Artificial Sequence
  Synthetic
ucaaaguaacuucucuucgu

SEQ ID NO: 659951 - RNA, 21 nt, Artificial Sequence
  Synthetic
uucaaaguaacuucucuucgu

SEQ ID NO: 659952 - RNA, 22 nt, Artificial Sequence
  Synthetic
cuucaaaguaacuucucuucgu

SEQ ID NO: 659953 - RNA, 23 nt, Artificial Sequence
  Synthetic
acuucaaaguaacuucucuucgu

SEQ ID NO: 659954 - RNA, 24 nt, Artificial Sequence
  Synthetic
aacuucaaaguaacuucucuucgu

SEQ ID NO: 659955 - RNA, 18 nt, Artificial Sequence
  Synthetic
ggaagugcaaacguucgu

SEQ ID NO: 659956 - RNA, 19 nt, Artificial Sequence
  Synthetic
cggaagugcaaacguucgu

SEQ ID NO: 659957 - RNA, 20 nt, Artificial Sequence
  Synthetic
ccggaagugcaaacguucgu

SEQ ID NO: 659958 - RNA, 21 nt, Artificial Sequence
  Synthetic
cccggaagugcaaacguucgu

SEQ ID NO: 659959 - RNA, 22 nt, Artificial Sequence
  Synthetic
gcccggaagugcaaacguucgu

SEQ ID NO: 659960 - RNA, 23 nt, Artificial Sequence
  Synthetic
agcccggaagugcaaacguucgu

SEQ ID NO: 659961 - RNA, 24 nt, Artificial Sequence
  Synthetic
aagcccggaagugcaaacguucgu

SEQ ID NO: 659962 - RNA, 18 nt, Artificial Sequence
  Synthetic
auuauacacuagguucgu

SEQ ID NO: 659963 - RNA, 19 nt, Artificial Sequence
  Synthetic
gauuauacacuagguucgu

SEQ ID NO: 659964 - RNA, 20 nt, Artificial Sequence
  Synthetic
agauuauacacuagguucgu

SEQ ID NO: 659965 - RNA, 21 nt, Artificial Sequence
  Synthetic
gagauuauacacuagguucgu

SEQ ID NO: 659966 - RNA, 22 nt, Artificial Sequence
  Synthetic
ggagauuauacacuagguucgu

SEQ ID NO: 659967 - RNA, 23 nt, Artificial Sequence
  Synthetic
gggagauuauacacuagguucgu

SEQ ID NO: 659968 - RNA, 24 nt, Artificial Sequence
  Synthetic
agggagauuauacacuagguucgu

SEQ ID NO: 659969 - RNA, 18 nt, Artificial Sequence
  Synthetic
aauggaaagaaaaaaggu

SEQ ID NO: 659970 - RNA, 19 nt, Artificial Sequence
  Synthetic
gaauggaaagaaaaaaggu

SEQ ID NO: 659971 - RNA, 20 nt, Artificial Sequence
  Synthetic
agaauggaaagaaaaaaggu

SEQ ID NO: 659972 - RNA, 21 nt, Artificial Sequence
  Synthetic
gagaauggaaagaaaaaaggu

SEQ ID NO: 659973 - RNA, 22 nt, Artificial Sequence
  Synthetic
agagaauggaaagaaaaaaggu

SEQ ID NO: 659974 - RNA, 23 nt, Artificial Sequence
  Synthetic
gagagaauggaaagaaaaaaggu

SEQ ID NO: 659975 - RNA, 24 nt, Artificial Sequence
  Synthetic
ugagagaauggaaagaaaaaaggu

SEQ ID NO: 659976 - RNA, 18 nt, Artificial Sequence
  Synthetic
uggacacagggaaaaggu

SEQ ID NO: 659977 - RNA, 19 nt, Artificial Sequence
  Synthetic
guggacacagggaaaaggu

SEQ ID NO: 659978 - RNA, 20 nt, Artificial Sequence
  Synthetic
uguggacacagggaaaaggu

SEQ ID NO: 659979 - RNA, 21 nt, Artificial Sequence
  Synthetic
auguggacacagggaaaaggu

SEQ ID NO: 659980 - RNA, 22 nt, Artificial Sequence
  Synthetic
aauguggacacagggaaaaggu

SEQ ID NO: 659981 - RNA, 23 nt, Artificial Sequence
  Synthetic
caauguggacacagggaaaaggu

SEQ ID NO: 659982 - RNA, 24 nt, Artificial Sequence
  Synthetic
acaauguggacacagggaaaaggu

SEQ ID NO: 659983 - RNA, 18 nt, Artificial Sequence
  Synthetic
uucuacacaauaaaaggu

SEQ ID NO: 659984 - RNA, 19 nt, Artificial Sequence
  Synthetic
uuucuacacaauaaaaggu

SEQ ID NO: 659985 - RNA, 20 nt, Artificial Sequence
  Synthetic
uuuucuacacaauaaaaggu

SEQ ID NO: 659986 - RNA, 21 nt, Artificial Sequence
  Synthetic
auuuucuacacaauaaaaggu

SEQ ID NO: 659987 - RNA, 22 nt, Artificial Sequence
  Synthetic
cauuuucuacacaauaaaaggu

SEQ ID NO: 659988 - RNA, 23 nt, Artificial Sequence
  Synthetic
ccauuuucuacacaauaaaaggu

SEQ ID NO: 659989 - RNA, 24 nt, Artificial Sequence
  Synthetic
uccauuuucuacacaauaaaaggu

SEQ ID NO: 659990 - RNA, 18 nt, Artificial Sequence
  Synthetic
auuauuuuaauaaaaggu

SEQ ID NO: 659991 - RNA, 19 nt, Artificial Sequence
  Synthetic
gauuauuuuaauaaaaggu

SEQ ID NO: 659992 - RNA, 20 nt, Artificial Sequence
  Synthetic
ugauuauuuuaauaaaaggu

SEQ ID NO: 659993 - RNA, 21 nt, Artificial Sequence
  Synthetic
uugauuauuuuaauaaaaggu

SEQ ID NO: 659994 - RNA, 22 nt, Artificial Sequence
  Synthetic
guugauuauuuuaauaaaaggu

SEQ ID NO: 659995 - RNA, 23 nt, Artificial Sequence
  Synthetic
aguugauuauuuuaauaaaaggu

SEQ ID NO: 659996 - RNA, 24 nt, Artificial Sequence
  Synthetic
aaguugauuauuuuaauaaaaggu

SEQ ID NO: 659997 - RNA, 18 nt, Artificial Sequence
  Synthetic
ugugaauaucuaaaaggu

SEQ ID NO: 659998 - RNA, 19 nt, Artificial Sequence
  Synthetic
augugaauaucuaaaaggu

SEQ ID NO: 659999 - RNA, 20 nt, Artificial Sequence
  Synthetic
caugugaauaucuaaaaggu

SEQ ID NO: 660000 - RNA, 21 nt, Artificial Sequence
  Synthetic
ucaugugaauaucuaaaaggu

SEQ ID NO: 660001 - RNA, 22 nt, Artificial Sequence
  Synthetic
uucaugugaauaucuaaaaggu

SEQ ID NO: 660002 - RNA, 23 nt, Artificial Sequence
  Synthetic
auucaugugaauaucuaaaaggu

SEQ ID NO: 660003 - RNA, 24 nt, Artificial Sequence
  Synthetic
uauucaugugaauaucuaaaaggu

SEQ ID NO: 660004 - RNA, 18 nt, Artificial Sequence
  Synthetic
guguccuauguaaaaggu

SEQ ID NO: 660005 - RNA, 19 nt, Artificial Sequence
  Synthetic
aguguccuauguaaaaggu

SEQ ID NO: 660006 - RNA, 20 nt, Artificial Sequence
  Synthetic
uaguguccuauguaaaaggu

SEQ ID NO: 660007 - RNA, 21 nt, Artificial Sequence
  Synthetic
auaguguccuauguaaaaggu

SEQ ID NO: 660008 - RNA, 22 nt, Artificial Sequence
  Synthetic
aauaguguccuauguaaaaggu

SEQ ID NO: 660009 - RNA, 23 nt, Artificial Sequence
  Synthetic
aaauaguguccuauguaaaaggu

SEQ ID NO: 660010 - RNA, 24 nt, Artificial Sequence
  Synthetic
uaaauaguguccuauguaaaaggu

SEQ ID NO: 660011 - RNA, 18 nt, Artificial Sequence
  Synthetic
ccucacaagaccaaaggu

SEQ ID NO: 660012 - RNA, 19 nt, Artificial Sequence
  Synthetic
uccucacaagaccaaaggu

SEQ ID NO: 660013 - RNA, 20 nt, Artificial Sequence
  Synthetic
uuccucacaagaccaaaggu

SEQ ID NO: 660014 - RNA, 21 nt, Artificial Sequence
  Synthetic
cuuccucacaagaccaaaggu

SEQ ID NO: 660015 - RNA, 22 nt, Artificial Sequence
  Synthetic
ccuuccucacaagaccaaaggu

SEQ ID NO: 660016 - RNA, 23 nt, Artificial Sequence
  Synthetic
uccuuccucacaagaccaaaggu

SEQ ID NO: 660017 - RNA, 24 nt, Artificial Sequence
  Synthetic
uuccuuccucacaagaccaaaggu

SEQ ID NO: 660018 - RNA, 18 nt, Artificial Sequence
  Synthetic
auucacaauagcaaaggu

SEQ ID NO: 660019 - RNA, 19 nt, Artificial Sequence
  Synthetic
uauucacaauagcaaaggu

SEQ ID NO: 660020 - RNA, 20 nt, Artificial Sequence
  Synthetic
cuauucacaauagcaaaggu

SEQ ID NO: 660021 - RNA, 21 nt, Artificial Sequence
  Synthetic
acuauucacaauagcaaaggu

SEQ ID NO: 660022 - RNA, 22 nt, Artificial Sequence
  Synthetic
cacuauucacaauagcaaaggu

SEQ ID NO: 660023 - RNA, 23 nt, Artificial Sequence
  Synthetic
gcacuauucacaauagcaaaggu

SEQ ID NO: 660024 - RNA, 24 nt, Artificial Sequence
  Synthetic
agcacuauucacaauagcaaaggu

SEQ ID NO: 660025 - RNA, 18 nt, Artificial Sequence
  Synthetic
gggaggaauggcaaaggu

SEQ ID NO: 660026 - RNA, 19 nt, Artificial Sequence
  Synthetic
agggaggaauggcaaaggu

SEQ ID NO: 660027 - RNA, 20 nt, Artificial Sequence
  Synthetic
aagggaggaauggcaaaggu

SEQ ID NO: 660028 - RNA, 21 nt, Artificial Sequence
  Synthetic
aaagggaggaauggcaaaggu

SEQ ID NO: 660029 - RNA, 22 nt, Artificial Sequence
  Synthetic
gaaagggaggaauggcaaaggu

SEQ ID NO: 660030 - RNA, 23 nt, Artificial Sequence
  Synthetic
ggaaagggaggaauggcaaaggu

SEQ ID NO: 660031 - RNA, 24 nt, Artificial Sequence
  Synthetic
gggaaagggaggaauggcaaaggu

SEQ ID NO: 660032 - RNA, 18 nt, Artificial Sequence
  Synthetic
cguguggccaucaaaggu

SEQ ID NO: 660033 - RNA, 19 nt, Artificial Sequence
  Synthetic
acguguggccaucaaaggu

SEQ ID NO: 660034 - RNA, 20 nt, Artificial Sequence
  Synthetic
uacguguggccaucaaaggu

SEQ ID NO: 660035 - RNA, 21 nt, Artificial Sequence
  Synthetic
cuacguguggccaucaaaggu

SEQ ID NO: 660036 - RNA, 22 nt, Artificial Sequence
  Synthetic
acuacguguggccaucaaaggu

SEQ ID NO: 660037 - RNA, 23 nt, Artificial Sequence
  Synthetic
uacuacguguggccaucaaaggu

SEQ ID NO: 660038 - RNA, 24 nt, Artificial Sequence
  Synthetic
cuacuacguguggccaucaaaggu

SEQ ID NO: 660039 - RNA, 18 nt, Artificial Sequence
  Synthetic
gaguagaugcagaaaggu

SEQ ID NO: 660040 - RNA, 19 nt, Artificial Sequence
  Synthetic
agaguagaugcagaaaggu

SEQ ID NO: 660041 - RNA, 20 nt, Artificial Sequence
  Synthetic
aagaguagaugcagaaaggu

SEQ ID NO: 660042 - RNA, 21 nt, Artificial Sequence
  Synthetic
caagaguagaugcagaaaggu

SEQ ID NO: 660043 - RNA, 22 nt, Artificial Sequence
  Synthetic
gcaagaguagaugcagaaaggu

SEQ ID NO: 660044 - RNA, 23 nt, Artificial Sequence
  Synthetic
ggcaagaguagaugcagaaaggu

SEQ ID NO: 660045 - RNA, 24 nt, Artificial Sequence
  Synthetic
uggcaagaguagaugcagaaaggu

SEQ ID NO: 660046 - RNA, 18 nt, Artificial Sequence
  Synthetic
uuugcauaauagaaaggu

SEQ ID NO: 660047 - RNA, 19 nt, Artificial Sequence
  Synthetic
uuuugcauaauagaaaggu

SEQ ID NO: 660048 - RNA, 20 nt, Artificial Sequence
  Synthetic
guuuugcauaauagaaaggu

SEQ ID NO: 660049 - RNA, 21 nt, Artificial Sequence
  Synthetic
uguuuugcauaauagaaaggu

SEQ ID NO: 660050 - RNA, 22 nt, Artificial Sequence
  Synthetic
uuguuuugcauaauagaaaggu

SEQ ID NO: 660051 - RNA, 23 nt, Artificial Sequence
  Synthetic
uuuguuuugcauaauagaaaggu

SEQ ID NO: 660052 - RNA, 24 nt, Artificial Sequence
  Synthetic
uuuuguuuugcauaauagaaaggu

SEQ ID NO: 660053 - RNA, 18 nt, Artificial Sequence
  Synthetic
acuagagucacgaaaggu

SEQ ID NO: 660054 - RNA, 19 nt, Artificial Sequence
  Synthetic
aacuagagucacgaaaggu

SEQ ID NO: 660055 - RNA, 20 nt, Artificial Sequence
  Synthetic
aaacuagagucacgaaaggu

SEQ ID NO: 660056 - RNA, 21 nt, Artificial Sequence
  Synthetic
aaaacuagagucacgaaaggu

SEQ ID NO: 660057 - RNA, 22 nt, Artificial Sequence
  Synthetic
aaaaacuagagucacgaaaggu

SEQ ID NO: 660058 - RNA, 23 nt, Artificial Sequence
  Synthetic
aaaaaacuagagucacgaaaggu

SEQ ID NO: 660059 - RNA, 24 nt, Artificial Sequence
  Synthetic
uaaaaaacuagagucacgaaaggu

SEQ ID NO: 660060 - RNA, 18 nt, Artificial Sequence
  Synthetic
auuuuuuuucugaaaggu

SEQ ID NO: 660061 - RNA, 19 nt, Artificial Sequence
  Synthetic
cauuuuuuuucugaaaggu

SEQ ID NO: 660062 - RNA, 20 nt, Artificial Sequence
  Synthetic
acauuuuuuuucugaaaggu

SEQ ID NO: 660063 - RNA, 21 nt, Artificial Sequence
  Synthetic
uacauuuuuuuucugaaaggu

SEQ ID NO: 660064 - RNA, 22 nt, Artificial Sequence
  Synthetic
cuacauuuuuuuucugaaaggu

SEQ ID NO: 660065 - RNA, 23 nt, Artificial Sequence
  Synthetic
ucuacauuuuuuuucugaaaggu

SEQ ID NO: 660066 - RNA, 24 nt, Artificial Sequence
  Synthetic
cucuacauuuuuuuucugaaaggu

SEQ ID NO: 660067 - RNA, 18 nt, Artificial Sequence
  Synthetic
gaugucaaaaauaaaggu

SEQ ID NO: 660068 - RNA, 19 nt, Artificial Sequence
  Synthetic
ugaugucaaaaauaaaggu

SEQ ID NO: 660069 - RNA, 20 nt, Artificial Sequence
  Synthetic
cugaugucaaaaauaaaggu

SEQ ID NO: 660070 - RNA, 21 nt, Artificial Sequence
  Synthetic
acugaugucaaaaauaaaggu

SEQ ID NO: 660071 - RNA, 22 nt, Artificial Sequence
  Synthetic
aacugaugucaaaaauaaaggu

SEQ ID NO: 660072 - RNA, 23 nt, Artificial Sequence
  Synthetic
aaacugaugucaaaaauaaaggu

SEQ ID NO: 660073 - RNA, 24 nt, Artificial Sequence
  Synthetic
gaaacugaugucaaaaauaaaggu

SEQ ID NO: 660074 - RNA, 18 nt, Artificial Sequence
  Synthetic
ucaguuuaagauaaaggu

SEQ ID NO: 660075 - RNA, 19 nt, Artificial Sequence
  Synthetic
aucaguuuaagauaaaggu

SEQ ID NO: 660076 - RNA, 20 nt, Artificial Sequence
  Synthetic
aaucaguuuaagauaaaggu

SEQ ID NO: 660077 - RNA, 21 nt, Artificial Sequence
  Synthetic
uaaucaguuuaagauaaaggu

SEQ ID NO: 660078 - RNA, 22 nt, Artificial Sequence
  Synthetic
cuaaucaguuuaagauaaaggu

SEQ ID NO: 660079 - RNA, 23 nt, Artificial Sequence
  Synthetic
acuaaucaguuuaagauaaaggu

SEQ ID NO: 660080 - RNA, 24 nt, Artificial Sequence
  Synthetic
aacuaaucaguuuaagauaaaggu

SEQ ID NO: 660081 - RNA, 18 nt, Artificial Sequence
  Synthetic
aauauaaaauauaaaggu

SEQ ID NO: 660082 - RNA, 19 nt, Artificial Sequence
  Synthetic
gaauauaaaauauaaaggu

SEQ ID NO: 660083 - RNA, 20 nt, Artificial Sequence
  Synthetic
agaauauaaaauauaaaggu

SEQ ID NO: 660084 - RNA, 21 nt, Artificial Sequence
  Synthetic
cagaauauaaaauauaaaggu

SEQ ID NO: 660085 - RNA, 22 nt, Artificial Sequence
  Synthetic
acagaauauaaaauauaaaggu

SEQ ID NO: 660086 - RNA, 23 nt, Artificial Sequence
  Synthetic
cacagaauauaaaauauaaaggu

SEQ ID NO: 660087 - RNA, 24 nt, Artificial Sequence
  Synthetic
acacagaauauaaaauauaaaggu

SEQ ID NO: 660088 - RNA, 18 nt, Artificial Sequence
  Synthetic
uauuuccuuuuuaaaggu

SEQ ID NO: 660089 - RNA, 19 nt, Artificial Sequence
  Synthetic
uuauuuccuuuuuaaaggu

SEQ ID NO: 660090 - RNA, 20 nt, Artificial Sequence
  Synthetic
uuuauuuccuuuuuaaaggu

SEQ ID NO: 660091 - RNA, 21 nt, Artificial Sequence
  Synthetic
auuuauuuccuuuuuaaaggu

SEQ ID NO: 660092 - RNA, 22 nt, Artificial Sequence
  Synthetic
uauuuauuuccuuuuuaaaggu

SEQ ID NO: 660093 - RNA, 23 nt, Artificial Sequence
  Synthetic
uuauuuauuuccuuuuuaaaggu

SEQ ID NO: 660094 - RNA, 24 nt, Artificial Sequence
  Synthetic
guuauuuauuuccuuuuuaaaggu

SEQ ID NO: 660095 - RNA, 18 nt, Artificial Sequence
  Synthetic
gcggguggaucacaaggu

SEQ ID NO: 660096 - RNA, 19 nt, Artificial Sequence
  Synthetic
ggcggguggaucacaaggu

SEQ ID NO: 660097 - RNA, 20 nt, Artificial Sequence
  Synthetic
aggcggguggaucacaaggu

SEQ ID NO: 660098 - RNA, 21 nt, Artificial Sequence
  Synthetic
gaggcggguggaucacaaggu

SEQ ID NO: 660099 - RNA, 22 nt, Artificial Sequence
  Synthetic
cgaggcggguggaucacaaggu

SEQ ID NO: 660100 - RNA, 23 nt, Artificial Sequence
  Synthetic
ccgaggcggguggaucacaaggu

SEQ ID NO: 660101 - RNA, 24 nt, Artificial Sequence
  Synthetic
gccgaggcggguggaucacaaggu

SEQ ID NO: 660102 - RNA, 18 nt, Artificial Sequence
  Synthetic
aagcauaaauuacaaggu

SEQ ID NO: 660103 - RNA, 19 nt, Artificial Sequence
  Synthetic
caagcauaaauuacaaggu

SEQ ID NO: 660104 - RNA, 20 nt, Artificial Sequence
  Synthetic
acaagcauaaauuacaaggu

SEQ ID NO: 660105 - RNA, 21 nt, Artificial Sequence
  Synthetic
gacaagcauaaauuacaaggu

SEQ ID NO: 660106 - RNA, 22 nt, Artificial Sequence
  Synthetic
agacaagcauaaauuacaaggu

SEQ ID NO: 660107 - RNA, 23 nt, Artificial Sequence
  Synthetic
gagacaagcauaaauuacaaggu

SEQ ID NO: 660108 - RNA, 24 nt, Artificial Sequence
  Synthetic
ggagacaagcauaaauuacaaggu

SEQ ID NO: 660109 - RNA, 18 nt, Artificial Sequence
  Synthetic
auuaaguuuuuacaaggu

SEQ ID NO: 660110 - RNA, 19 nt, Artificial Sequence
  Synthetic
aauuaaguuuuuacaaggu

SEQ ID NO: 660111 - RNA, 20 nt, Artificial Sequence
  Synthetic
gaauuaaguuuuuacaaggu

SEQ ID NO: 660112 - RNA, 21 nt, Artificial Sequence
  Synthetic
ugaauuaaguuuuuacaaggu

SEQ ID NO: 660113 - RNA, 22 nt, Artificial Sequence
  Synthetic
uugaauuaaguuuuuacaaggu

SEQ ID NO: 660114 - RNA, 23 nt, Artificial Sequence
  Synthetic
uuugaauuaaguuuuuacaaggu

SEQ ID NO: 660115 - RNA, 24 nt, Artificial Sequence
  Synthetic
uuuugaauuaaguuuuuacaaggu

SEQ ID NO: 660116 - RNA, 18 nt, Artificial Sequence
  Synthetic
acuauauuaaaccaaggu

SEQ ID NO: 660117 - RNA, 19 nt, Artificial Sequence
  Synthetic
aacuauauuaaaccaaggu

SEQ ID NO: 660118 - RNA, 20 nt, Artificial Sequence
  Synthetic
uaacuauauuaaaccaaggu

SEQ ID NO: 660119 - RNA, 21 nt, Artificial Sequence
  Synthetic
uuaacuauauuaaaccaaggu

SEQ ID NO: 660120 - RNA, 22 nt, Artificial Sequence
  Synthetic
auuaacuauauuaaaccaaggu

SEQ ID NO: 660121 - RNA, 23 nt, Artificial Sequence
  Synthetic
cauuaacuauauuaaaccaaggu

SEQ ID NO: 660122 - RNA, 24 nt, Artificial Sequence
  Synthetic
ccauuaacuauauuaaaccaaggu

SEQ ID NO: 660123 - RNA, 18 nt, Artificial Sequence
  Synthetic
uaaaaacccagccaaggu

SEQ ID NO: 660124 - RNA, 19 nt, Artificial Sequence
  Synthetic
uuaaaaacccagccaaggu

SEQ ID NO: 660125 - RNA, 20 nt, Artificial Sequence
  Synthetic
cuuaaaaacccagccaaggu

SEQ ID NO: 660126 - RNA, 21 nt, Artificial Sequence
  Synthetic
ucuuaaaaacccagccaaggu

SEQ ID NO: 660127 - RNA, 22 nt, Artificial Sequence
  Synthetic
uucuuaaaaacccagccaaggu

SEQ ID NO: 660128 - RNA, 23 nt, Artificial Sequence
  Synthetic
auucuuaaaaacccagccaaggu

SEQ ID NO: 660129 - RNA, 24 nt, Artificial Sequence
  Synthetic
aauucuuaaaaacccagccaaggu

SEQ ID NO: 660130 - RNA, 18 nt, Artificial Sequence
  Synthetic
aagugguggagccaaggu

SEQ ID NO: 660131 - RNA, 19 nt, Artificial Sequence
  Synthetic
aaagugguggagccaaggu

SEQ ID NO: 660132 - RNA, 20 nt, Artificial Sequence
  Synthetic
gaaagugguggagccaaggu

SEQ ID NO: 660133 - RNA, 21 nt, Artificial Sequence
  Synthetic
agaaagugguggagccaaggu

SEQ ID NO: 660134 - RNA, 22 nt, Artificial Sequence
  Synthetic
uagaaagugguggagccaaggu

SEQ ID NO: 660135 - RNA, 23 nt, Artificial Sequence
  Synthetic
auagaaagugguggagccaaggu

SEQ ID NO: 660136 - RNA, 24 nt, Artificial Sequence
  Synthetic
gauagaaagugguggagccaaggu

SEQ ID NO: 660137 - RNA, 18 nt, Artificial Sequence
  Synthetic
auucacaauagccaaggu

SEQ ID NO: 660138 - RNA, 19 nt, Artificial Sequence
  Synthetic
uauucacaauagccaaggu

SEQ ID NO: 660139 - RNA, 20 nt, Artificial Sequence
  Synthetic
cuauucacaauagccaaggu

SEQ ID NO: 660140 - RNA, 21 nt, Artificial Sequence
  Synthetic
ucuauucacaauagccaaggu

SEQ ID NO: 660141 - RNA, 22 nt, Artificial Sequence
  Synthetic
cucuauucacaauagccaaggu

SEQ ID NO: 660142 - RNA, 23 nt, Artificial Sequence
  Synthetic
gcucuauucacaauagccaaggu

SEQ ID NO: 660143 - RNA, 24 nt, Artificial Sequence
  Synthetic
agcucuauucacaauagccaaggu

SEQ ID NO: 660144 - RNA, 18 nt, Artificial Sequence
  Synthetic
ucaaaaaggggccaaggu

SEQ ID NO: 660145 - RNA, 19 nt, Artificial Sequence
  Synthetic
uucaaaaaggggccaaggu

SEQ ID NO: 660146 - RNA, 20 nt, Artificial Sequence
  Synthetic
cuucaaaaaggggccaaggu

SEQ ID NO: 660147 - RNA, 21 nt, Artificial Sequence
  Synthetic
ccuucaaaaaggggccaaggu

SEQ ID NO: 660148 - RNA, 22 nt, Artificial Sequence
  Synthetic
gccuucaaaaaggggccaaggu

SEQ ID NO: 660149 - RNA, 23 nt, Artificial Sequence
  Synthetic
ugccuucaaaaaggggccaaggu

SEQ ID NO: 660150 - RNA, 24 nt, Artificial Sequence
  Synthetic
uugccuucaaaaaggggccaaggu

SEQ ID NO: 660151 - RNA, 18 nt, Artificial Sequence
  Synthetic
uccccaaaagagcaaggu

SEQ ID NO: 660152 - RNA, 19 nt, Artificial Sequence
  Synthetic
auccccaaaagagcaaggu

SEQ ID NO: 660153 - RNA, 20 nt, Artificial Sequence
  Synthetic
cauccccaaaagagcaaggu

SEQ ID NO: 660154 - RNA, 21 nt, Artificial Sequence
  Synthetic
ucauccccaaaagagcaaggu

SEQ ID NO: 660155 - RNA, 22 nt, Artificial Sequence
  Synthetic
aucauccccaaaagagcaaggu

SEQ ID NO: 660156 - RNA, 23 nt, Artificial Sequence
  Synthetic
aaucauccccaaaagagcaaggu

SEQ ID NO: 660157 - RNA, 24 nt, Artificial Sequence
  Synthetic
aaaucauccccaaaagagcaaggu

SEQ ID NO: 660158 - RNA, 18 nt, Artificial Sequence
  Synthetic
uaaaaaauuauucaaggu

SEQ ID NO: 660159 - RNA, 19 nt, Artificial Sequence
  Synthetic
cuaaaaaauuauucaaggu

SEQ ID NO: 660160 - RNA, 20 nt, Artificial Sequence
  Synthetic
ccuaaaaaauuauucaaggu

SEQ ID NO: 660161 - RNA, 21 nt, Artificial Sequence
  Synthetic
cccuaaaaaauuauucaaggu

SEQ ID NO: 660162 - RNA, 22 nt, Artificial Sequence
  Synthetic
acccuaaaaaauuauucaaggu

SEQ ID NO: 660163 - RNA, 23 nt, Artificial Sequence
  Synthetic
aacccuaaaaaauuauucaaggu

SEQ ID NO: 660164 - RNA, 24 nt, Artificial Sequence
  Synthetic
uaacccuaaaaaauuauucaaggu

SEQ ID NO: 660165 - RNA, 18 nt, Artificial Sequence
  Synthetic
aagagagagaaagaaggu

SEQ ID NO: 660166 - RNA, 19 nt, Artificial Sequence
  Synthetic
aaagagagagaaagaaggu

SEQ ID NO: 660167 - RNA, 20 nt, Artificial Sequence
  Synthetic
aaaagagagagaaagaaggu

SEQ ID NO: 660168 - RNA, 21 nt, Artificial Sequence
  Synthetic
uaaaagagagagaaagaaggu

SEQ ID NO: 660169 - RNA, 22 nt, Artificial Sequence
  Synthetic
cuaaaagagagagaaagaaggu

SEQ ID NO: 660170 - RNA, 23 nt, Artificial Sequence
  Synthetic
ucuaaaagagagagaaagaaggu

SEQ ID NO: 660171 - RNA, 24 nt, Artificial Sequence
  Synthetic
uucuaaaagagagagaaagaaggu

SEQ ID NO: 660172 - RNA, 18 nt, Artificial Sequence
  Synthetic
uuugauagacaagaaggu

SEQ ID NO: 660173 - RNA, 19 nt, Artificial Sequence
  Synthetic
guuugauagacaagaaggu

SEQ ID NO: 660174 - RNA, 20 nt, Artificial Sequence
  Synthetic
uguuugauagacaagaaggu

SEQ ID NO: 660175 - RNA, 21 nt, Artificial Sequence
  Synthetic
guguuugauagacaagaaggu

SEQ ID NO: 660176 - RNA, 22 nt, Artificial Sequence
  Synthetic
uguguuugauagacaagaaggu

SEQ ID NO: 660177 - RNA, 23 nt, Artificial Sequence
  Synthetic
uuguguuugauagacaagaaggu

SEQ ID NO: 660178 - RNA, 24 nt, Artificial Sequence
  Synthetic
uuuguguuugauagacaagaaggu

SEQ ID NO: 660179 - RNA, 18 nt, Artificial Sequence
  Synthetic
gggcagaagggagaaggu

SEQ ID NO: 660180 - RNA, 19 nt, Artificial Sequence
  Synthetic
ggggcagaagggagaaggu

SEQ ID NO: 660181 - RNA, 20 nt, Artificial Sequence
  Synthetic
uggggcagaagggagaaggu

SEQ ID NO: 660182 - RNA, 21 nt, Artificial Sequence
  Synthetic
uuggggcagaagggagaaggu

SEQ ID NO: 660183 - RNA, 22 nt, Artificial Sequence
  Synthetic
auuggggcagaagggagaaggu

SEQ ID NO: 660184 - RNA, 23 nt, Artificial Sequence
  Synthetic
gauuggggcagaagggagaaggu

SEQ ID NO: 660185 - RNA, 24 nt, Artificial Sequence
  Synthetic
ugauuggggcagaagggagaaggu

SEQ ID NO: 660186 - RNA, 18 nt, Artificial Sequence
  Synthetic
ucuaagaacuuagaaggu

SEQ ID NO: 660187 - RNA, 19 nt, Artificial Sequence
  Synthetic
uucuaagaacuuagaaggu

SEQ ID NO: 660188 - RNA, 20 nt, Artificial Sequence
  Synthetic
uuucuaagaacuuagaaggu

SEQ ID NO: 660189 - RNA, 21 nt, Artificial Sequence
  Synthetic
auuucuaagaacuuagaaggu

SEQ ID NO: 660190 - RNA, 22 nt, Artificial Sequence
  Synthetic
gauuucuaagaacuuagaaggu

SEQ ID NO: 660191 - RNA, 23 nt, Artificial Sequence
  Synthetic
ugauuucuaagaacuuagaaggu

SEQ ID NO: 660192 - RNA, 24 nt, Artificial Sequence
  Synthetic
cugauuucuaagaacuuagaaggu

SEQ ID NO: 660193 - RNA, 18 nt, Artificial Sequence
  Synthetic
caauaacucaaggaaggu

SEQ ID NO: 660194 - RNA, 19 nt, Artificial Sequence
  Synthetic
gcaauaacucaaggaaggu

SEQ ID NO: 660195 - RNA, 20 nt, Artificial Sequence
  Synthetic
agcaauaacucaaggaaggu

SEQ ID NO: 660196 - RNA, 21 nt, Artificial Sequence
  Synthetic
aagcaauaacucaaggaaggu

SEQ ID NO: 660197 - RNA, 22 nt, Artificial Sequence
  Synthetic
uaagcaauaacucaaggaaggu

SEQ ID NO: 660198 - RNA, 23 nt, Artificial Sequence
  Synthetic
cuaagcaauaacucaaggaaggu

SEQ ID NO: 660199 - RNA, 24 nt, Artificial Sequence
  Synthetic
ucuaagcaauaacucaaggaaggu

SEQ ID NO: 660200 - RNA, 18 nt, Artificial Sequence
  Synthetic
cucuaggaguuggaaggu

SEQ ID NO: 660201 - RNA, 19 nt, Artificial Sequence
  Synthetic
ucucuaggaguuggaaggu

SEQ ID NO: 660202 - RNA, 20 nt, Artificial Sequence
  Synthetic
gucucuaggaguuggaaggu

SEQ ID NO: 660203 - RNA, 21 nt, Artificial Sequence
  Synthetic
ugucucuaggaguuggaaggu

SEQ ID NO: 660204 - RNA, 22 nt, Artificial Sequence
  Synthetic
uugucucuaggaguuggaaggu

SEQ ID NO: 660205 - RNA, 23 nt, Artificial Sequence
  Synthetic
guugucucuaggaguuggaaggu

SEQ ID NO: 660206 - RNA, 24 nt, Artificial Sequence
  Synthetic
uguugucucuaggaguuggaaggu

SEQ ID NO: 660207 - RNA, 18 nt, Artificial Sequence
  Synthetic
auuacaauuuuggaaggu

SEQ ID NO: 660208 - RNA, 19 nt, Artificial Sequence
  Synthetic
cauuacaauuuuggaaggu

SEQ ID NO: 660209 - RNA, 20 nt, Artificial Sequence
  Synthetic
ccauuacaauuuuggaaggu

SEQ ID NO: 660210 - RNA, 21 nt, Artificial Sequence
  Synthetic
cccauuacaauuuuggaaggu

SEQ ID NO: 660211 - RNA, 22 nt, Artificial Sequence
  Synthetic
acccauuacaauuuuggaaggu

SEQ ID NO: 660212 - RNA, 23 nt, Artificial Sequence
  Synthetic
uacccauuacaauuuuggaaggu

SEQ ID NO: 660213 - RNA, 24 nt, Artificial Sequence
  Synthetic
cuacccauuacaauuuuggaaggu

SEQ ID NO: 660214 - RNA, 18 nt, Artificial Sequence
  Synthetic
aaaaaagucaaugaaggu

SEQ ID NO: 660215 - RNA, 19 nt, Artificial Sequence
  Synthetic
caaaaaagucaaugaaggu

SEQ ID NO: 660216 - RNA, 20 nt, Artificial Sequence
  Synthetic
ucaaaaaagucaaugaaggu

SEQ ID NO: 660217 - RNA, 21 nt, Artificial Sequence
  Synthetic
uucaaaaaagucaaugaaggu

SEQ ID NO: 660218 - RNA, 22 nt, Artificial Sequence
  Synthetic
cuucaaaaaagucaaugaaggu

SEQ ID NO: 660219 - RNA, 23 nt, Artificial Sequence
  Synthetic
ccuucaaaaaagucaaugaaggu

SEQ ID NO: 660220 - RNA, 24 nt, Artificial Sequence
  Synthetic
cccuucaaaaaagucaaugaaggu

SEQ ID NO: 660221 - RNA, 18 nt, Artificial Sequence
  Synthetic
aagaacauaagugaaggu

SEQ ID NO: 660222 - RNA, 19 nt, Artificial Sequence
  Synthetic
aaagaacauaagugaaggu

SEQ ID NO: 660223 - RNA, 20 nt, Artificial Sequence
  Synthetic
gaaagaacauaagugaaggu

SEQ ID NO: 660224 - RNA, 21 nt, Artificial Sequence
  Synthetic
ugaaagaacauaagugaaggu

SEQ ID NO: 660225 - RNA, 22 nt, Artificial Sequence
  Synthetic
cugaaagaacauaagugaaggu

SEQ ID NO: 660226 - RNA, 23 nt, Artificial Sequence
  Synthetic
ccugaaagaacauaagugaaggu

SEQ ID NO: 660227 - RNA, 24 nt, Artificial Sequence
  Synthetic
cccugaaagaacauaagugaaggu

SEQ ID NO: 660228 - RNA, 18 nt, Artificial Sequence
  Synthetic
accaucguggcauaaggu

SEQ ID NO: 660229 - RNA, 19 nt, Artificial Sequence
  Synthetic
uaccaucguggcauaaggu

SEQ ID NO: 660230 - RNA, 20 nt, Artificial Sequence
  Synthetic
uuaccaucguggcauaaggu

SEQ ID NO: 660231 - RNA, 21 nt, Artificial Sequence
  Synthetic
cuuaccaucguggcauaaggu

SEQ ID NO: 660232 - RNA, 22 nt, Artificial Sequence
  Synthetic
acuuaccaucguggcauaaggu

SEQ ID NO: 660233 - RNA, 23 nt, Artificial Sequence
  Synthetic
aacuuaccaucguggcauaaggu

SEQ ID NO: 660234 - RNA, 24 nt, Artificial Sequence
  Synthetic
aaacuuaccaucguggcauaaggu

SEQ ID NO: 660235 - RNA, 18 nt, Artificial Sequence
  Synthetic
gcgggcggaucauaaggu

SEQ ID NO: 660236 - RNA, 19 nt, Artificial Sequence
  Synthetic
ggcgggcggaucauaaggu

SEQ ID NO: 660237 - RNA, 20 nt, Artificial Sequence
  Synthetic
aggcgggcggaucauaaggu

SEQ ID NO: 660238 - RNA, 21 nt, Artificial Sequence
  Synthetic
gaggcgggcggaucauaaggu

SEQ ID NO: 660239 - RNA, 22 nt, Artificial Sequence
  Synthetic
cgaggcgggcggaucauaaggu

SEQ ID NO: 660240 - RNA, 23 nt, Artificial Sequence
  Synthetic
ccgaggcgggcggaucauaaggu

SEQ ID NO: 660241 - RNA, 24 nt, Artificial Sequence
  Synthetic
gccgaggcgggcggaucauaaggu

SEQ ID NO: 660242 - RNA, 18 nt, Artificial Sequence
  Synthetic
acaaucccauccuaaggu

SEQ ID NO: 660243 - RNA, 19 nt, Artificial Sequence
  Synthetic
cacaaucccauccuaaggu

SEQ ID NO: 660244 - RNA, 20 nt, Artificial Sequence
  Synthetic
acacaaucccauccuaaggu

SEQ ID NO: 660245 - RNA, 21 nt, Artificial Sequence
  Synthetic
gacacaaucccauccuaaggu

SEQ ID NO: 660246 - RNA, 22 nt, Artificial Sequence
  Synthetic
ggacacaaucccauccuaaggu

SEQ ID NO: 660247 - RNA, 23 nt, Artificial Sequence
  Synthetic
aggacacaaucccauccuaaggu

SEQ ID NO: 660248 - RNA, 24 nt, Artificial Sequence
  Synthetic
caggacacaaucccauccuaaggu

SEQ ID NO: 660249 - RNA, 18 nt, Artificial Sequence
  Synthetic
uacuugggaggcuaaggu

SEQ ID NO: 660250 - RNA, 19 nt, Artificial Sequence
  Synthetic
cuacuugggaggcuaaggu

SEQ ID NO: 660251 - RNA, 20 nt, Artificial Sequence
  Synthetic
gcuacuugggaggcuaaggu

SEQ ID NO: 660252 - RNA, 21 nt, Artificial Sequence
  Synthetic
agcuacuugggaggcuaaggu

SEQ ID NO: 660253 - RNA, 22 nt, Artificial Sequence
  Synthetic
cagcuacuugggaggcuaaggu

SEQ ID NO: 660254 - RNA, 23 nt, Artificial Sequence
  Synthetic
ccagcuacuugggaggcuaaggu

SEQ ID NO: 660255 - RNA, 24 nt, Artificial Sequence
  Synthetic
cccagcuacuugggaggcuaaggu

SEQ ID NO: 660256 - RNA, 18 nt, Artificial Sequence
  Synthetic
agagaauuaggcuaaggu

SEQ ID NO: 660257 - RNA, 19 nt, Artificial Sequence
  Synthetic
aagagaauuaggcuaaggu

SEQ ID NO: 660258 - RNA, 20 nt, Artificial Sequence
  Synthetic
aaagagaauuaggcuaaggu

SEQ ID NO: 660259 - RNA, 21 nt, Artificial Sequence
  Synthetic
aaaagagaauuaggcuaaggu

SEQ ID NO: 660260 - RNA, 22 nt, Artificial Sequence
  Synthetic
caaaagagaauuaggcuaaggu

SEQ ID NO: 660261 - RNA, 23 nt, Artificial Sequence
  Synthetic
ucaaaagagaauuaggcuaaggu

SEQ ID NO: 660262 - RNA, 24 nt, Artificial Sequence
  Synthetic
aucaaaagagaauuaggcuaaggu

SEQ ID NO: 660263 - RNA, 18 nt, Artificial Sequence
  Synthetic
cgacacauaaucuaaggu

SEQ ID NO: 660264 - RNA, 19 nt, Artificial Sequence
  Synthetic
ucgacacauaaucuaaggu

SEQ ID NO: 660265 - RNA, 20 nt, Artificial Sequence
  Synthetic
uucgacacauaaucuaaggu

SEQ ID NO: 660266 - RNA, 21 nt, Artificial Sequence
  Synthetic
uuucgacacauaaucuaaggu

SEQ ID NO: 660267 - RNA, 22 nt, Artificial Sequence
  Synthetic
cuuucgacacauaaucuaaggu

SEQ ID NO: 660268 - RNA, 23 nt, Artificial Sequence
  Synthetic
acuuucgacacauaaucuaaggu

SEQ ID NO: 660269 - RNA, 24 nt, Artificial Sequence
  Synthetic
aacuuucgacacauaaucuaaggu

SEQ ID NO: 660270 - RNA, 18 nt, Artificial Sequence
  Synthetic
aagggauuauuguaaggu

SEQ ID NO: 660271 - RNA, 19 nt, Artificial Sequence
  Synthetic
gaagggauuauuguaaggu

SEQ ID NO: 660272 - RNA, 20 nt, Artificial Sequence
  Synthetic
agaagggauuauuguaaggu

SEQ ID NO: 660273 - RNA, 21 nt, Artificial Sequence
  Synthetic
uagaagggauuauuguaaggu

SEQ ID NO: 660274 - RNA, 22 nt, Artificial Sequence
  Synthetic
auagaagggauuauuguaaggu

SEQ ID NO: 660275 - RNA, 23 nt, Artificial Sequence
  Synthetic
gauagaagggauuauuguaaggu

SEQ ID NO: 660276 - RNA, 24 nt, Artificial Sequence
  Synthetic
agauagaagggauuauuguaaggu

SEQ ID NO: 660277 - RNA, 18 nt, Artificial Sequence
  Synthetic
aaaucuugcauuuaaggu

SEQ ID NO: 660278 - RNA, 19 nt, Artificial Sequence
  Synthetic
aaaaucuugcauuuaaggu

SEQ ID NO: 660279 - RNA, 20 nt, Artificial Sequence
  Synthetic
aaaaaucuugcauuuaaggu

SEQ ID NO: 660280 - RNA, 21 nt, Artificial Sequence
  Synthetic
uaaaaaucuugcauuuaaggu

SEQ ID NO: 660281 - RNA, 22 nt, Artificial Sequence
  Synthetic
uuaaaaaucuugcauuuaaggu

SEQ ID NO: 660282 - RNA, 23 nt, Artificial Sequence
  Synthetic
auuaaaaaucuugcauuuaaggu

SEQ ID NO: 660283 - RNA, 24 nt, Artificial Sequence
  Synthetic
uauuaaaaaucuugcauuuaaggu

SEQ ID NO: 660284 - RNA, 18 nt, Artificial Sequence
  Synthetic
ccacaugcaaaaacaggu

SEQ ID NO: 660285 - RNA, 19 nt, Artificial Sequence
  Synthetic
accacaugcaaaaacaggu

SEQ ID NO: 660286 - RNA, 20 nt, Artificial Sequence
  Synthetic
aaccacaugcaaaaacaggu

SEQ ID NO: 660287 - RNA, 21 nt, Artificial Sequence
  Synthetic
caaccacaugcaaaaacaggu

SEQ ID NO: 660288 - RNA, 22 nt, Artificial Sequence
  Synthetic
acaaccacaugcaaaaacaggu

SEQ ID NO: 660289 - RNA, 23 nt, Artificial Sequence
  Synthetic
uacaaccacaugcaaaaacaggu

SEQ ID NO: 660290 - RNA, 24 nt, Artificial Sequence
  Synthetic
cuacaaccacaugcaaaaacaggu

SEQ ID NO: 660291 - RNA, 18 nt, Artificial Sequence
  Synthetic
uaggguagaacaacaggu

SEQ ID NO: 660292 - RNA, 19 nt, Artificial Sequence
  Synthetic
cuaggguagaacaacaggu

SEQ ID NO: 660293 - RNA, 20 nt, Artificial Sequence
  Synthetic
ccuaggguagaacaacaggu

SEQ ID NO: 660294 - RNA, 21 nt, Artificial Sequence
  Synthetic
uccuaggguagaacaacaggu

SEQ ID NO: 660295 - RNA, 22 nt, Artificial Sequence
  Synthetic
cuccuaggguagaacaacaggu

SEQ ID NO: 660296 - RNA, 23 nt, Artificial Sequence
  Synthetic
ccuccuaggguagaacaacaggu

SEQ ID NO: 660297 - RNA, 24 nt, Artificial Sequence
  Synthetic
accuccuaggguagaacaacaggu

SEQ ID NO: 660298 - RNA, 18 nt, Artificial Sequence
  Synthetic
aagguaauaaacacaggu

SEQ ID NO: 660299 - RNA, 19 nt, Artificial Sequence
  Synthetic
aaagguaauaaacacaggu

SEQ ID NO: 660300 - RNA, 20 nt, Artificial Sequence
  Synthetic
caaagguaauaaacacaggu

SEQ ID NO: 660301 - RNA, 21 nt, Artificial Sequence
  Synthetic
ccaaagguaauaaacacaggu

SEQ ID NO: 660302 - RNA, 22 nt, Artificial Sequence
  Synthetic
uccaaagguaauaaacacaggu

SEQ ID NO: 660303 - RNA, 23 nt, Artificial Sequence
  Synthetic
uuccaaagguaauaaacacaggu

SEQ ID NO: 660304 - RNA, 24 nt, Artificial Sequence
  Synthetic
cuuccaaagguaauaaacacaggu

SEQ ID NO: 660305 - RNA, 18 nt, Artificial Sequence
  Synthetic
auacagggguacacaggu

SEQ ID NO: 660306 - RNA, 19 nt, Artificial Sequence
  Synthetic
uauacagggguacacaggu

SEQ ID NO: 660307 - RNA, 20 nt, Artificial Sequence
  Synthetic
auauacagggguacacaggu

SEQ ID NO: 660308 - RNA, 21 nt, Artificial Sequence
  Synthetic
aauauacagggguacacaggu

SEQ ID NO: 660309 - RNA, 22 nt, Artificial Sequence
  Synthetic
uaauauacagggguacacaggu

SEQ ID NO: 660310 - RNA, 23 nt, Artificial Sequence
  Synthetic
auaauauacagggguacacaggu

SEQ ID NO: 660311 - RNA, 24 nt, Artificial Sequence
  Synthetic
gauaauauacagggguacacaggu

SEQ ID NO: 660312 - RNA, 18 nt, Artificial Sequence
  Synthetic
auacacagcagcacaggu

SEQ ID NO: 660313 - RNA, 19 nt, Artificial Sequence
  Synthetic
aauacacagcagcacaggu

SEQ ID NO: 660314 - RNA, 20 nt, Artificial Sequence
  Synthetic
aaauacacagcagcacaggu

SEQ ID NO: 660315 - RNA, 21 nt, Artificial Sequence
  Synthetic
caaauacacagcagcacaggu

SEQ ID NO: 660316 - RNA, 22 nt, Artificial Sequence
  Synthetic
ccaaauacacagcagcacaggu

SEQ ID NO: 660317 - RNA, 23 nt, Artificial Sequence
  Synthetic
gccaaauacacagcagcacaggu

SEQ ID NO: 660318 - RNA, 24 nt, Artificial Sequence
  Synthetic
ggccaaauacacagcagcacaggu

SEQ ID NO: 660319 - RNA, 18 nt, Artificial Sequence
  Synthetic
uaaguugguaggacaggu

SEQ ID NO: 660320 - RNA, 19 nt, Artificial Sequence
  Synthetic
auaaguugguaggacaggu

SEQ ID NO: 660321 - RNA, 20 nt, Artificial Sequence
  Synthetic
cauaaguugguaggacaggu

SEQ ID NO: 660322 - RNA, 21 nt, Artificial Sequence
  Synthetic
acauaaguugguaggacaggu

SEQ ID NO: 660323 - RNA, 22 nt, Artificial Sequence
  Synthetic
aacauaaguugguaggacaggu

SEQ ID NO: 660324 - RNA, 23 nt, Artificial Sequence
  Synthetic
aaacauaaguugguaggacaggu

SEQ ID NO: 660325 - RNA, 24 nt, Artificial Sequence
  Synthetic
uaaacauaaguugguaggacaggu

SEQ ID NO: 660326 - RNA, 18 nt, Artificial Sequence
  Synthetic
ccuuccaguuggacaggu

SEQ ID NO: 660327 - RNA, 19 nt, Artificial Sequence
  Synthetic
uccuuccaguuggacaggu

SEQ ID NO: 660328 - RNA, 20 nt, Artificial Sequence
  Synthetic
auccuuccaguuggacaggu

SEQ ID NO: 660329 - RNA, 21 nt, Artificial Sequence
  Synthetic
cauccuuccaguuggacaggu

SEQ ID NO: 660330 - RNA, 22 nt, Artificial Sequence
  Synthetic
ccauccuuccaguuggacaggu

SEQ ID NO: 660331 - RNA, 23 nt, Artificial Sequence
  Synthetic
accauccuuccaguuggacaggu

SEQ ID NO: 660332 - RNA, 24 nt, Artificial Sequence
  Synthetic
uaccauccuuccaguuggacaggu

SEQ ID NO: 660333 - RNA, 18 nt, Artificial Sequence
  Synthetic
aaaauaagagugacaggu

SEQ ID NO: 660334 - RNA, 19 nt, Artificial Sequence
  Synthetic
aaaaauaagagugacaggu

SEQ ID NO: 660335 - RNA, 20 nt, Artificial Sequence
  Synthetic
uaaaaauaagagugacaggu

SEQ ID NO: 660336 - RNA, 21 nt, Artificial Sequence
  Synthetic
cuaaaaauaagagugacaggu

SEQ ID NO: 660337 - RNA, 22 nt, Artificial Sequence
  Synthetic
gcuaaaaauaagagugacaggu

SEQ ID NO: 660338 - RNA, 23 nt, Artificial Sequence
  Synthetic
ugcuaaaaauaagagugacaggu

SEQ ID NO: 660339 - RNA, 24 nt, Artificial Sequence
  Synthetic
augcuaaaaauaagagugacaggu

SEQ ID NO: 660340 - RNA, 18 nt, Artificial Sequence
  Synthetic
agggcuagaaauacaggu

SEQ ID NO: 660341 - RNA, 19 nt, Artificial Sequence
  Synthetic
uagggcuagaaauacaggu

SEQ ID NO: 660342 - RNA, 20 nt, Artificial Sequence
  Synthetic
guagggcuagaaauacaggu

SEQ ID NO: 660343 - RNA, 21 nt, Artificial Sequence
  Synthetic
aguagggcuagaaauacaggu

SEQ ID NO: 660344 - RNA, 22 nt, Artificial Sequence
  Synthetic
uaguagggcuagaaauacaggu

SEQ ID NO: 660345 - RNA, 23 nt, Artificial Sequence
  Synthetic
guaguagggcuagaaauacaggu

SEQ ID NO: 660346 - RNA, 24 nt, Artificial Sequence
  Synthetic
gguaguagggcuagaaauacaggu

SEQ ID NO: 660347 - RNA, 18 nt, Artificial Sequence
  Synthetic
aaggcuaagaauacaggu

SEQ ID NO: 660348 - RNA, 19 nt, Artificial Sequence
  Synthetic
uaaggcuaagaauacaggu

SEQ ID NO: 660349 - RNA, 20 nt, Artificial Sequence
  Synthetic
guaaggcuaagaauacaggu

SEQ ID NO: 660350 - RNA, 21 nt, Artificial Sequence
  Synthetic
gguaaggcuaagaauacaggu

SEQ ID NO: 660351 - RNA, 22 nt, Artificial Sequence
  Synthetic
ggguaaggcuaagaauacaggu

SEQ ID NO: 660352 - RNA, 23 nt, Artificial Sequence
  Synthetic
gggguaaggcuaagaauacaggu

SEQ ID NO: 660353 - RNA, 24 nt, Artificial Sequence
  Synthetic
agggguaaggcuaagaauacaggu

SEQ ID NO: 660354 - RNA, 18 nt, Artificial Sequence
  Synthetic
agugcugggaguacaggu

SEQ ID NO: 660355 - RNA, 19 nt, Artificial Sequence
  Synthetic
aagugcugggaguacaggu

SEQ ID NO: 660356 - RNA, 20 nt, Artificial Sequence
  Synthetic
aaagugcugggaguacaggu

SEQ ID NO: 660357 - RNA, 21 nt, Artificial Sequence
  Synthetic
caaagugcugggaguacaggu

SEQ ID NO: 660358 - RNA, 22 nt, Artificial Sequence
  Synthetic
ccaaagugcugggaguacaggu

SEQ ID NO: 660359 - RNA, 23 nt, Artificial Sequence
  Synthetic
cccaaagugcugggaguacaggu

SEQ ID NO: 660360 - RNA, 24 nt, Artificial Sequence
  Synthetic
ucccaaagugcugggaguacaggu

SEQ ID NO: 660361 - RNA, 18 nt, Artificial Sequence
  Synthetic
auuuaauaugguacaggu

SEQ ID NO: 660362 - RNA, 19 nt, Artificial Sequence
  Synthetic
aauuuaauaugguacaggu

SEQ ID NO: 660363 - RNA, 20 nt, Artificial Sequence
  Synthetic
aaauuuaauaugguacaggu

SEQ ID NO: 660364 - RNA, 21 nt, Artificial Sequence
  Synthetic
aaaauuuaauaugguacaggu

SEQ ID NO: 660365 - RNA, 22 nt, Artificial Sequence
  Synthetic
caaaauuuaauaugguacaggu

SEQ ID NO: 660366 - RNA, 23 nt, Artificial Sequence
  Synthetic
ucaaaauuuaauaugguacaggu

SEQ ID NO: 660367 - RNA, 24 nt, Artificial Sequence
  Synthetic
uucaaaauuuaauaugguacaggu

SEQ ID NO: 660368 - RNA, 18 nt, Artificial Sequence
  Synthetic
agcgcuggaauuacaggu

SEQ ID NO: 660369 - RNA, 19 nt, Artificial Sequence
  Synthetic
aagcgcuggaauuacaggu

SEQ ID NO: 660370 - RNA, 20 nt, Artificial Sequence
  Synthetic
aaagcgcuggaauuacaggu

SEQ ID NO: 660371 - RNA, 21 nt, Artificial Sequence
  Synthetic
caaagcgcuggaauuacaggu

SEQ ID NO: 660372 - RNA, 22 nt, Artificial Sequence
  Synthetic
ccaaagcgcuggaauuacaggu

SEQ ID NO: 660373 - RNA, 23 nt, Artificial Sequence
  Synthetic
cccaaagcgcuggaauuacaggu

SEQ ID NO: 660374 - RNA, 24 nt, Artificial Sequence
  Synthetic
ucccaaagcgcuggaauuacaggu

SEQ ID NO: 660375 - RNA, 18 nt, Artificial Sequence
  Synthetic
aguguugagauuacaggu

SEQ ID NO: 660376 - RNA, 19 nt, Artificial Sequence
  Synthetic
aaguguugagauuacaggu

SEQ ID NO: 660377 - RNA, 20 nt, Artificial Sequence
  Synthetic
aaaguguugagauuacaggu

SEQ ID NO: 660378 - RNA, 21 nt, Artificial Sequence
  Synthetic
caaaguguugagauuacaggu

SEQ ID NO: 660379 - RNA, 22 nt, Artificial Sequence
  Synthetic
ccaaaguguugagauuacaggu

SEQ ID NO: 660380 - RNA, 23 nt, Artificial Sequence
  Synthetic
cccaaaguguugagauuacaggu

SEQ ID NO: 660381 - RNA, 24 nt, Artificial Sequence
  Synthetic
ucccaaaguguugagauuacaggu

SEQ ID NO: 660382 - RNA, 18 nt, Artificial Sequence
  Synthetic
aguacuaggauuacaggu

SEQ ID NO: 660383 - RNA, 19 nt, Artificial Sequence
  Synthetic
aaguacuaggauuacaggu

SEQ ID NO: 660384 - RNA, 20 nt, Artificial Sequence
  Synthetic
aaaguacuaggauuacaggu

SEQ ID NO: 660385 - RNA, 21 nt, Artificial Sequence
  Synthetic
caaaguacuaggauuacaggu

SEQ ID NO: 660386 - RNA, 22 nt, Artificial Sequence
  Synthetic
ccaaaguacuaggauuacaggu

SEQ ID NO: 660387 - RNA, 23 nt, Artificial Sequence
  Synthetic
cccaaaguacuaggauuacaggu

SEQ ID NO: 660388 - RNA, 24 nt, Artificial Sequence
  Synthetic
ucccaaaguacuaggauuacaggu

SEQ ID NO: 660389 - RNA, 18 nt, Artificial Sequence
  Synthetic
aguguuaggauuacaggu

SEQ ID NO: 660390 - RNA, 19 nt, Artificial Sequence
  Synthetic
aaguguuaggauuacaggu

SEQ ID NO: 660391 - RNA, 20 nt, Artificial Sequence
  Synthetic
aaaguguuaggauuacaggu

SEQ ID NO: 660392 - RNA, 21 nt, Artificial Sequence
  Synthetic
caaaguguuaggauuacaggu

SEQ ID NO: 660393 - RNA, 22 nt, Artificial Sequence
  Synthetic
ccaaaguguuaggauuacaggu

SEQ ID NO: 660394 - RNA, 23 nt, Artificial Sequence
  Synthetic
cccaaaguguuaggauuacaggu

SEQ ID NO: 660395 - RNA, 24 nt, Artificial Sequence
  Synthetic
ucccaaaguguuaggauuacaggu

SEQ ID NO: 660396 - RNA, 21 nt, Artificial Sequence
  Synthetic
caaagugcugggauuacaggu

SEQ ID NO: 660397 - RNA, 22 nt, Artificial Sequence
  Synthetic
ucaaagugcugggauuacaggu

SEQ ID NO: 660398 - RNA, 23 nt, Artificial Sequence
  Synthetic
cucaaagugcugggauuacaggu

SEQ ID NO: 660399 - RNA, 24 nt, Artificial Sequence
  Synthetic
ucucaaagugcugggauuacaggu

SEQ ID NO: 660400 - RNA, 18 nt, Artificial Sequence
  Synthetic
cagaaccaaaaaccaggu

SEQ ID NO: 660401 - RNA, 19 nt, Artificial Sequence
  Synthetic
ccagaaccaaaaaccaggu

SEQ ID NO: 660402 - RNA, 20 nt, Artificial Sequence
  Synthetic
accagaaccaaaaaccaggu

SEQ ID NO: 660403 - RNA, 21 nt, Artificial Sequence
  Synthetic
caccagaaccaaaaaccaggu

SEQ ID NO: 660404 - RNA, 22 nt, Artificial Sequence
  Synthetic
ucaccagaaccaaaaaccaggu

SEQ ID NO: 660405 - RNA, 23 nt, Artificial Sequence
  Synthetic
gucaccagaaccaaaaaccaggu

SEQ ID NO: 660406 - RNA, 24 nt, Artificial Sequence
  Synthetic
ugucaccagaaccaaaaaccaggu

SEQ ID NO: 660407 - RNA, 18 nt, Artificial Sequence
  Synthetic
uaaguaguuaaaccaggu

SEQ ID NO: 660408 - RNA, 19 nt, Artificial Sequence
  Synthetic
uuaaguaguuaaaccaggu

SEQ ID NO: 660409 - RNA, 20 nt, Artificial Sequence
  Synthetic
auuaaguaguuaaaccaggu

SEQ ID NO: 660410 - RNA, 21 nt, Artificial Sequence
  Synthetic
cauuaaguaguuaaaccaggu

SEQ ID NO: 660411 - RNA, 22 nt, Artificial Sequence
  Synthetic
ccauuaaguaguuaaaccaggu

SEQ ID NO: 660412 - RNA, 23 nt, Artificial Sequence
  Synthetic
cccauuaaguaguuaaaccaggu

SEQ ID NO: 660413 - RNA, 24 nt, Artificial Sequence
  Synthetic
acccauuaaguaguuaaaccaggu

SEQ ID NO: 660414 - RNA, 18 nt, Artificial Sequence
  Synthetic
agagccccuguaccaggu

SEQ ID NO: 660415 - RNA, 19 nt, Artificial Sequence
  Synthetic
aagagccccuguaccaggu

SEQ ID NO: 660416 - RNA, 20 nt, Artificial Sequence
  Synthetic
gaagagccccuguaccaggu

SEQ ID NO: 660417 - RNA, 21 nt, Artificial Sequence
  Synthetic
ugaagagccccuguaccaggu

SEQ ID NO: 660418 - RNA, 22 nt, Artificial Sequence
  Synthetic
augaagagccccuguaccaggu

SEQ ID NO: 660419 - RNA, 23 nt, Artificial Sequence
  Synthetic
uaugaagagccccuguaccaggu

SEQ ID NO: 660420 - RNA, 24 nt, Artificial Sequence
  Synthetic
auaugaagagccccuguaccaggu

SEQ ID NO: 660421 - RNA, 18 nt, Artificial Sequence
  Synthetic
ucgcuccaucgcccaggu

SEQ ID NO: 660422 - RNA, 19 nt, Artificial Sequence
  Synthetic
cucgcuccaucgcccaggu

SEQ ID NO: 660423 - RNA, 20 nt, Artificial Sequence
  Synthetic
ucucgcuccaucgcccaggu

SEQ ID NO: 660424 - RNA, 21 nt, Artificial Sequence
  Synthetic
gucucgcuccaucgcccaggu

SEQ ID NO: 660425 - RNA, 22 nt, Artificial Sequence
  Synthetic
agucucgcuccaucgcccaggu

SEQ ID NO: 660426 - RNA, 23 nt, Artificial Sequence
  Synthetic
aagucucgcuccaucgcccaggu

SEQ ID NO: 660427 - RNA, 24 nt, Artificial Sequence
  Synthetic
gaagucucgcuccaucgcccaggu

SEQ ID NO: 660428 - RNA, 18 nt, Artificial Sequence
  Synthetic
ucugacauucucccaggu

SEQ ID NO: 660429 - RNA, 19 nt, Artificial Sequence
  Synthetic
aucugacauucucccaggu

SEQ ID NO: 660430 - RNA, 20 nt, Artificial Sequence
  Synthetic
aaucugacauucucccaggu

SEQ ID NO: 660431 - RNA, 21 nt, Artificial Sequence
  Synthetic
uaaucugacauucucccaggu

SEQ ID NO: 660432 - RNA, 22 nt, Artificial Sequence
  Synthetic
auaaucugacauucucccaggu

SEQ ID NO: 660433 - RNA, 23 nt, Artificial Sequence
  Synthetic
aauaaucugacauucucccaggu

SEQ ID NO: 660434 - RNA, 24 nt, Artificial Sequence
  Synthetic
uaauaaucugacauucucccaggu

SEQ ID NO: 660435 - RNA, 18 nt, Artificial Sequence
  Synthetic
uccagcaggcagccaggu

SEQ ID NO: 660436 - RNA, 19 nt, Artificial Sequence
  Synthetic
cuccagcaggcagccaggu

SEQ ID NO: 660437 - RNA, 20 nt, Artificial Sequence
  Synthetic
acuccagcaggcagccaggu

SEQ ID NO: 660438 - RNA, 21 nt, Artificial Sequence
  Synthetic
aacuccagcaggcagccaggu

SEQ ID NO: 660439 - RNA, 22 nt, Artificial Sequence
  Synthetic
caacuccagcaggcagccaggu

SEQ ID NO: 660440 - RNA, 23 nt, Artificial Sequence
  Synthetic
acaacuccagcaggcagccaggu

SEQ ID NO: 660441 - RNA, 24 nt, Artificial Sequence
  Synthetic
uacaacuccagcaggcagccaggu

SEQ ID NO: 660442 - RNA, 18 nt, Artificial Sequence
  Synthetic
uaacuugcauagccaggu

SEQ ID NO: 660443 - RNA, 19 nt, Artificial Sequence
  Synthetic
auaacuugcauagccaggu

SEQ ID NO: 660444 - RNA, 20 nt, Artificial Sequence
  Synthetic
aauaacuugcauagccaggu

SEQ ID NO: 660445 - RNA, 21 nt, Artificial Sequence
  Synthetic
gaauaacuugcauagccaggu

SEQ ID NO: 660446 - RNA, 22 nt, Artificial Sequence
  Synthetic
agaauaacuugcauagccaggu

SEQ ID NO: 660447 - RNA, 23 nt, Artificial Sequence
  Synthetic
aagaauaacuugcauagccaggu

SEQ ID NO: 660448 - RNA, 24 nt, Artificial Sequence
  Synthetic
uaagaauaacuugcauagccaggu

SEQ ID NO: 660449 - RNA, 18 nt, Artificial Sequence
  Synthetic
uacaaaaauuagccaggu

SEQ ID NO: 660450 - RNA, 19 nt, Artificial Sequence
  Synthetic
auacaaaaauuagccaggu

SEQ ID NO: 660451 - RNA, 20 nt, Artificial Sequence
  Synthetic
aauacaaaaauuagccaggu

SEQ ID NO: 660452 - RNA, 21 nt, Artificial Sequence
  Synthetic
aaauacaaaaauuagccaggu

SEQ ID NO: 660453 - RNA, 22 nt, Artificial Sequence
  Synthetic
aaaauacaaaaauuagccaggu

SEQ ID NO: 660454 - RNA, 23 nt, Artificial Sequence
  Synthetic
aaaaauacaaaaauuagccaggu

SEQ ID NO: 660455 - RNA, 24 nt, Artificial Sequence
  Synthetic
uaaaaauacaaaaauuagccaggu

SEQ ID NO: 660456 - RNA, 18 nt, Artificial Sequence
  Synthetic
aaaacaguugauccaggu

SEQ ID NO: 660457 - RNA, 19 nt, Artificial Sequence
  Synthetic
gaaaacaguugauccaggu

SEQ ID NO: 660458 - RNA, 20 nt, Artificial Sequence
  Synthetic
ggaaaacaguugauccaggu

SEQ ID NO: 660459 - RNA, 21 nt, Artificial Sequence
  Synthetic
gggaaaacaguugauccaggu

SEQ ID NO: 660460 - RNA, 22 nt, Artificial Sequence
  Synthetic
ggggaaaacaguugauccaggu

SEQ ID NO: 660461 - RNA, 23 nt, Artificial Sequence
  Synthetic
uggggaaaacaguugauccaggu

SEQ ID NO: 660462 - RNA, 24 nt, Artificial Sequence
  Synthetic
auggggaaaacaguugauccaggu

SEQ ID NO: 660463 - RNA, 18 nt, Artificial Sequence
  Synthetic
aaccucugauauccaggu

SEQ ID NO: 660464 - RNA, 19 nt, Artificial Sequence
  Synthetic
aaaccucugauauccaggu

SEQ ID NO: 660465 - RNA, 20 nt, Artificial Sequence
  Synthetic
caaaccucugauauccaggu

SEQ ID NO: 660466 - RNA, 21 nt, Artificial Sequence
  Synthetic
ccaaaccucugauauccaggu

SEQ ID NO: 660467 - RNA, 22 nt, Artificial Sequence
  Synthetic
gccaaaccucugauauccaggu

SEQ ID NO: 660468 - RNA, 23 nt, Artificial Sequence
  Synthetic
ugccaaaccucugauauccaggu

SEQ ID NO: 660469 - RNA, 24 nt, Artificial Sequence
  Synthetic
uugccaaaccucugauauccaggu

SEQ ID NO: 660470 - RNA, 18 nt, Artificial Sequence
  Synthetic
uuguuccuguuuccaggu

SEQ ID NO: 660471 - RNA, 19 nt, Artificial Sequence
  Synthetic
uuuguuccuguuuccaggu

SEQ ID NO: 660472 - RNA, 20 nt, Artificial Sequence
  Synthetic
uuuuguuccuguuuccaggu

SEQ ID NO: 660473 - RNA, 21 nt, Artificial Sequence
  Synthetic
uuuuuguuccuguuuccaggu

SEQ ID NO: 660474 - RNA, 22 nt, Artificial Sequence
  Synthetic
auuuuuguuccuguuuccaggu

SEQ ID NO: 660475 - RNA, 23 nt, Artificial Sequence
  Synthetic
cauuuuuguuccuguuuccaggu

SEQ ID NO: 660476 - RNA, 24 nt, Artificial Sequence
  Synthetic
ccauuuuuguuccuguuuccaggu

SEQ ID NO: 660477 - RNA, 18 nt, Artificial Sequence
  Synthetic
ucaggugaacaagcaggu

SEQ ID NO: 660478 - RNA, 19 nt, Artificial Sequence
  Synthetic
cucaggugaacaagcaggu

SEQ ID NO: 660479 - RNA, 20 nt, Artificial Sequence
  Synthetic
gcucaggugaacaagcaggu

SEQ ID NO: 660480 - RNA, 21 nt, Artificial Sequence
  Synthetic
ugcucaggugaacaagcaggu

SEQ ID NO: 660481 - RNA, 22 nt, Artificial Sequence
  Synthetic
augcucaggugaacaagcaggu

SEQ ID NO: 660482 - RNA, 23 nt, Artificial Sequence
  Synthetic
uaugcucaggugaacaagcaggu

SEQ ID NO: 660483 - RNA, 24 nt, Artificial Sequence
  Synthetic
auaugcucaggugaacaagcaggu

SEQ ID NO: 660484 - RNA, 18 nt, Artificial Sequence
  Synthetic
gccagagaucaagcaggu

SEQ ID NO: 660485 - RNA, 19 nt, Artificial Sequence
  Synthetic
ugccagagaucaagcaggu

SEQ ID NO: 660486 - RNA, 20 nt, Artificial Sequence
  Synthetic
augccagagaucaagcaggu

SEQ ID NO: 660487 - RNA, 21 nt, Artificial Sequence
  Synthetic
uaugccagagaucaagcaggu

SEQ ID NO: 660488 - RNA, 22 nt, Artificial Sequence
  Synthetic
auaugccagagaucaagcaggu

SEQ ID NO: 660489 - RNA, 23 nt, Artificial Sequence
  Synthetic
uauaugccagagaucaagcaggu

SEQ ID NO: 660490 - RNA, 24 nt, Artificial Sequence
  Synthetic
uuauaugccagagaucaagcaggu

SEQ ID NO: 660491 - RNA, 18 nt, Artificial Sequence
  Synthetic
guuucugaucaagcaggu

SEQ ID NO: 660492 - RNA, 19 nt, Artificial Sequence
  Synthetic
uguuucugaucaagcaggu

SEQ ID NO: 660493 - RNA, 20 nt, Artificial Sequence
  Synthetic
auguuucugaucaagcaggu

SEQ ID NO: 660494 - RNA, 21 nt, Artificial Sequence
  Synthetic
aauguuucugaucaagcaggu

SEQ ID NO: 660495 - RNA, 22 nt, Artificial Sequence
  Synthetic
caauguuucugaucaagcaggu

SEQ ID NO: 660496 - RNA, 23 nt, Artificial Sequence
  Synthetic
ccaauguuucugaucaagcaggu

SEQ ID NO: 660497 - RNA, 24 nt, Artificial Sequence
  Synthetic
uccaauguuucugaucaagcaggu

SEQ ID NO: 660498 - RNA, 18 nt, Artificial Sequence
  Synthetic
gauguuguguuagcaggu

SEQ ID NO: 660499 - RNA, 19 nt, Artificial Sequence
  Synthetic
ggauguuguguuagcaggu

SEQ ID NO: 660500 - RNA, 20 nt, Artificial Sequence
  Synthetic
uggauguuguguuagcaggu

SEQ ID NO: 660501 - RNA, 21 nt, Artificial Sequence
  Synthetic
auggauguuguguuagcaggu

SEQ ID NO: 660502 - RNA, 22 nt, Artificial Sequence
  Synthetic
aauggauguuguguuagcaggu

SEQ ID NO: 660503 - RNA, 23 nt, Artificial Sequence
  Synthetic
gaauggauguuguguuagcaggu

SEQ ID NO: 660504 - RNA, 24 nt, Artificial Sequence
  Synthetic
agaauggauguuguguuagcaggu

SEQ ID NO: 660505 - RNA, 18 nt, Artificial Sequence
  Synthetic
ccugaagaacaggcaggu

SEQ ID NO: 660506 - RNA, 19 nt, Artificial Sequence
  Synthetic
accugaagaacaggcaggu

SEQ ID NO: 660507 - RNA, 20 nt, Artificial Sequence
  Synthetic
gaccugaagaacaggcaggu

SEQ ID NO: 660508 - RNA, 21 nt, Artificial Sequence
  Synthetic
agaccugaagaacaggcaggu

SEQ ID NO: 660509 - RNA, 22 nt, Artificial Sequence
  Synthetic
gagaccugaagaacaggcaggu

SEQ ID NO: 660510 - RNA, 23 nt, Artificial Sequence
  Synthetic
ugagaccugaagaacaggcaggu

SEQ ID NO: 660511 - RNA, 24 nt, Artificial Sequence
  Synthetic
gugagaccugaagaacaggcaggu

SEQ ID NO: 660512 - RNA, 18 nt, Artificial Sequence
  Synthetic
cuagacaaucuggcaggu

SEQ ID NO: 660513 - RNA, 19 nt, Artificial Sequence
  Synthetic
gcuagacaaucuggcaggu

SEQ ID NO: 660514 - RNA, 20 nt, Artificial Sequence
  Synthetic
ggcuagacaaucuggcaggu

SEQ ID NO: 660515 - RNA, 21 nt, Artificial Sequence
  Synthetic
gggcuagacaaucuggcaggu

SEQ ID NO: 660516 - RNA, 22 nt, Artificial Sequence
  Synthetic
ugggcuagacaaucuggcaggu

SEQ ID NO: 660517 - RNA, 23 nt, Artificial Sequence
  Synthetic
cugggcuagacaaucuggcaggu

SEQ ID NO: 660518 - RNA, 24 nt, Artificial Sequence
  Synthetic
acugggcuagacaaucuggcaggu

SEQ ID NO: 660519 - RNA, 18 nt, Artificial Sequence
  Synthetic
gggcaauuucuggcaggu

SEQ ID NO: 660520 - RNA, 19 nt, Artificial Sequence
  Synthetic
ggggcaauuucuggcaggu

SEQ ID NO: 660521 - RNA, 20 nt, Artificial Sequence
  Synthetic
uggggcaauuucuggcaggu

SEQ ID NO: 660522 - RNA, 21 nt, Artificial Sequence
  Synthetic
guggggcaauuucuggcaggu

SEQ ID NO: 660523 - RNA, 22 nt, Artificial Sequence
  Synthetic
aguggggcaauuucuggcaggu

SEQ ID NO: 660524 - RNA, 23 nt, Artificial Sequence
  Synthetic
gaguggggcaauuucuggcaggu

SEQ ID NO: 660525 - RNA, 24 nt, Artificial Sequence
  Synthetic
ugaguggggcaauuucuggcaggu

SEQ ID NO: 660526 - RNA, 18 nt, Artificial Sequence
  Synthetic
aucagaauuucugcaggu

SEQ ID NO: 660527 - RNA, 19 nt, Artificial Sequence
  Synthetic
aaucagaauuucugcaggu

SEQ ID NO: 660528 - RNA, 20 nt, Artificial Sequence
  Synthetic
aaaucagaauuucugcaggu

SEQ ID NO: 660529 - RNA, 21 nt, Artificial Sequence
  Synthetic
caaaucagaauuucugcaggu

SEQ ID NO: 660530 - RNA, 22 nt, Artificial Sequence
  Synthetic
ucaaaucagaauuucugcaggu

SEQ ID NO: 660531 - RNA, 23 nt, Artificial Sequence
  Synthetic
aucaaaucagaauuucugcaggu

SEQ ID NO: 660532 - RNA, 24 nt, Artificial Sequence
  Synthetic
aaucaaaucagaauuucugcaggu

SEQ ID NO: 660533 - RNA, 18 nt, Artificial Sequence
  Synthetic
uaaaacaaaugugcaggu

SEQ ID NO: 660534 - RNA, 19 nt, Artificial Sequence
  Synthetic
auaaaacaaaugugcaggu

SEQ ID NO: 660535 - RNA, 20 nt, Artificial Sequence
  Synthetic
aauaaaacaaaugugcaggu

SEQ ID NO: 660536 - RNA, 21 nt, Artificial Sequence
  Synthetic
uaauaaaacaaaugugcaggu

SEQ ID NO: 660537 - RNA, 22 nt, Artificial Sequence
  Synthetic
uuaauaaaacaaaugugcaggu

SEQ ID NO: 660538 - RNA, 23 nt, Artificial Sequence
  Synthetic
uuuaauaaaacaaaugugcaggu

SEQ ID NO: 660539 - RNA, 24 nt, Artificial Sequence
  Synthetic
uuuuaauaaaacaaaugugcaggu

SEQ ID NO: 660540 - RNA, 18 nt, Artificial Sequence
  Synthetic
auguuaugaauugcaggu

SEQ ID NO: 660541 - RNA, 19 nt, Artificial Sequence
  Synthetic
cauguuaugaauugcaggu

SEQ ID NO: 660542 - RNA, 20 nt, Artificial Sequence
  Synthetic
acauguuaugaauugcaggu

SEQ ID NO: 660543 - RNA, 21 nt, Artificial Sequence
  Synthetic
aacauguuaugaauugcaggu

SEQ ID NO: 660544 - RNA, 22 nt, Artificial Sequence
  Synthetic
aaacauguuaugaauugcaggu

SEQ ID NO: 660545 - RNA, 23 nt, Artificial Sequence
  Synthetic
uaaacauguuaugaauugcaggu

SEQ ID NO: 660546 - RNA, 24 nt, Artificial Sequence
  Synthetic
guaaacauguuaugaauugcaggu

SEQ ID NO: 660547 - RNA, 18 nt, Artificial Sequence
  Synthetic
acuuucagagaaucaggu

SEQ ID NO: 660548 - RNA, 19 nt, Artificial Sequence
  Synthetic
uacuuucagagaaucaggu

SEQ ID NO: 660549 - RNA, 20 nt, Artificial Sequence
  Synthetic
auacuuucagagaaucaggu

SEQ ID NO: 660550 - RNA, 21 nt, Artificial Sequence
  Synthetic
aauacuuucagagaaucaggu

SEQ ID NO: 660551 - RNA, 22 nt, Artificial Sequence
  Synthetic
aaauacuuucagagaaucaggu

SEQ ID NO: 660552 - RNA, 23 nt, Artificial Sequence
  Synthetic
aaaauacuuucagagaaucaggu

SEQ ID NO: 660553 - RNA, 24 nt, Artificial Sequence
  Synthetic
gaaaauacuuucagagaaucaggu

SEQ ID NO: 660554 - RNA, 18 nt, Artificial Sequence
  Synthetic
acucauuacaggucaggu

SEQ ID NO: 660555 - RNA, 19 nt, Artificial Sequence
  Synthetic
gacucauuacaggucaggu

SEQ ID NO: 660556 - RNA, 20 nt, Artificial Sequence
  Synthetic
ugacucauuacaggucaggu

SEQ ID NO: 660557 - RNA, 21 nt, Artificial Sequence
  Synthetic
gugacucauuacaggucaggu

SEQ ID NO: 660558 - RNA, 22 nt, Artificial Sequence
  Synthetic
ugugacucauuacaggucaggu

SEQ ID NO: 660559 - RNA, 23 nt, Artificial Sequence
  Synthetic
cugugacucauuacaggucaggu

SEQ ID NO: 660560 - RNA, 24 nt, Artificial Sequence
  Synthetic
acugugacucauuacaggucaggu

SEQ ID NO: 660561 - RNA, 18 nt, Artificial Sequence
  Synthetic
ucagaugcauauucaggu

SEQ ID NO: 660562 - RNA, 19 nt, Artificial Sequence
  Synthetic
cucagaugcauauucaggu

SEQ ID NO: 660563 - RNA, 20 nt, Artificial Sequence
  Synthetic
gcucagaugcauauucaggu

SEQ ID NO: 660564 - RNA, 21 nt, Artificial Sequence
  Synthetic
ggcucagaugcauauucaggu

SEQ ID NO: 660565 - RNA, 22 nt, Artificial Sequence
  Synthetic
gggcucagaugcauauucaggu

SEQ ID NO: 660566 - RNA, 23 nt, Artificial Sequence
  Synthetic
agggcucagaugcauauucaggu

SEQ ID NO: 660567 - RNA, 24 nt, Artificial Sequence
  Synthetic
uagggcucagaugcauauucaggu

SEQ ID NO: 660568 - RNA, 18 nt, Artificial Sequence
  Synthetic
ggcuagauuucuucaggu

SEQ ID NO: 660569 - RNA, 19 nt, Artificial Sequence
  Synthetic
aggcuagauuucuucaggu

SEQ ID NO: 660570 - RNA, 20 nt, Artificial Sequence
  Synthetic
aaggcuagauuucuucaggu

SEQ ID NO: 660571 - RNA, 21 nt, Artificial Sequence
  Synthetic
aaaggcuagauuucuucaggu

SEQ ID NO: 660572 - RNA, 22 nt, Artificial Sequence
  Synthetic
aaaaggcuagauuucuucaggu

SEQ ID NO: 660573 - RNA, 23 nt, Artificial Sequence
  Synthetic
gaaaaggcuagauuucuucaggu

SEQ ID NO: 660574 - RNA, 24 nt, Artificial Sequence
  Synthetic
ggaaaaggcuagauuucuucaggu

SEQ ID NO: 660575 - RNA, 18 nt, Artificial Sequence
  Synthetic
uucuuuaaaguuucaggu

SEQ ID NO: 660576 - RNA, 19 nt, Artificial Sequence
  Synthetic
uuucuuuaaaguuucaggu

SEQ ID NO: 660577 - RNA, 20 nt, Artificial Sequence
  Synthetic
uuuucuuuaaaguuucaggu

SEQ ID NO: 660578 - RNA, 21 nt, Artificial Sequence
  Synthetic
cuuuucuuuaaaguuucaggu

SEQ ID NO: 660579 - RNA, 22 nt, Artificial Sequence
  Synthetic
ccuuuucuuuaaaguuucaggu

SEQ ID NO: 660580 - RNA, 23 nt, Artificial Sequence
  Synthetic
uccuuuucuuuaaaguuucaggu

SEQ ID NO: 660581 - RNA, 24 nt, Artificial Sequence
  Synthetic
uuccuuuucuuuaaaguuucaggu

SEQ ID NO: 660582 - RNA, 18 nt, Artificial Sequence
  Synthetic
ggaauaauguuuucaggu

SEQ ID NO: 660583 - RNA, 19 nt, Artificial Sequence
  Synthetic
aggaauaauguuuucaggu

SEQ ID NO: 660584 - RNA, 20 nt, Artificial Sequence
  Synthetic
aaggaauaauguuuucaggu

SEQ ID NO: 660585 - RNA, 21 nt, Artificial Sequence
  Synthetic
gaaggaauaauguuuucaggu

SEQ ID NO: 660586 - RNA, 22 nt, Artificial Sequence
  Synthetic
ggaaggaauaauguuuucaggu

SEQ ID NO: 660587 - RNA, 23 nt, Artificial Sequence
  Synthetic
uggaaggaauaauguuuucaggu

SEQ ID NO: 660588 - RNA, 24 nt, Artificial Sequence
  Synthetic
auggaaggaauaauguuuucaggu

SEQ ID NO: 660589 - RNA, 18 nt, Artificial Sequence
  Synthetic
auucacauucaaagaggu

SEQ ID NO: 660590 - RNA, 19 nt, Artificial Sequence
  Synthetic
uauucacauucaaagaggu

SEQ ID NO: 660591 - RNA, 20 nt, Artificial Sequence
  Synthetic
auauucacauucaaagaggu

SEQ ID NO: 660592 - RNA, 21 nt, Artificial Sequence
  Synthetic
uauauucacauucaaagaggu

SEQ ID NO: 660593 - RNA, 22 nt, Artificial Sequence
  Synthetic
uuauauucacauucaaagaggu

SEQ ID NO: 660594 - RNA, 23 nt, Artificial Sequence
  Synthetic
auuauauucacauucaaagaggu

SEQ ID NO: 660595 - RNA, 24 nt, Artificial Sequence
  Synthetic
uauuauauucacauucaaagaggu

SEQ ID NO: 660596 - RNA, 18 nt, Artificial Sequence
  Synthetic
gaagucacagaaagaggu

SEQ ID NO: 660597 - RNA, 19 nt, Artificial Sequence
  Synthetic
ugaagucacagaaagaggu

SEQ ID NO: 660598 - RNA, 20 nt, Artificial Sequence
  Synthetic
cugaagucacagaaagaggu

SEQ ID NO: 660599 - RNA, 21 nt, Artificial Sequence
  Synthetic
ccugaagucacagaaagaggu

SEQ ID NO: 660600 - RNA, 22 nt, Artificial Sequence
  Synthetic
uccugaagucacagaaagaggu

SEQ ID NO: 660601 - RNA, 23 nt, Artificial Sequence
  Synthetic
cuccugaagucacagaaagaggu

SEQ ID NO: 660602 - RNA, 24 nt, Artificial Sequence
  Synthetic
ucuccugaagucacagaaagaggu

SEQ ID NO: 660603 - RNA, 18 nt, Artificial Sequence
  Synthetic
ggccuguuugaaagaggu

SEQ ID NO: 660604 - RNA, 19 nt, Artificial Sequence
  Synthetic
aggccuguuugaaagaggu

SEQ ID NO: 660605 - RNA, 20 nt, Artificial Sequence
  Synthetic
aaggccuguuugaaagaggu

SEQ ID NO: 660606 - RNA, 21 nt, Artificial Sequence
  Synthetic
aaaggccuguuugaaagaggu

SEQ ID NO: 660607 - RNA, 22 nt, Artificial Sequence
  Synthetic
aaaaggccuguuugaaagaggu

SEQ ID NO: 660608 - RNA, 23 nt, Artificial Sequence
  Synthetic
aaaaaggccuguuugaaagaggu

SEQ ID NO: 660609 - RNA, 24 nt, Artificial Sequence
  Synthetic
caaaaaggccuguuugaaagaggu

SEQ ID NO: 660610 - RNA, 18 nt, Artificial Sequence
  Synthetic
auaaaaagcuaaagaggu

SEQ ID NO: 660611 - RNA, 19 nt, Artificial Sequence
  Synthetic
aauaaaaagcuaaagaggu

SEQ ID NO: 660612 - RNA, 20 nt, Artificial Sequence
  Synthetic
aaauaaaaagcuaaagaggu

SEQ ID NO: 660613 - RNA, 21 nt, Artificial Sequence
  Synthetic
caaauaaaaagcuaaagaggu

SEQ ID NO: 660614 - RNA, 22 nt, Artificial Sequence
  Synthetic
acaaauaaaaagcuaaagaggu

SEQ ID NO: 660615 - RNA, 23 nt, Artificial Sequence
  Synthetic
uacaaauaaaaagcuaaagaggu

SEQ ID NO: 660616 - RNA, 24 nt, Artificial Sequence
  Synthetic
guacaaauaaaaagcuaaagaggu

SEQ ID NO: 660617 - RNA, 18 nt, Artificial Sequence
  Synthetic
uaucuauucccaagaggu

SEQ ID NO: 660618 - RNA, 19 nt, Artificial Sequence
  Synthetic
uuaucuauucccaagaggu

SEQ ID NO: 660619 - RNA, 20 nt, Artificial Sequence
  Synthetic
auuaucuauucccaagaggu

SEQ ID NO: 660620 - RNA, 21 nt, Artificial Sequence
  Synthetic
cauuaucuauucccaagaggu

SEQ ID NO: 660621 - RNA, 22 nt, Artificial Sequence
  Synthetic
acauuaucuauucccaagaggu

SEQ ID NO: 660622 - RNA, 23 nt, Artificial Sequence
  Synthetic
aacauuaucuauucccaagaggu

SEQ ID NO: 660623 - RNA, 24 nt, Artificial Sequence
  Synthetic
aaacauuaucuauucccaagaggu

SEQ ID NO: 660624 - RNA, 18 nt, Artificial Sequence
  Synthetic
uuacaguagccaagaggu

SEQ ID NO: 660625 - RNA, 19 nt, Artificial Sequence
  Synthetic
uuuacaguagccaagaggu

SEQ ID NO: 660626 - RNA, 20 nt, Artificial Sequence
  Synthetic
uuuuacaguagccaagaggu

SEQ ID NO: 660627 - RNA, 21 nt, Artificial Sequence
  Synthetic
uuuuuacaguagccaagaggu

SEQ ID NO: 660628 - RNA, 22 nt, Artificial Sequence
  Synthetic
auuuuuacaguagccaagaggu

SEQ ID NO: 660629 - RNA, 23 nt, Artificial Sequence
  Synthetic
cauuuuuacaguagccaagaggu

SEQ ID NO: 660630 - RNA, 24 nt, Artificial Sequence
  Synthetic
gcauuuuuacaguagccaagaggu

SEQ ID NO: 660631 - RNA, 18 nt, Artificial Sequence
  Synthetic
aagacuggaagaagaggu

SEQ ID NO: 660632 - RNA, 19 nt, Artificial Sequence
  Synthetic
aaagacuggaagaagaggu

SEQ ID NO: 660633 - RNA, 20 nt, Artificial Sequence
  Synthetic
gaaagacuggaagaagaggu

SEQ ID NO: 660634 - RNA, 21 nt, Artificial Sequence
  Synthetic
ggaaagacuggaagaagaggu

SEQ ID NO: 660635 - RNA, 22 nt, Artificial Sequence
  Synthetic
gggaaagacuggaagaagaggu

SEQ ID NO: 660636 - RNA, 23 nt, Artificial Sequence
  Synthetic
ggggaaagacuggaagaagaggu

SEQ ID NO: 660637 - RNA, 24 nt, Artificial Sequence
  Synthetic
uggggaaagacuggaagaagaggu

SEQ ID NO: 660638 - RNA, 18 nt, Artificial Sequence
  Synthetic
uuucuucugugaagaggu

SEQ ID NO: 660639 - RNA, 19 nt, Artificial Sequence
  Synthetic
guuucuucugugaagaggu

SEQ ID NO: 660640 - RNA, 20 nt, Artificial Sequence
  Synthetic
uguuucuucugugaagaggu

SEQ ID NO: 660641 - RNA, 21 nt, Artificial Sequence
  Synthetic
guguuucuucugugaagaggu

SEQ ID NO: 660642 - RNA, 22 nt, Artificial Sequence
  Synthetic
aguguuucuucugugaagaggu

SEQ ID NO: 660643 - RNA, 23 nt, Artificial Sequence
  Synthetic
uaguguuucuucugugaagaggu

SEQ ID NO: 660644 - RNA, 24 nt, Artificial Sequence
  Synthetic
guaguguuucuucugugaagaggu

SEQ ID NO: 660645 - RNA, 18 nt, Artificial Sequence
  Synthetic
uaugccaggcuaagaggu

SEQ ID NO: 660646 - RNA, 19 nt, Artificial Sequence
  Synthetic
guaugccaggcuaagaggu

SEQ ID NO: 660647 - RNA, 20 nt, Artificial Sequence
  Synthetic
aguaugccaggcuaagaggu

SEQ ID NO: 660648 - RNA, 21 nt, Artificial Sequence
  Synthetic
gaguaugccaggcuaagaggu

SEQ ID NO: 660649 - RNA, 22 nt, Artificial Sequence
  Synthetic
ugaguaugccaggcuaagaggu

SEQ ID NO: 660650 - RNA, 23 nt, Artificial Sequence
  Synthetic
cugaguaugccaggcuaagaggu

SEQ ID NO: 660651 - RNA, 24 nt, Artificial Sequence
  Synthetic
ucugaguaugccaggcuaagaggu

SEQ ID NO: 660652 - RNA, 18 nt, Artificial Sequence
  Synthetic
cuauaggagguaagaggu

SEQ ID NO: 660653 - RNA, 19 nt, Artificial Sequence
  Synthetic
gcuauaggagguaagaggu

SEQ ID NO: 660654 - RNA, 20 nt, Artificial Sequence
  Synthetic
ugcuauaggagguaagaggu

SEQ ID NO: 660655 - RNA, 21 nt, Artificial Sequence
  Synthetic
gugcuauaggagguaagaggu

SEQ ID NO: 660656 - RNA, 22 nt, Artificial Sequence
  Synthetic
agugcuauaggagguaagaggu

SEQ ID NO: 660657 - RNA, 23 nt, Artificial Sequence
  Synthetic
aagugcuauaggagguaagaggu

SEQ ID NO: 660658 - RNA, 24 nt, Artificial Sequence
  Synthetic
uaagugcuauaggagguaagaggu

SEQ ID NO: 660659 - RNA, 18 nt, Artificial Sequence
  Synthetic
gaacaaaggguaagaggu

SEQ ID NO: 660660 - RNA, 19 nt, Artificial Sequence
  Synthetic
ugaacaaaggguaagaggu

SEQ ID NO: 660661 - RNA, 20 nt, Artificial Sequence
  Synthetic
uugaacaaaggguaagaggu

SEQ ID NO: 660662 - RNA, 21 nt, Artificial Sequence
  Synthetic
cuugaacaaaggguaagaggu

SEQ ID NO: 660663 - RNA, 22 nt, Artificial Sequence
  Synthetic
acuugaacaaaggguaagaggu

SEQ ID NO: 660664 - RNA, 23 nt, Artificial Sequence
  Synthetic
aacuugaacaaaggguaagaggu

SEQ ID NO: 660665 - RNA, 24 nt, Artificial Sequence
  Synthetic
gaacuugaacaaaggguaagaggu

SEQ ID NO: 660666 - RNA, 18 nt, Artificial Sequence
  Synthetic
acaguaacuaacagaggu

SEQ ID NO: 660667 - RNA, 19 nt, Artificial Sequence
  Synthetic
gacaguaacuaacagaggu

SEQ ID NO: 660668 - RNA, 20 nt, Artificial Sequence
  Synthetic
ggacaguaacuaacagaggu

SEQ ID NO: 660669 - RNA, 21 nt, Artificial Sequence
  Synthetic
gggacaguaacuaacagaggu

SEQ ID NO: 660670 - RNA, 22 nt, Artificial Sequence
  Synthetic
agggacaguaacuaacagaggu

SEQ ID NO: 660671 - RNA, 23 nt, Artificial Sequence
  Synthetic
aagggacaguaacuaacagaggu

SEQ ID NO: 660672 - RNA, 24 nt, Artificial Sequence
  Synthetic
gaagggacaguaacuaacagaggu

SEQ ID NO: 660673 - RNA, 18 nt, Artificial Sequence
  Synthetic
ugggaaaucaucagaggu

SEQ ID NO: 660674 - RNA, 19 nt, Artificial Sequence
  Synthetic
augggaaaucaucagaggu

SEQ ID NO: 660675 - RNA, 20 nt, Artificial Sequence
  Synthetic
caugggaaaucaucagaggu

SEQ ID NO: 660676 - RNA, 21 nt, Artificial Sequence
  Synthetic
ccaugggaaaucaucagaggu

SEQ ID NO: 660677 - RNA, 22 nt, Artificial Sequence
  Synthetic
gccaugggaaaucaucagaggu

SEQ ID NO: 660678 - RNA, 23 nt, Artificial Sequence
  Synthetic
ggccaugggaaaucaucagaggu

SEQ ID NO: 660679 - RNA, 24 nt, Artificial Sequence
  Synthetic
aggccaugggaaaucaucagaggu

SEQ ID NO: 660680 - RNA, 18 nt, Artificial Sequence
  Synthetic
augaaugcugagagaggu

SEQ ID NO: 660681 - RNA, 19 nt, Artificial Sequence
  Synthetic
uaugaaugcugagagaggu

SEQ ID NO: 660682 - RNA, 20 nt, Artificial Sequence
  Synthetic
guaugaaugcugagagaggu

SEQ ID NO: 660683 - RNA, 21 nt, Artificial Sequence
  Synthetic
uguaugaaugcugagagaggu

SEQ ID NO: 660684 - RNA, 22 nt, Artificial Sequence
  Synthetic
uuguaugaaugcugagagaggu

SEQ ID NO: 660685 - RNA, 23 nt, Artificial Sequence
  Synthetic
guuguaugaaugcugagagaggu

SEQ ID NO: 660686 - RNA, 24 nt, Artificial Sequence
  Synthetic
aguuguaugaaugcugagagaggu

SEQ ID NO: 660687 - RNA, 18 nt, Artificial Sequence
  Synthetic
gacacucuacauagaggu

SEQ ID NO: 660688 - RNA, 19 nt, Artificial Sequence
  Synthetic
ugacacucuacauagaggu

SEQ ID NO: 660689 - RNA, 20 nt, Artificial Sequence
  Synthetic
uugacacucuacauagaggu

SEQ ID NO: 660690 - RNA, 21 nt, Artificial Sequence
  Synthetic
uuugacacucuacauagaggu

SEQ ID NO: 660691 - RNA, 22 nt, Artificial Sequence
  Synthetic
guuugacacucuacauagaggu

SEQ ID NO: 660692 - RNA, 23 nt, Artificial Sequence
  Synthetic
aguuugacacucuacauagaggu

SEQ ID NO: 660693 - RNA, 24 nt, Artificial Sequence
  Synthetic
uaguuugacacucuacauagaggu

SEQ ID NO: 660694 - RNA, 18 nt, Artificial Sequence
  Synthetic
ucgacagugcauagaggu

SEQ ID NO: 660695 - RNA, 19 nt, Artificial Sequence
  Synthetic
uucgacagugcauagaggu

SEQ ID NO: 660696 - RNA, 20 nt, Artificial Sequence
  Synthetic
auucgacagugcauagaggu

SEQ ID NO: 660697 - RNA, 21 nt, Artificial Sequence
  Synthetic
gauucgacagugcauagaggu

SEQ ID NO: 660698 - RNA, 22 nt, Artificial Sequence
  Synthetic
ugauucgacagugcauagaggu

SEQ ID NO: 660699 - RNA, 23 nt, Artificial Sequence
  Synthetic
uugauucgacagugcauagaggu

SEQ ID NO: 660700 - RNA, 24 nt, Artificial Sequence
  Synthetic
auugauucgacagugcauagaggu

SEQ ID NO: 660701 - RNA, 18 nt, Artificial Sequence
  Synthetic
guacagagucauagaggu

SEQ ID NO: 660702 - RNA, 19 nt, Artificial Sequence
  Synthetic
uguacagagucauagaggu

SEQ ID NO: 660703 - RNA, 20 nt, Artificial Sequence
  Synthetic
auguacagagucauagaggu

SEQ ID NO: 660704 - RNA, 21 nt, Artificial Sequence
  Synthetic
cauguacagagucauagaggu

SEQ ID NO: 660705 - RNA, 22 nt, Artificial Sequence
  Synthetic
acauguacagagucauagaggu

SEQ ID NO: 660706 - RNA, 23 nt, Artificial Sequence
  Synthetic
uacauguacagagucauagaggu

SEQ ID NO: 660707 - RNA, 24 nt, Artificial Sequence
  Synthetic
guacauguacagagucauagaggu

SEQ ID NO: 660708 - RNA, 18 nt, Artificial Sequence
  Synthetic
ugugcaagcaaacgaggu

SEQ ID NO: 660709 - RNA, 19 nt, Artificial Sequence
  Synthetic
gugugcaagcaaacgaggu

SEQ ID NO: 660710 - RNA, 20 nt, Artificial Sequence
  Synthetic
agugugcaagcaaacgaggu

SEQ ID NO: 660711 - RNA, 21 nt, Artificial Sequence
  Synthetic
gagugugcaagcaaacgaggu

SEQ ID NO: 660712 - RNA, 22 nt, Artificial Sequence
  Synthetic
ggagugugcaagcaaacgaggu

SEQ ID NO: 660713 - RNA, 23 nt, Artificial Sequence
  Synthetic
gggagugugcaagcaaacgaggu

SEQ ID NO: 660714 - RNA, 24 nt, Artificial Sequence
  Synthetic
agggagugugcaagcaaacgaggu

SEQ ID NO: 660715 - RNA, 18 nt, Artificial Sequence
  Synthetic
uguguuccagaacgaggu

SEQ ID NO: 660716 - RNA, 19 nt, Artificial Sequence
  Synthetic
cuguguuccagaacgaggu

SEQ ID NO: 660717 - RNA, 20 nt, Artificial Sequence
  Synthetic
acuguguuccagaacgaggu

SEQ ID NO: 660718 - RNA, 21 nt, Artificial Sequence
  Synthetic
aacuguguuccagaacgaggu

SEQ ID NO: 660719 - RNA, 22 nt, Artificial Sequence
  Synthetic
uaacuguguuccagaacgaggu

SEQ ID NO: 660720 - RNA, 23 nt, Artificial Sequence
  Synthetic
uuaacuguguuccagaacgaggu

SEQ ID NO: 660721 - RNA, 24 nt, Artificial Sequence
  Synthetic
auuaacuguguuccagaacgaggu

SEQ ID NO: 660722 - RNA, 18 nt, Artificial Sequence
  Synthetic
gugggcggaccacgaggu

SEQ ID NO: 660723 - RNA, 19 nt, Artificial Sequence
  Synthetic
agugggcggaccacgaggu

SEQ ID NO: 660724 - RNA, 20 nt, Artificial Sequence
  Synthetic
aagugggcggaccacgaggu

SEQ ID NO: 660725 - RNA, 21 nt, Artificial Sequence
  Synthetic
gaagugggcggaccacgaggu

SEQ ID NO: 660726 - RNA, 22 nt, Artificial Sequence
  Synthetic
cgaagugggcggaccacgaggu

SEQ ID NO: 660727 - RNA, 23 nt, Artificial Sequence
  Synthetic
ccgaagugggcggaccacgaggu

SEQ ID NO: 660728 - RNA, 24 nt, Artificial Sequence
  Synthetic
gccgaagugggcggaccacgaggu

SEQ ID NO: 660729 - RNA, 21 nt, Artificial Sequence
  Synthetic
aaggugggcagaucacgaggu

SEQ ID NO: 660730 - RNA, 22 nt, Artificial Sequence
  Synthetic
caaggugggcagaucacgaggu

SEQ ID NO: 660731 - RNA, 23 nt, Artificial Sequence
  Synthetic
ccaaggugggcagaucacgaggu

SEQ ID NO: 660732 - RNA, 24 nt, Artificial Sequence
  Synthetic
gccaaggugggcagaucacgaggu

SEQ ID NO: 660733 - RNA, 18 nt, Artificial Sequence
  Synthetic
acgggcggaucacgaggu

SEQ ID NO: 660734 - RNA, 19 nt, Artificial Sequence
  Synthetic
gacgggcggaucacgaggu

SEQ ID NO: 660735 - RNA, 20 nt, Artificial Sequence
  Synthetic
agacgggcggaucacgaggu

SEQ ID NO: 660736 - RNA, 21 nt, Artificial Sequence
  Synthetic
gagacgggcggaucacgaggu

SEQ ID NO: 660737 - RNA, 22 nt, Artificial Sequence
  Synthetic
cgagacgggcggaucacgaggu

SEQ ID NO: 660738 - RNA, 23 nt, Artificial Sequence
  Synthetic
ccgagacgggcggaucacgaggu

SEQ ID NO: 660739 - RNA, 24 nt, Artificial Sequence
  Synthetic
gccgagacgggcggaucacgaggu

SEQ ID NO: 660740 - RNA, 21 nt, Artificial Sequence
  Synthetic
aaggcggguggaucacgaggu

SEQ ID NO: 660741 - RNA, 22 nt, Artificial Sequence
  Synthetic
caaggcggguggaucacgaggu

SEQ ID NO: 660742 - RNA, 23 nt, Artificial Sequence
  Synthetic
ccaaggcggguggaucacgaggu

SEQ ID NO: 660743 - RNA, 24 nt, Artificial Sequence
  Synthetic
gccaaggcggguggaucacgaggu

SEQ ID NO: 660744 - RNA, 21 nt, Artificial Sequence
  Synthetic
gaggcggguggaucacgaggu

SEQ ID NO: 660745 - RNA, 22 nt, Artificial Sequence
  Synthetic
ugaggcggguggaucacgaggu

SEQ ID NO: 660746 - RNA, 23 nt, Artificial Sequence
  Synthetic
cugaggcggguggaucacgaggu

SEQ ID NO: 660747 - RNA, 24 nt, Artificial Sequence
  Synthetic
gcugaggcggguggaucacgaggu

SEQ ID NO: 660748 - RNA, 18 nt, Artificial Sequence
  Synthetic
guggguggaucacgaggu

SEQ ID NO: 660749 - RNA, 19 nt, Artificial Sequence
  Synthetic
gguggguggaucacgaggu

SEQ ID NO: 660750 - RNA, 20 nt, Artificial Sequence
  Synthetic
agguggguggaucacgaggu

SEQ ID NO: 660751 - RNA, 21 nt, Artificial Sequence
  Synthetic
aagguggguggaucacgaggu

SEQ ID NO: 660752 - RNA, 22 nt, Artificial Sequence
  Synthetic
caagguggguggaucacgaggu

SEQ ID NO: 660753 - RNA, 23 nt, Artificial Sequence
  Synthetic
ccaagguggguggaucacgaggu

SEQ ID NO: 660754 - RNA, 24 nt, Artificial Sequence
  Synthetic
gccaagguggguggaucacgaggu

SEQ ID NO: 660755 - RNA, 21 nt, Artificial Sequence
  Synthetic
gagguggguggaucacgaggu

SEQ ID NO: 660756 - RNA, 22 nt, Artificial Sequence
  Synthetic
cgagguggguggaucacgaggu

SEQ ID NO: 660757 - RNA, 23 nt, Artificial Sequence
  Synthetic
ccgagguggguggaucacgaggu

SEQ ID NO: 660758 - RNA, 24 nt, Artificial Sequence
  Synthetic
gccgagguggguggaucacgaggu

SEQ ID NO: 660759 - RNA, 18 nt, Artificial Sequence
  Synthetic
gggcggaacacucgaggu

SEQ ID NO: 660760 - RNA, 19 nt, Artificial Sequence
  Synthetic
ugggcggaacacucgaggu

SEQ ID NO: 660761 - RNA, 20 nt, Artificial Sequence
  Synthetic
gugggcggaacacucgaggu

SEQ ID NO: 660762 - RNA, 21 nt, Artificial Sequence
  Synthetic
agugggcggaacacucgaggu

SEQ ID NO: 660763 - RNA, 22 nt, Artificial Sequence
  Synthetic
aagugggcggaacacucgaggu

SEQ ID NO: 660764 - RNA, 23 nt, Artificial Sequence
  Synthetic
gaagugggcggaacacucgaggu

SEQ ID NO: 660765 - RNA, 24 nt, Artificial Sequence
  Synthetic
ugaagugggcggaacacucgaggu

SEQ ID NO: 660766 - RNA, 18 nt, Artificial Sequence
  Synthetic
guuugccuaagucgaggu

SEQ ID NO: 660767 - RNA, 19 nt, Artificial Sequence
  Synthetic
uguuugccuaagucgaggu

SEQ ID NO: 660768 - RNA, 20 nt, Artificial Sequence
  Synthetic
cuguuugccuaagucgaggu

SEQ ID NO: 660769 - RNA, 21 nt, Artificial Sequence
  Synthetic
ucuguuugccuaagucgaggu

SEQ ID NO: 660770 - RNA, 22 nt, Artificial Sequence
  Synthetic
uucuguuugccuaagucgaggu

SEQ ID NO: 660771 - RNA, 23 nt, Artificial Sequence
  Synthetic
guucuguuugccuaagucgaggu

SEQ ID NO: 660772 - RNA, 24 nt, Artificial Sequence
  Synthetic
gguucuguuugccuaagucgaggu

SEQ ID NO: 660773 - RNA, 18 nt, Artificial Sequence
  Synthetic
ggauggaguaaaggaggu

SEQ ID NO: 660774 - RNA, 19 nt, Artificial Sequence
  Synthetic
aggauggaguaaaggaggu

SEQ ID NO: 660775 - RNA, 20 nt, Artificial Sequence
  Synthetic
caggauggaguaaaggaggu

SEQ ID NO: 660776 - RNA, 21 nt, Artificial Sequence
  Synthetic
gcaggauggaguaaaggaggu

SEQ ID NO: 660777 - RNA, 22 nt, Artificial Sequence
  Synthetic
ugcaggauggaguaaaggaggu

SEQ ID NO: 660778 - RNA, 23 nt, Artificial Sequence
  Synthetic
gugcaggauggaguaaaggaggu

SEQ ID NO: 660779 - RNA, 24 nt, Artificial Sequence
  Synthetic
agugcaggauggaguaaaggaggu

SEQ ID NO: 660780 - RNA, 18 nt, Artificial Sequence
  Synthetic
uaguugguucaaggaggu

SEQ ID NO: 660781 - RNA, 19 nt, Artificial Sequence
  Synthetic
auaguugguucaaggaggu

SEQ ID NO: 660782 - RNA, 20 nt, Artificial Sequence
  Synthetic
aauaguugguucaaggaggu

SEQ ID NO: 660783 - RNA, 21 nt, Artificial Sequence
  Synthetic
aaauaguugguucaaggaggu

SEQ ID NO: 660784 - RNA, 22 nt, Artificial Sequence
  Synthetic
gaaauaguugguucaaggaggu

SEQ ID NO: 660785 - RNA, 23 nt, Artificial Sequence
  Synthetic
agaaauaguugguucaaggaggu

SEQ ID NO: 660786 - RNA, 24 nt, Artificial Sequence
  Synthetic
gagaaauaguugguucaaggaggu

SEQ ID NO: 660787 - RNA, 18 nt, Artificial Sequence
  Synthetic
auaagugcuauaggaggu

SEQ ID NO: 660788 - RNA, 19 nt, Artificial Sequence
  Synthetic
aauaagugcuauaggaggu

SEQ ID NO: 660789 - RNA, 20 nt, Artificial Sequence
  Synthetic
aaauaagugcuauaggaggu

SEQ ID NO: 660790 - RNA, 21 nt, Artificial Sequence
  Synthetic
aaaauaagugcuauaggaggu

SEQ ID NO: 660791 - RNA, 22 nt, Artificial Sequence
  Synthetic
aaaaauaagugcuauaggaggu

SEQ ID NO: 660792 - RNA, 23 nt, Artificial Sequence
  Synthetic
gaaaaauaagugcuauaggaggu

SEQ ID NO: 660793 - RNA, 24 nt, Artificial Sequence
  Synthetic
ugaaaaauaagugcuauaggaggu

SEQ ID NO: 660794 - RNA, 18 nt, Artificial Sequence
  Synthetic
gccucuggccuaggaggu

SEQ ID NO: 660795 - RNA, 19 nt, Artificial Sequence
  Synthetic
agccucuggccuaggaggu

SEQ ID NO: 660796 - RNA, 20 nt, Artificial Sequence
  Synthetic
uagccucuggccuaggaggu

SEQ ID NO: 660797 - RNA, 21 nt, Artificial Sequence
  Synthetic
uuagccucuggccuaggaggu

SEQ ID NO: 660798 - RNA, 22 nt, Artificial Sequence
  Synthetic
guuagccucuggccuaggaggu

SEQ ID NO: 660799 - RNA, 23 nt, Artificial Sequence
  Synthetic
uguuagccucuggccuaggaggu

SEQ ID NO: 660800 - RNA, 24 nt, Artificial Sequence
  Synthetic
auguuagccucuggccuaggaggu

SEQ ID NO: 660801 - RNA, 18 nt, Artificial Sequence
  Synthetic
gaguauagaaagggaggu

SEQ ID NO: 660802 - RNA, 19 nt, Artificial Sequence
  Synthetic
ugaguauagaaagggaggu

SEQ ID NO: 660803 - RNA, 20 nt, Artificial Sequence
  Synthetic
cugaguauagaaagggaggu

SEQ ID NO: 660804 - RNA, 21 nt, Artificial Sequence
  Synthetic
gcugaguauagaaagggaggu

SEQ ID NO: 660805 - RNA, 22 nt, Artificial Sequence
  Synthetic
agcugaguauagaaagggaggu

SEQ ID NO: 660806 - RNA, 23 nt, Artificial Sequence
  Synthetic
uagcugaguauagaaagggaggu

SEQ ID NO: 660807 - RNA, 24 nt, Artificial Sequence
  Synthetic
uuagcugaguauagaaagggaggu

SEQ ID NO: 660808 - RNA, 18 nt, Artificial Sequence
  Synthetic
auuuuauuuaggggaggu

SEQ ID NO: 660809 - RNA, 19 nt, Artificial Sequence
  Synthetic
aauuuuauuuaggggaggu

SEQ ID NO: 660810 - RNA, 20 nt, Artificial Sequence
  Synthetic
gaauuuuauuuaggggaggu

SEQ ID NO: 660811 - RNA, 21 nt, Artificial Sequence
  Synthetic
ggaauuuuauuuaggggaggu

SEQ ID NO: 660812 - RNA, 22 nt, Artificial Sequence
  Synthetic
aggaauuuuauuuaggggaggu

SEQ ID NO: 660813 - RNA, 23 nt, Artificial Sequence
  Synthetic
aaggaauuuuauuuaggggaggu

SEQ ID NO: 660814 - RNA, 24 nt, Artificial Sequence
  Synthetic
aaaggaauuuuauuuaggggaggu

SEQ ID NO: 660815 - RNA, 18 nt, Artificial Sequence
  Synthetic
gagaauauagggggaggu

SEQ ID NO: 660816 - RNA, 19 nt, Artificial Sequence
  Synthetic
ggagaauauagggggaggu

SEQ ID NO: 660817 - RNA, 20 nt, Artificial Sequence
  Synthetic
aggagaauauagggggaggu

SEQ ID NO: 660818 - RNA, 21 nt, Artificial Sequence
  Synthetic
aaggagaauauagggggaggu

SEQ ID NO: 660819 - RNA, 22 nt, Artificial Sequence
  Synthetic
gaaggagaauauagggggaggu

SEQ ID NO: 660820 - RNA, 23 nt, Artificial Sequence
  Synthetic
agaaggagaauauagggggaggu

SEQ ID NO: 660821 - RNA, 24 nt, Artificial Sequence
  Synthetic
gagaaggagaauauagggggaggu

SEQ ID NO: 660822 - RNA, 18 nt, Artificial Sequence
  Synthetic
uguuuaaacuggggaggu

SEQ ID NO: 660823 - RNA, 19 nt, Artificial Sequence
  Synthetic
cuguuuaaacuggggaggu

SEQ ID NO: 660824 - RNA, 20 nt, Artificial Sequence
  Synthetic
acuguuuaaacuggggaggu

SEQ ID NO: 660825 - RNA, 21 nt, Artificial Sequence
  Synthetic
gacuguuuaaacuggggaggu

SEQ ID NO: 660826 - RNA, 22 nt, Artificial Sequence
  Synthetic
ggacuguuuaaacuggggaggu

SEQ ID NO: 660827 - RNA, 23 nt, Artificial Sequence
  Synthetic
gggacuguuuaaacuggggaggu

SEQ ID NO: 660828 - RNA, 24 nt, Artificial Sequence
  Synthetic
cgggacuguuuaaacuggggaggu

SEQ ID NO: 660829 - RNA, 18 nt, Artificial Sequence
  Synthetic
uaaccuaguuugggaggu

SEQ ID NO: 660830 - RNA, 19 nt, Artificial Sequence
  Synthetic
cuaaccuaguuugggaggu

SEQ ID NO: 660831 - RNA, 20 nt, Artificial Sequence
  Synthetic
acuaaccuaguuugggaggu

SEQ ID NO: 660832 - RNA, 21 nt, Artificial Sequence
  Synthetic
cacuaaccuaguuugggaggu

SEQ ID NO: 660833 - RNA, 22 nt, Artificial Sequence
  Synthetic
acacuaaccuaguuugggaggu

SEQ ID NO: 660834 - RNA, 23 nt, Artificial Sequence
  Synthetic
uacacuaaccuaguuugggaggu

SEQ ID NO: 660835 - RNA, 24 nt, Artificial Sequence
  Synthetic
uuacacuaaccuaguuugggaggu

SEQ ID NO: 660836 - RNA, 18 nt, Artificial Sequence
  Synthetic
uaagacagagcuggaggu

SEQ ID NO: 660837 - RNA, 19 nt, Artificial Sequence
  Synthetic
guaagacagagcuggaggu

SEQ ID NO: 660838 - RNA, 20 nt, Artificial Sequence
  Synthetic
uguaagacagagcuggaggu

SEQ ID NO: 660839 - RNA, 21 nt, Artificial Sequence
  Synthetic
cuguaagacagagcuggaggu

SEQ ID NO: 660840 - RNA, 22 nt, Artificial Sequence
  Synthetic
ucuguaagacagagcuggaggu

SEQ ID NO: 660841 - RNA, 23 nt, Artificial Sequence
  Synthetic
cucuguaagacagagcuggaggu

SEQ ID NO: 660842 - RNA, 24 nt, Artificial Sequence
  Synthetic
gcucuguaagacagagcuggaggu

SEQ ID NO: 660843 - RNA, 18 nt, Artificial Sequence
  Synthetic
augagcugggcuggaggu

SEQ ID NO: 660844 - RNA, 19 nt, Artificial Sequence
  Synthetic
aaugagcugggcuggaggu

SEQ ID NO: 660845 - RNA, 20 nt, Artificial Sequence
  Synthetic
gaaugagcugggcuggaggu

SEQ ID NO: 660846 - RNA, 21 nt, Artificial Sequence
  Synthetic
agaaugagcugggcuggaggu

SEQ ID NO: 660847 - RNA, 22 nt, Artificial Sequence
  Synthetic
aagaaugagcugggcuggaggu

SEQ ID NO: 660848 - RNA, 23 nt, Artificial Sequence
  Synthetic
gaagaaugagcugggcuggaggu

SEQ ID NO: 660849 - RNA, 24 nt, Artificial Sequence
  Synthetic
agaagaaugagcugggcuggaggu

SEQ ID NO: 660850 - RNA, 18 nt, Artificial Sequence
  Synthetic
gugaaugagaguggaggu

SEQ ID NO: 660851 - RNA, 19 nt, Artificial Sequence
  Synthetic
ugugaaugagaguggaggu

SEQ ID NO: 660852 - RNA, 20 nt, Artificial Sequence
  Synthetic
gugugaaugagaguggaggu

SEQ ID NO: 660853 - RNA, 21 nt, Artificial Sequence
  Synthetic
agugugaaugagaguggaggu

SEQ ID NO: 660854 - RNA, 22 nt, Artificial Sequence
  Synthetic
gagugugaaugagaguggaggu

SEQ ID NO: 660855 - RNA, 23 nt, Artificial Sequence
  Synthetic
agagugugaaugagaguggaggu

SEQ ID NO: 660856 - RNA, 24 nt, Artificial Sequence
  Synthetic
aagagugugaaugagaguggaggu

SEQ ID NO: 660857 - RNA, 18 nt, Artificial Sequence
  Synthetic
aaaggguaguguggaggu

SEQ ID NO: 660858 - RNA, 19 nt, Artificial Sequence
  Synthetic
caaaggguaguguggaggu

SEQ ID NO: 660859 - RNA, 20 nt, Artificial Sequence
  Synthetic
acaaaggguaguguggaggu

SEQ ID NO: 660860 - RNA, 21 nt, Artificial Sequence
  Synthetic
uacaaaggguaguguggaggu

SEQ ID NO: 660861 - RNA, 22 nt, Artificial Sequence
  Synthetic
cuacaaaggguaguguggaggu

SEQ ID NO: 660862 - RNA, 23 nt, Artificial Sequence
  Synthetic
gcuacaaaggguaguguggaggu

SEQ ID NO: 660863 - RNA, 24 nt, Artificial Sequence
  Synthetic
ggcuacaaaggguaguguggaggu

SEQ ID NO: 660864 - RNA, 18 nt, Artificial Sequence
  Synthetic
ugacuugucacaugaggu

SEQ ID NO: 660865 - RNA, 19 nt, Artificial Sequence
  Synthetic
gugacuugucacaugaggu

SEQ ID NO: 660866 - RNA, 20 nt, Artificial Sequence
  Synthetic
ugugacuugucacaugaggu

SEQ ID NO: 660867 - RNA, 21 nt, Artificial Sequence
  Synthetic
cugugacuugucacaugaggu

SEQ ID NO: 660868 - RNA, 22 nt, Artificial Sequence
  Synthetic
acugugacuugucacaugaggu

SEQ ID NO: 660869 - RNA, 23 nt, Artificial Sequence
  Synthetic
cacugugacuugucacaugaggu

SEQ ID NO: 660870 - RNA, 24 nt, Artificial Sequence
  Synthetic
ucacugugacuugucacaugaggu

SEQ ID NO: 660871 - RNA, 18 nt, Artificial Sequence
  Synthetic
gugagcagaucaugaggu

SEQ ID NO: 660872 - RNA, 19 nt, Artificial Sequence
  Synthetic
ggugagcagaucaugaggu

SEQ ID NO: 660873 - RNA, 20 nt, Artificial Sequence
  Synthetic
aggugagcagaucaugaggu

SEQ ID NO: 660874 - RNA, 21 nt, Artificial Sequence
  Synthetic
gaggugagcagaucaugaggu

SEQ ID NO: 660875 - RNA, 22 nt, Artificial Sequence
  Synthetic
ugaggugagcagaucaugaggu

SEQ ID NO: 660876 - RNA, 23 nt, Artificial Sequence
  Synthetic
cugaggugagcagaucaugaggu

SEQ ID NO: 660877 - RNA, 24 nt, Artificial Sequence
  Synthetic
gcugaggugagcagaucaugaggu

SEQ ID NO: 660878 - RNA, 18 nt, Artificial Sequence
  Synthetic
gcaggcagaucaugaggu

SEQ ID NO: 660879 - RNA, 19 nt, Artificial Sequence
  Synthetic
ggcaggcagaucaugaggu

SEQ ID NO: 660880 - RNA, 20 nt, Artificial Sequence
  Synthetic
aggcaggcagaucaugaggu

SEQ ID NO: 660881 - RNA, 21 nt, Artificial Sequence
  Synthetic
gaggcaggcagaucaugaggu

SEQ ID NO: 660882 - RNA, 22 nt, Artificial Sequence
  Synthetic
ugaggcaggcagaucaugaggu

SEQ ID NO: 660883 - RNA, 23 nt, Artificial Sequence
  Synthetic
cugaggcaggcagaucaugaggu

SEQ ID NO: 660884 - RNA, 24 nt, Artificial Sequence
  Synthetic
gcugaggcaggcagaucaugaggu

SEQ ID NO: 660885 - RNA, 18 nt, Artificial Sequence
  Synthetic
gcgggcagaucaugaggu

SEQ ID NO: 660886 - RNA, 19 nt, Artificial Sequence
  Synthetic
ggcgggcagaucaugaggu

SEQ ID NO: 660887 - RNA, 20 nt, Artificial Sequence
  Synthetic
aggcgggcagaucaugaggu

SEQ ID NO: 660888 - RNA, 21 nt, Artificial Sequence
  Synthetic
gaggcgggcagaucaugaggu

SEQ ID NO: 660889 - RNA, 22 nt, Artificial Sequence
  Synthetic
cgaggcgggcagaucaugaggu

SEQ ID NO: 660890 - RNA, 23 nt, Artificial Sequence
  Synthetic
ccgaggcgggcagaucaugaggu

SEQ ID NO: 660891 - RNA, 24 nt, Artificial Sequence
  Synthetic
gccgaggcgggcagaucaugaggu

SEQ ID NO: 660892 - RNA, 18 nt, Artificial Sequence
  Synthetic
gcggguggaucaugaggu

SEQ ID NO: 660893 - RNA, 19 nt, Artificial Sequence
  Synthetic
agcggguggaucaugaggu

SEQ ID NO: 660894 - RNA, 20 nt, Artificial Sequence
  Synthetic
aagcggguggaucaugaggu

SEQ ID NO: 660895 - RNA, 21 nt, Artificial Sequence
  Synthetic
aaagcggguggaucaugaggu

SEQ ID NO: 660896 - RNA, 22 nt, Artificial Sequence
  Synthetic
caaagcggguggaucaugaggu

SEQ ID NO: 660897 - RNA, 23 nt, Artificial Sequence
  Synthetic
ccaaagcggguggaucaugaggu

SEQ ID NO: 660898 - RNA, 24 nt, Artificial Sequence
  Synthetic
gccaaagcggguggaucaugaggu

SEQ ID NO: 660899 - RNA, 18 nt, Artificial Sequence
  Synthetic
guggguggaucaugaggu

SEQ ID NO: 660900 - RNA, 19 nt, Artificial Sequence
  Synthetic
gguggguggaucaugaggu

SEQ ID NO: 660901 - RNA, 20 nt, Artificial Sequence
  Synthetic
agguggguggaucaugaggu

SEQ ID NO: 660902 - RNA, 21 nt, Artificial Sequence
  Synthetic
aagguggguggaucaugaggu

SEQ ID NO: 660903 - RNA, 22 nt, Artificial Sequence
  Synthetic
caagguggguggaucaugaggu

SEQ ID NO: 660904 - RNA, 23 nt, Artificial Sequence
  Synthetic
ccaagguggguggaucaugaggu

SEQ ID NO: 660905 - RNA, 24 nt, Artificial Sequence
  Synthetic
gccaagguggguggaucaugaggu

SEQ ID NO: 660906 - RNA, 18 nt, Artificial Sequence
  Synthetic
ccacgugaaguaugaggu

SEQ ID NO: 660907 - RNA, 19 nt, Artificial Sequence
  Synthetic
uccacgugaaguaugaggu

SEQ ID NO: 660908 - RNA, 20 nt, Artificial Sequence
  Synthetic
auccacgugaaguaugaggu

SEQ ID NO: 660909 - RNA, 21 nt, Artificial Sequence
  Synthetic
gauccacgugaaguaugaggu

SEQ ID NO: 660910 - RNA, 22 nt, Artificial Sequence
  Synthetic
agauccacgugaaguaugaggu

SEQ ID NO: 660911 - RNA, 23 nt, Artificial Sequence
  Synthetic
gagauccacgugaaguaugaggu

SEQ ID NO: 660912 - RNA, 24 nt, Artificial Sequence
  Synthetic
ugagauccacgugaaguaugaggu

SEQ ID NO: 660913 - RNA, 18 nt, Artificial Sequence
  Synthetic
auguuaagccacugaggu

SEQ ID NO: 660914 - RNA, 19 nt, Artificial Sequence
  Synthetic
uauguuaagccacugaggu

SEQ ID NO: 660915 - RNA, 20 nt, Artificial Sequence
  Synthetic
uuauguuaagccacugaggu

SEQ ID NO: 660916 - RNA, 21 nt, Artificial Sequence
  Synthetic
auuauguuaagccacugaggu

SEQ ID NO: 660917 - RNA, 22 nt, Artificial Sequence
  Synthetic
uauuauguuaagccacugaggu

SEQ ID NO: 660918 - RNA, 23 nt, Artificial Sequence
  Synthetic
cuauuauguuaagccacugaggu

SEQ ID NO: 660919 - RNA, 24 nt, Artificial Sequence
  Synthetic
ucuauuauguuaagccacugaggu

SEQ ID NO: 660920 - RNA, 18 nt, Artificial Sequence
  Synthetic
auugggugauacugaggu

SEQ ID NO: 660921 - RNA, 19 nt, Artificial Sequence
  Synthetic
uauugggugauacugaggu

SEQ ID NO: 660922 - RNA, 20 nt, Artificial Sequence
  Synthetic
uuauugggugauacugaggu

SEQ ID NO: 660923 - RNA, 21 nt, Artificial Sequence
  Synthetic
uuuauugggugauacugaggu

SEQ ID NO: 660924 - RNA, 22 nt, Artificial Sequence
  Synthetic
auuuauugggugauacugaggu

SEQ ID NO: 660925 - RNA, 23 nt, Artificial Sequence
  Synthetic
uauuuauugggugauacugaggu

SEQ ID NO: 660926 - RNA, 24 nt, Artificial Sequence
  Synthetic
auauuuauugggugauacugaggu

SEQ ID NO: 660927 - RNA, 18 nt, Artificial Sequence
  Synthetic
ugguagaacaccugaggu

SEQ ID NO: 660928 - RNA, 19 nt, Artificial Sequence
  Synthetic
gugguagaacaccugaggu

SEQ ID NO: 660929 - RNA, 20 nt, Artificial Sequence
  Synthetic
ggugguagaacaccugaggu

SEQ ID NO: 660930 - RNA, 21 nt, Artificial Sequence
  Synthetic
aggugguagaacaccugaggu

SEQ ID NO: 660931 - RNA, 22 nt, Artificial Sequence
  Synthetic
gaggugguagaacaccugaggu

SEQ ID NO: 660932 - RNA, 23 nt, Artificial Sequence
  Synthetic
ugaggugguagaacaccugaggu

SEQ ID NO: 660933 - RNA, 24 nt, Artificial Sequence
  Synthetic
cugaggugguagaacaccugaggu

SEQ ID NO: 660934 - RNA, 18 nt, Artificial Sequence
  Synthetic
aggcagaccaccugaggu

SEQ ID NO: 660935 - RNA, 19 nt, Artificial Sequence
  Synthetic
caggcagaccaccugaggu

SEQ ID NO: 660936 - RNA, 20 nt, Artificial Sequence
  Synthetic
acaggcagaccaccugaggu

SEQ ID NO: 660937 - RNA, 21 nt, Artificial Sequence
  Synthetic
gacaggcagaccaccugaggu

SEQ ID NO: 660938 - RNA, 22 nt, Artificial Sequence
  Synthetic
agacaggcagaccaccugaggu

SEQ ID NO: 660939 - RNA, 23 nt, Artificial Sequence
  Synthetic
gagacaggcagaccaccugaggu

SEQ ID NO: 660940 - RNA, 24 nt, Artificial Sequence
  Synthetic
ugagacaggcagaccaccugaggu

SEQ ID NO: 660941 - RNA, 18 nt, Artificial Sequence
  Synthetic
gggcgcaucaccugaggu

SEQ ID NO: 660942 - RNA, 19 nt, Artificial Sequence
  Synthetic
cgggcgcaucaccugaggu

SEQ ID NO: 660943 - RNA, 20 nt, Artificial Sequence
  Synthetic
gcgggcgcaucaccugaggu

SEQ ID NO: 660944 - RNA, 21 nt, Artificial Sequence
  Synthetic
ggcgggcgcaucaccugaggu

SEQ ID NO: 660945 - RNA, 22 nt, Artificial Sequence
  Synthetic
gggcgggcgcaucaccugaggu

SEQ ID NO: 660946 - RNA, 23 nt, Artificial Sequence
  Synthetic
ggggcgggcgcaucaccugaggu

SEQ ID NO: 660947 - RNA, 24 nt, Artificial Sequence
  Synthetic
cggggcgggcgcaucaccugaggu

SEQ ID NO: 660948 - RNA, 18 nt, Artificial Sequence
  Synthetic
gggcagaucaccugaggu

SEQ ID NO: 660949 - RNA, 19 nt, Artificial Sequence
  Synthetic
agggcagaucaccugaggu

SEQ ID NO: 660950 - RNA, 20 nt, Artificial Sequence
  Synthetic
gagggcagaucaccugaggu

SEQ ID NO: 660951 - RNA, 21 nt, Artificial Sequence
  Synthetic
ggagggcagaucaccugaggu

SEQ ID NO: 660952 - RNA, 22 nt, Artificial Sequence
  Synthetic
uggagggcagaucaccugaggu

SEQ ID NO: 660953 - RNA, 23 nt, Artificial Sequence
  Synthetic
guggagggcagaucaccugaggu

SEQ ID NO: 660954 - RNA, 24 nt, Artificial Sequence
  Synthetic
cguggagggcagaucaccugaggu

SEQ ID NO: 660955 - RNA, 21 nt, Artificial Sequence
  Synthetic
ggugggcagaucaccugaggu

SEQ ID NO: 660956 - RNA, 22 nt, Artificial Sequence
  Synthetic
aggugggcagaucaccugaggu

SEQ ID NO: 660957 - RNA, 23 nt, Artificial Sequence
  Synthetic
gaggugggcagaucaccugaggu

SEQ ID NO: 660958 - RNA, 24 nt, Artificial Sequence
  Synthetic
cgaggugggcagaucaccugaggu

SEQ ID NO: 660959 - RNA, 24 nt, Artificial Sequence
  Synthetic
ugaggugggcagaucaccugaggu

SEQ ID NO: 660960 - RNA, 18 nt, Artificial Sequence
  Synthetic
gaacggaucaccugaggu

SEQ ID NO: 660961 - RNA, 19 nt, Artificial Sequence
  Synthetic
ugaacggaucaccugaggu

SEQ ID NO: 660962 - RNA, 20 nt, Artificial Sequence
  Synthetic
gugaacggaucaccugaggu

SEQ ID NO: 660963 - RNA, 21 nt, Artificial Sequence
  Synthetic
ggugaacggaucaccugaggu

SEQ ID NO: 660964 - RNA, 22 nt, Artificial Sequence
  Synthetic
aggugaacggaucaccugaggu

SEQ ID NO: 660965 - RNA, 23 nt, Artificial Sequence
  Synthetic
aaggugaacggaucaccugaggu

SEQ ID NO: 660966 - RNA, 24 nt, Artificial Sequence
  Synthetic
caaggugaacggaucaccugaggu

SEQ ID NO: 660967 - RNA, 21 nt, Artificial Sequence
  Synthetic
ggugggcggaucaccugaggu

SEQ ID NO: 660968 - RNA, 22 nt, Artificial Sequence
  Synthetic
aggugggcggaucaccugaggu

SEQ ID NO: 660969 - RNA, 23 nt, Artificial Sequence
  Synthetic
aaggugggcggaucaccugaggu

SEQ ID NO: 660970 - RNA, 24 nt, Artificial Sequence
  Synthetic
caaggugggcggaucaccugaggu

SEQ ID NO: 660971 - RNA, 18 nt, Artificial Sequence
  Synthetic
gaguggaucaccugaggu

SEQ ID NO: 660972 - RNA, 19 nt, Artificial Sequence
  Synthetic
ugaguggaucaccugaggu

SEQ ID NO: 660973 - RNA, 20 nt, Artificial Sequence
  Synthetic
gugaguggaucaccugaggu

SEQ ID NO: 660974 - RNA, 21 nt, Artificial Sequence
  Synthetic
ggugaguggaucaccugaggu

SEQ ID NO: 660975 - RNA, 22 nt, Artificial Sequence
  Synthetic
aggugaguggaucaccugaggu

SEQ ID NO: 660976 - RNA, 23 nt, Artificial Sequence
  Synthetic
aaggugaguggaucaccugaggu

SEQ ID NO: 660977 - RNA, 24 nt, Artificial Sequence
  Synthetic
caaggugaguggaucaccugaggu

SEQ ID NO: 660978 - RNA, 21 nt, Artificial Sequence
  Synthetic
ggcagguggaucaccugaggu

SEQ ID NO: 660979 - RNA, 22 nt, Artificial Sequence
  Synthetic
aggcagguggaucaccugaggu

SEQ ID NO: 660980 - RNA, 23 nt, Artificial Sequence
  Synthetic
gaggcagguggaucaccugaggu

SEQ ID NO: 660981 - RNA, 24 nt, Artificial Sequence
  Synthetic
ugaggcagguggaucaccugaggu

SEQ ID NO: 660982 - RNA, 18 nt, Artificial Sequence
  Synthetic
ggguggaucaccugaggu

SEQ ID NO: 660983 - RNA, 19 nt, Artificial Sequence
  Synthetic
aggguggaucaccugaggu

SEQ ID NO: 660984 - RNA, 20 nt, Artificial Sequence
  Synthetic
gaggguggaucaccugaggu

SEQ ID NO: 660985 - RNA, 21 nt, Artificial Sequence
  Synthetic
ggaggguggaucaccugaggu

SEQ ID NO: 660986 - RNA, 22 nt, Artificial Sequence
  Synthetic
aggaggguggaucaccugaggu

SEQ ID NO: 660987 - RNA, 23 nt, Artificial Sequence
  Synthetic
gaggaggguggaucaccugaggu

SEQ ID NO: 660988 - RNA, 24 nt, Artificial Sequence
  Synthetic
ugaggaggguggaucaccugaggu

SEQ ID NO: 660989 - RNA, 19 nt, Artificial Sequence
  Synthetic
cggguggaucaccugaggu

SEQ ID NO: 660990 - RNA, 20 nt, Artificial Sequence
  Synthetic
gcggguggaucaccugaggu

SEQ ID NO: 660991 - RNA, 21 nt, Artificial Sequence
  Synthetic
ggcggguggaucaccugaggu

SEQ ID NO: 660992 - RNA, 22 nt, Artificial Sequence
  Synthetic
aggcggguggaucaccugaggu

SEQ ID NO: 660993 - RNA, 23 nt, Artificial Sequence
  Synthetic
gaggcggguggaucaccugaggu

SEQ ID NO: 660994 - RNA, 24 nt, Artificial Sequence
  Synthetic
cgaggcggguggaucaccugaggu

SEQ ID NO: 660995 - RNA, 24 nt, Artificial Sequence
  Synthetic
ugagguggguggaucaccugaggu

SEQ ID NO: 660996 - RNA, 18 nt, Artificial Sequence
  Synthetic
agccugaucaccugaggu

SEQ ID NO: 660997 - RNA, 19 nt, Artificial Sequence
  Synthetic
cagccugaucaccugaggu

SEQ ID NO: 660998 - RNA, 20 nt, Artificial Sequence
  Synthetic
gcagccugaucaccugaggu

SEQ ID NO: 660999 - RNA, 21 nt, Artificial Sequence
  Synthetic
ggcagccugaucaccugaggu

SEQ ID NO: 661000 - RNA, 22 nt, Artificial Sequence
  Synthetic
aggcagccugaucaccugaggu

SEQ ID NO: 661001 - RNA, 23 nt, Artificial Sequence
  Synthetic
gaggcagccugaucaccugaggu

SEQ ID NO: 661002 - RNA, 24 nt, Artificial Sequence
  Synthetic
cgaggcagccugaucaccugaggu

SEQ ID NO: 661003 - RNA, 18 nt, Artificial Sequence
  Synthetic
uacccaggaagcugaggu

SEQ ID NO: 661004 - RNA, 19 nt, Artificial Sequence
  Synthetic
cuacccaggaagcugaggu

SEQ ID NO: 661005 - RNA, 20 nt, Artificial Sequence
  Synthetic
gcuacccaggaagcugaggu

SEQ ID NO: 661006 - RNA, 21 nt, Artificial Sequence
  Synthetic
agcuacccaggaagcugaggu

SEQ ID NO: 661007 - RNA, 22 nt, Artificial Sequence
  Synthetic
cagcuacccaggaagcugaggu

SEQ ID NO: 661008 - RNA, 23 nt, Artificial Sequence
  Synthetic
ccagcuacccaggaagcugaggu

SEQ ID NO: 661009 - RNA, 24 nt, Artificial Sequence
  Synthetic
cccagcuacccaggaagcugaggu

SEQ ID NO: 661010 - RNA, 18 nt, Artificial Sequence
  Synthetic
uucucagaaggcugaggu

SEQ ID NO: 661011 - RNA, 19 nt, Artificial Sequence
  Synthetic
cuucucagaaggcugaggu

SEQ ID NO: 661012 - RNA, 20 nt, Artificial Sequence
  Synthetic
ucuucucagaaggcugaggu

SEQ ID NO: 661013 - RNA, 21 nt, Artificial Sequence
  Synthetic
aucuucucagaaggcugaggu

SEQ ID NO: 661014 - RNA, 22 nt, Artificial Sequence
  Synthetic
caucuucucagaaggcugaggu

SEQ ID NO: 661015 - RNA, 23 nt, Artificial Sequence
  Synthetic
ccaucuucucagaaggcugaggu

SEQ ID NO: 661016 - RNA, 24 nt, Artificial Sequence
  Synthetic
cccaucuucucagaaggcugaggu

SEQ ID NO: 661017 - RNA, 21 nt, Artificial Sequence
  Synthetic
agcuacucaggaggcugaggu

SEQ ID NO: 661018 - RNA, 22 nt, Artificial Sequence
  Synthetic
cagcuacucaggaggcugaggu

SEQ ID NO: 661019 - RNA, 23 nt, Artificial Sequence
  Synthetic
ccagcuacucaggaggcugaggu

SEQ ID NO: 661020 - RNA, 24 nt, Artificial Sequence
  Synthetic
cccagcuacucaggaggcugaggu

SEQ ID NO: 661021 - RNA, 18 nt, Artificial Sequence
  Synthetic
uacuuaggaggcugaggu

SEQ ID NO: 661022 - RNA, 19 nt, Artificial Sequence
  Synthetic
cuacuuaggaggcugaggu

SEQ ID NO: 661023 - RNA, 20 nt, Artificial Sequence
  Synthetic
gcuacuuaggaggcugaggu

SEQ ID NO: 661024 - RNA, 21 nt, Artificial Sequence
  Synthetic
agcuacuuaggaggcugaggu

SEQ ID NO: 661025 - RNA, 22 nt, Artificial Sequence
  Synthetic
cagcuacuuaggaggcugaggu

SEQ ID NO: 661026 - RNA, 23 nt, Artificial Sequence
  Synthetic
ccagcuacuuaggaggcugaggu

SEQ ID NO: 661027 - RNA, 24 nt, Artificial Sequence
  Synthetic
cccagcuacuuaggaggcugaggu

SEQ ID NO: 661028 - RNA, 18 nt, Artificial Sequence
  Synthetic
acuuuaggaggcugaggu

SEQ ID NO: 661029 - RNA, 19 nt, Artificial Sequence
  Synthetic
cacuuuaggaggcugaggu

SEQ ID NO: 661030 - RNA, 20 nt, Artificial Sequence
  Synthetic
gcacuuuaggaggcugaggu

SEQ ID NO: 661031 - RNA, 21 nt, Artificial Sequence
  Synthetic
agcacuuuaggaggcugaggu

SEQ ID NO: 661032 - RNA, 22 nt, Artificial Sequence
  Synthetic
cagcacuuuaggaggcugaggu

SEQ ID NO: 661033 - RNA, 23 nt, Artificial Sequence
  Synthetic
ccagcacuuuaggaggcugaggu

SEQ ID NO: 661034 - RNA, 24 nt, Artificial Sequence
  Synthetic
cccagcacuuuaggaggcugaggu

SEQ ID NO: 661035 - RNA, 18 nt, Artificial Sequence
  Synthetic
uacccgggaggcugaggu

SEQ ID NO: 661036 - RNA, 19 nt, Artificial Sequence
  Synthetic
cuacccgggaggcugaggu

SEQ ID NO: 661037 - RNA, 20 nt, Artificial Sequence
  Synthetic
gcuacccgggaggcugaggu

SEQ ID NO: 661038 - RNA, 21 nt, Artificial Sequence
  Synthetic
agcuacccgggaggcugaggu

SEQ ID NO: 661039 - RNA, 22 nt, Artificial Sequence
  Synthetic
cagcuacccgggaggcugaggu

SEQ ID NO: 661040 - RNA, 23 nt, Artificial Sequence
  Synthetic
ucagcuacccgggaggcugaggu

SEQ ID NO: 661041 - RNA, 24 nt, Artificial Sequence
  Synthetic
cucagcuacccgggaggcugaggu

SEQ ID NO: 661042 - RNA, 21 nt, Artificial Sequence
  Synthetic
agcuacucgggaggcugaggu

SEQ ID NO: 661043 - RNA, 22 nt, Artificial Sequence
  Synthetic
cagcuacucgggaggcugaggu

SEQ ID NO: 661044 - RNA, 23 nt, Artificial Sequence
  Synthetic
ucagcuacucgggaggcugaggu

SEQ ID NO: 661045 - RNA, 24 nt, Artificial Sequence
  Synthetic
cucagcuacucgggaggcugaggu

SEQ ID NO: 661046 - RNA, 18 nt, Artificial Sequence
  Synthetic
cacuugggaggcugaggu

SEQ ID NO: 661047 - RNA, 19 nt, Artificial Sequence
  Synthetic
ccacuugggaggcugaggu

SEQ ID NO: 661048 - RNA, 20 nt, Artificial Sequence
  Synthetic
gccacuugggaggcugaggu

SEQ ID NO: 661049 - RNA, 21 nt, Artificial Sequence
  Synthetic
agccacuugggaggcugaggu

SEQ ID NO: 661050 - RNA, 22 nt, Artificial Sequence
  Synthetic
cagccacuugggaggcugaggu

SEQ ID NO: 661051 - RNA, 23 nt, Artificial Sequence
  Synthetic
ccagccacuugggaggcugaggu

SEQ ID NO: 661052 - RNA, 24 nt, Artificial Sequence
  Synthetic
cccagccacuugggaggcugaggu

SEQ ID NO: 661053 - RNA, 21 nt, Artificial Sequence
  Synthetic
ugcuacuugggaggcugaggu

SEQ ID NO: 661054 - RNA, 22 nt, Artificial Sequence
  Synthetic
cugcuacuugggaggcugaggu

SEQ ID NO: 661055 - RNA, 23 nt, Artificial Sequence
  Synthetic
ucugcuacuugggaggcugaggu

SEQ ID NO: 661056 - RNA, 24 nt, Artificial Sequence
  Synthetic
cucugcuacuugggaggcugaggu

SEQ ID NO: 661057 - RNA, 18 nt, Artificial Sequence
  Synthetic
auggcgugaugcugaggu

SEQ ID NO: 661058 - RNA, 19 nt, Artificial Sequence
  Synthetic
uauggcgugaugcugaggu

SEQ ID NO: 661059 - RNA, 20 nt, Artificial Sequence
  Synthetic
auauggcgugaugcugaggu

SEQ ID NO: 661060 - RNA, 21 nt, Artificial Sequence
  Synthetic
uauauggcgugaugcugaggu

SEQ ID NO: 661061 - RNA, 22 nt, Artificial Sequence
  Synthetic
auauauggcgugaugcugaggu

SEQ ID NO: 661062 - RNA, 23 nt, Artificial Sequence
  Synthetic
gauauauggcgugaugcugaggu

SEQ ID NO: 661063 - RNA, 24 nt, Artificial Sequence
  Synthetic
ggauauauggcgugaugcugaggu

SEQ ID NO: 661064 - RNA, 18 nt, Artificial Sequence
  Synthetic
acugcgugaugcugaggu

SEQ ID NO: 661065 - RNA, 19 nt, Artificial Sequence
  Synthetic
uacugcgugaugcugaggu

SEQ ID NO: 661066 - RNA, 20 nt, Artificial Sequence
  Synthetic
auacugcgugaugcugaggu

SEQ ID NO: 661067 - RNA, 21 nt, Artificial Sequence
  Synthetic
uauacugcgugaugcugaggu

SEQ ID NO: 661068 - RNA, 22 nt, Artificial Sequence
  Synthetic
guauacugcgugaugcugaggu

SEQ ID NO: 661069 - RNA, 23 nt, Artificial Sequence
  Synthetic
gguauacugcgugaugcugaggu

SEQ ID NO: 661070 - RNA, 24 nt, Artificial Sequence
  Synthetic
ggguauacugcgugaugcugaggu

SEQ ID NO: 661071 - RNA, 18 nt, Artificial Sequence
  Synthetic
ucugauguaugcugaggu

SEQ ID NO: 661072 - RNA, 19 nt, Artificial Sequence
  Synthetic
uucugauguaugcugaggu

SEQ ID NO: 661073 - RNA, 20 nt, Artificial Sequence
  Synthetic
auucugauguaugcugaggu

SEQ ID NO: 661074 - RNA, 21 nt, Artificial Sequence
  Synthetic
gauucugauguaugcugaggu

SEQ ID NO: 661075 - RNA, 22 nt, Artificial Sequence
  Synthetic
ugauucugauguaugcugaggu

SEQ ID NO: 661076 - RNA, 23 nt, Artificial Sequence
  Synthetic
gugauucugauguaugcugaggu

SEQ ID NO: 661077 - RNA, 24 nt, Artificial Sequence
  Synthetic
ggugauucugauguaugcugaggu

SEQ ID NO: 661078 - RNA, 18 nt, Artificial Sequence
  Synthetic
ggauggaucaucugaggu

SEQ ID NO: 661079 - RNA, 19 nt, Artificial Sequence
  Synthetic
uggauggaucaucugaggu

SEQ ID NO: 661080 - RNA, 20 nt, Artificial Sequence
  Synthetic
guggauggaucaucugaggu

SEQ ID NO: 661081 - RNA, 21 nt, Artificial Sequence
  Synthetic
gguggauggaucaucugaggu

SEQ ID NO: 661082 - RNA, 22 nt, Artificial Sequence
  Synthetic
agguggauggaucaucugaggu

SEQ ID NO: 661083 - RNA, 23 nt, Artificial Sequence
  Synthetic
gagguggauggaucaucugaggu

SEQ ID NO: 661084 - RNA, 24 nt, Artificial Sequence
  Synthetic
ugagguggauggaucaucugaggu

SEQ ID NO: 661085 - RNA, 18 nt, Artificial Sequence
  Synthetic
aaaugauggcucugaggu

SEQ ID NO: 661086 - RNA, 19 nt, Artificial Sequence
  Synthetic
caaaugauggcucugaggu

SEQ ID NO: 661087 - RNA, 20 nt, Artificial Sequence
  Synthetic
ucaaaugauggcucugaggu

SEQ ID NO: 661088 - RNA, 21 nt, Artificial Sequence
  Synthetic
uucaaaugauggcucugaggu

SEQ ID NO: 661089 - RNA, 22 nt, Artificial Sequence
  Synthetic
auucaaaugauggcucugaggu

SEQ ID NO: 661090 - RNA, 23 nt, Artificial Sequence
  Synthetic
aauucaaaugauggcucugaggu

SEQ ID NO: 661091 - RNA, 24 nt, Artificial Sequence
  Synthetic
aaauucaaaugauggcucugaggu

SEQ ID NO: 661092 - RNA, 18 nt, Artificial Sequence
  Synthetic
aauaauaaauucugaggu

SEQ ID NO: 661093 - RNA, 19 nt, Artificial Sequence
  Synthetic
aaauaauaaauucugaggu

SEQ ID NO: 661094 - RNA, 20 nt, Artificial Sequence
  Synthetic
gaaauaauaaauucugaggu

SEQ ID NO: 661095 - RNA, 21 nt, Artificial Sequence
  Synthetic
ggaaauaauaaauucugaggu

SEQ ID NO: 661096 - RNA, 22 nt, Artificial Sequence
  Synthetic
aggaaauaauaaauucugaggu

SEQ ID NO: 661097 - RNA, 23 nt, Artificial Sequence
  Synthetic
aaggaaauaauaaauucugaggu

SEQ ID NO: 661098 - RNA, 24 nt, Artificial Sequence
  Synthetic
caaggaaauaauaaauucugaggu

SEQ ID NO: 661099 - RNA, 18 nt, Artificial Sequence
  Synthetic
ggagcuugggagugaggu

SEQ ID NO: 661100 - RNA, 19 nt, Artificial Sequence
  Synthetic
gggagcuugggagugaggu

SEQ ID NO: 661101 - RNA, 20 nt, Artificial Sequence
  Synthetic
ggggagcuugggagugaggu

SEQ ID NO: 661102 - RNA, 21 nt, Artificial Sequence
  Synthetic
uggggagcuugggagugaggu

SEQ ID NO: 661103 - RNA, 22 nt, Artificial Sequence
  Synthetic
guggggagcuugggagugaggu

SEQ ID NO: 661104 - RNA, 23 nt, Artificial Sequence
  Synthetic
aguggggagcuugggagugaggu

SEQ ID NO: 661105 - RNA, 24 nt, Artificial Sequence
  Synthetic
aaguggggagcuugggagugaggu

SEQ ID NO: 661106 - RNA, 18 nt, Artificial Sequence
  Synthetic
acaacauccuagugaggu

SEQ ID NO: 661107 - RNA, 19 nt, Artificial Sequence
  Synthetic
cacaacauccuagugaggu

SEQ ID NO: 661108 - RNA, 20 nt, Artificial Sequence
  Synthetic
ccacaacauccuagugaggu

SEQ ID NO: 661109 - RNA, 21 nt, Artificial Sequence
  Synthetic
uccacaacauccuagugaggu

SEQ ID NO: 661110 - RNA, 22 nt, Artificial Sequence
  Synthetic
auccacaacauccuagugaggu

SEQ ID NO: 661111 - RNA, 23 nt, Artificial Sequence
  Synthetic
aauccacaacauccuagugaggu

SEQ ID NO: 661112 - RNA, 24 nt, Artificial Sequence
  Synthetic
aaauccacaacauccuagugaggu

SEQ ID NO: 661113 - RNA, 18 nt, Artificial Sequence
  Synthetic
guccagcaggggugaggu

SEQ ID NO: 661114 - RNA, 19 nt, Artificial Sequence
  Synthetic
uguccagcaggggugaggu

SEQ ID NO: 661115 - RNA, 20 nt, Artificial Sequence
  Synthetic
auguccagcaggggugaggu

SEQ ID NO: 661116 - RNA, 21 nt, Artificial Sequence
  Synthetic
gauguccagcaggggugaggu

SEQ ID NO: 661117 - RNA, 22 nt, Artificial Sequence
  Synthetic
ggauguccagcaggggugaggu

SEQ ID NO: 661118 - RNA, 23 nt, Artificial Sequence
  Synthetic
uggauguccagcaggggugaggu

SEQ ID NO: 661119 - RNA, 24 nt, Artificial Sequence
  Synthetic
guggauguccagcaggggugaggu

SEQ ID NO: 661120 - RNA, 18 nt, Artificial Sequence
  Synthetic
aagaggguuaugugaggu

SEQ ID NO: 661121 - RNA, 19 nt, Artificial Sequence
  Synthetic
gaagaggguuaugugaggu

SEQ ID NO: 661122 - RNA, 20 nt, Artificial Sequence
  Synthetic
agaagaggguuaugugaggu

SEQ ID NO: 661123 - RNA, 21 nt, Artificial Sequence
  Synthetic
aagaagaggguuaugugaggu

SEQ ID NO: 661124 - RNA, 22 nt, Artificial Sequence
  Synthetic
aaagaagaggguuaugugaggu

SEQ ID NO: 661125 - RNA, 23 nt, Artificial Sequence
  Synthetic
caaagaagaggguuaugugaggu

SEQ ID NO: 661126 - RNA, 24 nt, Artificial Sequence
  Synthetic
acaaagaagaggguuaugugaggu

SEQ ID NO: 661127 - RNA, 18 nt, Artificial Sequence
  Synthetic
uuuauuggccugugaggu

SEQ ID NO: 661128 - RNA, 19 nt, Artificial Sequence
  Synthetic
uuuuauuggccugugaggu

SEQ ID NO: 661129 - RNA, 20 nt, Artificial Sequence
  Synthetic
auuuuauuggccugugaggu

SEQ ID NO: 661130 - RNA, 21 nt, Artificial Sequence
  Synthetic
uauuuuauuggccugugaggu

SEQ ID NO: 661131 - RNA, 22 nt, Artificial Sequence
  Synthetic
uuauuuuauuggccugugaggu

SEQ ID NO: 661132 - RNA, 23 nt, Artificial Sequence
  Synthetic
auuauuuuauuggccugugaggu

SEQ ID NO: 661133 - RNA, 24 nt, Artificial Sequence
  Synthetic
uauuauuuuauuggccugugaggu

SEQ ID NO: 661134 - RNA, 18 nt, Artificial Sequence
  Synthetic
ugacggaucacuugaggu

SEQ ID NO: 661135 - RNA, 19 nt, Artificial Sequence
  Synthetic
cugacggaucacuugaggu

SEQ ID NO: 661136 - RNA, 20 nt, Artificial Sequence
  Synthetic
gcugacggaucacuugaggu

SEQ ID NO: 661137 - RNA, 21 nt, Artificial Sequence
  Synthetic
ggcugacggaucacuugaggu

SEQ ID NO: 661138 - RNA, 22 nt, Artificial Sequence
  Synthetic
aggcugacggaucacuugaggu

SEQ ID NO: 661139 - RNA, 23 nt, Artificial Sequence
  Synthetic
gaggcugacggaucacuugaggu

SEQ ID NO: 661140 - RNA, 24 nt, Artificial Sequence
  Synthetic
ugaggcugacggaucacuugaggu

SEQ ID NO: 661141 - RNA, 18 nt, Artificial Sequence
  Synthetic
aggcggaucacuugaggu

SEQ ID NO: 661142 - RNA, 19 nt, Artificial Sequence
  Synthetic
caggcggaucacuugaggu

SEQ ID NO: 661143 - RNA, 20 nt, Artificial Sequence
  Synthetic
gcaggcggaucacuugaggu

SEQ ID NO: 661144 - RNA, 21 nt, Artificial Sequence
  Synthetic
ggcaggcggaucacuugaggu

SEQ ID NO: 661145 - RNA, 22 nt, Artificial Sequence
  Synthetic
aggcaggcggaucacuugaggu

SEQ ID NO: 661146 - RNA, 23 nt, Artificial Sequence
  Synthetic
gaggcaggcggaucacuugaggu

SEQ ID NO: 661147 - RNA, 24 nt, Artificial Sequence
  Synthetic
ugaggcaggcggaucacuugaggu

SEQ ID NO: 661148 - RNA, 18 nt, Artificial Sequence
  Synthetic
gggcggaucacuugaggu

SEQ ID NO: 661149 - RNA, 19 nt, Artificial Sequence
  Synthetic
ugggcggaucacuugaggu

SEQ ID NO: 661150 - RNA, 20 nt, Artificial Sequence
  Synthetic
gugggcggaucacuugaggu

SEQ ID NO: 661151 - RNA, 21 nt, Artificial Sequence
  Synthetic
ugugggcggaucacuugaggu

SEQ ID NO: 661152 - RNA, 22 nt, Artificial Sequence
  Synthetic
augugggcggaucacuugaggu

SEQ ID NO: 661153 - RNA, 23 nt, Artificial Sequence
  Synthetic
gaugugggcggaucacuugaggu

SEQ ID NO: 661154 - RNA, 24 nt, Artificial Sequence
  Synthetic
cgaugugggcggaucacuugaggu

SEQ ID NO: 661155 - RNA, 18 nt, Artificial Sequence
  Synthetic
agguggaucacuugaggu

SEQ ID NO: 661156 - RNA, 19 nt, Artificial Sequence
  Synthetic
uagguggaucacuugaggu

SEQ ID NO: 661157 - RNA, 20 nt, Artificial Sequence
  Synthetic
guagguggaucacuugaggu

SEQ ID NO: 661158 - RNA, 21 nt, Artificial Sequence
  Synthetic
aguagguggaucacuugaggu

SEQ ID NO: 661159 - RNA, 22 nt, Artificial Sequence
  Synthetic
aaguagguggaucacuugaggu

SEQ ID NO: 661160 - RNA, 23 nt, Artificial Sequence
  Synthetic
gaaguagguggaucacuugaggu

SEQ ID NO: 661161 - RNA, 24 nt, Artificial Sequence
  Synthetic
cgaaguagguggaucacuugaggu

SEQ ID NO: 661162 - RNA, 18 nt, Artificial Sequence
  Synthetic
gaaccucuuacuugaggu

SEQ ID NO: 661163 - RNA, 19 nt, Artificial Sequence
  Synthetic
ugaaccucuuacuugaggu

SEQ ID NO: 661164 - RNA, 20 nt, Artificial Sequence
  Synthetic
augaaccucuuacuugaggu

SEQ ID NO: 661165 - RNA, 21 nt, Artificial Sequence
  Synthetic
caugaaccucuuacuugaggu

SEQ ID NO: 661166 - RNA, 22 nt, Artificial Sequence
  Synthetic
ucaugaaccucuuacuugaggu

SEQ ID NO: 661167 - RNA, 23 nt, Artificial Sequence
  Synthetic
aucaugaaccucuuacuugaggu

SEQ ID NO: 661168 - RNA, 24 nt, Artificial Sequence
  Synthetic
caucaugaaccucuuacuugaggu

SEQ ID NO: 661169 - RNA, 18 nt, Artificial Sequence
  Synthetic
ggguggaucgcuugaggu

SEQ ID NO: 661170 - RNA, 19 nt, Artificial Sequence
  Synthetic
cggguggaucgcuugaggu

SEQ ID NO: 661171 - RNA, 20 nt, Artificial Sequence
  Synthetic
gcggguggaucgcuugaggu

SEQ ID NO: 661172 - RNA, 21 nt, Artificial Sequence
  Synthetic
ggcggguggaucgcuugaggu

SEQ ID NO: 661173 - RNA, 22 nt, Artificial Sequence
  Synthetic
aggcggguggaucgcuugaggu

SEQ ID NO: 661174 - RNA, 23 nt, Artificial Sequence
  Synthetic
gaggcggguggaucgcuugaggu

SEQ ID NO: 661175 - RNA, 24 nt, Artificial Sequence
  Synthetic
ugaggcggguggaucgcuugaggu

SEQ ID NO: 661176 - RNA, 18 nt, Artificial Sequence
  Synthetic
aagauaauugcuugaggu

SEQ ID NO: 661177 - RNA, 19 nt, Artificial Sequence
  Synthetic
aaagauaauugcuugaggu

SEQ ID NO: 661178 - RNA, 20 nt, Artificial Sequence
  Synthetic
aaaagauaauugcuugaggu

SEQ ID NO: 661179 - RNA, 21 nt, Artificial Sequence
  Synthetic
gaaaagauaauugcuugaggu

SEQ ID NO: 661180 - RNA, 22 nt, Artificial Sequence
  Synthetic
agaaaagauaauugcuugaggu

SEQ ID NO: 661181 - RNA, 23 nt, Artificial Sequence
  Synthetic
cagaaaagauaauugcuugaggu

SEQ ID NO: 661182 - RNA, 24 nt, Artificial Sequence
  Synthetic
acagaaaagauaauugcuugaggu

SEQ ID NO: 661183 - RNA, 18 nt, Artificial Sequence
  Synthetic
uuggaggcaucuugaggu

SEQ ID NO: 661184 - RNA, 19 nt, Artificial Sequence
  Synthetic
auuggaggcaucuugaggu

SEQ ID NO: 661185 - RNA, 20 nt, Artificial Sequence
  Synthetic
cauuggaggcaucuugaggu

SEQ ID NO: 661186 - RNA, 21 nt, Artificial Sequence
  Synthetic
acauuggaggcaucuugaggu

SEQ ID NO: 661187 - RNA, 22 nt, Artificial Sequence
  Synthetic
gacauuggaggcaucuugaggu

SEQ ID NO: 661188 - RNA, 23 nt, Artificial Sequence
  Synthetic
ugacauuggaggcaucuugaggu

SEQ ID NO: 661189 - RNA, 24 nt, Artificial Sequence
  Synthetic
cugacauuggaggcaucuugaggu

SEQ ID NO: 661190 - RNA, 18 nt, Artificial Sequence
  Synthetic
aagaaaaugucuugaggu

SEQ ID NO: 661191 - RNA, 19 nt, Artificial Sequence
  Synthetic
aaagaaaaugucuugaggu

SEQ ID NO: 661192 - RNA, 20 nt, Artificial Sequence
  Synthetic
gaaagaaaaugucuugaggu

SEQ ID NO: 661193 - RNA, 21 nt, Artificial Sequence
  Synthetic
agaaagaaaaugucuugaggu

SEQ ID NO: 661194 - RNA, 22 nt, Artificial Sequence
  Synthetic
cagaaagaaaaugucuugaggu

SEQ ID NO: 661195 - RNA, 23 nt, Artificial Sequence
  Synthetic
ccagaaagaaaaugucuugaggu

SEQ ID NO: 661196 - RNA, 24 nt, Artificial Sequence
  Synthetic
uccagaaagaaaaugucuugaggu

SEQ ID NO: 661197 - RNA, 18 nt, Artificial Sequence
  Synthetic
aggcagaucauuugaggu

SEQ ID NO: 661198 - RNA, 19 nt, Artificial Sequence
  Synthetic
caggcagaucauuugaggu

SEQ ID NO: 661199 - RNA, 20 nt, Artificial Sequence
  Synthetic
gcaggcagaucauuugaggu

SEQ ID NO: 661200 - RNA, 21 nt, Artificial Sequence
  Synthetic
ggcaggcagaucauuugaggu

SEQ ID NO: 661201 - RNA, 22 nt, Artificial Sequence
  Synthetic
aggcaggcagaucauuugaggu

SEQ ID NO: 661202 - RNA, 23 nt, Artificial Sequence
  Synthetic
gaggcaggcagaucauuugaggu

SEQ ID NO: 661203 - RNA, 24 nt, Artificial Sequence
  Synthetic
cgaggcaggcagaucauuugaggu

SEQ ID NO: 661204 - RNA, 18 nt, Artificial Sequence
  Synthetic
augaagcccaaaauaggu

SEQ ID NO: 661205 - RNA, 19 nt, Artificial Sequence
  Synthetic
aaugaagcccaaaauaggu

SEQ ID NO: 661206 - RNA, 20 nt, Artificial Sequence
  Synthetic
aaaugaagcccaaaauaggu

SEQ ID NO: 661207 - RNA, 21 nt, Artificial Sequence
  Synthetic
gaaaugaagcccaaaauaggu

SEQ ID NO: 661208 - RNA, 22 nt, Artificial Sequence
  Synthetic
ggaaaugaagcccaaaauaggu

SEQ ID NO: 661209 - RNA, 23 nt, Artificial Sequence
  Synthetic
gggaaaugaagcccaaaauaggu

SEQ ID NO: 661210 - RNA, 24 nt, Artificial Sequence
  Synthetic
agggaaaugaagcccaaaauaggu

SEQ ID NO: 661211 - RNA, 18 nt, Artificial Sequence
  Synthetic
ggaauagaugaaauaggu

SEQ ID NO: 661212 - RNA, 19 nt, Artificial Sequence
  Synthetic
uggaauagaugaaauaggu

SEQ ID NO: 661213 - RNA, 20 nt, Artificial Sequence
  Synthetic
auggaauagaugaaauaggu

SEQ ID NO: 661214 - RNA, 21 nt, Artificial Sequence
  Synthetic
uauggaauagaugaaauaggu

SEQ ID NO: 661215 - RNA, 22 nt, Artificial Sequence
  Synthetic
auauggaauagaugaaauaggu

SEQ ID NO: 661216 - RNA, 23 nt, Artificial Sequence
  Synthetic
cauauggaauagaugaaauaggu

SEQ ID NO: 661217 - RNA, 24 nt, Artificial Sequence
  Synthetic
ccauauggaauagaugaaauaggu

SEQ ID NO: 661218 - RNA, 18 nt, Artificial Sequence
  Synthetic
aaaaaacauuaaauaggu

SEQ ID NO: 661219 - RNA, 19 nt, Artificial Sequence
  Synthetic
aaaaaaacauuaaauaggu

SEQ ID NO: 661220 - RNA, 20 nt, Artificial Sequence
  Synthetic
gaaaaaaacauuaaauaggu

SEQ ID NO: 661221 - RNA, 21 nt, Artificial Sequence
  Synthetic
ugaaaaaaacauuaaauaggu

SEQ ID NO: 661222 - RNA, 22 nt, Artificial Sequence
  Synthetic
uugaaaaaaacauuaaauaggu

SEQ ID NO: 661223 - RNA, 23 nt, Artificial Sequence
  Synthetic
guugaaaaaaacauuaaauaggu

SEQ ID NO: 661224 - RNA, 24 nt, Artificial Sequence
  Synthetic
gguugaaaaaaacauuaaauaggu

SEQ ID NO: 661225 - RNA, 18 nt, Artificial Sequence
  Synthetic
uaauauccaucaauaggu

SEQ ID NO: 661226 - RNA, 19 nt, Artificial Sequence
  Synthetic
cuaauauccaucaauaggu

SEQ ID NO: 661227 - RNA, 20 nt, Artificial Sequence
  Synthetic
acuaauauccaucaauaggu

SEQ ID NO: 661228 - RNA, 21 nt, Artificial Sequence
  Synthetic
uacuaauauccaucaauaggu

SEQ ID NO: 661229 - RNA, 22 nt, Artificial Sequence
  Synthetic
uuacuaauauccaucaauaggu

SEQ ID NO: 661230 - RNA, 23 nt, Artificial Sequence
  Synthetic
guuacuaauauccaucaauaggu

SEQ ID NO: 661231 - RNA, 24 nt, Artificial Sequence
  Synthetic
gguuacuaauauccaucaauaggu

SEQ ID NO: 661232 - RNA, 18 nt, Artificial Sequence
  Synthetic
gacacugauucaauaggu

SEQ ID NO: 661233 - RNA, 19 nt, Artificial Sequence
  Synthetic
agacacugauucaauaggu

SEQ ID NO: 661234 - RNA, 20 nt, Artificial Sequence
  Synthetic
cagacacugauucaauaggu

SEQ ID NO: 661235 - RNA, 21 nt, Artificial Sequence
  Synthetic
acagacacugauucaauaggu

SEQ ID NO: 661236 - RNA, 22 nt, Artificial Sequence
  Synthetic
cacagacacugauucaauaggu

SEQ ID NO: 661237 - RNA, 23 nt, Artificial Sequence
  Synthetic
acacagacacugauucaauaggu

SEQ ID NO: 661238 - RNA, 24 nt, Artificial Sequence
  Synthetic
cacacagacacugauucaauaggu

SEQ ID NO: 661239 - RNA, 18 nt, Artificial Sequence
  Synthetic
guuugaaccuuaauaggu

SEQ ID NO: 661240 - RNA, 19 nt, Artificial Sequence
  Synthetic
gguuugaaccuuaauaggu

SEQ ID NO: 661241 - RNA, 20 nt, Artificial Sequence
  Synthetic
ggguuugaaccuuaauaggu

SEQ ID NO: 661242 - RNA, 21 nt, Artificial Sequence
  Synthetic
uggguuugaaccuuaauaggu

SEQ ID NO: 661243 - RNA, 22 nt, Artificial Sequence
  Synthetic
guggguuugaaccuuaauaggu

SEQ ID NO: 661244 - RNA, 23 nt, Artificial Sequence
  Synthetic
aguggguuugaaccuuaauaggu

SEQ ID NO: 661245 - RNA, 24 nt, Artificial Sequence
  Synthetic
aaguggguuugaaccuuaauaggu

SEQ ID NO: 661246 - RNA, 18 nt, Artificial Sequence
  Synthetic
ccuccuuucagcauaggu

SEQ ID NO: 661247 - RNA, 19 nt, Artificial Sequence
  Synthetic
gccuccuuucagcauaggu

SEQ ID NO: 661248 - RNA, 20 nt, Artificial Sequence
  Synthetic
agccuccuuucagcauaggu

SEQ ID NO: 661249 - RNA, 21 nt, Artificial Sequence
  Synthetic
uagccuccuuucagcauaggu

SEQ ID NO: 661250 - RNA, 22 nt, Artificial Sequence
  Synthetic
guagccuccuuucagcauaggu

SEQ ID NO: 661251 - RNA, 23 nt, Artificial Sequence
  Synthetic
uguagccuccuuucagcauaggu

SEQ ID NO: 661252 - RNA, 24 nt, Artificial Sequence
  Synthetic
auguagccuccuuucagcauaggu

SEQ ID NO: 661253 - RNA, 18 nt, Artificial Sequence
  Synthetic
aggguuggaaagauaggu

SEQ ID NO: 661254 - RNA, 19 nt, Artificial Sequence
  Synthetic
caggguuggaaagauaggu

SEQ ID NO: 661255 - RNA, 20 nt, Artificial Sequence
  Synthetic
acaggguuggaaagauaggu

SEQ ID NO: 661256 - RNA, 21 nt, Artificial Sequence
  Synthetic
aacaggguuggaaagauaggu

SEQ ID NO: 661257 - RNA, 22 nt, Artificial Sequence
  Synthetic
aaacaggguuggaaagauaggu

SEQ ID NO: 661258 - RNA, 23 nt, Artificial Sequence
  Synthetic
aaaacaggguuggaaagauaggu

SEQ ID NO: 661259 - RNA, 24 nt, Artificial Sequence
  Synthetic
aaaaacaggguuggaaagauaggu

SEQ ID NO: 661260 - RNA, 18 nt, Artificial Sequence
  Synthetic
ucucagugacauauaggu

SEQ ID NO: 661261 - RNA, 19 nt, Artificial Sequence
  Synthetic
gucucagugacauauaggu

SEQ ID NO: 661262 - RNA, 20 nt, Artificial Sequence
  Synthetic
ggucucagugacauauaggu

SEQ ID NO: 661263 - RNA, 21 nt, Artificial Sequence
  Synthetic
aggucucagugacauauaggu

SEQ ID NO: 661264 - RNA, 22 nt, Artificial Sequence
  Synthetic
gaggucucagugacauauaggu

SEQ ID NO: 661265 - RNA, 23 nt, Artificial Sequence
  Synthetic
ugaggucucagugacauauaggu

SEQ ID NO: 661266 - RNA, 24 nt, Artificial Sequence
  Synthetic
uugaggucucagugacauauaggu

SEQ ID NO: 661267 - RNA, 18 nt, Artificial Sequence
  Synthetic
uuuuggugagauauaggu

SEQ ID NO: 661268 - RNA, 19 nt, Artificial Sequence
  Synthetic
uuuuuggugagauauaggu

SEQ ID NO: 661269 - RNA, 20 nt, Artificial Sequence
  Synthetic
uuuuuuggugagauauaggu

SEQ ID NO: 661270 - RNA, 21 nt, Artificial Sequence
  Synthetic
uuuuuuuggugagauauaggu

SEQ ID NO: 661271 - RNA, 22 nt, Artificial Sequence
  Synthetic
cuuuuuuuggugagauauaggu

SEQ ID NO: 661272 - RNA, 23 nt, Artificial Sequence
  Synthetic
ccuuuuuuuggugagauauaggu

SEQ ID NO: 661273 - RNA, 24 nt, Artificial Sequence
  Synthetic
uccuuuuuuuggugagauauaggu

SEQ ID NO: 661274 - RNA, 18 nt, Artificial Sequence
  Synthetic
cuuaaaauaacuauaggu

SEQ ID NO: 661275 - RNA, 19 nt, Artificial Sequence
  Synthetic
ucuuaaaauaacuauaggu

SEQ ID NO: 661276 - RNA, 20 nt, Artificial Sequence
  Synthetic
uucuuaaaauaacuauaggu

SEQ ID NO: 661277 - RNA, 21 nt, Artificial Sequence
  Synthetic
uuucuuaaaauaacuauaggu

SEQ ID NO: 661278 - RNA, 22 nt, Artificial Sequence
  Synthetic
cuuucuuaaaauaacuauaggu

SEQ ID NO: 661279 - RNA, 23 nt, Artificial Sequence
  Synthetic
acuuucuuaaaauaacuauaggu

SEQ ID NO: 661280 - RNA, 24 nt, Artificial Sequence
  Synthetic
aacuuucuuaaaauaacuauaggu

SEQ ID NO: 661281 - RNA, 18 nt, Artificial Sequence
  Synthetic
agugcugggauuauaggu

SEQ ID NO: 661282 - RNA, 19 nt, Artificial Sequence
  Synthetic
aagugcugggauuauaggu

SEQ ID NO: 661283 - RNA, 20 nt, Artificial Sequence
  Synthetic
aaagugcugggauuauaggu

SEQ ID NO: 661284 - RNA, 21 nt, Artificial Sequence
  Synthetic
caaagugcugggauuauaggu

SEQ ID NO: 661285 - RNA, 22 nt, Artificial Sequence
  Synthetic
ccaaagugcugggauuauaggu

SEQ ID NO: 661286 - RNA, 23 nt, Artificial Sequence
  Synthetic
cccaaagugcugggauuauaggu

SEQ ID NO: 661287 - RNA, 24 nt, Artificial Sequence
  Synthetic
ucccaaagugcugggauuauaggu

SEQ ID NO: 661288 - RNA, 18 nt, Artificial Sequence
  Synthetic
cuagcuaauaaacuaggu

SEQ ID NO: 661289 - RNA, 19 nt, Artificial Sequence
  Synthetic
acuagcuaauaaacuaggu

SEQ ID NO: 661290 - RNA, 20 nt, Artificial Sequence
  Synthetic
aacuagcuaauaaacuaggu

SEQ ID NO: 661291 - RNA, 21 nt, Artificial Sequence
  Synthetic
gaacuagcuaauaaacuaggu

SEQ ID NO: 661292 - RNA, 22 nt, Artificial Sequence
  Synthetic
agaacuagcuaauaaacuaggu

SEQ ID NO: 661293 - RNA, 23 nt, Artificial Sequence
  Synthetic
aagaacuagcuaauaaacuaggu

SEQ ID NO: 661294 - RNA, 24 nt, Artificial Sequence
  Synthetic
aaagaacuagcuaauaaacuaggu

SEQ ID NO: 661295 - RNA, 18 nt, Artificial Sequence
  Synthetic
gcagguggaucacuaggu

SEQ ID NO: 661296 - RNA, 19 nt, Artificial Sequence
  Synthetic
ggcagguggaucacuaggu

SEQ ID NO: 661297 - RNA, 20 nt, Artificial Sequence
  Synthetic
aggcagguggaucacuaggu

SEQ ID NO: 661298 - RNA, 21 nt, Artificial Sequence
  Synthetic
gaggcagguggaucacuaggu

SEQ ID NO: 661299 - RNA, 22 nt, Artificial Sequence
  Synthetic
ugaggcagguggaucacuaggu

SEQ ID NO: 661300 - RNA, 23 nt, Artificial Sequence
  Synthetic
cugaggcagguggaucacuaggu

SEQ ID NO: 661301 - RNA, 24 nt, Artificial Sequence
  Synthetic
gcugaggcagguggaucacuaggu

SEQ ID NO: 661302 - RNA, 18 nt, Artificial Sequence
  Synthetic
auuuaagaucuccuaggu

SEQ ID NO: 661303 - RNA, 19 nt, Artificial Sequence
  Synthetic
cauuuaagaucuccuaggu

SEQ ID NO: 661304 - RNA, 20 nt, Artificial Sequence
  Synthetic
ucauuuaagaucuccuaggu

SEQ ID NO: 661305 - RNA, 21 nt, Artificial Sequence
  Synthetic
uucauuuaagaucuccuaggu

SEQ ID NO: 661306 - RNA, 22 nt, Artificial Sequence
  Synthetic
guucauuuaagaucuccuaggu

SEQ ID NO: 661307 - RNA, 23 nt, Artificial Sequence
  Synthetic
aguucauuuaagaucuccuaggu

SEQ ID NO: 661308 - RNA, 24 nt, Artificial Sequence
  Synthetic
gaguucauuuaagaucuccuaggu

SEQ ID NO: 661309 - RNA, 18 nt, Artificial Sequence
  Synthetic
acuucaauaaagcuaggu

SEQ ID NO: 661310 - RNA, 19 nt, Artificial Sequence
  Synthetic
uacuucaauaaagcuaggu

SEQ ID NO: 661311 - RNA, 20 nt, Artificial Sequence
  Synthetic
auacuucaauaaagcuaggu

SEQ ID NO: 661312 - RNA, 21 nt, Artificial Sequence
  Synthetic
uauacuucaauaaagcuaggu

SEQ ID NO: 661313 - RNA, 22 nt, Artificial Sequence
  Synthetic
uuauacuucaauaaagcuaggu

SEQ ID NO: 661314 - RNA, 23 nt, Artificial Sequence
  Synthetic
auuauacuucaauaaagcuaggu

SEQ ID NO: 661315 - RNA, 24 nt, Artificial Sequence
  Synthetic
aauuauacuucaauaaagcuaggu

SEQ ID NO: 661316 - RNA, 18 nt, Artificial Sequence
  Synthetic
uggccugucuugcuaggu

SEQ ID NO: 661317 - RNA, 19 nt, Artificial Sequence
  Synthetic
uuggccugucuugcuaggu

SEQ ID NO: 661318 - RNA, 20 nt, Artificial Sequence
  Synthetic
guuggccugucuugcuaggu

SEQ ID NO: 661319 - RNA, 21 nt, Artificial Sequence
  Synthetic
uguuggccugucuugcuaggu

SEQ ID NO: 661320 - RNA, 22 nt, Artificial Sequence
  Synthetic
auguuggccugucuugcuaggu

SEQ ID NO: 661321 - RNA, 23 nt, Artificial Sequence
  Synthetic
aauguuggccugucuugcuaggu

SEQ ID NO: 661322 - RNA, 24 nt, Artificial Sequence
  Synthetic
gaauguuggccugucuugcuaggu

SEQ ID NO: 661323 - RNA, 18 nt, Artificial Sequence
  Synthetic
caguuucaaagucuaggu

SEQ ID NO: 661324 - RNA, 19 nt, Artificial Sequence
  Synthetic
ucaguuucaaagucuaggu

SEQ ID NO: 661325 - RNA, 20 nt, Artificial Sequence
  Synthetic
gucaguuucaaagucuaggu

SEQ ID NO: 661326 - RNA, 21 nt, Artificial Sequence
  Synthetic
ugucaguuucaaagucuaggu

SEQ ID NO: 661327 - RNA, 22 nt, Artificial Sequence
  Synthetic
augucaguuucaaagucuaggu

SEQ ID NO: 661328 - RNA, 23 nt, Artificial Sequence
  Synthetic
caugucaguuucaaagucuaggu

SEQ ID NO: 661329 - RNA, 24 nt, Artificial Sequence
  Synthetic
ccaugucaguuucaaagucuaggu

SEQ ID NO: 661330 - RNA, 18 nt, Artificial Sequence
  Synthetic
ggagcucuacuucuaggu

SEQ ID NO: 661331 - RNA, 19 nt, Artificial Sequence
  Synthetic
uggagcucuacuucuaggu

SEQ ID NO: 661332 - RNA, 20 nt, Artificial Sequence
  Synthetic
uuggagcucuacuucuaggu

SEQ ID NO: 661333 - RNA, 21 nt, Artificial Sequence
  Synthetic
guuggagcucuacuucuaggu

SEQ ID NO: 661334 - RNA, 22 nt, Artificial Sequence
  Synthetic
gguuggagcucuacuucuaggu

SEQ ID NO: 661335 - RNA, 23 nt, Artificial Sequence
  Synthetic
ggguuggagcucuacuucuaggu

SEQ ID NO: 661336 - RNA, 24 nt, Artificial Sequence
  Synthetic
uggguuggagcucuacuucuaggu

SEQ ID NO: 661337 - RNA, 18 nt, Artificial Sequence
  Synthetic
gacacugauucaguaggu

SEQ ID NO: 661338 - RNA, 19 nt, Artificial Sequence
  Synthetic
agacacugauucaguaggu

SEQ ID NO: 661339 - RNA, 20 nt, Artificial Sequence
  Synthetic
cagacacugauucaguaggu

SEQ ID NO: 661340 - RNA, 21 nt, Artificial Sequence
  Synthetic
acagacacugauucaguaggu

SEQ ID NO: 661341 - RNA, 22 nt, Artificial Sequence
  Synthetic
cacagacacugauucaguaggu

SEQ ID NO: 661342 - RNA, 23 nt, Artificial Sequence
  Synthetic
acacagacacugauucaguaggu

SEQ ID NO: 661343 - RNA, 24 nt, Artificial Sequence
  Synthetic
cacacagacacugauucaguaggu

SEQ ID NO: 661344 - RNA, 18 nt, Artificial Sequence
  Synthetic
cccaacugacgaguaggu

SEQ ID NO: 661345 - RNA, 19 nt, Artificial Sequence
  Synthetic
gcccaacugacgaguaggu

SEQ ID NO: 661346 - RNA, 20 nt, Artificial Sequence
  Synthetic
agcccaacugacgaguaggu

SEQ ID NO: 661347 - RNA, 21 nt, Artificial Sequence
  Synthetic
aagcccaacugacgaguaggu

SEQ ID NO: 661348 - RNA, 22 nt, Artificial Sequence
  Synthetic
aaagcccaacugacgaguaggu

SEQ ID NO: 661349 - RNA, 23 nt, Artificial Sequence
  Synthetic
aaaagcccaacugacgaguaggu

SEQ ID NO: 661350 - RNA, 24 nt, Artificial Sequence
  Synthetic
aaaaagcccaacugacgaguaggu

SEQ ID NO: 661351 - RNA, 18 nt, Artificial Sequence
  Synthetic
ccugaaaagugaguaggu

SEQ ID NO: 661352 - RNA, 19 nt, Artificial Sequence
  Synthetic
accugaaaagugaguaggu

SEQ ID NO: 661353 - RNA, 20 nt, Artificial Sequence
  Synthetic
gaccugaaaagugaguaggu

SEQ ID NO: 661354 - RNA, 21 nt, Artificial Sequence
  Synthetic
agaccugaaaagugaguaggu

SEQ ID NO: 661355 - RNA, 22 nt, Artificial Sequence
  Synthetic
gagaccugaaaagugaguaggu

SEQ ID NO: 661356 - RNA, 23 nt, Artificial Sequence
  Synthetic
ugagaccugaaaagugaguaggu

SEQ ID NO: 661357 - RNA, 24 nt, Artificial Sequence
  Synthetic
cugagaccugaaaagugaguaggu

SEQ ID NO: 661358 - RNA, 18 nt, Artificial Sequence
  Synthetic
acaaucuauuguguaggu

SEQ ID NO: 661359 - RNA, 19 nt, Artificial Sequence
  Synthetic
gacaaucuauuguguaggu

SEQ ID NO: 661360 - RNA, 20 nt, Artificial Sequence
  Synthetic
agacaaucuauuguguaggu

SEQ ID NO: 661361 - RNA, 21 nt, Artificial Sequence
  Synthetic
aagacaaucuauuguguaggu

SEQ ID NO: 661362 - RNA, 22 nt, Artificial Sequence
  Synthetic
aaagacaaucuauuguguaggu

SEQ ID NO: 661363 - RNA, 23 nt, Artificial Sequence
  Synthetic
gaaagacaaucuauuguguaggu

SEQ ID NO: 661364 - RNA, 24 nt, Artificial Sequence
  Synthetic
agaaagacaaucuauuguguaggu

SEQ ID NO: 661365 - RNA, 18 nt, Artificial Sequence
  Synthetic
aagucccuuuguguaggu

SEQ ID NO: 661366 - RNA, 19 nt, Artificial Sequence
  Synthetic
uaagucccuuuguguaggu

SEQ ID NO: 661367 - RNA, 20 nt, Artificial Sequence
  Synthetic
cuaagucccuuuguguaggu

SEQ ID NO: 661368 - RNA, 21 nt, Artificial Sequence
  Synthetic
ccuaagucccuuuguguaggu

SEQ ID NO: 661369 - RNA, 22 nt, Artificial Sequence
  Synthetic
cccuaagucccuuuguguaggu

SEQ ID NO: 661370 - RNA, 23 nt, Artificial Sequence
  Synthetic
gcccuaagucccuuuguguaggu

SEQ ID NO: 661371 - RNA, 24 nt, Artificial Sequence
  Synthetic
ggcccuaagucccuuuguguaggu

SEQ ID NO: 661372 - RNA, 18 nt, Artificial Sequence
  Synthetic
uauacaaaaaaauuaggu

SEQ ID NO: 661373 - RNA, 19 nt, Artificial Sequence
  Synthetic
uuauacaaaaaaauuaggu

SEQ ID NO: 661374 - RNA, 20 nt, Artificial Sequence
  Synthetic
auuauacaaaaaaauuaggu

SEQ ID NO: 661375 - RNA, 21 nt, Artificial Sequence
  Synthetic
aauuauacaaaaaaauuaggu

SEQ ID NO: 661376 - RNA, 22 nt, Artificial Sequence
  Synthetic
uaauuauacaaaaaaauuaggu

SEQ ID NO: 661377 - RNA, 23 nt, Artificial Sequence
  Synthetic
cuaauuauacaaaaaaauuaggu

SEQ ID NO: 661378 - RNA, 24 nt, Artificial Sequence
  Synthetic
ucuaauuauacaaaaaaauuaggu

SEQ ID NO: 661379 - RNA, 18 nt, Artificial Sequence
  Synthetic
ugaaauaauccauuaggu

SEQ ID NO: 661380 - RNA, 19 nt, Artificial Sequence
  Synthetic
uugaaauaauccauuaggu

SEQ ID NO: 661381 - RNA, 20 nt, Artificial Sequence
  Synthetic
auugaaauaauccauuaggu

SEQ ID NO: 661382 - RNA, 21 nt, Artificial Sequence
  Synthetic
aauugaaauaauccauuaggu

SEQ ID NO: 661383 - RNA, 22 nt, Artificial Sequence
  Synthetic
aaauugaaauaauccauuaggu

SEQ ID NO: 661384 - RNA, 23 nt, Artificial Sequence
  Synthetic
aaaauugaaauaauccauuaggu

SEQ ID NO: 661385 - RNA, 24 nt, Artificial Sequence
  Synthetic
gaaaauugaaauaauccauuaggu

SEQ ID NO: 661386 - RNA, 18 nt, Artificial Sequence
  Synthetic
uagucugcaggauuaggu

SEQ ID NO: 661387 - RNA, 19 nt, Artificial Sequence
  Synthetic
guagucugcaggauuaggu

SEQ ID NO: 661388 - RNA, 20 nt, Artificial Sequence
  Synthetic
uguagucugcaggauuaggu

SEQ ID NO: 661389 - RNA, 21 nt, Artificial Sequence
  Synthetic
cuguagucugcaggauuaggu

SEQ ID NO: 661390 - RNA, 22 nt, Artificial Sequence
  Synthetic
ucuguagucugcaggauuaggu

SEQ ID NO: 661391 - RNA, 23 nt, Artificial Sequence
  Synthetic
uucuguagucugcaggauuaggu

SEQ ID NO: 661392 - RNA, 24 nt, Artificial Sequence
  Synthetic
uuucuguagucugcaggauuaggu

SEQ ID NO: 661393 - RNA, 18 nt, Artificial Sequence
  Synthetic
uuucaucuuugauuaggu

SEQ ID NO: 661394 - RNA, 19 nt, Artificial Sequence
  Synthetic
auuucaucuuugauuaggu

SEQ ID NO: 661395 - RNA, 20 nt, Artificial Sequence
  Synthetic
uauuucaucuuugauuaggu

SEQ ID NO: 661396 - RNA, 21 nt, Artificial Sequence
  Synthetic
auauuucaucuuugauuaggu

SEQ ID NO: 661397 - RNA, 22 nt, Artificial Sequence
  Synthetic
cauauuucaucuuugauuaggu

SEQ ID NO: 661398 - RNA, 23 nt, Artificial Sequence
  Synthetic
acauauuucaucuuugauuaggu

SEQ ID NO: 661399 - RNA, 24 nt, Artificial Sequence
  Synthetic
cacauauuucaucuuugauuaggu

SEQ ID NO: 661400 - RNA, 18 nt, Artificial Sequence
  Synthetic
uaaaucuuuugauuaggu

SEQ ID NO: 661401 - RNA, 19 nt, Artificial Sequence
  Synthetic
auaaaucuuuugauuaggu

SEQ ID NO: 661402 - RNA, 20 nt, Artificial Sequence
  Synthetic
uauaaaucuuuugauuaggu

SEQ ID NO: 661403 - RNA, 21 nt, Artificial Sequence
  Synthetic
cuauaaaucuuuugauuaggu

SEQ ID NO: 661404 - RNA, 22 nt, Artificial Sequence
  Synthetic
acuauaaaucuuuugauuaggu

SEQ ID NO: 661405 - RNA, 23 nt, Artificial Sequence
  Synthetic
cacuauaaaucuuuugauuaggu

SEQ ID NO: 661406 - RNA, 24 nt, Artificial Sequence
  Synthetic
ucacuauaaaucuuuugauuaggu

SEQ ID NO: 661407 - RNA, 18 nt, Artificial Sequence
  Synthetic
uagagcagaauauuaggu

SEQ ID NO: 661408 - RNA, 19 nt, Artificial Sequence
  Synthetic
auagagcagaauauuaggu

SEQ ID NO: 661409 - RNA, 20 nt, Artificial Sequence
  Synthetic
aauagagcagaauauuaggu

SEQ ID NO: 661410 - RNA, 21 nt, Artificial Sequence
  Synthetic
aaauagagcagaauauuaggu

SEQ ID NO: 661411 - RNA, 22 nt, Artificial Sequence
  Synthetic
uaaauagagcagaauauuaggu

SEQ ID NO: 661412 - RNA, 23 nt, Artificial Sequence
  Synthetic
auaaauagagcagaauauuaggu

SEQ ID NO: 661413 - RNA, 24 nt, Artificial Sequence
  Synthetic
aauaaauagagcagaauauuaggu

SEQ ID NO: 661414 - RNA, 18 nt, Artificial Sequence
  Synthetic
gcuaccaugguauuaggu

SEQ ID NO: 661415 - RNA, 19 nt, Artificial Sequence
  Synthetic
ugcuaccaugguauuaggu

SEQ ID NO: 661416 - RNA, 20 nt, Artificial Sequence
  Synthetic
uugcuaccaugguauuaggu

SEQ ID NO: 661417 - RNA, 21 nt, Artificial Sequence
  Synthetic
auugcuaccaugguauuaggu

SEQ ID NO: 661418 - RNA, 22 nt, Artificial Sequence
  Synthetic
uauugcuaccaugguauuaggu

SEQ ID NO: 661419 - RNA, 23 nt, Artificial Sequence
  Synthetic
uuauugcuaccaugguauuaggu

SEQ ID NO: 661420 - RNA, 24 nt, Artificial Sequence
  Synthetic
uuuauugcuaccaugguauuaggu

SEQ ID NO: 661421 - RNA, 18 nt, Artificial Sequence
  Synthetic
ggauguuauaacuuaggu

SEQ ID NO: 661422 - RNA, 19 nt, Artificial Sequence
  Synthetic
uggauguuauaacuuaggu

SEQ ID NO: 661423 - RNA, 20 nt, Artificial Sequence
  Synthetic
auggauguuauaacuuaggu

SEQ ID NO: 661424 - RNA, 21 nt, Artificial Sequence
  Synthetic
uauggauguuauaacuuaggu

SEQ ID NO: 661425 - RNA, 22 nt, Artificial Sequence
  Synthetic
uuauggauguuauaacuuaggu

SEQ ID NO: 661426 - RNA, 23 nt, Artificial Sequence
  Synthetic
uuuauggauguuauaacuuaggu

SEQ ID NO: 661427 - RNA, 24 nt, Artificial Sequence
  Synthetic
uuuuauggauguuauaacuuaggu

SEQ ID NO: 661428 - RNA, 18 nt, Artificial Sequence
  Synthetic
ggaauaagagacuuaggu

SEQ ID NO: 661429 - RNA, 19 nt, Artificial Sequence
  Synthetic
aggaauaagagacuuaggu

SEQ ID NO: 661430 - RNA, 20 nt, Artificial Sequence
  Synthetic
uaggaauaagagacuuaggu

SEQ ID NO: 661431 - RNA, 21 nt, Artificial Sequence
  Synthetic
auaggaauaagagacuuaggu

SEQ ID NO: 661432 - RNA, 22 nt, Artificial Sequence
  Synthetic
gauaggaauaagagacuuaggu

SEQ ID NO: 661433 - RNA, 23 nt, Artificial Sequence
  Synthetic
ggauaggaauaagagacuuaggu

SEQ ID NO: 661434 - RNA, 24 nt, Artificial Sequence
  Synthetic
uggauaggaauaagagacuuaggu

SEQ ID NO: 661435 - RNA, 18 nt, Artificial Sequence
  Synthetic
auucuucaaaucuuaggu

SEQ ID NO: 661436 - RNA, 19 nt, Artificial Sequence
  Synthetic
aauucuucaaaucuuaggu

SEQ ID NO: 661437 - RNA, 20 nt, Artificial Sequence
  Synthetic
aaauucuucaaaucuuaggu

SEQ ID NO: 661438 - RNA, 21 nt, Artificial Sequence
  Synthetic
gaaauucuucaaaucuuaggu

SEQ ID NO: 661439 - RNA, 22 nt, Artificial Sequence
  Synthetic
ggaaauucuucaaaucuuaggu

SEQ ID NO: 661440 - RNA, 23 nt, Artificial Sequence
  Synthetic
gggaaauucuucaaaucuuaggu

SEQ ID NO: 661441 - RNA, 24 nt, Artificial Sequence
  Synthetic
ugggaaauucuucaaaucuuaggu

SEQ ID NO: 661442 - RNA, 18 nt, Artificial Sequence
  Synthetic
cauuacuaacauuuaggu

SEQ ID NO: 661443 - RNA, 19 nt, Artificial Sequence
  Synthetic
gcauuacuaacauuuaggu

SEQ ID NO: 661444 - RNA, 20 nt, Artificial Sequence
  Synthetic
agcauuacuaacauuuaggu

SEQ ID NO: 661445 - RNA, 21 nt, Artificial Sequence
  Synthetic
uagcauuacuaacauuuaggu

SEQ ID NO: 661446 - RNA, 22 nt, Artificial Sequence
  Synthetic
uuagcauuacuaacauuuaggu

SEQ ID NO: 661447 - RNA, 23 nt, Artificial Sequence
  Synthetic
uuuagcauuacuaacauuuaggu

SEQ ID NO: 661448 - RNA, 24 nt, Artificial Sequence
  Synthetic
cuuuagcauuacuaacauuuaggu

SEQ ID NO: 661449 - RNA, 18 nt, Artificial Sequence
  Synthetic
auaaagcaaaguuuaggu

SEQ ID NO: 661450 - RNA, 19 nt, Artificial Sequence
  Synthetic
aauaaagcaaaguuuaggu

SEQ ID NO: 661451 - RNA, 20 nt, Artificial Sequence
  Synthetic
aaauaaagcaaaguuuaggu

SEQ ID NO: 661452 - RNA, 21 nt, Artificial Sequence
  Synthetic
aaaauaaagcaaaguuuaggu

SEQ ID NO: 661453 - RNA, 22 nt, Artificial Sequence
  Synthetic
aaaaauaaagcaaaguuuaggu

SEQ ID NO: 661454 - RNA, 23 nt, Artificial Sequence
  Synthetic
aaaaaauaaagcaaaguuuaggu

SEQ ID NO: 661455 - RNA, 24 nt, Artificial Sequence
  Synthetic
aaaaaaauaaagcaaaguuuaggu

SEQ ID NO: 661456 - RNA, 18 nt, Artificial Sequence
  Synthetic
ggggucagaauuuuaggu

SEQ ID NO: 661457 - RNA, 19 nt, Artificial Sequence
  Synthetic
gggggucagaauuuuaggu

SEQ ID NO: 661458 - RNA, 20 nt, Artificial Sequence
  Synthetic
ugggggucagaauuuuaggu

SEQ ID NO: 661459 - RNA, 21 nt, Artificial Sequence
  Synthetic
gugggggucagaauuuuaggu

SEQ ID NO: 661460 - RNA, 22 nt, Artificial Sequence
  Synthetic
agugggggucagaauuuuaggu

SEQ ID NO: 661461 - RNA, 23 nt, Artificial Sequence
  Synthetic
aagugggggucagaauuuuaggu

SEQ ID NO: 661462 - RNA, 24 nt, Artificial Sequence
  Synthetic
aaagugggggucagaauuuuaggu

SEQ ID NO: 661463 - RNA, 18 nt, Artificial Sequence
  Synthetic
cccagccuccagaacggu

SEQ ID NO: 661464 - RNA, 19 nt, Artificial Sequence
  Synthetic
ucccagccuccagaacggu

SEQ ID NO: 661465 - RNA, 20 nt, Artificial Sequence
  Synthetic
uucccagccuccagaacggu

SEQ ID NO: 661466 - RNA, 21 nt, Artificial Sequence
  Synthetic
cuucccagccuccagaacggu

SEQ ID NO: 661467 - RNA, 22 nt, Artificial Sequence
  Synthetic
acuucccagccuccagaacggu

SEQ ID NO: 661468 - RNA, 23 nt, Artificial Sequence
  Synthetic
aacuucccagccuccagaacggu

SEQ ID NO: 661469 - RNA, 24 nt, Artificial Sequence
  Synthetic
gaacuucccagccuccagaacggu

SEQ ID NO: 661470 - RNA, 18 nt, Artificial Sequence
  Synthetic
ccuguuuuacugaacggu

SEQ ID NO: 661471 - RNA, 19 nt, Artificial Sequence
  Synthetic
uccuguuuuacugaacggu

SEQ ID NO: 661472 - RNA, 20 nt, Artificial Sequence
  Synthetic
uuccuguuuuacugaacggu

SEQ ID NO: 661473 - RNA, 21 nt, Artificial Sequence
  Synthetic
uuuccuguuuuacugaacggu

SEQ ID NO: 661474 - RNA, 22 nt, Artificial Sequence
  Synthetic
auuuccuguuuuacugaacggu

SEQ ID NO: 661475 - RNA, 23 nt, Artificial Sequence
  Synthetic
cauuuccuguuuuacugaacggu

SEQ ID NO: 661476 - RNA, 24 nt, Artificial Sequence
  Synthetic
gcauuuccuguuuuacugaacggu

SEQ ID NO: 661477 - RNA, 18 nt, Artificial Sequence
  Synthetic
guagagaaaaaacacggu

SEQ ID NO: 661478 - RNA, 19 nt, Artificial Sequence
  Synthetic
aguagagaaaaaacacggu

SEQ ID NO: 661479 - RNA, 20 nt, Artificial Sequence
  Synthetic
gaguagagaaaaaacacggu

SEQ ID NO: 661480 - RNA, 21 nt, Artificial Sequence
  Synthetic
agaguagagaaaaaacacggu

SEQ ID NO: 661481 - RNA, 22 nt, Artificial Sequence
  Synthetic
gagaguagagaaaaaacacggu

SEQ ID NO: 661482 - RNA, 23 nt, Artificial Sequence
  Synthetic
ugagaguagagaaaaaacacggu

SEQ ID NO: 661483 - RNA, 24 nt, Artificial Sequence
  Synthetic
uugagaguagagaaaaaacacggu

SEQ ID NO: 661484 - RNA, 18 nt, Artificial Sequence
  Synthetic
uccauuauggaggacggu

SEQ ID NO: 661485 - RNA, 19 nt, Artificial Sequence
  Synthetic
auccauuauggaggacggu

SEQ ID NO: 661486 - RNA, 20 nt, Artificial Sequence
  Synthetic
cauccauuauggaggacggu

SEQ ID NO: 661487 - RNA, 21 nt, Artificial Sequence
  Synthetic
acauccauuauggaggacggu

SEQ ID NO: 661488 - RNA, 22 nt, Artificial Sequence
  Synthetic
uacauccauuauggaggacggu

SEQ ID NO: 661489 - RNA, 23 nt, Artificial Sequence
  Synthetic
guacauccauuauggaggacggu

SEQ ID NO: 661490 - RNA, 24 nt, Artificial Sequence
  Synthetic
aguacauccauuauggaggacggu

SEQ ID NO: 661491 - RNA, 18 nt, Artificial Sequence
  Synthetic
acaucacaguaggacggu

SEQ ID NO: 661492 - RNA, 19 nt, Artificial Sequence
  Synthetic
gacaucacaguaggacggu

SEQ ID NO: 661493 - RNA, 20 nt, Artificial Sequence
  Synthetic
agacaucacaguaggacggu

SEQ ID NO: 661494 - RNA, 21 nt, Artificial Sequence
  Synthetic
cagacaucacaguaggacggu

SEQ ID NO: 661495 - RNA, 22 nt, Artificial Sequence
  Synthetic
gcagacaucacaguaggacggu

SEQ ID NO: 661496 - RNA, 23 nt, Artificial Sequence
  Synthetic
agcagacaucacaguaggacggu

SEQ ID NO: 661497 - RNA, 24 nt, Artificial Sequence
  Synthetic
aagcagacaucacaguaggacggu

SEQ ID NO: 661498 - RNA, 18 nt, Artificial Sequence
  Synthetic
uacuagcugugugacggu

SEQ ID NO: 661499 - RNA, 19 nt, Artificial Sequence
  Synthetic
uuacuagcugugugacggu

SEQ ID NO: 661500 - RNA, 20 nt, Artificial Sequence
  Synthetic
uuuacuagcugugugacggu

SEQ ID NO: 661501 - RNA, 21 nt, Artificial Sequence
  Synthetic
cuuuacuagcugugugacggu

SEQ ID NO: 661502 - RNA, 22 nt, Artificial Sequence
  Synthetic
gcuuuacuagcugugugacggu

SEQ ID NO: 661503 - RNA, 23 nt, Artificial Sequence
  Synthetic
agcuuuacuagcugugugacggu

SEQ ID NO: 661504 - RNA, 24 nt, Artificial Sequence
  Synthetic
uagcuuuacuagcugugugacggu

SEQ ID NO: 661505 - RNA, 18 nt, Artificial Sequence
  Synthetic
gccauucuguuaaccggu

SEQ ID NO: 661506 - RNA, 19 nt, Artificial Sequence
  Synthetic
ugccauucuguuaaccggu

SEQ ID NO: 661507 - RNA, 20 nt, Artificial Sequence
  Synthetic
cugccauucuguuaaccggu

SEQ ID NO: 661508 - RNA, 21 nt, Artificial Sequence
  Synthetic
gcugccauucuguuaaccggu

SEQ ID NO: 661509 - RNA, 22 nt, Artificial Sequence
  Synthetic
ugcugccauucuguuaaccggu

SEQ ID NO: 661510 - RNA, 23 nt, Artificial Sequence
  Synthetic
cugcugccauucuguuaaccggu

SEQ ID NO: 661511 - RNA, 24 nt, Artificial Sequence
  Synthetic
gcugcugccauucuguuaaccggu

SEQ ID NO: 661512 - RNA, 18 nt, Artificial Sequence
  Synthetic
gcaaaccauacacccggu

SEQ ID NO: 661513 - RNA, 19 nt, Artificial Sequence
  Synthetic
ugcaaaccauacacccggu

SEQ ID NO: 661514 - RNA, 20 nt, Artificial Sequence
  Synthetic
uugcaaaccauacacccggu

SEQ ID NO: 661515 - RNA, 21 nt, Artificial Sequence
  Synthetic
uuugcaaaccauacacccggu

SEQ ID NO: 661516 - RNA, 22 nt, Artificial Sequence
  Synthetic
uuuugcaaaccauacacccggu

SEQ ID NO: 661517 - RNA, 23 nt, Artificial Sequence
  Synthetic
auuuugcaaaccauacacccggu

SEQ ID NO: 661518 - RNA, 24 nt, Artificial Sequence
  Synthetic
uauuuugcaaaccauacacccggu

SEQ ID NO: 661519 - RNA, 18 nt, Artificial Sequence
  Synthetic
aggugcaggagauccggu

SEQ ID NO: 661520 - RNA, 19 nt, Artificial Sequence
  Synthetic
aaggugcaggagauccggu

SEQ ID NO: 661521 - RNA, 20 nt, Artificial Sequence
  Synthetic
gaaggugcaggagauccggu

SEQ ID NO: 661522 - RNA, 21 nt, Artificial Sequence
  Synthetic
ugaaggugcaggagauccggu

SEQ ID NO: 661523 - RNA, 22 nt, Artificial Sequence
  Synthetic
uugaaggugcaggagauccggu

SEQ ID NO: 661524 - RNA, 23 nt, Artificial Sequence
  Synthetic
auugaaggugcaggagauccggu

SEQ ID NO: 661525 - RNA, 24 nt, Artificial Sequence
  Synthetic
cauugaaggugcaggagauccggu

SEQ ID NO: 661526 - RNA, 18 nt, Artificial Sequence
  Synthetic
auguugaauaggagcggu

SEQ ID NO: 661527 - RNA, 19 nt, Artificial Sequence
  Synthetic
uauguugaauaggagcggu

SEQ ID NO: 661528 - RNA, 20 nt, Artificial Sequence
  Synthetic
cuauguugaauaggagcggu

SEQ ID NO: 661529 - RNA, 21 nt, Artificial Sequence
  Synthetic
acuauguugaauaggagcggu

SEQ ID NO: 661530 - RNA, 22 nt, Artificial Sequence
  Synthetic
cacuauguugaauaggagcggu

SEQ ID NO: 661531 - RNA, 23 nt, Artificial Sequence
  Synthetic
acacuauguugaauaggagcggu

SEQ ID NO: 661532 - RNA, 24 nt, Artificial Sequence
  Synthetic
aacacuauguugaauaggagcggu

SEQ ID NO: 661533 - RNA, 18 nt, Artificial Sequence
  Synthetic
gcaguucuuucuagcggu

SEQ ID NO: 661534 - RNA, 19 nt, Artificial Sequence
  Synthetic
ggcaguucuuucuagcggu

SEQ ID NO: 661535 - RNA, 20 nt, Artificial Sequence
  Synthetic
gggcaguucuuucuagcggu

SEQ ID NO: 661536 - RNA, 21 nt, Artificial Sequence
  Synthetic
cgggcaguucuuucuagcggu

SEQ ID NO: 661537 - RNA, 22 nt, Artificial Sequence
  Synthetic
ucgggcaguucuuucuagcggu

SEQ ID NO: 661538 - RNA, 23 nt, Artificial Sequence
  Synthetic
cucgggcaguucuuucuagcggu

SEQ ID NO: 661539 - RNA, 24 nt, Artificial Sequence
  Synthetic
ucucgggcaguucuuucuagcggu

SEQ ID NO: 661540 - RNA, 18 nt, Artificial Sequence
  Synthetic
ccauugccaaaaggcggu

SEQ ID NO: 661541 - RNA, 19 nt, Artificial Sequence
  Synthetic
uccauugccaaaaggcggu

SEQ ID NO: 661542 - RNA, 20 nt, Artificial Sequence
  Synthetic
uuccauugccaaaaggcggu

SEQ ID NO: 661543 - RNA, 21 nt, Artificial Sequence
  Synthetic
guuccauugccaaaaggcggu

SEQ ID NO: 661544 - RNA, 22 nt, Artificial Sequence
  Synthetic
aguuccauugccaaaaggcggu

SEQ ID NO: 661545 - RNA, 23 nt, Artificial Sequence
  Synthetic
aaguuccauugccaaaaggcggu

SEQ ID NO: 661546 - RNA, 24 nt, Artificial Sequence
  Synthetic
caaguuccauugccaaaaggcggu

SEQ ID NO: 661547 - RNA, 18 nt, Artificial Sequence
  Synthetic
auacuauuuuuuugcggu

SEQ ID NO: 661548 - RNA, 19 nt, Artificial Sequence
  Synthetic
cauacuauuuuuuugcggu

SEQ ID NO: 661549 - RNA, 20 nt, Artificial Sequence
  Synthetic
acauacuauuuuuuugcggu

SEQ ID NO: 661550 - RNA, 21 nt, Artificial Sequence
  Synthetic
cacauacuauuuuuuugcggu

SEQ ID NO: 661551 - RNA, 22 nt, Artificial Sequence
  Synthetic
ucacauacuauuuuuuugcggu

SEQ ID NO: 661552 - RNA, 23 nt, Artificial Sequence
  Synthetic
cucacauacuauuuuuuugcggu

SEQ ID NO: 661553 - RNA, 24 nt, Artificial Sequence
  Synthetic
ccucacauacuauuuuuuugcggu

SEQ ID NO: 661554 - RNA, 18 nt, Artificial Sequence
  Synthetic
caacucauauuaaucggu

SEQ ID NO: 661555 - RNA, 19 nt, Artificial Sequence
  Synthetic
acaacucauauuaaucggu

SEQ ID NO: 661556 - RNA, 20 nt, Artificial Sequence
  Synthetic
gacaacucauauuaaucggu

SEQ ID NO: 661557 - RNA, 21 nt, Artificial Sequence
  Synthetic
agacaacucauauuaaucggu

SEQ ID NO: 661558 - RNA, 22 nt, Artificial Sequence
  Synthetic
cagacaacucauauuaaucggu

SEQ ID NO: 661559 - RNA, 23 nt, Artificial Sequence
  Synthetic
acagacaacucauauuaaucggu

SEQ ID NO: 661560 - RNA, 24 nt, Artificial Sequence
  Synthetic
uacagacaacucauauuaaucggu

SEQ ID NO: 661561 - RNA, 18 nt, Artificial Sequence
  Synthetic
ucuacuucuuuccucggu

SEQ ID NO: 661562 - RNA, 19 nt, Artificial Sequence
  Synthetic
uucuacuucuuuccucggu

SEQ ID NO: 661563 - RNA, 20 nt, Artificial Sequence
  Synthetic
uuucuacuucuuuccucggu

SEQ ID NO: 661564 - RNA, 21 nt, Artificial Sequence
  Synthetic
auuucuacuucuuuccucggu

SEQ ID NO: 661565 - RNA, 22 nt, Artificial Sequence
  Synthetic
uauuucuacuucuuuccucggu

SEQ ID NO: 661566 - RNA, 23 nt, Artificial Sequence
  Synthetic
uuauuucuacuucuuuccucggu

SEQ ID NO: 661567 - RNA, 24 nt, Artificial Sequence
  Synthetic
cuuauuucuacuucuuuccucggu

SEQ ID NO: 661568 - RNA, 18 nt, Artificial Sequence
  Synthetic
guugcuuuauacuucggu

SEQ ID NO: 661569 - RNA, 19 nt, Artificial Sequence
  Synthetic
uguugcuuuauacuucggu

SEQ ID NO: 661570 - RNA, 20 nt, Artificial Sequence
  Synthetic
uuguugcuuuauacuucggu

SEQ ID NO: 661571 - RNA, 21 nt, Artificial Sequence
  Synthetic
auuguugcuuuauacuucggu

SEQ ID NO: 661572 - RNA, 22 nt, Artificial Sequence
  Synthetic
cauuguugcuuuauacuucggu

SEQ ID NO: 661573 - RNA, 23 nt, Artificial Sequence
  Synthetic
ccauuguugcuuuauacuucggu

SEQ ID NO: 661574 - RNA, 24 nt, Artificial Sequence
  Synthetic
uccauuguugcuuuauacuucggu

SEQ ID NO: 661575 - RNA, 18 nt, Artificial Sequence
  Synthetic
guauuuugcuuguucggu

SEQ ID NO: 661576 - RNA, 19 nt, Artificial Sequence
  Synthetic
cguauuuugcuuguucggu

SEQ ID NO: 661577 - RNA, 20 nt, Artificial Sequence
  Synthetic
acguauuuugcuuguucggu

SEQ ID NO: 661578 - RNA, 21 nt, Artificial Sequence
  Synthetic
aacguauuuugcuuguucggu

SEQ ID NO: 661579 - RNA, 22 nt, Artificial Sequence
  Synthetic
aaacguauuuugcuuguucggu

SEQ ID NO: 661580 - RNA, 23 nt, Artificial Sequence
  Synthetic
gaaacguauuuugcuuguucggu

SEQ ID NO: 661581 - RNA, 24 nt, Artificial Sequence
  Synthetic
ugaaacguauuuugcuuguucggu

SEQ ID NO: 661582 - RNA, 18 nt, Artificial Sequence
  Synthetic
ggguauagguaaaagggu

SEQ ID NO: 661583 - RNA, 19 nt, Artificial Sequence
  Synthetic
uggguauagguaaaagggu

SEQ ID NO: 661584 - RNA, 20 nt, Artificial Sequence
  Synthetic
guggguauagguaaaagggu

SEQ ID NO: 661585 - RNA, 21 nt, Artificial Sequence
  Synthetic
gguggguauagguaaaagggu

SEQ ID NO: 661586 - RNA, 22 nt, Artificial Sequence
  Synthetic
ggguggguauagguaaaagggu

SEQ ID NO: 661587 - RNA, 23 nt, Artificial Sequence
  Synthetic
uggguggguauagguaaaagggu

SEQ ID NO: 661588 - RNA, 24 nt, Artificial Sequence
  Synthetic
guggguggguauagguaaaagggu

SEQ ID NO: 661589 - RNA, 18 nt, Artificial Sequence
  Synthetic
agaacuugaacaaagggu

SEQ ID NO: 661590 - RNA, 19 nt, Artificial Sequence
  Synthetic
cagaacuugaacaaagggu

SEQ ID NO: 661591 - RNA, 20 nt, Artificial Sequence
  Synthetic
ucagaacuugaacaaagggu

SEQ ID NO: 661592 - RNA, 21 nt, Artificial Sequence
  Synthetic
uucagaacuugaacaaagggu

SEQ ID NO: 661593 - RNA, 22 nt, Artificial Sequence
  Synthetic
guucagaacuugaacaaagggu

SEQ ID NO: 661594 - RNA, 23 nt, Artificial Sequence
  Synthetic
uguucagaacuugaacaaagggu

SEQ ID NO: 661595 - RNA, 24 nt, Artificial Sequence
  Synthetic
guguucagaacuugaacaaagggu

SEQ ID NO: 661596 - RNA, 18 nt, Artificial Sequence
  Synthetic
gaaaccacaauaaagggu

SEQ ID NO: 661597 - RNA, 19 nt, Artificial Sequence
  Synthetic
ggaaaccacaauaaagggu

SEQ ID NO: 661598 - RNA, 20 nt, Artificial Sequence
  Synthetic
uggaaaccacaauaaagggu

SEQ ID NO: 661599 - RNA, 21 nt, Artificial Sequence
  Synthetic
uuggaaaccacaauaaagggu

SEQ ID NO: 661600 - RNA, 22 nt, Artificial Sequence
  Synthetic
cuuggaaaccacaauaaagggu

SEQ ID NO: 661601 - RNA, 23 nt, Artificial Sequence
  Synthetic
ccuuggaaaccacaauaaagggu

SEQ ID NO: 661602 - RNA, 24 nt, Artificial Sequence
  Synthetic
uccuuggaaaccacaauaaagggu

SEQ ID NO: 661603 - RNA, 18 nt, Artificial Sequence
  Synthetic
auugaggcggccaagggu

SEQ ID NO: 661604 - RNA, 19 nt, Artificial Sequence
  Synthetic
aauugaggcggccaagggu

SEQ ID NO: 661605 - RNA, 20 nt, Artificial Sequence
  Synthetic
aaauugaggcggccaagggu

SEQ ID NO: 661606 - RNA, 21 nt, Artificial Sequence
  Synthetic
aaaauugaggcggccaagggu

SEQ ID NO: 661607 - RNA, 22 nt, Artificial Sequence
  Synthetic
aaaaauugaggcggccaagggu

SEQ ID NO: 661608 - RNA, 23 nt, Artificial Sequence
  Synthetic
aaaaaauugaggcggccaagggu

SEQ ID NO: 661609 - RNA, 24 nt, Artificial Sequence
  Synthetic
gaaaaaauugaggcggccaagggu

SEQ ID NO: 661610 - RNA, 18 nt, Artificial Sequence
  Synthetic
cacuaaaacuucaagggu

SEQ ID NO: 661611 - RNA, 19 nt, Artificial Sequence
  Synthetic
ucacuaaaacuucaagggu

SEQ ID NO: 661612 - RNA, 20 nt, Artificial Sequence
  Synthetic
cucacuaaaacuucaagggu

SEQ ID NO: 661613 - RNA, 21 nt, Artificial Sequence
  Synthetic
acucacuaaaacuucaagggu

SEQ ID NO: 661614 - RNA, 22 nt, Artificial Sequence
  Synthetic
cacucacuaaaacuucaagggu

SEQ ID NO: 661615 - RNA, 23 nt, Artificial Sequence
  Synthetic
ucacucacuaaaacuucaagggu

SEQ ID NO: 661616 - RNA, 24 nt, Artificial Sequence
  Synthetic
cucacucacuaaaacuucaagggu

SEQ ID NO: 661617 - RNA, 18 nt, Artificial Sequence
  Synthetic
uuuaaauaagggaagggu

SEQ ID NO: 661618 - RNA, 19 nt, Artificial Sequence
  Synthetic
cuuuaaauaagggaagggu

SEQ ID NO: 661619 - RNA, 20 nt, Artificial Sequence
  Synthetic
ccuuuaaauaagggaagggu

SEQ ID NO: 661620 - RNA, 21 nt, Artificial Sequence
  Synthetic
uccuuuaaauaagggaagggu

SEQ ID NO: 661621 - RNA, 22 nt, Artificial Sequence
  Synthetic
guccuuuaaauaagggaagggu

SEQ ID NO: 661622 - RNA, 23 nt, Artificial Sequence
  Synthetic
uguccuuuaaauaagggaagggu

SEQ ID NO: 661623 - RNA, 24 nt, Artificial Sequence
  Synthetic
auguccuuuaaauaagggaagggu

SEQ ID NO: 661624 - RNA, 18 nt, Artificial Sequence
  Synthetic
ccugaugcugggaagggu

SEQ ID NO: 661625 - RNA, 19 nt, Artificial Sequence
  Synthetic
accugaugcugggaagggu

SEQ ID NO: 661626 - RNA, 20 nt, Artificial Sequence
  Synthetic
uaccugaugcugggaagggu

SEQ ID NO: 661627 - RNA, 21 nt, Artificial Sequence
  Synthetic
uuaccugaugcugggaagggu

SEQ ID NO: 661628 - RNA, 22 nt, Artificial Sequence
  Synthetic
guuaccugaugcugggaagggu

SEQ ID NO: 661629 - RNA, 23 nt, Artificial Sequence
  Synthetic
gguuaccugaugcugggaagggu

SEQ ID NO: 661630 - RNA, 24 nt, Artificial Sequence
  Synthetic
ugguuaccugaugcugggaagggu

SEQ ID NO: 661631 - RNA, 18 nt, Artificial Sequence
  Synthetic
gaaaacacuuggaagggu

SEQ ID NO: 661632 - RNA, 19 nt, Artificial Sequence
  Synthetic
ggaaaacacuuggaagggu

SEQ ID NO: 661633 - RNA, 20 nt, Artificial Sequence
  Synthetic
uggaaaacacuuggaagggu

SEQ ID NO: 661634 - RNA, 21 nt, Artificial Sequence
  Synthetic
auggaaaacacuuggaagggu

SEQ ID NO: 661635 - RNA, 22 nt, Artificial Sequence
  Synthetic
uauggaaaacacuuggaagggu

SEQ ID NO: 661636 - RNA, 23 nt, Artificial Sequence
  Synthetic
guauggaaaacacuuggaagggu

SEQ ID NO: 661637 - RNA, 24 nt, Artificial Sequence
  Synthetic
aguauggaaaacacuuggaagggu

SEQ ID NO: 661638 - RNA, 18 nt, Artificial Sequence
  Synthetic
auuagcaaauugaagggu

SEQ ID NO: 661639 - RNA, 19 nt, Artificial Sequence
  Synthetic
uauuagcaaauugaagggu

SEQ ID NO: 661640 - RNA, 20 nt, Artificial Sequence
  Synthetic
cuauuagcaaauugaagggu

SEQ ID NO: 661641 - RNA, 21 nt, Artificial Sequence
  Synthetic
ucuauuagcaaauugaagggu

SEQ ID NO: 661642 - RNA, 22 nt, Artificial Sequence
  Synthetic
gucuauuagcaaauugaagggu

SEQ ID NO: 661643 - RNA, 23 nt, Artificial Sequence
  Synthetic
ugucuauuagcaaauugaagggu

SEQ ID NO: 661644 - RNA, 24 nt, Artificial Sequence
  Synthetic
augucuauuagcaaauugaagggu

SEQ ID NO: 661645 - RNA, 18 nt, Artificial Sequence
  Synthetic
guguaucaagcuaagggu

SEQ ID NO: 661646 - RNA, 19 nt, Artificial Sequence
  Synthetic
uguguaucaagcuaagggu

SEQ ID NO: 661647 - RNA, 20 nt, Artificial Sequence
  Synthetic
uuguguaucaagcuaagggu

SEQ ID NO: 661648 - RNA, 21 nt, Artificial Sequence
  Synthetic
cuuguguaucaagcuaagggu

SEQ ID NO: 661649 - RNA, 22 nt, Artificial Sequence
  Synthetic
gcuuguguaucaagcuaagggu

SEQ ID NO: 661650 - RNA, 23 nt, Artificial Sequence
  Synthetic
ggcuuguguaucaagcuaagggu

SEQ ID NO: 661651 - RNA, 24 nt, Artificial Sequence
  Synthetic
gggcuuguguaucaagcuaagggu

SEQ ID NO: 661652 - RNA, 18 nt, Artificial Sequence
  Synthetic
uugccuagggguaagggu

SEQ ID NO: 661653 - RNA, 19 nt, Artificial Sequence
  Synthetic
auugccuagggguaagggu

SEQ ID NO: 661654 - RNA, 20 nt, Artificial Sequence
  Synthetic
aauugccuagggguaagggu

SEQ ID NO: 661655 - RNA, 21 nt, Artificial Sequence
  Synthetic
uaauugccuagggguaagggu

SEQ ID NO: 661656 - RNA, 22 nt, Artificial Sequence
  Synthetic
auaauugccuagggguaagggu

SEQ ID NO: 661657 - RNA, 23 nt, Artificial Sequence
  Synthetic
aauaauugccuagggguaagggu

SEQ ID NO: 661658 - RNA, 24 nt, Artificial Sequence
  Synthetic
caauaauugccuagggguaagggu

SEQ ID NO: 661659 - RNA, 18 nt, Artificial Sequence
  Synthetic
aauuaugaaaaacagggu

SEQ ID NO: 661660 - RNA, 19 nt, Artificial Sequence
  Synthetic
aaauuaugaaaaacagggu

SEQ ID NO: 661661 - RNA, 20 nt, Artificial Sequence
  Synthetic
gaaauuaugaaaaacagggu

SEQ ID NO: 661662 - RNA, 21 nt, Artificial Sequence
  Synthetic
ggaaauuaugaaaaacagggu

SEQ ID NO: 661663 - RNA, 22 nt, Artificial Sequence
  Synthetic
uggaaauuaugaaaaacagggu

SEQ ID NO: 661664 - RNA, 23 nt, Artificial Sequence
  Synthetic
guggaaauuaugaaaaacagggu

SEQ ID NO: 661665 - RNA, 24 nt, Artificial Sequence
  Synthetic
aguggaaauuaugaaaaacagggu

SEQ ID NO: 661666 - RNA, 18 nt, Artificial Sequence
  Synthetic
aggacacaucaacagggu

SEQ ID NO: 661667 - RNA, 19 nt, Artificial Sequence
  Synthetic
caggacacaucaacagggu

SEQ ID NO: 661668 - RNA, 20 nt, Artificial Sequence
  Synthetic
ccaggacacaucaacagggu

SEQ ID NO: 661669 - RNA, 21 nt, Artificial Sequence
  Synthetic
uccaggacacaucaacagggu

SEQ ID NO: 661670 - RNA, 22 nt, Artificial Sequence
  Synthetic
uuccaggacacaucaacagggu

SEQ ID NO: 661671 - RNA, 23 nt, Artificial Sequence
  Synthetic
auuccaggacacaucaacagggu

SEQ ID NO: 661672 - RNA, 24 nt, Artificial Sequence
  Synthetic
gauuccaggacacaucaacagggu

SEQ ID NO: 661673 - RNA, 18 nt, Artificial Sequence
  Synthetic
auguggcagaagcagggu

SEQ ID NO: 661674 - RNA, 19 nt, Artificial Sequence
  Synthetic
uauguggcagaagcagggu

SEQ ID NO: 661675 - RNA, 20 nt, Artificial Sequence
  Synthetic
uuauguggcagaagcagggu

SEQ ID NO: 661676 - RNA, 21 nt, Artificial Sequence
  Synthetic
guuauguggcagaagcagggu

SEQ ID NO: 661677 - RNA, 22 nt, Artificial Sequence
  Synthetic
uguuauguggcagaagcagggu

SEQ ID NO: 661678 - RNA, 23 nt, Artificial Sequence
  Synthetic
uuguuauguggcagaagcagggu

SEQ ID NO: 661679 - RNA, 24 nt, Artificial Sequence
  Synthetic
guuguuauguggcagaagcagggu

SEQ ID NO: 661680 - RNA, 18 nt, Artificial Sequence
  Synthetic
guaaagcagcagcagggu

SEQ ID NO: 661681 - RNA, 19 nt, Artificial Sequence
  Synthetic
gguaaagcagcagcagggu

SEQ ID NO: 661682 - RNA, 20 nt, Artificial Sequence
  Synthetic
ugguaaagcagcagcagggu

SEQ ID NO: 661683 - RNA, 21 nt, Artificial Sequence
  Synthetic
uugguaaagcagcagcagggu

SEQ ID NO: 661684 - RNA, 22 nt, Artificial Sequence
  Synthetic
guugguaaagcagcagcagggu

SEQ ID NO: 661685 - RNA, 23 nt, Artificial Sequence
  Synthetic
aguugguaaagcagcagcagggu

SEQ ID NO: 661686 - RNA, 24 nt, Artificial Sequence
  Synthetic
uaguugguaaagcagcagcagggu

SEQ ID NO: 661687 - RNA, 18 nt, Artificial Sequence
  Synthetic
gucagauaugagcagggu

SEQ ID NO: 661688 - RNA, 19 nt, Artificial Sequence
  Synthetic
agucagauaugagcagggu

SEQ ID NO: 661689 - RNA, 20 nt, Artificial Sequence
  Synthetic
uagucagauaugagcagggu

SEQ ID NO: 661690 - RNA, 21 nt, Artificial Sequence
  Synthetic
cuagucagauaugagcagggu

SEQ ID NO: 661691 - RNA, 22 nt, Artificial Sequence
  Synthetic
gcuagucagauaugagcagggu

SEQ ID NO: 661692 - RNA, 23 nt, Artificial Sequence
  Synthetic
agcuagucagauaugagcagggu

SEQ ID NO: 661693 - RNA, 24 nt, Artificial Sequence
  Synthetic
uagcuagucagauaugagcagggu

SEQ ID NO: 661694 - RNA, 18 nt, Artificial Sequence
  Synthetic
uccacuagcaggcagggu

SEQ ID NO: 661695 - RNA, 19 nt, Artificial Sequence
  Synthetic
cuccacuagcaggcagggu

SEQ ID NO: 661696 - RNA, 20 nt, Artificial Sequence
  Synthetic
ccuccacuagcaggcagggu

SEQ ID NO: 661697 - RNA, 21 nt, Artificial Sequence
  Synthetic
cccuccacuagcaggcagggu

SEQ ID NO: 661698 - RNA, 22 nt, Artificial Sequence
  Synthetic
acccuccacuagcaggcagggu

SEQ ID NO: 661699 - RNA, 23 nt, Artificial Sequence
  Synthetic
gacccuccacuagcaggcagggu

SEQ ID NO: 661700 - RNA, 24 nt, Artificial Sequence
  Synthetic
ggacccuccacuagcaggcagggu

SEQ ID NO: 661701 - RNA, 18 nt, Artificial Sequence
  Synthetic
auuguaaguuggcagggu

SEQ ID NO: 661702 - RNA, 19 nt, Artificial Sequence
  Synthetic
uauuguaaguuggcagggu

SEQ ID NO: 661703 - RNA, 20 nt, Artificial Sequence
  Synthetic
auauuguaaguuggcagggu

SEQ ID NO: 661704 - RNA, 21 nt, Artificial Sequence
  Synthetic
uauauuguaaguuggcagggu

SEQ ID NO: 661705 - RNA, 22 nt, Artificial Sequence
  Synthetic
cuauauuguaaguuggcagggu

SEQ ID NO: 661706 - RNA, 23 nt, Artificial Sequence
  Synthetic
ucuauauuguaaguuggcagggu

SEQ ID NO: 661707 - RNA, 24 nt, Artificial Sequence
  Synthetic
uucuauauuguaaguuggcagggu

SEQ ID NO: 661708 - RNA, 18 nt, Artificial Sequence
  Synthetic
aguuuuaccaaucagggu

SEQ ID NO: 661709 - RNA, 19 nt, Artificial Sequence
  Synthetic
gaguuuuaccaaucagggu

SEQ ID NO: 661710 - RNA, 20 nt, Artificial Sequence
  Synthetic
agaguuuuaccaaucagggu

SEQ ID NO: 661711 - RNA, 21 nt, Artificial Sequence
  Synthetic
gagaguuuuaccaaucagggu

SEQ ID NO: 661712 - RNA, 22 nt, Artificial Sequence
  Synthetic
ugagaguuuuaccaaucagggu

SEQ ID NO: 661713 - RNA, 23 nt, Artificial Sequence
  Synthetic
augagaguuuuaccaaucagggu

SEQ ID NO: 661714 - RNA, 24 nt, Artificial Sequence
  Synthetic
aaugagaguuuuaccaaucagggu

SEQ ID NO: 661715 - RNA, 18 nt, Artificial Sequence
  Synthetic
cuauauuugacucagggu

SEQ ID NO: 661716 - RNA, 19 nt, Artificial Sequence
  Synthetic
ccuauauuugacucagggu

SEQ ID NO: 661717 - RNA, 20 nt, Artificial Sequence
  Synthetic
accuauauuugacucagggu

SEQ ID NO: 661718 - RNA, 21 nt, Artificial Sequence
  Synthetic
aaccuauauuugacucagggu

SEQ ID NO: 661719 - RNA, 22 nt, Artificial Sequence
  Synthetic
caaccuauauuugacucagggu

SEQ ID NO: 661720 - RNA, 23 nt, Artificial Sequence
  Synthetic
ccaaccuauauuugacucagggu

SEQ ID NO: 661721 - RNA, 24 nt, Artificial Sequence
  Synthetic
accaaccuauauuugacucagggu

SEQ ID NO: 661722 - RNA, 18 nt, Artificial Sequence
  Synthetic
uuccagagagcagagggu

SEQ ID NO: 661723 - RNA, 19 nt, Artificial Sequence
  Synthetic
guuccagagagcagagggu

SEQ ID NO: 661724 - RNA, 20 nt, Artificial Sequence
  Synthetic
uguuccagagagcagagggu

SEQ ID NO: 661725 - RNA, 21 nt, Artificial Sequence
  Synthetic
cuguuccagagagcagagggu

SEQ ID NO: 661726 - RNA, 22 nt, Artificial Sequence
  Synthetic
acuguuccagagagcagagggu

SEQ ID NO: 661727 - RNA, 23 nt, Artificial Sequence
  Synthetic
cacuguuccagagagcagagggu

SEQ ID NO: 661728 - RNA, 24 nt, Artificial Sequence
  Synthetic
gcacuguuccagagagcagagggu

SEQ ID NO: 661729 - RNA, 18 nt, Artificial Sequence
  Synthetic
uuuuguagagcagagggu

SEQ ID NO: 661730 - RNA, 19 nt, Artificial Sequence
  Synthetic
cuuuuguagagcagagggu

SEQ ID NO: 661731 - RNA, 20 nt, Artificial Sequence
  Synthetic
acuuuuguagagcagagggu

SEQ ID NO: 661732 - RNA, 21 nt, Artificial Sequence
  Synthetic
uacuuuuguagagcagagggu

SEQ ID NO: 661733 - RNA, 22 nt, Artificial Sequence
  Synthetic
auacuuuuguagagcagagggu

SEQ ID NO: 661734 - RNA, 23 nt, Artificial Sequence
  Synthetic
uauacuuuuguagagcagagggu

SEQ ID NO: 661735 - RNA, 24 nt, Artificial Sequence
  Synthetic
auauacuuuuguagagcagagggu

SEQ ID NO: 661736 - RNA, 18 nt, Artificial Sequence
  Synthetic
acaaauaaaggagagggu

SEQ ID NO: 661737 - RNA, 19 nt, Artificial Sequence
  Synthetic
aacaaauaaaggagagggu

SEQ ID NO: 661738 - RNA, 20 nt, Artificial Sequence
  Synthetic
caacaaauaaaggagagggu

SEQ ID NO: 661739 - RNA, 21 nt, Artificial Sequence
  Synthetic
ccaacaaauaaaggagagggu

SEQ ID NO: 661740 - RNA, 22 nt, Artificial Sequence
  Synthetic
accaacaaauaaaggagagggu

SEQ ID NO: 661741 - RNA, 23 nt, Artificial Sequence
  Synthetic
aaccaacaaauaaaggagagggu

SEQ ID NO: 661742 - RNA, 24 nt, Artificial Sequence
  Synthetic
caaccaacaaauaaaggagagggu

SEQ ID NO: 661743 - RNA, 18 nt, Artificial Sequence
  Synthetic
uauugcucaaaggagggu

SEQ ID NO: 661744 - RNA, 19 nt, Artificial Sequence
  Synthetic
cuauugcucaaaggagggu

SEQ ID NO: 661745 - RNA, 20 nt, Artificial Sequence
  Synthetic
acuauugcucaaaggagggu

SEQ ID NO: 661746 - RNA, 21 nt, Artificial Sequence
  Synthetic
cacuauugcucaaaggagggu

SEQ ID NO: 661747 - RNA, 22 nt, Artificial Sequence
  Synthetic
acacuauugcucaaaggagggu

SEQ ID NO: 661748 - RNA, 23 nt, Artificial Sequence
  Synthetic
gacacuauugcucaaaggagggu

SEQ ID NO: 661749 - RNA, 24 nt, Artificial Sequence
  Synthetic
ugacacuauugcucaaaggagggu

SEQ ID NO: 661750 - RNA, 18 nt, Artificial Sequence
  Synthetic
caguauuuuaaggagggu

SEQ ID NO: 661751 - RNA, 19 nt, Artificial Sequence
  Synthetic
acaguauuuuaaggagggu

SEQ ID NO: 661752 - RNA, 20 nt, Artificial Sequence
  Synthetic
cacaguauuuuaaggagggu

SEQ ID NO: 661753 - RNA, 21 nt, Artificial Sequence
  Synthetic
gcacaguauuuuaaggagggu

SEQ ID NO: 661754 - RNA, 22 nt, Artificial Sequence
  Synthetic
ugcacaguauuuuaaggagggu

SEQ ID NO: 661755 - RNA, 23 nt, Artificial Sequence
  Synthetic
uugcacaguauuuuaaggagggu

SEQ ID NO: 661756 - RNA, 24 nt, Artificial Sequence
  Synthetic
guugcacaguauuuuaaggagggu

SEQ ID NO: 661757 - RNA, 18 nt, Artificial Sequence
  Synthetic
uacuggaguggggagggu

SEQ ID NO: 661758 - RNA, 19 nt, Artificial Sequence
  Synthetic
cuacuggaguggggagggu

SEQ ID NO: 661759 - RNA, 20 nt, Artificial Sequence
  Synthetic
ccuacuggaguggggagggu

SEQ ID NO: 661760 - RNA, 21 nt, Artificial Sequence
  Synthetic
gccuacuggaguggggagggu

SEQ ID NO: 661761 - RNA, 22 nt, Artificial Sequence
  Synthetic
agccuacuggaguggggagggu

SEQ ID NO: 661762 - RNA, 23 nt, Artificial Sequence
  Synthetic
aagccuacuggaguggggagggu

SEQ ID NO: 661763 - RNA, 24 nt, Artificial Sequence
  Synthetic
gaagccuacuggaguggggagggu

SEQ ID NO: 661764 - RNA, 18 nt, Artificial Sequence
  Synthetic
cuuaggcauauggagggu

SEQ ID NO: 661765 - RNA, 19 nt, Artificial Sequence
  Synthetic
acuuaggcauauggagggu

SEQ ID NO: 661766 - RNA, 20 nt, Artificial Sequence
  Synthetic
aacuuaggcauauggagggu

SEQ ID NO: 661767 - RNA, 21 nt, Artificial Sequence
  Synthetic
gaacuuaggcauauggagggu

SEQ ID NO: 661768 - RNA, 22 nt, Artificial Sequence
  Synthetic
agaacuuaggcauauggagggu

SEQ ID NO: 661769 - RNA, 23 nt, Artificial Sequence
  Synthetic
uagaacuuaggcauauggagggu

SEQ ID NO: 661770 - RNA, 24 nt, Artificial Sequence
  Synthetic
guagaacuuaggcauauggagggu

SEQ ID NO: 661771 - RNA, 18 nt, Artificial Sequence
  Synthetic
uacucuaggguggagggu

SEQ ID NO: 661772 - RNA, 19 nt, Artificial Sequence
  Synthetic
cuacucuaggguggagggu

SEQ ID NO: 661773 - RNA, 20 nt, Artificial Sequence
  Synthetic
ucuacucuaggguggagggu

SEQ ID NO: 661774 - RNA, 21 nt, Artificial Sequence
  Synthetic
aucuacucuaggguggagggu

SEQ ID NO: 661775 - RNA, 22 nt, Artificial Sequence
  Synthetic
gaucuacucuaggguggagggu

SEQ ID NO: 661776 - RNA, 23 nt, Artificial Sequence
  Synthetic
ggaucuacucuaggguggagggu

SEQ ID NO: 661777 - RNA, 24 nt, Artificial Sequence
  Synthetic
aggaucuacucuaggguggagggu

SEQ ID NO: 661778 - RNA, 18 nt, Artificial Sequence
  Synthetic
uauuagaguguggagggu

SEQ ID NO: 661779 - RNA, 19 nt, Artificial Sequence
  Synthetic
cuauuagaguguggagggu

SEQ ID NO: 661780 - RNA, 20 nt, Artificial Sequence
  Synthetic
acuauuagaguguggagggu

SEQ ID NO: 661781 - RNA, 21 nt, Artificial Sequence
  Synthetic
gacuauuagaguguggagggu

SEQ ID NO: 661782 - RNA, 22 nt, Artificial Sequence
  Synthetic
ggacuauuagaguguggagggu

SEQ ID NO: 661783 - RNA, 23 nt, Artificial Sequence
  Synthetic
gggacuauuagaguguggagggu

SEQ ID NO: 661784 - RNA, 24 nt, Artificial Sequence
  Synthetic
agggacuauuagaguguggagggu

SEQ ID NO: 661785 - RNA, 18 nt, Artificial Sequence
  Synthetic
aacuucaaagaugagggu

SEQ ID NO: 661786 - RNA, 19 nt, Artificial Sequence
  Synthetic
uaacuucaaagaugagggu

SEQ ID NO: 661787 - RNA, 20 nt, Artificial Sequence
  Synthetic
auaacuucaaagaugagggu

SEQ ID NO: 661788 - RNA, 21 nt, Artificial Sequence
  Synthetic
uauaacuucaaagaugagggu

SEQ ID NO: 661789 - RNA, 22 nt, Artificial Sequence
  Synthetic
guauaacuucaaagaugagggu

SEQ ID NO: 661790 - RNA, 23 nt, Artificial Sequence
  Synthetic
aguauaacuucaaagaugagggu

SEQ ID NO: 661791 - RNA, 24 nt, Artificial Sequence
  Synthetic
uaguauaacuucaaagaugagggu

SEQ ID NO: 661792 - RNA, 18 nt, Artificial Sequence
  Synthetic
acaccugagagugagggu

SEQ ID NO: 661793 - RNA, 19 nt, Artificial Sequence
  Synthetic
aacaccugagagugagggu

SEQ ID NO: 661794 - RNA, 20 nt, Artificial Sequence
  Synthetic
caacaccugagagugagggu

SEQ ID NO: 661795 - RNA, 21 nt, Artificial Sequence
  Synthetic
acaacaccugagagugagggu

SEQ ID NO: 661796 - RNA, 22 nt, Artificial Sequence
  Synthetic
gacaacaccugagagugagggu

SEQ ID NO: 661797 - RNA, 23 nt, Artificial Sequence
  Synthetic
ugacaacaccugagagugagggu

SEQ ID NO: 661798 - RNA, 24 nt, Artificial Sequence
  Synthetic
augacaacaccugagagugagggu

SEQ ID NO: 661799 - RNA, 18 nt, Artificial Sequence
  Synthetic
gcaacuucucgugagggu

SEQ ID NO: 661800 - RNA, 19 nt, Artificial Sequence
  Synthetic
ugcaacuucucgugagggu

SEQ ID NO: 661801 - RNA, 20 nt, Artificial Sequence
  Synthetic
uugcaacuucucgugagggu

SEQ ID NO: 661802 - RNA, 21 nt, Artificial Sequence
  Synthetic
uuugcaacuucucgugagggu

SEQ ID NO: 661803 - RNA, 22 nt, Artificial Sequence
  Synthetic
auuugcaacuucucgugagggu

SEQ ID NO: 661804 - RNA, 23 nt, Artificial Sequence
  Synthetic
uauuugcaacuucucgugagggu

SEQ ID NO: 661805 - RNA, 24 nt, Artificial Sequence
  Synthetic
guauuugcaacuucucgugagggu

SEQ ID NO: 661806 - RNA, 18 nt, Artificial Sequence
  Synthetic
gucacuuagugauagggu

SEQ ID NO: 661807 - RNA, 19 nt, Artificial Sequence
  Synthetic
ugucacuuagugauagggu

SEQ ID NO: 661808 - RNA, 20 nt, Artificial Sequence
  Synthetic
cugucacuuagugauagggu

SEQ ID NO: 661809 - RNA, 21 nt, Artificial Sequence
  Synthetic
ccugucacuuagugauagggu

SEQ ID NO: 661810 - RNA, 22 nt, Artificial Sequence
  Synthetic
gccugucacuuagugauagggu

SEQ ID NO: 661811 - RNA, 23 nt, Artificial Sequence
  Synthetic
agccugucacuuagugauagggu

SEQ ID NO: 661812 - RNA, 24 nt, Artificial Sequence
  Synthetic
uagccugucacuuagugauagggu

SEQ ID NO: 661813 - RNA, 18 nt, Artificial Sequence
  Synthetic
uuagacuaaaacuagggu

SEQ ID NO: 661814 - RNA, 19 nt, Artificial Sequence
  Synthetic
uuuagacuaaaacuagggu

SEQ ID NO: 661815 - RNA, 20 nt, Artificial Sequence
  Synthetic
guuuagacuaaaacuagggu

SEQ ID NO: 661816 - RNA, 21 nt, Artificial Sequence
  Synthetic
gguuuagacuaaaacuagggu

SEQ ID NO: 661817 - RNA, 22 nt, Artificial Sequence
  Synthetic
ugguuuagacuaaaacuagggu

SEQ ID NO: 661818 - RNA, 23 nt, Artificial Sequence
  Synthetic
cugguuuagacuaaaacuagggu

SEQ ID NO: 661819 - RNA, 24 nt, Artificial Sequence
  Synthetic
acugguuuagacuaaaacuagggu

SEQ ID NO: 661820 - RNA, 18 nt, Artificial Sequence
  Synthetic
ucaacaacccucuagggu

SEQ ID NO: 661821 - RNA, 19 nt, Artificial Sequence
  Synthetic
cucaacaacccucuagggu

SEQ ID NO: 661822 - RNA, 20 nt, Artificial Sequence
  Synthetic
ucucaacaacccucuagggu

SEQ ID NO: 661823 - RNA, 21 nt, Artificial Sequence
  Synthetic
cucucaacaacccucuagggu

SEQ ID NO: 661824 - RNA, 22 nt, Artificial Sequence
  Synthetic
ccucucaacaacccucuagggu

SEQ ID NO: 661825 - RNA, 23 nt, Artificial Sequence
  Synthetic
uccucucaacaacccucuagggu

SEQ ID NO: 661826 - RNA, 24 nt, Artificial Sequence
  Synthetic
cuccucucaacaacccucuagggu

SEQ ID NO: 661827 - RNA, 18 nt, Artificial Sequence
  Synthetic
agcuauugagaguagggu

SEQ ID NO: 661828 - RNA, 19 nt, Artificial Sequence
  Synthetic
cagcuauugagaguagggu

SEQ ID NO: 661829 - RNA, 20 nt, Artificial Sequence
  Synthetic
ccagcuauugagaguagggu

SEQ ID NO: 661830 - RNA, 21 nt, Artificial Sequence
  Synthetic
gccagcuauugagaguagggu

SEQ ID NO: 661831 - RNA, 22 nt, Artificial Sequence
  Synthetic
ugccagcuauugagaguagggu

SEQ ID NO: 661832 - RNA, 23 nt, Artificial Sequence
  Synthetic
cugccagcuauugagaguagggu

SEQ ID NO: 661833 - RNA, 24 nt, Artificial Sequence
  Synthetic
ccugccagcuauugagaguagggu

SEQ ID NO: 661834 - RNA, 18 nt, Artificial Sequence
  Synthetic
gagggguggggguagggu

SEQ ID NO: 661835 - RNA, 19 nt, Artificial Sequence
  Synthetic
ugagggguggggguagggu

SEQ ID NO: 661836 - RNA, 20 nt, Artificial Sequence
  Synthetic
augagggguggggguagggu

SEQ ID NO: 661837 - RNA, 21 nt, Artificial Sequence
  Synthetic
gaugagggguggggguagggu

SEQ ID NO: 661838 - RNA, 22 nt, Artificial Sequence
  Synthetic
ugaugagggguggggguagggu

SEQ ID NO: 661839 - RNA, 23 nt, Artificial Sequence
  Synthetic
augaugagggguggggguagggu

SEQ ID NO: 661840 - RNA, 24 nt, Artificial Sequence
  Synthetic
caugaugagggguggggguagggu

SEQ ID NO: 661841 - RNA, 18 nt, Artificial Sequence
  Synthetic
aggucaaaauuuuagggu

SEQ ID NO: 661842 - RNA, 19 nt, Artificial Sequence
  Synthetic
aaggucaaaauuuuagggu

SEQ ID NO: 661843 - RNA, 20 nt, Artificial Sequence
  Synthetic
uaaggucaaaauuuuagggu

SEQ ID NO: 661844 - RNA, 21 nt, Artificial Sequence
  Synthetic
auaaggucaaaauuuuagggu

SEQ ID NO: 661845 - RNA, 22 nt, Artificial Sequence
  Synthetic
aauaaggucaaaauuuuagggu

SEQ ID NO: 661846 - RNA, 23 nt, Artificial Sequence
  Synthetic
aaauaaggucaaaauuuuagggu

SEQ ID NO: 661847 - RNA, 24 nt, Artificial Sequence
  Synthetic
aaaauaaggucaaaauuuuagggu

SEQ ID NO: 661848 - RNA, 18 nt, Artificial Sequence
  Synthetic
cagaauuccaaaacgggu

SEQ ID NO: 661849 - RNA, 19 nt, Artificial Sequence
  Synthetic
ccagaauuccaaaacgggu

SEQ ID NO: 661850 - RNA, 20 nt, Artificial Sequence
  Synthetic
gccagaauuccaaaacgggu

SEQ ID NO: 661851 - RNA, 21 nt, Artificial Sequence
  Synthetic
ggccagaauuccaaaacgggu

SEQ ID NO: 661852 - RNA, 22 nt, Artificial Sequence
  Synthetic
aggccagaauuccaaaacgggu

SEQ ID NO: 661853 - RNA, 23 nt, Artificial Sequence
  Synthetic
aaggccagaauuccaaaacgggu

SEQ ID NO: 661854 - RNA, 24 nt, Artificial Sequence
  Synthetic
aaaggccagaauuccaaaacgggu

SEQ ID NO: 661855 - RNA, 18 nt, Artificial Sequence
  Synthetic
cacugagugggcacgggu

SEQ ID NO: 661856 - RNA, 19 nt, Artificial Sequence
  Synthetic
acacugagugggcacgggu

SEQ ID NO: 661857 - RNA, 20 nt, Artificial Sequence
  Synthetic
cacacugagugggcacgggu

SEQ ID NO: 661858 - RNA, 21 nt, Artificial Sequence
  Synthetic
acacacugagugggcacgggu

SEQ ID NO: 661859 - RNA, 22 nt, Artificial Sequence
  Synthetic
aacacacugagugggcacgggu

SEQ ID NO: 661860 - RNA, 23 nt, Artificial Sequence
  Synthetic
uaacacacugagugggcacgggu

SEQ ID NO: 661861 - RNA, 24 nt, Artificial Sequence
  Synthetic
auaacacacugagugggcacgggu

SEQ ID NO: 661862 - RNA, 18 nt, Artificial Sequence
  Synthetic
aaagccagucugacgggu

SEQ ID NO: 661863 - RNA, 19 nt, Artificial Sequence
  Synthetic
caaagccagucugacgggu

SEQ ID NO: 661864 - RNA, 20 nt, Artificial Sequence
  Synthetic
acaaagccagucugacgggu

SEQ ID NO: 661865 - RNA, 21 nt, Artificial Sequence
  Synthetic
aacaaagccagucugacgggu

SEQ ID NO: 661866 - RNA, 22 nt, Artificial Sequence
  Synthetic
uaacaaagccagucugacgggu

SEQ ID NO: 661867 - RNA, 23 nt, Artificial Sequence
  Synthetic
uuaacaaagccagucugacgggu

SEQ ID NO: 661868 - RNA, 24 nt, Artificial Sequence
  Synthetic
uuuaacaaagccagucugacgggu

SEQ ID NO: 661869 - RNA, 18 nt, Artificial Sequence
  Synthetic
uuuuuccguggaccgggu

SEQ ID NO: 661870 - RNA, 19 nt, Artificial Sequence
  Synthetic
auuuuuccguggaccgggu

SEQ ID NO: 661871 - RNA, 20 nt, Artificial Sequence
  Synthetic
aauuuuuccguggaccgggu

SEQ ID NO: 661872 - RNA, 21 nt, Artificial Sequence
  Synthetic
caauuuuuccguggaccgggu

SEQ ID NO: 661873 - RNA, 22 nt, Artificial Sequence
  Synthetic
acaauuuuuccguggaccgggu

SEQ ID NO: 661874 - RNA, 23 nt, Artificial Sequence
  Synthetic
gacaauuuuuccguggaccgggu

SEQ ID NO: 661875 - RNA, 24 nt, Artificial Sequence
  Synthetic
agacaauuuuuccguggaccgggu

SEQ ID NO: 661876 - RNA, 18 nt, Artificial Sequence
  Synthetic
aaccuccgccucccgggu

SEQ ID NO: 661877 - RNA, 19 nt, Artificial Sequence
  Synthetic
caaccuccgccucccgggu

SEQ ID NO: 661878 - RNA, 20 nt, Artificial Sequence
  Synthetic
gcaaccuccgccucccgggu

SEQ ID NO: 661879 - RNA, 21 nt, Artificial Sequence
  Synthetic
ugcaaccuccgccucccgggu

SEQ ID NO: 661880 - RNA, 22 nt, Artificial Sequence
  Synthetic
cugcaaccuccgccucccgggu

SEQ ID NO: 661881 - RNA, 23 nt, Artificial Sequence
  Synthetic
acugcaaccuccgccucccgggu

SEQ ID NO: 661882 - RNA, 24 nt, Artificial Sequence
  Synthetic
cacugcaaccuccgccucccgggu

SEQ ID NO: 661883 - RNA, 18 nt, Artificial Sequence
  Synthetic
aaccucugccucccgggu

SEQ ID NO: 661884 - RNA, 19 nt, Artificial Sequence
  Synthetic
caaccucugccucccgggu

SEQ ID NO: 661885 - RNA, 20 nt, Artificial Sequence
  Synthetic
gcaaccucugccucccgggu

SEQ ID NO: 661886 - RNA, 21 nt, Artificial Sequence
  Synthetic
ugcaaccucugccucccgggu

SEQ ID NO: 661887 - RNA, 22 nt, Artificial Sequence
  Synthetic
cugcaaccucugccucccgggu

SEQ ID NO: 661888 - RNA, 23 nt, Artificial Sequence
  Synthetic
acugcaaccucugccucccgggu

SEQ ID NO: 661889 - RNA, 24 nt, Artificial Sequence
  Synthetic
cacugcaaccucugccucccgggu

SEQ ID NO: 661890 - RNA, 18 nt, Artificial Sequence
  Synthetic
uuaacauggaugccgggu

SEQ ID NO: 661891 - RNA, 19 nt, Artificial Sequence
  Synthetic
cuuaacauggaugccgggu

SEQ ID NO: 661892 - RNA, 20 nt, Artificial Sequence
  Synthetic
ucuuaacauggaugccgggu

SEQ ID NO: 661893 - RNA, 21 nt, Artificial Sequence
  Synthetic
uucuuaacauggaugccgggu

SEQ ID NO: 661894 - RNA, 22 nt, Artificial Sequence
  Synthetic
auucuuaacauggaugccgggu

SEQ ID NO: 661895 - RNA, 23 nt, Artificial Sequence
  Synthetic
uauucuuaacauggaugccgggu

SEQ ID NO: 661896 - RNA, 24 nt, Artificial Sequence
  Synthetic
guauucuuaacauggaugccgggu

SEQ ID NO: 661897 - RNA, 18 nt, Artificial Sequence
  Synthetic
aaacaggaguuggcgggu

SEQ ID NO: 661898 - RNA, 19 nt, Artificial Sequence
  Synthetic
aaaacaggaguuggcgggu

SEQ ID NO: 661899 - RNA, 20 nt, Artificial Sequence
  Synthetic
gaaaacaggaguuggcgggu

SEQ ID NO: 661900 - RNA, 21 nt, Artificial Sequence
  Synthetic
ggaaaacaggaguuggcgggu

SEQ ID NO: 661901 - RNA, 22 nt, Artificial Sequence
  Synthetic
aggaaaacaggaguuggcgggu

SEQ ID NO: 661902 - RNA, 23 nt, Artificial Sequence
  Synthetic
caggaaaacaggaguuggcgggu

SEQ ID NO: 661903 - RNA, 24 nt, Artificial Sequence
  Synthetic
ucaggaaaacaggaguuggcgggu

SEQ ID NO: 661904 - RNA, 18 nt, Artificial Sequence
  Synthetic
aggggccuguuggcgggu

SEQ ID NO: 661905 - RNA, 19 nt, Artificial Sequence
  Synthetic
caggggccuguuggcgggu

SEQ ID NO: 661906 - RNA, 20 nt, Artificial Sequence
  Synthetic
gcaggggccuguuggcgggu

SEQ ID NO: 661907 - RNA, 21 nt, Artificial Sequence
  Synthetic
cgcaggggccuguuggcgggu

SEQ ID NO: 661908 - RNA, 22 nt, Artificial Sequence
  Synthetic
ccgcaggggccuguuggcgggu

SEQ ID NO: 661909 - RNA, 23 nt, Artificial Sequence
  Synthetic
gccgcaggggccuguuggcgggu

SEQ ID NO: 661910 - RNA, 24 nt, Artificial Sequence
  Synthetic
ggccgcaggggccuguuggcgggu

SEQ ID NO: 661911 - RNA, 18 nt, Artificial Sequence
  Synthetic
ccuggauguguaucgggu

SEQ ID NO: 661912 - RNA, 19 nt, Artificial Sequence
  Synthetic
accuggauguguaucgggu

SEQ ID NO: 661913 - RNA, 20 nt, Artificial Sequence
  Synthetic
aaccuggauguguaucgggu

SEQ ID NO: 661914 - RNA, 21 nt, Artificial Sequence
  Synthetic
gaaccuggauguguaucgggu

SEQ ID NO: 661915 - RNA, 22 nt, Artificial Sequence
  Synthetic
ggaaccuggauguguaucgggu

SEQ ID NO: 661916 - RNA, 23 nt, Artificial Sequence
  Synthetic
aggaaccuggauguguaucgggu

SEQ ID NO: 661917 - RNA, 24 nt, Artificial Sequence
  Synthetic
gaggaaccuggauguguaucgggu

SEQ ID NO: 661918 - RNA, 18 nt, Artificial Sequence
  Synthetic
cggggccugucaaggggu

SEQ ID NO: 661919 - RNA, 19 nt, Artificial Sequence
  Synthetic
ccggggccugucaaggggu

SEQ ID NO: 661920 - RNA, 20 nt, Artificial Sequence
  Synthetic
accggggccugucaaggggu

SEQ ID NO: 661921 - RNA, 21 nt, Artificial Sequence
  Synthetic
caccggggccugucaaggggu

SEQ ID NO: 661922 - RNA, 22 nt, Artificial Sequence
  Synthetic
acaccggggccugucaaggggu

SEQ ID NO: 661923 - RNA, 23 nt, Artificial Sequence
  Synthetic
cacaccggggccugucaaggggu

SEQ ID NO: 661924 - RNA, 24 nt, Artificial Sequence
  Synthetic
acacaccggggccugucaaggggu

SEQ ID NO: 661925 - RNA, 18 nt, Artificial Sequence
  Synthetic
gugacaguauuaaggggu

SEQ ID NO: 661926 - RNA, 19 nt, Artificial Sequence
  Synthetic
ugugacaguauuaaggggu

SEQ ID NO: 661927 - RNA, 20 nt, Artificial Sequence
  Synthetic
uugugacaguauuaaggggu

SEQ ID NO: 661928 - RNA, 21 nt, Artificial Sequence
  Synthetic
auugugacaguauuaaggggu

SEQ ID NO: 661929 - RNA, 22 nt, Artificial Sequence
  Synthetic
cauugugacaguauuaaggggu

SEQ ID NO: 661930 - RNA, 23 nt, Artificial Sequence
  Synthetic
ccauugugacaguauuaaggggu

SEQ ID NO: 661931 - RNA, 24 nt, Artificial Sequence
  Synthetic
gccauugugacaguauuaaggggu

SEQ ID NO: 661932 - RNA, 18 nt, Artificial Sequence
  Synthetic
gcugaaugacacaggggu

SEQ ID NO: 661933 - RNA, 19 nt, Artificial Sequence
  Synthetic
agcugaaugacacaggggu

SEQ ID NO: 661934 - RNA, 20 nt, Artificial Sequence
  Synthetic
uagcugaaugacacaggggu

SEQ ID NO: 661935 - RNA, 21 nt, Artificial Sequence
  Synthetic
auagcugaaugacacaggggu

SEQ ID NO: 661936 - RNA, 22 nt, Artificial Sequence
  Synthetic
uauagcugaaugacacaggggu

SEQ ID NO: 661937 - RNA, 23 nt, Artificial Sequence
  Synthetic
cuauagcugaaugacacaggggu

SEQ ID NO: 661938 - RNA, 24 nt, Artificial Sequence
  Synthetic
ucuauagcugaaugacacaggggu

SEQ ID NO: 661939 - RNA, 18 nt, Artificial Sequence
  Synthetic
uggguaauaggcaggggu

SEQ ID NO: 661940 - RNA, 19 nt, Artificial Sequence
  Synthetic
cuggguaauaggcaggggu

SEQ ID NO: 661941 - RNA, 20 nt, Artificial Sequence
  Synthetic
acuggguaauaggcaggggu

SEQ ID NO: 661942 - RNA, 21 nt, Artificial Sequence
  Synthetic
aacuggguaauaggcaggggu

SEQ ID NO: 661943 - RNA, 22 nt, Artificial Sequence
  Synthetic
gaacuggguaauaggcaggggu

SEQ ID NO: 661944 - RNA, 23 nt, Artificial Sequence
  Synthetic
agaacuggguaauaggcaggggu

SEQ ID NO: 661945 - RNA, 24 nt, Artificial Sequence
  Synthetic
uagaacuggguaauaggcaggggu

SEQ ID NO: 661946 - RNA, 18 nt, Artificial Sequence
  Synthetic
auuugaaugugcaggggu

SEQ ID NO: 661947 - RNA, 19 nt, Artificial Sequence
  Synthetic
uauuugaaugugcaggggu

SEQ ID NO: 661948 - RNA, 20 nt, Artificial Sequence
  Synthetic
cuauuugaaugugcaggggu

SEQ ID NO: 661949 - RNA, 21 nt, Artificial Sequence
  Synthetic
ucuauuugaaugugcaggggu

SEQ ID NO: 661950 - RNA, 22 nt, Artificial Sequence
  Synthetic
cucuauuugaaugugcaggggu

SEQ ID NO: 661951 - RNA, 23 nt, Artificial Sequence
  Synthetic
ccucuauuugaaugugcaggggu

SEQ ID NO: 661952 - RNA, 24 nt, Artificial Sequence
  Synthetic
uccucuauuugaaugugcaggggu

SEQ ID NO: 661953 - RNA, 18 nt, Artificial Sequence
  Synthetic
auuuuagguaagaggggu

SEQ ID NO: 661954 - RNA, 19 nt, Artificial Sequence
  Synthetic
aauuuuagguaagaggggu

SEQ ID NO: 661955 - RNA, 20 nt, Artificial Sequence
  Synthetic
gaauuuuagguaagaggggu

SEQ ID NO: 661956 - RNA, 21 nt, Artificial Sequence
  Synthetic
agaauuuuagguaagaggggu

SEQ ID NO: 661957 - RNA, 22 nt, Artificial Sequence
  Synthetic
cagaauuuuagguaagaggggu

SEQ ID NO: 661958 - RNA, 23 nt, Artificial Sequence
  Synthetic
ucagaauuuuagguaagaggggu

SEQ ID NO: 661959 - RNA, 24 nt, Artificial Sequence
  Synthetic
gucagaauuuuagguaagaggggu

SEQ ID NO: 661960 - RNA, 18 nt, Artificial Sequence
  Synthetic
gugugaaggaggaggggu

SEQ ID NO: 661961 - RNA, 19 nt, Artificial Sequence
  Synthetic
ggugugaaggaggaggggu

SEQ ID NO: 661962 - RNA, 20 nt, Artificial Sequence
  Synthetic
gggugugaaggaggaggggu

SEQ ID NO: 661963 - RNA, 21 nt, Artificial Sequence
  Synthetic
ggggugugaaggaggaggggu

SEQ ID NO: 661964 - RNA, 22 nt, Artificial Sequence
  Synthetic
aggggugugaaggaggaggggu

SEQ ID NO: 661965 - RNA, 23 nt, Artificial Sequence
  Synthetic
gaggggugugaaggaggaggggu

SEQ ID NO: 661966 - RNA, 24 nt, Artificial Sequence
  Synthetic
ggaggggugugaaggaggaggggu

SEQ ID NO: 661967 - RNA, 18 nt, Artificial Sequence
  Synthetic
uggggaagggggaggggu

SEQ ID NO: 661968 - RNA, 19 nt, Artificial Sequence
  Synthetic
uuggggaagggggaggggu

SEQ ID NO: 661969 - RNA, 20 nt, Artificial Sequence
  Synthetic
uuuggggaagggggaggggu

SEQ ID NO: 661970 - RNA, 21 nt, Artificial Sequence
  Synthetic
uuuuggggaagggggaggggu

SEQ ID NO: 661971 - RNA, 22 nt, Artificial Sequence
  Synthetic
auuuuggggaagggggaggggu

SEQ ID NO: 661972 - RNA, 23 nt, Artificial Sequence
  Synthetic
aauuuuggggaagggggaggggu

SEQ ID NO: 661973 - RNA, 24 nt, Artificial Sequence
  Synthetic
aaauuuuggggaagggggaggggu

SEQ ID NO: 661974 - RNA, 18 nt, Artificial Sequence
  Synthetic
gugugaagggggaggggu

SEQ ID NO: 661975 - RNA, 19 nt, Artificial Sequence
  Synthetic
ggugugaagggggaggggu

SEQ ID NO: 661976 - RNA, 20 nt, Artificial Sequence
  Synthetic
gggugugaagggggaggggu

SEQ ID NO: 661977 - RNA, 21 nt, Artificial Sequence
  Synthetic
ggggugugaagggggaggggu

SEQ ID NO: 661978 - RNA, 22 nt, Artificial Sequence
  Synthetic
aggggugugaagggggaggggu

SEQ ID NO: 661979 - RNA, 23 nt, Artificial Sequence
  Synthetic
gaggggugugaagggggaggggu

SEQ ID NO: 661980 - RNA, 24 nt, Artificial Sequence
  Synthetic
ggaggggugugaagggggaggggu

SEQ ID NO: 661981 - RNA, 18 nt, Artificial Sequence
  Synthetic
cuagagaauuggaggggu

SEQ ID NO: 661982 - RNA, 19 nt, Artificial Sequence
  Synthetic
ccuagagaauuggaggggu

SEQ ID NO: 661983 - RNA, 20 nt, Artificial Sequence
  Synthetic
uccuagagaauuggaggggu

SEQ ID NO: 661984 - RNA, 21 nt, Artificial Sequence
  Synthetic
uuccuagagaauuggaggggu

SEQ ID NO: 661985 - RNA, 22 nt, Artificial Sequence
  Synthetic
cuuccuagagaauuggaggggu

SEQ ID NO: 661986 - RNA, 23 nt, Artificial Sequence
  Synthetic
acuuccuagagaauuggaggggu

SEQ ID NO: 661987 - RNA, 24 nt, Artificial Sequence
  Synthetic
aacuuccuagagaauuggaggggu

SEQ ID NO: 661988 - RNA, 18 nt, Artificial Sequence
  Synthetic
aaguugagucauaggggu

SEQ ID NO: 661989 - RNA, 19 nt, Artificial Sequence
  Synthetic
gaaguugagucauaggggu

SEQ ID NO: 661990 - RNA, 20 nt, Artificial Sequence
  Synthetic
agaaguugagucauaggggu

SEQ ID NO: 661991 - RNA, 21 nt, Artificial Sequence
  Synthetic
gagaaguugagucauaggggu

SEQ ID NO: 661992 - RNA, 22 nt, Artificial Sequence
  Synthetic
ugagaaguugagucauaggggu

SEQ ID NO: 661993 - RNA, 23 nt, Artificial Sequence
  Synthetic
augagaaguugagucauaggggu

SEQ ID NO: 661994 - RNA, 24 nt, Artificial Sequence
  Synthetic
uaugagaaguugagucauaggggu

SEQ ID NO: 661995 - RNA, 18 nt, Artificial Sequence
  Synthetic
accccuaagacuaggggu

SEQ ID NO: 661996 - RNA, 19 nt, Artificial Sequence
  Synthetic
aaccccuaagacuaggggu

SEQ ID NO: 661997 - RNA, 20 nt, Artificial Sequence
  Synthetic
caaccccuaagacuaggggu

SEQ ID NO: 661998 - RNA, 21 nt, Artificial Sequence
  Synthetic
ccaaccccuaagacuaggggu

SEQ ID NO: 661999 - RNA, 22 nt, Artificial Sequence
  Synthetic
gccaaccccuaagacuaggggu

SEQ ID NO: 662000 - RNA, 23 nt, Artificial Sequence
  Synthetic
ggccaaccccuaagacuaggggu

SEQ ID NO: 662001 - RNA, 24 nt, Artificial Sequence
  Synthetic
uggccaaccccuaagacuaggggu

SEQ ID NO: 662002 - RNA, 18 nt, Artificial Sequence
  Synthetic
gauagagugucuaggggu

SEQ ID NO: 662003 - RNA, 19 nt, Artificial Sequence
  Synthetic
ugauagagugucuaggggu

SEQ ID NO: 662004 - RNA, 20 nt, Artificial Sequence
  Synthetic
augauagagugucuaggggu

SEQ ID NO: 662005 - RNA, 21 nt, Artificial Sequence
  Synthetic
uaugauagagugucuaggggu

SEQ ID NO: 662006 - RNA, 22 nt, Artificial Sequence
  Synthetic
cuaugauagagugucuaggggu

SEQ ID NO: 662007 - RNA, 23 nt, Artificial Sequence
  Synthetic
acuaugauagagugucuaggggu

SEQ ID NO: 662008 - RNA, 24 nt, Artificial Sequence
  Synthetic
uacuaugauagagugucuaggggu

SEQ ID NO: 662009 - RNA, 18 nt, Artificial Sequence
  Synthetic
aggaaagcggguaggggu

SEQ ID NO: 662010 - RNA, 19 nt, Artificial Sequence
  Synthetic
aaggaaagcggguaggggu

SEQ ID NO: 662011 - RNA, 20 nt, Artificial Sequence
  Synthetic
aaaggaaagcggguaggggu

SEQ ID NO: 662012 - RNA, 21 nt, Artificial Sequence
  Synthetic
caaaggaaagcggguaggggu

SEQ ID NO: 662013 - RNA, 22 nt, Artificial Sequence
  Synthetic
gcaaaggaaagcggguaggggu

SEQ ID NO: 662014 - RNA, 23 nt, Artificial Sequence
  Synthetic
agcaaaggaaagcggguaggggu

SEQ ID NO: 662015 - RNA, 24 nt, Artificial Sequence
  Synthetic
cagcaaaggaaagcggguaggggu

SEQ ID NO: 662016 - RNA, 18 nt, Artificial Sequence
  Synthetic
aaggaacuucuuaggggu

SEQ ID NO: 662017 - RNA, 19 nt, Artificial Sequence
  Synthetic
caaggaacuucuuaggggu

SEQ ID NO: 662018 - RNA, 20 nt, Artificial Sequence
  Synthetic
acaaggaacuucuuaggggu

SEQ ID NO: 662019 - RNA, 21 nt, Artificial Sequence
  Synthetic
uacaaggaacuucuuaggggu

SEQ ID NO: 662020 - RNA, 22 nt, Artificial Sequence
  Synthetic
guacaaggaacuucuuaggggu

SEQ ID NO: 662021 - RNA, 23 nt, Artificial Sequence
  Synthetic
aguacaaggaacuucuuaggggu

SEQ ID NO: 662022 - RNA, 24 nt, Artificial Sequence
  Synthetic
aaguacaaggaacuucuuaggggu

SEQ ID NO: 662023 - RNA, 18 nt, Artificial Sequence
  Synthetic
aaaagcaaaaaacggggu

SEQ ID NO: 662024 - RNA, 19 nt, Artificial Sequence
  Synthetic
aaaaagcaaaaaacggggu

SEQ ID NO: 662025 - RNA, 20 nt, Artificial Sequence
  Synthetic
gaaaaagcaaaaaacggggu

SEQ ID NO: 662026 - RNA, 21 nt, Artificial Sequence
  Synthetic
ugaaaaagcaaaaaacggggu

SEQ ID NO: 662027 - RNA, 22 nt, Artificial Sequence
  Synthetic
cugaaaaagcaaaaaacggggu

SEQ ID NO: 662028 - RNA, 23 nt, Artificial Sequence
  Synthetic
acugaaaaagcaaaaaacggggu

SEQ ID NO: 662029 - RNA, 24 nt, Artificial Sequence
  Synthetic
aacugaaaaagcaaaaaacggggu

SEQ ID NO: 662030 - RNA, 18 nt, Artificial Sequence
  Synthetic
aacugggauuaacggggu

SEQ ID NO: 662031 - RNA, 19 nt, Artificial Sequence
  Synthetic
aaacugggauuaacggggu

SEQ ID NO: 662032 - RNA, 20 nt, Artificial Sequence
  Synthetic
gaaacugggauuaacggggu

SEQ ID NO: 662033 - RNA, 21 nt, Artificial Sequence
  Synthetic
ugaaacugggauuaacggggu

SEQ ID NO: 662034 - RNA, 22 nt, Artificial Sequence
  Synthetic
augaaacugggauuaacggggu

SEQ ID NO: 662035 - RNA, 23 nt, Artificial Sequence
  Synthetic
gaugaaacugggauuaacggggu

SEQ ID NO: 662036 - RNA, 24 nt, Artificial Sequence
  Synthetic
agaugaaacugggauuaacggggu

SEQ ID NO: 662037 - RNA, 18 nt, Artificial Sequence
  Synthetic
cuauaacauccucggggu

SEQ ID NO: 662038 - RNA, 19 nt, Artificial Sequence
  Synthetic
gcuauaacauccucggggu

SEQ ID NO: 662039 - RNA, 20 nt, Artificial Sequence
  Synthetic
agcuauaacauccucggggu

SEQ ID NO: 662040 - RNA, 21 nt, Artificial Sequence
  Synthetic
aagcuauaacauccucggggu

SEQ ID NO: 662041 - RNA, 22 nt, Artificial Sequence
  Synthetic
uaagcuauaacauccucggggu

SEQ ID NO: 662042 - RNA, 23 nt, Artificial Sequence
  Synthetic
cuaagcuauaacauccucggggu

SEQ ID NO: 662043 - RNA, 24 nt, Artificial Sequence
  Synthetic
ucuaagcuauaacauccucggggu

SEQ ID NO: 662044 - RNA, 18 nt, Artificial Sequence
  Synthetic
gaguuauaacaagggggu

SEQ ID NO: 662045 - RNA, 19 nt, Artificial Sequence
  Synthetic
agaguuauaacaagggggu

SEQ ID NO: 662046 - RNA, 20 nt, Artificial Sequence
  Synthetic
gagaguuauaacaagggggu

SEQ ID NO: 662047 - RNA, 21 nt, Artificial Sequence
  Synthetic
ggagaguuauaacaagggggu

SEQ ID NO: 662048 - RNA, 22 nt, Artificial Sequence
  Synthetic
uggagaguuauaacaagggggu

SEQ ID NO: 662049 - RNA, 23 nt, Artificial Sequence
  Synthetic
guggagaguuauaacaagggggu

SEQ ID NO: 662050 - RNA, 24 nt, Artificial Sequence
  Synthetic
aguggagaguuauaacaagggggu

SEQ ID NO: 662051 - RNA, 18 nt, Artificial Sequence
  Synthetic
uggggccugucagggggu

SEQ ID NO: 662052 - RNA, 19 nt, Artificial Sequence
  Synthetic
cuggggccugucagggggu

SEQ ID NO: 662053 - RNA, 20 nt, Artificial Sequence
  Synthetic
acuggggccugucagggggu

SEQ ID NO: 662054 - RNA, 21 nt, Artificial Sequence
  Synthetic
cacuggggccugucagggggu

SEQ ID NO: 662055 - RNA, 22 nt, Artificial Sequence
  Synthetic
acacuggggccugucagggggu

SEQ ID NO: 662056 - RNA, 23 nt, Artificial Sequence
  Synthetic
cacacuggggccugucagggggu

SEQ ID NO: 662057 - RNA, 24 nt, Artificial Sequence
  Synthetic
acacacuggggccugucagggggu

SEQ ID NO: 662058 - RNA, 18 nt, Artificial Sequence
  Synthetic
acgugaauaugagggggu

SEQ ID NO: 662059 - RNA, 19 nt, Artificial Sequence
  Synthetic
aacgugaauaugagggggu

SEQ ID NO: 662060 - RNA, 20 nt, Artificial Sequence
  Synthetic
aaacgugaauaugagggggu

SEQ ID NO: 662061 - RNA, 21 nt, Artificial Sequence
  Synthetic
uaaacgugaauaugagggggu

SEQ ID NO: 662062 - RNA, 22 nt, Artificial Sequence
  Synthetic
guaaacgugaauaugagggggu

SEQ ID NO: 662063 - RNA, 23 nt, Artificial Sequence
  Synthetic
aguaaacgugaauaugagggggu

SEQ ID NO: 662064 - RNA, 24 nt, Artificial Sequence
  Synthetic
gaguaaacgugaauaugagggggu

SEQ ID NO: 662065 - RNA, 18 nt, Artificial Sequence
  Synthetic
cauuugaagugagggggu

SEQ ID NO: 662066 - RNA, 19 nt, Artificial Sequence
  Synthetic
gcauuugaagugagggggu

SEQ ID NO: 662067 - RNA, 20 nt, Artificial Sequence
  Synthetic
cgcauuugaagugagggggu

SEQ ID NO: 662068 - RNA, 21 nt, Artificial Sequence
  Synthetic
acgcauuugaagugagggggu

SEQ ID NO: 662069 - RNA, 22 nt, Artificial Sequence
  Synthetic
cacgcauuugaagugagggggu

SEQ ID NO: 662070 - RNA, 23 nt, Artificial Sequence
  Synthetic
ccacgcauuugaagugagggggu

SEQ ID NO: 662071 - RNA, 24 nt, Artificial Sequence
  Synthetic
uccacgcauuugaagugagggggu

SEQ ID NO: 662072 - RNA, 18 nt, Artificial Sequence
  Synthetic
ccuuacuugugagggggu

SEQ ID NO: 662073 - RNA, 19 nt, Artificial Sequence
  Synthetic
accuuacuugugagggggu

SEQ ID NO: 662074 - RNA, 20 nt, Artificial Sequence
  Synthetic
uaccuuacuugugagggggu

SEQ ID NO: 662075 - RNA, 21 nt, Artificial Sequence
  Synthetic
auaccuuacuugugagggggu

SEQ ID NO: 662076 - RNA, 22 nt, Artificial Sequence
  Synthetic
aauaccuuacuugugagggggu

SEQ ID NO: 662077 - RNA, 23 nt, Artificial Sequence
  Synthetic
gaauaccuuacuugugagggggu

SEQ ID NO: 662078 - RNA, 24 nt, Artificial Sequence
  Synthetic
ugaauaccuuacuugugagggggu

SEQ ID NO: 662079 - RNA, 18 nt, Artificial Sequence
  Synthetic
cugggaaggguagggggu

SEQ ID NO: 662080 - RNA, 19 nt, Artificial Sequence
  Synthetic
gcugggaaggguagggggu

SEQ ID NO: 662081 - RNA, 20 nt, Artificial Sequence
  Synthetic
ugcugggaaggguagggggu

SEQ ID NO: 662082 - RNA, 21 nt, Artificial Sequence
  Synthetic
augcugggaaggguagggggu

SEQ ID NO: 662083 - RNA, 22 nt, Artificial Sequence
  Synthetic
gaugcugggaaggguagggggu

SEQ ID NO: 662084 - RNA, 23 nt, Artificial Sequence
  Synthetic
ugaugcugggaaggguagggggu

SEQ ID NO: 662085 - RNA, 24 nt, Artificial Sequence
  Synthetic
cugaugcugggaaggguagggggu

SEQ ID NO: 662086 - RNA, 18 nt, Artificial Sequence
  Synthetic
gucaggaggcacgggggu

SEQ ID NO: 662087 - RNA, 19 nt, Artificial Sequence
  Synthetic
agucaggaggcacgggggu

SEQ ID NO: 662088 - RNA, 20 nt, Artificial Sequence
  Synthetic
cagucaggaggcacgggggu

SEQ ID NO: 662089 - RNA, 21 nt, Artificial Sequence
  Synthetic
ccagucaggaggcacgggggu

SEQ ID NO: 662090 - RNA, 22 nt, Artificial Sequence
  Synthetic
cccagucaggaggcacgggggu

SEQ ID NO: 662091 - RNA, 23 nt, Artificial Sequence
  Synthetic
ucccagucaggaggcacgggggu

SEQ ID NO: 662092 - RNA, 24 nt, Artificial Sequence
  Synthetic
cucccagucaggaggcacgggggu

SEQ ID NO: 662093 - RNA, 18 nt, Artificial Sequence
  Synthetic
ucucaggggauggggggu

SEQ ID NO: 662094 - RNA, 19 nt, Artificial Sequence
  Synthetic
cucucaggggauggggggu

SEQ ID NO: 662095 - RNA, 20 nt, Artificial Sequence
  Synthetic
ccucucaggggauggggggu

SEQ ID NO: 662096 - RNA, 21 nt, Artificial Sequence
  Synthetic
gccucucaggggauggggggu

SEQ ID NO: 662097 - RNA, 22 nt, Artificial Sequence
  Synthetic
ggccucucaggggauggggggu

SEQ ID NO: 662098 - RNA, 23 nt, Artificial Sequence
  Synthetic
gggccucucaggggauggggggu

SEQ ID NO: 662099 - RNA, 24 nt, Artificial Sequence
  Synthetic
ggggccucucaggggauggggggu

SEQ ID NO: 662100 - RNA, 18 nt, Artificial Sequence
  Synthetic
ccaaauaugcuggggggu

SEQ ID NO: 662101 - RNA, 19 nt, Artificial Sequence
  Synthetic
gccaaauaugcuggggggu

SEQ ID NO: 662102 - RNA, 20 nt, Artificial Sequence
  Synthetic
ugccaaauaugcuggggggu

SEQ ID NO: 662103 - RNA, 21 nt, Artificial Sequence
  Synthetic
cugccaaauaugcuggggggu

SEQ ID NO: 662104 - RNA, 22 nt, Artificial Sequence
  Synthetic
acugccaaauaugcuggggggu

SEQ ID NO: 662105 - RNA, 23 nt, Artificial Sequence
  Synthetic
cacugccaaauaugcuggggggu

SEQ ID NO: 662106 - RNA, 24 nt, Artificial Sequence
  Synthetic
gcacugccaaauaugcuggggggu

SEQ ID NO: 662107 - RNA, 18 nt, Artificial Sequence
  Synthetic
agugguggguaugggggu

SEQ ID NO: 662108 - RNA, 19 nt, Artificial Sequence
  Synthetic
gagugguggguaugggggu

SEQ ID NO: 662109 - RNA, 20 nt, Artificial Sequence
  Synthetic
ggagugguggguaugggggu

SEQ ID NO: 662110 - RNA, 21 nt, Artificial Sequence
  Synthetic
uggagugguggguaugggggu

SEQ ID NO: 662111 - RNA, 22 nt, Artificial Sequence
  Synthetic
auggagugguggguaugggggu

SEQ ID NO: 662112 - RNA, 23 nt, Artificial Sequence
  Synthetic
aauggagugguggguaugggggu

SEQ ID NO: 662113 - RNA, 24 nt, Artificial Sequence
  Synthetic
gaauggagugguggguaugggggu

SEQ ID NO: 662114 - RNA, 18 nt, Artificial Sequence
  Synthetic
gaagaaggaacugggggu

SEQ ID NO: 662115 - RNA, 19 nt, Artificial Sequence
  Synthetic
ggaagaaggaacugggggu

SEQ ID NO: 662116 - RNA, 20 nt, Artificial Sequence
  Synthetic
gggaagaaggaacugggggu

SEQ ID NO: 662117 - RNA, 21 nt, Artificial Sequence
  Synthetic
ggggaagaaggaacugggggu

SEQ ID NO: 662118 - RNA, 22 nt, Artificial Sequence
  Synthetic
aggggaagaaggaacugggggu

SEQ ID NO: 662119 - RNA, 23 nt, Artificial Sequence
  Synthetic
uaggggaagaaggaacugggggu

SEQ ID NO: 662120 - RNA, 24 nt, Artificial Sequence
  Synthetic
uuaggggaagaaggaacugggggu

SEQ ID NO: 662121 - RNA, 18 nt, Artificial Sequence
  Synthetic
uaauuauaagcugggggu

SEQ ID NO: 662122 - RNA, 19 nt, Artificial Sequence
  Synthetic
cuaauuauaagcugggggu

SEQ ID NO: 662123 - RNA, 20 nt, Artificial Sequence
  Synthetic
ccuaauuauaagcugggggu

SEQ ID NO: 662124 - RNA, 21 nt, Artificial Sequence
  Synthetic
uccuaauuauaagcugggggu

SEQ ID NO: 662125 - RNA, 22 nt, Artificial Sequence
  Synthetic
uuccuaauuauaagcugggggu

SEQ ID NO: 662126 - RNA, 23 nt, Artificial Sequence
  Synthetic
uuuccuaauuauaagcugggggu

SEQ ID NO: 662127 - RNA, 24 nt, Artificial Sequence
  Synthetic
auuuccuaauuauaagcugggggu

SEQ ID NO: 662128 - RNA, 18 nt, Artificial Sequence
  Synthetic
ugauaauaugcugggggu

SEQ ID NO: 662129 - RNA, 19 nt, Artificial Sequence
  Synthetic
gugauaauaugcugggggu

SEQ ID NO: 662130 - RNA, 20 nt, Artificial Sequence
  Synthetic
ugugauaauaugcugggggu

SEQ ID NO: 662131 - RNA, 21 nt, Artificial Sequence
  Synthetic
uugugauaauaugcugggggu

SEQ ID NO: 662132 - RNA, 22 nt, Artificial Sequence
  Synthetic
uuugugauaauaugcugggggu

SEQ ID NO: 662133 - RNA, 23 nt, Artificial Sequence
  Synthetic
cuuugugauaauaugcugggggu

SEQ ID NO: 662134 - RNA, 24 nt, Artificial Sequence
  Synthetic
gcuuugugauaauaugcugggggu

SEQ ID NO: 662135 - RNA, 18 nt, Artificial Sequence
  Synthetic
ugaaguguugcugggggu

SEQ ID NO: 662136 - RNA, 19 nt, Artificial Sequence
  Synthetic
gugaaguguugcugggggu

SEQ ID NO: 662137 - RNA, 20 nt, Artificial Sequence
  Synthetic
agugaaguguugcugggggu

SEQ ID NO: 662138 - RNA, 21 nt, Artificial Sequence
  Synthetic
cagugaaguguugcugggggu

SEQ ID NO: 662139 - RNA, 22 nt, Artificial Sequence
  Synthetic
gcagugaaguguugcugggggu

SEQ ID NO: 662140 - RNA, 23 nt, Artificial Sequence
  Synthetic
ugcagugaaguguugcugggggu

SEQ ID NO: 662141 - RNA, 24 nt, Artificial Sequence
  Synthetic
uugcagugaaguguugcugggggu

SEQ ID NO: 662142 - RNA, 18 nt, Artificial Sequence
  Synthetic
ugcugggggguugggggu

SEQ ID NO: 662143 - RNA, 19 nt, Artificial Sequence
  Synthetic
augcugggggguugggggu

SEQ ID NO: 662144 - RNA, 20 nt, Artificial Sequence
  Synthetic
uaugcugggggguugggggu

SEQ ID NO: 662145 - RNA, 21 nt, Artificial Sequence
  Synthetic
auaugcugggggguugggggu

SEQ ID NO: 662146 - RNA, 22 nt, Artificial Sequence
  Synthetic
aauaugcugggggguugggggu

SEQ ID NO: 662147 - RNA, 23 nt, Artificial Sequence
  Synthetic
aaauaugcugggggguugggggu

SEQ ID NO: 662148 - RNA, 24 nt, Artificial Sequence
  Synthetic
caaauaugcugggggguugggggu

SEQ ID NO: 662149 - RNA, 18 nt, Artificial Sequence
  Synthetic
cuggugccuguugggggu

SEQ ID NO: 662150 - RNA, 19 nt, Artificial Sequence
  Synthetic
acuggugccuguugggggu

SEQ ID NO: 662151 - RNA, 20 nt, Artificial Sequence
  Synthetic
cacuggugccuguugggggu

SEQ ID NO: 662152 - RNA, 21 nt, Artificial Sequence
  Synthetic
acacuggugccuguugggggu

SEQ ID NO: 662153 - RNA, 22 nt, Artificial Sequence
  Synthetic
cacacuggugccuguugggggu

SEQ ID NO: 662154 - RNA, 23 nt, Artificial Sequence
  Synthetic
acacacuggugccuguugggggu

SEQ ID NO: 662155 - RNA, 24 nt, Artificial Sequence
  Synthetic
cacacacuggugccuguugggggu

SEQ ID NO: 662156 - RNA, 18 nt, Artificial Sequence
  Synthetic
ggagaguaggaauggggu

SEQ ID NO: 662157 - RNA, 19 nt, Artificial Sequence
  Synthetic
uggagaguaggaauggggu

SEQ ID NO: 662158 - RNA, 20 nt, Artificial Sequence
  Synthetic
uuggagaguaggaauggggu

SEQ ID NO: 662159 - RNA, 21 nt, Artificial Sequence
  Synthetic
guuggagaguaggaauggggu

SEQ ID NO: 662160 - RNA, 22 nt, Artificial Sequence
  Synthetic
uguuggagaguaggaauggggu

SEQ ID NO: 662161 - RNA, 23 nt, Artificial Sequence
  Synthetic
uuguuggagaguaggaauggggu

SEQ ID NO: 662162 - RNA, 24 nt, Artificial Sequence
  Synthetic
auuguuggagaguaggaauggggu

SEQ ID NO: 662163 - RNA, 18 nt, Artificial Sequence
  Synthetic
ucucauuugguauggggu

SEQ ID NO: 662164 - RNA, 19 nt, Artificial Sequence
  Synthetic
uucucauuugguauggggu

SEQ ID NO: 662165 - RNA, 20 nt, Artificial Sequence
  Synthetic
cuucucauuugguauggggu

SEQ ID NO: 662166 - RNA, 21 nt, Artificial Sequence
  Synthetic
acuucucauuugguauggggu

SEQ ID NO: 662167 - RNA, 22 nt, Artificial Sequence
  Synthetic
uacuucucauuugguauggggu

SEQ ID NO: 662168 - RNA, 23 nt, Artificial Sequence
  Synthetic
uuacuucucauuugguauggggu

SEQ ID NO: 662169 - RNA, 24 nt, Artificial Sequence
  Synthetic
uuuacuucucauuugguauggggu

SEQ ID NO: 662170 - RNA, 18 nt, Artificial Sequence
  Synthetic
guuggagaugacuggggu

SEQ ID NO: 662171 - RNA, 19 nt, Artificial Sequence
  Synthetic
uguuggagaugacuggggu

SEQ ID NO: 662172 - RNA, 20 nt, Artificial Sequence
  Synthetic
auguuggagaugacuggggu

SEQ ID NO: 662173 - RNA, 21 nt, Artificial Sequence
  Synthetic
cauguuggagaugacuggggu

SEQ ID NO: 662174 - RNA, 22 nt, Artificial Sequence
  Synthetic
ucauguuggagaugacuggggu

SEQ ID NO: 662175 - RNA, 23 nt, Artificial Sequence
  Synthetic
cucauguuggagaugacuggggu

SEQ ID NO: 662176 - RNA, 24 nt, Artificial Sequence
  Synthetic
ucucauguuggagaugacuggggu

SEQ ID NO: 662177 - RNA, 18 nt, Artificial Sequence
  Synthetic
ugcugauguuacuggggu

SEQ ID NO: 662178 - RNA, 19 nt, Artificial Sequence
  Synthetic
augcugauguuacuggggu

SEQ ID NO: 662179 - RNA, 20 nt, Artificial Sequence
  Synthetic
gaugcugauguuacuggggu

SEQ ID NO: 662180 - RNA, 21 nt, Artificial Sequence
  Synthetic
ugaugcugauguuacuggggu

SEQ ID NO: 662181 - RNA, 22 nt, Artificial Sequence
  Synthetic
cugaugcugauguuacuggggu

SEQ ID NO: 662182 - RNA, 23 nt, Artificial Sequence
  Synthetic
ucugaugcugauguuacuggggu

SEQ ID NO: 662183 - RNA, 24 nt, Artificial Sequence
  Synthetic
gucugaugcugauguuacuggggu

SEQ ID NO: 662184 - RNA, 18 nt, Artificial Sequence
  Synthetic
aaucagcaucucuggggu

SEQ ID NO: 662185 - RNA, 19 nt, Artificial Sequence
  Synthetic
gaaucagcaucucuggggu

SEQ ID NO: 662186 - RNA, 20 nt, Artificial Sequence
  Synthetic
ugaaucagcaucucuggggu

SEQ ID NO: 662187 - RNA, 21 nt, Artificial Sequence
  Synthetic
cugaaucagcaucucuggggu

SEQ ID NO: 662188 - RNA, 22 nt, Artificial Sequence
  Synthetic
acugaaucagcaucucuggggu

SEQ ID NO: 662189 - RNA, 23 nt, Artificial Sequence
  Synthetic
uacugaaucagcaucucuggggu

SEQ ID NO: 662190 - RNA, 24 nt, Artificial Sequence
  Synthetic
cuacugaaucagcaucucuggggu

SEQ ID NO: 662191 - RNA, 18 nt, Artificial Sequence
  Synthetic
cggggccugucguggggu

SEQ ID NO: 662192 - RNA, 19 nt, Artificial Sequence
  Synthetic
ccggggccugucguggggu

SEQ ID NO: 662193 - RNA, 20 nt, Artificial Sequence
  Synthetic
accggggccugucguggggu

SEQ ID NO: 662194 - RNA, 21 nt, Artificial Sequence
  Synthetic
caccggggccugucguggggu

SEQ ID NO: 662195 - RNA, 22 nt, Artificial Sequence
  Synthetic
acaccggggccugucguggggu

SEQ ID NO: 662196 - RNA, 23 nt, Artificial Sequence
  Synthetic
cacaccggggccugucguggggu

SEQ ID NO: 662197 - RNA, 24 nt, Artificial Sequence
  Synthetic
acacaccggggccugucguggggu

SEQ ID NO: 662198 - RNA, 18 nt, Artificial Sequence
  Synthetic
uggggccugucguggggu

SEQ ID NO: 662199 - RNA, 19 nt, Artificial Sequence
  Synthetic
cuggggccugucguggggu

SEQ ID NO: 662200 - RNA, 20 nt, Artificial Sequence
  Synthetic
acuggggccugucguggggu

SEQ ID NO: 662201 - RNA, 21 nt, Artificial Sequence
  Synthetic
cacuggggccugucguggggu

SEQ ID NO: 662202 - RNA, 22 nt, Artificial Sequence
  Synthetic
acacuggggccugucguggggu

SEQ ID NO: 662203 - RNA, 23 nt, Artificial Sequence
  Synthetic
cacacuggggccugucguggggu

SEQ ID NO: 662204 - RNA, 24 nt, Artificial Sequence
  Synthetic
acacacuggggccugucguggggu

SEQ ID NO: 662205 - RNA, 18 nt, Artificial Sequence
  Synthetic
agaagagaaauguggggu

SEQ ID NO: 662206 - RNA, 19 nt, Artificial Sequence
  Synthetic
cagaagagaaauguggggu

SEQ ID NO: 662207 - RNA, 20 nt, Artificial Sequence
  Synthetic
gcagaagagaaauguggggu

SEQ ID NO: 662208 - RNA, 21 nt, Artificial Sequence
  Synthetic
ugcagaagagaaauguggggu

SEQ ID NO: 662209 - RNA, 22 nt, Artificial Sequence
  Synthetic
gugcagaagagaaauguggggu

SEQ ID NO: 662210 - RNA, 23 nt, Artificial Sequence
  Synthetic
agugcagaagagaaauguggggu

SEQ ID NO: 662211 - RNA, 24 nt, Artificial Sequence
  Synthetic
cagugcagaagagaaauguggggu

SEQ ID NO: 662212 - RNA, 18 nt, Artificial Sequence
  Synthetic
ggaagggaaauguggggu

SEQ ID NO: 662213 - RNA, 19 nt, Artificial Sequence
  Synthetic
uggaagggaaauguggggu

SEQ ID NO: 662214 - RNA, 20 nt, Artificial Sequence
  Synthetic
guggaagggaaauguggggu

SEQ ID NO: 662215 - RNA, 21 nt, Artificial Sequence
  Synthetic
uguggaagggaaauguggggu

SEQ ID NO: 662216 - RNA, 22 nt, Artificial Sequence
  Synthetic
guguggaagggaaauguggggu

SEQ ID NO: 662217 - RNA, 23 nt, Artificial Sequence
  Synthetic
aguguggaagggaaauguggggu

SEQ ID NO: 662218 - RNA, 24 nt, Artificial Sequence
  Synthetic
caguguggaagggaaauguggggu

SEQ ID NO: 662219 - RNA, 18 nt, Artificial Sequence
  Synthetic
uggggacugcuguggggu

SEQ ID NO: 662220 - RNA, 19 nt, Artificial Sequence
  Synthetic
cuggggacugcuguggggu

SEQ ID NO: 662221 - RNA, 20 nt, Artificial Sequence
  Synthetic
ucuggggacugcuguggggu

SEQ ID NO: 662222 - RNA, 21 nt, Artificial Sequence
  Synthetic
cucuggggacugcuguggggu

SEQ ID NO: 662223 - RNA, 22 nt, Artificial Sequence
  Synthetic
acucuggggacugcuguggggu

SEQ ID NO: 662224 - RNA, 23 nt, Artificial Sequence
  Synthetic
cacucuggggacugcuguggggu

SEQ ID NO: 662225 - RNA, 24 nt, Artificial Sequence
  Synthetic
acacucuggggacugcuguggggu

SEQ ID NO: 662226 - RNA, 18 nt, Artificial Sequence
  Synthetic
uggggccugcuguggggu

SEQ ID NO: 662227 - RNA, 19 nt, Artificial Sequence
  Synthetic
cuggggccugcuguggggu

SEQ ID NO: 662228 - RNA, 20 nt, Artificial Sequence
  Synthetic
acuggggccugcuguggggu

SEQ ID NO: 662229 - RNA, 21 nt, Artificial Sequence
  Synthetic
cacuggggccugcuguggggu

SEQ ID NO: 662230 - RNA, 22 nt, Artificial Sequence
  Synthetic
acacuggggccugcuguggggu

SEQ ID NO: 662231 - RNA, 23 nt, Artificial Sequence
  Synthetic
cacacuggggccugcuguggggu

SEQ ID NO: 662232 - RNA, 24 nt, Artificial Sequence
  Synthetic
acacacuggggccugcuguggggu

SEQ ID NO: 662233 - RNA, 18 nt, Artificial Sequence
  Synthetic
ugggaacuguuguggggu

SEQ ID NO: 662234 - RNA, 19 nt, Artificial Sequence
  Synthetic
cugggaacuguuguggggu

SEQ ID NO: 662235 - RNA, 20 nt, Artificial Sequence
  Synthetic
ccugggaacuguuguggggu

SEQ ID NO: 662236 - RNA, 21 nt, Artificial Sequence
  Synthetic
cccugggaacuguuguggggu

SEQ ID NO: 662237 - RNA, 22 nt, Artificial Sequence
  Synthetic
acccugggaacuguuguggggu

SEQ ID NO: 662238 - RNA, 23 nt, Artificial Sequence
  Synthetic
cacccugggaacuguuguggggu

SEQ ID NO: 662239 - RNA, 24 nt, Artificial Sequence
  Synthetic
acacccugggaacuguuguggggu

SEQ ID NO: 662240 - RNA, 21 nt, Artificial Sequence
  Synthetic
caccggggccuguuguggggu

SEQ ID NO: 662241 - RNA, 22 nt, Artificial Sequence
  Synthetic
acaccggggccuguuguggggu

SEQ ID NO: 662242 - RNA, 23 nt, Artificial Sequence
  Synthetic
cacaccggggccuguuguggggu

SEQ ID NO: 662243 - RNA, 24 nt, Artificial Sequence
  Synthetic
acacaccggggccuguuguggggu

SEQ ID NO: 662244 - RNA, 18 nt, Artificial Sequence
  Synthetic
aaaagaaagaauuggggu

SEQ ID NO: 662245 - RNA, 19 nt, Artificial Sequence
  Synthetic
aaaaagaaagaauuggggu

SEQ ID NO: 662246 - RNA, 20 nt, Artificial Sequence
  Synthetic
aaaaaagaaagaauuggggu

SEQ ID NO: 662247 - RNA, 21 nt, Artificial Sequence
  Synthetic
uaaaaaagaaagaauuggggu

SEQ ID NO: 662248 - RNA, 22 nt, Artificial Sequence
  Synthetic
uuaaaaaagaaagaauuggggu

SEQ ID NO: 662249 - RNA, 23 nt, Artificial Sequence
  Synthetic
uuuaaaaaagaaagaauuggggu

SEQ ID NO: 662250 - RNA, 24 nt, Artificial Sequence
  Synthetic
auuuaaaaaagaaagaauuggggu

SEQ ID NO: 662251 - RNA, 18 nt, Artificial Sequence
  Synthetic
ucuaacucuacuuggggu

SEQ ID NO: 662252 - RNA, 19 nt, Artificial Sequence
  Synthetic
uucuaacucuacuuggggu

SEQ ID NO: 662253 - RNA, 20 nt, Artificial Sequence
  Synthetic
auucuaacucuacuuggggu

SEQ ID NO: 662254 - RNA, 21 nt, Artificial Sequence
  Synthetic
gauucuaacucuacuuggggu

SEQ ID NO: 662255 - RNA, 22 nt, Artificial Sequence
  Synthetic
ggauucuaacucuacuuggggu

SEQ ID NO: 662256 - RNA, 23 nt, Artificial Sequence
  Synthetic
gggauucuaacucuacuuggggu

SEQ ID NO: 662257 - RNA, 24 nt, Artificial Sequence
  Synthetic
agggauucuaacucuacuuggggu

SEQ ID NO: 662258 - RNA, 18 nt, Artificial Sequence
  Synthetic
uacauaggcuguuggggu

SEQ ID NO: 662259 - RNA, 19 nt, Artificial Sequence
  Synthetic
auacauaggcuguuggggu

SEQ ID NO: 662260 - RNA, 20 nt, Artificial Sequence
  Synthetic
cauacauaggcuguuggggu

SEQ ID NO: 662261 - RNA, 21 nt, Artificial Sequence
  Synthetic
ucauacauaggcuguuggggu

SEQ ID NO: 662262 - RNA, 22 nt, Artificial Sequence
  Synthetic
aucauacauaggcuguuggggu

SEQ ID NO: 662263 - RNA, 23 nt, Artificial Sequence
  Synthetic
uaucauacauaggcuguuggggu

SEQ ID NO: 662264 - RNA, 24 nt, Artificial Sequence
  Synthetic
auaucauacauaggcuguuggggu

SEQ ID NO: 662265 - RNA, 18 nt, Artificial Sequence
  Synthetic
uccauuuggauuuggggu

SEQ ID NO: 662266 - RNA, 19 nt, Artificial Sequence
  Synthetic
cuccauuuggauuuggggu

SEQ ID NO: 662267 - RNA, 20 nt, Artificial Sequence
  Synthetic
ucuccauuuggauuuggggu

SEQ ID NO: 662268 - RNA, 21 nt, Artificial Sequence
  Synthetic
aucuccauuuggauuuggggu

SEQ ID NO: 662269 - RNA, 22 nt, Artificial Sequence
  Synthetic
aaucuccauuuggauuuggggu

SEQ ID NO: 662270 - RNA, 23 nt, Artificial Sequence
  Synthetic
uaaucuccauuuggauuuggggu

SEQ ID NO: 662271 - RNA, 24 nt, Artificial Sequence
  Synthetic
cuaaucuccauuuggauuuggggu

SEQ ID NO: 662272 - RNA, 18 nt, Artificial Sequence
  Synthetic
auucuguugauuuggggu

SEQ ID NO: 662273 - RNA, 19 nt, Artificial Sequence
  Synthetic
uauucuguugauuuggggu

SEQ ID NO: 662274 - RNA, 20 nt, Artificial Sequence
  Synthetic
auauucuguugauuuggggu

SEQ ID NO: 662275 - RNA, 21 nt, Artificial Sequence
  Synthetic
uauauucuguugauuuggggu

SEQ ID NO: 662276 - RNA, 22 nt, Artificial Sequence
  Synthetic
guauauucuguugauuuggggu

SEQ ID NO: 662277 - RNA, 23 nt, Artificial Sequence
  Synthetic
uguauauucuguugauuuggggu

SEQ ID NO: 662278 - RNA, 24 nt, Artificial Sequence
  Synthetic
auguauauucuguugauuuggggu

SEQ ID NO: 662279 - RNA, 18 nt, Artificial Sequence
  Synthetic
aauuuugaauuuuggggu

SEQ ID NO: 662280 - RNA, 19 nt, Artificial Sequence
  Synthetic
caauuuugaauuuuggggu

SEQ ID NO: 662281 - RNA, 20 nt, Artificial Sequence
  Synthetic
ccaauuuugaauuuuggggu

SEQ ID NO: 662282 - RNA, 21 nt, Artificial Sequence
  Synthetic
uccaauuuugaauuuuggggu

SEQ ID NO: 662283 - RNA, 22 nt, Artificial Sequence
  Synthetic
uuccaauuuugaauuuuggggu

SEQ ID NO: 662284 - RNA, 23 nt, Artificial Sequence
  Synthetic
uuuccaauuuugaauuuuggggu

SEQ ID NO: 662285 - RNA, 24 nt, Artificial Sequence
  Synthetic
auuuccaauuuugaauuuuggggu

SEQ ID NO: 662286 - RNA, 18 nt, Artificial Sequence
  Synthetic
acauaugcuccaaugggu

SEQ ID NO: 662287 - RNA, 19 nt, Artificial Sequence
  Synthetic
aacauaugcuccaaugggu

SEQ ID NO: 662288 - RNA, 20 nt, Artificial Sequence
  Synthetic
uaacauaugcuccaaugggu

SEQ ID NO: 662289 - RNA, 21 nt, Artificial Sequence
  Synthetic
uuaacauaugcuccaaugggu

SEQ ID NO: 662290 - RNA, 22 nt, Artificial Sequence
  Synthetic
uuuaacauaugcuccaaugggu

SEQ ID NO: 662291 - RNA, 23 nt, Artificial Sequence
  Synthetic
auuuaacauaugcuccaaugggu

SEQ ID NO: 662292 - RNA, 24 nt, Artificial Sequence
  Synthetic
uauuuaacauaugcuccaaugggu

SEQ ID NO: 662293 - RNA, 18 nt, Artificial Sequence
  Synthetic
gcaaaauacuacaugggu

SEQ ID NO: 662294 - RNA, 19 nt, Artificial Sequence
  Synthetic
agcaaaauacuacaugggu

SEQ ID NO: 662295 - RNA, 20 nt, Artificial Sequence
  Synthetic
uagcaaaauacuacaugggu

SEQ ID NO: 662296 - RNA, 21 nt, Artificial Sequence
  Synthetic
auagcaaaauacuacaugggu

SEQ ID NO: 662297 - RNA, 22 nt, Artificial Sequence
  Synthetic
aauagcaaaauacuacaugggu

SEQ ID NO: 662298 - RNA, 23 nt, Artificial Sequence
  Synthetic
caauagcaaaauacuacaugggu

SEQ ID NO: 662299 - RNA, 24 nt, Artificial Sequence
  Synthetic
gcaauagcaaaauacuacaugggu

SEQ ID NO: 662300 - RNA, 18 nt, Artificial Sequence
  Synthetic
aacuugaagcccaugggu

SEQ ID NO: 662301 - RNA, 19 nt, Artificial Sequence
  Synthetic
caacuugaagcccaugggu

SEQ ID NO: 662302 - RNA, 20 nt, Artificial Sequence
  Synthetic
ccaacuugaagcccaugggu

SEQ ID NO: 662303 - RNA, 21 nt, Artificial Sequence
  Synthetic
cccaacuugaagcccaugggu

SEQ ID NO: 662304 - RNA, 22 nt, Artificial Sequence
  Synthetic
ccccaacuugaagcccaugggu

SEQ ID NO: 662305 - RNA, 23 nt, Artificial Sequence
  Synthetic
accccaacuugaagcccaugggu

SEQ ID NO: 662306 - RNA, 24 nt, Artificial Sequence
  Synthetic
aaccccaacuugaagcccaugggu

SEQ ID NO: 662307 - RNA, 18 nt, Artificial Sequence
  Synthetic
agaucuacucccaugggu

SEQ ID NO: 662308 - RNA, 19 nt, Artificial Sequence
  Synthetic
cagaucuacucccaugggu

SEQ ID NO: 662309 - RNA, 20 nt, Artificial Sequence
  Synthetic
acagaucuacucccaugggu

SEQ ID NO: 662310 - RNA, 21 nt, Artificial Sequence
  Synthetic
cacagaucuacucccaugggu

SEQ ID NO: 662311 - RNA, 22 nt, Artificial Sequence
  Synthetic
gcacagaucuacucccaugggu

SEQ ID NO: 662312 - RNA, 23 nt, Artificial Sequence
  Synthetic
agcacagaucuacucccaugggu

SEQ ID NO: 662313 - RNA, 24 nt, Artificial Sequence
  Synthetic
gagcacagaucuacucccaugggu

SEQ ID NO: 662314 - RNA, 18 nt, Artificial Sequence
  Synthetic
uauuccaugcucaugggu

SEQ ID NO: 662315 - RNA, 19 nt, Artificial Sequence
  Synthetic
auauuccaugcucaugggu

SEQ ID NO: 662316 - RNA, 20 nt, Artificial Sequence
  Synthetic
aauauuccaugcucaugggu

SEQ ID NO: 662317 - RNA, 21 nt, Artificial Sequence
  Synthetic
gaauauuccaugcucaugggu

SEQ ID NO: 662318 - RNA, 22 nt, Artificial Sequence
  Synthetic
agaauauuccaugcucaugggu

SEQ ID NO: 662319 - RNA, 23 nt, Artificial Sequence
  Synthetic
aagaauauuccaugcucaugggu

SEQ ID NO: 662320 - RNA, 24 nt, Artificial Sequence
  Synthetic
gaagaauauuccaugcucaugggu

SEQ ID NO: 662321 - RNA, 18 nt, Artificial Sequence
  Synthetic
cauuccgugcucaugggu

SEQ ID NO: 662322 - RNA, 19 nt, Artificial Sequence
  Synthetic
acauuccgugcucaugggu

SEQ ID NO: 662323 - RNA, 20 nt, Artificial Sequence
  Synthetic
aacauuccgugcucaugggu

SEQ ID NO: 662324 - RNA, 21 nt, Artificial Sequence
  Synthetic
gaacauuccgugcucaugggu

SEQ ID NO: 662325 - RNA, 22 nt, Artificial Sequence
  Synthetic
agaacauuccgugcucaugggu

SEQ ID NO: 662326 - RNA, 23 nt, Artificial Sequence
  Synthetic
aagaacauuccgugcucaugggu

SEQ ID NO: 662327 - RNA, 24 nt, Artificial Sequence
  Synthetic
gaagaacauuccgugcucaugggu

SEQ ID NO: 662328 - RNA, 18 nt, Artificial Sequence
  Synthetic
augaaccuagcgaugggu

SEQ ID NO: 662329 - RNA, 19 nt, Artificial Sequence
  Synthetic
caugaaccuagcgaugggu

SEQ ID NO: 662330 - RNA, 20 nt, Artificial Sequence
  Synthetic
ccaugaaccuagcgaugggu

SEQ ID NO: 662331 - RNA, 21 nt, Artificial Sequence
  Synthetic
gccaugaaccuagcgaugggu

SEQ ID NO: 662332 - RNA, 22 nt, Artificial Sequence
  Synthetic
agccaugaaccuagcgaugggu

SEQ ID NO: 662333 - RNA, 23 nt, Artificial Sequence
  Synthetic
cagccaugaaccuagcgaugggu

SEQ ID NO: 662334 - RNA, 24 nt, Artificial Sequence
  Synthetic
ucagccaugaaccuagcgaugggu

SEQ ID NO: 662335 - RNA, 18 nt, Artificial Sequence
  Synthetic
uagagaaucacuaugggu

SEQ ID NO: 662336 - RNA, 19 nt, Artificial Sequence
  Synthetic
auagagaaucacuaugggu

SEQ ID NO: 662337 - RNA, 20 nt, Artificial Sequence
  Synthetic
aauagagaaucacuaugggu

SEQ ID NO: 662338 - RNA, 21 nt, Artificial Sequence
  Synthetic
uaauagagaaucacuaugggu

SEQ ID NO: 662339 - RNA, 22 nt, Artificial Sequence
  Synthetic
auaauagagaaucacuaugggu

SEQ ID NO: 662340 - RNA, 23 nt, Artificial Sequence
  Synthetic
gauaauagagaaucacuaugggu

SEQ ID NO: 662341 - RNA, 24 nt, Artificial Sequence
  Synthetic
ugauaauagagaaucacuaugggu

SEQ ID NO: 662342 - RNA, 18 nt, Artificial Sequence
  Synthetic
guuguaucuucuaugggu

SEQ ID NO: 662343 - RNA, 19 nt, Artificial Sequence
  Synthetic
uguuguaucuucuaugggu

SEQ ID NO: 662344 - RNA, 20 nt, Artificial Sequence
  Synthetic
auguuguaucuucuaugggu

SEQ ID NO: 662345 - RNA, 21 nt, Artificial Sequence
  Synthetic
gauguuguaucuucuaugggu

SEQ ID NO: 662346 - RNA, 22 nt, Artificial Sequence
  Synthetic
ugauguuguaucuucuaugggu

SEQ ID NO: 662347 - RNA, 23 nt, Artificial Sequence
  Synthetic
gugauguuguaucuucuaugggu

SEQ ID NO: 662348 - RNA, 24 nt, Artificial Sequence
  Synthetic
ugugauguuguaucuucuaugggu

SEQ ID NO: 662349 - RNA, 18 nt, Artificial Sequence
  Synthetic
ucugugagccuuaugggu

SEQ ID NO: 662350 - RNA, 19 nt, Artificial Sequence
  Synthetic
uucugugagccuuaugggu

SEQ ID NO: 662351 - RNA, 20 nt, Artificial Sequence
  Synthetic
auucugugagccuuaugggu

SEQ ID NO: 662352 - RNA, 21 nt, Artificial Sequence
  Synthetic
uauucugugagccuuaugggu

SEQ ID NO: 662353 - RNA, 22 nt, Artificial Sequence
  Synthetic
uuauucugugagccuuaugggu

SEQ ID NO: 662354 - RNA, 23 nt, Artificial Sequence
  Synthetic
auuauucugugagccuuaugggu

SEQ ID NO: 662355 - RNA, 24 nt, Artificial Sequence
  Synthetic
cauuauucugugagccuuaugggu

SEQ ID NO: 662356 - RNA, 18 nt, Artificial Sequence
  Synthetic
agagauugguuacugggu

SEQ ID NO: 662357 - RNA, 19 nt, Artificial Sequence
  Synthetic
gagagauugguuacugggu

SEQ ID NO: 662358 - RNA, 20 nt, Artificial Sequence
  Synthetic
agagagauugguuacugggu

SEQ ID NO: 662359 - RNA, 21 nt, Artificial Sequence
  Synthetic
aagagagauugguuacugggu

SEQ ID NO: 662360 - RNA, 22 nt, Artificial Sequence
  Synthetic
gaagagagauugguuacugggu

SEQ ID NO: 662361 - RNA, 23 nt, Artificial Sequence
  Synthetic
ugaagagagauugguuacugggu

SEQ ID NO: 662362 - RNA, 24 nt, Artificial Sequence
  Synthetic
gugaagagagauugguuacugggu

SEQ ID NO: 662363 - RNA, 18 nt, Artificial Sequence
  Synthetic
agcagcagacagcugggu

SEQ ID NO: 662364 - RNA, 19 nt, Artificial Sequence
  Synthetic
gagcagcagacagcugggu

SEQ ID NO: 662365 - RNA, 20 nt, Artificial Sequence
  Synthetic
ugagcagcagacagcugggu

SEQ ID NO: 662366 - RNA, 21 nt, Artificial Sequence
  Synthetic
uugagcagcagacagcugggu

SEQ ID NO: 662367 - RNA, 22 nt, Artificial Sequence
  Synthetic
uuugagcagcagacagcugggu

SEQ ID NO: 662368 - RNA, 23 nt, Artificial Sequence
  Synthetic
uuuugagcagcagacagcugggu

SEQ ID NO: 662369 - RNA, 24 nt, Artificial Sequence
  Synthetic
guuuugagcagcagacagcugggu

SEQ ID NO: 662370 - RNA, 18 nt, Artificial Sequence
  Synthetic
cggaaagaugagcugggu

SEQ ID NO: 662371 - RNA, 19 nt, Artificial Sequence
  Synthetic
acggaaagaugagcugggu

SEQ ID NO: 662372 - RNA, 20 nt, Artificial Sequence
  Synthetic
uacggaaagaugagcugggu

SEQ ID NO: 662373 - RNA, 21 nt, Artificial Sequence
  Synthetic
auacggaaagaugagcugggu

SEQ ID NO: 662374 - RNA, 22 nt, Artificial Sequence
  Synthetic
cauacggaaagaugagcugggu

SEQ ID NO: 662375 - RNA, 23 nt, Artificial Sequence
  Synthetic
ccauacggaaagaugagcugggu

SEQ ID NO: 662376 - RNA, 24 nt, Artificial Sequence
  Synthetic
cccauacggaaagaugagcugggu

SEQ ID NO: 662377 - RNA, 18 nt, Artificial Sequence
  Synthetic
agugaagcauggcugggu

SEQ ID NO: 662378 - RNA, 19 nt, Artificial Sequence
  Synthetic
cagugaagcauggcugggu

SEQ ID NO: 662379 - RNA, 20 nt, Artificial Sequence
  Synthetic
acagugaagcauggcugggu

SEQ ID NO: 662380 - RNA, 21 nt, Artificial Sequence
  Synthetic
gacagugaagcauggcugggu

SEQ ID NO: 662381 - RNA, 22 nt, Artificial Sequence
  Synthetic
ggacagugaagcauggcugggu

SEQ ID NO: 662382 - RNA, 23 nt, Artificial Sequence
  Synthetic
uggacagugaagcauggcugggu

SEQ ID NO: 662383 - RNA, 24 nt, Artificial Sequence
  Synthetic
guggacagugaagcauggcugggu

SEQ ID NO: 662384 - RNA, 18 nt, Artificial Sequence
  Synthetic
gcucucacauaucugggu

SEQ ID NO: 662385 - RNA, 19 nt, Artificial Sequence
  Synthetic
agcucucacauaucugggu

SEQ ID NO: 662386 - RNA, 20 nt, Artificial Sequence
  Synthetic
aagcucucacauaucugggu

SEQ ID NO: 662387 - RNA, 21 nt, Artificial Sequence
  Synthetic
aaagcucucacauaucugggu

SEQ ID NO: 662388 - RNA, 22 nt, Artificial Sequence
  Synthetic
aaaagcucucacauaucugggu

SEQ ID NO: 662389 - RNA, 23 nt, Artificial Sequence
  Synthetic
gaaaagcucucacauaucugggu

SEQ ID NO: 662390 - RNA, 24 nt, Artificial Sequence
  Synthetic
cgaaaagcucucacauaucugggu

SEQ ID NO: 662391 - RNA, 18 nt, Artificial Sequence
  Synthetic
uuuuuucuuuaucugggu

SEQ ID NO: 662392 - RNA, 19 nt, Artificial Sequence
  Synthetic
auuuuuucuuuaucugggu

SEQ ID NO: 662393 - RNA, 20 nt, Artificial Sequence
  Synthetic
aauuuuuucuuuaucugggu

SEQ ID NO: 662394 - RNA, 21 nt, Artificial Sequence
  Synthetic
aaauuuuuucuuuaucugggu

SEQ ID NO: 662395 - RNA, 22 nt, Artificial Sequence
  Synthetic
aaaauuuuuucuuuaucugggu

SEQ ID NO: 662396 - RNA, 23 nt, Artificial Sequence
  Synthetic
aaaaauuuuuucuuuaucugggu

SEQ ID NO: 662397 - RNA, 24 nt, Artificial Sequence
  Synthetic
uaaaaauuuuuucuuuaucugggu

SEQ ID NO: 662398 - RNA, 18 nt, Artificial Sequence
  Synthetic
ggaggagcaaaagugggu

SEQ ID NO: 662399 - RNA, 19 nt, Artificial Sequence
  Synthetic
aggaggagcaaaagugggu

SEQ ID NO: 662400 - RNA, 20 nt, Artificial Sequence
  Synthetic
aaggaggagcaaaagugggu

SEQ ID NO: 662401 - RNA, 21 nt, Artificial Sequence
  Synthetic
aaaggaggagcaaaagugggu

SEQ ID NO: 662402 - RNA, 22 nt, Artificial Sequence
  Synthetic
caaaggaggagcaaaagugggu

SEQ ID NO: 662403 - RNA, 23 nt, Artificial Sequence
  Synthetic
gcaaaggaggagcaaaagugggu

SEQ ID NO: 662404 - RNA, 24 nt, Artificial Sequence
  Synthetic
ugcaaaggaggagcaaaagugggu

SEQ ID NO: 662405 - RNA, 18 nt, Artificial Sequence
  Synthetic
gaaaguauucaagugggu

SEQ ID NO: 662406 - RNA, 19 nt, Artificial Sequence
  Synthetic
ugaaaguauucaagugggu

SEQ ID NO: 662407 - RNA, 20 nt, Artificial Sequence
  Synthetic
augaaaguauucaagugggu

SEQ ID NO: 662408 - RNA, 21 nt, Artificial Sequence
  Synthetic
gaugaaaguauucaagugggu

SEQ ID NO: 662409 - RNA, 22 nt, Artificial Sequence
  Synthetic
agaugaaaguauucaagugggu

SEQ ID NO: 662410 - RNA, 23 nt, Artificial Sequence
  Synthetic
aagaugaaaguauucaagugggu

SEQ ID NO: 662411 - RNA, 24 nt, Artificial Sequence
  Synthetic
aaagaugaaaguauucaagugggu

SEQ ID NO: 662412 - RNA, 18 nt, Artificial Sequence
  Synthetic
gggagcucuucagugggu

SEQ ID NO: 662413 - RNA, 19 nt, Artificial Sequence
  Synthetic
ugggagcucuucagugggu

SEQ ID NO: 662414 - RNA, 20 nt, Artificial Sequence
  Synthetic
augggagcucuucagugggu

SEQ ID NO: 662415 - RNA, 21 nt, Artificial Sequence
  Synthetic
aaugggagcucuucagugggu

SEQ ID NO: 662416 - RNA, 22 nt, Artificial Sequence
  Synthetic
caaugggagcucuucagugggu

SEQ ID NO: 662417 - RNA, 23 nt, Artificial Sequence
  Synthetic
gcaaugggagcucuucagugggu

SEQ ID NO: 662418 - RNA, 24 nt, Artificial Sequence
  Synthetic
agcaaugggagcucuucagugggu

SEQ ID NO: 662419 - RNA, 18 nt, Artificial Sequence
  Synthetic
cagaacagucuggugggu

SEQ ID NO: 662420 - RNA, 19 nt, Artificial Sequence
  Synthetic
gcagaacagucuggugggu

SEQ ID NO: 662421 - RNA, 20 nt, Artificial Sequence
  Synthetic
ggcagaacagucuggugggu

SEQ ID NO: 662422 - RNA, 21 nt, Artificial Sequence
  Synthetic
aggcagaacagucuggugggu

SEQ ID NO: 662423 - RNA, 22 nt, Artificial Sequence
  Synthetic
uaggcagaacagucuggugggu

SEQ ID NO: 662424 - RNA, 23 nt, Artificial Sequence
  Synthetic
guaggcagaacagucuggugggu

SEQ ID NO: 662425 - RNA, 24 nt, Artificial Sequence
  Synthetic
uguaggcagaacagucuggugggu

SEQ ID NO: 662426 - RNA, 18 nt, Artificial Sequence
  Synthetic
cagaauggaguggugggu

SEQ ID NO: 662427 - RNA, 19 nt, Artificial Sequence
  Synthetic
ucagaauggaguggugggu

SEQ ID NO: 662428 - RNA, 20 nt, Artificial Sequence
  Synthetic
cucagaauggaguggugggu

SEQ ID NO: 662429 - RNA, 21 nt, Artificial Sequence
  Synthetic
acucagaauggaguggugggu

SEQ ID NO: 662430 - RNA, 22 nt, Artificial Sequence
  Synthetic
aacucagaauggaguggugggu

SEQ ID NO: 662431 - RNA, 23 nt, Artificial Sequence
  Synthetic
aaacucagaauggaguggugggu

SEQ ID NO: 662432 - RNA, 24 nt, Artificial Sequence
  Synthetic
aaaacucagaauggaguggugggu

SEQ ID NO: 662433 - RNA, 18 nt, Artificial Sequence
  Synthetic
uacugauugguggugggu

SEQ ID NO: 662434 - RNA, 19 nt, Artificial Sequence
  Synthetic
auacugauugguggugggu

SEQ ID NO: 662435 - RNA, 20 nt, Artificial Sequence
  Synthetic
aauacugauugguggugggu

SEQ ID NO: 662436 - RNA, 21 nt, Artificial Sequence
  Synthetic
caauacugauugguggugggu

SEQ ID NO: 662437 - RNA, 22 nt, Artificial Sequence
  Synthetic
acaauacugauugguggugggu

SEQ ID NO: 662438 - RNA, 23 nt, Artificial Sequence
  Synthetic
gacaauacugauugguggugggu

SEQ ID NO: 662439 - RNA, 24 nt, Artificial Sequence
  Synthetic
ugacaauacugauugguggugggu

SEQ ID NO: 662440 - RNA, 18 nt, Artificial Sequence
  Synthetic
aaacuugaacaugugggu

SEQ ID NO: 662441 - RNA, 19 nt, Artificial Sequence
  Synthetic
aaaacuugaacaugugggu

SEQ ID NO: 662442 - RNA, 20 nt, Artificial Sequence
  Synthetic
aaaaacuugaacaugugggu

SEQ ID NO: 662443 - RNA, 21 nt, Artificial Sequence
  Synthetic
gaaaaacuugaacaugugggu

SEQ ID NO: 662444 - RNA, 22 nt, Artificial Sequence
  Synthetic
ggaaaaacuugaacaugugggu

SEQ ID NO: 662445 - RNA, 23 nt, Artificial Sequence
  Synthetic
gggaaaaacuugaacaugugggu

SEQ ID NO: 662446 - RNA, 24 nt, Artificial Sequence
  Synthetic
ugggaaaaacuugaacaugugggu

SEQ ID NO: 662447 - RNA, 18 nt, Artificial Sequence
  Synthetic
auaaagacaaaauugggu

SEQ ID NO: 662448 - RNA, 19 nt, Artificial Sequence
  Synthetic
uauaaagacaaaauugggu

SEQ ID NO: 662449 - RNA, 20 nt, Artificial Sequence
  Synthetic
auauaaagacaaaauugggu

SEQ ID NO: 662450 - RNA, 21 nt, Artificial Sequence
  Synthetic
cauauaaagacaaaauugggu

SEQ ID NO: 662451 - RNA, 22 nt, Artificial Sequence
  Synthetic
ucauauaaagacaaaauugggu

SEQ ID NO: 662452 - RNA, 23 nt, Artificial Sequence
  Synthetic
aucauauaaagacaaaauugggu

SEQ ID NO: 662453 - RNA, 24 nt, Artificial Sequence
  Synthetic
uaucauauaaagacaaaauugggu

SEQ ID NO: 662454 - RNA, 18 nt, Artificial Sequence
  Synthetic
agagggguggcauugggu

SEQ ID NO: 662455 - RNA, 19 nt, Artificial Sequence
  Synthetic
aagagggguggcauugggu

SEQ ID NO: 662456 - RNA, 20 nt, Artificial Sequence
  Synthetic
aaagagggguggcauugggu

SEQ ID NO: 662457 - RNA, 21 nt, Artificial Sequence
  Synthetic
aaaagagggguggcauugggu

SEQ ID NO: 662458 - RNA, 22 nt, Artificial Sequence
  Synthetic
gaaaagagggguggcauugggu

SEQ ID NO: 662459 - RNA, 23 nt, Artificial Sequence
  Synthetic
agaaaagagggguggcauugggu

SEQ ID NO: 662460 - RNA, 24 nt, Artificial Sequence
  Synthetic
aagaaaagagggguggcauugggu

SEQ ID NO: 662461 - RNA, 18 nt, Artificial Sequence
  Synthetic
agcuuccuugcauugggu

SEQ ID NO: 662462 - RNA, 19 nt, Artificial Sequence
  Synthetic
uagcuuccuugcauugggu

SEQ ID NO: 662463 - RNA, 20 nt, Artificial Sequence
  Synthetic
uuagcuuccuugcauugggu

SEQ ID NO: 662464 - RNA, 21 nt, Artificial Sequence
  Synthetic
cuuagcuuccuugcauugggu

SEQ ID NO: 662465 - RNA, 22 nt, Artificial Sequence
  Synthetic
ucuuagcuuccuugcauugggu

SEQ ID NO: 662466 - RNA, 23 nt, Artificial Sequence
  Synthetic
uucuuagcuuccuugcauugggu

SEQ ID NO: 662467 - RNA, 24 nt, Artificial Sequence
  Synthetic
guucuuagcuuccuugcauugggu

SEQ ID NO: 662468 - RNA, 18 nt, Artificial Sequence
  Synthetic
cuagauaugggauugggu

SEQ ID NO: 662469 - RNA, 19 nt, Artificial Sequence
  Synthetic
ucuagauaugggauugggu

SEQ ID NO: 662470 - RNA, 20 nt, Artificial Sequence
  Synthetic
aucuagauaugggauugggu

SEQ ID NO: 662471 - RNA, 21 nt, Artificial Sequence
  Synthetic
aaucuagauaugggauugggu

SEQ ID NO: 662472 - RNA, 22 nt, Artificial Sequence
  Synthetic
aaaucuagauaugggauugggu

SEQ ID NO: 662473 - RNA, 23 nt, Artificial Sequence
  Synthetic
gaaaucuagauaugggauugggu

SEQ ID NO: 662474 - RNA, 24 nt, Artificial Sequence
  Synthetic
ggaaaucuagauaugggauugggu

SEQ ID NO: 662475 - RNA, 18 nt, Artificial Sequence
  Synthetic
uauaauugacccuugggu

SEQ ID NO: 662476 - RNA, 19 nt, Artificial Sequence
  Synthetic
uuauaauugacccuugggu

SEQ ID NO: 662477 - RNA, 20 nt, Artificial Sequence
  Synthetic
uuuauaauugacccuugggu

SEQ ID NO: 662478 - RNA, 21 nt, Artificial Sequence
  Synthetic
auuuauaauugacccuugggu

SEQ ID NO: 662479 - RNA, 22 nt, Artificial Sequence
  Synthetic
uauuuauaauugacccuugggu

SEQ ID NO: 662480 - RNA, 23 nt, Artificial Sequence
  Synthetic
uuauuuauaauugacccuugggu

SEQ ID NO: 662481 - RNA, 24 nt, Artificial Sequence
  Synthetic
auuauuuauaauugacccuugggu

SEQ ID NO: 662482 - RNA, 18 nt, Artificial Sequence
  Synthetic
gaaaaguucuaguugggu

SEQ ID NO: 662483 - RNA, 19 nt, Artificial Sequence
  Synthetic
agaaaaguucuaguugggu

SEQ ID NO: 662484 - RNA, 20 nt, Artificial Sequence
  Synthetic
uagaaaaguucuaguugggu

SEQ ID NO: 662485 - RNA, 21 nt, Artificial Sequence
  Synthetic
uuagaaaaguucuaguugggu

SEQ ID NO: 662486 - RNA, 22 nt, Artificial Sequence
  Synthetic
uuuagaaaaguucuaguugggu

SEQ ID NO: 662487 - RNA, 23 nt, Artificial Sequence
  Synthetic
guuuagaaaaguucuaguugggu

SEQ ID NO: 662488 - RNA, 24 nt, Artificial Sequence
  Synthetic
uguuuagaaaaguucuaguugggu

SEQ ID NO: 662489 - RNA, 18 nt, Artificial Sequence
  Synthetic
caguguuggugguugggu

SEQ ID NO: 662490 - RNA, 19 nt, Artificial Sequence
  Synthetic
acaguguuggugguugggu

SEQ ID NO: 662491 - RNA, 20 nt, Artificial Sequence
  Synthetic
aacaguguuggugguugggu

SEQ ID NO: 662492 - RNA, 21 nt, Artificial Sequence
  Synthetic
uaacaguguuggugguugggu

SEQ ID NO: 662493 - RNA, 22 nt, Artificial Sequence
  Synthetic
auaacaguguuggugguugggu

SEQ ID NO: 662494 - RNA, 23 nt, Artificial Sequence
  Synthetic
uauaacaguguuggugguugggu

SEQ ID NO: 662495 - RNA, 24 nt, Artificial Sequence
  Synthetic
uuauaacaguguuggugguugggu

SEQ ID NO: 662496 - RNA, 18 nt, Artificial Sequence
  Synthetic
guuuuaguuauguugggu

SEQ ID NO: 662497 - RNA, 19 nt, Artificial Sequence
  Synthetic
gguuuuaguuauguugggu

SEQ ID NO: 662498 - RNA, 20 nt, Artificial Sequence
  Synthetic
agguuuuaguuauguugggu

SEQ ID NO: 662499 - RNA, 21 nt, Artificial Sequence
  Synthetic
aagguuuuaguuauguugggu

SEQ ID NO: 662500 - RNA, 22 nt, Artificial Sequence
  Synthetic
gaagguuuuaguuauguugggu

SEQ ID NO: 662501 - RNA, 23 nt, Artificial Sequence
  Synthetic
ggaagguuuuaguuauguugggu

SEQ ID NO: 662502 - RNA, 24 nt, Artificial Sequence
  Synthetic
aggaagguuuuaguuauguugggu

SEQ ID NO: 662503 - RNA, 18 nt, Artificial Sequence
  Synthetic
uuuuuugcauuguugggu

SEQ ID NO: 662504 - RNA, 19 nt, Artificial Sequence
  Synthetic
uuuuuuugcauuguugggu

SEQ ID NO: 662505 - RNA, 20 nt, Artificial Sequence
  Synthetic
uuuuuuuugcauuguugggu

SEQ ID NO: 662506 - RNA, 21 nt, Artificial Sequence
  Synthetic
uuuuuuuuugcauuguugggu

SEQ ID NO: 662507 - RNA, 22 nt, Artificial Sequence
  Synthetic
auuuuuuuuugcauuguugggu

SEQ ID NO: 662508 - RNA, 23 nt, Artificial Sequence
  Synthetic
aauuuuuuuuugcauuguugggu

SEQ ID NO: 662509 - RNA, 24 nt, Artificial Sequence
  Synthetic
caauuuuuuuuugcauuguugggu

SEQ ID NO: 662510 - RNA, 18 nt, Artificial Sequence
  Synthetic
cauccuuuguuguugggu

SEQ ID NO: 662511 - RNA, 19 nt, Artificial Sequence
  Synthetic
ucauccuuuguuguugggu

SEQ ID NO: 662512 - RNA, 20 nt, Artificial Sequence
  Synthetic
uucauccuuuguuguugggu

SEQ ID NO: 662513 - RNA, 21 nt, Artificial Sequence
  Synthetic
auucauccuuuguuguugggu

SEQ ID NO: 662514 - RNA, 22 nt, Artificial Sequence
  Synthetic
cauucauccuuuguuguugggu

SEQ ID NO: 662515 - RNA, 23 nt, Artificial Sequence
  Synthetic
gcauucauccuuuguuguugggu

SEQ ID NO: 662516 - RNA, 24 nt, Artificial Sequence
  Synthetic
ggcauucauccuuuguuguugggu

SEQ ID NO: 662517 - RNA, 18 nt, Artificial Sequence
  Synthetic
ucaaaaugagauuugggu

SEQ ID NO: 662518 - RNA, 19 nt, Artificial Sequence
  Synthetic
uucaaaaugagauuugggu

SEQ ID NO: 662519 - RNA, 20 nt, Artificial Sequence
  Synthetic
auucaaaaugagauuugggu

SEQ ID NO: 662520 - RNA, 21 nt, Artificial Sequence
  Synthetic
aauucaaaaugagauuugggu

SEQ ID NO: 662521 - RNA, 22 nt, Artificial Sequence
  Synthetic
caauucaaaaugagauuugggu

SEQ ID NO: 662522 - RNA, 23 nt, Artificial Sequence
  Synthetic
acaauucaaaaugagauuugggu

SEQ ID NO: 662523 - RNA, 24 nt, Artificial Sequence
  Synthetic
uacaauucaaaaugagauuugggu

SEQ ID NO: 662524 - RNA, 21 nt, Artificial Sequence
  Synthetic
aauucaagaugagauuugggu

SEQ ID NO: 662525 - RNA, 22 nt, Artificial Sequence
  Synthetic
gaauucaagaugagauuugggu

SEQ ID NO: 662526 - RNA, 23 nt, Artificial Sequence
  Synthetic
agaauucaagaugagauuugggu

SEQ ID NO: 662527 - RNA, 24 nt, Artificial Sequence
  Synthetic
uagaauucaagaugagauuugggu

SEQ ID NO: 662528 - RNA, 18 nt, Artificial Sequence
  Synthetic
ucaaggugagauuugggu

SEQ ID NO: 662529 - RNA, 19 nt, Artificial Sequence
  Synthetic
uucaaggugagauuugggu

SEQ ID NO: 662530 - RNA, 20 nt, Artificial Sequence
  Synthetic
auucaaggugagauuugggu

SEQ ID NO: 662531 - RNA, 21 nt, Artificial Sequence
  Synthetic
aauucaaggugagauuugggu

SEQ ID NO: 662532 - RNA, 22 nt, Artificial Sequence
  Synthetic
caauucaaggugagauuugggu

SEQ ID NO: 662533 - RNA, 23 nt, Artificial Sequence
  Synthetic
acaauucaaggugagauuugggu

SEQ ID NO: 662534 - RNA, 24 nt, Artificial Sequence
  Synthetic
uacaauucaaggugagauuugggu

SEQ ID NO: 662535 - RNA, 22 nt, Artificial Sequence
  Synthetic
uaauucaaggugagauuugggu

SEQ ID NO: 662536 - RNA, 23 nt, Artificial Sequence
  Synthetic
auaauucaaggugagauuugggu

SEQ ID NO: 662537 - RNA, 24 nt, Artificial Sequence
  Synthetic
cauaauucaaggugagauuugggu

SEQ ID NO: 662538 - RNA, 18 nt, Artificial Sequence
  Synthetic
uggaacagaauuuugggu

SEQ ID NO: 662539 - RNA, 19 nt, Artificial Sequence
  Synthetic
cuggaacagaauuuugggu

SEQ ID NO: 662540 - RNA, 20 nt, Artificial Sequence
  Synthetic
ccuggaacagaauuuugggu

SEQ ID NO: 662541 - RNA, 21 nt, Artificial Sequence
  Synthetic
uccuggaacagaauuuugggu

SEQ ID NO: 662542 - RNA, 22 nt, Artificial Sequence
  Synthetic
auccuggaacagaauuuugggu

SEQ ID NO: 662543 - RNA, 23 nt, Artificial Sequence
  Synthetic
aauccuggaacagaauuuugggu

SEQ ID NO: 662544 - RNA, 24 nt, Artificial Sequence
  Synthetic
uaauccuggaacagaauuuugggu

SEQ ID NO: 662545 - RNA, 18 nt, Artificial Sequence
  Synthetic
gucucuucaacaaauggu

SEQ ID NO: 662546 - RNA, 19 nt, Artificial Sequence
  Synthetic
agucucuucaacaaauggu

SEQ ID NO: 662547 - RNA, 20 nt, Artificial Sequence
  Synthetic
cagucucuucaacaaauggu

SEQ ID NO: 662548 - RNA, 21 nt, Artificial Sequence
  Synthetic
acagucucuucaacaaauggu

SEQ ID NO: 662549 - RNA, 22 nt, Artificial Sequence
  Synthetic
gacagucucuucaacaaauggu

SEQ ID NO: 662550 - RNA, 23 nt, Artificial Sequence
  Synthetic
agacagucucuucaacaaauggu

SEQ ID NO: 662551 - RNA, 24 nt, Artificial Sequence
  Synthetic
aagacagucucuucaacaaauggu

SEQ ID NO: 662552 - RNA, 18 nt, Artificial Sequence
  Synthetic
aacauacucucaaauggu

SEQ ID NO: 662553 - RNA, 19 nt, Artificial Sequence
  Synthetic
gaacauacucucaaauggu

SEQ ID NO: 662554 - RNA, 20 nt, Artificial Sequence
  Synthetic
agaacauacucucaaauggu

SEQ ID NO: 662555 - RNA, 21 nt, Artificial Sequence
  Synthetic
gagaacauacucucaaauggu

SEQ ID NO: 662556 - RNA, 22 nt, Artificial Sequence
  Synthetic
ggagaacauacucucaaauggu

SEQ ID NO: 662557 - RNA, 23 nt, Artificial Sequence
  Synthetic
uggagaacauacucucaaauggu

SEQ ID NO: 662558 - RNA, 24 nt, Artificial Sequence
  Synthetic
uuggagaacauacucucaaauggu

SEQ ID NO: 662559 - RNA, 18 nt, Artificial Sequence
  Synthetic
aaacuaaguagaaauggu

SEQ ID NO: 662560 - RNA, 19 nt, Artificial Sequence
  Synthetic
uaaacuaaguagaaauggu

SEQ ID NO: 662561 - RNA, 20 nt, Artificial Sequence
  Synthetic
guaaacuaaguagaaauggu

SEQ ID NO: 662562 - RNA, 21 nt, Artificial Sequence
  Synthetic
aguaaacuaaguagaaauggu

SEQ ID NO: 662563 - RNA, 22 nt, Artificial Sequence
  Synthetic
aaguaaacuaaguagaaauggu

SEQ ID NO: 662564 - RNA, 23 nt, Artificial Sequence
  Synthetic
aaaguaaacuaaguagaaauggu

SEQ ID NO: 662565 - RNA, 24 nt, Artificial Sequence
  Synthetic
aaaaguaaacuaaguagaaauggu

SEQ ID NO: 662566 - RNA, 18 nt, Artificial Sequence
  Synthetic
ugaauuuggcgaaauggu

SEQ ID NO: 662567 - RNA, 19 nt, Artificial Sequence
  Synthetic
augaauuuggcgaaauggu

SEQ ID NO: 662568 - RNA, 20 nt, Artificial Sequence
  Synthetic
aaugaauuuggcgaaauggu

SEQ ID NO: 662569 - RNA, 21 nt, Artificial Sequence
  Synthetic
caaugaauuuggcgaaauggu

SEQ ID NO: 662570 - RNA, 22 nt, Artificial Sequence
  Synthetic
ucaaugaauuuggcgaaauggu

SEQ ID NO: 662571 - RNA, 23 nt, Artificial Sequence
  Synthetic
aucaaugaauuuggcgaaauggu

SEQ ID NO: 662572 - RNA, 24 nt, Artificial Sequence
  Synthetic
gaucaaugaauuuggcgaaauggu

SEQ ID NO: 662573 - RNA, 18 nt, Artificial Sequence
  Synthetic
cacccuggaugaaauggu

SEQ ID NO: 662574 - RNA, 19 nt, Artificial Sequence
  Synthetic
acacccuggaugaaauggu

SEQ ID NO: 662575 - RNA, 20 nt, Artificial Sequence
  Synthetic
aacacccuggaugaaauggu

SEQ ID NO: 662576 - RNA, 21 nt, Artificial Sequence
  Synthetic
uaacacccuggaugaaauggu

SEQ ID NO: 662577 - RNA, 22 nt, Artificial Sequence
  Synthetic
cuaacacccuggaugaaauggu

SEQ ID NO: 662578 - RNA, 23 nt, Artificial Sequence
  Synthetic
gcuaacacccuggaugaaauggu

SEQ ID NO: 662579 - RNA, 24 nt, Artificial Sequence
  Synthetic
agcuaacacccuggaugaaauggu

SEQ ID NO: 662580 - RNA, 18 nt, Artificial Sequence
  Synthetic
auuuacauauuaaauggu

SEQ ID NO: 662581 - RNA, 19 nt, Artificial Sequence
  Synthetic
gauuuacauauuaaauggu

SEQ ID NO: 662582 - RNA, 20 nt, Artificial Sequence
  Synthetic
ggauuuacauauuaaauggu

SEQ ID NO: 662583 - RNA, 21 nt, Artificial Sequence
  Synthetic
gggauuuacauauuaaauggu

SEQ ID NO: 662584 - RNA, 22 nt, Artificial Sequence
  Synthetic
ugggauuuacauauuaaauggu

SEQ ID NO: 662585 - RNA, 23 nt, Artificial Sequence
  Synthetic
augggauuuacauauuaaauggu

SEQ ID NO: 662586 - RNA, 24 nt, Artificial Sequence
  Synthetic
aaugggauuuacauauuaaauggu

SEQ ID NO: 662587 - RNA, 18 nt, Artificial Sequence
  Synthetic
cagaguguauuaaauggu

SEQ ID NO: 662588 - RNA, 19 nt, Artificial Sequence
  Synthetic
gcagaguguauuaaauggu

SEQ ID NO: 662589 - RNA, 20 nt, Artificial Sequence
  Synthetic
ggcagaguguauuaaauggu

SEQ ID NO: 662590 - RNA, 21 nt, Artificial Sequence
  Synthetic
gggcagaguguauuaaauggu

SEQ ID NO: 662591 - RNA, 22 nt, Artificial Sequence
  Synthetic
ugggcagaguguauuaaauggu

SEQ ID NO: 662592 - RNA, 23 nt, Artificial Sequence
  Synthetic
augggcagaguguauuaaauggu

SEQ ID NO: 662593 - RNA, 24 nt, Artificial Sequence
  Synthetic
uaugggcagaguguauuaaauggu

SEQ ID NO: 662594 - RNA, 18 nt, Artificial Sequence
  Synthetic
uuuggacuuuacaauggu

SEQ ID NO: 662595 - RNA, 19 nt, Artificial Sequence
  Synthetic
uuuuggacuuuacaauggu

SEQ ID NO: 662596 - RNA, 20 nt, Artificial Sequence
  Synthetic
uuuuuggacuuuacaauggu

SEQ ID NO: 662597 - RNA, 21 nt, Artificial Sequence
  Synthetic
auuuuuggacuuuacaauggu

SEQ ID NO: 662598 - RNA, 22 nt, Artificial Sequence
  Synthetic
aauuuuuggacuuuacaauggu

SEQ ID NO: 662599 - RNA, 23 nt, Artificial Sequence
  Synthetic
uaauuuuuggacuuuacaauggu

SEQ ID NO: 662600 - RNA, 24 nt, Artificial Sequence
  Synthetic
guaauuuuuggacuuuacaauggu

SEQ ID NO: 662601 - RNA, 18 nt, Artificial Sequence
  Synthetic
aaagaaaacgagaauggu

SEQ ID NO: 662602 - RNA, 19 nt, Artificial Sequence
  Synthetic
gaaagaaaacgagaauggu

SEQ ID NO: 662603 - RNA, 20 nt, Artificial Sequence
  Synthetic
ugaaagaaaacgagaauggu

SEQ ID NO: 662604 - RNA, 21 nt, Artificial Sequence
  Synthetic
cugaaagaaaacgagaauggu

SEQ ID NO: 662605 - RNA, 22 nt, Artificial Sequence
  Synthetic
gcugaaagaaaacgagaauggu

SEQ ID NO: 662606 - RNA, 23 nt, Artificial Sequence
  Synthetic
agcugaaagaaaacgagaauggu

SEQ ID NO: 662607 - RNA, 24 nt, Artificial Sequence
  Synthetic
aagcugaaagaaaacgagaauggu

SEQ ID NO: 662608 - RNA, 18 nt, Artificial Sequence
  Synthetic
cugaggcaggagaauggu

SEQ ID NO: 662609 - RNA, 19 nt, Artificial Sequence
  Synthetic
gcugaggcaggagaauggu

SEQ ID NO: 662610 - RNA, 20 nt, Artificial Sequence
  Synthetic
ggcugaggcaggagaauggu

SEQ ID NO: 662611 - RNA, 21 nt, Artificial Sequence
  Synthetic
aggcugaggcaggagaauggu

SEQ ID NO: 662612 - RNA, 22 nt, Artificial Sequence
  Synthetic
gaggcugaggcaggagaauggu

SEQ ID NO: 662613 - RNA, 23 nt, Artificial Sequence
  Synthetic
ggaggcugaggcaggagaauggu

SEQ ID NO: 662614 - RNA, 24 nt, Artificial Sequence
  Synthetic
uggaggcugaggcaggagaauggu

SEQ ID NO: 662615 - RNA, 18 nt, Artificial Sequence
  Synthetic
caaagccuugggaauggu

SEQ ID NO: 662616 - RNA, 19 nt, Artificial Sequence
  Synthetic
gcaaagccuugggaauggu

SEQ ID NO: 662617 - RNA, 20 nt, Artificial Sequence
  Synthetic
ggcaaagccuugggaauggu

SEQ ID NO: 662618 - RNA, 21 nt, Artificial Sequence
  Synthetic
gggcaaagccuugggaauggu

SEQ ID NO: 662619 - RNA, 22 nt, Artificial Sequence
  Synthetic
agggcaaagccuugggaauggu

SEQ ID NO: 662620 - RNA, 23 nt, Artificial Sequence
  Synthetic
aagggcaaagccuugggaauggu

SEQ ID NO: 662621 - RNA, 24 nt, Artificial Sequence
  Synthetic
caagggcaaagccuugggaauggu

SEQ ID NO: 662622 - RNA, 18 nt, Artificial Sequence
  Synthetic
cauggcaucuggaauggu

SEQ ID NO: 662623 - RNA, 19 nt, Artificial Sequence
  Synthetic
ucauggcaucuggaauggu

SEQ ID NO: 662624 - RNA, 20 nt, Artificial Sequence
  Synthetic
uucauggcaucuggaauggu

SEQ ID NO: 662625 - RNA, 21 nt, Artificial Sequence
  Synthetic
cuucauggcaucuggaauggu

SEQ ID NO: 662626 - RNA, 22 nt, Artificial Sequence
  Synthetic
ucuucauggcaucuggaauggu

SEQ ID NO: 662627 - RNA, 23 nt, Artificial Sequence
  Synthetic
uucuucauggcaucuggaauggu

SEQ ID NO: 662628 - RNA, 24 nt, Artificial Sequence
  Synthetic
uuucuucauggcaucuggaauggu

SEQ ID NO: 662629 - RNA, 18 nt, Artificial Sequence
  Synthetic
uccaggauguugaauggu

SEQ ID NO: 662630 - RNA, 19 nt, Artificial Sequence
  Synthetic
auccaggauguugaauggu

SEQ ID NO: 662631 - RNA, 20 nt, Artificial Sequence
  Synthetic
cauccaggauguugaauggu

SEQ ID NO: 662632 - RNA, 21 nt, Artificial Sequence
  Synthetic
ccauccaggauguugaauggu

SEQ ID NO: 662633 - RNA, 22 nt, Artificial Sequence
  Synthetic
gccauccaggauguugaauggu

SEQ ID NO: 662634 - RNA, 23 nt, Artificial Sequence
  Synthetic
ggccauccaggauguugaauggu

SEQ ID NO: 662635 - RNA, 24 nt, Artificial Sequence
  Synthetic
aggccauccaggauguugaauggu

SEQ ID NO: 662636 - RNA, 18 nt, Artificial Sequence
  Synthetic
gcuugauaaaauaauggu

SEQ ID NO: 662637 - RNA, 19 nt, Artificial Sequence
  Synthetic
ggcuugauaaaauaauggu

SEQ ID NO: 662638 - RNA, 20 nt, Artificial Sequence
  Synthetic
aggcuugauaaaauaauggu

SEQ ID NO: 662639 - RNA, 21 nt, Artificial Sequence
  Synthetic
uaggcuugauaaaauaauggu

SEQ ID NO: 662640 - RNA, 22 nt, Artificial Sequence
  Synthetic
cuaggcuugauaaaauaauggu

SEQ ID NO: 662641 - RNA, 23 nt, Artificial Sequence
  Synthetic
gcuaggcuugauaaaauaauggu

SEQ ID NO: 662642 - RNA, 24 nt, Artificial Sequence
  Synthetic
ugcuaggcuugauaaaauaauggu

SEQ ID NO: 662643 - RNA, 18 nt, Artificial Sequence
  Synthetic
ggacaucaugguaauggu

SEQ ID NO: 662644 - RNA, 19 nt, Artificial Sequence
  Synthetic
uggacaucaugguaauggu

SEQ ID NO: 662645 - RNA, 20 nt, Artificial Sequence
  Synthetic
uuggacaucaugguaauggu

SEQ ID NO: 662646 - RNA, 21 nt, Artificial Sequence
  Synthetic
uuuggacaucaugguaauggu

SEQ ID NO: 662647 - RNA, 22 nt, Artificial Sequence
  Synthetic
uuuuggacaucaugguaauggu

SEQ ID NO: 662648 - RNA, 23 nt, Artificial Sequence
  Synthetic
guuuuggacaucaugguaauggu

SEQ ID NO: 662649 - RNA, 24 nt, Artificial Sequence
  Synthetic
gguuuuggacaucaugguaauggu

SEQ ID NO: 662650 - RNA, 18 nt, Artificial Sequence
  Synthetic
gccuaccuucaacauggu

SEQ ID NO: 662651 - RNA, 19 nt, Artificial Sequence
  Synthetic
agccuaccuucaacauggu

SEQ ID NO: 662652 - RNA, 20 nt, Artificial Sequence
  Synthetic
uagccuaccuucaacauggu

SEQ ID NO: 662653 - RNA, 21 nt, Artificial Sequence
  Synthetic
cuagccuaccuucaacauggu

SEQ ID NO: 662654 - RNA, 22 nt, Artificial Sequence
  Synthetic
ccuagccuaccuucaacauggu

SEQ ID NO: 662655 - RNA, 23 nt, Artificial Sequence
  Synthetic
gccuagccuaccuucaacauggu

SEQ ID NO: 662656 - RNA, 24 nt, Artificial Sequence
  Synthetic
agccuagccuaccuucaacauggu

SEQ ID NO: 662657 - RNA, 18 nt, Artificial Sequence
  Synthetic
gccacacagagacauggu

SEQ ID NO: 662658 - RNA, 19 nt, Artificial Sequence
  Synthetic
cgccacacagagacauggu

SEQ ID NO: 662659 - RNA, 20 nt, Artificial Sequence
  Synthetic
acgccacacagagacauggu

SEQ ID NO: 662660 - RNA, 21 nt, Artificial Sequence
  Synthetic
gacgccacacagagacauggu

SEQ ID NO: 662661 - RNA, 22 nt, Artificial Sequence
  Synthetic
ugacgccacacagagacauggu

SEQ ID NO: 662662 - RNA, 23 nt, Artificial Sequence
  Synthetic
gugacgccacacagagacauggu

SEQ ID NO: 662663 - RNA, 24 nt, Artificial Sequence
  Synthetic
agugacgccacacagagacauggu

SEQ ID NO: 662664 - RNA, 18 nt, Artificial Sequence
  Synthetic
aguagauugggacauggu

SEQ ID NO: 662665 - RNA, 19 nt, Artificial Sequence
  Synthetic
gaguagauugggacauggu

SEQ ID NO: 662666 - RNA, 20 nt, Artificial Sequence
  Synthetic
ggaguagauugggacauggu

SEQ ID NO: 662667 - RNA, 21 nt, Artificial Sequence
  Synthetic
gggaguagauugggacauggu

SEQ ID NO: 662668 - RNA, 22 nt, Artificial Sequence
  Synthetic
agggaguagauugggacauggu

SEQ ID NO: 662669 - RNA, 23 nt, Artificial Sequence
  Synthetic
gagggaguagauugggacauggu

SEQ ID NO: 662670 - RNA, 24 nt, Artificial Sequence
  Synthetic
agagggaguagauugggacauggu

SEQ ID NO: 662671 - RNA, 18 nt, Artificial Sequence
  Synthetic
gguguguccuuacauggu

SEQ ID NO: 662672 - RNA, 19 nt, Artificial Sequence
  Synthetic
cgguguguccuuacauggu

SEQ ID NO: 662673 - RNA, 20 nt, Artificial Sequence
  Synthetic
ucgguguguccuuacauggu

SEQ ID NO: 662674 - RNA, 21 nt, Artificial Sequence
  Synthetic
uucgguguguccuuacauggu

SEQ ID NO: 662675 - RNA, 22 nt, Artificial Sequence
  Synthetic
cuucgguguguccuuacauggu

SEQ ID NO: 662676 - RNA, 23 nt, Artificial Sequence
  Synthetic
ucuucgguguguccuuacauggu

SEQ ID NO: 662677 - RNA, 24 nt, Artificial Sequence
  Synthetic
aucuucgguguguccuuacauggu

SEQ ID NO: 662678 - RNA, 18 nt, Artificial Sequence
  Synthetic
acucagaaguuccauggu

SEQ ID NO: 662679 - RNA, 19 nt, Artificial Sequence
  Synthetic
cacucagaaguuccauggu

SEQ ID NO: 662680 - RNA, 20 nt, Artificial Sequence
  Synthetic
acacucagaaguuccauggu

SEQ ID NO: 662681 - RNA, 21 nt, Artificial Sequence
  Synthetic
aacacucagaaguuccauggu

SEQ ID NO: 662682 - RNA, 22 nt, Artificial Sequence
  Synthetic
aaacacucagaaguuccauggu

SEQ ID NO: 662683 - RNA, 23 nt, Artificial Sequence
  Synthetic
caaacacucagaaguuccauggu

SEQ ID NO: 662684 - RNA, 24 nt, Artificial Sequence
  Synthetic
ccaaacacucagaaguuccauggu

SEQ ID NO: 662685 - RNA, 18 nt, Artificial Sequence
  Synthetic
gaauucgauuugcauggu

SEQ ID NO: 662686 - RNA, 19 nt, Artificial Sequence
  Synthetic
ugaauucgauuugcauggu

SEQ ID NO: 662687 - RNA, 20 nt, Artificial Sequence
  Synthetic
uugaauucgauuugcauggu

SEQ ID NO: 662688 - RNA, 21 nt, Artificial Sequence
  Synthetic
uuugaauucgauuugcauggu

SEQ ID NO: 662689 - RNA, 22 nt, Artificial Sequence
  Synthetic
guuugaauucgauuugcauggu

SEQ ID NO: 662690 - RNA, 23 nt, Artificial Sequence
  Synthetic
gguuugaauucgauuugcauggu

SEQ ID NO: 662691 - RNA, 24 nt, Artificial Sequence
  Synthetic
ugguuugaauucgauuugcauggu

SEQ ID NO: 662692 - RNA, 18 nt, Artificial Sequence
  Synthetic
aggccucagaaucauggu

SEQ ID NO: 662693 - RNA, 19 nt, Artificial Sequence
  Synthetic
gaggccucagaaucauggu

SEQ ID NO: 662694 - RNA, 20 nt, Artificial Sequence
  Synthetic
ggaggccucagaaucauggu

SEQ ID NO: 662695 - RNA, 21 nt, Artificial Sequence
  Synthetic
gggaggccucagaaucauggu

SEQ ID NO: 662696 - RNA, 22 nt, Artificial Sequence
  Synthetic
ggggaggccucagaaucauggu

SEQ ID NO: 662697 - RNA, 23 nt, Artificial Sequence
  Synthetic
uggggaggccucagaaucauggu

SEQ ID NO: 662698 - RNA, 24 nt, Artificial Sequence
  Synthetic
cuggggaggccucagaaucauggu

SEQ ID NO: 662699 - RNA, 18 nt, Artificial Sequence
  Synthetic
ugguagguacaucauggu

SEQ ID NO: 662700 - RNA, 19 nt, Artificial Sequence
  Synthetic
cugguagguacaucauggu

SEQ ID NO: 662701 - RNA, 20 nt, Artificial Sequence
  Synthetic
ccugguagguacaucauggu

SEQ ID NO: 662702 - RNA, 21 nt, Artificial Sequence
  Synthetic
cccugguagguacaucauggu

SEQ ID NO: 662703 - RNA, 22 nt, Artificial Sequence
  Synthetic
acccugguagguacaucauggu

SEQ ID NO: 662704 - RNA, 23 nt, Artificial Sequence
  Synthetic
gacccugguagguacaucauggu

SEQ ID NO: 662705 - RNA, 24 nt, Artificial Sequence
  Synthetic
ggacccugguagguacaucauggu

SEQ ID NO: 662706 - RNA, 18 nt, Artificial Sequence
  Synthetic
agacucucucuucauggu

SEQ ID NO: 662707 - RNA, 19 nt, Artificial Sequence
  Synthetic
cagacucucucuucauggu

SEQ ID NO: 662708 - RNA, 20 nt, Artificial Sequence
  Synthetic
ucagacucucucuucauggu

SEQ ID NO: 662709 - RNA, 21 nt, Artificial Sequence
  Synthetic
cucagacucucucuucauggu

SEQ ID NO: 662710 - RNA, 22 nt, Artificial Sequence
  Synthetic
ccucagacucucucuucauggu

SEQ ID NO: 662711 - RNA, 23 nt, Artificial Sequence
  Synthetic
uccucagacucucucuucauggu

SEQ ID NO: 662712 - RNA, 24 nt, Artificial Sequence
  Synthetic
uuccucagacucucucuucauggu

SEQ ID NO: 662713 - RNA, 18 nt, Artificial Sequence
  Synthetic
aauaggaguaaagauggu

SEQ ID NO: 662714 - RNA, 19 nt, Artificial Sequence
  Synthetic
aaauaggaguaaagauggu

SEQ ID NO: 662715 - RNA, 20 nt, Artificial Sequence
  Synthetic
aaaauaggaguaaagauggu

SEQ ID NO: 662716 - RNA, 21 nt, Artificial Sequence
  Synthetic
uaaaauaggaguaaagauggu

SEQ ID NO: 662717 - RNA, 22 nt, Artificial Sequence
  Synthetic
cuaaaauaggaguaaagauggu

SEQ ID NO: 662718 - RNA, 23 nt, Artificial Sequence
  Synthetic
acuaaaauaggaguaaagauggu

SEQ ID NO: 662719 - RNA, 24 nt, Artificial Sequence
  Synthetic
aacuaaaauaggaguaaagauggu

SEQ ID NO: 662720 - RNA, 18 nt, Artificial Sequence
  Synthetic
aaggagauaacagauggu

SEQ ID NO: 662721 - RNA, 19 nt, Artificial Sequence
  Synthetic
aaaggagauaacagauggu

SEQ ID NO: 662722 - RNA, 20 nt, Artificial Sequence
  Synthetic
gaaaggagauaacagauggu

SEQ ID NO: 662723 - RNA, 21 nt, Artificial Sequence
  Synthetic
agaaaggagauaacagauggu

SEQ ID NO: 662724 - RNA, 22 nt, Artificial Sequence
  Synthetic
aagaaaggagauaacagauggu

SEQ ID NO: 662725 - RNA, 23 nt, Artificial Sequence
  Synthetic
gaagaaaggagauaacagauggu

SEQ ID NO: 662726 - RNA, 24 nt, Artificial Sequence
  Synthetic
ggaagaaaggagauaacagauggu

SEQ ID NO: 662727 - RNA, 18 nt, Artificial Sequence
  Synthetic
agcacguauuacgauggu

SEQ ID NO: 662728 - RNA, 19 nt, Artificial Sequence
  Synthetic
aagcacguauuacgauggu

SEQ ID NO: 662729 - RNA, 20 nt, Artificial Sequence
  Synthetic
gaagcacguauuacgauggu

SEQ ID NO: 662730 - RNA, 21 nt, Artificial Sequence
  Synthetic
ggaagcacguauuacgauggu

SEQ ID NO: 662731 - RNA, 22 nt, Artificial Sequence
  Synthetic
aggaagcacguauuacgauggu

SEQ ID NO: 662732 - RNA, 23 nt, Artificial Sequence
  Synthetic
aaggaagcacguauuacgauggu

SEQ ID NO: 662733 - RNA, 24 nt, Artificial Sequence
  Synthetic
aaaggaagcacguauuacgauggu

SEQ ID NO: 662734 - RNA, 18 nt, Artificial Sequence
  Synthetic
ugcgugggaggcgauggu

SEQ ID NO: 662735 - RNA, 19 nt, Artificial Sequence
  Synthetic
gugcgugggaggcgauggu

SEQ ID NO: 662736 - RNA, 20 nt, Artificial Sequence
  Synthetic
ggugcgugggaggcgauggu

SEQ ID NO: 662737 - RNA, 21 nt, Artificial Sequence
  Synthetic
aggugcgugggaggcgauggu

SEQ ID NO: 662738 - RNA, 22 nt, Artificial Sequence
  Synthetic
gaggugcgugggaggcgauggu

SEQ ID NO: 662739 - RNA, 23 nt, Artificial Sequence
  Synthetic
agaggugcgugggaggcgauggu

SEQ ID NO: 662740 - RNA, 24 nt, Artificial Sequence
  Synthetic
gagaggugcgugggaggcgauggu

SEQ ID NO: 662741 - RNA, 18 nt, Artificial Sequence
  Synthetic
agaaccccgcucgauggu

SEQ ID NO: 662742 - RNA, 19 nt, Artificial Sequence
  Synthetic
aagaaccccgcucgauggu

SEQ ID NO: 662743 - RNA, 20 nt, Artificial Sequence
  Synthetic
gaagaaccccgcucgauggu

SEQ ID NO: 662744 - RNA, 21 nt, Artificial Sequence
  Synthetic
agaagaaccccgcucgauggu

SEQ ID NO: 662745 - RNA, 22 nt, Artificial Sequence
  Synthetic
aagaagaaccccgcucgauggu

SEQ ID NO: 662746 - RNA, 23 nt, Artificial Sequence
  Synthetic
aaagaagaaccccgcucgauggu

SEQ ID NO: 662747 - RNA, 24 nt, Artificial Sequence
  Synthetic
aaaagaagaaccccgcucgauggu

SEQ ID NO: 662748 - RNA, 18 nt, Artificial Sequence
  Synthetic
uucccagaccaggauggu

SEQ ID NO: 662749 - RNA, 19 nt, Artificial Sequence
  Synthetic
auucccagaccaggauggu

SEQ ID NO: 662750 - RNA, 20 nt, Artificial Sequence
  Synthetic
aauucccagaccaggauggu

SEQ ID NO: 662751 - RNA, 21 nt, Artificial Sequence
  Synthetic
aaauucccagaccaggauggu

SEQ ID NO: 662752 - RNA, 22 nt, Artificial Sequence
  Synthetic
uaaauucccagaccaggauggu

SEQ ID NO: 662753 - RNA, 23 nt, Artificial Sequence
  Synthetic
uuaaauucccagaccaggauggu

SEQ ID NO: 662754 - RNA, 24 nt, Artificial Sequence
  Synthetic
uuuaaauucccagaccaggauggu

SEQ ID NO: 662755 - RNA, 18 nt, Artificial Sequence
  Synthetic
gaaagggaaagggauggu

SEQ ID NO: 662756 - RNA, 19 nt, Artificial Sequence
  Synthetic
ggaaagggaaagggauggu

SEQ ID NO: 662757 - RNA, 20 nt, Artificial Sequence
  Synthetic
gggaaagggaaagggauggu

SEQ ID NO: 662758 - RNA, 21 nt, Artificial Sequence
  Synthetic
agggaaagggaaagggauggu

SEQ ID NO: 662759 - RNA, 22 nt, Artificial Sequence
  Synthetic
gagggaaagggaaagggauggu

SEQ ID NO: 662760 - RNA, 23 nt, Artificial Sequence
  Synthetic
agagggaaagggaaagggauggu

SEQ ID NO: 662761 - RNA, 24 nt, Artificial Sequence
  Synthetic
gagagggaaagggaaagggauggu

SEQ ID NO: 662762 - RNA, 18 nt, Artificial Sequence
  Synthetic
uaggugagauuggauggu

SEQ ID NO: 662763 - RNA, 19 nt, Artificial Sequence
  Synthetic
guaggugagauuggauggu

SEQ ID NO: 662764 - RNA, 20 nt, Artificial Sequence
  Synthetic
gguaggugagauuggauggu

SEQ ID NO: 662765 - RNA, 21 nt, Artificial Sequence
  Synthetic
agguaggugagauuggauggu

SEQ ID NO: 662766 - RNA, 22 nt, Artificial Sequence
  Synthetic
gagguaggugagauuggauggu

SEQ ID NO: 662767 - RNA, 23 nt, Artificial Sequence
  Synthetic
ugagguaggugagauuggauggu

SEQ ID NO: 662768 - RNA, 24 nt, Artificial Sequence
  Synthetic
gugagguaggugagauuggauggu

SEQ ID NO: 662769 - RNA, 18 nt, Artificial Sequence
  Synthetic
uuagcugggcaugauggu

SEQ ID NO: 662770 - RNA, 19 nt, Artificial Sequence
  Synthetic
auuagcugggcaugauggu

SEQ ID NO: 662771 - RNA, 20 nt, Artificial Sequence
  Synthetic
aauuagcugggcaugauggu

SEQ ID NO: 662772 - RNA, 21 nt, Artificial Sequence
  Synthetic
aaauuagcugggcaugauggu

SEQ ID NO: 662773 - RNA, 22 nt, Artificial Sequence
  Synthetic
aaaauuagcugggcaugauggu

SEQ ID NO: 662774 - RNA, 23 nt, Artificial Sequence
  Synthetic
aaaaauuagcugggcaugauggu

SEQ ID NO: 662775 - RNA, 24 nt, Artificial Sequence
  Synthetic
aaaaaauuagcugggcaugauggu

SEQ ID NO: 662776 - RNA, 18 nt, Artificial Sequence
  Synthetic
uuaaaugggcaauauggu

SEQ ID NO: 662777 - RNA, 19 nt, Artificial Sequence
  Synthetic
uuuaaaugggcaauauggu

SEQ ID NO: 662778 - RNA, 20 nt, Artificial Sequence
  Synthetic
auuuaaaugggcaauauggu

SEQ ID NO: 662779 - RNA, 21 nt, Artificial Sequence
  Synthetic
uauuuaaaugggcaauauggu

SEQ ID NO: 662780 - RNA, 22 nt, Artificial Sequence
  Synthetic
uuauuuaaaugggcaauauggu

SEQ ID NO: 662781 - RNA, 23 nt, Artificial Sequence
  Synthetic
uuuauuuaaaugggcaauauggu

SEQ ID NO: 662782 - RNA, 24 nt, Artificial Sequence
  Synthetic
auuuauuuaaaugggcaauauggu

SEQ ID NO: 662783 - RNA, 18 nt, Artificial Sequence
  Synthetic
ggcagcauaacauauggu

SEQ ID NO: 662784 - RNA, 19 nt, Artificial Sequence
  Synthetic
aggcagcauaacauauggu

SEQ ID NO: 662785 - RNA, 20 nt, Artificial Sequence
  Synthetic
uaggcagcauaacauauggu

SEQ ID NO: 662786 - RNA, 21 nt, Artificial Sequence
  Synthetic
auaggcagcauaacauauggu

SEQ ID NO: 662787 - RNA, 22 nt, Artificial Sequence
  Synthetic
gauaggcagcauaacauauggu

SEQ ID NO: 662788 - RNA, 23 nt, Artificial Sequence
  Synthetic
ggauaggcagcauaacauauggu

SEQ ID NO: 662789 - RNA, 24 nt, Artificial Sequence
  Synthetic
aggauaggcagcauaacauauggu

SEQ ID NO: 662790 - RNA, 18 nt, Artificial Sequence
  Synthetic
uauccacaaagauauggu

SEQ ID NO: 662791 - RNA, 19 nt, Artificial Sequence
  Synthetic
guauccacaaagauauggu

SEQ ID NO: 662792 - RNA, 20 nt, Artificial Sequence
  Synthetic
uguauccacaaagauauggu

SEQ ID NO: 662793 - RNA, 21 nt, Artificial Sequence
  Synthetic
auguauccacaaagauauggu

SEQ ID NO: 662794 - RNA, 22 nt, Artificial Sequence
  Synthetic
uauguauccacaaagauauggu

SEQ ID NO: 662795 - RNA, 23 nt, Artificial Sequence
  Synthetic
uuauguauccacaaagauauggu

SEQ ID NO: 662796 - RNA, 24 nt, Artificial Sequence
  Synthetic
uuuauguauccacaaagauauggu

SEQ ID NO: 662797 - RNA, 18 nt, Artificial Sequence
  Synthetic
aguaagaaaggauauggu

SEQ ID NO: 662798 - RNA, 19 nt, Artificial Sequence
  Synthetic
uaguaagaaaggauauggu

SEQ ID NO: 662799 - RNA, 20 nt, Artificial Sequence
  Synthetic
guaguaagaaaggauauggu

SEQ ID NO: 662800 - RNA, 21 nt, Artificial Sequence
  Synthetic
aguaguaagaaaggauauggu

SEQ ID NO: 662801 - RNA, 22 nt, Artificial Sequence
  Synthetic
uaguaguaagaaaggauauggu

SEQ ID NO: 662802 - RNA, 23 nt, Artificial Sequence
  Synthetic
guaguaguaagaaaggauauggu

SEQ ID NO: 662803 - RNA, 24 nt, Artificial Sequence
  Synthetic
uguaguaguaagaaaggauauggu

SEQ ID NO: 662804 - RNA, 18 nt, Artificial Sequence
  Synthetic
guaucccuuuucuauggu

SEQ ID NO: 662805 - RNA, 19 nt, Artificial Sequence
  Synthetic
gguaucccuuuucuauggu

SEQ ID NO: 662806 - RNA, 20 nt, Artificial Sequence
  Synthetic
ugguaucccuuuucuauggu

SEQ ID NO: 662807 - RNA, 21 nt, Artificial Sequence
  Synthetic
uugguaucccuuuucuauggu

SEQ ID NO: 662808 - RNA, 22 nt, Artificial Sequence
  Synthetic
uuugguaucccuuuucuauggu

SEQ ID NO: 662809 - RNA, 23 nt, Artificial Sequence
  Synthetic
auuugguaucccuuuucuauggu

SEQ ID NO: 662810 - RNA, 24 nt, Artificial Sequence
  Synthetic
cauuugguaucccuuuucuauggu

SEQ ID NO: 662811 - RNA, 18 nt, Artificial Sequence
  Synthetic
cuaauuuuuguguauggu

SEQ ID NO: 662812 - RNA, 19 nt, Artificial Sequence
  Synthetic
gcuaauuuuuguguauggu

SEQ ID NO: 662813 - RNA, 20 nt, Artificial Sequence
  Synthetic
agcuaauuuuuguguauggu

SEQ ID NO: 662814 - RNA, 21 nt, Artificial Sequence
  Synthetic
aagcuaauuuuuguguauggu

SEQ ID NO: 662815 - RNA, 22 nt, Artificial Sequence
  Synthetic
uaagcuaauuuuuguguauggu

SEQ ID NO: 662816 - RNA, 23 nt, Artificial Sequence
  Synthetic
uuaagcuaauuuuuguguauggu

SEQ ID NO: 662817 - RNA, 24 nt, Artificial Sequence
  Synthetic
uuuaagcuaauuuuuguguauggu

SEQ ID NO: 662818 - RNA, 18 nt, Artificial Sequence
  Synthetic
aaccugagguauuauggu

SEQ ID NO: 662819 - RNA, 19 nt, Artificial Sequence
  Synthetic
caaccugagguauuauggu

SEQ ID NO: 662820 - RNA, 20 nt, Artificial Sequence
  Synthetic
acaaccugagguauuauggu

SEQ ID NO: 662821 - RNA, 21 nt, Artificial Sequence
  Synthetic
aacaaccugagguauuauggu

SEQ ID NO: 662822 - RNA, 22 nt, Artificial Sequence
  Synthetic
caacaaccugagguauuauggu

SEQ ID NO: 662823 - RNA, 23 nt, Artificial Sequence
  Synthetic
gcaacaaccugagguauuauggu

SEQ ID NO: 662824 - RNA, 24 nt, Artificial Sequence
  Synthetic
ugcaacaaccugagguauuauggu

SEQ ID NO: 662825 - RNA, 18 nt, Artificial Sequence
  Synthetic
ucuucuucuucuuauggu

SEQ ID NO: 662826 - RNA, 19 nt, Artificial Sequence
  Synthetic
uucuucuucuucuuauggu

SEQ ID NO: 662827 - RNA, 20 nt, Artificial Sequence
  Synthetic
cuucuucuucuucuuauggu

SEQ ID NO: 662828 - RNA, 21 nt, Artificial Sequence
  Synthetic
ucuucuucuucuucuuauggu

SEQ ID NO: 662829 - RNA, 22 nt, Artificial Sequence
  Synthetic
uucuucuucuucuucuuauggu

SEQ ID NO: 662830 - RNA, 23 nt, Artificial Sequence
  Synthetic
cuucuucuucuucuucuuauggu

SEQ ID NO: 662831 - RNA, 24 nt, Artificial Sequence
  Synthetic
ccuucuucuucuucuucuuauggu

SEQ ID NO: 662832 - RNA, 18 nt, Artificial Sequence
  Synthetic
cauuuaucaacaacuggu

SEQ ID NO: 662833 - RNA, 19 nt, Artificial Sequence
  Synthetic
gcauuuaucaacaacuggu

SEQ ID NO: 662834 - RNA, 20 nt, Artificial Sequence
  Synthetic
ugcauuuaucaacaacuggu

SEQ ID NO: 662835 - RNA, 21 nt, Artificial Sequence
  Synthetic
cugcauuuaucaacaacuggu

SEQ ID NO: 662836 - RNA, 22 nt, Artificial Sequence
  Synthetic
acugcauuuaucaacaacuggu

SEQ ID NO: 662837 - RNA, 23 nt, Artificial Sequence
  Synthetic
aacugcauuuaucaacaacuggu

SEQ ID NO: 662838 - RNA, 24 nt, Artificial Sequence
  Synthetic
caacugcauuuaucaacaacuggu

SEQ ID NO: 662839 - RNA, 18 nt, Artificial Sequence
  Synthetic
cauugaaugccaacuggu

SEQ ID NO: 662840 - RNA, 19 nt, Artificial Sequence
  Synthetic
ucauugaaugccaacuggu

SEQ ID NO: 662841 - RNA, 20 nt, Artificial Sequence
  Synthetic
aucauugaaugccaacuggu

SEQ ID NO: 662842 - RNA, 21 nt, Artificial Sequence
  Synthetic
aaucauugaaugccaacuggu

SEQ ID NO: 662843 - RNA, 22 nt, Artificial Sequence
  Synthetic
uaaucauugaaugccaacuggu

SEQ ID NO: 662844 - RNA, 23 nt, Artificial Sequence
  Synthetic
uuaaucauugaaugccaacuggu

SEQ ID NO: 662845 - RNA, 24 nt, Artificial Sequence
  Synthetic
cuuaaucauugaaugccaacuggu

SEQ ID NO: 662846 - RNA, 18 nt, Artificial Sequence
  Synthetic
aguugccuaagaacuggu

SEQ ID NO: 662847 - RNA, 19 nt, Artificial Sequence
  Synthetic
caguugccuaagaacuggu

SEQ ID NO: 662848 - RNA, 20 nt, Artificial Sequence
  Synthetic
acaguugccuaagaacuggu

SEQ ID NO: 662849 - RNA, 21 nt, Artificial Sequence
  Synthetic
aacaguugccuaagaacuggu

SEQ ID NO: 662850 - RNA, 22 nt, Artificial Sequence
  Synthetic
aaacaguugccuaagaacuggu

SEQ ID NO: 662851 - RNA, 23 nt, Artificial Sequence
  Synthetic
gaaacaguugccuaagaacuggu

SEQ ID NO: 662852 - RNA, 24 nt, Artificial Sequence
  Synthetic
agaaacaguugccuaagaacuggu

SEQ ID NO: 662853 - RNA, 18 nt, Artificial Sequence
  Synthetic
ccaggucagagaacuggu

SEQ ID NO: 662854 - RNA, 19 nt, Artificial Sequence
  Synthetic
uccaggucagagaacuggu

SEQ ID NO: 662855 - RNA, 20 nt, Artificial Sequence
  Synthetic
auccaggucagagaacuggu

SEQ ID NO: 662856 - RNA, 21 nt, Artificial Sequence
  Synthetic
uauccaggucagagaacuggu

SEQ ID NO: 662857 - RNA, 22 nt, Artificial Sequence
  Synthetic
auauccaggucagagaacuggu

SEQ ID NO: 662858 - RNA, 23 nt, Artificial Sequence
  Synthetic
gauauccaggucagagaacuggu

SEQ ID NO: 662859 - RNA, 24 nt, Artificial Sequence
  Synthetic
ugauauccaggucagagaacuggu

SEQ ID NO: 662860 - RNA, 21 nt, Artificial Sequence
  Synthetic
augauugccauucuaacuggu

SEQ ID NO: 662861 - RNA, 22 nt, Artificial Sequence
  Synthetic
aaugauugccauucuaacuggu

SEQ ID NO: 662862 - RNA, 23 nt, Artificial Sequence
  Synthetic
aaaugauugccauucuaacuggu

SEQ ID NO: 662863 - RNA, 24 nt, Artificial Sequence
  Synthetic
uaaaugauugccauucuaacuggu

SEQ ID NO: 662864 - RNA, 23 nt, Artificial Sequence
  Synthetic
gaaugauugccauucuaacuggu

SEQ ID NO: 662865 - RNA, 24 nt, Artificial Sequence
  Synthetic
ugaaugauugccauucuaacuggu

SEQ ID NO: 662866 - RNA, 23 nt, Artificial Sequence
  Synthetic
uaaugauugccauucuaacuggu

SEQ ID NO: 662867 - RNA, 24 nt, Artificial Sequence
  Synthetic
uuaaugauugccauucuaacuggu

SEQ ID NO: 662868 - RNA, 18 nt, Artificial Sequence
  Synthetic
ggcucugauuuaacuggu

SEQ ID NO: 662869 - RNA, 19 nt, Artificial Sequence
  Synthetic
aggcucugauuuaacuggu

SEQ ID NO: 662870 - RNA, 20 nt, Artificial Sequence
  Synthetic
aaggcucugauuuaacuggu

SEQ ID NO: 662871 - RNA, 21 nt, Artificial Sequence
  Synthetic
uaaggcucugauuuaacuggu

SEQ ID NO: 662872 - RNA, 22 nt, Artificial Sequence
  Synthetic
uuaaggcucugauuuaacuggu

SEQ ID NO: 662873 - RNA, 23 nt, Artificial Sequence
  Synthetic
auuaaggcucugauuuaacuggu

SEQ ID NO: 662874 - RNA, 24 nt, Artificial Sequence
  Synthetic
uauuaaggcucugauuuaacuggu

SEQ ID NO: 662875 - RNA, 18 nt, Artificial Sequence
  Synthetic
uuuucaagaaacacuggu

SEQ ID NO: 662876 - RNA, 19 nt, Artificial Sequence
  Synthetic
guuuucaagaaacacuggu

SEQ ID NO: 662877 - RNA, 20 nt, Artificial Sequence
  Synthetic
uguuuucaagaaacacuggu

SEQ ID NO: 662878 - RNA, 21 nt, Artificial Sequence
  Synthetic
guguuuucaagaaacacuggu

SEQ ID NO: 662879 - RNA, 22 nt, Artificial Sequence
  Synthetic
uguguuuucaagaaacacuggu

SEQ ID NO: 662880 - RNA, 23 nt, Artificial Sequence
  Synthetic
auguguuuucaagaaacacuggu

SEQ ID NO: 662881 - RNA, 24 nt, Artificial Sequence
  Synthetic
gauguguuuucaagaaacacuggu

SEQ ID NO: 662882 - RNA, 18 nt, Artificial Sequence
  Synthetic
uggguuuuuaccacuggu

SEQ ID NO: 662883 - RNA, 19 nt, Artificial Sequence
  Synthetic
uuggguuuuuaccacuggu

SEQ ID NO: 662884 - RNA, 20 nt, Artificial Sequence
  Synthetic
auuggguuuuuaccacuggu

SEQ ID NO: 662885 - RNA, 21 nt, Artificial Sequence
  Synthetic
gauuggguuuuuaccacuggu

SEQ ID NO: 662886 - RNA, 22 nt, Artificial Sequence
  Synthetic
ggauuggguuuuuaccacuggu

SEQ ID NO: 662887 - RNA, 23 nt, Artificial Sequence
  Synthetic
aggauuggguuuuuaccacuggu

SEQ ID NO: 662888 - RNA, 24 nt, Artificial Sequence
  Synthetic
gaggauuggguuuuuaccacuggu

SEQ ID NO: 662889 - RNA, 18 nt, Artificial Sequence
  Synthetic
gcagacgcuuccacuggu

SEQ ID NO: 662890 - RNA, 19 nt, Artificial Sequence
  Synthetic
ugcagacgcuuccacuggu

SEQ ID NO: 662891 - RNA, 20 nt, Artificial Sequence
  Synthetic
gugcagacgcuuccacuggu

SEQ ID NO: 662892 - RNA, 21 nt, Artificial Sequence
  Synthetic
ggugcagacgcuuccacuggu

SEQ ID NO: 662893 - RNA, 22 nt, Artificial Sequence
  Synthetic
aggugcagacgcuuccacuggu

SEQ ID NO: 662894 - RNA, 23 nt, Artificial Sequence
  Synthetic
aaggugcagacgcuuccacuggu

SEQ ID NO: 662895 - RNA, 24 nt, Artificial Sequence
  Synthetic
aaaggugcagacgcuuccacuggu

SEQ ID NO: 662896 - RNA, 18 nt, Artificial Sequence
  Synthetic
auaggcauucugacuggu

SEQ ID NO: 662897 - RNA, 19 nt, Artificial Sequence
  Synthetic
aauaggcauucugacuggu

SEQ ID NO: 662898 - RNA, 20 nt, Artificial Sequence
  Synthetic
uaauaggcauucugacuggu

SEQ ID NO: 662899 - RNA, 21 nt, Artificial Sequence
  Synthetic
auaauaggcauucugacuggu

SEQ ID NO: 662900 - RNA, 22 nt, Artificial Sequence
  Synthetic
gauaauaggcauucugacuggu

SEQ ID NO: 662901 - RNA, 23 nt, Artificial Sequence
  Synthetic
ugauaauaggcauucugacuggu

SEQ ID NO: 662902 - RNA, 24 nt, Artificial Sequence
  Synthetic
uugauaauaggcauucugacuggu

SEQ ID NO: 662903 - RNA, 18 nt, Artificial Sequence
  Synthetic
uggaaacacuugacuggu

SEQ ID NO: 662904 - RNA, 19 nt, Artificial Sequence
  Synthetic
cuggaaacacuugacuggu

SEQ ID NO: 662905 - RNA, 20 nt, Artificial Sequence
  Synthetic
ucuggaaacacuugacuggu

SEQ ID NO: 662906 - RNA, 21 nt, Artificial Sequence
  Synthetic
cucuggaaacacuugacuggu

SEQ ID NO: 662907 - RNA, 22 nt, Artificial Sequence
  Synthetic
ccucuggaaacacuugacuggu

SEQ ID NO: 662908 - RNA, 23 nt, Artificial Sequence
  Synthetic
uccucuggaaacacuugacuggu

SEQ ID NO: 662909 - RNA, 24 nt, Artificial Sequence
  Synthetic
uuccucuggaaacacuugacuggu

SEQ ID NO: 662910 - RNA, 18 nt, Artificial Sequence
  Synthetic
auggaagcuuugacuggu

SEQ ID NO: 662911 - RNA, 19 nt, Artificial Sequence
  Synthetic
aauggaagcuuugacuggu

SEQ ID NO: 662912 - RNA, 20 nt, Artificial Sequence
  Synthetic
caauggaagcuuugacuggu

SEQ ID NO: 662913 - RNA, 21 nt, Artificial Sequence
  Synthetic
acaauggaagcuuugacuggu

SEQ ID NO: 662914 - RNA, 22 nt, Artificial Sequence
  Synthetic
gacaauggaagcuuugacuggu

SEQ ID NO: 662915 - RNA, 23 nt, Artificial Sequence
  Synthetic
ugacaauggaagcuuugacuggu

SEQ ID NO: 662916 - RNA, 24 nt, Artificial Sequence
  Synthetic
uugacaauggaagcuuugacuggu

SEQ ID NO: 662917 - RNA, 18 nt, Artificial Sequence
  Synthetic
cauguaguacauacuggu

SEQ ID NO: 662918 - RNA, 19 nt, Artificial Sequence
  Synthetic
ucauguaguacauacuggu

SEQ ID NO: 662919 - RNA, 20 nt, Artificial Sequence
  Synthetic
aucauguaguacauacuggu

SEQ ID NO: 662920 - RNA, 21 nt, Artificial Sequence
  Synthetic
uaucauguaguacauacuggu

SEQ ID NO: 662921 - RNA, 22 nt, Artificial Sequence
  Synthetic
auaucauguaguacauacuggu

SEQ ID NO: 662922 - RNA, 23 nt, Artificial Sequence
  Synthetic
aauaucauguaguacauacuggu

SEQ ID NO: 662923 - RNA, 24 nt, Artificial Sequence
  Synthetic
caauaucauguaguacauacuggu

SEQ ID NO: 662924 - RNA, 18 nt, Artificial Sequence
  Synthetic
acaguugaagauacuggu

SEQ ID NO: 662925 - RNA, 19 nt, Artificial Sequence
  Synthetic
gacaguugaagauacuggu

SEQ ID NO: 662926 - RNA, 20 nt, Artificial Sequence
  Synthetic
agacaguugaagauacuggu

SEQ ID NO: 662927 - RNA, 21 nt, Artificial Sequence
  Synthetic
cagacaguugaagauacuggu

SEQ ID NO: 662928 - RNA, 22 nt, Artificial Sequence
  Synthetic
ucagacaguugaagauacuggu

SEQ ID NO: 662929 - RNA, 23 nt, Artificial Sequence
  Synthetic
aucagacaguugaagauacuggu

SEQ ID NO: 662930 - RNA, 24 nt, Artificial Sequence
  Synthetic
aaucagacaguugaagauacuggu

SEQ ID NO: 662931 - RNA, 18 nt, Artificial Sequence
  Synthetic
gaaucacucgaaccuggu

SEQ ID NO: 662932 - RNA, 19 nt, Artificial Sequence
  Synthetic
ggaaucacucgaaccuggu

SEQ ID NO: 662933 - RNA, 20 nt, Artificial Sequence
  Synthetic
gggaaucacucgaaccuggu

SEQ ID NO: 662934 - RNA, 21 nt, Artificial Sequence
  Synthetic
ggggaaucacucgaaccuggu

SEQ ID NO: 662935 - RNA, 22 nt, Artificial Sequence
  Synthetic
aggggaaucacucgaaccuggu

SEQ ID NO: 662936 - RNA, 23 nt, Artificial Sequence
  Synthetic
caggggaaucacucgaaccuggu

SEQ ID NO: 662937 - RNA, 24 nt, Artificial Sequence
  Synthetic
gcaggggaaucacucgaaccuggu

SEQ ID NO: 662938 - RNA, 18 nt, Artificial Sequence
  Synthetic
aauccgggggaaccuggu

SEQ ID NO: 662939 - RNA, 19 nt, Artificial Sequence
  Synthetic
uaauccgggggaaccuggu

SEQ ID NO: 662940 - RNA, 20 nt, Artificial Sequence
  Synthetic
guaauccgggggaaccuggu

SEQ ID NO: 662941 - RNA, 21 nt, Artificial Sequence
  Synthetic
uguaauccgggggaaccuggu

SEQ ID NO: 662942 - RNA, 22 nt, Artificial Sequence
  Synthetic
cuguaauccgggggaaccuggu

SEQ ID NO: 662943 - RNA, 23 nt, Artificial Sequence
  Synthetic
acuguaauccgggggaaccuggu

SEQ ID NO: 662944 - RNA, 24 nt, Artificial Sequence
  Synthetic
aacuguaauccgggggaaccuggu

SEQ ID NO: 662945 - RNA, 18 nt, Artificial Sequence
  Synthetic
ucaugggagugaccuggu

SEQ ID NO: 662946 - RNA, 19 nt, Artificial Sequence
  Synthetic
gucaugggagugaccuggu

SEQ ID NO: 662947 - RNA, 20 nt, Artificial Sequence
  Synthetic
ugucaugggagugaccuggu

SEQ ID NO: 662948 - RNA, 21 nt, Artificial Sequence
  Synthetic
gugucaugggagugaccuggu

SEQ ID NO: 662949 - RNA, 22 nt, Artificial Sequence
  Synthetic
ugugucaugggagugaccuggu

SEQ ID NO: 662950 - RNA, 23 nt, Artificial Sequence
  Synthetic
augugucaugggagugaccuggu

SEQ ID NO: 662951 - RNA, 24 nt, Artificial Sequence
  Synthetic
caugugucaugggagugaccuggu

SEQ ID NO: 662952 - RNA, 18 nt, Artificial Sequence
  Synthetic
cacuaguuuaucccuggu

SEQ ID NO: 662953 - RNA, 19 nt, Artificial Sequence
  Synthetic
ccacuaguuuaucccuggu

SEQ ID NO: 662954 - RNA, 20 nt, Artificial Sequence
  Synthetic
gccacuaguuuaucccuggu

SEQ ID NO: 662955 - RNA, 21 nt, Artificial Sequence
  Synthetic
ugccacuaguuuaucccuggu

SEQ ID NO: 662956 - RNA, 22 nt, Artificial Sequence
  Synthetic
cugccacuaguuuaucccuggu

SEQ ID NO: 662957 - RNA, 23 nt, Artificial Sequence
  Synthetic
ucugccacuaguuuaucccuggu

SEQ ID NO: 662958 - RNA, 24 nt, Artificial Sequence
  Synthetic
cucugccacuaguuuaucccuggu

SEQ ID NO: 662959 - RNA, 21 nt, Artificial Sequence
  Synthetic
auguuggagguggggccuggu

SEQ ID NO: 662960 - RNA, 22 nt, Artificial Sequence
  Synthetic
aauguuggagguggggccuggu

SEQ ID NO: 662961 - RNA, 23 nt, Artificial Sequence
  Synthetic
caauguuggagguggggccuggu

SEQ ID NO: 662962 - RNA, 24 nt, Artificial Sequence
  Synthetic
ccaauguuggagguggggccuggu

SEQ ID NO: 662963 - RNA, 21 nt, Artificial Sequence
  Synthetic
guguuggagguggggccuggu

SEQ ID NO: 662964 - RNA, 22 nt, Artificial Sequence
  Synthetic
aguguuggagguggggccuggu

SEQ ID NO: 662965 - RNA, 23 nt, Artificial Sequence
  Synthetic
caguguuggagguggggccuggu

SEQ ID NO: 662966 - RNA, 24 nt, Artificial Sequence
  Synthetic
ccaguguuggagguggggccuggu

SEQ ID NO: 662967 - RNA, 18 nt, Artificial Sequence
  Synthetic
uuggacuuggggccuggu

SEQ ID NO: 662968 - RNA, 19 nt, Artificial Sequence
  Synthetic
guuggacuuggggccuggu

SEQ ID NO: 662969 - RNA, 20 nt, Artificial Sequence
  Synthetic
uguuggacuuggggccuggu

SEQ ID NO: 662970 - RNA, 21 nt, Artificial Sequence
  Synthetic
guguuggacuuggggccuggu

SEQ ID NO: 662971 - RNA, 22 nt, Artificial Sequence
  Synthetic
aguguuggacuuggggccuggu

SEQ ID NO: 662972 - RNA, 23 nt, Artificial Sequence
  Synthetic
aaguguuggacuuggggccuggu

SEQ ID NO: 662973 - RNA, 24 nt, Artificial Sequence
  Synthetic
caaguguuggacuuggggccuggu

SEQ ID NO: 662974 - RNA, 18 nt, Artificial Sequence
  Synthetic
ugcaaauguuuuccuggu

SEQ ID NO: 662975 - RNA, 19 nt, Artificial Sequence
  Synthetic
augcaaauguuuuccuggu

SEQ ID NO: 662976 - RNA, 20 nt, Artificial Sequence
  Synthetic
uaugcaaauguuuuccuggu

SEQ ID NO: 662977 - RNA, 21 nt, Artificial Sequence
  Synthetic
auaugcaaauguuuuccuggu

SEQ ID NO: 662978 - RNA, 22 nt, Artificial Sequence
  Synthetic
uauaugcaaauguuuuccuggu

SEQ ID NO: 662979 - RNA, 23 nt, Artificial Sequence
  Synthetic
uuauaugcaaauguuuuccuggu

SEQ ID NO: 662980 - RNA, 24 nt, Artificial Sequence
  Synthetic
uuuauaugcaaauguuuuccuggu

SEQ ID NO: 662981 - RNA, 18 nt, Artificial Sequence
  Synthetic
uuaugcugcccagcuggu

SEQ ID NO: 662982 - RNA, 19 nt, Artificial Sequence
  Synthetic
guuaugcugcccagcuggu

SEQ ID NO: 662983 - RNA, 20 nt, Artificial Sequence
  Synthetic
uguuaugcugcccagcuggu

SEQ ID NO: 662984 - RNA, 21 nt, Artificial Sequence
  Synthetic
uuguuaugcugcccagcuggu

SEQ ID NO: 662985 - RNA, 22 nt, Artificial Sequence
  Synthetic
guuguuaugcugcccagcuggu

SEQ ID NO: 662986 - RNA, 23 nt, Artificial Sequence
  Synthetic
aguuguuaugcugcccagcuggu

SEQ ID NO: 662987 - RNA, 24 nt, Artificial Sequence
  Synthetic
caguuguuaugcugcccagcuggu

SEQ ID NO: 662988 - RNA, 18 nt, Artificial Sequence
  Synthetic
uuccucaucucagcuggu

SEQ ID NO: 662989 - RNA, 19 nt, Artificial Sequence
  Synthetic
auuccucaucucagcuggu

SEQ ID NO: 662990 - RNA, 20 nt, Artificial Sequence
  Synthetic
uauuccucaucucagcuggu

SEQ ID NO: 662991 - RNA, 21 nt, Artificial Sequence
  Synthetic
guauuccucaucucagcuggu

SEQ ID NO: 662992 - RNA, 22 nt, Artificial Sequence
  Synthetic
cguauuccucaucucagcuggu

SEQ ID NO: 662993 - RNA, 23 nt, Artificial Sequence
  Synthetic
ucguauuccucaucucagcuggu

SEQ ID NO: 662994 - RNA, 24 nt, Artificial Sequence
  Synthetic
cucguauuccucaucucagcuggu

SEQ ID NO: 662995 - RNA, 18 nt, Artificial Sequence
  Synthetic
caccuuggccaggcuggu

SEQ ID NO: 662996 - RNA, 19 nt, Artificial Sequence
  Synthetic
ucaccuuggccaggcuggu

SEQ ID NO: 662997 - RNA, 20 nt, Artificial Sequence
  Synthetic
aucaccuuggccaggcuggu

SEQ ID NO: 662998 - RNA, 21 nt, Artificial Sequence
  Synthetic
caucaccuuggccaggcuggu

SEQ ID NO: 662999 - RNA, 22 nt, Artificial Sequence
  Synthetic
ucaucaccuuggccaggcuggu

SEQ ID NO: 663000 - RNA, 23 nt, Artificial Sequence
  Synthetic
uucaucaccuuggccaggcuggu

SEQ ID NO: 663001 - RNA, 24 nt, Artificial Sequence
  Synthetic
uuucaucaccuuggccaggcuggu

SEQ ID NO: 663002 - RNA, 18 nt, Artificial Sequence
  Synthetic
uugggauggcaggcuggu

SEQ ID NO: 663003 - RNA, 19 nt, Artificial Sequence
  Synthetic
uuugggauggcaggcuggu

SEQ ID NO: 663004 - RNA, 20 nt, Artificial Sequence
  Synthetic
cuuugggauggcaggcuggu

SEQ ID NO: 663005 - RNA, 21 nt, Artificial Sequence
  Synthetic
ccuuugggauggcaggcuggu

SEQ ID NO: 663006 - RNA, 22 nt, Artificial Sequence
  Synthetic
uccuuugggauggcaggcuggu

SEQ ID NO: 663007 - RNA, 23 nt, Artificial Sequence
  Synthetic
uuccuuugggauggcaggcuggu

SEQ ID NO: 663008 - RNA, 24 nt, Artificial Sequence
  Synthetic
guuccuuugggauggcaggcuggu

SEQ ID NO: 663009 - RNA, 18 nt, Artificial Sequence
  Synthetic
agccucaaaugggcuggu

SEQ ID NO: 663010 - RNA, 19 nt, Artificial Sequence
  Synthetic
aagccucaaaugggcuggu

SEQ ID NO: 663011 - RNA, 20 nt, Artificial Sequence
  Synthetic
aaagccucaaaugggcuggu

SEQ ID NO: 663012 - RNA, 21 nt, Artificial Sequence
  Synthetic
uaaagccucaaaugggcuggu

SEQ ID NO: 663013 - RNA, 22 nt, Artificial Sequence
  Synthetic
auaaagccucaaaugggcuggu

SEQ ID NO: 663014 - RNA, 23 nt, Artificial Sequence
  Synthetic
aauaaagccucaaaugggcuggu

SEQ ID NO: 663015 - RNA, 24 nt, Artificial Sequence
  Synthetic
aaauaaagccucaaaugggcuggu

SEQ ID NO: 663016 - RNA, 18 nt, Artificial Sequence
  Synthetic
cucuucuacguggcuggu

SEQ ID NO: 663017 - RNA, 19 nt, Artificial Sequence
  Synthetic
acucuucuacguggcuggu

SEQ ID NO: 663018 - RNA, 20 nt, Artificial Sequence
  Synthetic
gacucuucuacguggcuggu

SEQ ID NO: 663019 - RNA, 21 nt, Artificial Sequence
  Synthetic
agacucuucuacguggcuggu

SEQ ID NO: 663020 - RNA, 22 nt, Artificial Sequence
  Synthetic
cagacucuucuacguggcuggu

SEQ ID NO: 663021 - RNA, 23 nt, Artificial Sequence
  Synthetic
gcagacucuucuacguggcuggu

SEQ ID NO: 663022 - RNA, 24 nt, Artificial Sequence
  Synthetic
ugcagacucuucuacguggcuggu

SEQ ID NO: 663023 - RNA, 18 nt, Artificial Sequence
  Synthetic
uacuagcugguaucuggu

SEQ ID NO: 663024 - RNA, 19 nt, Artificial Sequence
  Synthetic
guacuagcugguaucuggu

SEQ ID NO: 663025 - RNA, 20 nt, Artificial Sequence
  Synthetic
uguacuagcugguaucuggu

SEQ ID NO: 663026 - RNA, 21 nt, Artificial Sequence
  Synthetic
cuguacuagcugguaucuggu

SEQ ID NO: 663027 - RNA, 22 nt, Artificial Sequence
  Synthetic
ucuguacuagcugguaucuggu

SEQ ID NO: 663028 - RNA, 23 nt, Artificial Sequence
  Synthetic
aucuguacuagcugguaucuggu

SEQ ID NO: 663029 - RNA, 24 nt, Artificial Sequence
  Synthetic
gaucuguacuagcugguaucuggu

SEQ ID NO: 663030 - RNA, 18 nt, Artificial Sequence
  Synthetic
ugcuagugucucucuggu

SEQ ID NO: 663031 - RNA, 19 nt, Artificial Sequence
  Synthetic
augcuagugucucucuggu

SEQ ID NO: 663032 - RNA, 20 nt, Artificial Sequence
  Synthetic
caugcuagugucucucuggu

SEQ ID NO: 663033 - RNA, 21 nt, Artificial Sequence
  Synthetic
ccaugcuagugucucucuggu

SEQ ID NO: 663034 - RNA, 22 nt, Artificial Sequence
  Synthetic
gccaugcuagugucucucuggu

SEQ ID NO: 663035 - RNA, 23 nt, Artificial Sequence
  Synthetic
agccaugcuagugucucucuggu

SEQ ID NO: 663036 - RNA, 24 nt, Artificial Sequence
  Synthetic
gagccaugcuagugucucucuggu

SEQ ID NO: 663037 - RNA, 18 nt, Artificial Sequence
  Synthetic
uggcauuuggugucuggu

SEQ ID NO: 663038 - RNA, 19 nt, Artificial Sequence
  Synthetic
cuggcauuuggugucuggu

SEQ ID NO: 663039 - RNA, 20 nt, Artificial Sequence
  Synthetic
ucuggcauuuggugucuggu

SEQ ID NO: 663040 - RNA, 21 nt, Artificial Sequence
  Synthetic
cucuggcauuuggugucuggu

SEQ ID NO: 663041 - RNA, 22 nt, Artificial Sequence
  Synthetic
gcucuggcauuuggugucuggu

SEQ ID NO: 663042 - RNA, 23 nt, Artificial Sequence
  Synthetic
ggcucuggcauuuggugucuggu

SEQ ID NO: 663043 - RNA, 24 nt, Artificial Sequence
  Synthetic
aggcucuggcauuuggugucuggu

SEQ ID NO: 663044 - RNA, 18 nt, Artificial Sequence
  Synthetic
gcagauucauugucuggu

SEQ ID NO: 663045 - RNA, 19 nt, Artificial Sequence
  Synthetic
agcagauucauugucuggu

SEQ ID NO: 663046 - RNA, 20 nt, Artificial Sequence
  Synthetic
cagcagauucauugucuggu

SEQ ID NO: 663047 - RNA, 21 nt, Artificial Sequence
  Synthetic
ucagcagauucauugucuggu

SEQ ID NO: 663048 - RNA, 22 nt, Artificial Sequence
  Synthetic
aucagcagauucauugucuggu

SEQ ID NO: 663049 - RNA, 23 nt, Artificial Sequence
  Synthetic
caucagcagauucauugucuggu

SEQ ID NO: 663050 - RNA, 24 nt, Artificial Sequence
  Synthetic
acaucagcagauucauugucuggu

SEQ ID NO: 663051 - RNA, 18 nt, Artificial Sequence
  Synthetic
acuacauuguugucuggu

SEQ ID NO: 663052 - RNA, 19 nt, Artificial Sequence
  Synthetic
aacuacauuguugucuggu

SEQ ID NO: 663053 - RNA, 20 nt, Artificial Sequence
  Synthetic
caacuacauuguugucuggu

SEQ ID NO: 663054 - RNA, 21 nt, Artificial Sequence
  Synthetic
acaacuacauuguugucuggu

SEQ ID NO: 663055 - RNA, 22 nt, Artificial Sequence
  Synthetic
gacaacuacauuguugucuggu

SEQ ID NO: 663056 - RNA, 23 nt, Artificial Sequence
  Synthetic
agacaacuacauuguugucuggu

SEQ ID NO: 663057 - RNA, 24 nt, Artificial Sequence
  Synthetic
cagacaacuacauuguugucuggu

SEQ ID NO: 663058 - RNA, 18 nt, Artificial Sequence
  Synthetic
gugauaucuuugucuggu

SEQ ID NO: 663059 - RNA, 19 nt, Artificial Sequence
  Synthetic
ugugauaucuuugucuggu

SEQ ID NO: 663060 - RNA, 20 nt, Artificial Sequence
  Synthetic
uugugauaucuuugucuggu

SEQ ID NO: 663061 - RNA, 21 nt, Artificial Sequence
  Synthetic
cuugugauaucuuugucuggu

SEQ ID NO: 663062 - RNA, 22 nt, Artificial Sequence
  Synthetic
ucuugugauaucuuugucuggu

SEQ ID NO: 663063 - RNA, 23 nt, Artificial Sequence
  Synthetic
uucuugugauaucuuugucuggu

SEQ ID NO: 663064 - RNA, 24 nt, Artificial Sequence
  Synthetic
uuucuugugauaucuuugucuggu

SEQ ID NO: 663065 - RNA, 18 nt, Artificial Sequence
  Synthetic
uuucgaugauauucuggu

SEQ ID NO: 663066 - RNA, 19 nt, Artificial Sequence
  Synthetic
auuucgaugauauucuggu

SEQ ID NO: 663067 - RNA, 20 nt, Artificial Sequence
  Synthetic
uauuucgaugauauucuggu

SEQ ID NO: 663068 - RNA, 21 nt, Artificial Sequence
  Synthetic
guauuucgaugauauucuggu

SEQ ID NO: 663069 - RNA, 22 nt, Artificial Sequence
  Synthetic
aguauuucgaugauauucuggu

SEQ ID NO: 663070 - RNA, 23 nt, Artificial Sequence
  Synthetic
caguauuucgaugauauucuggu

SEQ ID NO: 663071 - RNA, 24 nt, Artificial Sequence
  Synthetic
ucaguauuucgaugauauucuggu

SEQ ID NO: 663072 - RNA, 18 nt, Artificial Sequence
  Synthetic
uuuucauuaacuucuggu

SEQ ID NO: 663073 - RNA, 19 nt, Artificial Sequence
  Synthetic
uuuuucauuaacuucuggu

SEQ ID NO: 663074 - RNA, 20 nt, Artificial Sequence
  Synthetic
auuuuucauuaacuucuggu

SEQ ID NO: 663075 - RNA, 21 nt, Artificial Sequence
  Synthetic
uauuuuucauuaacuucuggu

SEQ ID NO: 663076 - RNA, 22 nt, Artificial Sequence
  Synthetic
cuauuuuucauuaacuucuggu

SEQ ID NO: 663077 - RNA, 23 nt, Artificial Sequence
  Synthetic
ccuauuuuucauuaacuucuggu

SEQ ID NO: 663078 - RNA, 24 nt, Artificial Sequence
  Synthetic
cccuauuuuucauuaacuucuggu

SEQ ID NO: 663079 - RNA, 18 nt, Artificial Sequence
  Synthetic
gcccuuucgacuucuggu

SEQ ID NO: 663080 - RNA, 19 nt, Artificial Sequence
  Synthetic
agcccuuucgacuucuggu

SEQ ID NO: 663081 - RNA, 20 nt, Artificial Sequence
  Synthetic
aagcccuuucgacuucuggu

SEQ ID NO: 663082 - RNA, 21 nt, Artificial Sequence
  Synthetic
gaagcccuuucgacuucuggu

SEQ ID NO: 663083 - RNA, 22 nt, Artificial Sequence
  Synthetic
agaagcccuuucgacuucuggu

SEQ ID NO: 663084 - RNA, 23 nt, Artificial Sequence
  Synthetic
gagaagcccuuucgacuucuggu

SEQ ID NO: 663085 - RNA, 24 nt, Artificial Sequence
  Synthetic
agagaagcccuuucgacuucuggu

SEQ ID NO: 663086 - RNA, 18 nt, Artificial Sequence
  Synthetic
cuggcaucuacuucuggu

SEQ ID NO: 663087 - RNA, 19 nt, Artificial Sequence
  Synthetic
acuggcaucuacuucuggu

SEQ ID NO: 663088 - RNA, 20 nt, Artificial Sequence
  Synthetic
cacuggcaucuacuucuggu

SEQ ID NO: 663089 - RNA, 21 nt, Artificial Sequence
  Synthetic
ucacuggcaucuacuucuggu

SEQ ID NO: 663090 - RNA, 22 nt, Artificial Sequence
  Synthetic
gucacuggcaucuacuucuggu

SEQ ID NO: 663091 - RNA, 23 nt, Artificial Sequence
  Synthetic
ugucacuggcaucuacuucuggu

SEQ ID NO: 663092 - RNA, 24 nt, Artificial Sequence
  Synthetic
augucacuggcaucuacuucuggu

SEQ ID NO: 663093 - RNA, 18 nt, Artificial Sequence
  Synthetic
caaaaagcuauuucuggu

SEQ ID NO: 663094 - RNA, 19 nt, Artificial Sequence
  Synthetic
acaaaaagcuauuucuggu

SEQ ID NO: 663095 - RNA, 20 nt, Artificial Sequence
  Synthetic
uacaaaaagcuauuucuggu

SEQ ID NO: 663096 - RNA, 21 nt, Artificial Sequence
  Synthetic
cuacaaaaagcuauuucuggu

SEQ ID NO: 663097 - RNA, 22 nt, Artificial Sequence
  Synthetic
gcuacaaaaagcuauuucuggu

SEQ ID NO: 663098 - RNA, 23 nt, Artificial Sequence
  Synthetic
agcuacaaaaagcuauuucuggu

SEQ ID NO: 663099 - RNA, 24 nt, Artificial Sequence
  Synthetic
gagcuacaaaaagcuauuucuggu

SEQ ID NO: 663100 - RNA, 18 nt, Artificial Sequence
  Synthetic
uagugaucacuuucuggu

SEQ ID NO: 663101 - RNA, 19 nt, Artificial Sequence
  Synthetic
uuagugaucacuuucuggu

SEQ ID NO: 663102 - RNA, 20 nt, Artificial Sequence
  Synthetic
uuuagugaucacuuucuggu

SEQ ID NO: 663103 - RNA, 21 nt, Artificial Sequence
  Synthetic
uuuuagugaucacuuucuggu

SEQ ID NO: 663104 - RNA, 22 nt, Artificial Sequence
  Synthetic
uuuuuagugaucacuuucuggu

SEQ ID NO: 663105 - RNA, 23 nt, Artificial Sequence
  Synthetic
cuuuuuagugaucacuuucuggu

SEQ ID NO: 663106 - RNA, 24 nt, Artificial Sequence
  Synthetic
acuuuuuagugaucacuuucuggu

SEQ ID NO: 663107 - RNA, 18 nt, Artificial Sequence
  Synthetic
uuagaaaaggcaaguggu

SEQ ID NO: 663108 - RNA, 19 nt, Artificial Sequence
  Synthetic
guuagaaaaggcaaguggu

SEQ ID NO: 663109 - RNA, 20 nt, Artificial Sequence
  Synthetic
gguuagaaaaggcaaguggu

SEQ ID NO: 663110 - RNA, 21 nt, Artificial Sequence
  Synthetic
ugguuagaaaaggcaaguggu

SEQ ID NO: 663111 - RNA, 22 nt, Artificial Sequence
  Synthetic
gugguuagaaaaggcaaguggu

SEQ ID NO: 663112 - RNA, 23 nt, Artificial Sequence
  Synthetic
agugguuagaaaaggcaaguggu

SEQ ID NO: 663113 - RNA, 24 nt, Artificial Sequence
  Synthetic
aagugguuagaaaaggcaaguggu

SEQ ID NO: 663114 - RNA, 18 nt, Artificial Sequence
  Synthetic
uaaauugggagaaguggu

SEQ ID NO: 663115 - RNA, 19 nt, Artificial Sequence
  Synthetic
uuaaauugggagaaguggu

SEQ ID NO: 663116 - RNA, 20 nt, Artificial Sequence
  Synthetic
cuuaaauugggagaaguggu

SEQ ID NO: 663117 - RNA, 21 nt, Artificial Sequence
  Synthetic
ucuuaaauugggagaaguggu

SEQ ID NO: 663118 - RNA, 22 nt, Artificial Sequence
  Synthetic
uucuuaaauugggagaaguggu

SEQ ID NO: 663119 - RNA, 23 nt, Artificial Sequence
  Synthetic
uuucuuaaauugggagaaguggu

SEQ ID NO: 663120 - RNA, 24 nt, Artificial Sequence
  Synthetic
uuuucuuaaauugggagaaguggu

SEQ ID NO: 663121 - RNA, 18 nt, Artificial Sequence
  Synthetic
ggagaagacaagaguggu

SEQ ID NO: 663122 - RNA, 19 nt, Artificial Sequence
  Synthetic
aggagaagacaagaguggu

SEQ ID NO: 663123 - RNA, 20 nt, Artificial Sequence
  Synthetic
uaggagaagacaagaguggu

SEQ ID NO: 663124 - RNA, 21 nt, Artificial Sequence
  Synthetic
auaggagaagacaagaguggu

SEQ ID NO: 663125 - RNA, 22 nt, Artificial Sequence
  Synthetic
cauaggagaagacaagaguggu

SEQ ID NO: 663126 - RNA, 23 nt, Artificial Sequence
  Synthetic
acauaggagaagacaagaguggu

SEQ ID NO: 663127 - RNA, 24 nt, Artificial Sequence
  Synthetic
gacauaggagaagacaagaguggu

SEQ ID NO: 663128 - RNA, 18 nt, Artificial Sequence
  Synthetic
auguugaauacgaguggu

SEQ ID NO: 663129 - RNA, 19 nt, Artificial Sequence
  Synthetic
uauguugaauacgaguggu

SEQ ID NO: 663130 - RNA, 20 nt, Artificial Sequence
  Synthetic
uuauguugaauacgaguggu

SEQ ID NO: 663131 - RNA, 21 nt, Artificial Sequence
  Synthetic
auuauguugaauacgaguggu

SEQ ID NO: 663132 - RNA, 22 nt, Artificial Sequence
  Synthetic
uauuauguugaauacgaguggu

SEQ ID NO: 663133 - RNA, 23 nt, Artificial Sequence
  Synthetic
auauuauguugaauacgaguggu

SEQ ID NO: 663134 - RNA, 24 nt, Artificial Sequence
  Synthetic
aauauuauguugaauacgaguggu

SEQ ID NO: 663135 - RNA, 18 nt, Artificial Sequence
  Synthetic
uuaucagaggugaguggu

SEQ ID NO: 663136 - RNA, 19 nt, Artificial Sequence
  Synthetic
guuaucagaggugaguggu

SEQ ID NO: 663137 - RNA, 20 nt, Artificial Sequence
  Synthetic
gguuaucagaggugaguggu

SEQ ID NO: 663138 - RNA, 21 nt, Artificial Sequence
  Synthetic
ggguuaucagaggugaguggu

SEQ ID NO: 663139 - RNA, 22 nt, Artificial Sequence
  Synthetic
uggguuaucagaggugaguggu

SEQ ID NO: 663140 - RNA, 23 nt, Artificial Sequence
  Synthetic
cuggguuaucagaggugaguggu

SEQ ID NO: 663141 - RNA, 24 nt, Artificial Sequence
  Synthetic
gcuggguuaucagaggugaguggu

SEQ ID NO: 663142 - RNA, 18 nt, Artificial Sequence
  Synthetic
uugcugaacaguaguggu

SEQ ID NO: 663143 - RNA, 19 nt, Artificial Sequence
  Synthetic
uuugcugaacaguaguggu

SEQ ID NO: 663144 - RNA, 20 nt, Artificial Sequence
  Synthetic
guuugcugaacaguaguggu

SEQ ID NO: 663145 - RNA, 21 nt, Artificial Sequence
  Synthetic
gguuugcugaacaguaguggu

SEQ ID NO: 663146 - RNA, 22 nt, Artificial Sequence
  Synthetic
ugguuugcugaacaguaguggu

SEQ ID NO: 663147 - RNA, 23 nt, Artificial Sequence
  Synthetic
gugguuugcugaacaguaguggu

SEQ ID NO: 663148 - RNA, 24 nt, Artificial Sequence
  Synthetic
ugugguuugcugaacaguaguggu

SEQ ID NO: 663149 - RNA, 18 nt, Artificial Sequence
  Synthetic
acugggaaggguaguggu

SEQ ID NO: 663150 - RNA, 19 nt, Artificial Sequence
  Synthetic
gacugggaaggguaguggu

SEQ ID NO: 663151 - RNA, 20 nt, Artificial Sequence
  Synthetic
agacugggaaggguaguggu

SEQ ID NO: 663152 - RNA, 21 nt, Artificial Sequence
  Synthetic
gagacugggaaggguaguggu

SEQ ID NO: 663153 - RNA, 22 nt, Artificial Sequence
  Synthetic
ggagacugggaaggguaguggu

SEQ ID NO: 663154 - RNA, 23 nt, Artificial Sequence
  Synthetic
aggagacugggaaggguaguggu

SEQ ID NO: 663155 - RNA, 24 nt, Artificial Sequence
  Synthetic
caggagacugggaaggguaguggu

SEQ ID NO: 663156 - RNA, 21 nt, Artificial Sequence
  Synthetic
uauggagaaugucuuaguggu

SEQ ID NO: 663157 - RNA, 22 nt, Artificial Sequence
  Synthetic
auauggagaaugucuuaguggu

SEQ ID NO: 663158 - RNA, 23 nt, Artificial Sequence
  Synthetic
aauauggagaaugucuuaguggu

SEQ ID NO: 663159 - RNA, 24 nt, Artificial Sequence
  Synthetic
uaauauggagaaugucuuaguggu

SEQ ID NO: 663160 - RNA, 18 nt, Artificial Sequence
  Synthetic
gguuuggggggacguggu

SEQ ID NO: 663161 - RNA, 19 nt, Artificial Sequence
  Synthetic
agguuuggggggacguggu

SEQ ID NO: 663162 - RNA, 20 nt, Artificial Sequence
  Synthetic
cagguuuggggggacguggu

SEQ ID NO: 663163 - RNA, 21 nt, Artificial Sequence
  Synthetic
acagguuuggggggacguggu

SEQ ID NO: 663164 - RNA, 22 nt, Artificial Sequence
  Synthetic
cacagguuuggggggacguggu

SEQ ID NO: 663165 - RNA, 23 nt, Artificial Sequence
  Synthetic
gcacagguuuggggggacguggu

SEQ ID NO: 663166 - RNA, 24 nt, Artificial Sequence
  Synthetic
agcacagguuuggggggacguggu

SEQ ID NO: 663167 - RNA, 18 nt, Artificial Sequence
  Synthetic
agggaaauaauccguggu

SEQ ID NO: 663168 - RNA, 19 nt, Artificial Sequence
  Synthetic
aagggaaauaauccguggu

SEQ ID NO: 663169 - RNA, 20 nt, Artificial Sequence
  Synthetic
gaagggaaauaauccguggu

SEQ ID NO: 663170 - RNA, 21 nt, Artificial Sequence
  Synthetic
ugaagggaaauaauccguggu

SEQ ID NO: 663171 - RNA, 22 nt, Artificial Sequence
  Synthetic
gugaagggaaauaauccguggu

SEQ ID NO: 663172 - RNA, 23 nt, Artificial Sequence
  Synthetic
ggugaagggaaauaauccguggu

SEQ ID NO: 663173 - RNA, 24 nt, Artificial Sequence
  Synthetic
aggugaagggaaauaauccguggu

SEQ ID NO: 663174 - RNA, 18 nt, Artificial Sequence
  Synthetic
gagcaaaguccucguggu

SEQ ID NO: 663175 - RNA, 19 nt, Artificial Sequence
  Synthetic
ugagcaaaguccucguggu

SEQ ID NO: 663176 - RNA, 20 nt, Artificial Sequence
  Synthetic
uugagcaaaguccucguggu

SEQ ID NO: 663177 - RNA, 21 nt, Artificial Sequence
  Synthetic
uuugagcaaaguccucguggu

SEQ ID NO: 663178 - RNA, 22 nt, Artificial Sequence
  Synthetic
auuugagcaaaguccucguggu

SEQ ID NO: 663179 - RNA, 23 nt, Artificial Sequence
  Synthetic
cauuugagcaaaguccucguggu

SEQ ID NO: 663180 - RNA, 24 nt, Artificial Sequence
  Synthetic
acauuugagcaaaguccucguggu

SEQ ID NO: 663181 - RNA, 18 nt, Artificial Sequence
  Synthetic
acauuucaugcucguggu

SEQ ID NO: 663182 - RNA, 19 nt, Artificial Sequence
  Synthetic
aacauuucaugcucguggu

SEQ ID NO: 663183 - RNA, 20 nt, Artificial Sequence
  Synthetic
aaacauuucaugcucguggu

SEQ ID NO: 663184 - RNA, 21 nt, Artificial Sequence
  Synthetic
aaaacauuucaugcucguggu

SEQ ID NO: 663185 - RNA, 22 nt, Artificial Sequence
  Synthetic
aaaaacauuucaugcucguggu

SEQ ID NO: 663186 - RNA, 23 nt, Artificial Sequence
  Synthetic
aaaaaacauuucaugcucguggu

SEQ ID NO: 663187 - RNA, 24 nt, Artificial Sequence
  Synthetic
gaaaaaacauuucaugcucguggu

SEQ ID NO: 663188 - RNA, 18 nt, Artificial Sequence
  Synthetic
cuaauguuuacagguggu

SEQ ID NO: 663189 - RNA, 19 nt, Artificial Sequence
  Synthetic
ccuaauguuuacagguggu

SEQ ID NO: 663190 - RNA, 20 nt, Artificial Sequence
  Synthetic
uccuaauguuuacagguggu

SEQ ID NO: 663191 - RNA, 21 nt, Artificial Sequence
  Synthetic
uuccuaauguuuacagguggu

SEQ ID NO: 663192 - RNA, 22 nt, Artificial Sequence
  Synthetic
cuuccuaauguuuacagguggu

SEQ ID NO: 663193 - RNA, 23 nt, Artificial Sequence
  Synthetic
gcuuccuaauguuuacagguggu

SEQ ID NO: 663194 - RNA, 24 nt, Artificial Sequence
  Synthetic
agcuuccuaauguuuacagguggu

SEQ ID NO: 663195 - RNA, 18 nt, Artificial Sequence
  Synthetic
aagucauauucagguggu

SEQ ID NO: 663196 - RNA, 19 nt, Artificial Sequence
  Synthetic
caagucauauucagguggu

SEQ ID NO: 663197 - RNA, 20 nt, Artificial Sequence
  Synthetic
acaagucauauucagguggu

SEQ ID NO: 663198 - RNA, 21 nt, Artificial Sequence
  Synthetic
uacaagucauauucagguggu

SEQ ID NO: 663199 - RNA, 22 nt, Artificial Sequence
  Synthetic
cuacaagucauauucagguggu

SEQ ID NO: 663200 - RNA, 23 nt, Artificial Sequence
  Synthetic
gcuacaagucauauucagguggu

SEQ ID NO: 663201 - RNA, 24 nt, Artificial Sequence
  Synthetic
agcuacaagucauauucagguggu

SEQ ID NO: 663202 - RNA, 18 nt, Artificial Sequence
  Synthetic
uuucaacuuuaggguggu

SEQ ID NO: 663203 - RNA, 19 nt, Artificial Sequence
  Synthetic
uuuucaacuuuaggguggu

SEQ ID NO: 663204 - RNA, 20 nt, Artificial Sequence
  Synthetic
uuuuucaacuuuaggguggu

SEQ ID NO: 663205 - RNA, 21 nt, Artificial Sequence
  Synthetic
auuuuucaacuuuaggguggu

SEQ ID NO: 663206 - RNA, 22 nt, Artificial Sequence
  Synthetic
gauuuuucaacuuuaggguggu

SEQ ID NO: 663207 - RNA, 23 nt, Artificial Sequence
  Synthetic
ugauuuuucaacuuuaggguggu

SEQ ID NO: 663208 - RNA, 24 nt, Artificial Sequence
  Synthetic
gugauuuuucaacuuuaggguggu

SEQ ID NO: 663209 - RNA, 18 nt, Artificial Sequence
  Synthetic
uauaaagaaggggguggu

SEQ ID NO: 663210 - RNA, 19 nt, Artificial Sequence
  Synthetic
cuauaaagaaggggguggu

SEQ ID NO: 663211 - RNA, 20 nt, Artificial Sequence
  Synthetic
gcuauaaagaaggggguggu

SEQ ID NO: 663212 - RNA, 21 nt, Artificial Sequence
  Synthetic
agcuauaaagaaggggguggu

SEQ ID NO: 663213 - RNA, 22 nt, Artificial Sequence
  Synthetic
aagcuauaaagaaggggguggu

SEQ ID NO: 663214 - RNA, 23 nt, Artificial Sequence
  Synthetic
uaagcuauaaagaaggggguggu

SEQ ID NO: 663215 - RNA, 24 nt, Artificial Sequence
  Synthetic
guaagcuauaaagaaggggguggu

SEQ ID NO: 663216 - RNA, 18 nt, Artificial Sequence
  Synthetic
cagaacccucaugguggu

SEQ ID NO: 663217 - RNA, 19 nt, Artificial Sequence
  Synthetic
gcagaacccucaugguggu

SEQ ID NO: 663218 - RNA, 20 nt, Artificial Sequence
  Synthetic
agcagaacccucaugguggu

SEQ ID NO: 663219 - RNA, 21 nt, Artificial Sequence
  Synthetic
aagcagaacccucaugguggu

SEQ ID NO: 663220 - RNA, 22 nt, Artificial Sequence
  Synthetic
caagcagaacccucaugguggu

SEQ ID NO: 663221 - RNA, 23 nt, Artificial Sequence
  Synthetic
ccaagcagaacccucaugguggu

SEQ ID NO: 663222 - RNA, 24 nt, Artificial Sequence
  Synthetic
gccaagcagaacccucaugguggu

SEQ ID NO: 663223 - RNA, 18 nt, Artificial Sequence
  Synthetic
ucacuuuauuaugguggu

SEQ ID NO: 663224 - RNA, 19 nt, Artificial Sequence
  Synthetic
cucacuuuauuaugguggu

SEQ ID NO: 663225 - RNA, 20 nt, Artificial Sequence
  Synthetic
acucacuuuauuaugguggu

SEQ ID NO: 663226 - RNA, 21 nt, Artificial Sequence
  Synthetic
gacucacuuuauuaugguggu

SEQ ID NO: 663227 - RNA, 22 nt, Artificial Sequence
  Synthetic
ugacucacuuuauuaugguggu

SEQ ID NO: 663228 - RNA, 23 nt, Artificial Sequence
  Synthetic
gugacucacuuuauuaugguggu

SEQ ID NO: 663229 - RNA, 24 nt, Artificial Sequence
  Synthetic
ugugacucacuuuauuaugguggu

SEQ ID NO: 663230 - RNA, 18 nt, Artificial Sequence
  Synthetic
auuguuguuacugguggu

SEQ ID NO: 663231 - RNA, 19 nt, Artificial Sequence
  Synthetic
uauuguuguuacugguggu

SEQ ID NO: 663232 - RNA, 20 nt, Artificial Sequence
  Synthetic
uuauuguuguuacugguggu

SEQ ID NO: 663233 - RNA, 21 nt, Artificial Sequence
  Synthetic
auuauuguuguuacugguggu

SEQ ID NO: 663234 - RNA, 22 nt, Artificial Sequence
  Synthetic
uauuauuguuguuacugguggu

SEQ ID NO: 663235 - RNA, 23 nt, Artificial Sequence
  Synthetic
uuauuauuguuguuacugguggu

SEQ ID NO: 663236 - RNA, 24 nt, Artificial Sequence
  Synthetic
uuuauuauuguuguuacugguggu

SEQ ID NO: 663237 - RNA, 18 nt, Artificial Sequence
  Synthetic
uccuuuuggggugguggu

SEQ ID NO: 663238 - RNA, 19 nt, Artificial Sequence
  Synthetic
cuccuuuuggggugguggu

SEQ ID NO: 663239 - RNA, 20 nt, Artificial Sequence
  Synthetic
ucuccuuuuggggugguggu

SEQ ID NO: 663240 - RNA, 21 nt, Artificial Sequence
  Synthetic
cucuccuuuuggggugguggu

SEQ ID NO: 663241 - RNA, 22 nt, Artificial Sequence
  Synthetic
ucucuccuuuuggggugguggu

SEQ ID NO: 663242 - RNA, 23 nt, Artificial Sequence
  Synthetic
aucucuccuuuuggggugguggu

SEQ ID NO: 663243 - RNA, 24 nt, Artificial Sequence
  Synthetic
aaucucuccuuuuggggugguggu

SEQ ID NO: 663244 - RNA, 18 nt, Artificial Sequence
  Synthetic
ucuguauauggugguggu

SEQ ID NO: 663245 - RNA, 19 nt, Artificial Sequence
  Synthetic
aucuguauauggugguggu

SEQ ID NO: 663246 - RNA, 20 nt, Artificial Sequence
  Synthetic
uaucuguauauggugguggu

SEQ ID NO: 663247 - RNA, 21 nt, Artificial Sequence
  Synthetic
auaucuguauauggugguggu

SEQ ID NO: 663248 - RNA, 22 nt, Artificial Sequence
  Synthetic
uauaucuguauauggugguggu

SEQ ID NO: 663249 - RNA, 23 nt, Artificial Sequence
  Synthetic
guauaucuguauauggugguggu

SEQ ID NO: 663250 - RNA, 24 nt, Artificial Sequence
  Synthetic
uguauaucuguauauggugguggu

SEQ ID NO: 663251 - RNA, 18 nt, Artificial Sequence
  Synthetic
uaacuugcuguugguggu

SEQ ID NO: 663252 - RNA, 19 nt, Artificial Sequence
  Synthetic
guaacuugcuguugguggu

SEQ ID NO: 663253 - RNA, 20 nt, Artificial Sequence
  Synthetic
aguaacuugcuguugguggu

SEQ ID NO: 663254 - RNA, 21 nt, Artificial Sequence
  Synthetic
uaguaacuugcuguugguggu

SEQ ID NO: 663255 - RNA, 22 nt, Artificial Sequence
  Synthetic
uuaguaacuugcuguugguggu

SEQ ID NO: 663256 - RNA, 23 nt, Artificial Sequence
  Synthetic
uuuaguaacuugcuguugguggu

SEQ ID NO: 663257 - RNA, 24 nt, Artificial Sequence
  Synthetic
auuuaguaacuugcuguugguggu

SEQ ID NO: 663258 - RNA, 18 nt, Artificial Sequence
  Synthetic
uauuuccuuaaauguggu

SEQ ID NO: 663259 - RNA, 19 nt, Artificial Sequence
  Synthetic
guauuuccuuaaauguggu

SEQ ID NO: 663260 - RNA, 20 nt, Artificial Sequence
  Synthetic
aguauuuccuuaaauguggu

SEQ ID NO: 663261 - RNA, 21 nt, Artificial Sequence
  Synthetic
caguauuuccuuaaauguggu

SEQ ID NO: 663262 - RNA, 22 nt, Artificial Sequence
  Synthetic
acaguauuuccuuaaauguggu

SEQ ID NO: 663263 - RNA, 23 nt, Artificial Sequence
  Synthetic
aacaguauuuccuuaaauguggu

SEQ ID NO: 663264 - RNA, 24 nt, Artificial Sequence
  Synthetic
aaacaguauuuccuuaaauguggu

SEQ ID NO: 663265 - RNA, 18 nt, Artificial Sequence
  Synthetic
guuaaguugggauguggu

SEQ ID NO: 663266 - RNA, 19 nt, Artificial Sequence
  Synthetic
aguuaaguugggauguggu

SEQ ID NO: 663267 - RNA, 20 nt, Artificial Sequence
  Synthetic
aaguuaaguugggauguggu

SEQ ID NO: 663268 - RNA, 21 nt, Artificial Sequence
  Synthetic
aaaguuaaguugggauguggu

SEQ ID NO: 663269 - RNA, 22 nt, Artificial Sequence
  Synthetic
gaaaguuaaguugggauguggu

SEQ ID NO: 663270 - RNA, 23 nt, Artificial Sequence
  Synthetic
agaaaguuaaguugggauguggu

SEQ ID NO: 663271 - RNA, 24 nt, Artificial Sequence
  Synthetic
aagaaaguuaaguugggauguggu

SEQ ID NO: 663272 - RNA, 18 nt, Artificial Sequence
  Synthetic
uaacacucaugauguggu

SEQ ID NO: 663273 - RNA, 19 nt, Artificial Sequence
  Synthetic
auaacacucaugauguggu

SEQ ID NO: 663274 - RNA, 20 nt, Artificial Sequence
  Synthetic
aauaacacucaugauguggu

SEQ ID NO: 663275 - RNA, 21 nt, Artificial Sequence
  Synthetic
gaauaacacucaugauguggu

SEQ ID NO: 663276 - RNA, 22 nt, Artificial Sequence
  Synthetic
ggaauaacacucaugauguggu

SEQ ID NO: 663277 - RNA, 23 nt, Artificial Sequence
  Synthetic
aggaauaacacucaugauguggu

SEQ ID NO: 663278 - RNA, 24 nt, Artificial Sequence
  Synthetic
uaggaauaacacucaugauguggu

SEQ ID NO: 663279 - RNA, 18 nt, Artificial Sequence
  Synthetic
uguguguuuguauguggu

SEQ ID NO: 663280 - RNA, 19 nt, Artificial Sequence
  Synthetic
guguguguuuguauguggu

SEQ ID NO: 663281 - RNA, 20 nt, Artificial Sequence
  Synthetic
uguguguguuuguauguggu

SEQ ID NO: 663282 - RNA, 21 nt, Artificial Sequence
  Synthetic
cuguguguguuuguauguggu

SEQ ID NO: 663283 - RNA, 22 nt, Artificial Sequence
  Synthetic
ucuguguguguuuguauguggu

SEQ ID NO: 663284 - RNA, 23 nt, Artificial Sequence
  Synthetic
cucuguguguguuuguauguggu

SEQ ID NO: 663285 - RNA, 24 nt, Artificial Sequence
  Synthetic
ucucuguguguguuuguauguggu

SEQ ID NO: 663286 - RNA, 18 nt, Artificial Sequence
  Synthetic
gugaugaacaacuguggu

SEQ ID NO: 663287 - RNA, 19 nt, Artificial Sequence
  Synthetic
agugaugaacaacuguggu

SEQ ID NO: 663288 - RNA, 20 nt, Artificial Sequence
  Synthetic
cagugaugaacaacuguggu

SEQ ID NO: 663289 - RNA, 21 nt, Artificial Sequence
  Synthetic
acagugaugaacaacuguggu

SEQ ID NO: 663290 - RNA, 22 nt, Artificial Sequence
  Synthetic
cacagugaugaacaacuguggu

SEQ ID NO: 663291 - RNA, 23 nt, Artificial Sequence
  Synthetic
acacagugaugaacaacuguggu

SEQ ID NO: 663292 - RNA, 24 nt, Artificial Sequence
  Synthetic
aacacagugaugaacaacuguggu

SEQ ID NO: 663293 - RNA, 18 nt, Artificial Sequence
  Synthetic
auuugauuguacuguggu

SEQ ID NO: 663294 - RNA, 19 nt, Artificial Sequence
  Synthetic
aauuugauuguacuguggu

SEQ ID NO: 663295 - RNA, 20 nt, Artificial Sequence
  Synthetic
uaauuugauuguacuguggu

SEQ ID NO: 663296 - RNA, 21 nt, Artificial Sequence
  Synthetic
cuaauuugauuguacuguggu

SEQ ID NO: 663297 - RNA, 22 nt, Artificial Sequence
  Synthetic
ucuaauuugauuguacuguggu

SEQ ID NO: 663298 - RNA, 23 nt, Artificial Sequence
  Synthetic
uucuaauuugauuguacuguggu

SEQ ID NO: 663299 - RNA, 24 nt, Artificial Sequence
  Synthetic
guucuaauuugauuguacuguggu

SEQ ID NO: 663300 - RNA, 18 nt, Artificial Sequence
  Synthetic
cuucugcuggccuguggu

SEQ ID NO: 663301 - RNA, 19 nt, Artificial Sequence
  Synthetic
ucuucugcuggccuguggu

SEQ ID NO: 663302 - RNA, 20 nt, Artificial Sequence
  Synthetic
uucuucugcuggccuguggu

SEQ ID NO: 663303 - RNA, 21 nt, Artificial Sequence
  Synthetic
guucuucugcuggccuguggu

SEQ ID NO: 663304 - RNA, 22 nt, Artificial Sequence
  Synthetic
aguucuucugcuggccuguggu

SEQ ID NO: 663305 - RNA, 23 nt, Artificial Sequence
  Synthetic
uaguucuucugcuggccuguggu

SEQ ID NO: 663306 - RNA, 24 nt, Artificial Sequence
  Synthetic
cuaguucuucugcuggccuguggu

SEQ ID NO: 663307 - RNA, 18 nt, Artificial Sequence
  Synthetic
ucagagagauccuguggu

SEQ ID NO: 663308 - RNA, 19 nt, Artificial Sequence
  Synthetic
cucagagagauccuguggu

SEQ ID NO: 663309 - RNA, 20 nt, Artificial Sequence
  Synthetic
ucucagagagauccuguggu

SEQ ID NO: 663310 - RNA, 21 nt, Artificial Sequence
  Synthetic
aucucagagagauccuguggu

SEQ ID NO: 663311 - RNA, 22 nt, Artificial Sequence
  Synthetic
aaucucagagagauccuguggu

SEQ ID NO: 663312 - RNA, 23 nt, Artificial Sequence
  Synthetic
aaaucucagagagauccuguggu

SEQ ID NO: 663313 - RNA, 24 nt, Artificial Sequence
  Synthetic
aaaaucucagagagauccuguggu

SEQ ID NO: 663314 - RNA, 18 nt, Artificial Sequence
  Synthetic
aaaugauacccuuguggu

SEQ ID NO: 663315 - RNA, 19 nt, Artificial Sequence
  Synthetic
uaaaugauacccuuguggu

SEQ ID NO: 663316 - RNA, 20 nt, Artificial Sequence
  Synthetic
cuaaaugauacccuuguggu

SEQ ID NO: 663317 - RNA, 21 nt, Artificial Sequence
  Synthetic
ccuaaaugauacccuuguggu

SEQ ID NO: 663318 - RNA, 22 nt, Artificial Sequence
  Synthetic
uccuaaaugauacccuuguggu

SEQ ID NO: 663319 - RNA, 23 nt, Artificial Sequence
  Synthetic
uuccuaaaugauacccuuguggu

SEQ ID NO: 663320 - RNA, 24 nt, Artificial Sequence
  Synthetic
uuuccuaaaugauacccuuguggu

SEQ ID NO: 663321 - RNA, 18 nt, Artificial Sequence
  Synthetic
gagagaauugguuguggu

SEQ ID NO: 663322 - RNA, 19 nt, Artificial Sequence
  Synthetic
agagagaauugguuguggu

SEQ ID NO: 663323 - RNA, 20 nt, Artificial Sequence
  Synthetic
aagagagaauugguuguggu

SEQ ID NO: 663324 - RNA, 21 nt, Artificial Sequence
  Synthetic
aaagagagaauugguuguggu

SEQ ID NO: 663325 - RNA, 22 nt, Artificial Sequence
  Synthetic
aaaagagagaauugguuguggu

SEQ ID NO: 663326 - RNA, 23 nt, Artificial Sequence
  Synthetic
aaaaagagagaauugguuguggu

SEQ ID NO: 663327 - RNA, 24 nt, Artificial Sequence
  Synthetic
uaaaaagagagaauugguuguggu

SEQ ID NO: 663328 - RNA, 18 nt, Artificial Sequence
  Synthetic
guaguaguauuuuguggu

SEQ ID NO: 663329 - RNA, 19 nt, Artificial Sequence
  Synthetic
aguaguaguauuuuguggu

SEQ ID NO: 663330 - RNA, 20 nt, Artificial Sequence
  Synthetic
gaguaguaguauuuuguggu

SEQ ID NO: 663331 - RNA, 21 nt, Artificial Sequence
  Synthetic
agaguaguaguauuuuguggu

SEQ ID NO: 663332 - RNA, 22 nt, Artificial Sequence
  Synthetic
gagaguaguaguauuuuguggu

SEQ ID NO: 663333 - RNA, 23 nt, Artificial Sequence
  Synthetic
agagaguaguaguauuuuguggu

SEQ ID NO: 663334 - RNA, 24 nt, Artificial Sequence
  Synthetic
aagagaguaguaguauuuuguggu

SEQ ID NO: 663335 - RNA, 18 nt, Artificial Sequence
  Synthetic
augcauuucuaaauuggu

SEQ ID NO: 663336 - RNA, 19 nt, Artificial Sequence
  Synthetic
aaugcauuucuaaauuggu

SEQ ID NO: 663337 - RNA, 20 nt, Artificial Sequence
  Synthetic
aaaugcauuucuaaauuggu

SEQ ID NO: 663338 - RNA, 21 nt, Artificial Sequence
  Synthetic
aaaaugcauuucuaaauuggu

SEQ ID NO: 663339 - RNA, 22 nt, Artificial Sequence
  Synthetic
gaaaaugcauuucuaaauuggu

SEQ ID NO: 663340 - RNA, 23 nt, Artificial Sequence
  Synthetic
agaaaaugcauuucuaaauuggu

SEQ ID NO: 663341 - RNA, 24 nt, Artificial Sequence
  Synthetic
aagaaaaugcauuucuaaauuggu

SEQ ID NO: 663342 - RNA, 18 nt, Artificial Sequence
  Synthetic
gaauugcugcuaauuggu

SEQ ID NO: 663343 - RNA, 19 nt, Artificial Sequence
  Synthetic
agaauugcugcuaauuggu

SEQ ID NO: 663344 - RNA, 20 nt, Artificial Sequence
  Synthetic
aagaauugcugcuaauuggu

SEQ ID NO: 663345 - RNA, 21 nt, Artificial Sequence
  Synthetic
aaagaauugcugcuaauuggu

SEQ ID NO: 663346 - RNA, 22 nt, Artificial Sequence
  Synthetic
uaaagaauugcugcuaauuggu

SEQ ID NO: 663347 - RNA, 23 nt, Artificial Sequence
  Synthetic
uuaaagaauugcugcuaauuggu

SEQ ID NO: 663348 - RNA, 24 nt, Artificial Sequence
  Synthetic
guuaaagaauugcugcuaauuggu

SEQ ID NO: 663349 - RNA, 18 nt, Artificial Sequence
  Synthetic
aagaaaggcaacauuggu

SEQ ID NO: 663350 - RNA, 19 nt, Artificial Sequence
  Synthetic
caagaaaggcaacauuggu

SEQ ID NO: 663351 - RNA, 20 nt, Artificial Sequence
  Synthetic
acaagaaaggcaacauuggu

SEQ ID NO: 663352 - RNA, 21 nt, Artificial Sequence
  Synthetic
uacaagaaaggcaacauuggu

SEQ ID NO: 663353 - RNA, 22 nt, Artificial Sequence
  Synthetic
uuacaagaaaggcaacauuggu

SEQ ID NO: 663354 - RNA, 23 nt, Artificial Sequence
  Synthetic
guuacaagaaaggcaacauuggu

SEQ ID NO: 663355 - RNA, 24 nt, Artificial Sequence
  Synthetic
uguuacaagaaaggcaacauuggu

SEQ ID NO: 663356 - RNA, 18 nt, Artificial Sequence
  Synthetic
gagcuccaugacauuggu

SEQ ID NO: 663357 - RNA, 19 nt, Artificial Sequence
  Synthetic
agagcuccaugacauuggu

SEQ ID NO: 663358 - RNA, 20 nt, Artificial Sequence
  Synthetic
aagagcuccaugacauuggu

SEQ ID NO: 663359 - RNA, 21 nt, Artificial Sequence
  Synthetic
gaagagcuccaugacauuggu

SEQ ID NO: 663360 - RNA, 22 nt, Artificial Sequence
  Synthetic
agaagagcuccaugacauuggu

SEQ ID NO: 663361 - RNA, 23 nt, Artificial Sequence
  Synthetic
gagaagagcuccaugacauuggu

SEQ ID NO: 663362 - RNA, 24 nt, Artificial Sequence
  Synthetic
agagaagagcuccaugacauuggu

SEQ ID NO: 663363 - RNA, 18 nt, Artificial Sequence
  Synthetic
guauuuauucucauuggu

SEQ ID NO: 663364 - RNA, 19 nt, Artificial Sequence
  Synthetic
uguauuuauucucauuggu

SEQ ID NO: 663365 - RNA, 20 nt, Artificial Sequence
  Synthetic
guguauuuauucucauuggu

SEQ ID NO: 663366 - RNA, 21 nt, Artificial Sequence
  Synthetic
uguguauuuauucucauuggu

SEQ ID NO: 663367 - RNA, 22 nt, Artificial Sequence
  Synthetic
uuguguauuuauucucauuggu

SEQ ID NO: 663368 - RNA, 23 nt, Artificial Sequence
  Synthetic
guuguguauuuauucucauuggu

SEQ ID NO: 663369 - RNA, 24 nt, Artificial Sequence
  Synthetic
cguuguguauuuauucucauuggu

SEQ ID NO: 663370 - RNA, 18 nt, Artificial Sequence
  Synthetic
uuuuaaucucagauuggu

SEQ ID NO: 663371 - RNA, 19 nt, Artificial Sequence
  Synthetic
uuuuuaaucucagauuggu

SEQ ID NO: 663372 - RNA, 20 nt, Artificial Sequence
  Synthetic
uuuuuuaaucucagauuggu

SEQ ID NO: 663373 - RNA, 21 nt, Artificial Sequence
  Synthetic
uuuuuuuaaucucagauuggu

SEQ ID NO: 663374 - RNA, 22 nt, Artificial Sequence
  Synthetic
uuuuuuuuaaucucagauuggu

SEQ ID NO: 663375 - RNA, 23 nt, Artificial Sequence
  Synthetic
auuuuuuuuaaucucagauuggu

SEQ ID NO: 663376 - RNA, 24 nt, Artificial Sequence
  Synthetic
aauuuuuuuuaaucucagauuggu

SEQ ID NO: 663377 - RNA, 18 nt, Artificial Sequence
  Synthetic
gaucgauuaaguauuggu

SEQ ID NO: 663378 - RNA, 19 nt, Artificial Sequence
  Synthetic
cgaucgauuaaguauuggu

SEQ ID NO: 663379 - RNA, 20 nt, Artificial Sequence
  Synthetic
ccgaucgauuaaguauuggu

SEQ ID NO: 663380 - RNA, 21 nt, Artificial Sequence
  Synthetic
cccgaucgauuaaguauuggu

SEQ ID NO: 663381 - RNA, 22 nt, Artificial Sequence
  Synthetic
ucccgaucgauuaaguauuggu

SEQ ID NO: 663382 - RNA, 23 nt, Artificial Sequence
  Synthetic
uucccgaucgauuaaguauuggu

SEQ ID NO: 663383 - RNA, 24 nt, Artificial Sequence
  Synthetic
uuucccgaucgauuaaguauuggu

SEQ ID NO: 663384 - RNA, 18 nt, Artificial Sequence
  Synthetic
cuaaucagacuuauuggu

SEQ ID NO: 663385 - RNA, 19 nt, Artificial Sequence
  Synthetic
ccuaaucagacuuauuggu

SEQ ID NO: 663386 - RNA, 20 nt, Artificial Sequence
  Synthetic
accuaaucagacuuauuggu

SEQ ID NO: 663387 - RNA, 21 nt, Artificial Sequence
  Synthetic
uaccuaaucagacuuauuggu

SEQ ID NO: 663388 - RNA, 22 nt, Artificial Sequence
  Synthetic
auaccuaaucagacuuauuggu

SEQ ID NO: 663389 - RNA, 23 nt, Artificial Sequence
  Synthetic
gauaccuaaucagacuuauuggu

SEQ ID NO: 663390 - RNA, 24 nt, Artificial Sequence
  Synthetic
agauaccuaaucagacuuauuggu

SEQ ID NO: 663391 - RNA, 18 nt, Artificial Sequence
  Synthetic
cccuuuauuaaacuuggu

SEQ ID NO: 663392 - RNA, 19 nt, Artificial Sequence
  Synthetic
acccuuuauuaaacuuggu

SEQ ID NO: 663393 - RNA, 20 nt, Artificial Sequence
  Synthetic
cacccuuuauuaaacuuggu

SEQ ID NO: 663394 - RNA, 21 nt, Artificial Sequence
  Synthetic
acacccuuuauuaaacuuggu

SEQ ID NO: 663395 - RNA, 22 nt, Artificial Sequence
  Synthetic
gacacccuuuauuaaacuuggu

SEQ ID NO: 663396 - RNA, 23 nt, Artificial Sequence
  Synthetic
ggacacccuuuauuaaacuuggu

SEQ ID NO: 663397 - RNA, 24 nt, Artificial Sequence
  Synthetic
aggacacccuuuauuaaacuuggu

SEQ ID NO: 663398 - RNA, 18 nt, Artificial Sequence
  Synthetic
aacucacaaagacuuggu

SEQ ID NO: 663399 - RNA, 19 nt, Artificial Sequence
  Synthetic
gaacucacaaagacuuggu

SEQ ID NO: 663400 - RNA, 20 nt, Artificial Sequence
  Synthetic
ggaacucacaaagacuuggu

SEQ ID NO: 663401 - RNA, 21 nt, Artificial Sequence
  Synthetic
uggaacucacaaagacuuggu

SEQ ID NO: 663402 - RNA, 22 nt, Artificial Sequence
  Synthetic
uuggaacucacaaagacuuggu

SEQ ID NO: 663403 - RNA, 23 nt, Artificial Sequence
  Synthetic
auuggaacucacaaagacuuggu

SEQ ID NO: 663404 - RNA, 24 nt, Artificial Sequence
  Synthetic
uauuggaacucacaaagacuuggu

SEQ ID NO: 663405 - RNA, 18 nt, Artificial Sequence
  Synthetic
uugcaaucagaccuuggu

SEQ ID NO: 663406 - RNA, 19 nt, Artificial Sequence
  Synthetic
uuugcaaucagaccuuggu

SEQ ID NO: 663407 - RNA, 20 nt, Artificial Sequence
  Synthetic
uuuugcaaucagaccuuggu

SEQ ID NO: 663408 - RNA, 21 nt, Artificial Sequence
  Synthetic
uuuuugcaaucagaccuuggu

SEQ ID NO: 663409 - RNA, 22 nt, Artificial Sequence
  Synthetic
auuuuugcaaucagaccuuggu

SEQ ID NO: 663410 - RNA, 23 nt, Artificial Sequence
  Synthetic
aauuuuugcaaucagaccuuggu

SEQ ID NO: 663411 - RNA, 24 nt, Artificial Sequence
  Synthetic
gaauuuuugcaaucagaccuuggu

SEQ ID NO: 663412 - RNA, 18 nt, Artificial Sequence
  Synthetic
ugaaauauaucccuuggu

SEQ ID NO: 663413 - RNA, 19 nt, Artificial Sequence
  Synthetic
cugaaauauaucccuuggu

SEQ ID NO: 663414 - RNA, 20 nt, Artificial Sequence
  Synthetic
gcugaaauauaucccuuggu

SEQ ID NO: 663415 - RNA, 21 nt, Artificial Sequence
  Synthetic
agcugaaauauaucccuuggu

SEQ ID NO: 663416 - RNA, 22 nt, Artificial Sequence
  Synthetic
aagcugaaauauaucccuuggu

SEQ ID NO: 663417 - RNA, 23 nt, Artificial Sequence
  Synthetic
uaagcugaaauauaucccuuggu

SEQ ID NO: 663418 - RNA, 24 nt, Artificial Sequence
  Synthetic
auaagcugaaauauaucccuuggu

SEQ ID NO: 663419 - RNA, 18 nt, Artificial Sequence
  Synthetic
gaaaugauuaagcuuggu

SEQ ID NO: 663420 - RNA, 19 nt, Artificial Sequence
  Synthetic
agaaaugauuaagcuuggu

SEQ ID NO: 663421 - RNA, 20 nt, Artificial Sequence
  Synthetic
uagaaaugauuaagcuuggu

SEQ ID NO: 663422 - RNA, 21 nt, Artificial Sequence
  Synthetic
cuagaaaugauuaagcuuggu

SEQ ID NO: 663423 - RNA, 22 nt, Artificial Sequence
  Synthetic
gcuagaaaugauuaagcuuggu

SEQ ID NO: 663424 - RNA, 23 nt, Artificial Sequence
  Synthetic
agcuagaaaugauuaagcuuggu

SEQ ID NO: 663425 - RNA, 24 nt, Artificial Sequence
  Synthetic
aagcuagaaaugauuaagcuuggu

SEQ ID NO: 663426 - RNA, 18 nt, Artificial Sequence
  Synthetic
aacagaaugaugcuuggu

SEQ ID NO: 663427 - RNA, 19 nt, Artificial Sequence
  Synthetic
uaacagaaugaugcuuggu

SEQ ID NO: 663428 - RNA, 20 nt, Artificial Sequence
  Synthetic
guaacagaaugaugcuuggu

SEQ ID NO: 663429 - RNA, 21 nt, Artificial Sequence
  Synthetic
aguaacagaaugaugcuuggu

SEQ ID NO: 663430 - RNA, 22 nt, Artificial Sequence
  Synthetic
gaguaacagaaugaugcuuggu

SEQ ID NO: 663431 - RNA, 23 nt, Artificial Sequence
  Synthetic
ggaguaacagaaugaugcuuggu

SEQ ID NO: 663432 - RNA, 24 nt, Artificial Sequence
  Synthetic
gggaguaacagaaugaugcuuggu

SEQ ID NO: 663433 - RNA, 18 nt, Artificial Sequence
  Synthetic
uugcaaucauuucuuggu

SEQ ID NO: 663434 - RNA, 19 nt, Artificial Sequence
  Synthetic
cuugcaaucauuucuuggu

SEQ ID NO: 663435 - RNA, 20 nt, Artificial Sequence
  Synthetic
gcuugcaaucauuucuuggu

SEQ ID NO: 663436 - RNA, 21 nt, Artificial Sequence
  Synthetic
ggcuugcaaucauuucuuggu

SEQ ID NO: 663437 - RNA, 22 nt, Artificial Sequence
  Synthetic
gggcuugcaaucauuucuuggu

SEQ ID NO: 663438 - RNA, 23 nt, Artificial Sequence
  Synthetic
ugggcuugcaaucauuucuuggu

SEQ ID NO: 663439 - RNA, 24 nt, Artificial Sequence
  Synthetic
uugggcuugcaaucauuucuuggu

SEQ ID NO: 663440 - RNA, 18 nt, Artificial Sequence
  Synthetic
cugcuaucuuaaguuggu

SEQ ID NO: 663441 - RNA, 19 nt, Artificial Sequence
  Synthetic
acugcuaucuuaaguuggu

SEQ ID NO: 663442 - RNA, 20 nt, Artificial Sequence
  Synthetic
aacugcuaucuuaaguuggu

SEQ ID NO: 663443 - RNA, 21 nt, Artificial Sequence
  Synthetic
uaacugcuaucuuaaguuggu

SEQ ID NO: 663444 - RNA, 22 nt, Artificial Sequence
  Synthetic
guaacugcuaucuuaaguuggu

SEQ ID NO: 663445 - RNA, 23 nt, Artificial Sequence
  Synthetic
uguaacugcuaucuuaaguuggu

SEQ ID NO: 663446 - RNA, 24 nt, Artificial Sequence
  Synthetic
auguaacugcuaucuuaaguuggu

SEQ ID NO: 663447 - RNA, 18 nt, Artificial Sequence
  Synthetic
gguaaggagaagguuggu

SEQ ID NO: 663448 - RNA, 19 nt, Artificial Sequence
  Synthetic
agguaaggagaagguuggu

SEQ ID NO: 663449 - RNA, 20 nt, Artificial Sequence
  Synthetic
aagguaaggagaagguuggu

SEQ ID NO: 663450 - RNA, 21 nt, Artificial Sequence
  Synthetic
aaagguaaggagaagguuggu

SEQ ID NO: 663451 - RNA, 22 nt, Artificial Sequence
  Synthetic
caaagguaaggagaagguuggu

SEQ ID NO: 663452 - RNA, 23 nt, Artificial Sequence
  Synthetic
ucaaagguaaggagaagguuggu

SEQ ID NO: 663453 - RNA, 24 nt, Artificial Sequence
  Synthetic
aucaaagguaaggagaagguuggu

SEQ ID NO: 663454 - RNA, 18 nt, Artificial Sequence
  Synthetic
ucaagauuggggguuggu

SEQ ID NO: 663455 - RNA, 19 nt, Artificial Sequence
  Synthetic
uucaagauuggggguuggu

SEQ ID NO: 663456 - RNA, 20 nt, Artificial Sequence
  Synthetic
uuucaagauuggggguuggu

SEQ ID NO: 663457 - RNA, 21 nt, Artificial Sequence
  Synthetic
cuuucaagauuggggguuggu

SEQ ID NO: 663458 - RNA, 22 nt, Artificial Sequence
  Synthetic
gcuuucaagauuggggguuggu

SEQ ID NO: 663459 - RNA, 23 nt, Artificial Sequence
  Synthetic
ugcuuucaagauuggggguuggu

SEQ ID NO: 663460 - RNA, 24 nt, Artificial Sequence
  Synthetic
cugcuuucaagauuggggguuggu

SEQ ID NO: 663461 - RNA, 18 nt, Artificial Sequence
  Synthetic
cuaucuaacuauguuggu

SEQ ID NO: 663462 - RNA, 19 nt, Artificial Sequence
  Synthetic
gcuaucuaacuauguuggu

SEQ ID NO: 663463 - RNA, 20 nt, Artificial Sequence
  Synthetic
ggcuaucuaacuauguuggu

SEQ ID NO: 663464 - RNA, 21 nt, Artificial Sequence
  Synthetic
gggcuaucuaacuauguuggu

SEQ ID NO: 663465 - RNA, 22 nt, Artificial Sequence
  Synthetic
ugggcuaucuaacuauguuggu

SEQ ID NO: 663466 - RNA, 23 nt, Artificial Sequence
  Synthetic
augggcuaucuaacuauguuggu

SEQ ID NO: 663467 - RNA, 24 nt, Artificial Sequence
  Synthetic
uaugggcuaucuaacuauguuggu

SEQ ID NO: 663468 - RNA, 18 nt, Artificial Sequence
  Synthetic
uuuuauuccauuguuggu

SEQ ID NO: 663469 - RNA, 19 nt, Artificial Sequence
  Synthetic
guuuuauuccauuguuggu

SEQ ID NO: 663470 - RNA, 20 nt, Artificial Sequence
  Synthetic
aguuuuauuccauuguuggu

SEQ ID NO: 663471 - RNA, 21 nt, Artificial Sequence
  Synthetic
aaguuuuauuccauuguuggu

SEQ ID NO: 663472 - RNA, 22 nt, Artificial Sequence
  Synthetic
gaaguuuuauuccauuguuggu

SEQ ID NO: 663473 - RNA, 23 nt, Artificial Sequence
  Synthetic
ggaaguuuuauuccauuguuggu

SEQ ID NO: 663474 - RNA, 24 nt, Artificial Sequence
  Synthetic
uggaaguuuuauuccauuguuggu

SEQ ID NO: 663475 - RNA, 18 nt, Artificial Sequence
  Synthetic
gaaguuuggacauuuggu

SEQ ID NO: 663476 - RNA, 19 nt, Artificial Sequence
  Synthetic
agaaguuuggacauuuggu

SEQ ID NO: 663477 - RNA, 20 nt, Artificial Sequence
  Synthetic
cagaaguuuggacauuuggu

SEQ ID NO: 663478 - RNA, 21 nt, Artificial Sequence
  Synthetic
acagaaguuuggacauuuggu

SEQ ID NO: 663479 - RNA, 22 nt, Artificial Sequence
  Synthetic
uacagaaguuuggacauuuggu

SEQ ID NO: 663480 - RNA, 23 nt, Artificial Sequence
  Synthetic
cuacagaaguuuggacauuuggu

SEQ ID NO: 663481 - RNA, 24 nt, Artificial Sequence
  Synthetic
ccuacagaaguuuggacauuuggu

SEQ ID NO: 663482 - RNA, 18 nt, Artificial Sequence
  Synthetic
auuuacuucucauuuggu

SEQ ID NO: 663483 - RNA, 19 nt, Artificial Sequence
  Synthetic
cauuuacuucucauuuggu

SEQ ID NO: 663484 - RNA, 20 nt, Artificial Sequence
  Synthetic
ucauuuacuucucauuuggu

SEQ ID NO: 663485 - RNA, 21 nt, Artificial Sequence
  Synthetic
cucauuuacuucucauuuggu

SEQ ID NO: 663486 - RNA, 22 nt, Artificial Sequence
  Synthetic
acucauuuacuucucauuuggu

SEQ ID NO: 663487 - RNA, 23 nt, Artificial Sequence
  Synthetic
cacucauuuacuucucauuuggu

SEQ ID NO: 663488 - RNA, 24 nt, Artificial Sequence
  Synthetic
ucacucauuuacuucucauuuggu

SEQ ID NO: 663489 - RNA, 18 nt, Artificial Sequence
  Synthetic
uuaauaauuggauuuggu

SEQ ID NO: 663490 - RNA, 19 nt, Artificial Sequence
  Synthetic
guuaauaauuggauuuggu

SEQ ID NO: 663491 - RNA, 20 nt, Artificial Sequence
  Synthetic
gguuaauaauuggauuuggu

SEQ ID NO: 663492 - RNA, 21 nt, Artificial Sequence
  Synthetic
ugguuaauaauuggauuuggu

SEQ ID NO: 663493 - RNA, 22 nt, Artificial Sequence
  Synthetic
augguuaauaauuggauuuggu

SEQ ID NO: 663494 - RNA, 23 nt, Artificial Sequence
  Synthetic
uaugguuaauaauuggauuuggu

SEQ ID NO: 663495 - RNA, 24 nt, Artificial Sequence
  Synthetic
guaugguuaauaauuggauuuggu

SEQ ID NO: 663496 - RNA, 18 nt, Artificial Sequence
  Synthetic
gguugaaagcuauuuggu

SEQ ID NO: 663497 - RNA, 19 nt, Artificial Sequence
  Synthetic
ugguugaaagcuauuuggu

SEQ ID NO: 663498 - RNA, 20 nt, Artificial Sequence
  Synthetic
uugguugaaagcuauuuggu

SEQ ID NO: 663499 - RNA, 21 nt, Artificial Sequence
  Synthetic
uuugguugaaagcuauuuggu

SEQ ID NO: 663500 - RNA, 22 nt, Artificial Sequence
  Synthetic
auuugguugaaagcuauuuggu

SEQ ID NO: 663501 - RNA, 23 nt, Artificial Sequence
  Synthetic
uauuugguugaaagcuauuuggu

SEQ ID NO: 663502 - RNA, 24 nt, Artificial Sequence
  Synthetic
cuauuugguugaaagcuauuuggu

SEQ ID NO: 663503 - RNA, 18 nt, Artificial Sequence
  Synthetic
auauugauugacuuuggu

SEQ ID NO: 663504 - RNA, 19 nt, Artificial Sequence
  Synthetic
aauauugauugacuuuggu

SEQ ID NO: 663505 - RNA, 20 nt, Artificial Sequence
  Synthetic
uaauauugauugacuuuggu

SEQ ID NO: 663506 - RNA, 21 nt, Artificial Sequence
  Synthetic
cuaauauugauugacuuuggu

SEQ ID NO: 663507 - RNA, 22 nt, Artificial Sequence
  Synthetic
acuaauauugauugacuuuggu

SEQ ID NO: 663508 - RNA, 23 nt, Artificial Sequence
  Synthetic
gacuaauauugauugacuuuggu

SEQ ID NO: 663509 - RNA, 24 nt, Artificial Sequence
  Synthetic
ugacuaauauugauugacuuuggu

SEQ ID NO: 663510 - RNA, 18 nt, Artificial Sequence
  Synthetic
gugcgccaaaauuuuggu

SEQ ID NO: 663511 - RNA, 19 nt, Artificial Sequence
  Synthetic
cgugcgccaaaauuuuggu

SEQ ID NO: 663512 - RNA, 20 nt, Artificial Sequence
  Synthetic
ccgugcgccaaaauuuuggu

SEQ ID NO: 663513 - RNA, 21 nt, Artificial Sequence
  Synthetic
uccgugcgccaaaauuuuggu

SEQ ID NO: 663514 - RNA, 22 nt, Artificial Sequence
  Synthetic
auccgugcgccaaaauuuuggu

SEQ ID NO: 663515 - RNA, 23 nt, Artificial Sequence
  Synthetic
aauccgugcgccaaaauuuuggu

SEQ ID NO: 663516 - RNA, 24 nt, Artificial Sequence
  Synthetic
uaauccgugcgccaaaauuuuggu

SEQ ID NO: 663517 - RNA, 18 nt, Artificial Sequence
  Synthetic
acauggcaugauuuuggu

SEQ ID NO: 663518 - RNA, 19 nt, Artificial Sequence
  Synthetic
cacauggcaugauuuuggu

SEQ ID NO: 663519 - RNA, 20 nt, Artificial Sequence
  Synthetic
ucacauggcaugauuuuggu

SEQ ID NO: 663520 - RNA, 21 nt, Artificial Sequence
  Synthetic
aucacauggcaugauuuuggu

SEQ ID NO: 663521 - RNA, 22 nt, Artificial Sequence
  Synthetic
aaucacauggcaugauuuuggu

SEQ ID NO: 663522 - RNA, 23 nt, Artificial Sequence
  Synthetic
aaaucacauggcaugauuuuggu

SEQ ID NO: 663523 - RNA, 24 nt, Artificial Sequence
  Synthetic
caaaucacauggcaugauuuuggu

SEQ ID NO: 663524 - RNA, 18 nt, Artificial Sequence
  Synthetic
uacugaaguaguuuuggu

SEQ ID NO: 663525 - RNA, 19 nt, Artificial Sequence
  Synthetic
auacugaaguaguuuuggu

SEQ ID NO: 663526 - RNA, 20 nt, Artificial Sequence
  Synthetic
aauacugaaguaguuuuggu

SEQ ID NO: 663527 - RNA, 21 nt, Artificial Sequence
  Synthetic
aaauacugaaguaguuuuggu

SEQ ID NO: 663528 - RNA, 22 nt, Artificial Sequence
  Synthetic
uaaauacugaaguaguuuuggu

SEQ ID NO: 663529 - RNA, 23 nt, Artificial Sequence
  Synthetic
auaaauacugaaguaguuuuggu

SEQ ID NO: 663530 - RNA, 24 nt, Artificial Sequence
  Synthetic
aauaaauacugaaguaguuuuggu

SEQ ID NO: 663531 - RNA, 18 nt, Artificial Sequence
  Synthetic
cauggcaaaaaaaaaugu

SEQ ID NO: 663532 - RNA, 19 nt, Artificial Sequence
  Synthetic
ccauggcaaaaaaaaaugu

SEQ ID NO: 663533 - RNA, 20 nt, Artificial Sequence
  Synthetic
cccauggcaaaaaaaaaugu

SEQ ID NO: 663534 - RNA, 21 nt, Artificial Sequence
  Synthetic
ccccauggcaaaaaaaaaugu

SEQ ID NO: 663535 - RNA, 22 nt, Artificial Sequence
  Synthetic
uccccauggcaaaaaaaaaugu

SEQ ID NO: 663536 - RNA, 23 nt, Artificial Sequence
  Synthetic
uuccccauggcaaaaaaaaaugu

SEQ ID NO: 663537 - RNA, 24 nt, Artificial Sequence
  Synthetic
auuccccauggcaaaaaaaaaugu

SEQ ID NO: 663538 - RNA, 18 nt, Artificial Sequence
  Synthetic
auucuagagagaaaaugu

SEQ ID NO: 663539 - RNA, 19 nt, Artificial Sequence
  Synthetic
cauucuagagagaaaaugu

SEQ ID NO: 663540 - RNA, 20 nt, Artificial Sequence
  Synthetic
acauucuagagagaaaaugu

SEQ ID NO: 663541 - RNA, 21 nt, Artificial Sequence
  Synthetic
gacauucuagagagaaaaugu

SEQ ID NO: 663542 - RNA, 22 nt, Artificial Sequence
  Synthetic
agacauucuagagagaaaaugu

SEQ ID NO: 663543 - RNA, 23 nt, Artificial Sequence
  Synthetic
aagacauucuagagagaaaaugu

SEQ ID NO: 663544 - RNA, 24 nt, Artificial Sequence
  Synthetic
uaagacauucuagagagaaaaugu

SEQ ID NO: 663545 - RNA, 18 nt, Artificial Sequence
  Synthetic
augcaauuuagaaaaugu

SEQ ID NO: 663546 - RNA, 19 nt, Artificial Sequence
  Synthetic
uaugcaauuuagaaaaugu

SEQ ID NO: 663547 - RNA, 20 nt, Artificial Sequence
  Synthetic
auaugcaauuuagaaaaugu

SEQ ID NO: 663548 - RNA, 21 nt, Artificial Sequence
  Synthetic
aauaugcaauuuagaaaaugu

SEQ ID NO: 663549 - RNA, 22 nt, Artificial Sequence
  Synthetic
aaauaugcaauuuagaaaaugu

SEQ ID NO: 663550 - RNA, 23 nt, Artificial Sequence
  Synthetic
aaaauaugcaauuuagaaaaugu

SEQ ID NO: 663551 - RNA, 24 nt, Artificial Sequence
  Synthetic
uaaaauaugcaauuuagaaaaugu

SEQ ID NO: 663552 - RNA, 18 nt, Artificial Sequence
  Synthetic
acuaucuaaggaaaaugu

SEQ ID NO: 663553 - RNA, 19 nt, Artificial Sequence
  Synthetic
aacuaucuaaggaaaaugu

SEQ ID NO: 663554 - RNA, 20 nt, Artificial Sequence
  Synthetic
uaacuaucuaaggaaaaugu

SEQ ID NO: 663555 - RNA, 21 nt, Artificial Sequence
  Synthetic
uuaacuaucuaaggaaaaugu

SEQ ID NO: 663556 - RNA, 22 nt, Artificial Sequence
  Synthetic
uuuaacuaucuaaggaaaaugu

SEQ ID NO: 663557 - RNA, 23 nt, Artificial Sequence
  Synthetic
auuuaacuaucuaaggaaaaugu

SEQ ID NO: 663558 - RNA, 24 nt, Artificial Sequence
  Synthetic
aauuuaacuaucuaaggaaaaugu

SEQ ID NO: 663559 - RNA, 18 nt, Artificial Sequence
  Synthetic
acagccucaauaaaaugu

SEQ ID NO: 663560 - RNA, 19 nt, Artificial Sequence
  Synthetic
cacagccucaauaaaaugu

SEQ ID NO: 663561 - RNA, 20 nt, Artificial Sequence
  Synthetic
ucacagccucaauaaaaugu

SEQ ID NO: 663562 - RNA, 21 nt, Artificial Sequence
  Synthetic
cucacagccucaauaaaaugu

SEQ ID NO: 663563 - RNA, 22 nt, Artificial Sequence
  Synthetic
ucucacagccucaauaaaaugu

SEQ ID NO: 663564 - RNA, 23 nt, Artificial Sequence
  Synthetic
cucucacagccucaauaaaaugu

SEQ ID NO: 663565 - RNA, 24 nt, Artificial Sequence
  Synthetic
ccucucacagccucaauaaaaugu

SEQ ID NO: 663566 - RNA, 18 nt, Artificial Sequence
  Synthetic
guuagaaacauaaaaugu

SEQ ID NO: 663567 - RNA, 19 nt, Artificial Sequence
  Synthetic
uguuagaaacauaaaaugu

SEQ ID NO: 663568 - RNA, 20 nt, Artificial Sequence
  Synthetic
auguuagaaacauaaaaugu

SEQ ID NO: 663569 - RNA, 21 nt, Artificial Sequence
  Synthetic
gauguuagaaacauaaaaugu

SEQ ID NO: 663570 - RNA, 22 nt, Artificial Sequence
  Synthetic
ugauguuagaaacauaaaaugu

SEQ ID NO: 663571 - RNA, 23 nt, Artificial Sequence
  Synthetic
gugauguuagaaacauaaaaugu

SEQ ID NO: 663572 - RNA, 24 nt, Artificial Sequence
  Synthetic
ugugauguuagaaacauaaaaugu

SEQ ID NO: 663573 - RNA, 18 nt, Artificial Sequence
  Synthetic
aauucaaggauaaaaugu

SEQ ID NO: 663574 - RNA, 19 nt, Artificial Sequence
  Synthetic
aaauucaaggauaaaaugu

SEQ ID NO: 663575 - RNA, 20 nt, Artificial Sequence
  Synthetic
gaaauucaaggauaaaaugu

SEQ ID NO: 663576 - RNA, 21 nt, Artificial Sequence
  Synthetic
agaaauucaaggauaaaaugu

SEQ ID NO: 663577 - RNA, 22 nt, Artificial Sequence
  Synthetic
uagaaauucaaggauaaaaugu

SEQ ID NO: 663578 - RNA, 23 nt, Artificial Sequence
  Synthetic
auagaaauucaaggauaaaaugu

SEQ ID NO: 663579 - RNA, 24 nt, Artificial Sequence
  Synthetic
aauagaaauucaaggauaaaaugu

SEQ ID NO: 663580 - RNA, 18 nt, Artificial Sequence
  Synthetic
acaaaacaaaacaaaugu

SEQ ID NO: 663581 - RNA, 19 nt, Artificial Sequence
  Synthetic
aacaaaacaaaacaaaugu

SEQ ID NO: 663582 - RNA, 20 nt, Artificial Sequence
  Synthetic
aaacaaaacaaaacaaaugu

SEQ ID NO: 663583 - RNA, 21 nt, Artificial Sequence
  Synthetic
aaaacaaaacaaaacaaaugu

SEQ ID NO: 663584 - RNA, 22 nt, Artificial Sequence
  Synthetic
caaaacaaaacaaaacaaaugu

SEQ ID NO: 663585 - RNA, 23 nt, Artificial Sequence
  Synthetic
acaaaacaaaacaaaacaaaugu

SEQ ID NO: 663586 - RNA, 24 nt, Artificial Sequence
  Synthetic
aacaaaacaaaacaaaacaaaugu

SEQ ID NO: 663587 - RNA, 18 nt, Artificial Sequence
  Synthetic
ccaauguaucacaaaugu

SEQ ID NO: 663588 - RNA, 19 nt, Artificial Sequence
  Synthetic
accaauguaucacaaaugu

SEQ ID NO: 663589 - RNA, 20 nt, Artificial Sequence
  Synthetic
uaccaauguaucacaaaugu

SEQ ID NO: 663590 - RNA, 21 nt, Artificial Sequence
  Synthetic
cuaccaauguaucacaaaugu

SEQ ID NO: 663591 - RNA, 22 nt, Artificial Sequence
  Synthetic
acuaccaauguaucacaaaugu

SEQ ID NO: 663592 - RNA, 23 nt, Artificial Sequence
  Synthetic
cacuaccaauguaucacaaaugu

SEQ ID NO: 663593 - RNA, 24 nt, Artificial Sequence
  Synthetic
gcacuaccaauguaucacaaaugu

SEQ ID NO: 663594 - RNA, 18 nt, Artificial Sequence
  Synthetic
aguuggaaugucaaaugu

SEQ ID NO: 663595 - RNA, 19 nt, Artificial Sequence
  Synthetic
aaguuggaaugucaaaugu

SEQ ID NO: 663596 - RNA, 20 nt, Artificial Sequence
  Synthetic
aaaguuggaaugucaaaugu

SEQ ID NO: 663597 - RNA, 21 nt, Artificial Sequence
  Synthetic
uaaaguuggaaugucaaaugu

SEQ ID NO: 663598 - RNA, 22 nt, Artificial Sequence
  Synthetic
auaaaguuggaaugucaaaugu

SEQ ID NO: 663599 - RNA, 23 nt, Artificial Sequence
  Synthetic
gauaaaguuggaaugucaaaugu

SEQ ID NO: 663600 - RNA, 24 nt, Artificial Sequence
  Synthetic
ugauaaaguuggaaugucaaaugu

SEQ ID NO: 663601 - RNA, 18 nt, Artificial Sequence
  Synthetic
aauuagaaucagaaaugu

SEQ ID NO: 663602 - RNA, 19 nt, Artificial Sequence
  Synthetic
uaauuagaaucagaaaugu

SEQ ID NO: 663603 - RNA, 20 nt, Artificial Sequence
  Synthetic
guaauuagaaucagaaaugu

SEQ ID NO: 663604 - RNA, 21 nt, Artificial Sequence
  Synthetic
aguaauuagaaucagaaaugu

SEQ ID NO: 663605 - RNA, 22 nt, Artificial Sequence
  Synthetic
aaguaauuagaaucagaaaugu

SEQ ID NO: 663606 - RNA, 23 nt, Artificial Sequence
  Synthetic
caaguaauuagaaucagaaaugu

SEQ ID NO: 663607 - RNA, 24 nt, Artificial Sequence
  Synthetic
acaaguaauuagaaucagaaaugu

SEQ ID NO: 663608 - RNA, 18 nt, Artificial Sequence
  Synthetic
uuuauacaucagaaaugu

SEQ ID NO: 663609 - RNA, 19 nt, Artificial Sequence
  Synthetic
uuuuauacaucagaaaugu

SEQ ID NO: 663610 - RNA, 20 nt, Artificial Sequence
  Synthetic
auuuuauacaucagaaaugu

SEQ ID NO: 663611 - RNA, 21 nt, Artificial Sequence
  Synthetic
uauuuuauacaucagaaaugu

SEQ ID NO: 663612 - RNA, 22 nt, Artificial Sequence
  Synthetic
cuauuuuauacaucagaaaugu

SEQ ID NO: 663613 - RNA, 23 nt, Artificial Sequence
  Synthetic
ccuauuuuauacaucagaaaugu

SEQ ID NO: 663614 - RNA, 24 nt, Artificial Sequence
  Synthetic
uccuauuuuauacaucagaaaugu

SEQ ID NO: 663615 - RNA, 18 nt, Artificial Sequence
  Synthetic
aagacuauuaggaaaugu

SEQ ID NO: 663616 - RNA, 19 nt, Artificial Sequence
  Synthetic
aaagacuauuaggaaaugu

SEQ ID NO: 663617 - RNA, 20 nt, Artificial Sequence
  Synthetic
aaaagacuauuaggaaaugu

SEQ ID NO: 663618 - RNA, 21 nt, Artificial Sequence
  Synthetic
aaaaagacuauuaggaaaugu

SEQ ID NO: 663619 - RNA, 22 nt, Artificial Sequence
  Synthetic
aaaaaagacuauuaggaaaugu

SEQ ID NO: 663620 - RNA, 23 nt, Artificial Sequence
  Synthetic
gaaaaaagacuauuaggaaaugu

SEQ ID NO: 663621 - RNA, 24 nt, Artificial Sequence
  Synthetic
ggaaaaaagacuauuaggaaaugu

SEQ ID NO: 663622 - RNA, 18 nt, Artificial Sequence
  Synthetic
uagcacuuugggaaaugu

SEQ ID NO: 663623 - RNA, 19 nt, Artificial Sequence
  Synthetic
uuagcacuuugggaaaugu

SEQ ID NO: 663624 - RNA, 20 nt, Artificial Sequence
  Synthetic
uuuagcacuuugggaaaugu

SEQ ID NO: 663625 - RNA, 21 nt, Artificial Sequence
  Synthetic
uuuuagcacuuugggaaaugu

SEQ ID NO: 663626 - RNA, 22 nt, Artificial Sequence
  Synthetic
guuuuagcacuuugggaaaugu

SEQ ID NO: 663627 - RNA, 23 nt, Artificial Sequence
  Synthetic
aguuuuagcacuuugggaaaugu

SEQ ID NO: 663628 - RNA, 24 nt, Artificial Sequence
  Synthetic
uaguuuuagcacuuugggaaaugu

SEQ ID NO: 663629 - RNA, 18 nt, Artificial Sequence
  Synthetic
agggacauuuggaaaugu

SEQ ID NO: 663630 - RNA, 19 nt, Artificial Sequence
  Synthetic
aagggacauuuggaaaugu

SEQ ID NO: 663631 - RNA, 20 nt, Artificial Sequence
  Synthetic
caagggacauuuggaaaugu

SEQ ID NO: 663632 - RNA, 21 nt, Artificial Sequence
  Synthetic
ccaagggacauuuggaaaugu

SEQ ID NO: 663633 - RNA, 22 nt, Artificial Sequence
  Synthetic
cccaagggacauuuggaaaugu

SEQ ID NO: 663634 - RNA, 23 nt, Artificial Sequence
  Synthetic
ccccaagggacauuuggaaaugu

SEQ ID NO: 663635 - RNA, 24 nt, Artificial Sequence
  Synthetic
uccccaagggacauuuggaaaugu

SEQ ID NO: 663636 - RNA, 18 nt, Artificial Sequence
  Synthetic
aaauaauaaaauaaaugu

SEQ ID NO: 663637 - RNA, 19 nt, Artificial Sequence
  Synthetic
aaaauaauaaaauaaaugu

SEQ ID NO: 663638 - RNA, 20 nt, Artificial Sequence
  Synthetic
aaaaauaauaaaauaaaugu

SEQ ID NO: 663639 - RNA, 21 nt, Artificial Sequence
  Synthetic
aaaaaauaauaaaauaaaugu

SEQ ID NO: 663640 - RNA, 22 nt, Artificial Sequence
  Synthetic
caaaaaauaauaaaauaaaugu

SEQ ID NO: 663641 - RNA, 23 nt, Artificial Sequence
  Synthetic
acaaaaaauaauaaaauaaaugu

SEQ ID NO: 663642 - RNA, 24 nt, Artificial Sequence
  Synthetic
gacaaaaaauaauaaaauaaaugu

SEQ ID NO: 663643 - RNA, 18 nt, Artificial Sequence
  Synthetic
cagugaccaaauaaaugu

SEQ ID NO: 663644 - RNA, 19 nt, Artificial Sequence
  Synthetic
acagugaccaaauaaaugu

SEQ ID NO: 663645 - RNA, 20 nt, Artificial Sequence
  Synthetic
aacagugaccaaauaaaugu

SEQ ID NO: 663646 - RNA, 21 nt, Artificial Sequence
  Synthetic
aaacagugaccaaauaaaugu

SEQ ID NO: 663647 - RNA, 22 nt, Artificial Sequence
  Synthetic
caaacagugaccaaauaaaugu

SEQ ID NO: 663648 - RNA, 23 nt, Artificial Sequence
  Synthetic
acaaacagugaccaaauaaaugu

SEQ ID NO: 663649 - RNA, 24 nt, Artificial Sequence
  Synthetic
uacaaacagugaccaaauaaaugu

SEQ ID NO: 663650 - RNA, 18 nt, Artificial Sequence
  Synthetic
cagagaaauuauaaaugu

SEQ ID NO: 663651 - RNA, 19 nt, Artificial Sequence
  Synthetic
acagagaaauuauaaaugu

SEQ ID NO: 663652 - RNA, 20 nt, Artificial Sequence
  Synthetic
cacagagaaauuauaaaugu

SEQ ID NO: 663653 - RNA, 21 nt, Artificial Sequence
  Synthetic
ccacagagaaauuauaaaugu

SEQ ID NO: 663654 - RNA, 22 nt, Artificial Sequence
  Synthetic
accacagagaaauuauaaaugu

SEQ ID NO: 663655 - RNA, 23 nt, Artificial Sequence
  Synthetic
caccacagagaaauuauaaaugu

SEQ ID NO: 663656 - RNA, 24 nt, Artificial Sequence
  Synthetic
ucaccacagagaaauuauaaaugu

SEQ ID NO: 663657 - RNA, 18 nt, Artificial Sequence
  Synthetic
cauuauuuuuauaaaugu

SEQ ID NO: 663658 - RNA, 19 nt, Artificial Sequence
  Synthetic
acauuauuuuuauaaaugu

SEQ ID NO: 663659 - RNA, 20 nt, Artificial Sequence
  Synthetic
cacauuauuuuuauaaaugu

SEQ ID NO: 663660 - RNA, 21 nt, Artificial Sequence
  Synthetic
ucacauuauuuuuauaaaugu

SEQ ID NO: 663661 - RNA, 22 nt, Artificial Sequence
  Synthetic
uucacauuauuuuuauaaaugu

SEQ ID NO: 663662 - RNA, 23 nt, Artificial Sequence
  Synthetic
uuucacauuauuuuuauaaaugu

SEQ ID NO: 663663 - RNA, 24 nt, Artificial Sequence
  Synthetic
auuucacauuauuuuuauaaaugu

SEQ ID NO: 663664 - RNA, 18 nt, Artificial Sequence
  Synthetic
uuuugaagaucuaaaugu

SEQ ID NO: 663665 - RNA, 19 nt, Artificial Sequence
  Synthetic
auuuugaagaucuaaaugu

SEQ ID NO: 663666 - RNA, 20 nt, Artificial Sequence
  Synthetic
gauuuugaagaucuaaaugu

SEQ ID NO: 663667 - RNA, 21 nt, Artificial Sequence
  Synthetic
ugauuuugaagaucuaaaugu

SEQ ID NO: 663668 - RNA, 22 nt, Artificial Sequence
  Synthetic
uugauuuugaagaucuaaaugu

SEQ ID NO: 663669 - RNA, 23 nt, Artificial Sequence
  Synthetic
cuugauuuugaagaucuaaaugu

SEQ ID NO: 663670 - RNA, 24 nt, Artificial Sequence
  Synthetic
acuugauuuugaagaucuaaaugu

SEQ ID NO: 663671 - RNA, 18 nt, Artificial Sequence
  Synthetic
caaagcaaugguaaaugu

SEQ ID NO: 663672 - RNA, 19 nt, Artificial Sequence
  Synthetic
acaaagcaaugguaaaugu

SEQ ID NO: 663673 - RNA, 20 nt, Artificial Sequence
  Synthetic
cacaaagcaaugguaaaugu

SEQ ID NO: 663674 - RNA, 21 nt, Artificial Sequence
  Synthetic
acacaaagcaaugguaaaugu

SEQ ID NO: 663675 - RNA, 22 nt, Artificial Sequence
  Synthetic
aacacaaagcaaugguaaaugu

SEQ ID NO: 663676 - RNA, 23 nt, Artificial Sequence
  Synthetic
caacacaaagcaaugguaaaugu

SEQ ID NO: 663677 - RNA, 24 nt, Artificial Sequence
  Synthetic
ccaacacaaagcaaugguaaaugu

SEQ ID NO: 663678 - RNA, 18 nt, Artificial Sequence
  Synthetic
uugaaggauuguaaaugu

SEQ ID NO: 663679 - RNA, 19 nt, Artificial Sequence
  Synthetic
auugaaggauuguaaaugu

SEQ ID NO: 663680 - RNA, 20 nt, Artificial Sequence
  Synthetic
aauugaaggauuguaaaugu

SEQ ID NO: 663681 - RNA, 21 nt, Artificial Sequence
  Synthetic
aaauugaaggauuguaaaugu

SEQ ID NO: 663682 - RNA, 22 nt, Artificial Sequence
  Synthetic
caaauugaaggauuguaaaugu

SEQ ID NO: 663683 - RNA, 23 nt, Artificial Sequence
  Synthetic
acaaauugaaggauuguaaaugu

SEQ ID NO: 663684 - RNA, 24 nt, Artificial Sequence
  Synthetic
aacaaauugaaggauuguaaaugu

SEQ ID NO: 663685 - RNA, 18 nt, Artificial Sequence
  Synthetic
uaaaauaucauuaaaugu

SEQ ID NO: 663686 - RNA, 19 nt, Artificial Sequence
  Synthetic
uuaaaauaucauuaaaugu

SEQ ID NO: 663687 - RNA, 20 nt, Artificial Sequence
  Synthetic
uuuaaaauaucauuaaaugu

SEQ ID NO: 663688 - RNA, 21 nt, Artificial Sequence
  Synthetic
uuuuaaaauaucauuaaaugu

SEQ ID NO: 663689 - RNA, 22 nt, Artificial Sequence
  Synthetic
guuuuaaaauaucauuaaaugu

SEQ ID NO: 663690 - RNA, 23 nt, Artificial Sequence
  Synthetic
uguuuuaaaauaucauuaaaugu

SEQ ID NO: 663691 - RNA, 24 nt, Artificial Sequence
  Synthetic
guguuuuaaaauaucauuaaaugu

SEQ ID NO: 663692 - RNA, 18 nt, Artificial Sequence
  Synthetic
uaaauguuacuuaaaugu

SEQ ID NO: 663693 - RNA, 19 nt, Artificial Sequence
  Synthetic
guaaauguuacuuaaaugu

SEQ ID NO: 663694 - RNA, 20 nt, Artificial Sequence
  Synthetic
aguaaauguuacuuaaaugu

SEQ ID NO: 663695 - RNA, 21 nt, Artificial Sequence
  Synthetic
aaguaaauguuacuuaaaugu

SEQ ID NO: 663696 - RNA, 22 nt, Artificial Sequence
  Synthetic
uaaguaaauguuacuuaaaugu

SEQ ID NO: 663697 - RNA, 23 nt, Artificial Sequence
  Synthetic
uuaaguaaauguuacuuaaaugu

SEQ ID NO: 663698 - RNA, 24 nt, Artificial Sequence
  Synthetic
uuuaaguaaauguuacuuaaaugu

SEQ ID NO: 663699 - RNA, 18 nt, Artificial Sequence
  Synthetic
caugcuagcuuuaaaugu

SEQ ID NO: 663700 - RNA, 19 nt, Artificial Sequence
  Synthetic
acaugcuagcuuuaaaugu

SEQ ID NO: 663701 - RNA, 20 nt, Artificial Sequence
  Synthetic
aacaugcuagcuuuaaaugu

SEQ ID NO: 663702 - RNA, 21 nt, Artificial Sequence
  Synthetic
gaacaugcuagcuuuaaaugu

SEQ ID NO: 663703 - RNA, 22 nt, Artificial Sequence
  Synthetic
agaacaugcuagcuuuaaaugu

SEQ ID NO: 663704 - RNA, 23 nt, Artificial Sequence
  Synthetic
aagaacaugcuagcuuuaaaugu

SEQ ID NO: 663705 - RNA, 24 nt, Artificial Sequence
  Synthetic
caagaacaugcuagcuuuaaaugu

SEQ ID NO: 663706 - RNA, 18 nt, Artificial Sequence
  Synthetic
ggagauaaggaacaaugu

SEQ ID NO: 663707 - RNA, 19 nt, Artificial Sequence
  Synthetic
gggagauaaggaacaaugu

SEQ ID NO: 663708 - RNA, 20 nt, Artificial Sequence
  Synthetic
agggagauaaggaacaaugu

SEQ ID NO: 663709 - RNA, 21 nt, Artificial Sequence
  Synthetic
uagggagauaaggaacaaugu

SEQ ID NO: 663710 - RNA, 22 nt, Artificial Sequence
  Synthetic
auagggagauaaggaacaaugu

SEQ ID NO: 663711 - RNA, 23 nt, Artificial Sequence
  Synthetic
aauagggagauaaggaacaaugu

SEQ ID NO: 663712 - RNA, 24 nt, Artificial Sequence
  Synthetic
aaauagggagauaaggaacaaugu

SEQ ID NO: 663713 - RNA, 18 nt, Artificial Sequence
  Synthetic
gaaaaguuugcacaaugu

SEQ ID NO: 663714 - RNA, 19 nt, Artificial Sequence
  Synthetic
ggaaaaguuugcacaaugu

SEQ ID NO: 663715 - RNA, 20 nt, Artificial Sequence
  Synthetic
gggaaaaguuugcacaaugu

SEQ ID NO: 663716 - RNA, 21 nt, Artificial Sequence
  Synthetic
agggaaaaguuugcacaaugu

SEQ ID NO: 663717 - RNA, 22 nt, Artificial Sequence
  Synthetic
cagggaaaaguuugcacaaugu

SEQ ID NO: 663718 - RNA, 23 nt, Artificial Sequence
  Synthetic
acagggaaaaguuugcacaaugu

SEQ ID NO: 663719 - RNA, 24 nt, Artificial Sequence
  Synthetic
aacagggaaaaguuugcacaaugu

SEQ ID NO: 663720 - RNA, 18 nt, Artificial Sequence
  Synthetic
uuugcugaaagacaaugu

SEQ ID NO: 663721 - RNA, 19 nt, Artificial Sequence
  Synthetic
auuugcugaaagacaaugu

SEQ ID NO: 663722 - RNA, 20 nt, Artificial Sequence
  Synthetic
uauuugcugaaagacaaugu

SEQ ID NO: 663723 - RNA, 21 nt, Artificial Sequence
  Synthetic
cuauuugcugaaagacaaugu

SEQ ID NO: 663724 - RNA, 22 nt, Artificial Sequence
  Synthetic
ucuauuugcugaaagacaaugu

SEQ ID NO: 663725 - RNA, 23 nt, Artificial Sequence
  Synthetic
uucuauuugcugaaagacaaugu

SEQ ID NO: 663726 - RNA, 24 nt, Artificial Sequence
  Synthetic
auucuauuugcugaaagacaaugu

SEQ ID NO: 663727 - RNA, 18 nt, Artificial Sequence
  Synthetic
uagcuaagaaaccaaugu

SEQ ID NO: 663728 - RNA, 19 nt, Artificial Sequence
  Synthetic
auagcuaagaaaccaaugu

SEQ ID NO: 663729 - RNA, 20 nt, Artificial Sequence
  Synthetic
uauagcuaagaaaccaaugu

SEQ ID NO: 663730 - RNA, 21 nt, Artificial Sequence
  Synthetic
cuauagcuaagaaaccaaugu

SEQ ID NO: 663731 - RNA, 22 nt, Artificial Sequence
  Synthetic
ccuauagcuaagaaaccaaugu

SEQ ID NO: 663732 - RNA, 23 nt, Artificial Sequence
  Synthetic
uccuauagcuaagaaaccaaugu

SEQ ID NO: 663733 - RNA, 24 nt, Artificial Sequence
  Synthetic
uuccuauagcuaagaaaccaaugu

SEQ ID NO: 663734 - RNA, 18 nt, Artificial Sequence
  Synthetic
caaauaaaugaccaaugu

SEQ ID NO: 663735 - RNA, 19 nt, Artificial Sequence
  Synthetic
acaaauaaaugaccaaugu

SEQ ID NO: 663736 - RNA, 20 nt, Artificial Sequence
  Synthetic
cacaaauaaaugaccaaugu

SEQ ID NO: 663737 - RNA, 21 nt, Artificial Sequence
  Synthetic
acacaaauaaaugaccaaugu

SEQ ID NO: 663738 - RNA, 22 nt, Artificial Sequence
  Synthetic
aacacaaauaaaugaccaaugu

SEQ ID NO: 663739 - RNA, 23 nt, Artificial Sequence
  Synthetic
caacacaaauaaaugaccaaugu

SEQ ID NO: 663740 - RNA, 24 nt, Artificial Sequence
  Synthetic
ccaacacaaauaaaugaccaaugu

SEQ ID NO: 663741 - RNA, 18 nt, Artificial Sequence
  Synthetic
aauuguaauccccaaugu

SEQ ID NO: 663742 - RNA, 19 nt, Artificial Sequence
  Synthetic
aaauuguaauccccaaugu

SEQ ID NO: 663743 - RNA, 20 nt, Artificial Sequence
  Synthetic
uaaauuguaauccccaaugu

SEQ ID NO: 663744 - RNA, 21 nt, Artificial Sequence
  Synthetic
uuaaauuguaauccccaaugu

SEQ ID NO: 663745 - RNA, 22 nt, Artificial Sequence
  Synthetic
auuaaauuguaauccccaaugu

SEQ ID NO: 663746 - RNA, 23 nt, Artificial Sequence
  Synthetic
uauuaaauuguaauccccaaugu

SEQ ID NO: 663747 - RNA, 24 nt, Artificial Sequence
  Synthetic
auauuaaauuguaauccccaaugu

SEQ ID NO: 663748 - RNA, 18 nt, Artificial Sequence
  Synthetic
ccuggcaacacgcaaugu

SEQ ID NO: 663749 - RNA, 19 nt, Artificial Sequence
  Synthetic
uccuggcaacacgcaaugu

SEQ ID NO: 663750 - RNA, 20 nt, Artificial Sequence
  Synthetic
uuccuggcaacacgcaaugu

SEQ ID NO: 663751 - RNA, 21 nt, Artificial Sequence
  Synthetic
cuuccuggcaacacgcaaugu

SEQ ID NO: 663752 - RNA, 22 nt, Artificial Sequence
  Synthetic
acuuccuggcaacacgcaaugu

SEQ ID NO: 663753 - RNA, 23 nt, Artificial Sequence
  Synthetic
uacuuccuggcaacacgcaaugu

SEQ ID NO: 663754 - RNA, 24 nt, Artificial Sequence
  Synthetic
auacuuccuggcaacacgcaaugu

SEQ ID NO: 663755 - RNA, 18 nt, Artificial Sequence
  Synthetic
cucucucuaaugcaaugu

SEQ ID NO: 663756 - RNA, 19 nt, Artificial Sequence
  Synthetic
ccucucucuaaugcaaugu

SEQ ID NO: 663757 - RNA, 20 nt, Artificial Sequence
  Synthetic
gccucucucuaaugcaaugu

SEQ ID NO: 663758 - RNA, 21 nt, Artificial Sequence
  Synthetic
agccucucucuaaugcaaugu

SEQ ID NO: 663759 - RNA, 22 nt, Artificial Sequence
  Synthetic
cagccucucucuaaugcaaugu

SEQ ID NO: 663760 - RNA, 23 nt, Artificial Sequence
  Synthetic
ccagccucucucuaaugcaaugu

SEQ ID NO: 663761 - RNA, 24 nt, Artificial Sequence
  Synthetic
cccagccucucucuaaugcaaugu

SEQ ID NO: 663762 - RNA, 18 nt, Artificial Sequence
  Synthetic
gugaaggaagcucaaugu

SEQ ID NO: 663763 - RNA, 19 nt, Artificial Sequence
  Synthetic
ggugaaggaagcucaaugu

SEQ ID NO: 663764 - RNA, 20 nt, Artificial Sequence
  Synthetic
aggugaaggaagcucaaugu

SEQ ID NO: 663765 - RNA, 21 nt, Artificial Sequence
  Synthetic
gaggugaaggaagcucaaugu

SEQ ID NO: 663766 - RNA, 22 nt, Artificial Sequence
  Synthetic
agaggugaaggaagcucaaugu

SEQ ID NO: 663767 - RNA, 23 nt, Artificial Sequence
  Synthetic
aagaggugaaggaagcucaaugu

SEQ ID NO: 663768 - RNA, 24 nt, Artificial Sequence
  Synthetic
gaagaggugaaggaagcucaaugu

SEQ ID NO: 663769 - RNA, 18 nt, Artificial Sequence
  Synthetic
gucgaggcuucucaaugu

SEQ ID NO: 663770 - RNA, 19 nt, Artificial Sequence
  Synthetic
cgucgaggcuucucaaugu

SEQ ID NO: 663771 - RNA, 20 nt, Artificial Sequence
  Synthetic
gcgucgaggcuucucaaugu

SEQ ID NO: 663772 - RNA, 21 nt, Artificial Sequence
  Synthetic
agcgucgaggcuucucaaugu

SEQ ID NO: 663773 - RNA, 22 nt, Artificial Sequence
  Synthetic
cagcgucgaggcuucucaaugu

SEQ ID NO: 663774 - RNA, 23 nt, Artificial Sequence
  Synthetic
acagcgucgaggcuucucaaugu

SEQ ID NO: 663775 - RNA, 24 nt, Artificial Sequence
  Synthetic
cacagcgucgaggcuucucaaugu

SEQ ID NO: 663776 - RNA, 18 nt, Artificial Sequence
  Synthetic
uccuugaguagucaaugu

SEQ ID NO: 663777 - RNA, 19 nt, Artificial Sequence
  Synthetic
cuccuugaguagucaaugu

SEQ ID NO: 663778 - RNA, 20 nt, Artificial Sequence
  Synthetic
acuccuugaguagucaaugu

SEQ ID NO: 663779 - RNA, 21 nt, Artificial Sequence
  Synthetic
uacuccuugaguagucaaugu

SEQ ID NO: 663780 - RNA, 22 nt, Artificial Sequence
  Synthetic
auacuccuugaguagucaaugu

SEQ ID NO: 663781 - RNA, 23 nt, Artificial Sequence
  Synthetic
aauacuccuugaguagucaaugu

SEQ ID NO: 663782 - RNA, 24 nt, Artificial Sequence
  Synthetic
aaauacuccuugaguagucaaugu

SEQ ID NO: 663783 - RNA, 18 nt, Artificial Sequence
  Synthetic
aguacagggcuucaaugu

SEQ ID NO: 663784 - RNA, 19 nt, Artificial Sequence
  Synthetic
caguacagggcuucaaugu

SEQ ID NO: 663785 - RNA, 20 nt, Artificial Sequence
  Synthetic
gcaguacagggcuucaaugu

SEQ ID NO: 663786 - RNA, 21 nt, Artificial Sequence
  Synthetic
ugcaguacagggcuucaaugu

SEQ ID NO: 663787 - RNA, 22 nt, Artificial Sequence
  Synthetic
gugcaguacagggcuucaaugu

SEQ ID NO: 663788 - RNA, 23 nt, Artificial Sequence
  Synthetic
agugcaguacagggcuucaaugu

SEQ ID NO: 663789 - RNA, 24 nt, Artificial Sequence
  Synthetic
gagugcaguacagggcuucaaugu

SEQ ID NO: 663790 - RNA, 18 nt, Artificial Sequence
  Synthetic
auuuuaaaguuucaaugu

SEQ ID NO: 663791 - RNA, 19 nt, Artificial Sequence
  Synthetic
aauuuuaaaguuucaaugu

SEQ ID NO: 663792 - RNA, 20 nt, Artificial Sequence
  Synthetic
gaauuuuaaaguuucaaugu

SEQ ID NO: 663793 - RNA, 21 nt, Artificial Sequence
  Synthetic
cgaauuuuaaaguuucaaugu

SEQ ID NO: 663794 - RNA, 22 nt, Artificial Sequence
  Synthetic
gcgaauuuuaaaguuucaaugu

SEQ ID NO: 663795 - RNA, 23 nt, Artificial Sequence
  Synthetic
ggcgaauuuuaaaguuucaaugu

SEQ ID NO: 663796 - RNA, 24 nt, Artificial Sequence
  Synthetic
uggcgaauuuuaaaguuucaaugu

SEQ ID NO: 663797 - RNA, 18 nt, Artificial Sequence
  Synthetic
uaaacuaguuuucaaugu

SEQ ID NO: 663798 - RNA, 19 nt, Artificial Sequence
  Synthetic
guaaacuaguuuucaaugu

SEQ ID NO: 663799 - RNA, 20 nt, Artificial Sequence
  Synthetic
aguaaacuaguuuucaaugu

SEQ ID NO: 663800 - RNA, 21 nt, Artificial Sequence
  Synthetic
uaguaaacuaguuuucaaugu

SEQ ID NO: 663801 - RNA, 22 nt, Artificial Sequence
  Synthetic
uuaguaaacuaguuuucaaugu

SEQ ID NO: 663802 - RNA, 23 nt, Artificial Sequence
  Synthetic
uuuaguaaacuaguuuucaaugu

SEQ ID NO: 663803 - RNA, 24 nt, Artificial Sequence
  Synthetic
auuuaguaaacuaguuuucaaugu

SEQ ID NO: 663804 - RNA, 18 nt, Artificial Sequence
  Synthetic
uuauuauuuuuucaaugu

SEQ ID NO: 663805 - RNA, 19 nt, Artificial Sequence
  Synthetic
auuauuauuuuuucaaugu

SEQ ID NO: 663806 - RNA, 20 nt, Artificial Sequence
  Synthetic
gauuauuauuuuuucaaugu

SEQ ID NO: 663807 - RNA, 21 nt, Artificial Sequence
  Synthetic
ggauuauuauuuuuucaaugu

SEQ ID NO: 663808 - RNA, 22 nt, Artificial Sequence
  Synthetic
aggauuauuauuuuuucaaugu

SEQ ID NO: 663809 - RNA, 23 nt, Artificial Sequence
  Synthetic
caggauuauuauuuuuucaaugu

SEQ ID NO: 663810 - RNA, 24 nt, Artificial Sequence
  Synthetic
ucaggauuauuauuuuuucaaugu

SEQ ID NO: 663811 - RNA, 18 nt, Artificial Sequence
  Synthetic
aagcuggggccagaaugu

SEQ ID NO: 663812 - RNA, 19 nt, Artificial Sequence
  Synthetic
gaagcuggggccagaaugu

SEQ ID NO: 663813 - RNA, 20 nt, Artificial Sequence
  Synthetic
ggaagcuggggccagaaugu

SEQ ID NO: 663814 - RNA, 21 nt, Artificial Sequence
  Synthetic
gggaagcuggggccagaaugu

SEQ ID NO: 663815 - RNA, 22 nt, Artificial Sequence
  Synthetic
agggaagcuggggccagaaugu

SEQ ID NO: 663816 - RNA, 23 nt, Artificial Sequence
  Synthetic
aagggaagcuggggccagaaugu

SEQ ID NO: 663817 - RNA, 24 nt, Artificial Sequence
  Synthetic
gaagggaagcuggggccagaaugu

SEQ ID NO: 663818 - RNA, 18 nt, Artificial Sequence
  Synthetic
aagaugggaucagaaugu

SEQ ID NO: 663819 - RNA, 19 nt, Artificial Sequence
  Synthetic
caagaugggaucagaaugu

SEQ ID NO: 663820 - RNA, 20 nt, Artificial Sequence
  Synthetic
ucaagaugggaucagaaugu

SEQ ID NO: 663821 - RNA, 21 nt, Artificial Sequence
  Synthetic
gucaagaugggaucagaaugu

SEQ ID NO: 663822 - RNA, 22 nt, Artificial Sequence
  Synthetic
ugucaagaugggaucagaaugu

SEQ ID NO: 663823 - RNA, 23 nt, Artificial Sequence
  Synthetic
gugucaagaugggaucagaaugu

SEQ ID NO: 663824 - RNA, 24 nt, Artificial Sequence
  Synthetic
agugucaagaugggaucagaaugu

SEQ ID NO: 663825 - RNA, 18 nt, Artificial Sequence
  Synthetic
auuugaaacucagaaugu

SEQ ID NO: 663826 - RNA, 19 nt, Artificial Sequence
  Synthetic
uauuugaaacucagaaugu

SEQ ID NO: 663827 - RNA, 20 nt, Artificial Sequence
  Synthetic
uuauuugaaacucagaaugu

SEQ ID NO: 663828 - RNA, 21 nt, Artificial Sequence
  Synthetic
cuuauuugaaacucagaaugu

SEQ ID NO: 663829 - RNA, 22 nt, Artificial Sequence
  Synthetic
ucuuauuugaaacucagaaugu

SEQ ID NO: 663830 - RNA, 23 nt, Artificial Sequence
  Synthetic
uucuuauuugaaacucagaaugu

SEQ ID NO: 663831 - RNA, 24 nt, Artificial Sequence
  Synthetic
cuucuuauuugaaacucagaaugu

SEQ ID NO: 663832 - RNA, 18 nt, Artificial Sequence
  Synthetic
uuuaaaaacuacgaaugu

SEQ ID NO: 663833 - RNA, 19 nt, Artificial Sequence
  Synthetic
cuuuaaaaacuacgaaugu

SEQ ID NO: 663834 - RNA, 20 nt, Artificial Sequence
  Synthetic
gcuuuaaaaacuacgaaugu

SEQ ID NO: 663835 - RNA, 21 nt, Artificial Sequence
  Synthetic
ugcuuuaaaaacuacgaaugu

SEQ ID NO: 663836 - RNA, 22 nt, Artificial Sequence
  Synthetic
cugcuuuaaaaacuacgaaugu

SEQ ID NO: 663837 - RNA, 23 nt, Artificial Sequence
  Synthetic
gcugcuuuaaaaacuacgaaugu

SEQ ID NO: 663838 - RNA, 24 nt, Artificial Sequence
  Synthetic
ggcugcuuuaaaaacuacgaaugu

SEQ ID NO: 663839 - RNA, 18 nt, Artificial Sequence
  Synthetic
uuuuauuuguaugaaugu

SEQ ID NO: 663840 - RNA, 19 nt, Artificial Sequence
  Synthetic
uuuuuauuuguaugaaugu

SEQ ID NO: 663841 - RNA, 20 nt, Artificial Sequence
  Synthetic
uuuuuuauuuguaugaaugu

SEQ ID NO: 663842 - RNA, 21 nt, Artificial Sequence
  Synthetic
auuuuuuauuuguaugaaugu

SEQ ID NO: 663843 - RNA, 22 nt, Artificial Sequence
  Synthetic
aauuuuuuauuuguaugaaugu

SEQ ID NO: 663844 - RNA, 23 nt, Artificial Sequence
  Synthetic
uaauuuuuuauuuguaugaaugu

SEQ ID NO: 663845 - RNA, 24 nt, Artificial Sequence
  Synthetic
auaauuuuuuauuuguaugaaugu

SEQ ID NO: 663846 - RNA, 18 nt, Artificial Sequence
  Synthetic
aaacacaauuaugaaugu

SEQ ID NO: 663847 - RNA, 19 nt, Artificial Sequence
  Synthetic
aaaacacaauuaugaaugu

SEQ ID NO: 663848 - RNA, 20 nt, Artificial Sequence
  Synthetic
uaaaacacaauuaugaaugu

SEQ ID NO: 663849 - RNA, 21 nt, Artificial Sequence
  Synthetic
uuaaaacacaauuaugaaugu

SEQ ID NO: 663850 - RNA, 22 nt, Artificial Sequence
  Synthetic
uuuaaaacacaauuaugaaugu

SEQ ID NO: 663851 - RNA, 23 nt, Artificial Sequence
  Synthetic
cuuuaaaacacaauuaugaaugu

SEQ ID NO: 663852 - RNA, 24 nt, Artificial Sequence
  Synthetic
ucuuuaaaacacaauuaugaaugu

SEQ ID NO: 663853 - RNA, 18 nt, Artificial Sequence
  Synthetic
uuccuccuaccugaaugu

SEQ ID NO: 663854 - RNA, 19 nt, Artificial Sequence
  Synthetic
guuccuccuaccugaaugu

SEQ ID NO: 663855 - RNA, 20 nt, Artificial Sequence
  Synthetic
aguuccuccuaccugaaugu

SEQ ID NO: 663856 - RNA, 21 nt, Artificial Sequence
  Synthetic
gaguuccuccuaccugaaugu

SEQ ID NO: 663857 - RNA, 22 nt, Artificial Sequence
  Synthetic
agaguuccuccuaccugaaugu

SEQ ID NO: 663858 - RNA, 23 nt, Artificial Sequence
  Synthetic
uagaguuccuccuaccugaaugu

SEQ ID NO: 663859 - RNA, 24 nt, Artificial Sequence
  Synthetic
auagaguuccuccuaccugaaugu

SEQ ID NO: 663860 - RNA, 18 nt, Artificial Sequence
  Synthetic
ggggcaaaaugugaaugu

SEQ ID NO: 663861 - RNA, 19 nt, Artificial Sequence
  Synthetic
gggggcaaaaugugaaugu

SEQ ID NO: 663862 - RNA, 20 nt, Artificial Sequence
  Synthetic
ugggggcaaaaugugaaugu

SEQ ID NO: 663863 - RNA, 21 nt, Artificial Sequence
  Synthetic
cugggggcaaaaugugaaugu

SEQ ID NO: 663864 - RNA, 22 nt, Artificial Sequence
  Synthetic
ccugggggcaaaaugugaaugu

SEQ ID NO: 663865 - RNA, 23 nt, Artificial Sequence
  Synthetic
uccugggggcaaaaugugaaugu

SEQ ID NO: 663866 - RNA, 24 nt, Artificial Sequence
  Synthetic
auccugggggcaaaaugugaaugu

SEQ ID NO: 663867 - RNA, 18 nt, Artificial Sequence
  Synthetic
aaaagagacaaauaaugu

SEQ ID NO: 663868 - RNA, 19 nt, Artificial Sequence
  Synthetic
aaaaagagacaaauaaugu

SEQ ID NO: 663869 - RNA, 20 nt, Artificial Sequence
  Synthetic
gaaaaagagacaaauaaugu

SEQ ID NO: 663870 - RNA, 21 nt, Artificial Sequence
  Synthetic
ugaaaaagagacaaauaaugu

SEQ ID NO: 663871 - RNA, 22 nt, Artificial Sequence
  Synthetic
uugaaaaagagacaaauaaugu

SEQ ID NO: 663872 - RNA, 23 nt, Artificial Sequence
  Synthetic
uuugaaaaagagacaaauaaugu

SEQ ID NO: 663873 - RNA, 24 nt, Artificial Sequence
  Synthetic
auuugaaaaagagacaaauaaugu

SEQ ID NO: 663874 - RNA, 18 nt, Artificial Sequence
  Synthetic
gcuucuuuccaauaaugu

SEQ ID NO: 663875 - RNA, 19 nt, Artificial Sequence
  Synthetic
ugcuucuuuccaauaaugu

SEQ ID NO: 663876 - RNA, 20 nt, Artificial Sequence
  Synthetic
uugcuucuuuccaauaaugu

SEQ ID NO: 663877 - RNA, 21 nt, Artificial Sequence
  Synthetic
cuugcuucuuuccaauaaugu

SEQ ID NO: 663878 - RNA, 22 nt, Artificial Sequence
  Synthetic
ucuugcuucuuuccaauaaugu

SEQ ID NO: 663879 - RNA, 23 nt, Artificial Sequence
  Synthetic
uucuugcuucuuuccaauaaugu

SEQ ID NO: 663880 - RNA, 24 nt, Artificial Sequence
  Synthetic
guucuugcuucuuuccaauaaugu

SEQ ID NO: 663881 - RNA, 18 nt, Artificial Sequence
  Synthetic
ugagcuauagaauaaugu

SEQ ID NO: 663882 - RNA, 19 nt, Artificial Sequence
  Synthetic
cugagcuauagaauaaugu

SEQ ID NO: 663883 - RNA, 20 nt, Artificial Sequence
  Synthetic
gcugagcuauagaauaaugu

SEQ ID NO: 663884 - RNA, 21 nt, Artificial Sequence
  Synthetic
agcugagcuauagaauaaugu

SEQ ID NO: 663885 - RNA, 22 nt, Artificial Sequence
  Synthetic
gagcugagcuauagaauaaugu

SEQ ID NO: 663886 - RNA, 23 nt, Artificial Sequence
  Synthetic
ggagcugagcuauagaauaaugu

SEQ ID NO: 663887 - RNA, 24 nt, Artificial Sequence
  Synthetic
aggagcugagcuauagaauaaugu

SEQ ID NO: 663888 - RNA, 18 nt, Artificial Sequence
  Synthetic
uaauaauaauaauaaugu

SEQ ID NO: 663889 - RNA, 19 nt, Artificial Sequence
  Synthetic
auaauaauaauaauaaugu

SEQ ID NO: 663890 - RNA, 20 nt, Artificial Sequence
  Synthetic
uauaauaauaauaauaaugu

SEQ ID NO: 663891 - RNA, 21 nt, Artificial Sequence
  Synthetic
auauaauaauaauaauaaugu

SEQ ID NO: 663892 - RNA, 22 nt, Artificial Sequence
  Synthetic
aauauaauaauaauaauaaugu

SEQ ID NO: 663893 - RNA, 23 nt, Artificial Sequence
  Synthetic
aaauauaauaauaauaauaaugu

SEQ ID NO: 663894 - RNA, 24 nt, Artificial Sequence
  Synthetic
caaauauaauaauaauaauaaugu

SEQ ID NO: 663895 - RNA, 18 nt, Artificial Sequence
  Synthetic
uggacuaacacauaaugu

SEQ ID NO: 663896 - RNA, 19 nt, Artificial Sequence
  Synthetic
guggacuaacacauaaugu

SEQ ID NO: 663897 - RNA, 20 nt, Artificial Sequence
  Synthetic
cguggacuaacacauaaugu

SEQ ID NO: 663898 - RNA, 21 nt, Artificial Sequence
  Synthetic
acguggacuaacacauaaugu

SEQ ID NO: 663899 - RNA, 22 nt, Artificial Sequence
  Synthetic
aacguggacuaacacauaaugu

SEQ ID NO: 663900 - RNA, 23 nt, Artificial Sequence
  Synthetic
gaacguggacuaacacauaaugu

SEQ ID NO: 663901 - RNA, 24 nt, Artificial Sequence
  Synthetic
agaacguggacuaacacauaaugu

SEQ ID NO: 663902 - RNA, 18 nt, Artificial Sequence
  Synthetic
gagguugaaauauaaugu

SEQ ID NO: 663903 - RNA, 19 nt, Artificial Sequence
  Synthetic
agagguugaaauauaaugu

SEQ ID NO: 663904 - RNA, 20 nt, Artificial Sequence
  Synthetic
gagagguugaaauauaaugu

SEQ ID NO: 663905 - RNA, 21 nt, Artificial Sequence
  Synthetic
ggagagguugaaauauaaugu

SEQ ID NO: 663906 - RNA, 22 nt, Artificial Sequence
  Synthetic
uggagagguugaaauauaaugu

SEQ ID NO: 663907 - RNA, 23 nt, Artificial Sequence
  Synthetic
uuggagagguugaaauauaaugu

SEQ ID NO: 663908 - RNA, 24 nt, Artificial Sequence
  Synthetic
uuuggagagguugaaauauaaugu

SEQ ID NO: 663909 - RNA, 18 nt, Artificial Sequence
  Synthetic
cuauaaaaccacuaaugu

SEQ ID NO: 663910 - RNA, 19 nt, Artificial Sequence
  Synthetic
ucuauaaaaccacuaaugu

SEQ ID NO: 663911 - RNA, 20 nt, Artificial Sequence
  Synthetic
aucuauaaaaccacuaaugu

SEQ ID NO: 663912 - RNA, 21 nt, Artificial Sequence
  Synthetic
aaucuauaaaaccacuaaugu

SEQ ID NO: 663913 - RNA, 22 nt, Artificial Sequence
  Synthetic
uaaucuauaaaaccacuaaugu

SEQ ID NO: 663914 - RNA, 23 nt, Artificial Sequence
  Synthetic
uuaaucuauaaaaccacuaaugu

SEQ ID NO: 663915 - RNA, 24 nt, Artificial Sequence
  Synthetic
uuuaaucuauaaaaccacuaaugu

SEQ ID NO: 663916 - RNA, 18 nt, Artificial Sequence
  Synthetic
uagugucuagccuaaugu

SEQ ID NO: 663917 - RNA, 19 nt, Artificial Sequence
  Synthetic
cuagugucuagccuaaugu

SEQ ID NO: 663918 - RNA, 20 nt, Artificial Sequence
  Synthetic
ucuagugucuagccuaaugu

SEQ ID NO: 663919 - RNA, 21 nt, Artificial Sequence
  Synthetic
cucuagugucuagccuaaugu

SEQ ID NO: 663920 - RNA, 22 nt, Artificial Sequence
  Synthetic
ucucuagugucuagccuaaugu

SEQ ID NO: 663921 - RNA, 23 nt, Artificial Sequence
  Synthetic
gucucuagugucuagccuaaugu

SEQ ID NO: 663922 - RNA, 24 nt, Artificial Sequence
  Synthetic
ugucucuagugucuagccuaaugu

SEQ ID NO: 663923 - RNA, 18 nt, Artificial Sequence
  Synthetic
aagaguaagugcuaaugu

SEQ ID NO: 663924 - RNA, 19 nt, Artificial Sequence
  Synthetic
aaagaguaagugcuaaugu

SEQ ID NO: 663925 - RNA, 20 nt, Artificial Sequence
  Synthetic
gaaagaguaagugcuaaugu

SEQ ID NO: 663926 - RNA, 21 nt, Artificial Sequence
  Synthetic
agaaagaguaagugcuaaugu

SEQ ID NO: 663927 - RNA, 22 nt, Artificial Sequence
  Synthetic
uagaaagaguaagugcuaaugu

SEQ ID NO: 663928 - RNA, 23 nt, Artificial Sequence
  Synthetic
auagaaagaguaagugcuaaugu

SEQ ID NO: 663929 - RNA, 24 nt, Artificial Sequence
  Synthetic
cauagaaagaguaagugcuaaugu

SEQ ID NO: 663930 - RNA, 18 nt, Artificial Sequence
  Synthetic
uaacucuuucucuaaugu

SEQ ID NO: 663931 - RNA, 19 nt, Artificial Sequence
  Synthetic
uuaacucuuucucuaaugu

SEQ ID NO: 663932 - RNA, 20 nt, Artificial Sequence
  Synthetic
cuuaacucuuucucuaaugu

SEQ ID NO: 663933 - RNA, 21 nt, Artificial Sequence
  Synthetic
ccuuaacucuuucucuaaugu

SEQ ID NO: 663934 - RNA, 22 nt, Artificial Sequence
  Synthetic
accuuaacucuuucucuaaugu

SEQ ID NO: 663935 - RNA, 23 nt, Artificial Sequence
  Synthetic
uaccuuaacucuuucucuaaugu

SEQ ID NO: 663936 - RNA, 24 nt, Artificial Sequence
  Synthetic
auaccuuaacucuuucucuaaugu

SEQ ID NO: 663937 - RNA, 18 nt, Artificial Sequence
  Synthetic
uaauuuacaugguaaugu

SEQ ID NO: 663938 - RNA, 19 nt, Artificial Sequence
  Synthetic
auaauuuacaugguaaugu

SEQ ID NO: 663939 - RNA, 20 nt, Artificial Sequence
  Synthetic
aauaauuuacaugguaaugu

SEQ ID NO: 663940 - RNA, 21 nt, Artificial Sequence
  Synthetic
aaauaauuuacaugguaaugu

SEQ ID NO: 663941 - RNA, 22 nt, Artificial Sequence
  Synthetic
gaaauaauuuacaugguaaugu

SEQ ID NO: 663942 - RNA, 23 nt, Artificial Sequence
  Synthetic
ggaaauaauuuacaugguaaugu

SEQ ID NO: 663943 - RNA, 24 nt, Artificial Sequence
  Synthetic
uggaaauaauuuacaugguaaugu

SEQ ID NO: 663944 - RNA, 18 nt, Artificial Sequence
  Synthetic
cuacaugugaauuaaugu

SEQ ID NO: 663945 - RNA, 19 nt, Artificial Sequence
  Synthetic
ccuacaugugaauuaaugu

SEQ ID NO: 663946 - RNA, 20 nt, Artificial Sequence
  Synthetic
uccuacaugugaauuaaugu

SEQ ID NO: 663947 - RNA, 21 nt, Artificial Sequence
  Synthetic
guccuacaugugaauuaaugu

SEQ ID NO: 663948 - RNA, 22 nt, Artificial Sequence
  Synthetic
uguccuacaugugaauuaaugu

SEQ ID NO: 663949 - RNA, 23 nt, Artificial Sequence
  Synthetic
cuguccuacaugugaauuaaugu

SEQ ID NO: 663950 - RNA, 24 nt, Artificial Sequence
  Synthetic
ucuguccuacaugugaauuaaugu

SEQ ID NO: 663951 - RNA, 18 nt, Artificial Sequence
  Synthetic
gaagagaaauauuaaugu

SEQ ID NO: 663952 - RNA, 19 nt, Artificial Sequence
  Synthetic
ugaagagaaauauuaaugu

SEQ ID NO: 663953 - RNA, 20 nt, Artificial Sequence
  Synthetic
augaagagaaauauuaaugu

SEQ ID NO: 663954 - RNA, 21 nt, Artificial Sequence
  Synthetic
uaugaagagaaauauuaaugu

SEQ ID NO: 663955 - RNA, 22 nt, Artificial Sequence
  Synthetic
guaugaagagaaauauuaaugu

SEQ ID NO: 663956 - RNA, 23 nt, Artificial Sequence
  Synthetic
uguaugaagagaaauauuaaugu

SEQ ID NO: 663957 - RNA, 24 nt, Artificial Sequence
  Synthetic
auguaugaagagaaauauuaaugu

SEQ ID NO: 663958 - RNA, 18 nt, Artificial Sequence
  Synthetic
uuacucuuuuguuaaugu

SEQ ID NO: 663959 - RNA, 19 nt, Artificial Sequence
  Synthetic
guuacucuuuuguuaaugu

SEQ ID NO: 663960 - RNA, 20 nt, Artificial Sequence
  Synthetic
aguuacucuuuuguuaaugu

SEQ ID NO: 663961 - RNA, 21 nt, Artificial Sequence
  Synthetic
aaguuacucuuuuguuaaugu

SEQ ID NO: 663962 - RNA, 22 nt, Artificial Sequence
  Synthetic
aaaguuacucuuuuguuaaugu

SEQ ID NO: 663963 - RNA, 23 nt, Artificial Sequence
  Synthetic
caaaguuacucuuuuguuaaugu

SEQ ID NO: 663964 - RNA, 24 nt, Artificial Sequence
  Synthetic
acaaaguuacucuuuuguuaaugu

SEQ ID NO: 663965 - RNA, 18 nt, Artificial Sequence
  Synthetic
uuugaagacauuuaaugu

SEQ ID NO: 663966 - RNA, 19 nt, Artificial Sequence
  Synthetic
cuuugaagacauuuaaugu

SEQ ID NO: 663967 - RNA, 20 nt, Artificial Sequence
  Synthetic
gcuuugaagacauuuaaugu

SEQ ID NO: 663968 - RNA, 21 nt, Artificial Sequence
  Synthetic
agcuuugaagacauuuaaugu

SEQ ID NO: 663969 - RNA, 22 nt, Artificial Sequence
  Synthetic
aagcuuugaagacauuuaaugu

SEQ ID NO: 663970 - RNA, 23 nt, Artificial Sequence
  Synthetic
gaagcuuugaagacauuuaaugu

SEQ ID NO: 663971 - RNA, 24 nt, Artificial Sequence
  Synthetic
agaagcuuugaagacauuuaaugu

SEQ ID NO: 663972 - RNA, 18 nt, Artificial Sequence
  Synthetic
auuacuaaaacaacaugu

SEQ ID NO: 663973 - RNA, 19 nt, Artificial Sequence
  Synthetic
aauuacuaaaacaacaugu

SEQ ID NO: 663974 - RNA, 20 nt, Artificial Sequence
  Synthetic
uaauuacuaaaacaacaugu

SEQ ID NO: 663975 - RNA, 21 nt, Artificial Sequence
  Synthetic
auaauuacuaaaacaacaugu

SEQ ID NO: 663976 - RNA, 22 nt, Artificial Sequence
  Synthetic
aauaauuacuaaaacaacaugu

SEQ ID NO: 663977 - RNA, 23 nt, Artificial Sequence
  Synthetic
gaauaauuacuaaaacaacaugu

SEQ ID NO: 663978 - RNA, 24 nt, Artificial Sequence
  Synthetic
agaauaauuacuaaaacaacaugu

SEQ ID NO: 663979 - RNA, 18 nt, Artificial Sequence
  Synthetic
gaucccgcaagaacaugu

SEQ ID NO: 663980 - RNA, 19 nt, Artificial Sequence
  Synthetic
agaucccgcaagaacaugu

SEQ ID NO: 663981 - RNA, 20 nt, Artificial Sequence
  Synthetic
uagaucccgcaagaacaugu

SEQ ID NO: 663982 - RNA, 21 nt, Artificial Sequence
  Synthetic
cuagaucccgcaagaacaugu

SEQ ID NO: 663983 - RNA, 22 nt, Artificial Sequence
  Synthetic
ucuagaucccgcaagaacaugu

SEQ ID NO: 663984 - RNA, 23 nt, Artificial Sequence
  Synthetic
uucuagaucccgcaagaacaugu

SEQ ID NO: 663985 - RNA, 24 nt, Artificial Sequence
  Synthetic
cuucuagaucccgcaagaacaugu

SEQ ID NO: 663986 - RNA, 18 nt, Artificial Sequence
  Synthetic
guggcagaaauaacaugu

SEQ ID NO: 663987 - RNA, 19 nt, Artificial Sequence
  Synthetic
aguggcagaaauaacaugu

SEQ ID NO: 663988 - RNA, 20 nt, Artificial Sequence
  Synthetic
aaguggcagaaauaacaugu

SEQ ID NO: 663989 - RNA, 21 nt, Artificial Sequence
  Synthetic
aaaguggcagaaauaacaugu

SEQ ID NO: 663990 - RNA, 22 nt, Artificial Sequence
  Synthetic
aaaaguggcagaaauaacaugu

SEQ ID NO: 663991 - RNA, 23 nt, Artificial Sequence
  Synthetic
aaaaaguggcagaaauaacaugu

SEQ ID NO: 663992 - RNA, 24 nt, Artificial Sequence
  Synthetic
gaaaaaguggcagaaauaacaugu

SEQ ID NO: 663993 - RNA, 18 nt, Artificial Sequence
  Synthetic
auuacagaguccacaugu

SEQ ID NO: 663994 - RNA, 19 nt, Artificial Sequence
  Synthetic
aauuacagaguccacaugu

SEQ ID NO: 663995 - RNA, 20 nt, Artificial Sequence
  Synthetic
aaauuacagaguccacaugu

SEQ ID NO: 663996 - RNA, 21 nt, Artificial Sequence
  Synthetic
uaaauuacagaguccacaugu

SEQ ID NO: 663997 - RNA, 22 nt, Artificial Sequence
  Synthetic
auaaauuacagaguccacaugu

SEQ ID NO: 663998 - RNA, 23 nt, Artificial Sequence
  Synthetic
aauaaauuacagaguccacaugu

SEQ ID NO: 663999 - RNA, 24 nt, Artificial Sequence
  Synthetic
uaauaaauuacagaguccacaugu

SEQ ID NO: 664000 - RNA, 18 nt, Artificial Sequence
  Synthetic
guguugucacucacaugu

SEQ ID NO: 664001 - RNA, 19 nt, Artificial Sequence
  Synthetic
uguguugucacucacaugu

SEQ ID NO: 664002 - RNA, 20 nt, Artificial Sequence
  Synthetic
auguguugucacucacaugu

SEQ ID NO: 664003 - RNA, 21 nt, Artificial Sequence
  Synthetic
uauguguugucacucacaugu

SEQ ID NO: 664004 - RNA, 22 nt, Artificial Sequence
  Synthetic
uuauguguugucacucacaugu

SEQ ID NO: 664005 - RNA, 23 nt, Artificial Sequence
  Synthetic
auuauguguugucacucacaugu

SEQ ID NO: 664006 - RNA, 24 nt, Artificial Sequence
  Synthetic
uauuauguguugucacucacaugu

SEQ ID NO: 664007 - RNA, 18 nt, Artificial Sequence
  Synthetic
cccuaagacaagacaugu

SEQ ID NO: 664008 - RNA, 19 nt, Artificial Sequence
  Synthetic
gcccuaagacaagacaugu

SEQ ID NO: 664009 - RNA, 20 nt, Artificial Sequence
  Synthetic
ggcccuaagacaagacaugu

SEQ ID NO: 664010 - RNA, 21 nt, Artificial Sequence
  Synthetic
uggcccuaagacaagacaugu

SEQ ID NO: 664011 - RNA, 22 nt, Artificial Sequence
  Synthetic
uuggcccuaagacaagacaugu

SEQ ID NO: 664012 - RNA, 23 nt, Artificial Sequence
  Synthetic
uuuggcccuaagacaagacaugu

SEQ ID NO: 664013 - RNA, 24 nt, Artificial Sequence
  Synthetic
auuuggcccuaagacaagacaugu

SEQ ID NO: 664014 - RNA, 18 nt, Artificial Sequence
  Synthetic
gcacaguuugggacaugu

SEQ ID NO: 664015 - RNA, 19 nt, Artificial Sequence
  Synthetic
ugcacaguuugggacaugu

SEQ ID NO: 664016 - RNA, 20 nt, Artificial Sequence
  Synthetic
gugcacaguuugggacaugu

SEQ ID NO: 664017 - RNA, 21 nt, Artificial Sequence
  Synthetic
cgugcacaguuugggacaugu

SEQ ID NO: 664018 - RNA, 22 nt, Artificial Sequence
  Synthetic
acgugcacaguuugggacaugu

SEQ ID NO: 664019 - RNA, 23 nt, Artificial Sequence
  Synthetic
aacgugcacaguuugggacaugu

SEQ ID NO: 664020 - RNA, 24 nt, Artificial Sequence
  Synthetic
uaacgugcacaguuugggacaugu

SEQ ID NO: 664021 - RNA, 18 nt, Artificial Sequence
  Synthetic
ucuuuuuuggauacaugu

SEQ ID NO: 664022 - RNA, 19 nt, Artificial Sequence
  Synthetic
cucuuuuuuggauacaugu

SEQ ID NO: 664023 - RNA, 20 nt, Artificial Sequence
  Synthetic
gcucuuuuuuggauacaugu

SEQ ID NO: 664024 - RNA, 21 nt, Artificial Sequence
  Synthetic
agcucuuuuuuggauacaugu

SEQ ID NO: 664025 - RNA, 22 nt, Artificial Sequence
  Synthetic
gagcucuuuuuuggauacaugu

SEQ ID NO: 664026 - RNA, 23 nt, Artificial Sequence
  Synthetic
ggagcucuuuuuuggauacaugu

SEQ ID NO: 664027 - RNA, 24 nt, Artificial Sequence
  Synthetic
gggagcucuuuuuuggauacaugu

SEQ ID NO: 664028 - RNA, 18 nt, Artificial Sequence
  Synthetic
agccucugaaguacaugu

SEQ ID NO: 664029 - RNA, 19 nt, Artificial Sequence
  Synthetic
aagccucugaaguacaugu

SEQ ID NO: 664030 - RNA, 20 nt, Artificial Sequence
  Synthetic
caagccucugaaguacaugu

SEQ ID NO: 664031 - RNA, 21 nt, Artificial Sequence
  Synthetic
ucaagccucugaaguacaugu

SEQ ID NO: 664032 - RNA, 22 nt, Artificial Sequence
  Synthetic
cucaagccucugaaguacaugu

SEQ ID NO: 664033 - RNA, 23 nt, Artificial Sequence
  Synthetic
ucucaagccucugaaguacaugu

SEQ ID NO: 664034 - RNA, 24 nt, Artificial Sequence
  Synthetic
uucucaagccucugaaguacaugu

SEQ ID NO: 664035 - RNA, 18 nt, Artificial Sequence
  Synthetic
uucauauguuguacaugu

SEQ ID NO: 664036 - RNA, 19 nt, Artificial Sequence
  Synthetic
uuucauauguuguacaugu

SEQ ID NO: 664037 - RNA, 20 nt, Artificial Sequence
  Synthetic
uuuucauauguuguacaugu

SEQ ID NO: 664038 - RNA, 21 nt, Artificial Sequence
  Synthetic
auuuucauauguuguacaugu

SEQ ID NO: 664039 - RNA, 22 nt, Artificial Sequence
  Synthetic
uauuuucauauguuguacaugu

SEQ ID NO: 664040 - RNA, 23 nt, Artificial Sequence
  Synthetic
auauuuucauauguuguacaugu

SEQ ID NO: 664041 - RNA, 24 nt, Artificial Sequence
  Synthetic
uauauuuucauauguuguacaugu

SEQ ID NO: 664042 - RNA, 18 nt, Artificial Sequence
  Synthetic
gaggccuuccuuacaugu

SEQ ID NO: 664043 - RNA, 19 nt, Artificial Sequence
  Synthetic
ggaggccuuccuuacaugu

SEQ ID NO: 664044 - RNA, 20 nt, Artificial Sequence
  Synthetic
uggaggccuuccuuacaugu

SEQ ID NO: 664045 - RNA, 21 nt, Artificial Sequence
  Synthetic
cuggaggccuuccuuacaugu

SEQ ID NO: 664046 - RNA, 22 nt, Artificial Sequence
  Synthetic
acuggaggccuuccuuacaugu

SEQ ID NO: 664047 - RNA, 23 nt, Artificial Sequence
  Synthetic
uacuggaggccuuccuuacaugu

SEQ ID NO: 664048 - RNA, 24 nt, Artificial Sequence
  Synthetic
guacuggaggccuuccuuacaugu

SEQ ID NO: 664049 - RNA, 18 nt, Artificial Sequence
  Synthetic
auuaaagauaaaccaugu

SEQ ID NO: 664050 - RNA, 19 nt, Artificial Sequence
  Synthetic
uauuaaagauaaaccaugu

SEQ ID NO: 664051 - RNA, 20 nt, Artificial Sequence
  Synthetic
auauuaaagauaaaccaugu

SEQ ID NO: 664052 - RNA, 21 nt, Artificial Sequence
  Synthetic
cauauuaaagauaaaccaugu

SEQ ID NO: 664053 - RNA, 22 nt, Artificial Sequence
  Synthetic
acauauuaaagauaaaccaugu

SEQ ID NO: 664054 - RNA, 23 nt, Artificial Sequence
  Synthetic
aacauauuaaagauaaaccaugu

SEQ ID NO: 664055 - RNA, 24 nt, Artificial Sequence
  Synthetic
aaacauauuaaagauaaaccaugu

SEQ ID NO: 664056 - RNA, 18 nt, Artificial Sequence
  Synthetic
uccaggaugacaccaugu

SEQ ID NO: 664057 - RNA, 19 nt, Artificial Sequence
  Synthetic
uuccaggaugacaccaugu

SEQ ID NO: 664058 - RNA, 20 nt, Artificial Sequence
  Synthetic
guuccaggaugacaccaugu

SEQ ID NO: 664059 - RNA, 21 nt, Artificial Sequence
  Synthetic
aguuccaggaugacaccaugu

SEQ ID NO: 664060 - RNA, 22 nt, Artificial Sequence
  Synthetic
caguuccaggaugacaccaugu

SEQ ID NO: 664061 - RNA, 23 nt, Artificial Sequence
  Synthetic
gcaguuccaggaugacaccaugu

SEQ ID NO: 664062 - RNA, 24 nt, Artificial Sequence
  Synthetic
ggcaguuccaggaugacaccaugu

SEQ ID NO: 664063 - RNA, 18 nt, Artificial Sequence
  Synthetic
uugugggagggaccaugu

SEQ ID NO: 664064 - RNA, 19 nt, Artificial Sequence
  Synthetic
guugugggagggaccaugu

SEQ ID NO: 664065 - RNA, 20 nt, Artificial Sequence
  Synthetic
uguugugggagggaccaugu

SEQ ID NO: 664066 - RNA, 21 nt, Artificial Sequence
  Synthetic
guguugugggagggaccaugu

SEQ ID NO: 664067 - RNA, 22 nt, Artificial Sequence
  Synthetic
cguguugugggagggaccaugu

SEQ ID NO: 664068 - RNA, 23 nt, Artificial Sequence
  Synthetic
acguguugugggagggaccaugu

SEQ ID NO: 664069 - RNA, 24 nt, Artificial Sequence
  Synthetic
cacguguugugggagggaccaugu

SEQ ID NO: 664070 - RNA, 18 nt, Artificial Sequence
  Synthetic
guuuccaagugaccaugu

SEQ ID NO: 664071 - RNA, 19 nt, Artificial Sequence
  Synthetic
gguuuccaagugaccaugu

SEQ ID NO: 664072 - RNA, 20 nt, Artificial Sequence
  Synthetic
ggguuuccaagugaccaugu

SEQ ID NO: 664073 - RNA, 21 nt, Artificial Sequence
  Synthetic
uggguuuccaagugaccaugu

SEQ ID NO: 664074 - RNA, 22 nt, Artificial Sequence
  Synthetic
cuggguuuccaagugaccaugu

SEQ ID NO: 664075 - RNA, 23 nt, Artificial Sequence
  Synthetic
ucuggguuuccaagugaccaugu

SEQ ID NO: 664076 - RNA, 24 nt, Artificial Sequence
  Synthetic
gucuggguuuccaagugaccaugu

SEQ ID NO: 664077 - RNA, 18 nt, Artificial Sequence
  Synthetic
ugaaggcucuuaccaugu

SEQ ID NO: 664078 - RNA, 19 nt, Artificial Sequence
  Synthetic
cugaaggcucuuaccaugu

SEQ ID NO: 664079 - RNA, 20 nt, Artificial Sequence
  Synthetic
acugaaggcucuuaccaugu

SEQ ID NO: 664080 - RNA, 21 nt, Artificial Sequence
  Synthetic
aacugaaggcucuuaccaugu

SEQ ID NO: 664081 - RNA, 22 nt, Artificial Sequence
  Synthetic
aaacugaaggcucuuaccaugu

SEQ ID NO: 664082 - RNA, 23 nt, Artificial Sequence
  Synthetic
uaaacugaaggcucuuaccaugu

SEQ ID NO: 664083 - RNA, 24 nt, Artificial Sequence
  Synthetic
auaaacugaaggcucuuaccaugu

SEQ ID NO: 664084 - RNA, 18 nt, Artificial Sequence
  Synthetic
gguuuauuguccccaugu

SEQ ID NO: 664085 - RNA, 19 nt, Artificial Sequence
  Synthetic
ugguuuauuguccccaugu

SEQ ID NO: 664086 - RNA, 20 nt, Artificial Sequence
  Synthetic
augguuuauuguccccaugu

SEQ ID NO: 664087 - RNA, 21 nt, Artificial Sequence
  Synthetic
caugguuuauuguccccaugu

SEQ ID NO: 664088 - RNA, 22 nt, Artificial Sequence
  Synthetic
ucaugguuuauuguccccaugu

SEQ ID NO: 664089 - RNA, 23 nt, Artificial Sequence
  Synthetic
uucaugguuuauuguccccaugu

SEQ ID NO: 664090 - RNA, 24 nt, Artificial Sequence
  Synthetic
cuucaugguuuauuguccccaugu

SEQ ID NO: 664091 - RNA, 18 nt, Artificial Sequence
  Synthetic
aaucuggauaugccaugu

SEQ ID NO: 664092 - RNA, 19 nt, Artificial Sequence
  Synthetic
aaaucuggauaugccaugu

SEQ ID NO: 664093 - RNA, 20 nt, Artificial Sequence
  Synthetic
uaaaucuggauaugccaugu

SEQ ID NO: 664094 - RNA, 21 nt, Artificial Sequence
  Synthetic
auaaaucuggauaugccaugu

SEQ ID NO: 664095 - RNA, 22 nt, Artificial Sequence
  Synthetic
aauaaaucuggauaugccaugu

SEQ ID NO: 664096 - RNA, 23 nt, Artificial Sequence
  Synthetic
aaauaaaucuggauaugccaugu

SEQ ID NO: 664097 - RNA, 24 nt, Artificial Sequence
  Synthetic
uaaauaaaucuggauaugccaugu

SEQ ID NO: 664098 - RNA, 18 nt, Artificial Sequence
  Synthetic
ugaggcaaauugccaugu

SEQ ID NO: 664099 - RNA, 19 nt, Artificial Sequence
  Synthetic
augaggcaaauugccaugu

SEQ ID NO: 664100 - RNA, 20 nt, Artificial Sequence
  Synthetic
gaugaggcaaauugccaugu

SEQ ID NO: 664101 - RNA, 21 nt, Artificial Sequence
  Synthetic
ugaugaggcaaauugccaugu

SEQ ID NO: 664102 - RNA, 22 nt, Artificial Sequence
  Synthetic
uugaugaggcaaauugccaugu

SEQ ID NO: 664103 - RNA, 23 nt, Artificial Sequence
  Synthetic
uuugaugaggcaaauugccaugu

SEQ ID NO: 664104 - RNA, 24 nt, Artificial Sequence
  Synthetic
uuuugaugaggcaaauugccaugu

SEQ ID NO: 664105 - RNA, 18 nt, Artificial Sequence
  Synthetic
cuccagguccauccaugu

SEQ ID NO: 664106 - RNA, 19 nt, Artificial Sequence
  Synthetic
ccuccagguccauccaugu

SEQ ID NO: 664107 - RNA, 20 nt, Artificial Sequence
  Synthetic
uccuccagguccauccaugu

SEQ ID NO: 664108 - RNA, 21 nt, Artificial Sequence
  Synthetic
guccuccagguccauccaugu

SEQ ID NO: 664109 - RNA, 22 nt, Artificial Sequence
  Synthetic
gguccuccagguccauccaugu

SEQ ID NO: 664110 - RNA, 23 nt, Artificial Sequence
  Synthetic
agguccuccagguccauccaugu

SEQ ID NO: 664111 - RNA, 24 nt, Artificial Sequence
  Synthetic
aagguccuccagguccauccaugu

SEQ ID NO: 664112 - RNA, 18 nt, Artificial Sequence
  Synthetic
agagcaacaacagcaugu

SEQ ID NO: 664113 - RNA, 19 nt, Artificial Sequence
  Synthetic
gagagcaacaacagcaugu

SEQ ID NO: 664114 - RNA, 20 nt, Artificial Sequence
  Synthetic
cgagagcaacaacagcaugu

SEQ ID NO: 664115 - RNA, 21 nt, Artificial Sequence
  Synthetic
ucgagagcaacaacagcaugu

SEQ ID NO: 664116 - RNA, 22 nt, Artificial Sequence
  Synthetic
aucgagagcaacaacagcaugu

SEQ ID NO: 664117 - RNA, 23 nt, Artificial Sequence
  Synthetic
uaucgagagcaacaacagcaugu

SEQ ID NO: 664118 - RNA, 24 nt, Artificial Sequence
  Synthetic
uuaucgagagcaacaacagcaugu

SEQ ID NO: 664119 - RNA, 18 nt, Artificial Sequence
  Synthetic
ucggugagucuagcaugu

SEQ ID NO: 664120 - RNA, 19 nt, Artificial Sequence
  Synthetic
cucggugagucuagcaugu

SEQ ID NO: 664121 - RNA, 20 nt, Artificial Sequence
  Synthetic
acucggugagucuagcaugu

SEQ ID NO: 664122 - RNA, 21 nt, Artificial Sequence
  Synthetic
aacucggugagucuagcaugu

SEQ ID NO: 664123 - RNA, 22 nt, Artificial Sequence
  Synthetic
uaacucggugagucuagcaugu

SEQ ID NO: 664124 - RNA, 23 nt, Artificial Sequence
  Synthetic
uuaacucggugagucuagcaugu

SEQ ID NO: 664125 - RNA, 24 nt, Artificial Sequence
  Synthetic
auuaacucggugagucuagcaugu

SEQ ID NO: 664126 - RNA, 18 nt, Artificial Sequence
  Synthetic
uugaggacgcuggcaugu

SEQ ID NO: 664127 - RNA, 19 nt, Artificial Sequence
  Synthetic
auugaggacgcuggcaugu

SEQ ID NO: 664128 - RNA, 20 nt, Artificial Sequence
  Synthetic
uauugaggacgcuggcaugu

SEQ ID NO: 664129 - RNA, 21 nt, Artificial Sequence
  Synthetic
cuauugaggacgcuggcaugu

SEQ ID NO: 664130 - RNA, 22 nt, Artificial Sequence
  Synthetic
acuauugaggacgcuggcaugu

SEQ ID NO: 664131 - RNA, 23 nt, Artificial Sequence
  Synthetic
aacuauugaggacgcuggcaugu

SEQ ID NO: 664132 - RNA, 24 nt, Artificial Sequence
  Synthetic
caacuauugaggacgcuggcaugu

SEQ ID NO: 664133 - RNA, 18 nt, Artificial Sequence
  Synthetic
acaauaaaaguggcaugu

SEQ ID NO: 664134 - RNA, 19 nt, Artificial Sequence
  Synthetic
cacaauaaaaguggcaugu

SEQ ID NO: 664135 - RNA, 20 nt, Artificial Sequence
  Synthetic
ccacaauaaaaguggcaugu

SEQ ID NO: 664136 - RNA, 21 nt, Artificial Sequence
  Synthetic
gccacaauaaaaguggcaugu

SEQ ID NO: 664137 - RNA, 22 nt, Artificial Sequence
  Synthetic
ugccacaauaaaaguggcaugu

SEQ ID NO: 664138 - RNA, 23 nt, Artificial Sequence
  Synthetic
augccacaauaaaaguggcaugu

SEQ ID NO: 664139 - RNA, 24 nt, Artificial Sequence
  Synthetic
aaugccacaauaaaaguggcaugu

SEQ ID NO: 664140 - RNA, 18 nt, Artificial Sequence
  Synthetic
uccagagaggaugcaugu

SEQ ID NO: 664141 - RNA, 19 nt, Artificial Sequence
  Synthetic
auccagagaggaugcaugu

SEQ ID NO: 664142 - RNA, 20 nt, Artificial Sequence
  Synthetic
uauccagagaggaugcaugu

SEQ ID NO: 664143 - RNA, 21 nt, Artificial Sequence
  Synthetic
auauccagagaggaugcaugu

SEQ ID NO: 664144 - RNA, 22 nt, Artificial Sequence
  Synthetic
aauauccagagaggaugcaugu

SEQ ID NO: 664145 - RNA, 23 nt, Artificial Sequence
  Synthetic
aaauauccagagaggaugcaugu

SEQ ID NO: 664146 - RNA, 24 nt, Artificial Sequence
  Synthetic
uaaauauccagagaggaugcaugu

SEQ ID NO: 664147 - RNA, 18 nt, Artificial Sequence
  Synthetic
cuaugugugugugcaugu

SEQ ID NO: 664148 - RNA, 19 nt, Artificial Sequence
  Synthetic
ucuaugugugugugcaugu

SEQ ID NO: 664149 - RNA, 20 nt, Artificial Sequence
  Synthetic
uucuaugugugugugcaugu

SEQ ID NO: 664150 - RNA, 21 nt, Artificial Sequence
  Synthetic
uuucuaugugugugugcaugu

SEQ ID NO: 664151 - RNA, 22 nt, Artificial Sequence
  Synthetic
auuucuaugugugugugcaugu

SEQ ID NO: 664152 - RNA, 23 nt, Artificial Sequence
  Synthetic
aauuucuaugugugugugcaugu

SEQ ID NO: 664153 - RNA, 24 nt, Artificial Sequence
  Synthetic
caauuucuaugugugugugcaugu

SEQ ID NO: 664154 - RNA, 18 nt, Artificial Sequence
  Synthetic
uauuuucacagaucaugu

SEQ ID NO: 664155 - RNA, 19 nt, Artificial Sequence
  Synthetic
uuauuuucacagaucaugu

SEQ ID NO: 664156 - RNA, 20 nt, Artificial Sequence
  Synthetic
cuuauuuucacagaucaugu

SEQ ID NO: 664157 - RNA, 21 nt, Artificial Sequence
  Synthetic
ucuuauuuucacagaucaugu

SEQ ID NO: 664158 - RNA, 22 nt, Artificial Sequence
  Synthetic
uucuuauuuucacagaucaugu

SEQ ID NO: 664159 - RNA, 23 nt, Artificial Sequence
  Synthetic
auucuuauuuucacagaucaugu

SEQ ID NO: 664160 - RNA, 24 nt, Artificial Sequence
  Synthetic
cauucuuauuuucacagaucaugu

SEQ ID NO: 664161 - RNA, 18 nt, Artificial Sequence
  Synthetic
uuuucaugaggaucaugu

SEQ ID NO: 664162 - RNA, 19 nt, Artificial Sequence
  Synthetic
cuuuucaugaggaucaugu

SEQ ID NO: 664163 - RNA, 20 nt, Artificial Sequence
  Synthetic
ccuuuucaugaggaucaugu

SEQ ID NO: 664164 - RNA, 21 nt, Artificial Sequence
  Synthetic
accuuuucaugaggaucaugu

SEQ ID NO: 664165 - RNA, 22 nt, Artificial Sequence
  Synthetic
gaccuuuucaugaggaucaugu

SEQ ID NO: 664166 - RNA, 23 nt, Artificial Sequence
  Synthetic
ugaccuuuucaugaggaucaugu

SEQ ID NO: 664167 - RNA, 24 nt, Artificial Sequence
  Synthetic
uugaccuuuucaugaggaucaugu

SEQ ID NO: 664168 - RNA, 18 nt, Artificial Sequence
  Synthetic
cacaaauaaauaucaugu

SEQ ID NO: 664169 - RNA, 19 nt, Artificial Sequence
  Synthetic
ccacaaauaaauaucaugu

SEQ ID NO: 664170 - RNA, 20 nt, Artificial Sequence
  Synthetic
gccacaaauaaauaucaugu

SEQ ID NO: 664171 - RNA, 21 nt, Artificial Sequence
  Synthetic
agccacaaauaaauaucaugu

SEQ ID NO: 664172 - RNA, 22 nt, Artificial Sequence
  Synthetic
uagccacaaauaaauaucaugu

SEQ ID NO: 664173 - RNA, 23 nt, Artificial Sequence
  Synthetic
guagccacaaauaaauaucaugu

SEQ ID NO: 664174 - RNA, 24 nt, Artificial Sequence
  Synthetic
aguagccacaaauaaauaucaugu

SEQ ID NO: 664175 - RNA, 18 nt, Artificial Sequence
  Synthetic
caauaauucuuaucaugu

SEQ ID NO: 664176 - RNA, 19 nt, Artificial Sequence
  Synthetic
gcaauaauucuuaucaugu

SEQ ID NO: 664177 - RNA, 20 nt, Artificial Sequence
  Synthetic
ggcaauaauucuuaucaugu

SEQ ID NO: 664178 - RNA, 21 nt, Artificial Sequence
  Synthetic
uggcaauaauucuuaucaugu

SEQ ID NO: 664179 - RNA, 22 nt, Artificial Sequence
  Synthetic
auggcaauaauucuuaucaugu

SEQ ID NO: 664180 - RNA, 23 nt, Artificial Sequence
  Synthetic
aauggcaauaauucuuaucaugu

SEQ ID NO: 664181 - RNA, 24 nt, Artificial Sequence
  Synthetic
aaauggcaauaauucuuaucaugu

SEQ ID NO: 664182 - RNA, 18 nt, Artificial Sequence
  Synthetic
uacuaauaacacucaugu

SEQ ID NO: 664183 - RNA, 19 nt, Artificial Sequence
  Synthetic
guacuaauaacacucaugu

SEQ ID NO: 664184 - RNA, 20 nt, Artificial Sequence
  Synthetic
gguacuaauaacacucaugu

SEQ ID NO: 664185 - RNA, 21 nt, Artificial Sequence
  Synthetic
ugguacuaauaacacucaugu

SEQ ID NO: 664186 - RNA, 22 nt, Artificial Sequence
  Synthetic
uugguacuaauaacacucaugu

SEQ ID NO: 664187 - RNA, 23 nt, Artificial Sequence
  Synthetic
cuugguacuaauaacacucaugu

SEQ ID NO: 664188 - RNA, 24 nt, Artificial Sequence
  Synthetic
ccuugguacuaauaacacucaugu

SEQ ID NO: 664189 - RNA, 18 nt, Artificial Sequence
  Synthetic
gugaugagacccucaugu

SEQ ID NO: 664190 - RNA, 19 nt, Artificial Sequence
  Synthetic
ggugaugagacccucaugu

SEQ ID NO: 664191 - RNA, 20 nt, Artificial Sequence
  Synthetic
gggugaugagacccucaugu

SEQ ID NO: 664192 - RNA, 21 nt, Artificial Sequence
  Synthetic
ggggugaugagacccucaugu

SEQ ID NO: 664193 - RNA, 22 nt, Artificial Sequence
  Synthetic
gggggugaugagacccucaugu

SEQ ID NO: 664194 - RNA, 23 nt, Artificial Sequence
  Synthetic
ggggggugaugagacccucaugu

SEQ ID NO: 664195 - RNA, 24 nt, Artificial Sequence
  Synthetic
uggggggugaugagacccucaugu

SEQ ID NO: 664196 - RNA, 18 nt, Artificial Sequence
  Synthetic
acagcaauuuccucaugu

SEQ ID NO: 664197 - RNA, 19 nt, Artificial Sequence
  Synthetic
gacagcaauuuccucaugu

SEQ ID NO: 664198 - RNA, 20 nt, Artificial Sequence
  Synthetic
ugacagcaauuuccucaugu

SEQ ID NO: 664199 - RNA, 21 nt, Artificial Sequence
  Synthetic
uugacagcaauuuccucaugu

SEQ ID NO: 664200 - RNA, 22 nt, Artificial Sequence
  Synthetic
guugacagcaauuuccucaugu

SEQ ID NO: 664201 - RNA, 23 nt, Artificial Sequence
  Synthetic
uguugacagcaauuuccucaugu

SEQ ID NO: 664202 - RNA, 24 nt, Artificial Sequence
  Synthetic
uuguugacagcaauuuccucaugu

SEQ ID NO: 664203 - RNA, 18 nt, Artificial Sequence
  Synthetic
aaaaagaaagucucaugu

SEQ ID NO: 664204 - RNA, 19 nt, Artificial Sequence
  Synthetic
caaaaagaaagucucaugu

SEQ ID NO: 664205 - RNA, 20 nt, Artificial Sequence
  Synthetic
acaaaaagaaagucucaugu

SEQ ID NO: 664206 - RNA, 21 nt, Artificial Sequence
  Synthetic
aacaaaaagaaagucucaugu

SEQ ID NO: 664207 - RNA, 22 nt, Artificial Sequence
  Synthetic
aaacaaaaagaaagucucaugu

SEQ ID NO: 664208 - RNA, 23 nt, Artificial Sequence
  Synthetic
aaaacaaaaagaaagucucaugu

SEQ ID NO: 664209 - RNA, 24 nt, Artificial Sequence
  Synthetic
caaaacaaaaagaaagucucaugu

SEQ ID NO: 664210 - RNA, 18 nt, Artificial Sequence
  Synthetic
ucuugccugcugucaugu

SEQ ID NO: 664211 - RNA, 19 nt, Artificial Sequence
  Synthetic
cucuugccugcugucaugu

SEQ ID NO: 664212 - RNA, 20 nt, Artificial Sequence
  Synthetic
ucucuugccugcugucaugu

SEQ ID NO: 664213 - RNA, 21 nt, Artificial Sequence
  Synthetic
cucucuugccugcugucaugu

SEQ ID NO: 664214 - RNA, 22 nt, Artificial Sequence
  Synthetic
gcucucuugccugcugucaugu

SEQ ID NO: 664215 - RNA, 23 nt, Artificial Sequence
  Synthetic
ugcucucuugccugcugucaugu

SEQ ID NO: 664216 - RNA, 24 nt, Artificial Sequence
  Synthetic
augcucucuugccugcugucaugu

SEQ ID NO: 664217 - RNA, 18 nt, Artificial Sequence
  Synthetic
aauccccaugugucaugu

SEQ ID NO: 664218 - RNA, 19 nt, Artificial Sequence
  Synthetic
uaauccccaugugucaugu

SEQ ID NO: 664219 - RNA, 20 nt, Artificial Sequence
  Synthetic
guaauccccaugugucaugu

SEQ ID NO: 664220 - RNA, 21 nt, Artificial Sequence
  Synthetic
uguaauccccaugugucaugu

SEQ ID NO: 664221 - RNA, 22 nt, Artificial Sequence
  Synthetic
cuguaauccccaugugucaugu

SEQ ID NO: 664222 - RNA, 23 nt, Artificial Sequence
  Synthetic
ccuguaauccccaugugucaugu

SEQ ID NO: 664223 - RNA, 24 nt, Artificial Sequence
  Synthetic
uccuguaauccccaugugucaugu

SEQ ID NO: 664224 - RNA, 18 nt, Artificial Sequence
  Synthetic
cuggcacauacuucaugu

SEQ ID NO: 664225 - RNA, 19 nt, Artificial Sequence
  Synthetic
ucuggcacauacuucaugu

SEQ ID NO: 664226 - RNA, 20 nt, Artificial Sequence
  Synthetic
cucuggcacauacuucaugu

SEQ ID NO: 664227 - RNA, 21 nt, Artificial Sequence
  Synthetic
acucuggcacauacuucaugu

SEQ ID NO: 664228 - RNA, 22 nt, Artificial Sequence
  Synthetic
gacucuggcacauacuucaugu

SEQ ID NO: 664229 - RNA, 23 nt, Artificial Sequence
  Synthetic
agacucuggcacauacuucaugu

SEQ ID NO: 664230 - RNA, 24 nt, Artificial Sequence
  Synthetic
uagacucuggcacauacuucaugu

SEQ ID NO: 664231 - RNA, 18 nt, Artificial Sequence
  Synthetic
cggcaucagccuucaugu

SEQ ID NO: 664232 - RNA, 19 nt, Artificial Sequence
  Synthetic
acggcaucagccuucaugu

SEQ ID NO: 664233 - RNA, 20 nt, Artificial Sequence
  Synthetic
gacggcaucagccuucaugu

SEQ ID NO: 664234 - RNA, 21 nt, Artificial Sequence
  Synthetic
ugacggcaucagccuucaugu

SEQ ID NO: 664235 - RNA, 22 nt, Artificial Sequence
  Synthetic
gugacggcaucagccuucaugu

SEQ ID NO: 664236 - RNA, 23 nt, Artificial Sequence
  Synthetic
ggugacggcaucagccuucaugu

SEQ ID NO: 664237 - RNA, 24 nt, Artificial Sequence
  Synthetic
gggugacggcaucagccuucaugu

SEQ ID NO: 664238 - RNA, 18 nt, Artificial Sequence
  Synthetic
uuaaaagaccuuucaugu

SEQ ID NO: 664239 - RNA, 19 nt, Artificial Sequence
  Synthetic
guuaaaagaccuuucaugu

SEQ ID NO: 664240 - RNA, 20 nt, Artificial Sequence
  Synthetic
aguuaaaagaccuuucaugu

SEQ ID NO: 664241 - RNA, 21 nt, Artificial Sequence
  Synthetic
caguuaaaagaccuuucaugu

SEQ ID NO: 664242 - RNA, 22 nt, Artificial Sequence
  Synthetic
acaguuaaaagaccuuucaugu

SEQ ID NO: 664243 - RNA, 23 nt, Artificial Sequence
  Synthetic
aacaguuaaaagaccuuucaugu

SEQ ID NO: 664244 - RNA, 24 nt, Artificial Sequence
  Synthetic
aaacaguuaaaagaccuuucaugu

SEQ ID NO: 664245 - RNA, 18 nt, Artificial Sequence
  Synthetic
guguuggugcuuucaugu

SEQ ID NO: 664246 - RNA, 19 nt, Artificial Sequence
  Synthetic
uguguuggugcuuucaugu

SEQ ID NO: 664247 - RNA, 20 nt, Artificial Sequence
  Synthetic
guguguuggugcuuucaugu

SEQ ID NO: 664248 - RNA, 21 nt, Artificial Sequence
  Synthetic
aguguguuggugcuuucaugu

SEQ ID NO: 664249 - RNA, 22 nt, Artificial Sequence
  Synthetic
caguguguuggugcuuucaugu

SEQ ID NO: 664250 - RNA, 23 nt, Artificial Sequence
  Synthetic
acaguguguuggugcuuucaugu

SEQ ID NO: 664251 - RNA, 24 nt, Artificial Sequence
  Synthetic
aacaguguguuggugcuuucaugu

SEQ ID NO: 664252 - RNA, 18 nt, Artificial Sequence
  Synthetic
uucagcagcaaaagaugu

SEQ ID NO: 664253 - RNA, 19 nt, Artificial Sequence
  Synthetic
uuucagcagcaaaagaugu

SEQ ID NO: 664254 - RNA, 20 nt, Artificial Sequence
  Synthetic
auuucagcagcaaaagaugu

SEQ ID NO: 664255 - RNA, 21 nt, Artificial Sequence
  Synthetic
uauuucagcagcaaaagaugu

SEQ ID NO: 664256 - RNA, 22 nt, Artificial Sequence
  Synthetic
uuauuucagcagcaaaagaugu

SEQ ID NO: 664257 - RNA, 23 nt, Artificial Sequence
  Synthetic
uuuauuucagcagcaaaagaugu

SEQ ID NO: 664258 - RNA, 24 nt, Artificial Sequence
  Synthetic
auuuauuucagcagcaaaagaugu

SEQ ID NO: 664259 - RNA, 18 nt, Artificial Sequence
  Synthetic
aauucuuugcaaagaugu

SEQ ID NO: 664260 - RNA, 19 nt, Artificial Sequence
  Synthetic
caauucuuugcaaagaugu

SEQ ID NO: 664261 - RNA, 20 nt, Artificial Sequence
  Synthetic
ucaauucuuugcaaagaugu

SEQ ID NO: 664262 - RNA, 21 nt, Artificial Sequence
  Synthetic
cucaauucuuugcaaagaugu

SEQ ID NO: 664263 - RNA, 22 nt, Artificial Sequence
  Synthetic
gcucaauucuuugcaaagaugu

SEQ ID NO: 664264 - RNA, 23 nt, Artificial Sequence
  Synthetic
ggcucaauucuuugcaaagaugu

SEQ ID NO: 664265 - RNA, 24 nt, Artificial Sequence
  Synthetic
aggcucaauucuuugcaaagaugu

SEQ ID NO: 664266 - RNA, 18 nt, Artificial Sequence
  Synthetic
uacuuauaugaaagaugu

SEQ ID NO: 664267 - RNA, 19 nt, Artificial Sequence
  Synthetic
auacuuauaugaaagaugu

SEQ ID NO: 664268 - RNA, 20 nt, Artificial Sequence
  Synthetic
uauacuuauaugaaagaugu

SEQ ID NO: 664269 - RNA, 21 nt, Artificial Sequence
  Synthetic
auauacuuauaugaaagaugu

SEQ ID NO: 664270 - RNA, 22 nt, Artificial Sequence
  Synthetic
uauauacuuauaugaaagaugu

SEQ ID NO: 664271 - RNA, 23 nt, Artificial Sequence
  Synthetic
auauauacuuauaugaaagaugu

SEQ ID NO: 664272 - RNA, 24 nt, Artificial Sequence
  Synthetic
uauauauacuuauaugaaagaugu

SEQ ID NO: 664273 - RNA, 18 nt, Artificial Sequence
  Synthetic
auguuggaagcaagaugu

SEQ ID NO: 664274 - RNA, 19 nt, Artificial Sequence
  Synthetic
uauguuggaagcaagaugu

SEQ ID NO: 664275 - RNA, 20 nt, Artificial Sequence
  Synthetic
uuauguuggaagcaagaugu

SEQ ID NO: 664276 - RNA, 21 nt, Artificial Sequence
  Synthetic
cuuauguuggaagcaagaugu

SEQ ID NO: 664277 - RNA, 22 nt, Artificial Sequence
  Synthetic
ucuuauguuggaagcaagaugu

SEQ ID NO: 664278 - RNA, 23 nt, Artificial Sequence
  Synthetic
uucuuauguuggaagcaagaugu

SEQ ID NO: 664279 - RNA, 24 nt, Artificial Sequence
  Synthetic
uuucuuauguuggaagcaagaugu

SEQ ID NO: 664280 - RNA, 18 nt, Artificial Sequence
  Synthetic
aucccuaaaagaagaugu

SEQ ID NO: 664281 - RNA, 19 nt, Artificial Sequence
  Synthetic
uaucccuaaaagaagaugu

SEQ ID NO: 664282 - RNA, 20 nt, Artificial Sequence
  Synthetic
uuaucccuaaaagaagaugu

SEQ ID NO: 664283 - RNA, 21 nt, Artificial Sequence
  Synthetic
guuaucccuaaaagaagaugu

SEQ ID NO: 664284 - RNA, 22 nt, Artificial Sequence
  Synthetic
uguuaucccuaaaagaagaugu

SEQ ID NO: 664285 - RNA, 23 nt, Artificial Sequence
  Synthetic
cuguuaucccuaaaagaagaugu

SEQ ID NO: 664286 - RNA, 24 nt, Artificial Sequence
  Synthetic
ccuguuaucccuaaaagaagaugu

SEQ ID NO: 664287 - RNA, 18 nt, Artificial Sequence
  Synthetic
cagaagacaggaagaugu

SEQ ID NO: 664288 - RNA, 19 nt, Artificial Sequence
  Synthetic
ucagaagacaggaagaugu

SEQ ID NO: 664289 - RNA, 20 nt, Artificial Sequence
  Synthetic
gucagaagacaggaagaugu

SEQ ID NO: 664290 - RNA, 21 nt, Artificial Sequence
  Synthetic
ggucagaagacaggaagaugu

SEQ ID NO: 664291 - RNA, 22 nt, Artificial Sequence
  Synthetic
gggucagaagacaggaagaugu

SEQ ID NO: 664292 - RNA, 23 nt, Artificial Sequence
  Synthetic
ggggucagaagacaggaagaugu

SEQ ID NO: 664293 - RNA, 24 nt, Artificial Sequence
  Synthetic
aggggucagaagacaggaagaugu

SEQ ID NO: 664294 - RNA, 18 nt, Artificial Sequence
  Synthetic
agagaggagggaagaugu

SEQ ID NO: 664295 - RNA, 19 nt, Artificial Sequence
  Synthetic
gagagaggagggaagaugu

SEQ ID NO: 664296 - RNA, 20 nt, Artificial Sequence
  Synthetic
agagagaggagggaagaugu

SEQ ID NO: 664297 - RNA, 21 nt, Artificial Sequence
  Synthetic
aagagagaggagggaagaugu

SEQ ID NO: 664298 - RNA, 22 nt, Artificial Sequence
  Synthetic
caagagagaggagggaagaugu

SEQ ID NO: 664299 - RNA, 23 nt, Artificial Sequence
  Synthetic
ucaagagagaggagggaagaugu

SEQ ID NO: 664300 - RNA, 24 nt, Artificial Sequence
  Synthetic
uucaagagagaggagggaagaugu

SEQ ID NO: 664301 - RNA, 18 nt, Artificial Sequence
  Synthetic
cuuucaguuauaagaugu

SEQ ID NO: 664302 - RNA, 19 nt, Artificial Sequence
  Synthetic
acuuucaguuauaagaugu

SEQ ID NO: 664303 - RNA, 20 nt, Artificial Sequence
  Synthetic
aacuuucaguuauaagaugu

SEQ ID NO: 664304 - RNA, 21 nt, Artificial Sequence
  Synthetic
aaacuuucaguuauaagaugu

SEQ ID NO: 664305 - RNA, 22 nt, Artificial Sequence
  Synthetic
caaacuuucaguuauaagaugu

SEQ ID NO: 664306 - RNA, 23 nt, Artificial Sequence
  Synthetic
acaaacuuucaguuauaagaugu

SEQ ID NO: 664307 - RNA, 24 nt, Artificial Sequence
  Synthetic
cacaaacuuucaguuauaagaugu

SEQ ID NO: 664308 - RNA, 18 nt, Artificial Sequence
  Synthetic
ggaaauguucuaagaugu

SEQ ID NO: 664309 - RNA, 19 nt, Artificial Sequence
  Synthetic
uggaaauguucuaagaugu

SEQ ID NO: 664310 - RNA, 20 nt, Artificial Sequence
  Synthetic
guggaaauguucuaagaugu

SEQ ID NO: 664311 - RNA, 21 nt, Artificial Sequence
  Synthetic
uguggaaauguucuaagaugu

SEQ ID NO: 664312 - RNA, 22 nt, Artificial Sequence
  Synthetic
uuguggaaauguucuaagaugu

SEQ ID NO: 664313 - RNA, 23 nt, Artificial Sequence
  Synthetic
uuuguggaaauguucuaagaugu

SEQ ID NO: 664314 - RNA, 24 nt, Artificial Sequence
  Synthetic
guuuguggaaauguucuaagaugu

SEQ ID NO: 664315 - RNA, 18 nt, Artificial Sequence
  Synthetic
ccuguagagaacagaugu

SEQ ID NO: 664316 - RNA, 19 nt, Artificial Sequence
  Synthetic
gccuguagagaacagaugu

SEQ ID NO: 664317 - RNA, 20 nt, Artificial Sequence
  Synthetic
agccuguagagaacagaugu

SEQ ID NO: 664318 - RNA, 21 nt, Artificial Sequence
  Synthetic
cagccuguagagaacagaugu

SEQ ID NO: 664319 - RNA, 22 nt, Artificial Sequence
  Synthetic
acagccuguagagaacagaugu

SEQ ID NO: 664320 - RNA, 23 nt, Artificial Sequence
  Synthetic
gacagccuguagagaacagaugu

SEQ ID NO: 664321 - RNA, 24 nt, Artificial Sequence
  Synthetic
ugacagccuguagagaacagaugu

SEQ ID NO: 664322 - RNA, 18 nt, Artificial Sequence
  Synthetic
uuagaaauggacagaugu

SEQ ID NO: 664323 - RNA, 19 nt, Artificial Sequence
  Synthetic
guuagaaauggacagaugu

SEQ ID NO: 664324 - RNA, 20 nt, Artificial Sequence
  Synthetic
gguuagaaauggacagaugu

SEQ ID NO: 664325 - RNA, 21 nt, Artificial Sequence
  Synthetic
ugguuagaaauggacagaugu

SEQ ID NO: 664326 - RNA, 22 nt, Artificial Sequence
  Synthetic
augguuagaaauggacagaugu

SEQ ID NO: 664327 - RNA, 23 nt, Artificial Sequence
  Synthetic
gaugguuagaaauggacagaugu

SEQ ID NO: 664328 - RNA, 24 nt, Artificial Sequence
  Synthetic
agaugguuagaaauggacagaugu

SEQ ID NO: 664329 - RNA, 18 nt, Artificial Sequence
  Synthetic
auugacaguuacagaugu

SEQ ID NO: 664330 - RNA, 19 nt, Artificial Sequence
  Synthetic
aauugacaguuacagaugu

SEQ ID NO: 664331 - RNA, 20 nt, Artificial Sequence
  Synthetic
gaauugacaguuacagaugu

SEQ ID NO: 664332 - RNA, 21 nt, Artificial Sequence
  Synthetic
ugaauugacaguuacagaugu

SEQ ID NO: 664333 - RNA, 22 nt, Artificial Sequence
  Synthetic
uugaauugacaguuacagaugu

SEQ ID NO: 664334 - RNA, 23 nt, Artificial Sequence
  Synthetic
cuugaauugacaguuacagaugu

SEQ ID NO: 664335 - RNA, 24 nt, Artificial Sequence
  Synthetic
ccuugaauugacaguuacagaugu

SEQ ID NO: 664336 - RNA, 18 nt, Artificial Sequence
  Synthetic
auccaaguuuccagaugu

SEQ ID NO: 664337 - RNA, 19 nt, Artificial Sequence
  Synthetic
uauccaaguuuccagaugu

SEQ ID NO: 664338 - RNA, 20 nt, Artificial Sequence
  Synthetic
auauccaaguuuccagaugu

SEQ ID NO: 664339 - RNA, 21 nt, Artificial Sequence
  Synthetic
aauauccaaguuuccagaugu

SEQ ID NO: 664340 - RNA, 22 nt, Artificial Sequence
  Synthetic
caauauccaaguuuccagaugu

SEQ ID NO: 664341 - RNA, 23 nt, Artificial Sequence
  Synthetic
acaauauccaaguuuccagaugu

SEQ ID NO: 664342 - RNA, 24 nt, Artificial Sequence
  Synthetic
aacaauauccaaguuuccagaugu

SEQ ID NO: 664343 - RNA, 18 nt, Artificial Sequence
  Synthetic
aguaugcuaagcagaugu

SEQ ID NO: 664344 - RNA, 19 nt, Artificial Sequence
  Synthetic
aaguaugcuaagcagaugu

SEQ ID NO: 664345 - RNA, 20 nt, Artificial Sequence
  Synthetic
aaaguaugcuaagcagaugu

SEQ ID NO: 664346 - RNA, 21 nt, Artificial Sequence
  Synthetic
caaaguaugcuaagcagaugu

SEQ ID NO: 664347 - RNA, 22 nt, Artificial Sequence
  Synthetic
ucaaaguaugcuaagcagaugu

SEQ ID NO: 664348 - RNA, 23 nt, Artificial Sequence
  Synthetic
uucaaaguaugcuaagcagaugu

SEQ ID NO: 664349 - RNA, 24 nt, Artificial Sequence
  Synthetic
cuucaaaguaugcuaagcagaugu

SEQ ID NO: 664350 - RNA, 18 nt, Artificial Sequence
  Synthetic
cuuauuucacgcagaugu

SEQ ID NO: 664351 - RNA, 19 nt, Artificial Sequence
  Synthetic
acuuauuucacgcagaugu

SEQ ID NO: 664352 - RNA, 20 nt, Artificial Sequence
  Synthetic
aacuuauuucacgcagaugu

SEQ ID NO: 664353 - RNA, 21 nt, Artificial Sequence
  Synthetic
aaacuuauuucacgcagaugu

SEQ ID NO: 664354 - RNA, 22 nt, Artificial Sequence
  Synthetic
gaaacuuauuucacgcagaugu

SEQ ID NO: 664355 - RNA, 23 nt, Artificial Sequence
  Synthetic
ugaaacuuauuucacgcagaugu

SEQ ID NO: 664356 - RNA, 24 nt, Artificial Sequence
  Synthetic
uugaaacuuauuucacgcagaugu

SEQ ID NO: 664357 - RNA, 18 nt, Artificial Sequence
  Synthetic
cauguggaaaucagaugu

SEQ ID NO: 664358 - RNA, 19 nt, Artificial Sequence
  Synthetic
ccauguggaaaucagaugu

SEQ ID NO: 664359 - RNA, 20 nt, Artificial Sequence
  Synthetic
uccauguggaaaucagaugu

SEQ ID NO: 664360 - RNA, 21 nt, Artificial Sequence
  Synthetic
auccauguggaaaucagaugu

SEQ ID NO: 664361 - RNA, 22 nt, Artificial Sequence
  Synthetic
aauccauguggaaaucagaugu

SEQ ID NO: 664362 - RNA, 23 nt, Artificial Sequence
  Synthetic
uaauccauguggaaaucagaugu

SEQ ID NO: 664363 - RNA, 24 nt, Artificial Sequence
  Synthetic
auaauccauguggaaaucagaugu

SEQ ID NO: 664364 - RNA, 18 nt, Artificial Sequence
  Synthetic
uacaaggaaaagagaugu

SEQ ID NO: 664365 - RNA, 19 nt, Artificial Sequence
  Synthetic
uuacaaggaaaagagaugu

SEQ ID NO: 664366 - RNA, 20 nt, Artificial Sequence
  Synthetic
guuacaaggaaaagagaugu

SEQ ID NO: 664367 - RNA, 21 nt, Artificial Sequence
  Synthetic
aguuacaaggaaaagagaugu

SEQ ID NO: 664368 - RNA, 22 nt, Artificial Sequence
  Synthetic
gaguuacaaggaaaagagaugu

SEQ ID NO: 664369 - RNA, 23 nt, Artificial Sequence
  Synthetic
agaguuacaaggaaaagagaugu

SEQ ID NO: 664370 - RNA, 24 nt, Artificial Sequence
  Synthetic
uagaguuacaaggaaaagagaugu

SEQ ID NO: 664371 - RNA, 18 nt, Artificial Sequence
  Synthetic
uuuaaacuugugagaugu

SEQ ID NO: 664372 - RNA, 19 nt, Artificial Sequence
  Synthetic
uuuuaaacuugugagaugu

SEQ ID NO: 664373 - RNA, 20 nt, Artificial Sequence
  Synthetic
auuuuaaacuugugagaugu

SEQ ID NO: 664374 - RNA, 21 nt, Artificial Sequence
  Synthetic
cauuuuaaacuugugagaugu

SEQ ID NO: 664375 - RNA, 22 nt, Artificial Sequence
  Synthetic
acauuuuaaacuugugagaugu

SEQ ID NO: 664376 - RNA, 23 nt, Artificial Sequence
  Synthetic
uacauuuuaaacuugugagaugu

SEQ ID NO: 664377 - RNA, 24 nt, Artificial Sequence
  Synthetic
uuacauuuuaaacuugugagaugu

SEQ ID NO: 664378 - RNA, 18 nt, Artificial Sequence
  Synthetic
ugccuaaaacauagaugu

SEQ ID NO: 664379 - RNA, 19 nt, Artificial Sequence
  Synthetic
uugccuaaaacauagaugu

SEQ ID NO: 664380 - RNA, 20 nt, Artificial Sequence
  Synthetic
uuugccuaaaacauagaugu

SEQ ID NO: 664381 - RNA, 21 nt, Artificial Sequence
  Synthetic
uuuugccuaaaacauagaugu

SEQ ID NO: 664382 - RNA, 22 nt, Artificial Sequence
  Synthetic
auuuugccuaaaacauagaugu

SEQ ID NO: 664383 - RNA, 23 nt, Artificial Sequence
  Synthetic
aauuuugccuaaaacauagaugu

SEQ ID NO: 664384 - RNA, 24 nt, Artificial Sequence
  Synthetic
aaauuuugccuaaaacauagaugu

SEQ ID NO: 664385 - RNA, 18 nt, Artificial Sequence
  Synthetic
ccgcggacuaguagaugu

SEQ ID NO: 664386 - RNA, 19 nt, Artificial Sequence
  Synthetic
accgcggacuaguagaugu

SEQ ID NO: 664387 - RNA, 20 nt, Artificial Sequence
  Synthetic
uaccgcggacuaguagaugu

SEQ ID NO: 664388 - RNA, 21 nt, Artificial Sequence
  Synthetic
auaccgcggacuaguagaugu

SEQ ID NO: 664389 - RNA, 22 nt, Artificial Sequence
  Synthetic
gauaccgcggacuaguagaugu

SEQ ID NO: 664390 - RNA, 23 nt, Artificial Sequence
  Synthetic
agauaccgcggacuaguagaugu

SEQ ID NO: 664391 - RNA, 24 nt, Artificial Sequence
  Synthetic
cagauaccgcggacuaguagaugu

SEQ ID NO: 664392 - RNA, 18 nt, Artificial Sequence
  Synthetic
aggucuccauuuagaugu

SEQ ID NO: 664393 - RNA, 19 nt, Artificial Sequence
  Synthetic
uaggucuccauuuagaugu

SEQ ID NO: 664394 - RNA, 20 nt, Artificial Sequence
  Synthetic
uuaggucuccauuuagaugu

SEQ ID NO: 664395 - RNA, 21 nt, Artificial Sequence
  Synthetic
cuuaggucuccauuuagaugu

SEQ ID NO: 664396 - RNA, 22 nt, Artificial Sequence
  Synthetic
ucuuaggucuccauuuagaugu

SEQ ID NO: 664397 - RNA, 23 nt, Artificial Sequence
  Synthetic
cucuuaggucuccauuuagaugu

SEQ ID NO: 664398 - RNA, 24 nt, Artificial Sequence
  Synthetic
ucucuuaggucuccauuuagaugu

SEQ ID NO: 664399 - RNA, 18 nt, Artificial Sequence
  Synthetic
gcuugguuuuaaggaugu

SEQ ID NO: 664400 - RNA, 19 nt, Artificial Sequence
  Synthetic
ugcuugguuuuaaggaugu

SEQ ID NO: 664401 - RNA, 20 nt, Artificial Sequence
  Synthetic
uugcuugguuuuaaggaugu

SEQ ID NO: 664402 - RNA, 21 nt, Artificial Sequence
  Synthetic
uuugcuugguuuuaaggaugu

SEQ ID NO: 664403 - RNA, 22 nt, Artificial Sequence
  Synthetic
cuuugcuugguuuuaaggaugu

SEQ ID NO: 664404 - RNA, 23 nt, Artificial Sequence
  Synthetic
ccuuugcuugguuuuaaggaugu

SEQ ID NO: 664405 - RNA, 24 nt, Artificial Sequence
  Synthetic
cccuuugcuugguuuuaaggaugu

SEQ ID NO: 664406 - RNA, 18 nt, Artificial Sequence
  Synthetic
ugauuuagagcaggaugu

SEQ ID NO: 664407 - RNA, 19 nt, Artificial Sequence
  Synthetic
cugauuuagagcaggaugu

SEQ ID NO: 664408 - RNA, 20 nt, Artificial Sequence
  Synthetic
ccugauuuagagcaggaugu

SEQ ID NO: 664409 - RNA, 21 nt, Artificial Sequence
  Synthetic
uccugauuuagagcaggaugu

SEQ ID NO: 664410 - RNA, 22 nt, Artificial Sequence
  Synthetic
guccugauuuagagcaggaugu

SEQ ID NO: 664411 - RNA, 23 nt, Artificial Sequence
  Synthetic
aguccugauuuagagcaggaugu

SEQ ID NO: 664412 - RNA, 24 nt, Artificial Sequence
  Synthetic
caguccugauuuagagcaggaugu

SEQ ID NO: 664413 - RNA, 18 nt, Artificial Sequence
  Synthetic
agagaaacaucaggaugu

SEQ ID NO: 664414 - RNA, 19 nt, Artificial Sequence
  Synthetic
uagagaaacaucaggaugu

SEQ ID NO: 664415 - RNA, 20 nt, Artificial Sequence
  Synthetic
cuagagaaacaucaggaugu

SEQ ID NO: 664416 - RNA, 21 nt, Artificial Sequence
  Synthetic
ccuagagaaacaucaggaugu

SEQ ID NO: 664417 - RNA, 22 nt, Artificial Sequence
  Synthetic
uccuagagaaacaucaggaugu

SEQ ID NO: 664418 - RNA, 23 nt, Artificial Sequence
  Synthetic
guccuagagaaacaucaggaugu

SEQ ID NO: 664419 - RNA, 24 nt, Artificial Sequence
  Synthetic
uguccuagagaaacaucaggaugu

SEQ ID NO: 664420 - RNA, 18 nt, Artificial Sequence
  Synthetic
cuguguuacucaggaugu

SEQ ID NO: 664421 - RNA, 19 nt, Artificial Sequence
  Synthetic
ccuguguuacucaggaugu

SEQ ID NO: 664422 - RNA, 20 nt, Artificial Sequence
  Synthetic
uccuguguuacucaggaugu

SEQ ID NO: 664423 - RNA, 21 nt, Artificial Sequence
  Synthetic
uuccuguguuacucaggaugu

SEQ ID NO: 664424 - RNA, 22 nt, Artificial Sequence
  Synthetic
uuuccuguguuacucaggaugu

SEQ ID NO: 664425 - RNA, 23 nt, Artificial Sequence
  Synthetic
auuuccuguguuacucaggaugu

SEQ ID NO: 664426 - RNA, 24 nt, Artificial Sequence
  Synthetic
gauuuccuguguuacucaggaugu

SEQ ID NO: 664427 - RNA, 18 nt, Artificial Sequence
  Synthetic
cuagauuucagaggaugu

SEQ ID NO: 664428 - RNA, 19 nt, Artificial Sequence
  Synthetic
ccuagauuucagaggaugu

SEQ ID NO: 664429 - RNA, 20 nt, Artificial Sequence
  Synthetic
gccuagauuucagaggaugu

SEQ ID NO: 664430 - RNA, 21 nt, Artificial Sequence
  Synthetic
ugccuagauuucagaggaugu

SEQ ID NO: 664431 - RNA, 22 nt, Artificial Sequence
  Synthetic
cugccuagauuucagaggaugu

SEQ ID NO: 664432 - RNA, 23 nt, Artificial Sequence
  Synthetic
ucugccuagauuucagaggaugu

SEQ ID NO: 664433 - RNA, 24 nt, Artificial Sequence
  Synthetic
cucugccuagauuucagaggaugu

SEQ ID NO: 664434 - RNA, 18 nt, Artificial Sequence
  Synthetic
aaacaauguugcggaugu

SEQ ID NO: 664435 - RNA, 19 nt, Artificial Sequence
  Synthetic
aaaacaauguugcggaugu

SEQ ID NO: 664436 - RNA, 20 nt, Artificial Sequence
  Synthetic
aaaaacaauguugcggaugu

SEQ ID NO: 664437 - RNA, 21 nt, Artificial Sequence
  Synthetic
gaaaaacaauguugcggaugu

SEQ ID NO: 664438 - RNA, 22 nt, Artificial Sequence
  Synthetic
agaaaaacaauguugcggaugu

SEQ ID NO: 664439 - RNA, 23 nt, Artificial Sequence
  Synthetic
aagaaaaacaauguugcggaugu

SEQ ID NO: 664440 - RNA, 24 nt, Artificial Sequence
  Synthetic
aaagaaaaacaauguugcggaugu

SEQ ID NO: 664441 - RNA, 18 nt, Artificial Sequence
  Synthetic
auucccucuaagggaugu

SEQ ID NO: 664442 - RNA, 19 nt, Artificial Sequence
  Synthetic
cauucccucuaagggaugu

SEQ ID NO: 664443 - RNA, 20 nt, Artificial Sequence
  Synthetic
gcauucccucuaagggaugu

SEQ ID NO: 664444 - RNA, 21 nt, Artificial Sequence
  Synthetic
ugcauucccucuaagggaugu

SEQ ID NO: 664445 - RNA, 22 nt, Artificial Sequence
  Synthetic
uugcauucccucuaagggaugu

SEQ ID NO: 664446 - RNA, 23 nt, Artificial Sequence
  Synthetic
cuugcauucccucuaagggaugu

SEQ ID NO: 664447 - RNA, 24 nt, Artificial Sequence
  Synthetic
gcuugcauucccucuaagggaugu

SEQ ID NO: 664448 - RNA, 18 nt, Artificial Sequence
  Synthetic
ugugggcuccugggaugu

SEQ ID NO: 664449 - RNA, 19 nt, Artificial Sequence
  Synthetic
cugugggcuccugggaugu

SEQ ID NO: 664450 - RNA, 20 nt, Artificial Sequence
  Synthetic
ucugugggcuccugggaugu

SEQ ID NO: 664451 - RNA, 21 nt, Artificial Sequence
  Synthetic
aucugugggcuccugggaugu

SEQ ID NO: 664452 - RNA, 22 nt, Artificial Sequence
  Synthetic
aaucugugggcuccugggaugu

SEQ ID NO: 664453 - RNA, 23 nt, Artificial Sequence
  Synthetic
aaaucugugggcuccugggaugu

SEQ ID NO: 664454 - RNA, 24 nt, Artificial Sequence
  Synthetic
aaaaucugugggcuccugggaugu

SEQ ID NO: 664455 - RNA, 18 nt, Artificial Sequence
  Synthetic
cacaaccucgugggaugu

SEQ ID NO: 664456 - RNA, 19 nt, Artificial Sequence
  Synthetic
ccacaaccucgugggaugu

SEQ ID NO: 664457 - RNA, 20 nt, Artificial Sequence
  Synthetic
cccacaaccucgugggaugu

SEQ ID NO: 664458 - RNA, 21 nt, Artificial Sequence
  Synthetic
gcccacaaccucgugggaugu

SEQ ID NO: 664459 - RNA, 22 nt, Artificial Sequence
  Synthetic
ugcccacaaccucgugggaugu

SEQ ID NO: 664460 - RNA, 23 nt, Artificial Sequence
  Synthetic
uugcccacaaccucgugggaugu

SEQ ID NO: 664461 - RNA, 24 nt, Artificial Sequence
  Synthetic
cuugcccacaaccucgugggaugu

SEQ ID NO: 664462 - RNA, 18 nt, Artificial Sequence
  Synthetic
gugcucuacacuggaugu

SEQ ID NO: 664463 - RNA, 19 nt, Artificial Sequence
  Synthetic
agugcucuacacuggaugu

SEQ ID NO: 664464 - RNA, 20 nt, Artificial Sequence
  Synthetic
uagugcucuacacuggaugu

SEQ ID NO: 664465 - RNA, 21 nt, Artificial Sequence
  Synthetic
auagugcucuacacuggaugu

SEQ ID NO: 664466 - RNA, 22 nt, Artificial Sequence
  Synthetic
uauagugcucuacacuggaugu

SEQ ID NO: 664467 - RNA, 23 nt, Artificial Sequence
  Synthetic
guauagugcucuacacuggaugu

SEQ ID NO: 664468 - RNA, 24 nt, Artificial Sequence
  Synthetic
aguauagugcucuacacuggaugu

SEQ ID NO: 664469 - RNA, 18 nt, Artificial Sequence
  Synthetic
ucaguguuaccuggaugu

SEQ ID NO: 664470 - RNA, 19 nt, Artificial Sequence
  Synthetic
aucaguguuaccuggaugu

SEQ ID NO: 664471 - RNA, 20 nt, Artificial Sequence
  Synthetic
caucaguguuaccuggaugu

SEQ ID NO: 664472 - RNA, 21 nt, Artificial Sequence
  Synthetic
gcaucaguguuaccuggaugu

SEQ ID NO: 664473 - RNA, 22 nt, Artificial Sequence
  Synthetic
ugcaucaguguuaccuggaugu

SEQ ID NO: 664474 - RNA, 23 nt, Artificial Sequence
  Synthetic
uugcaucaguguuaccuggaugu

SEQ ID NO: 664475 - RNA, 24 nt, Artificial Sequence
  Synthetic
cuugcaucaguguuaccuggaugu

SEQ ID NO: 664476 - RNA, 18 nt, Artificial Sequence
  Synthetic
aagacucccaguggaugu

SEQ ID NO: 664477 - RNA, 19 nt, Artificial Sequence
  Synthetic
caagacucccaguggaugu

SEQ ID NO: 664478 - RNA, 20 nt, Artificial Sequence
  Synthetic
ccaagacucccaguggaugu

SEQ ID NO: 664479 - RNA, 21 nt, Artificial Sequence
  Synthetic
uccaagacucccaguggaugu

SEQ ID NO: 664480 - RNA, 22 nt, Artificial Sequence
  Synthetic
uuccaagacucccaguggaugu

SEQ ID NO: 664481 - RNA, 23 nt, Artificial Sequence
  Synthetic
auuccaagacucccaguggaugu

SEQ ID NO: 664482 - RNA, 24 nt, Artificial Sequence
  Synthetic
cauuccaagacucccaguggaugu

SEQ ID NO: 664483 - RNA, 18 nt, Artificial Sequence
  Synthetic
agccaggcguguggaugu

SEQ ID NO: 664484 - RNA, 19 nt, Artificial Sequence
  Synthetic
uagccaggcguguggaugu

SEQ ID NO: 664485 - RNA, 20 nt, Artificial Sequence
  Synthetic
guagccaggcguguggaugu

SEQ ID NO: 664486 - RNA, 21 nt, Artificial Sequence
  Synthetic
aguagccaggcguguggaugu

SEQ ID NO: 664487 - RNA, 22 nt, Artificial Sequence
  Synthetic
caguagccaggcguguggaugu

SEQ ID NO: 664488 - RNA, 23 nt, Artificial Sequence
  Synthetic
acaguagccaggcguguggaugu

SEQ ID NO: 664489 - RNA, 24 nt, Artificial Sequence
  Synthetic
aacaguagccaggcguguggaugu

SEQ ID NO: 664490 - RNA, 18 nt, Artificial Sequence
  Synthetic
caaaugcuacaaugaugu

SEQ ID NO: 664491 - RNA, 19 nt, Artificial Sequence
  Synthetic
ccaaaugcuacaaugaugu

SEQ ID NO: 664492 - RNA, 20 nt, Artificial Sequence
  Synthetic
uccaaaugcuacaaugaugu

SEQ ID NO: 664493 - RNA, 21 nt, Artificial Sequence
  Synthetic
uuccaaaugcuacaaugaugu

SEQ ID NO: 664494 - RNA, 22 nt, Artificial Sequence
  Synthetic
uuuccaaaugcuacaaugaugu

SEQ ID NO: 664495 - RNA, 23 nt, Artificial Sequence
  Synthetic
uuuuccaaaugcuacaaugaugu

SEQ ID NO: 664496 - RNA, 24 nt, Artificial Sequence
  Synthetic
auuuuccaaaugcuacaaugaugu

SEQ ID NO: 664497 - RNA, 18 nt, Artificial Sequence
  Synthetic
ugacauucucaaugaugu

SEQ ID NO: 664498 - RNA, 19 nt, Artificial Sequence
  Synthetic
uugacauucucaaugaugu

SEQ ID NO: 664499 - RNA, 20 nt, Artificial Sequence
  Synthetic
cuugacauucucaaugaugu

SEQ ID NO: 664500 - RNA, 21 nt, Artificial Sequence
  Synthetic
ucuugacauucucaaugaugu

SEQ ID NO: 664501 - RNA, 22 nt, Artificial Sequence
  Synthetic
uucuugacauucucaaugaugu

SEQ ID NO: 664502 - RNA, 23 nt, Artificial Sequence
  Synthetic
auucuugacauucucaaugaugu

SEQ ID NO: 664503 - RNA, 24 nt, Artificial Sequence
  Synthetic
aauucuugacauucucaaugaugu

SEQ ID NO: 664504 - RNA, 18 nt, Artificial Sequence
  Synthetic
gagagugaacacugaugu

SEQ ID NO: 664505 - RNA, 19 nt, Artificial Sequence
  Synthetic
agagagugaacacugaugu

SEQ ID NO: 664506 - RNA, 20 nt, Artificial Sequence
  Synthetic
uagagagugaacacugaugu

SEQ ID NO: 664507 - RNA, 21 nt, Artificial Sequence
  Synthetic
auagagagugaacacugaugu

SEQ ID NO: 664508 - RNA, 22 nt, Artificial Sequence
  Synthetic
uauagagagugaacacugaugu

SEQ ID NO: 664509 - RNA, 23 nt, Artificial Sequence
  Synthetic
cuauagagagugaacacugaugu

SEQ ID NO: 664510 - RNA, 24 nt, Artificial Sequence
  Synthetic
ucuauagagagugaacacugaugu

SEQ ID NO: 664511 - RNA, 18 nt, Artificial Sequence
  Synthetic
uacuugggaggcugaugu

SEQ ID NO: 664512 - RNA, 19 nt, Artificial Sequence
  Synthetic
cuacuugggaggcugaugu

SEQ ID NO: 664513 - RNA, 20 nt, Artificial Sequence
  Synthetic
gcuacuugggaggcugaugu

SEQ ID NO: 664514 - RNA, 21 nt, Artificial Sequence
  Synthetic
ggcuacuugggaggcugaugu

SEQ ID NO: 664515 - RNA, 22 nt, Artificial Sequence
  Synthetic
uggcuacuugggaggcugaugu

SEQ ID NO: 664516 - RNA, 23 nt, Artificial Sequence
  Synthetic
cuggcuacuugggaggcugaugu

SEQ ID NO: 664517 - RNA, 24 nt, Artificial Sequence
  Synthetic
ccuggcuacuugggaggcugaugu

SEQ ID NO: 664518 - RNA, 18 nt, Artificial Sequence
  Synthetic
aacuaauacuucugaugu

SEQ ID NO: 664519 - RNA, 19 nt, Artificial Sequence
  Synthetic
uaacuaauacuucugaugu

SEQ ID NO: 664520 - RNA, 20 nt, Artificial Sequence
  Synthetic
auaacuaauacuucugaugu

SEQ ID NO: 664521 - RNA, 21 nt, Artificial Sequence
  Synthetic
uauaacuaauacuucugaugu

SEQ ID NO: 664522 - RNA, 22 nt, Artificial Sequence
  Synthetic
auauaacuaauacuucugaugu

SEQ ID NO: 664523 - RNA, 23 nt, Artificial Sequence
  Synthetic
uauauaacuaauacuucugaugu

SEQ ID NO: 664524 - RNA, 24 nt, Artificial Sequence
  Synthetic
auauauaacuaauacuucugaugu

SEQ ID NO: 664525 - RNA, 18 nt, Artificial Sequence
  Synthetic
aauuuauccuugugaugu

SEQ ID NO: 664526 - RNA, 19 nt, Artificial Sequence
  Synthetic
aaauuuauccuugugaugu

SEQ ID NO: 664527 - RNA, 20 nt, Artificial Sequence
  Synthetic
aaaauuuauccuugugaugu

SEQ ID NO: 664528 - RNA, 21 nt, Artificial Sequence
  Synthetic
uaaaauuuauccuugugaugu

SEQ ID NO: 664529 - RNA, 22 nt, Artificial Sequence
  Synthetic
auaaaauuuauccuugugaugu

SEQ ID NO: 664530 - RNA, 23 nt, Artificial Sequence
  Synthetic
aauaaaauuuauccuugugaugu

SEQ ID NO: 664531 - RNA, 24 nt, Artificial Sequence
  Synthetic
gaauaaaauuuauccuugugaugu

SEQ ID NO: 664532 - RNA, 18 nt, Artificial Sequence
  Synthetic
aaaaguaaguugugaugu

SEQ ID NO: 664533 - RNA, 19 nt, Artificial Sequence
  Synthetic
aaaaaguaaguugugaugu

SEQ ID NO: 664534 - RNA, 20 nt, Artificial Sequence
  Synthetic
aaaaaaguaaguugugaugu

SEQ ID NO: 664535 - RNA, 21 nt, Artificial Sequence
  Synthetic
aaaaaaaguaaguugugaugu

SEQ ID NO: 664536 - RNA, 22 nt, Artificial Sequence
  Synthetic
aaaaaaaaguaaguugugaugu

SEQ ID NO: 664537 - RNA, 23 nt, Artificial Sequence
  Synthetic
aaaaaaaaaguaaguugugaugu

SEQ ID NO: 664538 - RNA, 24 nt, Artificial Sequence
  Synthetic
aaaaaaaaaaguaaguugugaugu

SEQ ID NO: 664539 - RNA, 18 nt, Artificial Sequence
  Synthetic
aaaaggaaauguugaugu

SEQ ID NO: 664540 - RNA, 19 nt, Artificial Sequence
  Synthetic
caaaaggaaauguugaugu

SEQ ID NO: 664541 - RNA, 20 nt, Artificial Sequence
  Synthetic
ucaaaaggaaauguugaugu

SEQ ID NO: 664542 - RNA, 21 nt, Artificial Sequence
  Synthetic
uucaaaaggaaauguugaugu

SEQ ID NO: 664543 - RNA, 22 nt, Artificial Sequence
  Synthetic
cuucaaaaggaaauguugaugu

SEQ ID NO: 664544 - RNA, 23 nt, Artificial Sequence
  Synthetic
acuucaaaaggaaauguugaugu

SEQ ID NO: 664545 - RNA, 24 nt, Artificial Sequence
  Synthetic
aacuucaaaaggaaauguugaugu

SEQ ID NO: 664546 - RNA, 18 nt, Artificial Sequence
  Synthetic
acuagugaaauuugaugu

SEQ ID NO: 664547 - RNA, 19 nt, Artificial Sequence
  Synthetic
gacuagugaaauuugaugu

SEQ ID NO: 664548 - RNA, 20 nt, Artificial Sequence
  Synthetic
ggacuagugaaauuugaugu

SEQ ID NO: 664549 - RNA, 21 nt, Artificial Sequence
  Synthetic
uggacuagugaaauuugaugu

SEQ ID NO: 664550 - RNA, 22 nt, Artificial Sequence
  Synthetic
cuggacuagugaaauuugaugu

SEQ ID NO: 664551 - RNA, 23 nt, Artificial Sequence
  Synthetic
gcuggacuagugaaauuugaugu

SEQ ID NO: 664552 - RNA, 24 nt, Artificial Sequence
  Synthetic
ggcuggacuagugaaauuugaugu

SEQ ID NO: 664553 - RNA, 18 nt, Artificial Sequence
  Synthetic
ucaguguaauuuugaugu

SEQ ID NO: 664554 - RNA, 19 nt, Artificial Sequence
  Synthetic
aucaguguaauuuugaugu

SEQ ID NO: 664555 - RNA, 20 nt, Artificial Sequence
  Synthetic
uaucaguguaauuuugaugu

SEQ ID NO: 664556 - RNA, 21 nt, Artificial Sequence
  Synthetic
guaucaguguaauuuugaugu

SEQ ID NO: 664557 - RNA, 22 nt, Artificial Sequence
  Synthetic
aguaucaguguaauuuugaugu

SEQ ID NO: 664558 - RNA, 23 nt, Artificial Sequence
  Synthetic
aaguaucaguguaauuuugaugu

SEQ ID NO: 664559 - RNA, 24 nt, Artificial Sequence
  Synthetic
aaaguaucaguguaauuuugaugu

SEQ ID NO: 664560 - RNA, 18 nt, Artificial Sequence
  Synthetic
gaaagaggggaaauaugu

SEQ ID NO: 664561 - RNA, 19 nt, Artificial Sequence
  Synthetic
agaaagaggggaaauaugu

SEQ ID NO: 664562 - RNA, 20 nt, Artificial Sequence
  Synthetic
aagaaagaggggaaauaugu

SEQ ID NO: 664563 - RNA, 21 nt, Artificial Sequence
  Synthetic
aaagaaagaggggaaauaugu

SEQ ID NO: 664564 - RNA, 22 nt, Artificial Sequence
  Synthetic
aaaagaaagaggggaaauaugu

SEQ ID NO: 664565 - RNA, 23 nt, Artificial Sequence
  Synthetic
uaaaagaaagaggggaaauaugu

SEQ ID NO: 664566 - RNA, 24 nt, Artificial Sequence
  Synthetic
guaaaagaaagaggggaaauaugu

SEQ ID NO: 664567 - RNA, 18 nt, Artificial Sequence
  Synthetic
uuuuacuuggaaauaugu

SEQ ID NO: 664568 - RNA, 19 nt, Artificial Sequence
  Synthetic
cuuuuacuuggaaauaugu

SEQ ID NO: 664569 - RNA, 20 nt, Artificial Sequence
  Synthetic
ccuuuuacuuggaaauaugu

SEQ ID NO: 664570 - RNA, 21 nt, Artificial Sequence
  Synthetic
accuuuuacuuggaaauaugu

SEQ ID NO: 664571 - RNA, 22 nt, Artificial Sequence
  Synthetic
uaccuuuuacuuggaaauaugu

SEQ ID NO: 664572 - RNA, 23 nt, Artificial Sequence
  Synthetic
auaccuuuuacuuggaaauaugu

SEQ ID NO: 664573 - RNA, 24 nt, Artificial Sequence
  Synthetic
aauaccuuuuacuuggaaauaugu

SEQ ID NO: 664574 - RNA, 18 nt, Artificial Sequence
  Synthetic
aauaaauacccaauaugu

SEQ ID NO: 664575 - RNA, 19 nt, Artificial Sequence
  Synthetic
caauaaauacccaauaugu

SEQ ID NO: 664576 - RNA, 20 nt, Artificial Sequence
  Synthetic
ucaauaaauacccaauaugu

SEQ ID NO: 664577 - RNA, 21 nt, Artificial Sequence
  Synthetic
gucaauaaauacccaauaugu

SEQ ID NO: 664578 - RNA, 22 nt, Artificial Sequence
  Synthetic
agucaauaaauacccaauaugu

SEQ ID NO: 664579 - RNA, 23 nt, Artificial Sequence
  Synthetic
gagucaauaaauacccaauaugu

SEQ ID NO: 664580 - RNA, 24 nt, Artificial Sequence
  Synthetic
ugagucaauaaauacccaauaugu

SEQ ID NO: 664581 - RNA, 18 nt, Artificial Sequence
  Synthetic
aauuauagagcaauaugu

SEQ ID NO: 664582 - RNA, 19 nt, Artificial Sequence
  Synthetic
aaauuauagagcaauaugu

SEQ ID NO: 664583 - RNA, 20 nt, Artificial Sequence
  Synthetic
uaaauuauagagcaauaugu

SEQ ID NO: 664584 - RNA, 21 nt, Artificial Sequence
  Synthetic
auaaauuauagagcaauaugu

SEQ ID NO: 664585 - RNA, 22 nt, Artificial Sequence
  Synthetic
aauaaauuauagagcaauaugu

SEQ ID NO: 664586 - RNA, 23 nt, Artificial Sequence
  Synthetic
aaauaaauuauagagcaauaugu

SEQ ID NO: 664587 - RNA, 24 nt, Artificial Sequence
  Synthetic
aaaauaaauuauagagcaauaugu

SEQ ID NO: 664588 - RNA, 18 nt, Artificial Sequence
  Synthetic
uaucaacccagaauaugu

SEQ ID NO: 664589 - RNA, 19 nt, Artificial Sequence
  Synthetic
auaucaacccagaauaugu

SEQ ID NO: 664590 - RNA, 20 nt, Artificial Sequence
  Synthetic
aauaucaacccagaauaugu

SEQ ID NO: 664591 - RNA, 21 nt, Artificial Sequence
  Synthetic
aaauaucaacccagaauaugu

SEQ ID NO: 664592 - RNA, 22 nt, Artificial Sequence
  Synthetic
gaaauaucaacccagaauaugu

SEQ ID NO: 664593 - RNA, 23 nt, Artificial Sequence
  Synthetic
agaaauaucaacccagaauaugu

SEQ ID NO: 664594 - RNA, 24 nt, Artificial Sequence
  Synthetic
gagaaauaucaacccagaauaugu

SEQ ID NO: 664595 - RNA, 18 nt, Artificial Sequence
  Synthetic
uccaaacaaugaauaugu

SEQ ID NO: 664596 - RNA, 19 nt, Artificial Sequence
  Synthetic
uuccaaacaaugaauaugu

SEQ ID NO: 664597 - RNA, 20 nt, Artificial Sequence
  Synthetic
cuuccaaacaaugaauaugu

SEQ ID NO: 664598 - RNA, 21 nt, Artificial Sequence
  Synthetic
ucuuccaaacaaugaauaugu

SEQ ID NO: 664599 - RNA, 22 nt, Artificial Sequence
  Synthetic
uucuuccaaacaaugaauaugu

SEQ ID NO: 664600 - RNA, 23 nt, Artificial Sequence
  Synthetic
uuucuuccaaacaaugaauaugu

SEQ ID NO: 664601 - RNA, 24 nt, Artificial Sequence
  Synthetic
auuucuuccaaacaaugaauaugu

SEQ ID NO: 664602 - RNA, 18 nt, Artificial Sequence
  Synthetic
aaaaaaugcauaauaugu

SEQ ID NO: 664603 - RNA, 19 nt, Artificial Sequence
  Synthetic
uaaaaaaugcauaauaugu

SEQ ID NO: 664604 - RNA, 20 nt, Artificial Sequence
  Synthetic
uuaaaaaaugcauaauaugu

SEQ ID NO: 664605 - RNA, 21 nt, Artificial Sequence
  Synthetic
uuuaaaaaaugcauaauaugu

SEQ ID NO: 664606 - RNA, 22 nt, Artificial Sequence
  Synthetic
guuuaaaaaaugcauaauaugu

SEQ ID NO: 664607 - RNA, 23 nt, Artificial Sequence
  Synthetic
aguuuaaaaaaugcauaauaugu

SEQ ID NO: 664608 - RNA, 24 nt, Artificial Sequence
  Synthetic
aaguuuaaaaaaugcauaauaugu

SEQ ID NO: 664609 - RNA, 18 nt, Artificial Sequence
  Synthetic
ggaaguaugaacauaugu

SEQ ID NO: 664610 - RNA, 19 nt, Artificial Sequence
  Synthetic
gggaaguaugaacauaugu

SEQ ID NO: 664611 - RNA, 20 nt, Artificial Sequence
  Synthetic
agggaaguaugaacauaugu

SEQ ID NO: 664612 - RNA, 21 nt, Artificial Sequence
  Synthetic
aagggaaguaugaacauaugu

SEQ ID NO: 664613 - RNA, 22 nt, Artificial Sequence
  Synthetic
aaagggaaguaugaacauaugu

SEQ ID NO: 664614 - RNA, 23 nt, Artificial Sequence
  Synthetic
caaagggaaguaugaacauaugu

SEQ ID NO: 664615 - RNA, 24 nt, Artificial Sequence
  Synthetic
gcaaagggaaguaugaacauaugu

SEQ ID NO: 664616 - RNA, 18 nt, Artificial Sequence
  Synthetic
uucugcaauaacauaugu

SEQ ID NO: 664617 - RNA, 19 nt, Artificial Sequence
  Synthetic
uuucugcaauaacauaugu

SEQ ID NO: 664618 - RNA, 20 nt, Artificial Sequence
  Synthetic
guuucugcaauaacauaugu

SEQ ID NO: 664619 - RNA, 21 nt, Artificial Sequence
  Synthetic
gguuucugcaauaacauaugu

SEQ ID NO: 664620 - RNA, 22 nt, Artificial Sequence
  Synthetic
agguuucugcaauaacauaugu

SEQ ID NO: 664621 - RNA, 23 nt, Artificial Sequence
  Synthetic
uagguuucugcaauaacauaugu

SEQ ID NO: 664622 - RNA, 24 nt, Artificial Sequence
  Synthetic
cuagguuucugcaauaacauaugu

SEQ ID NO: 664623 - RNA, 18 nt, Artificial Sequence
  Synthetic
aagauuguagacauaugu

SEQ ID NO: 664624 - RNA, 19 nt, Artificial Sequence
  Synthetic
aaagauuguagacauaugu

SEQ ID NO: 664625 - RNA, 20 nt, Artificial Sequence
  Synthetic
caaagauuguagacauaugu

SEQ ID NO: 664626 - RNA, 21 nt, Artificial Sequence
  Synthetic
ccaaagauuguagacauaugu

SEQ ID NO: 664627 - RNA, 22 nt, Artificial Sequence
  Synthetic
accaaagauuguagacauaugu

SEQ ID NO: 664628 - RNA, 23 nt, Artificial Sequence
  Synthetic
gaccaaagauuguagacauaugu

SEQ ID NO: 664629 - RNA, 24 nt, Artificial Sequence
  Synthetic
agaccaaagauuguagacauaugu

SEQ ID NO: 664630 - RNA, 18 nt, Artificial Sequence
  Synthetic
auuucuucucagauaugu

SEQ ID NO: 664631 - RNA, 19 nt, Artificial Sequence
  Synthetic
aauuucuucucagauaugu

SEQ ID NO: 664632 - RNA, 20 nt, Artificial Sequence
  Synthetic
gaauuucuucucagauaugu

SEQ ID NO: 664633 - RNA, 21 nt, Artificial Sequence
  Synthetic
agaauuucuucucagauaugu

SEQ ID NO: 664634 - RNA, 22 nt, Artificial Sequence
  Synthetic
aagaauuucuucucagauaugu

SEQ ID NO: 664635 - RNA, 23 nt, Artificial Sequence
  Synthetic
aaagaauuucuucucagauaugu

SEQ ID NO: 664636 - RNA, 24 nt, Artificial Sequence
  Synthetic
caaagaauuucuucucagauaugu

SEQ ID NO: 664637 - RNA, 18 nt, Artificial Sequence
  Synthetic
uaugauauuaggauaugu

SEQ ID NO: 664638 - RNA, 19 nt, Artificial Sequence
  Synthetic
uuaugauauuaggauaugu

SEQ ID NO: 664639 - RNA, 20 nt, Artificial Sequence
  Synthetic
auuaugauauuaggauaugu

SEQ ID NO: 664640 - RNA, 21 nt, Artificial Sequence
  Synthetic
gauuaugauauuaggauaugu

SEQ ID NO: 664641 - RNA, 22 nt, Artificial Sequence
  Synthetic
ugauuaugauauuaggauaugu

SEQ ID NO: 664642 - RNA, 23 nt, Artificial Sequence
  Synthetic
cugauuaugauauuaggauaugu

SEQ ID NO: 664643 - RNA, 24 nt, Artificial Sequence
  Synthetic
acugauuaugauauuaggauaugu

SEQ ID NO: 664644 - RNA, 18 nt, Artificial Sequence
  Synthetic
aggagcaaaaugauaugu

SEQ ID NO: 664645 - RNA, 19 nt, Artificial Sequence
  Synthetic
caggagcaaaaugauaugu

SEQ ID NO: 664646 - RNA, 20 nt, Artificial Sequence
  Synthetic
ccaggagcaaaaugauaugu

SEQ ID NO: 664647 - RNA, 21 nt, Artificial Sequence
  Synthetic
gccaggagcaaaaugauaugu

SEQ ID NO: 664648 - RNA, 22 nt, Artificial Sequence
  Synthetic
ggccaggagcaaaaugauaugu

SEQ ID NO: 664649 - RNA, 23 nt, Artificial Sequence
  Synthetic
gggccaggagcaaaaugauaugu

SEQ ID NO: 664650 - RNA, 24 nt, Artificial Sequence
  Synthetic
ggggccaggagcaaaaugauaugu

SEQ ID NO: 664651 - RNA, 18 nt, Artificial Sequence
  Synthetic
uucucuucaaugauaugu

SEQ ID NO: 664652 - RNA, 19 nt, Artificial Sequence
  Synthetic
uuucucuucaaugauaugu

SEQ ID NO: 664653 - RNA, 20 nt, Artificial Sequence
  Synthetic
uuuucucuucaaugauaugu

SEQ ID NO: 664654 - RNA, 21 nt, Artificial Sequence
  Synthetic
auuuucucuucaaugauaugu

SEQ ID NO: 664655 - RNA, 22 nt, Artificial Sequence
  Synthetic
cauuuucucuucaaugauaugu

SEQ ID NO: 664656 - RNA, 23 nt, Artificial Sequence
  Synthetic
ucauuuucucuucaaugauaugu

SEQ ID NO: 664657 - RNA, 24 nt, Artificial Sequence
  Synthetic
cucauuuucucuucaaugauaugu

SEQ ID NO: 664658 - RNA, 18 nt, Artificial Sequence
  Synthetic
acuuaaguguauauaugu

SEQ ID NO: 664659 - RNA, 19 nt, Artificial Sequence
  Synthetic
aacuuaaguguauauaugu

SEQ ID NO: 664660 - RNA, 20 nt, Artificial Sequence
  Synthetic
uaacuuaaguguauauaugu

SEQ ID NO: 664661 - RNA, 21 nt, Artificial Sequence
  Synthetic
auaacuuaaguguauauaugu

SEQ ID NO: 664662 - RNA, 22 nt, Artificial Sequence
  Synthetic
cauaacuuaaguguauauaugu

SEQ ID NO: 664663 - RNA, 23 nt, Artificial Sequence
  Synthetic
ccauaacuuaaguguauauaugu

SEQ ID NO: 664664 - RNA, 24 nt, Artificial Sequence
  Synthetic
accauaacuuaaguguauauaugu

SEQ ID NO: 664665 - RNA, 18 nt, Artificial Sequence
  Synthetic
guauguguguauauaugu

SEQ ID NO: 664666 - RNA, 19 nt, Artificial Sequence
  Synthetic
gguauguguguauauaugu

SEQ ID NO: 664667 - RNA, 20 nt, Artificial Sequence
  Synthetic
ggguauguguguauauaugu

SEQ ID NO: 664668 - RNA, 21 nt, Artificial Sequence
  Synthetic
gggguauguguguauauaugu

SEQ ID NO: 664669 - RNA, 22 nt, Artificial Sequence
  Synthetic
ugggguauguguguauauaugu

SEQ ID NO: 664670 - RNA, 23 nt, Artificial Sequence
  Synthetic
augggguauguguguauauaugu

SEQ ID NO: 664671 - RNA, 24 nt, Artificial Sequence
  Synthetic
uaugggguauguguguauauaugu

SEQ ID NO: 664672 - RNA, 18 nt, Artificial Sequence
  Synthetic
uucaauuuuucuauaugu

SEQ ID NO: 664673 - RNA, 19 nt, Artificial Sequence
  Synthetic
uuucaauuuuucuauaugu

SEQ ID NO: 664674 - RNA, 20 nt, Artificial Sequence
  Synthetic
guuucaauuuuucuauaugu

SEQ ID NO: 664675 - RNA, 21 nt, Artificial Sequence
  Synthetic
uguuucaauuuuucuauaugu

SEQ ID NO: 664676 - RNA, 22 nt, Artificial Sequence
  Synthetic
uuguuucaauuuuucuauaugu

SEQ ID NO: 664677 - RNA, 23 nt, Artificial Sequence
  Synthetic
auuguuucaauuuuucuauaugu

SEQ ID NO: 664678 - RNA, 24 nt, Artificial Sequence
  Synthetic
aauuguuucaauuuuucuauaugu

SEQ ID NO: 664679 - RNA, 18 nt, Artificial Sequence
  Synthetic
ucuagaaaacaacuaugu

SEQ ID NO: 664680 - RNA, 19 nt, Artificial Sequence
  Synthetic
uucuagaaaacaacuaugu

SEQ ID NO: 664681 - RNA, 20 nt, Artificial Sequence
  Synthetic
uuucuagaaaacaacuaugu

SEQ ID NO: 664682 - RNA, 21 nt, Artificial Sequence
  Synthetic
cuuucuagaaaacaacuaugu

SEQ ID NO: 664683 - RNA, 22 nt, Artificial Sequence
  Synthetic
ucuuucuagaaaacaacuaugu

SEQ ID NO: 664684 - RNA, 23 nt, Artificial Sequence
  Synthetic
uucuuucuagaaaacaacuaugu

SEQ ID NO: 664685 - RNA, 24 nt, Artificial Sequence
  Synthetic
uuucuuucuagaaaacaacuaugu

SEQ ID NO: 664686 - RNA, 18 nt, Artificial Sequence
  Synthetic
uuccuauggaagcuaugu

SEQ ID NO: 664687 - RNA, 19 nt, Artificial Sequence
  Synthetic
uuuccuauggaagcuaugu

SEQ ID NO: 664688 - RNA, 20 nt, Artificial Sequence
  Synthetic
uuuuccuauggaagcuaugu

SEQ ID NO: 664689 - RNA, 21 nt, Artificial Sequence
  Synthetic
uuuuuccuauggaagcuaugu

SEQ ID NO: 664690 - RNA, 22 nt, Artificial Sequence
  Synthetic
uuuuuuccuauggaagcuaugu

SEQ ID NO: 664691 - RNA, 23 nt, Artificial Sequence
  Synthetic
guuuuuuccuauggaagcuaugu

SEQ ID NO: 664692 - RNA, 24 nt, Artificial Sequence
  Synthetic
uguuuuuuccuauggaagcuaugu

SEQ ID NO: 664693 - RNA, 18 nt, Artificial Sequence
  Synthetic
uaaguagcacagcuaugu

SEQ ID NO: 664694 - RNA, 19 nt, Artificial Sequence
  Synthetic
auaaguagcacagcuaugu

SEQ ID NO: 664695 - RNA, 20 nt, Artificial Sequence
  Synthetic
uauaaguagcacagcuaugu

SEQ ID NO: 664696 - RNA, 21 nt, Artificial Sequence
  Synthetic
cuauaaguagcacagcuaugu

SEQ ID NO: 664697 - RNA, 22 nt, Artificial Sequence
  Synthetic
ucuauaaguagcacagcuaugu

SEQ ID NO: 664698 - RNA, 23 nt, Artificial Sequence
  Synthetic
gucuauaaguagcacagcuaugu

SEQ ID NO: 664699 - RNA, 24 nt, Artificial Sequence
  Synthetic
agucuauaaguagcacagcuaugu

SEQ ID NO: 664700 - RNA, 18 nt, Artificial Sequence
  Synthetic
cgauugauauagcuaugu

SEQ ID NO: 664701 - RNA, 19 nt, Artificial Sequence
  Synthetic
gcgauugauauagcuaugu

SEQ ID NO: 664702 - RNA, 20 nt, Artificial Sequence
  Synthetic
ggcgauugauauagcuaugu

SEQ ID NO: 664703 - RNA, 21 nt, Artificial Sequence
  Synthetic
gggcgauugauauagcuaugu

SEQ ID NO: 664704 - RNA, 22 nt, Artificial Sequence
  Synthetic
ggggcgauugauauagcuaugu

SEQ ID NO: 664705 - RNA, 23 nt, Artificial Sequence
  Synthetic
gggggcgauugauauagcuaugu

SEQ ID NO: 664706 - RNA, 24 nt, Artificial Sequence
  Synthetic
agggggcgauugauauagcuaugu

SEQ ID NO: 664707 - RNA, 18 nt, Artificial Sequence
  Synthetic
ugucucucuuugcuaugu

SEQ ID NO: 664708 - RNA, 19 nt, Artificial Sequence
  Synthetic
cugucucucuuugcuaugu

SEQ ID NO: 664709 - RNA, 20 nt, Artificial Sequence
  Synthetic
ucugucucucuuugcuaugu

SEQ ID NO: 664710 - RNA, 21 nt, Artificial Sequence
  Synthetic
cucugucucucuuugcuaugu

SEQ ID NO: 664711 - RNA, 22 nt, Artificial Sequence
  Synthetic
gcucugucucucuuugcuaugu

SEQ ID NO: 664712 - RNA, 23 nt, Artificial Sequence
  Synthetic
agcucugucucucuuugcuaugu

SEQ ID NO: 664713 - RNA, 24 nt, Artificial Sequence
  Synthetic
gagcucugucucucuuugcuaugu

SEQ ID NO: 664714 - RNA, 18 nt, Artificial Sequence
  Synthetic
ggcucagagaaucuaugu

SEQ ID NO: 664715 - RNA, 19 nt, Artificial Sequence
  Synthetic
uggcucagagaaucuaugu

SEQ ID NO: 664716 - RNA, 20 nt, Artificial Sequence
  Synthetic
uuggcucagagaaucuaugu

SEQ ID NO: 664717 - RNA, 21 nt, Artificial Sequence
  Synthetic
cuuggcucagagaaucuaugu

SEQ ID NO: 664718 - RNA, 22 nt, Artificial Sequence
  Synthetic
ucuuggcucagagaaucuaugu

SEQ ID NO: 664719 - RNA, 23 nt, Artificial Sequence
  Synthetic
cucuuggcucagagaaucuaugu

SEQ ID NO: 664720 - RNA, 24 nt, Artificial Sequence
  Synthetic
ucucuuggcucagagaaucuaugu

SEQ ID NO: 664721 - RNA, 18 nt, Artificial Sequence
  Synthetic
aggugccugucaguaugu

SEQ ID NO: 664722 - RNA, 19 nt, Artificial Sequence
  Synthetic
gaggugccugucaguaugu

SEQ ID NO: 664723 - RNA, 20 nt, Artificial Sequence
  Synthetic
cgaggugccugucaguaugu

SEQ ID NO: 664724 - RNA, 21 nt, Artificial Sequence
  Synthetic
ucgaggugccugucaguaugu

SEQ ID NO: 664725 - RNA, 22 nt, Artificial Sequence
  Synthetic
uucgaggugccugucaguaugu

SEQ ID NO: 664726 - RNA, 23 nt, Artificial Sequence
  Synthetic
guucgaggugccugucaguaugu

SEQ ID NO: 664727 - RNA, 24 nt, Artificial Sequence
  Synthetic
uguucgaggugccugucaguaugu

SEQ ID NO: 664728 - RNA, 18 nt, Artificial Sequence
  Synthetic
uaagcauugucaguaugu

SEQ ID NO: 664729 - RNA, 19 nt, Artificial Sequence
  Synthetic
guaagcauugucaguaugu

SEQ ID NO: 664730 - RNA, 20 nt, Artificial Sequence
  Synthetic
gguaagcauugucaguaugu

SEQ ID NO: 664731 - RNA, 21 nt, Artificial Sequence
  Synthetic
ugguaagcauugucaguaugu

SEQ ID NO: 664732 - RNA, 22 nt, Artificial Sequence
  Synthetic
augguaagcauugucaguaugu

SEQ ID NO: 664733 - RNA, 23 nt, Artificial Sequence
  Synthetic
aaugguaagcauugucaguaugu

SEQ ID NO: 664734 - RNA, 24 nt, Artificial Sequence
  Synthetic
aaaugguaagcauugucaguaugu

SEQ ID NO: 664735 - RNA, 18 nt, Artificial Sequence
  Synthetic
gauugucaugugguaugu

SEQ ID NO: 664736 - RNA, 19 nt, Artificial Sequence
  Synthetic
ugauugucaugugguaugu

SEQ ID NO: 664737 - RNA, 20 nt, Artificial Sequence
  Synthetic
augauugucaugugguaugu

SEQ ID NO: 664738 - RNA, 21 nt, Artificial Sequence
  Synthetic
aaugauugucaugugguaugu

SEQ ID NO: 664739 - RNA, 22 nt, Artificial Sequence
  Synthetic
aaaugauugucaugugguaugu

SEQ ID NO: 664740 - RNA, 23 nt, Artificial Sequence
  Synthetic
aaaaugauugucaugugguaugu

SEQ ID NO: 664741 - RNA, 24 nt, Artificial Sequence
  Synthetic
aaaaaugauugucaugugguaugu

SEQ ID NO: 664742 - RNA, 18 nt, Artificial Sequence
  Synthetic
uaacacaucacuguaugu

SEQ ID NO: 664743 - RNA, 19 nt, Artificial Sequence
  Synthetic
guaacacaucacuguaugu

SEQ ID NO: 664744 - RNA, 20 nt, Artificial Sequence
  Synthetic
aguaacacaucacuguaugu

SEQ ID NO: 664745 - RNA, 21 nt, Artificial Sequence
  Synthetic
aaguaacacaucacuguaugu

SEQ ID NO: 664746 - RNA, 22 nt, Artificial Sequence
  Synthetic
aaaguaacacaucacuguaugu

SEQ ID NO: 664747 - RNA, 23 nt, Artificial Sequence
  Synthetic
aaaaguaacacaucacuguaugu

SEQ ID NO: 664748 - RNA, 24 nt, Artificial Sequence
  Synthetic
aaaaaguaacacaucacuguaugu

SEQ ID NO: 664749 - RNA, 18 nt, Artificial Sequence
  Synthetic
gugaaacuagcuguaugu

SEQ ID NO: 664750 - RNA, 19 nt, Artificial Sequence
  Synthetic
ggugaaacuagcuguaugu

SEQ ID NO: 664751 - RNA, 20 nt, Artificial Sequence
  Synthetic
aggugaaacuagcuguaugu

SEQ ID NO: 664752 - RNA, 21 nt, Artificial Sequence
  Synthetic
caggugaaacuagcuguaugu

SEQ ID NO: 664753 - RNA, 22 nt, Artificial Sequence
  Synthetic
ucaggugaaacuagcuguaugu

SEQ ID NO: 664754 - RNA, 23 nt, Artificial Sequence
  Synthetic
uucaggugaaacuagcuguaugu

SEQ ID NO: 664755 - RNA, 24 nt, Artificial Sequence
  Synthetic
guucaggugaaacuagcuguaugu

SEQ ID NO: 664756 - RNA, 18 nt, Artificial Sequence
  Synthetic
gaucaugauucuguaugu

SEQ ID NO: 664757 - RNA, 19 nt, Artificial Sequence
  Synthetic
agaucaugauucuguaugu

SEQ ID NO: 664758 - RNA, 20 nt, Artificial Sequence
  Synthetic
gagaucaugauucuguaugu

SEQ ID NO: 664759 - RNA, 21 nt, Artificial Sequence
  Synthetic
agagaucaugauucuguaugu

SEQ ID NO: 664760 - RNA, 22 nt, Artificial Sequence
  Synthetic
gagagaucaugauucuguaugu

SEQ ID NO: 664761 - RNA, 23 nt, Artificial Sequence
  Synthetic
ugagagaucaugauucuguaugu

SEQ ID NO: 664762 - RNA, 24 nt, Artificial Sequence
  Synthetic
cugagagaucaugauucuguaugu

SEQ ID NO: 664763 - RNA, 18 nt, Artificial Sequence
  Synthetic
auggauaggaguguaugu

SEQ ID NO: 664764 - RNA, 19 nt, Artificial Sequence
  Synthetic
aauggauaggaguguaugu

SEQ ID NO: 664765 - RNA, 20 nt, Artificial Sequence
  Synthetic
aaauggauaggaguguaugu

SEQ ID NO: 664766 - RNA, 21 nt, Artificial Sequence
  Synthetic
uaaauggauaggaguguaugu

SEQ ID NO: 664767 - RNA, 22 nt, Artificial Sequence
  Synthetic
uuaaauggauaggaguguaugu

SEQ ID NO: 664768 - RNA, 23 nt, Artificial Sequence
  Synthetic
auuaaauggauaggaguguaugu

SEQ ID NO: 664769 - RNA, 24 nt, Artificial Sequence
  Synthetic
cauuaaauggauaggaguguaugu

SEQ ID NO: 664770 - RNA, 18 nt, Artificial Sequence
  Synthetic
aaaaacuuuuguguaugu

SEQ ID NO: 664771 - RNA, 19 nt, Artificial Sequence
  Synthetic
gaaaaacuuuuguguaugu

SEQ ID NO: 664772 - RNA, 20 nt, Artificial Sequence
  Synthetic
ugaaaaacuuuuguguaugu

SEQ ID NO: 664773 - RNA, 21 nt, Artificial Sequence
  Synthetic
uugaaaaacuuuuguguaugu

SEQ ID NO: 664774 - RNA, 22 nt, Artificial Sequence
  Synthetic
auugaaaaacuuuuguguaugu

SEQ ID NO: 664775 - RNA, 23 nt, Artificial Sequence
  Synthetic
uauugaaaaacuuuuguguaugu

SEQ ID NO: 664776 - RNA, 24 nt, Artificial Sequence
  Synthetic
uuauugaaaaacuuuuguguaugu

SEQ ID NO: 664777 - RNA, 18 nt, Artificial Sequence
  Synthetic
cacuuggcuauuguaugu

SEQ ID NO: 664778 - RNA, 19 nt, Artificial Sequence
  Synthetic
ucacuuggcuauuguaugu

SEQ ID NO: 664779 - RNA, 20 nt, Artificial Sequence
  Synthetic
uucacuuggcuauuguaugu

SEQ ID NO: 664780 - RNA, 21 nt, Artificial Sequence
  Synthetic
uuucacuuggcuauuguaugu

SEQ ID NO: 664781 - RNA, 22 nt, Artificial Sequence
  Synthetic
uuuucacuuggcuauuguaugu

SEQ ID NO: 664782 - RNA, 23 nt, Artificial Sequence
  Synthetic
uuuuucacuuggcuauuguaugu

SEQ ID NO: 664783 - RNA, 24 nt, Artificial Sequence
  Synthetic
auuuuucacuuggcuauuguaugu

SEQ ID NO: 664784 - RNA, 18 nt, Artificial Sequence
  Synthetic
agauuggaugaauuaugu

SEQ ID NO: 664785 - RNA, 19 nt, Artificial Sequence
  Synthetic
cagauuggaugaauuaugu

SEQ ID NO: 664786 - RNA, 20 nt, Artificial Sequence
  Synthetic
acagauuggaugaauuaugu

SEQ ID NO: 664787 - RNA, 21 nt, Artificial Sequence
  Synthetic
gacagauuggaugaauuaugu

SEQ ID NO: 664788 - RNA, 22 nt, Artificial Sequence
  Synthetic
ugacagauuggaugaauuaugu

SEQ ID NO: 664789 - RNA, 23 nt, Artificial Sequence
  Synthetic
augacagauuggaugaauuaugu

SEQ ID NO: 664790 - RNA, 24 nt, Artificial Sequence
  Synthetic
aaugacagauuggaugaauuaugu

SEQ ID NO: 664791 - RNA, 18 nt, Artificial Sequence
  Synthetic
caguucuuccuauuaugu

SEQ ID NO: 664792 - RNA, 19 nt, Artificial Sequence
  Synthetic
gcaguucuuccuauuaugu

SEQ ID NO: 664793 - RNA, 20 nt, Artificial Sequence
  Synthetic
agcaguucuuccuauuaugu

SEQ ID NO: 664794 - RNA, 21 nt, Artificial Sequence
  Synthetic
aagcaguucuuccuauuaugu

SEQ ID NO: 664795 - RNA, 22 nt, Artificial Sequence
  Synthetic
aaagcaguucuuccuauuaugu

SEQ ID NO: 664796 - RNA, 23 nt, Artificial Sequence
  Synthetic
uaaagcaguucuuccuauuaugu

SEQ ID NO: 664797 - RNA, 24 nt, Artificial Sequence
  Synthetic
auaaagcaguucuuccuauuaugu

SEQ ID NO: 664798 - RNA, 18 nt, Artificial Sequence
  Synthetic
cauuuuaaugacuuaugu

SEQ ID NO: 664799 - RNA, 19 nt, Artificial Sequence
  Synthetic
ucauuuuaaugacuuaugu

SEQ ID NO: 664800 - RNA, 20 nt, Artificial Sequence
  Synthetic
aucauuuuaaugacuuaugu

SEQ ID NO: 664801 - RNA, 21 nt, Artificial Sequence
  Synthetic
caucauuuuaaugacuuaugu

SEQ ID NO: 664802 - RNA, 22 nt, Artificial Sequence
  Synthetic
acaucauuuuaaugacuuaugu

SEQ ID NO: 664803 - RNA, 23 nt, Artificial Sequence
  Synthetic
uacaucauuuuaaugacuuaugu

SEQ ID NO: 664804 - RNA, 24 nt, Artificial Sequence
  Synthetic
guacaucauuuuaaugacuuaugu

SEQ ID NO: 664805 - RNA, 18 nt, Artificial Sequence
  Synthetic
agaauaaacugcuuaugu

SEQ ID NO: 664806 - RNA, 19 nt, Artificial Sequence
  Synthetic
gagaauaaacugcuuaugu

SEQ ID NO: 664807 - RNA, 20 nt, Artificial Sequence
  Synthetic
agagaauaaacugcuuaugu

SEQ ID NO: 664808 - RNA, 21 nt, Artificial Sequence
  Synthetic
aagagaauaaacugcuuaugu

SEQ ID NO: 664809 - RNA, 22 nt, Artificial Sequence
  Synthetic
uaagagaauaaacugcuuaugu

SEQ ID NO: 664810 - RNA, 23 nt, Artificial Sequence
  Synthetic
uuaagagaauaaacugcuuaugu

SEQ ID NO: 664811 - RNA, 24 nt, Artificial Sequence
  Synthetic
cuuaagagaauaaacugcuuaugu

SEQ ID NO: 664812 - RNA, 18 nt, Artificial Sequence
  Synthetic
cucaggauuugcuuaugu

SEQ ID NO: 664813 - RNA, 19 nt, Artificial Sequence
  Synthetic
ucucaggauuugcuuaugu

SEQ ID NO: 664814 - RNA, 20 nt, Artificial Sequence
  Synthetic
gucucaggauuugcuuaugu

SEQ ID NO: 664815 - RNA, 21 nt, Artificial Sequence
  Synthetic
ugucucaggauuugcuuaugu

SEQ ID NO: 664816 - RNA, 22 nt, Artificial Sequence
  Synthetic
uugucucaggauuugcuuaugu

SEQ ID NO: 664817 - RNA, 23 nt, Artificial Sequence
  Synthetic
cuugucucaggauuugcuuaugu

SEQ ID NO: 664818 - RNA, 24 nt, Artificial Sequence
  Synthetic
ccuugucucaggauuugcuuaugu

SEQ ID NO: 664819 - RNA, 18 nt, Artificial Sequence
  Synthetic
ugucagaauuucuuaugu

SEQ ID NO: 664820 - RNA, 19 nt, Artificial Sequence
  Synthetic
augucagaauuucuuaugu

SEQ ID NO: 664821 - RNA, 20 nt, Artificial Sequence
  Synthetic
uaugucagaauuucuuaugu

SEQ ID NO: 664822 - RNA, 21 nt, Artificial Sequence
  Synthetic
uuaugucagaauuucuuaugu

SEQ ID NO: 664823 - RNA, 22 nt, Artificial Sequence
  Synthetic
auuaugucagaauuucuuaugu

SEQ ID NO: 664824 - RNA, 23 nt, Artificial Sequence
  Synthetic
uauuaugucagaauuucuuaugu

SEQ ID NO: 664825 - RNA, 24 nt, Artificial Sequence
  Synthetic
cuauuaugucagaauuucuuaugu

SEQ ID NO: 664826 - RNA, 18 nt, Artificial Sequence
  Synthetic
cagguugaaauguuaugu

SEQ ID NO: 664827 - RNA, 19 nt, Artificial Sequence
  Synthetic
acagguugaaauguuaugu

SEQ ID NO: 664828 - RNA, 20 nt, Artificial Sequence
  Synthetic
gacagguugaaauguuaugu

SEQ ID NO: 664829 - RNA, 21 nt, Artificial Sequence
  Synthetic
ugacagguugaaauguuaugu

SEQ ID NO: 664830 - RNA, 22 nt, Artificial Sequence
  Synthetic
augacagguugaaauguuaugu

SEQ ID NO: 664831 - RNA, 23 nt, Artificial Sequence
  Synthetic
uaugacagguugaaauguuaugu

SEQ ID NO: 664832 - RNA, 24 nt, Artificial Sequence
  Synthetic
auaugacagguugaaauguuaugu

SEQ ID NO: 664833 - RNA, 18 nt, Artificial Sequence
  Synthetic
cgcuuaaaauauuuaugu

SEQ ID NO: 664834 - RNA, 19 nt, Artificial Sequence
  Synthetic
ucgcuuaaaauauuuaugu

SEQ ID NO: 664835 - RNA, 20 nt, Artificial Sequence
  Synthetic
uucgcuuaaaauauuuaugu

SEQ ID NO: 664836 - RNA, 21 nt, Artificial Sequence
  Synthetic
cuucgcuuaaaauauuuaugu

SEQ ID NO: 664837 - RNA, 22 nt, Artificial Sequence
  Synthetic
acuucgcuuaaaauauuuaugu

SEQ ID NO: 664838 - RNA, 23 nt, Artificial Sequence
  Synthetic
uacuucgcuuaaaauauuuaugu

SEQ ID NO: 664839 - RNA, 24 nt, Artificial Sequence
  Synthetic
guacuucgcuuaaaauauuuaugu

SEQ ID NO: 664840 - RNA, 18 nt, Artificial Sequence
  Synthetic
cuaggcuggacuuuaugu

SEQ ID NO: 664841 - RNA, 19 nt, Artificial Sequence
  Synthetic
ccuaggcuggacuuuaugu

SEQ ID NO: 664842 - RNA, 20 nt, Artificial Sequence
  Synthetic
accuaggcuggacuuuaugu

SEQ ID NO: 664843 - RNA, 21 nt, Artificial Sequence
  Synthetic
uaccuaggcuggacuuuaugu

SEQ ID NO: 664844 - RNA, 22 nt, Artificial Sequence
  Synthetic
guaccuaggcuggacuuuaugu

SEQ ID NO: 664845 - RNA, 23 nt, Artificial Sequence
  Synthetic
cguaccuaggcuggacuuuaugu

SEQ ID NO: 664846 - RNA, 24 nt, Artificial Sequence
  Synthetic
acguaccuaggcuggacuuuaugu

SEQ ID NO: 664847 - RNA, 18 nt, Artificial Sequence
  Synthetic
gggggucuggguuuaugu

SEQ ID NO: 664848 - RNA, 19 nt, Artificial Sequence
  Synthetic
ugggggucuggguuuaugu

SEQ ID NO: 664849 - RNA, 20 nt, Artificial Sequence
  Synthetic
cugggggucuggguuuaugu

SEQ ID NO: 664850 - RNA, 21 nt, Artificial Sequence
  Synthetic
ucugggggucuggguuuaugu

SEQ ID NO: 664851 - RNA, 22 nt, Artificial Sequence
  Synthetic
gucugggggucuggguuuaugu

SEQ ID NO: 664852 - RNA, 23 nt, Artificial Sequence
  Synthetic
ggucugggggucuggguuuaugu

SEQ ID NO: 664853 - RNA, 24 nt, Artificial Sequence
  Synthetic
aggucugggggucuggguuuaugu

SEQ ID NO: 664854 - RNA, 18 nt, Artificial Sequence
  Synthetic
cugcggcuuuguuuaugu

SEQ ID NO: 664855 - RNA, 19 nt, Artificial Sequence
  Synthetic
gcugcggcuuuguuuaugu

SEQ ID NO: 664856 - RNA, 20 nt, Artificial Sequence
  Synthetic
agcugcggcuuuguuuaugu

SEQ ID NO: 664857 - RNA, 21 nt, Artificial Sequence
  Synthetic
aagcugcggcuuuguuuaugu

SEQ ID NO: 664858 - RNA, 22 nt, Artificial Sequence
  Synthetic
caagcugcggcuuuguuuaugu

SEQ ID NO: 664859 - RNA, 23 nt, Artificial Sequence
  Synthetic
ucaagcugcggcuuuguuuaugu

SEQ ID NO: 664860 - RNA, 24 nt, Artificial Sequence
  Synthetic
cucaagcugcggcuuuguuuaugu

SEQ ID NO: 664861 - RNA, 18 nt, Artificial Sequence
  Synthetic
ucuuuggaaauuuuaugu

SEQ ID NO: 664862 - RNA, 19 nt, Artificial Sequence
  Synthetic
aucuuuggaaauuuuaugu

SEQ ID NO: 664863 - RNA, 20 nt, Artificial Sequence
  Synthetic
caucuuuggaaauuuuaugu

SEQ ID NO: 664864 - RNA, 21 nt, Artificial Sequence
  Synthetic
acaucuuuggaaauuuuaugu

SEQ ID NO: 664865 - RNA, 22 nt, Artificial Sequence
  Synthetic
cacaucuuuggaaauuuuaugu

SEQ ID NO: 664866 - RNA, 23 nt, Artificial Sequence
  Synthetic
gcacaucuuuggaaauuuuaugu

SEQ ID NO: 664867 - RNA, 24 nt, Artificial Sequence
  Synthetic
ggcacaucuuuggaaauuuuaugu

SEQ ID NO: 664868 - RNA, 18 nt, Artificial Sequence
  Synthetic
uaucaggacaaaaacugu

SEQ ID NO: 664869 - RNA, 19 nt, Artificial Sequence
  Synthetic
auaucaggacaaaaacugu

SEQ ID NO: 664870 - RNA, 20 nt, Artificial Sequence
  Synthetic
gauaucaggacaaaaacugu

SEQ ID NO: 664871 - RNA, 21 nt, Artificial Sequence
  Synthetic
cgauaucaggacaaaaacugu

SEQ ID NO: 664872 - RNA, 22 nt, Artificial Sequence
  Synthetic
ucgauaucaggacaaaaacugu

SEQ ID NO: 664873 - RNA, 23 nt, Artificial Sequence
  Synthetic
aucgauaucaggacaaaaacugu

SEQ ID NO: 664874 - RNA, 24 nt, Artificial Sequence
  Synthetic
aaucgauaucaggacaaaaacugu

SEQ ID NO: 664875 - RNA, 18 nt, Artificial Sequence
  Synthetic
uauaaaauuaaaaacugu

SEQ ID NO: 664876 - RNA, 19 nt, Artificial Sequence
  Synthetic
uuauaaaauuaaaaacugu

SEQ ID NO: 664877 - RNA, 20 nt, Artificial Sequence
  Synthetic
uuuauaaaauuaaaaacugu

SEQ ID NO: 664878 - RNA, 21 nt, Artificial Sequence
  Synthetic
auuuauaaaauuaaaaacugu

SEQ ID NO: 664879 - RNA, 22 nt, Artificial Sequence
  Synthetic
gauuuauaaaauuaaaaacugu

SEQ ID NO: 664880 - RNA, 23 nt, Artificial Sequence
  Synthetic
agauuuauaaaauuaaaaacugu

SEQ ID NO: 664881 - RNA, 24 nt, Artificial Sequence
  Synthetic
cagauuuauaaaauuaaaaacugu

SEQ ID NO: 664882 - RNA, 18 nt, Artificial Sequence
  Synthetic
ugaauguaaccaaacugu

SEQ ID NO: 664883 - RNA, 19 nt, Artificial Sequence
  Synthetic
augaauguaaccaaacugu

SEQ ID NO: 664884 - RNA, 20 nt, Artificial Sequence
  Synthetic
uaugaauguaaccaaacugu

SEQ ID NO: 664885 - RNA, 21 nt, Artificial Sequence
  Synthetic
cuaugaauguaaccaaacugu

SEQ ID NO: 664886 - RNA, 22 nt, Artificial Sequence
  Synthetic
ucuaugaauguaaccaaacugu

SEQ ID NO: 664887 - RNA, 23 nt, Artificial Sequence
  Synthetic
gucuaugaauguaaccaaacugu

SEQ ID NO: 664888 - RNA, 24 nt, Artificial Sequence
  Synthetic
agucuaugaauguaaccaaacugu

SEQ ID NO: 664889 - RNA, 18 nt, Artificial Sequence
  Synthetic
auaaggaaaauaaacugu

SEQ ID NO: 664890 - RNA, 19 nt, Artificial Sequence
  Synthetic
uauaaggaaaauaaacugu

SEQ ID NO: 664891 - RNA, 20 nt, Artificial Sequence
  Synthetic
guauaaggaaaauaaacugu

SEQ ID NO: 664892 - RNA, 21 nt, Artificial Sequence
  Synthetic
aguauaaggaaaauaaacugu

SEQ ID NO: 664893 - RNA, 22 nt, Artificial Sequence
  Synthetic
gaguauaaggaaaauaaacugu

SEQ ID NO: 664894 - RNA, 23 nt, Artificial Sequence
  Synthetic
ugaguauaaggaaaauaaacugu

SEQ ID NO: 664895 - RNA, 24 nt, Artificial Sequence
  Synthetic
gugaguauaaggaaaauaaacugu

SEQ ID NO: 664896 - RNA, 18 nt, Artificial Sequence
  Synthetic
uuccacgcauuaaacugu

SEQ ID NO: 664897 - RNA, 19 nt, Artificial Sequence
  Synthetic
uuuccacgcauuaaacugu

SEQ ID NO: 664898 - RNA, 20 nt, Artificial Sequence
  Synthetic
uuuuccacgcauuaaacugu

SEQ ID NO: 664899 - RNA, 21 nt, Artificial Sequence
  Synthetic
cuuuuccacgcauuaaacugu

SEQ ID NO: 664900 - RNA, 22 nt, Artificial Sequence
  Synthetic
ucuuuuccacgcauuaaacugu

SEQ ID NO: 664901 - RNA, 23 nt, Artificial Sequence
  Synthetic
aucuuuuccacgcauuaaacugu

SEQ ID NO: 664902 - RNA, 24 nt, Artificial Sequence
  Synthetic
caucuuuuccacgcauuaaacugu

SEQ ID NO: 664903 - RNA, 18 nt, Artificial Sequence
  Synthetic
uuuaaaguagacaacugu

SEQ ID NO: 664904 - RNA, 19 nt, Artificial Sequence
  Synthetic
uuuuaaaguagacaacugu

SEQ ID NO: 664905 - RNA, 20 nt, Artificial Sequence
  Synthetic
auuuuaaaguagacaacugu

SEQ ID NO: 664906 - RNA, 21 nt, Artificial Sequence
  Synthetic
aauuuuaaaguagacaacugu

SEQ ID NO: 664907 - RNA, 22 nt, Artificial Sequence
  Synthetic
caauuuuaaaguagacaacugu

SEQ ID NO: 664908 - RNA, 23 nt, Artificial Sequence
  Synthetic
ucaauuuuaaaguagacaacugu

SEQ ID NO: 664909 - RNA, 24 nt, Artificial Sequence
  Synthetic
uucaauuuuaaaguagacaacugu

SEQ ID NO: 664910 - RNA, 18 nt, Artificial Sequence
  Synthetic
gggcauuuauacaacugu

SEQ ID NO: 664911 - RNA, 19 nt, Artificial Sequence
  Synthetic
ugggcauuuauacaacugu

SEQ ID NO: 664912 - RNA, 20 nt, Artificial Sequence
  Synthetic
uugggcauuuauacaacugu

SEQ ID NO: 664913 - RNA, 21 nt, Artificial Sequence
  Synthetic
uuugggcauuuauacaacugu

SEQ ID NO: 664914 - RNA, 22 nt, Artificial Sequence
  Synthetic
uuuugggcauuuauacaacugu

SEQ ID NO: 664915 - RNA, 23 nt, Artificial Sequence
  Synthetic
cuuuugggcauuuauacaacugu

SEQ ID NO: 664916 - RNA, 24 nt, Artificial Sequence
  Synthetic
ccuuuugggcauuuauacaacugu

SEQ ID NO: 664917 - RNA, 18 nt, Artificial Sequence
  Synthetic
ugaaguuauuacaacugu

SEQ ID NO: 664918 - RNA, 19 nt, Artificial Sequence
  Synthetic
gugaaguuauuacaacugu

SEQ ID NO: 664919 - RNA, 20 nt, Artificial Sequence
  Synthetic
ugugaaguuauuacaacugu

SEQ ID NO: 664920 - RNA, 21 nt, Artificial Sequence
  Synthetic
augugaaguuauuacaacugu

SEQ ID NO: 664921 - RNA, 22 nt, Artificial Sequence
  Synthetic
aaugugaaguuauuacaacugu

SEQ ID NO: 664922 - RNA, 23 nt, Artificial Sequence
  Synthetic
uaaugugaaguuauuacaacugu

SEQ ID NO: 664923 - RNA, 24 nt, Artificial Sequence
  Synthetic
uuaaugugaaguuauuacaacugu

SEQ ID NO: 664924 - RNA, 18 nt, Artificial Sequence
  Synthetic
acccaaaacgccaacugu

SEQ ID NO: 664925 - RNA, 19 nt, Artificial Sequence
  Synthetic
cacccaaaacgccaacugu

SEQ ID NO: 664926 - RNA, 20 nt, Artificial Sequence
  Synthetic
acacccaaaacgccaacugu

SEQ ID NO: 664927 - RNA, 21 nt, Artificial Sequence
  Synthetic
uacacccaaaacgccaacugu

SEQ ID NO: 664928 - RNA, 22 nt, Artificial Sequence
  Synthetic
auacacccaaaacgccaacugu

SEQ ID NO: 664929 - RNA, 23 nt, Artificial Sequence
  Synthetic
uauacacccaaaacgccaacugu

SEQ ID NO: 664930 - RNA, 24 nt, Artificial Sequence
  Synthetic
guauacacccaaaacgccaacugu

SEQ ID NO: 664931 - RNA, 18 nt, Artificial Sequence
  Synthetic
augcagcucaagaacugu

SEQ ID NO: 664932 - RNA, 19 nt, Artificial Sequence
  Synthetic
caugcagcucaagaacugu

SEQ ID NO: 664933 - RNA, 20 nt, Artificial Sequence
  Synthetic
acaugcagcucaagaacugu

SEQ ID NO: 664934 - RNA, 21 nt, Artificial Sequence
  Synthetic
cacaugcagcucaagaacugu

SEQ ID NO: 664935 - RNA, 22 nt, Artificial Sequence
  Synthetic
acacaugcagcucaagaacugu

SEQ ID NO: 664936 - RNA, 23 nt, Artificial Sequence
  Synthetic
aacacaugcagcucaagaacugu

SEQ ID NO: 664937 - RNA, 24 nt, Artificial Sequence
  Synthetic
caacacaugcagcucaagaacugu

SEQ ID NO: 664938 - RNA, 18 nt, Artificial Sequence
  Synthetic
cccagccuccagaacugu

SEQ ID NO: 664939 - RNA, 19 nt, Artificial Sequence
  Synthetic
ucccagccuccagaacugu

SEQ ID NO: 664940 - RNA, 20 nt, Artificial Sequence
  Synthetic
aucccagccuccagaacugu

SEQ ID NO: 664941 - RNA, 21 nt, Artificial Sequence
  Synthetic
aaucccagccuccagaacugu

SEQ ID NO: 664942 - RNA, 22 nt, Artificial Sequence
  Synthetic
gaaucccagccuccagaacugu

SEQ ID NO: 664943 - RNA, 23 nt, Artificial Sequence
  Synthetic
ggaaucccagccuccagaacugu

SEQ ID NO: 664944 - RNA, 24 nt, Artificial Sequence
  Synthetic
uggaaucccagccuccagaacugu

SEQ ID NO: 664945 - RNA, 18 nt, Artificial Sequence
  Synthetic
gugucuaaccugaacugu

SEQ ID NO: 664946 - RNA, 19 nt, Artificial Sequence
  Synthetic
ggugucuaaccugaacugu

SEQ ID NO: 664947 - RNA, 20 nt, Artificial Sequence
  Synthetic
uggugucuaaccugaacugu

SEQ ID NO: 664948 - RNA, 21 nt, Artificial Sequence
  Synthetic
auggugucuaaccugaacugu

SEQ ID NO: 664949 - RNA, 22 nt, Artificial Sequence
  Synthetic
aauggugucuaaccugaacugu

SEQ ID NO: 664950 - RNA, 23 nt, Artificial Sequence
  Synthetic
aaauggugucuaaccugaacugu

SEQ ID NO: 664951 - RNA, 24 nt, Artificial Sequence
  Synthetic
aaaauggugucuaaccugaacugu

SEQ ID NO: 664952 - RNA, 18 nt, Artificial Sequence
  Synthetic
cucagccuccguaacugu

SEQ ID NO: 664953 - RNA, 19 nt, Artificial Sequence
  Synthetic
ucucagccuccguaacugu

SEQ ID NO: 664954 - RNA, 20 nt, Artificial Sequence
  Synthetic
uucucagccuccguaacugu

SEQ ID NO: 664955 - RNA, 21 nt, Artificial Sequence
  Synthetic
cuucucagccuccguaacugu

SEQ ID NO: 664956 - RNA, 22 nt, Artificial Sequence
  Synthetic
acuucucagccuccguaacugu

SEQ ID NO: 664957 - RNA, 23 nt, Artificial Sequence
  Synthetic
gacuucucagccuccguaacugu

SEQ ID NO: 664958 - RNA, 24 nt, Artificial Sequence
  Synthetic
ggacuucucagccuccguaacugu

SEQ ID NO: 664959 - RNA, 18 nt, Artificial Sequence
  Synthetic
uagccuguauguaacugu

SEQ ID NO: 664960 - RNA, 19 nt, Artificial Sequence
  Synthetic
cuagccuguauguaacugu

SEQ ID NO: 664961 - RNA, 20 nt, Artificial Sequence
  Synthetic
ccuagccuguauguaacugu

SEQ ID NO: 664962 - RNA, 21 nt, Artificial Sequence
  Synthetic
cccuagccuguauguaacugu

SEQ ID NO: 664963 - RNA, 22 nt, Artificial Sequence
  Synthetic
ucccuagccuguauguaacugu

SEQ ID NO: 664964 - RNA, 23 nt, Artificial Sequence
  Synthetic
cucccuagccuguauguaacugu

SEQ ID NO: 664965 - RNA, 24 nt, Artificial Sequence
  Synthetic
acucccuagccuguauguaacugu

SEQ ID NO: 664966 - RNA, 18 nt, Artificial Sequence
  Synthetic
gaugagaaaauuaacugu

SEQ ID NO: 664967 - RNA, 19 nt, Artificial Sequence
  Synthetic
agaugagaaaauuaacugu

SEQ ID NO: 664968 - RNA, 20 nt, Artificial Sequence
  Synthetic
cagaugagaaaauuaacugu

SEQ ID NO: 664969 - RNA, 21 nt, Artificial Sequence
  Synthetic
acagaugagaaaauuaacugu

SEQ ID NO: 664970 - RNA, 22 nt, Artificial Sequence
  Synthetic
uacagaugagaaaauuaacugu

SEQ ID NO: 664971 - RNA, 23 nt, Artificial Sequence
  Synthetic
uuacagaugagaaaauuaacugu

SEQ ID NO: 664972 - RNA, 24 nt, Artificial Sequence
  Synthetic
uuuacagaugagaaaauuaacugu

SEQ ID NO: 664973 - RNA, 18 nt, Artificial Sequence
  Synthetic
aagaaauaccuuaacugu

SEQ ID NO: 664974 - RNA, 19 nt, Artificial Sequence
  Synthetic
aaagaaauaccuuaacugu

SEQ ID NO: 664975 - RNA, 20 nt, Artificial Sequence
  Synthetic
gaaagaaauaccuuaacugu

SEQ ID NO: 664976 - RNA, 21 nt, Artificial Sequence
  Synthetic
ggaaagaaauaccuuaacugu

SEQ ID NO: 664977 - RNA, 22 nt, Artificial Sequence
  Synthetic
aggaaagaaauaccuuaacugu

SEQ ID NO: 664978 - RNA, 23 nt, Artificial Sequence
  Synthetic
caggaaagaaauaccuuaacugu

SEQ ID NO: 664979 - RNA, 24 nt, Artificial Sequence
  Synthetic
ccaggaaagaaauaccuuaacugu

SEQ ID NO: 664980 - RNA, 18 nt, Artificial Sequence
  Synthetic
uagucucucuuuaacugu

SEQ ID NO: 664981 - RNA, 19 nt, Artificial Sequence
  Synthetic
auagucucucuuuaacugu

SEQ ID NO: 664982 - RNA, 20 nt, Artificial Sequence
  Synthetic
uauagucucucuuuaacugu

SEQ ID NO: 664983 - RNA, 21 nt, Artificial Sequence
  Synthetic
cuauagucucucuuuaacugu

SEQ ID NO: 664984 - RNA, 22 nt, Artificial Sequence
  Synthetic
gcuauagucucucuuuaacugu

SEQ ID NO: 664985 - RNA, 23 nt, Artificial Sequence
  Synthetic
ugcuauagucucucuuuaacugu

SEQ ID NO: 664986 - RNA, 24 nt, Artificial Sequence
  Synthetic
uugcuauagucucucuuuaacugu

SEQ ID NO: 664987 - RNA, 18 nt, Artificial Sequence
  Synthetic
cuugucuuuuuuaacugu

SEQ ID NO: 664988 - RNA, 19 nt, Artificial Sequence
  Synthetic
gcuugucuuuuuuaacugu

SEQ ID NO: 664989 - RNA, 20 nt, Artificial Sequence
  Synthetic
ggcuugucuuuuuuaacugu

SEQ ID NO: 664990 - RNA, 21 nt, Artificial Sequence
  Synthetic
gggcuugucuuuuuuaacugu

SEQ ID NO: 664991 - RNA, 22 nt, Artificial Sequence
  Synthetic
ugggcuugucuuuuuuaacugu

SEQ ID NO: 664992 - RNA, 23 nt, Artificial Sequence
  Synthetic
augggcuugucuuuuuuaacugu

SEQ ID NO: 664993 - RNA, 24 nt, Artificial Sequence
  Synthetic
caugggcuugucuuuuuuaacugu

SEQ ID NO: 664994 - RNA, 18 nt, Artificial Sequence
  Synthetic
gauccuaggaaacacugu

SEQ ID NO: 664995 - RNA, 19 nt, Artificial Sequence
  Synthetic
ugauccuaggaaacacugu

SEQ ID NO: 664996 - RNA, 20 nt, Artificial Sequence
  Synthetic
gugauccuaggaaacacugu

SEQ ID NO: 664997 - RNA, 21 nt, Artificial Sequence
  Synthetic
ggugauccuaggaaacacugu

SEQ ID NO: 664998 - RNA, 22 nt, Artificial Sequence
  Synthetic
aggugauccuaggaaacacugu

SEQ ID NO: 664999 - RNA, 23 nt, Artificial Sequence
  Synthetic
gaggugauccuaggaaacacugu

SEQ ID NO: 665000 - RNA, 24 nt, Artificial Sequence
  Synthetic
ugaggugauccuaggaaacacugu

SEQ ID NO: 665001 - RNA, 18 nt, Artificial Sequence
  Synthetic
uaagagaagcaacacugu

SEQ ID NO: 665002 - RNA, 19 nt, Artificial Sequence
  Synthetic
uuaagagaagcaacacugu

SEQ ID NO: 665003 - RNA, 20 nt, Artificial Sequence
  Synthetic
uuuaagagaagcaacacugu

SEQ ID NO: 665004 - RNA, 21 nt, Artificial Sequence
  Synthetic
auuuaagagaagcaacacugu

SEQ ID NO: 665005 - RNA, 22 nt, Artificial Sequence
  Synthetic
aauuuaagagaagcaacacugu

SEQ ID NO: 665006 - RNA, 23 nt, Artificial Sequence
  Synthetic
gaauuuaagagaagcaacacugu

SEQ ID NO: 665007 - RNA, 24 nt, Artificial Sequence
  Synthetic
ggaauuuaagagaagcaacacugu

SEQ ID NO: 665008 - RNA, 18 nt, Artificial Sequence
  Synthetic
gcuaaguaguaacacugu

SEQ ID NO: 665009 - RNA, 19 nt, Artificial Sequence
  Synthetic
agcuaaguaguaacacugu

SEQ ID NO: 665010 - RNA, 20 nt, Artificial Sequence
  Synthetic
aagcuaaguaguaacacugu

SEQ ID NO: 665011 - RNA, 21 nt, Artificial Sequence
  Synthetic
aaagcuaaguaguaacacugu

SEQ ID NO: 665012 - RNA, 22 nt, Artificial Sequence
  Synthetic
uaaagcuaaguaguaacacugu

SEQ ID NO: 665013 - RNA, 23 nt, Artificial Sequence
  Synthetic
auaaagcuaaguaguaacacugu

SEQ ID NO: 665014 - RNA, 24 nt, Artificial Sequence
  Synthetic
aauaaagcuaaguaguaacacugu

SEQ ID NO: 665015 - RNA, 18 nt, Artificial Sequence
  Synthetic
uguuuauuaacacacugu

SEQ ID NO: 665016 - RNA, 19 nt, Artificial Sequence
  Synthetic
guguuuauuaacacacugu

SEQ ID NO: 665017 - RNA, 20 nt, Artificial Sequence
  Synthetic
gguguuuauuaacacacugu

SEQ ID NO: 665018 - RNA, 21 nt, Artificial Sequence
  Synthetic
agguguuuauuaacacacugu

SEQ ID NO: 665019 - RNA, 22 nt, Artificial Sequence
  Synthetic
uagguguuuauuaacacacugu

SEQ ID NO: 665020 - RNA, 23 nt, Artificial Sequence
  Synthetic
guagguguuuauuaacacacugu

SEQ ID NO: 665021 - RNA, 24 nt, Artificial Sequence
  Synthetic
aguagguguuuauuaacacacugu

SEQ ID NO: 665022 - RNA, 18 nt, Artificial Sequence
  Synthetic
cccgaacccucacacugu

SEQ ID NO: 665023 - RNA, 19 nt, Artificial Sequence
  Synthetic
ccccgaacccucacacugu

SEQ ID NO: 665024 - RNA, 20 nt, Artificial Sequence
  Synthetic
gccccgaacccucacacugu

SEQ ID NO: 665025 - RNA, 21 nt, Artificial Sequence
  Synthetic
cgccccgaacccucacacugu

SEQ ID NO: 665026 - RNA, 22 nt, Artificial Sequence
  Synthetic
gcgccccgaacccucacacugu

SEQ ID NO: 665027 - RNA, 23 nt, Artificial Sequence
  Synthetic
agcgccccgaacccucacacugu

SEQ ID NO: 665028 - RNA, 24 nt, Artificial Sequence
  Synthetic
cagcgccccgaacccucacacugu

SEQ ID NO: 665029 - RNA, 18 nt, Artificial Sequence
  Synthetic
uggauuugcauacacugu

SEQ ID NO: 665030 - RNA, 19 nt, Artificial Sequence
  Synthetic
cuggauuugcauacacugu

SEQ ID NO: 665031 - RNA, 20 nt, Artificial Sequence
  Synthetic
ucuggauuugcauacacugu

SEQ ID NO: 665032 - RNA, 21 nt, Artificial Sequence
  Synthetic
cucuggauuugcauacacugu

SEQ ID NO: 665033 - RNA, 22 nt, Artificial Sequence
  Synthetic
ucucuggauuugcauacacugu

SEQ ID NO: 665034 - RNA, 23 nt, Artificial Sequence
  Synthetic
aucucuggauuugcauacacugu

SEQ ID NO: 665035 - RNA, 24 nt, Artificial Sequence
  Synthetic
uaucucuggauuugcauacacugu

SEQ ID NO: 665036 - RNA, 18 nt, Artificial Sequence
  Synthetic
uuugaauaucuacacugu

SEQ ID NO: 665037 - RNA, 19 nt, Artificial Sequence
  Synthetic
auuugaauaucuacacugu

SEQ ID NO: 665038 - RNA, 20 nt, Artificial Sequence
  Synthetic
uauuugaauaucuacacugu

SEQ ID NO: 665039 - RNA, 21 nt, Artificial Sequence
  Synthetic
uuauuugaauaucuacacugu

SEQ ID NO: 665040 - RNA, 22 nt, Artificial Sequence
  Synthetic
uuuauuugaauaucuacacugu

SEQ ID NO: 665041 - RNA, 23 nt, Artificial Sequence
  Synthetic
auuuauuugaauaucuacacugu

SEQ ID NO: 665042 - RNA, 24 nt, Artificial Sequence
  Synthetic
cauuuauuugaauaucuacacugu

SEQ ID NO: 665043 - RNA, 18 nt, Artificial Sequence
  Synthetic
cggcuuuguuuacacugu

SEQ ID NO: 665044 - RNA, 19 nt, Artificial Sequence
  Synthetic
acggcuuuguuuacacugu

SEQ ID NO: 665045 - RNA, 20 nt, Artificial Sequence
  Synthetic
gacggcuuuguuuacacugu

SEQ ID NO: 665046 - RNA, 21 nt, Artificial Sequence
  Synthetic
ugacggcuuuguuuacacugu

SEQ ID NO: 665047 - RNA, 22 nt, Artificial Sequence
  Synthetic
uugacggcuuuguuuacacugu

SEQ ID NO: 665048 - RNA, 23 nt, Artificial Sequence
  Synthetic
cuugacggcuuuguuuacacugu

SEQ ID NO: 665049 - RNA, 24 nt, Artificial Sequence
  Synthetic
ucuugacggcuuuguuuacacugu

SEQ ID NO: 665050 - RNA, 18 nt, Artificial Sequence
  Synthetic
ugggcucuaugccacugu

SEQ ID NO: 665051 - RNA, 19 nt, Artificial Sequence
  Synthetic
cugggcucuaugccacugu

SEQ ID NO: 665052 - RNA, 20 nt, Artificial Sequence
  Synthetic
acugggcucuaugccacugu

SEQ ID NO: 665053 - RNA, 21 nt, Artificial Sequence
  Synthetic
aacugggcucuaugccacugu

SEQ ID NO: 665054 - RNA, 22 nt, Artificial Sequence
  Synthetic
aaacugggcucuaugccacugu

SEQ ID NO: 665055 - RNA, 23 nt, Artificial Sequence
  Synthetic
aaaacugggcucuaugccacugu

SEQ ID NO: 665056 - RNA, 24 nt, Artificial Sequence
  Synthetic
uaaaacugggcucuaugccacugu

SEQ ID NO: 665057 - RNA, 18 nt, Artificial Sequence
  Synthetic
aaagaugugugccacugu

SEQ ID NO: 665058 - RNA, 19 nt, Artificial Sequence
  Synthetic
caaagaugugugccacugu

SEQ ID NO: 665059 - RNA, 20 nt, Artificial Sequence
  Synthetic
acaaagaugugugccacugu

SEQ ID NO: 665060 - RNA, 21 nt, Artificial Sequence
  Synthetic
aacaaagaugugugccacugu

SEQ ID NO: 665061 - RNA, 22 nt, Artificial Sequence
  Synthetic
aaacaaagaugugugccacugu

SEQ ID NO: 665062 - RNA, 23 nt, Artificial Sequence
  Synthetic
aaaacaaagaugugugccacugu

SEQ ID NO: 665063 - RNA, 24 nt, Artificial Sequence
  Synthetic
uaaaacaaagaugugugccacugu

SEQ ID NO: 665064 - RNA, 18 nt, Artificial Sequence
  Synthetic
cccagguuacuccacugu

SEQ ID NO: 665065 - RNA, 19 nt, Artificial Sequence
  Synthetic
ucccagguuacuccacugu

SEQ ID NO: 665066 - RNA, 20 nt, Artificial Sequence
  Synthetic
cucccagguuacuccacugu

SEQ ID NO: 665067 - RNA, 21 nt, Artificial Sequence
  Synthetic
acucccagguuacuccacugu

SEQ ID NO: 665068 - RNA, 22 nt, Artificial Sequence
  Synthetic
uacucccagguuacuccacugu

SEQ ID NO: 665069 - RNA, 23 nt, Artificial Sequence
  Synthetic
guacucccagguuacuccacugu

SEQ ID NO: 665070 - RNA, 24 nt, Artificial Sequence
  Synthetic
uguacucccagguuacuccacugu

SEQ ID NO: 665071 - RNA, 18 nt, Artificial Sequence
  Synthetic
ucuccccccuuccacugu

SEQ ID NO: 665072 - RNA, 19 nt, Artificial Sequence
  Synthetic
cucuccccccuuccacugu

SEQ ID NO: 665073 - RNA, 20 nt, Artificial Sequence
  Synthetic
ucucuccccccuuccacugu

SEQ ID NO: 665074 - RNA, 21 nt, Artificial Sequence
  Synthetic
aucucuccccccuuccacugu

SEQ ID NO: 665075 - RNA, 22 nt, Artificial Sequence
  Synthetic
caucucuccccccuuccacugu

SEQ ID NO: 665076 - RNA, 23 nt, Artificial Sequence
  Synthetic
acaucucuccccccuuccacugu

SEQ ID NO: 665077 - RNA, 24 nt, Artificial Sequence
  Synthetic
aacaucucuccccccuuccacugu

SEQ ID NO: 665078 - RNA, 18 nt, Artificial Sequence
  Synthetic
uagcuuuucuuccacugu

SEQ ID NO: 665079 - RNA, 19 nt, Artificial Sequence
  Synthetic
cuagcuuuucuuccacugu

SEQ ID NO: 665080 - RNA, 20 nt, Artificial Sequence
  Synthetic
ucuagcuuuucuuccacugu

SEQ ID NO: 665081 - RNA, 21 nt, Artificial Sequence
  Synthetic
cucuagcuuuucuuccacugu

SEQ ID NO: 665082 - RNA, 22 nt, Artificial Sequence
  Synthetic
ccucuagcuuuucuuccacugu

SEQ ID NO: 665083 - RNA, 23 nt, Artificial Sequence
  Synthetic
cccucuagcuuuucuuccacugu

SEQ ID NO: 665084 - RNA, 24 nt, Artificial Sequence
  Synthetic
ucccucuagcuuuucuuccacugu

SEQ ID NO: 665085 - RNA, 18 nt, Artificial Sequence
  Synthetic
auguaaucccagcacugu

SEQ ID NO: 665086 - RNA, 19 nt, Artificial Sequence
  Synthetic
cauguaaucccagcacugu

SEQ ID NO: 665087 - RNA, 20 nt, Artificial Sequence
  Synthetic
gcauguaaucccagcacugu

SEQ ID NO: 665088 - RNA, 21 nt, Artificial Sequence
  Synthetic
ugcauguaaucccagcacugu

SEQ ID NO: 665089 - RNA, 22 nt, Artificial Sequence
  Synthetic
augcauguaaucccagcacugu

SEQ ID NO: 665090 - RNA, 23 nt, Artificial Sequence
  Synthetic
caugcauguaaucccagcacugu

SEQ ID NO: 665091 - RNA, 24 nt, Artificial Sequence
  Synthetic
ucaugcauguaaucccagcacugu

SEQ ID NO: 665092 - RNA, 18 nt, Artificial Sequence
  Synthetic
cuguaaucccagcacugu

SEQ ID NO: 665093 - RNA, 19 nt, Artificial Sequence
  Synthetic
ccuguaaucccagcacugu

SEQ ID NO: 665094 - RNA, 20 nt, Artificial Sequence
  Synthetic
gccuguaaucccagcacugu

SEQ ID NO: 665095 - RNA, 21 nt, Artificial Sequence
  Synthetic
ugccuguaaucccagcacugu

SEQ ID NO: 665096 - RNA, 22 nt, Artificial Sequence
  Synthetic
augccuguaaucccagcacugu

SEQ ID NO: 665097 - RNA, 23 nt, Artificial Sequence
  Synthetic
caugccuguaaucccagcacugu

SEQ ID NO: 665098 - RNA, 24 nt, Artificial Sequence
  Synthetic
acaugccuguaaucccagcacugu

SEQ ID NO: 665099 - RNA, 18 nt, Artificial Sequence
  Synthetic
cuugcucuguugcacugu

SEQ ID NO: 665100 - RNA, 19 nt, Artificial Sequence
  Synthetic
ucuugcucuguugcacugu

SEQ ID NO: 665101 - RNA, 20 nt, Artificial Sequence
  Synthetic
uucuugcucuguugcacugu

SEQ ID NO: 665102 - RNA, 21 nt, Artificial Sequence
  Synthetic
cuucuugcucuguugcacugu

SEQ ID NO: 665103 - RNA, 22 nt, Artificial Sequence
  Synthetic
gcuucuugcucuguugcacugu

SEQ ID NO: 665104 - RNA, 23 nt, Artificial Sequence
  Synthetic
agcuucuugcucuguugcacugu

SEQ ID NO: 665105 - RNA, 24 nt, Artificial Sequence
  Synthetic
aagcuucuugcucuguugcacugu

SEQ ID NO: 665106 - RNA, 18 nt, Artificial Sequence
  Synthetic
uucaaaagagaucacugu

SEQ ID NO: 665107 - RNA, 19 nt, Artificial Sequence
  Synthetic
uuucaaaagagaucacugu

SEQ ID NO: 665108 - RNA, 20 nt, Artificial Sequence
  Synthetic
auuucaaaagagaucacugu

SEQ ID NO: 665109 - RNA, 21 nt, Artificial Sequence
  Synthetic
uauuucaaaagagaucacugu

SEQ ID NO: 665110 - RNA, 22 nt, Artificial Sequence
  Synthetic
uuauuucaaaagagaucacugu

SEQ ID NO: 665111 - RNA, 23 nt, Artificial Sequence
  Synthetic
guuauuucaaaagagaucacugu

SEQ ID NO: 665112 - RNA, 24 nt, Artificial Sequence
  Synthetic
aguuauuucaaaagagaucacugu

SEQ ID NO: 665113 - RNA, 18 nt, Artificial Sequence
  Synthetic
aaauuaaaauaucacugu

SEQ ID NO: 665114 - RNA, 19 nt, Artificial Sequence
  Synthetic
uaaauuaaaauaucacugu

SEQ ID NO: 665115 - RNA, 20 nt, Artificial Sequence
  Synthetic
cuaaauuaaaauaucacugu

SEQ ID NO: 665116 - RNA, 21 nt, Artificial Sequence
  Synthetic
gcuaaauuaaaauaucacugu

SEQ ID NO: 665117 - RNA, 22 nt, Artificial Sequence
  Synthetic
agcuaaauuaaaauaucacugu

SEQ ID NO: 665118 - RNA, 23 nt, Artificial Sequence
  Synthetic
gagcuaaauuaaaauaucacugu

SEQ ID NO: 665119 - RNA, 24 nt, Artificial Sequence
  Synthetic
agagcuaaauuaaaauaucacugu

SEQ ID NO: 665120 - RNA, 18 nt, Artificial Sequence
  Synthetic
uuauaguuuuaucacugu

SEQ ID NO: 665121 - RNA, 19 nt, Artificial Sequence
  Synthetic
uuuauaguuuuaucacugu

SEQ ID NO: 665122 - RNA, 20 nt, Artificial Sequence
  Synthetic
cuuuauaguuuuaucacugu

SEQ ID NO: 665123 - RNA, 21 nt, Artificial Sequence
  Synthetic
gcuuuauaguuuuaucacugu

SEQ ID NO: 665124 - RNA, 22 nt, Artificial Sequence
  Synthetic
ugcuuuauaguuuuaucacugu

SEQ ID NO: 665125 - RNA, 23 nt, Artificial Sequence
  Synthetic
cugcuuuauaguuuuaucacugu

SEQ ID NO: 665126 - RNA, 24 nt, Artificial Sequence
  Synthetic
gcugcuuuauaguuuuaucacugu

SEQ ID NO: 665127 - RNA, 18 nt, Artificial Sequence
  Synthetic
ugccuucaaagagacugu

SEQ ID NO: 665128 - RNA, 19 nt, Artificial Sequence
  Synthetic
cugccuucaaagagacugu

SEQ ID NO: 665129 - RNA, 20 nt, Artificial Sequence
  Synthetic
ccugccuucaaagagacugu

SEQ ID NO: 665130 - RNA, 21 nt, Artificial Sequence
  Synthetic
gccugccuucaaagagacugu

SEQ ID NO: 665131 - RNA, 22 nt, Artificial Sequence
  Synthetic
ugccugccuucaaagagacugu

SEQ ID NO: 665132 - RNA, 23 nt, Artificial Sequence
  Synthetic
uugccugccuucaaagagacugu

SEQ ID NO: 665133 - RNA, 24 nt, Artificial Sequence
  Synthetic
uuugccugccuucaaagagacugu

SEQ ID NO: 665134 - RNA, 18 nt, Artificial Sequence
  Synthetic
aaucguaauagagacugu

SEQ ID NO: 665135 - RNA, 19 nt, Artificial Sequence
  Synthetic
uaaucguaauagagacugu

SEQ ID NO: 665136 - RNA, 20 nt, Artificial Sequence
  Synthetic
uuaaucguaauagagacugu

SEQ ID NO: 665137 - RNA, 21 nt, Artificial Sequence
  Synthetic
auuaaucguaauagagacugu

SEQ ID NO: 665138 - RNA, 22 nt, Artificial Sequence
  Synthetic
aauuaaucguaauagagacugu

SEQ ID NO: 665139 - RNA, 23 nt, Artificial Sequence
  Synthetic
gaauuaaucguaauagagacugu

SEQ ID NO: 665140 - RNA, 24 nt, Artificial Sequence
  Synthetic
ugaauuaaucguaauagagacugu

SEQ ID NO: 665141 - RNA, 18 nt, Artificial Sequence
  Synthetic
caaauucugagggacugu

SEQ ID NO: 665142 - RNA, 19 nt, Artificial Sequence
  Synthetic
ccaaauucugagggacugu

SEQ ID NO: 665143 - RNA, 20 nt, Artificial Sequence
  Synthetic
gccaaauucugagggacugu

SEQ ID NO: 665144 - RNA, 21 nt, Artificial Sequence
  Synthetic
ugccaaauucugagggacugu

SEQ ID NO: 665145 - RNA, 22 nt, Artificial Sequence
  Synthetic
cugccaaauucugagggacugu

SEQ ID NO: 665146 - RNA, 23 nt, Artificial Sequence
  Synthetic
ucugccaaauucugagggacugu

SEQ ID NO: 665147 - RNA, 24 nt, Artificial Sequence
  Synthetic
uucugccaaauucugagggacugu

SEQ ID NO: 665148 - RNA, 18 nt, Artificial Sequence
  Synthetic
gggagauuaguggacugu

SEQ ID NO: 665149 - RNA, 19 nt, Artificial Sequence
  Synthetic
agggagauuaguggacugu

SEQ ID NO: 665150 - RNA, 20 nt, Artificial Sequence
  Synthetic
aagggagauuaguggacugu

SEQ ID NO: 665151 - RNA, 21 nt, Artificial Sequence
  Synthetic
aaagggagauuaguggacugu

SEQ ID NO: 665152 - RNA, 22 nt, Artificial Sequence
  Synthetic
caaagggagauuaguggacugu

SEQ ID NO: 665153 - RNA, 23 nt, Artificial Sequence
  Synthetic
acaaagggagauuaguggacugu

SEQ ID NO: 665154 - RNA, 24 nt, Artificial Sequence
  Synthetic
uacaaagggagauuaguggacugu

SEQ ID NO: 665155 - RNA, 18 nt, Artificial Sequence
  Synthetic
aagacuuugagugacugu

SEQ ID NO: 665156 - RNA, 19 nt, Artificial Sequence
  Synthetic
uaagacuuugagugacugu

SEQ ID NO: 665157 - RNA, 20 nt, Artificial Sequence
  Synthetic
uuaagacuuugagugacugu

SEQ ID NO: 665158 - RNA, 21 nt, Artificial Sequence
  Synthetic
guuaagacuuugagugacugu

SEQ ID NO: 665159 - RNA, 22 nt, Artificial Sequence
  Synthetic
aguuaagacuuugagugacugu

SEQ ID NO: 665160 - RNA, 23 nt, Artificial Sequence
  Synthetic
gaguuaagacuuugagugacugu

SEQ ID NO: 665161 - RNA, 24 nt, Artificial Sequence
  Synthetic
ugaguuaagacuuugagugacugu

SEQ ID NO: 665162 - RNA, 18 nt, Artificial Sequence
  Synthetic
ugcaccauuuuauacugu

SEQ ID NO: 665163 - RNA, 19 nt, Artificial Sequence
  Synthetic
gugcaccauuuuauacugu

SEQ ID NO: 665164 - RNA, 20 nt, Artificial Sequence
  Synthetic
ugugcaccauuuuauacugu

SEQ ID NO: 665165 - RNA, 21 nt, Artificial Sequence
  Synthetic
augugcaccauuuuauacugu

SEQ ID NO: 665166 - RNA, 22 nt, Artificial Sequence
  Synthetic
uaugugcaccauuuuauacugu

SEQ ID NO: 665167 - RNA, 23 nt, Artificial Sequence
  Synthetic
uuaugugcaccauuuuauacugu

SEQ ID NO: 665168 - RNA, 24 nt, Artificial Sequence
  Synthetic
uuuaugugcaccauuuuauacugu

SEQ ID NO: 665169 - RNA, 18 nt, Artificial Sequence
  Synthetic
caucuauacaccuacugu

SEQ ID NO: 665170 - RNA, 19 nt, Artificial Sequence
  Synthetic
ccaucuauacaccuacugu

SEQ ID NO: 665171 - RNA, 20 nt, Artificial Sequence
  Synthetic
uccaucuauacaccuacugu

SEQ ID NO: 665172 - RNA, 21 nt, Artificial Sequence
  Synthetic
uuccaucuauacaccuacugu

SEQ ID NO: 665173 - RNA, 22 nt, Artificial Sequence
  Synthetic
uuuccaucuauacaccuacugu

SEQ ID NO: 665174 - RNA, 23 nt, Artificial Sequence
  Synthetic
uuuuccaucuauacaccuacugu

SEQ ID NO: 665175 - RNA, 24 nt, Artificial Sequence
  Synthetic
cuuuuccaucuauacaccuacugu

SEQ ID NO: 665176 - RNA, 18 nt, Artificial Sequence
  Synthetic
uguguauucugcuacugu

SEQ ID NO: 665177 - RNA, 19 nt, Artificial Sequence
  Synthetic
auguguauucugcuacugu

SEQ ID NO: 665178 - RNA, 20 nt, Artificial Sequence
  Synthetic
aauguguauucugcuacugu

SEQ ID NO: 665179 - RNA, 21 nt, Artificial Sequence
  Synthetic
uaauguguauucugcuacugu

SEQ ID NO: 665180 - RNA, 22 nt, Artificial Sequence
  Synthetic
guaauguguauucugcuacugu

SEQ ID NO: 665181 - RNA, 23 nt, Artificial Sequence
  Synthetic
aguaauguguauucugcuacugu

SEQ ID NO: 665182 - RNA, 24 nt, Artificial Sequence
  Synthetic
aaguaauguguauucugcuacugu

SEQ ID NO: 665183 - RNA, 18 nt, Artificial Sequence
  Synthetic
gcuucauaggauuacugu

SEQ ID NO: 665184 - RNA, 19 nt, Artificial Sequence
  Synthetic
ugcuucauaggauuacugu

SEQ ID NO: 665185 - RNA, 20 nt, Artificial Sequence
  Synthetic
cugcuucauaggauuacugu

SEQ ID NO: 665186 - RNA, 21 nt, Artificial Sequence
  Synthetic
ccugcuucauaggauuacugu

SEQ ID NO: 665187 - RNA, 22 nt, Artificial Sequence
  Synthetic
accugcuucauaggauuacugu

SEQ ID NO: 665188 - RNA, 23 nt, Artificial Sequence
  Synthetic
caccugcuucauaggauuacugu

SEQ ID NO: 665189 - RNA, 24 nt, Artificial Sequence
  Synthetic
gcaccugcuucauaggauuacugu

SEQ ID NO: 665190 - RNA, 18 nt, Artificial Sequence
  Synthetic
ggaccuaguuauuacugu

SEQ ID NO: 665191 - RNA, 19 nt, Artificial Sequence
  Synthetic
aggaccuaguuauuacugu

SEQ ID NO: 665192 - RNA, 20 nt, Artificial Sequence
  Synthetic
gaggaccuaguuauuacugu

SEQ ID NO: 665193 - RNA, 21 nt, Artificial Sequence
  Synthetic
ugaggaccuaguuauuacugu

SEQ ID NO: 665194 - RNA, 22 nt, Artificial Sequence
  Synthetic
uugaggaccuaguuauuacugu

SEQ ID NO: 665195 - RNA, 23 nt, Artificial Sequence
  Synthetic
auugaggaccuaguuauuacugu

SEQ ID NO: 665196 - RNA, 24 nt, Artificial Sequence
  Synthetic
uauugaggaccuaguuauuacugu

SEQ ID NO: 665197 - RNA, 18 nt, Artificial Sequence
  Synthetic
ugguagaaaucuuacugu

SEQ ID NO: 665198 - RNA, 19 nt, Artificial Sequence
  Synthetic
gugguagaaaucuuacugu

SEQ ID NO: 665199 - RNA, 20 nt, Artificial Sequence
  Synthetic
agugguagaaaucuuacugu

SEQ ID NO: 665200 - RNA, 21 nt, Artificial Sequence
  Synthetic
cagugguagaaaucuuacugu

SEQ ID NO: 665201 - RNA, 22 nt, Artificial Sequence
  Synthetic
gcagugguagaaaucuuacugu

SEQ ID NO: 665202 - RNA, 23 nt, Artificial Sequence
  Synthetic
ugcagugguagaaaucuuacugu

SEQ ID NO: 665203 - RNA, 24 nt, Artificial Sequence
  Synthetic
gugcagugguagaaaucuuacugu

SEQ ID NO: 665204 - RNA, 18 nt, Artificial Sequence
  Synthetic
acuccugcugaaaccugu

SEQ ID NO: 665205 - RNA, 19 nt, Artificial Sequence
  Synthetic
uacuccugcugaaaccugu

SEQ ID NO: 665206 - RNA, 20 nt, Artificial Sequence
  Synthetic
auacuccugcugaaaccugu

SEQ ID NO: 665207 - RNA, 21 nt, Artificial Sequence
  Synthetic
cauacuccugcugaaaccugu

SEQ ID NO: 665208 - RNA, 22 nt, Artificial Sequence
  Synthetic
ccauacuccugcugaaaccugu

SEQ ID NO: 665209 - RNA, 23 nt, Artificial Sequence
  Synthetic
cccauacuccugcugaaaccugu

SEQ ID NO: 665210 - RNA, 24 nt, Artificial Sequence
  Synthetic
gcccauacuccugcugaaaccugu

SEQ ID NO: 665211 - RNA, 18 nt, Artificial Sequence
  Synthetic
cauuguggugccaccugu

SEQ ID NO: 665212 - RNA, 19 nt, Artificial Sequence
  Synthetic
ucauuguggugccaccugu

SEQ ID NO: 665213 - RNA, 20 nt, Artificial Sequence
  Synthetic
uucauuguggugccaccugu

SEQ ID NO: 665214 - RNA, 21 nt, Artificial Sequence
  Synthetic
auucauuguggugccaccugu

SEQ ID NO: 665215 - RNA, 22 nt, Artificial Sequence
  Synthetic
uauucauuguggugccaccugu

SEQ ID NO: 665216 - RNA, 23 nt, Artificial Sequence
  Synthetic
auauucauuguggugccaccugu

SEQ ID NO: 665217 - RNA, 24 nt, Artificial Sequence
  Synthetic
uauauucauuguggugccaccugu

SEQ ID NO: 665218 - RNA, 18 nt, Artificial Sequence
  Synthetic
cuuugccacaugaccugu

SEQ ID NO: 665219 - RNA, 19 nt, Artificial Sequence
  Synthetic
ucuuugccacaugaccugu

SEQ ID NO: 665220 - RNA, 20 nt, Artificial Sequence
  Synthetic
cucuuugccacaugaccugu

SEQ ID NO: 665221 - RNA, 21 nt, Artificial Sequence
  Synthetic
acucuuugccacaugaccugu

SEQ ID NO: 665222 - RNA, 22 nt, Artificial Sequence
  Synthetic
uacucuuugccacaugaccugu

SEQ ID NO: 665223 - RNA, 23 nt, Artificial Sequence
  Synthetic
auacucuuugccacaugaccugu

SEQ ID NO: 665224 - RNA, 24 nt, Artificial Sequence
  Synthetic
cauacucuuugccacaugaccugu

SEQ ID NO: 665225 - RNA, 18 nt, Artificial Sequence
  Synthetic
gaacaaaaauguaccugu

SEQ ID NO: 665226 - RNA, 19 nt, Artificial Sequence
  Synthetic
ggaacaaaaauguaccugu

SEQ ID NO: 665227 - RNA, 20 nt, Artificial Sequence
  Synthetic
aggaacaaaaauguaccugu

SEQ ID NO: 665228 - RNA, 21 nt, Artificial Sequence
  Synthetic
uaggaacaaaaauguaccugu

SEQ ID NO: 665229 - RNA, 22 nt, Artificial Sequence
  Synthetic
auaggaacaaaaauguaccugu

SEQ ID NO: 665230 - RNA, 23 nt, Artificial Sequence
  Synthetic
aauaggaacaaaaauguaccugu

SEQ ID NO: 665231 - RNA, 24 nt, Artificial Sequence
  Synthetic
uaauaggaacaaaaauguaccugu

SEQ ID NO: 665232 - RNA, 18 nt, Artificial Sequence
  Synthetic
guggcuuuuugccccugu

SEQ ID NO: 665233 - RNA, 19 nt, Artificial Sequence
  Synthetic
gguggcuuuuugccccugu

SEQ ID NO: 665234 - RNA, 20 nt, Artificial Sequence
  Synthetic
ugguggcuuuuugccccugu

SEQ ID NO: 665235 - RNA, 21 nt, Artificial Sequence
  Synthetic
cugguggcuuuuugccccugu

SEQ ID NO: 665236 - RNA, 22 nt, Artificial Sequence
  Synthetic
acugguggcuuuuugccccugu

SEQ ID NO: 665237 - RNA, 23 nt, Artificial Sequence
  Synthetic
gacugguggcuuuuugccccugu

SEQ ID NO: 665238 - RNA, 24 nt, Artificial Sequence
  Synthetic
agacugguggcuuuuugccccugu

SEQ ID NO: 665239 - RNA, 18 nt, Artificial Sequence
  Synthetic
aaggcagauguccccugu

SEQ ID NO: 665240 - RNA, 19 nt, Artificial Sequence
  Synthetic
aaaggcagauguccccugu

SEQ ID NO: 665241 - RNA, 20 nt, Artificial Sequence
  Synthetic
caaaggcagauguccccugu

SEQ ID NO: 665242 - RNA, 21 nt, Artificial Sequence
  Synthetic
gcaaaggcagauguccccugu

SEQ ID NO: 665243 - RNA, 22 nt, Artificial Sequence
  Synthetic
agcaaaggcagauguccccugu

SEQ ID NO: 665244 - RNA, 23 nt, Artificial Sequence
  Synthetic
uagcaaaggcagauguccccugu

SEQ ID NO: 665245 - RNA, 24 nt, Artificial Sequence
  Synthetic
guagcaaaggcagauguccccugu

SEQ ID NO: 665246 - RNA, 18 nt, Artificial Sequence
  Synthetic
uuauuauaauuccccugu

SEQ ID NO: 665247 - RNA, 19 nt, Artificial Sequence
  Synthetic
auuauuauaauuccccugu

SEQ ID NO: 665248 - RNA, 20 nt, Artificial Sequence
  Synthetic
cauuauuauaauuccccugu

SEQ ID NO: 665249 - RNA, 21 nt, Artificial Sequence
  Synthetic
acauuauuauaauuccccugu

SEQ ID NO: 665250 - RNA, 22 nt, Artificial Sequence
  Synthetic
cacauuauuauaauuccccugu

SEQ ID NO: 665251 - RNA, 23 nt, Artificial Sequence
  Synthetic
ccacauuauuauaauuccccugu

SEQ ID NO: 665252 - RNA, 24 nt, Artificial Sequence
  Synthetic
uccacauuauuauaauuccccugu

SEQ ID NO: 665253 - RNA, 18 nt, Artificial Sequence
  Synthetic
acuggaacacagcccugu

SEQ ID NO: 665254 - RNA, 19 nt, Artificial Sequence
  Synthetic
aacuggaacacagcccugu

SEQ ID NO: 665255 - RNA, 20 nt, Artificial Sequence
  Synthetic
aaacuggaacacagcccugu

SEQ ID NO: 665256 - RNA, 21 nt, Artificial Sequence
  Synthetic
uaaacuggaacacagcccugu

SEQ ID NO: 665257 - RNA, 22 nt, Artificial Sequence
  Synthetic
uuaaacuggaacacagcccugu

SEQ ID NO: 665258 - RNA, 23 nt, Artificial Sequence
  Synthetic
guuaaacuggaacacagcccugu

SEQ ID NO: 665259 - RNA, 24 nt, Artificial Sequence
  Synthetic
uguuaaacuggaacacagcccugu

SEQ ID NO: 665260 - RNA, 18 nt, Artificial Sequence
  Synthetic
guacagccucuucccugu

SEQ ID NO: 665261 - RNA, 19 nt, Artificial Sequence
  Synthetic
aguacagccucuucccugu

SEQ ID NO: 665262 - RNA, 20 nt, Artificial Sequence
  Synthetic
uaguacagccucuucccugu

SEQ ID NO: 665263 - RNA, 21 nt, Artificial Sequence
  Synthetic
auaguacagccucuucccugu

SEQ ID NO: 665264 - RNA, 22 nt, Artificial Sequence
  Synthetic
uauaguacagccucuucccugu

SEQ ID NO: 665265 - RNA, 23 nt, Artificial Sequence
  Synthetic
auauaguacagccucuucccugu

SEQ ID NO: 665266 - RNA, 24 nt, Artificial Sequence
  Synthetic
uauauaguacagccucuucccugu

SEQ ID NO: 665267 - RNA, 18 nt, Artificial Sequence
  Synthetic
uauuauaauuaagccugu

SEQ ID NO: 665268 - RNA, 19 nt, Artificial Sequence
  Synthetic
uuauuauaauuaagccugu

SEQ ID NO: 665269 - RNA, 20 nt, Artificial Sequence
  Synthetic
uuuauuauaauuaagccugu

SEQ ID NO: 665270 - RNA, 21 nt, Artificial Sequence
  Synthetic
auuuauuauaauuaagccugu

SEQ ID NO: 665271 - RNA, 22 nt, Artificial Sequence
  Synthetic
uauuuauuauaauuaagccugu

SEQ ID NO: 665272 - RNA, 23 nt, Artificial Sequence
  Synthetic
auauuuauuauaauuaagccugu

SEQ ID NO: 665273 - RNA, 24 nt, Artificial Sequence
  Synthetic
aauauuuauuauaauuaagccugu

SEQ ID NO: 665274 - RNA, 18 nt, Artificial Sequence
  Synthetic
agauuaacuugagccugu

SEQ ID NO: 665275 - RNA, 19 nt, Artificial Sequence
  Synthetic
cagauuaacuugagccugu

SEQ ID NO: 665276 - RNA, 20 nt, Artificial Sequence
  Synthetic
gcagauuaacuugagccugu

SEQ ID NO: 665277 - RNA, 21 nt, Artificial Sequence
  Synthetic
ugcagauuaacuugagccugu

SEQ ID NO: 665278 - RNA, 22 nt, Artificial Sequence
  Synthetic
augcagauuaacuugagccugu

SEQ ID NO: 665279 - RNA, 23 nt, Artificial Sequence
  Synthetic
uaugcagauuaacuugagccugu

SEQ ID NO: 665280 - RNA, 24 nt, Artificial Sequence
  Synthetic
auaugcagauuaacuugagccugu

SEQ ID NO: 665281 - RNA, 18 nt, Artificial Sequence
  Synthetic
ucucccaaaaaggccugu

SEQ ID NO: 665282 - RNA, 19 nt, Artificial Sequence
  Synthetic
gucucccaaaaaggccugu

SEQ ID NO: 665283 - RNA, 20 nt, Artificial Sequence
  Synthetic
ugucucccaaaaaggccugu

SEQ ID NO: 665284 - RNA, 21 nt, Artificial Sequence
  Synthetic
uugucucccaaaaaggccugu

SEQ ID NO: 665285 - RNA, 22 nt, Artificial Sequence
  Synthetic
cuugucucccaaaaaggccugu

SEQ ID NO: 665286 - RNA, 23 nt, Artificial Sequence
  Synthetic
ucuugucucccaaaaaggccugu

SEQ ID NO: 665287 - RNA, 24 nt, Artificial Sequence
  Synthetic
gucuugucucccaaaaaggccugu

SEQ ID NO: 665288 - RNA, 18 nt, Artificial Sequence
  Synthetic
ucacacacuggggccugu

SEQ ID NO: 665289 - RNA, 19 nt, Artificial Sequence
  Synthetic
aucacacacuggggccugu

SEQ ID NO: 665290 - RNA, 20 nt, Artificial Sequence
  Synthetic
caucacacacuggggccugu

SEQ ID NO: 665291 - RNA, 21 nt, Artificial Sequence
  Synthetic
acaucacacacuggggccugu

SEQ ID NO: 665292 - RNA, 22 nt, Artificial Sequence
  Synthetic
aacaucacacacuggggccugu

SEQ ID NO: 665293 - RNA, 23 nt, Artificial Sequence
  Synthetic
gaacaucacacacuggggccugu

SEQ ID NO: 665294 - RNA, 24 nt, Artificial Sequence
  Synthetic
ggaacaucacacacuggggccugu

SEQ ID NO: 665295 - RNA, 18 nt, Artificial Sequence
  Synthetic
ucacuaaguauggccugu

SEQ ID NO: 665296 - RNA, 19 nt, Artificial Sequence
  Synthetic
gucacuaaguauggccugu

SEQ ID NO: 665297 - RNA, 20 nt, Artificial Sequence
  Synthetic
agucacuaaguauggccugu

SEQ ID NO: 665298 - RNA, 21 nt, Artificial Sequence
  Synthetic
uagucacuaaguauggccugu

SEQ ID NO: 665299 - RNA, 22 nt, Artificial Sequence
  Synthetic
uuagucacuaaguauggccugu

SEQ ID NO: 665300 - RNA, 23 nt, Artificial Sequence
  Synthetic
uuuagucacuaaguauggccugu

SEQ ID NO: 665301 - RNA, 24 nt, Artificial Sequence
  Synthetic
uuuuagucacuaaguauggccugu

SEQ ID NO: 665302 - RNA, 18 nt, Artificial Sequence
  Synthetic
acacacacuggugccugu

SEQ ID NO: 665303 - RNA, 19 nt, Artificial Sequence
  Synthetic
aacacacacuggugccugu

SEQ ID NO: 665304 - RNA, 20 nt, Artificial Sequence
  Synthetic
caacacacacuggugccugu

SEQ ID NO: 665305 - RNA, 21 nt, Artificial Sequence
  Synthetic
acaacacacacuggugccugu

SEQ ID NO: 665306 - RNA, 22 nt, Artificial Sequence
  Synthetic
aacaacacacacuggugccugu

SEQ ID NO: 665307 - RNA, 23 nt, Artificial Sequence
  Synthetic
gaacaacacacacuggugccugu

SEQ ID NO: 665308 - RNA, 24 nt, Artificial Sequence
  Synthetic
ggaacaacacacacuggugccugu

SEQ ID NO: 665309 - RNA, 18 nt, Artificial Sequence
  Synthetic
uccugcauuguugccugu

SEQ ID NO: 665310 - RNA, 19 nt, Artificial Sequence
  Synthetic
auccugcauuguugccugu

SEQ ID NO: 665311 - RNA, 20 nt, Artificial Sequence
  Synthetic
aauccugcauuguugccugu

SEQ ID NO: 665312 - RNA, 21 nt, Artificial Sequence
  Synthetic
aaauccugcauuguugccugu

SEQ ID NO: 665313 - RNA, 22 nt, Artificial Sequence
  Synthetic
caaauccugcauuguugccugu

SEQ ID NO: 665314 - RNA, 23 nt, Artificial Sequence
  Synthetic
ccaaauccugcauuguugccugu

SEQ ID NO: 665315 - RNA, 24 nt, Artificial Sequence
  Synthetic
uccaaauccugcauuguugccugu

SEQ ID NO: 665316 - RNA, 18 nt, Artificial Sequence
  Synthetic
aaaagcaguuuugccugu

SEQ ID NO: 665317 - RNA, 19 nt, Artificial Sequence
  Synthetic
gaaaagcaguuuugccugu

SEQ ID NO: 665318 - RNA, 20 nt, Artificial Sequence
  Synthetic
ggaaaagcaguuuugccugu

SEQ ID NO: 665319 - RNA, 21 nt, Artificial Sequence
  Synthetic
aggaaaagcaguuuugccugu

SEQ ID NO: 665320 - RNA, 22 nt, Artificial Sequence
  Synthetic
aaggaaaagcaguuuugccugu

SEQ ID NO: 665321 - RNA, 23 nt, Artificial Sequence
  Synthetic
uaaggaaaagcaguuuugccugu

SEQ ID NO: 665322 - RNA, 24 nt, Artificial Sequence
  Synthetic
uuaaggaaaagcaguuuugccugu

SEQ ID NO: 665323 - RNA, 18 nt, Artificial Sequence
  Synthetic
uauuuuaaauaauccugu

SEQ ID NO: 665324 - RNA, 19 nt, Artificial Sequence
  Synthetic
auauuuuaaauaauccugu

SEQ ID NO: 665325 - RNA, 20 nt, Artificial Sequence
  Synthetic
gauauuuuaaauaauccugu

SEQ ID NO: 665326 - RNA, 21 nt, Artificial Sequence
  Synthetic
ggauauuuuaaauaauccugu

SEQ ID NO: 665327 - RNA, 22 nt, Artificial Sequence
  Synthetic
uggauauuuuaaauaauccugu

SEQ ID NO: 665328 - RNA, 23 nt, Artificial Sequence
  Synthetic
uuggauauuuuaaauaauccugu

SEQ ID NO: 665329 - RNA, 24 nt, Artificial Sequence
  Synthetic
guuggauauuuuaaauaauccugu

SEQ ID NO: 665330 - RNA, 18 nt, Artificial Sequence
  Synthetic
gucuuaaaaaccuccugu

SEQ ID NO: 665331 - RNA, 19 nt, Artificial Sequence
  Synthetic
ggucuuaaaaaccuccugu

SEQ ID NO: 665332 - RNA, 20 nt, Artificial Sequence
  Synthetic
aggucuuaaaaaccuccugu

SEQ ID NO: 665333 - RNA, 21 nt, Artificial Sequence
  Synthetic
uaggucuuaaaaaccuccugu

SEQ ID NO: 665334 - RNA, 22 nt, Artificial Sequence
  Synthetic
auaggucuuaaaaaccuccugu

SEQ ID NO: 665335 - RNA, 23 nt, Artificial Sequence
  Synthetic
uauaggucuuaaaaaccuccugu

SEQ ID NO: 665336 - RNA, 24 nt, Artificial Sequence
  Synthetic
uuauaggucuuaaaaaccuccugu

SEQ ID NO: 665337 - RNA, 18 nt, Artificial Sequence
  Synthetic
aaaaauguucccuccugu

SEQ ID NO: 665338 - RNA, 19 nt, Artificial Sequence
  Synthetic
aaaaaauguucccuccugu

SEQ ID NO: 665339 - RNA, 20 nt, Artificial Sequence
  Synthetic
uaaaaaauguucccuccugu

SEQ ID NO: 665340 - RNA, 21 nt, Artificial Sequence
  Synthetic
cuaaaaaauguucccuccugu

SEQ ID NO: 665341 - RNA, 22 nt, Artificial Sequence
  Synthetic
ccuaaaaaauguucccuccugu

SEQ ID NO: 665342 - RNA, 23 nt, Artificial Sequence
  Synthetic
accuaaaaaauguucccuccugu

SEQ ID NO: 665343 - RNA, 24 nt, Artificial Sequence
  Synthetic
aaccuaaaaaauguucccuccugu

SEQ ID NO: 665344 - RNA, 18 nt, Artificial Sequence
  Synthetic
cagccagagcucuccugu

SEQ ID NO: 665345 - RNA, 19 nt, Artificial Sequence
  Synthetic
ccagccagagcucuccugu

SEQ ID NO: 665346 - RNA, 20 nt, Artificial Sequence
  Synthetic
gccagccagagcucuccugu

SEQ ID NO: 665347 - RNA, 21 nt, Artificial Sequence
  Synthetic
ugccagccagagcucuccugu

SEQ ID NO: 665348 - RNA, 22 nt, Artificial Sequence
  Synthetic
augccagccagagcucuccugu

SEQ ID NO: 665349 - RNA, 23 nt, Artificial Sequence
  Synthetic
gaugccagccagagcucuccugu

SEQ ID NO: 665350 - RNA, 24 nt, Artificial Sequence
  Synthetic
agaugccagccagagcucuccugu

SEQ ID NO: 665351 - RNA, 18 nt, Artificial Sequence
  Synthetic
uuguuuucugucuccugu

SEQ ID NO: 665352 - RNA, 19 nt, Artificial Sequence
  Synthetic
uuuguuuucugucuccugu

SEQ ID NO: 665353 - RNA, 20 nt, Artificial Sequence
  Synthetic
uuuuguuuucugucuccugu

SEQ ID NO: 665354 - RNA, 21 nt, Artificial Sequence
  Synthetic
auuuuguuuucugucuccugu

SEQ ID NO: 665355 - RNA, 22 nt, Artificial Sequence
  Synthetic
uauuuuguuuucugucuccugu

SEQ ID NO: 665356 - RNA, 23 nt, Artificial Sequence
  Synthetic
uuauuuuguuuucugucuccugu

SEQ ID NO: 665357 - RNA, 24 nt, Artificial Sequence
  Synthetic
guuauuuuguuuucugucuccugu

SEQ ID NO: 665358 - RNA, 18 nt, Artificial Sequence
  Synthetic
cucagcuguuauuccugu

SEQ ID NO: 665359 - RNA, 19 nt, Artificial Sequence
  Synthetic
ccucagcuguuauuccugu

SEQ ID NO: 665360 - RNA, 20 nt, Artificial Sequence
  Synthetic
uccucagcuguuauuccugu

SEQ ID NO: 665361 - RNA, 21 nt, Artificial Sequence
  Synthetic
guccucagcuguuauuccugu

SEQ ID NO: 665362 - RNA, 22 nt, Artificial Sequence
  Synthetic
aguccucagcuguuauuccugu

SEQ ID NO: 665363 - RNA, 23 nt, Artificial Sequence
  Synthetic
caguccucagcuguuauuccugu

SEQ ID NO: 665364 - RNA, 24 nt, Artificial Sequence
  Synthetic
acaguccucagcuguuauuccugu

SEQ ID NO: 665365 - RNA, 18 nt, Artificial Sequence
  Synthetic
ucacucauagguuccugu

SEQ ID NO: 665366 - RNA, 19 nt, Artificial Sequence
  Synthetic
aucacucauagguuccugu

SEQ ID NO: 665367 - RNA, 20 nt, Artificial Sequence
  Synthetic
caucacucauagguuccugu

SEQ ID NO: 665368 - RNA, 21 nt, Artificial Sequence
  Synthetic
ccaucacucauagguuccugu

SEQ ID NO: 665369 - RNA, 22 nt, Artificial Sequence
  Synthetic
cccaucacucauagguuccugu

SEQ ID NO: 665370 - RNA, 23 nt, Artificial Sequence
  Synthetic
acccaucacucauagguuccugu

SEQ ID NO: 665371 - RNA, 24 nt, Artificial Sequence
  Synthetic
cacccaucacucauagguuccugu

SEQ ID NO: 665372 - RNA, 18 nt, Artificial Sequence
  Synthetic
caguuccaugguuccugu

SEQ ID NO: 665373 - RNA, 19 nt, Artificial Sequence
  Synthetic
acaguuccaugguuccugu

SEQ ID NO: 665374 - RNA, 20 nt, Artificial Sequence
  Synthetic
aacaguuccaugguuccugu

SEQ ID NO: 665375 - RNA, 21 nt, Artificial Sequence
  Synthetic
caacaguuccaugguuccugu

SEQ ID NO: 665376 - RNA, 22 nt, Artificial Sequence
  Synthetic
gcaacaguuccaugguuccugu

SEQ ID NO: 665377 - RNA, 23 nt, Artificial Sequence
  Synthetic
ggcaacaguuccaugguuccugu

SEQ ID NO: 665378 - RNA, 24 nt, Artificial Sequence
  Synthetic
gggcaacaguuccaugguuccugu

SEQ ID NO: 665379 - RNA, 18 nt, Artificial Sequence
  Synthetic
auuacauugcuuuccugu

SEQ ID NO: 665380 - RNA, 19 nt, Artificial Sequence
  Synthetic
uauuacauugcuuuccugu

SEQ ID NO: 665381 - RNA, 20 nt, Artificial Sequence
  Synthetic
uuauuacauugcuuuccugu

SEQ ID NO: 665382 - RNA, 21 nt, Artificial Sequence
  Synthetic
cuuauuacauugcuuuccugu

SEQ ID NO: 665383 - RNA, 22 nt, Artificial Sequence
  Synthetic
ccuuauuacauugcuuuccugu

SEQ ID NO: 665384 - RNA, 23 nt, Artificial Sequence
  Synthetic
accuuauuacauugcuuuccugu

SEQ ID NO: 665385 - RNA, 24 nt, Artificial Sequence
  Synthetic
aaccuuauuacauugcuuuccugu

SEQ ID NO: 665386 - RNA, 18 nt, Artificial Sequence
  Synthetic
acucaaccaccaagcugu

SEQ ID NO: 665387 - RNA, 19 nt, Artificial Sequence
  Synthetic
aacucaaccaccaagcugu

SEQ ID NO: 665388 - RNA, 20 nt, Artificial Sequence
  Synthetic
gaacucaaccaccaagcugu

SEQ ID NO: 665389 - RNA, 21 nt, Artificial Sequence
  Synthetic
agaacucaaccaccaagcugu

SEQ ID NO: 665390 - RNA, 22 nt, Artificial Sequence
  Synthetic
cagaacucaaccaccaagcugu

SEQ ID NO: 665391 - RNA, 23 nt, Artificial Sequence
  Synthetic
acagaacucaaccaccaagcugu

SEQ ID NO: 665392 - RNA, 24 nt, Artificial Sequence
  Synthetic
cacagaacucaaccaccaagcugu

SEQ ID NO: 665393 - RNA, 18 nt, Artificial Sequence
  Synthetic
uuuuauccuucaagcugu

SEQ ID NO: 665394 - RNA, 19 nt, Artificial Sequence
  Synthetic
cuuuuauccuucaagcugu

SEQ ID NO: 665395 - RNA, 20 nt, Artificial Sequence
  Synthetic
ccuuuuauccuucaagcugu

SEQ ID NO: 665396 - RNA, 21 nt, Artificial Sequence
  Synthetic
accuuuuauccuucaagcugu

SEQ ID NO: 665397 - RNA, 22 nt, Artificial Sequence
  Synthetic
gaccuuuuauccuucaagcugu

SEQ ID NO: 665398 - RNA, 23 nt, Artificial Sequence
  Synthetic
ugaccuuuuauccuucaagcugu

SEQ ID NO: 665399 - RNA, 24 nt, Artificial Sequence
  Synthetic
uugaccuuuuauccuucaagcugu

SEQ ID NO: 665400 - RNA, 18 nt, Artificial Sequence
  Synthetic
aagucucuuguaagcugu

SEQ ID NO: 665401 - RNA, 19 nt, Artificial Sequence
  Synthetic
aaagucucuuguaagcugu

SEQ ID NO: 665402 - RNA, 20 nt, Artificial Sequence
  Synthetic
aaaagucucuuguaagcugu

SEQ ID NO: 665403 - RNA, 21 nt, Artificial Sequence
  Synthetic
gaaaagucucuuguaagcugu

SEQ ID NO: 665404 - RNA, 22 nt, Artificial Sequence
  Synthetic
ggaaaagucucuuguaagcugu

SEQ ID NO: 665405 - RNA, 23 nt, Artificial Sequence
  Synthetic
aggaaaagucucuuguaagcugu

SEQ ID NO: 665406 - RNA, 24 nt, Artificial Sequence
  Synthetic
aaggaaaagucucuuguaagcugu

SEQ ID NO: 665407 - RNA, 18 nt, Artificial Sequence
  Synthetic
ugaaucacuuuaagcugu

SEQ ID NO: 665408 - RNA, 19 nt, Artificial Sequence
  Synthetic
augaaucacuuuaagcugu

SEQ ID NO: 665409 - RNA, 20 nt, Artificial Sequence
  Synthetic
aaugaaucacuuuaagcugu

SEQ ID NO: 665410 - RNA, 21 nt, Artificial Sequence
  Synthetic
aaaugaaucacuuuaagcugu

SEQ ID NO: 665411 - RNA, 22 nt, Artificial Sequence
  Synthetic
gaaaugaaucacuuuaagcugu

SEQ ID NO: 665412 - RNA, 23 nt, Artificial Sequence
  Synthetic
ugaaaugaaucacuuuaagcugu

SEQ ID NO: 665413 - RNA, 24 nt, Artificial Sequence
  Synthetic
cugaaaugaaucacuuuaagcugu

SEQ ID NO: 665414 - RNA, 18 nt, Artificial Sequence
  Synthetic
caccaaccuaacagcugu

SEQ ID NO: 665415 - RNA, 19 nt, Artificial Sequence
  Synthetic
gcaccaaccuaacagcugu

SEQ ID NO: 665416 - RNA, 20 nt, Artificial Sequence
  Synthetic
ugcaccaaccuaacagcugu

SEQ ID NO: 665417 - RNA, 21 nt, Artificial Sequence
  Synthetic
uugcaccaaccuaacagcugu

SEQ ID NO: 665418 - RNA, 22 nt, Artificial Sequence
  Synthetic
uuugcaccaaccuaacagcugu

SEQ ID NO: 665419 - RNA, 23 nt, Artificial Sequence
  Synthetic
uuuugcaccaaccuaacagcugu

SEQ ID NO: 665420 - RNA, 24 nt, Artificial Sequence
  Synthetic
cuuuugcaccaaccuaacagcugu

SEQ ID NO: 665421 - RNA, 18 nt, Artificial Sequence
  Synthetic
gugauucuuuacagcugu

SEQ ID NO: 665422 - RNA, 19 nt, Artificial Sequence
  Synthetic
ugugauucuuuacagcugu

SEQ ID NO: 665423 - RNA, 20 nt, Artificial Sequence
  Synthetic
uugugauucuuuacagcugu

SEQ ID NO: 665424 - RNA, 21 nt, Artificial Sequence
  Synthetic
auugugauucuuuacagcugu

SEQ ID NO: 665425 - RNA, 22 nt, Artificial Sequence
  Synthetic
uauugugauucuuuacagcugu

SEQ ID NO: 665426 - RNA, 23 nt, Artificial Sequence
  Synthetic
auauugugauucuuuacagcugu

SEQ ID NO: 665427 - RNA, 24 nt, Artificial Sequence
  Synthetic
cauauugugauucuuuacagcugu

SEQ ID NO: 665428 - RNA, 18 nt, Artificial Sequence
  Synthetic
ugaggccuccccagcugu

SEQ ID NO: 665429 - RNA, 19 nt, Artificial Sequence
  Synthetic
gugaggccuccccagcugu

SEQ ID NO: 665430 - RNA, 20 nt, Artificial Sequence
  Synthetic
ugugaggccuccccagcugu

SEQ ID NO: 665431 - RNA, 21 nt, Artificial Sequence
  Synthetic
uugugaggccuccccagcugu

SEQ ID NO: 665432 - RNA, 22 nt, Artificial Sequence
  Synthetic
auugugaggccuccccagcugu

SEQ ID NO: 665433 - RNA, 23 nt, Artificial Sequence
  Synthetic
gauugugaggccuccccagcugu

SEQ ID NO: 665434 - RNA, 24 nt, Artificial Sequence
  Synthetic
agauugugaggccuccccagcugu

SEQ ID NO: 665435 - RNA, 18 nt, Artificial Sequence
  Synthetic
acugccuaguagagcugu

SEQ ID NO: 665436 - RNA, 19 nt, Artificial Sequence
  Synthetic
cacugccuaguagagcugu

SEQ ID NO: 665437 - RNA, 20 nt, Artificial Sequence
  Synthetic
gcacugccuaguagagcugu

SEQ ID NO: 665438 - RNA, 21 nt, Artificial Sequence
  Synthetic
ggcacugccuaguagagcugu

SEQ ID NO: 665439 - RNA, 22 nt, Artificial Sequence
  Synthetic
gggcacugccuaguagagcugu

SEQ ID NO: 665440 - RNA, 23 nt, Artificial Sequence
  Synthetic
ggggcacugccuaguagagcugu

SEQ ID NO: 665441 - RNA, 24 nt, Artificial Sequence
  Synthetic
uggggcacugccuaguagagcugu

SEQ ID NO: 665442 - RNA, 18 nt, Artificial Sequence
  Synthetic
aaauguuaaaauagcugu

SEQ ID NO: 665443 - RNA, 19 nt, Artificial Sequence
  Synthetic
gaaauguuaaaauagcugu

SEQ ID NO: 665444 - RNA, 20 nt, Artificial Sequence
  Synthetic
agaaauguuaaaauagcugu

SEQ ID NO: 665445 - RNA, 21 nt, Artificial Sequence
  Synthetic
uagaaauguuaaaauagcugu

SEQ ID NO: 665446 - RNA, 22 nt, Artificial Sequence
  Synthetic
auagaaauguuaaaauagcugu

SEQ ID NO: 665447 - RNA, 23 nt, Artificial Sequence
  Synthetic
aauagaaauguuaaaauagcugu

SEQ ID NO: 665448 - RNA, 24 nt, Artificial Sequence
  Synthetic
uaauagaaauguuaaaauagcugu

SEQ ID NO: 665449 - RNA, 18 nt, Artificial Sequence
  Synthetic
auaguacacccuagcugu

SEQ ID NO: 665450 - RNA, 19 nt, Artificial Sequence
  Synthetic
gauaguacacccuagcugu

SEQ ID NO: 665451 - RNA, 20 nt, Artificial Sequence
  Synthetic
agauaguacacccuagcugu

SEQ ID NO: 665452 - RNA, 21 nt, Artificial Sequence
  Synthetic
aagauaguacacccuagcugu

SEQ ID NO: 665453 - RNA, 22 nt, Artificial Sequence
  Synthetic
gaagauaguacacccuagcugu

SEQ ID NO: 665454 - RNA, 23 nt, Artificial Sequence
  Synthetic
agaagauaguacacccuagcugu

SEQ ID NO: 665455 - RNA, 24 nt, Artificial Sequence
  Synthetic
aagaagauaguacacccuagcugu

SEQ ID NO: 665456 - RNA, 18 nt, Artificial Sequence
  Synthetic
ggagcuacccaaggcugu

SEQ ID NO: 665457 - RNA, 19 nt, Artificial Sequence
  Synthetic
uggagcuacccaaggcugu

SEQ ID NO: 665458 - RNA, 20 nt, Artificial Sequence
  Synthetic
guggagcuacccaaggcugu

SEQ ID NO: 665459 - RNA, 21 nt, Artificial Sequence
  Synthetic
aguggagcuacccaaggcugu

SEQ ID NO: 665460 - RNA, 22 nt, Artificial Sequence
  Synthetic
gaguggagcuacccaaggcugu

SEQ ID NO: 665461 - RNA, 23 nt, Artificial Sequence
  Synthetic
ggaguggagcuacccaaggcugu

SEQ ID NO: 665462 - RNA, 24 nt, Artificial Sequence
  Synthetic
aggaguggagcuacccaaggcugu

SEQ ID NO: 665463 - RNA, 18 nt, Artificial Sequence
  Synthetic
cuaugcugccaaggcugu

SEQ ID NO: 665464 - RNA, 19 nt, Artificial Sequence
  Synthetic
acuaugcugccaaggcugu

SEQ ID NO: 665465 - RNA, 20 nt, Artificial Sequence
  Synthetic
cacuaugcugccaaggcugu

SEQ ID NO: 665466 - RNA, 21 nt, Artificial Sequence
  Synthetic
acacuaugcugccaaggcugu

SEQ ID NO: 665467 - RNA, 22 nt, Artificial Sequence
  Synthetic
uacacuaugcugccaaggcugu

SEQ ID NO: 665468 - RNA, 23 nt, Artificial Sequence
  Synthetic
guacacuaugcugccaaggcugu

SEQ ID NO: 665469 - RNA, 24 nt, Artificial Sequence
  Synthetic
gguacacuaugcugccaaggcugu

SEQ ID NO: 665470 - RNA, 18 nt, Artificial Sequence
  Synthetic
uuaugccuccaaggcugu

SEQ ID NO: 665471 - RNA, 19 nt, Artificial Sequence
  Synthetic
cuuaugccuccaaggcugu

SEQ ID NO: 665472 - RNA, 20 nt, Artificial Sequence
  Synthetic
acuuaugccuccaaggcugu

SEQ ID NO: 665473 - RNA, 21 nt, Artificial Sequence
  Synthetic
aacuuaugccuccaaggcugu

SEQ ID NO: 665474 - RNA, 22 nt, Artificial Sequence
  Synthetic
caacuuaugccuccaaggcugu

SEQ ID NO: 665475 - RNA, 23 nt, Artificial Sequence
  Synthetic
ccaacuuaugccuccaaggcugu

SEQ ID NO: 665476 - RNA, 24 nt, Artificial Sequence
  Synthetic
cccaacuuaugccuccaaggcugu

SEQ ID NO: 665477 - RNA, 18 nt, Artificial Sequence
  Synthetic
aggaauacagcaggcugu

SEQ ID NO: 665478 - RNA, 19 nt, Artificial Sequence
  Synthetic
gaggaauacagcaggcugu

SEQ ID NO: 665479 - RNA, 20 nt, Artificial Sequence
  Synthetic
agaggaauacagcaggcugu

SEQ ID NO: 665480 - RNA, 21 nt, Artificial Sequence
  Synthetic
cagaggaauacagcaggcugu

SEQ ID NO: 665481 - RNA, 22 nt, Artificial Sequence
  Synthetic
gcagaggaauacagcaggcugu

SEQ ID NO: 665482 - RNA, 23 nt, Artificial Sequence
  Synthetic
agcagaggaauacagcaggcugu

SEQ ID NO: 665483 - RNA, 24 nt, Artificial Sequence
  Synthetic
aagcagaggaauacagcaggcugu

SEQ ID NO: 665484 - RNA, 18 nt, Artificial Sequence
  Synthetic
gcauguugcggaggcugu

SEQ ID NO: 665485 - RNA, 19 nt, Artificial Sequence
  Synthetic
ugcauguugcggaggcugu

SEQ ID NO: 665486 - RNA, 20 nt, Artificial Sequence
  Synthetic
cugcauguugcggaggcugu

SEQ ID NO: 665487 - RNA, 21 nt, Artificial Sequence
  Synthetic
ucugcauguugcggaggcugu

SEQ ID NO: 665488 - RNA, 22 nt, Artificial Sequence
  Synthetic
gucugcauguugcggaggcugu

SEQ ID NO: 665489 - RNA, 23 nt, Artificial Sequence
  Synthetic
ggucugcauguugcggaggcugu

SEQ ID NO: 665490 - RNA, 24 nt, Artificial Sequence
  Synthetic
uggucugcauguugcggaggcugu

SEQ ID NO: 665491 - RNA, 18 nt, Artificial Sequence
  Synthetic
gccaaacaaauuggcugu

SEQ ID NO: 665492 - RNA, 19 nt, Artificial Sequence
  Synthetic
agccaaacaaauuggcugu

SEQ ID NO: 665493 - RNA, 20 nt, Artificial Sequence
  Synthetic
gagccaaacaaauuggcugu

SEQ ID NO: 665494 - RNA, 21 nt, Artificial Sequence
  Synthetic
ggagccaaacaaauuggcugu

SEQ ID NO: 665495 - RNA, 22 nt, Artificial Sequence
  Synthetic
aggagccaaacaaauuggcugu

SEQ ID NO: 665496 - RNA, 23 nt, Artificial Sequence
  Synthetic
gaggagccaaacaaauuggcugu

SEQ ID NO: 665497 - RNA, 24 nt, Artificial Sequence
  Synthetic
agaggagccaaacaaauuggcugu

SEQ ID NO: 665498 - RNA, 18 nt, Artificial Sequence
  Synthetic
cucuuuuuauuuggcugu

SEQ ID NO: 665499 - RNA, 19 nt, Artificial Sequence
  Synthetic
ucucuuuuuauuuggcugu

SEQ ID NO: 665500 - RNA, 20 nt, Artificial Sequence
  Synthetic
uucucuuuuuauuuggcugu

SEQ ID NO: 665501 - RNA, 21 nt, Artificial Sequence
  Synthetic
uuucucuuuuuauuuggcugu

SEQ ID NO: 665502 - RNA, 22 nt, Artificial Sequence
  Synthetic
auuucucuuuuuauuuggcugu

SEQ ID NO: 665503 - RNA, 23 nt, Artificial Sequence
  Synthetic
uauuucucuuuuuauuuggcugu

SEQ ID NO: 665504 - RNA, 24 nt, Artificial Sequence
  Synthetic
uuauuucucuuuuuauuuggcugu

SEQ ID NO: 665505 - RNA, 18 nt, Artificial Sequence
  Synthetic
acuggggcucaaugcugu

SEQ ID NO: 665506 - RNA, 19 nt, Artificial Sequence
  Synthetic
aacuggggcucaaugcugu

SEQ ID NO: 665507 - RNA, 20 nt, Artificial Sequence
  Synthetic
gaacuggggcucaaugcugu

SEQ ID NO: 665508 - RNA, 21 nt, Artificial Sequence
  Synthetic
ggaacuggggcucaaugcugu

SEQ ID NO: 665509 - RNA, 22 nt, Artificial Sequence
  Synthetic
gggaacuggggcucaaugcugu

SEQ ID NO: 665510 - RNA, 23 nt, Artificial Sequence
  Synthetic
ggggaacuggggcucaaugcugu

SEQ ID NO: 665511 - RNA, 24 nt, Artificial Sequence
  Synthetic
uggggaacuggggcucaaugcugu

SEQ ID NO: 665512 - RNA, 18 nt, Artificial Sequence
  Synthetic
caaugcuuugaaugcugu

SEQ ID NO: 665513 - RNA, 19 nt, Artificial Sequence
  Synthetic
acaaugcuuugaaugcugu

SEQ ID NO: 665514 - RNA, 20 nt, Artificial Sequence
  Synthetic
uacaaugcuuugaaugcugu

SEQ ID NO: 665515 - RNA, 21 nt, Artificial Sequence
  Synthetic
cuacaaugcuuugaaugcugu

SEQ ID NO: 665516 - RNA, 22 nt, Artificial Sequence
  Synthetic
ucuacaaugcuuugaaugcugu

SEQ ID NO: 665517 - RNA, 23 nt, Artificial Sequence
  Synthetic
gucuacaaugcuuugaaugcugu

SEQ ID NO: 665518 - RNA, 24 nt, Artificial Sequence
  Synthetic
ggucuacaaugcuuugaaugcugu

SEQ ID NO: 665519 - RNA, 18 nt, Artificial Sequence
  Synthetic
aaagcgagcacaugcugu

SEQ ID NO: 665520 - RNA, 19 nt, Artificial Sequence
  Synthetic
uaaagcgagcacaugcugu

SEQ ID NO: 665521 - RNA, 20 nt, Artificial Sequence
  Synthetic
guaaagcgagcacaugcugu

SEQ ID NO: 665522 - RNA, 21 nt, Artificial Sequence
  Synthetic
cguaaagcgagcacaugcugu

SEQ ID NO: 665523 - RNA, 22 nt, Artificial Sequence
  Synthetic
acguaaagcgagcacaugcugu

SEQ ID NO: 665524 - RNA, 23 nt, Artificial Sequence
  Synthetic
gacguaaagcgagcacaugcugu

SEQ ID NO: 665525 - RNA, 24 nt, Artificial Sequence
  Synthetic
agacguaaagcgagcacaugcugu

SEQ ID NO: 665526 - RNA, 18 nt, Artificial Sequence
  Synthetic
aucuguagaagaugcugu

SEQ ID NO: 665527 - RNA, 19 nt, Artificial Sequence
  Synthetic
aaucuguagaagaugcugu

SEQ ID NO: 665528 - RNA, 20 nt, Artificial Sequence
  Synthetic
gaaucuguagaagaugcugu

SEQ ID NO: 665529 - RNA, 21 nt, Artificial Sequence
  Synthetic
agaaucuguagaagaugcugu

SEQ ID NO: 665530 - RNA, 22 nt, Artificial Sequence
  Synthetic
cagaaucuguagaagaugcugu

SEQ ID NO: 665531 - RNA, 23 nt, Artificial Sequence
  Synthetic
acagaaucuguagaagaugcugu

SEQ ID NO: 665532 - RNA, 24 nt, Artificial Sequence
  Synthetic
gacagaaucuguagaagaugcugu

SEQ ID NO: 665533 - RNA, 18 nt, Artificial Sequence
  Synthetic
aagucuaugaccugcugu

SEQ ID NO: 665534 - RNA, 19 nt, Artificial Sequence
  Synthetic
aaagucuaugaccugcugu

SEQ ID NO: 665535 - RNA, 20 nt, Artificial Sequence
  Synthetic
uaaagucuaugaccugcugu

SEQ ID NO: 665536 - RNA, 21 nt, Artificial Sequence
  Synthetic
guaaagucuaugaccugcugu

SEQ ID NO: 665537 - RNA, 22 nt, Artificial Sequence
  Synthetic
uguaaagucuaugaccugcugu

SEQ ID NO: 665538 - RNA, 23 nt, Artificial Sequence
  Synthetic
guguaaagucuaugaccugcugu

SEQ ID NO: 665539 - RNA, 24 nt, Artificial Sequence
  Synthetic
uguguaaagucuaugaccugcugu

SEQ ID NO: 665540 - RNA, 18 nt, Artificial Sequence
  Synthetic
cauccuaugaggugcugu

SEQ ID NO: 665541 - RNA, 19 nt, Artificial Sequence
  Synthetic
ccauccuaugaggugcugu

SEQ ID NO: 665542 - RNA, 20 nt, Artificial Sequence
  Synthetic
gccauccuaugaggugcugu

SEQ ID NO: 665543 - RNA, 21 nt, Artificial Sequence
  Synthetic
ggccauccuaugaggugcugu

SEQ ID NO: 665544 - RNA, 22 nt, Artificial Sequence
  Synthetic
aggccauccuaugaggugcugu

SEQ ID NO: 665545 - RNA, 23 nt, Artificial Sequence
  Synthetic
caggccauccuaugaggugcugu

SEQ ID NO: 665546 - RNA, 24 nt, Artificial Sequence
  Synthetic
acaggccauccuaugaggugcugu

SEQ ID NO: 665547 - RNA, 18 nt, Artificial Sequence
  Synthetic
cuauuuaugaggugcugu

SEQ ID NO: 665548 - RNA, 19 nt, Artificial Sequence
  Synthetic
ucuauuuaugaggugcugu

SEQ ID NO: 665549 - RNA, 20 nt, Artificial Sequence
  Synthetic
aucuauuuaugaggugcugu

SEQ ID NO: 665550 - RNA, 21 nt, Artificial Sequence
  Synthetic
aaucuauuuaugaggugcugu

SEQ ID NO: 665551 - RNA, 22 nt, Artificial Sequence
  Synthetic
gaaucuauuuaugaggugcugu

SEQ ID NO: 665552 - RNA, 23 nt, Artificial Sequence
  Synthetic
ggaaucuauuuaugaggugcugu

SEQ ID NO: 665553 - RNA, 24 nt, Artificial Sequence
  Synthetic
aggaaucuauuuaugaggugcugu

SEQ ID NO: 665554 - RNA, 18 nt, Artificial Sequence
  Synthetic
aaaaauaaagguugcugu

SEQ ID NO: 665555 - RNA, 19 nt, Artificial Sequence
  Synthetic
aaaaaauaaagguugcugu

SEQ ID NO: 665556 - RNA, 20 nt, Artificial Sequence
  Synthetic
uaaaaaauaaagguugcugu

SEQ ID NO: 665557 - RNA, 21 nt, Artificial Sequence
  Synthetic
cuaaaaaauaaagguugcugu

SEQ ID NO: 665558 - RNA, 22 nt, Artificial Sequence
  Synthetic
ucuaaaaaauaaagguugcugu

SEQ ID NO: 665559 - RNA, 23 nt, Artificial Sequence
  Synthetic
gucuaaaaaauaaagguugcugu

SEQ ID NO: 665560 - RNA, 24 nt, Artificial Sequence
  Synthetic
agucuaaaaaauaaagguugcugu

SEQ ID NO: 665561 - RNA, 18 nt, Artificial Sequence
  Synthetic
gaaauugagugaaucugu

SEQ ID NO: 665562 - RNA, 19 nt, Artificial Sequence
  Synthetic
ggaaauugagugaaucugu

SEQ ID NO: 665563 - RNA, 20 nt, Artificial Sequence
  Synthetic
aggaaauugagugaaucugu

SEQ ID NO: 665564 - RNA, 21 nt, Artificial Sequence
  Synthetic
aaggaaauugagugaaucugu

SEQ ID NO: 665565 - RNA, 22 nt, Artificial Sequence
  Synthetic
gaaggaaauugagugaaucugu

SEQ ID NO: 665566 - RNA, 23 nt, Artificial Sequence
  Synthetic
ggaaggaaauugagugaaucugu

SEQ ID NO: 665567 - RNA, 24 nt, Artificial Sequence
  Synthetic
aggaaggaaauugagugaaucugu

SEQ ID NO: 665568 - RNA, 18 nt, Artificial Sequence
  Synthetic
uuuuucaugugaaucugu

SEQ ID NO: 665569 - RNA, 19 nt, Artificial Sequence
  Synthetic
guuuuucaugugaaucugu

SEQ ID NO: 665570 - RNA, 20 nt, Artificial Sequence
  Synthetic
gguuuuucaugugaaucugu

SEQ ID NO: 665571 - RNA, 21 nt, Artificial Sequence
  Synthetic
ugguuuuucaugugaaucugu

SEQ ID NO: 665572 - RNA, 22 nt, Artificial Sequence
  Synthetic
cugguuuuucaugugaaucugu

SEQ ID NO: 665573 - RNA, 23 nt, Artificial Sequence
  Synthetic
ucugguuuuucaugugaaucugu

SEQ ID NO: 665574 - RNA, 24 nt, Artificial Sequence
  Synthetic
uucugguuuuucaugugaaucugu

SEQ ID NO: 665575 - RNA, 18 nt, Artificial Sequence
  Synthetic
guugugauaaacaucugu

SEQ ID NO: 665576 - RNA, 19 nt, Artificial Sequence
  Synthetic
gguugugauaaacaucugu

SEQ ID NO: 665577 - RNA, 20 nt, Artificial Sequence
  Synthetic
agguugugauaaacaucugu

SEQ ID NO: 665578 - RNA, 18 nt, Artificial Sequence
  Synthetic
cacccuuuguccaucugu

SEQ ID NO: 665579 - RNA, 19 nt, Artificial Sequence
  Synthetic
acacccuuuguccaucugu

SEQ ID NO: 665580 - RNA, 20 nt, Artificial Sequence
  Synthetic
aacacccuuuguccaucugu

SEQ ID NO: 665581 - RNA, 21 nt, Artificial Sequence
  Synthetic
aaacacccuuuguccaucugu

SEQ ID NO: 665582 - RNA, 22 nt, Artificial Sequence
  Synthetic
aaaacacccuuuguccaucugu

SEQ ID NO: 665583 - RNA, 23 nt, Artificial Sequence
  Synthetic
aaaaacacccuuuguccaucugu

SEQ ID NO: 665584 - RNA, 24 nt, Artificial Sequence
  Synthetic
uaaaaacacccuuuguccaucugu

SEQ ID NO: 665585 - RNA, 18 nt, Artificial Sequence
  Synthetic
caaauaugaaucaucugu

SEQ ID NO: 665586 - RNA, 19 nt, Artificial Sequence
  Synthetic
ccaaauaugaaucaucugu

SEQ ID NO: 665587 - RNA, 20 nt, Artificial Sequence
  Synthetic
accaaauaugaaucaucugu

SEQ ID NO: 665588 - RNA, 21 nt, Artificial Sequence
  Synthetic
aaccaaauaugaaucaucugu

SEQ ID NO: 665589 - RNA, 22 nt, Artificial Sequence
  Synthetic
gaaccaaauaugaaucaucugu

SEQ ID NO: 665590 - RNA, 23 nt, Artificial Sequence
  Synthetic
agaaccaaauaugaaucaucugu

SEQ ID NO: 665591 - RNA, 24 nt, Artificial Sequence
  Synthetic
uagaaccaaauaugaaucaucugu

SEQ ID NO: 665592 - RNA, 18 nt, Artificial Sequence
  Synthetic
cuucuuuuccucaucugu

SEQ ID NO: 665593 - RNA, 19 nt, Artificial Sequence
  Synthetic
ucuucuuuuccucaucugu

SEQ ID NO: 665594 - RNA, 20 nt, Artificial Sequence
  Synthetic
aucuucuuuuccucaucugu

SEQ ID NO: 665595 - RNA, 21 nt, Artificial Sequence
  Synthetic
caucuucuuuuccucaucugu

SEQ ID NO: 665596 - RNA, 22 nt, Artificial Sequence
  Synthetic
acaucuucuuuuccucaucugu

SEQ ID NO: 665597 - RNA, 23 nt, Artificial Sequence
  Synthetic
uacaucuucuuuuccucaucugu

SEQ ID NO: 665598 - RNA, 24 nt, Artificial Sequence
  Synthetic
cuacaucuucuuuuccucaucugu

SEQ ID NO: 665599 - RNA, 18 nt, Artificial Sequence
  Synthetic
cuuuggaucuucaucugu

SEQ ID NO: 665600 - RNA, 19 nt, Artificial Sequence
  Synthetic
gcuuuggaucuucaucugu

SEQ ID NO: 665601 - RNA, 20 nt, Artificial Sequence
  Synthetic
ugcuuuggaucuucaucugu

SEQ ID NO: 665602 - RNA, 21 nt, Artificial Sequence
  Synthetic
augcuuuggaucuucaucugu

SEQ ID NO: 665603 - RNA, 22 nt, Artificial Sequence
  Synthetic
gaugcuuuggaucuucaucugu

SEQ ID NO: 665604 - RNA, 23 nt, Artificial Sequence
  Synthetic
ggaugcuuuggaucuucaucugu

SEQ ID NO: 665605 - RNA, 24 nt, Artificial Sequence
  Synthetic
aggaugcuuuggaucuucaucugu

SEQ ID NO: 665606 - RNA, 18 nt, Artificial Sequence
  Synthetic
auauguggaaugaucugu

SEQ ID NO: 665607 - RNA, 19 nt, Artificial Sequence
  Synthetic
uauauguggaaugaucugu

SEQ ID NO: 665608 - RNA, 20 nt, Artificial Sequence
  Synthetic
auauauguggaaugaucugu

SEQ ID NO: 665609 - RNA, 21 nt, Artificial Sequence
  Synthetic
uauauauguggaaugaucugu

SEQ ID NO: 665610 - RNA, 22 nt, Artificial Sequence
  Synthetic
guauauauguggaaugaucugu

SEQ ID NO: 665611 - RNA, 23 nt, Artificial Sequence
  Synthetic
aguauauauguggaaugaucugu

SEQ ID NO: 665612 - RNA, 24 nt, Artificial Sequence
  Synthetic
aaguauauauguggaaugaucugu

SEQ ID NO: 665613 - RNA, 18 nt, Artificial Sequence
  Synthetic
agcaaugcgaauaucugu

SEQ ID NO: 665614 - RNA, 19 nt, Artificial Sequence
  Synthetic
uagcaaugcgaauaucugu

SEQ ID NO: 665615 - RNA, 20 nt, Artificial Sequence
  Synthetic
uuagcaaugcgaauaucugu

SEQ ID NO: 665616 - RNA, 21 nt, Artificial Sequence
  Synthetic
guuagcaaugcgaauaucugu

SEQ ID NO: 665617 - RNA, 22 nt, Artificial Sequence
  Synthetic
gguuagcaaugcgaauaucugu

SEQ ID NO: 665618 - RNA, 23 nt, Artificial Sequence
  Synthetic
agguuagcaaugcgaauaucugu

SEQ ID NO: 665619 - RNA, 24 nt, Artificial Sequence
  Synthetic
aagguuagcaaugcgaauaucugu

SEQ ID NO: 665620 - RNA, 18 nt, Artificial Sequence
  Synthetic
ugauucaugcauaucugu

SEQ ID NO: 665621 - RNA, 19 nt, Artificial Sequence
  Synthetic
uugauucaugcauaucugu

SEQ ID NO: 665622 - RNA, 20 nt, Artificial Sequence
  Synthetic
uuugauucaugcauaucugu

SEQ ID NO: 665623 - RNA, 21 nt, Artificial Sequence
  Synthetic
auuugauucaugcauaucugu

SEQ ID NO: 665624 - RNA, 22 nt, Artificial Sequence
  Synthetic
aauuugauucaugcauaucugu

SEQ ID NO: 665625 - RNA, 23 nt, Artificial Sequence
  Synthetic
uaauuugauucaugcauaucugu

SEQ ID NO: 665626 - RNA, 24 nt, Artificial Sequence
  Synthetic
guaauuugauucaugcauaucugu

SEQ ID NO: 665627 - RNA, 18 nt, Artificial Sequence
  Synthetic
gguuuaccccuuaucugu

SEQ ID NO: 665628 - RNA, 19 nt, Artificial Sequence
  Synthetic
ugguuuaccccuuaucugu

SEQ ID NO: 665629 - RNA, 20 nt, Artificial Sequence
  Synthetic
gugguuuaccccuuaucugu

SEQ ID NO: 665630 - RNA, 21 nt, Artificial Sequence
  Synthetic
agugguuuaccccuuaucugu

SEQ ID NO: 665631 - RNA, 22 nt, Artificial Sequence
  Synthetic
cagugguuuaccccuuaucugu

SEQ ID NO: 665632 - RNA, 23 nt, Artificial Sequence
  Synthetic
acagugguuuaccccuuaucugu

SEQ ID NO: 665633 - RNA, 24 nt, Artificial Sequence
  Synthetic
uacagugguuuaccccuuaucugu

SEQ ID NO: 665634 - RNA, 18 nt, Artificial Sequence
  Synthetic
uucaauucauuuaucugu

SEQ ID NO: 665635 - RNA, 19 nt, Artificial Sequence
  Synthetic
cuucaauucauuuaucugu

SEQ ID NO: 665636 - RNA, 20 nt, Artificial Sequence
  Synthetic
gcuucaauucauuuaucugu

SEQ ID NO: 665637 - RNA, 21 nt, Artificial Sequence
  Synthetic
ggcuucaauucauuuaucugu

SEQ ID NO: 665638 - RNA, 22 nt, Artificial Sequence
  Synthetic
uggcuucaauucauuuaucugu

SEQ ID NO: 665639 - RNA, 23 nt, Artificial Sequence
  Synthetic
guggcuucaauucauuuaucugu

SEQ ID NO: 665640 - RNA, 24 nt, Artificial Sequence
  Synthetic
uguggcuucaauucauuuaucugu

SEQ ID NO: 665641 - RNA, 18 nt, Artificial Sequence
  Synthetic
cagccagcugaacucugu

SEQ ID NO: 665642 - RNA, 19 nt, Artificial Sequence
  Synthetic
gcagccagcugaacucugu

SEQ ID NO: 665643 - RNA, 20 nt, Artificial Sequence
  Synthetic
ugcagccagcugaacucugu

SEQ ID NO: 665644 - RNA, 21 nt, Artificial Sequence
  Synthetic
augcagccagcugaacucugu

SEQ ID NO: 665645 - RNA, 22 nt, Artificial Sequence
  Synthetic
caugcagccagcugaacucugu

SEQ ID NO: 665646 - RNA, 23 nt, Artificial Sequence
  Synthetic
ucaugcagccagcugaacucugu

SEQ ID NO: 665647 - RNA, 24 nt, Artificial Sequence
  Synthetic
aucaugcagccagcugaacucugu

SEQ ID NO: 665648 - RNA, 18 nt, Artificial Sequence
  Synthetic
ccccaguggggacucugu

SEQ ID NO: 665649 - RNA, 19 nt, Artificial Sequence
  Synthetic
gccccaguggggacucugu

SEQ ID NO: 665650 - RNA, 20 nt, Artificial Sequence
  Synthetic
ugccccaguggggacucugu

SEQ ID NO: 665651 - RNA, 21 nt, Artificial Sequence
  Synthetic
gugccccaguggggacucugu

SEQ ID NO: 665652 - RNA, 22 nt, Artificial Sequence
  Synthetic
agugccccaguggggacucugu

SEQ ID NO: 665653 - RNA, 23 nt, Artificial Sequence
  Synthetic
cagugccccaguggggacucugu

SEQ ID NO: 665654 - RNA, 24 nt, Artificial Sequence
  Synthetic
gcagugccccaguggggacucugu

SEQ ID NO: 665655 - RNA, 18 nt, Artificial Sequence
  Synthetic
uguuaucauggacucugu

SEQ ID NO: 665656 - RNA, 19 nt, Artificial Sequence
  Synthetic
auguuaucauggacucugu

SEQ ID NO: 665657 - RNA, 20 nt, Artificial Sequence
  Synthetic
uauguuaucauggacucugu

SEQ ID NO: 665658 - RNA, 21 nt, Artificial Sequence
  Synthetic
auauguuaucauggacucugu

SEQ ID NO: 665659 - RNA, 22 nt, Artificial Sequence
  Synthetic
uauauguuaucauggacucugu

SEQ ID NO: 665660 - RNA, 23 nt, Artificial Sequence
  Synthetic
uuauauguuaucauggacucugu

SEQ ID NO: 665661 - RNA, 24 nt, Artificial Sequence
  Synthetic
uuuauauguuaucauggacucugu

SEQ ID NO: 665662 - RNA, 18 nt, Artificial Sequence
  Synthetic
ugccuuuguucccucugu

SEQ ID NO: 665663 - RNA, 19 nt, Artificial Sequence
  Synthetic
augccuuuguucccucugu

SEQ ID NO: 665664 - RNA, 20 nt, Artificial Sequence
  Synthetic
uaugccuuuguucccucugu

SEQ ID NO: 665665 - RNA, 21 nt, Artificial Sequence
  Synthetic
cuaugccuuuguucccucugu

SEQ ID NO: 665666 - RNA, 22 nt, Artificial Sequence
  Synthetic
acuaugccuuuguucccucugu

SEQ ID NO: 665667 - RNA, 23 nt, Artificial Sequence
  Synthetic
cacuaugccuuuguucccucugu

SEQ ID NO: 665668 - RNA, 24 nt, Artificial Sequence
  Synthetic
ucacuaugccuuuguucccucugu

SEQ ID NO: 665669 - RNA, 18 nt, Artificial Sequence
  Synthetic
guuucuugaugccucugu

SEQ ID NO: 665670 - RNA, 19 nt, Artificial Sequence
  Synthetic
cguuucuugaugccucugu

SEQ ID NO: 665671 - RNA, 20 nt, Artificial Sequence
  Synthetic
acguuucuugaugccucugu

SEQ ID NO: 665672 - RNA, 21 nt, Artificial Sequence
  Synthetic
uacguuucuugaugccucugu

SEQ ID NO: 665673 - RNA, 22 nt, Artificial Sequence
  Synthetic
auacguuucuugaugccucugu

SEQ ID NO: 665674 - RNA, 23 nt, Artificial Sequence
  Synthetic
aauacguuucuugaugccucugu

SEQ ID NO: 665675 - RNA, 24 nt, Artificial Sequence
  Synthetic
aaauacguuucuugaugccucugu

SEQ ID NO: 665676 - RNA, 18 nt, Artificial Sequence
  Synthetic
guauugaauuuccucugu

SEQ ID NO: 665677 - RNA, 19 nt, Artificial Sequence
  Synthetic
uguauugaauuuccucugu

SEQ ID NO: 665678 - RNA, 20 nt, Artificial Sequence
  Synthetic
cuguauugaauuuccucugu

SEQ ID NO: 665679 - RNA, 21 nt, Artificial Sequence
  Synthetic
ucuguauugaauuuccucugu

SEQ ID NO: 665680 - RNA, 22 nt, Artificial Sequence
  Synthetic
cucuguauugaauuuccucugu

SEQ ID NO: 665681 - RNA, 23 nt, Artificial Sequence
  Synthetic
ccucuguauugaauuuccucugu

SEQ ID NO: 665682 - RNA, 24 nt, Artificial Sequence
  Synthetic
uccucuguauugaauuuccucugu

SEQ ID NO: 665683 - RNA, 18 nt, Artificial Sequence
  Synthetic
uuuuauuuauagcucugu

SEQ ID NO: 665684 - RNA, 19 nt, Artificial Sequence
  Synthetic
auuuuauuuauagcucugu

SEQ ID NO: 665685 - RNA, 20 nt, Artificial Sequence
  Synthetic
cauuuuauuuauagcucugu

SEQ ID NO: 665686 - RNA, 21 nt, Artificial Sequence
  Synthetic
ucauuuuauuuauagcucugu

SEQ ID NO: 665687 - RNA, 22 nt, Artificial Sequence
  Synthetic
uucauuuuauuuauagcucugu

SEQ ID NO: 665688 - RNA, 23 nt, Artificial Sequence
  Synthetic
uuucauuuuauuuauagcucugu

SEQ ID NO: 665689 - RNA, 24 nt, Artificial Sequence
  Synthetic
auuucauuuuauuuauagcucugu

SEQ ID NO: 665690 - RNA, 18 nt, Artificial Sequence
  Synthetic
cugggucuuacgcucugu

SEQ ID NO: 665691 - RNA, 19 nt, Artificial Sequence
  Synthetic
gcugggucuuacgcucugu

SEQ ID NO: 665692 - RNA, 20 nt, Artificial Sequence
  Synthetic
agcugggucuuacgcucugu

SEQ ID NO: 665693 - RNA, 21 nt, Artificial Sequence
  Synthetic
aagcugggucuuacgcucugu

SEQ ID NO: 665694 - RNA, 22 nt, Artificial Sequence
  Synthetic
gaagcugggucuuacgcucugu

SEQ ID NO: 665695 - RNA, 23 nt, Artificial Sequence
  Synthetic
ugaagcugggucuuacgcucugu

SEQ ID NO: 665696 - RNA, 24 nt, Artificial Sequence
  Synthetic
gugaagcugggucuuacgcucugu

SEQ ID NO: 665697 - RNA, 18 nt, Artificial Sequence
  Synthetic
aucuugguuaggcucugu

SEQ ID NO: 665698 - RNA, 19 nt, Artificial Sequence
  Synthetic
caucuugguuaggcucugu

SEQ ID NO: 665699 - RNA, 20 nt, Artificial Sequence
  Synthetic
ucaucuugguuaggcucugu

SEQ ID NO: 665700 - RNA, 21 nt, Artificial Sequence
  Synthetic
uucaucuugguuaggcucugu

SEQ ID NO: 665701 - RNA, 22 nt, Artificial Sequence
  Synthetic
cuucaucuugguuaggcucugu

SEQ ID NO: 665702 - RNA, 23 nt, Artificial Sequence
  Synthetic
ccuucaucuugguuaggcucugu

SEQ ID NO: 665703 - RNA, 24 nt, Artificial Sequence
  Synthetic
cccuucaucuugguuaggcucugu

SEQ ID NO: 665704 - RNA, 18 nt, Artificial Sequence
  Synthetic
uuuaaagacgaucucugu

SEQ ID NO: 665705 - RNA, 19 nt, Artificial Sequence
  Synthetic
auuuaaagacgaucucugu

SEQ ID NO: 665706 - RNA, 20 nt, Artificial Sequence
  Synthetic
uauuuaaagacgaucucugu

SEQ ID NO: 665707 - RNA, 21 nt, Artificial Sequence
  Synthetic
auauuuaaagacgaucucugu

SEQ ID NO: 665708 - RNA, 22 nt, Artificial Sequence
  Synthetic
uauauuuaaagacgaucucugu

SEQ ID NO: 665709 - RNA, 23 nt, Artificial Sequence
  Synthetic
cuauauuuaaagacgaucucugu

SEQ ID NO: 665710 - RNA, 24 nt, Artificial Sequence
  Synthetic
ccuauauuuaaagacgaucucugu

SEQ ID NO: 665711 - RNA, 18 nt, Artificial Sequence
  Synthetic
gcuaugcuucuucucugu

SEQ ID NO: 665712 - RNA, 19 nt, Artificial Sequence
  Synthetic
ugcuaugcuucuucucugu

SEQ ID NO: 665713 - RNA, 20 nt, Artificial Sequence
  Synthetic
augcuaugcuucuucucugu

SEQ ID NO: 665714 - RNA, 21 nt, Artificial Sequence
  Synthetic
uaugcuaugcuucuucucugu

SEQ ID NO: 665715 - RNA, 22 nt, Artificial Sequence
  Synthetic
uuaugcuaugcuucuucucugu

SEQ ID NO: 665716 - RNA, 23 nt, Artificial Sequence
  Synthetic
uuuaugcuaugcuucuucucugu

SEQ ID NO: 665717 - RNA, 24 nt, Artificial Sequence
  Synthetic
auuuaugcuaugcuucuucucugu

SEQ ID NO: 665718 - RNA, 18 nt, Artificial Sequence
  Synthetic
cugucuccuguucucugu

SEQ ID NO: 665719 - RNA, 19 nt, Artificial Sequence
  Synthetic
ucugucuccuguucucugu

SEQ ID NO: 665720 - RNA, 20 nt, Artificial Sequence
  Synthetic
cucugucuccuguucucugu

SEQ ID NO: 665721 - RNA, 21 nt, Artificial Sequence
  Synthetic
ccucugucuccuguucucugu

SEQ ID NO: 665722 - RNA, 22 nt, Artificial Sequence
  Synthetic
uccucugucuccuguucucugu

SEQ ID NO: 665723 - RNA, 23 nt, Artificial Sequence
  Synthetic
guccucugucuccuguucucugu

SEQ ID NO: 665724 - RNA, 24 nt, Artificial Sequence
  Synthetic
aguccucugucuccuguucucugu

SEQ ID NO: 665725 - RNA, 18 nt, Artificial Sequence
  Synthetic
uuugccuaguuucucugu

SEQ ID NO: 665726 - RNA, 19 nt, Artificial Sequence
  Synthetic
uuuugccuaguuucucugu

SEQ ID NO: 665727 - RNA, 20 nt, Artificial Sequence
  Synthetic
auuuugccuaguuucucugu

SEQ ID NO: 665728 - RNA, 21 nt, Artificial Sequence
  Synthetic
cauuuugccuaguuucucugu

SEQ ID NO: 665729 - RNA, 22 nt, Artificial Sequence
  Synthetic
ucauuuugccuaguuucucugu

SEQ ID NO: 665730 - RNA, 23 nt, Artificial Sequence
  Synthetic
aucauuuugccuaguuucucugu

SEQ ID NO: 665731 - RNA, 24 nt, Artificial Sequence
  Synthetic
uaucauuuugccuaguuucucugu

SEQ ID NO: 665732 - RNA, 18 nt, Artificial Sequence
  Synthetic
uuuuucuuuuuucucugu

SEQ ID NO: 665733 - RNA, 19 nt, Artificial Sequence
  Synthetic
uuuuuucuuuuuucucugu

SEQ ID NO: 665734 - RNA, 20 nt, Artificial Sequence
  Synthetic
uuuuuuucuuuuuucucugu

SEQ ID NO: 665735 - RNA, 21 nt, Artificial Sequence
  Synthetic
auuuuuuucuuuuuucucugu

SEQ ID NO: 665736 - RNA, 22 nt, Artificial Sequence
  Synthetic
cauuuuuuucuuuuuucucugu

SEQ ID NO: 665737 - RNA, 23 nt, Artificial Sequence
  Synthetic
ucauuuuuuucuuuuuucucugu

SEQ ID NO: 665738 - RNA, 24 nt, Artificial Sequence
  Synthetic
aucauuuuuuucuuuuuucucugu

SEQ ID NO: 665739 - RNA, 18 nt, Artificial Sequence
  Synthetic
guucagugucaagucugu

SEQ ID NO: 665740 - RNA, 19 nt, Artificial Sequence
  Synthetic
gguucagugucaagucugu

SEQ ID NO: 665741 - RNA, 20 nt, Artificial Sequence
  Synthetic
ugguucagugucaagucugu

SEQ ID NO: 665742 - RNA, 21 nt, Artificial Sequence
  Synthetic
gugguucagugucaagucugu

SEQ ID NO: 665743 - RNA, 22 nt, Artificial Sequence
  Synthetic
ugugguucagugucaagucugu

SEQ ID NO: 665744 - RNA, 23 nt, Artificial Sequence
  Synthetic
uugugguucagugucaagucugu

SEQ ID NO: 665745 - RNA, 24 nt, Artificial Sequence
  Synthetic
uuugugguucagugucaagucugu

SEQ ID NO: 665746 - RNA, 18 nt, Artificial Sequence
  Synthetic
gugcaggaaucagucugu

SEQ ID NO: 665747 - RNA, 19 nt, Artificial Sequence
  Synthetic
ugugcaggaaucagucugu

SEQ ID NO: 665748 - RNA, 20 nt, Artificial Sequence
  Synthetic
augugcaggaaucagucugu

SEQ ID NO: 665749 - RNA, 21 nt, Artificial Sequence
  Synthetic
uaugugcaggaaucagucugu

SEQ ID NO: 665750 - RNA, 22 nt, Artificial Sequence
  Synthetic
uuaugugcaggaaucagucugu

SEQ ID NO: 665751 - RNA, 23 nt, Artificial Sequence
  Synthetic
uuuaugugcaggaaucagucugu

SEQ ID NO: 665752 - RNA, 24 nt, Artificial Sequence
  Synthetic
uuuuaugugcaggaaucagucugu

SEQ ID NO: 665753 - RNA, 18 nt, Artificial Sequence
  Synthetic
augaagagaggggucugu

SEQ ID NO: 665754 - RNA, 19 nt, Artificial Sequence
  Synthetic
aaugaagagaggggucugu

SEQ ID NO: 665755 - RNA, 20 nt, Artificial Sequence
  Synthetic
gaaugaagagaggggucugu

SEQ ID NO: 665756 - RNA, 21 nt, Artificial Sequence
  Synthetic
agaaugaagagaggggucugu

SEQ ID NO: 665757 - RNA, 22 nt, Artificial Sequence
  Synthetic
gagaaugaagagaggggucugu

SEQ ID NO: 665758 - RNA, 23 nt, Artificial Sequence
  Synthetic
ugagaaugaagagaggggucugu

SEQ ID NO: 665759 - RNA, 24 nt, Artificial Sequence
  Synthetic
augagaaugaagagaggggucugu

SEQ ID NO: 665760 - RNA, 18 nt, Artificial Sequence
  Synthetic
auaacagaguacuucugu

SEQ ID NO: 665761 - RNA, 19 nt, Artificial Sequence
  Synthetic
aauaacagaguacuucugu

SEQ ID NO: 665762 - RNA, 20 nt, Artificial Sequence
  Synthetic
caauaacagaguacuucugu

SEQ ID NO: 665763 - RNA, 21 nt, Artificial Sequence
  Synthetic
ccaauaacagaguacuucugu

SEQ ID NO: 665764 - RNA, 22 nt, Artificial Sequence
  Synthetic
accaauaacagaguacuucugu

SEQ ID NO: 665765 - RNA, 23 nt, Artificial Sequence
  Synthetic
aaccaauaacagaguacuucugu

SEQ ID NO: 665766 - RNA, 24 nt, Artificial Sequence
  Synthetic
aaaccaauaacagaguacuucugu

SEQ ID NO: 665767 - RNA, 18 nt, Artificial Sequence
  Synthetic
gugaaagaccccuucugu

SEQ ID NO: 665768 - RNA, 19 nt, Artificial Sequence
  Synthetic
ggugaaagaccccuucugu

SEQ ID NO: 665769 - RNA, 20 nt, Artificial Sequence
  Synthetic
uggugaaagaccccuucugu

SEQ ID NO: 665770 - RNA, 21 nt, Artificial Sequence
  Synthetic
auggugaaagaccccuucugu

SEQ ID NO: 665771 - RNA, 22 nt, Artificial Sequence
  Synthetic
uauggugaaagaccccuucugu

SEQ ID NO: 665772 - RNA, 23 nt, Artificial Sequence
  Synthetic
uuauggugaaagaccccuucugu

SEQ ID NO: 665773 - RNA, 24 nt, Artificial Sequence
  Synthetic
guuauggugaaagaccccuucugu

SEQ ID NO: 665774 - RNA, 18 nt, Artificial Sequence
  Synthetic
agaaagaauggcuucugu

SEQ ID NO: 665775 - RNA, 19 nt, Artificial Sequence
  Synthetic
uagaaagaauggcuucugu

SEQ ID NO: 665776 - RNA, 20 nt, Artificial Sequence
  Synthetic
uuagaaagaauggcuucugu

SEQ ID NO: 665777 - RNA, 21 nt, Artificial Sequence
  Synthetic
uuuagaaagaauggcuucugu

SEQ ID NO: 665778 - RNA, 22 nt, Artificial Sequence
  Synthetic
uuuuagaaagaauggcuucugu

SEQ ID NO: 665779 - RNA, 23 nt, Artificial Sequence
  Synthetic
uuuuuagaaagaauggcuucugu

SEQ ID NO: 665780 - RNA, 24 nt, Artificial Sequence
  Synthetic
uuuuuuagaaagaauggcuucugu

SEQ ID NO: 665781 - RNA, 18 nt, Artificial Sequence
  Synthetic
aaguagaaacucuucugu

SEQ ID NO: 665782 - RNA, 19 nt, Artificial Sequence
  Synthetic
caaguagaaacucuucugu

SEQ ID NO: 665783 - RNA, 20 nt, Artificial Sequence
  Synthetic
ucaaguagaaacucuucugu

SEQ ID NO: 665784 - RNA, 21 nt, Artificial Sequence
  Synthetic
uucaaguagaaacucuucugu

SEQ ID NO: 665785 - RNA, 22 nt, Artificial Sequence
  Synthetic
guucaaguagaaacucuucugu

SEQ ID NO: 665786 - RNA, 23 nt, Artificial Sequence
  Synthetic
uguucaaguagaaacucuucugu

SEQ ID NO: 665787 - RNA, 24 nt, Artificial Sequence
  Synthetic
cuguucaaguagaaacucuucugu

SEQ ID NO: 665788 - RNA, 18 nt, Artificial Sequence
  Synthetic
aaucugcuagucuucugu

SEQ ID NO: 665789 - RNA, 19 nt, Artificial Sequence
  Synthetic
caaucugcuagucuucugu

SEQ ID NO: 665790 - RNA, 20 nt, Artificial Sequence
  Synthetic
ccaaucugcuagucuucugu

SEQ ID NO: 665791 - RNA, 21 nt, Artificial Sequence
  Synthetic
cccaaucugcuagucuucugu

SEQ ID NO: 665792 - RNA, 22 nt, Artificial Sequence
  Synthetic
ccccaaucugcuagucuucugu

SEQ ID NO: 665793 - RNA, 23 nt, Artificial Sequence
  Synthetic
gccccaaucugcuagucuucugu

SEQ ID NO: 665794 - RNA, 24 nt, Artificial Sequence
  Synthetic
ugccccaaucugcuagucuucugu

SEQ ID NO: 665795 - RNA, 18 nt, Artificial Sequence
  Synthetic
uuccuggcauauuucugu

SEQ ID NO: 665796 - RNA, 19 nt, Artificial Sequence
  Synthetic
auuccuggcauauuucugu

SEQ ID NO: 665797 - RNA, 20 nt, Artificial Sequence
  Synthetic
cauuccuggcauauuucugu

SEQ ID NO: 665798 - RNA, 21 nt, Artificial Sequence
  Synthetic
ucauuccuggcauauuucugu

SEQ ID NO: 665799 - RNA, 22 nt, Artificial Sequence
  Synthetic
aucauuccuggcauauuucugu

SEQ ID NO: 665800 - RNA, 23 nt, Artificial Sequence
  Synthetic
aaucauuccuggcauauuucugu

SEQ ID NO: 665801 - RNA, 24 nt, Artificial Sequence
  Synthetic
uaaucauuccuggcauauuucugu

SEQ ID NO: 665802 - RNA, 18 nt, Artificial Sequence
  Synthetic
uucuuuuguacuuucugu

SEQ ID NO: 665803 - RNA, 19 nt, Artificial Sequence
  Synthetic
cuucuuuuguacuuucugu

SEQ ID NO: 665804 - RNA, 20 nt, Artificial Sequence
  Synthetic
ucuucuuuuguacuuucugu

SEQ ID NO: 665805 - RNA, 21 nt, Artificial Sequence
  Synthetic
aucuucuuuuguacuuucugu

SEQ ID NO: 665806 - RNA, 22 nt, Artificial Sequence
  Synthetic
gaucuucuuuuguacuuucugu

SEQ ID NO: 665807 - RNA, 23 nt, Artificial Sequence
  Synthetic
agaucuucuuuuguacuuucugu

SEQ ID NO: 665808 - RNA, 24 nt, Artificial Sequence
  Synthetic
cagaucuucuuuuguacuuucugu

SEQ ID NO: 665809 - RNA, 18 nt, Artificial Sequence
  Synthetic
aauaccaauauuuucugu

SEQ ID NO: 665810 - RNA, 19 nt, Artificial Sequence
  Synthetic
aaauaccaauauuuucugu

SEQ ID NO: 665811 - RNA, 20 nt, Artificial Sequence
  Synthetic
aaaauaccaauauuuucugu

SEQ ID NO: 665812 - RNA, 21 nt, Artificial Sequence
  Synthetic
aaaaauaccaauauuuucugu

SEQ ID NO: 665813 - RNA, 22 nt, Artificial Sequence
  Synthetic
aaaaaauaccaauauuuucugu

SEQ ID NO: 665814 - RNA, 23 nt, Artificial Sequence
  Synthetic
gaaaaaauaccaauauuuucugu

SEQ ID NO: 665815 - RNA, 24 nt, Artificial Sequence
  Synthetic
agaaaaaauaccaauauuuucugu

SEQ ID NO: 665816 - RNA, 18 nt, Artificial Sequence
  Synthetic
ggaagaggucaaaagugu

SEQ ID NO: 665817 - RNA, 19 nt, Artificial Sequence
  Synthetic
aggaagaggucaaaagugu

SEQ ID NO: 665818 - RNA, 20 nt, Artificial Sequence
  Synthetic
caggaagaggucaaaagugu

SEQ ID NO: 665819 - RNA, 21 nt, Artificial Sequence
  Synthetic
acaggaagaggucaaaagugu

SEQ ID NO: 665820 - RNA, 22 nt, Artificial Sequence
  Synthetic
cacaggaagaggucaaaagugu

SEQ ID NO: 665821 - RNA, 23 nt, Artificial Sequence
  Synthetic
gcacaggaagaggucaaaagugu

SEQ ID NO: 665822 - RNA, 24 nt, Artificial Sequence
  Synthetic
ggcacaggaagaggucaaaagugu

SEQ ID NO: 665823 - RNA, 18 nt, Artificial Sequence
  Synthetic
uguuugguagaaaagugu

SEQ ID NO: 665824 - RNA, 19 nt, Artificial Sequence
  Synthetic
auguuugguagaaaagugu

SEQ ID NO: 665825 - RNA, 20 nt, Artificial Sequence
  Synthetic
uauguuugguagaaaagugu

SEQ ID NO: 665826 - RNA, 21 nt, Artificial Sequence
  Synthetic
guauguuugguagaaaagugu

SEQ ID NO: 665827 - RNA, 22 nt, Artificial Sequence
  Synthetic
aguauguuugguagaaaagugu

SEQ ID NO: 665828 - RNA, 23 nt, Artificial Sequence
  Synthetic
caguauguuugguagaaaagugu

SEQ ID NO: 665829 - RNA, 24 nt, Artificial Sequence
  Synthetic
ucaguauguuugguagaaaagugu

SEQ ID NO: 665830 - RNA, 18 nt, Artificial Sequence
  Synthetic
cucagccucccaaagugu

SEQ ID NO: 665831 - RNA, 19 nt, Artificial Sequence
  Synthetic
ccucagccucccaaagugu

SEQ ID NO: 665832 - RNA, 20 nt, Artificial Sequence
  Synthetic
gccucagccucccaaagugu

SEQ ID NO: 665833 - RNA, 21 nt, Artificial Sequence
  Synthetic
ugccucagccucccaaagugu

SEQ ID NO: 665834 - RNA, 22 nt, Artificial Sequence
  Synthetic
cugccucagccucccaaagugu

SEQ ID NO: 665835 - RNA, 23 nt, Artificial Sequence
  Synthetic
ccugccucagccucccaaagugu

SEQ ID NO: 665836 - RNA, 24 nt, Artificial Sequence
  Synthetic
accugccucagccucccaaagugu

SEQ ID NO: 665837 - RNA, 18 nt, Artificial Sequence
  Synthetic
aaguuggaggcaaagugu

SEQ ID NO: 665838 - RNA, 19 nt, Artificial Sequence
  Synthetic
gaaguuggaggcaaagugu

SEQ ID NO: 665839 - RNA, 20 nt, Artificial Sequence
  Synthetic
ggaaguuggaggcaaagugu

SEQ ID NO: 665840 - RNA, 21 nt, Artificial Sequence
  Synthetic
aggaaguuggaggcaaagugu

SEQ ID NO: 665841 - RNA, 22 nt, Artificial Sequence
  Synthetic
gaggaaguuggaggcaaagugu

SEQ ID NO: 665842 - RNA, 23 nt, Artificial Sequence
  Synthetic
agaggaaguuggaggcaaagugu

SEQ ID NO: 665843 - RNA, 24 nt, Artificial Sequence
  Synthetic
gagaggaaguuggaggcaaagugu

SEQ ID NO: 665844 - RNA, 18 nt, Artificial Sequence
  Synthetic
uggaaagugggaaagugu

SEQ ID NO: 665845 - RNA, 19 nt, Artificial Sequence
  Synthetic
cuggaaagugggaaagugu

SEQ ID NO: 665846 - RNA, 20 nt, Artificial Sequence
  Synthetic
ccuggaaagugggaaagugu

SEQ ID NO: 665847 - RNA, 21 nt, Artificial Sequence
  Synthetic
uccuggaaagugggaaagugu

SEQ ID NO: 665848 - RNA, 22 nt, Artificial Sequence
  Synthetic
auccuggaaagugggaaagugu

SEQ ID NO: 665849 - RNA, 23 nt, Artificial Sequence
  Synthetic
aauccuggaaagugggaaagugu

SEQ ID NO: 665850 - RNA, 24 nt, Artificial Sequence
  Synthetic
gaauccuggaaagugggaaagugu

SEQ ID NO: 665851 - RNA, 18 nt, Artificial Sequence
  Synthetic
agggugagaugaaagugu

SEQ ID NO: 665852 - RNA, 19 nt, Artificial Sequence
  Synthetic
gagggugagaugaaagugu

SEQ ID NO: 665853 - RNA, 20 nt, Artificial Sequence
  Synthetic
agagggugagaugaaagugu

SEQ ID NO: 665854 - RNA, 21 nt, Artificial Sequence
  Synthetic
gagagggugagaugaaagugu

SEQ ID NO: 665855 - RNA, 22 nt, Artificial Sequence
  Synthetic
ugagagggugagaugaaagugu

SEQ ID NO: 665856 - RNA, 23 nt, Artificial Sequence
  Synthetic
uugagagggugagaugaaagugu

SEQ ID NO: 665857 - RNA, 24 nt, Artificial Sequence
  Synthetic
cuugagagggugagaugaaagugu

SEQ ID NO: 665858 - RNA, 18 nt, Artificial Sequence
  Synthetic
uacugucugugaaagugu

SEQ ID NO: 665859 - RNA, 19 nt, Artificial Sequence
  Synthetic
auacugucugugaaagugu

SEQ ID NO: 665860 - RNA, 20 nt, Artificial Sequence
  Synthetic
aauacugucugugaaagugu

SEQ ID NO: 665861 - RNA, 21 nt, Artificial Sequence
  Synthetic
gaauacugucugugaaagugu

SEQ ID NO: 665862 - RNA, 22 nt, Artificial Sequence
  Synthetic
ggaauacugucugugaaagugu

SEQ ID NO: 665863 - RNA, 23 nt, Artificial Sequence
  Synthetic
gggaauacugucugugaaagugu

SEQ ID NO: 665864 - RNA, 24 nt, Artificial Sequence
  Synthetic
agggaauacugucugugaaagugu

SEQ ID NO: 665865 - RNA, 18 nt, Artificial Sequence
  Synthetic
gguuuuuuuuuaaagugu

SEQ ID NO: 665866 - RNA, 19 nt, Artificial Sequence
  Synthetic
ugguuuuuuuuuaaagugu

SEQ ID NO: 665867 - RNA, 20 nt, Artificial Sequence
  Synthetic
cugguuuuuuuuuaaagugu

SEQ ID NO: 665868 - RNA, 21 nt, Artificial Sequence
  Synthetic
ucugguuuuuuuuuaaagugu

SEQ ID NO: 665869 - RNA, 22 nt, Artificial Sequence
  Synthetic
aucugguuuuuuuuuaaagugu

SEQ ID NO: 665870 - RNA, 23 nt, Artificial Sequence
  Synthetic
gaucugguuuuuuuuuaaagugu

SEQ ID NO: 665871 - RNA, 24 nt, Artificial Sequence
  Synthetic
agaucugguuuuuuuuuaaagugu

SEQ ID NO: 665872 - RNA, 18 nt, Artificial Sequence
  Synthetic
ggugaucuccacaagugu

SEQ ID NO: 665873 - RNA, 19 nt, Artificial Sequence
  Synthetic
uggugaucuccacaagugu

SEQ ID NO: 665874 - RNA, 20 nt, Artificial Sequence
  Synthetic
cuggugaucuccacaagugu

SEQ ID NO: 665875 - RNA, 21 nt, Artificial Sequence
  Synthetic
ccuggugaucuccacaagugu

SEQ ID NO: 665876 - RNA, 22 nt, Artificial Sequence
  Synthetic
uccuggugaucuccacaagugu

SEQ ID NO: 665877 - RNA, 23 nt, Artificial Sequence
  Synthetic
uuccuggugaucuccacaagugu

SEQ ID NO: 665878 - RNA, 24 nt, Artificial Sequence
  Synthetic
cuuccuggugaucuccacaagugu

SEQ ID NO: 665879 - RNA, 18 nt, Artificial Sequence
  Synthetic
agacagaguuccaagugu

SEQ ID NO: 665880 - RNA, 19 nt, Artificial Sequence
  Synthetic
uagacagaguuccaagugu

SEQ ID NO: 665881 - RNA, 20 nt, Artificial Sequence
  Synthetic
auagacagaguuccaagugu

SEQ ID NO: 665882 - RNA, 21 nt, Artificial Sequence
  Synthetic
gauagacagaguuccaagugu

SEQ ID NO: 665883 - RNA, 22 nt, Artificial Sequence
  Synthetic
ggauagacagaguuccaagugu

SEQ ID NO: 665884 - RNA, 23 nt, Artificial Sequence
  Synthetic
gggauagacagaguuccaagugu

SEQ ID NO: 665885 - RNA, 24 nt, Artificial Sequence
  Synthetic
agggauagacagaguuccaagugu

SEQ ID NO: 665886 - RNA, 18 nt, Artificial Sequence
  Synthetic
agagaauguugcaagugu

SEQ ID NO: 665887 - RNA, 19 nt, Artificial Sequence
  Synthetic
aagagaauguugcaagugu

SEQ ID NO: 665888 - RNA, 20 nt, Artificial Sequence
  Synthetic
aaagagaauguugcaagugu

SEQ ID NO: 665889 - RNA, 21 nt, Artificial Sequence
  Synthetic
gaaagagaauguugcaagugu

SEQ ID NO: 665890 - RNA, 22 nt, Artificial Sequence
  Synthetic
ggaaagagaauguugcaagugu

SEQ ID NO: 665891 - RNA, 23 nt, Artificial Sequence
  Synthetic
aggaaagagaauguugcaagugu

SEQ ID NO: 665892 - RNA, 24 nt, Artificial Sequence
  Synthetic
gaggaaagagaauguugcaagugu

SEQ ID NO: 665893 - RNA, 18 nt, Artificial Sequence
  Synthetic
cuaauuucaaucaagugu

SEQ ID NO: 665894 - RNA, 19 nt, Artificial Sequence
  Synthetic
ccuaauuucaaucaagugu

SEQ ID NO: 665895 - RNA, 20 nt, Artificial Sequence
  Synthetic
cccuaauuucaaucaagugu

SEQ ID NO: 665896 - RNA, 21 nt, Artificial Sequence
  Synthetic
acccuaauuucaaucaagugu

SEQ ID NO: 665897 - RNA, 22 nt, Artificial Sequence
  Synthetic
uacccuaauuucaaucaagugu

SEQ ID NO: 665898 - RNA, 23 nt, Artificial Sequence
  Synthetic
auacccuaauuucaaucaagugu

SEQ ID NO: 665899 - RNA, 24 nt, Artificial Sequence
  Synthetic
aauacccuaauuucaaucaagugu

SEQ ID NO: 665900 - RNA, 18 nt, Artificial Sequence
  Synthetic
cuuauuuuuuucaagugu

SEQ ID NO: 665901 - RNA, 19 nt, Artificial Sequence
  Synthetic
ucuuauuuuuuucaagugu

SEQ ID NO: 665902 - RNA, 20 nt, Artificial Sequence
  Synthetic
cucuuauuuuuuucaagugu

SEQ ID NO: 665903 - RNA, 21 nt, Artificial Sequence
  Synthetic
acucuuauuuuuuucaagugu

SEQ ID NO: 665904 - RNA, 22 nt, Artificial Sequence
  Synthetic
aacucuuauuuuuuucaagugu

SEQ ID NO: 665905 - RNA, 23 nt, Artificial Sequence
  Synthetic
gaacucuuauuuuuuucaagugu

SEQ ID NO: 665906 - RNA, 24 nt, Artificial Sequence
  Synthetic
ggaacucuuauuuuuuucaagugu

SEQ ID NO: 665907 - RNA, 18 nt, Artificial Sequence
  Synthetic
acucuacaugagaagugu

SEQ ID NO: 665908 - RNA, 19 nt, Artificial Sequence
  Synthetic
uacucuacaugagaagugu

SEQ ID NO: 665909 - RNA, 20 nt, Artificial Sequence
  Synthetic
uuacucuacaugagaagugu

SEQ ID NO: 665910 - RNA, 21 nt, Artificial Sequence
  Synthetic
guuacucuacaugagaagugu

SEQ ID NO: 665911 - RNA, 22 nt, Artificial Sequence
  Synthetic
gguuacucuacaugagaagugu

SEQ ID NO: 665912 - RNA, 23 nt, Artificial Sequence
  Synthetic
ggguuacucuacaugagaagugu

SEQ ID NO: 665913 - RNA, 24 nt, Artificial Sequence
  Synthetic
aggguuacucuacaugagaagugu

SEQ ID NO: 665914 - RNA, 18 nt, Artificial Sequence
  Synthetic
ugggccaaaaggaagugu

SEQ ID NO: 665915 - RNA, 19 nt, Artificial Sequence
  Synthetic
uugggccaaaaggaagugu

SEQ ID NO: 665916 - RNA, 20 nt, Artificial Sequence
  Synthetic
uuugggccaaaaggaagugu

SEQ ID NO: 665917 - RNA, 21 nt, Artificial Sequence
  Synthetic
uuuugggccaaaaggaagugu

SEQ ID NO: 665918 - RNA, 22 nt, Artificial Sequence
  Synthetic
auuuugggccaaaaggaagugu

SEQ ID NO: 665919 - RNA, 23 nt, Artificial Sequence
  Synthetic
cauuuugggccaaaaggaagugu

SEQ ID NO: 665920 - RNA, 24 nt, Artificial Sequence
  Synthetic
acauuuugggccaaaaggaagugu

SEQ ID NO: 665921 - RNA, 18 nt, Artificial Sequence
  Synthetic
ugaacacaaaggaagugu

SEQ ID NO: 665922 - RNA, 19 nt, Artificial Sequence
  Synthetic
uugaacacaaaggaagugu

SEQ ID NO: 665923 - RNA, 20 nt, Artificial Sequence
  Synthetic
auugaacacaaaggaagugu

SEQ ID NO: 665924 - RNA, 21 nt, Artificial Sequence
  Synthetic
uauugaacacaaaggaagugu

SEQ ID NO: 665925 - RNA, 22 nt, Artificial Sequence
  Synthetic
uuauugaacacaaaggaagugu

SEQ ID NO: 665926 - RNA, 23 nt, Artificial Sequence
  Synthetic
uuuauugaacacaaaggaagugu

SEQ ID NO: 665927 - RNA, 24 nt, Artificial Sequence
  Synthetic
auuuauugaacacaaaggaagugu

SEQ ID NO: 665928 - RNA, 18 nt, Artificial Sequence
  Synthetic
caagcuuaugggaagugu

SEQ ID NO: 665929 - RNA, 19 nt, Artificial Sequence
  Synthetic
ucaagcuuaugggaagugu

SEQ ID NO: 665930 - RNA, 20 nt, Artificial Sequence
  Synthetic
uucaagcuuaugggaagugu

SEQ ID NO: 665931 - RNA, 21 nt, Artificial Sequence
  Synthetic
uuucaagcuuaugggaagugu

SEQ ID NO: 665932 - RNA, 22 nt, Artificial Sequence
  Synthetic
auuucaagcuuaugggaagugu

SEQ ID NO: 665933 - RNA, 23 nt, Artificial Sequence
  Synthetic
gauuucaagcuuaugggaagugu

SEQ ID NO: 665934 - RNA, 24 nt, Artificial Sequence
  Synthetic
ggauuucaagcuuaugggaagugu

SEQ ID NO: 665935 - RNA, 18 nt, Artificial Sequence
  Synthetic
cuaagguaugugaagugu

SEQ ID NO: 665936 - RNA, 19 nt, Artificial Sequence
  Synthetic
ucuaagguaugugaagugu

SEQ ID NO: 665937 - RNA, 20 nt, Artificial Sequence
  Synthetic
cucuaagguaugugaagugu

SEQ ID NO: 665938 - RNA, 21 nt, Artificial Sequence
  Synthetic
ucucuaagguaugugaagugu

SEQ ID NO: 665939 - RNA, 22 nt, Artificial Sequence
  Synthetic
uucucuaagguaugugaagugu

SEQ ID NO: 665940 - RNA, 23 nt, Artificial Sequence
  Synthetic
guucucuaagguaugugaagugu

SEQ ID NO: 665941 - RNA, 24 nt, Artificial Sequence
  Synthetic
uguucucuaagguaugugaagugu

SEQ ID NO: 665942 - RNA, 18 nt, Artificial Sequence
  Synthetic
aaugguagacauaagugu

SEQ ID NO: 665943 - RNA, 19 nt, Artificial Sequence
  Synthetic
gaaugguagacauaagugu

SEQ ID NO: 665944 - RNA, 20 nt, Artificial Sequence
  Synthetic
agaaugguagacauaagugu

SEQ ID NO: 665945 - RNA, 21 nt, Artificial Sequence
  Synthetic
cagaaugguagacauaagugu

SEQ ID NO: 665946 - RNA, 22 nt, Artificial Sequence
  Synthetic
ucagaaugguagacauaagugu

SEQ ID NO: 665947 - RNA, 23 nt, Artificial Sequence
  Synthetic
aucagaaugguagacauaagugu

SEQ ID NO: 665948 - RNA, 24 nt, Artificial Sequence
  Synthetic
uaucagaaugguagacauaagugu

SEQ ID NO: 665949 - RNA, 18 nt, Artificial Sequence
  Synthetic
cauauagcugauaagugu

SEQ ID NO: 665950 - RNA, 19 nt, Artificial Sequence
  Synthetic
ccauauagcugauaagugu

SEQ ID NO: 665951 - RNA, 20 nt, Artificial Sequence
  Synthetic
gccauauagcugauaagugu

SEQ ID NO: 665952 - RNA, 21 nt, Artificial Sequence
  Synthetic
agccauauagcugauaagugu

SEQ ID NO: 665953 - RNA, 22 nt, Artificial Sequence
  Synthetic
aagccauauagcugauaagugu

SEQ ID NO: 665954 - RNA, 23 nt, Artificial Sequence
  Synthetic
aaagccauauagcugauaagugu

SEQ ID NO: 665955 - RNA, 24 nt, Artificial Sequence
  Synthetic
aaaagccauauagcugauaagugu

SEQ ID NO: 665956 - RNA, 18 nt, Artificial Sequence
  Synthetic
uagacucacacuaagugu

SEQ ID NO: 665957 - RNA, 19 nt, Artificial Sequence
  Synthetic
cuagacucacacuaagugu

SEQ ID NO: 665958 - RNA, 20 nt, Artificial Sequence
  Synthetic
ucuagacucacacuaagugu

SEQ ID NO: 665959 - RNA, 21 nt, Artificial Sequence
  Synthetic
uucuagacucacacuaagugu

SEQ ID NO: 665960 - RNA, 22 nt, Artificial Sequence
  Synthetic
uuucuagacucacacuaagugu

SEQ ID NO: 665961 - RNA, 23 nt, Artificial Sequence
  Synthetic
auuucuagacucacacuaagugu

SEQ ID NO: 665962 - RNA, 24 nt, Artificial Sequence
  Synthetic
uauuucuagacucacacuaagugu

SEQ ID NO: 665963 - RNA, 18 nt, Artificial Sequence
  Synthetic
ggauacuauguuaagugu

SEQ ID NO: 665964 - RNA, 19 nt, Artificial Sequence
  Synthetic
aggauacuauguuaagugu

SEQ ID NO: 665965 - RNA, 20 nt, Artificial Sequence
  Synthetic
gaggauacuauguuaagugu

SEQ ID NO: 665966 - RNA, 21 nt, Artificial Sequence
  Synthetic
ugaggauacuauguuaagugu

SEQ ID NO: 665967 - RNA, 22 nt, Artificial Sequence
  Synthetic
cugaggauacuauguuaagugu

SEQ ID NO: 665968 - RNA, 23 nt, Artificial Sequence
  Synthetic
ccugaggauacuauguuaagugu

SEQ ID NO: 665969 - RNA, 24 nt, Artificial Sequence
  Synthetic
accugaggauacuauguuaagugu

SEQ ID NO: 665970 - RNA, 18 nt, Artificial Sequence
  Synthetic
uuaggaaauuuuaagugu

SEQ ID NO: 665971 - RNA, 19 nt, Artificial Sequence
  Synthetic
cuuaggaaauuuuaagugu

SEQ ID NO: 665972 - RNA, 20 nt, Artificial Sequence
  Synthetic
ucuuaggaaauuuuaagugu

SEQ ID NO: 665973 - RNA, 21 nt, Artificial Sequence
  Synthetic
uucuuaggaaauuuuaagugu

SEQ ID NO: 665974 - RNA, 22 nt, Artificial Sequence
  Synthetic
uuucuuaggaaauuuuaagugu

SEQ ID NO: 665975 - RNA, 23 nt, Artificial Sequence
  Synthetic
auuucuuaggaaauuuuaagugu

SEQ ID NO: 665976 - RNA, 24 nt, Artificial Sequence
  Synthetic
gauuucuuaggaaauuuuaagugu

SEQ ID NO: 665977 - RNA, 18 nt, Artificial Sequence
  Synthetic
gcucaagcuugacagugu

SEQ ID NO: 665978 - RNA, 19 nt, Artificial Sequence
  Synthetic
ggcucaagcuugacagugu

SEQ ID NO: 665979 - RNA, 20 nt, Artificial Sequence
  Synthetic
uggcucaagcuugacagugu

SEQ ID NO: 665980 - RNA, 21 nt, Artificial Sequence
  Synthetic
uuggcucaagcuugacagugu

SEQ ID NO: 665981 - RNA, 22 nt, Artificial Sequence
  Synthetic
guuggcucaagcuugacagugu

SEQ ID NO: 665982 - RNA, 23 nt, Artificial Sequence
  Synthetic
uguuggcucaagcuugacagugu

SEQ ID NO: 665983 - RNA, 24 nt, Artificial Sequence
  Synthetic
cuguuggcucaagcuugacagugu

SEQ ID NO: 665984 - RNA, 18 nt, Artificial Sequence
  Synthetic
gagaguuauuuacagugu

SEQ ID NO: 665985 - RNA, 19 nt, Artificial Sequence
  Synthetic
ggagaguuauuuacagugu

SEQ ID NO: 665986 - RNA, 20 nt, Artificial Sequence
  Synthetic
gggagaguuauuuacagugu

SEQ ID NO: 665987 - RNA, 21 nt, Artificial Sequence
  Synthetic
ugggagaguuauuuacagugu

SEQ ID NO: 665988 - RNA, 22 nt, Artificial Sequence
  Synthetic
cugggagaguuauuuacagugu

SEQ ID NO: 665989 - RNA, 23 nt, Artificial Sequence
  Synthetic
ccugggagaguuauuuacagugu

SEQ ID NO: 665990 - RNA, 24 nt, Artificial Sequence
  Synthetic
gccugggagaguuauuuacagugu

SEQ ID NO: 665991 - RNA, 18 nt, Artificial Sequence
  Synthetic
aaauguaauucccagugu

SEQ ID NO: 665992 - RNA, 19 nt, Artificial Sequence
  Synthetic
gaaauguaauucccagugu

SEQ ID NO: 665993 - RNA, 20 nt, Artificial Sequence
  Synthetic
ugaaauguaauucccagugu

SEQ ID NO: 665994 - RNA, 21 nt, Artificial Sequence
  Synthetic
uugaaauguaauucccagugu

SEQ ID NO: 665995 - RNA, 22 nt, Artificial Sequence
  Synthetic
cuugaaauguaauucccagugu

SEQ ID NO: 665996 - RNA, 23 nt, Artificial Sequence
  Synthetic
ucuugaaauguaauucccagugu

SEQ ID NO: 665997 - RNA, 24 nt, Artificial Sequence
  Synthetic
aucuugaaauguaauucccagugu

SEQ ID NO: 665998 - RNA, 18 nt, Artificial Sequence
  Synthetic
ugucuuuauuagcagugu

SEQ ID NO: 665999 - RNA, 19 nt, Artificial Sequence
  Synthetic
augucuuuauuagcagugu

SEQ ID NO: 666000 - RNA, 20 nt, Artificial Sequence
  Synthetic
uaugucuuuauuagcagugu

SEQ ID NO: 666001 - RNA, 21 nt, Artificial Sequence
  Synthetic
guaugucuuuauuagcagugu

SEQ ID NO: 666002 - RNA, 22 nt, Artificial Sequence
  Synthetic
gguaugucuuuauuagcagugu

SEQ ID NO: 666003 - RNA, 23 nt, Artificial Sequence
  Synthetic
agguaugucuuuauuagcagugu

SEQ ID NO: 666004 - RNA, 24 nt, Artificial Sequence
  Synthetic
cagguaugucuuuauuagcagugu

SEQ ID NO: 666005 - RNA, 18 nt, Artificial Sequence
  Synthetic
agacuuaaaacgcagugu

SEQ ID NO: 666006 - RNA, 19 nt, Artificial Sequence
  Synthetic
gagacuuaaaacgcagugu

SEQ ID NO: 666007 - RNA, 20 nt, Artificial Sequence
  Synthetic
agagacuuaaaacgcagugu

SEQ ID NO: 666008 - RNA, 21 nt, Artificial Sequence
  Synthetic
aagagacuuaaaacgcagugu

SEQ ID NO: 666009 - RNA, 22 nt, Artificial Sequence
  Synthetic
gaagagacuuaaaacgcagugu

SEQ ID NO: 666010 - RNA, 23 nt, Artificial Sequence
  Synthetic
ugaagagacuuaaaacgcagugu

SEQ ID NO: 666011 - RNA, 24 nt, Artificial Sequence
  Synthetic
augaagagacuuaaaacgcagugu

SEQ ID NO: 666012 - RNA, 18 nt, Artificial Sequence
  Synthetic
uauagugcuacucagugu

SEQ ID NO: 666013 - RNA, 19 nt, Artificial Sequence
  Synthetic
auauagugcuacucagugu

SEQ ID NO: 666014 - RNA, 20 nt, Artificial Sequence
  Synthetic
uauauagugcuacucagugu

SEQ ID NO: 666015 - RNA, 21 nt, Artificial Sequence
  Synthetic
auauauagugcuacucagugu

SEQ ID NO: 666016 - RNA, 22 nt, Artificial Sequence
  Synthetic
uauauauagugcuacucagugu

SEQ ID NO: 666017 - RNA, 23 nt, Artificial Sequence
  Synthetic
auauauauagugcuacucagugu

SEQ ID NO: 666018 - RNA, 24 nt, Artificial Sequence
  Synthetic
aauauauauagugcuacucagugu

SEQ ID NO: 666019 - RNA, 18 nt, Artificial Sequence
  Synthetic
uaaggaacuccucagugu

SEQ ID NO: 666020 - RNA, 19 nt, Artificial Sequence
  Synthetic
uuaaggaacuccucagugu

SEQ ID NO: 666021 - RNA, 20 nt, Artificial Sequence
  Synthetic
uuuaaggaacuccucagugu

SEQ ID NO: 666022 - RNA, 21 nt, Artificial Sequence
  Synthetic
cuuuaaggaacuccucagugu

SEQ ID NO: 666023 - RNA, 22 nt, Artificial Sequence
  Synthetic
ucuuuaaggaacuccucagugu

SEQ ID NO: 666024 - RNA, 23 nt, Artificial Sequence
  Synthetic
gucuuuaaggaacuccucagugu

SEQ ID NO: 666025 - RNA, 24 nt, Artificial Sequence
  Synthetic
ggucuuuaaggaacuccucagugu

SEQ ID NO: 666026 - RNA, 18 nt, Artificial Sequence
  Synthetic
uaagaguguaaagagugu

SEQ ID NO: 666027 - RNA, 19 nt, Artificial Sequence
  Synthetic
uuaagaguguaaagagugu

SEQ ID NO: 666028 - RNA, 20 nt, Artificial Sequence
  Synthetic
auuaagaguguaaagagugu

SEQ ID NO: 666029 - RNA, 21 nt, Artificial Sequence
  Synthetic
aauuaagaguguaaagagugu

SEQ ID NO: 666030 - RNA, 22 nt, Artificial Sequence
  Synthetic
aaauuaagaguguaaagagugu

SEQ ID NO: 666031 - RNA, 23 nt, Artificial Sequence
  Synthetic
aaaauuaagaguguaaagagugu

SEQ ID NO: 666032 - RNA, 24 nt, Artificial Sequence
  Synthetic
uaaaauuaagaguguaaagagugu

SEQ ID NO: 666033 - RNA, 18 nt, Artificial Sequence
  Synthetic
cuuuacacaacagagugu

SEQ ID NO: 666034 - RNA, 19 nt, Artificial Sequence
  Synthetic
ucuuuacacaacagagugu

SEQ ID NO: 666035 - RNA, 20 nt, Artificial Sequence
  Synthetic
uucuuuacacaacagagugu

SEQ ID NO: 666036 - RNA, 21 nt, Artificial Sequence
  Synthetic
uuucuuuacacaacagagugu

SEQ ID NO: 666037 - RNA, 22 nt, Artificial Sequence
  Synthetic
guuucuuuacacaacagagugu

SEQ ID NO: 666038 - RNA, 23 nt, Artificial Sequence
  Synthetic
gguuucuuuacacaacagagugu

SEQ ID NO: 666039 - RNA, 24 nt, Artificial Sequence
  Synthetic
ugguuucuuuacacaacagagugu

SEQ ID NO: 666040 - RNA, 18 nt, Artificial Sequence
  Synthetic
cagagacuuucagagugu

SEQ ID NO: 666041 - RNA, 19 nt, Artificial Sequence
  Synthetic
acagagacuuucagagugu

SEQ ID NO: 666042 - RNA, 20 nt, Artificial Sequence
  Synthetic
aacagagacuuucagagugu

SEQ ID NO: 666043 - RNA, 21 nt, Artificial Sequence
  Synthetic
aaacagagacuuucagagugu

SEQ ID NO: 666044 - RNA, 22 nt, Artificial Sequence
  Synthetic
uaaacagagacuuucagagugu

SEQ ID NO: 666045 - RNA, 23 nt, Artificial Sequence
  Synthetic
auaaacagagacuuucagagugu

SEQ ID NO: 666046 - RNA, 24 nt, Artificial Sequence
  Synthetic
gauaaacagagacuuucagagugu

SEQ ID NO: 666047 - RNA, 18 nt, Artificial Sequence
  Synthetic
uggcccuuuugagagugu

SEQ ID NO: 666048 - RNA, 19 nt, Artificial Sequence
  Synthetic
uuggcccuuuugagagugu

SEQ ID NO: 666049 - RNA, 20 nt, Artificial Sequence
  Synthetic
cuuggcccuuuugagagugu

SEQ ID NO: 666050 - RNA, 21 nt, Artificial Sequence
  Synthetic
acuuggcccuuuugagagugu

SEQ ID NO: 666051 - RNA, 22 nt, Artificial Sequence
  Synthetic
aacuuggcccuuuugagagugu

SEQ ID NO: 666052 - RNA, 23 nt, Artificial Sequence
  Synthetic
aaacuuggcccuuuugagagugu

SEQ ID NO: 666053 - RNA, 24 nt, Artificial Sequence
  Synthetic
aaaacuuggcccuuuugagagugu

SEQ ID NO: 666054 - RNA, 18 nt, Artificial Sequence
  Synthetic
ucuccucuacuagagugu

SEQ ID NO: 666055 - RNA, 19 nt, Artificial Sequence
  Synthetic
uucuccucuacuagagugu

SEQ ID NO: 666056 - RNA, 20 nt, Artificial Sequence
  Synthetic
cuucuccucuacuagagugu

SEQ ID NO: 666057 - RNA, 21 nt, Artificial Sequence
  Synthetic
ccuucuccucuacuagagugu

SEQ ID NO: 666058 - RNA, 22 nt, Artificial Sequence
  Synthetic
accuucuccucuacuagagugu

SEQ ID NO: 666059 - RNA, 23 nt, Artificial Sequence
  Synthetic
caccuucuccucuacuagagugu

SEQ ID NO: 666060 - RNA, 24 nt, Artificial Sequence
  Synthetic
acaccuucuccucuacuagagugu

SEQ ID NO: 666061 - RNA, 18 nt, Artificial Sequence
  Synthetic
ccagaagaaaaggagugu

SEQ ID NO: 666062 - RNA, 19 nt, Artificial Sequence
  Synthetic
uccagaagaaaaggagugu

SEQ ID NO: 666063 - RNA, 20 nt, Artificial Sequence
  Synthetic
cuccagaagaaaaggagugu

SEQ ID NO: 666064 - RNA, 21 nt, Artificial Sequence
  Synthetic
acuccagaagaaaaggagugu

SEQ ID NO: 666065 - RNA, 22 nt, Artificial Sequence
  Synthetic
uacuccagaagaaaaggagugu

SEQ ID NO: 666066 - RNA, 23 nt, Artificial Sequence
  Synthetic
auacuccagaagaaaaggagugu

SEQ ID NO: 666067 - RNA, 24 nt, Artificial Sequence
  Synthetic
aauacuccagaagaaaaggagugu

SEQ ID NO: 666068 - RNA, 18 nt, Artificial Sequence
  Synthetic
acugaaggggcggagugu

SEQ ID NO: 666069 - RNA, 19 nt, Artificial Sequence
  Synthetic
uacugaaggggcggagugu

SEQ ID NO: 666070 - RNA, 20 nt, Artificial Sequence
  Synthetic
cuacugaaggggcggagugu

SEQ ID NO: 666071 - RNA, 21 nt, Artificial Sequence
  Synthetic
ucuacugaaggggcggagugu

SEQ ID NO: 666072 - RNA, 22 nt, Artificial Sequence
  Synthetic
aucuacugaaggggcggagugu

SEQ ID NO: 666073 - RNA, 23 nt, Artificial Sequence
  Synthetic
aaucuacugaaggggcggagugu

SEQ ID NO: 666074 - RNA, 24 nt, Artificial Sequence
  Synthetic
gaaucuacugaaggggcggagugu

SEQ ID NO: 666075 - RNA, 18 nt, Artificial Sequence
  Synthetic
ugauuauggcuggagugu

SEQ ID NO: 666076 - RNA, 19 nt, Artificial Sequence
  Synthetic
gugauuauggcuggagugu

SEQ ID NO: 666077 - RNA, 20 nt, Artificial Sequence
  Synthetic
agugauuauggcuggagugu

SEQ ID NO: 666078 - RNA, 21 nt, Artificial Sequence
  Synthetic
aagugauuauggcuggagugu

SEQ ID NO: 666079 - RNA, 22 nt, Artificial Sequence
  Synthetic
gaagugauuauggcuggagugu

SEQ ID NO: 666080 - RNA, 23 nt, Artificial Sequence
  Synthetic
ggaagugauuauggcuggagugu

SEQ ID NO: 666081 - RNA, 24 nt, Artificial Sequence
  Synthetic
aggaagugauuauggcuggagugu

SEQ ID NO: 666082 - RNA, 18 nt, Artificial Sequence
  Synthetic
cuugaacauuuggagugu

SEQ ID NO: 666083 - RNA, 19 nt, Artificial Sequence
  Synthetic
acuugaacauuuggagugu

SEQ ID NO: 666084 - RNA, 20 nt, Artificial Sequence
  Synthetic
aacuugaacauuuggagugu

SEQ ID NO: 666085 - RNA, 21 nt, Artificial Sequence
  Synthetic
aaacuugaacauuuggagugu

SEQ ID NO: 666086 - RNA, 22 nt, Artificial Sequence
  Synthetic
gaaacuugaacauuuggagugu

SEQ ID NO: 666087 - RNA, 23 nt, Artificial Sequence
  Synthetic
ugaaacuugaacauuuggagugu

SEQ ID NO: 666088 - RNA, 24 nt, Artificial Sequence
  Synthetic
cugaaacuugaacauuuggagugu

SEQ ID NO: 666089 - RNA, 18 nt, Artificial Sequence
  Synthetic
aucuugauccaugagugu

SEQ ID NO: 666090 - RNA, 19 nt, Artificial Sequence
  Synthetic
caucuugauccaugagugu

SEQ ID NO: 666091 - RNA, 20 nt, Artificial Sequence
  Synthetic
ucaucuugauccaugagugu

SEQ ID NO: 666092 - RNA, 21 nt, Artificial Sequence
  Synthetic
gucaucuugauccaugagugu

SEQ ID NO: 666093 - RNA, 22 nt, Artificial Sequence
  Synthetic
agucaucuugauccaugagugu

SEQ ID NO: 666094 - RNA, 23 nt, Artificial Sequence
  Synthetic
uagucaucuugauccaugagugu

SEQ ID NO: 666095 - RNA, 24 nt, Artificial Sequence
  Synthetic
auagucaucuugauccaugagugu

SEQ ID NO: 666096 - RNA, 18 nt, Artificial Sequence
  Synthetic
cuuccuucugaugagugu

SEQ ID NO: 666097 - RNA, 19 nt, Artificial Sequence
  Synthetic
acuuccuucugaugagugu

SEQ ID NO: 666098 - RNA, 20 nt, Artificial Sequence
  Synthetic
gacuuccuucugaugagugu

SEQ ID NO: 666099 - RNA, 21 nt, Artificial Sequence
  Synthetic
agacuuccuucugaugagugu

SEQ ID NO: 666100 - RNA, 22 nt, Artificial Sequence
  Synthetic
aagacuuccuucugaugagugu

SEQ ID NO: 666101 - RNA, 23 nt, Artificial Sequence
  Synthetic
aaagacuuccuucugaugagugu

SEQ ID NO: 666102 - RNA, 24 nt, Artificial Sequence
  Synthetic
gaaagacuuccuucugaugagugu

SEQ ID NO: 666103 - RNA, 18 nt, Artificial Sequence
  Synthetic
gcaggaaaacgugagugu

SEQ ID NO: 666104 - RNA, 19 nt, Artificial Sequence
  Synthetic
ggcaggaaaacgugagugu

SEQ ID NO: 666105 - RNA, 20 nt, Artificial Sequence
  Synthetic
gggcaggaaaacgugagugu

SEQ ID NO: 666106 - RNA, 21 nt, Artificial Sequence
  Synthetic
cgggcaggaaaacgugagugu

SEQ ID NO: 666107 - RNA, 22 nt, Artificial Sequence
  Synthetic
acgggcaggaaaacgugagugu

SEQ ID NO: 666108 - RNA, 23 nt, Artificial Sequence
  Synthetic
gacgggcaggaaaacgugagugu

SEQ ID NO: 666109 - RNA, 24 nt, Artificial Sequence
  Synthetic
agacgggcaggaaaacgugagugu

SEQ ID NO: 666110 - RNA, 21 nt, Artificial Sequence
  Synthetic
cacuccuauucaacauagugu

SEQ ID NO: 666111 - RNA, 22 nt, Artificial Sequence
  Synthetic
ccacuccuauucaacauagugu

SEQ ID NO: 666112 - RNA, 23 nt, Artificial Sequence
  Synthetic
accacuccuauucaacauagugu

SEQ ID NO: 666113 - RNA, 24 nt, Artificial Sequence
  Synthetic
caccacuccuauucaacauagugu

SEQ ID NO: 666114 - RNA, 18 nt, Artificial Sequence
  Synthetic
gugggaaaagcauagugu

SEQ ID NO: 666115 - RNA, 19 nt, Artificial Sequence
  Synthetic
ugugggaaaagcauagugu

SEQ ID NO: 666116 - RNA, 20 nt, Artificial Sequence
  Synthetic
cugugggaaaagcauagugu

SEQ ID NO: 666117 - RNA, 21 nt, Artificial Sequence
  Synthetic
gcugugggaaaagcauagugu

SEQ ID NO: 666118 - RNA, 22 nt, Artificial Sequence
  Synthetic
ggcugugggaaaagcauagugu

SEQ ID NO: 666119 - RNA, 23 nt, Artificial Sequence
  Synthetic
aggcugugggaaaagcauagugu

SEQ ID NO: 666120 - RNA, 24 nt, Artificial Sequence
  Synthetic
gaggcugugggaaaagcauagugu

SEQ ID NO: 666121 - RNA, 18 nt, Artificial Sequence
  Synthetic
aaagaggaagcauagugu

SEQ ID NO: 666122 - RNA, 19 nt, Artificial Sequence
  Synthetic
uaaagaggaagcauagugu

SEQ ID NO: 666123 - RNA, 20 nt, Artificial Sequence
  Synthetic
auaaagaggaagcauagugu

SEQ ID NO: 666124 - RNA, 21 nt, Artificial Sequence
  Synthetic
gauaaagaggaagcauagugu

SEQ ID NO: 666125 - RNA, 22 nt, Artificial Sequence
  Synthetic
ugauaaagaggaagcauagugu

SEQ ID NO: 666126 - RNA, 23 nt, Artificial Sequence
  Synthetic
cugauaaagaggaagcauagugu

SEQ ID NO: 666127 - RNA, 24 nt, Artificial Sequence
  Synthetic
acugauaaagaggaagcauagugu

SEQ ID NO: 666128 - RNA, 18 nt, Artificial Sequence
  Synthetic
ugaaauagaagauagugu

SEQ ID NO: 666129 - RNA, 19 nt, Artificial Sequence
  Synthetic
gugaaauagaagauagugu

SEQ ID NO: 666130 - RNA, 20 nt, Artificial Sequence
  Synthetic
ugugaaauagaagauagugu

SEQ ID NO: 666131 - RNA, 21 nt, Artificial Sequence
  Synthetic
gugugaaauagaagauagugu

SEQ ID NO: 666132 - RNA, 22 nt, Artificial Sequence
  Synthetic
agugugaaauagaagauagugu

SEQ ID NO: 666133 - RNA, 23 nt, Artificial Sequence
  Synthetic
cagugugaaauagaagauagugu

SEQ ID NO: 666134 - RNA, 24 nt, Artificial Sequence
  Synthetic
gcagugugaaauagaagauagugu

SEQ ID NO: 666135 - RNA, 18 nt, Artificial Sequence
  Synthetic
ucucuggguggauagugu

SEQ ID NO: 666136 - RNA, 19 nt, Artificial Sequence
  Synthetic
aucucuggguggauagugu

SEQ ID NO: 666137 - RNA, 20 nt, Artificial Sequence
  Synthetic
uaucucuggguggauagugu

SEQ ID NO: 666138 - RNA, 21 nt, Artificial Sequence
  Synthetic
cuaucucuggguggauagugu

SEQ ID NO: 666139 - RNA, 22 nt, Artificial Sequence
  Synthetic
acuaucucuggguggauagugu

SEQ ID NO: 666140 - RNA, 23 nt, Artificial Sequence
  Synthetic
cacuaucucuggguggauagugu

SEQ ID NO: 666141 - RNA, 24 nt, Artificial Sequence
  Synthetic
acacuaucucuggguggauagugu

SEQ ID NO: 666142 - RNA, 18 nt, Artificial Sequence
  Synthetic
aacguuuacaucuagugu

SEQ ID NO: 666143 - RNA, 19 nt, Artificial Sequence
  Synthetic
caacguuuacaucuagugu

SEQ ID NO: 666144 - RNA, 20 nt, Artificial Sequence
  Synthetic
gcaacguuuacaucuagugu

SEQ ID NO: 666145 - RNA, 21 nt, Artificial Sequence
  Synthetic
ggcaacguuuacaucuagugu

SEQ ID NO: 666146 - RNA, 22 nt, Artificial Sequence
  Synthetic
uggcaacguuuacaucuagugu

SEQ ID NO: 666147 - RNA, 23 nt, Artificial Sequence
  Synthetic
auggcaacguuuacaucuagugu

SEQ ID NO: 666148 - RNA, 24 nt, Artificial Sequence
  Synthetic
cauggcaacguuuacaucuagugu

SEQ ID NO: 666149 - RNA, 18 nt, Artificial Sequence
  Synthetic
cuugcuuuauuguagugu

SEQ ID NO: 666150 - RNA, 19 nt, Artificial Sequence
  Synthetic
ccuugcuuuauuguagugu

SEQ ID NO: 666151 - RNA, 20 nt, Artificial Sequence
  Synthetic
uccuugcuuuauuguagugu

SEQ ID NO: 666152 - RNA, 21 nt, Artificial Sequence
  Synthetic
uuccuugcuuuauuguagugu

SEQ ID NO: 666153 - RNA, 22 nt, Artificial Sequence
  Synthetic
uuuccuugcuuuauuguagugu

SEQ ID NO: 666154 - RNA, 23 nt, Artificial Sequence
  Synthetic
uuuuccuugcuuuauuguagugu

SEQ ID NO: 666155 - RNA, 24 nt, Artificial Sequence
  Synthetic
uuuuuccuugcuuuauuguagugu

SEQ ID NO: 666156 - RNA, 18 nt, Artificial Sequence
  Synthetic
uccaaauaaaguuagugu

SEQ ID NO: 666157 - RNA, 19 nt, Artificial Sequence
  Synthetic
cuccaaauaaaguuagugu

SEQ ID NO: 666158 - RNA, 20 nt, Artificial Sequence
  Synthetic
acuccaaauaaaguuagugu

SEQ ID NO: 666159 - RNA, 21 nt, Artificial Sequence
  Synthetic
cacuccaaauaaaguuagugu

SEQ ID NO: 666160 - RNA, 22 nt, Artificial Sequence
  Synthetic
acacuccaaauaaaguuagugu

SEQ ID NO: 666161 - RNA, 23 nt, Artificial Sequence
  Synthetic
aacacuccaaauaaaguuagugu

SEQ ID NO: 666162 - RNA, 24 nt, Artificial Sequence
  Synthetic
caacacuccaaauaaaguuagugu

SEQ ID NO: 666163 - RNA, 18 nt, Artificial Sequence
  Synthetic
aaugcuuccuaaacgugu

SEQ ID NO: 666164 - RNA, 19 nt, Artificial Sequence
  Synthetic
aaaugcuuccuaaacgugu

SEQ ID NO: 666165 - RNA, 20 nt, Artificial Sequence
  Synthetic
gaaaugcuuccuaaacgugu

SEQ ID NO: 666166 - RNA, 21 nt, Artificial Sequence
  Synthetic
agaaaugcuuccuaaacgugu

SEQ ID NO: 666167 - RNA, 22 nt, Artificial Sequence
  Synthetic
uagaaaugcuuccuaaacgugu

SEQ ID NO: 666168 - RNA, 23 nt, Artificial Sequence
  Synthetic
cuagaaaugcuuccuaaacgugu

SEQ ID NO: 666169 - RNA, 24 nt, Artificial Sequence
  Synthetic
acuagaaaugcuuccuaaacgugu

SEQ ID NO: 666170 - RNA, 18 nt, Artificial Sequence
  Synthetic
gugccuauaugcacgugu

SEQ ID NO: 666171 - RNA, 19 nt, Artificial Sequence
  Synthetic
ugugccuauaugcacgugu

SEQ ID NO: 666172 - RNA, 20 nt, Artificial Sequence
  Synthetic
gugugccuauaugcacgugu

SEQ ID NO: 666173 - RNA, 21 nt, Artificial Sequence
  Synthetic
agugugccuauaugcacgugu

SEQ ID NO: 666174 - RNA, 22 nt, Artificial Sequence
  Synthetic
gagugugccuauaugcacgugu

SEQ ID NO: 666175 - RNA, 23 nt, Artificial Sequence
  Synthetic
ggagugugccuauaugcacgugu

SEQ ID NO: 666176 - RNA, 24 nt, Artificial Sequence
  Synthetic
uggagugugccuauaugcacgugu

SEQ ID NO: 666177 - RNA, 18 nt, Artificial Sequence
  Synthetic
gccaccccauggccgugu

SEQ ID NO: 666178 - RNA, 19 nt, Artificial Sequence
  Synthetic
ggccaccccauggccgugu

SEQ ID NO: 666179 - RNA, 20 nt, Artificial Sequence
  Synthetic
aggccaccccauggccgugu

SEQ ID NO: 666180 - RNA, 21 nt, Artificial Sequence
  Synthetic
aaggccaccccauggccgugu

SEQ ID NO: 666181 - RNA, 22 nt, Artificial Sequence
  Synthetic
caaggccaccccauggccgugu

SEQ ID NO: 666182 - RNA, 23 nt, Artificial Sequence
  Synthetic
acaaggccaccccauggccgugu

SEQ ID NO: 666183 - RNA, 24 nt, Artificial Sequence
  Synthetic
cacaaggccaccccauggccgugu

SEQ ID NO: 666184 - RNA, 18 nt, Artificial Sequence
  Synthetic
uuaauucaaaaaucgugu

SEQ ID NO: 666185 - RNA, 19 nt, Artificial Sequence
  Synthetic
guuaauucaaaaaucgugu

SEQ ID NO: 666186 - RNA, 20 nt, Artificial Sequence
  Synthetic
aguuaauucaaaaaucgugu

SEQ ID NO: 666187 - RNA, 21 nt, Artificial Sequence
  Synthetic
caguuaauucaaaaaucgugu

SEQ ID NO: 666188 - RNA, 22 nt, Artificial Sequence
  Synthetic
ucaguuaauucaaaaaucgugu

SEQ ID NO: 666189 - RNA, 23 nt, Artificial Sequence
  Synthetic
gucaguuaauucaaaaaucgugu

SEQ ID NO: 666190 - RNA, 24 nt, Artificial Sequence
  Synthetic
ugucaguuaauucaaaaaucgugu

SEQ ID NO: 666191 - RNA, 18 nt, Artificial Sequence
  Synthetic
acaggcugcaugucgugu

SEQ ID NO: 666192 - RNA, 19 nt, Artificial Sequence
  Synthetic
uacaggcugcaugucgugu

SEQ ID NO: 666193 - RNA, 20 nt, Artificial Sequence
  Synthetic
auacaggcugcaugucgugu

SEQ ID NO: 666194 - RNA, 21 nt, Artificial Sequence
  Synthetic
aauacaggcugcaugucgugu

SEQ ID NO: 666195 - RNA, 22 nt, Artificial Sequence
  Synthetic
caauacaggcugcaugucgugu

SEQ ID NO: 666196 - RNA, 23 nt, Artificial Sequence
  Synthetic
acaauacaggcugcaugucgugu

SEQ ID NO: 666197 - RNA, 24 nt, Artificial Sequence
  Synthetic
cacaauacaggcugcaugucgugu

SEQ ID NO: 666198 - RNA, 18 nt, Artificial Sequence
  Synthetic
ggagugccuaauucgugu

SEQ ID NO: 666199 - RNA, 19 nt, Artificial Sequence
  Synthetic
cggagugccuaauucgugu

SEQ ID NO: 666200 - RNA, 20 nt, Artificial Sequence
  Synthetic
ucggagugccuaauucgugu

SEQ ID NO: 666201 - RNA, 21 nt, Artificial Sequence
  Synthetic
uucggagugccuaauucgugu

SEQ ID NO: 666202 - RNA, 22 nt, Artificial Sequence
  Synthetic
uuucggagugccuaauucgugu

SEQ ID NO: 666203 - RNA, 23 nt, Artificial Sequence
  Synthetic
cuuucggagugccuaauucgugu

SEQ ID NO: 666204 - RNA, 24 nt, Artificial Sequence
  Synthetic
ccuuucggagugccuaauucgugu

SEQ ID NO: 666205 - RNA, 18 nt, Artificial Sequence
  Synthetic
ugaagucaaaaaaggugu

SEQ ID NO: 666206 - RNA, 19 nt, Artificial Sequence
  Synthetic
uugaagucaaaaaaggugu

SEQ ID NO: 666207 - RNA, 20 nt, Artificial Sequence
  Synthetic
uuugaagucaaaaaaggugu

SEQ ID NO: 666208 - RNA, 21 nt, Artificial Sequence
  Synthetic
cuuugaagucaaaaaaggugu

SEQ ID NO: 666209 - RNA, 22 nt, Artificial Sequence
  Synthetic
gcuuugaagucaaaaaaggugu

SEQ ID NO: 666210 - RNA, 23 nt, Artificial Sequence
  Synthetic
ggcuuugaagucaaaaaaggugu

SEQ ID NO: 666211 - RNA, 24 nt, Artificial Sequence
  Synthetic
gggcuuugaagucaaaaaaggugu

SEQ ID NO: 666212 - RNA, 18 nt, Artificial Sequence
  Synthetic
auauauuugcaaaggugu

SEQ ID NO: 666213 - RNA, 19 nt, Artificial Sequence
  Synthetic
aauauauuugcaaaggugu

SEQ ID NO: 666214 - RNA, 20 nt, Artificial Sequence
  Synthetic
uaauauauuugcaaaggugu

SEQ ID NO: 666215 - RNA, 21 nt, Artificial Sequence
  Synthetic
auaauauauuugcaaaggugu

SEQ ID NO: 666216 - RNA, 22 nt, Artificial Sequence
  Synthetic
aauaauauauuugcaaaggugu

SEQ ID NO: 666217 - RNA, 23 nt, Artificial Sequence
  Synthetic
gaauaauauauuugcaaaggugu

SEQ ID NO: 666218 - RNA, 24 nt, Artificial Sequence
  Synthetic
agaauaauauauuugcaaaggugu

SEQ ID NO: 666219 - RNA, 18 nt, Artificial Sequence
  Synthetic
aucaacauuacaaggugu

SEQ ID NO: 666220 - RNA, 19 nt, Artificial Sequence
  Synthetic
uaucaacauuacaaggugu

SEQ ID NO: 666221 - RNA, 20 nt, Artificial Sequence
  Synthetic
auaucaacauuacaaggugu

SEQ ID NO: 666222 - RNA, 21 nt, Artificial Sequence
  Synthetic
aauaucaacauuacaaggugu

SEQ ID NO: 666223 - RNA, 22 nt, Artificial Sequence
  Synthetic
aaauaucaacauuacaaggugu

SEQ ID NO: 666224 - RNA, 23 nt, Artificial Sequence
  Synthetic
uaaauaucaacauuacaaggugu

SEQ ID NO: 666225 - RNA, 24 nt, Artificial Sequence
  Synthetic
guaaauaucaacauuacaaggugu

SEQ ID NO: 666226 - RNA, 18 nt, Artificial Sequence
  Synthetic
auguguuggugaaggugu

SEQ ID NO: 666227 - RNA, 19 nt, Artificial Sequence
  Synthetic
cauguguuggugaaggugu

SEQ ID NO: 666228 - RNA, 20 nt, Artificial Sequence
  Synthetic
acauguguuggugaaggugu

SEQ ID NO: 666229 - RNA, 21 nt, Artificial Sequence
  Synthetic
uacauguguuggugaaggugu

SEQ ID NO: 666230 - RNA, 22 nt, Artificial Sequence
  Synthetic
uuacauguguuggugaaggugu

SEQ ID NO: 666231 - RNA, 23 nt, Artificial Sequence
  Synthetic
auuacauguguuggugaaggugu

SEQ ID NO: 666232 - RNA, 24 nt, Artificial Sequence
  Synthetic
cauuacauguguuggugaaggugu

SEQ ID NO: 666233 - RNA, 24 nt, Artificial Sequence
  Synthetic
ugaguuaauuuuuguauaaggugu

SEQ ID NO: 666234 - RNA, 21 nt, Artificial Sequence
  Synthetic
auugauuuuuguauaaggugu

SEQ ID NO: 666235 - RNA, 22 nt, Artificial Sequence
  Synthetic
aauugauuuuuguauaaggugu

SEQ ID NO: 666236 - RNA, 23 nt, Artificial Sequence
  Synthetic
gaauugauuuuuguauaaggugu

SEQ ID NO: 666237 - RNA, 24 nt, Artificial Sequence
  Synthetic
ugaauugauuuuuguauaaggugu

SEQ ID NO: 666238 - RNA, 18 nt, Artificial Sequence
  Synthetic
gugcuacugaagaggugu

SEQ ID NO: 666239 - RNA, 19 nt, Artificial Sequence
  Synthetic
ugugcuacugaagaggugu

SEQ ID NO: 666240 - RNA, 20 nt, Artificial Sequence
  Synthetic
augugcuacugaagaggugu

SEQ ID NO: 666241 - RNA, 21 nt, Artificial Sequence
  Synthetic
caugugcuacugaagaggugu

SEQ ID NO: 666242 - RNA, 22 nt, Artificial Sequence
  Synthetic
acaugugcuacugaagaggugu

SEQ ID NO: 666243 - RNA, 23 nt, Artificial Sequence
  Synthetic
uacaugugcuacugaagaggugu

SEQ ID NO: 666244 - RNA, 24 nt, Artificial Sequence
  Synthetic
guacaugugcuacugaagaggugu

SEQ ID NO: 666245 - RNA, 18 nt, Artificial Sequence
  Synthetic
aacauauauaauaggugu

SEQ ID NO: 666246 - RNA, 19 nt, Artificial Sequence
  Synthetic
aaacauauauaauaggugu

SEQ ID NO: 666247 - RNA, 20 nt, Artificial Sequence
  Synthetic
aaaacauauauaauaggugu

SEQ ID NO: 666248 - RNA, 21 nt, Artificial Sequence
  Synthetic
caaaacauauauaauaggugu

SEQ ID NO: 666249 - RNA, 22 nt, Artificial Sequence
  Synthetic
acaaaacauauauaauaggugu

SEQ ID NO: 666250 - RNA, 23 nt, Artificial Sequence
  Synthetic
cacaaaacauauauaauaggugu

SEQ ID NO: 666251 - RNA, 24 nt, Artificial Sequence
  Synthetic
acacaaaacauauauaauaggugu

SEQ ID NO: 666252 - RNA, 18 nt, Artificial Sequence
  Synthetic
caaaacuaaucuaggugu

SEQ ID NO: 666253 - RNA, 19 nt, Artificial Sequence
  Synthetic
ucaaaacuaaucuaggugu

SEQ ID NO: 666254 - RNA, 20 nt, Artificial Sequence
  Synthetic
gucaaaacuaaucuaggugu

SEQ ID NO: 666255 - RNA, 21 nt, Artificial Sequence
  Synthetic
agucaaaacuaaucuaggugu

SEQ ID NO: 666256 - RNA, 22 nt, Artificial Sequence
  Synthetic
aagucaaaacuaaucuaggugu

SEQ ID NO: 666257 - RNA, 23 nt, Artificial Sequence
  Synthetic
aaagucaaaacuaaucuaggugu

SEQ ID NO: 666258 - RNA, 24 nt, Artificial Sequence
  Synthetic
caaagucaaaacuaaucuaggugu

SEQ ID NO: 666259 - RNA, 18 nt, Artificial Sequence
  Synthetic
accuggggaagagggugu

SEQ ID NO: 666260 - RNA, 19 nt, Artificial Sequence
  Synthetic
aaccuggggaagagggugu

SEQ ID NO: 666261 - RNA, 20 nt, Artificial Sequence
  Synthetic
aaaccuggggaagagggugu

SEQ ID NO: 666262 - RNA, 21 nt, Artificial Sequence
  Synthetic
aaaaccuggggaagagggugu

SEQ ID NO: 666263 - RNA, 22 nt, Artificial Sequence
  Synthetic
gaaaaccuggggaagagggugu

SEQ ID NO: 666264 - RNA, 23 nt, Artificial Sequence
  Synthetic
ugaaaaccuggggaagagggugu

SEQ ID NO: 666265 - RNA, 24 nt, Artificial Sequence
  Synthetic
gugaaaaccuggggaagagggugu

SEQ ID NO: 666266 - RNA, 18 nt, Artificial Sequence
  Synthetic
ucaccugaggucgggugu

SEQ ID NO: 666267 - RNA, 19 nt, Artificial Sequence
  Synthetic
aucaccugaggucgggugu

SEQ ID NO: 666268 - RNA, 20 nt, Artificial Sequence
  Synthetic
gaucaccugaggucgggugu

SEQ ID NO: 666269 - RNA, 21 nt, Artificial Sequence
  Synthetic
ggaucaccugaggucgggugu

SEQ ID NO: 666270 - RNA, 22 nt, Artificial Sequence
  Synthetic
uggaucaccugaggucgggugu

SEQ ID NO: 666271 - RNA, 23 nt, Artificial Sequence
  Synthetic
guggaucaccugaggucgggugu

SEQ ID NO: 666272 - RNA, 24 nt, Artificial Sequence
  Synthetic
gguggaucaccugaggucgggugu

SEQ ID NO: 666273 - RNA, 18 nt, Artificial Sequence
  Synthetic
aucauuauugaggggugu

SEQ ID NO: 666274 - RNA, 19 nt, Artificial Sequence
  Synthetic
gaucauuauugaggggugu

SEQ ID NO: 666275 - RNA, 20 nt, Artificial Sequence
  Synthetic
cgaucauuauugaggggugu

SEQ ID NO: 666276 - RNA, 21 nt, Artificial Sequence
  Synthetic
ccgaucauuauugaggggugu

SEQ ID NO: 666277 - RNA, 22 nt, Artificial Sequence
  Synthetic
cccgaucauuauugaggggugu

SEQ ID NO: 666278 - RNA, 23 nt, Artificial Sequence
  Synthetic
gcccgaucauuauugaggggugu

SEQ ID NO: 666279 - RNA, 24 nt, Artificial Sequence
  Synthetic
agcccgaucauuauugaggggugu

SEQ ID NO: 666280 - RNA, 18 nt, Artificial Sequence
  Synthetic
auaauaugcugggggugu

SEQ ID NO: 666281 - RNA, 19 nt, Artificial Sequence
  Synthetic
gauaauaugcugggggugu

SEQ ID NO: 666282 - RNA, 20 nt, Artificial Sequence
  Synthetic
ugauaauaugcugggggugu

SEQ ID NO: 666283 - RNA, 21 nt, Artificial Sequence
  Synthetic
gugauaauaugcugggggugu

SEQ ID NO: 666284 - RNA, 22 nt, Artificial Sequence
  Synthetic
ugugauaauaugcugggggugu

SEQ ID NO: 666285 - RNA, 23 nt, Artificial Sequence
  Synthetic
uugugauaauaugcugggggugu

SEQ ID NO: 666286 - RNA, 24 nt, Artificial Sequence
  Synthetic
uuugugauaauaugcugggggugu

SEQ ID NO: 666287 - RNA, 18 nt, Artificial Sequence
  Synthetic
cuucucuuuugggggugu

SEQ ID NO: 666288 - RNA, 19 nt, Artificial Sequence
  Synthetic
acuucucuuuugggggugu

SEQ ID NO: 666289 - RNA, 20 nt, Artificial Sequence
  Synthetic
gacuucucuuuugggggugu

SEQ ID NO: 666290 - RNA, 21 nt, Artificial Sequence
  Synthetic
ugacuucucuuuugggggugu

SEQ ID NO: 666291 - RNA, 22 nt, Artificial Sequence
  Synthetic
augacuucucuuuugggggugu

SEQ ID NO: 666292 - RNA, 23 nt, Artificial Sequence
  Synthetic
aaugacuucucuuuugggggugu

SEQ ID NO: 666293 - RNA, 24 nt, Artificial Sequence
  Synthetic
uaaugacuucucuuuugggggugu

SEQ ID NO: 666294 - RNA, 18 nt, Artificial Sequence
  Synthetic
acgaauuccuuggggugu

SEQ ID NO: 666295 - RNA, 19 nt, Artificial Sequence
  Synthetic
aacgaauuccuuggggugu

SEQ ID NO: 666296 - RNA, 20 nt, Artificial Sequence
  Synthetic
aaacgaauuccuuggggugu

SEQ ID NO: 666297 - RNA, 21 nt, Artificial Sequence
  Synthetic
uaaacgaauuccuuggggugu

SEQ ID NO: 666298 - RNA, 22 nt, Artificial Sequence
  Synthetic
uuaaacgaauuccuuggggugu

SEQ ID NO: 666299 - RNA, 23 nt, Artificial Sequence
  Synthetic
guuaaacgaauuccuuggggugu

SEQ ID NO: 666300 - RNA, 24 nt, Artificial Sequence
  Synthetic
gguuaaacgaauuccuuggggugu

SEQ ID NO: 666301 - RNA, 18 nt, Artificial Sequence
  Synthetic
aauuuucccauugggugu

SEQ ID NO: 666302 - RNA, 19 nt, Artificial Sequence
  Synthetic
aaauuuucccauugggugu

SEQ ID NO: 666303 - RNA, 20 nt, Artificial Sequence
  Synthetic
caaauuuucccauugggugu

SEQ ID NO: 666304 - RNA, 21 nt, Artificial Sequence
  Synthetic
acaaauuuucccauugggugu

SEQ ID NO: 666305 - RNA, 22 nt, Artificial Sequence
  Synthetic
cacaaauuuucccauugggugu

SEQ ID NO: 666306 - RNA, 23 nt, Artificial Sequence
  Synthetic
ccacaaauuuucccauugggugu

SEQ ID NO: 666307 - RNA, 24 nt, Artificial Sequence
  Synthetic
uccacaaauuuucccauugggugu

SEQ ID NO: 666308 - RNA, 18 nt, Artificial Sequence
  Synthetic
cuaagauuggcauggugu

SEQ ID NO: 666309 - RNA, 19 nt, Artificial Sequence
  Synthetic
gcuaagauuggcauggugu

SEQ ID NO: 666310 - RNA, 20 nt, Artificial Sequence
  Synthetic
cgcuaagauuggcauggugu

SEQ ID NO: 666311 - RNA, 21 nt, Artificial Sequence
  Synthetic
acgcuaagauuggcauggugu

SEQ ID NO: 666312 - RNA, 22 nt, Artificial Sequence
  Synthetic
cacgcuaagauuggcauggugu

SEQ ID NO: 666313 - RNA, 23 nt, Artificial Sequence
  Synthetic
ccacgcuaagauuggcauggugu

SEQ ID NO: 666314 - RNA, 24 nt, Artificial Sequence
  Synthetic
accacgcuaagauuggcauggugu

SEQ ID NO: 666315 - RNA, 18 nt, Artificial Sequence
  Synthetic
guguggugaucauggugu

SEQ ID NO: 666316 - RNA, 19 nt, Artificial Sequence
  Synthetic
uguguggugaucauggugu

SEQ ID NO: 666317 - RNA, 20 nt, Artificial Sequence
  Synthetic
uuguguggugaucauggugu

SEQ ID NO: 666318 - RNA, 21 nt, Artificial Sequence
  Synthetic
cuuguguggugaucauggugu

SEQ ID NO: 666319 - RNA, 22 nt, Artificial Sequence
  Synthetic
gcuuguguggugaucauggugu

SEQ ID NO: 666320 - RNA, 23 nt, Artificial Sequence
  Synthetic
ugcuuguguggugaucauggugu

SEQ ID NO: 666321 - RNA, 24 nt, Artificial Sequence
  Synthetic
uugcuuguguggugaucauggugu

SEQ ID NO: 666322 - RNA, 18 nt, Artificial Sequence
  Synthetic
aaauuuauuucauggugu

SEQ ID NO: 666323 - RNA, 19 nt, Artificial Sequence
  Synthetic
aaaauuuauuucauggugu

SEQ ID NO: 666324 - RNA, 20 nt, Artificial Sequence
  Synthetic
aaaaauuuauuucauggugu

SEQ ID NO: 666325 - RNA, 21 nt, Artificial Sequence
  Synthetic
aaaaaauuuauuucauggugu

SEQ ID NO: 666326 - RNA, 22 nt, Artificial Sequence
  Synthetic
gaaaaaauuuauuucauggugu

SEQ ID NO: 666327 - RNA, 23 nt, Artificial Sequence
  Synthetic
agaaaaaauuuauuucauggugu

SEQ ID NO: 666328 - RNA, 24 nt, Artificial Sequence
  Synthetic
aagaaaaaauuuauuucauggugu

SEQ ID NO: 666329 - RNA, 18 nt, Artificial Sequence
  Synthetic
aagugagaaugcuggugu

SEQ ID NO: 666330 - RNA, 19 nt, Artificial Sequence
  Synthetic
aaagugagaaugcuggugu

SEQ ID NO: 666331 - RNA, 20 nt, Artificial Sequence
  Synthetic
aaaagugagaaugcuggugu

SEQ ID NO: 666332 - RNA, 21 nt, Artificial Sequence
  Synthetic
uaaaagugagaaugcuggugu

SEQ ID NO: 666333 - RNA, 22 nt, Artificial Sequence
  Synthetic
uuaaaagugagaaugcuggugu

SEQ ID NO: 666334 - RNA, 23 nt, Artificial Sequence
  Synthetic
uuuaaaagugagaaugcuggugu

SEQ ID NO: 666335 - RNA, 24 nt, Artificial Sequence
  Synthetic
cuuuaaaagugagaaugcuggugu

SEQ ID NO: 666336 - RNA, 18 nt, Artificial Sequence
  Synthetic
auuuucagugucuggugu

SEQ ID NO: 666337 - RNA, 19 nt, Artificial Sequence
  Synthetic
gauuuucagugucuggugu

SEQ ID NO: 666338 - RNA, 20 nt, Artificial Sequence
  Synthetic
ugauuuucagugucuggugu

SEQ ID NO: 666339 - RNA, 21 nt, Artificial Sequence
  Synthetic
gugauuuucagugucuggugu

SEQ ID NO: 666340 - RNA, 22 nt, Artificial Sequence
  Synthetic
ugugauuuucagugucuggugu

SEQ ID NO: 666341 - RNA, 23 nt, Artificial Sequence
  Synthetic
cugugauuuucagugucuggugu

SEQ ID NO: 666342 - RNA, 24 nt, Artificial Sequence
  Synthetic
ccugugauuuucagugucuggugu

SEQ ID NO: 666343 - RNA, 18 nt, Artificial Sequence
  Synthetic
gugccugcuguuuggugu

SEQ ID NO: 666344 - RNA, 19 nt, Artificial Sequence
  Synthetic
ggugccugcuguuuggugu

SEQ ID NO: 666345 - RNA, 20 nt, Artificial Sequence
  Synthetic
uggugccugcuguuuggugu

SEQ ID NO: 666346 - RNA, 21 nt, Artificial Sequence
  Synthetic
cuggugccugcuguuuggugu

SEQ ID NO: 666347 - RNA, 22 nt, Artificial Sequence
  Synthetic
gcuggugccugcuguuuggugu

SEQ ID NO: 666348 - RNA, 23 nt, Artificial Sequence
  Synthetic
agcuggugccugcuguuuggugu

SEQ ID NO: 666349 - RNA, 24 nt, Artificial Sequence
  Synthetic
cagcuggugccugcuguuuggugu

SEQ ID NO: 666350 - RNA, 18 nt, Artificial Sequence
  Synthetic
uugguuaaaaaaaugugu

SEQ ID NO: 666351 - RNA, 19 nt, Artificial Sequence
  Synthetic
uuugguuaaaaaaaugugu

SEQ ID NO: 666352 - RNA, 20 nt, Artificial Sequence
  Synthetic
cuuugguuaaaaaaaugugu

SEQ ID NO: 666353 - RNA, 21 nt, Artificial Sequence
  Synthetic
gcuuugguuaaaaaaaugugu

SEQ ID NO: 666354 - RNA, 22 nt, Artificial Sequence
  Synthetic
ugcuuugguuaaaaaaaugugu

SEQ ID NO: 666355 - RNA, 23 nt, Artificial Sequence
  Synthetic
uugcuuugguuaaaaaaaugugu

SEQ ID NO: 666356 - RNA, 24 nt, Artificial Sequence
  Synthetic
uuugcuuugguuaaaaaaaugugu

SEQ ID NO: 666357 - RNA, 18 nt, Artificial Sequence
  Synthetic
uauugucauaaaaugugu

SEQ ID NO: 666358 - RNA, 19 nt, Artificial Sequence
  Synthetic
guauugucauaaaaugugu

SEQ ID NO: 666359 - RNA, 20 nt, Artificial Sequence
  Synthetic
aguauugucauaaaaugugu

SEQ ID NO: 666360 - RNA, 21 nt, Artificial Sequence
  Synthetic
aaguauugucauaaaaugugu

SEQ ID NO: 666361 - RNA, 22 nt, Artificial Sequence
  Synthetic
gaaguauugucauaaaaugugu

SEQ ID NO: 666362 - RNA, 23 nt, Artificial Sequence
  Synthetic
agaaguauugucauaaaaugugu

SEQ ID NO: 666363 - RNA, 24 nt, Artificial Sequence
  Synthetic
uagaaguauugucauaaaaugugu

SEQ ID NO: 666364 - RNA, 18 nt, Artificial Sequence
  Synthetic
uugcagcagcaaaugugu

SEQ ID NO: 666365 - RNA, 19 nt, Artificial Sequence
  Synthetic
cuugcagcagcaaaugugu

SEQ ID NO: 666366 - RNA, 20 nt, Artificial Sequence
  Synthetic
ccuugcagcagcaaaugugu

SEQ ID NO: 666367 - RNA, 21 nt, Artificial Sequence
  Synthetic
uccuugcagcagcaaaugugu

SEQ ID NO: 666368 - RNA, 22 nt, Artificial Sequence
  Synthetic
cuccuugcagcagcaaaugugu

SEQ ID NO: 666369 - RNA, 23 nt, Artificial Sequence
  Synthetic
gcuccuugcagcagcaaaugugu

SEQ ID NO: 666370 - RNA, 24 nt, Artificial Sequence
  Synthetic
ugcuccuugcagcagcaaaugugu

SEQ ID NO: 666371 - RNA, 18 nt, Artificial Sequence
  Synthetic
cucaaagucacaaugugu

SEQ ID NO: 666372 - RNA, 19 nt, Artificial Sequence
  Synthetic
gcucaaagucacaaugugu

SEQ ID NO: 666373 - RNA, 20 nt, Artificial Sequence
  Synthetic
ugcucaaagucacaaugugu

SEQ ID NO: 666374 - RNA, 21 nt, Artificial Sequence
  Synthetic
uugcucaaagucacaaugugu

SEQ ID NO: 666375 - RNA, 22 nt, Artificial Sequence
  Synthetic
uuugcucaaagucacaaugugu

SEQ ID NO: 666376 - RNA, 23 nt, Artificial Sequence
  Synthetic
uuuugcucaaagucacaaugugu

SEQ ID NO: 666377 - RNA, 24 nt, Artificial Sequence
  Synthetic
guuuugcucaaagucacaaugugu

SEQ ID NO: 666378 - RNA, 18 nt, Artificial Sequence
  Synthetic
gaugggaucagaaugugu

SEQ ID NO: 666379 - RNA, 19 nt, Artificial Sequence
  Synthetic
agaugggaucagaaugugu

SEQ ID NO: 666380 - RNA, 20 nt, Artificial Sequence
  Synthetic
aagaugggaucagaaugugu

SEQ ID NO: 666381 - RNA, 21 nt, Artificial Sequence
  Synthetic
caagaugggaucagaaugugu

SEQ ID NO: 666382 - RNA, 22 nt, Artificial Sequence
  Synthetic
ucaagaugggaucagaaugugu

SEQ ID NO: 666383 - RNA, 23 nt, Artificial Sequence
  Synthetic
gucaagaugggaucagaaugugu

SEQ ID NO: 666384 - RNA, 24 nt, Artificial Sequence
  Synthetic
ugucaagaugggaucagaaugugu

SEQ ID NO: 666385 - RNA, 18 nt, Artificial Sequence
  Synthetic
agggggaaaugaaugugu

SEQ ID NO: 666386 - RNA, 19 nt, Artificial Sequence
  Synthetic
uagggggaaaugaaugugu

SEQ ID NO: 666387 - RNA, 20 nt, Artificial Sequence
  Synthetic
auagggggaaaugaaugugu

SEQ ID NO: 666388 - RNA, 21 nt, Artificial Sequence
  Synthetic
cauagggggaaaugaaugugu

SEQ ID NO: 666389 - RNA, 22 nt, Artificial Sequence
  Synthetic
ccauagggggaaaugaaugugu

SEQ ID NO: 666390 - RNA, 23 nt, Artificial Sequence
  Synthetic
uccauagggggaaaugaaugugu

SEQ ID NO: 666391 - RNA, 24 nt, Artificial Sequence
  Synthetic
cuccauagggggaaaugaaugugu

SEQ ID NO: 666392 - RNA, 18 nt, Artificial Sequence
  Synthetic
acucuuucucuaaugugu

SEQ ID NO: 666393 - RNA, 19 nt, Artificial Sequence
  Synthetic
aacucuuucucuaaugugu

SEQ ID NO: 666394 - RNA, 20 nt, Artificial Sequence
  Synthetic
uaacucuuucucuaaugugu

SEQ ID NO: 666395 - RNA, 21 nt, Artificial Sequence
  Synthetic
uuaacucuuucucuaaugugu

SEQ ID NO: 666396 - RNA, 22 nt, Artificial Sequence
  Synthetic
cuuaacucuuucucuaaugugu

SEQ ID NO: 666397 - RNA, 23 nt, Artificial Sequence
  Synthetic
ccuuaacucuuucucuaaugugu

SEQ ID NO: 666398 - RNA, 24 nt, Artificial Sequence
  Synthetic
accuuaacucuuucucuaaugugu

SEQ ID NO: 666399 - RNA, 18 nt, Artificial Sequence
  Synthetic
ugaguucuucccaugugu

SEQ ID NO: 666400 - RNA, 19 nt, Artificial Sequence
  Synthetic
uugaguucuucccaugugu

SEQ ID NO: 666401 - RNA, 20 nt, Artificial Sequence
  Synthetic
auugaguucuucccaugugu

SEQ ID NO: 666402 - RNA, 21 nt, Artificial Sequence
  Synthetic
uauugaguucuucccaugugu

SEQ ID NO: 666403 - RNA, 22 nt, Artificial Sequence
  Synthetic
uuauugaguucuucccaugugu

SEQ ID NO: 666404 - RNA, 23 nt, Artificial Sequence
  Synthetic
uuuauugaguucuucccaugugu

SEQ ID NO: 666405 - RNA, 24 nt, Artificial Sequence
  Synthetic
auuuauugaguucuucccaugugu

SEQ ID NO: 666406 - RNA, 18 nt, Artificial Sequence
  Synthetic
cccccaaauuucaugugu

SEQ ID NO: 666407 - RNA, 19 nt, Artificial Sequence
  Synthetic
ucccccaaauuucaugugu

SEQ ID NO: 666408 - RNA, 20 nt, Artificial Sequence
  Synthetic
gucccccaaauuucaugugu

SEQ ID NO: 666409 - RNA, 21 nt, Artificial Sequence
  Synthetic
ugucccccaaauuucaugugu

SEQ ID NO: 666410 - RNA, 22 nt, Artificial Sequence
  Synthetic
gugucccccaaauuucaugugu

SEQ ID NO: 666411 - RNA, 23 nt, Artificial Sequence
  Synthetic
ugugucccccaaauuucaugugu

SEQ ID NO: 666412 - RNA, 24 nt, Artificial Sequence
  Synthetic
augugucccccaaauuucaugugu

SEQ ID NO: 666413 - RNA, 18 nt, Artificial Sequence
  Synthetic
uggagaaaugagaugugu

SEQ ID NO: 666414 - RNA, 19 nt, Artificial Sequence
  Synthetic
auggagaaaugagaugugu

SEQ ID NO: 666415 - RNA, 20 nt, Artificial Sequence
  Synthetic
gauggagaaaugagaugugu

SEQ ID NO: 666416 - RNA, 21 nt, Artificial Sequence
  Synthetic
ggauggagaaaugagaugugu

SEQ ID NO: 666417 - RNA, 22 nt, Artificial Sequence
  Synthetic
uggauggagaaaugagaugugu

SEQ ID NO: 666418 - RNA, 23 nt, Artificial Sequence
  Synthetic
uuggauggagaaaugagaugugu

SEQ ID NO: 666419 - RNA, 24 nt, Artificial Sequence
  Synthetic
uuuggauggagaaaugagaugugu

SEQ ID NO: 666420 - RNA, 18 nt, Artificial Sequence
  Synthetic
aagacaccuuuuaugugu

SEQ ID NO: 666421 - RNA, 19 nt, Artificial Sequence
  Synthetic
aaagacaccuuuuaugugu

SEQ ID NO: 666422 - RNA, 20 nt, Artificial Sequence
  Synthetic
gaaagacaccuuuuaugugu

SEQ ID NO: 666423 - RNA, 21 nt, Artificial Sequence
  Synthetic
agaaagacaccuuuuaugugu

SEQ ID NO: 666424 - RNA, 22 nt, Artificial Sequence
  Synthetic
cagaaagacaccuuuuaugugu

SEQ ID NO: 666425 - RNA, 23 nt, Artificial Sequence
  Synthetic
acagaaagacaccuuuuaugugu

SEQ ID NO: 666426 - RNA, 24 nt, Artificial Sequence
  Synthetic
gacagaaagacaccuuuuaugugu

SEQ ID NO: 666427 - RNA, 18 nt, Artificial Sequence
  Synthetic
cucauuucuuuuaugugu

SEQ ID NO: 666428 - RNA, 19 nt, Artificial Sequence
  Synthetic
ucucauuucuuuuaugugu

SEQ ID NO: 666429 - RNA, 20 nt, Artificial Sequence
  Synthetic
cucucauuucuuuuaugugu

SEQ ID NO: 666430 - RNA, 21 nt, Artificial Sequence
  Synthetic
ucucucauuucuuuuaugugu

SEQ ID NO: 666431 - RNA, 22 nt, Artificial Sequence
  Synthetic
uucucucauuucuuuuaugugu

SEQ ID NO: 666432 - RNA, 23 nt, Artificial Sequence
  Synthetic
cuucucucauuucuuuuaugugu

SEQ ID NO: 666433 - RNA, 24 nt, Artificial Sequence
  Synthetic
ucuucucucauuucuuuuaugugu

SEQ ID NO: 666434 - RNA, 18 nt, Artificial Sequence
  Synthetic
auaagugaugaacugugu

SEQ ID NO: 666435 - RNA, 19 nt, Artificial Sequence
  Synthetic
aauaagugaugaacugugu

SEQ ID NO: 666436 - RNA, 20 nt, Artificial Sequence
  Synthetic
uaauaagugaugaacugugu

SEQ ID NO: 666437 - RNA, 21 nt, Artificial Sequence
  Synthetic
auaauaagugaugaacugugu

SEQ ID NO: 666438 - RNA, 22 nt, Artificial Sequence
  Synthetic
gauaauaagugaugaacugugu

SEQ ID NO: 666439 - RNA, 23 nt, Artificial Sequence
  Synthetic
ggauaauaagugaugaacugugu

SEQ ID NO: 666440 - RNA, 24 nt, Artificial Sequence
  Synthetic
aggauaauaagugaugaacugugu

SEQ ID NO: 666441 - RNA, 18 nt, Artificial Sequence
  Synthetic
ccaagcucuuaacugugu

SEQ ID NO: 666442 - RNA, 19 nt, Artificial Sequence
  Synthetic
gccaagcucuuaacugugu

SEQ ID NO: 666443 - RNA, 20 nt, Artificial Sequence
  Synthetic
agccaagcucuuaacugugu

SEQ ID NO: 666444 - RNA, 21 nt, Artificial Sequence
  Synthetic
aagccaagcucuuaacugugu

SEQ ID NO: 666445 - RNA, 22 nt, Artificial Sequence
  Synthetic
aaagccaagcucuuaacugugu

SEQ ID NO: 666446 - RNA, 23 nt, Artificial Sequence
  Synthetic
caaagccaagcucuuaacugugu

SEQ ID NO: 666447 - RNA, 24 nt, Artificial Sequence
  Synthetic
ccaaagccaagcucuuaacugugu

SEQ ID NO: 666448 - RNA, 18 nt, Artificial Sequence
  Synthetic
auaugccagacccugugu

SEQ ID NO: 666449 - RNA, 19 nt, Artificial Sequence
  Synthetic
uauaugccagacccugugu

SEQ ID NO: 666450 - RNA, 20 nt, Artificial Sequence
  Synthetic
uuauaugccagacccugugu

SEQ ID NO: 666451 - RNA, 21 nt, Artificial Sequence
  Synthetic
cuuauaugccagacccugugu

SEQ ID NO: 666452 - RNA, 22 nt, Artificial Sequence
  Synthetic
ucuuauaugccagacccugugu

SEQ ID NO: 666453 - RNA, 23 nt, Artificial Sequence
  Synthetic
uucuuauaugccagacccugugu

SEQ ID NO: 666454 - RNA, 24 nt, Artificial Sequence
  Synthetic
guucuuauaugccagacccugugu

SEQ ID NO: 666455 - RNA, 18 nt, Artificial Sequence
  Synthetic
augccuccaaggcugugu

SEQ ID NO: 666456 - RNA, 19 nt, Artificial Sequence
  Synthetic
uaugccuccaaggcugugu

SEQ ID NO: 666457 - RNA, 20 nt, Artificial Sequence
  Synthetic
uuaugccuccaaggcugugu

SEQ ID NO: 666458 - RNA, 21 nt, Artificial Sequence
  Synthetic
cuuaugccuccaaggcugugu

SEQ ID NO: 666459 - RNA, 22 nt, Artificial Sequence
  Synthetic
acuuaugccuccaaggcugugu

SEQ ID NO: 666460 - RNA, 23 nt, Artificial Sequence
  Synthetic
aacuuaugccuccaaggcugugu

SEQ ID NO: 666461 - RNA, 24 nt, Artificial Sequence
  Synthetic
caacuuaugccuccaaggcugugu

SEQ ID NO: 666462 - RNA, 18 nt, Artificial Sequence
  Synthetic
aauuuguuacaucugugu

SEQ ID NO: 666463 - RNA, 19 nt, Artificial Sequence
  Synthetic
uaauuuguuacaucugugu

SEQ ID NO: 666464 - RNA, 20 nt, Artificial Sequence
  Synthetic
guaauuuguuacaucugugu

SEQ ID NO: 666465 - RNA, 21 nt, Artificial Sequence
  Synthetic
gguaauuuguuacaucugugu

SEQ ID NO: 666466 - RNA, 22 nt, Artificial Sequence
  Synthetic
ugguaauuuguuacaucugugu

SEQ ID NO: 666467 - RNA, 23 nt, Artificial Sequence
  Synthetic
gugguaauuuguuacaucugugu

SEQ ID NO: 666468 - RNA, 24 nt, Artificial Sequence
  Synthetic
ugugguaauuuguuacaucugugu

SEQ ID NO: 666469 - RNA, 18 nt, Artificial Sequence
  Synthetic
gguuagggcgaagugugu

SEQ ID NO: 666470 - RNA, 19 nt, Artificial Sequence
  Synthetic
agguuagggcgaagugugu

SEQ ID NO: 666471 - RNA, 20 nt, Artificial Sequence
  Synthetic
aagguuagggcgaagugugu

SEQ ID NO: 666472 - RNA, 21 nt, Artificial Sequence
  Synthetic
aaagguuagggcgaagugugu

SEQ ID NO: 666473 - RNA, 22 nt, Artificial Sequence
  Synthetic
caaagguuagggcgaagugugu

SEQ ID NO: 666474 - RNA, 23 nt, Artificial Sequence
  Synthetic
gcaaagguuagggcgaagugugu

SEQ ID NO: 666475 - RNA, 24 nt, Artificial Sequence
  Synthetic
ggcaaagguuagggcgaagugugu

SEQ ID NO: 666476 - RNA, 18 nt, Artificial Sequence
  Synthetic
ucaagcuugacagugugu

SEQ ID NO: 666477 - RNA, 19 nt, Artificial Sequence
  Synthetic
cucaagcuugacagugugu

SEQ ID NO: 666478 - RNA, 20 nt, Artificial Sequence
  Synthetic
gcucaagcuugacagugugu

SEQ ID NO: 666479 - RNA, 21 nt, Artificial Sequence
  Synthetic
ggcucaagcuugacagugugu

SEQ ID NO: 666480 - RNA, 22 nt, Artificial Sequence
  Synthetic
uggcucaagcuugacagugugu

SEQ ID NO: 666481 - RNA, 23 nt, Artificial Sequence
  Synthetic
uuggcucaagcuugacagugugu

SEQ ID NO: 666482 - RNA, 24 nt, Artificial Sequence
  Synthetic
guuggcucaagcuugacagugugu

SEQ ID NO: 666483 - RNA, 18 nt, Artificial Sequence
  Synthetic
ccucagccuccagugugu

SEQ ID NO: 666484 - RNA, 19 nt, Artificial Sequence
  Synthetic
gccucagccuccagugugu

SEQ ID NO: 666485 - RNA, 20 nt, Artificial Sequence
  Synthetic
ugccucagccuccagugugu

SEQ ID NO: 666486 - RNA, 21 nt, Artificial Sequence
  Synthetic
cugccucagccuccagugugu

SEQ ID NO: 666487 - RNA, 22 nt, Artificial Sequence
  Synthetic
ccugccucagccuccagugugu

SEQ ID NO: 666488 - RNA, 23 nt, Artificial Sequence
  Synthetic
uccugccucagccuccagugugu

SEQ ID NO: 666489 - RNA, 24 nt, Artificial Sequence
  Synthetic
cuccugccucagccuccagugugu

SEQ ID NO: 666490 - RNA, 18 nt, Artificial Sequence
  Synthetic
aaauagaagauagugugu

SEQ ID NO: 666491 - RNA, 19 nt, Artificial Sequence
  Synthetic
gaaauagaagauagugugu

SEQ ID NO: 666492 - RNA, 20 nt, Artificial Sequence
  Synthetic
ugaaauagaagauagugugu

SEQ ID NO: 666493 - RNA, 21 nt, Artificial Sequence
  Synthetic
gugaaauagaagauagugugu

SEQ ID NO: 666494 - RNA, 22 nt, Artificial Sequence
  Synthetic
ugugaaauagaagauagugugu

SEQ ID NO: 666495 - RNA, 23 nt, Artificial Sequence
  Synthetic
gugugaaauagaagauagugugu

SEQ ID NO: 666496 - RNA, 24 nt, Artificial Sequence
  Synthetic
agugugaaauagaagauagugugu

SEQ ID NO: 666497 - RNA, 18 nt, Artificial Sequence
  Synthetic
caguaacaaaaggugugu

SEQ ID NO: 666498 - RNA, 19 nt, Artificial Sequence
  Synthetic
acaguaacaaaaggugugu

SEQ ID NO: 666499 - RNA, 20 nt, Artificial Sequence
  Synthetic
aacaguaacaaaaggugugu

SEQ ID NO: 666500 - RNA, 21 nt, Artificial Sequence
  Synthetic
aaacaguaacaaaaggugugu

SEQ ID NO: 666501 - RNA, 22 nt, Artificial Sequence
  Synthetic
aaaacaguaacaaaaggugugu

SEQ ID NO: 666502 - RNA, 23 nt, Artificial Sequence
  Synthetic
uaaaacaguaacaaaaggugugu

SEQ ID NO: 666503 - RNA, 24 nt, Artificial Sequence
  Synthetic
uuaaaacaguaacaaaaggugugu

SEQ ID NO: 666504 - RNA, 18 nt, Artificial Sequence
  Synthetic
uguguguguguggugugu

SEQ ID NO: 666505 - RNA, 19 nt, Artificial Sequence
  Synthetic
guguguguguguggugugu

SEQ ID NO: 666506 - RNA, 20 nt, Artificial Sequence
  Synthetic
uguguguguguguggugugu

SEQ ID NO: 666507 - RNA, 21 nt, Artificial Sequence
  Synthetic
guguguguguguguggugugu

SEQ ID NO: 666508 - RNA, 22 nt, Artificial Sequence
  Synthetic
uguguguguguguguggugugu

SEQ ID NO: 666509 - RNA, 23 nt, Artificial Sequence
  Synthetic
guguguguguguguguggugugu

SEQ ID NO: 666510 - RNA, 24 nt, Artificial Sequence
  Synthetic
uguguguguguguguguggugugu

SEQ ID NO: 666511 - RNA, 18 nt, Artificial Sequence
  Synthetic
ggaaaguuuaaugugugu

SEQ ID NO: 666512 - RNA, 19 nt, Artificial Sequence
  Synthetic
aggaaaguuuaaugugugu

SEQ ID NO: 666513 - RNA, 20 nt, Artificial Sequence
  Synthetic
uaggaaaguuuaaugugugu

SEQ ID NO: 666514 - RNA, 21 nt, Artificial Sequence
  Synthetic
guaggaaaguuuaaugugugu

SEQ ID NO: 666515 - RNA, 22 nt, Artificial Sequence
  Synthetic
gguaggaaaguuuaaugugugu

SEQ ID NO: 666516 - RNA, 23 nt, Artificial Sequence
  Synthetic
agguaggaaaguuuaaugugugu

SEQ ID NO: 666517 - RNA, 24 nt, Artificial Sequence
  Synthetic
gagguaggaaaguuuaaugugugu

SEQ ID NO: 666518 - RNA, 18 nt, Artificial Sequence
  Synthetic
uaaacgguuucugugugu

SEQ ID NO: 666519 - RNA, 19 nt, Artificial Sequence
  Synthetic
guaaacgguuucugugugu

SEQ ID NO: 666520 - RNA, 20 nt, Artificial Sequence
  Synthetic
aguaaacgguuucugugugu

SEQ ID NO: 666521 - RNA, 21 nt, Artificial Sequence
  Synthetic
uaguaaacgguuucugugugu

SEQ ID NO: 666522 - RNA, 22 nt, Artificial Sequence
  Synthetic
cuaguaaacgguuucugugugu

SEQ ID NO: 666523 - RNA, 23 nt, Artificial Sequence
  Synthetic
gcuaguaaacgguuucugugugu

SEQ ID NO: 666524 - RNA, 24 nt, Artificial Sequence
  Synthetic
ugcuaguaaacgguuucugugugu

SEQ ID NO: 666525 - RNA, 18 nt, Artificial Sequence
  Synthetic
agaacaaagugugugugu

SEQ ID NO: 666526 - RNA, 19 nt, Artificial Sequence
  Synthetic
aagaacaaagugugugugu

SEQ ID NO: 666527 - RNA, 20 nt, Artificial Sequence
  Synthetic
gaagaacaaagugugugugu

SEQ ID NO: 666528 - RNA, 21 nt, Artificial Sequence
  Synthetic
ugaagaacaaagugugugugu

SEQ ID NO: 666529 - RNA, 22 nt, Artificial Sequence
  Synthetic
augaagaacaaagugugugugu

SEQ ID NO: 666530 - RNA, 23 nt, Artificial Sequence
  Synthetic
caugaagaacaaagugugugugu

SEQ ID NO: 666531 - RNA, 24 nt, Artificial Sequence
  Synthetic
ccaugaagaacaaagugugugugu

SEQ ID NO: 666532 - RNA, 18 nt, Artificial Sequence
  Synthetic
guaugugugugugugugu

SEQ ID NO: 666533 - RNA, 19 nt, Artificial Sequence
  Synthetic
gguaugugugugugugugu

SEQ ID NO: 666534 - RNA, 20 nt, Artificial Sequence
  Synthetic
ggguaugugugugugugugu

SEQ ID NO: 666535 - RNA, 21 nt, Artificial Sequence
  Synthetic
gggguaugugugugugugugu

SEQ ID NO: 666536 - RNA, 22 nt, Artificial Sequence
  Synthetic
ugggguaugugugugugugugu

SEQ ID NO: 666537 - RNA, 23 nt, Artificial Sequence
  Synthetic
gugggguaugugugugugugugu

SEQ ID NO: 666538 - RNA, 24 nt, Artificial Sequence
  Synthetic
ugugggguaugugugugugugugu

SEQ ID NO: 666539 - RNA, 18 nt, Artificial Sequence
  Synthetic
uggugugugugugugugu

SEQ ID NO: 666540 - RNA, 19 nt, Artificial Sequence
  Synthetic
auggugugugugugugugu

SEQ ID NO: 666541 - RNA, 20 nt, Artificial Sequence
  Synthetic
gauggugugugugugugugu

SEQ ID NO: 666542 - RNA, 21 nt, Artificial Sequence
  Synthetic
ugauggugugugugugugugu

SEQ ID NO: 666543 - RNA, 22 nt, Artificial Sequence
  Synthetic
augauggugugugugugugugu

SEQ ID NO: 666544 - RNA, 23 nt, Artificial Sequence
  Synthetic
caugauggugugugugugugugu

SEQ ID NO: 666545 - RNA, 24 nt, Artificial Sequence
  Synthetic
acaugauggugugugugugugugu

SEQ ID NO: 666546 - RNA, 18 nt, Artificial Sequence
  Synthetic
augugugugugugugugu

SEQ ID NO: 666547 - RNA, 19 nt, Artificial Sequence
  Synthetic
uaugugugugugugugugu

SEQ ID NO: 666548 - RNA, 20 nt, Artificial Sequence
  Synthetic
guaugugugugugugugugu

SEQ ID NO: 666549 - RNA, 21 nt, Artificial Sequence
  Synthetic
gguaugugugugugugugugu

SEQ ID NO: 666550 - RNA, 22 nt, Artificial Sequence
  Synthetic
ggguaugugugugugugugugu

SEQ ID NO: 666551 - RNA, 23 nt, Artificial Sequence
  Synthetic
gggguaugugugugugugugugu

SEQ ID NO: 666552 - RNA, 24 nt, Artificial Sequence
  Synthetic
ugggguaugugugugugugugugu

SEQ ID NO: 666553 - RNA, 18 nt, Artificial Sequence
  Synthetic
gugugugugugugugugu

SEQ ID NO: 666554 - RNA, 19 nt, Artificial Sequence
  Synthetic
ggugugugugugugugugu

SEQ ID NO: 666555 - RNA, 20 nt, Artificial Sequence
  Synthetic
uggugugugugugugugugu

SEQ ID NO: 666556 - RNA, 21 nt, Artificial Sequence
  Synthetic
auggugugugugugugugugu

SEQ ID NO: 666557 - RNA, 22 nt, Artificial Sequence
  Synthetic
gauggugugugugugugugugu

SEQ ID NO: 666558 - RNA, 23 nt, Artificial Sequence
  Synthetic
ugauggugugugugugugugugu

SEQ ID NO: 666559 - RNA, 24 nt, Artificial Sequence
  Synthetic
augauggugugugugugugugugu

SEQ ID NO: 666560 - RNA, 21 nt, Artificial Sequence
  Synthetic
ugugugugugugugugugugu

SEQ ID NO: 666561 - RNA, 22 nt, Artificial Sequence
  Synthetic
gugugugugugugugugugugu

SEQ ID NO: 666562 - RNA, 23 nt, Artificial Sequence
  Synthetic
ugugugugugugugugugugugu

SEQ ID NO: 666563 - RNA, 24 nt, Artificial Sequence
  Synthetic
gugugugugugugugugugugugu

SEQ ID NO: 666564 - RNA, 18 nt, Artificial Sequence
  Synthetic
aagugugagccauugugu

SEQ ID NO: 666565 - RNA, 19 nt, Artificial Sequence
  Synthetic
caagugugagccauugugu

SEQ ID NO: 666566 - RNA, 20 nt, Artificial Sequence
  Synthetic
acaagugugagccauugugu

SEQ ID NO: 666567 - RNA, 21 nt, Artificial Sequence
  Synthetic
uacaagugugagccauugugu

SEQ ID NO: 666568 - RNA, 22 nt, Artificial Sequence
  Synthetic
uuacaagugugagccauugugu

SEQ ID NO: 666569 - RNA, 23 nt, Artificial Sequence
  Synthetic
auuacaagugugagccauugugu

SEQ ID NO: 666570 - RNA, 24 nt, Artificial Sequence
  Synthetic
uauuacaagugugagccauugugu

SEQ ID NO: 666571 - RNA, 18 nt, Artificial Sequence
  Synthetic
auggaaucaauauugugu

SEQ ID NO: 666572 - RNA, 19 nt, Artificial Sequence
  Synthetic
aauggaaucaauauugugu

SEQ ID NO: 666573 - RNA, 20 nt, Artificial Sequence
  Synthetic
aaauggaaucaauauugugu

SEQ ID NO: 666574 - RNA, 21 nt, Artificial Sequence
  Synthetic
gaaauggaaucaauauugugu

SEQ ID NO: 666575 - RNA, 22 nt, Artificial Sequence
  Synthetic
ugaaauggaaucaauauugugu

SEQ ID NO: 666576 - RNA, 23 nt, Artificial Sequence
  Synthetic
augaaauggaaucaauauugugu

SEQ ID NO: 666577 - RNA, 24 nt, Artificial Sequence
  Synthetic
uaugaaauggaaucaauauugugu

SEQ ID NO: 666578 - RNA, 18 nt, Artificial Sequence
  Synthetic
ucuauaaggagcuugugu

SEQ ID NO: 666579 - RNA, 19 nt, Artificial Sequence
  Synthetic
uucuauaaggagcuugugu

SEQ ID NO: 666580 - RNA, 20 nt, Artificial Sequence
  Synthetic
uuucuauaaggagcuugugu

SEQ ID NO: 666581 - RNA, 21 nt, Artificial Sequence
  Synthetic
uuuucuauaaggagcuugugu

SEQ ID NO: 666582 - RNA, 22 nt, Artificial Sequence
  Synthetic
cuuuucuauaaggagcuugugu

SEQ ID NO: 666583 - RNA, 23 nt, Artificial Sequence
  Synthetic
ccuuuucuauaaggagcuugugu

SEQ ID NO: 666584 - RNA, 24 nt, Artificial Sequence
  Synthetic
cccuuuucuauaaggagcuugugu

SEQ ID NO: 666585 - RNA, 18 nt, Artificial Sequence
  Synthetic
auaguggccggcuugugu

SEQ ID NO: 666586 - RNA, 19 nt, Artificial Sequence
  Synthetic
uauaguggccggcuugugu

SEQ ID NO: 666587 - RNA, 20 nt, Artificial Sequence
  Synthetic
uuauaguggccggcuugugu

SEQ ID NO: 666588 - RNA, 21 nt, Artificial Sequence
  Synthetic
auuauaguggccggcuugugu

SEQ ID NO: 666589 - RNA, 22 nt, Artificial Sequence
  Synthetic
aauuauaguggccggcuugugu

SEQ ID NO: 666590 - RNA, 23 nt, Artificial Sequence
  Synthetic
uaauuauaguggccggcuugugu

SEQ ID NO: 666591 - RNA, 24 nt, Artificial Sequence
  Synthetic
cuaauuauaguggccggcuugugu

SEQ ID NO: 666592 - RNA, 18 nt, Artificial Sequence
  Synthetic
caggguuggggguugugu

SEQ ID NO: 666593 - RNA, 19 nt, Artificial Sequence
  Synthetic
gcaggguuggggguugugu

SEQ ID NO: 666594 - RNA, 20 nt, Artificial Sequence
  Synthetic
ggcaggguuggggguugugu

SEQ ID NO: 666595 - RNA, 21 nt, Artificial Sequence
  Synthetic
uggcaggguuggggguugugu

SEQ ID NO: 666596 - RNA, 22 nt, Artificial Sequence
  Synthetic
uuggcaggguuggggguugugu

SEQ ID NO: 666597 - RNA, 23 nt, Artificial Sequence
  Synthetic
guuggcaggguuggggguugugu

SEQ ID NO: 666598 - RNA, 24 nt, Artificial Sequence
  Synthetic
aguuggcaggguuggggguugugu

SEQ ID NO: 666599 - RNA, 18 nt, Artificial Sequence
  Synthetic
uuaaaggaugguuugugu

SEQ ID NO: 666600 - RNA, 19 nt, Artificial Sequence
  Synthetic
cuuaaaggaugguuugugu

SEQ ID NO: 666601 - RNA, 20 nt, Artificial Sequence
  Synthetic
acuuaaaggaugguuugugu

SEQ ID NO: 666602 - RNA, 21 nt, Artificial Sequence
  Synthetic
uacuuaaaggaugguuugugu

SEQ ID NO: 666603 - RNA, 22 nt, Artificial Sequence
  Synthetic
cuacuuaaaggaugguuugugu

SEQ ID NO: 666604 - RNA, 23 nt, Artificial Sequence
  Synthetic
gcuacuuaaaggaugguuugugu

SEQ ID NO: 666605 - RNA, 24 nt, Artificial Sequence
  Synthetic
ugcuacuuaaaggaugguuugugu

SEQ ID NO: 666606 - RNA, 18 nt, Artificial Sequence
  Synthetic
gguuuauagguuuugugu

SEQ ID NO: 666607 - RNA, 19 nt, Artificial Sequence
  Synthetic
ugguuuauagguuuugugu

SEQ ID NO: 666608 - RNA, 20 nt, Artificial Sequence
  Synthetic
gugguuuauagguuuugugu

SEQ ID NO: 666609 - RNA, 21 nt, Artificial Sequence
  Synthetic
ugugguuuauagguuuugugu

SEQ ID NO: 666610 - RNA, 22 nt, Artificial Sequence
  Synthetic
gugugguuuauagguuuugugu

SEQ ID NO: 666611 - RNA, 23 nt, Artificial Sequence
  Synthetic
ggugugguuuauagguuuugugu

SEQ ID NO: 666612 - RNA, 24 nt, Artificial Sequence
  Synthetic
uggugugguuuauagguuuugugu

SEQ ID NO: 666613 - RNA, 18 nt, Artificial Sequence
  Synthetic
gcaccauucuuuuugugu

SEQ ID NO: 666614 - RNA, 19 nt, Artificial Sequence
  Synthetic
agcaccauucuuuuugugu

SEQ ID NO: 666615 - RNA, 20 nt, Artificial Sequence
  Synthetic
aagcaccauucuuuuugugu

SEQ ID NO: 666616 - RNA, 21 nt, Artificial Sequence
  Synthetic
uaagcaccauucuuuuugugu

SEQ ID NO: 666617 - RNA, 22 nt, Artificial Sequence
  Synthetic
uuaagcaccauucuuuuugugu

SEQ ID NO: 666618 - RNA, 23 nt, Artificial Sequence
  Synthetic
auuaagcaccauucuuuuugugu

SEQ ID NO: 666619 - RNA, 24 nt, Artificial Sequence
  Synthetic
gauuaagcaccauucuuuuugugu

SEQ ID NO: 666620 - RNA, 18 nt, Artificial Sequence
  Synthetic
uugacaguuucaaauugu

SEQ ID NO: 666621 - RNA, 19 nt, Artificial Sequence
  Synthetic
uuugacaguuucaaauugu

SEQ ID NO: 666622 - RNA, 20 nt, Artificial Sequence
  Synthetic
uuuugacaguuucaaauugu

SEQ ID NO: 666623 - RNA, 21 nt, Artificial Sequence
  Synthetic
auuuugacaguuucaaauugu

SEQ ID NO: 666624 - RNA, 22 nt, Artificial Sequence
  Synthetic
aauuuugacaguuucaaauugu

SEQ ID NO: 666625 - RNA, 23 nt, Artificial Sequence
  Synthetic
aaauuuugacaguuucaaauugu

SEQ ID NO: 666626 - RNA, 24 nt, Artificial Sequence
  Synthetic
aaaauuuugacaguuucaaauugu

SEQ ID NO: 666627 - RNA, 18 nt, Artificial Sequence
  Synthetic
aggggggaaagaaauugu

SEQ ID NO: 666628 - RNA, 19 nt, Artificial Sequence
  Synthetic
caggggggaaagaaauugu

SEQ ID NO: 666629 - RNA, 20 nt, Artificial Sequence
  Synthetic
gcaggggggaaagaaauugu

SEQ ID NO: 666630 - RNA, 21 nt, Artificial Sequence
  Synthetic
ugcaggggggaaagaaauugu

SEQ ID NO: 666631 - RNA, 22 nt, Artificial Sequence
  Synthetic
augcaggggggaaagaaauugu

SEQ ID NO: 666632 - RNA, 23 nt, Artificial Sequence
  Synthetic
aaugcaggggggaaagaaauugu

SEQ ID NO: 666633 - RNA, 24 nt, Artificial Sequence
  Synthetic
caaugcaggggggaaagaaauugu

SEQ ID NO: 666634 - RNA, 18 nt, Artificial Sequence
  Synthetic
cacuuaagcagaaauugu

SEQ ID NO: 666635 - RNA, 19 nt, Artificial Sequence
  Synthetic
ccacuuaagcagaaauugu

SEQ ID NO: 666636 - RNA, 20 nt, Artificial Sequence
  Synthetic
uccacuuaagcagaaauugu

SEQ ID NO: 666637 - RNA, 21 nt, Artificial Sequence
  Synthetic
auccacuuaagcagaaauugu

SEQ ID NO: 666638 - RNA, 22 nt, Artificial Sequence
  Synthetic
cauccacuuaagcagaaauugu

SEQ ID NO: 666639 - RNA, 23 nt, Artificial Sequence
  Synthetic
ucauccacuuaagcagaaauugu

SEQ ID NO: 666640 - RNA, 24 nt, Artificial Sequence
  Synthetic
uucauccacuuaagcagaaauugu

SEQ ID NO: 666641 - RNA, 18 nt, Artificial Sequence
  Synthetic
ggagagugaggaaauugu

SEQ ID NO: 666642 - RNA, 19 nt, Artificial Sequence
  Synthetic
gggagagugaggaaauugu

SEQ ID NO: 666643 - RNA, 20 nt, Artificial Sequence
  Synthetic
ugggagagugaggaaauugu

SEQ ID NO: 666644 - RNA, 21 nt, Artificial Sequence
  Synthetic
augggagagugaggaaauugu

SEQ ID NO: 666645 - RNA, 22 nt, Artificial Sequence
  Synthetic
uaugggagagugaggaaauugu

SEQ ID NO: 666646 - RNA, 23 nt, Artificial Sequence
  Synthetic
auaugggagagugaggaaauugu

SEQ ID NO: 666647 - RNA, 24 nt, Artificial Sequence
  Synthetic
cauaugggagagugaggaaauugu

SEQ ID NO: 666648 - RNA, 18 nt, Artificial Sequence
  Synthetic
auggauuauugaaauugu

SEQ ID NO: 666649 - RNA, 19 nt, Artificial Sequence
  Synthetic
uauggauuauugaaauugu

SEQ ID NO: 666650 - RNA, 20 nt, Artificial Sequence
  Synthetic
guauggauuauugaaauugu

SEQ ID NO: 666651 - RNA, 21 nt, Artificial Sequence
  Synthetic
gguauggauuauugaaauugu

SEQ ID NO: 666652 - RNA, 22 nt, Artificial Sequence
  Synthetic
ggguauggauuauugaaauugu

SEQ ID NO: 666653 - RNA, 23 nt, Artificial Sequence
  Synthetic
aggguauggauuauugaaauugu

SEQ ID NO: 666654 - RNA, 24 nt, Artificial Sequence
  Synthetic
gaggguauggauuauugaaauugu

SEQ ID NO: 666655 - RNA, 18 nt, Artificial Sequence
  Synthetic
ucuaggaaaaacaauugu

SEQ ID NO: 666656 - RNA, 19 nt, Artificial Sequence
  Synthetic
uucuaggaaaaacaauugu

SEQ ID NO: 666657 - RNA, 20 nt, Artificial Sequence
  Synthetic
uuucuaggaaaaacaauugu

SEQ ID NO: 666658 - RNA, 21 nt, Artificial Sequence
  Synthetic
guuucuaggaaaaacaauugu

SEQ ID NO: 666659 - RNA, 22 nt, Artificial Sequence
  Synthetic
uguuucuaggaaaaacaauugu

SEQ ID NO: 666660 - RNA, 23 nt, Artificial Sequence
  Synthetic
uuguuucuaggaaaaacaauugu

SEQ ID NO: 666661 - RNA, 24 nt, Artificial Sequence
  Synthetic
uuuguuucuaggaaaaacaauugu

SEQ ID NO: 666662 - RNA, 18 nt, Artificial Sequence
  Synthetic
caaaugacaaccaauugu

SEQ ID NO: 666663 - RNA, 19 nt, Artificial Sequence
  Synthetic
ccaaaugacaaccaauugu

SEQ ID NO: 666664 - RNA, 20 nt, Artificial Sequence
  Synthetic
accaaaugacaaccaauugu

SEQ ID NO: 666665 - RNA, 21 nt, Artificial Sequence
  Synthetic
gaccaaaugacaaccaauugu

SEQ ID NO: 666666 - RNA, 22 nt, Artificial Sequence
  Synthetic
agaccaaaugacaaccaauugu

SEQ ID NO: 666667 - RNA, 23 nt, Artificial Sequence
  Synthetic
aagaccaaaugacaaccaauugu

SEQ ID NO: 666668 - RNA, 24 nt, Artificial Sequence
  Synthetic
gaagaccaaaugacaaccaauugu

SEQ ID NO: 666669 - RNA, 18 nt, Artificial Sequence
  Synthetic
gaagguggagauaauugu

SEQ ID NO: 666670 - RNA, 19 nt, Artificial Sequence
  Synthetic
agaagguggagauaauugu

SEQ ID NO: 666671 - RNA, 20 nt, Artificial Sequence
  Synthetic
cagaagguggagauaauugu

SEQ ID NO: 666672 - RNA, 21 nt, Artificial Sequence
  Synthetic
acagaagguggagauaauugu

SEQ ID NO: 666673 - RNA, 22 nt, Artificial Sequence
  Synthetic
gacagaagguggagauaauugu

SEQ ID NO: 666674 - RNA, 23 nt, Artificial Sequence
  Synthetic
ugacagaagguggagauaauugu

SEQ ID NO: 666675 - RNA, 24 nt, Artificial Sequence
  Synthetic
uugacagaagguggagauaauugu

SEQ ID NO: 666676 - RNA, 18 nt, Artificial Sequence
  Synthetic
caauccaucaguaauugu

SEQ ID NO: 666677 - RNA, 19 nt, Artificial Sequence
  Synthetic
gcaauccaucaguaauugu

SEQ ID NO: 666678 - RNA, 20 nt, Artificial Sequence
  Synthetic
ggcaauccaucaguaauugu

SEQ ID NO: 666679 - RNA, 21 nt, Artificial Sequence
  Synthetic
aggcaauccaucaguaauugu

SEQ ID NO: 666680 - RNA, 22 nt, Artificial Sequence
  Synthetic
aaggcaauccaucaguaauugu

SEQ ID NO: 666681 - RNA, 23 nt, Artificial Sequence
  Synthetic
aaaggcaauccaucaguaauugu

SEQ ID NO: 666682 - RNA, 24 nt, Artificial Sequence
  Synthetic
aaaaggcaauccaucaguaauugu

SEQ ID NO: 666683 - RNA, 18 nt, Artificial Sequence
  Synthetic
ccuccuaagguuaauugu

SEQ ID NO: 666684 - RNA, 19 nt, Artificial Sequence
  Synthetic
accuccuaagguuaauugu

SEQ ID NO: 666685 - RNA, 20 nt, Artificial Sequence
  Synthetic
uaccuccuaagguuaauugu

SEQ ID NO: 666686 - RNA, 21 nt, Artificial Sequence
  Synthetic
uuaccuccuaagguuaauugu

SEQ ID NO: 666687 - RNA, 22 nt, Artificial Sequence
  Synthetic
cuuaccuccuaagguuaauugu

SEQ ID NO: 666688 - RNA, 23 nt, Artificial Sequence
  Synthetic
acuuaccuccuaagguuaauugu

SEQ ID NO: 666689 - RNA, 24 nt, Artificial Sequence
  Synthetic
uacuuaccuccuaagguuaauugu

SEQ ID NO: 666690 - RNA, 18 nt, Artificial Sequence
  Synthetic
aaauaguguuuuaauugu

SEQ ID NO: 666691 - RNA, 19 nt, Artificial Sequence
  Synthetic
aaaauaguguuuuaauugu

SEQ ID NO: 666692 - RNA, 20 nt, Artificial Sequence
  Synthetic
aaaaauaguguuuuaauugu

SEQ ID NO: 666693 - RNA, 21 nt, Artificial Sequence
  Synthetic
aaaaaauaguguuuuaauugu

SEQ ID NO: 666694 - RNA, 22 nt, Artificial Sequence
  Synthetic
aaaaaaauaguguuuuaauugu

SEQ ID NO: 666695 - RNA, 23 nt, Artificial Sequence
  Synthetic
gaaaaaaauaguguuuuaauugu

SEQ ID NO: 666696 - RNA, 24 nt, Artificial Sequence
  Synthetic
agaaaaaaauaguguuuuaauugu

SEQ ID NO: 666697 - RNA, 18 nt, Artificial Sequence
  Synthetic
uugucugcuaaacauugu

SEQ ID NO: 666698 - RNA, 19 nt, Artificial Sequence
  Synthetic
auugucugcuaaacauugu

SEQ ID NO: 666699 - RNA, 20 nt, Artificial Sequence
  Synthetic
uauugucugcuaaacauugu

SEQ ID NO: 666700 - RNA, 21 nt, Artificial Sequence
  Synthetic
uuauugucugcuaaacauugu

SEQ ID NO: 666701 - RNA, 22 nt, Artificial Sequence
  Synthetic
cuuauugucugcuaaacauugu

SEQ ID NO: 666702 - RNA, 23 nt, Artificial Sequence
  Synthetic
acuuauugucugcuaaacauugu

SEQ ID NO: 666703 - RNA, 24 nt, Artificial Sequence
  Synthetic
uacuuauugucugcuaaacauugu

SEQ ID NO: 666704 - RNA, 18 nt, Artificial Sequence
  Synthetic
caucugcaacaacauugu

SEQ ID NO: 666705 - RNA, 19 nt, Artificial Sequence
  Synthetic
ucaucugcaacaacauugu

SEQ ID NO: 666706 - RNA, 20 nt, Artificial Sequence
  Synthetic
gucaucugcaacaacauugu

SEQ ID NO: 666707 - RNA, 21 nt, Artificial Sequence
  Synthetic
ugucaucugcaacaacauugu

SEQ ID NO: 666708 - RNA, 22 nt, Artificial Sequence
  Synthetic
cugucaucugcaacaacauugu

SEQ ID NO: 666709 - RNA, 23 nt, Artificial Sequence
  Synthetic
ucugucaucugcaacaacauugu

SEQ ID NO: 666710 - RNA, 24 nt, Artificial Sequence
  Synthetic
uucugucaucugcaacaacauugu

SEQ ID NO: 666711 - RNA, 18 nt, Artificial Sequence
  Synthetic
cagaccaaguaacauugu

SEQ ID NO: 666712 - RNA, 19 nt, Artificial Sequence
  Synthetic
acagaccaaguaacauugu

SEQ ID NO: 666713 - RNA, 20 nt, Artificial Sequence
  Synthetic
cacagaccaaguaacauugu

SEQ ID NO: 666714 - RNA, 21 nt, Artificial Sequence
  Synthetic
ucacagaccaaguaacauugu

SEQ ID NO: 666715 - RNA, 22 nt, Artificial Sequence
  Synthetic
uucacagaccaaguaacauugu

SEQ ID NO: 666716 - RNA, 23 nt, Artificial Sequence
  Synthetic
auucacagaccaaguaacauugu

SEQ ID NO: 666717 - RNA, 24 nt, Artificial Sequence
  Synthetic
aauucacagaccaaguaacauugu

SEQ ID NO: 666718 - RNA, 18 nt, Artificial Sequence
  Synthetic
cccuaacccucacauugu

SEQ ID NO: 666719 - RNA, 19 nt, Artificial Sequence
  Synthetic
ccccuaacccucacauugu

SEQ ID NO: 666720 - RNA, 20 nt, Artificial Sequence
  Synthetic
gccccuaacccucacauugu

SEQ ID NO: 666721 - RNA, 21 nt, Artificial Sequence
  Synthetic
cgccccuaacccucacauugu

SEQ ID NO: 666722 - RNA, 22 nt, Artificial Sequence
  Synthetic
gcgccccuaacccucacauugu

SEQ ID NO: 666723 - RNA, 23 nt, Artificial Sequence
  Synthetic
agcgccccuaacccucacauugu

SEQ ID NO: 666724 - RNA, 24 nt, Artificial Sequence
  Synthetic
cagcgccccuaacccucacauugu

SEQ ID NO: 666725 - RNA, 18 nt, Artificial Sequence
  Synthetic
ucaagaaucuaccauugu

SEQ ID NO: 666726 - RNA, 19 nt, Artificial Sequence
  Synthetic
uucaagaaucuaccauugu

SEQ ID NO: 666727 - RNA, 20 nt, Artificial Sequence
  Synthetic
auucaagaaucuaccauugu

SEQ ID NO: 666728 - RNA, 21 nt, Artificial Sequence
  Synthetic
gauucaagaaucuaccauugu

SEQ ID NO: 666729 - RNA, 22 nt, Artificial Sequence
  Synthetic
ggauucaagaaucuaccauugu

SEQ ID NO: 666730 - RNA, 23 nt, Artificial Sequence
  Synthetic
aggauucaagaaucuaccauugu

SEQ ID NO: 666731 - RNA, 24 nt, Artificial Sequence
  Synthetic
aaggauucaagaaucuaccauugu

SEQ ID NO: 666732 - RNA, 18 nt, Artificial Sequence
  Synthetic
guaugguggugccauugu

SEQ ID NO: 666733 - RNA, 19 nt, Artificial Sequence
  Synthetic
aguaugguggugccauugu

SEQ ID NO: 666734 - RNA, 20 nt, Artificial Sequence
  Synthetic
gaguaugguggugccauugu

SEQ ID NO: 666735 - RNA, 21 nt, Artificial Sequence
  Synthetic
cgaguaugguggugccauugu

SEQ ID NO: 666736 - RNA, 22 nt, Artificial Sequence
  Synthetic
ucgaguaugguggugccauugu

SEQ ID NO: 666737 - RNA, 23 nt, Artificial Sequence
  Synthetic
cucgaguaugguggugccauugu

SEQ ID NO: 666738 - RNA, 24 nt, Artificial Sequence
  Synthetic
acucgaguaugguggugccauugu

SEQ ID NO: 666739 - RNA, 18 nt, Artificial Sequence
  Synthetic
cuaaggagcauccauugu

SEQ ID NO: 666740 - RNA, 19 nt, Artificial Sequence
  Synthetic
gcuaaggagcauccauugu

SEQ ID NO: 666741 - RNA, 20 nt, Artificial Sequence
  Synthetic
agcuaaggagcauccauugu

SEQ ID NO: 666742 - RNA, 21 nt, Artificial Sequence
  Synthetic
aagcuaaggagcauccauugu

SEQ ID NO: 666743 - RNA, 22 nt, Artificial Sequence
  Synthetic
aaagcuaaggagcauccauugu

SEQ ID NO: 666744 - RNA, 23 nt, Artificial Sequence
  Synthetic
caaagcuaaggagcauccauugu

SEQ ID NO: 666745 - RNA, 24 nt, Artificial Sequence
  Synthetic
ucaaagcuaaggagcauccauugu

SEQ ID NO: 666746 - RNA, 18 nt, Artificial Sequence
  Synthetic
acugauucagagcauugu

SEQ ID NO: 666747 - RNA, 19 nt, Artificial Sequence
  Synthetic
cacugauucagagcauugu

SEQ ID NO: 666748 - RNA, 20 nt, Artificial Sequence
  Synthetic
gcacugauucagagcauugu

SEQ ID NO: 666749 - RNA, 21 nt, Artificial Sequence
  Synthetic
agcacugauucagagcauugu

SEQ ID NO: 666750 - RNA, 22 nt, Artificial Sequence
  Synthetic
aagcacugauucagagcauugu

SEQ ID NO: 666751 - RNA, 23 nt, Artificial Sequence
  Synthetic
gaagcacugauucagagcauugu

SEQ ID NO: 666752 - RNA, 24 nt, Artificial Sequence
  Synthetic
agaagcacugauucagagcauugu

SEQ ID NO: 666753 - RNA, 18 nt, Artificial Sequence
  Synthetic
gauugaaagaugcauugu

SEQ ID NO: 666754 - RNA, 19 nt, Artificial Sequence
  Synthetic
agauugaaagaugcauugu

SEQ ID NO: 666755 - RNA, 20 nt, Artificial Sequence
  Synthetic
gagauugaaagaugcauugu

SEQ ID NO: 666756 - RNA, 21 nt, Artificial Sequence
  Synthetic
cgagauugaaagaugcauugu

SEQ ID NO: 666757 - RNA, 22 nt, Artificial Sequence
  Synthetic
acgagauugaaagaugcauugu

SEQ ID NO: 666758 - RNA, 23 nt, Artificial Sequence
  Synthetic
cacgagauugaaagaugcauugu

SEQ ID NO: 666759 - RNA, 24 nt, Artificial Sequence
  Synthetic
gcacgagauugaaagaugcauugu

SEQ ID NO: 666760 - RNA, 18 nt, Artificial Sequence
  Synthetic
aguuuguugcugcauugu

SEQ ID NO: 666761 - RNA, 19 nt, Artificial Sequence
  Synthetic
aaguuuguugcugcauugu

SEQ ID NO: 666762 - RNA, 20 nt, Artificial Sequence
  Synthetic
aaaguuuguugcugcauugu

SEQ ID NO: 666763 - RNA, 21 nt, Artificial Sequence
  Synthetic
gaaaguuuguugcugcauugu

SEQ ID NO: 666764 - RNA, 22 nt, Artificial Sequence
  Synthetic
agaaaguuuguugcugcauugu

SEQ ID NO: 666765 - RNA, 23 nt, Artificial Sequence
  Synthetic
aagaaaguuuguugcugcauugu

SEQ ID NO: 666766 - RNA, 24 nt, Artificial Sequence
  Synthetic
caagaaaguuuguugcugcauugu

SEQ ID NO: 666767 - RNA, 18 nt, Artificial Sequence
  Synthetic
guaaagaagauucauugu

SEQ ID NO: 666768 - RNA, 19 nt, Artificial Sequence
  Synthetic
aguaaagaagauucauugu

SEQ ID NO: 666769 - RNA, 20 nt, Artificial Sequence
  Synthetic
gaguaaagaagauucauugu

SEQ ID NO: 666770 - RNA, 21 nt, Artificial Sequence
  Synthetic
agaguaaagaagauucauugu

SEQ ID NO: 666771 - RNA, 22 nt, Artificial Sequence
  Synthetic
gagaguaaagaagauucauugu

SEQ ID NO: 666772 - RNA, 23 nt, Artificial Sequence
  Synthetic
agagaguaaagaagauucauugu

SEQ ID NO: 666773 - RNA, 24 nt, Artificial Sequence
  Synthetic
aagagaguaaagaagauucauugu

SEQ ID NO: 666774 - RNA, 18 nt, Artificial Sequence
  Synthetic
aucaaaacauuucauugu

SEQ ID NO: 666775 - RNA, 19 nt, Artificial Sequence
  Synthetic
aaucaaaacauuucauugu

SEQ ID NO: 666776 - RNA, 20 nt, Artificial Sequence
  Synthetic
uaaucaaaacauuucauugu

SEQ ID NO: 666777 - RNA, 21 nt, Artificial Sequence
  Synthetic
uuaaucaaaacauuucauugu

SEQ ID NO: 666778 - RNA, 22 nt, Artificial Sequence
  Synthetic
uuuaaucaaaacauuucauugu

SEQ ID NO: 666779 - RNA, 23 nt, Artificial Sequence
  Synthetic
guuuaaucaaaacauuucauugu

SEQ ID NO: 666780 - RNA, 24 nt, Artificial Sequence
  Synthetic
gguuuaaucaaaacauuucauugu

SEQ ID NO: 666781 - RNA, 18 nt, Artificial Sequence
  Synthetic
uuaacuacauuucauugu

SEQ ID NO: 666782 - RNA, 19 nt, Artificial Sequence
  Synthetic
guuaacuacauuucauugu

SEQ ID NO: 666783 - RNA, 20 nt, Artificial Sequence
  Synthetic
cguuaacuacauuucauugu

SEQ ID NO: 666784 - RNA, 21 nt, Artificial Sequence
  Synthetic
acguuaacuacauuucauugu

SEQ ID NO: 666785 - RNA, 22 nt, Artificial Sequence
  Synthetic
uacguuaacuacauuucauugu

SEQ ID NO: 666786 - RNA, 23 nt, Artificial Sequence
  Synthetic
cuacguuaacuacauuucauugu

SEQ ID NO: 666787 - RNA, 24 nt, Artificial Sequence
  Synthetic
acuacguuaacuacauuucauugu

SEQ ID NO: 666788 - RNA, 18 nt, Artificial Sequence
  Synthetic
gaaaaaaauuaagauugu

SEQ ID NO: 666789 - RNA, 19 nt, Artificial Sequence
  Synthetic
agaaaaaaauuaagauugu

SEQ ID NO: 666790 - RNA, 20 nt, Artificial Sequence
  Synthetic
uagaaaaaaauuaagauugu

SEQ ID NO: 666791 - RNA, 21 nt, Artificial Sequence
  Synthetic
auagaaaaaaauuaagauugu

SEQ ID NO: 666792 - RNA, 22 nt, Artificial Sequence
  Synthetic
uauagaaaaaaauuaagauugu

SEQ ID NO: 666793 - RNA, 23 nt, Artificial Sequence
  Synthetic
auauagaaaaaaauuaagauugu

SEQ ID NO: 666794 - RNA, 24 nt, Artificial Sequence
  Synthetic
uauauagaaaaaaauuaagauugu

SEQ ID NO: 666795 - RNA, 18 nt, Artificial Sequence
  Synthetic
cugugaacaagagauugu

SEQ ID NO: 666796 - RNA, 19 nt, Artificial Sequence
  Synthetic
ucugugaacaagagauugu

SEQ ID NO: 666797 - RNA, 20 nt, Artificial Sequence
  Synthetic
aucugugaacaagagauugu

SEQ ID NO: 666798 - RNA, 21 nt, Artificial Sequence
  Synthetic
uaucugugaacaagagauugu

SEQ ID NO: 666799 - RNA, 22 nt, Artificial Sequence
  Synthetic
uuaucugugaacaagagauugu

SEQ ID NO: 666800 - RNA, 23 nt, Artificial Sequence
  Synthetic
auuaucugugaacaagagauugu

SEQ ID NO: 666801 - RNA, 24 nt, Artificial Sequence
  Synthetic
gauuaucugugaacaagagauugu

SEQ ID NO: 666802 - RNA, 18 nt, Artificial Sequence
  Synthetic
uucaauuggcaggauugu

SEQ ID NO: 666803 - RNA, 19 nt, Artificial Sequence
  Synthetic
guucaauuggcaggauugu

SEQ ID NO: 666804 - RNA, 20 nt, Artificial Sequence
  Synthetic
uguucaauuggcaggauugu

SEQ ID NO: 666805 - RNA, 21 nt, Artificial Sequence
  Synthetic
guguucaauuggcaggauugu

SEQ ID NO: 666806 - RNA, 22 nt, Artificial Sequence
  Synthetic
gguguucaauuggcaggauugu

SEQ ID NO: 666807 - RNA, 23 nt, Artificial Sequence
  Synthetic
ugguguucaauuggcaggauugu

SEQ ID NO: 666808 - RNA, 24 nt, Artificial Sequence
  Synthetic
gugguguucaauuggcaggauugu

SEQ ID NO: 666809 - RNA, 18 nt, Artificial Sequence
  Synthetic
agaguauaauuggauugu

SEQ ID NO: 666810 - RNA, 19 nt, Artificial Sequence
  Synthetic
aagaguauaauuggauugu

SEQ ID NO: 666811 - RNA, 20 nt, Artificial Sequence
  Synthetic
aaagaguauaauuggauugu

SEQ ID NO: 666812 - RNA, 21 nt, Artificial Sequence
  Synthetic
aaaagaguauaauuggauugu

SEQ ID NO: 666813 - RNA, 22 nt, Artificial Sequence
  Synthetic
uaaaagaguauaauuggauugu

SEQ ID NO: 666814 - RNA, 23 nt, Artificial Sequence
  Synthetic
uuaaaagaguauaauuggauugu

SEQ ID NO: 666815 - RNA, 24 nt, Artificial Sequence
  Synthetic
auuaaaagaguauaauuggauugu

SEQ ID NO: 666816 - RNA, 18 nt, Artificial Sequence
  Synthetic
cacauagauagugauugu

SEQ ID NO: 666817 - RNA, 19 nt, Artificial Sequence
  Synthetic
ucacauagauagugauugu

SEQ ID NO: 666818 - RNA, 20 nt, Artificial Sequence
  Synthetic
gucacauagauagugauugu

SEQ ID NO: 666819 - RNA, 21 nt, Artificial Sequence
  Synthetic
ggucacauagauagugauugu

SEQ ID NO: 666820 - RNA, 22 nt, Artificial Sequence
  Synthetic
aggucacauagauagugauugu

SEQ ID NO: 666821 - RNA, 23 nt, Artificial Sequence
  Synthetic
aaggucacauagauagugauugu

SEQ ID NO: 666822 - RNA, 24 nt, Artificial Sequence
  Synthetic
uaaggucacauagauagugauugu

SEQ ID NO: 666823 - RNA, 18 nt, Artificial Sequence
  Synthetic
cuuuuguuugaauauugu

SEQ ID NO: 666824 - RNA, 19 nt, Artificial Sequence
  Synthetic
ccuuuuguuugaauauugu

SEQ ID NO: 666825 - RNA, 20 nt, Artificial Sequence
  Synthetic
uccuuuuguuugaauauugu

SEQ ID NO: 666826 - RNA, 21 nt, Artificial Sequence
  Synthetic
cuccuuuuguuugaauauugu

SEQ ID NO: 666827 - RNA, 22 nt, Artificial Sequence
  Synthetic
ucuccuuuuguuugaauauugu

SEQ ID NO: 666828 - RNA, 23 nt, Artificial Sequence
  Synthetic
cucuccuuuuguuugaauauugu

SEQ ID NO: 666829 - RNA, 24 nt, Artificial Sequence
  Synthetic
acucuccuuuuguuugaauauugu

SEQ ID NO: 666830 - RNA, 18 nt, Artificial Sequence
  Synthetic
aucucacaaacauauugu

SEQ ID NO: 666831 - RNA, 19 nt, Artificial Sequence
  Synthetic
aaucucacaaacauauugu

SEQ ID NO: 666832 - RNA, 20 nt, Artificial Sequence
  Synthetic
gaaucucacaaacauauugu

SEQ ID NO: 666833 - RNA, 21 nt, Artificial Sequence
  Synthetic
ugaaucucacaaacauauugu

SEQ ID NO: 666834 - RNA, 22 nt, Artificial Sequence
  Synthetic
augaaucucacaaacauauugu

SEQ ID NO: 666835 - RNA, 23 nt, Artificial Sequence
  Synthetic
gaugaaucucacaaacauauugu

SEQ ID NO: 666836 - RNA, 24 nt, Artificial Sequence
  Synthetic
ggaugaaucucacaaacauauugu

SEQ ID NO: 666837 - RNA, 18 nt, Artificial Sequence
  Synthetic
uacacauaucuauauugu

SEQ ID NO: 666838 - RNA, 19 nt, Artificial Sequence
  Synthetic
auacacauaucuauauugu

SEQ ID NO: 666839 - RNA, 20 nt, Artificial Sequence
  Synthetic
gauacacauaucuauauugu

SEQ ID NO: 666840 - RNA, 21 nt, Artificial Sequence
  Synthetic
agauacacauaucuauauugu

SEQ ID NO: 666841 - RNA, 22 nt, Artificial Sequence
  Synthetic
aagauacacauaucuauauugu

SEQ ID NO: 666842 - RNA, 23 nt, Artificial Sequence
  Synthetic
aaagauacacauaucuauauugu

SEQ ID NO: 666843 - RNA, 24 nt, Artificial Sequence
  Synthetic
gaaagauacacauaucuauauugu

SEQ ID NO: 666844 - RNA, 18 nt, Artificial Sequence
  Synthetic
uuaagacagacguauugu

SEQ ID NO: 666845 - RNA, 19 nt, Artificial Sequence
  Synthetic
auuaagacagacguauugu

SEQ ID NO: 666846 - RNA, 20 nt, Artificial Sequence
  Synthetic
uauuaagacagacguauugu

SEQ ID NO: 666847 - RNA, 21 nt, Artificial Sequence
  Synthetic
uuauuaagacagacguauugu

SEQ ID NO: 666848 - RNA, 22 nt, Artificial Sequence
  Synthetic
auuauuaagacagacguauugu

SEQ ID NO: 666849 - RNA, 23 nt, Artificial Sequence
  Synthetic
aauuauuaagacagacguauugu

SEQ ID NO: 666850 - RNA, 24 nt, Artificial Sequence
  Synthetic
gaauuauuaagacagacguauugu

SEQ ID NO: 666851 - RNA, 18 nt, Artificial Sequence
  Synthetic
aucucccacuauuauugu

SEQ ID NO: 666852 - RNA, 19 nt, Artificial Sequence
  Synthetic
aaucucccacuauuauugu

SEQ ID NO: 666853 - RNA, 20 nt, Artificial Sequence
  Synthetic
aaaucucccacuauuauugu

SEQ ID NO: 666854 - RNA, 21 nt, Artificial Sequence
  Synthetic
aaaaucucccacuauuauugu

SEQ ID NO: 666855 - RNA, 22 nt, Artificial Sequence
  Synthetic
uaaaaucucccacuauuauugu

SEQ ID NO: 666856 - RNA, 23 nt, Artificial Sequence
  Synthetic
uuaaaaucucccacuauuauugu

SEQ ID NO: 666857 - RNA, 24 nt, Artificial Sequence
  Synthetic
guuaaaaucucccacuauuauugu

SEQ ID NO: 666858 - RNA, 18 nt, Artificial Sequence
  Synthetic
cuuuugauugguuauugu

SEQ ID NO: 666859 - RNA, 19 nt, Artificial Sequence
  Synthetic
ccuuuugauugguuauugu

SEQ ID NO: 666860 - RNA, 20 nt, Artificial Sequence
  Synthetic
accuuuugauugguuauugu

SEQ ID NO: 666861 - RNA, 21 nt, Artificial Sequence
  Synthetic
uaccuuuugauugguuauugu

SEQ ID NO: 666862 - RNA, 22 nt, Artificial Sequence
  Synthetic
uuaccuuuugauugguuauugu

SEQ ID NO: 666863 - RNA, 23 nt, Artificial Sequence
  Synthetic
uuuaccuuuugauugguuauugu

SEQ ID NO: 666864 - RNA, 24 nt, Artificial Sequence
  Synthetic
uuuuaccuuuugauugguuauugu

SEQ ID NO: 666865 - RNA, 18 nt, Artificial Sequence
  Synthetic
caguguguugcaacuugu

SEQ ID NO: 666866 - RNA, 19 nt, Artificial Sequence
  Synthetic
ucaguguguugcaacuugu

SEQ ID NO: 666867 - RNA, 20 nt, Artificial Sequence
  Synthetic
gucaguguguugcaacuugu

SEQ ID NO: 666868 - RNA, 21 nt, Artificial Sequence
  Synthetic
ggucaguguguugcaacuugu

SEQ ID NO: 666869 - RNA, 22 nt, Artificial Sequence
  Synthetic
gggucaguguguugcaacuugu

SEQ ID NO: 666870 - RNA, 23 nt, Artificial Sequence
  Synthetic
ugggucaguguguugcaacuugu

SEQ ID NO: 666871 - RNA, 24 nt, Artificial Sequence
  Synthetic
uugggucaguguguugcaacuugu

SEQ ID NO: 666872 - RNA, 18 nt, Artificial Sequence
  Synthetic
cauccccugagaacuugu

SEQ ID NO: 666873 - RNA, 19 nt, Artificial Sequence
  Synthetic
acauccccugagaacuugu

SEQ ID NO: 666874 - RNA, 20 nt, Artificial Sequence
  Synthetic
aacauccccugagaacuugu

SEQ ID NO: 666875 - RNA, 21 nt, Artificial Sequence
  Synthetic
caacauccccugagaacuugu

SEQ ID NO: 666876 - RNA, 22 nt, Artificial Sequence
  Synthetic
gcaacauccccugagaacuugu

SEQ ID NO: 666877 - RNA, 23 nt, Artificial Sequence
  Synthetic
ggcaacauccccugagaacuugu

SEQ ID NO: 666878 - RNA, 24 nt, Artificial Sequence
  Synthetic
cggcaacauccccugagaacuugu

SEQ ID NO: 666879 - RNA, 18 nt, Artificial Sequence
  Synthetic
caucaccugauaacuugu

SEQ ID NO: 666880 - RNA, 19 nt, Artificial Sequence
  Synthetic
gcaucaccugauaacuugu

SEQ ID NO: 666881 - RNA, 20 nt, Artificial Sequence
  Synthetic
agcaucaccugauaacuugu

SEQ ID NO: 666882 - RNA, 21 nt, Artificial Sequence
  Synthetic
cagcaucaccugauaacuugu

SEQ ID NO: 666883 - RNA, 22 nt, Artificial Sequence
  Synthetic
ucagcaucaccugauaacuugu

SEQ ID NO: 666884 - RNA, 23 nt, Artificial Sequence
  Synthetic
aucagcaucaccugauaacuugu

SEQ ID NO: 666885 - RNA, 24 nt, Artificial Sequence
  Synthetic
caucagcaucaccugauaacuugu

SEQ ID NO: 666886 - RNA, 18 nt, Artificial Sequence
  Synthetic
gagauuucagccacuugu

SEQ ID NO: 666887 - RNA, 19 nt, Artificial Sequence
  Synthetic
agagauuucagccacuugu

SEQ ID NO: 666888 - RNA, 20 nt, Artificial Sequence
  Synthetic
aagagauuucagccacuugu

SEQ ID NO: 666889 - RNA, 21 nt, Artificial Sequence
  Synthetic
gaagagauuucagccacuugu

SEQ ID NO: 666890 - RNA, 22 nt, Artificial Sequence
  Synthetic
agaagagauuucagccacuugu

SEQ ID NO: 666891 - RNA, 23 nt, Artificial Sequence
  Synthetic
uagaagagauuucagccacuugu

SEQ ID NO: 666892 - RNA, 24 nt, Artificial Sequence
  Synthetic
auagaagagauuucagccacuugu

SEQ ID NO: 666893 - RNA, 18 nt, Artificial Sequence
  Synthetic
ugcccagaccauacuugu

SEQ ID NO: 666894 - RNA, 19 nt, Artificial Sequence
  Synthetic
uugcccagaccauacuugu

SEQ ID NO: 666895 - RNA, 20 nt, Artificial Sequence
  Synthetic
auugcccagaccauacuugu

SEQ ID NO: 666896 - RNA, 21 nt, Artificial Sequence
  Synthetic
aauugcccagaccauacuugu

SEQ ID NO: 666897 - RNA, 22 nt, Artificial Sequence
  Synthetic
uaauugcccagaccauacuugu

SEQ ID NO: 666898 - RNA, 23 nt, Artificial Sequence
  Synthetic
auaauugcccagaccauacuugu

SEQ ID NO: 666899 - RNA, 24 nt, Artificial Sequence
  Synthetic
uauaauugcccagaccauacuugu

SEQ ID NO: 666900 - RNA, 18 nt, Artificial Sequence
  Synthetic
ccaaauguguauacuugu

SEQ ID NO: 666901 - RNA, 19 nt, Artificial Sequence
  Synthetic
gccaaauguguauacuugu

SEQ ID NO: 666902 - RNA, 20 nt, Artificial Sequence
  Synthetic
ugccaaauguguauacuugu

SEQ ID NO: 666903 - RNA, 21 nt, Artificial Sequence
  Synthetic
uugccaaauguguauacuugu

SEQ ID NO: 666904 - RNA, 22 nt, Artificial Sequence
  Synthetic
uuugccaaauguguauacuugu

SEQ ID NO: 666905 - RNA, 23 nt, Artificial Sequence
  Synthetic
uuuugccaaauguguauacuugu

SEQ ID NO: 666906 - RNA, 24 nt, Artificial Sequence
  Synthetic
guuuugccaaauguguauacuugu

SEQ ID NO: 666907 - RNA, 18 nt, Artificial Sequence
  Synthetic
aaagagaaaacuacuugu

SEQ ID NO: 666908 - RNA, 19 nt, Artificial Sequence
  Synthetic
aaaagagaaaacuacuugu

SEQ ID NO: 666909 - RNA, 20 nt, Artificial Sequence
  Synthetic
aaaaagagaaaacuacuugu

SEQ ID NO: 666910 - RNA, 21 nt, Artificial Sequence
  Synthetic
caaaaagagaaaacuacuugu

SEQ ID NO: 666911 - RNA, 22 nt, Artificial Sequence
  Synthetic
acaaaaagagaaaacuacuugu

SEQ ID NO: 666912 - RNA, 23 nt, Artificial Sequence
  Synthetic
gacaaaaagagaaaacuacuugu

SEQ ID NO: 666913 - RNA, 24 nt, Artificial Sequence
  Synthetic
ugacaaaaagagaaaacuacuugu

SEQ ID NO: 666914 - RNA, 18 nt, Artificial Sequence
  Synthetic
acuuuauauuguacuugu

SEQ ID NO: 666915 - RNA, 19 nt, Artificial Sequence
  Synthetic
aacuuuauauuguacuugu

SEQ ID NO: 666916 - RNA, 20 nt, Artificial Sequence
  Synthetic
uaacuuuauauuguacuugu

SEQ ID NO: 666917 - RNA, 21 nt, Artificial Sequence
  Synthetic
auaacuuuauauuguacuugu

SEQ ID NO: 666918 - RNA, 22 nt, Artificial Sequence
  Synthetic
cauaacuuuauauuguacuugu

SEQ ID NO: 666919 - RNA, 23 nt, Artificial Sequence
  Synthetic
acauaacuuuauauuguacuugu

SEQ ID NO: 666920 - RNA, 24 nt, Artificial Sequence
  Synthetic
aacauaacuuuauauuguacuugu

SEQ ID NO: 666921 - RNA, 18 nt, Artificial Sequence
  Synthetic
acugaauaccuuacuugu

SEQ ID NO: 666922 - RNA, 19 nt, Artificial Sequence
  Synthetic
aacugaauaccuuacuugu

SEQ ID NO: 666923 - RNA, 20 nt, Artificial Sequence
  Synthetic
uaacugaauaccuuacuugu

SEQ ID NO: 666924 - RNA, 21 nt, Artificial Sequence
  Synthetic
uuaacugaauaccuuacuugu

SEQ ID NO: 666925 - RNA, 22 nt, Artificial Sequence
  Synthetic
cuuaacugaauaccuuacuugu

SEQ ID NO: 666926 - RNA, 23 nt, Artificial Sequence
  Synthetic
ucuuaacugaauaccuuacuugu

SEQ ID NO: 666927 - RNA, 24 nt, Artificial Sequence
  Synthetic
aucuuaacugaauaccuuacuugu

SEQ ID NO: 666928 - RNA, 18 nt, Artificial Sequence
  Synthetic
aaggucugauaaccuugu

SEQ ID NO: 666929 - RNA, 19 nt, Artificial Sequence
  Synthetic
gaaggucugauaaccuugu

SEQ ID NO: 666930 - RNA, 20 nt, Artificial Sequence
  Synthetic
ggaaggucugauaaccuugu

SEQ ID NO: 666931 - RNA, 21 nt, Artificial Sequence
  Synthetic
uggaaggucugauaaccuugu

SEQ ID NO: 666932 - RNA, 22 nt, Artificial Sequence
  Synthetic
guggaaggucugauaaccuugu

SEQ ID NO: 666933 - RNA, 23 nt, Artificial Sequence
  Synthetic
gguggaaggucugauaaccuugu

SEQ ID NO: 666934 - RNA, 24 nt, Artificial Sequence
  Synthetic
ugguggaaggucugauaaccuugu

SEQ ID NO: 666935 - RNA, 18 nt, Artificial Sequence
  Synthetic
uuucauaaacuaccuugu

SEQ ID NO: 666936 - RNA, 19 nt, Artificial Sequence
  Synthetic
uuuucauaaacuaccuugu

SEQ ID NO: 666937 - RNA, 20 nt, Artificial Sequence
  Synthetic
guuuucauaaacuaccuugu

SEQ ID NO: 666938 - RNA, 21 nt, Artificial Sequence
  Synthetic
aguuuucauaaacuaccuugu

SEQ ID NO: 666939 - RNA, 22 nt, Artificial Sequence
  Synthetic
caguuuucauaaacuaccuugu

SEQ ID NO: 666940 - RNA, 23 nt, Artificial Sequence
  Synthetic
ccaguuuucauaaacuaccuugu

SEQ ID NO: 666941 - RNA, 24 nt, Artificial Sequence
  Synthetic
uccaguuuucauaaacuaccuugu

SEQ ID NO: 666942 - RNA, 18 nt, Artificial Sequence
  Synthetic
ggaagucccuuaccuugu

SEQ ID NO: 666943 - RNA, 19 nt, Artificial Sequence
  Synthetic
gggaagucccuuaccuugu

SEQ ID NO: 666944 - RNA, 20 nt, Artificial Sequence
  Synthetic
agggaagucccuuaccuugu

SEQ ID NO: 666945 - RNA, 21 nt, Artificial Sequence
  Synthetic
uagggaagucccuuaccuugu

SEQ ID NO: 666946 - RNA, 22 nt, Artificial Sequence
  Synthetic
uuagggaagucccuuaccuugu

SEQ ID NO: 666947 - RNA, 23 nt, Artificial Sequence
  Synthetic
uuuagggaagucccuuaccuugu

SEQ ID NO: 666948 - RNA, 24 nt, Artificial Sequence
  Synthetic
cuuuagggaagucccuuaccuugu

SEQ ID NO: 666949 - RNA, 18 nt, Artificial Sequence
  Synthetic
cauuuuggacucccuugu

SEQ ID NO: 666950 - RNA, 19 nt, Artificial Sequence
  Synthetic
ccauuuuggacucccuugu

SEQ ID NO: 666951 - RNA, 20 nt, Artificial Sequence
  Synthetic
cccauuuuggacucccuugu

SEQ ID NO: 666952 - RNA, 21 nt, Artificial Sequence
  Synthetic
acccauuuuggacucccuugu

SEQ ID NO: 666953 - RNA, 22 nt, Artificial Sequence
  Synthetic
cacccauuuuggacucccuugu

SEQ ID NO: 666954 - RNA, 23 nt, Artificial Sequence
  Synthetic
ccacccauuuuggacucccuugu

SEQ ID NO: 666955 - RNA, 24 nt, Artificial Sequence
  Synthetic
accacccauuuuggacucccuugu

SEQ ID NO: 666956 - RNA, 18 nt, Artificial Sequence
  Synthetic
ggugguaguuucccuugu

SEQ ID NO: 666957 - RNA, 19 nt, Artificial Sequence
  Synthetic
uggugguaguuucccuugu

SEQ ID NO: 666958 - RNA, 20 nt, Artificial Sequence
  Synthetic
cuggugguaguuucccuugu

SEQ ID NO: 666959 - RNA, 21 nt, Artificial Sequence
  Synthetic
ccuggugguaguuucccuugu

SEQ ID NO: 666960 - RNA, 22 nt, Artificial Sequence
  Synthetic
gccuggugguaguuucccuugu

SEQ ID NO: 666961 - RNA, 23 nt, Artificial Sequence
  Synthetic
ugccuggugguaguuucccuugu

SEQ ID NO: 666962 - RNA, 24 nt, Artificial Sequence
  Synthetic
augccuggugguaguuucccuugu

SEQ ID NO: 666963 - RNA, 18 nt, Artificial Sequence
  Synthetic
cuccuccauccuccuugu

SEQ ID NO: 666964 - RNA, 19 nt, Artificial Sequence
  Synthetic
ucuccuccauccuccuugu

SEQ ID NO: 666965 - RNA, 20 nt, Artificial Sequence
  Synthetic
uucuccuccauccuccuugu

SEQ ID NO: 666966 - RNA, 21 nt, Artificial Sequence
  Synthetic
uuucuccuccauccuccuugu

SEQ ID NO: 666967 - RNA, 22 nt, Artificial Sequence
  Synthetic
auuucuccuccauccuccuugu

SEQ ID NO: 666968 - RNA, 23 nt, Artificial Sequence
  Synthetic
aauuucuccuccauccuccuugu

SEQ ID NO: 666969 - RNA, 24 nt, Artificial Sequence
  Synthetic
aaauuucuccuccauccuccuugu

SEQ ID NO: 666970 - RNA, 18 nt, Artificial Sequence
  Synthetic
agaaccacagcagcuugu

SEQ ID NO: 666971 - RNA, 19 nt, Artificial Sequence
  Synthetic
aagaaccacagcagcuugu

SEQ ID NO: 666972 - RNA, 20 nt, Artificial Sequence
  Synthetic
aaagaaccacagcagcuugu

SEQ ID NO: 666973 - RNA, 21 nt, Artificial Sequence
  Synthetic
uaaagaaccacagcagcuugu

SEQ ID NO: 666974 - RNA, 22 nt, Artificial Sequence
  Synthetic
uuaaagaaccacagcagcuugu

SEQ ID NO: 666975 - RNA, 23 nt, Artificial Sequence
  Synthetic
uuuaaagaaccacagcagcuugu

SEQ ID NO: 666976 - RNA, 24 nt, Artificial Sequence
  Synthetic
uuuuaaagaaccacagcagcuugu

SEQ ID NO: 666977 - RNA, 18 nt, Artificial Sequence
  Synthetic
uuucuauaaggagcuugu

SEQ ID NO: 666978 - RNA, 19 nt, Artificial Sequence
  Synthetic
uuuucuauaaggagcuugu

SEQ ID NO: 666979 - RNA, 20 nt, Artificial Sequence
  Synthetic
cuuuucuauaaggagcuugu

SEQ ID NO: 666980 - RNA, 21 nt, Artificial Sequence
  Synthetic
ccuuuucuauaaggagcuugu

SEQ ID NO: 666981 - RNA, 22 nt, Artificial Sequence
  Synthetic
cccuuuucuauaaggagcuugu

SEQ ID NO: 666982 - RNA, 23 nt, Artificial Sequence
  Synthetic
gcccuuuucuauaaggagcuugu

SEQ ID NO: 666983 - RNA, 24 nt, Artificial Sequence
  Synthetic
agcccuuuucuauaaggagcuugu

SEQ ID NO: 666984 - RNA, 18 nt, Artificial Sequence
  Synthetic
agcacauaaugagcuugu

SEQ ID NO: 666985 - RNA, 19 nt, Artificial Sequence
  Synthetic
gagcacauaaugagcuugu

SEQ ID NO: 666986 - RNA, 20 nt, Artificial Sequence
  Synthetic
agagcacauaaugagcuugu

SEQ ID NO: 666987 - RNA, 21 nt, Artificial Sequence
  Synthetic
cagagcacauaaugagcuugu

SEQ ID NO: 666988 - RNA, 22 nt, Artificial Sequence
  Synthetic
ucagagcacauaaugagcuugu

SEQ ID NO: 666989 - RNA, 23 nt, Artificial Sequence
  Synthetic
aucagagcacauaaugagcuugu

SEQ ID NO: 666990 - RNA, 24 nt, Artificial Sequence
  Synthetic
gaucagagcacauaaugagcuugu

SEQ ID NO: 666991 - RNA, 18 nt, Artificial Sequence
  Synthetic
cuuaucaauuuagcuugu

SEQ ID NO: 666992 - RNA, 19 nt, Artificial Sequence
  Synthetic
ucuuaucaauuuagcuugu

SEQ ID NO: 666993 - RNA, 20 nt, Artificial Sequence
  Synthetic
uucuuaucaauuuagcuugu

SEQ ID NO: 666994 - RNA, 21 nt, Artificial Sequence
  Synthetic
uuucuuaucaauuuagcuugu

SEQ ID NO: 666995 - RNA, 22 nt, Artificial Sequence
  Synthetic
cuuucuuaucaauuuagcuugu

SEQ ID NO: 666996 - RNA, 23 nt, Artificial Sequence
  Synthetic
acuuucuuaucaauuuagcuugu

SEQ ID NO: 666997 - RNA, 24 nt, Artificial Sequence
  Synthetic
uacuuucuuaucaauuuagcuugu

SEQ ID NO: 666998 - RNA, 18 nt, Artificial Sequence
  Synthetic
cuguuguuuccugcuugu

SEQ ID NO: 666999 - RNA, 19 nt, Artificial Sequence
  Synthetic
acuguuguuuccugcuugu

SEQ ID NO: 667000 - RNA, 20 nt, Artificial Sequence
  Synthetic
gacuguuguuuccugcuugu

SEQ ID NO: 667001 - RNA, 21 nt, Artificial Sequence
  Synthetic
agacuguuguuuccugcuugu

SEQ ID NO: 667002 - RNA, 22 nt, Artificial Sequence
  Synthetic
aagacuguuguuuccugcuugu

SEQ ID NO: 667003 - RNA, 23 nt, Artificial Sequence
  Synthetic
uaagacuguuguuuccugcuugu

SEQ ID NO: 667004 - RNA, 24 nt, Artificial Sequence
  Synthetic
guaagacuguuguuuccugcuugu

SEQ ID NO: 667005 - RNA, 18 nt, Artificial Sequence
  Synthetic
guaggaaaaauugcuugu

SEQ ID NO: 667006 - RNA, 19 nt, Artificial Sequence
  Synthetic
cguaggaaaaauugcuugu

SEQ ID NO: 667007 - RNA, 20 nt, Artificial Sequence
  Synthetic
acguaggaaaaauugcuugu

SEQ ID NO: 667008 - RNA, 21 nt, Artificial Sequence
  Synthetic
uacguaggaaaaauugcuugu

SEQ ID NO: 667009 - RNA, 22 nt, Artificial Sequence
  Synthetic
uuacguaggaaaaauugcuugu

SEQ ID NO: 667010 - RNA, 23 nt, Artificial Sequence
  Synthetic
cuuacguaggaaaaauugcuugu

SEQ ID NO: 667011 - RNA, 24 nt, Artificial Sequence
  Synthetic
acuuacguaggaaaaauugcuugu

SEQ ID NO: 667012 - RNA, 18 nt, Artificial Sequence
  Synthetic
aaaacaaucagaucuugu

SEQ ID NO: 667013 - RNA, 19 nt, Artificial Sequence
  Synthetic
uaaaacaaucagaucuugu

SEQ ID NO: 667014 - RNA, 20 nt, Artificial Sequence
  Synthetic
auaaaacaaucagaucuugu

SEQ ID NO: 667015 - RNA, 21 nt, Artificial Sequence
  Synthetic
uauaaaacaaucagaucuugu

SEQ ID NO: 667016 - RNA, 22 nt, Artificial Sequence
  Synthetic
uuauaaaacaaucagaucuugu

SEQ ID NO: 667017 - RNA, 23 nt, Artificial Sequence
  Synthetic
cuuauaaaacaaucagaucuugu

SEQ ID NO: 667018 - RNA, 24 nt, Artificial Sequence
  Synthetic
ccuuauaaaacaaucagaucuugu

SEQ ID NO: 667019 - RNA, 18 nt, Artificial Sequence
  Synthetic
ggccaagauggaucuugu

SEQ ID NO: 667020 - RNA, 19 nt, Artificial Sequence
  Synthetic
aggccaagauggaucuugu

SEQ ID NO: 667021 - RNA, 20 nt, Artificial Sequence
  Synthetic
gaggccaagauggaucuugu

SEQ ID NO: 667022 - RNA, 21 nt, Artificial Sequence
  Synthetic
ggaggccaagauggaucuugu

SEQ ID NO: 667023 - RNA, 22 nt, Artificial Sequence
  Synthetic
aggaggccaagauggaucuugu

SEQ ID NO: 667024 - RNA, 23 nt, Artificial Sequence
  Synthetic
caggaggccaagauggaucuugu

SEQ ID NO: 667025 - RNA, 24 nt, Artificial Sequence
  Synthetic
acaggaggccaagauggaucuugu

SEQ ID NO: 667026 - RNA, 18 nt, Artificial Sequence
  Synthetic
gcucuguaccucucuugu

SEQ ID NO: 667027 - RNA, 19 nt, Artificial Sequence
  Synthetic
ugcucuguaccucucuugu

SEQ ID NO: 667028 - RNA, 20 nt, Artificial Sequence
  Synthetic
cugcucuguaccucucuugu

SEQ ID NO: 667029 - RNA, 21 nt, Artificial Sequence
  Synthetic
ucugcucuguaccucucuugu

SEQ ID NO: 667030 - RNA, 22 nt, Artificial Sequence
  Synthetic
uucugcucuguaccucucuugu

SEQ ID NO: 667031 - RNA, 23 nt, Artificial Sequence
  Synthetic
cuucugcucuguaccucucuugu

SEQ ID NO: 667032 - RNA, 24 nt, Artificial Sequence
  Synthetic
ucuucugcucuguaccucucuugu

SEQ ID NO: 667033 - RNA, 18 nt, Artificial Sequence
  Synthetic
acuuguuaaaugucuugu

SEQ ID NO: 667034 - RNA, 19 nt, Artificial Sequence
  Synthetic
aacuuguuaaaugucuugu

SEQ ID NO: 667035 - RNA, 20 nt, Artificial Sequence
  Synthetic
aaacuuguuaaaugucuugu

SEQ ID NO: 667036 - RNA, 21 nt, Artificial Sequence
  Synthetic
uaaacuuguuaaaugucuugu

SEQ ID NO: 667037 - RNA, 22 nt, Artificial Sequence
  Synthetic
guaaacuuguuaaaugucuugu

SEQ ID NO: 667038 - RNA, 23 nt, Artificial Sequence
  Synthetic
gguaaacuuguuaaaugucuugu

SEQ ID NO: 667039 - RNA, 24 nt, Artificial Sequence
  Synthetic
agguaaacuuguuaaaugucuugu

SEQ ID NO: 667040 - RNA, 18 nt, Artificial Sequence
  Synthetic
gaccuuuucaauucuugu

SEQ ID NO: 667041 - RNA, 19 nt, Artificial Sequence
  Synthetic
ugaccuuuucaauucuugu

SEQ ID NO: 667042 - RNA, 20 nt, Artificial Sequence
  Synthetic
cugaccuuuucaauucuugu

SEQ ID NO: 667043 - RNA, 21 nt, Artificial Sequence
  Synthetic
ccugaccuuuucaauucuugu

SEQ ID NO: 667044 - RNA, 22 nt, Artificial Sequence
  Synthetic
uccugaccuuuucaauucuugu

SEQ ID NO: 667045 - RNA, 23 nt, Artificial Sequence
  Synthetic
uuccugaccuuuucaauucuugu

SEQ ID NO: 667046 - RNA, 24 nt, Artificial Sequence
  Synthetic
uuuccugaccuuuucaauucuugu

SEQ ID NO: 667047 - RNA, 18 nt, Artificial Sequence
  Synthetic
agacauuaugcuucuugu

SEQ ID NO: 667048 - RNA, 19 nt, Artificial Sequence
  Synthetic
cagacauuaugcuucuugu

SEQ ID NO: 667049 - RNA, 20 nt, Artificial Sequence
  Synthetic
acagacauuaugcuucuugu

SEQ ID NO: 667050 - RNA, 21 nt, Artificial Sequence
  Synthetic
uacagacauuaugcuucuugu

SEQ ID NO: 667051 - RNA, 22 nt, Artificial Sequence
  Synthetic
cuacagacauuaugcuucuugu

SEQ ID NO: 667052 - RNA, 23 nt, Artificial Sequence
  Synthetic
gcuacagacauuaugcuucuugu

SEQ ID NO: 667053 - RNA, 24 nt, Artificial Sequence
  Synthetic
ugcuacagacauuaugcuucuugu

SEQ ID NO: 667054 - RNA, 18 nt, Artificial Sequence
  Synthetic
uggauaauuauuucuugu

SEQ ID NO: 667055 - RNA, 19 nt, Artificial Sequence
  Synthetic
cuggauaauuauuucuugu

SEQ ID NO: 667056 - RNA, 20 nt, Artificial Sequence
  Synthetic
acuggauaauuauuucuugu

SEQ ID NO: 667057 - RNA, 21 nt, Artificial Sequence
  Synthetic
gacuggauaauuauuucuugu

SEQ ID NO: 667058 - RNA, 22 nt, Artificial Sequence
  Synthetic
ggacuggauaauuauuucuugu

SEQ ID NO: 667059 - RNA, 23 nt, Artificial Sequence
  Synthetic
gggacuggauaauuauuucuugu

SEQ ID NO: 667060 - RNA, 24 nt, Artificial Sequence
  Synthetic
ugggacuggauaauuauuucuugu

SEQ ID NO: 667061 - RNA, 18 nt, Artificial Sequence
  Synthetic
gugccaucuguuucuugu

SEQ ID NO: 667062 - RNA, 19 nt, Artificial Sequence
  Synthetic
ugugccaucuguuucuugu

SEQ ID NO: 667063 - RNA, 20 nt, Artificial Sequence
  Synthetic
augugccaucuguuucuugu

SEQ ID NO: 667064 - RNA, 21 nt, Artificial Sequence
  Synthetic
aaugugccaucuguuucuugu

SEQ ID NO: 667065 - RNA, 22 nt, Artificial Sequence
  Synthetic
gaaugugccaucuguuucuugu

SEQ ID NO: 667066 - RNA, 23 nt, Artificial Sequence
  Synthetic
ugaaugugccaucuguuucuugu

SEQ ID NO: 667067 - RNA, 24 nt, Artificial Sequence
  Synthetic
cugaaugugccaucuguuucuugu

SEQ ID NO: 667068 - RNA, 18 nt, Artificial Sequence
  Synthetic
aagaagaaauaaaguugu

SEQ ID NO: 667069 - RNA, 19 nt, Artificial Sequence
  Synthetic
uaagaagaaauaaaguugu

SEQ ID NO: 667070 - RNA, 20 nt, Artificial Sequence
  Synthetic
uuaagaagaaauaaaguugu

SEQ ID NO: 667071 - RNA, 21 nt, Artificial Sequence
  Synthetic
guuaagaagaaauaaaguugu

SEQ ID NO: 667072 - RNA, 22 nt, Artificial Sequence
  Synthetic
gguuaagaagaaauaaaguugu

SEQ ID NO: 667073 - RNA, 23 nt, Artificial Sequence
  Synthetic
ggguuaagaagaaauaaaguugu

SEQ ID NO: 667074 - RNA, 24 nt, Artificial Sequence
  Synthetic
aggguuaagaagaaauaaaguugu

SEQ ID NO: 667075 - RNA, 18 nt, Artificial Sequence
  Synthetic
augaaauagggaaguugu

SEQ ID NO: 667076 - RNA, 19 nt, Artificial Sequence
  Synthetic
caugaaauagggaaguugu

SEQ ID NO: 667077 - RNA, 20 nt, Artificial Sequence
  Synthetic
gcaugaaauagggaaguugu

SEQ ID NO: 667078 - RNA, 21 nt, Artificial Sequence
  Synthetic
agcaugaaauagggaaguugu

SEQ ID NO: 667079 - RNA, 22 nt, Artificial Sequence
  Synthetic
uagcaugaaauagggaaguugu

SEQ ID NO: 667080 - RNA, 23 nt, Artificial Sequence
  Synthetic
auagcaugaaauagggaaguugu

SEQ ID NO: 667081 - RNA, 24 nt, Artificial Sequence
  Synthetic
aauagcaugaaauagggaaguugu

SEQ ID NO: 667082 - RNA, 18 nt, Artificial Sequence
  Synthetic
cauuuucucagcaguugu

SEQ ID NO: 667083 - RNA, 19 nt, Artificial Sequence
  Synthetic
acauuuucucagcaguugu

SEQ ID NO: 667084 - RNA, 20 nt, Artificial Sequence
  Synthetic
uacauuuucucagcaguugu

SEQ ID NO: 667085 - RNA, 21 nt, Artificial Sequence
  Synthetic
guacauuuucucagcaguugu

SEQ ID NO: 667086 - RNA, 22 nt, Artificial Sequence
  Synthetic
uguacauuuucucagcaguugu

SEQ ID NO: 667087 - RNA, 23 nt, Artificial Sequence
  Synthetic
uuguacauuuucucagcaguugu

SEQ ID NO: 667088 - RNA, 24 nt, Artificial Sequence
  Synthetic
uuuguacauuuucucagcaguugu

SEQ ID NO: 667089 - RNA, 18 nt, Artificial Sequence
  Synthetic
uucuaucugugcaguugu

SEQ ID NO: 667090 - RNA, 19 nt, Artificial Sequence
  Synthetic
uuucuaucugugcaguugu

SEQ ID NO: 667091 - RNA, 20 nt, Artificial Sequence
  Synthetic
cuuucuaucugugcaguugu

SEQ ID NO: 667092 - RNA, 21 nt, Artificial Sequence
  Synthetic
ucuuucuaucugugcaguugu

SEQ ID NO: 667093 - RNA, 22 nt, Artificial Sequence
  Synthetic
cucuuucuaucugugcaguugu

SEQ ID NO: 667094 - RNA, 23 nt, Artificial Sequence
  Synthetic
ccucuuucuaucugugcaguugu

SEQ ID NO: 667095 - RNA, 24 nt, Artificial Sequence
  Synthetic
cccucuuucuaucugugcaguugu

SEQ ID NO: 667096 - RNA, 18 nt, Artificial Sequence
  Synthetic
uuuaaaaaaaucaguugu

SEQ ID NO: 667097 - RNA, 19 nt, Artificial Sequence
  Synthetic
auuuaaaaaaaucaguugu

SEQ ID NO: 667098 - RNA, 20 nt, Artificial Sequence
  Synthetic
uauuuaaaaaaaucaguugu

SEQ ID NO: 667099 - RNA, 21 nt, Artificial Sequence
  Synthetic
uuauuuaaaaaaaucaguugu

SEQ ID NO: 667100 - RNA, 22 nt, Artificial Sequence
  Synthetic
uuuauuuaaaaaaaucaguugu

SEQ ID NO: 667101 - RNA, 23 nt, Artificial Sequence
  Synthetic
uuuuauuuaaaaaaaucaguugu

SEQ ID NO: 667102 - RNA, 24 nt, Artificial Sequence
  Synthetic
uuuuuauuuaaaaaaaucaguugu

SEQ ID NO: 667103 - RNA, 18 nt, Artificial Sequence
  Synthetic
cacuuuccauucaguugu

SEQ ID NO: 667104 - RNA, 19 nt, Artificial Sequence
  Synthetic
acacuuuccauucaguugu

SEQ ID NO: 667105 - RNA, 20 nt, Artificial Sequence
  Synthetic
uacacuuuccauucaguugu

SEQ ID NO: 667106 - RNA, 21 nt, Artificial Sequence
  Synthetic
auacacuuuccauucaguugu

SEQ ID NO: 667107 - RNA, 22 nt, Artificial Sequence
  Synthetic
cauacacuuuccauucaguugu

SEQ ID NO: 667108 - RNA, 23 nt, Artificial Sequence
  Synthetic
ccauacacuuuccauucaguugu

SEQ ID NO: 667109 - RNA, 24 nt, Artificial Sequence
  Synthetic
accauacacuuuccauucaguugu

SEQ ID NO: 667110 - RNA, 18 nt, Artificial Sequence
  Synthetic
augcuuuucuucaguugu

SEQ ID NO: 667111 - RNA, 19 nt, Artificial Sequence
  Synthetic
caugcuuuucuucaguugu

SEQ ID NO: 667112 - RNA, 20 nt, Artificial Sequence
  Synthetic
acaugcuuuucuucaguugu

SEQ ID NO: 667113 - RNA, 21 nt, Artificial Sequence
  Synthetic
aacaugcuuuucuucaguugu

SEQ ID NO: 667114 - RNA, 22 nt, Artificial Sequence
  Synthetic
aaacaugcuuuucuucaguugu

SEQ ID NO: 667115 - RNA, 23 nt, Artificial Sequence
  Synthetic
uaaacaugcuuuucuucaguugu

SEQ ID NO: 667116 - RNA, 24 nt, Artificial Sequence
  Synthetic
uuaaacaugcuuuucuucaguugu

SEQ ID NO: 667117 - RNA, 18 nt, Artificial Sequence
  Synthetic
gauuuuucuuucaguugu

SEQ ID NO: 667118 - RNA, 19 nt, Artificial Sequence
  Synthetic
agauuuuucuuucaguugu

SEQ ID NO: 667119 - RNA, 20 nt, Artificial Sequence
  Synthetic
uagauuuuucuuucaguugu

SEQ ID NO: 667120 - RNA, 21 nt, Artificial Sequence
  Synthetic
guagauuuuucuuucaguugu

SEQ ID NO: 667121 - RNA, 22 nt, Artificial Sequence
  Synthetic
uguagauuuuucuuucaguugu

SEQ ID NO: 667122 - RNA, 23 nt, Artificial Sequence
  Synthetic
cuguagauuuuucuuucaguugu

SEQ ID NO: 667123 - RNA, 24 nt, Artificial Sequence
  Synthetic
ucuguagauuuuucuuucaguugu

SEQ ID NO: 667124 - RNA, 18 nt, Artificial Sequence
  Synthetic
ugaauauaggugaguugu

SEQ ID NO: 667125 - RNA, 19 nt, Artificial Sequence
  Synthetic
cugaauauaggugaguugu

SEQ ID NO: 667126 - RNA, 20 nt, Artificial Sequence
  Synthetic
ccugaauauaggugaguugu

SEQ ID NO: 667127 - RNA, 21 nt, Artificial Sequence
  Synthetic
cccugaauauaggugaguugu

SEQ ID NO: 667128 - RNA, 22 nt, Artificial Sequence
  Synthetic
ccccugaauauaggugaguugu

SEQ ID NO: 667129 - RNA, 23 nt, Artificial Sequence
  Synthetic
uccccugaauauaggugaguugu

SEQ ID NO: 667130 - RNA, 24 nt, Artificial Sequence
  Synthetic
guccccugaauauaggugaguugu

SEQ ID NO: 667131 - RNA, 18 nt, Artificial Sequence
  Synthetic
gauuagggagcuaguugu

SEQ ID NO: 667132 - RNA, 19 nt, Artificial Sequence
  Synthetic
cgauuagggagcuaguugu

SEQ ID NO: 667133 - RNA, 20 nt, Artificial Sequence
  Synthetic
gcgauuagggagcuaguugu

SEQ ID NO: 667134 - RNA, 21 nt, Artificial Sequence
  Synthetic
agcgauuagggagcuaguugu

SEQ ID NO: 667135 - RNA, 22 nt, Artificial Sequence
  Synthetic
gagcgauuagggagcuaguugu

SEQ ID NO: 667136 - RNA, 23 nt, Artificial Sequence
  Synthetic
agagcgauuagggagcuaguugu

SEQ ID NO: 667137 - RNA, 24 nt, Artificial Sequence
  Synthetic
cagagcgauuagggagcuaguugu

SEQ ID NO: 667138 - RNA, 18 nt, Artificial Sequence
  Synthetic
auguucacauguaguugu

SEQ ID NO: 667139 - RNA, 19 nt, Artificial Sequence
  Synthetic
uauguucacauguaguugu

SEQ ID NO: 667140 - RNA, 20 nt, Artificial Sequence
  Synthetic
guauguucacauguaguugu

SEQ ID NO: 667141 - RNA, 21 nt, Artificial Sequence
  Synthetic
uguauguucacauguaguugu

SEQ ID NO: 667142 - RNA, 22 nt, Artificial Sequence
  Synthetic
uuguauguucacauguaguugu

SEQ ID NO: 667143 - RNA, 23 nt, Artificial Sequence
  Synthetic
auuguauguucacauguaguugu

SEQ ID NO: 667144 - RNA, 24 nt, Artificial Sequence
  Synthetic
aauuguauguucacauguaguugu

SEQ ID NO: 667145 - RNA, 18 nt, Artificial Sequence
  Synthetic
gauucggaccaacguugu

SEQ ID NO: 667146 - RNA, 19 nt, Artificial Sequence
  Synthetic
ugauucggaccaacguugu

SEQ ID NO: 667147 - RNA, 20 nt, Artificial Sequence
  Synthetic
augauucggaccaacguugu

SEQ ID NO: 667148 - RNA, 21 nt, Artificial Sequence
  Synthetic
caugauucggaccaacguugu

SEQ ID NO: 667149 - RNA, 22 nt, Artificial Sequence
  Synthetic
ccaugauucggaccaacguugu

SEQ ID NO: 667150 - RNA, 23 nt, Artificial Sequence
  Synthetic
accaugauucggaccaacguugu

SEQ ID NO: 667151 - RNA, 24 nt, Artificial Sequence
  Synthetic
aaccaugauucggaccaacguugu

SEQ ID NO: 667152 - RNA, 18 nt, Artificial Sequence
  Synthetic
uauucacugggagguugu

SEQ ID NO: 667153 - RNA, 19 nt, Artificial Sequence
  Synthetic
cuauucacugggagguugu

SEQ ID NO: 667154 - RNA, 20 nt, Artificial Sequence
  Synthetic
ccuauucacugggagguugu

SEQ ID NO: 667155 - RNA, 21 nt, Artificial Sequence
  Synthetic
accuauucacugggagguugu

SEQ ID NO: 667156 - RNA, 22 nt, Artificial Sequence
  Synthetic
gaccuauucacugggagguugu

SEQ ID NO: 667157 - RNA, 23 nt, Artificial Sequence
  Synthetic
ggaccuauucacugggagguugu

SEQ ID NO: 667158 - RNA, 24 nt, Artificial Sequence
  Synthetic
uggaccuauucacugggagguugu

SEQ ID NO: 667159 - RNA, 18 nt, Artificial Sequence
  Synthetic
aaggauucuucggguugu

SEQ ID NO: 667160 - RNA, 19 nt, Artificial Sequence
  Synthetic
aaaggauucuucggguugu

SEQ ID NO: 667161 - RNA, 20 nt, Artificial Sequence
  Synthetic
caaaggauucuucggguugu

SEQ ID NO: 667162 - RNA, 21 nt, Artificial Sequence
  Synthetic
acaaaggauucuucggguugu

SEQ ID NO: 667163 - RNA, 22 nt, Artificial Sequence
  Synthetic
uacaaaggauucuucggguugu

SEQ ID NO: 667164 - RNA, 23 nt, Artificial Sequence
  Synthetic
cuacaaaggauucuucggguugu

SEQ ID NO: 667165 - RNA, 24 nt, Artificial Sequence
  Synthetic
acuacaaaggauucuucggguugu

SEQ ID NO: 667166 - RNA, 18 nt, Artificial Sequence
  Synthetic
ggcaggguuggggguugu

SEQ ID NO: 667167 - RNA, 19 nt, Artificial Sequence
  Synthetic
uggcaggguuggggguugu

SEQ ID NO: 667168 - RNA, 20 nt, Artificial Sequence
  Synthetic
uuggcaggguuggggguugu

SEQ ID NO: 667169 - RNA, 21 nt, Artificial Sequence
  Synthetic
guuggcaggguuggggguugu

SEQ ID NO: 667170 - RNA, 22 nt, Artificial Sequence
  Synthetic
aguuggcaggguuggggguugu

SEQ ID NO: 667171 - RNA, 23 nt, Artificial Sequence
  Synthetic
aaguuggcaggguuggggguugu

SEQ ID NO: 667172 - RNA, 24 nt, Artificial Sequence
  Synthetic
uaaguuggcaggguuggggguugu

SEQ ID NO: 667173 - RNA, 18 nt, Artificial Sequence
  Synthetic
aggggcgggugggguugu

SEQ ID NO: 667174 - RNA, 19 nt, Artificial Sequence
  Synthetic
caggggcgggugggguugu

SEQ ID NO: 667175 - RNA, 20 nt, Artificial Sequence
  Synthetic
ucaggggcgggugggguugu

SEQ ID NO: 667176 - RNA, 21 nt, Artificial Sequence
  Synthetic
aucaggggcgggugggguugu

SEQ ID NO: 667177 - RNA, 22 nt, Artificial Sequence
  Synthetic
gaucaggggcgggugggguugu

SEQ ID NO: 667178 - RNA, 23 nt, Artificial Sequence
  Synthetic
ggaucaggggcgggugggguugu

SEQ ID NO: 667179 - RNA, 24 nt, Artificial Sequence
  Synthetic
uggaucaggggcgggugggguugu

SEQ ID NO: 667180 - RNA, 18 nt, Artificial Sequence
  Synthetic
ugaauuccuacauguugu

SEQ ID NO: 667181 - RNA, 19 nt, Artificial Sequence
  Synthetic
uugaauuccuacauguugu

SEQ ID NO: 667182 - RNA, 20 nt, Artificial Sequence
  Synthetic
cuugaauuccuacauguugu

SEQ ID NO: 667183 - RNA, 21 nt, Artificial Sequence
  Synthetic
ucuugaauuccuacauguugu

SEQ ID NO: 667184 - RNA, 22 nt, Artificial Sequence
  Synthetic
aucuugaauuccuacauguugu

SEQ ID NO: 667185 - RNA, 23 nt, Artificial Sequence
  Synthetic
caucuugaauuccuacauguugu

SEQ ID NO: 667186 - RNA, 24 nt, Artificial Sequence
  Synthetic
ucaucuugaauuccuacauguugu

SEQ ID NO: 667187 - RNA, 18 nt, Artificial Sequence
  Synthetic
caggagcgaugauguugu

SEQ ID NO: 667188 - RNA, 19 nt, Artificial Sequence
  Synthetic
ucaggagcgaugauguugu

SEQ ID NO: 667189 - RNA, 20 nt, Artificial Sequence
  Synthetic
cucaggagcgaugauguugu

SEQ ID NO: 667190 - RNA, 21 nt, Artificial Sequence
  Synthetic
acucaggagcgaugauguugu

SEQ ID NO: 667191 - RNA, 22 nt, Artificial Sequence
  Synthetic
cacucaggagcgaugauguugu

SEQ ID NO: 667192 - RNA, 23 nt, Artificial Sequence
  Synthetic
gcacucaggagcgaugauguugu

SEQ ID NO: 667193 - RNA, 24 nt, Artificial Sequence
  Synthetic
agcacucaggagcgaugauguugu

SEQ ID NO: 667194 - RNA, 18 nt, Artificial Sequence
  Synthetic
agcugaacucuauguugu

SEQ ID NO: 667195 - RNA, 19 nt, Artificial Sequence
  Synthetic
aagcugaacucuauguugu

SEQ ID NO: 667196 - RNA, 20 nt, Artificial Sequence
  Synthetic
uaagcugaacucuauguugu

SEQ ID NO: 667197 - RNA, 21 nt, Artificial Sequence
  Synthetic
cuaagcugaacucuauguugu

SEQ ID NO: 667198 - RNA, 22 nt, Artificial Sequence
  Synthetic
ccuaagcugaacucuauguugu

SEQ ID NO: 667199 - RNA, 23 nt, Artificial Sequence
  Synthetic
uccuaagcugaacucuauguugu

SEQ ID NO: 667200 - RNA, 24 nt, Artificial Sequence
  Synthetic
uuccuaagcugaacucuauguugu

SEQ ID NO: 667201 - RNA, 18 nt, Artificial Sequence
  Synthetic
auuuauuuuugcuguugu

SEQ ID NO: 667202 - RNA, 19 nt, Artificial Sequence
  Synthetic
uauuuauuuuugcuguugu

SEQ ID NO: 667203 - RNA, 20 nt, Artificial Sequence
  Synthetic
cuauuuauuuuugcuguugu

SEQ ID NO: 667204 - RNA, 21 nt, Artificial Sequence
  Synthetic
gcuauuuauuuuugcuguugu

SEQ ID NO: 667205 - RNA, 22 nt, Artificial Sequence
  Synthetic
agcuauuuauuuuugcuguugu

SEQ ID NO: 667206 - RNA, 23 nt, Artificial Sequence
  Synthetic
gagcuauuuauuuuugcuguugu

SEQ ID NO: 667207 - RNA, 24 nt, Artificial Sequence
  Synthetic
ugagcuauuuauuuuugcuguugu

SEQ ID NO: 667208 - RNA, 18 nt, Artificial Sequence
  Synthetic
uuucaaacauucuguugu

SEQ ID NO: 667209 - RNA, 19 nt, Artificial Sequence
  Synthetic
uuuucaaacauucuguugu

SEQ ID NO: 667210 - RNA, 20 nt, Artificial Sequence
  Synthetic
cuuuucaaacauucuguugu

SEQ ID NO: 667211 - RNA, 21 nt, Artificial Sequence
  Synthetic
ucuuuucaaacauucuguugu

SEQ ID NO: 667212 - RNA, 22 nt, Artificial Sequence
  Synthetic
aucuuuucaaacauucuguugu

SEQ ID NO: 667213 - RNA, 23 nt, Artificial Sequence
  Synthetic
uaucuuuucaaacauucuguugu

SEQ ID NO: 667214 - RNA, 24 nt, Artificial Sequence
  Synthetic
uuaucuuuucaaacauucuguugu

SEQ ID NO: 667215 - RNA, 18 nt, Artificial Sequence
  Synthetic
ggcacuggacaguguugu

SEQ ID NO: 667216 - RNA, 19 nt, Artificial Sequence
  Synthetic
gggcacuggacaguguugu

SEQ ID NO: 667217 - RNA, 20 nt, Artificial Sequence
  Synthetic
agggcacuggacaguguugu

SEQ ID NO: 667218 - RNA, 21 nt, Artificial Sequence
  Synthetic
uagggcacuggacaguguugu

SEQ ID NO: 667219 - RNA, 22 nt, Artificial Sequence
  Synthetic
auagggcacuggacaguguugu

SEQ ID NO: 667220 - RNA, 23 nt, Artificial Sequence
  Synthetic
gauagggcacuggacaguguugu

SEQ ID NO: 667221 - RNA, 24 nt, Artificial Sequence
  Synthetic
ggauagggcacuggacaguguugu

SEQ ID NO: 667222 - RNA, 18 nt, Artificial Sequence
  Synthetic
aggauauuacaguguugu

SEQ ID NO: 667223 - RNA, 19 nt, Artificial Sequence
  Synthetic
uaggauauuacaguguugu

SEQ ID NO: 667224 - RNA, 20 nt, Artificial Sequence
  Synthetic
uuaggauauuacaguguugu

SEQ ID NO: 667225 - RNA, 21 nt, Artificial Sequence
  Synthetic
uuuaggauauuacaguguugu

SEQ ID NO: 667226 - RNA, 22 nt, Artificial Sequence
  Synthetic
cuuuaggauauuacaguguugu

SEQ ID NO: 667227 - RNA, 23 nt, Artificial Sequence
  Synthetic
gcuuuaggauauuacaguguugu

SEQ ID NO: 667228 - RNA, 24 nt, Artificial Sequence
  Synthetic
ugcuuuaggauauuacaguguugu

SEQ ID NO: 667229 - RNA, 18 nt, Artificial Sequence
  Synthetic
auaauccccacguguugu

SEQ ID NO: 667230 - RNA, 19 nt, Artificial Sequence
  Synthetic
aauaauccccacguguugu

SEQ ID NO: 667231 - RNA, 20 nt, Artificial Sequence
  Synthetic
caauaauccccacguguugu

SEQ ID NO: 667232 - RNA, 21 nt, Artificial Sequence
  Synthetic
ccaauaauccccacguguugu

SEQ ID NO: 667233 - RNA, 22 nt, Artificial Sequence
  Synthetic
uccaauaauccccacguguugu

SEQ ID NO: 667234 - RNA, 23 nt, Artificial Sequence
  Synthetic
cuccaauaauccccacguguugu

SEQ ID NO: 667235 - RNA, 24 nt, Artificial Sequence
  Synthetic
acuccaauaauccccacguguugu

SEQ ID NO: 667236 - RNA, 18 nt, Artificial Sequence
  Synthetic
caaauaauucuuuguugu

SEQ ID NO: 667237 - RNA, 19 nt, Artificial Sequence
  Synthetic
ccaaauaauucuuuguugu

SEQ ID NO: 667238 - RNA, 20 nt, Artificial Sequence
  Synthetic
accaaauaauucuuuguugu

SEQ ID NO: 667239 - RNA, 21 nt, Artificial Sequence
  Synthetic
gaccaaauaauucuuuguugu

SEQ ID NO: 667240 - RNA, 22 nt, Artificial Sequence
  Synthetic
ggaccaaauaauucuuuguugu

SEQ ID NO: 667241 - RNA, 23 nt, Artificial Sequence
  Synthetic
uggaccaaauaauucuuuguugu

SEQ ID NO: 667242 - RNA, 24 nt, Artificial Sequence
  Synthetic
uuggaccaaauaauucuuuguugu

SEQ ID NO: 667243 - RNA, 18 nt, Artificial Sequence
  Synthetic
agaauaauucuuuguugu

SEQ ID NO: 667244 - RNA, 19 nt, Artificial Sequence
  Synthetic
cagaauaauucuuuguugu

SEQ ID NO: 667245 - RNA, 20 nt, Artificial Sequence
  Synthetic
acagaauaauucuuuguugu

SEQ ID NO: 667246 - RNA, 21 nt, Artificial Sequence
  Synthetic
gacagaauaauucuuuguugu

SEQ ID NO: 667247 - RNA, 22 nt, Artificial Sequence
  Synthetic
ggacagaauaauucuuuguugu

SEQ ID NO: 667248 - RNA, 23 nt, Artificial Sequence
  Synthetic
uggacagaauaauucuuuguugu

SEQ ID NO: 667249 - RNA, 24 nt, Artificial Sequence
  Synthetic
uuggacagaauaauucuuuguugu

SEQ ID NO: 667250 - RNA, 18 nt, Artificial Sequence
  Synthetic
ugauaauugguuuguugu

SEQ ID NO: 667251 - RNA, 19 nt, Artificial Sequence
  Synthetic
uugauaauugguuuguugu

SEQ ID NO: 667252 - RNA, 20 nt, Artificial Sequence
  Synthetic
auugauaauugguuuguugu

SEQ ID NO: 667253 - RNA, 21 nt, Artificial Sequence
  Synthetic
cauugauaauugguuuguugu

SEQ ID NO: 667254 - RNA, 22 nt, Artificial Sequence
  Synthetic
ucauugauaauugguuuguugu

SEQ ID NO: 667255 - RNA, 23 nt, Artificial Sequence
  Synthetic
uucauugauaauugguuuguugu

SEQ ID NO: 667256 - RNA, 24 nt, Artificial Sequence
  Synthetic
auucauugauaauugguuuguugu

SEQ ID NO: 667257 - RNA, 18 nt, Artificial Sequence
  Synthetic
uuuaauuaacaaauuugu

SEQ ID NO: 667258 - RNA, 19 nt, Artificial Sequence
  Synthetic
auuuaauuaacaaauuugu

SEQ ID NO: 667259 - RNA, 20 nt, Artificial Sequence
  Synthetic
aauuuaauuaacaaauuugu

SEQ ID NO: 667260 - RNA, 21 nt, Artificial Sequence
  Synthetic
uaauuuaauuaacaaauuugu

SEQ ID NO: 667261 - RNA, 22 nt, Artificial Sequence
  Synthetic
uuaauuuaauuaacaaauuugu

SEQ ID NO: 667262 - RNA, 23 nt, Artificial Sequence
  Synthetic
auuaauuuaauuaacaaauuugu

SEQ ID NO: 667263 - RNA, 24 nt, Artificial Sequence
  Synthetic
uauuaauuuaauuaacaaauuugu

SEQ ID NO: 667264 - RNA, 18 nt, Artificial Sequence
  Synthetic
augugaaaagaaauuugu

SEQ ID NO: 667265 - RNA, 19 nt, Artificial Sequence
  Synthetic
aaugugaaaagaaauuugu

SEQ ID NO: 667266 - RNA, 20 nt, Artificial Sequence
  Synthetic
caaugugaaaagaaauuugu

SEQ ID NO: 667267 - RNA, 21 nt, Artificial Sequence
  Synthetic
ucaaugugaaaagaaauuugu

SEQ ID NO: 667268 - RNA, 22 nt, Artificial Sequence
  Synthetic
gucaaugugaaaagaaauuugu

SEQ ID NO: 667269 - RNA, 23 nt, Artificial Sequence
  Synthetic
ugucaaugugaaaagaaauuugu

SEQ ID NO: 667270 - RNA, 24 nt, Artificial Sequence
  Synthetic
cugucaaugugaaaagaaauuugu

SEQ ID NO: 667271 - RNA, 18 nt, Artificial Sequence
  Synthetic
caaucuuguuaaauuugu

SEQ ID NO: 667272 - RNA, 19 nt, Artificial Sequence
  Synthetic
ucaaucuuguuaaauuugu

SEQ ID NO: 667273 - RNA, 20 nt, Artificial Sequence
  Synthetic
uucaaucuuguuaaauuugu

SEQ ID NO: 667274 - RNA, 21 nt, Artificial Sequence
  Synthetic
uuucaaucuuguuaaauuugu

SEQ ID NO: 667275 - RNA, 22 nt, Artificial Sequence
  Synthetic
cuuucaaucuuguuaaauuugu

SEQ ID NO: 667276 - RNA, 23 nt, Artificial Sequence
  Synthetic
gcuuucaaucuuguuaaauuugu

SEQ ID NO: 667277 - RNA, 24 nt, Artificial Sequence
  Synthetic
ugcuuucaaucuuguuaaauuugu

SEQ ID NO: 667278 - RNA, 18 nt, Artificial Sequence
  Synthetic
gguggggucugaauuugu

SEQ ID NO: 667279 - RNA, 19 nt, Artificial Sequence
  Synthetic
ggguggggucugaauuugu

SEQ ID NO: 667280 - RNA, 20 nt, Artificial Sequence
  Synthetic
gggguggggucugaauuugu

SEQ ID NO: 667281 - RNA, 21 nt, Artificial Sequence
  Synthetic
ggggguggggucugaauuugu

SEQ ID NO: 667282 - RNA, 22 nt, Artificial Sequence
  Synthetic
uggggguggggucugaauuugu

SEQ ID NO: 667283 - RNA, 23 nt, Artificial Sequence
  Synthetic
uuggggguggggucugaauuugu

SEQ ID NO: 667284 - RNA, 24 nt, Artificial Sequence
  Synthetic
guuggggguggggucugaauuugu

SEQ ID NO: 667285 - RNA, 18 nt, Artificial Sequence
  Synthetic
uauucgcuuuuaauuugu

SEQ ID NO: 667286 - RNA, 19 nt, Artificial Sequence
  Synthetic
auauucgcuuuuaauuugu

SEQ ID NO: 667287 - RNA, 20 nt, Artificial Sequence
  Synthetic
aauauucgcuuuuaauuugu

SEQ ID NO: 667288 - RNA, 21 nt, Artificial Sequence
  Synthetic
aaauauucgcuuuuaauuugu

SEQ ID NO: 667289 - RNA, 22 nt, Artificial Sequence
  Synthetic
aaaauauucgcuuuuaauuugu

SEQ ID NO: 667290 - RNA, 23 nt, Artificial Sequence
  Synthetic
uaaaauauucgcuuuuaauuugu

SEQ ID NO: 667291 - RNA, 24 nt, Artificial Sequence
  Synthetic
uuaaaauauucgcuuuuaauuugu

SEQ ID NO: 667292 - RNA, 18 nt, Artificial Sequence
  Synthetic
ccaucuggggacauuugu

SEQ ID NO: 667293 - RNA, 19 nt, Artificial Sequence
  Synthetic
uccaucuggggacauuugu

SEQ ID NO: 667294 - RNA, 20 nt, Artificial Sequence
  Synthetic
uuccaucuggggacauuugu

SEQ ID NO: 667295 - RNA, 21 nt, Artificial Sequence
  Synthetic
guuccaucuggggacauuugu

SEQ ID NO: 667296 - RNA, 22 nt, Artificial Sequence
  Synthetic
aguuccaucuggggacauuugu

SEQ ID NO: 667297 - RNA, 23 nt, Artificial Sequence
  Synthetic
gaguuccaucuggggacauuugu

SEQ ID NO: 667298 - RNA, 24 nt, Artificial Sequence
  Synthetic
ugaguuccaucuggggacauuugu

SEQ ID NO: 667299 - RNA, 18 nt, Artificial Sequence
  Synthetic
agagacauguacauuugu

SEQ ID NO: 667300 - RNA, 19 nt, Artificial Sequence
  Synthetic
cagagacauguacauuugu

SEQ ID NO: 667301 - RNA, 20 nt, Artificial Sequence
  Synthetic
ccagagacauguacauuugu

SEQ ID NO: 667302 - RNA, 21 nt, Artificial Sequence
  Synthetic
accagagacauguacauuugu

SEQ ID NO: 667303 - RNA, 22 nt, Artificial Sequence
  Synthetic
uaccagagacauguacauuugu

SEQ ID NO: 667304 - RNA, 23 nt, Artificial Sequence
  Synthetic
cuaccagagacauguacauuugu

SEQ ID NO: 667305 - RNA, 24 nt, Artificial Sequence
  Synthetic
ucuaccagagacauguacauuugu

SEQ ID NO: 667306 - RNA, 18 nt, Artificial Sequence
  Synthetic
aauacugcuaccauuugu

SEQ ID NO: 667307 - RNA, 19 nt, Artificial Sequence
  Synthetic
uaauacugcuaccauuugu

SEQ ID NO: 667308 - RNA, 20 nt, Artificial Sequence
  Synthetic
guaauacugcuaccauuugu

SEQ ID NO: 667309 - RNA, 21 nt, Artificial Sequence
  Synthetic
gguaauacugcuaccauuugu

SEQ ID NO: 667310 - RNA, 22 nt, Artificial Sequence
  Synthetic
agguaauacugcuaccauuugu

SEQ ID NO: 667311 - RNA, 23 nt, Artificial Sequence
  Synthetic
aagguaauacugcuaccauuugu

SEQ ID NO: 667312 - RNA, 24 nt, Artificial Sequence
  Synthetic
aaagguaauacugcuaccauuugu

SEQ ID NO: 667313 - RNA, 18 nt, Artificial Sequence
  Synthetic
ucauucacuagcauuugu

SEQ ID NO: 667314 - RNA, 19 nt, Artificial Sequence
  Synthetic
uucauucacuagcauuugu

SEQ ID NO: 667315 - RNA, 20 nt, Artificial Sequence
  Synthetic
cuucauucacuagcauuugu

SEQ ID NO: 667316 - RNA, 21 nt, Artificial Sequence
  Synthetic
ucuucauucacuagcauuugu

SEQ ID NO: 667317 - RNA, 22 nt, Artificial Sequence
  Synthetic
cucuucauucacuagcauuugu

SEQ ID NO: 667318 - RNA, 23 nt, Artificial Sequence
  Synthetic
ucucuucauucacuagcauuugu

SEQ ID NO: 667319 - RNA, 24 nt, Artificial Sequence
  Synthetic
cucucuucauucacuagcauuugu

SEQ ID NO: 667320 - RNA, 18 nt, Artificial Sequence
  Synthetic
acagucuacugcauuugu

SEQ ID NO: 667321 - RNA, 19 nt, Artificial Sequence
  Synthetic
cacagucuacugcauuugu

SEQ ID NO: 667322 - RNA, 20 nt, Artificial Sequence
  Synthetic
acacagucuacugcauuugu

SEQ ID NO: 667323 - RNA, 21 nt, Artificial Sequence
  Synthetic
uacacagucuacugcauuugu

SEQ ID NO: 667324 - RNA, 22 nt, Artificial Sequence
  Synthetic
uuacacagucuacugcauuugu

SEQ ID NO: 667325 - RNA, 23 nt, Artificial Sequence
  Synthetic
auuacacagucuacugcauuugu

SEQ ID NO: 667326 - RNA, 24 nt, Artificial Sequence
  Synthetic
cauuacacagucuacugcauuugu

SEQ ID NO: 667327 - RNA, 18 nt, Artificial Sequence
  Synthetic
aaggagucuugcauuugu

SEQ ID NO: 667328 - RNA, 19 nt, Artificial Sequence
  Synthetic
uaaggagucuugcauuugu

SEQ ID NO: 667329 - RNA, 20 nt, Artificial Sequence
  Synthetic
auaaggagucuugcauuugu

SEQ ID NO: 667330 - RNA, 21 nt, Artificial Sequence
  Synthetic
aauaaggagucuugcauuugu

SEQ ID NO: 667331 - RNA, 22 nt, Artificial Sequence
  Synthetic
aaauaaggagucuugcauuugu

SEQ ID NO: 667332 - RNA, 23 nt, Artificial Sequence
  Synthetic
aaaauaaggagucuugcauuugu

SEQ ID NO: 667333 - RNA, 24 nt, Artificial Sequence
  Synthetic
gaaaauaaggagucuugcauuugu

SEQ ID NO: 667334 - RNA, 18 nt, Artificial Sequence
  Synthetic
acaagcaaguucauuugu

SEQ ID NO: 667335 - RNA, 19 nt, Artificial Sequence
  Synthetic
gacaagcaaguucauuugu

SEQ ID NO: 667336 - RNA, 20 nt, Artificial Sequence
  Synthetic
ugacaagcaaguucauuugu

SEQ ID NO: 667337 - RNA, 21 nt, Artificial Sequence
  Synthetic
augacaagcaaguucauuugu

SEQ ID NO: 667338 - RNA, 22 nt, Artificial Sequence
  Synthetic
aaugacaagcaaguucauuugu

SEQ ID NO: 667339 - RNA, 23 nt, Artificial Sequence
  Synthetic
uaaugacaagcaaguucauuugu

SEQ ID NO: 667340 - RNA, 24 nt, Artificial Sequence
  Synthetic
auaaugacaagcaaguucauuugu

SEQ ID NO: 667341 - RNA, 18 nt, Artificial Sequence
  Synthetic
ccuagcuuccagauuugu

SEQ ID NO: 667342 - RNA, 19 nt, Artificial Sequence
  Synthetic
accuagcuuccagauuugu

SEQ ID NO: 667343 - RNA, 20 nt, Artificial Sequence
  Synthetic
caccuagcuuccagauuugu

SEQ ID NO: 667344 - RNA, 21 nt, Artificial Sequence
  Synthetic
acaccuagcuuccagauuugu

SEQ ID NO: 667345 - RNA, 22 nt, Artificial Sequence
  Synthetic
gacaccuagcuuccagauuugu

SEQ ID NO: 667346 - RNA, 23 nt, Artificial Sequence
  Synthetic
ggacaccuagcuuccagauuugu

SEQ ID NO: 667347 - RNA, 24 nt, Artificial Sequence
  Synthetic
uggacaccuagcuuccagauuugu

SEQ ID NO: 667348 - RNA, 18 nt, Artificial Sequence
  Synthetic
caccugcuggagauuugu

SEQ ID NO: 667349 - RNA, 19 nt, Artificial Sequence
  Synthetic
ucaccugcuggagauuugu

SEQ ID NO: 667350 - RNA, 20 nt, Artificial Sequence
  Synthetic
uucaccugcuggagauuugu

SEQ ID NO: 667351 - RNA, 21 nt, Artificial Sequence
  Synthetic
auucaccugcuggagauuugu

SEQ ID NO: 667352 - RNA, 22 nt, Artificial Sequence
  Synthetic
cauucaccugcuggagauuugu

SEQ ID NO: 667353 - RNA, 23 nt, Artificial Sequence
  Synthetic
ccauucaccugcuggagauuugu

SEQ ID NO: 667354 - RNA, 24 nt, Artificial Sequence
  Synthetic
cccauucaccugcuggagauuugu

SEQ ID NO: 667355 - RNA, 18 nt, Artificial Sequence
  Synthetic
uugcaaaaaaggauuugu

SEQ ID NO: 667356 - RNA, 19 nt, Artificial Sequence
  Synthetic
auugcaaaaaaggauuugu

SEQ ID NO: 667357 - RNA, 20 nt, Artificial Sequence
  Synthetic
uauugcaaaaaaggauuugu

SEQ ID NO: 667358 - RNA, 21 nt, Artificial Sequence
  Synthetic
auauugcaaaaaaggauuugu

SEQ ID NO: 667359 - RNA, 22 nt, Artificial Sequence
  Synthetic
uauauugcaaaaaaggauuugu

SEQ ID NO: 667360 - RNA, 23 nt, Artificial Sequence
  Synthetic
auauauugcaaaaaaggauuugu

SEQ ID NO: 667361 - RNA, 24 nt, Artificial Sequence
  Synthetic
cauauauugcaaaaaaggauuugu

SEQ ID NO: 667362 - RNA, 18 nt, Artificial Sequence
  Synthetic
auguggauguggauuugu

SEQ ID NO: 667363 - RNA, 19 nt, Artificial Sequence
  Synthetic
uauguggauguggauuugu

SEQ ID NO: 667364 - RNA, 20 nt, Artificial Sequence
  Synthetic
auauguggauguggauuugu

SEQ ID NO: 667365 - RNA, 21 nt, Artificial Sequence
  Synthetic
aauauguggauguggauuugu

SEQ ID NO: 667366 - RNA, 22 nt, Artificial Sequence
  Synthetic
aaauauguggauguggauuugu

SEQ ID NO: 667367 - RNA, 23 nt, Artificial Sequence
  Synthetic
uaaauauguggauguggauuugu

SEQ ID NO: 667368 - RNA, 24 nt, Artificial Sequence
  Synthetic
uuaaauauguggauguggauuugu

SEQ ID NO: 667369 - RNA, 18 nt, Artificial Sequence
  Synthetic
ucacaaaucaguauuugu

SEQ ID NO: 667370 - RNA, 19 nt, Artificial Sequence
  Synthetic
uucacaaaucaguauuugu

SEQ ID NO: 667371 - RNA, 20 nt, Artificial Sequence
  Synthetic
auucacaaaucaguauuugu

SEQ ID NO: 667372 - RNA, 21 nt, Artificial Sequence
  Synthetic
aauucacaaaucaguauuugu

SEQ ID NO: 667373 - RNA, 22 nt, Artificial Sequence
  Synthetic
uaauucacaaaucaguauuugu

SEQ ID NO: 667374 - RNA, 23 nt, Artificial Sequence
  Synthetic
uuaauucacaaaucaguauuugu

SEQ ID NO: 667375 - RNA, 24 nt, Artificial Sequence
  Synthetic
auuaauucacaaaucaguauuugu

SEQ ID NO: 667376 - RNA, 18 nt, Artificial Sequence
  Synthetic
guuuuaaagaguauuugu

SEQ ID NO: 667377 - RNA, 19 nt, Artificial Sequence
  Synthetic
uguuuuaaagaguauuugu

SEQ ID NO: 667378 - RNA, 20 nt, Artificial Sequence
  Synthetic
cuguuuuaaagaguauuugu

SEQ ID NO: 667379 - RNA, 21 nt, Artificial Sequence
  Synthetic
acuguuuuaaagaguauuugu

SEQ ID NO: 667380 - RNA, 22 nt, Artificial Sequence
  Synthetic
uacuguuuuaaagaguauuugu

SEQ ID NO: 667381 - RNA, 23 nt, Artificial Sequence
  Synthetic
auacuguuuuaaagaguauuugu

SEQ ID NO: 667382 - RNA, 24 nt, Artificial Sequence
  Synthetic
gauacuguuuuaaagaguauuugu

SEQ ID NO: 667383 - RNA, 18 nt, Artificial Sequence
  Synthetic
guugauugcauuauuugu

SEQ ID NO: 667384 - RNA, 19 nt, Artificial Sequence
  Synthetic
uguugauugcauuauuugu

SEQ ID NO: 667385 - RNA, 20 nt, Artificial Sequence
  Synthetic
auguugauugcauuauuugu

SEQ ID NO: 667386 - RNA, 21 nt, Artificial Sequence
  Synthetic
aauguugauugcauuauuugu

SEQ ID NO: 667387 - RNA, 22 nt, Artificial Sequence
  Synthetic
aaauguugauugcauuauuugu

SEQ ID NO: 667388 - RNA, 23 nt, Artificial Sequence
  Synthetic
uaaauguugauugcauuauuugu

SEQ ID NO: 667389 - RNA, 24 nt, Artificial Sequence
  Synthetic
uuaaauguugauugcauuauuugu

SEQ ID NO: 667390 - RNA, 18 nt, Artificial Sequence
  Synthetic
ucuaaaucucuuauuugu

SEQ ID NO: 667391 - RNA, 19 nt, Artificial Sequence
  Synthetic
gucuaaaucucuuauuugu

SEQ ID NO: 667392 - RNA, 20 nt, Artificial Sequence
  Synthetic
agucuaaaucucuuauuugu

SEQ ID NO: 667393 - RNA, 21 nt, Artificial Sequence
  Synthetic
cagucuaaaucucuuauuugu

SEQ ID NO: 667394 - RNA, 22 nt, Artificial Sequence
  Synthetic
ucagucuaaaucucuuauuugu

SEQ ID NO: 667395 - RNA, 23 nt, Artificial Sequence
  Synthetic
uucagucuaaaucucuuauuugu

SEQ ID NO: 667396 - RNA, 24 nt, Artificial Sequence
  Synthetic
auucagucuaaaucucuuauuugu

SEQ ID NO: 667397 - RNA, 18 nt, Artificial Sequence
  Synthetic
cucuagcuuuaacuuugu

SEQ ID NO: 667398 - RNA, 19 nt, Artificial Sequence
  Synthetic
ucucuagcuuuaacuuugu

SEQ ID NO: 667399 - RNA, 20 nt, Artificial Sequence
  Synthetic
uucucuagcuuuaacuuugu

SEQ ID NO: 667400 - RNA, 21 nt, Artificial Sequence
  Synthetic
uuucucuagcuuuaacuuugu

SEQ ID NO: 667401 - RNA, 22 nt, Artificial Sequence
  Synthetic
auuucucuagcuuuaacuuugu

SEQ ID NO: 667402 - RNA, 23 nt, Artificial Sequence
  Synthetic
gauuucucuagcuuuaacuuugu

SEQ ID NO: 667403 - RNA, 24 nt, Artificial Sequence
  Synthetic
ugauuucucuagcuuuaacuuugu

SEQ ID NO: 667404 - RNA, 18 nt, Artificial Sequence
  Synthetic
agugguguugaccuuugu

SEQ ID NO: 667405 - RNA, 19 nt, Artificial Sequence
  Synthetic
gagugguguugaccuuugu

SEQ ID NO: 667406 - RNA, 20 nt, Artificial Sequence
  Synthetic
agagugguguugaccuuugu

SEQ ID NO: 667407 - RNA, 21 nt, Artificial Sequence
  Synthetic
gagagugguguugaccuuugu

SEQ ID NO: 667408 - RNA, 22 nt, Artificial Sequence
  Synthetic
ggagagugguguugaccuuugu

SEQ ID NO: 667409 - RNA, 23 nt, Artificial Sequence
  Synthetic
gggagagugguguugaccuuugu

SEQ ID NO: 667410 - RNA, 24 nt, Artificial Sequence
  Synthetic
agggagagugguguugaccuuugu

SEQ ID NO: 667411 - RNA, 18 nt, Artificial Sequence
  Synthetic
agccuggagccccuuugu

SEQ ID NO: 667412 - RNA, 19 nt, Artificial Sequence
  Synthetic
gagccuggagccccuuugu

SEQ ID NO: 667413 - RNA, 20 nt, Artificial Sequence
  Synthetic
ggagccuggagccccuuugu

SEQ ID NO: 667414 - RNA, 21 nt, Artificial Sequence
  Synthetic
uggagccuggagccccuuugu

SEQ ID NO: 667415 - RNA, 22 nt, Artificial Sequence
  Synthetic
auggagccuggagccccuuugu

SEQ ID NO: 667416 - RNA, 23 nt, Artificial Sequence
  Synthetic
cauggagccuggagccccuuugu

SEQ ID NO: 667417 - RNA, 24 nt, Artificial Sequence
  Synthetic
gcauggagccuggagccccuuugu

SEQ ID NO: 667418 - RNA, 18 nt, Artificial Sequence
  Synthetic
cuagugugcagccuuugu

SEQ ID NO: 667419 - RNA, 19 nt, Artificial Sequence
  Synthetic
ccuagugugcagccuuugu

SEQ ID NO: 667420 - RNA, 20 nt, Artificial Sequence
  Synthetic
accuagugugcagccuuugu

SEQ ID NO: 667421 - RNA, 21 nt, Artificial Sequence
  Synthetic
caccuagugugcagccuuugu

SEQ ID NO: 667422 - RNA, 22 nt, Artificial Sequence
  Synthetic
acaccuagugugcagccuuugu

SEQ ID NO: 667423 - RNA, 23 nt, Artificial Sequence
  Synthetic
aacaccuagugugcagccuuugu

SEQ ID NO: 667424 - RNA, 24 nt, Artificial Sequence
  Synthetic
caacaccuagugugcagccuuugu

SEQ ID NO: 667425 - RNA, 18 nt, Artificial Sequence
  Synthetic
cugccuuguauccuuugu

SEQ ID NO: 667426 - RNA, 19 nt, Artificial Sequence
  Synthetic
acugccuuguauccuuugu

SEQ ID NO: 667427 - RNA, 20 nt, Artificial Sequence
  Synthetic
cacugccuuguauccuuugu

SEQ ID NO: 667428 - RNA, 21 nt, Artificial Sequence
  Synthetic
ccacugccuuguauccuuugu

SEQ ID NO: 667429 - RNA, 22 nt, Artificial Sequence
  Synthetic
accacugccuuguauccuuugu

SEQ ID NO: 667430 - RNA, 23 nt, Artificial Sequence
  Synthetic
uaccacugccuuguauccuuugu

SEQ ID NO: 667431 - RNA, 24 nt, Artificial Sequence
  Synthetic
cuaccacugccuuguauccuuugu

SEQ ID NO: 667432 - RNA, 18 nt, Artificial Sequence
  Synthetic
uaugucuuccuccuuugu

SEQ ID NO: 667433 - RNA, 19 nt, Artificial Sequence
  Synthetic
cuaugucuuccuccuuugu

SEQ ID NO: 667434 - RNA, 20 nt, Artificial Sequence
  Synthetic
ccuaugucuuccuccuuugu

SEQ ID NO: 667435 - RNA, 21 nt, Artificial Sequence
  Synthetic
cccuaugucuuccuccuuugu

SEQ ID NO: 667436 - RNA, 22 nt, Artificial Sequence
  Synthetic
acccuaugucuuccuccuuugu

SEQ ID NO: 667437 - RNA, 23 nt, Artificial Sequence
  Synthetic
aacccuaugucuuccuccuuugu

SEQ ID NO: 667438 - RNA, 24 nt, Artificial Sequence
  Synthetic
aaacccuaugucuuccuccuuugu

SEQ ID NO: 667439 - RNA, 18 nt, Artificial Sequence
  Synthetic
gcuuuuuguuuccuuugu

SEQ ID NO: 667440 - RNA, 19 nt, Artificial Sequence
  Synthetic
cgcuuuuuguuuccuuugu

SEQ ID NO: 667441 - RNA, 20 nt, Artificial Sequence
  Synthetic
acgcuuuuuguuuccuuugu

SEQ ID NO: 667442 - RNA, 21 nt, Artificial Sequence
  Synthetic
cacgcuuuuuguuuccuuugu

SEQ ID NO: 667443 - RNA, 22 nt, Artificial Sequence
  Synthetic
gcacgcuuuuuguuuccuuugu

SEQ ID NO: 667444 - RNA, 23 nt, Artificial Sequence
  Synthetic
ugcacgcuuuuuguuuccuuugu

SEQ ID NO: 667445 - RNA, 24 nt, Artificial Sequence
  Synthetic
uugcacgcuuuuuguuuccuuugu

SEQ ID NO: 667446 - RNA, 18 nt, Artificial Sequence
  Synthetic
ccuaacucauagcuuugu

SEQ ID NO: 667447 - RNA, 19 nt, Artificial Sequence
  Synthetic
accuaacucauagcuuugu

SEQ ID NO: 667448 - RNA, 20 nt, Artificial Sequence
  Synthetic
caccuaacucauagcuuugu

SEQ ID NO: 667449 - RNA, 21 nt, Artificial Sequence
  Synthetic
ccaccuaacucauagcuuugu

SEQ ID NO: 667450 - RNA, 22 nt, Artificial Sequence
  Synthetic
accaccuaacucauagcuuugu

SEQ ID NO: 667451 - RNA, 23 nt, Artificial Sequence
  Synthetic
uaccaccuaacucauagcuuugu

SEQ ID NO: 667452 - RNA, 24 nt, Artificial Sequence
  Synthetic
auaccaccuaacucauagcuuugu

SEQ ID NO: 667453 - RNA, 18 nt, Artificial Sequence
  Synthetic
aagauuccauggcuuugu

SEQ ID NO: 667454 - RNA, 19 nt, Artificial Sequence
  Synthetic
uaagauuccauggcuuugu

SEQ ID NO: 667455 - RNA, 20 nt, Artificial Sequence
  Synthetic
auaagauuccauggcuuugu

SEQ ID NO: 667456 - RNA, 21 nt, Artificial Sequence
  Synthetic
gauaagauuccauggcuuugu

SEQ ID NO: 667457 - RNA, 22 nt, Artificial Sequence
  Synthetic
ugauaagauuccauggcuuugu

SEQ ID NO: 667458 - RNA, 23 nt, Artificial Sequence
  Synthetic
cugauaagauuccauggcuuugu

SEQ ID NO: 667459 - RNA, 24 nt, Artificial Sequence
  Synthetic
ucugauaagauuccauggcuuugu

SEQ ID NO: 667460 - RNA, 18 nt, Artificial Sequence
  Synthetic
ugcuuaaagcugcuuugu

SEQ ID NO: 667461 - RNA, 19 nt, Artificial Sequence
  Synthetic
uugcuuaaagcugcuuugu

SEQ ID NO: 667462 - RNA, 20 nt, Artificial Sequence
  Synthetic
uuugcuuaaagcugcuuugu

SEQ ID NO: 667463 - RNA, 21 nt, Artificial Sequence
  Synthetic
uuuugcuuaaagcugcuuugu

SEQ ID NO: 667464 - RNA, 22 nt, Artificial Sequence
  Synthetic
auuuugcuuaaagcugcuuugu

SEQ ID NO: 667465 - RNA, 23 nt, Artificial Sequence
  Synthetic
cauuuugcuuaaagcugcuuugu

SEQ ID NO: 667466 - RNA, 24 nt, Artificial Sequence
  Synthetic
ucauuuugcuuaaagcugcuuugu

SEQ ID NO: 667467 - RNA, 18 nt, Artificial Sequence
  Synthetic
aaaaugugucugcuuugu

SEQ ID NO: 667468 - RNA, 19 nt, Artificial Sequence
  Synthetic
uaaaaugugucugcuuugu

SEQ ID NO: 667469 - RNA, 20 nt, Artificial Sequence
  Synthetic
auaaaaugugucugcuuugu

SEQ ID NO: 667470 - RNA, 21 nt, Artificial Sequence
  Synthetic
aauaaaaugugucugcuuugu

SEQ ID NO: 667471 - RNA, 22 nt, Artificial Sequence
  Synthetic
caauaaaaugugucugcuuugu

SEQ ID NO: 667472 - RNA, 23 nt, Artificial Sequence
  Synthetic
acaauaaaaugugucugcuuugu

SEQ ID NO: 667473 - RNA, 24 nt, Artificial Sequence
  Synthetic
cacaauaaaaugugucugcuuugu

SEQ ID NO: 667474 - RNA, 18 nt, Artificial Sequence
  Synthetic
agugagaaggugcuuugu

SEQ ID NO: 667475 - RNA, 19 nt, Artificial Sequence
  Synthetic
cagugagaaggugcuuugu

SEQ ID NO: 667476 - RNA, 20 nt, Artificial Sequence
  Synthetic
gcagugagaaggugcuuugu

SEQ ID NO: 667477 - RNA, 21 nt, Artificial Sequence
  Synthetic
ugcagugagaaggugcuuugu

SEQ ID NO: 667478 - RNA, 22 nt, Artificial Sequence
  Synthetic
gugcagugagaaggugcuuugu

SEQ ID NO: 667479 - RNA, 23 nt, Artificial Sequence
  Synthetic
ggugcagugagaaggugcuuugu

SEQ ID NO: 667480 - RNA, 24 nt, Artificial Sequence
  Synthetic
gggugcagugagaaggugcuuugu

SEQ ID NO: 667481 - RNA, 18 nt, Artificial Sequence
  Synthetic
aauacuagaaaucuuugu

SEQ ID NO: 667482 - RNA, 19 nt, Artificial Sequence
  Synthetic
uaauacuagaaaucuuugu

SEQ ID NO: 667483 - RNA, 20 nt, Artificial Sequence
  Synthetic
guaauacuagaaaucuuugu

SEQ ID NO: 667484 - RNA, 21 nt, Artificial Sequence
  Synthetic
aguaauacuagaaaucuuugu

SEQ ID NO: 667485 - RNA, 22 nt, Artificial Sequence
  Synthetic
caguaauacuagaaaucuuugu

SEQ ID NO: 667486 - RNA, 23 nt, Artificial Sequence
  Synthetic
ccaguaauacuagaaaucuuugu

SEQ ID NO: 667487 - RNA, 24 nt, Artificial Sequence
  Synthetic
gccaguaauacuagaaaucuuugu

SEQ ID NO: 667488 - RNA, 18 nt, Artificial Sequence
  Synthetic
aacagcuucucucuuugu

SEQ ID NO: 667489 - RNA, 19 nt, Artificial Sequence
  Synthetic
aaacagcuucucucuuugu

SEQ ID NO: 667490 - RNA, 20 nt, Artificial Sequence
  Synthetic
gaaacagcuucucucuuugu

SEQ ID NO: 667491 - RNA, 21 nt, Artificial Sequence
  Synthetic
ugaaacagcuucucucuuugu

SEQ ID NO: 667492 - RNA, 22 nt, Artificial Sequence
  Synthetic
cugaaacagcuucucucuuugu

SEQ ID NO: 667493 - RNA, 23 nt, Artificial Sequence
  Synthetic
acugaaacagcuucucucuuugu

SEQ ID NO: 667494 - RNA, 24 nt, Artificial Sequence
  Synthetic
gacugaaacagcuucucucuuugu

SEQ ID NO: 667495 - RNA, 18 nt, Artificial Sequence
  Synthetic
agucccaggcuucuuugu

SEQ ID NO: 667496 - RNA, 19 nt, Artificial Sequence
  Synthetic
gagucccaggcuucuuugu

SEQ ID NO: 667497 - RNA, 20 nt, Artificial Sequence
  Synthetic
agagucccaggcuucuuugu

SEQ ID NO: 667498 - RNA, 21 nt, Artificial Sequence
  Synthetic
uagagucccaggcuucuuugu

SEQ ID NO: 667499 - RNA, 22 nt, Artificial Sequence
  Synthetic
cuagagucccaggcuucuuugu

SEQ ID NO: 667500 - RNA, 23 nt, Artificial Sequence
  Synthetic
ucuagagucccaggcuucuuugu

SEQ ID NO: 667501 - RNA, 24 nt, Artificial Sequence
  Synthetic
gucuagagucccaggcuucuuugu

SEQ ID NO: 667502 - RNA, 18 nt, Artificial Sequence
  Synthetic
acagugaaucuucuuugu

SEQ ID NO: 667503 - RNA, 19 nt, Artificial Sequence
  Synthetic
gacagugaaucuucuuugu

SEQ ID NO: 667504 - RNA, 20 nt, Artificial Sequence
  Synthetic
cgacagugaaucuucuuugu

SEQ ID NO: 667505 - RNA, 21 nt, Artificial Sequence
  Synthetic
ucgacagugaaucuucuuugu

SEQ ID NO: 667506 - RNA, 22 nt, Artificial Sequence
  Synthetic
cucgacagugaaucuucuuugu

SEQ ID NO: 667507 - RNA, 23 nt, Artificial Sequence
  Synthetic
ccucgacagugaaucuucuuugu

SEQ ID NO: 667508 - RNA, 24 nt, Artificial Sequence
  Synthetic
uccucgacagugaaucuucuuugu

SEQ ID NO: 667509 - RNA, 18 nt, Artificial Sequence
  Synthetic
uaacuuaaaggcguuugu

SEQ ID NO: 667510 - RNA, 19 nt, Artificial Sequence
  Synthetic
uuaacuuaaaggcguuugu

SEQ ID NO: 667511 - RNA, 20 nt, Artificial Sequence
  Synthetic
uuuaacuuaaaggcguuugu

SEQ ID NO: 667512 - RNA, 21 nt, Artificial Sequence
  Synthetic
auuuaacuuaaaggcguuugu

SEQ ID NO: 667513 - RNA, 22 nt, Artificial Sequence
  Synthetic
uauuuaacuuaaaggcguuugu

SEQ ID NO: 667514 - RNA, 23 nt, Artificial Sequence
  Synthetic
uuauuuaacuuaaaggcguuugu

SEQ ID NO: 667515 - RNA, 24 nt, Artificial Sequence
  Synthetic
uuuauuuaacuuaaaggcguuugu

SEQ ID NO: 667516 - RNA, 18 nt, Artificial Sequence
  Synthetic
uuuaaccaauagguuugu

SEQ ID NO: 667517 - RNA, 19 nt, Artificial Sequence
  Synthetic
auuuaaccaauagguuugu

SEQ ID NO: 667518 - RNA, 20 nt, Artificial Sequence
  Synthetic
uauuuaaccaauagguuugu

SEQ ID NO: 667519 - RNA, 21 nt, Artificial Sequence
  Synthetic
auauuuaaccaauagguuugu

SEQ ID NO: 667520 - RNA, 22 nt, Artificial Sequence
  Synthetic
aauauuuaaccaauagguuugu

SEQ ID NO: 667521 - RNA, 23 nt, Artificial Sequence
  Synthetic
aaauauuuaaccaauagguuugu

SEQ ID NO: 667522 - RNA, 24 nt, Artificial Sequence
  Synthetic
aaaauauuuaaccaauagguuugu

SEQ ID NO: 667523 - RNA, 18 nt, Artificial Sequence
  Synthetic
cgacuuuguaauguuugu

SEQ ID NO: 667524 - RNA, 19 nt, Artificial Sequence
  Synthetic
gcgacuuuguaauguuugu

SEQ ID NO: 667525 - RNA, 20 nt, Artificial Sequence
  Synthetic
ugcgacuuuguaauguuugu

SEQ ID NO: 667526 - RNA, 21 nt, Artificial Sequence
  Synthetic
cugcgacuuuguaauguuugu

SEQ ID NO: 667527 - RNA, 22 nt, Artificial Sequence
  Synthetic
acugcgacuuuguaauguuugu

SEQ ID NO: 667528 - RNA, 23 nt, Artificial Sequence
  Synthetic
uacugcgacuuuguaauguuugu

SEQ ID NO: 667529 - RNA, 24 nt, Artificial Sequence
  Synthetic
auacugcgacuuuguaauguuugu

SEQ ID NO: 667530 - RNA, 18 nt, Artificial Sequence
  Synthetic
uuuguaucaguuguuugu

SEQ ID NO: 667531 - RNA, 19 nt, Artificial Sequence
  Synthetic
uuuuguaucaguuguuugu

SEQ ID NO: 667532 - RNA, 20 nt, Artificial Sequence
  Synthetic
uuuuuguaucaguuguuugu

SEQ ID NO: 667533 - RNA, 21 nt, Artificial Sequence
  Synthetic
uuuuuuguaucaguuguuugu

SEQ ID NO: 667534 - RNA, 22 nt, Artificial Sequence
  Synthetic
cuuuuuuguaucaguuguuugu

SEQ ID NO: 667535 - RNA, 23 nt, Artificial Sequence
  Synthetic
acuuuuuuguaucaguuguuugu

SEQ ID NO: 667536 - RNA, 24 nt, Artificial Sequence
  Synthetic
gacuuuuuuguaucaguuguuugu

SEQ ID NO: 667537 - RNA, 18 nt, Artificial Sequence
  Synthetic
cuuuuuuuuuuuguuugu

SEQ ID NO: 667538 - RNA, 19 nt, Artificial Sequence
  Synthetic
ucuuuuuuuuuuuguuugu

SEQ ID NO: 667539 - RNA, 20 nt, Artificial Sequence
  Synthetic
aucuuuuuuuuuuuguuugu

SEQ ID NO: 667540 - RNA, 21 nt, Artificial Sequence
  Synthetic
aaucuuuuuuuuuuuguuugu

SEQ ID NO: 667541 - RNA, 22 nt, Artificial Sequence
  Synthetic
uaaucuuuuuuuuuuuguuugu

SEQ ID NO: 667542 - RNA, 23 nt, Artificial Sequence
  Synthetic
uuaaucuuuuuuuuuuuguuugu

SEQ ID NO: 667543 - RNA, 24 nt, Artificial Sequence
  Synthetic
uuuaaucuuuuuuuuuuuguuugu

SEQ ID NO: 667544 - RNA, 18 nt, Artificial Sequence
  Synthetic
ccuguacauaaauuuugu

SEQ ID NO: 667545 - RNA, 19 nt, Artificial Sequence
  Synthetic
uccuguacauaaauuuugu

SEQ ID NO: 667546 - RNA, 20 nt, Artificial Sequence
  Synthetic
uuccuguacauaaauuuugu

SEQ ID NO: 667547 - RNA, 21 nt, Artificial Sequence
  Synthetic
auuccuguacauaaauuuugu

SEQ ID NO: 667548 - RNA, 22 nt, Artificial Sequence
  Synthetic
aauuccuguacauaaauuuugu

SEQ ID NO: 667549 - RNA, 23 nt, Artificial Sequence
  Synthetic
caauuccuguacauaaauuuugu

SEQ ID NO: 667550 - RNA, 24 nt, Artificial Sequence
  Synthetic
acaauuccuguacauaaauuuugu

SEQ ID NO: 667551 - RNA, 18 nt, Artificial Sequence
  Synthetic
acuguaauucaauuuugu

SEQ ID NO: 667552 - RNA, 19 nt, Artificial Sequence
  Synthetic
cacuguaauucaauuuugu

SEQ ID NO: 667553 - RNA, 20 nt, Artificial Sequence
  Synthetic
ucacuguaauucaauuuugu

SEQ ID NO: 667554 - RNA, 21 nt, Artificial Sequence
  Synthetic
cucacuguaauucaauuuugu

SEQ ID NO: 667555 - RNA, 22 nt, Artificial Sequence
  Synthetic
acucacuguaauucaauuuugu

SEQ ID NO: 667556 - RNA, 23 nt, Artificial Sequence
  Synthetic
uacucacuguaauucaauuuugu

SEQ ID NO: 667557 - RNA, 24 nt, Artificial Sequence
  Synthetic
uuacucacuguaauucaauuuugu

SEQ ID NO: 667558 - RNA, 18 nt, Artificial Sequence
  Synthetic
aauaaauguacauuuugu

SEQ ID NO: 667559 - RNA, 19 nt, Artificial Sequence
  Synthetic
aaauaaauguacauuuugu

SEQ ID NO: 667560 - RNA, 20 nt, Artificial Sequence
  Synthetic
caaauaaauguacauuuugu

SEQ ID NO: 667561 - RNA, 21 nt, Artificial Sequence
  Synthetic
acaaauaaauguacauuuugu

SEQ ID NO: 667562 - RNA, 22 nt, Artificial Sequence
  Synthetic
uacaaauaaauguacauuuugu

SEQ ID NO: 667563 - RNA, 23 nt, Artificial Sequence
  Synthetic
uuacaaauaaauguacauuuugu

SEQ ID NO: 667564 - RNA, 24 nt, Artificial Sequence
  Synthetic
uuuacaaauaaauguacauuuugu

SEQ ID NO: 667565 - RNA, 18 nt, Artificial Sequence
  Synthetic
gcugauuuuuuauuuugu

SEQ ID NO: 667566 - RNA, 19 nt, Artificial Sequence
  Synthetic
ugcugauuuuuuauuuugu

SEQ ID NO: 667567 - RNA, 20 nt, Artificial Sequence
  Synthetic
augcugauuuuuuauuuugu

SEQ ID NO: 667568 - RNA, 21 nt, Artificial Sequence
  Synthetic
gaugcugauuuuuuauuuugu

SEQ ID NO: 667569 - RNA, 22 nt, Artificial Sequence
  Synthetic
agaugcugauuuuuuauuuugu

SEQ ID NO: 667570 - RNA, 23 nt, Artificial Sequence
  Synthetic
gagaugcugauuuuuuauuuugu

SEQ ID NO: 667571 - RNA, 24 nt, Artificial Sequence
  Synthetic
ugagaugcugauuuuuuauuuugu

SEQ ID NO: 667572 - RNA, 18 nt, Artificial Sequence
  Synthetic
aacagaaaauccuuuugu

SEQ ID NO: 667573 - RNA, 19 nt, Artificial Sequence
  Synthetic
aaacagaaaauccuuuugu

SEQ ID NO: 667574 - RNA, 20 nt, Artificial Sequence
  Synthetic
aaaacagaaaauccuuuugu

SEQ ID NO: 667575 - RNA, 21 nt, Artificial Sequence
  Synthetic
gaaaacagaaaauccuuuugu

SEQ ID NO: 667576 - RNA, 22 nt, Artificial Sequence
  Synthetic
ugaaaacagaaaauccuuuugu

SEQ ID NO: 667577 - RNA, 23 nt, Artificial Sequence
  Synthetic
uugaaaacagaaaauccuuuugu

SEQ ID NO: 667578 - RNA, 24 nt, Artificial Sequence
  Synthetic
cuugaaaacagaaaauccuuuugu

SEQ ID NO: 667579 - RNA, 18 nt, Artificial Sequence
  Synthetic
cauucaugcuucuuuugu

SEQ ID NO: 667580 - RNA, 19 nt, Artificial Sequence
  Synthetic
ucauucaugcuucuuuugu

SEQ ID NO: 667581 - RNA, 20 nt, Artificial Sequence
  Synthetic
gucauucaugcuucuuuugu

SEQ ID NO: 667582 - RNA, 21 nt, Artificial Sequence
  Synthetic
agucauucaugcuucuuuugu

SEQ ID NO: 667583 - RNA, 22 nt, Artificial Sequence
  Synthetic
aagucauucaugcuucuuuugu

SEQ ID NO: 667584 - RNA, 23 nt, Artificial Sequence
  Synthetic
aaagucauucaugcuucuuuugu

SEQ ID NO: 667585 - RNA, 24 nt, Artificial Sequence
  Synthetic
gaaagucauucaugcuucuuuugu

SEQ ID NO: 667586 - RNA, 18 nt, Artificial Sequence
  Synthetic
agaacccuacaguuuugu

SEQ ID NO: 667587 - RNA, 19 nt, Artificial Sequence
  Synthetic
cagaacccuacaguuuugu

SEQ ID NO: 667588 - RNA, 20 nt, Artificial Sequence
  Synthetic
ccagaacccuacaguuuugu

SEQ ID NO: 667589 - RNA, 21 nt, Artificial Sequence
  Synthetic
accagaacccuacaguuuugu

SEQ ID NO: 667590 - RNA, 22 nt, Artificial Sequence
  Synthetic
aaccagaacccuacaguuuugu

SEQ ID NO: 667591 - RNA, 23 nt, Artificial Sequence
  Synthetic
aaaccagaacccuacaguuuugu

SEQ ID NO: 667592 - RNA, 24 nt, Artificial Sequence
  Synthetic
gaaaccagaacccuacaguuuugu

SEQ ID NO: 667593 - RNA, 18 nt, Artificial Sequence
  Synthetic
aauguuacauaguuuugu

SEQ ID NO: 667594 - RNA, 19 nt, Artificial Sequence
  Synthetic
gaauguuacauaguuuugu

SEQ ID NO: 667595 - RNA, 20 nt, Artificial Sequence
  Synthetic
agaauguuacauaguuuugu

SEQ ID NO: 667596 - RNA, 21 nt, Artificial Sequence
  Synthetic
cagaauguuacauaguuuugu

SEQ ID NO: 667597 - RNA, 22 nt, Artificial Sequence
  Synthetic
ucagaauguuacauaguuuugu

SEQ ID NO: 667598 - RNA, 23 nt, Artificial Sequence
  Synthetic
uucagaauguuacauaguuuugu

SEQ ID NO: 667599 - RNA, 24 nt, Artificial Sequence
  Synthetic
cuucagaauguuacauaguuuugu

SEQ ID NO: 667600 - RNA, 18 nt, Artificial Sequence
  Synthetic
gugguuuauagguuuugu

SEQ ID NO: 667601 - RNA, 19 nt, Artificial Sequence
  Synthetic
ugugguuuauagguuuugu

SEQ ID NO: 667602 - RNA, 20 nt, Artificial Sequence
  Synthetic
gugugguuuauagguuuugu

SEQ ID NO: 667603 - RNA, 21 nt, Artificial Sequence
  Synthetic
ggugugguuuauagguuuugu

SEQ ID NO: 667604 - RNA, 22 nt, Artificial Sequence
  Synthetic
uggugugguuuauagguuuugu

SEQ ID NO: 667605 - RNA, 23 nt, Artificial Sequence
  Synthetic
guggugugguuuauagguuuugu

SEQ ID NO: 667606 - RNA, 24 nt, Artificial Sequence
  Synthetic
cguggugugguuuauagguuuugu

SEQ ID NO: 667607 - RNA, 18 nt, Artificial Sequence
  Synthetic
uugacauccugguuuugu

SEQ ID NO: 667608 - RNA, 19 nt, Artificial Sequence
  Synthetic
uuugacauccugguuuugu

SEQ ID NO: 667609 - RNA, 20 nt, Artificial Sequence
  Synthetic
uuuugacauccugguuuugu

SEQ ID NO: 667610 - RNA, 21 nt, Artificial Sequence
  Synthetic
auuuugacauccugguuuugu

SEQ ID NO: 667611 - RNA, 22 nt, Artificial Sequence
  Synthetic
gauuuugacauccugguuuugu

SEQ ID NO: 667612 - RNA, 23 nt, Artificial Sequence
  Synthetic
agauuuugacauccugguuuugu

SEQ ID NO: 667613 - RNA, 24 nt, Artificial Sequence
  Synthetic
cagauuuugacauccugguuuugu

SEQ ID NO: 667614 - RNA, 18 nt, Artificial Sequence
  Synthetic
guuuaaagucuguuuugu

SEQ ID NO: 667615 - RNA, 19 nt, Artificial Sequence
  Synthetic
gguuuaaagucuguuuugu

SEQ ID NO: 667616 - RNA, 20 nt, Artificial Sequence
  Synthetic
ugguuuaaagucuguuuugu

SEQ ID NO: 667617 - RNA, 21 nt, Artificial Sequence
  Synthetic
uugguuuaaagucuguuuugu

SEQ ID NO: 667618 - RNA, 22 nt, Artificial Sequence
  Synthetic
auugguuuaaagucuguuuugu

SEQ ID NO: 667619 - RNA, 23 nt, Artificial Sequence
  Synthetic
uauugguuuaaagucuguuuugu

SEQ ID NO: 667620 - RNA, 24 nt, Artificial Sequence
  Synthetic
uuauugguuuaaagucuguuuugu

SEQ ID NO: 667621 - RNA, 18 nt, Artificial Sequence
  Synthetic
uauuuguucuuguuuugu

SEQ ID NO: 667622 - RNA, 19 nt, Artificial Sequence
  Synthetic
uuauuuguucuuguuuugu

SEQ ID NO: 667623 - RNA, 20 nt, Artificial Sequence
  Synthetic
uuuauuuguucuuguuuugu

SEQ ID NO: 667624 - RNA, 21 nt, Artificial Sequence
  Synthetic
guuuauuuguucuuguuuugu

SEQ ID NO: 667625 - RNA, 22 nt, Artificial Sequence
  Synthetic
uguuuauuuguucuuguuuugu

SEQ ID NO: 667626 - RNA, 23 nt, Artificial Sequence
  Synthetic
uuguuuauuuguucuuguuuugu

SEQ ID NO: 667627 - RNA, 24 nt, Artificial Sequence
  Synthetic
uuuguuuauuuguucuuguuuugu

SEQ ID NO: 667628 - RNA, 18 nt, Artificial Sequence
  Synthetic
uguuuuguuuuguuuugu

SEQ ID NO: 667629 - RNA, 19 nt, Artificial Sequence
  Synthetic
uuguuuuguuuuguuuugu

SEQ ID NO: 667630 - RNA, 20 nt, Artificial Sequence
  Synthetic
uuuguuuuguuuuguuuugu

SEQ ID NO: 667631 - RNA, 21 nt, Artificial Sequence
  Synthetic
uuuuguuuuguuuuguuuugu

SEQ ID NO: 667632 - RNA, 22 nt, Artificial Sequence
  Synthetic
uuuuuguuuuguuuuguuuugu

SEQ ID NO: 667633 - RNA, 23 nt, Artificial Sequence
  Synthetic
uuuuuuguuuuguuuuguuuugu

SEQ ID NO: 667634 - RNA, 24 nt, Artificial Sequence
  Synthetic
uuuuuuuguuuuguuuuguuuugu

SEQ ID NO: 667635 - RNA, 18 nt, Artificial Sequence
  Synthetic
auuguuuuuaauuuuugu

SEQ ID NO: 667636 - RNA, 19 nt, Artificial Sequence
  Synthetic
uauuguuuuuaauuuuugu

SEQ ID NO: 667637 - RNA, 20 nt, Artificial Sequence
  Synthetic
uuauuguuuuuaauuuuugu

SEQ ID NO: 667638 - RNA, 21 nt, Artificial Sequence
  Synthetic
uuuauuguuuuuaauuuuugu

SEQ ID NO: 667639 - RNA, 22 nt, Artificial Sequence
  Synthetic
auuuauuguuuuuaauuuuugu

SEQ ID NO: 667640 - RNA, 23 nt, Artificial Sequence
  Synthetic
gauuuauuguuuuuaauuuuugu

SEQ ID NO: 667641 - RNA, 24 nt, Artificial Sequence
  Synthetic
ugauuuauuguuuuuaauuuuugu

SEQ ID NO: 667642 - RNA, 18 nt, Artificial Sequence
  Synthetic
aagcaccauucuuuuugu

SEQ ID NO: 667643 - RNA, 19 nt, Artificial Sequence
  Synthetic
uaagcaccauucuuuuugu

SEQ ID NO: 667644 - RNA, 20 nt, Artificial Sequence
  Synthetic
uuaagcaccauucuuuuugu

SEQ ID NO: 667645 - RNA, 21 nt, Artificial Sequence
  Synthetic
auuaagcaccauucuuuuugu

SEQ ID NO: 667646 - RNA, 22 nt, Artificial Sequence
  Synthetic
gauuaagcaccauucuuuuugu

SEQ ID NO: 667647 - RNA, 23 nt, Artificial Sequence
  Synthetic
ggauuaagcaccauucuuuuugu

SEQ ID NO: 667648 - RNA, 24 nt, Artificial Sequence
  Synthetic
uggauuaagcaccauucuuuuugu

SEQ ID NO: 667649 - RNA, 18 nt, Artificial Sequence
  Synthetic
auuguuaagaguuuuugu

SEQ ID NO: 667650 - RNA, 19 nt, Artificial Sequence
  Synthetic
uauuguuaagaguuuuugu

SEQ ID NO: 667651 - RNA, 20 nt, Artificial Sequence
  Synthetic
uuauuguuaagaguuuuugu

SEQ ID NO: 667652 - RNA, 21 nt, Artificial Sequence
  Synthetic
auuauuguuaagaguuuuugu

SEQ ID NO: 667653 - RNA, 22 nt, Artificial Sequence
  Synthetic
aauuauuguuaagaguuuuugu

SEQ ID NO: 667654 - RNA, 23 nt, Artificial Sequence
  Synthetic
caauuauuguuaagaguuuuugu

SEQ ID NO: 667655 - RNA, 24 nt, Artificial Sequence
  Synthetic
acaauuauuguuaagaguuuuugu

SEQ ID NO: 667656 - RNA, 18 nt, Artificial Sequence
  Synthetic
uucagaugggguuuuugu

SEQ ID NO: 667657 - RNA, 19 nt, Artificial Sequence
  Synthetic
cuucagaugggguuuuugu

SEQ ID NO: 667658 - RNA, 20 nt, Artificial Sequence
  Synthetic
ccuucagaugggguuuuugu

SEQ ID NO: 667659 - RNA, 21 nt, Artificial Sequence
  Synthetic
accuucagaugggguuuuugu

SEQ ID NO: 667660 - RNA, 22 nt, Artificial Sequence
  Synthetic
gaccuucagaugggguuuuugu

SEQ ID NO: 667661 - RNA, 23 nt, Artificial Sequence
  Synthetic
ugaccuucagaugggguuuuugu

SEQ ID NO: 667662 - RNA, 24 nt, Artificial Sequence
  Synthetic
gugaccuucagaugggguuuuugu

SEQ ID NO: 667663 - RNA, 18 nt, Artificial Sequence
  Synthetic
uaggucuuuuguuuuugu

SEQ ID NO: 667664 - RNA, 19 nt, Artificial Sequence
  Synthetic
auaggucuuuuguuuuugu

SEQ ID NO: 667665 - RNA, 20 nt, Artificial Sequence
  Synthetic
aauaggucuuuuguuuuugu

SEQ ID NO: 667666 - RNA, 21 nt, Artificial Sequence
  Synthetic
uaauaggucuuuuguuuuugu

SEQ ID NO: 667667 - RNA, 22 nt, Artificial Sequence
  Synthetic
guaauaggucuuuuguuuuugu

SEQ ID NO: 667668 - RNA, 23 nt, Artificial Sequence
  Synthetic
uguaauaggucuuuuguuuuugu

SEQ ID NO: 667669 - RNA, 24 nt, Artificial Sequence
  Synthetic
cuguaauaggucuuuuguuuuugu

SEQ ID NO: 667670 - RNA, 18 nt, Artificial Sequence
  Synthetic
uauucaauacuuuuuugu

SEQ ID NO: 667671 - RNA, 19 nt, Artificial Sequence
  Synthetic
auauucaauacuuuuuugu

SEQ ID NO: 667672 - RNA, 20 nt, Artificial Sequence
  Synthetic
uauauucaauacuuuuuugu

SEQ ID NO: 667673 - RNA, 21 nt, Artificial Sequence
  Synthetic
uuauauucaauacuuuuuugu

SEQ ID NO: 667674 - RNA, 22 nt, Artificial Sequence
  Synthetic
uuuauauucaauacuuuuuugu

SEQ ID NO: 667675 - RNA, 23 nt, Artificial Sequence
  Synthetic
cuuuauauucaauacuuuuuugu

SEQ ID NO: 667676 - RNA, 24 nt, Artificial Sequence
  Synthetic
acuuuauauucaauacuuuuuugu

SEQ ID NO: 667677 - RNA, 18 nt, Artificial Sequence
  Synthetic
ggaccuggguuuuuuugu

SEQ ID NO: 667678 - RNA, 19 nt, Artificial Sequence
  Synthetic
uggaccuggguuuuuuugu

SEQ ID NO: 667679 - RNA, 20 nt, Artificial Sequence
  Synthetic
cuggaccuggguuuuuuugu

SEQ ID NO: 667680 - RNA, 21 nt, Artificial Sequence
  Synthetic
ccuggaccuggguuuuuuugu

SEQ ID NO: 667681 - RNA, 22 nt, Artificial Sequence
  Synthetic
uccuggaccuggguuuuuuugu

SEQ ID NO: 667682 - RNA, 23 nt, Artificial Sequence
  Synthetic
cuccuggaccuggguuuuuuugu

SEQ ID NO: 667683 - RNA, 24 nt, Artificial Sequence
  Synthetic
ucuccuggaccuggguuuuuuugu

SEQ ID NO: 667684 - RNA, 18 nt, Artificial Sequence
  Synthetic
aaaaaaaaaaaaaaaauu

SEQ ID NO: 667685 - RNA, 19 nt, Artificial Sequence
  Synthetic
aaaaaaaaaaaaaaaaauu

SEQ ID NO: 667686 - RNA, 20 nt, Artificial Sequence
  Synthetic
aaaaaaaaaaaaaaaaaauu

SEQ ID NO: 667687 - RNA, 21 nt, Artificial Sequence
  Synthetic
aaaaaaaaaaaaaaaaaaauu

SEQ ID NO: 667688 - RNA, 22 nt, Artificial Sequence
  Synthetic
aaaaaaaaaaaaaaaaaaaauu

SEQ ID NO: 667689 - RNA, 23 nt, Artificial Sequence
  Synthetic
aaaaaaaaaaaaaaaaaaaaauu

SEQ ID NO: 667690 - RNA, 24 nt, Artificial Sequence
  Synthetic
caaaaaaaaaaaaaaaaaaaaauu

SEQ ID NO: 667691 - RNA, 18 nt, Artificial Sequence
  Synthetic
aggaacagaaaaaaaauu

SEQ ID NO: 667692 - RNA, 19 nt, Artificial Sequence
  Synthetic
aaggaacagaaaaaaaauu

SEQ ID NO: 667693 - RNA, 20 nt, Artificial Sequence
  Synthetic
aaaggaacagaaaaaaaauu

SEQ ID NO: 667694 - RNA, 21 nt, Artificial Sequence
  Synthetic
uaaaggaacagaaaaaaaauu

SEQ ID NO: 667695 - RNA, 22 nt, Artificial Sequence
  Synthetic
auaaaggaacagaaaaaaaauu

SEQ ID NO: 667696 - RNA, 23 nt, Artificial Sequence
  Synthetic
uauaaaggaacagaaaaaaaauu

SEQ ID NO: 667697 - RNA, 24 nt, Artificial Sequence
  Synthetic
uuauaaaggaacagaaaaaaaauu

SEQ ID NO: 667698 - RNA, 18 nt, Artificial Sequence
  Synthetic
guaaaaggaaaaaaaauu

SEQ ID NO: 667699 - RNA, 19 nt, Artificial Sequence
  Synthetic
aguaaaaggaaaaaaaauu

SEQ ID NO: 667700 - RNA, 20 nt, Artificial Sequence
  Synthetic
uaguaaaaggaaaaaaaauu

SEQ ID NO: 667701 - RNA, 21 nt, Artificial Sequence
  Synthetic
auaguaaaaggaaaaaaaauu

SEQ ID NO: 667702 - RNA, 22 nt, Artificial Sequence
  Synthetic
cauaguaaaaggaaaaaaaauu

SEQ ID NO: 667703 - RNA, 23 nt, Artificial Sequence
  Synthetic
ccauaguaaaaggaaaaaaaauu

SEQ ID NO: 667704 - RNA, 24 nt, Artificial Sequence
  Synthetic
cccauaguaaaaggaaaaaaaauu

SEQ ID NO: 667705 - RNA, 18 nt, Artificial Sequence
  Synthetic
aaaacuuugaaaaaaauu

SEQ ID NO: 667706 - RNA, 19 nt, Artificial Sequence
  Synthetic
aaaaacuuugaaaaaaauu

SEQ ID NO: 667707 - RNA, 20 nt, Artificial Sequence
  Synthetic
gaaaaacuuugaaaaaaauu

SEQ ID NO: 667708 - RNA, 21 nt, Artificial Sequence
  Synthetic
ugaaaaacuuugaaaaaaauu

SEQ ID NO: 667709 - RNA, 22 nt, Artificial Sequence
  Synthetic
uugaaaaacuuugaaaaaaauu

SEQ ID NO: 667710 - RNA, 23 nt, Artificial Sequence
  Synthetic
uuugaaaaacuuugaaaaaaauu

SEQ ID NO: 667711 - RNA, 24 nt, Artificial Sequence
  Synthetic
uuuugaaaaacuuugaaaaaaauu

SEQ ID NO: 667712 - RNA, 18 nt, Artificial Sequence
  Synthetic
uuggaguaauaaaaaauu

SEQ ID NO: 667713 - RNA, 19 nt, Artificial Sequence
  Synthetic
guuggaguaauaaaaaauu

SEQ ID NO: 667714 - RNA, 20 nt, Artificial Sequence
  Synthetic
gguuggaguaauaaaaaauu

SEQ ID NO: 667715 - RNA, 21 nt, Artificial Sequence
  Synthetic
ugguuggaguaauaaaaaauu

SEQ ID NO: 667716 - RNA, 22 nt, Artificial Sequence
  Synthetic
cugguuggaguaauaaaaaauu

SEQ ID NO: 667717 - RNA, 23 nt, Artificial Sequence
  Synthetic
ucugguuggaguaauaaaaaauu

SEQ ID NO: 667718 - RNA, 24 nt, Artificial Sequence
  Synthetic
gucugguuggaguaauaaaaaauu

SEQ ID NO: 667719 - RNA, 18 nt, Artificial Sequence
  Synthetic
auuuaaagauaaaaaauu

SEQ ID NO: 667720 - RNA, 19 nt, Artificial Sequence
  Synthetic
cauuuaaagauaaaaaauu

SEQ ID NO: 667721 - RNA, 20 nt, Artificial Sequence
  Synthetic
acauuuaaagauaaaaaauu

SEQ ID NO: 667722 - RNA, 21 nt, Artificial Sequence
  Synthetic
aacauuuaaagauaaaaaauu

SEQ ID NO: 667723 - RNA, 22 nt, Artificial Sequence
  Synthetic
uaacauuuaaagauaaaaaauu

SEQ ID NO: 667724 - RNA, 23 nt, Artificial Sequence
  Synthetic
auaacauuuaaagauaaaaaauu

SEQ ID NO: 667725 - RNA, 24 nt, Artificial Sequence
  Synthetic
aauaacauuuaaagauaaaaaauu

SEQ ID NO: 667726 - RNA, 18 nt, Artificial Sequence
  Synthetic
auuuaauuguaaaaaauu

SEQ ID NO: 667727 - RNA, 19 nt, Artificial Sequence
  Synthetic
uauuuaauuguaaaaaauu

SEQ ID NO: 667728 - RNA, 20 nt, Artificial Sequence
  Synthetic
auauuuaauuguaaaaaauu

SEQ ID NO: 667729 - RNA, 21 nt, Artificial Sequence
  Synthetic
uauauuuaauuguaaaaaauu

SEQ ID NO: 667730 - RNA, 22 nt, Artificial Sequence
  Synthetic
guauauuuaauuguaaaaaauu

SEQ ID NO: 667731 - RNA, 23 nt, Artificial Sequence
  Synthetic
uguauauuuaauuguaaaaaauu

SEQ ID NO: 667732 - RNA, 24 nt, Artificial Sequence
  Synthetic
cuguauauuuaauuguaaaaaauu

SEQ ID NO: 667733 - RNA, 18 nt, Artificial Sequence
  Synthetic
gggaaguguacaaaaauu

SEQ ID NO: 667734 - RNA, 19 nt, Artificial Sequence
  Synthetic
agggaaguguacaaaaauu

SEQ ID NO: 667735 - RNA, 20 nt, Artificial Sequence
  Synthetic
aagggaaguguacaaaaauu

SEQ ID NO: 667736 - RNA, 21 nt, Artificial Sequence
  Synthetic
aaagggaaguguacaaaaauu

SEQ ID NO: 667737 - RNA, 22 nt, Artificial Sequence
  Synthetic
uaaagggaaguguacaaaaauu

SEQ ID NO: 667738 - RNA, 23 nt, Artificial Sequence
  Synthetic
auaaagggaaguguacaaaaauu

SEQ ID NO: 667739 - RNA, 24 nt, Artificial Sequence
  Synthetic
uauaaagggaaguguacaaaaauu

SEQ ID NO: 667740 - RNA, 18 nt, Artificial Sequence
  Synthetic
aauacuacaucaaaaauu

SEQ ID NO: 667741 - RNA, 19 nt, Artificial Sequence
  Synthetic
aaauacuacaucaaaaauu

SEQ ID NO: 667742 - RNA, 20 nt, Artificial Sequence
  Synthetic
uaaauacuacaucaaaaauu

SEQ ID NO: 667743 - RNA, 21 nt, Artificial Sequence
  Synthetic
uuaaauacuacaucaaaaauu

SEQ ID NO: 667744 - RNA, 22 nt, Artificial Sequence
  Synthetic
guuaaauacuacaucaaaaauu

SEQ ID NO: 667745 - RNA, 23 nt, Artificial Sequence
  Synthetic
uguuaaauacuacaucaaaaauu

SEQ ID NO: 667746 - RNA, 24 nt, Artificial Sequence
  Synthetic
guguuaaauacuacaucaaaaauu

SEQ ID NO: 667747 - RNA, 18 nt, Artificial Sequence
  Synthetic
uaucaugcuugaaaaauu

SEQ ID NO: 667748 - RNA, 19 nt, Artificial Sequence
  Synthetic
guaucaugcuugaaaaauu

SEQ ID NO: 667749 - RNA, 20 nt, Artificial Sequence
  Synthetic
uguaucaugcuugaaaaauu

SEQ ID NO: 667750 - RNA, 21 nt, Artificial Sequence
  Synthetic
auguaucaugcuugaaaaauu

SEQ ID NO: 667751 - RNA, 22 nt, Artificial Sequence
  Synthetic
uauguaucaugcuugaaaaauu

SEQ ID NO: 667752 - RNA, 23 nt, Artificial Sequence
  Synthetic
uuauguaucaugcuugaaaaauu

SEQ ID NO: 667753 - RNA, 24 nt, Artificial Sequence
  Synthetic
uuuauguaucaugcuugaaaaauu

SEQ ID NO: 667754 - RNA, 18 nt, Artificial Sequence
  Synthetic
cucucauggguaaaaauu

SEQ ID NO: 667755 - RNA, 19 nt, Artificial Sequence
  Synthetic
gcucucauggguaaaaauu

SEQ ID NO: 667756 - RNA, 20 nt, Artificial Sequence
  Synthetic
agcucucauggguaaaaauu

SEQ ID NO: 667757 - RNA, 21 nt, Artificial Sequence
  Synthetic
aagcucucauggguaaaaauu

SEQ ID NO: 667758 - RNA, 22 nt, Artificial Sequence
  Synthetic
caagcucucauggguaaaaauu

SEQ ID NO: 667759 - RNA, 23 nt, Artificial Sequence
  Synthetic
ccaagcucucauggguaaaaauu

SEQ ID NO: 667760 - RNA, 24 nt, Artificial Sequence
  Synthetic
gccaagcucucauggguaaaaauu

SEQ ID NO: 667761 - RNA, 18 nt, Artificial Sequence
  Synthetic
uaugacgcaaacaaaauu

SEQ ID NO: 667762 - RNA, 19 nt, Artificial Sequence
  Synthetic
auaugacgcaaacaaaauu

SEQ ID NO: 667763 - RNA, 20 nt, Artificial Sequence
  Synthetic
aauaugacgcaaacaaaauu

SEQ ID NO: 667764 - RNA, 21 nt, Artificial Sequence
  Synthetic
uaauaugacgcaaacaaaauu

SEQ ID NO: 667765 - RNA, 22 nt, Artificial Sequence
  Synthetic
uuaauaugacgcaaacaaaauu

SEQ ID NO: 667766 - RNA, 23 nt, Artificial Sequence
  Synthetic
cuuaauaugacgcaaacaaaauu

SEQ ID NO: 667767 - RNA, 24 nt, Artificial Sequence
  Synthetic
acuuaauaugacgcaaacaaaauu

SEQ ID NO: 667768 - RNA, 18 nt, Artificial Sequence
  Synthetic
auagacuaagacaaaauu

SEQ ID NO: 667769 - RNA, 19 nt, Artificial Sequence
  Synthetic
cauagacuaagacaaaauu

SEQ ID NO: 667770 - RNA, 20 nt, Artificial Sequence
  Synthetic
gcauagacuaagacaaaauu

SEQ ID NO: 667771 - RNA, 21 nt, Artificial Sequence
  Synthetic
agcauagacuaagacaaaauu

SEQ ID NO: 667772 - RNA, 22 nt, Artificial Sequence
  Synthetic
aagcauagacuaagacaaaauu

SEQ ID NO: 667773 - RNA, 23 nt, Artificial Sequence
  Synthetic
gaagcauagacuaagacaaaauu

SEQ ID NO: 667774 - RNA, 24 nt, Artificial Sequence
  Synthetic
ggaagcauagacuaagacaaaauu

SEQ ID NO: 667775 - RNA, 18 nt, Artificial Sequence
  Synthetic
ugcuauucuaccaaaauu

SEQ ID NO: 667776 - RNA, 19 nt, Artificial Sequence
  Synthetic
cugcuauucuaccaaaauu

SEQ ID NO: 667777 - RNA, 20 nt, Artificial Sequence
  Synthetic
acugcuauucuaccaaaauu

SEQ ID NO: 667778 - RNA, 21 nt, Artificial Sequence
  Synthetic
cacugcuauucuaccaaaauu

SEQ ID NO: 667779 - RNA, 22 nt, Artificial Sequence
  Synthetic
acacugcuauucuaccaaaauu

SEQ ID NO: 667780 - RNA, 23 nt, Artificial Sequence
  Synthetic
uacacugcuauucuaccaaaauu

SEQ ID NO: 667781 - RNA, 24 nt, Artificial Sequence
  Synthetic
auacacugcuauucuaccaaaauu

SEQ ID NO: 667782 - RNA, 18 nt, Artificial Sequence
  Synthetic
guuacucuaagcaaaauu

SEQ ID NO: 667783 - RNA, 19 nt, Artificial Sequence
  Synthetic
uguuacucuaagcaaaauu

SEQ ID NO: 667784 - RNA, 20 nt, Artificial Sequence
  Synthetic
cuguuacucuaagcaaaauu

SEQ ID NO: 667785 - RNA, 21 nt, Artificial Sequence
  Synthetic
ucuguuacucuaagcaaaauu

SEQ ID NO: 667786 - RNA, 22 nt, Artificial Sequence
  Synthetic
aucuguuacucuaagcaaaauu

SEQ ID NO: 667787 - RNA, 23 nt, Artificial Sequence
  Synthetic
aaucuguuacucuaagcaaaauu

SEQ ID NO: 667788 - RNA, 24 nt, Artificial Sequence
  Synthetic
aaaucuguuacucuaagcaaaauu

SEQ ID NO: 667789 - RNA, 18 nt, Artificial Sequence
  Synthetic
caucuccagugcaaaauu

SEQ ID NO: 667790 - RNA, 19 nt, Artificial Sequence
  Synthetic
ccaucuccagugcaaaauu

SEQ ID NO: 667791 - RNA, 20 nt, Artificial Sequence
  Synthetic
uccaucuccagugcaaaauu

SEQ ID NO: 667792 - RNA, 21 nt, Artificial Sequence
  Synthetic
cuccaucuccagugcaaaauu

SEQ ID NO: 667793 - RNA, 22 nt, Artificial Sequence
  Synthetic
acuccaucuccagugcaaaauu

SEQ ID NO: 667794 - RNA, 23 nt, Artificial Sequence
  Synthetic
uacuccaucuccagugcaaaauu

SEQ ID NO: 667795 - RNA, 24 nt, Artificial Sequence
  Synthetic
uuacuccaucuccagugcaaaauu

SEQ ID NO: 667796 - RNA, 18 nt, Artificial Sequence
  Synthetic
aauaucuaaaucaaaauu

SEQ ID NO: 667797 - RNA, 19 nt, Artificial Sequence
  Synthetic
uaauaucuaaaucaaaauu

SEQ ID NO: 667798 - RNA, 20 nt, Artificial Sequence
  Synthetic
auaauaucuaaaucaaaauu

SEQ ID NO: 667799 - RNA, 21 nt, Artificial Sequence
  Synthetic
uauaauaucuaaaucaaaauu

SEQ ID NO: 667800 - RNA, 22 nt, Artificial Sequence
  Synthetic
uuauaauaucuaaaucaaaauu

SEQ ID NO: 667801 - RNA, 23 nt, Artificial Sequence
  Synthetic
uuuauaauaucuaaaucaaaauu

SEQ ID NO: 667802 - RNA, 24 nt, Artificial Sequence
  Synthetic
guuuauaauaucuaaaucaaaauu

SEQ ID NO: 667803 - RNA, 18 nt, Artificial Sequence
  Synthetic
ggaauaugaaucaaaauu

SEQ ID NO: 667804 - RNA, 19 nt, Artificial Sequence
  Synthetic
uggaauaugaaucaaaauu

SEQ ID NO: 667805 - RNA, 20 nt, Artificial Sequence
  Synthetic
auggaauaugaaucaaaauu

SEQ ID NO: 667806 - RNA, 21 nt, Artificial Sequence
  Synthetic
uauggaauaugaaucaaaauu

SEQ ID NO: 667807 - RNA, 22 nt, Artificial Sequence
  Synthetic
uuauggaauaugaaucaaaauu

SEQ ID NO: 667808 - RNA, 23 nt, Artificial Sequence
  Synthetic
guuauggaauaugaaucaaaauu

SEQ ID NO: 667809 - RNA, 24 nt, Artificial Sequence
  Synthetic
uguuauggaauaugaaucaaaauu

SEQ ID NO: 667810 - RNA, 18 nt, Artificial Sequence
  Synthetic
auaaacuaccucaaaauu

SEQ ID NO: 667811 - RNA, 19 nt, Artificial Sequence
  Synthetic
gauaaacuaccucaaaauu

SEQ ID NO: 667812 - RNA, 20 nt, Artificial Sequence
  Synthetic
agauaaacuaccucaaaauu

SEQ ID NO: 667813 - RNA, 21 nt, Artificial Sequence
  Synthetic
aagauaaacuaccucaaaauu

SEQ ID NO: 667814 - RNA, 22 nt, Artificial Sequence
  Synthetic
aaagauaaacuaccucaaaauu

SEQ ID NO: 667815 - RNA, 23 nt, Artificial Sequence
  Synthetic
gaaagauaaacuaccucaaaauu

SEQ ID NO: 667816 - RNA, 24 nt, Artificial Sequence
  Synthetic
ugaaagauaaacuaccucaaaauu

SEQ ID NO: 667817 - RNA, 18 nt, Artificial Sequence
  Synthetic
cuauuuucagucaaaauu

SEQ ID NO: 667818 - RNA, 19 nt, Artificial Sequence
  Synthetic
ccuauuuucagucaaaauu

SEQ ID NO: 667819 - RNA, 20 nt, Artificial Sequence
  Synthetic
gccuauuuucagucaaaauu

SEQ ID NO: 667820 - RNA, 21 nt, Artificial Sequence
  Synthetic
ugccuauuuucagucaaaauu

SEQ ID NO: 667821 - RNA, 22 nt, Artificial Sequence
  Synthetic
uugccuauuuucagucaaaauu

SEQ ID NO: 667822 - RNA, 23 nt, Artificial Sequence
  Synthetic
cuugccuauuuucagucaaaauu

SEQ ID NO: 667823 - RNA, 24 nt, Artificial Sequence
  Synthetic
ucuugccuauuuucagucaaaauu

SEQ ID NO: 667824 - RNA, 18 nt, Artificial Sequence
  Synthetic
ugauguccugucaaaauu

SEQ ID NO: 667825 - RNA, 19 nt, Artificial Sequence
  Synthetic
augauguccugucaaaauu

SEQ ID NO: 667826 - RNA, 20 nt, Artificial Sequence
  Synthetic
aaugauguccugucaaaauu

SEQ ID NO: 667827 - RNA, 21 nt, Artificial Sequence
  Synthetic
caaugauguccugucaaaauu

SEQ ID NO: 667828 - RNA, 22 nt, Artificial Sequence
  Synthetic
ucaaugauguccugucaaaauu

SEQ ID NO: 667829 - RNA, 23 nt, Artificial Sequence
  Synthetic
uucaaugauguccugucaaaauu

SEQ ID NO: 667830 - RNA, 24 nt, Artificial Sequence
  Synthetic
cuucaaugauguccugucaaaauu

SEQ ID NO: 667831 - RNA, 18 nt, Artificial Sequence
  Synthetic
aauaggguauucaaaauu

SEQ ID NO: 667832 - RNA, 19 nt, Artificial Sequence
  Synthetic
aaauaggguauucaaaauu

SEQ ID NO: 667833 - RNA, 20 nt, Artificial Sequence
  Synthetic
aaaauaggguauucaaaauu

SEQ ID NO: 667834 - RNA, 21 nt, Artificial Sequence
  Synthetic
uaaaauaggguauucaaaauu

SEQ ID NO: 667835 - RNA, 22 nt, Artificial Sequence
  Synthetic
uuaaaauaggguauucaaaauu

SEQ ID NO: 667836 - RNA, 23 nt, Artificial Sequence
  Synthetic
uuuaaaauaggguauucaaaauu

SEQ ID NO: 667837 - RNA, 24 nt, Artificial Sequence
  Synthetic
auuuaaaauaggguauucaaaauu

SEQ ID NO: 667838 - RNA, 18 nt, Artificial Sequence
  Synthetic
uaauacauguucaaaauu

SEQ ID NO: 667839 - RNA, 19 nt, Artificial Sequence
  Synthetic
auaauacauguucaaaauu

SEQ ID NO: 667840 - RNA, 20 nt, Artificial Sequence
  Synthetic
aauaauacauguucaaaauu

SEQ ID NO: 667841 - RNA, 21 nt, Artificial Sequence
  Synthetic
aaauaauacauguucaaaauu

SEQ ID NO: 667842 - RNA, 22 nt, Artificial Sequence
  Synthetic
gaaauaauacauguucaaaauu

SEQ ID NO: 667843 - RNA, 23 nt, Artificial Sequence
  Synthetic
ugaaauaauacauguucaaaauu

SEQ ID NO: 667844 - RNA, 24 nt, Artificial Sequence
  Synthetic
uugaaauaauacauguucaaaauu

SEQ ID NO: 667845 - RNA, 18 nt, Artificial Sequence
  Synthetic
uuagacuuacagaaaauu

SEQ ID NO: 667846 - RNA, 19 nt, Artificial Sequence
  Synthetic
auuagacuuacagaaaauu

SEQ ID NO: 667847 - RNA, 20 nt, Artificial Sequence
  Synthetic
uauuagacuuacagaaaauu

SEQ ID NO: 667848 - RNA, 21 nt, Artificial Sequence
  Synthetic
guauuagacuuacagaaaauu

SEQ ID NO: 667849 - RNA, 22 nt, Artificial Sequence
  Synthetic
uguauuagacuuacagaaaauu

SEQ ID NO: 667850 - RNA, 23 nt, Artificial Sequence
  Synthetic
auguauuagacuuacagaaaauu

SEQ ID NO: 667851 - RNA, 24 nt, Artificial Sequence
  Synthetic
cauguauuagacuuacagaaaauu

SEQ ID NO: 667852 - RNA, 18 nt, Artificial Sequence
  Synthetic
agcauaauguagaaaauu

SEQ ID NO: 667853 - RNA, 19 nt, Artificial Sequence
  Synthetic
uagcauaauguagaaaauu

SEQ ID NO: 667854 - RNA, 20 nt, Artificial Sequence
  Synthetic
uuagcauaauguagaaaauu

SEQ ID NO: 667855 - RNA, 21 nt, Artificial Sequence
  Synthetic
auuagcauaauguagaaaauu

SEQ ID NO: 667856 - RNA, 22 nt, Artificial Sequence
  Synthetic
aauuagcauaauguagaaaauu

SEQ ID NO: 667857 - RNA, 23 nt, Artificial Sequence
  Synthetic
uaauuagcauaauguagaaaauu

SEQ ID NO: 667858 - RNA, 24 nt, Artificial Sequence
  Synthetic
auaauuagcauaauguagaaaauu

SEQ ID NO: 667859 - RNA, 18 nt, Artificial Sequence
  Synthetic
aaaaucugagggaaaauu

SEQ ID NO: 667860 - RNA, 19 nt, Artificial Sequence
  Synthetic
gaaaaucugagggaaaauu

SEQ ID NO: 667861 - RNA, 20 nt, Artificial Sequence
  Synthetic
agaaaaucugagggaaaauu

SEQ ID NO: 667862 - RNA, 21 nt, Artificial Sequence
  Synthetic
gagaaaaucugagggaaaauu

SEQ ID NO: 667863 - RNA, 22 nt, Artificial Sequence
  Synthetic
agagaaaaucugagggaaaauu

SEQ ID NO: 667864 - RNA, 23 nt, Artificial Sequence
  Synthetic
aagagaaaaucugagggaaaauu

SEQ ID NO: 667865 - RNA, 24 nt, Artificial Sequence
  Synthetic
gaagagaaaaucugagggaaaauu

SEQ ID NO: 667866 - RNA, 18 nt, Artificial Sequence
  Synthetic
uaauuauuauggaaaauu

SEQ ID NO: 667867 - RNA, 19 nt, Artificial Sequence
  Synthetic
cuaauuauuauggaaaauu

SEQ ID NO: 667868 - RNA, 20 nt, Artificial Sequence
  Synthetic
acuaauuauuauggaaaauu

SEQ ID NO: 667869 - RNA, 21 nt, Artificial Sequence
  Synthetic
cacuaauuauuauggaaaauu

SEQ ID NO: 667870 - RNA, 22 nt, Artificial Sequence
  Synthetic
gcacuaauuauuauggaaaauu

SEQ ID NO: 667871 - RNA, 23 nt, Artificial Sequence
  Synthetic
agcacuaauuauuauggaaaauu

SEQ ID NO: 667872 - RNA, 24 nt, Artificial Sequence
  Synthetic
aagcacuaauuauuauggaaaauu

SEQ ID NO: 667873 - RNA, 18 nt, Artificial Sequence
  Synthetic
acgacaccccugaaaauu

SEQ ID NO: 667874 - RNA, 19 nt, Artificial Sequence
  Synthetic
aacgacaccccugaaaauu

SEQ ID NO: 667875 - RNA, 20 nt, Artificial Sequence
  Synthetic
uaacgacaccccugaaaauu

SEQ ID NO: 667876 - RNA, 21 nt, Artificial Sequence
  Synthetic
auaacgacaccccugaaaauu

SEQ ID NO: 667877 - RNA, 22 nt, Artificial Sequence
  Synthetic
gauaacgacaccccugaaaauu

SEQ ID NO: 667878 - RNA, 23 nt, Artificial Sequence
  Synthetic
ugauaacgacaccccugaaaauu

SEQ ID NO: 667879 - RNA, 24 nt, Artificial Sequence
  Synthetic
gugauaacgacaccccugaaaauu

SEQ ID NO: 667880 - RNA, 18 nt, Artificial Sequence
  Synthetic
cugaugcaugugaaaauu

SEQ ID NO: 667881 - RNA, 19 nt, Artificial Sequence
  Synthetic
ucugaugcaugugaaaauu

SEQ ID NO: 667882 - RNA, 20 nt, Artificial Sequence
  Synthetic
aucugaugcaugugaaaauu

SEQ ID NO: 667883 - RNA, 21 nt, Artificial Sequence
  Synthetic
uaucugaugcaugugaaaauu

SEQ ID NO: 667884 - RNA, 22 nt, Artificial Sequence
  Synthetic
uuaucugaugcaugugaaaauu

SEQ ID NO: 667885 - RNA, 23 nt, Artificial Sequence
  Synthetic
auuaucugaugcaugugaaaauu

SEQ ID NO: 667886 - RNA, 24 nt, Artificial Sequence
  Synthetic
aauuaucugaugcaugugaaaauu

SEQ ID NO: 667887 - RNA, 18 nt, Artificial Sequence
  Synthetic
cuacagcuauugaaaauu

SEQ ID NO: 667888 - RNA, 19 nt, Artificial Sequence
  Synthetic
ucuacagcuauugaaaauu

SEQ ID NO: 667889 - RNA, 20 nt, Artificial Sequence
  Synthetic
uucuacagcuauugaaaauu

SEQ ID NO: 667890 - RNA, 21 nt, Artificial Sequence
  Synthetic
cuucuacagcuauugaaaauu

SEQ ID NO: 667891 - RNA, 22 nt, Artificial Sequence
  Synthetic
ccuucuacagcuauugaaaauu

SEQ ID NO: 667892 - RNA, 23 nt, Artificial Sequence
  Synthetic
accuucuacagcuauugaaaauu

SEQ ID NO: 667893 - RNA, 24 nt, Artificial Sequence
  Synthetic
uaccuucuacagcuauugaaaauu

SEQ ID NO: 667894 - RNA, 18 nt, Artificial Sequence
  Synthetic
uuuauaaaccauaaaauu

SEQ ID NO: 667895 - RNA, 19 nt, Artificial Sequence
  Synthetic
guuuauaaaccauaaaauu

SEQ ID NO: 667896 - RNA, 20 nt, Artificial Sequence
  Synthetic
gguuuauaaaccauaaaauu

SEQ ID NO: 667897 - RNA, 21 nt, Artificial Sequence
  Synthetic
ugguuuauaaaccauaaaauu

SEQ ID NO: 667898 - RNA, 22 nt, Artificial Sequence
  Synthetic
gugguuuauaaaccauaaaauu

SEQ ID NO: 667899 - RNA, 23 nt, Artificial Sequence
  Synthetic
agugguuuauaaaccauaaaauu

SEQ ID NO: 667900 - RNA, 24 nt, Artificial Sequence
  Synthetic
uagugguuuauaaaccauaaaauu

SEQ ID NO: 667901 - RNA, 18 nt, Artificial Sequence
  Synthetic
aucagaguucauaaaauu

SEQ ID NO: 667902 - RNA, 19 nt, Artificial Sequence
  Synthetic
aaucagaguucauaaaauu

SEQ ID NO: 667903 - RNA, 20 nt, Artificial Sequence
  Synthetic
gaaucagaguucauaaaauu

SEQ ID NO: 667904 - RNA, 21 nt, Artificial Sequence
  Synthetic
ugaaucagaguucauaaaauu

SEQ ID NO: 667905 - RNA, 22 nt, Artificial Sequence
  Synthetic
cugaaucagaguucauaaaauu

SEQ ID NO: 667906 - RNA, 23 nt, Artificial Sequence
  Synthetic
gcugaaucagaguucauaaaauu

SEQ ID NO: 667907 - RNA, 24 nt, Artificial Sequence
  Synthetic
ggcugaaucagaguucauaaaauu

SEQ ID NO: 667908 - RNA, 18 nt, Artificial Sequence
  Synthetic
gagaaaucauauaaaauu

SEQ ID NO: 667909 - RNA, 19 nt, Artificial Sequence
  Synthetic
ugagaaaucauauaaaauu

SEQ ID NO: 667910 - RNA, 20 nt, Artificial Sequence
  Synthetic
augagaaaucauauaaaauu

SEQ ID NO: 667911 - RNA, 21 nt, Artificial Sequence
  Synthetic
caugagaaaucauauaaaauu

SEQ ID NO: 667912 - RNA, 22 nt, Artificial Sequence
  Synthetic
acaugagaaaucauauaaaauu

SEQ ID NO: 667913 - RNA, 23 nt, Artificial Sequence
  Synthetic
uacaugagaaaucauauaaaauu

SEQ ID NO: 667914 - RNA, 24 nt, Artificial Sequence
  Synthetic
uuacaugagaaaucauauaaaauu

SEQ ID NO: 667915 - RNA, 18 nt, Artificial Sequence
  Synthetic
uccuucauguauaaaauu

SEQ ID NO: 667916 - RNA, 19 nt, Artificial Sequence
  Synthetic
uuccuucauguauaaaauu

SEQ ID NO: 667917 - RNA, 20 nt, Artificial Sequence
  Synthetic
uuuccuucauguauaaaauu

SEQ ID NO: 667918 - RNA, 21 nt, Artificial Sequence
  Synthetic
auuuccuucauguauaaaauu

SEQ ID NO: 667919 - RNA, 22 nt, Artificial Sequence
  Synthetic
cauuuccuucauguauaaaauu

SEQ ID NO: 667920 - RNA, 23 nt, Artificial Sequence
  Synthetic
acauuuccuucauguauaaaauu

SEQ ID NO: 667921 - RNA, 24 nt, Artificial Sequence
  Synthetic
cacauuuccuucauguauaaaauu

SEQ ID NO: 667922 - RNA, 18 nt, Artificial Sequence
  Synthetic
agaaacaaaccuaaaauu

SEQ ID NO: 667923 - RNA, 19 nt, Artificial Sequence
  Synthetic
aagaaacaaaccuaaaauu

SEQ ID NO: 667924 - RNA, 20 nt, Artificial Sequence
  Synthetic
gaagaaacaaaccuaaaauu

SEQ ID NO: 667925 - RNA, 21 nt, Artificial Sequence
  Synthetic
ggaagaaacaaaccuaaaauu

SEQ ID NO: 667926 - RNA, 22 nt, Artificial Sequence
  Synthetic
uggaagaaacaaaccuaaaauu

SEQ ID NO: 667927 - RNA, 23 nt, Artificial Sequence
  Synthetic
auggaagaaacaaaccuaaaauu

SEQ ID NO: 667928 - RNA, 24 nt, Artificial Sequence
  Synthetic
uauggaagaaacaaaccuaaaauu

SEQ ID NO: 667929 - RNA, 18 nt, Artificial Sequence
  Synthetic
ugaaagauggcuaaaauu

SEQ ID NO: 667930 - RNA, 19 nt, Artificial Sequence
  Synthetic
uugaaagauggcuaaaauu

SEQ ID NO: 667931 - RNA, 20 nt, Artificial Sequence
  Synthetic
auugaaagauggcuaaaauu

SEQ ID NO: 667932 - RNA, 21 nt, Artificial Sequence
  Synthetic
aauugaaagauggcuaaaauu

SEQ ID NO: 667933 - RNA, 22 nt, Artificial Sequence
  Synthetic
caauugaaagauggcuaaaauu

SEQ ID NO: 667934 - RNA, 23 nt, Artificial Sequence
  Synthetic
acaauugaaagauggcuaaaauu

SEQ ID NO: 667935 - RNA, 24 nt, Artificial Sequence
  Synthetic
aacaauugaaagauggcuaaaauu

SEQ ID NO: 667936 - RNA, 18 nt, Artificial Sequence
  Synthetic
uccaacuuuaguaaaauu

SEQ ID NO: 667937 - RNA, 19 nt, Artificial Sequence
  Synthetic
auccaacuuuaguaaaauu

SEQ ID NO: 667938 - RNA, 20 nt, Artificial Sequence
  Synthetic
gauccaacuuuaguaaaauu

SEQ ID NO: 667939 - RNA, 21 nt, Artificial Sequence
  Synthetic
ggauccaacuuuaguaaaauu

SEQ ID NO: 667940 - RNA, 22 nt, Artificial Sequence
  Synthetic
aggauccaacuuuaguaaaauu

SEQ ID NO: 667941 - RNA, 23 nt, Artificial Sequence
  Synthetic
uaggauccaacuuuaguaaaauu

SEQ ID NO: 667942 - RNA, 24 nt, Artificial Sequence
  Synthetic
uuaggauccaacuuuaguaaaauu

SEQ ID NO: 667943 - RNA, 18 nt, Artificial Sequence
  Synthetic
guguacaaagguaaaauu

SEQ ID NO: 667944 - RNA, 19 nt, Artificial Sequence
  Synthetic
aguguacaaagguaaaauu

SEQ ID NO: 667945 - RNA, 20 nt, Artificial Sequence
  Synthetic
aaguguacaaagguaaaauu

SEQ ID NO: 667946 - RNA, 21 nt, Artificial Sequence
  Synthetic
gaaguguacaaagguaaaauu

SEQ ID NO: 667947 - RNA, 22 nt, Artificial Sequence
  Synthetic
cgaaguguacaaagguaaaauu

SEQ ID NO: 667948 - RNA, 23 nt, Artificial Sequence
  Synthetic
ccgaaguguacaaagguaaaauu

SEQ ID NO: 667949 - RNA, 24 nt, Artificial Sequence
  Synthetic
accgaaguguacaaagguaaaauu

SEQ ID NO: 667950 - RNA, 18 nt, Artificial Sequence
  Synthetic
ccugaucccuguaaaauu

SEQ ID NO: 667951 - RNA, 19 nt, Artificial Sequence
  Synthetic
gccugaucccuguaaaauu

SEQ ID NO: 667952 - RNA, 20 nt, Artificial Sequence
  Synthetic
ugccugaucccuguaaaauu

SEQ ID NO: 667953 - RNA, 21 nt, Artificial Sequence
  Synthetic
cugccugaucccuguaaaauu

SEQ ID NO: 667954 - RNA, 22 nt, Artificial Sequence
  Synthetic
ccugccugaucccuguaaaauu

SEQ ID NO: 667955 - RNA, 23 nt, Artificial Sequence
  Synthetic
cccugccugaucccuguaaaauu

SEQ ID NO: 667956 - RNA, 24 nt, Artificial Sequence
  Synthetic
ucccugccugaucccuguaaaauu

SEQ ID NO: 667957 - RNA, 18 nt, Artificial Sequence
  Synthetic
cacauaucuauuaaaauu

SEQ ID NO: 667958 - RNA, 19 nt, Artificial Sequence
  Synthetic
ccacauaucuauuaaaauu

SEQ ID NO: 667959 - RNA, 20 nt, Artificial Sequence
  Synthetic
cccacauaucuauuaaaauu

SEQ ID NO: 667960 - RNA, 21 nt, Artificial Sequence
  Synthetic
acccacauaucuauuaaaauu

SEQ ID NO: 667961 - RNA, 22 nt, Artificial Sequence
  Synthetic
aacccacauaucuauuaaaauu

SEQ ID NO: 667962 - RNA, 23 nt, Artificial Sequence
  Synthetic
aaacccacauaucuauuaaaauu

SEQ ID NO: 667963 - RNA, 24 nt, Artificial Sequence
  Synthetic
gaaacccacauaucuauuaaaauu

SEQ ID NO: 667964 - RNA, 18 nt, Artificial Sequence
  Synthetic
aguauauauguuaaaauu

SEQ ID NO: 667965 - RNA, 19 nt, Artificial Sequence
  Synthetic
aaguauauauguuaaaauu

SEQ ID NO: 667966 - RNA, 20 nt, Artificial Sequence
  Synthetic
gaaguauauauguuaaaauu

SEQ ID NO: 667967 - RNA, 21 nt, Artificial Sequence
  Synthetic
agaaguauauauguuaaaauu

SEQ ID NO: 667968 - RNA, 22 nt, Artificial Sequence
  Synthetic
uagaaguauauauguuaaaauu

SEQ ID NO: 667969 - RNA, 23 nt, Artificial Sequence
  Synthetic
auagaaguauauauguuaaaauu

SEQ ID NO: 667970 - RNA, 24 nt, Artificial Sequence
  Synthetic
uauagaaguauauauguuaaaauu

SEQ ID NO: 667971 - RNA, 18 nt, Artificial Sequence
  Synthetic
aggcucuaaaaacaaauu

SEQ ID NO: 667972 - RNA, 19 nt, Artificial Sequence
  Synthetic
uaggcucuaaaaacaaauu

SEQ ID NO: 667973 - RNA, 20 nt, Artificial Sequence
  Synthetic
uuaggcucuaaaaacaaauu

SEQ ID NO: 667974 - RNA, 21 nt, Artificial Sequence
  Synthetic
auuaggcucuaaaaacaaauu

SEQ ID NO: 667975 - RNA, 22 nt, Artificial Sequence
  Synthetic
aauuaggcucuaaaaacaaauu

SEQ ID NO: 667976 - RNA, 23 nt, Artificial Sequence
  Synthetic
gaauuaggcucuaaaaacaaauu

SEQ ID NO: 667977 - RNA, 24 nt, Artificial Sequence
  Synthetic
agaauuaggcucuaaaaacaaauu

SEQ ID NO: 667978 - RNA, 18 nt, Artificial Sequence
  Synthetic
aaagcccuagcacaaauu

SEQ ID NO: 667979 - RNA, 19 nt, Artificial Sequence
  Synthetic
uaaagcccuagcacaaauu

SEQ ID NO: 667980 - RNA, 20 nt, Artificial Sequence
  Synthetic
uuaaagcccuagcacaaauu

SEQ ID NO: 667981 - RNA, 21 nt, Artificial Sequence
  Synthetic
auuaaagcccuagcacaaauu

SEQ ID NO: 667982 - RNA, 22 nt, Artificial Sequence
  Synthetic
uauuaaagcccuagcacaaauu

SEQ ID NO: 667983 - RNA, 23 nt, Artificial Sequence
  Synthetic
auauuaaagcccuagcacaaauu

SEQ ID NO: 667984 - RNA, 24 nt, Artificial Sequence
  Synthetic
gauauuaaagcccuagcacaaauu

SEQ ID NO: 667985 - RNA, 18 nt, Artificial Sequence
  Synthetic
aucucuggaauacaaauu

SEQ ID NO: 667986 - RNA, 19 nt, Artificial Sequence
  Synthetic
gaucucuggaauacaaauu

SEQ ID NO: 667987 - RNA, 20 nt, Artificial Sequence
  Synthetic
agaucucuggaauacaaauu

SEQ ID NO: 667988 - RNA, 21 nt, Artificial Sequence
  Synthetic
cagaucucuggaauacaaauu

SEQ ID NO: 667989 - RNA, 22 nt, Artificial Sequence
  Synthetic
gcagaucucuggaauacaaauu

SEQ ID NO: 667990 - RNA, 23 nt, Artificial Sequence
  Synthetic
ggcagaucucuggaauacaaauu

SEQ ID NO: 667991 - RNA, 24 nt, Artificial Sequence
  Synthetic
aggcagaucucuggaauacaaauu

SEQ ID NO: 667992 - RNA, 18 nt, Artificial Sequence
  Synthetic
uucucuauacuacaaauu

SEQ ID NO: 667993 - RNA, 19 nt, Artificial Sequence
  Synthetic
uuucucuauacuacaaauu

SEQ ID NO: 667994 - RNA, 20 nt, Artificial Sequence
  Synthetic
auuucucuauacuacaaauu

SEQ ID NO: 667995 - RNA, 21 nt, Artificial Sequence
  Synthetic
uauuucucuauacuacaaauu

SEQ ID NO: 667996 - RNA, 22 nt, Artificial Sequence
  Synthetic
uuauuucucuauacuacaaauu

SEQ ID NO: 667997 - RNA, 23 nt, Artificial Sequence
  Synthetic
auuauuucucuauacuacaaauu

SEQ ID NO: 667998 - RNA, 24 nt, Artificial Sequence
  Synthetic
aauuauuucucuauacuacaaauu

SEQ ID NO: 667999 - RNA, 18 nt, Artificial Sequence
  Synthetic
uguugagaauuacaaauu

SEQ ID NO: 668000 - RNA, 19 nt, Artificial Sequence
  Synthetic
auguugagaauuacaaauu

SEQ ID NO: 668001 - RNA, 20 nt, Artificial Sequence
  Synthetic
aauguugagaauuacaaauu

SEQ ID NO: 668002 - RNA, 21 nt, Artificial Sequence
  Synthetic
aaauguugagaauuacaaauu

SEQ ID NO: 668003 - RNA, 22 nt, Artificial Sequence
  Synthetic
caaauguugagaauuacaaauu

SEQ ID NO: 668004 - RNA, 23 nt, Artificial Sequence
  Synthetic
ucaaauguugagaauuacaaauu

SEQ ID NO: 668005 - RNA, 24 nt, Artificial Sequence
  Synthetic
uucaaauguugagaauuacaaauu

SEQ ID NO: 668006 - RNA, 18 nt, Artificial Sequence
  Synthetic
ccucauuucugccaaauu

SEQ ID NO: 668007 - RNA, 19 nt, Artificial Sequence
  Synthetic
cccucauuucugccaaauu

SEQ ID NO: 668008 - RNA, 20 nt, Artificial Sequence
  Synthetic
ucccucauuucugccaaauu

SEQ ID NO: 668009 - RNA, 21 nt, Artificial Sequence
  Synthetic
gucccucauuucugccaaauu

SEQ ID NO: 668010 - RNA, 22 nt, Artificial Sequence
  Synthetic
agucccucauuucugccaaauu

SEQ ID NO: 668011 - RNA, 23 nt, Artificial Sequence
  Synthetic
gagucccucauuucugccaaauu

SEQ ID NO: 668012 - RNA, 24 nt, Artificial Sequence
  Synthetic
ugagucccucauuucugccaaauu

SEQ ID NO: 668013 - RNA, 18 nt, Artificial Sequence
  Synthetic
auguucuuaaagcaaauu

SEQ ID NO: 668014 - RNA, 19 nt, Artificial Sequence
  Synthetic
aauguucuuaaagcaaauu

SEQ ID NO: 668015 - RNA, 20 nt, Artificial Sequence
  Synthetic
aaauguucuuaaagcaaauu

SEQ ID NO: 668016 - RNA, 21 nt, Artificial Sequence
  Synthetic
aaaauguucuuaaagcaaauu

SEQ ID NO: 668017 - RNA, 22 nt, Artificial Sequence
  Synthetic
caaaauguucuuaaagcaaauu

SEQ ID NO: 668018 - RNA, 23 nt, Artificial Sequence
  Synthetic
gcaaaauguucuuaaagcaaauu

SEQ ID NO: 668019 - RNA, 24 nt, Artificial Sequence
  Synthetic
ugcaaaauguucuuaaagcaaauu

SEQ ID NO: 668020 - RNA, 18 nt, Artificial Sequence
  Synthetic
cuacuuggcaggcaaauu

SEQ ID NO: 668021 - RNA, 19 nt, Artificial Sequence
  Synthetic
acuacuuggcaggcaaauu

SEQ ID NO: 668022 - RNA, 20 nt, Artificial Sequence
  Synthetic
uacuacuuggcaggcaaauu

SEQ ID NO: 668023 - RNA, 21 nt, Artificial Sequence
  Synthetic
auacuacuuggcaggcaaauu

SEQ ID NO: 668024 - RNA, 22 nt, Artificial Sequence
  Synthetic
aauacuacuuggcaggcaaauu

SEQ ID NO: 668025 - RNA, 23 nt, Artificial Sequence
  Synthetic
aaauacuacuuggcaggcaaauu

SEQ ID NO: 668026 - RNA, 24 nt, Artificial Sequence
  Synthetic
uaaauacuacuuggcaggcaaauu

SEQ ID NO: 668027 - RNA, 18 nt, Artificial Sequence
  Synthetic
uugcuagaaaugcaaauu

SEQ ID NO: 668028 - RNA, 19 nt, Artificial Sequence
  Synthetic
cuugcuagaaaugcaaauu

SEQ ID NO: 668029 - RNA, 20 nt, Artificial Sequence
  Synthetic
acuugcuagaaaugcaaauu

SEQ ID NO: 668030 - RNA, 21 nt, Artificial Sequence
  Synthetic
aacuugcuagaaaugcaaauu

SEQ ID NO: 668031 - RNA, 22 nt, Artificial Sequence
  Synthetic
uaacuugcuagaaaugcaaauu

SEQ ID NO: 668032 - RNA, 23 nt, Artificial Sequence
  Synthetic
guaacuugcuagaaaugcaaauu

SEQ ID NO: 668033 - RNA, 24 nt, Artificial Sequence
  Synthetic
gguaacuugcuagaaaugcaaauu

SEQ ID NO: 668034 - RNA, 18 nt, Artificial Sequence
  Synthetic
uuuuuccccuugcaaauu

SEQ ID NO: 668035 - RNA, 19 nt, Artificial Sequence
  Synthetic
auuuuuccccuugcaaauu

SEQ ID NO: 668036 - RNA, 20 nt, Artificial Sequence
  Synthetic
cauuuuuccccuugcaaauu

SEQ ID NO: 668037 - RNA, 21 nt, Artificial Sequence
  Synthetic
acauuuuuccccuugcaaauu

SEQ ID NO: 668038 - RNA, 22 nt, Artificial Sequence
  Synthetic
cacauuuuuccccuugcaaauu

SEQ ID NO: 668039 - RNA, 23 nt, Artificial Sequence
  Synthetic
acacauuuuuccccuugcaaauu

SEQ ID NO: 668040 - RNA, 24 nt, Artificial Sequence
  Synthetic
cacacauuuuuccccuugcaaauu

SEQ ID NO: 668041 - RNA, 18 nt, Artificial Sequence
  Synthetic
aauaaaauacaucaaauu

SEQ ID NO: 668042 - RNA, 19 nt, Artificial Sequence
  Synthetic
aaauaaaauacaucaaauu

SEQ ID NO: 668043 - RNA, 20 nt, Artificial Sequence
  Synthetic
gaaauaaaauacaucaaauu

SEQ ID NO: 668044 - RNA, 21 nt, Artificial Sequence
  Synthetic
agaaauaaaauacaucaaauu

SEQ ID NO: 668045 - RNA, 22 nt, Artificial Sequence
  Synthetic
gagaaauaaaauacaucaaauu

SEQ ID NO: 668046 - RNA, 23 nt, Artificial Sequence
  Synthetic
agagaaauaaaauacaucaaauu

SEQ ID NO: 668047 - RNA, 24 nt, Artificial Sequence
  Synthetic
aagagaaauaaaauacaucaaauu

SEQ ID NO: 668048 - RNA, 18 nt, Artificial Sequence
  Synthetic
guaucaggaccucaaauu

SEQ ID NO: 668049 - RNA, 19 nt, Artificial Sequence
  Synthetic
uguaucaggaccucaaauu

SEQ ID NO: 668050 - RNA, 20 nt, Artificial Sequence
  Synthetic
auguaucaggaccucaaauu

SEQ ID NO: 668051 - RNA, 21 nt, Artificial Sequence
  Synthetic
uauguaucaggaccucaaauu

SEQ ID NO: 668052 - RNA, 22 nt, Artificial Sequence
  Synthetic
auauguaucaggaccucaaauu

SEQ ID NO: 668053 - RNA, 23 nt, Artificial Sequence
  Synthetic
uauauguaucaggaccucaaauu

SEQ ID NO: 668054 - RNA, 24 nt, Artificial Sequence
  Synthetic
auauauguaucaggaccucaaauu

SEQ ID NO: 668055 - RNA, 18 nt, Artificial Sequence
  Synthetic
aucacguauccucaaauu

SEQ ID NO: 668056 - RNA, 19 nt, Artificial Sequence
  Synthetic
aaucacguauccucaaauu

SEQ ID NO: 668057 - RNA, 20 nt, Artificial Sequence
  Synthetic
uaaucacguauccucaaauu

SEQ ID NO: 668058 - RNA, 21 nt, Artificial Sequence
  Synthetic
auaaucacguauccucaaauu

SEQ ID NO: 668059 - RNA, 22 nt, Artificial Sequence
  Synthetic
cauaaucacguauccucaaauu

SEQ ID NO: 668060 - RNA, 23 nt, Artificial Sequence
  Synthetic
acauaaucacguauccucaaauu

SEQ ID NO: 668061 - RNA, 24 nt, Artificial Sequence
  Synthetic
cacauaaucacguauccucaaauu

SEQ ID NO: 668062 - RNA, 18 nt, Artificial Sequence
  Synthetic
uucaagucuggucaaauu

SEQ ID NO: 668063 - RNA, 19 nt, Artificial Sequence
  Synthetic
cuucaagucuggucaaauu

SEQ ID NO: 668064 - RNA, 20 nt, Artificial Sequence
  Synthetic
ccuucaagucuggucaaauu

SEQ ID NO: 668065 - RNA, 21 nt, Artificial Sequence
  Synthetic
uccuucaagucuggucaaauu

SEQ ID NO: 668066 - RNA, 22 nt, Artificial Sequence
  Synthetic
guccuucaagucuggucaaauu

SEQ ID NO: 668067 - RNA, 23 nt, Artificial Sequence
  Synthetic
aguccuucaagucuggucaaauu

SEQ ID NO: 668068 - RNA, 24 nt, Artificial Sequence
  Synthetic
aaguccuucaagucuggucaaauu

SEQ ID NO: 668069 - RNA, 18 nt, Artificial Sequence
  Synthetic
cucccaaugugucaaauu

SEQ ID NO: 668070 - RNA, 19 nt, Artificial Sequence
  Synthetic
ucucccaaugugucaaauu

SEQ ID NO: 668071 - RNA, 20 nt, Artificial Sequence
  Synthetic
uucucccaaugugucaaauu

SEQ ID NO: 668072 - RNA, 21 nt, Artificial Sequence
  Synthetic
cuucucccaaugugucaaauu

SEQ ID NO: 668073 - RNA, 22 nt, Artificial Sequence
  Synthetic
gcuucucccaaugugucaaauu

SEQ ID NO: 668074 - RNA, 23 nt, Artificial Sequence
  Synthetic
agcuucucccaaugugucaaauu

SEQ ID NO: 668075 - RNA, 24 nt, Artificial Sequence
  Synthetic
cagcuucucccaaugugucaaauu

SEQ ID NO: 668076 - RNA, 18 nt, Artificial Sequence
  Synthetic
gaagaaauaauucaaauu

SEQ ID NO: 668077 - RNA, 19 nt, Artificial Sequence
  Synthetic
agaagaaauaauucaaauu

SEQ ID NO: 668078 - RNA, 20 nt, Artificial Sequence
  Synthetic
cagaagaaauaauucaaauu

SEQ ID NO: 668079 - RNA, 21 nt, Artificial Sequence
  Synthetic
ucagaagaaauaauucaaauu

SEQ ID NO: 668080 - RNA, 22 nt, Artificial Sequence
  Synthetic
aucagaagaaauaauucaaauu

SEQ ID NO: 668081 - RNA, 23 nt, Artificial Sequence
  Synthetic
uaucagaagaaauaauucaaauu

SEQ ID NO: 668082 - RNA, 24 nt, Artificial Sequence
  Synthetic
uuaucagaagaaauaauucaaauu

SEQ ID NO: 668083 - RNA, 18 nt, Artificial Sequence
  Synthetic
uccagacgacuucaaauu

SEQ ID NO: 668084 - RNA, 19 nt, Artificial Sequence
  Synthetic
cuccagacgacuucaaauu

SEQ ID NO: 668085 - RNA, 20 nt, Artificial Sequence
  Synthetic
ccuccagacgacuucaaauu

SEQ ID NO: 668086 - RNA, 21 nt, Artificial Sequence
  Synthetic
gccuccagacgacuucaaauu

SEQ ID NO: 668087 - RNA, 22 nt, Artificial Sequence
  Synthetic
ugccuccagacgacuucaaauu

SEQ ID NO: 668088 - RNA, 23 nt, Artificial Sequence
  Synthetic
cugccuccagacgacuucaaauu

SEQ ID NO: 668089 - RNA, 24 nt, Artificial Sequence
  Synthetic
gcugccuccagacgacuucaaauu

SEQ ID NO: 668090 - RNA, 18 nt, Artificial Sequence
  Synthetic
gauguuuaucuucaaauu

SEQ ID NO: 668091 - RNA, 19 nt, Artificial Sequence
  Synthetic
ggauguuuaucuucaaauu

SEQ ID NO: 668092 - RNA, 20 nt, Artificial Sequence
  Synthetic
aggauguuuaucuucaaauu

SEQ ID NO: 668093 - RNA, 21 nt, Artificial Sequence
  Synthetic
gaggauguuuaucuucaaauu

SEQ ID NO: 668094 - RNA, 22 nt, Artificial Sequence
  Synthetic
ugaggauguuuaucuucaaauu

SEQ ID NO: 668095 - RNA, 23 nt, Artificial Sequence
  Synthetic
augaggauguuuaucuucaaauu

SEQ ID NO: 668096 - RNA, 24 nt, Artificial Sequence
  Synthetic
caugaggauguuuaucuucaaauu

SEQ ID NO: 668097 - RNA, 18 nt, Artificial Sequence
  Synthetic
uguaggcaugaagaaauu

SEQ ID NO: 668098 - RNA, 19 nt, Artificial Sequence
  Synthetic
uuguaggcaugaagaaauu

SEQ ID NO: 668099 - RNA, 20 nt, Artificial Sequence
  Synthetic
uuuguaggcaugaagaaauu

SEQ ID NO: 668100 - RNA, 21 nt, Artificial Sequence
  Synthetic
guuuguaggcaugaagaaauu

SEQ ID NO: 668101 - RNA, 22 nt, Artificial Sequence
  Synthetic
aguuuguaggcaugaagaaauu

SEQ ID NO: 668102 - RNA, 23 nt, Artificial Sequence
  Synthetic
aaguuuguaggcaugaagaaauu

SEQ ID NO: 668103 - RNA, 24 nt, Artificial Sequence
  Synthetic
uaaguuuguaggcaugaagaaauu

SEQ ID NO: 668104 - RNA, 18 nt, Artificial Sequence
  Synthetic
ugggucuaugaagaaauu

SEQ ID NO: 668105 - RNA, 19 nt, Artificial Sequence
  Synthetic
cugggucuaugaagaaauu

SEQ ID NO: 668106 - RNA, 20 nt, Artificial Sequence
  Synthetic
acugggucuaugaagaaauu

SEQ ID NO: 668107 - RNA, 21 nt, Artificial Sequence
  Synthetic
cacugggucuaugaagaaauu

SEQ ID NO: 668108 - RNA, 22 nt, Artificial Sequence
  Synthetic
ccacugggucuaugaagaaauu

SEQ ID NO: 668109 - RNA, 23 nt, Artificial Sequence
  Synthetic
accacugggucuaugaagaaauu

SEQ ID NO: 668110 - RNA, 24 nt, Artificial Sequence
  Synthetic
gaccacugggucuaugaagaaauu

SEQ ID NO: 668111 - RNA, 18 nt, Artificial Sequence
  Synthetic
agggggagguaagaaauu

SEQ ID NO: 668112 - RNA, 19 nt, Artificial Sequence
  Synthetic
uagggggagguaagaaauu

SEQ ID NO: 668113 - RNA, 20 nt, Artificial Sequence
  Synthetic
auagggggagguaagaaauu

SEQ ID NO: 668114 - RNA, 21 nt, Artificial Sequence
  Synthetic
uauagggggagguaagaaauu

SEQ ID NO: 668115 - RNA, 22 nt, Artificial Sequence
  Synthetic
auauagggggagguaagaaauu

SEQ ID NO: 668116 - RNA, 23 nt, Artificial Sequence
  Synthetic
aauauagggggagguaagaaauu

SEQ ID NO: 668117 - RNA, 24 nt, Artificial Sequence
  Synthetic
gaauauagggggagguaagaaauu

SEQ ID NO: 668118 - RNA, 18 nt, Artificial Sequence
  Synthetic
cugucuaaaauagaaauu

SEQ ID NO: 668119 - RNA, 19 nt, Artificial Sequence
  Synthetic
acugucuaaaauagaaauu

SEQ ID NO: 668120 - RNA, 20 nt, Artificial Sequence
  Synthetic
aacugucuaaaauagaaauu

SEQ ID NO: 668121 - RNA, 21 nt, Artificial Sequence
  Synthetic
aaacugucuaaaauagaaauu

SEQ ID NO: 668122 - RNA, 22 nt, Artificial Sequence
  Synthetic
caaacugucuaaaauagaaauu

SEQ ID NO: 668123 - RNA, 23 nt, Artificial Sequence
  Synthetic
acaaacugucuaaaauagaaauu

SEQ ID NO: 668124 - RNA, 24 nt, Artificial Sequence
  Synthetic
aacaaacugucuaaaauagaaauu

SEQ ID NO: 668125 - RNA, 18 nt, Artificial Sequence
  Synthetic
uccaguuuacuagaaauu

SEQ ID NO: 668126 - RNA, 19 nt, Artificial Sequence
  Synthetic
uuccaguuuacuagaaauu

SEQ ID NO: 668127 - RNA, 20 nt, Artificial Sequence
  Synthetic
cuuccaguuuacuagaaauu

SEQ ID NO: 668128 - RNA, 21 nt, Artificial Sequence
  Synthetic
acuuccaguuuacuagaaauu

SEQ ID NO: 668129 - RNA, 22 nt, Artificial Sequence
  Synthetic
aacuuccaguuuacuagaaauu

SEQ ID NO: 668130 - RNA, 23 nt, Artificial Sequence
  Synthetic
uaacuuccaguuuacuagaaauu

SEQ ID NO: 668131 - RNA, 24 nt, Artificial Sequence
  Synthetic
cuaacuuccaguuuacuagaaauu

SEQ ID NO: 668132 - RNA, 18 nt, Artificial Sequence
  Synthetic
agaggcauccuagaaauu

SEQ ID NO: 668133 - RNA, 19 nt, Artificial Sequence
  Synthetic
aagaggcauccuagaaauu

SEQ ID NO: 668134 - RNA, 20 nt, Artificial Sequence
  Synthetic
aaagaggcauccuagaaauu

SEQ ID NO: 668135 - RNA, 21 nt, Artificial Sequence
  Synthetic
aaaagaggcauccuagaaauu

SEQ ID NO: 668136 - RNA, 22 nt, Artificial Sequence
  Synthetic
aaaaagaggcauccuagaaauu

SEQ ID NO: 668137 - RNA, 23 nt, Artificial Sequence
  Synthetic
aaaaaagaggcauccuagaaauu

SEQ ID NO: 668138 - RNA, 24 nt, Artificial Sequence
  Synthetic
aaaaaaagaggcauccuagaaauu

SEQ ID NO: 668139 - RNA, 18 nt, Artificial Sequence
  Synthetic
uccucagaaguagaaauu

SEQ ID NO: 668140 - RNA, 19 nt, Artificial Sequence
  Synthetic
uuccucagaaguagaaauu

SEQ ID NO: 668141 - RNA, 20 nt, Artificial Sequence
  Synthetic
auuccucagaaguagaaauu

SEQ ID NO: 668142 - RNA, 21 nt, Artificial Sequence
  Synthetic
cauuccucagaaguagaaauu

SEQ ID NO: 668143 - RNA, 22 nt, Artificial Sequence
  Synthetic
ucauuccucagaaguagaaauu

SEQ ID NO: 668144 - RNA, 23 nt, Artificial Sequence
  Synthetic
cucauuccucagaaguagaaauu

SEQ ID NO: 668145 - RNA, 24 nt, Artificial Sequence
  Synthetic
ucucauuccucagaaguagaaauu

SEQ ID NO: 668146 - RNA, 18 nt, Artificial Sequence
  Synthetic
aauaacauguuagaaauu

SEQ ID NO: 668147 - RNA, 19 nt, Artificial Sequence
  Synthetic
aaauaacauguuagaaauu

SEQ ID NO: 668148 - RNA, 20 nt, Artificial Sequence
  Synthetic
gaaauaacauguuagaaauu

SEQ ID NO: 668149 - RNA, 21 nt, Artificial Sequence
  Synthetic
agaaauaacauguuagaaauu

SEQ ID NO: 668150 - RNA, 22 nt, Artificial Sequence
  Synthetic
cagaaauaacauguuagaaauu

SEQ ID NO: 668151 - RNA, 23 nt, Artificial Sequence
  Synthetic
gcagaaauaacauguuagaaauu

SEQ ID NO: 668152 - RNA, 24 nt, Artificial Sequence
  Synthetic
ggcagaaauaacauguuagaaauu

SEQ ID NO: 668153 - RNA, 18 nt, Artificial Sequence
  Synthetic
aggaucagaaacgaaauu

SEQ ID NO: 668154 - RNA, 19 nt, Artificial Sequence
  Synthetic
aaggaucagaaacgaaauu

SEQ ID NO: 668155 - RNA, 20 nt, Artificial Sequence
  Synthetic
uaaggaucagaaacgaaauu

SEQ ID NO: 668156 - RNA, 21 nt, Artificial Sequence
  Synthetic
auaaggaucagaaacgaaauu

SEQ ID NO: 668157 - RNA, 22 nt, Artificial Sequence
  Synthetic
gauaaggaucagaaacgaaauu

SEQ ID NO: 668158 - RNA, 23 nt, Artificial Sequence
  Synthetic
agauaaggaucagaaacgaaauu

SEQ ID NO: 668159 - RNA, 24 nt, Artificial Sequence
  Synthetic
aagauaaggaucagaaacgaaauu

SEQ ID NO: 668160 - RNA, 18 nt, Artificial Sequence
  Synthetic
uacaauuggaaggaaauu

SEQ ID NO: 668161 - RNA, 19 nt, Artificial Sequence
  Synthetic
cuacaauuggaaggaaauu

SEQ ID NO: 668162 - RNA, 20 nt, Artificial Sequence
  Synthetic
ucuacaauuggaaggaaauu

SEQ ID NO: 668163 - RNA, 21 nt, Artificial Sequence
  Synthetic
uucuacaauuggaaggaaauu

SEQ ID NO: 668164 - RNA, 22 nt, Artificial Sequence
  Synthetic
auucuacaauuggaaggaaauu

SEQ ID NO: 668165 - RNA, 23 nt, Artificial Sequence
  Synthetic
aauucuacaauuggaaggaaauu

SEQ ID NO: 668166 - RNA, 24 nt, Artificial Sequence
  Synthetic
aaauucuacaauuggaaggaaauu

SEQ ID NO: 668167 - RNA, 18 nt, Artificial Sequence
  Synthetic
auggggauuaaggaaauu

SEQ ID NO: 668168 - RNA, 19 nt, Artificial Sequence
  Synthetic
aauggggauuaaggaaauu

SEQ ID NO: 668169 - RNA, 20 nt, Artificial Sequence
  Synthetic
gaauggggauuaaggaaauu

SEQ ID NO: 668170 - RNA, 21 nt, Artificial Sequence
  Synthetic
agaauggggauuaaggaaauu

SEQ ID NO: 668171 - RNA, 22 nt, Artificial Sequence
  Synthetic
aagaauggggauuaaggaaauu

SEQ ID NO: 668172 - RNA, 23 nt, Artificial Sequence
  Synthetic
caagaauggggauuaaggaaauu

SEQ ID NO: 668173 - RNA, 24 nt, Artificial Sequence
  Synthetic
ucaagaauggggauuaaggaaauu

SEQ ID NO: 668174 - RNA, 18 nt, Artificial Sequence
  Synthetic
uaaaagguuaaggaaauu

SEQ ID NO: 668175 - RNA, 19 nt, Artificial Sequence
  Synthetic
uuaaaagguuaaggaaauu

SEQ ID NO: 668176 - RNA, 20 nt, Artificial Sequence
  Synthetic
uuuaaaagguuaaggaaauu

SEQ ID NO: 668177 - RNA, 21 nt, Artificial Sequence
  Synthetic
auuuaaaagguuaaggaaauu

SEQ ID NO: 668178 - RNA, 22 nt, Artificial Sequence
  Synthetic
cauuuaaaagguuaaggaaauu

SEQ ID NO: 668179 - RNA, 23 nt, Artificial Sequence
  Synthetic
acauuuaaaagguuaaggaaauu

SEQ ID NO: 668180 - RNA, 24 nt, Artificial Sequence
  Synthetic
aacauuuaaaagguuaaggaaauu

SEQ ID NO: 668181 - RNA, 18 nt, Artificial Sequence
  Synthetic
acauaaaaacaggaaauu

SEQ ID NO: 668182 - RNA, 19 nt, Artificial Sequence
  Synthetic
aacauaaaaacaggaaauu

SEQ ID NO: 668183 - RNA, 20 nt, Artificial Sequence
  Synthetic
caacauaaaaacaggaaauu

SEQ ID NO: 668184 - RNA, 21 nt, Artificial Sequence
  Synthetic
gcaacauaaaaacaggaaauu

SEQ ID NO: 668185 - RNA, 22 nt, Artificial Sequence
  Synthetic
agcaacauaaaaacaggaaauu

SEQ ID NO: 668186 - RNA, 23 nt, Artificial Sequence
  Synthetic
uagcaacauaaaaacaggaaauu

SEQ ID NO: 668187 - RNA, 24 nt, Artificial Sequence
  Synthetic
cuagcaacauaaaaacaggaaauu

SEQ ID NO: 668188 - RNA, 18 nt, Artificial Sequence
  Synthetic
uuuuacagccaggaaauu

SEQ ID NO: 668189 - RNA, 19 nt, Artificial Sequence
  Synthetic
cuuuuacagccaggaaauu

SEQ ID NO: 668190 - RNA, 20 nt, Artificial Sequence
  Synthetic
acuuuuacagccaggaaauu

SEQ ID NO: 668191 - RNA, 21 nt, Artificial Sequence
  Synthetic
cacuuuuacagccaggaaauu

SEQ ID NO: 668192 - RNA, 22 nt, Artificial Sequence
  Synthetic
ccacuuuuacagccaggaaauu

SEQ ID NO: 668193 - RNA, 23 nt, Artificial Sequence
  Synthetic
accacuuuuacagccaggaaauu

SEQ ID NO: 668194 - RNA, 24 nt, Artificial Sequence
  Synthetic
gaccacuuuuacagccaggaaauu

SEQ ID NO: 668195 - RNA, 18 nt, Artificial Sequence
  Synthetic
auauacacagaggaaauu

SEQ ID NO: 668196 - RNA, 19 nt, Artificial Sequence
  Synthetic
uauauacacagaggaaauu

SEQ ID NO: 668197 - RNA, 20 nt, Artificial Sequence
  Synthetic
auauauacacagaggaaauu

SEQ ID NO: 668198 - RNA, 21 nt, Artificial Sequence
  Synthetic
gauauauacacagaggaaauu

SEQ ID NO: 668199 - RNA, 22 nt, Artificial Sequence
  Synthetic
ugauauauacacagaggaaauu

SEQ ID NO: 668200 - RNA, 23 nt, Artificial Sequence
  Synthetic
gugauauauacacagaggaaauu

SEQ ID NO: 668201 - RNA, 24 nt, Artificial Sequence
  Synthetic
ggugauauauacacagaggaaauu

SEQ ID NO: 668202 - RNA, 18 nt, Artificial Sequence
  Synthetic
aauaaauguugggaaauu

SEQ ID NO: 668203 - RNA, 19 nt, Artificial Sequence
  Synthetic
aaauaaauguugggaaauu

SEQ ID NO: 668204 - RNA, 20 nt, Artificial Sequence
  Synthetic
aaaauaaauguugggaaauu

SEQ ID NO: 668205 - RNA, 21 nt, Artificial Sequence
  Synthetic
uaaaauaaauguugggaaauu

SEQ ID NO: 668206 - RNA, 22 nt, Artificial Sequence
  Synthetic
auaaaauaaauguugggaaauu

SEQ ID NO: 668207 - RNA, 23 nt, Artificial Sequence
  Synthetic
aauaaaauaaauguugggaaauu

SEQ ID NO: 668208 - RNA, 24 nt, Artificial Sequence
  Synthetic
uaauaaaauaaauguugggaaauu

SEQ ID NO: 668209 - RNA, 18 nt, Artificial Sequence
  Synthetic
uacaaacacauggaaauu

SEQ ID NO: 668210 - RNA, 19 nt, Artificial Sequence
  Synthetic
auacaaacacauggaaauu

SEQ ID NO: 668211 - RNA, 20 nt, Artificial Sequence
  Synthetic
uauacaaacacauggaaauu

SEQ ID NO: 668212 - RNA, 21 nt, Artificial Sequence
  Synthetic
cuauacaaacacauggaaauu

SEQ ID NO: 668213 - RNA, 22 nt, Artificial Sequence
  Synthetic
acuauacaaacacauggaaauu

SEQ ID NO: 668214 - RNA, 23 nt, Artificial Sequence
  Synthetic
aacuauacaaacacauggaaauu

SEQ ID NO: 668215 - RNA, 24 nt, Artificial Sequence
  Synthetic
aaacuauacaaacacauggaaauu

SEQ ID NO: 668216 - RNA, 18 nt, Artificial Sequence
  Synthetic
acagaaauaguggaaauu

SEQ ID NO: 668217 - RNA, 19 nt, Artificial Sequence
  Synthetic
aacagaaauaguggaaauu

SEQ ID NO: 668218 - RNA, 20 nt, Artificial Sequence
  Synthetic
aaacagaaauaguggaaauu

SEQ ID NO: 668219 - RNA, 21 nt, Artificial Sequence
  Synthetic
uaaacagaaauaguggaaauu

SEQ ID NO: 668220 - RNA, 22 nt, Artificial Sequence
  Synthetic
auaaacagaaauaguggaaauu

SEQ ID NO: 668221 - RNA, 23 nt, Artificial Sequence
  Synthetic
cauaaacagaaauaguggaaauu

SEQ ID NO: 668222 - RNA, 24 nt, Artificial Sequence
  Synthetic
acauaaacagaaauaguggaaauu

SEQ ID NO: 668223 - RNA, 18 nt, Artificial Sequence
  Synthetic
uacaggaaguuggaaauu

SEQ ID NO: 668224 - RNA, 19 nt, Artificial Sequence
  Synthetic
guacaggaaguuggaaauu

SEQ ID NO: 668225 - RNA, 20 nt, Artificial Sequence
  Synthetic
aguacaggaaguuggaaauu

SEQ ID NO: 668226 - RNA, 21 nt, Artificial Sequence
  Synthetic
aaguacaggaaguuggaaauu

SEQ ID NO: 668227 - RNA, 22 nt, Artificial Sequence
  Synthetic
caaguacaggaaguuggaaauu

SEQ ID NO: 668228 - RNA, 23 nt, Artificial Sequence
  Synthetic
gcaaguacaggaaguuggaaauu

SEQ ID NO: 668229 - RNA, 24 nt, Artificial Sequence
  Synthetic
ugcaaguacaggaaguuggaaauu

SEQ ID NO: 668230 - RNA, 18 nt, Artificial Sequence
  Synthetic
auguaauaaaaugaaauu

SEQ ID NO: 668231 - RNA, 19 nt, Artificial Sequence
  Synthetic
gauguaauaaaaugaaauu

SEQ ID NO: 668232 - RNA, 20 nt, Artificial Sequence
  Synthetic
agauguaauaaaaugaaauu

SEQ ID NO: 668233 - RNA, 21 nt, Artificial Sequence
  Synthetic
aagauguaauaaaaugaaauu

SEQ ID NO: 668234 - RNA, 22 nt, Artificial Sequence
  Synthetic
aaagauguaauaaaaugaaauu

SEQ ID NO: 668235 - RNA, 23 nt, Artificial Sequence
  Synthetic
aaaagauguaauaaaaugaaauu

SEQ ID NO: 668236 - RNA, 24 nt, Artificial Sequence
  Synthetic
gaaaagauguaauaaaaugaaauu

SEQ ID NO: 668237 - RNA, 18 nt, Artificial Sequence
  Synthetic
uggaguuaccaugaaauu

SEQ ID NO: 668238 - RNA, 19 nt, Artificial Sequence
  Synthetic
uuggaguuaccaugaaauu

SEQ ID NO: 668239 - RNA, 20 nt, Artificial Sequence
  Synthetic
cuuggaguuaccaugaaauu

SEQ ID NO: 668240 - RNA, 21 nt, Artificial Sequence
  Synthetic
ccuuggaguuaccaugaaauu

SEQ ID NO: 668241 - RNA, 22 nt, Artificial Sequence
  Synthetic
accuuggaguuaccaugaaauu

SEQ ID NO: 668242 - RNA, 23 nt, Artificial Sequence
  Synthetic
uaccuuggaguuaccaugaaauu

SEQ ID NO: 668243 - RNA, 24 nt, Artificial Sequence
  Synthetic
cuaccuuggaguuaccaugaaauu

SEQ ID NO: 668244 - RNA, 18 nt, Artificial Sequence
  Synthetic
acauuguugccugaaauu

SEQ ID NO: 668245 - RNA, 19 nt, Artificial Sequence
  Synthetic
cacauuguugccugaaauu

SEQ ID NO: 668246 - RNA, 20 nt, Artificial Sequence
  Synthetic
ucacauuguugccugaaauu

SEQ ID NO: 668247 - RNA, 21 nt, Artificial Sequence
  Synthetic
uucacauuguugccugaaauu

SEQ ID NO: 668248 - RNA, 22 nt, Artificial Sequence
  Synthetic
uuucacauuguugccugaaauu

SEQ ID NO: 668249 - RNA, 23 nt, Artificial Sequence
  Synthetic
uuuucacauuguugccugaaauu

SEQ ID NO: 668250 - RNA, 24 nt, Artificial Sequence
  Synthetic
auuuucacauuguugccugaaauu

SEQ ID NO: 668251 - RNA, 18 nt, Artificial Sequence
  Synthetic
uggaaucagugugaaauu

SEQ ID NO: 668252 - RNA, 19 nt, Artificial Sequence
  Synthetic
cuggaaucagugugaaauu

SEQ ID NO: 668253 - RNA, 20 nt, Artificial Sequence
  Synthetic
acuggaaucagugugaaauu

SEQ ID NO: 668254 - RNA, 21 nt, Artificial Sequence
  Synthetic
cacuggaaucagugugaaauu

SEQ ID NO: 668255 - RNA, 22 nt, Artificial Sequence
  Synthetic
ucacuggaaucagugugaaauu

SEQ ID NO: 668256 - RNA, 23 nt, Artificial Sequence
  Synthetic
gucacuggaaucagugugaaauu

SEQ ID NO: 668257 - RNA, 24 nt, Artificial Sequence
  Synthetic
ugucacuggaaucagugugaaauu

SEQ ID NO: 668258 - RNA, 18 nt, Artificial Sequence
  Synthetic
aaccagcaucuugaaauu

SEQ ID NO: 668259 - RNA, 19 nt, Artificial Sequence
  Synthetic
gaaccagcaucuugaaauu

SEQ ID NO: 668260 - RNA, 20 nt, Artificial Sequence
  Synthetic
ggaaccagcaucuugaaauu

SEQ ID NO: 668261 - RNA, 21 nt, Artificial Sequence
  Synthetic
gggaaccagcaucuugaaauu

SEQ ID NO: 668262 - RNA, 22 nt, Artificial Sequence
  Synthetic
agggaaccagcaucuugaaauu

SEQ ID NO: 668263 - RNA, 23 nt, Artificial Sequence
  Synthetic
cagggaaccagcaucuugaaauu

SEQ ID NO: 668264 - RNA, 24 nt, Artificial Sequence
  Synthetic
ccagggaaccagcaucuugaaauu

SEQ ID NO: 668265 - RNA, 18 nt, Artificial Sequence
  Synthetic
gaaagcagucuugaaauu

SEQ ID NO: 668266 - RNA, 19 nt, Artificial Sequence
  Synthetic
agaaagcagucuugaaauu

SEQ ID NO: 668267 - RNA, 20 nt, Artificial Sequence
  Synthetic
uagaaagcagucuugaaauu

SEQ ID NO: 668268 - RNA, 21 nt, Artificial Sequence
  Synthetic
uuagaaagcagucuugaaauu

SEQ ID NO: 668269 - RNA, 22 nt, Artificial Sequence
  Synthetic
auuagaaagcagucuugaaauu

SEQ ID NO: 668270 - RNA, 23 nt, Artificial Sequence
  Synthetic
aauuagaaagcagucuugaaauu

SEQ ID NO: 668271 - RNA, 24 nt, Artificial Sequence
  Synthetic
caauuagaaagcagucuugaaauu

SEQ ID NO: 668272 - RNA, 18 nt, Artificial Sequence
  Synthetic
aagauuuuuuuugaaauu

SEQ ID NO: 668273 - RNA, 19 nt, Artificial Sequence
  Synthetic
gaagauuuuuuuugaaauu

SEQ ID NO: 668274 - RNA, 20 nt, Artificial Sequence
  Synthetic
ugaagauuuuuuuugaaauu

SEQ ID NO: 668275 - RNA, 21 nt, Artificial Sequence
  Synthetic
augaagauuuuuuuugaaauu

SEQ ID NO: 668276 - RNA, 22 nt, Artificial Sequence
  Synthetic
uaugaagauuuuuuuugaaauu

SEQ ID NO: 668277 - RNA, 23 nt, Artificial Sequence
  Synthetic
guaugaagauuuuuuuugaaauu

SEQ ID NO: 668278 - RNA, 24 nt, Artificial Sequence
  Synthetic
aguaugaagauuuuuuuugaaauu

SEQ ID NO: 668279 - RNA, 18 nt, Artificial Sequence
  Synthetic
auaauugcugaauaaauu

SEQ ID NO: 668280 - RNA, 19 nt, Artificial Sequence
  Synthetic
aauaauugcugaauaaauu

SEQ ID NO: 668281 - RNA, 20 nt, Artificial Sequence
  Synthetic
aaauaauugcugaauaaauu

SEQ ID NO: 668282 - RNA, 21 nt, Artificial Sequence
  Synthetic
uaaauaauugcugaauaaauu

SEQ ID NO: 668283 - RNA, 22 nt, Artificial Sequence
  Synthetic
guaaauaauugcugaauaaauu

SEQ ID NO: 668284 - RNA, 23 nt, Artificial Sequence
  Synthetic
gguaaauaauugcugaauaaauu

SEQ ID NO: 668285 - RNA, 24 nt, Artificial Sequence
  Synthetic
ugguaaauaauugcugaauaaauu

SEQ ID NO: 668286 - RNA, 18 nt, Artificial Sequence
  Synthetic
acaaggaaauaauaaauu

SEQ ID NO: 668287 - RNA, 19 nt, Artificial Sequence
  Synthetic
cacaaggaaauaauaaauu

SEQ ID NO: 668288 - RNA, 20 nt, Artificial Sequence
  Synthetic
ccacaaggaaauaauaaauu

SEQ ID NO: 668289 - RNA, 21 nt, Artificial Sequence
  Synthetic
uccacaaggaaauaauaaauu

SEQ ID NO: 668290 - RNA, 22 nt, Artificial Sequence
  Synthetic
uuccacaaggaaauaauaaauu

SEQ ID NO: 668291 - RNA, 23 nt, Artificial Sequence
  Synthetic
cuuccacaaggaaauaauaaauu

SEQ ID NO: 668292 - RNA, 24 nt, Artificial Sequence
  Synthetic
ccuuccacaaggaaauaauaaauu

SEQ ID NO: 668293 - RNA, 18 nt, Artificial Sequence
  Synthetic
acaaagucuuaauaaauu

SEQ ID NO: 668294 - RNA, 19 nt, Artificial Sequence
  Synthetic
cacaaagucuuaauaaauu

SEQ ID NO: 668295 - RNA, 20 nt, Artificial Sequence
  Synthetic
ccacaaagucuuaauaaauu

SEQ ID NO: 668296 - RNA, 21 nt, Artificial Sequence
  Synthetic
accacaaagucuuaauaaauu

SEQ ID NO: 668297 - RNA, 22 nt, Artificial Sequence
  Synthetic
gaccacaaagucuuaauaaauu

SEQ ID NO: 668298 - RNA, 23 nt, Artificial Sequence
  Synthetic
agaccacaaagucuuaauaaauu

SEQ ID NO: 668299 - RNA, 24 nt, Artificial Sequence
  Synthetic
gagaccacaaagucuuaauaaauu

SEQ ID NO: 668300 - RNA, 18 nt, Artificial Sequence
  Synthetic
aagcaagaacgauaaauu

SEQ ID NO: 668301 - RNA, 19 nt, Artificial Sequence
  Synthetic
gaagcaagaacgauaaauu

SEQ ID NO: 668302 - RNA, 20 nt, Artificial Sequence
  Synthetic
ugaagcaagaacgauaaauu

SEQ ID NO: 668303 - RNA, 21 nt, Artificial Sequence
  Synthetic
augaagcaagaacgauaaauu

SEQ ID NO: 668304 - RNA, 22 nt, Artificial Sequence
  Synthetic
gaugaagcaagaacgauaaauu

SEQ ID NO: 668305 - RNA, 23 nt, Artificial Sequence
  Synthetic
ugaugaagcaagaacgauaaauu

SEQ ID NO: 668306 - RNA, 24 nt, Artificial Sequence
  Synthetic
augaugaagcaagaacgauaaauu

SEQ ID NO: 668307 - RNA, 18 nt, Artificial Sequence
  Synthetic
uucugcaggggauaaauu

SEQ ID NO: 668308 - RNA, 19 nt, Artificial Sequence
  Synthetic
uuucugcaggggauaaauu

SEQ ID NO: 668309 - RNA, 20 nt, Artificial Sequence
  Synthetic
auuucugcaggggauaaauu

SEQ ID NO: 668310 - RNA, 21 nt, Artificial Sequence
  Synthetic
aauuucugcaggggauaaauu

SEQ ID NO: 668311 - RNA, 22 nt, Artificial Sequence
  Synthetic
caauuucugcaggggauaaauu

SEQ ID NO: 668312 - RNA, 23 nt, Artificial Sequence
  Synthetic
ucaauuucugcaggggauaaauu

SEQ ID NO: 668313 - RNA, 24 nt, Artificial Sequence
  Synthetic
cucaauuucugcaggggauaaauu

SEQ ID NO: 668314 - RNA, 18 nt, Artificial Sequence
  Synthetic
gaaugguggugauaaauu

SEQ ID NO: 668315 - RNA, 19 nt, Artificial Sequence
  Synthetic
agaaugguggugauaaauu

SEQ ID NO: 668316 - RNA, 20 nt, Artificial Sequence
  Synthetic
cagaaugguggugauaaauu

SEQ ID NO: 668317 - RNA, 21 nt, Artificial Sequence
  Synthetic
ccagaaugguggugauaaauu

SEQ ID NO: 668318 - RNA, 22 nt, Artificial Sequence
  Synthetic
uccagaaugguggugauaaauu

SEQ ID NO: 668319 - RNA, 23 nt, Artificial Sequence
  Synthetic
uuccagaaugguggugauaaauu

SEQ ID NO: 668320 - RNA, 24 nt, Artificial Sequence
  Synthetic
guuccagaaugguggugauaaauu

SEQ ID NO: 668321 - RNA, 18 nt, Artificial Sequence
  Synthetic
uuuaaaaugugauaaauu

SEQ ID NO: 668322 - RNA, 19 nt, Artificial Sequence
  Synthetic
uuuuaaaaugugauaaauu

SEQ ID NO: 668323 - RNA, 20 nt, Artificial Sequence
  Synthetic
uuuuuaaaaugugauaaauu

SEQ ID NO: 668324 - RNA, 21 nt, Artificial Sequence
  Synthetic
auuuuuaaaaugugauaaauu

SEQ ID NO: 668325 - RNA, 22 nt, Artificial Sequence
  Synthetic
uauuuuuaaaaugugauaaauu

SEQ ID NO: 668326 - RNA, 23 nt, Artificial Sequence
  Synthetic
uuauuuuuaaaaugugauaaauu

SEQ ID NO: 668327 - RNA, 24 nt, Artificial Sequence
  Synthetic
guuauuuuuaaaaugugauaaauu

SEQ ID NO: 668328 - RNA, 18 nt, Artificial Sequence
  Synthetic
cauagcagaauauaaauu

SEQ ID NO: 668329 - RNA, 19 nt, Artificial Sequence
  Synthetic
acauagcagaauauaaauu

SEQ ID NO: 668330 - RNA, 20 nt, Artificial Sequence
  Synthetic
aacauagcagaauauaaauu

SEQ ID NO: 668331 - RNA, 21 nt, Artificial Sequence
  Synthetic
uaacauagcagaauauaaauu

SEQ ID NO: 668332 - RNA, 22 nt, Artificial Sequence
  Synthetic
uuaacauagcagaauauaaauu

SEQ ID NO: 668333 - RNA, 23 nt, Artificial Sequence
  Synthetic
guuaacauagcagaauauaaauu

SEQ ID NO: 668334 - RNA, 24 nt, Artificial Sequence
  Synthetic
gguuaacauagcagaauauaaauu

SEQ ID NO: 668335 - RNA, 18 nt, Artificial Sequence
  Synthetic
aauugcuauauauaaauu

SEQ ID NO: 668336 - RNA, 19 nt, Artificial Sequence
  Synthetic
gaauugcuauauauaaauu

SEQ ID NO: 668337 - RNA, 20 nt, Artificial Sequence
  Synthetic
ugaauugcuauauauaaauu

SEQ ID NO: 668338 - RNA, 21 nt, Artificial Sequence
  Synthetic
uugaauugcuauauauaaauu

SEQ ID NO: 668339 - RNA, 22 nt, Artificial Sequence
  Synthetic
uuugaauugcuauauauaaauu

SEQ ID NO: 668340 - RNA, 23 nt, Artificial Sequence
  Synthetic
auuugaauugcuauauauaaauu

SEQ ID NO: 668341 - RNA, 24 nt, Artificial Sequence
  Synthetic
cauuugaauugcuauauauaaauu

SEQ ID NO: 668342 - RNA, 18 nt, Artificial Sequence
  Synthetic
ucagcaucccacuaaauu

SEQ ID NO: 668343 - RNA, 19 nt, Artificial Sequence
  Synthetic
uucagcaucccacuaaauu

SEQ ID NO: 668344 - RNA, 20 nt, Artificial Sequence
  Synthetic
uuucagcaucccacuaaauu

SEQ ID NO: 668345 - RNA, 21 nt, Artificial Sequence
  Synthetic
auuucagcaucccacuaaauu

SEQ ID NO: 668346 - RNA, 22 nt, Artificial Sequence
  Synthetic
uauuucagcaucccacuaaauu

SEQ ID NO: 668347 - RNA, 23 nt, Artificial Sequence
  Synthetic
cuauuucagcaucccacuaaauu

SEQ ID NO: 668348 - RNA, 24 nt, Artificial Sequence
  Synthetic
ucuauuucagcaucccacuaaauu

SEQ ID NO: 668349 - RNA, 18 nt, Artificial Sequence
  Synthetic
ucuuaaauguacuaaauu

SEQ ID NO: 668350 - RNA, 19 nt, Artificial Sequence
  Synthetic
cucuuaaauguacuaaauu

SEQ ID NO: 668351 - RNA, 20 nt, Artificial Sequence
  Synthetic
ucucuuaaauguacuaaauu

SEQ ID NO: 668352 - RNA, 21 nt, Artificial Sequence
  Synthetic
gucucuuaaauguacuaaauu

SEQ ID NO: 668353 - RNA, 22 nt, Artificial Sequence
  Synthetic
ugucucuuaaauguacuaaauu

SEQ ID NO: 668354 - RNA, 23 nt, Artificial Sequence
  Synthetic
uugucucuuaaauguacuaaauu

SEQ ID NO: 668355 - RNA, 24 nt, Artificial Sequence
  Synthetic
cuugucucuuaaauguacuaaauu

SEQ ID NO: 668356 - RNA, 18 nt, Artificial Sequence
  Synthetic
gcaaagcuuaccuaaauu

SEQ ID NO: 668357 - RNA, 19 nt, Artificial Sequence
  Synthetic
ugcaaagcuuaccuaaauu

SEQ ID NO: 668358 - RNA, 20 nt, Artificial Sequence
  Synthetic
uugcaaagcuuaccuaaauu

SEQ ID NO: 668359 - RNA, 21 nt, Artificial Sequence
  Synthetic
cuugcaaagcuuaccuaaauu

SEQ ID NO: 668360 - RNA, 22 nt, Artificial Sequence
  Synthetic
ccuugcaaagcuuaccuaaauu

SEQ ID NO: 668361 - RNA, 23 nt, Artificial Sequence
  Synthetic
accuugcaaagcuuaccuaaauu

SEQ ID NO: 668362 - RNA, 24 nt, Artificial Sequence
  Synthetic
gaccuugcaaagcuuaccuaaauu

SEQ ID NO: 668363 - RNA, 18 nt, Artificial Sequence
  Synthetic
gugccauuucccuaaauu

SEQ ID NO: 668364 - RNA, 19 nt, Artificial Sequence
  Synthetic
ugugccauuucccuaaauu

SEQ ID NO: 668365 - RNA, 20 nt, Artificial Sequence
  Synthetic
uugugccauuucccuaaauu

SEQ ID NO: 668366 - RNA, 21 nt, Artificial Sequence
  Synthetic
cuugugccauuucccuaaauu

SEQ ID NO: 668367 - RNA, 22 nt, Artificial Sequence
  Synthetic
ucuugugccauuucccuaaauu

SEQ ID NO: 668368 - RNA, 23 nt, Artificial Sequence
  Synthetic
cucuugugccauuucccuaaauu

SEQ ID NO: 668369 - RNA, 24 nt, Artificial Sequence
  Synthetic
ucucuugugccauuucccuaaauu

SEQ ID NO: 668370 - RNA, 18 nt, Artificial Sequence
  Synthetic
gccuagauugucuaaauu

SEQ ID NO: 668371 - RNA, 19 nt, Artificial Sequence
  Synthetic
agccuagauugucuaaauu

SEQ ID NO: 668372 - RNA, 20 nt, Artificial Sequence
  Synthetic
aagccuagauugucuaaauu

SEQ ID NO: 668373 - RNA, 21 nt, Artificial Sequence
  Synthetic
uaagccuagauugucuaaauu

SEQ ID NO: 668374 - RNA, 22 nt, Artificial Sequence
  Synthetic
auaagccuagauugucuaaauu

SEQ ID NO: 668375 - RNA, 23 nt, Artificial Sequence
  Synthetic
gauaagccuagauugucuaaauu

SEQ ID NO: 668376 - RNA, 24 nt, Artificial Sequence
  Synthetic
ggauaagccuagauugucuaaauu

SEQ ID NO: 668377 - RNA, 18 nt, Artificial Sequence
  Synthetic
acguuaaacaaguaaauu

SEQ ID NO: 668378 - RNA, 19 nt, Artificial Sequence
  Synthetic
aacguuaaacaaguaaauu

SEQ ID NO: 668379 - RNA, 20 nt, Artificial Sequence
  Synthetic
aaacguuaaacaaguaaauu

SEQ ID NO: 668380 - RNA, 21 nt, Artificial Sequence
  Synthetic
caaacguuaaacaaguaaauu

SEQ ID NO: 668381 - RNA, 22 nt, Artificial Sequence
  Synthetic
gcaaacguuaaacaaguaaauu

SEQ ID NO: 668382 - RNA, 23 nt, Artificial Sequence
  Synthetic
ggcaaacguuaaacaaguaaauu

SEQ ID NO: 668383 - RNA, 24 nt, Artificial Sequence
  Synthetic
uggcaaacguuaaacaaguaaauu

SEQ ID NO: 668384 - RNA, 18 nt, Artificial Sequence
  Synthetic
gacuagaaagaguaaauu

SEQ ID NO: 668385 - RNA, 19 nt, Artificial Sequence
  Synthetic
agacuagaaagaguaaauu

SEQ ID NO: 668386 - RNA, 20 nt, Artificial Sequence
  Synthetic
aagacuagaaagaguaaauu

SEQ ID NO: 668387 - RNA, 21 nt, Artificial Sequence
  Synthetic
aaagacuagaaagaguaaauu

SEQ ID NO: 668388 - RNA, 22 nt, Artificial Sequence
  Synthetic
gaaagacuagaaagaguaaauu

SEQ ID NO: 668389 - RNA, 23 nt, Artificial Sequence
  Synthetic
ggaaagacuagaaagaguaaauu

SEQ ID NO: 668390 - RNA, 24 nt, Artificial Sequence
  Synthetic
uggaaagacuagaaagaguaaauu

SEQ ID NO: 668391 - RNA, 18 nt, Artificial Sequence
  Synthetic
aaauuaaugcuguaaauu

SEQ ID NO: 668392 - RNA, 19 nt, Artificial Sequence
  Synthetic
aaaauuaaugcuguaaauu

SEQ ID NO: 668393 - RNA, 20 nt, Artificial Sequence
  Synthetic
aaaaauuaaugcuguaaauu

SEQ ID NO: 668394 - RNA, 21 nt, Artificial Sequence
  Synthetic
aaaaaauuaaugcuguaaauu

SEQ ID NO: 668395 - RNA, 22 nt, Artificial Sequence
  Synthetic
gaaaaaauuaaugcuguaaauu

SEQ ID NO: 668396 - RNA, 23 nt, Artificial Sequence
  Synthetic
ugaaaaaauuaaugcuguaaauu

SEQ ID NO: 668397 - RNA, 24 nt, Artificial Sequence
  Synthetic
gugaaaaaauuaaugcuguaaauu

SEQ ID NO: 668398 - RNA, 18 nt, Artificial Sequence
  Synthetic
gguuuggcaaauuaaauu

SEQ ID NO: 668399 - RNA, 19 nt, Artificial Sequence
  Synthetic
ugguuuggcaaauuaaauu

SEQ ID NO: 668400 - RNA, 20 nt, Artificial Sequence
  Synthetic
gugguuuggcaaauuaaauu

SEQ ID NO: 668401 - RNA, 21 nt, Artificial Sequence
  Synthetic
ugugguuuggcaaauuaaauu

SEQ ID NO: 668402 - RNA, 22 nt, Artificial Sequence
  Synthetic
cugugguuuggcaaauuaaauu

SEQ ID NO: 668403 - RNA, 23 nt, Artificial Sequence
  Synthetic
ccugugguuuggcaaauuaaauu

SEQ ID NO: 668404 - RNA, 24 nt, Artificial Sequence
  Synthetic
gccugugguuuggcaaauuaaauu

SEQ ID NO: 668405 - RNA, 18 nt, Artificial Sequence
  Synthetic
cuuuucuugaauuaaauu

SEQ ID NO: 668406 - RNA, 19 nt, Artificial Sequence
  Synthetic
acuuuucuugaauuaaauu

SEQ ID NO: 668407 - RNA, 20 nt, Artificial Sequence
  Synthetic
uacuuuucuugaauuaaauu

SEQ ID NO: 668408 - RNA, 21 nt, Artificial Sequence
  Synthetic
auacuuuucuugaauuaaauu

SEQ ID NO: 668409 - RNA, 22 nt, Artificial Sequence
  Synthetic
uauacuuuucuugaauuaaauu

SEQ ID NO: 668410 - RNA, 23 nt, Artificial Sequence
  Synthetic
auauacuuuucuugaauuaaauu

SEQ ID NO: 668411 - RNA, 24 nt, Artificial Sequence
  Synthetic
cauauacuuuucuugaauuaaauu

SEQ ID NO: 668412 - RNA, 18 nt, Artificial Sequence
  Synthetic
uaucaauauuauuaaauu

SEQ ID NO: 668413 - RNA, 19 nt, Artificial Sequence
  Synthetic
uuaucaauauuauuaaauu

SEQ ID NO: 668414 - RNA, 20 nt, Artificial Sequence
  Synthetic
auuaucaauauuauuaaauu

SEQ ID NO: 668415 - RNA, 21 nt, Artificial Sequence
  Synthetic
uauuaucaauauuauuaaauu

SEQ ID NO: 668416 - RNA, 22 nt, Artificial Sequence
  Synthetic
auauuaucaauauuauuaaauu

SEQ ID NO: 668417 - RNA, 23 nt, Artificial Sequence
  Synthetic
aauauuaucaauauuauuaaauu

SEQ ID NO: 668418 - RNA, 24 nt, Artificial Sequence
  Synthetic
aaauauuaucaauauuauuaaauu

SEQ ID NO: 668419 - RNA, 18 nt, Artificial Sequence
  Synthetic
auuuugggcccuuaaauu

SEQ ID NO: 668420 - RNA, 19 nt, Artificial Sequence
  Synthetic
uauuuugggcccuuaaauu

SEQ ID NO: 668421 - RNA, 20 nt, Artificial Sequence
  Synthetic
auauuuugggcccuuaaauu

SEQ ID NO: 668422 - RNA, 21 nt, Artificial Sequence
  Synthetic
cauauuuugggcccuuaaauu

SEQ ID NO: 668423 - RNA, 22 nt, Artificial Sequence
  Synthetic
ucauauuuugggcccuuaaauu

SEQ ID NO: 668424 - RNA, 23 nt, Artificial Sequence
  Synthetic
uucauauuuugggcccuuaaauu

SEQ ID NO: 668425 - RNA, 24 nt, Artificial Sequence
  Synthetic
uuucauauuuugggcccuuaaauu

SEQ ID NO: 668426 - RNA, 18 nt, Artificial Sequence
  Synthetic
ugaauuaauucuuaaauu

SEQ ID NO: 668427 - RNA, 19 nt, Artificial Sequence
  Synthetic
uugaauuaauucuuaaauu

SEQ ID NO: 668428 - RNA, 20 nt, Artificial Sequence
  Synthetic
guugaauuaauucuuaaauu

SEQ ID NO: 668429 - RNA, 21 nt, Artificial Sequence
  Synthetic
aguugaauuaauucuuaaauu

SEQ ID NO: 668430 - RNA, 22 nt, Artificial Sequence
  Synthetic
aaguugaauuaauucuuaaauu

SEQ ID NO: 668431 - RNA, 23 nt, Artificial Sequence
  Synthetic
uaaguugaauuaauucuuaaauu

SEQ ID NO: 668432 - RNA, 24 nt, Artificial Sequence
  Synthetic
cuaaguugaauuaauucuuaaauu

SEQ ID NO: 668433 - RNA, 18 nt, Artificial Sequence
  Synthetic
gaaggcacuucuuaaauu

SEQ ID NO: 668434 - RNA, 19 nt, Artificial Sequence
  Synthetic
ugaaggcacuucuuaaauu

SEQ ID NO: 668435 - RNA, 20 nt, Artificial Sequence
  Synthetic
uugaaggcacuucuuaaauu

SEQ ID NO: 668436 - RNA, 21 nt, Artificial Sequence
  Synthetic
auugaaggcacuucuuaaauu

SEQ ID NO: 668437 - RNA, 22 nt, Artificial Sequence
  Synthetic
aauugaaggcacuucuuaaauu

SEQ ID NO: 668438 - RNA, 23 nt, Artificial Sequence
  Synthetic
uaauugaaggcacuucuuaaauu

SEQ ID NO: 668439 - RNA, 24 nt, Artificial Sequence
  Synthetic
guaauugaaggcacuucuuaaauu

SEQ ID NO: 668440 - RNA, 18 nt, Artificial Sequence
  Synthetic
ggcuuuuuuucuuaaauu

SEQ ID NO: 668441 - RNA, 19 nt, Artificial Sequence
  Synthetic
aggcuuuuuuucuuaaauu

SEQ ID NO: 668442 - RNA, 20 nt, Artificial Sequence
  Synthetic
aaggcuuuuuuucuuaaauu

SEQ ID NO: 668443 - RNA, 21 nt, Artificial Sequence
  Synthetic
uaaggcuuuuuuucuuaaauu

SEQ ID NO: 668444 - RNA, 22 nt, Artificial Sequence
  Synthetic
auaaggcuuuuuuucuuaaauu

SEQ ID NO: 668445 - RNA, 23 nt, Artificial Sequence
  Synthetic
uauaaggcuuuuuuucuuaaauu

SEQ ID NO: 668446 - RNA, 24 nt, Artificial Sequence
  Synthetic
auauaaggcuuuuuuucuuaaauu

SEQ ID NO: 668447 - RNA, 18 nt, Artificial Sequence
  Synthetic
cacgggauaaguuaaauu

SEQ ID NO: 668448 - RNA, 19 nt, Artificial Sequence
  Synthetic
gcacgggauaaguuaaauu

SEQ ID NO: 668449 - RNA, 20 nt, Artificial Sequence
  Synthetic
agcacgggauaaguuaaauu

SEQ ID NO: 668450 - RNA, 21 nt, Artificial Sequence
  Synthetic
aagcacgggauaaguuaaauu

SEQ ID NO: 668451 - RNA, 22 nt, Artificial Sequence
  Synthetic
caagcacgggauaaguuaaauu

SEQ ID NO: 668452 - RNA, 23 nt, Artificial Sequence
  Synthetic
ucaagcacgggauaaguuaaauu

SEQ ID NO: 668453 - RNA, 24 nt, Artificial Sequence
  Synthetic
uucaagcacgggauaaguuaaauu

SEQ ID NO: 668454 - RNA, 18 nt, Artificial Sequence
  Synthetic
aaugcuaacuguuaaauu

SEQ ID NO: 668455 - RNA, 19 nt, Artificial Sequence
  Synthetic
caaugcuaacuguuaaauu

SEQ ID NO: 668456 - RNA, 20 nt, Artificial Sequence
  Synthetic
ucaaugcuaacuguuaaauu

SEQ ID NO: 668457 - RNA, 21 nt, Artificial Sequence
  Synthetic
gucaaugcuaacuguuaaauu

SEQ ID NO: 668458 - RNA, 22 nt, Artificial Sequence
  Synthetic
ugucaaugcuaacuguuaaauu

SEQ ID NO: 668459 - RNA, 23 nt, Artificial Sequence
  Synthetic
gugucaaugcuaacuguuaaauu

SEQ ID NO: 668460 - RNA, 24 nt, Artificial Sequence
  Synthetic
ggugucaaugcuaacuguuaaauu

SEQ ID NO: 668461 - RNA, 18 nt, Artificial Sequence
  Synthetic
cucacuccaauuuaaauu

SEQ ID NO: 668462 - RNA, 19 nt, Artificial Sequence
  Synthetic
ucucacuccaauuuaaauu

SEQ ID NO: 668463 - RNA, 20 nt, Artificial Sequence
  Synthetic
uucucacuccaauuuaaauu

SEQ ID NO: 668464 - RNA, 21 nt, Artificial Sequence
  Synthetic
uuucucacuccaauuuaaauu

SEQ ID NO: 668465 - RNA, 22 nt, Artificial Sequence
  Synthetic
auuucucacuccaauuuaaauu

SEQ ID NO: 668466 - RNA, 23 nt, Artificial Sequence
  Synthetic
aauuucucacuccaauuuaaauu

SEQ ID NO: 668467 - RNA, 24 nt, Artificial Sequence
  Synthetic
gaauuucucacuccaauuuaaauu

SEQ ID NO: 668468 - RNA, 18 nt, Artificial Sequence
  Synthetic
aacuuagacauuuaaauu

SEQ ID NO: 668469 - RNA, 19 nt, Artificial Sequence
  Synthetic
aaacuuagacauuuaaauu

SEQ ID NO: 668470 - RNA, 20 nt, Artificial Sequence
  Synthetic
caaacuuagacauuuaaauu

SEQ ID NO: 668471 - RNA, 21 nt, Artificial Sequence
  Synthetic
gcaaacuuagacauuuaaauu

SEQ ID NO: 668472 - RNA, 22 nt, Artificial Sequence
  Synthetic
ggcaaacuuagacauuuaaauu

SEQ ID NO: 668473 - RNA, 23 nt, Artificial Sequence
  Synthetic
aggcaaacuuagacauuuaaauu

SEQ ID NO: 668474 - RNA, 24 nt, Artificial Sequence
  Synthetic
aaggcaaacuuagacauuuaaauu

SEQ ID NO: 668475 - RNA, 18 nt, Artificial Sequence
  Synthetic
auucuuacgauuuaaauu

SEQ ID NO: 668476 - RNA, 19 nt, Artificial Sequence
  Synthetic
aauucuuacgauuuaaauu

SEQ ID NO: 668477 - RNA, 20 nt, Artificial Sequence
  Synthetic
aaauucuuacgauuuaaauu

SEQ ID NO: 668478 - RNA, 21 nt, Artificial Sequence
  Synthetic
aaaauucuuacgauuuaaauu

SEQ ID NO: 668479 - RNA, 22 nt, Artificial Sequence
  Synthetic
uaaaauucuuacgauuuaaauu

SEQ ID NO: 668480 - RNA, 23 nt, Artificial Sequence
  Synthetic
auaaaauucuuacgauuuaaauu

SEQ ID NO: 668481 - RNA, 24 nt, Artificial Sequence
  Synthetic
aauaaaauucuuacgauuuaaauu

SEQ ID NO: 668482 - RNA, 18 nt, Artificial Sequence
  Synthetic
uauuccaggcuuuaaauu

SEQ ID NO: 668483 - RNA, 19 nt, Artificial Sequence
  Synthetic
uuauuccaggcuuuaaauu

SEQ ID NO: 668484 - RNA, 20 nt, Artificial Sequence
  Synthetic
auuauuccaggcuuuaaauu

SEQ ID NO: 668485 - RNA, 21 nt, Artificial Sequence
  Synthetic
gauuauuccaggcuuuaaauu

SEQ ID NO: 668486 - RNA, 22 nt, Artificial Sequence
  Synthetic
agauuauuccaggcuuuaaauu

SEQ ID NO: 668487 - RNA, 23 nt, Artificial Sequence
  Synthetic
uagauuauuccaggcuuuaaauu

SEQ ID NO: 668488 - RNA, 24 nt, Artificial Sequence
  Synthetic
guagauuauuccaggcuuuaaauu

SEQ ID NO: 668489 - RNA, 18 nt, Artificial Sequence
  Synthetic
uuguauaugcuuuaaauu

SEQ ID NO: 668490 - RNA, 19 nt, Artificial Sequence
  Synthetic
cuuguauaugcuuuaaauu

SEQ ID NO: 668491 - RNA, 20 nt, Artificial Sequence
  Synthetic
acuuguauaugcuuuaaauu

SEQ ID NO: 668492 - RNA, 21 nt, Artificial Sequence
  Synthetic
aacuuguauaugcuuuaaauu

SEQ ID NO: 668493 - RNA, 22 nt, Artificial Sequence
  Synthetic
aaacuuguauaugcuuuaaauu

SEQ ID NO: 668494 - RNA, 23 nt, Artificial Sequence
  Synthetic
gaaacuuguauaugcuuuaaauu

SEQ ID NO: 668495 - RNA, 24 nt, Artificial Sequence
  Synthetic
ugaaacuuguauaugcuuuaaauu

SEQ ID NO: 668496 - RNA, 18 nt, Artificial Sequence
  Synthetic
agacagucaaaaacaauu

SEQ ID NO: 668497 - RNA, 19 nt, Artificial Sequence
  Synthetic
uagacagucaaaaacaauu

SEQ ID NO: 668498 - RNA, 20 nt, Artificial Sequence
  Synthetic
guagacagucaaaaacaauu

SEQ ID NO: 668499 - RNA, 21 nt, Artificial Sequence
  Synthetic
aguagacagucaaaaacaauu

SEQ ID NO: 668500 - RNA, 22 nt, Artificial Sequence
  Synthetic
uaguagacagucaaaaacaauu

SEQ ID NO: 668501 - RNA, 23 nt, Artificial Sequence
  Synthetic
auaguagacagucaaaaacaauu

SEQ ID NO: 668502 - RNA, 24 nt, Artificial Sequence
  Synthetic
aauaguagacagucaaaaacaauu

SEQ ID NO: 668503 - RNA, 18 nt, Artificial Sequence
  Synthetic
auuuaggaacaaacaauu

SEQ ID NO: 668504 - RNA, 19 nt, Artificial Sequence
  Synthetic
cauuuaggaacaaacaauu

SEQ ID NO: 668505 - RNA, 20 nt, Artificial Sequence
  Synthetic
ucauuuaggaacaaacaauu

SEQ ID NO: 668506 - RNA, 21 nt, Artificial Sequence
  Synthetic
cucauuuaggaacaaacaauu

SEQ ID NO: 668507 - RNA, 22 nt, Artificial Sequence
  Synthetic
ucucauuuaggaacaaacaauu

SEQ ID NO: 668508 - RNA, 23 nt, Artificial Sequence
  Synthetic
gucucauuuaggaacaaacaauu

SEQ ID NO: 668509 - RNA, 24 nt, Artificial Sequence
  Synthetic
ugucucauuuaggaacaaacaauu

SEQ ID NO: 668510 - RNA, 18 nt, Artificial Sequence
  Synthetic
auccaucuuagaacaauu

SEQ ID NO: 668511 - RNA, 19 nt, Artificial Sequence
  Synthetic
uauccaucuuagaacaauu

SEQ ID NO: 668512 - RNA, 20 nt, Artificial Sequence
  Synthetic
auauccaucuuagaacaauu

SEQ ID NO: 668513 - RNA, 21 nt, Artificial Sequence
  Synthetic
gauauccaucuuagaacaauu

SEQ ID NO: 668514 - RNA, 22 nt, Artificial Sequence
  Synthetic
ugauauccaucuuagaacaauu

SEQ ID NO: 668515 - RNA, 23 nt, Artificial Sequence
  Synthetic
cugauauccaucuuagaacaauu

SEQ ID NO: 668516 - RNA, 24 nt, Artificial Sequence
  Synthetic
ccugauauccaucuuagaacaauu

SEQ ID NO: 668517 - RNA, 18 nt, Artificial Sequence
  Synthetic
aaaaacaaaugaacaauu

SEQ ID NO: 668518 - RNA, 19 nt, Artificial Sequence
  Synthetic
caaaaacaaaugaacaauu

SEQ ID NO: 668519 - RNA, 20 nt, Artificial Sequence
  Synthetic
ucaaaaacaaaugaacaauu

SEQ ID NO: 668520 - RNA, 21 nt, Artificial Sequence
  Synthetic
aucaaaaacaaaugaacaauu

SEQ ID NO: 668521 - RNA, 22 nt, Artificial Sequence
  Synthetic
aaucaaaaacaaaugaacaauu

SEQ ID NO: 668522 - RNA, 23 nt, Artificial Sequence
  Synthetic
aaaucaaaaacaaaugaacaauu

SEQ ID NO: 668523 - RNA, 24 nt, Artificial Sequence
  Synthetic
aaaaucaaaaacaaaugaacaauu

SEQ ID NO: 668524 - RNA, 18 nt, Artificial Sequence
  Synthetic
cguaaucuuugaacaauu

SEQ ID NO: 668525 - RNA, 19 nt, Artificial Sequence
  Synthetic
gcguaaucuuugaacaauu

SEQ ID NO: 668526 - RNA, 20 nt, Artificial Sequence
  Synthetic
agcguaaucuuugaacaauu

SEQ ID NO: 668527 - RNA, 21 nt, Artificial Sequence
  Synthetic
uagcguaaucuuugaacaauu

SEQ ID NO: 668528 - RNA, 22 nt, Artificial Sequence
  Synthetic
uuagcguaaucuuugaacaauu

SEQ ID NO: 668529 - RNA, 23 nt, Artificial Sequence
  Synthetic
cuuagcguaaucuuugaacaauu

SEQ ID NO: 668530 - RNA, 24 nt, Artificial Sequence
  Synthetic
ccuuagcguaaucuuugaacaauu

SEQ ID NO: 668531 - RNA, 18 nt, Artificial Sequence
  Synthetic
ucuccaagauccacaauu

SEQ ID NO: 668532 - RNA, 19 nt, Artificial Sequence
  Synthetic
aucuccaagauccacaauu

SEQ ID NO: 668533 - RNA, 20 nt, Artificial Sequence
  Synthetic
aaucuccaagauccacaauu

SEQ ID NO: 668534 - RNA, 21 nt, Artificial Sequence
  Synthetic
uaaucuccaagauccacaauu

SEQ ID NO: 668535 - RNA, 22 nt, Artificial Sequence
  Synthetic
auaaucuccaagauccacaauu

SEQ ID NO: 668536 - RNA, 23 nt, Artificial Sequence
  Synthetic
uauaaucuccaagauccacaauu

SEQ ID NO: 668537 - RNA, 24 nt, Artificial Sequence
  Synthetic
auauaaucuccaagauccacaauu

SEQ ID NO: 668538 - RNA, 18 nt, Artificial Sequence
  Synthetic
ugauguguucgcacaauu

SEQ ID NO: 668539 - RNA, 19 nt, Artificial Sequence
  Synthetic
uugauguguucgcacaauu

SEQ ID NO: 668540 - RNA, 20 nt, Artificial Sequence
  Synthetic
cuugauguguucgcacaauu

SEQ ID NO: 668541 - RNA, 21 nt, Artificial Sequence
  Synthetic
acuugauguguucgcacaauu

SEQ ID NO: 668542 - RNA, 22 nt, Artificial Sequence
  Synthetic
cacuugauguguucgcacaauu

SEQ ID NO: 668543 - RNA, 23 nt, Artificial Sequence
  Synthetic
ucacuugauguguucgcacaauu

SEQ ID NO: 668544 - RNA, 24 nt, Artificial Sequence
  Synthetic
uucacuugauguguucgcacaauu

SEQ ID NO: 668545 - RNA, 18 nt, Artificial Sequence
  Synthetic
agauaauuuugcacaauu

SEQ ID NO: 668546 - RNA, 19 nt, Artificial Sequence
  Synthetic
cagauaauuuugcacaauu

SEQ ID NO: 668547 - RNA, 20 nt, Artificial Sequence
  Synthetic
ccagauaauuuugcacaauu

SEQ ID NO: 668548 - RNA, 21 nt, Artificial Sequence
  Synthetic
accagauaauuuugcacaauu

SEQ ID NO: 668549 - RNA, 22 nt, Artificial Sequence
  Synthetic
gaccagauaauuuugcacaauu

SEQ ID NO: 668550 - RNA, 23 nt, Artificial Sequence
  Synthetic
ugaccagauaauuuugcacaauu

SEQ ID NO: 668551 - RNA, 24 nt, Artificial Sequence
  Synthetic
cugaccagauaauuuugcacaauu

SEQ ID NO: 668552 - RNA, 18 nt, Artificial Sequence
  Synthetic
cugcaacucaggacaauu

SEQ ID NO: 668553 - RNA, 19 nt, Artificial Sequence
  Synthetic
gcugcaacucaggacaauu

SEQ ID NO: 668554 - RNA, 20 nt, Artificial Sequence
  Synthetic
ugcugcaacucaggacaauu

SEQ ID NO: 668555 - RNA, 21 nt, Artificial Sequence
  Synthetic
uugcugcaacucaggacaauu

SEQ ID NO: 668556 - RNA, 22 nt, Artificial Sequence
  Synthetic
cuugcugcaacucaggacaauu

SEQ ID NO: 668557 - RNA, 23 nt, Artificial Sequence
  Synthetic
ccuugcugcaacucaggacaauu

SEQ ID NO: 668558 - RNA, 24 nt, Artificial Sequence
  Synthetic
cccuugcugcaacucaggacaauu

SEQ ID NO: 668559 - RNA, 18 nt, Artificial Sequence
  Synthetic
guuuucuguaggacaauu

SEQ ID NO: 668560 - RNA, 19 nt, Artificial Sequence
  Synthetic
gguuuucuguaggacaauu

SEQ ID NO: 668561 - RNA, 20 nt, Artificial Sequence
  Synthetic
ugguuuucuguaggacaauu

SEQ ID NO: 668562 - RNA, 21 nt, Artificial Sequence
  Synthetic
cugguuuucuguaggacaauu

SEQ ID NO: 668563 - RNA, 22 nt, Artificial Sequence
  Synthetic
ccugguuuucuguaggacaauu

SEQ ID NO: 668564 - RNA, 23 nt, Artificial Sequence
  Synthetic
accugguuuucuguaggacaauu

SEQ ID NO: 668565 - RNA, 24 nt, Artificial Sequence
  Synthetic
aaccugguuuucuguaggacaauu

SEQ ID NO: 668566 - RNA, 18 nt, Artificial Sequence
  Synthetic
acauguaaagugacaauu

SEQ ID NO: 668567 - RNA, 19 nt, Artificial Sequence
  Synthetic
aacauguaaagugacaauu

SEQ ID NO: 668568 - RNA, 20 nt, Artificial Sequence
  Synthetic
uaacauguaaagugacaauu

SEQ ID NO: 668569 - RNA, 21 nt, Artificial Sequence
  Synthetic
guaacauguaaagugacaauu

SEQ ID NO: 668570 - RNA, 22 nt, Artificial Sequence
  Synthetic
uguaacauguaaagugacaauu

SEQ ID NO: 668571 - RNA, 23 nt, Artificial Sequence
  Synthetic
uuguaacauguaaagugacaauu

SEQ ID NO: 668572 - RNA, 24 nt, Artificial Sequence
  Synthetic
guuguaacauguaaagugacaauu

SEQ ID NO: 668573 - RNA, 18 nt, Artificial Sequence
  Synthetic
cugaagauaaauacaauu

SEQ ID NO: 668574 - RNA, 19 nt, Artificial Sequence
  Synthetic
gcugaagauaaauacaauu

SEQ ID NO: 668575 - RNA, 20 nt, Artificial Sequence
  Synthetic
ugcugaagauaaauacaauu

SEQ ID NO: 668576 - RNA, 21 nt, Artificial Sequence
  Synthetic
gugcugaagauaaauacaauu

SEQ ID NO: 668577 - RNA, 22 nt, Artificial Sequence
  Synthetic
ugugcugaagauaaauacaauu

SEQ ID NO: 668578 - RNA, 23 nt, Artificial Sequence
  Synthetic
augugcugaagauaaauacaauu

SEQ ID NO: 668579 - RNA, 24 nt, Artificial Sequence
  Synthetic
gaugugcugaagauaaauacaauu

SEQ ID NO: 668580 - RNA, 18 nt, Artificial Sequence
  Synthetic
caacuaacugcuacaauu

SEQ ID NO: 668581 - RNA, 19 nt, Artificial Sequence
  Synthetic
acaacuaacugcuacaauu

SEQ ID NO: 668582 - RNA, 20 nt, Artificial Sequence
  Synthetic
cacaacuaacugcuacaauu

SEQ ID NO: 668583 - RNA, 21 nt, Artificial Sequence
  Synthetic
ucacaacuaacugcuacaauu

SEQ ID NO: 668584 - RNA, 22 nt, Artificial Sequence
  Synthetic
aucacaacuaacugcuacaauu

SEQ ID NO: 668585 - RNA, 23 nt, Artificial Sequence
  Synthetic
aaucacaacuaacugcuacaauu

SEQ ID NO: 668586 - RNA, 24 nt, Artificial Sequence
  Synthetic
uaaucacaacuaacugcuacaauu

SEQ ID NO: 668587 - RNA, 18 nt, Artificial Sequence
  Synthetic
acaaaguaaaguacaauu

SEQ ID NO: 668588 - RNA, 19 nt, Artificial Sequence
  Synthetic
uacaaaguaaaguacaauu

SEQ ID NO: 668589 - RNA, 20 nt, Artificial Sequence
  Synthetic
auacaaaguaaaguacaauu

SEQ ID NO: 668590 - RNA, 21 nt, Artificial Sequence
  Synthetic
aauacaaaguaaaguacaauu

SEQ ID NO: 668591 - RNA, 22 nt, Artificial Sequence
  Synthetic
uaauacaaaguaaaguacaauu

SEQ ID NO: 668592 - RNA, 23 nt, Artificial Sequence
  Synthetic
auaauacaaaguaaaguacaauu

SEQ ID NO: 668593 - RNA, 24 nt, Artificial Sequence
  Synthetic
cauaauacaaaguaaaguacaauu

SEQ ID NO: 668594 - RNA, 18 nt, Artificial Sequence
  Synthetic
gugaguaaugguacaauu

SEQ ID NO: 668595 - RNA, 19 nt, Artificial Sequence
  Synthetic
agugaguaaugguacaauu

SEQ ID NO: 668596 - RNA, 20 nt, Artificial Sequence
  Synthetic
cagugaguaaugguacaauu

SEQ ID NO: 668597 - RNA, 21 nt, Artificial Sequence
  Synthetic
gcagugaguaaugguacaauu

SEQ ID NO: 668598 - RNA, 22 nt, Artificial Sequence
  Synthetic
cgcagugaguaaugguacaauu

SEQ ID NO: 668599 - RNA, 23 nt, Artificial Sequence
  Synthetic
acgcagugaguaaugguacaauu

SEQ ID NO: 668600 - RNA, 24 nt, Artificial Sequence
  Synthetic
aacgcagugaguaaugguacaauu

SEQ ID NO: 668601 - RNA, 18 nt, Artificial Sequence
  Synthetic
gcaauacaauguacaauu

SEQ ID NO: 668602 - RNA, 19 nt, Artificial Sequence
  Synthetic
agcaauacaauguacaauu

SEQ ID NO: 668603 - RNA, 20 nt, Artificial Sequence
  Synthetic
gagcaauacaauguacaauu

SEQ ID NO: 668604 - RNA, 21 nt, Artificial Sequence
  Synthetic
agagcaauacaauguacaauu

SEQ ID NO: 668605 - RNA, 22 nt, Artificial Sequence
  Synthetic
aagagcaauacaauguacaauu

SEQ ID NO: 668606 - RNA, 23 nt, Artificial Sequence
  Synthetic
aaagagcaauacaauguacaauu

SEQ ID NO: 668607 - RNA, 24 nt, Artificial Sequence
  Synthetic
uaaagagcaauacaauguacaauu

SEQ ID NO: 668608 - RNA, 18 nt, Artificial Sequence
  Synthetic
agucuacccauuacaauu

SEQ ID NO: 668609 - RNA, 19 nt, Artificial Sequence
  Synthetic
aagucuacccauuacaauu

SEQ ID NO: 668610 - RNA, 20 nt, Artificial Sequence
  Synthetic
gaagucuacccauuacaauu

SEQ ID NO: 668611 - RNA, 21 nt, Artificial Sequence
  Synthetic
ugaagucuacccauuacaauu

SEQ ID NO: 668612 - RNA, 22 nt, Artificial Sequence
  Synthetic
uugaagucuacccauuacaauu

SEQ ID NO: 668613 - RNA, 23 nt, Artificial Sequence
  Synthetic
uuugaagucuacccauuacaauu

SEQ ID NO: 668614 - RNA, 24 nt, Artificial Sequence
  Synthetic
auuugaagucuacccauuacaauu

SEQ ID NO: 668615 - RNA, 18 nt, Artificial Sequence
  Synthetic
augguuugacuuacaauu

SEQ ID NO: 668616 - RNA, 19 nt, Artificial Sequence
  Synthetic
gaugguuugacuuacaauu

SEQ ID NO: 668617 - RNA, 20 nt, Artificial Sequence
  Synthetic
cgaugguuugacuuacaauu

SEQ ID NO: 668618 - RNA, 21 nt, Artificial Sequence
  Synthetic
acgaugguuugacuuacaauu

SEQ ID NO: 668619 - RNA, 22 nt, Artificial Sequence
  Synthetic
uacgaugguuugacuuacaauu

SEQ ID NO: 668620 - RNA, 23 nt, Artificial Sequence
  Synthetic
cuacgaugguuugacuuacaauu

SEQ ID NO: 668621 - RNA, 24 nt, Artificial Sequence
  Synthetic
acuacgaugguuugacuuacaauu

SEQ ID NO: 668622 - RNA, 18 nt, Artificial Sequence
  Synthetic
ucaaaagggcuuacaauu

SEQ ID NO: 668623 - RNA, 19 nt, Artificial Sequence
  Synthetic
cucaaaagggcuuacaauu

SEQ ID NO: 668624 - RNA, 20 nt, Artificial Sequence
  Synthetic
acucaaaagggcuuacaauu

SEQ ID NO: 668625 - RNA, 21 nt, Artificial Sequence
  Synthetic
uacucaaaagggcuuacaauu

SEQ ID NO: 668626 - RNA, 22 nt, Artificial Sequence
  Synthetic
uuacucaaaagggcuuacaauu

SEQ ID NO: 668627 - RNA, 23 nt, Artificial Sequence
  Synthetic
uuuacucaaaagggcuuacaauu

SEQ ID NO: 668628 - RNA, 24 nt, Artificial Sequence
  Synthetic
auuuacucaaaagggcuuacaauu

SEQ ID NO: 668629 - RNA, 18 nt, Artificial Sequence
  Synthetic
auuuauuaucuuacaauu

SEQ ID NO: 668630 - RNA, 19 nt, Artificial Sequence
  Synthetic
aauuuauuaucuuacaauu

SEQ ID NO: 668631 - RNA, 20 nt, Artificial Sequence
  Synthetic
aaauuuauuaucuuacaauu

SEQ ID NO: 668632 - RNA, 21 nt, Artificial Sequence
  Synthetic
caaauuuauuaucuuacaauu

SEQ ID NO: 668633 - RNA, 22 nt, Artificial Sequence
  Synthetic
ccaaauuuauuaucuuacaauu

SEQ ID NO: 668634 - RNA, 23 nt, Artificial Sequence
  Synthetic
cccaaauuuauuaucuuacaauu

SEQ ID NO: 668635 - RNA, 24 nt, Artificial Sequence
  Synthetic
acccaaauuuauuaucuuacaauu

SEQ ID NO: 668636 - RNA, 18 nt, Artificial Sequence
  Synthetic
gaugcauuguuuacaauu

SEQ ID NO: 668637 - RNA, 19 nt, Artificial Sequence
  Synthetic
ugaugcauuguuuacaauu

SEQ ID NO: 668638 - RNA, 20 nt, Artificial Sequence
  Synthetic
uugaugcauuguuuacaauu

SEQ ID NO: 668639 - RNA, 21 nt, Artificial Sequence
  Synthetic
cuugaugcauuguuuacaauu

SEQ ID NO: 668640 - RNA, 22 nt, Artificial Sequence
  Synthetic
ucuugaugcauuguuuacaauu

SEQ ID NO: 668641 - RNA, 23 nt, Artificial Sequence
  Synthetic
aucuugaugcauuguuuacaauu

SEQ ID NO: 668642 - RNA, 24 nt, Artificial Sequence
  Synthetic
gaucuugaugcauuguuuacaauu

SEQ ID NO: 668643 - RNA, 18 nt, Artificial Sequence
  Synthetic
ugcucacuucaaccaauu

SEQ ID NO: 668644 - RNA, 19 nt, Artificial Sequence
  Synthetic
uugcucacuucaaccaauu

SEQ ID NO: 668645 - RNA, 20 nt, Artificial Sequence
  Synthetic
cuugcucacuucaaccaauu

SEQ ID NO: 668646 - RNA, 21 nt, Artificial Sequence
  Synthetic
ccuugcucacuucaaccaauu

SEQ ID NO: 668647 - RNA, 22 nt, Artificial Sequence
  Synthetic
accuugcucacuucaaccaauu

SEQ ID NO: 668648 - RNA, 23 nt, Artificial Sequence
  Synthetic
uaccuugcucacuucaaccaauu

SEQ ID NO: 668649 - RNA, 24 nt, Artificial Sequence
  Synthetic
cuaccuugcucacuucaaccaauu

SEQ ID NO: 668650 - RNA, 18 nt, Artificial Sequence
  Synthetic
aagaaaauagaaccaauu

SEQ ID NO: 668651 - RNA, 19 nt, Artificial Sequence
  Synthetic
aaagaaaauagaaccaauu

SEQ ID NO: 668652 - RNA, 20 nt, Artificial Sequence
  Synthetic
gaaagaaaauagaaccaauu

SEQ ID NO: 668653 - RNA, 21 nt, Artificial Sequence
  Synthetic
ugaaagaaaauagaaccaauu

SEQ ID NO: 668654 - RNA, 22 nt, Artificial Sequence
  Synthetic
gugaaagaaaauagaaccaauu

SEQ ID NO: 668655 - RNA, 23 nt, Artificial Sequence
  Synthetic
ugugaaagaaaauagaaccaauu

SEQ ID NO: 668656 - RNA, 24 nt, Artificial Sequence
  Synthetic
augugaaagaaaauagaaccaauu

SEQ ID NO: 668657 - RNA, 18 nt, Artificial Sequence
  Synthetic
uaaauacguauaccaauu

SEQ ID NO: 668658 - RNA, 19 nt, Artificial Sequence
  Synthetic
auaaauacguauaccaauu

SEQ ID NO: 668659 - RNA, 20 nt, Artificial Sequence
  Synthetic
cauaaauacguauaccaauu

SEQ ID NO: 668660 - RNA, 21 nt, Artificial Sequence
  Synthetic
acauaaauacguauaccaauu

SEQ ID NO: 668661 - RNA, 22 nt, Artificial Sequence
  Synthetic
uacauaaauacguauaccaauu

SEQ ID NO: 668662 - RNA, 23 nt, Artificial Sequence
  Synthetic
cuacauaaauacguauaccaauu

SEQ ID NO: 668663 - RNA, 24 nt, Artificial Sequence
  Synthetic
acuacauaaauacguauaccaauu

SEQ ID NO: 668664 - RNA, 18 nt, Artificial Sequence
  Synthetic
auaaguauacuaccaauu

SEQ ID NO: 668665 - RNA, 19 nt, Artificial Sequence
  Synthetic
gauaaguauacuaccaauu

SEQ ID NO: 668666 - RNA, 20 nt, Artificial Sequence
  Synthetic
agauaaguauacuaccaauu

SEQ ID NO: 668667 - RNA, 21 nt, Artificial Sequence
  Synthetic
aagauaaguauacuaccaauu

SEQ ID NO: 668668 - RNA, 22 nt, Artificial Sequence
  Synthetic
aaagauaaguauacuaccaauu

SEQ ID NO: 668669 - RNA, 23 nt, Artificial Sequence
  Synthetic
aaaagauaaguauacuaccaauu

SEQ ID NO: 668670 - RNA, 24 nt, Artificial Sequence
  Synthetic
uaaaagauaaguauacuaccaauu

SEQ ID NO: 668671 - RNA, 18 nt, Artificial Sequence
  Synthetic
ccaauaccugggccaauu

SEQ ID NO: 668672 - RNA, 19 nt, Artificial Sequence
  Synthetic
gccaauaccugggccaauu

SEQ ID NO: 668673 - RNA, 20 nt, Artificial Sequence
  Synthetic
ugccaauaccugggccaauu

SEQ ID NO: 668674 - RNA, 21 nt, Artificial Sequence
  Synthetic
cugccaauaccugggccaauu

SEQ ID NO: 668675 - RNA, 22 nt, Artificial Sequence
  Synthetic
ucugccaauaccugggccaauu

SEQ ID NO: 668676 - RNA, 23 nt, Artificial Sequence
  Synthetic
aucugccaauaccugggccaauu

SEQ ID NO: 668677 - RNA, 24 nt, Artificial Sequence
  Synthetic
uaucugccaauaccugggccaauu

SEQ ID NO: 668678 - RNA, 18 nt, Artificial Sequence
  Synthetic
aauaaauccaugccaauu

SEQ ID NO: 668679 - RNA, 19 nt, Artificial Sequence
  Synthetic
caauaaauccaugccaauu

SEQ ID NO: 668680 - RNA, 20 nt, Artificial Sequence
  Synthetic
acaauaaauccaugccaauu

SEQ ID NO: 668681 - RNA, 21 nt, Artificial Sequence
  Synthetic
aacaauaaauccaugccaauu

SEQ ID NO: 668682 - RNA, 22 nt, Artificial Sequence
  Synthetic
uaacaauaaauccaugccaauu

SEQ ID NO: 668683 - RNA, 23 nt, Artificial Sequence
  Synthetic
auaacaauaaauccaugccaauu

SEQ ID NO: 668684 - RNA, 24 nt, Artificial Sequence
  Synthetic
gauaacaauaaauccaugccaauu

SEQ ID NO: 668685 - RNA, 18 nt, Artificial Sequence
  Synthetic
uaaauugcauugccaauu

SEQ ID NO: 668686 - RNA, 19 nt, Artificial Sequence
  Synthetic
auaaauugcauugccaauu

SEQ ID NO: 668687 - RNA, 20 nt, Artificial Sequence
  Synthetic
aauaaauugcauugccaauu

SEQ ID NO: 668688 - RNA, 21 nt, Artificial Sequence
  Synthetic
caauaaauugcauugccaauu

SEQ ID NO: 668689 - RNA, 22 nt, Artificial Sequence
  Synthetic
gcaauaaauugcauugccaauu

SEQ ID NO: 668690 - RNA, 23 nt, Artificial Sequence
  Synthetic
ugcaauaaauugcauugccaauu

SEQ ID NO: 668691 - RNA, 24 nt, Artificial Sequence
  Synthetic
augcaauaaauugcauugccaauu

SEQ ID NO: 668692 - RNA, 18 nt, Artificial Sequence
  Synthetic
aaagauacuuugccaauu

SEQ ID NO: 668693 - RNA, 19 nt, Artificial Sequence
  Synthetic
uaaagauacuuugccaauu

SEQ ID NO: 668694 - RNA, 20 nt, Artificial Sequence
  Synthetic
guaaagauacuuugccaauu

SEQ ID NO: 668695 - RNA, 21 nt, Artificial Sequence
  Synthetic
aguaaagauacuuugccaauu

SEQ ID NO: 668696 - RNA, 22 nt, Artificial Sequence
  Synthetic
caguaaagauacuuugccaauu

SEQ ID NO: 668697 - RNA, 23 nt, Artificial Sequence
  Synthetic
acaguaaagauacuuugccaauu

SEQ ID NO: 668698 - RNA, 24 nt, Artificial Sequence
  Synthetic
gacaguaaagauacuuugccaauu

SEQ ID NO: 668699 - RNA, 18 nt, Artificial Sequence
  Synthetic
auggaacagcauccaauu

SEQ ID NO: 668700 - RNA, 19 nt, Artificial Sequence
  Synthetic
uauggaacagcauccaauu

SEQ ID NO: 668701 - RNA, 20 nt, Artificial Sequence
  Synthetic
uuauggaacagcauccaauu

SEQ ID NO: 668702 - RNA, 21 nt, Artificial Sequence
  Synthetic
auuauggaacagcauccaauu

SEQ ID NO: 668703 - RNA, 22 nt, Artificial Sequence
  Synthetic
aauuauggaacagcauccaauu

SEQ ID NO: 668704 - RNA, 23 nt, Artificial Sequence
  Synthetic
uaauuauggaacagcauccaauu

SEQ ID NO: 668705 - RNA, 24 nt, Artificial Sequence
  Synthetic
guaauuauggaacagcauccaauu

SEQ ID NO: 668706 - RNA, 18 nt, Artificial Sequence
  Synthetic
aaaaaaaaguauccaauu

SEQ ID NO: 668707 - RNA, 19 nt, Artificial Sequence
  Synthetic
aaaaaaaaaguauccaauu

SEQ ID NO: 668708 - RNA, 20 nt, Artificial Sequence
  Synthetic
aaaaaaaaaaguauccaauu

SEQ ID NO: 668709 - RNA, 21 nt, Artificial Sequence
  Synthetic
aaaaaaaaaaaguauccaauu

SEQ ID NO: 668710 - RNA, 22 nt, Artificial Sequence
  Synthetic
aaaaaaaaaaaaguauccaauu

SEQ ID NO: 668711 - RNA, 23 nt, Artificial Sequence
  Synthetic
caaaaaaaaaaaaguauccaauu

SEQ ID NO: 668712 - RNA, 24 nt, Artificial Sequence
  Synthetic
ucaaaaaaaaaaaaguauccaauu

SEQ ID NO: 668713 - RNA, 18 nt, Artificial Sequence
  Synthetic
ucugaaauaaaagcaauu

SEQ ID NO: 668714 - RNA, 19 nt, Artificial Sequence
  Synthetic
cucugaaauaaaagcaauu

SEQ ID NO: 668715 - RNA, 20 nt, Artificial Sequence
  Synthetic
ccucugaaauaaaagcaauu

SEQ ID NO: 668716 - RNA, 21 nt, Artificial Sequence
  Synthetic
accucugaaauaaaagcaauu

SEQ ID NO: 668717 - RNA, 22 nt, Artificial Sequence
  Synthetic
uaccucugaaauaaaagcaauu

SEQ ID NO: 668718 - RNA, 23 nt, Artificial Sequence
  Synthetic
auaccucugaaauaaaagcaauu

SEQ ID NO: 668719 - RNA, 24 nt, Artificial Sequence
  Synthetic
cauaccucugaaauaaaagcaauu

SEQ ID NO: 668720 - RNA, 18 nt, Artificial Sequence
  Synthetic
guuuuuaguaaagcaauu

SEQ ID NO: 668721 - RNA, 19 nt, Artificial Sequence
  Synthetic
uguuuuuaguaaagcaauu

SEQ ID NO: 668722 - RNA, 20 nt, Artificial Sequence
  Synthetic
guguuuuuaguaaagcaauu

SEQ ID NO: 668723 - RNA, 21 nt, Artificial Sequence
  Synthetic
gguguuuuuaguaaagcaauu

SEQ ID NO: 668724 - RNA, 22 nt, Artificial Sequence
  Synthetic
agguguuuuuaguaaagcaauu

SEQ ID NO: 668725 - RNA, 23 nt, Artificial Sequence
  Synthetic
gagguguuuuuaguaaagcaauu

SEQ ID NO: 668726 - RNA, 24 nt, Artificial Sequence
  Synthetic
agagguguuuuuaguaaagcaauu

SEQ ID NO: 668727 - RNA, 18 nt, Artificial Sequence
  Synthetic
aggcaauauacagcaauu

SEQ ID NO: 668728 - RNA, 19 nt, Artificial Sequence
  Synthetic
gaggcaauauacagcaauu

SEQ ID NO: 668729 - RNA, 20 nt, Artificial Sequence
  Synthetic
ugaggcaauauacagcaauu

SEQ ID NO: 668730 - RNA, 21 nt, Artificial Sequence
  Synthetic
cugaggcaauauacagcaauu

SEQ ID NO: 668731 - RNA, 22 nt, Artificial Sequence
  Synthetic
acugaggcaauauacagcaauu

SEQ ID NO: 668732 - RNA, 23 nt, Artificial Sequence
  Synthetic
uacugaggcaauauacagcaauu

SEQ ID NO: 668733 - RNA, 24 nt, Artificial Sequence
  Synthetic
auacugaggcaauauacagcaauu

SEQ ID NO: 668734 - RNA, 18 nt, Artificial Sequence
  Synthetic
ccuguaauaucagcaauu

SEQ ID NO: 668735 - RNA, 19 nt, Artificial Sequence
  Synthetic
gccuguaauaucagcaauu

SEQ ID NO: 668736 - RNA, 20 nt, Artificial Sequence
  Synthetic
cgccuguaauaucagcaauu

SEQ ID NO: 668737 - RNA, 21 nt, Artificial Sequence
  Synthetic
acgccuguaauaucagcaauu

SEQ ID NO: 668738 - RNA, 22 nt, Artificial Sequence
  Synthetic
cacgccuguaauaucagcaauu

SEQ ID NO: 668739 - RNA, 23 nt, Artificial Sequence
  Synthetic
ucacgccuguaauaucagcaauu

SEQ ID NO: 668740 - RNA, 24 nt, Artificial Sequence
  Synthetic
cucacgccuguaauaucagcaauu

SEQ ID NO: 668741 - RNA, 18 nt, Artificial Sequence
  Synthetic
cauaaucugagagcaauu

SEQ ID NO: 668742 - RNA, 19 nt, Artificial Sequence
  Synthetic
ccauaaucugagagcaauu

SEQ ID NO: 668743 - RNA, 20 nt, Artificial Sequence
  Synthetic
uccauaaucugagagcaauu

SEQ ID NO: 668744 - RNA, 21 nt, Artificial Sequence
  Synthetic
cuccauaaucugagagcaauu

SEQ ID NO: 668745 - RNA, 22 nt, Artificial Sequence
  Synthetic
gcuccauaaucugagagcaauu

SEQ ID NO: 668746 - RNA, 23 nt, Artificial Sequence
  Synthetic
ugcuccauaaucugagagcaauu

SEQ ID NO: 668747 - RNA, 24 nt, Artificial Sequence
  Synthetic
augcuccauaaucugagagcaauu

SEQ ID NO: 668748 - RNA, 18 nt, Artificial Sequence
  Synthetic
ucuguuauuuuagcaauu

SEQ ID NO: 668749 - RNA, 19 nt, Artificial Sequence
  Synthetic
aucuguuauuuuagcaauu

SEQ ID NO: 668750 - RNA, 20 nt, Artificial Sequence
  Synthetic
aaucuguuauuuuagcaauu

SEQ ID NO: 668751 - RNA, 21 nt, Artificial Sequence
  Synthetic
aaaucuguuauuuuagcaauu

SEQ ID NO: 668752 - RNA, 22 nt, Artificial Sequence
  Synthetic
aaaaucuguuauuuuagcaauu

SEQ ID NO: 668753 - RNA, 23 nt, Artificial Sequence
  Synthetic
uaaaaucuguuauuuuagcaauu

SEQ ID NO: 668754 - RNA, 24 nt, Artificial Sequence
  Synthetic
uuaaaaucuguuauuuuagcaauu

SEQ ID NO: 668755 - RNA, 18 nt, Artificial Sequence
  Synthetic
cacagaaaauaggcaauu

SEQ ID NO: 668756 - RNA, 19 nt, Artificial Sequence
  Synthetic
acacagaaaauaggcaauu

SEQ ID NO: 668757 - RNA, 20 nt, Artificial Sequence
  Synthetic
gacacagaaaauaggcaauu

SEQ ID NO: 668758 - RNA, 21 nt, Artificial Sequence
  Synthetic
agacacagaaaauaggcaauu

SEQ ID NO: 668759 - RNA, 22 nt, Artificial Sequence
  Synthetic
aagacacagaaaauaggcaauu

SEQ ID NO: 668760 - RNA, 23 nt, Artificial Sequence
  Synthetic
caagacacagaaaauaggcaauu

SEQ ID NO: 668761 - RNA, 24 nt, Artificial Sequence
  Synthetic
gcaagacacagaaaauaggcaauu

SEQ ID NO: 668762 - RNA, 18 nt, Artificial Sequence
  Synthetic
aagucagcucgggcaauu

SEQ ID NO: 668763 - RNA, 19 nt, Artificial Sequence
  Synthetic
aaagucagcucgggcaauu

SEQ ID NO: 668764 - RNA, 20 nt, Artificial Sequence
  Synthetic
aaaagucagcucgggcaauu

SEQ ID NO: 668765 - RNA, 21 nt, Artificial Sequence
  Synthetic
gaaaagucagcucgggcaauu

SEQ ID NO: 668766 - RNA, 22 nt, Artificial Sequence
  Synthetic
ggaaaagucagcucgggcaauu

SEQ ID NO: 668767 - RNA, 23 nt, Artificial Sequence
  Synthetic
gggaaaagucagcucgggcaauu

SEQ ID NO: 668768 - RNA, 24 nt, Artificial Sequence
  Synthetic
agggaaaagucagcucgggcaauu

SEQ ID NO: 668769 - RNA, 18 nt, Artificial Sequence
  Synthetic
cgagacucaggggcaauu

SEQ ID NO: 668770 - RNA, 19 nt, Artificial Sequence
  Synthetic
acgagacucaggggcaauu

SEQ ID NO: 668771 - RNA, 20 nt, Artificial Sequence
  Synthetic
aacgagacucaggggcaauu

SEQ ID NO: 668772 - RNA, 21 nt, Artificial Sequence
  Synthetic
aaacgagacucaggggcaauu

SEQ ID NO: 668773 - RNA, 22 nt, Artificial Sequence
  Synthetic
gaaacgagacucaggggcaauu

SEQ ID NO: 668774 - RNA, 23 nt, Artificial Sequence
  Synthetic
ggaaacgagacucaggggcaauu

SEQ ID NO: 668775 - RNA, 24 nt, Artificial Sequence
  Synthetic
uggaaacgagacucaggggcaauu

SEQ ID NO: 668776 - RNA, 18 nt, Artificial Sequence
  Synthetic
gauaguuugauggcaauu

SEQ ID NO: 668777 - RNA, 19 nt, Artificial Sequence
  Synthetic
ggauaguuugauggcaauu

SEQ ID NO: 668778 - RNA, 20 nt, Artificial Sequence
  Synthetic
aggauaguuugauggcaauu

SEQ ID NO: 668779 - RNA, 21 nt, Artificial Sequence
  Synthetic
gaggauaguuugauggcaauu

SEQ ID NO: 668780 - RNA, 22 nt, Artificial Sequence
  Synthetic
agaggauaguuugauggcaauu

SEQ ID NO: 668781 - RNA, 23 nt, Artificial Sequence
  Synthetic
cagaggauaguuugauggcaauu

SEQ ID NO: 668782 - RNA, 24 nt, Artificial Sequence
  Synthetic
acagaggauaguuugauggcaauu

SEQ ID NO: 668783 - RNA, 18 nt, Artificial Sequence
  Synthetic
aguaagcauauggcaauu

SEQ ID NO: 668784 - RNA, 19 nt, Artificial Sequence
  Synthetic
caguaagcauauggcaauu

SEQ ID NO: 668785 - RNA, 20 nt, Artificial Sequence
  Synthetic
acaguaagcauauggcaauu

SEQ ID NO: 668786 - RNA, 21 nt, Artificial Sequence
  Synthetic
aacaguaagcauauggcaauu

SEQ ID NO: 668787 - RNA, 22 nt, Artificial Sequence
  Synthetic
aaacaguaagcauauggcaauu

SEQ ID NO: 668788 - RNA, 23 nt, Artificial Sequence
  Synthetic
aaaacaguaagcauauggcaauu

SEQ ID NO: 668789 - RNA, 24 nt, Artificial Sequence
  Synthetic
gaaaacaguaagcauauggcaauu

SEQ ID NO: 668790 - RNA, 18 nt, Artificial Sequence
  Synthetic
uuguacauguuggcaauu

SEQ ID NO: 668791 - RNA, 19 nt, Artificial Sequence
  Synthetic
uuuguacauguuggcaauu

SEQ ID NO: 668792 - RNA, 20 nt, Artificial Sequence
  Synthetic
uuuuguacauguuggcaauu

SEQ ID NO: 668793 - RNA, 21 nt, Artificial Sequence
  Synthetic
guuuuguacauguuggcaauu

SEQ ID NO: 668794 - RNA, 22 nt, Artificial Sequence
  Synthetic
gguuuuguacauguuggcaauu

SEQ ID NO: 668795 - RNA, 23 nt, Artificial Sequence
  Synthetic
ugguuuuguacauguuggcaauu

SEQ ID NO: 668796 - RNA, 24 nt, Artificial Sequence
  Synthetic
cugguuuuguacauguuggcaauu

SEQ ID NO: 668797 - RNA, 18 nt, Artificial Sequence
  Synthetic
ccgauagaaaaugcaauu

SEQ ID NO: 668798 - RNA, 19 nt, Artificial Sequence
  Synthetic
uccgauagaaaaugcaauu

SEQ ID NO: 668799 - RNA, 20 nt, Artificial Sequence
  Synthetic
auccgauagaaaaugcaauu

SEQ ID NO: 668800 - RNA, 21 nt, Artificial Sequence
  Synthetic
cauccgauagaaaaugcaauu

SEQ ID NO: 668801 - RNA, 22 nt, Artificial Sequence
  Synthetic
ccauccgauagaaaaugcaauu

SEQ ID NO: 668802 - RNA, 23 nt, Artificial Sequence
  Synthetic
accauccgauagaaaaugcaauu

SEQ ID NO: 668803 - RNA, 24 nt, Artificial Sequence
  Synthetic
uaccauccgauagaaaaugcaauu

SEQ ID NO: 668804 - RNA, 18 nt, Artificial Sequence
  Synthetic
agaguuaagaaugcaauu

SEQ ID NO: 668805 - RNA, 19 nt, Artificial Sequence
  Synthetic
cagaguuaagaaugcaauu

SEQ ID NO: 668806 - RNA, 20 nt, Artificial Sequence
  Synthetic
ucagaguuaagaaugcaauu

SEQ ID NO: 668807 - RNA, 21 nt, Artificial Sequence
  Synthetic
aucagaguuaagaaugcaauu

SEQ ID NO: 668808 - RNA, 22 nt, Artificial Sequence
  Synthetic
aaucagaguuaagaaugcaauu

SEQ ID NO: 668809 - RNA, 23 nt, Artificial Sequence
  Synthetic
aaaucagaguuaagaaugcaauu

SEQ ID NO: 668810 - RNA, 24 nt, Artificial Sequence
  Synthetic
gaaaucagaguuaagaaugcaauu

SEQ ID NO: 668811 - RNA, 18 nt, Artificial Sequence
  Synthetic
aaauuggcucaugcaauu

SEQ ID NO: 668812 - RNA, 19 nt, Artificial Sequence
  Synthetic
gaaauuggcucaugcaauu

SEQ ID NO: 668813 - RNA, 20 nt, Artificial Sequence
  Synthetic
agaaauuggcucaugcaauu

SEQ ID NO: 668814 - RNA, 21 nt, Artificial Sequence
  Synthetic
aagaaauuggcucaugcaauu

SEQ ID NO: 668815 - RNA, 22 nt, Artificial Sequence
  Synthetic
uaagaaauuggcucaugcaauu

SEQ ID NO: 668816 - RNA, 23 nt, Artificial Sequence
  Synthetic
guaagaaauuggcucaugcaauu

SEQ ID NO: 668817 - RNA, 24 nt, Artificial Sequence
  Synthetic
gguaagaaauuggcucaugcaauu

SEQ ID NO: 668818 - RNA, 18 nt, Artificial Sequence
  Synthetic
aaaauaaaauaugcaauu

SEQ ID NO: 668819 - RNA, 19 nt, Artificial Sequence
  Synthetic
gaaaauaaaauaugcaauu

SEQ ID NO: 668820 - RNA, 20 nt, Artificial Sequence
  Synthetic
ugaaaauaaaauaugcaauu

SEQ ID NO: 668821 - RNA, 21 nt, Artificial Sequence
  Synthetic
augaaaauaaaauaugcaauu

SEQ ID NO: 668822 - RNA, 22 nt, Artificial Sequence
  Synthetic
uaugaaaauaaaauaugcaauu

SEQ ID NO: 668823 - RNA, 23 nt, Artificial Sequence
  Synthetic
cuaugaaaauaaaauaugcaauu

SEQ ID NO: 668824 - RNA, 24 nt, Artificial Sequence
  Synthetic
ucuaugaaaauaaaauaugcaauu

SEQ ID NO: 668825 - RNA, 18 nt, Artificial Sequence
  Synthetic
aaaauuaaauaugcaauu

SEQ ID NO: 668826 - RNA, 19 nt, Artificial Sequence
  Synthetic
uaaaauuaaauaugcaauu

SEQ ID NO: 668827 - RNA, 20 nt, Artificial Sequence
  Synthetic
auaaaauuaaauaugcaauu

SEQ ID NO: 668828 - RNA, 21 nt, Artificial Sequence
  Synthetic
uauaaaauuaaauaugcaauu

SEQ ID NO: 668829 - RNA, 22 nt, Artificial Sequence
  Synthetic
cuauaaaauuaaauaugcaauu

SEQ ID NO: 668830 - RNA, 23 nt, Artificial Sequence
  Synthetic
acuauaaaauuaaauaugcaauu

SEQ ID NO: 668831 - RNA, 24 nt, Artificial Sequence
  Synthetic
cacuauaaaauuaaauaugcaauu

SEQ ID NO: 668832 - RNA, 18 nt, Artificial Sequence
  Synthetic
ggcccacugccugcaauu

SEQ ID NO: 668833 - RNA, 19 nt, Artificial Sequence
  Synthetic
aggcccacugccugcaauu

SEQ ID NO: 668834 - RNA, 20 nt, Artificial Sequence
  Synthetic
caggcccacugccugcaauu

SEQ ID NO: 668835 - RNA, 21 nt, Artificial Sequence
  Synthetic
ccaggcccacugccugcaauu

SEQ ID NO: 668836 - RNA, 22 nt, Artificial Sequence
  Synthetic
gccaggcccacugccugcaauu

SEQ ID NO: 668837 - RNA, 23 nt, Artificial Sequence
  Synthetic
ggccaggcccacugccugcaauu

SEQ ID NO: 668838 - RNA, 24 nt, Artificial Sequence
  Synthetic
gggccaggcccacugccugcaauu

SEQ ID NO: 668839 - RNA, 18 nt, Artificial Sequence
  Synthetic
uucacagaugcugcaauu

SEQ ID NO: 668840 - RNA, 19 nt, Artificial Sequence
  Synthetic
uuucacagaugcugcaauu

SEQ ID NO: 668841 - RNA, 20 nt, Artificial Sequence
  Synthetic
auuucacagaugcugcaauu

SEQ ID NO: 668842 - RNA, 21 nt, Artificial Sequence
  Synthetic
aauuucacagaugcugcaauu

SEQ ID NO: 668843 - RNA, 22 nt, Artificial Sequence
  Synthetic
uaauuucacagaugcugcaauu

SEQ ID NO: 668844 - RNA, 23 nt, Artificial Sequence
  Synthetic
cuaauuucacagaugcugcaauu

SEQ ID NO: 668845 - RNA, 24 nt, Artificial Sequence
  Synthetic
ucuaauuucacagaugcugcaauu

SEQ ID NO: 668846 - RNA, 18 nt, Artificial Sequence
  Synthetic
aaccuuaaaaaaucaauu

SEQ ID NO: 668847 - RNA, 19 nt, Artificial Sequence
  Synthetic
gaaccuuaaaaaaucaauu

SEQ ID NO: 668848 - RNA, 20 nt, Artificial Sequence
  Synthetic
ugaaccuuaaaaaaucaauu

SEQ ID NO: 668849 - RNA, 21 nt, Artificial Sequence
  Synthetic
augaaccuuaaaaaaucaauu

SEQ ID NO: 668850 - RNA, 22 nt, Artificial Sequence
  Synthetic
caugaaccuuaaaaaaucaauu

SEQ ID NO: 668851 - RNA, 23 nt, Artificial Sequence
  Synthetic
ucaugaaccuuaaaaaaucaauu

SEQ ID NO: 668852 - RNA, 24 nt, Artificial Sequence
  Synthetic
uucaugaaccuuaaaaaaucaauu

SEQ ID NO: 668853 - RNA, 18 nt, Artificial Sequence
  Synthetic
agaacuucccaaucaauu

SEQ ID NO: 668854 - RNA, 19 nt, Artificial Sequence
  Synthetic
gagaacuucccaaucaauu

SEQ ID NO: 668855 - RNA, 20 nt, Artificial Sequence
  Synthetic
ggagaacuucccaaucaauu

SEQ ID NO: 668856 - RNA, 21 nt, Artificial Sequence
  Synthetic
aggagaacuucccaaucaauu

SEQ ID NO: 668857 - RNA, 22 nt, Artificial Sequence
  Synthetic
aaggagaacuucccaaucaauu

SEQ ID NO: 668858 - RNA, 23 nt, Artificial Sequence
  Synthetic
uaaggagaacuucccaaucaauu

SEQ ID NO: 668859 - RNA, 24 nt, Artificial Sequence
  Synthetic
auaaggagaacuucccaaucaauu

SEQ ID NO: 668860 - RNA, 18 nt, Artificial Sequence
  Synthetic
ggccuucuccaaucaauu

SEQ ID NO: 668861 - RNA, 19 nt, Artificial Sequence
  Synthetic
gggccuucuccaaucaauu

SEQ ID NO: 668862 - RNA, 20 nt, Artificial Sequence
  Synthetic
ugggccuucuccaaucaauu

SEQ ID NO: 668863 - RNA, 21 nt, Artificial Sequence
  Synthetic
gugggccuucuccaaucaauu

SEQ ID NO: 668864 - RNA, 22 nt, Artificial Sequence
  Synthetic
ggugggccuucuccaaucaauu

SEQ ID NO: 668865 - RNA, 23 nt, Artificial Sequence
  Synthetic
gggugggccuucuccaaucaauu

SEQ ID NO: 668866 - RNA, 24 nt, Artificial Sequence
  Synthetic
ugggugggccuucuccaaucaauu

SEQ ID NO: 668867 - RNA, 18 nt, Artificial Sequence
  Synthetic
cugaccuuagaaucaauu

SEQ ID NO: 668868 - RNA, 19 nt, Artificial Sequence
  Synthetic
ucugaccuuagaaucaauu

SEQ ID NO: 668869 - RNA, 20 nt, Artificial Sequence
  Synthetic
uucugaccuuagaaucaauu

SEQ ID NO: 668870 - RNA, 21 nt, Artificial Sequence
  Synthetic
auucugaccuuagaaucaauu

SEQ ID NO: 668871 - RNA, 22 nt, Artificial Sequence
  Synthetic
gauucugaccuuagaaucaauu

SEQ ID NO: 668872 - RNA, 23 nt, Artificial Sequence
  Synthetic
agauucugaccuuagaaucaauu

SEQ ID NO: 668873 - RNA, 24 nt, Artificial Sequence
  Synthetic
cagauucugaccuuagaaucaauu

SEQ ID NO: 668874 - RNA, 18 nt, Artificial Sequence
  Synthetic
ccuaguucggaaucaauu

SEQ ID NO: 668875 - RNA, 19 nt, Artificial Sequence
  Synthetic
uccuaguucggaaucaauu

SEQ ID NO: 668876 - RNA, 20 nt, Artificial Sequence
  Synthetic
uuccuaguucggaaucaauu

SEQ ID NO: 668877 - RNA, 21 nt, Artificial Sequence
  Synthetic
guuccuaguucggaaucaauu

SEQ ID NO: 668878 - RNA, 22 nt, Artificial Sequence
  Synthetic
uguuccuaguucggaaucaauu

SEQ ID NO: 668879 - RNA, 23 nt, Artificial Sequence
  Synthetic
auguuccuaguucggaaucaauu

SEQ ID NO: 668880 - RNA, 24 nt, Artificial Sequence
  Synthetic
cauguuccuaguucggaaucaauu

SEQ ID NO: 668881 - RNA, 18 nt, Artificial Sequence
  Synthetic
agagucuguagaucaauu

SEQ ID NO: 668882 - RNA, 19 nt, Artificial Sequence
  Synthetic
uagagucuguagaucaauu

SEQ ID NO: 668883 - RNA, 20 nt, Artificial Sequence
  Synthetic
auagagucuguagaucaauu

SEQ ID NO: 668884 - RNA, 21 nt, Artificial Sequence
  Synthetic
cauagagucuguagaucaauu

SEQ ID NO: 668885 - RNA, 22 nt, Artificial Sequence
  Synthetic
ccauagagucuguagaucaauu

SEQ ID NO: 668886 - RNA, 23 nt, Artificial Sequence
  Synthetic
uccauagagucuguagaucaauu

SEQ ID NO: 668887 - RNA, 24 nt, Artificial Sequence
  Synthetic
uuccauagagucuguagaucaauu

SEQ ID NO: 668888 - RNA, 18 nt, Artificial Sequence
  Synthetic
guccuaccauuaucaauu

SEQ ID NO: 668889 - RNA, 19 nt, Artificial Sequence
  Synthetic
uguccuaccauuaucaauu

SEQ ID NO: 668890 - RNA, 20 nt, Artificial Sequence
  Synthetic
cuguccuaccauuaucaauu

SEQ ID NO: 668891 - RNA, 21 nt, Artificial Sequence
  Synthetic
gcuguccuaccauuaucaauu

SEQ ID NO: 668892 - RNA, 22 nt, Artificial Sequence
  Synthetic
agcuguccuaccauuaucaauu

SEQ ID NO: 668893 - RNA, 23 nt, Artificial Sequence
  Synthetic
aagcuguccuaccauuaucaauu

SEQ ID NO: 668894 - RNA, 24 nt, Artificial Sequence
  Synthetic
caagcuguccuaccauuaucaauu

SEQ ID NO: 668895 - RNA, 18 nt, Artificial Sequence
  Synthetic
cuagagguauuaucaauu

SEQ ID NO: 668896 - RNA, 19 nt, Artificial Sequence
  Synthetic
ucuagagguauuaucaauu

SEQ ID NO: 668897 - RNA, 20 nt, Artificial Sequence
  Synthetic
cucuagagguauuaucaauu

SEQ ID NO: 668898 - RNA, 21 nt, Artificial Sequence
  Synthetic
ucucuagagguauuaucaauu

SEQ ID NO: 668899 - RNA, 22 nt, Artificial Sequence
  Synthetic
cucucuagagguauuaucaauu

SEQ ID NO: 668900 - RNA, 23 nt, Artificial Sequence
  Synthetic
ucucucuagagguauuaucaauu

SEQ ID NO: 668901 - RNA, 24 nt, Artificial Sequence
  Synthetic
uucucucuagagguauuaucaauu

SEQ ID NO: 668902 - RNA, 18 nt, Artificial Sequence
  Synthetic
uggaaaugcuacucaauu

SEQ ID NO: 668903 - RNA, 19 nt, Artificial Sequence
  Synthetic
auggaaaugcuacucaauu

SEQ ID NO: 668904 - RNA, 20 nt, Artificial Sequence
  Synthetic
uauggaaaugcuacucaauu

SEQ ID NO: 668905 - RNA, 21 nt, Artificial Sequence
  Synthetic
auauggaaaugcuacucaauu

SEQ ID NO: 668906 - RNA, 22 nt, Artificial Sequence
  Synthetic
aauauggaaaugcuacucaauu

SEQ ID NO: 668907 - RNA, 23 nt, Artificial Sequence
  Synthetic
aaauauggaaaugcuacucaauu

SEQ ID NO: 668908 - RNA, 24 nt, Artificial Sequence
  Synthetic
caaauauggaaaugcuacucaauu

SEQ ID NO: 668909 - RNA, 18 nt, Artificial Sequence
  Synthetic
uaaaauuuuaccucaauu

SEQ ID NO: 668910 - RNA, 19 nt, Artificial Sequence
  Synthetic
auaaaauuuuaccucaauu

SEQ ID NO: 668911 - RNA, 20 nt, Artificial Sequence
  Synthetic
uauaaaauuuuaccucaauu

SEQ ID NO: 668912 - RNA, 21 nt, Artificial Sequence
  Synthetic
auauaaaauuuuaccucaauu

SEQ ID NO: 668913 - RNA, 22 nt, Artificial Sequence
  Synthetic
uauauaaaauuuuaccucaauu

SEQ ID NO: 668914 - RNA, 23 nt, Artificial Sequence
  Synthetic
uuauauaaaauuuuaccucaauu

SEQ ID NO: 668915 - RNA, 24 nt, Artificial Sequence
  Synthetic
cuuauauaaaauuuuaccucaauu

SEQ ID NO: 668916 - RNA, 18 nt, Artificial Sequence
  Synthetic
uucagagguuccucaauu

SEQ ID NO: 668917 - RNA, 19 nt, Artificial Sequence
  Synthetic
auucagagguuccucaauu

SEQ ID NO: 668918 - RNA, 20 nt, Artificial Sequence
  Synthetic
gauucagagguuccucaauu

SEQ ID NO: 668919 - RNA, 21 nt, Artificial Sequence
  Synthetic
ugauucagagguuccucaauu

SEQ ID NO: 668920 - RNA, 22 nt, Artificial Sequence
  Synthetic
augauucagagguuccucaauu

SEQ ID NO: 668921 - RNA, 23 nt, Artificial Sequence
  Synthetic
uaugauucagagguuccucaauu

SEQ ID NO: 668922 - RNA, 24 nt, Artificial Sequence
  Synthetic
uuaugauucagagguuccucaauu

SEQ ID NO: 668923 - RNA, 18 nt, Artificial Sequence
  Synthetic
uaaaacgucaagucaauu

SEQ ID NO: 668924 - RNA, 19 nt, Artificial Sequence
  Synthetic
uuaaaacgucaagucaauu

SEQ ID NO: 668925 - RNA, 20 nt, Artificial Sequence
  Synthetic
uuuaaaacgucaagucaauu

SEQ ID NO: 668926 - RNA, 21 nt, Artificial Sequence
  Synthetic
auuuaaaacgucaagucaauu

SEQ ID NO: 668927 - RNA, 22 nt, Artificial Sequence
  Synthetic
aauuuaaaacgucaagucaauu

SEQ ID NO: 668928 - RNA, 23 nt, Artificial Sequence
  Synthetic
aaauuuaaaacgucaagucaauu

SEQ ID NO: 668929 - RNA, 24 nt, Artificial Sequence
  Synthetic
caaauuuaaaacgucaagucaauu

SEQ ID NO: 668930 - RNA, 18 nt, Artificial Sequence
  Synthetic
aggaacaggaagucaauu

SEQ ID NO: 668931 - RNA, 19 nt, Artificial Sequence
  Synthetic
aaggaacaggaagucaauu

SEQ ID NO: 668932 - RNA, 20 nt, Artificial Sequence
  Synthetic
gaaggaacaggaagucaauu

SEQ ID NO: 668933 - RNA, 21 nt, Artificial Sequence
  Synthetic
ggaaggaacaggaagucaauu

SEQ ID NO: 668934 - RNA, 22 nt, Artificial Sequence
  Synthetic
uggaaggaacaggaagucaauu

SEQ ID NO: 668935 - RNA, 23 nt, Artificial Sequence
  Synthetic
uuggaaggaacaggaagucaauu

SEQ ID NO: 668936 - RNA, 24 nt, Artificial Sequence
  Synthetic
guuggaaggaacaggaagucaauu

SEQ ID NO: 668937 - RNA, 18 nt, Artificial Sequence
  Synthetic
guacaugaauagucaauu

SEQ ID NO: 668938 - RNA, 19 nt, Artificial Sequence
  Synthetic
gguacaugaauagucaauu

SEQ ID NO: 668939 - RNA, 20 nt, Artificial Sequence
  Synthetic
agguacaugaauagucaauu

SEQ ID NO: 668940 - RNA, 21 nt, Artificial Sequence
  Synthetic
uagguacaugaauagucaauu

SEQ ID NO: 668941 - RNA, 22 nt, Artificial Sequence
  Synthetic
auagguacaugaauagucaauu

SEQ ID NO: 668942 - RNA, 23 nt, Artificial Sequence
  Synthetic
uauagguacaugaauagucaauu

SEQ ID NO: 668943 - RNA, 24 nt, Artificial Sequence
  Synthetic
uuauagguacaugaauagucaauu

SEQ ID NO: 668944 - RNA, 18 nt, Artificial Sequence
  Synthetic
aguuuuuguuggucaauu

SEQ ID NO: 668945 - RNA, 19 nt, Artificial Sequence
  Synthetic
uaguuuuuguuggucaauu

SEQ ID NO: 668946 - RNA, 20 nt, Artificial Sequence
  Synthetic
guaguuuuuguuggucaauu

SEQ ID NO: 668947 - RNA, 21 nt, Artificial Sequence
  Synthetic
uguaguuuuuguuggucaauu

SEQ ID NO: 668948 - RNA, 22 nt, Artificial Sequence
  Synthetic
uuguaguuuuuguuggucaauu

SEQ ID NO: 668949 - RNA, 23 nt, Artificial Sequence
  Synthetic
uuuguaguuuuuguuggucaauu

SEQ ID NO: 668950 - RNA, 24 nt, Artificial Sequence
  Synthetic
uuuuguaguuuuuguuggucaauu

SEQ ID NO: 668951 - RNA, 18 nt, Artificial Sequence
  Synthetic
ccauauguuuggucaauu

SEQ ID NO: 668952 - RNA, 19 nt, Artificial Sequence
  Synthetic
cccauauguuuggucaauu

SEQ ID NO: 668953 - RNA, 20 nt, Artificial Sequence
  Synthetic
ucccauauguuuggucaauu

SEQ ID NO: 668954 - RNA, 21 nt, Artificial Sequence
  Synthetic
uucccauauguuuggucaauu

SEQ ID NO: 668955 - RNA, 22 nt, Artificial Sequence
  Synthetic
cuucccauauguuuggucaauu

SEQ ID NO: 668956 - RNA, 23 nt, Artificial Sequence
  Synthetic
gcuucccauauguuuggucaauu

SEQ ID NO: 668957 - RNA, 24 nt, Artificial Sequence
  Synthetic
agcuucccauauguuuggucaauu

SEQ ID NO: 668958 - RNA, 18 nt, Artificial Sequence
  Synthetic
aauggaggacugucaauu

SEQ ID NO: 668959 - RNA, 19 nt, Artificial Sequence
  Synthetic
uaauggaggacugucaauu

SEQ ID NO: 668960 - RNA, 20 nt, Artificial Sequence
  Synthetic
guaauggaggacugucaauu

SEQ ID NO: 668961 - RNA, 21 nt, Artificial Sequence
  Synthetic
uguaauggaggacugucaauu

SEQ ID NO: 668962 - RNA, 22 nt, Artificial Sequence
  Synthetic
guguaauggaggacugucaauu

SEQ ID NO: 668963 - RNA, 23 nt, Artificial Sequence
  Synthetic
gguguaauggaggacugucaauu

SEQ ID NO: 668964 - RNA, 24 nt, Artificial Sequence
  Synthetic
agguguaauggaggacugucaauu

SEQ ID NO: 668965 - RNA, 18 nt, Artificial Sequence
  Synthetic
aauacaaauaauucaauu

SEQ ID NO: 668966 - RNA, 19 nt, Artificial Sequence
  Synthetic
aaauacaaauaauucaauu

SEQ ID NO: 668967 - RNA, 20 nt, Artificial Sequence
  Synthetic
uaaauacaaauaauucaauu

SEQ ID NO: 668968 - RNA, 21 nt, Artificial Sequence
  Synthetic
uuaaauacaaauaauucaauu

SEQ ID NO: 668969 - RNA, 22 nt, Artificial Sequence
  Synthetic
uuuaaauacaaauaauucaauu

SEQ ID NO: 668970 - RNA, 23 nt, Artificial Sequence
  Synthetic
auuuaaauacaaauaauucaauu

SEQ ID NO: 668971 - RNA, 24 nt, Artificial Sequence
  Synthetic
gauuuaaauacaaauaauucaauu

SEQ ID NO: 668972 - RNA, 18 nt, Artificial Sequence
  Synthetic
uaauagaaacauucaauu

SEQ ID NO: 668973 - RNA, 19 nt, Artificial Sequence
  Synthetic
uuaauagaaacauucaauu

SEQ ID NO: 668974 - RNA, 20 nt, Artificial Sequence
  Synthetic
cuuaauagaaacauucaauu

SEQ ID NO: 668975 - RNA, 21 nt, Artificial Sequence
  Synthetic
acuuaauagaaacauucaauu

SEQ ID NO: 668976 - RNA, 22 nt, Artificial Sequence
  Synthetic
uacuuaauagaaacauucaauu

SEQ ID NO: 668977 - RNA, 23 nt, Artificial Sequence
  Synthetic
uuacuuaauagaaacauucaauu

SEQ ID NO: 668978 - RNA, 24 nt, Artificial Sequence
  Synthetic
guuacuuaauagaaacauucaauu

SEQ ID NO: 668979 - RNA, 21 nt, Artificial Sequence
  Synthetic
agaaauaaaggguauucaauu

SEQ ID NO: 668980 - RNA, 22 nt, Artificial Sequence
  Synthetic
aagaaauaaaggguauucaauu

SEQ ID NO: 668981 - RNA, 23 nt, Artificial Sequence
  Synthetic
aaagaaauaaaggguauucaauu

SEQ ID NO: 668982 - RNA, 24 nt, Artificial Sequence
  Synthetic
aaaagaaauaaaggguauucaauu

SEQ ID NO: 668983 - RNA, 18 nt, Artificial Sequence
  Synthetic
uuacaaauuuauucaauu

SEQ ID NO: 668984 - RNA, 19 nt, Artificial Sequence
  Synthetic
uuuacaaauuuauucaauu

SEQ ID NO: 668985 - RNA, 20 nt, Artificial Sequence
  Synthetic
uuuuacaaauuuauucaauu

SEQ ID NO: 668986 - RNA, 21 nt, Artificial Sequence
  Synthetic
auuuuacaaauuuauucaauu

SEQ ID NO: 668987 - RNA, 22 nt, Artificial Sequence
  Synthetic
uauuuuacaaauuuauucaauu

SEQ ID NO: 668988 - RNA, 23 nt, Artificial Sequence
  Synthetic
uuauuuuacaaauuuauucaauu

SEQ ID NO: 668989 - RNA, 24 nt, Artificial Sequence
  Synthetic
uuuauuuuacaaauuuauucaauu

SEQ ID NO: 668990 - RNA, 18 nt, Artificial Sequence
  Synthetic
uaagugaucaguucaauu

SEQ ID NO: 668991 - RNA, 19 nt, Artificial Sequence
  Synthetic
auaagugaucaguucaauu

SEQ ID NO: 668992 - RNA, 20 nt, Artificial Sequence
  Synthetic
cauaagugaucaguucaauu

SEQ ID NO: 668993 - RNA, 21 nt, Artificial Sequence
  Synthetic
gcauaagugaucaguucaauu

SEQ ID NO: 668994 - RNA, 22 nt, Artificial Sequence
  Synthetic
ugcauaagugaucaguucaauu

SEQ ID NO: 668995 - RNA, 23 nt, Artificial Sequence
  Synthetic
gugcauaagugaucaguucaauu

SEQ ID NO: 668996 - RNA, 24 nt, Artificial Sequence
  Synthetic
ugugcauaagugaucaguucaauu

SEQ ID NO: 668997 - RNA, 18 nt, Artificial Sequence
  Synthetic
ugccucccuuguucaauu

SEQ ID NO: 668998 - RNA, 19 nt, Artificial Sequence
  Synthetic
augccucccuuguucaauu

SEQ ID NO: 668999 - RNA, 20 nt, Artificial Sequence
  Synthetic
aaugccucccuuguucaauu

SEQ ID NO: 669000 - RNA, 21 nt, Artificial Sequence
  Synthetic
aaaugccucccuuguucaauu

SEQ ID NO: 669001 - RNA, 22 nt, Artificial Sequence
  Synthetic
aaaaugccucccuuguucaauu

SEQ ID NO: 669002 - RNA, 23 nt, Artificial Sequence
  Synthetic
aaaaaugccucccuuguucaauu

SEQ ID NO: 669003 - RNA, 24 nt, Artificial Sequence
  Synthetic
caaaaaugccucccuuguucaauu

SEQ ID NO: 669004 - RNA, 18 nt, Artificial Sequence
  Synthetic
gaauggucauaaagaauu

SEQ ID NO: 669005 - RNA, 19 nt, Artificial Sequence
  Synthetic
ggaauggucauaaagaauu

SEQ ID NO: 669006 - RNA, 20 nt, Artificial Sequence
  Synthetic
aggaauggucauaaagaauu

SEQ ID NO: 669007 - RNA, 21 nt, Artificial Sequence
  Synthetic
aaggaauggucauaaagaauu

SEQ ID NO: 669008 - RNA, 22 nt, Artificial Sequence
  Synthetic
aaaggaauggucauaaagaauu

SEQ ID NO: 669009 - RNA, 23 nt, Artificial Sequence
  Synthetic
gaaaggaauggucauaaagaauu

SEQ ID NO: 669010 - RNA, 24 nt, Artificial Sequence
  Synthetic
agaaaggaauggucauaaagaauu

SEQ ID NO: 669011 - RNA, 18 nt, Artificial Sequence
  Synthetic
aaauuaauauaaagaauu

SEQ ID NO: 669012 - RNA, 19 nt, Artificial Sequence
  Synthetic
aaaauuaauauaaagaauu

SEQ ID NO: 669013 - RNA, 20 nt, Artificial Sequence
  Synthetic
aaaaauuaauauaaagaauu

SEQ ID NO: 669014 - RNA, 21 nt, Artificial Sequence
  Synthetic
aaaaaauuaauauaaagaauu

SEQ ID NO: 669015 - RNA, 22 nt, Artificial Sequence
  Synthetic
caaaaaauuaauauaaagaauu

SEQ ID NO: 669016 - RNA, 23 nt, Artificial Sequence
  Synthetic
ucaaaaaauuaauauaaagaauu

SEQ ID NO: 669017 - RNA, 24 nt, Artificial Sequence
  Synthetic
uucaaaaaauuaauauaaagaauu

SEQ ID NO: 669018 - RNA, 18 nt, Artificial Sequence
  Synthetic
uugagaagaacaagaauu

SEQ ID NO: 669019 - RNA, 19 nt, Artificial Sequence
  Synthetic
uuugagaagaacaagaauu

SEQ ID NO: 669020 - RNA, 20 nt, Artificial Sequence
  Synthetic
cuuugagaagaacaagaauu

SEQ ID NO: 669021 - RNA, 21 nt, Artificial Sequence
  Synthetic
ucuuugagaagaacaagaauu

SEQ ID NO: 669022 - RNA, 22 nt, Artificial Sequence
  Synthetic
gucuuugagaagaacaagaauu

SEQ ID NO: 669023 - RNA, 23 nt, Artificial Sequence
  Synthetic
ugucuuugagaagaacaagaauu

SEQ ID NO: 669024 - RNA, 24 nt, Artificial Sequence
  Synthetic
uugucuuugagaagaacaagaauu

SEQ ID NO: 669025 - RNA, 18 nt, Artificial Sequence
  Synthetic
ucgucagugccaagaauu

SEQ ID NO: 669026 - RNA, 19 nt, Artificial Sequence
  Synthetic
uucgucagugccaagaauu

SEQ ID NO: 669027 - RNA, 20 nt, Artificial Sequence
  Synthetic
cuucgucagugccaagaauu

SEQ ID NO: 669028 - RNA, 21 nt, Artificial Sequence
  Synthetic
ucuucgucagugccaagaauu

SEQ ID NO: 669029 - RNA, 22 nt, Artificial Sequence
  Synthetic
cucuucgucagugccaagaauu

SEQ ID NO: 669030 - RNA, 23 nt, Artificial Sequence
  Synthetic
ucucuucgucagugccaagaauu

SEQ ID NO: 669031 - RNA, 24 nt, Artificial Sequence
  Synthetic
gucucuucgucagugccaagaauu

SEQ ID NO: 669032 - RNA, 18 nt, Artificial Sequence
  Synthetic
uaccccaagggaagaauu

SEQ ID NO: 669033 - RNA, 19 nt, Artificial Sequence
  Synthetic
cuaccccaagggaagaauu

SEQ ID NO: 669034 - RNA, 20 nt, Artificial Sequence
  Synthetic
ccuaccccaagggaagaauu

SEQ ID NO: 669035 - RNA, 21 nt, Artificial Sequence
  Synthetic
cccuaccccaagggaagaauu

SEQ ID NO: 669036 - RNA, 22 nt, Artificial Sequence
  Synthetic
ccccuaccccaagggaagaauu

SEQ ID NO: 669037 - RNA, 23 nt, Artificial Sequence
  Synthetic
cccccuaccccaagggaagaauu

SEQ ID NO: 669038 - RNA, 24 nt, Artificial Sequence
  Synthetic
gcccccuaccccaagggaagaauu

SEQ ID NO: 669039 - RNA, 18 nt, Artificial Sequence
  Synthetic
ucuuaacaacuaagaauu

SEQ ID NO: 669040 - RNA, 19 nt, Artificial Sequence
  Synthetic
cucuuaacaacuaagaauu

SEQ ID NO: 669041 - RNA, 20 nt, Artificial Sequence
  Synthetic
gcucuuaacaacuaagaauu

SEQ ID NO: 669042 - RNA, 21 nt, Artificial Sequence
  Synthetic
ugcucuuaacaacuaagaauu

SEQ ID NO: 669043 - RNA, 22 nt, Artificial Sequence
  Synthetic
cugcucuuaacaacuaagaauu

SEQ ID NO: 669044 - RNA, 23 nt, Artificial Sequence
  Synthetic
ccugcucuuaacaacuaagaauu

SEQ ID NO: 669045 - RNA, 24 nt, Artificial Sequence
  Synthetic
accugcucuuaacaacuaagaauu

SEQ ID NO: 669046 - RNA, 18 nt, Artificial Sequence
  Synthetic
uuguugacucuaagaauu

SEQ ID NO: 669047 - RNA, 19 nt, Artificial Sequence
  Synthetic
auuguugacucuaagaauu

SEQ ID NO: 669048 - RNA, 20 nt, Artificial Sequence
  Synthetic
aauuguugacucuaagaauu

SEQ ID NO: 669049 - RNA, 21 nt, Artificial Sequence
  Synthetic
caauuguugacucuaagaauu

SEQ ID NO: 669050 - RNA, 22 nt, Artificial Sequence
  Synthetic
acaauuguugacucuaagaauu

SEQ ID NO: 669051 - RNA, 23 nt, Artificial Sequence
  Synthetic
aacaauuguugacucuaagaauu

SEQ ID NO: 669052 - RNA, 24 nt, Artificial Sequence
  Synthetic
uaacaauuguugacucuaagaauu

SEQ ID NO: 669053 - RNA, 18 nt, Artificial Sequence
  Synthetic
uaaauuucucuaagaauu

SEQ ID NO: 669054 - RNA, 19 nt, Artificial Sequence
  Synthetic
cuaaauuucucuaagaauu

SEQ ID NO: 669055 - RNA, 20 nt, Artificial Sequence
  Synthetic
acuaaauuucucuaagaauu

SEQ ID NO: 669056 - RNA, 21 nt, Artificial Sequence
  Synthetic
cacuaaauuucucuaagaauu

SEQ ID NO: 669057 - RNA, 22 nt, Artificial Sequence
  Synthetic
ucacuaaauuucucuaagaauu

SEQ ID NO: 669058 - RNA, 23 nt, Artificial Sequence
  Synthetic
aucacuaaauuucucuaagaauu

SEQ ID NO: 669059 - RNA, 24 nt, Artificial Sequence
  Synthetic
uaucacuaaauuucucuaagaauu

SEQ ID NO: 669060 - RNA, 18 nt, Artificial Sequence
  Synthetic
cucuagggcguaagaauu

SEQ ID NO: 669061 - RNA, 19 nt, Artificial Sequence
  Synthetic
acucuagggcguaagaauu

SEQ ID NO: 669062 - RNA, 20 nt, Artificial Sequence
  Synthetic
gacucuagggcguaagaauu

SEQ ID NO: 669063 - RNA, 21 nt, Artificial Sequence
  Synthetic
ugacucuagggcguaagaauu

SEQ ID NO: 669064 - RNA, 22 nt, Artificial Sequence
  Synthetic
augacucuagggcguaagaauu

SEQ ID NO: 669065 - RNA, 23 nt, Artificial Sequence
  Synthetic
aaugacucuagggcguaagaauu

SEQ ID NO: 669066 - RNA, 24 nt, Artificial Sequence
  Synthetic
aaaugacucuagggcguaagaauu

SEQ ID NO: 669067 - RNA, 18 nt, Artificial Sequence
  Synthetic
cauuuugguuuaagaauu

SEQ ID NO: 669068 - RNA, 19 nt, Artificial Sequence
  Synthetic
acauuuugguuuaagaauu

SEQ ID NO: 669069 - RNA, 20 nt, Artificial Sequence
  Synthetic
uacauuuugguuuaagaauu

SEQ ID NO: 669070 - RNA, 21 nt, Artificial Sequence
  Synthetic
guacauuuugguuuaagaauu

SEQ ID NO: 669071 - RNA, 22 nt, Artificial Sequence
  Synthetic
aguacauuuugguuuaagaauu

SEQ ID NO: 669072 - RNA, 23 nt, Artificial Sequence
  Synthetic
uaguacauuuugguuuaagaauu

SEQ ID NO: 669073 - RNA, 24 nt, Artificial Sequence
  Synthetic
cuaguacauuuugguuuaagaauu

SEQ ID NO: 669074 - RNA, 18 nt, Artificial Sequence
  Synthetic
uaggagaguaacagaauu

SEQ ID NO: 669075 - RNA, 19 nt, Artificial Sequence
  Synthetic
guaggagaguaacagaauu

SEQ ID NO: 669076 - RNA, 20 nt, Artificial Sequence
  Synthetic
gguaggagaguaacagaauu

SEQ ID NO: 669077 - RNA, 21 nt, Artificial Sequence
  Synthetic
cgguaggagaguaacagaauu

SEQ ID NO: 669078 - RNA, 22 nt, Artificial Sequence
  Synthetic
acgguaggagaguaacagaauu

SEQ ID NO: 669079 - RNA, 23 nt, Artificial Sequence
  Synthetic
aacgguaggagaguaacagaauu

SEQ ID NO: 669080 - RNA, 24 nt, Artificial Sequence
  Synthetic
gaacgguaggagaguaacagaauu

SEQ ID NO: 669081 - RNA, 18 nt, Artificial Sequence
  Synthetic
cuucagacacacagaauu

SEQ ID NO: 669082 - RNA, 19 nt, Artificial Sequence
  Synthetic
acuucagacacacagaauu

SEQ ID NO: 669083 - RNA, 20 nt, Artificial Sequence
  Synthetic
aacuucagacacacagaauu

SEQ ID NO: 669084 - RNA, 21 nt, Artificial Sequence
  Synthetic
aaacuucagacacacagaauu

SEQ ID NO: 669085 - RNA, 22 nt, Artificial Sequence
  Synthetic
caaacuucagacacacagaauu

SEQ ID NO: 669086 - RNA, 23 nt, Artificial Sequence
  Synthetic
gcaaacuucagacacacagaauu

SEQ ID NO: 669087 - RNA, 24 nt, Artificial Sequence
  Synthetic
agcaaacuucagacacacagaauu

SEQ ID NO: 669088 - RNA, 18 nt, Artificial Sequence
  Synthetic
aguagaauucacagaauu

SEQ ID NO: 669089 - RNA, 19 nt, Artificial Sequence
  Synthetic
aaguagaauucacagaauu

SEQ ID NO: 669090 - RNA, 20 nt, Artificial Sequence
  Synthetic
gaaguagaauucacagaauu

SEQ ID NO: 669091 - RNA, 21 nt, Artificial Sequence
  Synthetic
ugaaguagaauucacagaauu

SEQ ID NO: 669092 - RNA, 22 nt, Artificial Sequence
  Synthetic
uugaaguagaauucacagaauu

SEQ ID NO: 669093 - RNA, 23 nt, Artificial Sequence
  Synthetic
uuugaaguagaauucacagaauu

SEQ ID NO: 669094 - RNA, 24 nt, Artificial Sequence
  Synthetic
uuuugaaguagaauucacagaauu

SEQ ID NO: 669095 - RNA, 18 nt, Artificial Sequence
  Synthetic
ugauaugaauacagaauu

SEQ ID NO: 669096 - RNA, 19 nt, Artificial Sequence
  Synthetic
gugauaugaauacagaauu

SEQ ID NO: 669097 - RNA, 20 nt, Artificial Sequence
  Synthetic
ggugauaugaauacagaauu

SEQ ID NO: 669098 - RNA, 21 nt, Artificial Sequence
  Synthetic
gggugauaugaauacagaauu

SEQ ID NO: 669099 - RNA, 22 nt, Artificial Sequence
  Synthetic
agggugauaugaauacagaauu

SEQ ID NO: 669100 - RNA, 23 nt, Artificial Sequence
  Synthetic
gagggugauaugaauacagaauu

SEQ ID NO: 669101 - RNA, 24 nt, Artificial Sequence
  Synthetic
agagggugauaugaauacagaauu

SEQ ID NO: 669102 - RNA, 18 nt, Artificial Sequence
  Synthetic
gacuuucuuuacagaauu

SEQ ID NO: 669103 - RNA, 19 nt, Artificial Sequence
  Synthetic
ugacuuucuuuacagaauu

SEQ ID NO: 669104 - RNA, 20 nt, Artificial Sequence
  Synthetic
cugacuuucuuuacagaauu

SEQ ID NO: 669105 - RNA, 21 nt, Artificial Sequence
  Synthetic
acugacuuucuuuacagaauu

SEQ ID NO: 669106 - RNA, 22 nt, Artificial Sequence
  Synthetic
cacugacuuucuuuacagaauu

SEQ ID NO: 669107 - RNA, 23 nt, Artificial Sequence
  Synthetic
ccacugacuuucuuuacagaauu

SEQ ID NO: 669108 - RNA, 24 nt, Artificial Sequence
  Synthetic
accacugacuuucuuuacagaauu

SEQ ID NO: 669109 - RNA, 18 nt, Artificial Sequence
  Synthetic
acauggaggcccagaauu

SEQ ID NO: 669110 - RNA, 19 nt, Artificial Sequence
  Synthetic
uacauggaggcccagaauu

SEQ ID NO: 669111 - RNA, 20 nt, Artificial Sequence
  Synthetic
cuacauggaggcccagaauu

SEQ ID NO: 669112 - RNA, 21 nt, Artificial Sequence
  Synthetic
acuacauggaggcccagaauu

SEQ ID NO: 669113 - RNA, 22 nt, Artificial Sequence
  Synthetic
aacuacauggaggcccagaauu

SEQ ID NO: 669114 - RNA, 23 nt, Artificial Sequence
  Synthetic
aaacuacauggaggcccagaauu

SEQ ID NO: 669115 - RNA, 24 nt, Artificial Sequence
  Synthetic
aaaacuacauggaggcccagaauu

SEQ ID NO: 669116 - RNA, 18 nt, Artificial Sequence
  Synthetic
agccaaucucccagaauu

SEQ ID NO: 669117 - RNA, 19 nt, Artificial Sequence
  Synthetic
gagccaaucucccagaauu

SEQ ID NO: 669118 - RNA, 20 nt, Artificial Sequence
  Synthetic
agagccaaucucccagaauu

SEQ ID NO: 669119 - RNA, 21 nt, Artificial Sequence
  Synthetic
gagagccaaucucccagaauu

SEQ ID NO: 669120 - RNA, 22 nt, Artificial Sequence
  Synthetic
agagagccaaucucccagaauu

SEQ ID NO: 669121 - RNA, 23 nt, Artificial Sequence
  Synthetic
cagagagccaaucucccagaauu

SEQ ID NO: 669122 - RNA, 24 nt, Artificial Sequence
  Synthetic
gcagagagccaaucucccagaauu

SEQ ID NO: 669123 - RNA, 18 nt, Artificial Sequence
  Synthetic
uguuuuauuaucagaauu

SEQ ID NO: 669124 - RNA, 19 nt, Artificial Sequence
  Synthetic
auguuuuauuaucagaauu

SEQ ID NO: 669125 - RNA, 20 nt, Artificial Sequence
  Synthetic
aauguuuuauuaucagaauu

SEQ ID NO: 669126 - RNA, 21 nt, Artificial Sequence
  Synthetic
gaauguuuuauuaucagaauu

SEQ ID NO: 669127 - RNA, 22 nt, Artificial Sequence
  Synthetic
ggaauguuuuauuaucagaauu

SEQ ID NO: 669128 - RNA, 23 nt, Artificial Sequence
  Synthetic
uggaauguuuuauuaucagaauu

SEQ ID NO: 669129 - RNA, 24 nt, Artificial Sequence
  Synthetic
cuggaauguuuuauuaucagaauu

SEQ ID NO: 669130 - RNA, 18 nt, Artificial Sequence
  Synthetic
uagucaacucucagaauu

SEQ ID NO: 669131 - RNA, 19 nt, Artificial Sequence
  Synthetic
auagucaacucucagaauu

SEQ ID NO: 669132 - RNA, 20 nt, Artificial Sequence
  Synthetic
cauagucaacucucagaauu

SEQ ID NO: 669133 - RNA, 21 nt, Artificial Sequence
  Synthetic
ucauagucaacucucagaauu

SEQ ID NO: 669134 - RNA, 22 nt, Artificial Sequence
  Synthetic
aucauagucaacucucagaauu

SEQ ID NO: 669135 - RNA, 23 nt, Artificial Sequence
  Synthetic
uaucauagucaacucucagaauu

SEQ ID NO: 669136 - RNA, 24 nt, Artificial Sequence
  Synthetic
auaucauagucaacucucagaauu

SEQ ID NO: 669137 - RNA, 18 nt, Artificial Sequence
  Synthetic
accaaaguguucagaauu

SEQ ID NO: 669138 - RNA, 19 nt, Artificial Sequence
  Synthetic
caccaaaguguucagaauu

SEQ ID NO: 669139 - RNA, 20 nt, Artificial Sequence
  Synthetic
ucaccaaaguguucagaauu

SEQ ID NO: 669140 - RNA, 21 nt, Artificial Sequence
  Synthetic
gucaccaaaguguucagaauu

SEQ ID NO: 669141 - RNA, 22 nt, Artificial Sequence
  Synthetic
ggucaccaaaguguucagaauu

SEQ ID NO: 669142 - RNA, 23 nt, Artificial Sequence
  Synthetic
gggucaccaaaguguucagaauu

SEQ ID NO: 669143 - RNA, 24 nt, Artificial Sequence
  Synthetic
ggggucaccaaaguguucagaauu

SEQ ID NO: 669144 - RNA, 18 nt, Artificial Sequence
  Synthetic
ggguuaacuuagagaauu

SEQ ID NO: 669145 - RNA, 19 nt, Artificial Sequence
  Synthetic
uggguuaacuuagagaauu

SEQ ID NO: 669146 - RNA, 20 nt, Artificial Sequence
  Synthetic
guggguuaacuuagagaauu

SEQ ID NO: 669147 - RNA, 21 nt, Artificial Sequence
  Synthetic
gguggguuaacuuagagaauu

SEQ ID NO: 669148 - RNA, 22 nt, Artificial Sequence
  Synthetic
agguggguuaacuuagagaauu

SEQ ID NO: 669149 - RNA, 23 nt, Artificial Sequence
  Synthetic
uagguggguuaacuuagagaauu

SEQ ID NO: 669150 - RNA, 24 nt, Artificial Sequence
  Synthetic
uuagguggguuaacuuagagaauu

SEQ ID NO: 669151 - RNA, 18 nt, Artificial Sequence
  Synthetic
gaaacacuaacgagaauu

SEQ ID NO: 669152 - RNA, 19 nt, Artificial Sequence
  Synthetic
ugaaacacuaacgagaauu

SEQ ID NO: 669153 - RNA, 20 nt, Artificial Sequence
  Synthetic
cugaaacacuaacgagaauu

SEQ ID NO: 669154 - RNA, 21 nt, Artificial Sequence
  Synthetic
gcugaaacacuaacgagaauu

SEQ ID NO: 669155 - RNA, 22 nt, Artificial Sequence
  Synthetic
ugcugaaacacuaacgagaauu

SEQ ID NO: 669156 - RNA, 23 nt, Artificial Sequence
  Synthetic
cugcugaaacacuaacgagaauu

SEQ ID NO: 669157 - RNA, 24 nt, Artificial Sequence
  Synthetic
gcugcugaaacacuaacgagaauu

SEQ ID NO: 669158 - RNA, 18 nt, Artificial Sequence
  Synthetic
ugagacuuuuggagaauu

SEQ ID NO: 669159 - RNA, 19 nt, Artificial Sequence
  Synthetic
gugagacuuuuggagaauu

SEQ ID NO: 669160 - RNA, 20 nt, Artificial Sequence
  Synthetic
ggugagacuuuuggagaauu

SEQ ID NO: 669161 - RNA, 21 nt, Artificial Sequence
  Synthetic
aggugagacuuuuggagaauu

SEQ ID NO: 669162 - RNA, 22 nt, Artificial Sequence
  Synthetic
aaggugagacuuuuggagaauu

SEQ ID NO: 669163 - RNA, 23 nt, Artificial Sequence
  Synthetic
gaaggugagacuuuuggagaauu

SEQ ID NO: 669164 - RNA, 24 nt, Artificial Sequence
  Synthetic
agaaggugagacuuuuggagaauu

SEQ ID NO: 669165 - RNA, 18 nt, Artificial Sequence
  Synthetic
cuuauagucaugagaauu

SEQ ID NO: 669166 - RNA, 19 nt, Artificial Sequence
  Synthetic
acuuauagucaugagaauu

SEQ ID NO: 669167 - RNA, 20 nt, Artificial Sequence
  Synthetic
gacuuauagucaugagaauu

SEQ ID NO: 669168 - RNA, 21 nt, Artificial Sequence
  Synthetic
ggacuuauagucaugagaauu

SEQ ID NO: 669169 - RNA, 22 nt, Artificial Sequence
  Synthetic
gggacuuauagucaugagaauu

SEQ ID NO: 669170 - RNA, 23 nt, Artificial Sequence
  Synthetic
ugggacuuauagucaugagaauu

SEQ ID NO: 669171 - RNA, 24 nt, Artificial Sequence
  Synthetic
augggacuuauagucaugagaauu

SEQ ID NO: 669172 - RNA, 18 nt, Artificial Sequence
  Synthetic
aaggagagagugagaauu

SEQ ID NO: 669173 - RNA, 19 nt, Artificial Sequence
  Synthetic
caaggagagagugagaauu

SEQ ID NO: 669174 - RNA, 20 nt, Artificial Sequence
  Synthetic
ucaaggagagagugagaauu

SEQ ID NO: 669175 - RNA, 21 nt, Artificial Sequence
  Synthetic
uucaaggagagagugagaauu

SEQ ID NO: 669176 - RNA, 22 nt, Artificial Sequence
  Synthetic
uuucaaggagagagugagaauu

SEQ ID NO: 669177 - RNA, 23 nt, Artificial Sequence
  Synthetic
auuucaaggagagagugagaauu

SEQ ID NO: 669178 - RNA, 24 nt, Artificial Sequence
  Synthetic
aauuucaaggagagagugagaauu

SEQ ID NO: 669179 - RNA, 18 nt, Artificial Sequence
  Synthetic
uuucugcaucauagaauu

SEQ ID NO: 669180 - RNA, 19 nt, Artificial Sequence
  Synthetic
auuucugcaucauagaauu

SEQ ID NO: 669181 - RNA, 20 nt, Artificial Sequence
  Synthetic
aauuucugcaucauagaauu

SEQ ID NO: 669182 - RNA, 21 nt, Artificial Sequence
  Synthetic
caauuucugcaucauagaauu

SEQ ID NO: 669183 - RNA, 22 nt, Artificial Sequence
  Synthetic
ucaauuucugcaucauagaauu

SEQ ID NO: 669184 - RNA, 23 nt, Artificial Sequence
  Synthetic
gucaauuucugcaucauagaauu

SEQ ID NO: 669185 - RNA, 24 nt, Artificial Sequence
  Synthetic
ugucaauuucugcaucauagaauu

SEQ ID NO: 669186 - RNA, 18 nt, Artificial Sequence
  Synthetic
ugaaaugaggauagaauu

SEQ ID NO: 669187 - RNA, 19 nt, Artificial Sequence
  Synthetic
gugaaaugaggauagaauu

SEQ ID NO: 669188 - RNA, 20 nt, Artificial Sequence
  Synthetic
cgugaaaugaggauagaauu

SEQ ID NO: 669189 - RNA, 21 nt, Artificial Sequence
  Synthetic
ccgugaaaugaggauagaauu

SEQ ID NO: 669190 - RNA, 22 nt, Artificial Sequence
  Synthetic
uccgugaaaugaggauagaauu

SEQ ID NO: 669191 - RNA, 23 nt, Artificial Sequence
  Synthetic
guccgugaaaugaggauagaauu

SEQ ID NO: 669192 - RNA, 24 nt, Artificial Sequence
  Synthetic
gguccgugaaaugaggauagaauu

SEQ ID NO: 669193 - RNA, 18 nt, Artificial Sequence
  Synthetic
aaauuugaaucuagaauu

SEQ ID NO: 669194 - RNA, 19 nt, Artificial Sequence
  Synthetic
gaaauuugaaucuagaauu

SEQ ID NO: 669195 - RNA, 20 nt, Artificial Sequence
  Synthetic
agaaauuugaaucuagaauu

SEQ ID NO: 669196 - RNA, 21 nt, Artificial Sequence
  Synthetic
uagaaauuugaaucuagaauu

SEQ ID NO: 669197 - RNA, 22 nt, Artificial Sequence
  Synthetic
uuagaaauuugaaucuagaauu

SEQ ID NO: 669198 - RNA, 23 nt, Artificial Sequence
  Synthetic
uuuagaaauuugaaucuagaauu

SEQ ID NO: 669199 - RNA, 24 nt, Artificial Sequence
  Synthetic
auuuagaaauuugaaucuagaauu

SEQ ID NO: 669200 - RNA, 18 nt, Artificial Sequence
  Synthetic
ccuuuggaagguagaauu

SEQ ID NO: 669201 - RNA, 19 nt, Artificial Sequence
  Synthetic
accuuuggaagguagaauu

SEQ ID NO: 669202 - RNA, 20 nt, Artificial Sequence
  Synthetic
uaccuuuggaagguagaauu

SEQ ID NO: 669203 - RNA, 21 nt, Artificial Sequence
  Synthetic
cuaccuuuggaagguagaauu

SEQ ID NO: 669204 - RNA, 22 nt, Artificial Sequence
  Synthetic
ccuaccuuuggaagguagaauu

SEQ ID NO: 669205 - RNA, 23 nt, Artificial Sequence
  Synthetic
uccuaccuuuggaagguagaauu

SEQ ID NO: 669206 - RNA, 24 nt, Artificial Sequence
  Synthetic
guccuaccuuuggaagguagaauu

SEQ ID NO: 669207 - RNA, 18 nt, Artificial Sequence
  Synthetic
augcuaaaaguuagaauu

SEQ ID NO: 669208 - RNA, 19 nt, Artificial Sequence
  Synthetic
aaugcuaaaaguuagaauu

SEQ ID NO: 669209 - RNA, 20 nt, Artificial Sequence
  Synthetic
aaaugcuaaaaguuagaauu

SEQ ID NO: 669210 - RNA, 21 nt, Artificial Sequence
  Synthetic
aaaaugcuaaaaguuagaauu

SEQ ID NO: 669211 - RNA, 22 nt, Artificial Sequence
  Synthetic
aaaaaugcuaaaaguuagaauu

SEQ ID NO: 669212 - RNA, 23 nt, Artificial Sequence
  Synthetic
aaaaaaugcuaaaaguuagaauu

SEQ ID NO: 669213 - RNA, 24 nt, Artificial Sequence
  Synthetic
aaaaaaaugcuaaaaguuagaauu

SEQ ID NO: 669214 - RNA, 18 nt, Artificial Sequence
  Synthetic
aaaauggaauuuagaauu

SEQ ID NO: 669215 - RNA, 19 nt, Artificial Sequence
  Synthetic
uaaaauggaauuuagaauu

SEQ ID NO: 669216 - RNA, 20 nt, Artificial Sequence
  Synthetic
guaaaauggaauuuagaauu

SEQ ID NO: 669217 - RNA, 21 nt, Artificial Sequence
  Synthetic
uguaaaauggaauuuagaauu

SEQ ID NO: 669218 - RNA, 22 nt, Artificial Sequence
  Synthetic
auguaaaauggaauuuagaauu

SEQ ID NO: 669219 - RNA, 23 nt, Artificial Sequence
  Synthetic
gauguaaaauggaauuuagaauu

SEQ ID NO: 669220 - RNA, 24 nt, Artificial Sequence
  Synthetic
ggauguaaaauggaauuuagaauu

SEQ ID NO: 669221 - RNA, 18 nt, Artificial Sequence
  Synthetic
ugacaugaauuuagaauu

SEQ ID NO: 669222 - RNA, 19 nt, Artificial Sequence
  Synthetic
augacaugaauuuagaauu

SEQ ID NO: 669223 - RNA, 20 nt, Artificial Sequence
  Synthetic
uaugacaugaauuuagaauu

SEQ ID NO: 669224 - RNA, 21 nt, Artificial Sequence
  Synthetic
auaugacaugaauuuagaauu

SEQ ID NO: 669225 - RNA, 22 nt, Artificial Sequence
  Synthetic
aauaugacaugaauuuagaauu

SEQ ID NO: 669226 - RNA, 23 nt, Artificial Sequence
  Synthetic
aaauaugacaugaauuuagaauu

SEQ ID NO: 669227 - RNA, 24 nt, Artificial Sequence
  Synthetic
gaaauaugacaugaauuuagaauu

SEQ ID NO: 669228 - RNA, 18 nt, Artificial Sequence
  Synthetic
gggcuuucuuuuagaauu

SEQ ID NO: 669229 - RNA, 19 nt, Artificial Sequence
  Synthetic
agggcuuucuuuuagaauu

SEQ ID NO: 669230 - RNA, 20 nt, Artificial Sequence
  Synthetic
aagggcuuucuuuuagaauu

SEQ ID NO: 669231 - RNA, 21 nt, Artificial Sequence
  Synthetic
caagggcuuucuuuuagaauu

SEQ ID NO: 669232 - RNA, 22 nt, Artificial Sequence
  Synthetic
acaagggcuuucuuuuagaauu

SEQ ID NO: 669233 - RNA, 23 nt, Artificial Sequence
  Synthetic
cacaagggcuuucuuuuagaauu

SEQ ID NO: 669234 - RNA, 24 nt, Artificial Sequence
  Synthetic
acacaagggcuuucuuuuagaauu

SEQ ID NO: 669235 - RNA, 18 nt, Artificial Sequence
  Synthetic
ugguagagaugacgaauu

SEQ ID NO: 669236 - RNA, 19 nt, Artificial Sequence
  Synthetic
uugguagagaugacgaauu

SEQ ID NO: 669237 - RNA, 20 nt, Artificial Sequence
  Synthetic
uuugguagagaugacgaauu

SEQ ID NO: 669238 - RNA, 21 nt, Artificial Sequence
  Synthetic
guuugguagagaugacgaauu

SEQ ID NO: 669239 - RNA, 22 nt, Artificial Sequence
  Synthetic
uguuugguagagaugacgaauu

SEQ ID NO: 669240 - RNA, 23 nt, Artificial Sequence
  Synthetic
uuguuugguagagaugacgaauu

SEQ ID NO: 669241 - RNA, 24 nt, Artificial Sequence
  Synthetic
guuguuugguagagaugacgaauu

SEQ ID NO: 669242 - RNA, 18 nt, Artificial Sequence
  Synthetic
uuaaugacauaucgaauu

SEQ ID NO: 669243 - RNA, 19 nt, Artificial Sequence
  Synthetic
auuaaugacauaucgaauu

SEQ ID NO: 669244 - RNA, 20 nt, Artificial Sequence
  Synthetic
cauuaaugacauaucgaauu

SEQ ID NO: 669245 - RNA, 21 nt, Artificial Sequence
  Synthetic
acauuaaugacauaucgaauu

SEQ ID NO: 669246 - RNA, 22 nt, Artificial Sequence
  Synthetic
uacauuaaugacauaucgaauu

SEQ ID NO: 669247 - RNA, 23 nt, Artificial Sequence
  Synthetic
cuacauuaaugacauaucgaauu

SEQ ID NO: 669248 - RNA, 24 nt, Artificial Sequence
  Synthetic
acuacauuaaugacauaucgaauu

SEQ ID NO: 669249 - RNA, 18 nt, Artificial Sequence
  Synthetic
cacauccagaaaggaauu

SEQ ID NO: 669250 - RNA, 19 nt, Artificial Sequence
  Synthetic
ccacauccagaaaggaauu

SEQ ID NO: 669251 - RNA, 20 nt, Artificial Sequence
  Synthetic
gccacauccagaaaggaauu

SEQ ID NO: 669252 - RNA, 21 nt, Artificial Sequence
  Synthetic
ggccacauccagaaaggaauu

SEQ ID NO: 669253 - RNA, 22 nt, Artificial Sequence
  Synthetic
aggccacauccagaaaggaauu

SEQ ID NO: 669254 - RNA, 23 nt, Artificial Sequence
  Synthetic
gaggccacauccagaaaggaauu

SEQ ID NO: 669255 - RNA, 24 nt, Artificial Sequence
  Synthetic
ugaggccacauccagaaaggaauu

SEQ ID NO: 669256 - RNA, 18 nt, Artificial Sequence
  Synthetic
agacuauccuaaggaauu

SEQ ID NO: 669257 - RNA, 19 nt, Artificial Sequence
  Synthetic
aagacuauccuaaggaauu

SEQ ID NO: 669258 - RNA, 20 nt, Artificial Sequence
  Synthetic
caagacuauccuaaggaauu

SEQ ID NO: 669259 - RNA, 21 nt, Artificial Sequence
  Synthetic
ccaagacuauccuaaggaauu

SEQ ID NO: 669260 - RNA, 22 nt, Artificial Sequence
  Synthetic
accaagacuauccuaaggaauu

SEQ ID NO: 669261 - RNA, 23 nt, Artificial Sequence
  Synthetic
aaccaagacuauccuaaggaauu

SEQ ID NO: 669262 - RNA, 24 nt, Artificial Sequence
  Synthetic
caaccaagacuauccuaaggaauu

SEQ ID NO: 669263 - RNA, 18 nt, Artificial Sequence
  Synthetic
ucaaucacguaaggaauu

SEQ ID NO: 669264 - RNA, 19 nt, Artificial Sequence
  Synthetic
aucaaucacguaaggaauu

SEQ ID NO: 669265 - RNA, 20 nt, Artificial Sequence
  Synthetic
uaucaaucacguaaggaauu

SEQ ID NO: 669266 - RNA, 21 nt, Artificial Sequence
  Synthetic
uuaucaaucacguaaggaauu

SEQ ID NO: 669267 - RNA, 22 nt, Artificial Sequence
  Synthetic
auuaucaaucacguaaggaauu

SEQ ID NO: 669268 - RNA, 23 nt, Artificial Sequence
  Synthetic
cauuaucaaucacguaaggaauu

SEQ ID NO: 669269 - RNA, 24 nt, Artificial Sequence
  Synthetic
gcauuaucaaucacguaaggaauu

SEQ ID NO: 669270 - RNA, 18 nt, Artificial Sequence
  Synthetic
auagucagaccaggaauu

SEQ ID NO: 669271 - RNA, 19 nt, Artificial Sequence
  Synthetic
cauagucagaccaggaauu

SEQ ID NO: 669272 - RNA, 20 nt, Artificial Sequence
  Synthetic
acauagucagaccaggaauu

SEQ ID NO: 669273 - RNA, 21 nt, Artificial Sequence
  Synthetic
uacauagucagaccaggaauu

SEQ ID NO: 669274 - RNA, 22 nt, Artificial Sequence
  Synthetic
uuacauagucagaccaggaauu

SEQ ID NO: 669275 - RNA, 23 nt, Artificial Sequence
  Synthetic
auuacauagucagaccaggaauu

SEQ ID NO: 669276 - RNA, 24 nt, Artificial Sequence
  Synthetic
uauuacauagucagaccaggaauu

SEQ ID NO: 669277 - RNA, 18 nt, Artificial Sequence
  Synthetic
accuaccuccgaggaauu

SEQ ID NO: 669278 - RNA, 19 nt, Artificial Sequence
  Synthetic
uaccuaccuccgaggaauu

SEQ ID NO: 669279 - RNA, 20 nt, Artificial Sequence
  Synthetic
auaccuaccuccgaggaauu

SEQ ID NO: 669280 - RNA, 21 nt, Artificial Sequence
  Synthetic
cauaccuaccuccgaggaauu

SEQ ID NO: 669281 - RNA, 22 nt, Artificial Sequence
  Synthetic
acauaccuaccuccgaggaauu

SEQ ID NO: 669282 - RNA, 23 nt, Artificial Sequence
  Synthetic
gacauaccuaccuccgaggaauu

SEQ ID NO: 669283 - RNA, 24 nt, Artificial Sequence
  Synthetic
ugacauaccuaccuccgaggaauu

SEQ ID NO: 669284 - RNA, 18 nt, Artificial Sequence
  Synthetic
aaucaacaaugaggaauu

SEQ ID NO: 669285 - RNA, 19 nt, Artificial Sequence
  Synthetic
aaaucaacaaugaggaauu

SEQ ID NO: 669286 - RNA, 20 nt, Artificial Sequence
  Synthetic
gaaaucaacaaugaggaauu

SEQ ID NO: 669287 - RNA, 21 nt, Artificial Sequence
  Synthetic
agaaaucaacaaugaggaauu

SEQ ID NO: 669288 - RNA, 22 nt, Artificial Sequence
  Synthetic
uagaaaucaacaaugaggaauu

SEQ ID NO: 669289 - RNA, 23 nt, Artificial Sequence
  Synthetic
cuagaaaucaacaaugaggaauu

SEQ ID NO: 669290 - RNA, 24 nt, Artificial Sequence
  Synthetic
acuagaaaucaacaaugaggaauu

SEQ ID NO: 669291 - RNA, 18 nt, Artificial Sequence
  Synthetic
cacagaaggauaggaauu

SEQ ID NO: 669292 - RNA, 19 nt, Artificial Sequence
  Synthetic
ucacagaaggauaggaauu

SEQ ID NO: 669293 - RNA, 20 nt, Artificial Sequence
  Synthetic
aucacagaaggauaggaauu

SEQ ID NO: 669294 - RNA, 21 nt, Artificial Sequence
  Synthetic
caucacagaaggauaggaauu

SEQ ID NO: 669295 - RNA, 22 nt, Artificial Sequence
  Synthetic
ccaucacagaaggauaggaauu

SEQ ID NO: 669296 - RNA, 23 nt, Artificial Sequence
  Synthetic
cccaucacagaaggauaggaauu

SEQ ID NO: 669297 - RNA, 24 nt, Artificial Sequence
  Synthetic
ucccaucacagaaggauaggaauu

SEQ ID NO: 669298 - RNA, 18 nt, Artificial Sequence
  Synthetic
ccacaacaaguaggaauu

SEQ ID NO: 669299 - RNA, 19 nt, Artificial Sequence
  Synthetic
cccacaacaaguaggaauu

SEQ ID NO: 669300 - RNA, 20 nt, Artificial Sequence
  Synthetic
ucccacaacaaguaggaauu

SEQ ID NO: 669301 - RNA, 21 nt, Artificial Sequence
  Synthetic
cucccacaacaaguaggaauu

SEQ ID NO: 669302 - RNA, 22 nt, Artificial Sequence
  Synthetic
ccucccacaacaaguaggaauu

SEQ ID NO: 669303 - RNA, 23 nt, Artificial Sequence
  Synthetic
cccucccacaacaaguaggaauu

SEQ ID NO: 669304 - RNA, 24 nt, Artificial Sequence
  Synthetic
ucccucccacaacaaguaggaauu

SEQ ID NO: 669305 - RNA, 18 nt, Artificial Sequence
  Synthetic
auuauggauguaggaauu

SEQ ID NO: 669306 - RNA, 19 nt, Artificial Sequence
  Synthetic
uauuauggauguaggaauu

SEQ ID NO: 669307 - RNA, 20 nt, Artificial Sequence
  Synthetic
cuauuauggauguaggaauu

SEQ ID NO: 669308 - RNA, 21 nt, Artificial Sequence
  Synthetic
gcuauuauggauguaggaauu

SEQ ID NO: 669309 - RNA, 22 nt, Artificial Sequence
  Synthetic
agcuauuauggauguaggaauu

SEQ ID NO: 669310 - RNA, 23 nt, Artificial Sequence
  Synthetic
gagcuauuauggauguaggaauu

SEQ ID NO: 669311 - RNA, 24 nt, Artificial Sequence
  Synthetic
ugagcuauuauggauguaggaauu

SEQ ID NO: 669312 - RNA, 18 nt, Artificial Sequence
  Synthetic
cucagaggagacggaauu

SEQ ID NO: 669313 - RNA, 19 nt, Artificial Sequence
  Synthetic
gcucagaggagacggaauu

SEQ ID NO: 669314 - RNA, 20 nt, Artificial Sequence
  Synthetic
ggcucagaggagacggaauu

SEQ ID NO: 669315 - RNA, 21 nt, Artificial Sequence
  Synthetic
aggcucagaggagacggaauu

SEQ ID NO: 669316 - RNA, 22 nt, Artificial Sequence
  Synthetic
aaggcucagaggagacggaauu

SEQ ID NO: 669317 - RNA, 23 nt, Artificial Sequence
  Synthetic
caaggcucagaggagacggaauu

SEQ ID NO: 669318 - RNA, 24 nt, Artificial Sequence
  Synthetic
acaaggcucagaggagacggaauu

SEQ ID NO: 669319 - RNA, 18 nt, Artificial Sequence
  Synthetic
uauugggauuacggaauu

SEQ ID NO: 669320 - RNA, 19 nt, Artificial Sequence
  Synthetic
cuauugggauuacggaauu

SEQ ID NO: 669321 - RNA, 20 nt, Artificial Sequence
  Synthetic
gcuauugggauuacggaauu

SEQ ID NO: 669322 - RNA, 21 nt, Artificial Sequence
  Synthetic
ugcuauugggauuacggaauu

SEQ ID NO: 669323 - RNA, 22 nt, Artificial Sequence
  Synthetic
cugcuauugggauuacggaauu

SEQ ID NO: 669324 - RNA, 23 nt, Artificial Sequence
  Synthetic
ccugcuauugggauuacggaauu

SEQ ID NO: 669325 - RNA, 24 nt, Artificial Sequence
  Synthetic
accugcuauugggauuacggaauu

SEQ ID NO: 669326 - RNA, 18 nt, Artificial Sequence
  Synthetic
ccucaaagggagggaauu

SEQ ID NO: 669327 - RNA, 19 nt, Artificial Sequence
  Synthetic
accucaaagggagggaauu

SEQ ID NO: 669328 - RNA, 20 nt, Artificial Sequence
  Synthetic
aaccucaaagggagggaauu

SEQ ID NO: 669329 - RNA, 21 nt, Artificial Sequence
  Synthetic
caaccucaaagggagggaauu

SEQ ID NO: 669330 - RNA, 22 nt, Artificial Sequence
  Synthetic
gcaaccucaaagggagggaauu

SEQ ID NO: 669331 - RNA, 23 nt, Artificial Sequence
  Synthetic
ggcaaccucaaagggagggaauu

SEQ ID NO: 669332 - RNA, 24 nt, Artificial Sequence
  Synthetic
uggcaaccucaaagggagggaauu

SEQ ID NO: 669333 - RNA, 18 nt, Artificial Sequence
  Synthetic
acucaggguuggggaauu

SEQ ID NO: 669334 - RNA, 19 nt, Artificial Sequence
  Synthetic
gacucaggguuggggaauu

SEQ ID NO: 669335 - RNA, 20 nt, Artificial Sequence
  Synthetic
ugacucaggguuggggaauu

SEQ ID NO: 669336 - RNA, 21 nt, Artificial Sequence
  Synthetic
uugacucaggguuggggaauu

SEQ ID NO: 669337 - RNA, 22 nt, Artificial Sequence
  Synthetic
uuugacucaggguuggggaauu

SEQ ID NO: 669338 - RNA, 23 nt, Artificial Sequence
  Synthetic
auuugacucaggguuggggaauu

SEQ ID NO: 669339 - RNA, 24 nt, Artificial Sequence
  Synthetic
uauuugacucaggguuggggaauu

SEQ ID NO: 669340 - RNA, 18 nt, Artificial Sequence
  Synthetic
acaaaagcagugggaauu

SEQ ID NO: 669341 - RNA, 19 nt, Artificial Sequence
  Synthetic
aacaaaagcagugggaauu

SEQ ID NO: 669342 - RNA, 20 nt, Artificial Sequence
  Synthetic
uaacaaaagcagugggaauu

SEQ ID NO: 669343 - RNA, 21 nt, Artificial Sequence
  Synthetic
uuaacaaaagcagugggaauu

SEQ ID NO: 669344 - RNA, 22 nt, Artificial Sequence
  Synthetic
cuuaacaaaagcagugggaauu

SEQ ID NO: 669345 - RNA, 23 nt, Artificial Sequence
  Synthetic
ccuuaacaaaagcagugggaauu

SEQ ID NO: 669346 - RNA, 24 nt, Artificial Sequence
  Synthetic
gccuuaacaaaagcagugggaauu

SEQ ID NO: 669347 - RNA, 18 nt, Artificial Sequence
  Synthetic
aguccugucaguggaauu

SEQ ID NO: 669348 - RNA, 19 nt, Artificial Sequence
  Synthetic
gaguccugucaguggaauu

SEQ ID NO: 669349 - RNA, 20 nt, Artificial Sequence
  Synthetic
agaguccugucaguggaauu

SEQ ID NO: 669350 - RNA, 21 nt, Artificial Sequence
  Synthetic
uagaguccugucaguggaauu

SEQ ID NO: 669351 - RNA, 22 nt, Artificial Sequence
  Synthetic
guagaguccugucaguggaauu

SEQ ID NO: 669352 - RNA, 23 nt, Artificial Sequence
  Synthetic
aguagaguccugucaguggaauu

SEQ ID NO: 669353 - RNA, 24 nt, Artificial Sequence
  Synthetic
uaguagaguccugucaguggaauu

SEQ ID NO: 669354 - RNA, 18 nt, Artificial Sequence
  Synthetic
cgagagaucuguggaauu

SEQ ID NO: 669355 - RNA, 19 nt, Artificial Sequence
  Synthetic
ccgagagaucuguggaauu

SEQ ID NO: 669356 - RNA, 20 nt, Artificial Sequence
  Synthetic
uccgagagaucuguggaauu

SEQ ID NO: 669357 - RNA, 21 nt, Artificial Sequence
  Synthetic
guccgagagaucuguggaauu

SEQ ID NO: 669358 - RNA, 22 nt, Artificial Sequence
  Synthetic
uguccgagagaucuguggaauu

SEQ ID NO: 669359 - RNA, 23 nt, Artificial Sequence
  Synthetic
cuguccgagagaucuguggaauu

SEQ ID NO: 669360 - RNA, 24 nt, Artificial Sequence
  Synthetic
ccuguccgagagaucuguggaauu

SEQ ID NO: 669361 - RNA, 18 nt, Artificial Sequence
  Synthetic
gcuuauaaccuuggaauu

SEQ ID NO: 669362 - RNA, 19 nt, Artificial Sequence
  Synthetic
ugcuuauaaccuuggaauu

SEQ ID NO: 669363 - RNA, 20 nt, Artificial Sequence
  Synthetic
cugcuuauaaccuuggaauu

SEQ ID NO: 669364 - RNA, 21 nt, Artificial Sequence
  Synthetic
acugcuuauaaccuuggaauu

SEQ ID NO: 669365 - RNA, 22 nt, Artificial Sequence
  Synthetic
cacugcuuauaaccuuggaauu

SEQ ID NO: 669366 - RNA, 23 nt, Artificial Sequence
  Synthetic
ccacugcuuauaaccuuggaauu

SEQ ID NO: 669367 - RNA, 24 nt, Artificial Sequence
  Synthetic
accacugcuuauaaccuuggaauu

SEQ ID NO: 669368 - RNA, 18 nt, Artificial Sequence
  Synthetic
ugguauguucuuggaauu

SEQ ID NO: 669369 - RNA, 19 nt, Artificial Sequence
  Synthetic
gugguauguucuuggaauu

SEQ ID NO: 669370 - RNA, 20 nt, Artificial Sequence
  Synthetic
ggugguauguucuuggaauu

SEQ ID NO: 669371 - RNA, 21 nt, Artificial Sequence
  Synthetic
uggugguauguucuuggaauu

SEQ ID NO: 669372 - RNA, 22 nt, Artificial Sequence
  Synthetic
auggugguauguucuuggaauu

SEQ ID NO: 669373 - RNA, 23 nt, Artificial Sequence
  Synthetic
aauggugguauguucuuggaauu

SEQ ID NO: 669374 - RNA, 24 nt, Artificial Sequence
  Synthetic
uaauggugguauguucuuggaauu

SEQ ID NO: 669375 - RNA, 18 nt, Artificial Sequence
  Synthetic
auuguuuuuguuggaauu

SEQ ID NO: 669376 - RNA, 19 nt, Artificial Sequence
  Synthetic
aauuguuuuuguuggaauu

SEQ ID NO: 669377 - RNA, 20 nt, Artificial Sequence
  Synthetic
caauuguuuuuguuggaauu

SEQ ID NO: 669378 - RNA, 21 nt, Artificial Sequence
  Synthetic
gcaauuguuuuuguuggaauu

SEQ ID NO: 669379 - RNA, 22 nt, Artificial Sequence
  Synthetic
ugcaauuguuuuuguuggaauu

SEQ ID NO: 669380 - RNA, 23 nt, Artificial Sequence
  Synthetic
uugcaauuguuuuuguuggaauu

SEQ ID NO: 669381 - RNA, 24 nt, Artificial Sequence
  Synthetic
uuugcaauuguuuuuguuggaauu

SEQ ID NO: 669382 - RNA, 18 nt, Artificial Sequence
  Synthetic
ucaugauacuuuggaauu

SEQ ID NO: 669383 - RNA, 19 nt, Artificial Sequence
  Synthetic
aucaugauacuuuggaauu

SEQ ID NO: 669384 - RNA, 20 nt, Artificial Sequence
  Synthetic
uaucaugauacuuuggaauu

SEQ ID NO: 669385 - RNA, 21 nt, Artificial Sequence
  Synthetic
guaucaugauacuuuggaauu

SEQ ID NO: 669386 - RNA, 22 nt, Artificial Sequence
  Synthetic
aguaucaugauacuuuggaauu

SEQ ID NO: 669387 - RNA, 23 nt, Artificial Sequence
  Synthetic
caguaucaugauacuuuggaauu

SEQ ID NO: 669388 - RNA, 24 nt, Artificial Sequence
  Synthetic
acaguaucaugauacuuuggaauu

SEQ ID NO: 669389 - RNA, 18 nt, Artificial Sequence
  Synthetic
ucaaacaguuuuggaauu

SEQ ID NO: 669390 - RNA, 19 nt, Artificial Sequence
  Synthetic
uucaaacaguuuuggaauu

SEQ ID NO: 669391 - RNA, 20 nt, Artificial Sequence
  Synthetic
auucaaacaguuuuggaauu

SEQ ID NO: 669392 - RNA, 21 nt, Artificial Sequence
  Synthetic
cauucaaacaguuuuggaauu

SEQ ID NO: 669393 - RNA, 22 nt, Artificial Sequence
  Synthetic
gcauucaaacaguuuuggaauu

SEQ ID NO: 669394 - RNA, 23 nt, Artificial Sequence
  Synthetic
agcauucaaacaguuuuggaauu

SEQ ID NO: 669395 - RNA, 24 nt, Artificial Sequence
  Synthetic
cagcauucaaacaguuuuggaauu

SEQ ID NO: 669396 - RNA, 18 nt, Artificial Sequence
  Synthetic
aauaaagagaaaugaauu

SEQ ID NO: 669397 - RNA, 19 nt, Artificial Sequence
  Synthetic
uaauaaagagaaaugaauu

SEQ ID NO: 669398 - RNA, 20 nt, Artificial Sequence
  Synthetic
uuaauaaagagaaaugaauu

SEQ ID NO: 669399 - RNA, 21 nt, Artificial Sequence
  Synthetic
uuuaauaaagagaaaugaauu

SEQ ID NO: 669400 - RNA, 22 nt, Artificial Sequence
  Synthetic
uuuuaauaaagagaaaugaauu

SEQ ID NO: 669401 - RNA, 23 nt, Artificial Sequence
  Synthetic
uuuuuaauaaagagaaaugaauu

SEQ ID NO: 669402 - RNA, 24 nt, Artificial Sequence
  Synthetic
auuuuuaauaaagagaaaugaauu

SEQ ID NO: 669403 - RNA, 18 nt, Artificial Sequence
  Synthetic
cuguugacagaaugaauu

SEQ ID NO: 669404 - RNA, 19 nt, Artificial Sequence
  Synthetic
ucuguugacagaaugaauu

SEQ ID NO: 669405 - RNA, 20 nt, Artificial Sequence
  Synthetic
uucuguugacagaaugaauu

SEQ ID NO: 669406 - RNA, 21 nt, Artificial Sequence
  Synthetic
auucuguugacagaaugaauu

SEQ ID NO: 669407 - RNA, 22 nt, Artificial Sequence
  Synthetic
cauucuguugacagaaugaauu

SEQ ID NO: 669408 - RNA, 23 nt, Artificial Sequence
  Synthetic
acauucuguugacagaaugaauu

SEQ ID NO: 669409 - RNA, 24 nt, Artificial Sequence
  Synthetic
uacauucuguugacagaaugaauu

SEQ ID NO: 669410 - RNA, 18 nt, Artificial Sequence
  Synthetic
acaauggaacuaugaauu

SEQ ID NO: 669411 - RNA, 19 nt, Artificial Sequence
  Synthetic
cacaauggaacuaugaauu

SEQ ID NO: 669412 - RNA, 20 nt, Artificial Sequence
  Synthetic
ccacaauggaacuaugaauu

SEQ ID NO: 669413 - RNA, 21 nt, Artificial Sequence
  Synthetic
gccacaauggaacuaugaauu

SEQ ID NO: 669414 - RNA, 22 nt, Artificial Sequence
  Synthetic
agccacaauggaacuaugaauu

SEQ ID NO: 669415 - RNA, 23 nt, Artificial Sequence
  Synthetic
uagccacaauggaacuaugaauu

SEQ ID NO: 669416 - RNA, 24 nt, Artificial Sequence
  Synthetic
auagccacaauggaacuaugaauu

SEQ ID NO: 669417 - RNA, 18 nt, Artificial Sequence
  Synthetic
auuaucgacaccugaauu

SEQ ID NO: 669418 - RNA, 19 nt, Artificial Sequence
  Synthetic
cauuaucgacaccugaauu

SEQ ID NO: 669419 - RNA, 20 nt, Artificial Sequence
  Synthetic
acauuaucgacaccugaauu

SEQ ID NO: 669420 - RNA, 21 nt, Artificial Sequence
  Synthetic
cacauuaucgacaccugaauu

SEQ ID NO: 669421 - RNA, 22 nt, Artificial Sequence
  Synthetic
gcacauuaucgacaccugaauu

SEQ ID NO: 669422 - RNA, 23 nt, Artificial Sequence
  Synthetic
agcacauuaucgacaccugaauu

SEQ ID NO: 669423 - RNA, 24 nt, Artificial Sequence
  Synthetic
uagcacauuaucgacaccugaauu

SEQ ID NO: 669424 - RNA, 18 nt, Artificial Sequence
  Synthetic
uaauguaaaugcugaauu

SEQ ID NO: 669425 - RNA, 19 nt, Artificial Sequence
  Synthetic
uuaauguaaaugcugaauu

SEQ ID NO: 669426 - RNA, 20 nt, Artificial Sequence
  Synthetic
uuuaauguaaaugcugaauu

SEQ ID NO: 669427 - RNA, 21 nt, Artificial Sequence
  Synthetic
auuuaauguaaaugcugaauu

SEQ ID NO: 669428 - RNA, 22 nt, Artificial Sequence
  Synthetic
aauuuaauguaaaugcugaauu

SEQ ID NO: 669429 - RNA, 23 nt, Artificial Sequence
  Synthetic
aaauuuaauguaaaugcugaauu

SEQ ID NO: 669430 - RNA, 24 nt, Artificial Sequence
  Synthetic
aaaauuuaauguaaaugcugaauu

SEQ ID NO: 669431 - RNA, 18 nt, Artificial Sequence
  Synthetic
uauauggaaugcugaauu

SEQ ID NO: 669432 - RNA, 19 nt, Artificial Sequence
  Synthetic
guauauggaaugcugaauu

SEQ ID NO: 669433 - RNA, 20 nt, Artificial Sequence
  Synthetic
aguauauggaaugcugaauu

SEQ ID NO: 669434 - RNA, 21 nt, Artificial Sequence
  Synthetic
aaguauauggaaugcugaauu

SEQ ID NO: 669435 - RNA, 22 nt, Artificial Sequence
  Synthetic
uaaguauauggaaugcugaauu

SEQ ID NO: 669436 - RNA, 23 nt, Artificial Sequence
  Synthetic
uuaaguauauggaaugcugaauu

SEQ ID NO: 669437 - RNA, 24 nt, Artificial Sequence
  Synthetic
guuaaguauauggaaugcugaauu

SEQ ID NO: 669438 - RNA, 18 nt, Artificial Sequence
  Synthetic
ucauagaccaggugaauu

SEQ ID NO: 669439 - RNA, 19 nt, Artificial Sequence
  Synthetic
uucauagaccaggugaauu

SEQ ID NO: 669440 - RNA, 20 nt, Artificial Sequence
  Synthetic
auucauagaccaggugaauu

SEQ ID NO: 669441 - RNA, 21 nt, Artificial Sequence
  Synthetic
aauucauagaccaggugaauu

SEQ ID NO: 669442 - RNA, 22 nt, Artificial Sequence
  Synthetic
gaauucauagaccaggugaauu

SEQ ID NO: 669443 - RNA, 23 nt, Artificial Sequence
  Synthetic
ggaauucauagaccaggugaauu

SEQ ID NO: 669444 - RNA, 24 nt, Artificial Sequence
  Synthetic
gggaauucauagaccaggugaauu

SEQ ID NO: 669445 - RNA, 18 nt, Artificial Sequence
  Synthetic
aagcgaugaaugugaauu

SEQ ID NO: 669446 - RNA, 19 nt, Artificial Sequence
  Synthetic
caagcgaugaaugugaauu

SEQ ID NO: 669447 - RNA, 20 nt, Artificial Sequence
  Synthetic
acaagcgaugaaugugaauu

SEQ ID NO: 669448 - RNA, 21 nt, Artificial Sequence
  Synthetic
aacaagcgaugaaugugaauu

SEQ ID NO: 669449 - RNA, 22 nt, Artificial Sequence
  Synthetic
aaacaagcgaugaaugugaauu

SEQ ID NO: 669450 - RNA, 23 nt, Artificial Sequence
  Synthetic
gaaacaagcgaugaaugugaauu

SEQ ID NO: 669451 - RNA, 24 nt, Artificial Sequence
  Synthetic
agaaacaagcgaugaaugugaauu

SEQ ID NO: 669452 - RNA, 18 nt, Artificial Sequence
  Synthetic
uccuaguggaugugaauu

SEQ ID NO: 669453 - RNA, 19 nt, Artificial Sequence
  Synthetic
auccuaguggaugugaauu

SEQ ID NO: 669454 - RNA, 20 nt, Artificial Sequence
  Synthetic
cauccuaguggaugugaauu

SEQ ID NO: 669455 - RNA, 21 nt, Artificial Sequence
  Synthetic
gcauccuaguggaugugaauu

SEQ ID NO: 669456 - RNA, 22 nt, Artificial Sequence
  Synthetic
ggcauccuaguggaugugaauu

SEQ ID NO: 669457 - RNA, 23 nt, Artificial Sequence
  Synthetic
cggcauccuaguggaugugaauu

SEQ ID NO: 669458 - RNA, 24 nt, Artificial Sequence
  Synthetic
gcggcauccuaguggaugugaauu

SEQ ID NO: 669459 - RNA, 18 nt, Artificial Sequence
  Synthetic
aguugaguuaauugaauu

SEQ ID NO: 669460 - RNA, 19 nt, Artificial Sequence
  Synthetic
aaguugaguuaauugaauu

SEQ ID NO: 669461 - RNA, 20 nt, Artificial Sequence
  Synthetic
aaaguugaguuaauugaauu

SEQ ID NO: 669462 - RNA, 21 nt, Artificial Sequence
  Synthetic
aaaaguugaguuaauugaauu

SEQ ID NO: 669463 - RNA, 22 nt, Artificial Sequence
  Synthetic
gaaaaguugaguuaauugaauu

SEQ ID NO: 669464 - RNA, 23 nt, Artificial Sequence
  Synthetic
ugaaaaguugaguuaauugaauu

SEQ ID NO: 669465 - RNA, 24 nt, Artificial Sequence
  Synthetic
uugaaaaguugaguuaauugaauu

SEQ ID NO: 669466 - RNA, 18 nt, Artificial Sequence
  Synthetic
uuuuugucccauugaauu

SEQ ID NO: 669467 - RNA, 19 nt, Artificial Sequence
  Synthetic
cuuuuugucccauugaauu

SEQ ID NO: 669468 - RNA, 20 nt, Artificial Sequence
  Synthetic
ucuuuuugucccauugaauu

SEQ ID NO: 669469 - RNA, 21 nt, Artificial Sequence
  Synthetic
uucuuuuugucccauugaauu

SEQ ID NO: 669470 - RNA, 22 nt, Artificial Sequence
  Synthetic
auucuuuuugucccauugaauu

SEQ ID NO: 669471 - RNA, 23 nt, Artificial Sequence
  Synthetic
aauucuuuuugucccauugaauu

SEQ ID NO: 669472 - RNA, 24 nt, Artificial Sequence
  Synthetic
uaauucuuuuugucccauugaauu

SEQ ID NO: 669473 - RNA, 18 nt, Artificial Sequence
  Synthetic
agacagaucacuugaauu

SEQ ID NO: 669474 - RNA, 19 nt, Artificial Sequence
  Synthetic
cagacagaucacuugaauu

SEQ ID NO: 669475 - RNA, 20 nt, Artificial Sequence
  Synthetic
gcagacagaucacuugaauu

SEQ ID NO: 669476 - RNA, 21 nt, Artificial Sequence
  Synthetic
ggcagacagaucacuugaauu

SEQ ID NO: 669477 - RNA, 22 nt, Artificial Sequence
  Synthetic
aggcagacagaucacuugaauu

SEQ ID NO: 669478 - RNA, 23 nt, Artificial Sequence
  Synthetic
aaggcagacagaucacuugaauu

SEQ ID NO: 669479 - RNA, 24 nt, Artificial Sequence
  Synthetic
caaggcagacagaucacuugaauu

SEQ ID NO: 669480 - RNA, 18 nt, Artificial Sequence
  Synthetic
cuagcaguguguugaauu

SEQ ID NO: 669481 - RNA, 19 nt, Artificial Sequence
  Synthetic
gcuagcaguguguugaauu

SEQ ID NO: 669482 - RNA, 20 nt, Artificial Sequence
  Synthetic
ggcuagcaguguguugaauu

SEQ ID NO: 669483 - RNA, 21 nt, Artificial Sequence
  Synthetic
aggcuagcaguguguugaauu

SEQ ID NO: 669484 - RNA, 22 nt, Artificial Sequence
  Synthetic
gaggcuagcaguguguugaauu

SEQ ID NO: 669485 - RNA, 23 nt, Artificial Sequence
  Synthetic
ugaggcuagcaguguguugaauu

SEQ ID NO: 669486 - RNA, 24 nt, Artificial Sequence
  Synthetic
cugaggcuagcaguguguugaauu

SEQ ID NO: 669487 - RNA, 18 nt, Artificial Sequence
  Synthetic
auauugaauuguugaauu

SEQ ID NO: 669488 - RNA, 19 nt, Artificial Sequence
  Synthetic
aauauugaauuguugaauu

SEQ ID NO: 669489 - RNA, 20 nt, Artificial Sequence
  Synthetic
caauauugaauuguugaauu

SEQ ID NO: 669490 - RNA, 21 nt, Artificial Sequence
  Synthetic
ccaauauugaauuguugaauu

SEQ ID NO: 669491 - RNA, 22 nt, Artificial Sequence
  Synthetic
uccaauauugaauuguugaauu

SEQ ID NO: 669492 - RNA, 23 nt, Artificial Sequence
  Synthetic
auccaauauugaauuguugaauu

SEQ ID NO: 669493 - RNA, 24 nt, Artificial Sequence
  Synthetic
aauccaauauugaauuguugaauu

SEQ ID NO: 669494 - RNA, 18 nt, Artificial Sequence
  Synthetic
uauuuccaauuuugaauu

SEQ ID NO: 669495 - RNA, 19 nt, Artificial Sequence
  Synthetic
guauuuccaauuuugaauu

SEQ ID NO: 669496 - RNA, 20 nt, Artificial Sequence
  Synthetic
aguauuuccaauuuugaauu

SEQ ID NO: 669497 - RNA, 21 nt, Artificial Sequence
  Synthetic
gaguauuuccaauuuugaauu

SEQ ID NO: 669498 - RNA, 22 nt, Artificial Sequence
  Synthetic
ggaguauuuccaauuuugaauu

SEQ ID NO: 669499 - RNA, 23 nt, Artificial Sequence
  Synthetic
uggaguauuuccaauuuugaauu

SEQ ID NO: 669500 - RNA, 24 nt, Artificial Sequence
  Synthetic
uuggaguauuuccaauuuugaauu

SEQ ID NO: 669501 - RNA, 18 nt, Artificial Sequence
  Synthetic
auuuucacauuuugaauu

SEQ ID NO: 669502 - RNA, 19 nt, Artificial Sequence
  Synthetic
aauuuucacauuuugaauu

SEQ ID NO: 669503 - RNA, 20 nt, Artificial Sequence
  Synthetic
caauuuucacauuuugaauu

SEQ ID NO: 669504 - RNA, 21 nt, Artificial Sequence
  Synthetic
ccaauuuucacauuuugaauu

SEQ ID NO: 669505 - RNA, 22 nt, Artificial Sequence
  Synthetic
accaauuuucacauuuugaauu

SEQ ID NO: 669506 - RNA, 23 nt, Artificial Sequence
  Synthetic
uaccaauuuucacauuuugaauu

SEQ ID NO: 669507 - RNA, 24 nt, Artificial Sequence
  Synthetic
uuaccaauuuucacauuuugaauu

SEQ ID NO: 669508 - RNA, 18 nt, Artificial Sequence
  Synthetic
uguaauugcuuuugaauu

SEQ ID NO: 669509 - RNA, 19 nt, Artificial Sequence
  Synthetic
uuguaauugcuuuugaauu

SEQ ID NO: 669510 - RNA, 20 nt, Artificial Sequence
  Synthetic
cuuguaauugcuuuugaauu

SEQ ID NO: 669511 - RNA, 21 nt, Artificial Sequence
  Synthetic
gcuuguaauugcuuuugaauu

SEQ ID NO: 669512 - RNA, 22 nt, Artificial Sequence
  Synthetic
cgcuuguaauugcuuuugaauu

SEQ ID NO: 669513 - RNA, 23 nt, Artificial Sequence
  Synthetic
ccgcuuguaauugcuuuugaauu

SEQ ID NO: 669514 - RNA, 24 nt, Artificial Sequence
  Synthetic
uccgcuuguaauugcuuuugaauu

SEQ ID NO: 669515 - RNA, 18 nt, Artificial Sequence
  Synthetic
gaguguucaaaaauaauu

SEQ ID NO: 669516 - RNA, 19 nt, Artificial Sequence
  Synthetic
ugaguguucaaaaauaauu

SEQ ID NO: 669517 - RNA, 20 nt, Artificial Sequence
  Synthetic
uugaguguucaaaaauaauu

SEQ ID NO: 669518 - RNA, 21 nt, Artificial Sequence
  Synthetic
uuugaguguucaaaaauaauu

SEQ ID NO: 669519 - RNA, 22 nt, Artificial Sequence
  Synthetic
guuugaguguucaaaaauaauu

SEQ ID NO: 669520 - RNA, 23 nt, Artificial Sequence
  Synthetic
aguuugaguguucaaaaauaauu

SEQ ID NO: 669521 - RNA, 24 nt, Artificial Sequence
  Synthetic
uaguuugaguguucaaaaauaauu

SEQ ID NO: 669522 - RNA, 18 nt, Artificial Sequence
  Synthetic
cucuguuuuaaaauaauu

SEQ ID NO: 669523 - RNA, 19 nt, Artificial Sequence
  Synthetic
ucucuguuuuaaaauaauu

SEQ ID NO: 669524 - RNA, 20 nt, Artificial Sequence
  Synthetic
gucucuguuuuaaaauaauu

SEQ ID NO: 669525 - RNA, 21 nt, Artificial Sequence
  Synthetic
ugucucuguuuuaaaauaauu

SEQ ID NO: 669526 - RNA, 22 nt, Artificial Sequence
  Synthetic
cugucucuguuuuaaaauaauu

SEQ ID NO: 669527 - RNA, 23 nt, Artificial Sequence
  Synthetic
acugucucuguuuuaaaauaauu

SEQ ID NO: 669528 - RNA, 24 nt, Artificial Sequence
  Synthetic
aacugucucuguuuuaaaauaauu

SEQ ID NO: 669529 - RNA, 18 nt, Artificial Sequence
  Synthetic
uaaucaauacaaauaauu

SEQ ID NO: 669530 - RNA, 19 nt, Artificial Sequence
  Synthetic
guaaucaauacaaauaauu

SEQ ID NO: 669531 - RNA, 20 nt, Artificial Sequence
  Synthetic
uguaaucaauacaaauaauu

SEQ ID NO: 669532 - RNA, 21 nt, Artificial Sequence
  Synthetic
cuguaaucaauacaaauaauu

SEQ ID NO: 669533 - RNA, 22 nt, Artificial Sequence
  Synthetic
acuguaaucaauacaaauaauu

SEQ ID NO: 669534 - RNA, 23 nt, Artificial Sequence
  Synthetic
uacuguaaucaauacaaauaauu

SEQ ID NO: 669535 - RNA, 24 nt, Artificial Sequence
  Synthetic
uuacuguaaucaauacaaauaauu

SEQ ID NO: 669536 - RNA, 18 nt, Artificial Sequence
  Synthetic
ggacguuaagaaauaauu

SEQ ID NO: 669537 - RNA, 19 nt, Artificial Sequence
  Synthetic
uggacguuaagaaauaauu

SEQ ID NO: 669538 - RNA, 20 nt, Artificial Sequence
  Synthetic
cuggacguuaagaaauaauu

SEQ ID NO: 669539 - RNA, 21 nt, Artificial Sequence
  Synthetic
ucuggacguuaagaaauaauu

SEQ ID NO: 669540 - RNA, 22 nt, Artificial Sequence
  Synthetic
aucuggacguuaagaaauaauu

SEQ ID NO: 669541 - RNA, 23 nt, Artificial Sequence
  Synthetic
gaucuggacguuaagaaauaauu

SEQ ID NO: 669542 - RNA, 24 nt, Artificial Sequence
  Synthetic
ugaucuggacguuaagaaauaauu

SEQ ID NO: 669543 - RNA, 18 nt, Artificial Sequence
  Synthetic
auguuuaaauaaauaauu

SEQ ID NO: 669544 - RNA, 19 nt, Artificial Sequence
  Synthetic
aauguuuaaauaaauaauu

SEQ ID NO: 669545 - RNA, 20 nt, Artificial Sequence
  Synthetic
aaauguuuaaauaaauaauu

SEQ ID NO: 669546 - RNA, 21 nt, Artificial Sequence
  Synthetic
gaaauguuuaaauaaauaauu

SEQ ID NO: 669547 - RNA, 22 nt, Artificial Sequence
  Synthetic
agaaauguuuaaauaaauaauu

SEQ ID NO: 669548 - RNA, 23 nt, Artificial Sequence
  Synthetic
aagaaauguuuaaauaaauaauu

SEQ ID NO: 669549 - RNA, 24 nt, Artificial Sequence
  Synthetic
aaagaaauguuuaaauaaauaauu

SEQ ID NO: 669550 - RNA, 18 nt, Artificial Sequence
  Synthetic
aauuacagauaaauaauu

SEQ ID NO: 669551 - RNA, 19 nt, Artificial Sequence
  Synthetic
aaauuacagauaaauaauu

SEQ ID NO: 669552 - RNA, 20 nt, Artificial Sequence
  Synthetic
caaauuacagauaaauaauu

SEQ ID NO: 669553 - RNA, 21 nt, Artificial Sequence
  Synthetic
ucaaauuacagauaaauaauu

SEQ ID NO: 669554 - RNA, 22 nt, Artificial Sequence
  Synthetic
aucaaauuacagauaaauaauu

SEQ ID NO: 669555 - RNA, 23 nt, Artificial Sequence
  Synthetic
aaucaaauuacagauaaauaauu

SEQ ID NO: 669556 - RNA, 24 nt, Artificial Sequence
  Synthetic
uaaucaaauuacagauaaauaauu

SEQ ID NO: 669557 - RNA, 18 nt, Artificial Sequence
  Synthetic
uaaacuaauucaauaauu

SEQ ID NO: 669558 - RNA, 19 nt, Artificial Sequence
  Synthetic
cuaaacuaauucaauaauu

SEQ ID NO: 669559 - RNA, 20 nt, Artificial Sequence
  Synthetic
ucuaaacuaauucaauaauu

SEQ ID NO: 669560 - RNA, 21 nt, Artificial Sequence
  Synthetic
cucuaaacuaauucaauaauu

SEQ ID NO: 669561 - RNA, 22 nt, Artificial Sequence
  Synthetic
gcucuaaacuaauucaauaauu

SEQ ID NO: 669562 - RNA, 23 nt, Artificial Sequence
  Synthetic
ugcucuaaacuaauucaauaauu

SEQ ID NO: 669563 - RNA, 24 nt, Artificial Sequence
  Synthetic
uugcucuaaacuaauucaauaauu

SEQ ID NO: 669564 - RNA, 18 nt, Artificial Sequence
  Synthetic
cguaacauuucaauaauu

SEQ ID NO: 669565 - RNA, 19 nt, Artificial Sequence
  Synthetic
gcguaacauuucaauaauu

SEQ ID NO: 669566 - RNA, 20 nt, Artificial Sequence
  Synthetic
agcguaacauuucaauaauu

SEQ ID NO: 669567 - RNA, 21 nt, Artificial Sequence
  Synthetic
cagcguaacauuucaauaauu

SEQ ID NO: 669568 - RNA, 22 nt, Artificial Sequence
  Synthetic
acagcguaacauuucaauaauu

SEQ ID NO: 669569 - RNA, 23 nt, Artificial Sequence
  Synthetic
cacagcguaacauuucaauaauu

SEQ ID NO: 669570 - RNA, 24 nt, Artificial Sequence
  Synthetic
acacagcguaacauuucaauaauu

SEQ ID NO: 669571 - RNA, 18 nt, Artificial Sequence
  Synthetic
accaguuuuucaauaauu

SEQ ID NO: 669572 - RNA, 19 nt, Artificial Sequence
  Synthetic
uaccaguuuuucaauaauu

SEQ ID NO: 669573 - RNA, 20 nt, Artificial Sequence
  Synthetic
uuaccaguuuuucaauaauu

SEQ ID NO: 669574 - RNA, 21 nt, Artificial Sequence
  Synthetic
auuaccaguuuuucaauaauu

SEQ ID NO: 669575 - RNA, 22 nt, Artificial Sequence
  Synthetic
aauuaccaguuuuucaauaauu

SEQ ID NO: 669576 - RNA, 23 nt, Artificial Sequence
  Synthetic
caauuaccaguuuuucaauaauu

SEQ ID NO: 669577 - RNA, 24 nt, Artificial Sequence
  Synthetic
acaauuaccaguuuuucaauaauu

SEQ ID NO: 669578 - RNA, 18 nt, Artificial Sequence
  Synthetic
uuuccucugagaauaauu

SEQ ID NO: 669579 - RNA, 19 nt, Artificial Sequence
  Synthetic
auuuccucugagaauaauu

SEQ ID NO: 669580 - RNA, 20 nt, Artificial Sequence
  Synthetic
gauuuccucugagaauaauu

SEQ ID NO: 669581 - RNA, 21 nt, Artificial Sequence
  Synthetic
ugauuuccucugagaauaauu

SEQ ID NO: 669582 - RNA, 22 nt, Artificial Sequence
  Synthetic
uugauuuccucugagaauaauu

SEQ ID NO: 669583 - RNA, 23 nt, Artificial Sequence
  Synthetic
uuugauuuccucugagaauaauu

SEQ ID NO: 669584 - RNA, 24 nt, Artificial Sequence
  Synthetic
auuugauuuccucugagaauaauu

SEQ ID NO: 669585 - RNA, 18 nt, Artificial Sequence
  Synthetic
cccugacuuagaauaauu

SEQ ID NO: 669586 - RNA, 19 nt, Artificial Sequence
  Synthetic
ucccugacuuagaauaauu

SEQ ID NO: 669587 - RNA, 20 nt, Artificial Sequence
  Synthetic
cucccugacuuagaauaauu

SEQ ID NO: 669588 - RNA, 21 nt, Artificial Sequence
  Synthetic
ucucccugacuuagaauaauu

SEQ ID NO: 669589 - RNA, 22 nt, Artificial Sequence
  Synthetic
aucucccugacuuagaauaauu

SEQ ID NO: 669590 - RNA, 23 nt, Artificial Sequence
  Synthetic
aaucucccugacuuagaauaauu

SEQ ID NO: 669591 - RNA, 24 nt, Artificial Sequence
  Synthetic
aaaucucccugacuuagaauaauu

SEQ ID NO: 669592 - RNA, 18 nt, Artificial Sequence
  Synthetic
acccuggaacacauaauu

SEQ ID NO: 669593 - RNA, 19 nt, Artificial Sequence
  Synthetic
gacccuggaacacauaauu

SEQ ID NO: 669594 - RNA, 20 nt, Artificial Sequence
  Synthetic
ugacccuggaacacauaauu

SEQ ID NO: 669595 - RNA, 21 nt, Artificial Sequence
  Synthetic
cugacccuggaacacauaauu

SEQ ID NO: 669596 - RNA, 22 nt, Artificial Sequence
  Synthetic
acugacccuggaacacauaauu

SEQ ID NO: 669597 - RNA, 23 nt, Artificial Sequence
  Synthetic
cacugacccuggaacacauaauu

SEQ ID NO: 669598 - RNA, 24 nt, Artificial Sequence
  Synthetic
gcacugacccuggaacacauaauu

SEQ ID NO: 669599 - RNA, 18 nt, Artificial Sequence
  Synthetic
caagacugagacauaauu

SEQ ID NO: 669600 - RNA, 19 nt, Artificial Sequence
  Synthetic
ucaagacugagacauaauu

SEQ ID NO: 669601 - RNA, 20 nt, Artificial Sequence
  Synthetic
aucaagacugagacauaauu

SEQ ID NO: 669602 - RNA, 21 nt, Artificial Sequence
  Synthetic
aaucaagacugagacauaauu

SEQ ID NO: 669603 - RNA, 22 nt, Artificial Sequence
  Synthetic
aaaucaagacugagacauaauu

SEQ ID NO: 669604 - RNA, 23 nt, Artificial Sequence
  Synthetic
uaaaucaagacugagacauaauu

SEQ ID NO: 669605 - RNA, 24 nt, Artificial Sequence
  Synthetic
cuaaaucaagacugagacauaauu

SEQ ID NO: 669606 - RNA, 18 nt, Artificial Sequence
  Synthetic
uaauggaaaaccauaauu

SEQ ID NO: 669607 - RNA, 19 nt, Artificial Sequence
  Synthetic
cuaauggaaaaccauaauu

SEQ ID NO: 669608 - RNA, 20 nt, Artificial Sequence
  Synthetic
ccuaauggaaaaccauaauu

SEQ ID NO: 669609 - RNA, 21 nt, Artificial Sequence
  Synthetic
accuaauggaaaaccauaauu

SEQ ID NO: 669610 - RNA, 22 nt, Artificial Sequence
  Synthetic
uaccuaauggaaaaccauaauu

SEQ ID NO: 669611 - RNA, 23 nt, Artificial Sequence
  Synthetic
auaccuaauggaaaaccauaauu

SEQ ID NO: 669612 - RNA, 24 nt, Artificial Sequence
  Synthetic
aauaccuaauggaaaaccauaauu

SEQ ID NO: 669613 - RNA, 18 nt, Artificial Sequence
  Synthetic
uguaagcacaccauaauu

SEQ ID NO: 669614 - RNA, 19 nt, Artificial Sequence
  Synthetic
uuguaagcacaccauaauu

SEQ ID NO: 669615 - RNA, 20 nt, Artificial Sequence
  Synthetic
cuuguaagcacaccauaauu

SEQ ID NO: 669616 - RNA, 21 nt, Artificial Sequence
  Synthetic
ccuuguaagcacaccauaauu

SEQ ID NO: 669617 - RNA, 22 nt, Artificial Sequence
  Synthetic
uccuuguaagcacaccauaauu

SEQ ID NO: 669618 - RNA, 23 nt, Artificial Sequence
  Synthetic
guccuuguaagcacaccauaauu

SEQ ID NO: 669619 - RNA, 24 nt, Artificial Sequence
  Synthetic
gguccuuguaagcacaccauaauu

SEQ ID NO: 669620 - RNA, 18 nt, Artificial Sequence
  Synthetic
gcuaaaaccaccauaauu

SEQ ID NO: 669621 - RNA, 19 nt, Artificial Sequence
  Synthetic
agcuaaaaccaccauaauu

SEQ ID NO: 669622 - RNA, 20 nt, Artificial Sequence
  Synthetic
uagcuaaaaccaccauaauu

SEQ ID NO: 669623 - RNA, 21 nt, Artificial Sequence
  Synthetic
uuagcuaaaaccaccauaauu

SEQ ID NO: 669624 - RNA, 22 nt, Artificial Sequence
  Synthetic
cuuagcuaaaaccaccauaauu

SEQ ID NO: 669625 - RNA, 23 nt, Artificial Sequence
  Synthetic
ucuuagcuaaaaccaccauaauu

SEQ ID NO: 669626 - RNA, 24 nt, Artificial Sequence
  Synthetic
uucuuagcuaaaaccaccauaauu

SEQ ID NO: 669627 - RNA, 18 nt, Artificial Sequence
  Synthetic
cuguugaaacccauaauu

SEQ ID NO: 669628 - RNA, 19 nt, Artificial Sequence
  Synthetic
acuguugaaacccauaauu

SEQ ID NO: 669629 - RNA, 20 nt, Artificial Sequence
  Synthetic
aacuguugaaacccauaauu

SEQ ID NO: 669630 - RNA, 21 nt, Artificial Sequence
  Synthetic
aaacuguugaaacccauaauu

SEQ ID NO: 669631 - RNA, 22 nt, Artificial Sequence
  Synthetic
aaaacuguugaaacccauaauu

SEQ ID NO: 669632 - RNA, 23 nt, Artificial Sequence
  Synthetic
caaaacuguugaaacccauaauu

SEQ ID NO: 669633 - RNA, 24 nt, Artificial Sequence
  Synthetic
ccaaaacuguugaaacccauaauu

SEQ ID NO: 669634 - RNA, 18 nt, Artificial Sequence
  Synthetic
ugagagagaagcauaauu

SEQ ID NO: 669635 - RNA, 19 nt, Artificial Sequence
  Synthetic
uugagagagaagcauaauu

SEQ ID NO: 669636 - RNA, 20 nt, Artificial Sequence
  Synthetic
guugagagagaagcauaauu

SEQ ID NO: 669637 - RNA, 21 nt, Artificial Sequence
  Synthetic
uguugagagagaagcauaauu

SEQ ID NO: 669638 - RNA, 22 nt, Artificial Sequence
  Synthetic
uuguugagagagaagcauaauu

SEQ ID NO: 669639 - RNA, 23 nt, Artificial Sequence
  Synthetic
auuguugagagagaagcauaauu

SEQ ID NO: 669640 - RNA, 24 nt, Artificial Sequence
  Synthetic
cauuguugagagagaagcauaauu

SEQ ID NO: 669641 - RNA, 18 nt, Artificial Sequence
  Synthetic
uguuaauugaugauaauu

SEQ ID NO: 669642 - RNA, 19 nt, Artificial Sequence
  Synthetic
auguuaauugaugauaauu

SEQ ID NO: 669643 - RNA, 20 nt, Artificial Sequence
  Synthetic
cauguuaauugaugauaauu

SEQ ID NO: 669644 - RNA, 21 nt, Artificial Sequence
  Synthetic
acauguuaauugaugauaauu

SEQ ID NO: 669645 - RNA, 22 nt, Artificial Sequence
  Synthetic
uacauguuaauugaugauaauu

SEQ ID NO: 669646 - RNA, 23 nt, Artificial Sequence
  Synthetic
guacauguuaauugaugauaauu

SEQ ID NO: 669647 - RNA, 24 nt, Artificial Sequence
  Synthetic
aguacauguuaauugaugauaauu

SEQ ID NO: 669648 - RNA, 18 nt, Artificial Sequence
  Synthetic
uccacauagaauauaauu

SEQ ID NO: 669649 - RNA, 19 nt, Artificial Sequence
  Synthetic
guccacauagaauauaauu

SEQ ID NO: 669650 - RNA, 20 nt, Artificial Sequence
  Synthetic
cguccacauagaauauaauu

SEQ ID NO: 669651 - RNA, 21 nt, Artificial Sequence
  Synthetic
ccguccacauagaauauaauu

SEQ ID NO: 669652 - RNA, 22 nt, Artificial Sequence
  Synthetic
accguccacauagaauauaauu

SEQ ID NO: 669653 - RNA, 23 nt, Artificial Sequence
  Synthetic
gaccguccacauagaauauaauu

SEQ ID NO: 669654 - RNA, 24 nt, Artificial Sequence
  Synthetic
ggaccguccacauagaauauaauu

SEQ ID NO: 669655 - RNA, 18 nt, Artificial Sequence
  Synthetic
uugugccugaauauaauu

SEQ ID NO: 669656 - RNA, 19 nt, Artificial Sequence
  Synthetic
uuugugccugaauauaauu

SEQ ID NO: 669657 - RNA, 20 nt, Artificial Sequence
  Synthetic
auuugugccugaauauaauu

SEQ ID NO: 669658 - RNA, 21 nt, Artificial Sequence
  Synthetic
uauuugugccugaauauaauu

SEQ ID NO: 669659 - RNA, 22 nt, Artificial Sequence
  Synthetic
guauuugugccugaauauaauu

SEQ ID NO: 669660 - RNA, 23 nt, Artificial Sequence
  Synthetic
gguauuugugccugaauauaauu

SEQ ID NO: 669661 - RNA, 24 nt, Artificial Sequence
  Synthetic
ugguauuugugccugaauauaauu

SEQ ID NO: 669662 - RNA, 18 nt, Artificial Sequence
  Synthetic
uuuuauuuuaauauaauu

SEQ ID NO: 669663 - RNA, 19 nt, Artificial Sequence
  Synthetic
auuuuauuuuaauauaauu

SEQ ID NO: 669664 - RNA, 20 nt, Artificial Sequence
  Synthetic
cauuuuauuuuaauauaauu

SEQ ID NO: 669665 - RNA, 21 nt, Artificial Sequence
  Synthetic
acauuuuauuuuaauauaauu

SEQ ID NO: 669666 - RNA, 22 nt, Artificial Sequence
  Synthetic
gacauuuuauuuuaauauaauu

SEQ ID NO: 669667 - RNA, 23 nt, Artificial Sequence
  Synthetic
ugacauuuuauuuuaauauaauu

SEQ ID NO: 669668 - RNA, 24 nt, Artificial Sequence
  Synthetic
cugacauuuuauuuuaauauaauu

SEQ ID NO: 669669 - RNA, 18 nt, Artificial Sequence
  Synthetic
cuuagggaacauauaauu

SEQ ID NO: 669670 - RNA, 19 nt, Artificial Sequence
  Synthetic
acuuagggaacauauaauu

SEQ ID NO: 669671 - RNA, 20 nt, Artificial Sequence
  Synthetic
aacuuagggaacauauaauu

SEQ ID NO: 669672 - RNA, 21 nt, Artificial Sequence
  Synthetic
aaacuuagggaacauauaauu

SEQ ID NO: 669673 - RNA, 22 nt, Artificial Sequence
  Synthetic
caaacuuagggaacauauaauu

SEQ ID NO: 669674 - RNA, 23 nt, Artificial Sequence
  Synthetic
ucaaacuuagggaacauauaauu

SEQ ID NO: 669675 - RNA, 24 nt, Artificial Sequence
  Synthetic
cucaaacuuagggaacauauaauu

SEQ ID NO: 669676 - RNA, 18 nt, Artificial Sequence
  Synthetic
ucaacuguugauauaauu

SEQ ID NO: 669677 - RNA, 19 nt, Artificial Sequence
  Synthetic
uucaacuguugauauaauu

SEQ ID NO: 669678 - RNA, 20 nt, Artificial Sequence
  Synthetic
uuucaacuguugauauaauu

SEQ ID NO: 669679 - RNA, 21 nt, Artificial Sequence
  Synthetic
auuucaacuguugauauaauu

SEQ ID NO: 669680 - RNA, 22 nt, Artificial Sequence
  Synthetic
aauuucaacuguugauauaauu

SEQ ID NO: 669681 - RNA, 23 nt, Artificial Sequence
  Synthetic
gaauuucaacuguugauauaauu

SEQ ID NO: 669682 - RNA, 24 nt, Artificial Sequence
  Synthetic
agaauuucaacuguugauauaauu

SEQ ID NO: 669683 - RNA, 18 nt, Artificial Sequence
  Synthetic
guaggauuuuaacuaauu

SEQ ID NO: 669684 - RNA, 19 nt, Artificial Sequence
  Synthetic
aguaggauuuuaacuaauu

SEQ ID NO: 669685 - RNA, 20 nt, Artificial Sequence
  Synthetic
uaguaggauuuuaacuaauu

SEQ ID NO: 669686 - RNA, 21 nt, Artificial Sequence
  Synthetic
auaguaggauuuuaacuaauu

SEQ ID NO: 669687 - RNA, 22 nt, Artificial Sequence
  Synthetic
aauaguaggauuuuaacuaauu

SEQ ID NO: 669688 - RNA, 23 nt, Artificial Sequence
  Synthetic
aaauaguaggauuuuaacuaauu

SEQ ID NO: 669689 - RNA, 24 nt, Artificial Sequence
  Synthetic
aaaauaguaggauuuuaacuaauu

SEQ ID NO: 669690 - RNA, 18 nt, Artificial Sequence
  Synthetic
gagccacuuagacuaauu

SEQ ID NO: 669691 - RNA, 19 nt, Artificial Sequence
  Synthetic
agagccacuuagacuaauu

SEQ ID NO: 669692 - RNA, 20 nt, Artificial Sequence
  Synthetic
cagagccacuuagacuaauu

SEQ ID NO: 669693 - RNA, 21 nt, Artificial Sequence
  Synthetic
ccagagccacuuagacuaauu

SEQ ID NO: 669694 - RNA, 22 nt, Artificial Sequence
  Synthetic
accagagccacuuagacuaauu

SEQ ID NO: 669695 - RNA, 23 nt, Artificial Sequence
  Synthetic
uaccagagccacuuagacuaauu

SEQ ID NO: 669696 - RNA, 24 nt, Artificial Sequence
  Synthetic
cuaccagagccacuuagacuaauu

SEQ ID NO: 669697 - RNA, 18 nt, Artificial Sequence
  Synthetic
agccuaaccugacuaauu

SEQ ID NO: 669698 - RNA, 19 nt, Artificial Sequence
  Synthetic
uagccuaaccugacuaauu

SEQ ID NO: 669699 - RNA, 20 nt, Artificial Sequence
  Synthetic
auagccuaaccugacuaauu

SEQ ID NO: 669700 - RNA, 21 nt, Artificial Sequence
  Synthetic
cauagccuaaccugacuaauu

SEQ ID NO: 669701 - RNA, 22 nt, Artificial Sequence
  Synthetic
gcauagccuaaccugacuaauu

SEQ ID NO: 669702 - RNA, 23 nt, Artificial Sequence
  Synthetic
agcauagccuaaccugacuaauu

SEQ ID NO: 669703 - RNA, 24 nt, Artificial Sequence
  Synthetic
uagcauagccuaaccugacuaauu

SEQ ID NO: 669704 - RNA, 18 nt, Artificial Sequence
  Synthetic
auuaaccauauacuaauu

SEQ ID NO: 669705 - RNA, 19 nt, Artificial Sequence
  Synthetic
uauuaaccauauacuaauu

SEQ ID NO: 669706 - RNA, 20 nt, Artificial Sequence
  Synthetic
auauuaaccauauacuaauu

SEQ ID NO: 669707 - RNA, 21 nt, Artificial Sequence
  Synthetic
gauauuaaccauauacuaauu

SEQ ID NO: 669708 - RNA, 22 nt, Artificial Sequence
  Synthetic
ggauauuaaccauauacuaauu

SEQ ID NO: 669709 - RNA, 23 nt, Artificial Sequence
  Synthetic
uggauauuaaccauauacuaauu

SEQ ID NO: 669710 - RNA, 24 nt, Artificial Sequence
  Synthetic
auggauauuaaccauauacuaauu

SEQ ID NO: 669711 - RNA, 18 nt, Artificial Sequence
  Synthetic
gacuuuuacaaccuaauu

SEQ ID NO: 669712 - RNA, 19 nt, Artificial Sequence
  Synthetic
ugacuuuuacaaccuaauu

SEQ ID NO: 669713 - RNA, 20 nt, Artificial Sequence
  Synthetic
gugacuuuuacaaccuaauu

SEQ ID NO: 669714 - RNA, 21 nt, Artificial Sequence
  Synthetic
ggugacuuuuacaaccuaauu

SEQ ID NO: 669715 - RNA, 22 nt, Artificial Sequence
  Synthetic
cggugacuuuuacaaccuaauu

SEQ ID NO: 669716 - RNA, 23 nt, Artificial Sequence
  Synthetic
acggugacuuuuacaaccuaauu

SEQ ID NO: 669717 - RNA, 24 nt, Artificial Sequence
  Synthetic
uacggugacuuuuacaaccuaauu

SEQ ID NO: 669718 - RNA, 18 nt, Artificial Sequence
  Synthetic
uaaauguucuaccuaauu

SEQ ID NO: 669719 - RNA, 19 nt, Artificial Sequence
  Synthetic
uuaaauguucuaccuaauu

SEQ ID NO: 669720 - RNA, 20 nt, Artificial Sequence
  Synthetic
auuaaauguucuaccuaauu

SEQ ID NO: 669721 - RNA, 21 nt, Artificial Sequence
  Synthetic
aauuaaauguucuaccuaauu

SEQ ID NO: 669722 - RNA, 22 nt, Artificial Sequence
  Synthetic
aaauuaaauguucuaccuaauu

SEQ ID NO: 669723 - RNA, 23 nt, Artificial Sequence
  Synthetic
aaaauuaaauguucuaccuaauu

SEQ ID NO: 669724 - RNA, 24 nt, Artificial Sequence
  Synthetic
aaaaauuaaauguucuaccuaauu

SEQ ID NO: 669725 - RNA, 18 nt, Artificial Sequence
  Synthetic
aauugccuuucccuaauu

SEQ ID NO: 669726 - RNA, 19 nt, Artificial Sequence
  Synthetic
gaauugccuuucccuaauu

SEQ ID NO: 669727 - RNA, 20 nt, Artificial Sequence
  Synthetic
agaauugccuuucccuaauu

SEQ ID NO: 669728 - RNA, 21 nt, Artificial Sequence
  Synthetic
gagaauugccuuucccuaauu

SEQ ID NO: 669729 - RNA, 22 nt, Artificial Sequence
  Synthetic
ggagaauugccuuucccuaauu

SEQ ID NO: 669730 - RNA, 23 nt, Artificial Sequence
  Synthetic
aggagaauugccuuucccuaauu

SEQ ID NO: 669731 - RNA, 24 nt, Artificial Sequence
  Synthetic
caggagaauugccuuucccuaauu

SEQ ID NO: 669732 - RNA, 18 nt, Artificial Sequence
  Synthetic
uuuuaguucugccuaauu

SEQ ID NO: 669733 - RNA, 19 nt, Artificial Sequence
  Synthetic
uuuuuaguucugccuaauu

SEQ ID NO: 669734 - RNA, 20 nt, Artificial Sequence
  Synthetic
guuuuuaguucugccuaauu

SEQ ID NO: 669735 - RNA, 21 nt, Artificial Sequence
  Synthetic
uguuuuuaguucugccuaauu

SEQ ID NO: 669736 - RNA, 22 nt, Artificial Sequence
  Synthetic
auguuuuuaguucugccuaauu

SEQ ID NO: 669737 - RNA, 23 nt, Artificial Sequence
  Synthetic
gauguuuuuaguucugccuaauu

SEQ ID NO: 669738 - RNA, 24 nt, Artificial Sequence
  Synthetic
agauguuuuuaguucugccuaauu

SEQ ID NO: 669739 - RNA, 18 nt, Artificial Sequence
  Synthetic
aauggaaugcugcuaauu

SEQ ID NO: 669740 - RNA, 19 nt, Artificial Sequence
  Synthetic
caauggaaugcugcuaauu

SEQ ID NO: 669741 - RNA, 20 nt, Artificial Sequence
  Synthetic
acaauggaaugcugcuaauu

SEQ ID NO: 669742 - RNA, 21 nt, Artificial Sequence
  Synthetic
cacaauggaaugcugcuaauu

SEQ ID NO: 669743 - RNA, 22 nt, Artificial Sequence
  Synthetic
ucacaauggaaugcugcuaauu

SEQ ID NO: 669744 - RNA, 23 nt, Artificial Sequence
  Synthetic
uucacaauggaaugcugcuaauu

SEQ ID NO: 669745 - RNA, 24 nt, Artificial Sequence
  Synthetic
auucacaauggaaugcugcuaauu

SEQ ID NO: 669746 - RNA, 18 nt, Artificial Sequence
  Synthetic
gccuggugagcucuaauu

SEQ ID NO: 669747 - RNA, 19 nt, Artificial Sequence
  Synthetic
agccuggugagcucuaauu

SEQ ID NO: 669748 - RNA, 20 nt, Artificial Sequence
  Synthetic
aagccuggugagcucuaauu

SEQ ID NO: 669749 - RNA, 21 nt, Artificial Sequence
  Synthetic
aaagccuggugagcucuaauu

SEQ ID NO: 669750 - RNA, 22 nt, Artificial Sequence
  Synthetic
gaaagccuggugagcucuaauu

SEQ ID NO: 669751 - RNA, 23 nt, Artificial Sequence
  Synthetic
ugaaagccuggugagcucuaauu

SEQ ID NO: 669752 - RNA, 24 nt, Artificial Sequence
  Synthetic
augaaagccuggugagcucuaauu

SEQ ID NO: 669753 - RNA, 18 nt, Artificial Sequence
  Synthetic
agucuuacaagucuaauu

SEQ ID NO: 669754 - RNA, 19 nt, Artificial Sequence
  Synthetic
cagucuuacaagucuaauu

SEQ ID NO: 669755 - RNA, 20 nt, Artificial Sequence
  Synthetic
ccagucuuacaagucuaauu

SEQ ID NO: 669756 - RNA, 21 nt, Artificial Sequence
  Synthetic
cccagucuuacaagucuaauu

SEQ ID NO: 669757 - RNA, 22 nt, Artificial Sequence
  Synthetic
ucccagucuuacaagucuaauu

SEQ ID NO: 669758 - RNA, 23 nt, Artificial Sequence
  Synthetic
uucccagucuuacaagucuaauu

SEQ ID NO: 669759 - RNA, 24 nt, Artificial Sequence
  Synthetic
cuucccagucuuacaagucuaauu

SEQ ID NO: 669760 - RNA, 18 nt, Artificial Sequence
  Synthetic
uggaucaguauucuaauu

SEQ ID NO: 669761 - RNA, 19 nt, Artificial Sequence
  Synthetic
cuggaucaguauucuaauu

SEQ ID NO: 669762 - RNA, 20 nt, Artificial Sequence
  Synthetic
ccuggaucaguauucuaauu

SEQ ID NO: 669763 - RNA, 21 nt, Artificial Sequence
  Synthetic
accuggaucaguauucuaauu

SEQ ID NO: 669764 - RNA, 22 nt, Artificial Sequence
  Synthetic
aaccuggaucaguauucuaauu

SEQ ID NO: 669765 - RNA, 23 nt, Artificial Sequence
  Synthetic
aaaccuggaucaguauucuaauu

SEQ ID NO: 669766 - RNA, 24 nt, Artificial Sequence
  Synthetic
aaaaccuggaucaguauucuaauu

SEQ ID NO: 669767 - RNA, 18 nt, Artificial Sequence
  Synthetic
gcugaauauuuucuaauu

SEQ ID NO: 669768 - RNA, 19 nt, Artificial Sequence
  Synthetic
ggcugaauauuuucuaauu

SEQ ID NO: 669769 - RNA, 20 nt, Artificial Sequence
  Synthetic
aggcugaauauuuucuaauu

SEQ ID NO: 669770 - RNA, 21 nt, Artificial Sequence
  Synthetic
caggcugaauauuuucuaauu

SEQ ID NO: 669771 - RNA, 22 nt, Artificial Sequence
  Synthetic
ucaggcugaauauuuucuaauu

SEQ ID NO: 669772 - RNA, 23 nt, Artificial Sequence
  Synthetic
aucaggcugaauauuuucuaauu

SEQ ID NO: 669773 - RNA, 24 nt, Artificial Sequence
  Synthetic
caucaggcugaauauuuucuaauu

SEQ ID NO: 669774 - RNA, 18 nt, Artificial Sequence
  Synthetic
agaaaacacaaaguaauu

SEQ ID NO: 669775 - RNA, 19 nt, Artificial Sequence
  Synthetic
gagaaaacacaaaguaauu

SEQ ID NO: 669776 - RNA, 20 nt, Artificial Sequence
  Synthetic
agagaaaacacaaaguaauu

SEQ ID NO: 669777 - RNA, 21 nt, Artificial Sequence
  Synthetic
aagagaaaacacaaaguaauu

SEQ ID NO: 669778 - RNA, 22 nt, Artificial Sequence
  Synthetic
caagagaaaacacaaaguaauu

SEQ ID NO: 669779 - RNA, 23 nt, Artificial Sequence
  Synthetic
acaagagaaaacacaaaguaauu

SEQ ID NO: 669780 - RNA, 24 nt, Artificial Sequence
  Synthetic
aacaagagaaaacacaaaguaauu

SEQ ID NO: 669781 - RNA, 18 nt, Artificial Sequence
  Synthetic
uuacuuuuugaaguaauu

SEQ ID NO: 669782 - RNA, 19 nt, Artificial Sequence
  Synthetic
uuuacuuuuugaaguaauu

SEQ ID NO: 669783 - RNA, 20 nt, Artificial Sequence
  Synthetic
guuuacuuuuugaaguaauu

SEQ ID NO: 669784 - RNA, 21 nt, Artificial Sequence
  Synthetic
aguuuacuuuuugaaguaauu

SEQ ID NO: 669785 - RNA, 22 nt, Artificial Sequence
  Synthetic
aaguuuacuuuuugaaguaauu

SEQ ID NO: 669786 - RNA, 23 nt, Artificial Sequence
  Synthetic
uaaguuuacuuuuugaaguaauu

SEQ ID NO: 669787 - RNA, 24 nt, Artificial Sequence
  Synthetic
cuaaguuuacuuuuugaaguaauu

SEQ ID NO: 669788 - RNA, 18 nt, Artificial Sequence
  Synthetic
augggaagaccaguaauu

SEQ ID NO: 669789 - RNA, 19 nt, Artificial Sequence
  Synthetic
caugggaagaccaguaauu

SEQ ID NO: 669790 - RNA, 20 nt, Artificial Sequence
  Synthetic
ucaugggaagaccaguaauu

SEQ ID NO: 669791 - RNA, 21 nt, Artificial Sequence
  Synthetic
gucaugggaagaccaguaauu

SEQ ID NO: 669792 - RNA, 22 nt, Artificial Sequence
  Synthetic
agucaugggaagaccaguaauu

SEQ ID NO: 669793 - RNA, 23 nt, Artificial Sequence
  Synthetic
gagucaugggaagaccaguaauu

SEQ ID NO: 669794 - RNA, 24 nt, Artificial Sequence
  Synthetic
agagucaugggaagaccaguaauu

SEQ ID NO: 669795 - RNA, 18 nt, Artificial Sequence
  Synthetic
uuucucuacccaguaauu

SEQ ID NO: 669796 - RNA, 19 nt, Artificial Sequence
  Synthetic
uuuucucuacccaguaauu

SEQ ID NO: 669797 - RNA, 20 nt, Artificial Sequence
  Synthetic
cuuuucucuacccaguaauu

SEQ ID NO: 669798 - RNA, 21 nt, Artificial Sequence
  Synthetic
gcuuuucucuacccaguaauu

SEQ ID NO: 669799 - RNA, 22 nt, Artificial Sequence
  Synthetic
agcuuuucucuacccaguaauu

SEQ ID NO: 669800 - RNA, 23 nt, Artificial Sequence
  Synthetic
cagcuuuucucuacccaguaauu

SEQ ID NO: 669801 - RNA, 24 nt, Artificial Sequence
  Synthetic
acagcuuuucucuacccaguaauu

SEQ ID NO: 669802 - RNA, 18 nt, Artificial Sequence
  Synthetic
uuccauaaaaagguaauu

SEQ ID NO: 669803 - RNA, 19 nt, Artificial Sequence
  Synthetic
uuuccauaaaaagguaauu

SEQ ID NO: 669804 - RNA, 20 nt, Artificial Sequence
  Synthetic
uuuuccauaaaaagguaauu

SEQ ID NO: 669805 - RNA, 21 nt, Artificial Sequence
  Synthetic
auuuuccauaaaaagguaauu

SEQ ID NO: 669806 - RNA, 22 nt, Artificial Sequence
  Synthetic
cauuuuccauaaaaagguaauu

SEQ ID NO: 669807 - RNA, 23 nt, Artificial Sequence
  Synthetic
ucauuuuccauaaaaagguaauu

SEQ ID NO: 669808 - RNA, 24 nt, Artificial Sequence
  Synthetic
aucauuuuccauaaaaagguaauu

SEQ ID NO: 669809 - RNA, 18 nt, Artificial Sequence
  Synthetic
agaaacguacauguaauu

SEQ ID NO: 669810 - RNA, 19 nt, Artificial Sequence
  Synthetic
uagaaacguacauguaauu

SEQ ID NO: 669811 - RNA, 20 nt, Artificial Sequence
  Synthetic
guagaaacguacauguaauu

SEQ ID NO: 669812 - RNA, 21 nt, Artificial Sequence
  Synthetic
uguagaaacguacauguaauu

SEQ ID NO: 669813 - RNA, 22 nt, Artificial Sequence
  Synthetic
auguagaaacguacauguaauu

SEQ ID NO: 669814 - RNA, 23 nt, Artificial Sequence
  Synthetic
gauguagaaacguacauguaauu

SEQ ID NO: 669815 - RNA, 24 nt, Artificial Sequence
  Synthetic
ugauguagaaacguacauguaauu

SEQ ID NO: 669816 - RNA, 18 nt, Artificial Sequence
  Synthetic
cuagucaucucuguaauu

SEQ ID NO: 669817 - RNA, 19 nt, Artificial Sequence
  Synthetic
ucuagucaucucuguaauu

SEQ ID NO: 669818 - RNA, 20 nt, Artificial Sequence
  Synthetic
gucuagucaucucuguaauu

SEQ ID NO: 669819 - RNA, 21 nt, Artificial Sequence
  Synthetic
ugucuagucaucucuguaauu

SEQ ID NO: 669820 - RNA, 22 nt, Artificial Sequence
  Synthetic
gugucuagucaucucuguaauu

SEQ ID NO: 669821 - RNA, 23 nt, Artificial Sequence
  Synthetic
ugugucuagucaucucuguaauu

SEQ ID NO: 669822 - RNA, 24 nt, Artificial Sequence
  Synthetic
cugugucuagucaucucuguaauu

SEQ ID NO: 669823 - RNA, 18 nt, Artificial Sequence
  Synthetic
agcaccauuucuguaauu

SEQ ID NO: 669824 - RNA, 19 nt, Artificial Sequence
  Synthetic
cagcaccauuucuguaauu

SEQ ID NO: 669825 - RNA, 20 nt, Artificial Sequence
  Synthetic
ucagcaccauuucuguaauu

SEQ ID NO: 669826 - RNA, 21 nt, Artificial Sequence
  Synthetic
uucagcaccauuucuguaauu

SEQ ID NO: 669827 - RNA, 22 nt, Artificial Sequence
  Synthetic
uuucagcaccauuucuguaauu

SEQ ID NO: 669828 - RNA, 23 nt, Artificial Sequence
  Synthetic
auuucagcaccauuucuguaauu

SEQ ID NO: 669829 - RNA, 24 nt, Artificial Sequence
  Synthetic
uauuucagcaccauuucuguaauu

SEQ ID NO: 669830 - RNA, 18 nt, Artificial Sequence
  Synthetic
cuuuuauuccuuguaauu

SEQ ID NO: 669831 - RNA, 19 nt, Artificial Sequence
  Synthetic
acuuuuauuccuuguaauu

SEQ ID NO: 669832 - RNA, 20 nt, Artificial Sequence
  Synthetic
cacuuuuauuccuuguaauu

SEQ ID NO: 669833 - RNA, 21 nt, Artificial Sequence
  Synthetic
ccacuuuuauuccuuguaauu

SEQ ID NO: 669834 - RNA, 22 nt, Artificial Sequence
  Synthetic
cccacuuuuauuccuuguaauu

SEQ ID NO: 669835 - RNA, 23 nt, Artificial Sequence
  Synthetic
ccccacuuuuauuccuuguaauu

SEQ ID NO: 669836 - RNA, 24 nt, Artificial Sequence
  Synthetic
accccacuuuuauuccuuguaauu

SEQ ID NO: 669837 - RNA, 18 nt, Artificial Sequence
  Synthetic
auuacuguaacauuaauu

SEQ ID NO: 669838 - RNA, 19 nt, Artificial Sequence
  Synthetic
uauuacuguaacauuaauu

SEQ ID NO: 669839 - RNA, 20 nt, Artificial Sequence
  Synthetic
cuauuacuguaacauuaauu

SEQ ID NO: 669840 - RNA, 21 nt, Artificial Sequence
  Synthetic
ucuauuacuguaacauuaauu

SEQ ID NO: 669841 - RNA, 22 nt, Artificial Sequence
  Synthetic
gucuauuacuguaacauuaauu

SEQ ID NO: 669842 - RNA, 23 nt, Artificial Sequence
  Synthetic
agucuauuacuguaacauuaauu

SEQ ID NO: 669843 - RNA, 24 nt, Artificial Sequence
  Synthetic
uagucuauuacuguaacauuaauu

SEQ ID NO: 669844 - RNA, 18 nt, Artificial Sequence
  Synthetic
cauuugaucagauuaauu

SEQ ID NO: 669845 - RNA, 19 nt, Artificial Sequence
  Synthetic
acauuugaucagauuaauu

SEQ ID NO: 669846 - RNA, 20 nt, Artificial Sequence
  Synthetic
gacauuugaucagauuaauu

SEQ ID NO: 669847 - RNA, 21 nt, Artificial Sequence
  Synthetic
agacauuugaucagauuaauu

SEQ ID NO: 669848 - RNA, 22 nt, Artificial Sequence
  Synthetic
cagacauuugaucagauuaauu

SEQ ID NO: 669849 - RNA, 23 nt, Artificial Sequence
  Synthetic
gcagacauuugaucagauuaauu

SEQ ID NO: 669850 - RNA, 24 nt, Artificial Sequence
  Synthetic
ugcagacauuugaucagauuaauu

SEQ ID NO: 669851 - RNA, 18 nt, Artificial Sequence
  Synthetic
gaaugcaauagauuaauu

SEQ ID NO: 669852 - RNA, 19 nt, Artificial Sequence
  Synthetic
agaaugcaauagauuaauu

SEQ ID NO: 669853 - RNA, 20 nt, Artificial Sequence
  Synthetic
uagaaugcaauagauuaauu

SEQ ID NO: 669854 - RNA, 21 nt, Artificial Sequence
  Synthetic
auagaaugcaauagauuaauu

SEQ ID NO: 669855 - RNA, 22 nt, Artificial Sequence
  Synthetic
gauagaaugcaauagauuaauu

SEQ ID NO: 669856 - RNA, 23 nt, Artificial Sequence
  Synthetic
ggauagaaugcaauagauuaauu

SEQ ID NO: 669857 - RNA, 24 nt, Artificial Sequence
  Synthetic
uggauagaaugcaauagauuaauu

SEQ ID NO: 669858 - RNA, 18 nt, Artificial Sequence
  Synthetic
uaaggauaguuauuaauu

SEQ ID NO: 669859 - RNA, 19 nt, Artificial Sequence
  Synthetic
uuaaggauaguuauuaauu

SEQ ID NO: 669860 - RNA, 20 nt, Artificial Sequence
  Synthetic
uuuaaggauaguuauuaauu

SEQ ID NO: 669861 - RNA, 21 nt, Artificial Sequence
  Synthetic
cuuuaaggauaguuauuaauu

SEQ ID NO: 669862 - RNA, 22 nt, Artificial Sequence
  Synthetic
ucuuuaaggauaguuauuaauu

SEQ ID NO: 669863 - RNA, 23 nt, Artificial Sequence
  Synthetic
aucuuuaaggauaguuauuaauu

SEQ ID NO: 669864 - RNA, 24 nt, Artificial Sequence
  Synthetic
aaucuuuaaggauaguuauuaauu

SEQ ID NO: 669865 - RNA, 18 nt, Artificial Sequence
  Synthetic
uuagaugauuuauuaauu

SEQ ID NO: 669866 - RNA, 19 nt, Artificial Sequence
  Synthetic
auuagaugauuuauuaauu

SEQ ID NO: 669867 - RNA, 20 nt, Artificial Sequence
  Synthetic
cauuagaugauuuauuaauu

SEQ ID NO: 669868 - RNA, 21 nt, Artificial Sequence
  Synthetic
ccauuagaugauuuauuaauu

SEQ ID NO: 669869 - RNA, 22 nt, Artificial Sequence
  Synthetic
gccauuagaugauuuauuaauu

SEQ ID NO: 669870 - RNA, 23 nt, Artificial Sequence
  Synthetic
agccauuagaugauuuauuaauu

SEQ ID NO: 669871 - RNA, 24 nt, Artificial Sequence
  Synthetic
aagccauuagaugauuuauuaauu

SEQ ID NO: 669872 - RNA, 18 nt, Artificial Sequence
  Synthetic
caacucugcaacuuaauu

SEQ ID NO: 669873 - RNA, 19 nt, Artificial Sequence
  Synthetic
ucaacucugcaacuuaauu

SEQ ID NO: 669874 - RNA, 20 nt, Artificial Sequence
  Synthetic
cucaacucugcaacuuaauu

SEQ ID NO: 669875 - RNA, 21 nt, Artificial Sequence
  Synthetic
gcucaacucugcaacuuaauu

SEQ ID NO: 669876 - RNA, 22 nt, Artificial Sequence
  Synthetic
agcucaacucugcaacuuaauu

SEQ ID NO: 669877 - RNA, 23 nt, Artificial Sequence
  Synthetic
gagcucaacucugcaacuuaauu

SEQ ID NO: 669878 - RNA, 24 nt, Artificial Sequence
  Synthetic
cgagcucaacucugcaacuuaauu

SEQ ID NO: 669879 - RNA, 18 nt, Artificial Sequence
  Synthetic
guguuuugagccuuaauu

SEQ ID NO: 669880 - RNA, 19 nt, Artificial Sequence
  Synthetic
aguguuuugagccuuaauu

SEQ ID NO: 669881 - RNA, 20 nt, Artificial Sequence
  Synthetic
caguguuuugagccuuaauu

SEQ ID NO: 669882 - RNA, 21 nt, Artificial Sequence
  Synthetic
ccaguguuuugagccuuaauu

SEQ ID NO: 669883 - RNA, 22 nt, Artificial Sequence
  Synthetic
accaguguuuugagccuuaauu

SEQ ID NO: 669884 - RNA, 23 nt, Artificial Sequence
  Synthetic
uaccaguguuuugagccuuaauu

SEQ ID NO: 669885 - RNA, 24 nt, Artificial Sequence
  Synthetic
uuaccaguguuuugagccuuaauu

SEQ ID NO: 669886 - RNA, 18 nt, Artificial Sequence
  Synthetic
ggacuauuuugcuuaauu

SEQ ID NO: 669887 - RNA, 19 nt, Artificial Sequence
  Synthetic
gggacuauuuugcuuaauu

SEQ ID NO: 669888 - RNA, 20 nt, Artificial Sequence
  Synthetic
ggggacuauuuugcuuaauu

SEQ ID NO: 669889 - RNA, 21 nt, Artificial Sequence
  Synthetic
aggggacuauuuugcuuaauu

SEQ ID NO: 669890 - RNA, 22 nt, Artificial Sequence
  Synthetic
aaggggacuauuuugcuuaauu

SEQ ID NO: 669891 - RNA, 23 nt, Artificial Sequence
  Synthetic
caaggggacuauuuugcuuaauu

SEQ ID NO: 669892 - RNA, 24 nt, Artificial Sequence
  Synthetic
ucaaggggacuauuuugcuuaauu

SEQ ID NO: 669893 - RNA, 18 nt, Artificial Sequence
  Synthetic
aaucagcaucaguuaauu

SEQ ID NO: 669894 - RNA, 19 nt, Artificial Sequence
  Synthetic
gaaucagcaucaguuaauu

SEQ ID NO: 669895 - RNA, 20 nt, Artificial Sequence
  Synthetic
ugaaucagcaucaguuaauu

SEQ ID NO: 669896 - RNA, 21 nt, Artificial Sequence
  Synthetic
cugaaucagcaucaguuaauu

SEQ ID NO: 669897 - RNA, 22 nt, Artificial Sequence
  Synthetic
acugaaucagcaucaguuaauu

SEQ ID NO: 669898 - RNA, 23 nt, Artificial Sequence
  Synthetic
uacugaaucagcaucaguuaauu

SEQ ID NO: 669899 - RNA, 24 nt, Artificial Sequence
  Synthetic
cuacugaaucagcaucaguuaauu

SEQ ID NO: 669900 - RNA, 18 nt, Artificial Sequence
  Synthetic
uuccauuaguaguuaauu

SEQ ID NO: 669901 - RNA, 19 nt, Artificial Sequence
  Synthetic
cuuccauuaguaguuaauu

SEQ ID NO: 669902 - RNA, 20 nt, Artificial Sequence
  Synthetic
acuuccauuaguaguuaauu

SEQ ID NO: 669903 - RNA, 21 nt, Artificial Sequence
  Synthetic
aacuuccauuaguaguuaauu

SEQ ID NO: 669904 - RNA, 22 nt, Artificial Sequence
  Synthetic
aaacuuccauuaguaguuaauu

SEQ ID NO: 669905 - RNA, 23 nt, Artificial Sequence
  Synthetic
uaaacuuccauuaguaguuaauu

SEQ ID NO: 669906 - RNA, 24 nt, Artificial Sequence
  Synthetic
guaaacuuccauuaguaguuaauu

SEQ ID NO: 669907 - RNA, 18 nt, Artificial Sequence
  Synthetic
uaccuccuaagguuaauu

SEQ ID NO: 669908 - RNA, 19 nt, Artificial Sequence
  Synthetic
uuaccuccuaagguuaauu

SEQ ID NO: 669909 - RNA, 20 nt, Artificial Sequence
  Synthetic
cuuaccuccuaagguuaauu

SEQ ID NO: 669910 - RNA, 21 nt, Artificial Sequence
  Synthetic
acuuaccuccuaagguuaauu

SEQ ID NO: 669911 - RNA, 22 nt, Artificial Sequence
  Synthetic
uacuuaccuccuaagguuaauu

SEQ ID NO: 669912 - RNA, 23 nt, Artificial Sequence
  Synthetic
guacuuaccuccuaagguuaauu

SEQ ID NO: 669913 - RNA, 24 nt, Artificial Sequence
  Synthetic
aguacuuaccuccuaagguuaauu

SEQ ID NO: 669914 - RNA, 18 nt, Artificial Sequence
  Synthetic
caaaagagaaauuuaauu

SEQ ID NO: 669915 - RNA, 19 nt, Artificial Sequence
  Synthetic
ucaaaagagaaauuuaauu

SEQ ID NO: 669916 - RNA, 20 nt, Artificial Sequence
  Synthetic
uucaaaagagaaauuuaauu

SEQ ID NO: 669917 - RNA, 21 nt, Artificial Sequence
  Synthetic
uuucaaaagagaaauuuaauu

SEQ ID NO: 669918 - RNA, 22 nt, Artificial Sequence
  Synthetic
uuuucaaaagagaaauuuaauu

SEQ ID NO: 669919 - RNA, 23 nt, Artificial Sequence
  Synthetic
auuuucaaaagagaaauuuaauu

SEQ ID NO: 669920 - RNA, 24 nt, Artificial Sequence
  Synthetic
uauuuucaaaagagaaauuuaauu

SEQ ID NO: 669921 - RNA, 18 nt, Artificial Sequence
  Synthetic
gcaguauuauauuuaauu

SEQ ID NO: 669922 - RNA, 19 nt, Artificial Sequence
  Synthetic
ugcaguauuauauuuaauu

SEQ ID NO: 669923 - RNA, 20 nt, Artificial Sequence
  Synthetic
augcaguauuauauuuaauu

SEQ ID NO: 669924 - RNA, 21 nt, Artificial Sequence
  Synthetic
aaugcaguauuauauuuaauu

SEQ ID NO: 669925 - RNA, 22 nt, Artificial Sequence
  Synthetic
uaaugcaguauuauauuuaauu

SEQ ID NO: 669926 - RNA, 23 nt, Artificial Sequence
  Synthetic
auaaugcaguauuauauuuaauu

SEQ ID NO: 669927 - RNA, 24 nt, Artificial Sequence
  Synthetic
aauaaugcaguauuauauuuaauu

SEQ ID NO: 669928 - RNA, 18 nt, Artificial Sequence
  Synthetic
uuuuuuucaacuuuaauu

SEQ ID NO: 669929 - RNA, 19 nt, Artificial Sequence
  Synthetic
uuuuuuuucaacuuuaauu

SEQ ID NO: 669930 - RNA, 20 nt, Artificial Sequence
  Synthetic
uuuuuuuuucaacuuuaauu

SEQ ID NO: 669931 - RNA, 21 nt, Artificial Sequence
  Synthetic
uuuuuuuuuucaacuuuaauu

SEQ ID NO: 669932 - RNA, 22 nt, Artificial Sequence
  Synthetic
guuuuuuuuuucaacuuuaauu

SEQ ID NO: 669933 - RNA, 23 nt, Artificial Sequence
  Synthetic
aguuuuuuuuuucaacuuuaauu

SEQ ID NO: 669934 - RNA, 24 nt, Artificial Sequence
  Synthetic
uaguuuuuuuuuucaacuuuaauu

SEQ ID NO: 669935 - RNA, 18 nt, Artificial Sequence
  Synthetic
auuuaucgagcuuuaauu

SEQ ID NO: 669936 - RNA, 19 nt, Artificial Sequence
  Synthetic
cauuuaucgagcuuuaauu

SEQ ID NO: 669937 - RNA, 20 nt, Artificial Sequence
  Synthetic
gcauuuaucgagcuuuaauu

SEQ ID NO: 669938 - RNA, 21 nt, Artificial Sequence
  Synthetic
ugcauuuaucgagcuuuaauu

SEQ ID NO: 669939 - RNA, 22 nt, Artificial Sequence
  Synthetic
augcauuuaucgagcuuuaauu

SEQ ID NO: 669940 - RNA, 23 nt, Artificial Sequence
  Synthetic
aaugcauuuaucgagcuuuaauu

SEQ ID NO: 669941 - RNA, 24 nt, Artificial Sequence
  Synthetic
gaaugcauuuaucgagcuuuaauu

SEQ ID NO: 669942 - RNA, 18 nt, Artificial Sequence
  Synthetic
uacagauuaucuuuaauu

SEQ ID NO: 669943 - RNA, 19 nt, Artificial Sequence
  Synthetic
auacagauuaucuuuaauu

SEQ ID NO: 669944 - RNA, 20 nt, Artificial Sequence
  Synthetic
gauacagauuaucuuuaauu

SEQ ID NO: 669945 - RNA, 21 nt, Artificial Sequence
  Synthetic
cgauacagauuaucuuuaauu

SEQ ID NO: 669946 - RNA, 22 nt, Artificial Sequence
  Synthetic
ucgauacagauuaucuuuaauu

SEQ ID NO: 669947 - RNA, 23 nt, Artificial Sequence
  Synthetic
cucgauacagauuaucuuuaauu

SEQ ID NO: 669948 - RNA, 24 nt, Artificial Sequence
  Synthetic
acucgauacagauuaucuuuaauu

SEQ ID NO: 669949 - RNA, 18 nt, Artificial Sequence
  Synthetic
cuaauauccauuuuaauu

SEQ ID NO: 669950 - RNA, 19 nt, Artificial Sequence
  Synthetic
ucuaauauccauuuuaauu

SEQ ID NO: 669951 - RNA, 20 nt, Artificial Sequence
  Synthetic
aucuaauauccauuuuaauu

SEQ ID NO: 669952 - RNA, 21 nt, Artificial Sequence
  Synthetic
uaucuaauauccauuuuaauu

SEQ ID NO: 669953 - RNA, 22 nt, Artificial Sequence
  Synthetic
auaucuaauauccauuuuaauu

SEQ ID NO: 669954 - RNA, 23 nt, Artificial Sequence
  Synthetic
uauaucuaauauccauuuuaauu

SEQ ID NO: 669955 - RNA, 24 nt, Artificial Sequence
  Synthetic
auauaucuaauauccauuuuaauu

SEQ ID NO: 669956 - RNA, 18 nt, Artificial Sequence
  Synthetic
auaccacugauuuuaauu

SEQ ID NO: 669957 - RNA, 19 nt, Artificial Sequence
  Synthetic
cauaccacugauuuuaauu

SEQ ID NO: 669958 - RNA, 20 nt, Artificial Sequence
  Synthetic
acauaccacugauuuuaauu

SEQ ID NO: 669959 - RNA, 21 nt, Artificial Sequence
  Synthetic
uacauaccacugauuuuaauu

SEQ ID NO: 669960 - RNA, 22 nt, Artificial Sequence
  Synthetic
uuacauaccacugauuuuaauu

SEQ ID NO: 669961 - RNA, 23 nt, Artificial Sequence
  Synthetic
auuacauaccacugauuuuaauu

SEQ ID NO: 669962 - RNA, 24 nt, Artificial Sequence
  Synthetic
cauuacauaccacugauuuuaauu

SEQ ID NO: 669963 - RNA, 18 nt, Artificial Sequence
  Synthetic
aucaguucuauuuuaauu

SEQ ID NO: 669964 - RNA, 19 nt, Artificial Sequence
  Synthetic
aaucaguucuauuuuaauu

SEQ ID NO: 669965 - RNA, 20 nt, Artificial Sequence
  Synthetic
caaucaguucuauuuuaauu

SEQ ID NO: 669966 - RNA, 21 nt, Artificial Sequence
  Synthetic
ucaaucaguucuauuuuaauu

SEQ ID NO: 669967 - RNA, 22 nt, Artificial Sequence
  Synthetic
aucaaucaguucuauuuuaauu

SEQ ID NO: 669968 - RNA, 23 nt, Artificial Sequence
  Synthetic
aaucaaucaguucuauuuuaauu

SEQ ID NO: 669969 - RNA, 24 nt, Artificial Sequence
  Synthetic
aaaucaaucaguucuauuuuaauu

SEQ ID NO: 669970 - RNA, 18 nt, Artificial Sequence
  Synthetic
guaaauuuuauuuuaauu

SEQ ID NO: 669971 - RNA, 19 nt, Artificial Sequence
  Synthetic
aguaaauuuuauuuuaauu

SEQ ID NO: 669972 - RNA, 20 nt, Artificial Sequence
  Synthetic
caguaaauuuuauuuuaauu

SEQ ID NO: 669973 - RNA, 21 nt, Artificial Sequence
  Synthetic
ucaguaaauuuuauuuuaauu

SEQ ID NO: 669974 - RNA, 22 nt, Artificial Sequence
  Synthetic
cucaguaaauuuuauuuuaauu

SEQ ID NO: 669975 - RNA, 23 nt, Artificial Sequence
  Synthetic
acucaguaaauuuuauuuuaauu

SEQ ID NO: 669976 - RNA, 24 nt, Artificial Sequence
  Synthetic
aacucaguaaauuuuauuuuaauu

SEQ ID NO: 669977 - RNA, 18 nt, Artificial Sequence
  Synthetic
cucguggaaguuuuaauu

SEQ ID NO: 669978 - RNA, 19 nt, Artificial Sequence
  Synthetic
acucguggaaguuuuaauu

SEQ ID NO: 669979 - RNA, 20 nt, Artificial Sequence
  Synthetic
uacucguggaaguuuuaauu

SEQ ID NO: 669980 - RNA, 21 nt, Artificial Sequence
  Synthetic
guacucguggaaguuuuaauu

SEQ ID NO: 669981 - RNA, 22 nt, Artificial Sequence
  Synthetic
uguacucguggaaguuuuaauu

SEQ ID NO: 669982 - RNA, 23 nt, Artificial Sequence
  Synthetic
uuguacucguggaaguuuuaauu

SEQ ID NO: 669983 - RNA, 24 nt, Artificial Sequence
  Synthetic
guuguacucguggaaguuuuaauu

SEQ ID NO: 669984 - RNA, 18 nt, Artificial Sequence
  Synthetic
guuuuuuuuuuuuuaauu

SEQ ID NO: 669985 - RNA, 19 nt, Artificial Sequence
  Synthetic
uguuuuuuuuuuuuuaauu

SEQ ID NO: 669986 - RNA, 20 nt, Artificial Sequence
  Synthetic
uuguuuuuuuuuuuuuaauu

SEQ ID NO: 669987 - RNA, 21 nt, Artificial Sequence
  Synthetic
cuuguuuuuuuuuuuuuaauu

SEQ ID NO: 669988 - RNA, 22 nt, Artificial Sequence
  Synthetic
ucuuguuuuuuuuuuuuuaauu

SEQ ID NO: 669989 - RNA, 23 nt, Artificial Sequence
  Synthetic
aucuuguuuuuuuuuuuuuaauu

SEQ ID NO: 669990 - RNA, 24 nt, Artificial Sequence
  Synthetic
uaucuuguuuuuuuuuuuuuaauu

SEQ ID NO: 669991 - RNA, 18 nt, Artificial Sequence
  Synthetic
ucacguuuuaaaaacauu

SEQ ID NO: 669992 - RNA, 19 nt, Artificial Sequence
  Synthetic
uucacguuuuaaaaacauu

SEQ ID NO: 669993 - RNA, 20 nt, Artificial Sequence
  Synthetic
uuucacguuuuaaaaacauu

SEQ ID NO: 669994 - RNA, 21 nt, Artificial Sequence
  Synthetic
uuuucacguuuuaaaaacauu

SEQ ID NO: 669995 - RNA, 22 nt, Artificial Sequence
  Synthetic
cuuuucacguuuuaaaaacauu

SEQ ID NO: 669996 - RNA, 23 nt, Artificial Sequence
  Synthetic
ccuuuucacguuuuaaaaacauu

SEQ ID NO: 669997 - RNA, 24 nt, Artificial Sequence
  Synthetic
accuuuucacguuuuaaaaacauu

SEQ ID NO: 669998 - RNA, 18 nt, Artificial Sequence
  Synthetic
auauauaaagcaaacauu

SEQ ID NO: 669999 - RNA, 19 nt, Artificial Sequence
  Synthetic
aauauauaaagcaaacauu

SEQ ID NO: 670000 - RNA, 20 nt, Artificial Sequence
  Synthetic
aaauauauaaagcaaacauu

SEQ ID NO: 670001 - RNA, 21 nt, Artificial Sequence
  Synthetic
uaaauauauaaagcaaacauu

SEQ ID NO: 670002 - RNA, 22 nt, Artificial Sequence
  Synthetic
cuaaauauauaaagcaaacauu

SEQ ID NO: 670003 - RNA, 23 nt, Artificial Sequence
  Synthetic
ccuaaauauauaaagcaaacauu

SEQ ID NO: 670004 - RNA, 24 nt, Artificial Sequence
  Synthetic
accuaaauauauaaagcaaacauu

SEQ ID NO: 670005 - RNA, 18 nt, Artificial Sequence
  Synthetic
accagucucagaaacauu

SEQ ID NO: 670006 - RNA, 19 nt, Artificial Sequence
  Synthetic
uaccagucucagaaacauu

SEQ ID NO: 670007 - RNA, 20 nt, Artificial Sequence
  Synthetic
guaccagucucagaaacauu

SEQ ID NO: 670008 - RNA, 21 nt, Artificial Sequence
  Synthetic
uguaccagucucagaaacauu

SEQ ID NO: 670009 - RNA, 22 nt, Artificial Sequence
  Synthetic
guguaccagucucagaaacauu

SEQ ID NO: 670010 - RNA, 23 nt, Artificial Sequence
  Synthetic
gguguaccagucucagaaacauu

SEQ ID NO: 670011 - RNA, 24 nt, Artificial Sequence
  Synthetic
ggguguaccagucucagaaacauu

SEQ ID NO: 670012 - RNA, 18 nt, Artificial Sequence
  Synthetic
acugacaccauaaacauu

SEQ ID NO: 670013 - RNA, 19 nt, Artificial Sequence
  Synthetic
uacugacaccauaaacauu

SEQ ID NO: 670014 - RNA, 20 nt, Artificial Sequence
  Synthetic
cuacugacaccauaaacauu

SEQ ID NO: 670015 - RNA, 21 nt, Artificial Sequence
  Synthetic
ucuacugacaccauaaacauu

SEQ ID NO: 670016 - RNA, 22 nt, Artificial Sequence
  Synthetic
aucuacugacaccauaaacauu

SEQ ID NO: 670017 - RNA, 23 nt, Artificial Sequence
  Synthetic
aaucuacugacaccauaaacauu

SEQ ID NO: 670018 - RNA, 24 nt, Artificial Sequence
  Synthetic
gaaucuacugacaccauaaacauu

SEQ ID NO: 670019 - RNA, 18 nt, Artificial Sequence
  Synthetic
aaugguaaagacaacauu

SEQ ID NO: 670020 - RNA, 19 nt, Artificial Sequence
  Synthetic
uaaugguaaagacaacauu

SEQ ID NO: 670021 - RNA, 20 nt, Artificial Sequence
  Synthetic
auaaugguaaagacaacauu

SEQ ID NO: 670022 - RNA, 21 nt, Artificial Sequence
  Synthetic
gauaaugguaaagacaacauu

SEQ ID NO: 670023 - RNA, 22 nt, Artificial Sequence
  Synthetic
ugauaaugguaaagacaacauu

SEQ ID NO: 670024 - RNA, 23 nt, Artificial Sequence
  Synthetic
gugauaaugguaaagacaacauu

SEQ ID NO: 670025 - RNA, 24 nt, Artificial Sequence
  Synthetic
cgugauaaugguaaagacaacauu

SEQ ID NO: 670026 - RNA, 18 nt, Artificial Sequence
  Synthetic
aagcuggaaaccaacauu

SEQ ID NO: 670027 - RNA, 19 nt, Artificial Sequence
  Synthetic
gaagcuggaaaccaacauu

SEQ ID NO: 670028 - RNA, 20 nt, Artificial Sequence
  Synthetic
ugaagcuggaaaccaacauu

SEQ ID NO: 670029 - RNA, 21 nt, Artificial Sequence
  Synthetic
augaagcuggaaaccaacauu

SEQ ID NO: 670030 - RNA, 22 nt, Artificial Sequence
  Synthetic
gaugaagcuggaaaccaacauu

SEQ ID NO: 670031 - RNA, 23 nt, Artificial Sequence
  Synthetic
ggaugaagcuggaaaccaacauu

SEQ ID NO: 670032 - RNA, 24 nt, Artificial Sequence
  Synthetic
uggaugaagcuggaaaccaacauu

SEQ ID NO: 670033 - RNA, 18 nt, Artificial Sequence
  Synthetic
ggcaugguacccaacauu

SEQ ID NO: 670034 - RNA, 19 nt, Artificial Sequence
  Synthetic
uggcaugguacccaacauu

SEQ ID NO: 670035 - RNA, 20 nt, Artificial Sequence
  Synthetic
uuggcaugguacccaacauu

SEQ ID NO: 670036 - RNA, 21 nt, Artificial Sequence
  Synthetic
uuuggcaugguacccaacauu

SEQ ID NO: 670037 - RNA, 22 nt, Artificial Sequence
  Synthetic
guuuggcaugguacccaacauu

SEQ ID NO: 670038 - RNA, 23 nt, Artificial Sequence
  Synthetic
cguuuggcaugguacccaacauu

SEQ ID NO: 670039 - RNA, 24 nt, Artificial Sequence
  Synthetic
acguuuggcaugguacccaacauu

SEQ ID NO: 670040 - RNA, 18 nt, Artificial Sequence
  Synthetic
aaaaaauuaagcaacauu

SEQ ID NO: 670041 - RNA, 19 nt, Artificial Sequence
  Synthetic
uaaaaaauuaagcaacauu

SEQ ID NO: 670042 - RNA, 20 nt, Artificial Sequence
  Synthetic
uuaaaaaauuaagcaacauu

SEQ ID NO: 670043 - RNA, 21 nt, Artificial Sequence
  Synthetic
guuaaaaaauuaagcaacauu

SEQ ID NO: 670044 - RNA, 22 nt, Artificial Sequence
  Synthetic
gguuaaaaaauuaagcaacauu

SEQ ID NO: 670045 - RNA, 23 nt, Artificial Sequence
  Synthetic
agguuaaaaaauuaagcaacauu

SEQ ID NO: 670046 - RNA, 24 nt, Artificial Sequence
  Synthetic
gagguuaaaaaauuaagcaacauu

SEQ ID NO: 670047 - RNA, 18 nt, Artificial Sequence
  Synthetic
aauaugaaaaucaacauu

SEQ ID NO: 670048 - RNA, 19 nt, Artificial Sequence
  Synthetic
aaauaugaaaaucaacauu

SEQ ID NO: 670049 - RNA, 20 nt, Artificial Sequence
  Synthetic
aaaauaugaaaaucaacauu

SEQ ID NO: 670050 - RNA, 21 nt, Artificial Sequence
  Synthetic
uaaaauaugaaaaucaacauu

SEQ ID NO: 670051 - RNA, 22 nt, Artificial Sequence
  Synthetic
uuaaaauaugaaaaucaacauu

SEQ ID NO: 670052 - RNA, 23 nt, Artificial Sequence
  Synthetic
cuuaaaauaugaaaaucaacauu

SEQ ID NO: 670053 - RNA, 24 nt, Artificial Sequence
  Synthetic
ucuuaaaauaugaaaaucaacauu

SEQ ID NO: 670054 - RNA, 18 nt, Artificial Sequence
  Synthetic
auguacuagaucaacauu

SEQ ID NO: 670055 - RNA, 19 nt, Artificial Sequence
  Synthetic
gauguacuagaucaacauu

SEQ ID NO: 670056 - RNA, 20 nt, Artificial Sequence
  Synthetic
agauguacuagaucaacauu

SEQ ID NO: 670057 - RNA, 21 nt, Artificial Sequence
  Synthetic
aagauguacuagaucaacauu

SEQ ID NO: 670058 - RNA, 22 nt, Artificial Sequence
  Synthetic
caagauguacuagaucaacauu

SEQ ID NO: 670059 - RNA, 23 nt, Artificial Sequence
  Synthetic
gcaagauguacuagaucaacauu

SEQ ID NO: 670060 - RNA, 24 nt, Artificial Sequence
  Synthetic
ggcaagauguacuagaucaacauu

SEQ ID NO: 670061 - RNA, 18 nt, Artificial Sequence
  Synthetic
cuaaauguaaggaacauu

SEQ ID NO: 670062 - RNA, 19 nt, Artificial Sequence
  Synthetic
ucuaaauguaaggaacauu

SEQ ID NO: 670063 - RNA, 20 nt, Artificial Sequence
  Synthetic
aucuaaauguaaggaacauu

SEQ ID NO: 670064 - RNA, 21 nt, Artificial Sequence
  Synthetic
gaucuaaauguaaggaacauu

SEQ ID NO: 670065 - RNA, 22 nt, Artificial Sequence
  Synthetic
agaucuaaauguaaggaacauu

SEQ ID NO: 670066 - RNA, 23 nt, Artificial Sequence
  Synthetic
aagaucuaaauguaaggaacauu

SEQ ID NO: 670067 - RNA, 24 nt, Artificial Sequence
  Synthetic
gaagaucuaaauguaaggaacauu

SEQ ID NO: 670068 - RNA, 18 nt, Artificial Sequence
  Synthetic
aacaauauuuugaacauu

SEQ ID NO: 670069 - RNA, 19 nt, Artificial Sequence
  Synthetic
aaacaauauuuugaacauu

SEQ ID NO: 670070 - RNA, 20 nt, Artificial Sequence
  Synthetic
aaaacaauauuuugaacauu

SEQ ID NO: 670071 - RNA, 21 nt, Artificial Sequence
  Synthetic
uaaaacaauauuuugaacauu

SEQ ID NO: 670072 - RNA, 22 nt, Artificial Sequence
  Synthetic
uuaaaacaauauuuugaacauu

SEQ ID NO: 670073 - RNA, 23 nt, Artificial Sequence
  Synthetic
auuaaaacaauauuuugaacauu

SEQ ID NO: 670074 - RNA, 24 nt, Artificial Sequence
  Synthetic
aauuaaaacaauauuuugaacauu

SEQ ID NO: 670075 - RNA, 18 nt, Artificial Sequence
  Synthetic
aaucauuuaaauaacauu

SEQ ID NO: 670076 - RNA, 19 nt, Artificial Sequence
  Synthetic
uaaucauuuaaauaacauu

SEQ ID NO: 670077 - RNA, 20 nt, Artificial Sequence
  Synthetic
guaaucauuuaaauaacauu

SEQ ID NO: 670078 - RNA, 21 nt, Artificial Sequence
  Synthetic
aguaaucauuuaaauaacauu

SEQ ID NO: 670079 - RNA, 22 nt, Artificial Sequence
  Synthetic
aaguaaucauuuaaauaacauu

SEQ ID NO: 670080 - RNA, 23 nt, Artificial Sequence
  Synthetic
gaaguaaucauuuaaauaacauu

SEQ ID NO: 670081 - RNA, 24 nt, Artificial Sequence
  Synthetic
ugaaguaaucauuuaaauaacauu

SEQ ID NO: 670082 - RNA, 18 nt, Artificial Sequence
  Synthetic
aauagcguacauaacauu

SEQ ID NO: 670083 - RNA, 19 nt, Artificial Sequence
  Synthetic
aaauagcguacauaacauu

SEQ ID NO: 670084 - RNA, 20 nt, Artificial Sequence
  Synthetic
caaauagcguacauaacauu

SEQ ID NO: 670085 - RNA, 21 nt, Artificial Sequence
  Synthetic
ccaaauagcguacauaacauu

SEQ ID NO: 670086 - RNA, 22 nt, Artificial Sequence
  Synthetic
cccaaauagcguacauaacauu

SEQ ID NO: 670087 - RNA, 23 nt, Artificial Sequence
  Synthetic
gcccaaauagcguacauaacauu

SEQ ID NO: 670088 - RNA, 24 nt, Artificial Sequence
  Synthetic
agcccaaauagcguacauaacauu

SEQ ID NO: 670089 - RNA, 18 nt, Artificial Sequence
  Synthetic
ggcauguacgauaacauu

SEQ ID NO: 670090 - RNA, 19 nt, Artificial Sequence
  Synthetic
uggcauguacgauaacauu

SEQ ID NO: 670091 - RNA, 20 nt, Artificial Sequence
  Synthetic
auggcauguacgauaacauu

SEQ ID NO: 670092 - RNA, 21 nt, Artificial Sequence
  Synthetic
aauggcauguacgauaacauu

SEQ ID NO: 670093 - RNA, 22 nt, Artificial Sequence
  Synthetic
gaauggcauguacgauaacauu

SEQ ID NO: 670094 - RNA, 23 nt, Artificial Sequence
  Synthetic
ggaauggcauguacgauaacauu

SEQ ID NO: 670095 - RNA, 24 nt, Artificial Sequence
  Synthetic
cggaauggcauguacgauaacauu

SEQ ID NO: 670096 - RNA, 18 nt, Artificial Sequence
  Synthetic
uauauaugaccuaacauu

SEQ ID NO: 670097 - RNA, 19 nt, Artificial Sequence
  Synthetic
guauauaugaccuaacauu

SEQ ID NO: 670098 - RNA, 20 nt, Artificial Sequence
  Synthetic
aguauauaugaccuaacauu

SEQ ID NO: 670099 - RNA, 21 nt, Artificial Sequence
  Synthetic
uaguauauaugaccuaacauu

SEQ ID NO: 670100 - RNA, 22 nt, Artificial Sequence
  Synthetic
guaguauauaugaccuaacauu

SEQ ID NO: 670101 - RNA, 23 nt, Artificial Sequence
  Synthetic
gguaguauauaugaccuaacauu

SEQ ID NO: 670102 - RNA, 24 nt, Artificial Sequence
  Synthetic
ugguaguauauaugaccuaacauu

SEQ ID NO: 670103 - RNA, 18 nt, Artificial Sequence
  Synthetic
cuggcugccccuaacauu

SEQ ID NO: 670104 - RNA, 19 nt, Artificial Sequence
  Synthetic
ucuggcugccccuaacauu

SEQ ID NO: 670105 - RNA, 20 nt, Artificial Sequence
  Synthetic
cucuggcugccccuaacauu

SEQ ID NO: 670106 - RNA, 21 nt, Artificial Sequence
  Synthetic
ucucuggcugccccuaacauu

SEQ ID NO: 670107 - RNA, 22 nt, Artificial Sequence
  Synthetic
cucucuggcugccccuaacauu

SEQ ID NO: 670108 - RNA, 23 nt, Artificial Sequence
  Synthetic
ucucucuggcugccccuaacauu

SEQ ID NO: 670109 - RNA, 24 nt, Artificial Sequence
  Synthetic
uucucucuggcugccccuaacauu

SEQ ID NO: 670110 - RNA, 18 nt, Artificial Sequence
  Synthetic
uuauuaaaagguaacauu

SEQ ID NO: 670111 - RNA, 19 nt, Artificial Sequence
  Synthetic
uuuauuaaaagguaacauu

SEQ ID NO: 670112 - RNA, 20 nt, Artificial Sequence
  Synthetic
auuuauuaaaagguaacauu

SEQ ID NO: 670113 - RNA, 21 nt, Artificial Sequence
  Synthetic
cauuuauuaaaagguaacauu

SEQ ID NO: 670114 - RNA, 22 nt, Artificial Sequence
  Synthetic
ucauuuauuaaaagguaacauu

SEQ ID NO: 670115 - RNA, 23 nt, Artificial Sequence
  Synthetic
uucauuuauuaaaagguaacauu

SEQ ID NO: 670116 - RNA, 24 nt, Artificial Sequence
  Synthetic
auucauuuauuaaaagguaacauu

SEQ ID NO: 670117 - RNA, 18 nt, Artificial Sequence
  Synthetic
guguaaagguguaacauu

SEQ ID NO: 670118 - RNA, 19 nt, Artificial Sequence
  Synthetic
uguguaaagguguaacauu

SEQ ID NO: 670119 - RNA, 20 nt, Artificial Sequence
  Synthetic
uuguguaaagguguaacauu

SEQ ID NO: 670120 - RNA, 21 nt, Artificial Sequence
  Synthetic
cuuguguaaagguguaacauu

SEQ ID NO: 670121 - RNA, 22 nt, Artificial Sequence
  Synthetic
ucuuguguaaagguguaacauu

SEQ ID NO: 670122 - RNA, 23 nt, Artificial Sequence
  Synthetic
uucuuguguaaagguguaacauu

SEQ ID NO: 670123 - RNA, 24 nt, Artificial Sequence
  Synthetic
cuucuuguguaaagguguaacauu

SEQ ID NO: 670124 - RNA, 18 nt, Artificial Sequence
  Synthetic
gguaagaauuguaacauu

SEQ ID NO: 670125 - RNA, 19 nt, Artificial Sequence
  Synthetic
agguaagaauuguaacauu

SEQ ID NO: 670126 - RNA, 20 nt, Artificial Sequence
  Synthetic
cagguaagaauuguaacauu

SEQ ID NO: 670127 - RNA, 21 nt, Artificial Sequence
  Synthetic
ucagguaagaauuguaacauu

SEQ ID NO: 670128 - RNA, 22 nt, Artificial Sequence
  Synthetic
cucagguaagaauuguaacauu

SEQ ID NO: 670129 - RNA, 23 nt, Artificial Sequence
  Synthetic
ccucagguaagaauuguaacauu

SEQ ID NO: 670130 - RNA, 24 nt, Artificial Sequence
  Synthetic
gccucagguaagaauuguaacauu

SEQ ID NO: 670131 - RNA, 18 nt, Artificial Sequence
  Synthetic
ccuugaagucuuaacauu

SEQ ID NO: 670132 - RNA, 19 nt, Artificial Sequence
  Synthetic
cccuugaagucuuaacauu

SEQ ID NO: 670133 - RNA, 20 nt, Artificial Sequence
  Synthetic
acccuugaagucuuaacauu

SEQ ID NO: 670134 - RNA, 21 nt, Artificial Sequence
  Synthetic
cacccuugaagucuuaacauu

SEQ ID NO: 670135 - RNA, 22 nt, Artificial Sequence
  Synthetic
ucacccuugaagucuuaacauu

SEQ ID NO: 670136 - RNA, 23 nt, Artificial Sequence
  Synthetic
cucacccuugaagucuuaacauu

SEQ ID NO: 670137 - RNA, 24 nt, Artificial Sequence
  Synthetic
gcucacccuugaagucuuaacauu

SEQ ID NO: 670138 - RNA, 18 nt, Artificial Sequence
  Synthetic
cuaaccaguuaacacauu

SEQ ID NO: 670139 - RNA, 19 nt, Artificial Sequence
  Synthetic
acuaaccaguuaacacauu

SEQ ID NO: 670140 - RNA, 20 nt, Artificial Sequence
  Synthetic
uacuaaccaguuaacacauu

SEQ ID NO: 670141 - RNA, 21 nt, Artificial Sequence
  Synthetic
auacuaaccaguuaacacauu

SEQ ID NO: 670142 - RNA, 22 nt, Artificial Sequence
  Synthetic
gauacuaaccaguuaacacauu

SEQ ID NO: 670143 - RNA, 23 nt, Artificial Sequence
  Synthetic
agauacuaaccaguuaacacauu

SEQ ID NO: 670144 - RNA, 24 nt, Artificial Sequence
  Synthetic
uagauacuaaccaguuaacacauu

SEQ ID NO: 670145 - RNA, 18 nt, Artificial Sequence
  Synthetic
gacuguggcucacacauu

SEQ ID NO: 670146 - RNA, 19 nt, Artificial Sequence
  Synthetic
ugacuguggcucacacauu

SEQ ID NO: 670147 - RNA, 20 nt, Artificial Sequence
  Synthetic
augacuguggcucacacauu

SEQ ID NO: 670148 - RNA, 21 nt, Artificial Sequence
  Synthetic
gaugacuguggcucacacauu

SEQ ID NO: 670149 - RNA, 22 nt, Artificial Sequence
  Synthetic
agaugacuguggcucacacauu

SEQ ID NO: 670150 - RNA, 23 nt, Artificial Sequence
  Synthetic
cagaugacuguggcucacacauu

SEQ ID NO: 670151 - RNA, 24 nt, Artificial Sequence
  Synthetic
ucagaugacuguggcucacacauu

SEQ ID NO: 670152 - RNA, 18 nt, Artificial Sequence
  Synthetic
aauaaacagggacacauu

SEQ ID NO: 670153 - RNA, 19 nt, Artificial Sequence
  Synthetic
uaauaaacagggacacauu

SEQ ID NO: 670154 - RNA, 20 nt, Artificial Sequence
  Synthetic
auaauaaacagggacacauu

SEQ ID NO: 670155 - RNA, 21 nt, Artificial Sequence
  Synthetic
aauaauaaacagggacacauu

SEQ ID NO: 670156 - RNA, 22 nt, Artificial Sequence
  Synthetic
aaauaauaaacagggacacauu

SEQ ID NO: 670157 - RNA, 23 nt, Artificial Sequence
  Synthetic
aaaauaauaaacagggacacauu

SEQ ID NO: 670158 - RNA, 24 nt, Artificial Sequence
  Synthetic
uaaaauaauaaacagggacacauu

SEQ ID NO: 670159 - RNA, 18 nt, Artificial Sequence
  Synthetic
gguuucaacauacacauu

SEQ ID NO: 670160 - RNA, 19 nt, Artificial Sequence
  Synthetic
agguuucaacauacacauu

SEQ ID NO: 670161 - RNA, 20 nt, Artificial Sequence
  Synthetic
uagguuucaacauacacauu

SEQ ID NO: 670162 - RNA, 21 nt, Artificial Sequence
  Synthetic
uuagguuucaacauacacauu

SEQ ID NO: 670163 - RNA, 22 nt, Artificial Sequence
  Synthetic
guuagguuucaacauacacauu

SEQ ID NO: 670164 - RNA, 23 nt, Artificial Sequence
  Synthetic
uguuagguuucaacauacacauu

SEQ ID NO: 670165 - RNA, 24 nt, Artificial Sequence
  Synthetic
guguuagguuucaacauacacauu

SEQ ID NO: 670166 - RNA, 18 nt, Artificial Sequence
  Synthetic
ggcugccuagagcacauu

SEQ ID NO: 670167 - RNA, 19 nt, Artificial Sequence
  Synthetic
aggcugccuagagcacauu

SEQ ID NO: 670168 - RNA, 20 nt, Artificial Sequence
  Synthetic
caggcugccuagagcacauu

SEQ ID NO: 670169 - RNA, 21 nt, Artificial Sequence
  Synthetic
ucaggcugccuagagcacauu

SEQ ID NO: 670170 - RNA, 22 nt, Artificial Sequence
  Synthetic
cucaggcugccuagagcacauu

SEQ ID NO: 670171 - RNA, 23 nt, Artificial Sequence
  Synthetic
acucaggcugccuagagcacauu

SEQ ID NO: 670172 - RNA, 24 nt, Artificial Sequence
  Synthetic
aacucaggcugccuagagcacauu

SEQ ID NO: 670173 - RNA, 18 nt, Artificial Sequence
  Synthetic
aauaugaggaugcacauu

SEQ ID NO: 670174 - RNA, 19 nt, Artificial Sequence
  Synthetic
aaauaugaggaugcacauu

SEQ ID NO: 670175 - RNA, 20 nt, Artificial Sequence
  Synthetic
uaaauaugaggaugcacauu

SEQ ID NO: 670176 - RNA, 21 nt, Artificial Sequence
  Synthetic
uuaaauaugaggaugcacauu

SEQ ID NO: 670177 - RNA, 22 nt, Artificial Sequence
  Synthetic
uuuaaauaugaggaugcacauu

SEQ ID NO: 670178 - RNA, 23 nt, Artificial Sequence
  Synthetic
auuuaaauaugaggaugcacauu

SEQ ID NO: 670179 - RNA, 24 nt, Artificial Sequence
  Synthetic
aauuuaaauaugaggaugcacauu

SEQ ID NO: 670180 - RNA, 18 nt, Artificial Sequence
  Synthetic
uuuuucccaccucacauu

SEQ ID NO: 670181 - RNA, 19 nt, Artificial Sequence
  Synthetic
cuuuuucccaccucacauu

SEQ ID NO: 670182 - RNA, 20 nt, Artificial Sequence
  Synthetic
ucuuuuucccaccucacauu

SEQ ID NO: 670183 - RNA, 21 nt, Artificial Sequence
  Synthetic
uucuuuuucccaccucacauu

SEQ ID NO: 670184 - RNA, 22 nt, Artificial Sequence
  Synthetic
cuucuuuuucccaccucacauu

SEQ ID NO: 670185 - RNA, 23 nt, Artificial Sequence
  Synthetic
ucuucuuuuucccaccucacauu

SEQ ID NO: 670186 - RNA, 24 nt, Artificial Sequence
  Synthetic
uucuucuuuuucccaccucacauu

SEQ ID NO: 670187 - RNA, 18 nt, Artificial Sequence
  Synthetic
augaagucugcucacauu

SEQ ID NO: 670188 - RNA, 19 nt, Artificial Sequence
  Synthetic
caugaagucugcucacauu

SEQ ID NO: 670189 - RNA, 20 nt, Artificial Sequence
  Synthetic
acaugaagucugcucacauu

SEQ ID NO: 670190 - RNA, 21 nt, Artificial Sequence
  Synthetic
uacaugaagucugcucacauu

SEQ ID NO: 670191 - RNA, 22 nt, Artificial Sequence
  Synthetic
uuacaugaagucugcucacauu

SEQ ID NO: 670192 - RNA, 23 nt, Artificial Sequence
  Synthetic
auuacaugaagucugcucacauu

SEQ ID NO: 670193 - RNA, 24 nt, Artificial Sequence
  Synthetic
aauuacaugaagucugcucacauu

SEQ ID NO: 670194 - RNA, 18 nt, Artificial Sequence
  Synthetic
cuucuuaaaagucacauu

SEQ ID NO: 670195 - RNA, 19 nt, Artificial Sequence
  Synthetic
ucuucuuaaaagucacauu

SEQ ID NO: 670196 - RNA, 20 nt, Artificial Sequence
  Synthetic
cucuucuuaaaagucacauu

SEQ ID NO: 670197 - RNA, 21 nt, Artificial Sequence
  Synthetic
gcucuucuuaaaagucacauu

SEQ ID NO: 670198 - RNA, 22 nt, Artificial Sequence
  Synthetic
agcucuucuuaaaagucacauu

SEQ ID NO: 670199 - RNA, 23 nt, Artificial Sequence
  Synthetic
uagcucuucuuaaaagucacauu

SEQ ID NO: 670200 - RNA, 24 nt, Artificial Sequence
  Synthetic
auagcucuucuuaaaagucacauu

SEQ ID NO: 670201 - RNA, 18 nt, Artificial Sequence
  Synthetic
uauaugcauguucacauu

SEQ ID NO: 670202 - RNA, 19 nt, Artificial Sequence
  Synthetic
cuauaugcauguucacauu

SEQ ID NO: 670203 - RNA, 20 nt, Artificial Sequence
  Synthetic
ccuauaugcauguucacauu

SEQ ID NO: 670204 - RNA, 21 nt, Artificial Sequence
  Synthetic
uccuauaugcauguucacauu

SEQ ID NO: 670205 - RNA, 22 nt, Artificial Sequence
  Synthetic
uuccuauaugcauguucacauu

SEQ ID NO: 670206 - RNA, 23 nt, Artificial Sequence
  Synthetic
auuccuauaugcauguucacauu

SEQ ID NO: 670207 - RNA, 24 nt, Artificial Sequence
  Synthetic
uauuccuauaugcauguucacauu

SEQ ID NO: 670208 - RNA, 18 nt, Artificial Sequence
  Synthetic
acugacaacuuucacauu

SEQ ID NO: 670209 - RNA, 19 nt, Artificial Sequence
  Synthetic
gacugacaacuuucacauu

SEQ ID NO: 670210 - RNA, 20 nt, Artificial Sequence
  Synthetic
agacugacaacuuucacauu

SEQ ID NO: 670211 - RNA, 21 nt, Artificial Sequence
  Synthetic
uagacugacaacuuucacauu

SEQ ID NO: 670212 - RNA, 22 nt, Artificial Sequence
  Synthetic
auagacugacaacuuucacauu

SEQ ID NO: 670213 - RNA, 23 nt, Artificial Sequence
  Synthetic
uauagacugacaacuuucacauu

SEQ ID NO: 670214 - RNA, 24 nt, Artificial Sequence
  Synthetic
guauagacugacaacuuucacauu

SEQ ID NO: 670215 - RNA, 18 nt, Artificial Sequence
  Synthetic
aucuacuucuuucacauu

SEQ ID NO: 670216 - RNA, 19 nt, Artificial Sequence
  Synthetic
aaucuacuucuuucacauu

SEQ ID NO: 670217 - RNA, 20 nt, Artificial Sequence
  Synthetic
caaucuacuucuuucacauu

SEQ ID NO: 670218 - RNA, 21 nt, Artificial Sequence
  Synthetic
acaaucuacuucuuucacauu

SEQ ID NO: 670219 - RNA, 22 nt, Artificial Sequence
  Synthetic
uacaaucuacuucuuucacauu

SEQ ID NO: 670220 - RNA, 23 nt, Artificial Sequence
  Synthetic
cuacaaucuacuucuuucacauu

SEQ ID NO: 670221 - RNA, 24 nt, Artificial Sequence
  Synthetic
acuacaaucuacuucuuucacauu

SEQ ID NO: 670222 - RNA, 18 nt, Artificial Sequence
  Synthetic
caaguuucaaaagacauu

SEQ ID NO: 670223 - RNA, 19 nt, Artificial Sequence
  Synthetic
ucaaguuucaaaagacauu

SEQ ID NO: 670224 - RNA, 20 nt, Artificial Sequence
  Synthetic
gucaaguuucaaaagacauu

SEQ ID NO: 670225 - RNA, 21 nt, Artificial Sequence
  Synthetic
ggucaaguuucaaaagacauu

SEQ ID NO: 670226 - RNA, 22 nt, Artificial Sequence
  Synthetic
aggucaaguuucaaaagacauu

SEQ ID NO: 670227 - RNA, 23 nt, Artificial Sequence
  Synthetic
gaggucaaguuucaaaagacauu

SEQ ID NO: 670228 - RNA, 24 nt, Artificial Sequence
  Synthetic
agaggucaaguuucaaaagacauu

SEQ ID NO: 670229 - RNA, 18 nt, Artificial Sequence
  Synthetic
cucaagaguaaagacauu

SEQ ID NO: 670230 - RNA, 19 nt, Artificial Sequence
  Synthetic
gcucaagaguaaagacauu

SEQ ID NO: 670231 - RNA, 20 nt, Artificial Sequence
  Synthetic
ugcucaagaguaaagacauu

SEQ ID NO: 670232 - RNA, 21 nt, Artificial Sequence
  Synthetic
augcucaagaguaaagacauu

SEQ ID NO: 670233 - RNA, 22 nt, Artificial Sequence
  Synthetic
gaugcucaagaguaaagacauu

SEQ ID NO: 670234 - RNA, 23 nt, Artificial Sequence
  Synthetic
agaugcucaagaguaaagacauu

SEQ ID NO: 670235 - RNA, 24 nt, Artificial Sequence
  Synthetic
cagaugcucaagaguaaagacauu

SEQ ID NO: 670236 - RNA, 18 nt, Artificial Sequence
  Synthetic
cugggaugagaagacauu

SEQ ID NO: 670237 - RNA, 19 nt, Artificial Sequence
  Synthetic
ccugggaugagaagacauu

SEQ ID NO: 670238 - RNA, 20 nt, Artificial Sequence
  Synthetic
uccugggaugagaagacauu

SEQ ID NO: 670239 - RNA, 21 nt, Artificial Sequence
  Synthetic
guccugggaugagaagacauu

SEQ ID NO: 670240 - RNA, 22 nt, Artificial Sequence
  Synthetic
gguccugggaugagaagacauu

SEQ ID NO: 670241 - RNA, 23 nt, Artificial Sequence
  Synthetic
ggguccugggaugagaagacauu

SEQ ID NO: 670242 - RNA, 24 nt, Artificial Sequence
  Synthetic
aggguccugggaugagaagacauu

SEQ ID NO: 670243 - RNA, 18 nt, Artificial Sequence
  Synthetic
aaauugaaauaagacauu

SEQ ID NO: 670244 - RNA, 19 nt, Artificial Sequence
  Synthetic
gaaauugaaauaagacauu

SEQ ID NO: 670245 - RNA, 20 nt, Artificial Sequence
  Synthetic
ugaaauugaaauaagacauu

SEQ ID NO: 670246 - RNA, 21 nt, Artificial Sequence
  Synthetic
augaaauugaaauaagacauu

SEQ ID NO: 670247 - RNA, 22 nt, Artificial Sequence
  Synthetic
caugaaauugaaauaagacauu

SEQ ID NO: 670248 - RNA, 23 nt, Artificial Sequence
  Synthetic
gcaugaaauugaaauaagacauu

SEQ ID NO: 670249 - RNA, 24 nt, Artificial Sequence
  Synthetic
ugcaugaaauugaaauaagacauu

SEQ ID NO: 670250 - RNA, 18 nt, Artificial Sequence
  Synthetic
aaaagagaaccagacauu

SEQ ID NO: 670251 - RNA, 19 nt, Artificial Sequence
  Synthetic
caaaagagaaccagacauu

SEQ ID NO: 670252 - RNA, 20 nt, Artificial Sequence
  Synthetic
ucaaaagagaaccagacauu

SEQ ID NO: 670253 - RNA, 21 nt, Artificial Sequence
  Synthetic
aucaaaagagaaccagacauu

SEQ ID NO: 670254 - RNA, 22 nt, Artificial Sequence
  Synthetic
aaucaaaagagaaccagacauu

SEQ ID NO: 670255 - RNA, 23 nt, Artificial Sequence
  Synthetic
gaaucaaaagagaaccagacauu

SEQ ID NO: 670256 - RNA, 24 nt, Artificial Sequence
  Synthetic
ugaaucaaaagagaaccagacauu

SEQ ID NO: 670257 - RNA, 18 nt, Artificial Sequence
  Synthetic
guugcccugccagacauu

SEQ ID NO: 670258 - RNA, 19 nt, Artificial Sequence
  Synthetic
gguugcccugccagacauu

SEQ ID NO: 670259 - RNA, 20 nt, Artificial Sequence
  Synthetic
ugguugcccugccagacauu

SEQ ID NO: 670260 - RNA, 21 nt, Artificial Sequence
  Synthetic
uugguugcccugccagacauu

SEQ ID NO: 670261 - RNA, 22 nt, Artificial Sequence
  Synthetic
uuugguugcccugccagacauu

SEQ ID NO: 670262 - RNA, 23 nt, Artificial Sequence
  Synthetic
uuuugguugcccugccagacauu

SEQ ID NO: 670263 - RNA, 24 nt, Artificial Sequence
  Synthetic
auuuugguugcccugccagacauu

SEQ ID NO: 670264 - RNA, 18 nt, Artificial Sequence
  Synthetic
ggcucaaauggagacauu

SEQ ID NO: 670265 - RNA, 19 nt, Artificial Sequence
  Synthetic
aggcucaaauggagacauu

SEQ ID NO: 670266 - RNA, 20 nt, Artificial Sequence
  Synthetic
aaggcucaaauggagacauu

SEQ ID NO: 670267 - RNA, 21 nt, Artificial Sequence
  Synthetic
aaaggcucaaauggagacauu

SEQ ID NO: 670268 - RNA, 22 nt, Artificial Sequence
  Synthetic
uaaaggcucaaauggagacauu

SEQ ID NO: 670269 - RNA, 23 nt, Artificial Sequence
  Synthetic
uuaaaggcucaaauggagacauu

SEQ ID NO: 670270 - RNA, 24 nt, Artificial Sequence
  Synthetic
uuuaaaggcucaaauggagacauu

SEQ ID NO: 670271 - RNA, 18 nt, Artificial Sequence
  Synthetic
uuucuacaaauagacauu

SEQ ID NO: 670272 - RNA, 19 nt, Artificial Sequence
  Synthetic
uuuucuacaaauagacauu

SEQ ID NO: 670273 - RNA, 20 nt, Artificial Sequence
  Synthetic
uuuuucuacaaauagacauu

SEQ ID NO: 670274 - RNA, 21 nt, Artificial Sequence
  Synthetic
uuuuuucuacaaauagacauu

SEQ ID NO: 670275 - RNA, 22 nt, Artificial Sequence
  Synthetic
cuuuuuucuacaaauagacauu

SEQ ID NO: 670276 - RNA, 23 nt, Artificial Sequence
  Synthetic
ucuuuuuucuacaaauagacauu

SEQ ID NO: 670277 - RNA, 24 nt, Artificial Sequence
  Synthetic
uucuuuuuucuacaaauagacauu

SEQ ID NO: 670278 - RNA, 18 nt, Artificial Sequence
  Synthetic
ugcuccccaagggacauu

SEQ ID NO: 670279 - RNA, 19 nt, Artificial Sequence
  Synthetic
uugcuccccaagggacauu

SEQ ID NO: 670280 - RNA, 20 nt, Artificial Sequence
  Synthetic
uuugcuccccaagggacauu

SEQ ID NO: 670281 - RNA, 21 nt, Artificial Sequence
  Synthetic
uuuugcuccccaagggacauu

SEQ ID NO: 670282 - RNA, 22 nt, Artificial Sequence
  Synthetic
auuuugcuccccaagggacauu

SEQ ID NO: 670283 - RNA, 23 nt, Artificial Sequence
  Synthetic
gauuuugcuccccaagggacauu

SEQ ID NO: 670284 - RNA, 24 nt, Artificial Sequence
  Synthetic
ugauuuugcuccccaagggacauu

SEQ ID NO: 670285 - RNA, 18 nt, Artificial Sequence
  Synthetic
gaagaaacacaugacauu

SEQ ID NO: 670286 - RNA, 19 nt, Artificial Sequence
  Synthetic
ugaagaaacacaugacauu

SEQ ID NO: 670287 - RNA, 20 nt, Artificial Sequence
  Synthetic
gugaagaaacacaugacauu

SEQ ID NO: 670288 - RNA, 21 nt, Artificial Sequence
  Synthetic
ugugaagaaacacaugacauu

SEQ ID NO: 670289 - RNA, 22 nt, Artificial Sequence
  Synthetic
augugaagaaacacaugacauu

SEQ ID NO: 670290 - RNA, 23 nt, Artificial Sequence
  Synthetic
uaugugaagaaacacaugacauu

SEQ ID NO: 670291 - RNA, 24 nt, Artificial Sequence
  Synthetic
auaugugaagaaacacaugacauu

SEQ ID NO: 670292 - RNA, 18 nt, Artificial Sequence
  Synthetic
ccucaaggugaugacauu

SEQ ID NO: 670293 - RNA, 19 nt, Artificial Sequence
  Synthetic
cccucaaggugaugacauu

SEQ ID NO: 670294 - RNA, 20 nt, Artificial Sequence
  Synthetic
acccucaaggugaugacauu

SEQ ID NO: 670295 - RNA, 21 nt, Artificial Sequence
  Synthetic
cacccucaaggugaugacauu

SEQ ID NO: 670296 - RNA, 22 nt, Artificial Sequence
  Synthetic
ucacccucaaggugaugacauu

SEQ ID NO: 670297 - RNA, 23 nt, Artificial Sequence
  Synthetic
cucacccucaaggugaugacauu

SEQ ID NO: 670298 - RNA, 24 nt, Artificial Sequence
  Synthetic
ccucacccucaaggugaugacauu

SEQ ID NO: 670299 - RNA, 18 nt, Artificial Sequence
  Synthetic
cucaccacaacugacauu

SEQ ID NO: 670300 - RNA, 19 nt, Artificial Sequence
  Synthetic
ccucaccacaacugacauu

SEQ ID NO: 670301 - RNA, 20 nt, Artificial Sequence
  Synthetic
accucaccacaacugacauu

SEQ ID NO: 670302 - RNA, 21 nt, Artificial Sequence
  Synthetic
aaccucaccacaacugacauu

SEQ ID NO: 670303 - RNA, 22 nt, Artificial Sequence
  Synthetic
caaccucaccacaacugacauu

SEQ ID NO: 670304 - RNA, 23 nt, Artificial Sequence
  Synthetic
ccaaccucaccacaacugacauu

SEQ ID NO: 670305 - RNA, 24 nt, Artificial Sequence
  Synthetic
cccaaccucaccacaacugacauu

SEQ ID NO: 670306 - RNA, 18 nt, Artificial Sequence
  Synthetic
cugaccuugacugacauu

SEQ ID NO: 670307 - RNA, 19 nt, Artificial Sequence
  Synthetic
acugaccuugacugacauu

SEQ ID NO: 670308 - RNA, 20 nt, Artificial Sequence
  Synthetic
cacugaccuugacugacauu

SEQ ID NO: 670309 - RNA, 21 nt, Artificial Sequence
  Synthetic
ccacugaccuugacugacauu

SEQ ID NO: 670310 - RNA, 22 nt, Artificial Sequence
  Synthetic
cccacugaccuugacugacauu

SEQ ID NO: 670311 - RNA, 23 nt, Artificial Sequence
  Synthetic
ucccacugaccuugacugacauu

SEQ ID NO: 670312 - RNA, 24 nt, Artificial Sequence
  Synthetic
cucccacugaccuugacugacauu

SEQ ID NO: 670313 - RNA, 18 nt, Artificial Sequence
  Synthetic
cuuuaucuagcugacauu

SEQ ID NO: 670314 - RNA, 19 nt, Artificial Sequence
  Synthetic
ccuuuaucuagcugacauu

SEQ ID NO: 670315 - RNA, 20 nt, Artificial Sequence
  Synthetic
gccuuuaucuagcugacauu

SEQ ID NO: 670316 - RNA, 21 nt, Artificial Sequence
  Synthetic
ugccuuuaucuagcugacauu

SEQ ID NO: 670317 - RNA, 22 nt, Artificial Sequence
  Synthetic
augccuuuaucuagcugacauu

SEQ ID NO: 670318 - RNA, 23 nt, Artificial Sequence
  Synthetic
aaugccuuuaucuagcugacauu

SEQ ID NO: 670319 - RNA, 24 nt, Artificial Sequence
  Synthetic
aaaugccuuuaucuagcugacauu

SEQ ID NO: 670320 - RNA, 18 nt, Artificial Sequence
  Synthetic
uagaagccgagugacauu

SEQ ID NO: 670321 - RNA, 19 nt, Artificial Sequence
  Synthetic
guagaagccgagugacauu

SEQ ID NO: 670322 - RNA, 20 nt, Artificial Sequence
  Synthetic
cguagaagccgagugacauu

SEQ ID NO: 670323 - RNA, 21 nt, Artificial Sequence
  Synthetic
ucguagaagccgagugacauu

SEQ ID NO: 670324 - RNA, 22 nt, Artificial Sequence
  Synthetic
uucguagaagccgagugacauu

SEQ ID NO: 670325 - RNA, 23 nt, Artificial Sequence
  Synthetic
uuucguagaagccgagugacauu

SEQ ID NO: 670326 - RNA, 24 nt, Artificial Sequence
  Synthetic
cuuucguagaagccgagugacauu

SEQ ID NO: 670327 - RNA, 18 nt, Artificial Sequence
  Synthetic
uaguguggauuugacauu

SEQ ID NO: 670328 - RNA, 19 nt, Artificial Sequence
  Synthetic
uuaguguggauuugacauu

SEQ ID NO: 670329 - RNA, 20 nt, Artificial Sequence
  Synthetic
uuuaguguggauuugacauu

SEQ ID NO: 670330 - RNA, 21 nt, Artificial Sequence
  Synthetic
uuuuaguguggauuugacauu

SEQ ID NO: 670331 - RNA, 22 nt, Artificial Sequence
  Synthetic
uuuuuaguguggauuugacauu

SEQ ID NO: 670332 - RNA, 23 nt, Artificial Sequence
  Synthetic
guuuuuaguguggauuugacauu

SEQ ID NO: 670333 - RNA, 24 nt, Artificial Sequence
  Synthetic
aguuuuuaguguggauuugacauu

SEQ ID NO: 670334 - RNA, 18 nt, Artificial Sequence
  Synthetic
uaugacacucaauacauu

SEQ ID NO: 670335 - RNA, 19 nt, Artificial Sequence
  Synthetic
auaugacacucaauacauu

SEQ ID NO: 670336 - RNA, 20 nt, Artificial Sequence
  Synthetic
uauaugacacucaauacauu

SEQ ID NO: 670337 - RNA, 21 nt, Artificial Sequence
  Synthetic
auauaugacacucaauacauu

SEQ ID NO: 670338 - RNA, 22 nt, Artificial Sequence
  Synthetic
uauauaugacacucaauacauu

SEQ ID NO: 670339 - RNA, 23 nt, Artificial Sequence
  Synthetic
cuauauaugacacucaauacauu

SEQ ID NO: 670340 - RNA, 24 nt, Artificial Sequence
  Synthetic
acuauauaugacacucaauacauu

SEQ ID NO: 670341 - RNA, 18 nt, Artificial Sequence
  Synthetic
uaaugacaggaauacauu

SEQ ID NO: 670342 - RNA, 19 nt, Artificial Sequence
  Synthetic
uuaaugacaggaauacauu

SEQ ID NO: 670343 - RNA, 20 nt, Artificial Sequence
  Synthetic
cuuaaugacaggaauacauu

SEQ ID NO: 670344 - RNA, 21 nt, Artificial Sequence
  Synthetic
acuuaaugacaggaauacauu

SEQ ID NO: 670345 - RNA, 22 nt, Artificial Sequence
  Synthetic
cacuuaaugacaggaauacauu

SEQ ID NO: 670346 - RNA, 23 nt, Artificial Sequence
  Synthetic
ucacuuaaugacaggaauacauu

SEQ ID NO: 670347 - RNA, 24 nt, Artificial Sequence
  Synthetic
aucacuuaaugacaggaauacauu

SEQ ID NO: 670348 - RNA, 18 nt, Artificial Sequence
  Synthetic
caaauaagggaauacauu

SEQ ID NO: 670349 - RNA, 19 nt, Artificial Sequence
  Synthetic
ucaaauaagggaauacauu

SEQ ID NO: 670350 - RNA, 20 nt, Artificial Sequence
  Synthetic
cucaaauaagggaauacauu

SEQ ID NO: 670351 - RNA, 21 nt, Artificial Sequence
  Synthetic
ccucaaauaagggaauacauu

SEQ ID NO: 670352 - RNA, 22 nt, Artificial Sequence
  Synthetic
cccucaaauaagggaauacauu

SEQ ID NO: 670353 - RNA, 23 nt, Artificial Sequence
  Synthetic
ucccucaaauaagggaauacauu

SEQ ID NO: 670354 - RNA, 24 nt, Artificial Sequence
  Synthetic
uucccucaaauaagggaauacauu

SEQ ID NO: 670355 - RNA, 18 nt, Artificial Sequence
  Synthetic
ucaaacauauaauacauu

SEQ ID NO: 670356 - RNA, 19 nt, Artificial Sequence
  Synthetic
cucaaacauauaauacauu

SEQ ID NO: 670357 - RNA, 20 nt, Artificial Sequence
  Synthetic
ccucaaacauauaauacauu

SEQ ID NO: 670358 - RNA, 21 nt, Artificial Sequence
  Synthetic
accucaaacauauaauacauu

SEQ ID NO: 670359 - RNA, 22 nt, Artificial Sequence
  Synthetic
gaccucaaacauauaauacauu

SEQ ID NO: 670360 - RNA, 23 nt, Artificial Sequence
  Synthetic
agaccucaaacauauaauacauu

SEQ ID NO: 670361 - RNA, 24 nt, Artificial Sequence
  Synthetic
aagaccucaaacauauaauacauu

SEQ ID NO: 670362 - RNA, 18 nt, Artificial Sequence
  Synthetic
auuuucucuacauacauu

SEQ ID NO: 670363 - RNA, 19 nt, Artificial Sequence
  Synthetic
uauuuucucuacauacauu

SEQ ID NO: 670364 - RNA, 20 nt, Artificial Sequence
  Synthetic
guauuuucucuacauacauu

SEQ ID NO: 670365 - RNA, 21 nt, Artificial Sequence
  Synthetic
aguauuuucucuacauacauu

SEQ ID NO: 670366 - RNA, 22 nt, Artificial Sequence
  Synthetic
aaguauuuucucuacauacauu

SEQ ID NO: 670367 - RNA, 23 nt, Artificial Sequence
  Synthetic
uaaguauuuucucuacauacauu

SEQ ID NO: 670368 - RNA, 24 nt, Artificial Sequence
  Synthetic
uuaaguauuuucucuacauacauu

SEQ ID NO: 670369 - RNA, 18 nt, Artificial Sequence
  Synthetic
aguacaguuacauacauu

SEQ ID NO: 670370 - RNA, 19 nt, Artificial Sequence
  Synthetic
uaguacaguuacauacauu

SEQ ID NO: 670371 - RNA, 20 nt, Artificial Sequence
  Synthetic
auaguacaguuacauacauu

SEQ ID NO: 670372 - RNA, 21 nt, Artificial Sequence
  Synthetic
uauaguacaguuacauacauu

SEQ ID NO: 670373 - RNA, 22 nt, Artificial Sequence
  Synthetic
uuauaguacaguuacauacauu

SEQ ID NO: 670374 - RNA, 23 nt, Artificial Sequence
  Synthetic
cuuauaguacaguuacauacauu

SEQ ID NO: 670375 - RNA, 24 nt, Artificial Sequence
  Synthetic
ucuuauaguacaguuacauacauu

SEQ ID NO: 670376 - RNA, 18 nt, Artificial Sequence
  Synthetic
aagucucuaggauacauu

SEQ ID NO: 670377 - RNA, 19 nt, Artificial Sequence
  Synthetic
uaagucucuaggauacauu

SEQ ID NO: 670378 - RNA, 20 nt, Artificial Sequence
  Synthetic
cuaagucucuaggauacauu

SEQ ID NO: 670379 - RNA, 21 nt, Artificial Sequence
  Synthetic
ccuaagucucuaggauacauu

SEQ ID NO: 670380 - RNA, 22 nt, Artificial Sequence
  Synthetic
cccuaagucucuaggauacauu

SEQ ID NO: 670381 - RNA, 23 nt, Artificial Sequence
  Synthetic
ccccuaagucucuaggauacauu

SEQ ID NO: 670382 - RNA, 24 nt, Artificial Sequence
  Synthetic
gccccuaagucucuaggauacauu

SEQ ID NO: 670383 - RNA, 18 nt, Artificial Sequence
  Synthetic
aacuuaguuugauacauu

SEQ ID NO: 670384 - RNA, 19 nt, Artificial Sequence
  Synthetic
gaacuuaguuugauacauu

SEQ ID NO: 670385 - RNA, 20 nt, Artificial Sequence
  Synthetic
agaacuuaguuugauacauu

SEQ ID NO: 670386 - RNA, 21 nt, Artificial Sequence
  Synthetic
aagaacuuaguuugauacauu

SEQ ID NO: 670387 - RNA, 22 nt, Artificial Sequence
  Synthetic
gaagaacuuaguuugauacauu

SEQ ID NO: 670388 - RNA, 23 nt, Artificial Sequence
  Synthetic
ugaagaacuuaguuugauacauu

SEQ ID NO: 670389 - RNA, 24 nt, Artificial Sequence
  Synthetic
uugaagaacuuaguuugauacauu

SEQ ID NO: 670390 - RNA, 18 nt, Artificial Sequence
  Synthetic
auuaaagcaauauacauu

SEQ ID NO: 670391 - RNA, 19 nt, Artificial Sequence
  Synthetic
cauuaaagcaauauacauu

SEQ ID NO: 670392 - RNA, 20 nt, Artificial Sequence
  Synthetic
ucauuaaagcaauauacauu

SEQ ID NO: 670393 - RNA, 21 nt, Artificial Sequence
  Synthetic
aucauuaaagcaauauacauu

SEQ ID NO: 670394 - RNA, 22 nt, Artificial Sequence
  Synthetic
uaucauuaaagcaauauacauu

SEQ ID NO: 670395 - RNA, 23 nt, Artificial Sequence
  Synthetic
guaucauuaaagcaauauacauu

SEQ ID NO: 670396 - RNA, 24 nt, Artificial Sequence
  Synthetic
aguaucauuaaagcaauauacauu

SEQ ID NO: 670397 - RNA, 18 nt, Artificial Sequence
  Synthetic
guaacaaucauauacauu

SEQ ID NO: 670398 - RNA, 19 nt, Artificial Sequence
  Synthetic
aguaacaaucauauacauu

SEQ ID NO: 670399 - RNA, 20 nt, Artificial Sequence
  Synthetic
caguaacaaucauauacauu

SEQ ID NO: 670400 - RNA, 21 nt, Artificial Sequence
  Synthetic
ucaguaacaaucauauacauu

SEQ ID NO: 670401 - RNA, 22 nt, Artificial Sequence
  Synthetic
cucaguaacaaucauauacauu

SEQ ID NO: 670402 - RNA, 23 nt, Artificial Sequence
  Synthetic
ucucaguaacaaucauauacauu

SEQ ID NO: 670403 - RNA, 24 nt, Artificial Sequence
  Synthetic
uucucaguaacaaucauauacauu

SEQ ID NO: 670404 - RNA, 18 nt, Artificial Sequence
  Synthetic
aauuacaauauauacauu

SEQ ID NO: 670405 - RNA, 19 nt, Artificial Sequence
  Synthetic
gaauuacaauauauacauu

SEQ ID NO: 670406 - RNA, 20 nt, Artificial Sequence
  Synthetic
ggaauuacaauauauacauu

SEQ ID NO: 670407 - RNA, 21 nt, Artificial Sequence
  Synthetic
aggaauuacaauauauacauu

SEQ ID NO: 670408 - RNA, 22 nt, Artificial Sequence
  Synthetic
gaggaauuacaauauauacauu

SEQ ID NO: 670409 - RNA, 23 nt, Artificial Sequence
  Synthetic
ugaggaauuacaauauauacauu

SEQ ID NO: 670410 - RNA, 24 nt, Artificial Sequence
  Synthetic
augaggaauuacaauauauacauu

SEQ ID NO: 670411 - RNA, 18 nt, Artificial Sequence
  Synthetic
aauuaucauauauacauu

SEQ ID NO: 670412 - RNA, 19 nt, Artificial Sequence
  Synthetic
aaauuaucauauauacauu

SEQ ID NO: 670413 - RNA, 20 nt, Artificial Sequence
  Synthetic
caaauuaucauauauacauu

SEQ ID NO: 670414 - RNA, 21 nt, Artificial Sequence
  Synthetic
acaaauuaucauauauacauu

SEQ ID NO: 670415 - RNA, 22 nt, Artificial Sequence
  Synthetic
aacaaauuaucauauauacauu

SEQ ID NO: 670416 - RNA, 23 nt, Artificial Sequence
  Synthetic
uaacaaauuaucauauauacauu

SEQ ID NO: 670417 - RNA, 24 nt, Artificial Sequence
  Synthetic
guaacaaauuaucauauauacauu

SEQ ID NO: 670418 - RNA, 18 nt, Artificial Sequence
  Synthetic
auuuaucauguauacauu

SEQ ID NO: 670419 - RNA, 19 nt, Artificial Sequence
  Synthetic
uauuuaucauguauacauu

SEQ ID NO: 670420 - RNA, 20 nt, Artificial Sequence
  Synthetic
uuauuuaucauguauacauu

SEQ ID NO: 670421 - RNA, 21 nt, Artificial Sequence
  Synthetic
auuauuuaucauguauacauu

SEQ ID NO: 670422 - RNA, 22 nt, Artificial Sequence
  Synthetic
uauuauuuaucauguauacauu

SEQ ID NO: 670423 - RNA, 23 nt, Artificial Sequence
  Synthetic
uuauuauuuaucauguauacauu

SEQ ID NO: 670424 - RNA, 24 nt, Artificial Sequence
  Synthetic
uuuauuauuuaucauguauacauu

SEQ ID NO: 670425 - RNA, 18 nt, Artificial Sequence
  Synthetic
aacucuguagacuacauu

SEQ ID NO: 670426 - RNA, 19 nt, Artificial Sequence
  Synthetic
aaacucuguagacuacauu

SEQ ID NO: 670427 - RNA, 20 nt, Artificial Sequence
  Synthetic
uaaacucuguagacuacauu

SEQ ID NO: 670428 - RNA, 21 nt, Artificial Sequence
  Synthetic
uuaaacucuguagacuacauu

SEQ ID NO: 670429 - RNA, 22 nt, Artificial Sequence
  Synthetic
uuuaaacucuguagacuacauu

SEQ ID NO: 670430 - RNA, 23 nt, Artificial Sequence
  Synthetic
auuuaaacucuguagacuacauu

SEQ ID NO: 670431 - RNA, 24 nt, Artificial Sequence
  Synthetic
uauuuaaacucuguagacuacauu

SEQ ID NO: 670432 - RNA, 18 nt, Artificial Sequence
  Synthetic
acaaauauauacuacauu

SEQ ID NO: 670433 - RNA, 19 nt, Artificial Sequence
  Synthetic
cacaaauauauacuacauu

SEQ ID NO: 670434 - RNA, 20 nt, Artificial Sequence
  Synthetic
acacaaauauauacuacauu

SEQ ID NO: 670435 - RNA, 21 nt, Artificial Sequence
  Synthetic
cacacaaauauauacuacauu

SEQ ID NO: 670436 - RNA, 22 nt, Artificial Sequence
  Synthetic
acacacaaauauauacuacauu

SEQ ID NO: 670437 - RNA, 23 nt, Artificial Sequence
  Synthetic
gacacacaaauauauacuacauu

SEQ ID NO: 670438 - RNA, 24 nt, Artificial Sequence
  Synthetic
agacacacaaauauauacuacauu

SEQ ID NO: 670439 - RNA, 18 nt, Artificial Sequence
  Synthetic
ccacaaccugccuacauu

SEQ ID NO: 670440 - RNA, 19 nt, Artificial Sequence
  Synthetic
uccacaaccugccuacauu

SEQ ID NO: 670441 - RNA, 20 nt, Artificial Sequence
  Synthetic
cuccacaaccugccuacauu

SEQ ID NO: 670442 - RNA, 21 nt, Artificial Sequence
  Synthetic
ucuccacaaccugccuacauu

SEQ ID NO: 670443 - RNA, 22 nt, Artificial Sequence
  Synthetic
aucuccacaaccugccuacauu

SEQ ID NO: 670444 - RNA, 23 nt, Artificial Sequence
  Synthetic
gaucuccacaaccugccuacauu

SEQ ID NO: 670445 - RNA, 24 nt, Artificial Sequence
  Synthetic
ugaucuccacaaccugccuacauu

SEQ ID NO: 670446 - RNA, 18 nt, Artificial Sequence
  Synthetic
acugagaacaaguacauu

SEQ ID NO: 670447 - RNA, 19 nt, Artificial Sequence
  Synthetic
aacugagaacaaguacauu

SEQ ID NO: 670448 - RNA, 20 nt, Artificial Sequence
  Synthetic
caacugagaacaaguacauu

SEQ ID NO: 670449 - RNA, 21 nt, Artificial Sequence
  Synthetic
ucaacugagaacaaguacauu

SEQ ID NO: 670450 - RNA, 22 nt, Artificial Sequence
  Synthetic
uucaacugagaacaaguacauu

SEQ ID NO: 670451 - RNA, 23 nt, Artificial Sequence
  Synthetic
uuucaacugagaacaaguacauu

SEQ ID NO: 670452 - RNA, 24 nt, Artificial Sequence
  Synthetic
uuuucaacugagaacaaguacauu

SEQ ID NO: 670453 - RNA, 18 nt, Artificial Sequence
  Synthetic
ucaagcauaaauuacauu

SEQ ID NO: 670454 - RNA, 19 nt, Artificial Sequence
  Synthetic
cucaagcauaaauuacauu

SEQ ID NO: 670455 - RNA, 20 nt, Artificial Sequence
  Synthetic
ucucaagcauaaauuacauu

SEQ ID NO: 670456 - RNA, 21 nt, Artificial Sequence
  Synthetic
uucucaagcauaaauuacauu

SEQ ID NO: 670457 - RNA, 22 nt, Artificial Sequence
  Synthetic
auucucaagcauaaauuacauu

SEQ ID NO: 670458 - RNA, 23 nt, Artificial Sequence
  Synthetic
uauucucaagcauaaauuacauu

SEQ ID NO: 670459 - RNA, 24 nt, Artificial Sequence
  Synthetic
uuauucucaagcauaaauuacauu

SEQ ID NO: 670460 - RNA, 18 nt, Artificial Sequence
  Synthetic
auuuaugccaauuacauu

SEQ ID NO: 670461 - RNA, 19 nt, Artificial Sequence
  Synthetic
aauuuaugccaauuacauu

SEQ ID NO: 670462 - RNA, 20 nt, Artificial Sequence
  Synthetic
uaauuuaugccaauuacauu

SEQ ID NO: 670463 - RNA, 21 nt, Artificial Sequence
  Synthetic
cuaauuuaugccaauuacauu

SEQ ID NO: 670464 - RNA, 22 nt, Artificial Sequence
  Synthetic
ccuaauuuaugccaauuacauu

SEQ ID NO: 670465 - RNA, 23 nt, Artificial Sequence
  Synthetic
uccuaauuuaugccaauuacauu

SEQ ID NO: 670466 - RNA, 24 nt, Artificial Sequence
  Synthetic
uuccuaauuuaugccaauuacauu

SEQ ID NO: 670467 - RNA, 18 nt, Artificial Sequence
  Synthetic
uuuucaggugauuacauu

SEQ ID NO: 670468 - RNA, 19 nt, Artificial Sequence
  Synthetic
uuuuucaggugauuacauu

SEQ ID NO: 670469 - RNA, 20 nt, Artificial Sequence
  Synthetic
auuuuucaggugauuacauu

SEQ ID NO: 670470 - RNA, 21 nt, Artificial Sequence
  Synthetic
gauuuuucaggugauuacauu

SEQ ID NO: 670471 - RNA, 22 nt, Artificial Sequence
  Synthetic
agauuuuucaggugauuacauu

SEQ ID NO: 670472 - RNA, 23 nt, Artificial Sequence
  Synthetic
aagauuuuucaggugauuacauu

SEQ ID NO: 670473 - RNA, 24 nt, Artificial Sequence
  Synthetic
uaagauuuuucaggugauuacauu

SEQ ID NO: 670474 - RNA, 18 nt, Artificial Sequence
  Synthetic
gcaccuguuucuuacauu

SEQ ID NO: 670475 - RNA, 19 nt, Artificial Sequence
  Synthetic
ugcaccuguuucuuacauu

SEQ ID NO: 670476 - RNA, 20 nt, Artificial Sequence
  Synthetic
cugcaccuguuucuuacauu

SEQ ID NO: 670477 - RNA, 21 nt, Artificial Sequence
  Synthetic
acugcaccuguuucuuacauu

SEQ ID NO: 670478 - RNA, 22 nt, Artificial Sequence
  Synthetic
cacugcaccuguuucuuacauu

SEQ ID NO: 670479 - RNA, 23 nt, Artificial Sequence
  Synthetic
ucacugcaccuguuucuuacauu

SEQ ID NO: 670480 - RNA, 24 nt, Artificial Sequence
  Synthetic
aucacugcaccuguuucuuacauu

SEQ ID NO: 670481 - RNA, 18 nt, Artificial Sequence
  Synthetic
cauuauuugaaaaccauu

SEQ ID NO: 670482 - RNA, 19 nt, Artificial Sequence
  Synthetic
ucauuauuugaaaaccauu

SEQ ID NO: 670483 - RNA, 20 nt, Artificial Sequence
  Synthetic
uucauuauuugaaaaccauu

SEQ ID NO: 670484 - RNA, 21 nt, Artificial Sequence
  Synthetic
uuucauuauuugaaaaccauu

SEQ ID NO: 670485 - RNA, 22 nt, Artificial Sequence
  Synthetic
uuuucauuauuugaaaaccauu

SEQ ID NO: 670486 - RNA, 23 nt, Artificial Sequence
  Synthetic
guuuucauuauuugaaaaccauu

SEQ ID NO: 670487 - RNA, 24 nt, Artificial Sequence
  Synthetic
gguuuucauuauuugaaaaccauu

SEQ ID NO: 670488 - RNA, 18 nt, Artificial Sequence
  Synthetic
gggggacuugaaaccauu

SEQ ID NO: 670489 - RNA, 19 nt, Artificial Sequence
  Synthetic
agggggacuugaaaccauu

SEQ ID NO: 670490 - RNA, 20 nt, Artificial Sequence
  Synthetic
aagggggacuugaaaccauu

SEQ ID NO: 670491 - RNA, 21 nt, Artificial Sequence
  Synthetic
aaagggggacuugaaaccauu

SEQ ID NO: 670492 - RNA, 22 nt, Artificial Sequence
  Synthetic
caaagggggacuugaaaccauu

SEQ ID NO: 670493 - RNA, 23 nt, Artificial Sequence
  Synthetic
ucaaagggggacuugaaaccauu

SEQ ID NO: 670494 - RNA, 24 nt, Artificial Sequence
  Synthetic
gucaaagggggacuugaaaccauu

SEQ ID NO: 670495 - RNA, 21 nt, Artificial Sequence
  Synthetic
cuguaaacuaguucaaccauu

SEQ ID NO: 670496 - RNA, 22 nt, Artificial Sequence
  Synthetic
acuguaaacuaguucaaccauu

SEQ ID NO: 670497 - RNA, 23 nt, Artificial Sequence
  Synthetic
gacuguaaacuaguucaaccauu

SEQ ID NO: 670498 - RNA, 24 nt, Artificial Sequence
  Synthetic
agacuguaaacuaguucaaccauu

SEQ ID NO: 670499 - RNA, 18 nt, Artificial Sequence
  Synthetic
ugcacaaaauuaaccauu

SEQ ID NO: 670500 - RNA, 19 nt, Artificial Sequence
  Synthetic
augcacaaaauuaaccauu

SEQ ID NO: 670501 - RNA, 20 nt, Artificial Sequence
  Synthetic
gaugcacaaaauuaaccauu

SEQ ID NO: 670502 - RNA, 21 nt, Artificial Sequence
  Synthetic
ugaugcacaaaauuaaccauu

SEQ ID NO: 670503 - RNA, 22 nt, Artificial Sequence
  Synthetic
uugaugcacaaaauuaaccauu

SEQ ID NO: 670504 - RNA, 23 nt, Artificial Sequence
  Synthetic
guugaugcacaaaauuaaccauu

SEQ ID NO: 670505 - RNA, 24 nt, Artificial Sequence
  Synthetic
aguugaugcacaaaauuaaccauu

SEQ ID NO: 670506 - RNA, 18 nt, Artificial Sequence
  Synthetic
ccccccugauccaccauu

SEQ ID NO: 670507 - RNA, 19 nt, Artificial Sequence
  Synthetic
gccccccugauccaccauu

SEQ ID NO: 670508 - RNA, 20 nt, Artificial Sequence
  Synthetic
ggccccccugauccaccauu

SEQ ID NO: 670509 - RNA, 21 nt, Artificial Sequence
  Synthetic
gggccccccugauccaccauu

SEQ ID NO: 670510 - RNA, 22 nt, Artificial Sequence
  Synthetic
ugggccccccugauccaccauu

SEQ ID NO: 670511 - RNA, 23 nt, Artificial Sequence
  Synthetic
cugggccccccugauccaccauu

SEQ ID NO: 670512 - RNA, 24 nt, Artificial Sequence
  Synthetic
ccugggccccccugauccaccauu

SEQ ID NO: 670513 - RNA, 18 nt, Artificial Sequence
  Synthetic
uaaauuaguuccaccauu

SEQ ID NO: 670514 - RNA, 19 nt, Artificial Sequence
  Synthetic
guaaauuaguuccaccauu

SEQ ID NO: 670515 - RNA, 20 nt, Artificial Sequence
  Synthetic
uguaaauuaguuccaccauu

SEQ ID NO: 670516 - RNA, 21 nt, Artificial Sequence
  Synthetic
guguaaauuaguuccaccauu

SEQ ID NO: 670517 - RNA, 22 nt, Artificial Sequence
  Synthetic
aguguaaauuaguuccaccauu

SEQ ID NO: 670518 - RNA, 23 nt, Artificial Sequence
  Synthetic
gaguguaaauuaguuccaccauu

SEQ ID NO: 670519 - RNA, 24 nt, Artificial Sequence
  Synthetic
ggaguguaaauuaguuccaccauu

SEQ ID NO: 670520 - RNA, 18 nt, Artificial Sequence
  Synthetic
auuguuuuuugcaccauu

SEQ ID NO: 670521 - RNA, 19 nt, Artificial Sequence
  Synthetic
cauuguuuuuugcaccauu

SEQ ID NO: 670522 - RNA, 20 nt, Artificial Sequence
  Synthetic
acauuguuuuuugcaccauu

SEQ ID NO: 670523 - RNA, 21 nt, Artificial Sequence
  Synthetic
uacauuguuuuuugcaccauu

SEQ ID NO: 670524 - RNA, 22 nt, Artificial Sequence
  Synthetic
auacauuguuuuuugcaccauu

SEQ ID NO: 670525 - RNA, 23 nt, Artificial Sequence
  Synthetic
aauacauuguuuuuugcaccauu

SEQ ID NO: 670526 - RNA, 24 nt, Artificial Sequence
  Synthetic
uaauacauuguuuuuugcaccauu

SEQ ID NO: 670527 - RNA, 18 nt, Artificial Sequence
  Synthetic
uuggcaagccucaccauu

SEQ ID NO: 670528 - RNA, 19 nt, Artificial Sequence
  Synthetic
cuuggcaagccucaccauu

SEQ ID NO: 670529 - RNA, 20 nt, Artificial Sequence
  Synthetic
ucuuggcaagccucaccauu

SEQ ID NO: 670530 - RNA, 21 nt, Artificial Sequence
  Synthetic
uucuuggcaagccucaccauu

SEQ ID NO: 670531 - RNA, 22 nt, Artificial Sequence
  Synthetic
uuucuuggcaagccucaccauu

SEQ ID NO: 670532 - RNA, 23 nt, Artificial Sequence
  Synthetic
guuucuuggcaagccucaccauu

SEQ ID NO: 670533 - RNA, 24 nt, Artificial Sequence
  Synthetic
aguuucuuggcaagccucaccauu

SEQ ID NO: 670534 - RNA, 18 nt, Artificial Sequence
  Synthetic
cacuuuagaaagaccauu

SEQ ID NO: 670535 - RNA, 19 nt, Artificial Sequence
  Synthetic
ucacuuuagaaagaccauu

SEQ ID NO: 670536 - RNA, 20 nt, Artificial Sequence
  Synthetic
aucacuuuagaaagaccauu

SEQ ID NO: 670537 - RNA, 21 nt, Artificial Sequence
  Synthetic
gaucacuuuagaaagaccauu

SEQ ID NO: 670538 - RNA, 22 nt, Artificial Sequence
  Synthetic
agaucacuuuagaaagaccauu

SEQ ID NO: 670539 - RNA, 23 nt, Artificial Sequence
  Synthetic
uagaucacuuuagaaagaccauu

SEQ ID NO: 670540 - RNA, 24 nt, Artificial Sequence
  Synthetic
auagaucacuuuagaaagaccauu

SEQ ID NO: 670541 - RNA, 18 nt, Artificial Sequence
  Synthetic
aaugaggaauagaccauu

SEQ ID NO: 670542 - RNA, 19 nt, Artificial Sequence
  Synthetic
uaaugaggaauagaccauu

SEQ ID NO: 670543 - RNA, 20 nt, Artificial Sequence
  Synthetic
auaaugaggaauagaccauu

SEQ ID NO: 670544 - RNA, 21 nt, Artificial Sequence
  Synthetic
gauaaugaggaauagaccauu

SEQ ID NO: 670545 - RNA, 22 nt, Artificial Sequence
  Synthetic
ggauaaugaggaauagaccauu

SEQ ID NO: 670546 - RNA, 23 nt, Artificial Sequence
  Synthetic
aggauaaugaggaauagaccauu

SEQ ID NO: 670547 - RNA, 24 nt, Artificial Sequence
  Synthetic
aaggauaaugaggaauagaccauu

SEQ ID NO: 670548 - RNA, 21 nt, Artificial Sequence
  Synthetic
gaaaaccuaggcaauaccauu

SEQ ID NO: 670549 - RNA, 22 nt, Artificial Sequence
  Synthetic
agaaaaccuaggcaauaccauu

SEQ ID NO: 670550 - RNA, 23 nt, Artificial Sequence
  Synthetic
aagaaaaccuaggcaauaccauu

SEQ ID NO: 670551 - RNA, 24 nt, Artificial Sequence
  Synthetic
gaagaaaaccuaggcaauaccauu

SEQ ID NO: 670552 - RNA, 18 nt, Artificial Sequence
  Synthetic
aauuauccugguaccauu

SEQ ID NO: 670553 - RNA, 19 nt, Artificial Sequence
  Synthetic
gaauuauccugguaccauu

SEQ ID NO: 670554 - RNA, 20 nt, Artificial Sequence
  Synthetic
agaauuauccugguaccauu

SEQ ID NO: 670555 - RNA, 21 nt, Artificial Sequence
  Synthetic
cagaauuauccugguaccauu

SEQ ID NO: 670556 - RNA, 22 nt, Artificial Sequence
  Synthetic
ucagaauuauccugguaccauu

SEQ ID NO: 670557 - RNA, 23 nt, Artificial Sequence
  Synthetic
gucagaauuauccugguaccauu

SEQ ID NO: 670558 - RNA, 24 nt, Artificial Sequence
  Synthetic
ugucagaauuauccugguaccauu

SEQ ID NO: 670559 - RNA, 18 nt, Artificial Sequence
  Synthetic
aagaaaacucuuaccauu

SEQ ID NO: 670560 - RNA, 19 nt, Artificial Sequence
  Synthetic
aaagaaaacucuuaccauu

SEQ ID NO: 670561 - RNA, 20 nt, Artificial Sequence
  Synthetic
aaaagaaaacucuuaccauu

SEQ ID NO: 670562 - RNA, 21 nt, Artificial Sequence
  Synthetic
gaaaagaaaacucuuaccauu

SEQ ID NO: 670563 - RNA, 22 nt, Artificial Sequence
  Synthetic
agaaaagaaaacucuuaccauu

SEQ ID NO: 670564 - RNA, 23 nt, Artificial Sequence
  Synthetic
aagaaaagaaaacucuuaccauu

SEQ ID NO: 670565 - RNA, 24 nt, Artificial Sequence
  Synthetic
uaagaaaagaaaacucuuaccauu

SEQ ID NO: 670566 - RNA, 18 nt, Artificial Sequence
  Synthetic
uguaaaauaguuaccauu

SEQ ID NO: 670567 - RNA, 19 nt, Artificial Sequence
  Synthetic
guguaaaauaguuaccauu

SEQ ID NO: 670568 - RNA, 20 nt, Artificial Sequence
  Synthetic
aguguaaaauaguuaccauu

SEQ ID NO: 670569 - RNA, 21 nt, Artificial Sequence
  Synthetic
uaguguaaaauaguuaccauu

SEQ ID NO: 670570 - RNA, 22 nt, Artificial Sequence
  Synthetic
auaguguaaaauaguuaccauu

SEQ ID NO: 670571 - RNA, 23 nt, Artificial Sequence
  Synthetic
uauaguguaaaauaguuaccauu

SEQ ID NO: 670572 - RNA, 24 nt, Artificial Sequence
  Synthetic
auauaguguaaaauaguuaccauu

SEQ ID NO: 670573 - RNA, 18 nt, Artificial Sequence
  Synthetic
aaagguguaaaacccauu

SEQ ID NO: 670574 - RNA, 19 nt, Artificial Sequence
  Synthetic
aaaagguguaaaacccauu

SEQ ID NO: 670575 - RNA, 20 nt, Artificial Sequence
  Synthetic
caaaagguguaaaacccauu

SEQ ID NO: 670576 - RNA, 21 nt, Artificial Sequence
  Synthetic
ucaaaagguguaaaacccauu

SEQ ID NO: 670577 - RNA, 22 nt, Artificial Sequence
  Synthetic
aucaaaagguguaaaacccauu

SEQ ID NO: 670578 - RNA, 23 nt, Artificial Sequence
  Synthetic
caucaaaagguguaaaacccauu

SEQ ID NO: 670579 - RNA, 24 nt, Artificial Sequence
  Synthetic
acaucaaaagguguaaaacccauu

SEQ ID NO: 670580 - RNA, 18 nt, Artificial Sequence
  Synthetic
ggggaagcauaacccauu

SEQ ID NO: 670581 - RNA, 19 nt, Artificial Sequence
  Synthetic
aggggaagcauaacccauu

SEQ ID NO: 670582 - RNA, 20 nt, Artificial Sequence
  Synthetic
caggggaagcauaacccauu

SEQ ID NO: 670583 - RNA, 21 nt, Artificial Sequence
  Synthetic
acaggggaagcauaacccauu

SEQ ID NO: 670584 - RNA, 22 nt, Artificial Sequence
  Synthetic
aacaggggaagcauaacccauu

SEQ ID NO: 670585 - RNA, 23 nt, Artificial Sequence
  Synthetic
caacaggggaagcauaacccauu

SEQ ID NO: 670586 - RNA, 24 nt, Artificial Sequence
  Synthetic
acaacaggggaagcauaacccauu

SEQ ID NO: 670587 - RNA, 18 nt, Artificial Sequence
  Synthetic
aaucaggcaccacccauu

SEQ ID NO: 670588 - RNA, 19 nt, Artificial Sequence
  Synthetic
gaaucaggcaccacccauu

SEQ ID NO: 670589 - RNA, 20 nt, Artificial Sequence
  Synthetic
ugaaucaggcaccacccauu

SEQ ID NO: 670590 - RNA, 21 nt, Artificial Sequence
  Synthetic
cugaaucaggcaccacccauu

SEQ ID NO: 670591 - RNA, 22 nt, Artificial Sequence
  Synthetic
acugaaucaggcaccacccauu

SEQ ID NO: 670592 - RNA, 23 nt, Artificial Sequence
  Synthetic
cacugaaucaggcaccacccauu

SEQ ID NO: 670593 - RNA, 24 nt, Artificial Sequence
  Synthetic
ccacugaaucaggcaccacccauu

SEQ ID NO: 670594 - RNA, 18 nt, Artificial Sequence
  Synthetic
aauaacccucuacccauu

SEQ ID NO: 670595 - RNA, 19 nt, Artificial Sequence
  Synthetic
aaauaacccucuacccauu

SEQ ID NO: 670596 - RNA, 20 nt, Artificial Sequence
  Synthetic
aaaauaacccucuacccauu

SEQ ID NO: 670597 - RNA, 21 nt, Artificial Sequence
  Synthetic
aaaaauaacccucuacccauu

SEQ ID NO: 670598 - RNA, 22 nt, Artificial Sequence
  Synthetic
aaaaaauaacccucuacccauu

SEQ ID NO: 670599 - RNA, 23 nt, Artificial Sequence
  Synthetic
aaaaaaauaacccucuacccauu

SEQ ID NO: 670600 - RNA, 24 nt, Artificial Sequence
  Synthetic
gaaaaaaauaacccucuacccauu

SEQ ID NO: 670601 - RNA, 18 nt, Artificial Sequence
  Synthetic
caaauauuuuuacccauu

SEQ ID NO: 670602 - RNA, 19 nt, Artificial Sequence
  Synthetic
acaaauauuuuuacccauu

SEQ ID NO: 670603 - RNA, 20 nt, Artificial Sequence
  Synthetic
uacaaauauuuuuacccauu

SEQ ID NO: 670604 - RNA, 21 nt, Artificial Sequence
  Synthetic
uuacaaauauuuuuacccauu

SEQ ID NO: 670605 - RNA, 22 nt, Artificial Sequence
  Synthetic
uuuacaaauauuuuuacccauu

SEQ ID NO: 670606 - RNA, 23 nt, Artificial Sequence
  Synthetic
auuuacaaauauuuuuacccauu

SEQ ID NO: 670607 - RNA, 24 nt, Artificial Sequence
  Synthetic
gauuuacaaauauuuuuacccauu

SEQ ID NO: 670608 - RNA, 18 nt, Artificial Sequence
  Synthetic
uucugccaaaaccccauu

SEQ ID NO: 670609 - RNA, 19 nt, Artificial Sequence
  Synthetic
guucugccaaaaccccauu

SEQ ID NO: 670610 - RNA, 20 nt, Artificial Sequence
  Synthetic
aguucugccaaaaccccauu

SEQ ID NO: 670611 - RNA, 21 nt, Artificial Sequence
  Synthetic
uaguucugccaaaaccccauu

SEQ ID NO: 670612 - RNA, 22 nt, Artificial Sequence
  Synthetic
cuaguucugccaaaaccccauu

SEQ ID NO: 670613 - RNA, 23 nt, Artificial Sequence
  Synthetic
acuaguucugccaaaaccccauu

SEQ ID NO: 670614 - RNA, 24 nt, Artificial Sequence
  Synthetic
aacuaguucugccaaaaccccauu

SEQ ID NO: 670615 - RNA, 18 nt, Artificial Sequence
  Synthetic
uaucccccgccccccauu

SEQ ID NO: 670616 - RNA, 19 nt, Artificial Sequence
  Synthetic
auaucccccgccccccauu

SEQ ID NO: 670617 - RNA, 20 nt, Artificial Sequence
  Synthetic
aauaucccccgccccccauu

SEQ ID NO: 670618 - RNA, 21 nt, Artificial Sequence
  Synthetic
aaauaucccccgccccccauu

SEQ ID NO: 670619 - RNA, 22 nt, Artificial Sequence
  Synthetic
aaaauaucccccgccccccauu

SEQ ID NO: 670620 - RNA, 23 nt, Artificial Sequence
  Synthetic
aaaaauaucccccgccccccauu

SEQ ID NO: 670621 - RNA, 24 nt, Artificial Sequence
  Synthetic
uaaaaauaucccccgccccccauu

SEQ ID NO: 670622 - RNA, 18 nt, Artificial Sequence
  Synthetic
ugucuuuuucuccccauu

SEQ ID NO: 670623 - RNA, 19 nt, Artificial Sequence
  Synthetic
uugucuuuuucuccccauu

SEQ ID NO: 670624 - RNA, 20 nt, Artificial Sequence
  Synthetic
uuugucuuuuucuccccauu

SEQ ID NO: 670625 - RNA, 21 nt, Artificial Sequence
  Synthetic
auuugucuuuuucuccccauu

SEQ ID NO: 670626 - RNA, 22 nt, Artificial Sequence
  Synthetic
uauuugucuuuuucuccccauu

SEQ ID NO: 670627 - RNA, 23 nt, Artificial Sequence
  Synthetic
auauuugucuuuuucuccccauu

SEQ ID NO: 670628 - RNA, 24 nt, Artificial Sequence
  Synthetic
uauauuugucuuuuucuccccauu

SEQ ID NO: 670629 - RNA, 18 nt, Artificial Sequence
  Synthetic
uuuugaguucugcccauu

SEQ ID NO: 670630 - RNA, 19 nt, Artificial Sequence
  Synthetic
uuuuugaguucugcccauu

SEQ ID NO: 670631 - RNA, 20 nt, Artificial Sequence
  Synthetic
uuuuuugaguucugcccauu

SEQ ID NO: 670632 - RNA, 21 nt, Artificial Sequence
  Synthetic
cuuuuuugaguucugcccauu

SEQ ID NO: 670633 - RNA, 22 nt, Artificial Sequence
  Synthetic
ucuuuuuugaguucugcccauu

SEQ ID NO: 670634 - RNA, 23 nt, Artificial Sequence
  Synthetic
cucuuuuuugaguucugcccauu

SEQ ID NO: 670635 - RNA, 24 nt, Artificial Sequence
  Synthetic
ccucuuuuuugaguucugcccauu

SEQ ID NO: 670636 - RNA, 18 nt, Artificial Sequence
  Synthetic
auuccagauucucccauu

SEQ ID NO: 670637 - RNA, 19 nt, Artificial Sequence
  Synthetic
uauuccagauucucccauu

SEQ ID NO: 670638 - RNA, 20 nt, Artificial Sequence
  Synthetic
auauuccagauucucccauu

SEQ ID NO: 670639 - RNA, 21 nt, Artificial Sequence
  Synthetic
gauauuccagauucucccauu

SEQ ID NO: 670640 - RNA, 22 nt, Artificial Sequence
  Synthetic
agauauuccagauucucccauu

SEQ ID NO: 670641 - RNA, 23 nt, Artificial Sequence
  Synthetic
gagauauuccagauucucccauu

SEQ ID NO: 670642 - RNA, 24 nt, Artificial Sequence
  Synthetic
agagauauuccagauucucccauu

SEQ ID NO: 670643 - RNA, 18 nt, Artificial Sequence
  Synthetic
agguucucucuucccauu

SEQ ID NO: 670644 - RNA, 19 nt, Artificial Sequence
  Synthetic
cagguucucucuucccauu

SEQ ID NO: 670645 - RNA, 20 nt, Artificial Sequence
  Synthetic
acagguucucucuucccauu

SEQ ID NO: 670646 - RNA, 21 nt, Artificial Sequence
  Synthetic
gacagguucucucuucccauu

SEQ ID NO: 670647 - RNA, 22 nt, Artificial Sequence
  Synthetic
ugacagguucucucuucccauu

SEQ ID NO: 670648 - RNA, 23 nt, Artificial Sequence
  Synthetic
augacagguucucucuucccauu

SEQ ID NO: 670649 - RNA, 24 nt, Artificial Sequence
  Synthetic
aaugacagguucucucuucccauu

SEQ ID NO: 670650 - RNA, 18 nt, Artificial Sequence
  Synthetic
aagagacccuuucccauu

SEQ ID NO: 670651 - RNA, 19 nt, Artificial Sequence
  Synthetic
aaagagacccuuucccauu

SEQ ID NO: 670652 - RNA, 20 nt, Artificial Sequence
  Synthetic
uaaagagacccuuucccauu

SEQ ID NO: 670653 - RNA, 21 nt, Artificial Sequence
  Synthetic
uuaaagagacccuuucccauu

SEQ ID NO: 670654 - RNA, 22 nt, Artificial Sequence
  Synthetic
auuaaagagacccuuucccauu

SEQ ID NO: 670655 - RNA, 23 nt, Artificial Sequence
  Synthetic
gauuaaagagacccuuucccauu

SEQ ID NO: 670656 - RNA, 24 nt, Artificial Sequence
  Synthetic
agauuaaagagacccuuucccauu

SEQ ID NO: 670657 - RNA, 18 nt, Artificial Sequence
  Synthetic
caugugagugaggccauu

SEQ ID NO: 670658 - RNA, 19 nt, Artificial Sequence
  Synthetic
ucaugugagugaggccauu

SEQ ID NO: 670659 - RNA, 20 nt, Artificial Sequence
  Synthetic
gucaugugagugaggccauu

SEQ ID NO: 670660 - RNA, 21 nt, Artificial Sequence
  Synthetic
agucaugugagugaggccauu

SEQ ID NO: 670661 - RNA, 22 nt, Artificial Sequence
  Synthetic
cagucaugugagugaggccauu

SEQ ID NO: 670662 - RNA, 23 nt, Artificial Sequence
  Synthetic
ccagucaugugagugaggccauu

SEQ ID NO: 670663 - RNA, 24 nt, Artificial Sequence
  Synthetic
gccagucaugugagugaggccauu

SEQ ID NO: 670664 - RNA, 18 nt, Artificial Sequence
  Synthetic
cuaguucccguggccauu

SEQ ID NO: 670665 - RNA, 19 nt, Artificial Sequence
  Synthetic
ucuaguucccguggccauu

SEQ ID NO: 670666 - RNA, 20 nt, Artificial Sequence
  Synthetic
aucuaguucccguggccauu

SEQ ID NO: 670667 - RNA, 21 nt, Artificial Sequence
  Synthetic
aaucuaguucccguggccauu

SEQ ID NO: 670668 - RNA, 22 nt, Artificial Sequence
  Synthetic
caaucuaguucccguggccauu

SEQ ID NO: 670669 - RNA, 23 nt, Artificial Sequence
  Synthetic
ucaaucuaguucccguggccauu

SEQ ID NO: 670670 - RNA, 24 nt, Artificial Sequence
  Synthetic
cucaaucuaguucccguggccauu

SEQ ID NO: 670671 - RNA, 18 nt, Artificial Sequence
  Synthetic
accauuccagaugccauu

SEQ ID NO: 670672 - RNA, 19 nt, Artificial Sequence
  Synthetic
caccauuccagaugccauu

SEQ ID NO: 670673 - RNA, 20 nt, Artificial Sequence
  Synthetic
ucaccauuccagaugccauu

SEQ ID NO: 670674 - RNA, 21 nt, Artificial Sequence
  Synthetic
cucaccauuccagaugccauu

SEQ ID NO: 670675 - RNA, 22 nt, Artificial Sequence
  Synthetic
acucaccauuccagaugccauu

SEQ ID NO: 670676 - RNA, 23 nt, Artificial Sequence
  Synthetic
gacucaccauuccagaugccauu

SEQ ID NO: 670677 - RNA, 24 nt, Artificial Sequence
  Synthetic
ggacucaccauuccagaugccauu

SEQ ID NO: 670678 - RNA, 18 nt, Artificial Sequence
  Synthetic
gucaacccagcugccauu

SEQ ID NO: 670679 - RNA, 19 nt, Artificial Sequence
  Synthetic
ugucaacccagcugccauu

SEQ ID NO: 670680 - RNA, 20 nt, Artificial Sequence
  Synthetic
cugucaacccagcugccauu

SEQ ID NO: 670681 - RNA, 21 nt, Artificial Sequence
  Synthetic
ucugucaacccagcugccauu

SEQ ID NO: 670682 - RNA, 22 nt, Artificial Sequence
  Synthetic
aucugucaacccagcugccauu

SEQ ID NO: 670683 - RNA, 23 nt, Artificial Sequence
  Synthetic
caucugucaacccagcugccauu

SEQ ID NO: 670684 - RNA, 24 nt, Artificial Sequence
  Synthetic
ucaucugucaacccagcugccauu

SEQ ID NO: 670685 - RNA, 18 nt, Artificial Sequence
  Synthetic
augugaagacgugccauu

SEQ ID NO: 670686 - RNA, 19 nt, Artificial Sequence
  Synthetic
aaugugaagacgugccauu

SEQ ID NO: 670687 - RNA, 20 nt, Artificial Sequence
  Synthetic
aaaugugaagacgugccauu

SEQ ID NO: 670688 - RNA, 21 nt, Artificial Sequence
  Synthetic
gaaaugugaagacgugccauu

SEQ ID NO: 670689 - RNA, 22 nt, Artificial Sequence
  Synthetic
ugaaaugugaagacgugccauu

SEQ ID NO: 670690 - RNA, 23 nt, Artificial Sequence
  Synthetic
uugaaaugugaagacgugccauu

SEQ ID NO: 670691 - RNA, 24 nt, Artificial Sequence
  Synthetic
uuugaaaugugaagacgugccauu

SEQ ID NO: 670692 - RNA, 18 nt, Artificial Sequence
  Synthetic
uucagcccuauugccauu

SEQ ID NO: 670693 - RNA, 19 nt, Artificial Sequence
  Synthetic
cuucagcccuauugccauu

SEQ ID NO: 670694 - RNA, 20 nt, Artificial Sequence
  Synthetic
gcuucagcccuauugccauu

SEQ ID NO: 670695 - RNA, 21 nt, Artificial Sequence
  Synthetic
agcuucagcccuauugccauu

SEQ ID NO: 670696 - RNA, 22 nt, Artificial Sequence
  Synthetic
cagcuucagcccuauugccauu

SEQ ID NO: 670697 - RNA, 23 nt, Artificial Sequence
  Synthetic
ucagcuucagcccuauugccauu

SEQ ID NO: 670698 - RNA, 24 nt, Artificial Sequence
  Synthetic
cucagcuucagcccuauugccauu

SEQ ID NO: 670699 - RNA, 18 nt, Artificial Sequence
  Synthetic
aguccaagccuugccauu

SEQ ID NO: 670700 - RNA, 19 nt, Artificial Sequence
  Synthetic
aaguccaagccuugccauu

SEQ ID NO: 670701 - RNA, 20 nt, Artificial Sequence
  Synthetic
aaaguccaagccuugccauu

SEQ ID NO: 670702 - RNA, 21 nt, Artificial Sequence
  Synthetic
gaaaguccaagccuugccauu

SEQ ID NO: 670703 - RNA, 22 nt, Artificial Sequence
  Synthetic
agaaaguccaagccuugccauu

SEQ ID NO: 670704 - RNA, 23 nt, Artificial Sequence
  Synthetic
aagaaaguccaagccuugccauu

SEQ ID NO: 670705 - RNA, 24 nt, Artificial Sequence
  Synthetic
gaagaaaguccaagccuugccauu

SEQ ID NO: 670706 - RNA, 18 nt, Artificial Sequence
  Synthetic
aaacaugaugaauccauu

SEQ ID NO: 670707 - RNA, 19 nt, Artificial Sequence
  Synthetic
aaaacaugaugaauccauu

SEQ ID NO: 670708 - RNA, 20 nt, Artificial Sequence
  Synthetic
uaaaacaugaugaauccauu

SEQ ID NO: 670709 - RNA, 21 nt, Artificial Sequence
  Synthetic
uuaaaacaugaugaauccauu

SEQ ID NO: 670710 - RNA, 22 nt, Artificial Sequence
  Synthetic
auuaaaacaugaugaauccauu

SEQ ID NO: 670711 - RNA, 23 nt, Artificial Sequence
  Synthetic
uauuaaaacaugaugaauccauu

SEQ ID NO: 670712 - RNA, 24 nt, Artificial Sequence
  Synthetic
auauuaaaacaugaugaauccauu

SEQ ID NO: 670713 - RNA, 18 nt, Artificial Sequence
  Synthetic
uaaaugaguacauccauu

SEQ ID NO: 670714 - RNA, 19 nt, Artificial Sequence
  Synthetic
guaaaugaguacauccauu

SEQ ID NO: 670715 - RNA, 20 nt, Artificial Sequence
  Synthetic
uguaaaugaguacauccauu

SEQ ID NO: 670716 - RNA, 21 nt, Artificial Sequence
  Synthetic
auguaaaugaguacauccauu

SEQ ID NO: 670717 - RNA, 22 nt, Artificial Sequence
  Synthetic
aauguaaaugaguacauccauu

SEQ ID NO: 670718 - RNA, 23 nt, Artificial Sequence
  Synthetic
gaauguaaaugaguacauccauu

SEQ ID NO: 670719 - RNA, 24 nt, Artificial Sequence
  Synthetic
ggaauguaaaugaguacauccauu

SEQ ID NO: 670720 - RNA, 18 nt, Artificial Sequence
  Synthetic
agcuaaggagcauccauu

SEQ ID NO: 670721 - RNA, 19 nt, Artificial Sequence
  Synthetic
aagcuaaggagcauccauu

SEQ ID NO: 670722 - RNA, 20 nt, Artificial Sequence
  Synthetic
aaagcuaaggagcauccauu

SEQ ID NO: 670723 - RNA, 21 nt, Artificial Sequence
  Synthetic
caaagcuaaggagcauccauu

SEQ ID NO: 670724 - RNA, 22 nt, Artificial Sequence
  Synthetic
ucaaagcuaaggagcauccauu

SEQ ID NO: 670725 - RNA, 23 nt, Artificial Sequence
  Synthetic
uucaaagcuaaggagcauccauu

SEQ ID NO: 670726 - RNA, 24 nt, Artificial Sequence
  Synthetic
auucaaagcuaaggagcauccauu

SEQ ID NO: 670727 - RNA, 18 nt, Artificial Sequence
  Synthetic
uucaugaaaaucuccauu

SEQ ID NO: 670728 - RNA, 19 nt, Artificial Sequence
  Synthetic
guucaugaaaaucuccauu

SEQ ID NO: 670729 - RNA, 20 nt, Artificial Sequence
  Synthetic
uguucaugaaaaucuccauu

SEQ ID NO: 670730 - RNA, 21 nt, Artificial Sequence
  Synthetic
auguucaugaaaaucuccauu

SEQ ID NO: 670731 - RNA, 22 nt, Artificial Sequence
  Synthetic
gauguucaugaaaaucuccauu

SEQ ID NO: 670732 - RNA, 23 nt, Artificial Sequence
  Synthetic
agauguucaugaaaaucuccauu

SEQ ID NO: 670733 - RNA, 24 nt, Artificial Sequence
  Synthetic
gagauguucaugaaaaucuccauu

SEQ ID NO: 670734 - RNA, 18 nt, Artificial Sequence
  Synthetic
aagcucuagaaguccauu

SEQ ID NO: 670735 - RNA, 19 nt, Artificial Sequence
  Synthetic
aaagcucuagaaguccauu

SEQ ID NO: 670736 - RNA, 20 nt, Artificial Sequence
  Synthetic
gaaagcucuagaaguccauu

SEQ ID NO: 670737 - RNA, 21 nt, Artificial Sequence
  Synthetic
agaaagcucuagaaguccauu

SEQ ID NO: 670738 - RNA, 22 nt, Artificial Sequence
  Synthetic
uagaaagcucuagaaguccauu

SEQ ID NO: 670739 - RNA, 23 nt, Artificial Sequence
  Synthetic
uuagaaagcucuagaaguccauu

SEQ ID NO: 670740 - RNA, 24 nt, Artificial Sequence
  Synthetic
auuagaaagcucuagaaguccauu

SEQ ID NO: 670741 - RNA, 18 nt, Artificial Sequence
  Synthetic
aggugcacacauuccauu

SEQ ID NO: 670742 - RNA, 19 nt, Artificial Sequence
  Synthetic
aaggugcacacauuccauu

SEQ ID NO: 670743 - RNA, 20 nt, Artificial Sequence
  Synthetic
aaaggugcacacauuccauu

SEQ ID NO: 670744 - RNA, 21 nt, Artificial Sequence
  Synthetic
gaaaggugcacacauuccauu

SEQ ID NO: 670745 - RNA, 22 nt, Artificial Sequence
  Synthetic
agaaaggugcacacauuccauu

SEQ ID NO: 670746 - RNA, 23 nt, Artificial Sequence
  Synthetic
cagaaaggugcacacauuccauu

SEQ ID NO: 670747 - RNA, 24 nt, Artificial Sequence
  Synthetic
ccagaaaggugcacacauuccauu

SEQ ID NO: 670748 - RNA, 18 nt, Artificial Sequence
  Synthetic
ggccuuuuuacuuccauu

SEQ ID NO: 670749 - RNA, 19 nt, Artificial Sequence
  Synthetic
gggccuuuuuacuuccauu

SEQ ID NO: 670750 - RNA, 20 nt, Artificial Sequence
  Synthetic
agggccuuuuuacuuccauu

SEQ ID NO: 670751 - RNA, 21 nt, Artificial Sequence
  Synthetic
cagggccuuuuuacuuccauu

SEQ ID NO: 670752 - RNA, 22 nt, Artificial Sequence
  Synthetic
ucagggccuuuuuacuuccauu

SEQ ID NO: 670753 - RNA, 23 nt, Artificial Sequence
  Synthetic
uucagggccuuuuuacuuccauu

SEQ ID NO: 670754 - RNA, 24 nt, Artificial Sequence
  Synthetic
auucagggccuuuuuacuuccauu

SEQ ID NO: 670755 - RNA, 18 nt, Artificial Sequence
  Synthetic
auguugaagccuuccauu

SEQ ID NO: 670756 - RNA, 19 nt, Artificial Sequence
  Synthetic
cauguugaagccuuccauu

SEQ ID NO: 670757 - RNA, 20 nt, Artificial Sequence
  Synthetic
acauguugaagccuuccauu

SEQ ID NO: 670758 - RNA, 21 nt, Artificial Sequence
  Synthetic
uacauguugaagccuuccauu

SEQ ID NO: 670759 - RNA, 22 nt, Artificial Sequence
  Synthetic
auacauguugaagccuuccauu

SEQ ID NO: 670760 - RNA, 23 nt, Artificial Sequence
  Synthetic
aauacauguugaagccuuccauu

SEQ ID NO: 670761 - RNA, 24 nt, Artificial Sequence
  Synthetic
gaauacauguugaagccuuccauu

SEQ ID NO: 670762 - RNA, 18 nt, Artificial Sequence
  Synthetic
aaccuggguauuuccauu

SEQ ID NO: 670763 - RNA, 19 nt, Artificial Sequence
  Synthetic
aaaccuggguauuuccauu

SEQ ID NO: 670764 - RNA, 20 nt, Artificial Sequence
  Synthetic
aaaaccuggguauuuccauu

SEQ ID NO: 670765 - RNA, 21 nt, Artificial Sequence
  Synthetic
gaaaaccuggguauuuccauu

SEQ ID NO: 670766 - RNA, 22 nt, Artificial Sequence
  Synthetic
agaaaaccuggguauuuccauu

SEQ ID NO: 670767 - RNA, 23 nt, Artificial Sequence
  Synthetic
gagaaaaccuggguauuuccauu

SEQ ID NO: 670768 - RNA, 24 nt, Artificial Sequence
  Synthetic
ugagaaaaccuggguauuuccauu

SEQ ID NO: 670769 - RNA, 18 nt, Artificial Sequence
  Synthetic
cucugaggauuuuccauu

SEQ ID NO: 670770 - RNA, 19 nt, Artificial Sequence
  Synthetic
gcucugaggauuuuccauu

SEQ ID NO: 670771 - RNA, 20 nt, Artificial Sequence
  Synthetic
ugcucugaggauuuuccauu

SEQ ID NO: 670772 - RNA, 21 nt, Artificial Sequence
  Synthetic
uugcucugaggauuuuccauu

SEQ ID NO: 670773 - RNA, 22 nt, Artificial Sequence
  Synthetic
auugcucugaggauuuuccauu

SEQ ID NO: 670774 - RNA, 23 nt, Artificial Sequence
  Synthetic
aauugcucugaggauuuuccauu

SEQ ID NO: 670775 - RNA, 24 nt, Artificial Sequence
  Synthetic
aaauugcucugaggauuuuccauu

SEQ ID NO: 670776 - RNA, 18 nt, Artificial Sequence
  Synthetic
uaaaugagagaaagcauu

SEQ ID NO: 670777 - RNA, 19 nt, Artificial Sequence
  Synthetic
cuaaaugagagaaagcauu

SEQ ID NO: 670778 - RNA, 20 nt, Artificial Sequence
  Synthetic
gcuaaaugagagaaagcauu

SEQ ID NO: 670779 - RNA, 21 nt, Artificial Sequence
  Synthetic
ugcuaaaugagagaaagcauu

SEQ ID NO: 670780 - RNA, 22 nt, Artificial Sequence
  Synthetic
cugcuaaaugagagaaagcauu

SEQ ID NO: 670781 - RNA, 23 nt, Artificial Sequence
  Synthetic
gcugcuaaaugagagaaagcauu

SEQ ID NO: 670782 - RNA, 24 nt, Artificial Sequence
  Synthetic
agcugcuaaaugagagaaagcauu

SEQ ID NO: 670783 - RNA, 18 nt, Artificial Sequence
  Synthetic
agggagaaugaaagcauu

SEQ ID NO: 670784 - RNA, 19 nt, Artificial Sequence
  Synthetic
aagggagaaugaaagcauu

SEQ ID NO: 670785 - RNA, 20 nt, Artificial Sequence
  Synthetic
gaagggagaaugaaagcauu

SEQ ID NO: 670786 - RNA, 21 nt, Artificial Sequence
  Synthetic
agaagggagaaugaaagcauu

SEQ ID NO: 670787 - RNA, 22 nt, Artificial Sequence
  Synthetic
cagaagggagaaugaaagcauu

SEQ ID NO: 670788 - RNA, 23 nt, Artificial Sequence
  Synthetic
ucagaagggagaaugaaagcauu

SEQ ID NO: 670789 - RNA, 24 nt, Artificial Sequence
  Synthetic
uucagaagggagaaugaaagcauu

SEQ ID NO: 670790 - RNA, 18 nt, Artificial Sequence
  Synthetic
auguuauuucuaagcauu

SEQ ID NO: 670791 - RNA, 19 nt, Artificial Sequence
  Synthetic
uauguuauuucuaagcauu

SEQ ID NO: 670792 - RNA, 20 nt, Artificial Sequence
  Synthetic
uuauguuauuucuaagcauu

SEQ ID NO: 670793 - RNA, 21 nt, Artificial Sequence
  Synthetic
auuauguuauuucuaagcauu

SEQ ID NO: 670794 - RNA, 22 nt, Artificial Sequence
  Synthetic
aauuauguuauuucuaagcauu

SEQ ID NO: 670795 - RNA, 23 nt, Artificial Sequence
  Synthetic
aaauuauguuauuucuaagcauu

SEQ ID NO: 670796 - RNA, 24 nt, Artificial Sequence
  Synthetic
caaauuauguuauuucuaagcauu

SEQ ID NO: 670797 - RNA, 18 nt, Artificial Sequence
  Synthetic
gacaugguauuaagcauu

SEQ ID NO: 670798 - RNA, 19 nt, Artificial Sequence
  Synthetic
ugacaugguauuaagcauu

SEQ ID NO: 670799 - RNA, 20 nt, Artificial Sequence
  Synthetic
augacaugguauuaagcauu

SEQ ID NO: 670800 - RNA, 21 nt, Artificial Sequence
  Synthetic
caugacaugguauuaagcauu

SEQ ID NO: 670801 - RNA, 22 nt, Artificial Sequence
  Synthetic
gcaugacaugguauuaagcauu

SEQ ID NO: 670802 - RNA, 23 nt, Artificial Sequence
  Synthetic
agcaugacaugguauuaagcauu

SEQ ID NO: 670803 - RNA, 24 nt, Artificial Sequence
  Synthetic
cagcaugacaugguauuaagcauu

SEQ ID NO: 670804 - RNA, 18 nt, Artificial Sequence
  Synthetic
ucuuccuucaacagcauu

SEQ ID NO: 670805 - RNA, 19 nt, Artificial Sequence
  Synthetic
cucuuccuucaacagcauu

SEQ ID NO: 670806 - RNA, 20 nt, Artificial Sequence
  Synthetic
ucucuuccuucaacagcauu

SEQ ID NO: 670807 - RNA, 21 nt, Artificial Sequence
  Synthetic
aucucuuccuucaacagcauu

SEQ ID NO: 670808 - RNA, 22 nt, Artificial Sequence
  Synthetic
caucucuuccuucaacagcauu

SEQ ID NO: 670809 - RNA, 23 nt, Artificial Sequence
  Synthetic
acaucucuuccuucaacagcauu

SEQ ID NO: 670810 - RNA, 24 nt, Artificial Sequence
  Synthetic
cacaucucuuccuucaacagcauu

SEQ ID NO: 670811 - RNA, 18 nt, Artificial Sequence
  Synthetic
aauuucagcgacagcauu

SEQ ID NO: 670812 - RNA, 19 nt, Artificial Sequence
  Synthetic
aaauuucagcgacagcauu

SEQ ID NO: 670813 - RNA, 20 nt, Artificial Sequence
  Synthetic
aaaauuucagcgacagcauu

SEQ ID NO: 670814 - RNA, 21 nt, Artificial Sequence
  Synthetic
aaaaauuucagcgacagcauu

SEQ ID NO: 670815 - RNA, 22 nt, Artificial Sequence
  Synthetic
uaaaaauuucagcgacagcauu

SEQ ID NO: 670816 - RNA, 23 nt, Artificial Sequence
  Synthetic
auaaaaauuucagcgacagcauu

SEQ ID NO: 670817 - RNA, 24 nt, Artificial Sequence
  Synthetic
gauaaaaauuucagcgacagcauu

SEQ ID NO: 670818 - RNA, 18 nt, Artificial Sequence
  Synthetic
ggggggagggacagcauu

SEQ ID NO: 670819 - RNA, 19 nt, Artificial Sequence
  Synthetic
aggggggagggacagcauu

SEQ ID NO: 670820 - RNA, 20 nt, Artificial Sequence
  Synthetic
gaggggggagggacagcauu

SEQ ID NO: 670821 - RNA, 21 nt, Artificial Sequence
  Synthetic
ggaggggggagggacagcauu

SEQ ID NO: 670822 - RNA, 22 nt, Artificial Sequence
  Synthetic
gggaggggggagggacagcauu

SEQ ID NO: 670823 - RNA, 23 nt, Artificial Sequence
  Synthetic
ggggaggggggagggacagcauu

SEQ ID NO: 670824 - RNA, 24 nt, Artificial Sequence
  Synthetic
gggggaggggggagggacagcauu

SEQ ID NO: 670825 - RNA, 18 nt, Artificial Sequence
  Synthetic
ucugucacuuacagcauu

SEQ ID NO: 670826 - RNA, 19 nt, Artificial Sequence
  Synthetic
uucugucacuuacagcauu

SEQ ID NO: 670827 - RNA, 20 nt, Artificial Sequence
  Synthetic
uuucugucacuuacagcauu

SEQ ID NO: 670828 - RNA, 21 nt, Artificial Sequence
  Synthetic
uuuucugucacuuacagcauu

SEQ ID NO: 670829 - RNA, 22 nt, Artificial Sequence
  Synthetic
guuuucugucacuuacagcauu

SEQ ID NO: 670830 - RNA, 23 nt, Artificial Sequence
  Synthetic
aguuuucugucacuuacagcauu

SEQ ID NO: 670831 - RNA, 24 nt, Artificial Sequence
  Synthetic
caguuuucugucacuuacagcauu

SEQ ID NO: 670832 - RNA, 18 nt, Artificial Sequence
  Synthetic
uuuugugaauccagcauu

SEQ ID NO: 670833 - RNA, 19 nt, Artificial Sequence
  Synthetic
cuuuugugaauccagcauu

SEQ ID NO: 670834 - RNA, 20 nt, Artificial Sequence
  Synthetic
gcuuuugugaauccagcauu

SEQ ID NO: 670835 - RNA, 21 nt, Artificial Sequence
  Synthetic
ugcuuuugugaauccagcauu

SEQ ID NO: 670836 - RNA, 22 nt, Artificial Sequence
  Synthetic
cugcuuuugugaauccagcauu

SEQ ID NO: 670837 - RNA, 23 nt, Artificial Sequence
  Synthetic
acugcuuuugugaauccagcauu

SEQ ID NO: 670838 - RNA, 24 nt, Artificial Sequence
  Synthetic
uacugcuuuugugaauccagcauu

SEQ ID NO: 670839 - RNA, 18 nt, Artificial Sequence
  Synthetic
caagaguuguucagcauu

SEQ ID NO: 670840 - RNA, 19 nt, Artificial Sequence
  Synthetic
ccaagaguuguucagcauu

SEQ ID NO: 670841 - RNA, 20 nt, Artificial Sequence
  Synthetic
gccaagaguuguucagcauu

SEQ ID NO: 670842 - RNA, 21 nt, Artificial Sequence
  Synthetic
ugccaagaguuguucagcauu

SEQ ID NO: 670843 - RNA, 22 nt, Artificial Sequence
  Synthetic
uugccaagaguuguucagcauu

SEQ ID NO: 670844 - RNA, 23 nt, Artificial Sequence
  Synthetic
uuugccaagaguuguucagcauu

SEQ ID NO: 670845 - RNA, 24 nt, Artificial Sequence
  Synthetic
uuuugccaagaguuguucagcauu

SEQ ID NO: 670846 - RNA, 18 nt, Artificial Sequence
  Synthetic
gcacugauucagagcauu

SEQ ID NO: 670847 - RNA, 19 nt, Artificial Sequence
  Synthetic
agcacugauucagagcauu

SEQ ID NO: 670848 - RNA, 20 nt, Artificial Sequence
  Synthetic
aagcacugauucagagcauu

SEQ ID NO: 670849 - RNA, 21 nt, Artificial Sequence
  Synthetic
gaagcacugauucagagcauu

SEQ ID NO: 670850 - RNA, 22 nt, Artificial Sequence
  Synthetic
agaagcacugauucagagcauu

SEQ ID NO: 670851 - RNA, 23 nt, Artificial Sequence
  Synthetic
gagaagcacugauucagagcauu

SEQ ID NO: 670852 - RNA, 24 nt, Artificial Sequence
  Synthetic
agagaagcacugauucagagcauu

SEQ ID NO: 670853 - RNA, 18 nt, Artificial Sequence
  Synthetic
gacaucaaaaauagcauu

SEQ ID NO: 670854 - RNA, 19 nt, Artificial Sequence
  Synthetic
agacaucaaaaauagcauu

SEQ ID NO: 670855 - RNA, 20 nt, Artificial Sequence
  Synthetic
gagacaucaaaaauagcauu

SEQ ID NO: 670856 - RNA, 21 nt, Artificial Sequence
  Synthetic
agagacaucaaaaauagcauu

SEQ ID NO: 670857 - RNA, 22 nt, Artificial Sequence
  Synthetic
uagagacaucaaaaauagcauu

SEQ ID NO: 670858 - RNA, 23 nt, Artificial Sequence
  Synthetic
guagagacaucaaaaauagcauu

SEQ ID NO: 670859 - RNA, 24 nt, Artificial Sequence
  Synthetic
aguagagacaucaaaaauagcauu

SEQ ID NO: 670860 - RNA, 18 nt, Artificial Sequence
  Synthetic
aaggggagggauagcauu

SEQ ID NO: 670861 - RNA, 19 nt, Artificial Sequence
  Synthetic
caaggggagggauagcauu

SEQ ID NO: 670862 - RNA, 20 nt, Artificial Sequence
  Synthetic
gcaaggggagggauagcauu

SEQ ID NO: 670863 - RNA, 21 nt, Artificial Sequence
  Synthetic
ggcaaggggagggauagcauu

SEQ ID NO: 670864 - RNA, 22 nt, Artificial Sequence
  Synthetic
gggcaaggggagggauagcauu

SEQ ID NO: 670865 - RNA, 23 nt, Artificial Sequence
  Synthetic
ggggcaaggggagggauagcauu

SEQ ID NO: 670866 - RNA, 24 nt, Artificial Sequence
  Synthetic
gggggcaaggggagggauagcauu

SEQ ID NO: 670867 - RNA, 18 nt, Artificial Sequence
  Synthetic
uaggggagggauagcauu

SEQ ID NO: 670868 - RNA, 19 nt, Artificial Sequence
  Synthetic
cuaggggagggauagcauu

SEQ ID NO: 670869 - RNA, 20 nt, Artificial Sequence
  Synthetic
gcuaggggagggauagcauu

SEQ ID NO: 670870 - RNA, 21 nt, Artificial Sequence
  Synthetic
ggcuaggggagggauagcauu

SEQ ID NO: 670871 - RNA, 22 nt, Artificial Sequence
  Synthetic
gggcuaggggagggauagcauu

SEQ ID NO: 670872 - RNA, 23 nt, Artificial Sequence
  Synthetic
ggggcuaggggagggauagcauu

SEQ ID NO: 670873 - RNA, 24 nt, Artificial Sequence
  Synthetic
gggggcuaggggagggauagcauu

SEQ ID NO: 670874 - RNA, 19 nt, Artificial Sequence
  Synthetic
uuaggggagggauagcauu

SEQ ID NO: 670875 - RNA, 20 nt, Artificial Sequence
  Synthetic
guuaggggagggauagcauu

SEQ ID NO: 670876 - RNA, 21 nt, Artificial Sequence
  Synthetic
gguuaggggagggauagcauu

SEQ ID NO: 670877 - RNA, 22 nt, Artificial Sequence
  Synthetic
ggguuaggggagggauagcauu

SEQ ID NO: 670878 - RNA, 23 nt, Artificial Sequence
  Synthetic
gggguuaggggagggauagcauu

SEQ ID NO: 670879 - RNA, 24 nt, Artificial Sequence
  Synthetic
ggggguuaggggagggauagcauu

SEQ ID NO: 670880 - RNA, 18 nt, Artificial Sequence
  Synthetic
agggggagggauagcauu

SEQ ID NO: 670881 - RNA, 19 nt, Artificial Sequence
  Synthetic
aagggggagggauagcauu

SEQ ID NO: 670882 - RNA, 20 nt, Artificial Sequence
  Synthetic
gaagggggagggauagcauu

SEQ ID NO: 670883 - RNA, 21 nt, Artificial Sequence
  Synthetic
ggaagggggagggauagcauu

SEQ ID NO: 670884 - RNA, 22 nt, Artificial Sequence
  Synthetic
gggaagggggagggauagcauu

SEQ ID NO: 670885 - RNA, 23 nt, Artificial Sequence
  Synthetic
ggggaagggggagggauagcauu

SEQ ID NO: 670886 - RNA, 24 nt, Artificial Sequence
  Synthetic
gggggaagggggagggauagcauu

SEQ ID NO: 670887 - RNA, 18 nt, Artificial Sequence
  Synthetic
cgggggagggauagcauu

SEQ ID NO: 670888 - RNA, 19 nt, Artificial Sequence
  Synthetic
acgggggagggauagcauu

SEQ ID NO: 670889 - RNA, 20 nt, Artificial Sequence
  Synthetic
gacgggggagggauagcauu

SEQ ID NO: 670890 - RNA, 21 nt, Artificial Sequence
  Synthetic
ggacgggggagggauagcauu

SEQ ID NO: 670891 - RNA, 22 nt, Artificial Sequence
  Synthetic
gggacgggggagggauagcauu

SEQ ID NO: 670892 - RNA, 23 nt, Artificial Sequence
  Synthetic
ggggacgggggagggauagcauu

SEQ ID NO: 670893 - RNA, 24 nt, Artificial Sequence
  Synthetic
aggggacgggggagggauagcauu

SEQ ID NO: 670894 - RNA, 21 nt, Artificial Sequence
  Synthetic
ggaggggggagggauagcauu

SEQ ID NO: 670895 - RNA, 22 nt, Artificial Sequence
  Synthetic
gggaggggggagggauagcauu

SEQ ID NO: 670896 - RNA, 23 nt, Artificial Sequence
  Synthetic
ggggaggggggagggauagcauu

SEQ ID NO: 670897 - RNA, 24 nt, Artificial Sequence
  Synthetic
gggggaggggggagggauagcauu

SEQ ID NO: 670898 - RNA, 19 nt, Artificial Sequence
  Synthetic
gggggggagggauagcauu

SEQ ID NO: 670899 - RNA, 20 nt, Artificial Sequence
  Synthetic
agggggggagggauagcauu

SEQ ID NO: 670900 - RNA, 21 nt, Artificial Sequence
  Synthetic
gagggggggagggauagcauu

SEQ ID NO: 670901 - RNA, 22 nt, Artificial Sequence
  Synthetic
ggagggggggagggauagcauu

SEQ ID NO: 670902 - RNA, 23 nt, Artificial Sequence
  Synthetic
gggagggggggagggauagcauu

SEQ ID NO: 670903 - RNA, 24 nt, Artificial Sequence
  Synthetic
ggggagggggggagggauagcauu

SEQ ID NO: 670904 - RNA, 18 nt, Artificial Sequence
  Synthetic
cuggggagggauagcauu

SEQ ID NO: 670905 - RNA, 19 nt, Artificial Sequence
  Synthetic
gcuggggagggauagcauu

SEQ ID NO: 670906 - RNA, 20 nt, Artificial Sequence
  Synthetic
ggcuggggagggauagcauu

SEQ ID NO: 670907 - RNA, 21 nt, Artificial Sequence
  Synthetic
gggcuggggagggauagcauu

SEQ ID NO: 670908 - RNA, 22 nt, Artificial Sequence
  Synthetic
ggggcuggggagggauagcauu

SEQ ID NO: 670909 - RNA, 23 nt, Artificial Sequence
  Synthetic
gggggcuggggagggauagcauu

SEQ ID NO: 670910 - RNA, 24 nt, Artificial Sequence
  Synthetic
ggggggcuggggagggauagcauu

SEQ ID NO: 670911 - RNA, 18 nt, Artificial Sequence
  Synthetic
uaggguagggauagcauu

SEQ ID NO: 670912 - RNA, 19 nt, Artificial Sequence
  Synthetic
cuaggguagggauagcauu

SEQ ID NO: 670913 - RNA, 20 nt, Artificial Sequence
  Synthetic
gcuaggguagggauagcauu

SEQ ID NO: 670914 - RNA, 21 nt, Artificial Sequence
  Synthetic
ggcuaggguagggauagcauu

SEQ ID NO: 670915 - RNA, 22 nt, Artificial Sequence
  Synthetic
gggcuaggguagggauagcauu

SEQ ID NO: 670916 - RNA, 23 nt, Artificial Sequence
  Synthetic
ggggcuaggguagggauagcauu

SEQ ID NO: 670917 - RNA, 24 nt, Artificial Sequence
  Synthetic
gggggcuaggguagggauagcauu

SEQ ID NO: 670918 - RNA, 18 nt, Artificial Sequence
  Synthetic
gaaaaugugccuagcauu

SEQ ID NO: 670919 - RNA, 19 nt, Artificial Sequence
  Synthetic
ugaaaaugugccuagcauu

SEQ ID NO: 670920 - RNA, 20 nt, Artificial Sequence
  Synthetic
uugaaaaugugccuagcauu

SEQ ID NO: 670921 - RNA, 21 nt, Artificial Sequence
  Synthetic
uuugaaaaugugccuagcauu

SEQ ID NO: 670922 - RNA, 22 nt, Artificial Sequence
  Synthetic
auuugaaaaugugccuagcauu

SEQ ID NO: 670923 - RNA, 23 nt, Artificial Sequence
  Synthetic
uauuugaaaaugugccuagcauu

SEQ ID NO: 670924 - RNA, 24 nt, Artificial Sequence
  Synthetic
guauuugaaaaugugccuagcauu

SEQ ID NO: 670925 - RNA, 18 nt, Artificial Sequence
  Synthetic
acuaacucaacacgcauu

SEQ ID NO: 670926 - RNA, 19 nt, Artificial Sequence
  Synthetic
aacuaacucaacacgcauu

SEQ ID NO: 670927 - RNA, 20 nt, Artificial Sequence
  Synthetic
aaacuaacucaacacgcauu

SEQ ID NO: 670928 - RNA, 21 nt, Artificial Sequence
  Synthetic
caaacuaacucaacacgcauu

SEQ ID NO: 670929 - RNA, 22 nt, Artificial Sequence
  Synthetic
ucaaacuaacucaacacgcauu

SEQ ID NO: 670930 - RNA, 23 nt, Artificial Sequence
  Synthetic
aucaaacuaacucaacacgcauu

SEQ ID NO: 670931 - RNA, 24 nt, Artificial Sequence
  Synthetic
gaucaaacuaacucaacacgcauu

SEQ ID NO: 670932 - RNA, 18 nt, Artificial Sequence
  Synthetic
gauuuuaaaguacgcauu

SEQ ID NO: 670933 - RNA, 19 nt, Artificial Sequence
  Synthetic
ggauuuuaaaguacgcauu

SEQ ID NO: 670934 - RNA, 20 nt, Artificial Sequence
  Synthetic
aggauuuuaaaguacgcauu

SEQ ID NO: 670935 - RNA, 21 nt, Artificial Sequence
  Synthetic
gaggauuuuaaaguacgcauu

SEQ ID NO: 670936 - RNA, 22 nt, Artificial Sequence
  Synthetic
ugaggauuuuaaaguacgcauu

SEQ ID NO: 670937 - RNA, 23 nt, Artificial Sequence
  Synthetic
augaggauuuuaaaguacgcauu

SEQ ID NO: 670938 - RNA, 24 nt, Artificial Sequence
  Synthetic
uaugaggauuuuaaaguacgcauu

SEQ ID NO: 670939 - RNA, 18 nt, Artificial Sequence
  Synthetic
acguuuuaaaaaggcauu

SEQ ID NO: 670940 - RNA, 19 nt, Artificial Sequence
  Synthetic
uacguuuuaaaaaggcauu

SEQ ID NO: 670941 - RNA, 20 nt, Artificial Sequence
  Synthetic
cuacguuuuaaaaaggcauu

SEQ ID NO: 670942 - RNA, 21 nt, Artificial Sequence
  Synthetic
gcuacguuuuaaaaaggcauu

SEQ ID NO: 670943 - RNA, 22 nt, Artificial Sequence
  Synthetic
agcuacguuuuaaaaaggcauu

SEQ ID NO: 670944 - RNA, 23 nt, Artificial Sequence
  Synthetic
cagcuacguuuuaaaaaggcauu

SEQ ID NO: 670945 - RNA, 24 nt, Artificial Sequence
  Synthetic
ccagcuacguuuuaaaaaggcauu

SEQ ID NO: 670946 - RNA, 18 nt, Artificial Sequence
  Synthetic
cuugcuaaaagaggcauu

SEQ ID NO: 670947 - RNA, 19 nt, Artificial Sequence
  Synthetic
ucuugcuaaaagaggcauu

SEQ ID NO: 670948 - RNA, 20 nt, Artificial Sequence
  Synthetic
aucuugcuaaaagaggcauu

SEQ ID NO: 670949 - RNA, 21 nt, Artificial Sequence
  Synthetic
caucuugcuaaaagaggcauu

SEQ ID NO: 670950 - RNA, 22 nt, Artificial Sequence
  Synthetic
ucaucuugcuaaaagaggcauu

SEQ ID NO: 670951 - RNA, 23 nt, Artificial Sequence
  Synthetic
uucaucuugcuaaaagaggcauu

SEQ ID NO: 670952 - RNA, 24 nt, Artificial Sequence
  Synthetic
cuucaucuugcuaaaagaggcauu

SEQ ID NO: 670953 - RNA, 18 nt, Artificial Sequence
  Synthetic
aaguaaacccuaggcauu

SEQ ID NO: 670954 - RNA, 19 nt, Artificial Sequence
  Synthetic
uaaguaaacccuaggcauu

SEQ ID NO: 670955 - RNA, 20 nt, Artificial Sequence
  Synthetic
guaaguaaacccuaggcauu

SEQ ID NO: 670956 - RNA, 21 nt, Artificial Sequence
  Synthetic
aguaaguaaacccuaggcauu

SEQ ID NO: 670957 - RNA, 22 nt, Artificial Sequence
  Synthetic
aaguaaguaaacccuaggcauu

SEQ ID NO: 670958 - RNA, 23 nt, Artificial Sequence
  Synthetic
uaaguaaguaaacccuaggcauu

SEQ ID NO: 670959 - RNA, 24 nt, Artificial Sequence
  Synthetic
uuaaguaaguaaacccuaggcauu

SEQ ID NO: 670960 - RNA, 18 nt, Artificial Sequence
  Synthetic
caaaaacacuuaggcauu

SEQ ID NO: 670961 - RNA, 19 nt, Artificial Sequence
  Synthetic
acaaaaacacuuaggcauu

SEQ ID NO: 670962 - RNA, 20 nt, Artificial Sequence
  Synthetic
aacaaaaacacuuaggcauu

SEQ ID NO: 670963 - RNA, 21 nt, Artificial Sequence
  Synthetic
aaacaaaaacacuuaggcauu

SEQ ID NO: 670964 - RNA, 22 nt, Artificial Sequence
  Synthetic
aaaacaaaaacacuuaggcauu

SEQ ID NO: 670965 - RNA, 23 nt, Artificial Sequence
  Synthetic
caaaacaaaaacacuuaggcauu

SEQ ID NO: 670966 - RNA, 24 nt, Artificial Sequence
  Synthetic
acaaaacaaaaacacuuaggcauu

SEQ ID NO: 670967 - RNA, 18 nt, Artificial Sequence
  Synthetic
gccuguaaucucggcauu

SEQ ID NO: 670968 - RNA, 19 nt, Artificial Sequence
  Synthetic
cgccuguaaucucggcauu

SEQ ID NO: 670969 - RNA, 20 nt, Artificial Sequence
  Synthetic
acgccuguaaucucggcauu

SEQ ID NO: 670970 - RNA, 21 nt, Artificial Sequence
  Synthetic
cacgccuguaaucucggcauu

SEQ ID NO: 670971 - RNA, 22 nt, Artificial Sequence
  Synthetic
ucacgccuguaaucucggcauu

SEQ ID NO: 670972 - RNA, 23 nt, Artificial Sequence
  Synthetic
aucacgccuguaaucucggcauu

SEQ ID NO: 670973 - RNA, 24 nt, Artificial Sequence
  Synthetic
gaucacgccuguaaucucggcauu

SEQ ID NO: 670974 - RNA, 18 nt, Artificial Sequence
  Synthetic
uuucccaaggagggcauu

SEQ ID NO: 670975 - RNA, 19 nt, Artificial Sequence
  Synthetic
uuuucccaaggagggcauu

SEQ ID NO: 670976 - RNA, 20 nt, Artificial Sequence
  Synthetic
auuuucccaaggagggcauu

SEQ ID NO: 670977 - RNA, 21 nt, Artificial Sequence
  Synthetic
uauuuucccaaggagggcauu

SEQ ID NO: 670978 - RNA, 22 nt, Artificial Sequence
  Synthetic
guauuuucccaaggagggcauu

SEQ ID NO: 670979 - RNA, 23 nt, Artificial Sequence
  Synthetic
uguauuuucccaaggagggcauu

SEQ ID NO: 670980 - RNA, 24 nt, Artificial Sequence
  Synthetic
auguauuuucccaaggagggcauu

SEQ ID NO: 670981 - RNA, 18 nt, Artificial Sequence
  Synthetic
uuguuuaaugauggcauu

SEQ ID NO: 670982 - RNA, 19 nt, Artificial Sequence
  Synthetic
uuuguuuaaugauggcauu

SEQ ID NO: 670983 - RNA, 20 nt, Artificial Sequence
  Synthetic
cuuuguuuaaugauggcauu

SEQ ID NO: 670984 - RNA, 21 nt, Artificial Sequence
  Synthetic
ucuuuguuuaaugauggcauu

SEQ ID NO: 670985 - RNA, 22 nt, Artificial Sequence
  Synthetic
aucuuuguuuaaugauggcauu

SEQ ID NO: 670986 - RNA, 23 nt, Artificial Sequence
  Synthetic
uaucuuuguuuaaugauggcauu

SEQ ID NO: 670987 - RNA, 24 nt, Artificial Sequence
  Synthetic
guaucuuuguuuaaugauggcauu

SEQ ID NO: 670988 - RNA, 18 nt, Artificial Sequence
  Synthetic
acaguuaaugcuggcauu

SEQ ID NO: 670989 - RNA, 19 nt, Artificial Sequence
  Synthetic
gacaguuaaugcuggcauu

SEQ ID NO: 670990 - RNA, 20 nt, Artificial Sequence
  Synthetic
ggacaguuaaugcuggcauu

SEQ ID NO: 670991 - RNA, 21 nt, Artificial Sequence
  Synthetic
aggacaguuaaugcuggcauu

SEQ ID NO: 670992 - RNA, 22 nt, Artificial Sequence
  Synthetic
gaggacaguuaaugcuggcauu

SEQ ID NO: 670993 - RNA, 23 nt, Artificial Sequence
  Synthetic
agaggacaguuaaugcuggcauu

SEQ ID NO: 670994 - RNA, 24 nt, Artificial Sequence
  Synthetic
cagaggacaguuaaugcuggcauu

SEQ ID NO: 670995 - RNA, 18 nt, Artificial Sequence
  Synthetic
ggacauugugcuggcauu

SEQ ID NO: 670996 - RNA, 19 nt, Artificial Sequence
  Synthetic
uggacauugugcuggcauu

SEQ ID NO: 670997 - RNA, 20 nt, Artificial Sequence
  Synthetic
cuggacauugugcuggcauu

SEQ ID NO: 670998 - RNA, 21 nt, Artificial Sequence
  Synthetic
ucuggacauugugcuggcauu

SEQ ID NO: 670999 - RNA, 22 nt, Artificial Sequence
  Synthetic
uucuggacauugugcuggcauu

SEQ ID NO: 671000 - RNA, 23 nt, Artificial Sequence
  Synthetic
guucuggacauugugcuggcauu

SEQ ID NO: 671001 - RNA, 24 nt, Artificial Sequence
  Synthetic
uguucuggacauugugcuggcauu

SEQ ID NO: 671002 - RNA, 18 nt, Artificial Sequence
  Synthetic
auggaaccaaguggcauu

SEQ ID NO: 671003 - RNA, 19 nt, Artificial Sequence
  Synthetic
cauggaaccaaguggcauu

SEQ ID NO: 671004 - RNA, 20 nt, Artificial Sequence
  Synthetic
gcauggaaccaaguggcauu

SEQ ID NO: 671005 - RNA, 21 nt, Artificial Sequence
  Synthetic
ugcauggaaccaaguggcauu

SEQ ID NO: 671006 - RNA, 22 nt, Artificial Sequence
  Synthetic
gugcauggaaccaaguggcauu

SEQ ID NO: 671007 - RNA, 23 nt, Artificial Sequence
  Synthetic
agugcauggaaccaaguggcauu

SEQ ID NO: 671008 - RNA, 24 nt, Artificial Sequence
  Synthetic
aagugcauggaaccaaguggcauu

SEQ ID NO: 671009 - RNA, 18 nt, Artificial Sequence
  Synthetic
aauacuaaaaaaugcauu

SEQ ID NO: 671010 - RNA, 19 nt, Artificial Sequence
  Synthetic
aaauacuaaaaaaugcauu

SEQ ID NO: 671011 - RNA, 20 nt, Artificial Sequence
  Synthetic
gaaauacuaaaaaaugcauu

SEQ ID NO: 671012 - RNA, 21 nt, Artificial Sequence
  Synthetic
ugaaauacuaaaaaaugcauu

SEQ ID NO: 671013 - RNA, 22 nt, Artificial Sequence
  Synthetic
uugaaauacuaaaaaaugcauu

SEQ ID NO: 671014 - RNA, 23 nt, Artificial Sequence
  Synthetic
guugaaauacuaaaaaaugcauu

SEQ ID NO: 671015 - RNA, 24 nt, Artificial Sequence
  Synthetic
uguugaaauacuaaaaaaugcauu

SEQ ID NO: 671016 - RNA, 18 nt, Artificial Sequence
  Synthetic
caguggaaugaaugcauu

SEQ ID NO: 671017 - RNA, 19 nt, Artificial Sequence
  Synthetic
acaguggaaugaaugcauu

SEQ ID NO: 671018 - RNA, 20 nt, Artificial Sequence
  Synthetic
uacaguggaaugaaugcauu

SEQ ID NO: 671019 - RNA, 21 nt, Artificial Sequence
  Synthetic
guacaguggaaugaaugcauu

SEQ ID NO: 671020 - RNA, 22 nt, Artificial Sequence
  Synthetic
aguacaguggaaugaaugcauu

SEQ ID NO: 671021 - RNA, 23 nt, Artificial Sequence
  Synthetic
aaguacaguggaaugaaugcauu

SEQ ID NO: 671022 - RNA, 24 nt, Artificial Sequence
  Synthetic
caaguacaguggaaugaaugcauu

SEQ ID NO: 671023 - RNA, 18 nt, Artificial Sequence
  Synthetic
uuguuuagugaaugcauu

SEQ ID NO: 671024 - RNA, 19 nt, Artificial Sequence
  Synthetic
cuuguuuagugaaugcauu

SEQ ID NO: 671025 - RNA, 20 nt, Artificial Sequence
  Synthetic
gcuuguuuagugaaugcauu

SEQ ID NO: 671026 - RNA, 21 nt, Artificial Sequence
  Synthetic
ugcuuguuuagugaaugcauu

SEQ ID NO: 671027 - RNA, 22 nt, Artificial Sequence
  Synthetic
cugcuuguuuagugaaugcauu

SEQ ID NO: 671028 - RNA, 23 nt, Artificial Sequence
  Synthetic
acugcuuguuuagugaaugcauu

SEQ ID NO: 671029 - RNA, 24 nt, Artificial Sequence
  Synthetic
uacugcuuguuuagugaaugcauu

SEQ ID NO: 671030 - RNA, 18 nt, Artificial Sequence
  Synthetic
acaaauaccuaaugcauu

SEQ ID NO: 671031 - RNA, 19 nt, Artificial Sequence
  Synthetic
gacaaauaccuaaugcauu

SEQ ID NO: 671032 - RNA, 20 nt, Artificial Sequence
  Synthetic
ggacaaauaccuaaugcauu

SEQ ID NO: 671033 - RNA, 21 nt, Artificial Sequence
  Synthetic
aggacaaauaccuaaugcauu

SEQ ID NO: 671034 - RNA, 22 nt, Artificial Sequence
  Synthetic
uaggacaaauaccuaaugcauu

SEQ ID NO: 671035 - RNA, 23 nt, Artificial Sequence
  Synthetic
uuaggacaaauaccuaaugcauu

SEQ ID NO: 671036 - RNA, 24 nt, Artificial Sequence
  Synthetic
auuaggacaaauaccuaaugcauu

SEQ ID NO: 671037 - RNA, 18 nt, Artificial Sequence
  Synthetic
gagauugaaagaugcauu

SEQ ID NO: 671038 - RNA, 19 nt, Artificial Sequence
  Synthetic
cgagauugaaagaugcauu

SEQ ID NO: 671039 - RNA, 20 nt, Artificial Sequence
  Synthetic
acgagauugaaagaugcauu

SEQ ID NO: 671040 - RNA, 21 nt, Artificial Sequence
  Synthetic
cacgagauugaaagaugcauu

SEQ ID NO: 671041 - RNA, 22 nt, Artificial Sequence
  Synthetic
gcacgagauugaaagaugcauu

SEQ ID NO: 671042 - RNA, 23 nt, Artificial Sequence
  Synthetic
agcacgagauugaaagaugcauu

SEQ ID NO: 671043 - RNA, 24 nt, Artificial Sequence
  Synthetic
aagcacgagauugaaagaugcauu

SEQ ID NO: 671044 - RNA, 18 nt, Artificial Sequence
  Synthetic
uaauuuucaauaugcauu

SEQ ID NO: 671045 - RNA, 19 nt, Artificial Sequence
  Synthetic
uuaauuuucaauaugcauu

SEQ ID NO: 671046 - RNA, 20 nt, Artificial Sequence
  Synthetic
auuaauuuucaauaugcauu

SEQ ID NO: 671047 - RNA, 21 nt, Artificial Sequence
  Synthetic
uauuaauuuucaauaugcauu

SEQ ID NO: 671048 - RNA, 22 nt, Artificial Sequence
  Synthetic
uuauuaauuuucaauaugcauu

SEQ ID NO: 671049 - RNA, 23 nt, Artificial Sequence
  Synthetic
auuauuaauuuucaauaugcauu

SEQ ID NO: 671050 - RNA, 24 nt, Artificial Sequence
  Synthetic
uauuauuaauuuucaauaugcauu

SEQ ID NO: 671051 - RNA, 18 nt, Artificial Sequence
  Synthetic
gacuccuguuacugcauu

SEQ ID NO: 671052 - RNA, 19 nt, Artificial Sequence
  Synthetic
ggacuccuguuacugcauu

SEQ ID NO: 671053 - RNA, 20 nt, Artificial Sequence
  Synthetic
aggacuccuguuacugcauu

SEQ ID NO: 671054 - RNA, 21 nt, Artificial Sequence
  Synthetic
gaggacuccuguuacugcauu

SEQ ID NO: 671055 - RNA, 22 nt, Artificial Sequence
  Synthetic
ugaggacuccuguuacugcauu

SEQ ID NO: 671056 - RNA, 23 nt, Artificial Sequence
  Synthetic
cugaggacuccuguuacugcauu

SEQ ID NO: 671057 - RNA, 24 nt, Artificial Sequence
  Synthetic
acugaggacuccuguuacugcauu

SEQ ID NO: 671058 - RNA, 18 nt, Artificial Sequence
  Synthetic
ccugaaaagaccugcauu

SEQ ID NO: 671059 - RNA, 19 nt, Artificial Sequence
  Synthetic
uccugaaaagaccugcauu

SEQ ID NO: 671060 - RNA, 20 nt, Artificial Sequence
  Synthetic
uuccugaaaagaccugcauu

SEQ ID NO: 671061 - RNA, 21 nt, Artificial Sequence
  Synthetic
uuuccugaaaagaccugcauu

SEQ ID NO: 671062 - RNA, 22 nt, Artificial Sequence
  Synthetic
cuuuccugaaaagaccugcauu

SEQ ID NO: 671063 - RNA, 23 nt, Artificial Sequence
  Synthetic
acuuuccugaaaagaccugcauu

SEQ ID NO: 671064 - RNA, 24 nt, Artificial Sequence
  Synthetic
uacuuuccugaaaagaccugcauu

SEQ ID NO: 671065 - RNA, 18 nt, Artificial Sequence
  Synthetic
aaaguuuguugcugcauu

SEQ ID NO: 671066 - RNA, 19 nt, Artificial Sequence
  Synthetic
gaaaguuuguugcugcauu

SEQ ID NO: 671067 - RNA, 20 nt, Artificial Sequence
  Synthetic
agaaaguuuguugcugcauu

SEQ ID NO: 671068 - RNA, 21 nt, Artificial Sequence
  Synthetic
aagaaaguuuguugcugcauu

SEQ ID NO: 671069 - RNA, 22 nt, Artificial Sequence
  Synthetic
caagaaaguuuguugcugcauu

SEQ ID NO: 671070 - RNA, 23 nt, Artificial Sequence
  Synthetic
acaagaaaguuuguugcugcauu

SEQ ID NO: 671071 - RNA, 24 nt, Artificial Sequence
  Synthetic
uacaagaaaguuuguugcugcauu

SEQ ID NO: 671072 - RNA, 18 nt, Artificial Sequence
  Synthetic
aggaguugaaggugcauu

SEQ ID NO: 671073 - RNA, 19 nt, Artificial Sequence
  Synthetic
uaggaguugaaggugcauu

SEQ ID NO: 671074 - RNA, 20 nt, Artificial Sequence
  Synthetic
guaggaguugaaggugcauu

SEQ ID NO: 671075 - RNA, 21 nt, Artificial Sequence
  Synthetic
aguaggaguugaaggugcauu

SEQ ID NO: 671076 - RNA, 22 nt, Artificial Sequence
  Synthetic
uaguaggaguugaaggugcauu

SEQ ID NO: 671077 - RNA, 23 nt, Artificial Sequence
  Synthetic
uuaguaggaguugaaggugcauu

SEQ ID NO: 671078 - RNA, 24 nt, Artificial Sequence
  Synthetic
uuuaguaggaguugaaggugcauu

SEQ ID NO: 671079 - RNA, 18 nt, Artificial Sequence
  Synthetic
gcuugaaauaugugcauu

SEQ ID NO: 671080 - RNA, 19 nt, Artificial Sequence
  Synthetic
agcuugaaauaugugcauu

SEQ ID NO: 671081 - RNA, 20 nt, Artificial Sequence
  Synthetic
cagcuugaaauaugugcauu

SEQ ID NO: 671082 - RNA, 21 nt, Artificial Sequence
  Synthetic
acagcuugaaauaugugcauu

SEQ ID NO: 671083 - RNA, 22 nt, Artificial Sequence
  Synthetic
uacagcuugaaauaugugcauu

SEQ ID NO: 671084 - RNA, 23 nt, Artificial Sequence
  Synthetic
cuacagcuugaaauaugugcauu

SEQ ID NO: 671085 - RNA, 24 nt, Artificial Sequence
  Synthetic
ucuacagcuugaaauaugugcauu

SEQ ID NO: 671086 - RNA, 18 nt, Artificial Sequence
  Synthetic
uguuaucuggauugcauu

SEQ ID NO: 671087 - RNA, 19 nt, Artificial Sequence
  Synthetic
guguuaucuggauugcauu

SEQ ID NO: 671088 - RNA, 20 nt, Artificial Sequence
  Synthetic
gguguuaucuggauugcauu

SEQ ID NO: 671089 - RNA, 21 nt, Artificial Sequence
  Synthetic
agguguuaucuggauugcauu

SEQ ID NO: 671090 - RNA, 22 nt, Artificial Sequence
  Synthetic
aagguguuaucuggauugcauu

SEQ ID NO: 671091 - RNA, 23 nt, Artificial Sequence
  Synthetic
uaagguguuaucuggauugcauu

SEQ ID NO: 671092 - RNA, 24 nt, Artificial Sequence
  Synthetic
guaagguguuaucuggauugcauu

SEQ ID NO: 671093 - RNA, 18 nt, Artificial Sequence
  Synthetic
acagaaguagguugcauu

SEQ ID NO: 671094 - RNA, 19 nt, Artificial Sequence
  Synthetic
aacagaaguagguugcauu

SEQ ID NO: 671095 - RNA, 20 nt, Artificial Sequence
  Synthetic
caacagaaguagguugcauu

SEQ ID NO: 671096 - RNA, 21 nt, Artificial Sequence
  Synthetic
acaacagaaguagguugcauu

SEQ ID NO: 671097 - RNA, 22 nt, Artificial Sequence
  Synthetic
gacaacagaaguagguugcauu

SEQ ID NO: 671098 - RNA, 23 nt, Artificial Sequence
  Synthetic
ggacaacagaaguagguugcauu

SEQ ID NO: 671099 - RNA, 24 nt, Artificial Sequence
  Synthetic
aggacaacagaaguagguugcauu

SEQ ID NO: 671100 - RNA, 18 nt, Artificial Sequence
  Synthetic
gagcaauccuuuugcauu

SEQ ID NO: 671101 - RNA, 19 nt, Artificial Sequence
  Synthetic
ggagcaauccuuuugcauu

SEQ ID NO: 671102 - RNA, 20 nt, Artificial Sequence
  Synthetic
gggagcaauccuuuugcauu

SEQ ID NO: 671103 - RNA, 21 nt, Artificial Sequence
  Synthetic
ggggagcaauccuuuugcauu

SEQ ID NO: 671104 - RNA, 22 nt, Artificial Sequence
  Synthetic
uggggagcaauccuuuugcauu

SEQ ID NO: 671105 - RNA, 23 nt, Artificial Sequence
  Synthetic
uuggggagcaauccuuuugcauu

SEQ ID NO: 671106 - RNA, 24 nt, Artificial Sequence
  Synthetic
cuuggggagcaauccuuuugcauu

SEQ ID NO: 671107 - RNA, 18 nt, Artificial Sequence
  Synthetic
cgauucguguuuugcauu

SEQ ID NO: 671108 - RNA, 19 nt, Artificial Sequence
  Synthetic
acgauucguguuuugcauu

SEQ ID NO: 671109 - RNA, 20 nt, Artificial Sequence
  Synthetic
uacgauucguguuuugcauu

SEQ ID NO: 671110 - RNA, 21 nt, Artificial Sequence
  Synthetic
auacgauucguguuuugcauu

SEQ ID NO: 671111 - RNA, 22 nt, Artificial Sequence
  Synthetic
gauacgauucguguuuugcauu

SEQ ID NO: 671112 - RNA, 23 nt, Artificial Sequence
  Synthetic
ugauacgauucguguuuugcauu

SEQ ID NO: 671113 - RNA, 24 nt, Artificial Sequence
  Synthetic
augauacgauucguguuuugcauu

SEQ ID NO: 671114 - RNA, 18 nt, Artificial Sequence
  Synthetic
caauuuuuuuuuugcauu

SEQ ID NO: 671115 - RNA, 19 nt, Artificial Sequence
  Synthetic
acaauuuuuuuuuugcauu

SEQ ID NO: 671116 - RNA, 20 nt, Artificial Sequence
  Synthetic
uacaauuuuuuuuuugcauu

SEQ ID NO: 671117 - RNA, 21 nt, Artificial Sequence
  Synthetic
auacaauuuuuuuuuugcauu

SEQ ID NO: 671118 - RNA, 22 nt, Artificial Sequence
  Synthetic
aauacaauuuuuuuuuugcauu

SEQ ID NO: 671119 - RNA, 23 nt, Artificial Sequence
  Synthetic
caauacaauuuuuuuuuugcauu

SEQ ID NO: 671120 - RNA, 24 nt, Artificial Sequence
  Synthetic
acaauacaauuuuuuuuuugcauu

SEQ ID NO: 671121 - RNA, 18 nt, Artificial Sequence
  Synthetic
guucaauaaaaaaucauu

SEQ ID NO: 671122 - RNA, 19 nt, Artificial Sequence
  Synthetic
uguucaauaaaaaaucauu

SEQ ID NO: 671123 - RNA, 20 nt, Artificial Sequence
  Synthetic
auguucaauaaaaaaucauu

SEQ ID NO: 671124 - RNA, 21 nt, Artificial Sequence
  Synthetic
uauguucaauaaaaaaucauu

SEQ ID NO: 671125 - RNA, 22 nt, Artificial Sequence
  Synthetic
auauguucaauaaaaaaucauu

SEQ ID NO: 671126 - RNA, 23 nt, Artificial Sequence
  Synthetic
cauauguucaauaaaaaaucauu

SEQ ID NO: 671127 - RNA, 24 nt, Artificial Sequence
  Synthetic
ccauauguucaauaaaaaaucauu

SEQ ID NO: 671128 - RNA, 18 nt, Artificial Sequence
  Synthetic
aaaauacagugaaucauu

SEQ ID NO: 671129 - RNA, 19 nt, Artificial Sequence
  Synthetic
caaaauacagugaaucauu

SEQ ID NO: 671130 - RNA, 20 nt, Artificial Sequence
  Synthetic
ucaaaauacagugaaucauu

SEQ ID NO: 671131 - RNA, 21 nt, Artificial Sequence
  Synthetic
uucaaaauacagugaaucauu

SEQ ID NO: 671132 - RNA, 22 nt, Artificial Sequence
  Synthetic
auucaaaauacagugaaucauu

SEQ ID NO: 671133 - RNA, 23 nt, Artificial Sequence
  Synthetic
uauucaaaauacagugaaucauu

SEQ ID NO: 671134 - RNA, 24 nt, Artificial Sequence
  Synthetic
uuauucaaaauacagugaaucauu

SEQ ID NO: 671135 - RNA, 18 nt, Artificial Sequence
  Synthetic
gcugauaugcuaaucauu

SEQ ID NO: 671136 - RNA, 19 nt, Artificial Sequence
  Synthetic
ugcugauaugcuaaucauu

SEQ ID NO: 671137 - RNA, 20 nt, Artificial Sequence
  Synthetic
augcugauaugcuaaucauu

SEQ ID NO: 671138 - RNA, 21 nt, Artificial Sequence
  Synthetic
uaugcugauaugcuaaucauu

SEQ ID NO: 671139 - RNA, 22 nt, Artificial Sequence
  Synthetic
auaugcugauaugcuaaucauu

SEQ ID NO: 671140 - RNA, 23 nt, Artificial Sequence
  Synthetic
aauaugcugauaugcuaaucauu

SEQ ID NO: 671141 - RNA, 24 nt, Artificial Sequence
  Synthetic
aaauaugcugauaugcuaaucauu

SEQ ID NO: 671142 - RNA, 18 nt, Artificial Sequence
  Synthetic
uccaaaucuuuaaucauu

SEQ ID NO: 671143 - RNA, 19 nt, Artificial Sequence
  Synthetic
cuccaaaucuuuaaucauu

SEQ ID NO: 671144 - RNA, 20 nt, Artificial Sequence
  Synthetic
gcuccaaaucuuuaaucauu

SEQ ID NO: 671145 - RNA, 21 nt, Artificial Sequence
  Synthetic
ugcuccaaaucuuuaaucauu

SEQ ID NO: 671146 - RNA, 22 nt, Artificial Sequence
  Synthetic
gugcuccaaaucuuuaaucauu

SEQ ID NO: 671147 - RNA, 23 nt, Artificial Sequence
  Synthetic
agugcuccaaaucuuuaaucauu

SEQ ID NO: 671148 - RNA, 24 nt, Artificial Sequence
  Synthetic
gagugcuccaaaucuuuaaucauu

SEQ ID NO: 671149 - RNA, 18 nt, Artificial Sequence
  Synthetic
accuugaauaacaucauu

SEQ ID NO: 671150 - RNA, 19 nt, Artificial Sequence
  Synthetic
uaccuugaauaacaucauu

SEQ ID NO: 671151 - RNA, 20 nt, Artificial Sequence
  Synthetic
cuaccuugaauaacaucauu

SEQ ID NO: 671152 - RNA, 21 nt, Artificial Sequence
  Synthetic
ucuaccuugaauaacaucauu

SEQ ID NO: 671153 - RNA, 22 nt, Artificial Sequence
  Synthetic
uucuaccuugaauaacaucauu

SEQ ID NO: 671154 - RNA, 23 nt, Artificial Sequence
  Synthetic
guucuaccuugaauaacaucauu

SEQ ID NO: 671155 - RNA, 24 nt, Artificial Sequence
  Synthetic
uguucuaccuugaauaacaucauu

SEQ ID NO: 671156 - RNA, 18 nt, Artificial Sequence
  Synthetic
ucuuuucuggucaucauu

SEQ ID NO: 671157 - RNA, 19 nt, Artificial Sequence
  Synthetic
gucuuuucuggucaucauu

SEQ ID NO: 671158 - RNA, 20 nt, Artificial Sequence
  Synthetic
ugucuuuucuggucaucauu

SEQ ID NO: 671159 - RNA, 21 nt, Artificial Sequence
  Synthetic
augucuuuucuggucaucauu

SEQ ID NO: 671160 - RNA, 22 nt, Artificial Sequence
  Synthetic
caugucuuuucuggucaucauu

SEQ ID NO: 671161 - RNA, 23 nt, Artificial Sequence
  Synthetic
ucaugucuuuucuggucaucauu

SEQ ID NO: 671162 - RNA, 24 nt, Artificial Sequence
  Synthetic
uucaugucuuuucuggucaucauu

SEQ ID NO: 671163 - RNA, 18 nt, Artificial Sequence
  Synthetic
ugcaaagcaaagaucauu

SEQ ID NO: 671164 - RNA, 19 nt, Artificial Sequence
  Synthetic
cugcaaagcaaagaucauu

SEQ ID NO: 671165 - RNA, 20 nt, Artificial Sequence
  Synthetic
acugcaaagcaaagaucauu

SEQ ID NO: 671166 - RNA, 21 nt, Artificial Sequence
  Synthetic
gacugcaaagcaaagaucauu

SEQ ID NO: 671167 - RNA, 22 nt, Artificial Sequence
  Synthetic
ugacugcaaagcaaagaucauu

SEQ ID NO: 671168 - RNA, 23 nt, Artificial Sequence
  Synthetic
augacugcaaagcaaagaucauu

SEQ ID NO: 671169 - RNA, 24 nt, Artificial Sequence
  Synthetic
gaugacugcaaagcaaagaucauu

SEQ ID NO: 671170 - RNA, 18 nt, Artificial Sequence
  Synthetic
cggcagugugagaucauu

SEQ ID NO: 671171 - RNA, 19 nt, Artificial Sequence
  Synthetic
acggcagugugagaucauu

SEQ ID NO: 671172 - RNA, 20 nt, Artificial Sequence
  Synthetic
aacggcagugugagaucauu

SEQ ID NO: 671173 - RNA, 21 nt, Artificial Sequence
  Synthetic
caacggcagugugagaucauu

SEQ ID NO: 671174 - RNA, 22 nt, Artificial Sequence
  Synthetic
ucaacggcagugugagaucauu

SEQ ID NO: 671175 - RNA, 23 nt, Artificial Sequence
  Synthetic
aucaacggcagugugagaucauu

SEQ ID NO: 671176 - RNA, 24 nt, Artificial Sequence
  Synthetic
uaucaacggcagugugagaucauu

SEQ ID NO: 671177 - RNA, 18 nt, Artificial Sequence
  Synthetic
agaggaguugugaucauu

SEQ ID NO: 671178 - RNA, 19 nt, Artificial Sequence
  Synthetic
gagaggaguugugaucauu

SEQ ID NO: 671179 - RNA, 20 nt, Artificial Sequence
  Synthetic
ggagaggaguugugaucauu

SEQ ID NO: 671180 - RNA, 21 nt, Artificial Sequence
  Synthetic
uggagaggaguugugaucauu

SEQ ID NO: 671181 - RNA, 22 nt, Artificial Sequence
  Synthetic
cuggagaggaguugugaucauu

SEQ ID NO: 671182 - RNA, 23 nt, Artificial Sequence
  Synthetic
gcuggagaggaguugugaucauu

SEQ ID NO: 671183 - RNA, 24 nt, Artificial Sequence
  Synthetic
ugcuggagaggaguugugaucauu

SEQ ID NO: 671184 - RNA, 18 nt, Artificial Sequence
  Synthetic
uuuucccugaguaucauu

SEQ ID NO: 671185 - RNA, 19 nt, Artificial Sequence
  Synthetic
uuuuucccugaguaucauu

SEQ ID NO: 671186 - RNA, 20 nt, Artificial Sequence
  Synthetic
cuuuuucccugaguaucauu

SEQ ID NO: 671187 - RNA, 21 nt, Artificial Sequence
  Synthetic
ucuuuuucccugaguaucauu

SEQ ID NO: 671188 - RNA, 22 nt, Artificial Sequence
  Synthetic
cucuuuuucccugaguaucauu

SEQ ID NO: 671189 - RNA, 23 nt, Artificial Sequence
  Synthetic
ucucuuuuucccugaguaucauu

SEQ ID NO: 671190 - RNA, 24 nt, Artificial Sequence
  Synthetic
aucucuuuuucccugaguaucauu

SEQ ID NO: 671191 - RNA, 18 nt, Artificial Sequence
  Synthetic
uuuauucaugguaucauu

SEQ ID NO: 671192 - RNA, 19 nt, Artificial Sequence
  Synthetic
cuuuauucaugguaucauu

SEQ ID NO: 671193 - RNA, 20 nt, Artificial Sequence
  Synthetic
acuuuauucaugguaucauu

SEQ ID NO: 671194 - RNA, 21 nt, Artificial Sequence
  Synthetic
uacuuuauucaugguaucauu

SEQ ID NO: 671195 - RNA, 22 nt, Artificial Sequence
  Synthetic
auacuuuauucaugguaucauu

SEQ ID NO: 671196 - RNA, 23 nt, Artificial Sequence
  Synthetic
uauacuuuauucaugguaucauu

SEQ ID NO: 671197 - RNA, 24 nt, Artificial Sequence
  Synthetic
cuauacuuuauucaugguaucauu

SEQ ID NO: 671198 - RNA, 18 nt, Artificial Sequence
  Synthetic
uagcuaaaauguaucauu

SEQ ID NO: 671199 - RNA, 19 nt, Artificial Sequence
  Synthetic
uuagcuaaaauguaucauu

SEQ ID NO: 671200 - RNA, 20 nt, Artificial Sequence
  Synthetic
uuuagcuaaaauguaucauu

SEQ ID NO: 671201 - RNA, 21 nt, Artificial Sequence
  Synthetic
uuuuagcuaaaauguaucauu

SEQ ID NO: 671202 - RNA, 22 nt, Artificial Sequence
  Synthetic
auuuuagcuaaaauguaucauu

SEQ ID NO: 671203 - RNA, 23 nt, Artificial Sequence
  Synthetic
uauuuuagcuaaaauguaucauu

SEQ ID NO: 671204 - RNA, 24 nt, Artificial Sequence
  Synthetic
auauuuuagcuaaaauguaucauu

SEQ ID NO: 671205 - RNA, 18 nt, Artificial Sequence
  Synthetic
uuuuuuauauguaucauu

SEQ ID NO: 671206 - RNA, 19 nt, Artificial Sequence
  Synthetic
cuuuuuuauauguaucauu

SEQ ID NO: 671207 - RNA, 20 nt, Artificial Sequence
  Synthetic
acuuuuuuauauguaucauu

SEQ ID NO: 671208 - RNA, 21 nt, Artificial Sequence
  Synthetic
uacuuuuuuauauguaucauu

SEQ ID NO: 671209 - RNA, 22 nt, Artificial Sequence
  Synthetic
cuacuuuuuuauauguaucauu

SEQ ID NO: 671210 - RNA, 23 nt, Artificial Sequence
  Synthetic
ucuacuuuuuuauauguaucauu

SEQ ID NO: 671211 - RNA, 24 nt, Artificial Sequence
  Synthetic
cucuacuuuuuuauauguaucauu

SEQ ID NO: 671212 - RNA, 18 nt, Artificial Sequence
  Synthetic
auuugcgaauuuaucauu

SEQ ID NO: 671213 - RNA, 19 nt, Artificial Sequence
  Synthetic
gauuugcgaauuuaucauu

SEQ ID NO: 671214 - RNA, 20 nt, Artificial Sequence
  Synthetic
agauuugcgaauuuaucauu

SEQ ID NO: 671215 - RNA, 21 nt, Artificial Sequence
  Synthetic
gagauuugcgaauuuaucauu

SEQ ID NO: 671216 - RNA, 22 nt, Artificial Sequence
  Synthetic
agagauuugcgaauuuaucauu

SEQ ID NO: 671217 - RNA, 23 nt, Artificial Sequence
  Synthetic
uagagauuugcgaauuuaucauu

SEQ ID NO: 671218 - RNA, 24 nt, Artificial Sequence
  Synthetic
auagagauuugcgaauuuaucauu

SEQ ID NO: 671219 - RNA, 18 nt, Artificial Sequence
  Synthetic
caguagaacaaacucauu

SEQ ID NO: 671220 - RNA, 19 nt, Artificial Sequence
  Synthetic
gcaguagaacaaacucauu

SEQ ID NO: 671221 - RNA, 20 nt, Artificial Sequence
  Synthetic
ggcaguagaacaaacucauu

SEQ ID NO: 671222 - RNA, 21 nt, Artificial Sequence
  Synthetic
uggcaguagaacaaacucauu

SEQ ID NO: 671223 - RNA, 22 nt, Artificial Sequence
  Synthetic
uuggcaguagaacaaacucauu

SEQ ID NO: 671224 - RNA, 23 nt, Artificial Sequence
  Synthetic
guuggcaguagaacaaacucauu

SEQ ID NO: 671225 - RNA, 24 nt, Artificial Sequence
  Synthetic
uguuggcaguagaacaaacucauu

SEQ ID NO: 671226 - RNA, 18 nt, Artificial Sequence
  Synthetic
ccccuaccuaaacucauu

SEQ ID NO: 671227 - RNA, 19 nt, Artificial Sequence
  Synthetic
gccccuaccuaaacucauu

SEQ ID NO: 671228 - RNA, 20 nt, Artificial Sequence
  Synthetic
ugccccuaccuaaacucauu

SEQ ID NO: 671229 - RNA, 21 nt, Artificial Sequence
  Synthetic
cugccccuaccuaaacucauu

SEQ ID NO: 671230 - RNA, 22 nt, Artificial Sequence
  Synthetic
ucugccccuaccuaaacucauu

SEQ ID NO: 671231 - RNA, 23 nt, Artificial Sequence
  Synthetic
cucugccccuaccuaaacucauu

SEQ ID NO: 671232 - RNA, 24 nt, Artificial Sequence
  Synthetic
ccucugccccuaccuaaacucauu

SEQ ID NO: 671233 - RNA, 18 nt, Artificial Sequence
  Synthetic
cugcuguauugacucauu

SEQ ID NO: 671234 - RNA, 19 nt, Artificial Sequence
  Synthetic
ucugcuguauugacucauu

SEQ ID NO: 671235 - RNA, 20 nt, Artificial Sequence
  Synthetic
cucugcuguauugacucauu

SEQ ID NO: 671236 - RNA, 21 nt, Artificial Sequence
  Synthetic
gcucugcuguauugacucauu

SEQ ID NO: 671237 - RNA, 22 nt, Artificial Sequence
  Synthetic
agcucugcuguauugacucauu

SEQ ID NO: 671238 - RNA, 23 nt, Artificial Sequence
  Synthetic
cagcucugcuguauugacucauu

SEQ ID NO: 671239 - RNA, 24 nt, Artificial Sequence
  Synthetic
acagcucugcuguauugacucauu

SEQ ID NO: 671240 - RNA, 18 nt, Artificial Sequence
  Synthetic
aauaugagcuaccucauu

SEQ ID NO: 671241 - RNA, 19 nt, Artificial Sequence
  Synthetic
gaauaugagcuaccucauu

SEQ ID NO: 671242 - RNA, 20 nt, Artificial Sequence
  Synthetic
ggaauaugagcuaccucauu

SEQ ID NO: 671243 - RNA, 21 nt, Artificial Sequence
  Synthetic
aggaauaugagcuaccucauu

SEQ ID NO: 671244 - RNA, 22 nt, Artificial Sequence
  Synthetic
aaggaauaugagcuaccucauu

SEQ ID NO: 671245 - RNA, 23 nt, Artificial Sequence
  Synthetic
uaaggaauaugagcuaccucauu

SEQ ID NO: 671246 - RNA, 24 nt, Artificial Sequence
  Synthetic
uuaaggaauaugagcuaccucauu

SEQ ID NO: 671247 - RNA, 18 nt, Artificial Sequence
  Synthetic
ugcuuucucuuccucauu

SEQ ID NO: 671248 - RNA, 19 nt, Artificial Sequence
  Synthetic
augcuuucucuuccucauu

SEQ ID NO: 671249 - RNA, 20 nt, Artificial Sequence
  Synthetic
caugcuuucucuuccucauu

SEQ ID NO: 671250 - RNA, 21 nt, Artificial Sequence
  Synthetic
ucaugcuuucucuuccucauu

SEQ ID NO: 671251 - RNA, 22 nt, Artificial Sequence
  Synthetic
uucaugcuuucucuuccucauu

SEQ ID NO: 671252 - RNA, 23 nt, Artificial Sequence
  Synthetic
uuucaugcuuucucuuccucauu

SEQ ID NO: 671253 - RNA, 24 nt, Artificial Sequence
  Synthetic
uuuucaugcuuucucuuccucauu

SEQ ID NO: 671254 - RNA, 18 nt, Artificial Sequence
  Synthetic
ggguacagauagcucauu

SEQ ID NO: 671255 - RNA, 19 nt, Artificial Sequence
  Synthetic
uggguacagauagcucauu

SEQ ID NO: 671256 - RNA, 20 nt, Artificial Sequence
  Synthetic
uuggguacagauagcucauu

SEQ ID NO: 671257 - RNA, 21 nt, Artificial Sequence
  Synthetic
cuuggguacagauagcucauu

SEQ ID NO: 671258 - RNA, 22 nt, Artificial Sequence
  Synthetic
acuuggguacagauagcucauu

SEQ ID NO: 671259 - RNA, 23 nt, Artificial Sequence
  Synthetic
gacuuggguacagauagcucauu

SEQ ID NO: 671260 - RNA, 24 nt, Artificial Sequence
  Synthetic
ggacuuggguacagauagcucauu

SEQ ID NO: 671261 - RNA, 18 nt, Artificial Sequence
  Synthetic
acuagcccuuagcucauu

SEQ ID NO: 671262 - RNA, 19 nt, Artificial Sequence
  Synthetic
aacuagcccuuagcucauu

SEQ ID NO: 671263 - RNA, 20 nt, Artificial Sequence
  Synthetic
aaacuagcccuuagcucauu

SEQ ID NO: 671264 - RNA, 21 nt, Artificial Sequence
  Synthetic
aaaacuagcccuuagcucauu

SEQ ID NO: 671265 - RNA, 22 nt, Artificial Sequence
  Synthetic
aaaaacuagcccuuagcucauu

SEQ ID NO: 671266 - RNA, 23 nt, Artificial Sequence
  Synthetic
gaaaaacuagcccuuagcucauu

SEQ ID NO: 671267 - RNA, 24 nt, Artificial Sequence
  Synthetic
ugaaaaacuagcccuuagcucauu

SEQ ID NO: 671268 - RNA, 18 nt, Artificial Sequence
  Synthetic
auagcugaaugucucauu

SEQ ID NO: 671269 - RNA, 19 nt, Artificial Sequence
  Synthetic
uauagcugaaugucucauu

SEQ ID NO: 671270 - RNA, 20 nt, Artificial Sequence
  Synthetic
cuauagcugaaugucucauu

SEQ ID NO: 671271 - RNA, 21 nt, Artificial Sequence
  Synthetic
gcuauagcugaaugucucauu

SEQ ID NO: 671272 - RNA, 22 nt, Artificial Sequence
  Synthetic
ugcuauagcugaaugucucauu

SEQ ID NO: 671273 - RNA, 23 nt, Artificial Sequence
  Synthetic
cugcuauagcugaaugucucauu

SEQ ID NO: 671274 - RNA, 24 nt, Artificial Sequence
  Synthetic
gcugcuauagcugaaugucucauu

SEQ ID NO: 671275 - RNA, 18 nt, Artificial Sequence
  Synthetic
auuuuuucucuucucauu

SEQ ID NO: 671276 - RNA, 19 nt, Artificial Sequence
  Synthetic
aauuuuuucucuucucauu

SEQ ID NO: 671277 - RNA, 20 nt, Artificial Sequence
  Synthetic
aaauuuuuucucuucucauu

SEQ ID NO: 671278 - RNA, 21 nt, Artificial Sequence
  Synthetic
uaaauuuuuucucuucucauu

SEQ ID NO: 671279 - RNA, 22 nt, Artificial Sequence
  Synthetic
auaaauuuuuucucuucucauu

SEQ ID NO: 671280 - RNA, 23 nt, Artificial Sequence
  Synthetic
uauaaauuuuuucucuucucauu

SEQ ID NO: 671281 - RNA, 24 nt, Artificial Sequence
  Synthetic
uuauaaauuuuuucucuucucauu

SEQ ID NO: 671282 - RNA, 18 nt, Artificial Sequence
  Synthetic
cuugauugcuuucucauu

SEQ ID NO: 671283 - RNA, 19 nt, Artificial Sequence
  Synthetic
ucuugauugcuuucucauu

SEQ ID NO: 671284 - RNA, 20 nt, Artificial Sequence
  Synthetic
uucuugauugcuuucucauu

SEQ ID NO: 671285 - RNA, 21 nt, Artificial Sequence
  Synthetic
cuucuugauugcuuucucauu

SEQ ID NO: 671286 - RNA, 22 nt, Artificial Sequence
  Synthetic
ucuucuugauugcuuucucauu

SEQ ID NO: 671287 - RNA, 23 nt, Artificial Sequence
  Synthetic
aucuucuugauugcuuucucauu

SEQ ID NO: 671288 - RNA, 24 nt, Artificial Sequence
  Synthetic
aaucuucuugauugcuuucucauu

SEQ ID NO: 671289 - RNA, 18 nt, Artificial Sequence
  Synthetic
uuaggcagguuucucauu

SEQ ID NO: 671290 - RNA, 19 nt, Artificial Sequence
  Synthetic
auuaggcagguuucucauu

SEQ ID NO: 671291 - RNA, 20 nt, Artificial Sequence
  Synthetic
uauuaggcagguuucucauu

SEQ ID NO: 671292 - RNA, 21 nt, Artificial Sequence
  Synthetic
uuauuaggcagguuucucauu

SEQ ID NO: 671293 - RNA, 22 nt, Artificial Sequence
  Synthetic
uuuauuaggcagguuucucauu

SEQ ID NO: 671294 - RNA, 23 nt, Artificial Sequence
  Synthetic
uuuuauuaggcagguuucucauu

SEQ ID NO: 671295 - RNA, 24 nt, Artificial Sequence
  Synthetic
guuuuauuaggcagguuucucauu

SEQ ID NO: 671296 - RNA, 18 nt, Artificial Sequence
  Synthetic
ggucccacugaagucauu

SEQ ID NO: 671297 - RNA, 19 nt, Artificial Sequence
  Synthetic
aggucccacugaagucauu

SEQ ID NO: 671298 - RNA, 20 nt, Artificial Sequence
  Synthetic
caggucccacugaagucauu

SEQ ID NO: 671299 - RNA, 21 nt, Artificial Sequence
  Synthetic
ucaggucccacugaagucauu

SEQ ID NO: 671300 - RNA, 22 nt, Artificial Sequence
  Synthetic
cucaggucccacugaagucauu

SEQ ID NO: 671301 - RNA, 23 nt, Artificial Sequence
  Synthetic
ccucaggucccacugaagucauu

SEQ ID NO: 671302 - RNA, 24 nt, Artificial Sequence
  Synthetic
accucaggucccacugaagucauu

SEQ ID NO: 671303 - RNA, 18 nt, Artificial Sequence
  Synthetic
acuuuugcugaagucauu

SEQ ID NO: 671304 - RNA, 19 nt, Artificial Sequence
  Synthetic
aacuuuugcugaagucauu

SEQ ID NO: 671305 - RNA, 20 nt, Artificial Sequence
  Synthetic
caacuuuugcugaagucauu

SEQ ID NO: 671306 - RNA, 21 nt, Artificial Sequence
  Synthetic
acaacuuuugcugaagucauu

SEQ ID NO: 671307 - RNA, 22 nt, Artificial Sequence
  Synthetic
uacaacuuuugcugaagucauu

SEQ ID NO: 671308 - RNA, 23 nt, Artificial Sequence
  Synthetic
cuacaacuuuugcugaagucauu

SEQ ID NO: 671309 - RNA, 24 nt, Artificial Sequence
  Synthetic
ucuacaacuuuugcugaagucauu

SEQ ID NO: 671310 - RNA, 18 nt, Artificial Sequence
  Synthetic
auuuauccagcagucauu

SEQ ID NO: 671311 - RNA, 19 nt, Artificial Sequence
  Synthetic
uauuuauccagcagucauu

SEQ ID NO: 671312 - RNA, 20 nt, Artificial Sequence
  Synthetic
uuauuuauccagcagucauu

SEQ ID NO: 671313 - RNA, 21 nt, Artificial Sequence
  Synthetic
cuuauuuauccagcagucauu

SEQ ID NO: 671314 - RNA, 22 nt, Artificial Sequence
  Synthetic
ccuuauuuauccagcagucauu

SEQ ID NO: 671315 - RNA, 23 nt, Artificial Sequence
  Synthetic
uccuuauuuauccagcagucauu

SEQ ID NO: 671316 - RNA, 24 nt, Artificial Sequence
  Synthetic
uuccuuauuuauccagcagucauu

SEQ ID NO: 671317 - RNA, 18 nt, Artificial Sequence
  Synthetic
uauguuauuucagucauu

SEQ ID NO: 671318 - RNA, 19 nt, Artificial Sequence
  Synthetic
guauguuauuucagucauu

SEQ ID NO: 671319 - RNA, 20 nt, Artificial Sequence
  Synthetic
uguauguuauuucagucauu

SEQ ID NO: 671320 - RNA, 21 nt, Artificial Sequence
  Synthetic
guguauguuauuucagucauu

SEQ ID NO: 671321 - RNA, 22 nt, Artificial Sequence
  Synthetic
aguguauguuauuucagucauu

SEQ ID NO: 671322 - RNA, 23 nt, Artificial Sequence
  Synthetic
uaguguauguuauuucagucauu

SEQ ID NO: 671323 - RNA, 24 nt, Artificial Sequence
  Synthetic
auaguguauguuauuucagucauu

SEQ ID NO: 671324 - RNA, 18 nt, Artificial Sequence
  Synthetic
aauaaaaguaucgucauu

SEQ ID NO: 671325 - RNA, 19 nt, Artificial Sequence
  Synthetic
aaauaaaaguaucgucauu

SEQ ID NO: 671326 - RNA, 20 nt, Artificial Sequence
  Synthetic
aaaauaaaaguaucgucauu

SEQ ID NO: 671327 - RNA, 21 nt, Artificial Sequence
  Synthetic
gaaaauaaaaguaucgucauu

SEQ ID NO: 671328 - RNA, 22 nt, Artificial Sequence
  Synthetic
cgaaaauaaaaguaucgucauu

SEQ ID NO: 671329 - RNA, 23 nt, Artificial Sequence
  Synthetic
gcgaaaauaaaaguaucgucauu

SEQ ID NO: 671330 - RNA, 24 nt, Artificial Sequence
  Synthetic
agcgaaaauaaaaguaucgucauu

SEQ ID NO: 671331 - RNA, 18 nt, Artificial Sequence
  Synthetic
auuuuggacauggucauu

SEQ ID NO: 671332 - RNA, 19 nt, Artificial Sequence
  Synthetic
aauuuuggacauggucauu

SEQ ID NO: 671333 - RNA, 20 nt, Artificial Sequence
  Synthetic
caauuuuggacauggucauu

SEQ ID NO: 671334 - RNA, 21 nt, Artificial Sequence
  Synthetic
ucaauuuuggacauggucauu

SEQ ID NO: 671335 - RNA, 22 nt, Artificial Sequence
  Synthetic
uucaauuuuggacauggucauu

SEQ ID NO: 671336 - RNA, 23 nt, Artificial Sequence
  Synthetic
guucaauuuuggacauggucauu

SEQ ID NO: 671337 - RNA, 24 nt, Artificial Sequence
  Synthetic
aguucaauuuuggacauggucauu

SEQ ID NO: 671338 - RNA, 18 nt, Artificial Sequence
  Synthetic
guauaacuuguggucauu

SEQ ID NO: 671339 - RNA, 19 nt, Artificial Sequence
  Synthetic
aguauaacuuguggucauu

SEQ ID NO: 671340 - RNA, 20 nt, Artificial Sequence
  Synthetic
caguauaacuuguggucauu

SEQ ID NO: 671341 - RNA, 21 nt, Artificial Sequence
  Synthetic
ucaguauaacuuguggucauu

SEQ ID NO: 671342 - RNA, 22 nt, Artificial Sequence
  Synthetic
aucaguauaacuuguggucauu

SEQ ID NO: 671343 - RNA, 23 nt, Artificial Sequence
  Synthetic
gaucaguauaacuuguggucauu

SEQ ID NO: 671344 - RNA, 24 nt, Artificial Sequence
  Synthetic
agaucaguauaacuuguggucauu

SEQ ID NO: 671345 - RNA, 18 nt, Artificial Sequence
  Synthetic
gacuuaaucuuugucauu

SEQ ID NO: 671346 - RNA, 19 nt, Artificial Sequence
  Synthetic
agacuuaaucuuugucauu

SEQ ID NO: 671347 - RNA, 20 nt, Artificial Sequence
  Synthetic
gagacuuaaucuuugucauu

SEQ ID NO: 671348 - RNA, 21 nt, Artificial Sequence
  Synthetic
agagacuuaaucuuugucauu

SEQ ID NO: 671349 - RNA, 22 nt, Artificial Sequence
  Synthetic
uagagacuuaaucuuugucauu

SEQ ID NO: 671350 - RNA, 23 nt, Artificial Sequence
  Synthetic
auagagacuuaaucuuugucauu

SEQ ID NO: 671351 - RNA, 24 nt, Artificial Sequence
  Synthetic
uauagagacuuaaucuuugucauu

SEQ ID NO: 671352 - RNA, 18 nt, Artificial Sequence
  Synthetic
caaguuuaaaaauucauu

SEQ ID NO: 671353 - RNA, 19 nt, Artificial Sequence
  Synthetic
acaaguuuaaaaauucauu

SEQ ID NO: 671354 - RNA, 20 nt, Artificial Sequence
  Synthetic
aacaaguuuaaaaauucauu

SEQ ID NO: 671355 - RNA, 21 nt, Artificial Sequence
  Synthetic
caacaaguuuaaaaauucauu

SEQ ID NO: 671356 - RNA, 22 nt, Artificial Sequence
  Synthetic
ucaacaaguuuaaaaauucauu

SEQ ID NO: 671357 - RNA, 23 nt, Artificial Sequence
  Synthetic
uucaacaaguuuaaaaauucauu

SEQ ID NO: 671358 - RNA, 24 nt, Artificial Sequence
  Synthetic
guucaacaaguuuaaaaauucauu

SEQ ID NO: 671359 - RNA, 18 nt, Artificial Sequence
  Synthetic
auuagaauacaauucauu

SEQ ID NO: 671360 - RNA, 19 nt, Artificial Sequence
  Synthetic
cauuagaauacaauucauu

SEQ ID NO: 671361 - RNA, 20 nt, Artificial Sequence
  Synthetic
acauuagaauacaauucauu

SEQ ID NO: 671362 - RNA, 21 nt, Artificial Sequence
  Synthetic
cacauuagaauacaauucauu

SEQ ID NO: 671363 - RNA, 22 nt, Artificial Sequence
  Synthetic
ucacauuagaauacaauucauu

SEQ ID NO: 671364 - RNA, 23 nt, Artificial Sequence
  Synthetic
aucacauuagaauacaauucauu

SEQ ID NO: 671365 - RNA, 24 nt, Artificial Sequence
  Synthetic
uaucacauuagaauacaauucauu

SEQ ID NO: 671366 - RNA, 18 nt, Artificial Sequence
  Synthetic
acuaaauaauaauucauu

SEQ ID NO: 671367 - RNA, 19 nt, Artificial Sequence
  Synthetic
gacuaaauaauaauucauu

SEQ ID NO: 671368 - RNA, 20 nt, Artificial Sequence
  Synthetic
agacuaaauaauaauucauu

SEQ ID NO: 671369 - RNA, 21 nt, Artificial Sequence
  Synthetic
uagacuaaauaauaauucauu

SEQ ID NO: 671370 - RNA, 22 nt, Artificial Sequence
  Synthetic
cuagacuaaauaauaauucauu

SEQ ID NO: 671371 - RNA, 23 nt, Artificial Sequence
  Synthetic
acuagacuaaauaauaauucauu

SEQ ID NO: 671372 - RNA, 24 nt, Artificial Sequence
  Synthetic
aacuagacuaaauaauaauucauu

SEQ ID NO: 671373 - RNA, 18 nt, Artificial Sequence
  Synthetic
aagcgauaugcauucauu

SEQ ID NO: 671374 - RNA, 19 nt, Artificial Sequence
  Synthetic
aaagcgauaugcauucauu

SEQ ID NO: 671375 - RNA, 20 nt, Artificial Sequence
  Synthetic
gaaagcgauaugcauucauu

SEQ ID NO: 671376 - RNA, 21 nt, Artificial Sequence
  Synthetic
ugaaagcgauaugcauucauu

SEQ ID NO: 671377 - RNA, 22 nt, Artificial Sequence
  Synthetic
gugaaagcgauaugcauucauu

SEQ ID NO: 671378 - RNA, 23 nt, Artificial Sequence
  Synthetic
ugugaaagcgauaugcauucauu

SEQ ID NO: 671379 - RNA, 24 nt, Artificial Sequence
  Synthetic
gugugaaagcgauaugcauucauu

SEQ ID NO: 671380 - RNA, 18 nt, Artificial Sequence
  Synthetic
cuaccucucagauucauu

SEQ ID NO: 671381 - RNA, 19 nt, Artificial Sequence
  Synthetic
ucuaccucucagauucauu

SEQ ID NO: 671382 - RNA, 20 nt, Artificial Sequence
  Synthetic
cucuaccucucagauucauu

SEQ ID NO: 671383 - RNA, 21 nt, Artificial Sequence
  Synthetic
ucucuaccucucagauucauu

SEQ ID NO: 671384 - RNA, 22 nt, Artificial Sequence
  Synthetic
gucucuaccucucagauucauu

SEQ ID NO: 671385 - RNA, 23 nt, Artificial Sequence
  Synthetic
agucucuaccucucagauucauu

SEQ ID NO: 671386 - RNA, 24 nt, Artificial Sequence
  Synthetic
gagucucuaccucucagauucauu

SEQ ID NO: 671387 - RNA, 18 nt, Artificial Sequence
  Synthetic
caguauaccuuauucauu

SEQ ID NO: 671388 - RNA, 19 nt, Artificial Sequence
  Synthetic
gcaguauaccuuauucauu

SEQ ID NO: 671389 - RNA, 20 nt, Artificial Sequence
  Synthetic
ggcaguauaccuuauucauu

SEQ ID NO: 671390 - RNA, 21 nt, Artificial Sequence
  Synthetic
aggcaguauaccuuauucauu

SEQ ID NO: 671391 - RNA, 22 nt, Artificial Sequence
  Synthetic
uaggcaguauaccuuauucauu

SEQ ID NO: 671392 - RNA, 23 nt, Artificial Sequence
  Synthetic
auaggcaguauaccuuauucauu

SEQ ID NO: 671393 - RNA, 24 nt, Artificial Sequence
  Synthetic
uauaggcaguauaccuuauucauu

SEQ ID NO: 671394 - RNA, 18 nt, Artificial Sequence
  Synthetic
gcauuucauuuauucauu

SEQ ID NO: 671395 - RNA, 19 nt, Artificial Sequence
  Synthetic
agcauuucauuuauucauu

SEQ ID NO: 671396 - RNA, 20 nt, Artificial Sequence
  Synthetic
gagcauuucauuuauucauu

SEQ ID NO: 671397 - RNA, 21 nt, Artificial Sequence
  Synthetic
agagcauuucauuuauucauu

SEQ ID NO: 671398 - RNA, 22 nt, Artificial Sequence
  Synthetic
cagagcauuucauuuauucauu

SEQ ID NO: 671399 - RNA, 23 nt, Artificial Sequence
  Synthetic
ucagagcauuucauuuauucauu

SEQ ID NO: 671400 - RNA, 24 nt, Artificial Sequence
  Synthetic
aucagagcauuucauuuauucauu

SEQ ID NO: 671401 - RNA, 18 nt, Artificial Sequence
  Synthetic
caguccucuaccuucauu

SEQ ID NO: 671402 - RNA, 19 nt, Artificial Sequence
  Synthetic
ucaguccucuaccuucauu

SEQ ID NO: 671403 - RNA, 20 nt, Artificial Sequence
  Synthetic
uucaguccucuaccuucauu

SEQ ID NO: 671404 - RNA, 21 nt, Artificial Sequence
  Synthetic
uuucaguccucuaccuucauu

SEQ ID NO: 671405 - RNA, 22 nt, Artificial Sequence
  Synthetic
uuuucaguccucuaccuucauu

SEQ ID NO: 671406 - RNA, 23 nt, Artificial Sequence
  Synthetic
cuuuucaguccucuaccuucauu

SEQ ID NO: 671407 - RNA, 24 nt, Artificial Sequence
  Synthetic
ucuuuucaguccucuaccuucauu

SEQ ID NO: 671408 - RNA, 18 nt, Artificial Sequence
  Synthetic
aguaaaacacccuucauu

SEQ ID NO: 671409 - RNA, 19 nt, Artificial Sequence
  Synthetic
aaguaaaacacccuucauu

SEQ ID NO: 671410 - RNA, 20 nt, Artificial Sequence
  Synthetic
aaaguaaaacacccuucauu

SEQ ID NO: 671411 - RNA, 21 nt, Artificial Sequence
  Synthetic
aaaaguaaaacacccuucauu

SEQ ID NO: 671412 - RNA, 22 nt, Artificial Sequence
  Synthetic
gaaaaguaaaacacccuucauu

SEQ ID NO: 671413 - RNA, 23 nt, Artificial Sequence
  Synthetic
ggaaaaguaaaacacccuucauu

SEQ ID NO: 671414 - RNA, 24 nt, Artificial Sequence
  Synthetic
aggaaaaguaaaacacccuucauu

SEQ ID NO: 671415 - RNA, 18 nt, Artificial Sequence
  Synthetic
agaauguaucccuucauu

SEQ ID NO: 671416 - RNA, 19 nt, Artificial Sequence
  Synthetic
cagaauguaucccuucauu

SEQ ID NO: 671417 - RNA, 20 nt, Artificial Sequence
  Synthetic
gcagaauguaucccuucauu

SEQ ID NO: 671418 - RNA, 21 nt, Artificial Sequence
  Synthetic
agcagaauguaucccuucauu

SEQ ID NO: 671419 - RNA, 22 nt, Artificial Sequence
  Synthetic
uagcagaauguaucccuucauu

SEQ ID NO: 671420 - RNA, 23 nt, Artificial Sequence
  Synthetic
guagcagaauguaucccuucauu

SEQ ID NO: 671421 - RNA, 24 nt, Artificial Sequence
  Synthetic
uguagcagaauguaucccuucauu

SEQ ID NO: 671422 - RNA, 18 nt, Artificial Sequence
  Synthetic
aaaaacaagugcuucauu

SEQ ID NO: 671423 - RNA, 19 nt, Artificial Sequence
  Synthetic
uaaaaacaagugcuucauu

SEQ ID NO: 671424 - RNA, 20 nt, Artificial Sequence
  Synthetic
auaaaaacaagugcuucauu

SEQ ID NO: 671425 - RNA, 21 nt, Artificial Sequence
  Synthetic
aauaaaaacaagugcuucauu

SEQ ID NO: 671426 - RNA, 22 nt, Artificial Sequence
  Synthetic
aaauaaaaacaagugcuucauu

SEQ ID NO: 671427 - RNA, 23 nt, Artificial Sequence
  Synthetic
aaaauaaaaacaagugcuucauu

SEQ ID NO: 671428 - RNA, 24 nt, Artificial Sequence
  Synthetic
aaaaauaaaaacaagugcuucauu

SEQ ID NO: 671429 - RNA, 18 nt, Artificial Sequence
  Synthetic
uauuacaguugcuucauu

SEQ ID NO: 671430 - RNA, 19 nt, Artificial Sequence
  Synthetic
uuauuacaguugcuucauu

SEQ ID NO: 671431 - RNA, 20 nt, Artificial Sequence
  Synthetic
auuauuacaguugcuucauu

SEQ ID NO: 671432 - RNA, 21 nt, Artificial Sequence
  Synthetic
uauuauuacaguugcuucauu

SEQ ID NO: 671433 - RNA, 22 nt, Artificial Sequence
  Synthetic
guauuauuacaguugcuucauu

SEQ ID NO: 671434 - RNA, 23 nt, Artificial Sequence
  Synthetic
uguauuauuacaguugcuucauu

SEQ ID NO: 671435 - RNA, 24 nt, Artificial Sequence
  Synthetic
cuguauuauuacaguugcuucauu

SEQ ID NO: 671436 - RNA, 18 nt, Artificial Sequence
  Synthetic
cugcuuucauucuucauu

SEQ ID NO: 671437 - RNA, 19 nt, Artificial Sequence
  Synthetic
ccugcuuucauucuucauu

SEQ ID NO: 671438 - RNA, 20 nt, Artificial Sequence
  Synthetic
cccugcuuucauucuucauu

SEQ ID NO: 671439 - RNA, 21 nt, Artificial Sequence
  Synthetic
ucccugcuuucauucuucauu

SEQ ID NO: 671440 - RNA, 22 nt, Artificial Sequence
  Synthetic
uucccugcuuucauucuucauu

SEQ ID NO: 671441 - RNA, 23 nt, Artificial Sequence
  Synthetic
cuucccugcuuucauucuucauu

SEQ ID NO: 671442 - RNA, 24 nt, Artificial Sequence
  Synthetic
ccuucccugcuuucauucuucauu

SEQ ID NO: 671443 - RNA, 18 nt, Artificial Sequence
  Synthetic
agaacuuguuucuucauu

SEQ ID NO: 671444 - RNA, 19 nt, Artificial Sequence
  Synthetic
gagaacuuguuucuucauu

SEQ ID NO: 671445 - RNA, 20 nt, Artificial Sequence
  Synthetic
agagaacuuguuucuucauu

SEQ ID NO: 671446 - RNA, 21 nt, Artificial Sequence
  Synthetic
cagagaacuuguuucuucauu

SEQ ID NO: 671447 - RNA, 22 nt, Artificial Sequence
  Synthetic
acagagaacuuguuucuucauu

SEQ ID NO: 671448 - RNA, 23 nt, Artificial Sequence
  Synthetic
uacagagaacuuguuucuucauu

SEQ ID NO: 671449 - RNA, 24 nt, Artificial Sequence
  Synthetic
cuacagagaacuuguuucuucauu

SEQ ID NO: 671450 - RNA, 18 nt, Artificial Sequence
  Synthetic
gacacagggcaguucauu

SEQ ID NO: 671451 - RNA, 19 nt, Artificial Sequence
  Synthetic
ggacacagggcaguucauu

SEQ ID NO: 671452 - RNA, 20 nt, Artificial Sequence
  Synthetic
aggacacagggcaguucauu

SEQ ID NO: 671453 - RNA, 21 nt, Artificial Sequence
  Synthetic
uaggacacagggcaguucauu

SEQ ID NO: 671454 - RNA, 22 nt, Artificial Sequence
  Synthetic
auaggacacagggcaguucauu

SEQ ID NO: 671455 - RNA, 23 nt, Artificial Sequence
  Synthetic
gauaggacacagggcaguucauu

SEQ ID NO: 671456 - RNA, 24 nt, Artificial Sequence
  Synthetic
ggauaggacacagggcaguucauu

SEQ ID NO: 671457 - RNA, 18 nt, Artificial Sequence
  Synthetic
uuaaugaauuaguucauu

SEQ ID NO: 671458 - RNA, 19 nt, Artificial Sequence
  Synthetic
uuuaaugaauuaguucauu

SEQ ID NO: 671459 - RNA, 20 nt, Artificial Sequence
  Synthetic
cuuuaaugaauuaguucauu

SEQ ID NO: 671460 - RNA, 21 nt, Artificial Sequence
  Synthetic
ucuuuaaugaauuaguucauu

SEQ ID NO: 671461 - RNA, 22 nt, Artificial Sequence
  Synthetic
uucuuuaaugaauuaguucauu

SEQ ID NO: 671462 - RNA, 23 nt, Artificial Sequence
  Synthetic
uuucuuuaaugaauuaguucauu

SEQ ID NO: 671463 - RNA, 24 nt, Artificial Sequence
  Synthetic
auuucuuuaaugaauuaguucauu

SEQ ID NO: 671464 - RNA, 18 nt, Artificial Sequence
  Synthetic
gagaagugucuguucauu

SEQ ID NO: 671465 - RNA, 19 nt, Artificial Sequence
  Synthetic
ugagaagugucuguucauu

SEQ ID NO: 671466 - RNA, 20 nt, Artificial Sequence
  Synthetic
uugagaagugucuguucauu

SEQ ID NO: 671467 - RNA, 21 nt, Artificial Sequence
  Synthetic
uuugagaagugucuguucauu

SEQ ID NO: 671468 - RNA, 22 nt, Artificial Sequence
  Synthetic
uuuugagaagugucuguucauu

SEQ ID NO: 671469 - RNA, 23 nt, Artificial Sequence
  Synthetic
cuuuugagaagugucuguucauu

SEQ ID NO: 671470 - RNA, 24 nt, Artificial Sequence
  Synthetic
ucuuuugagaagugucuguucauu

SEQ ID NO: 671471 - RNA, 18 nt, Artificial Sequence
  Synthetic
uuugcauuuuuguucauu

SEQ ID NO: 671472 - RNA, 19 nt, Artificial Sequence
  Synthetic
uuuugcauuuuuguucauu

SEQ ID NO: 671473 - RNA, 20 nt, Artificial Sequence
  Synthetic
uuuuugcauuuuuguucauu

SEQ ID NO: 671474 - RNA, 21 nt, Artificial Sequence
  Synthetic
auuuuugcauuuuuguucauu

SEQ ID NO: 671475 - RNA, 22 nt, Artificial Sequence
  Synthetic
uauuuuugcauuuuuguucauu

SEQ ID NO: 671476 - RNA, 23 nt, Artificial Sequence
  Synthetic
cuauuuuugcauuuuuguucauu

SEQ ID NO: 671477 - RNA, 24 nt, Artificial Sequence
  Synthetic
acuauuuuugcauuuuuguucauu

SEQ ID NO: 671478 - RNA, 18 nt, Artificial Sequence
  Synthetic
uuguuguuuaauuucauu

SEQ ID NO: 671479 - RNA, 19 nt, Artificial Sequence
  Synthetic
auuguuguuuaauuucauu

SEQ ID NO: 671480 - RNA, 20 nt, Artificial Sequence
  Synthetic
uauuguuguuuaauuucauu

SEQ ID NO: 671481 - RNA, 21 nt, Artificial Sequence
  Synthetic
guauuguuguuuaauuucauu

SEQ ID NO: 671482 - RNA, 22 nt, Artificial Sequence
  Synthetic
aguauuguuguuuaauuucauu

SEQ ID NO: 671483 - RNA, 23 nt, Artificial Sequence
  Synthetic
gaguauuguuguuuaauuucauu

SEQ ID NO: 671484 - RNA, 24 nt, Artificial Sequence
  Synthetic
agaguauuguuguuuaauuucauu

SEQ ID NO: 671485 - RNA, 18 nt, Artificial Sequence
  Synthetic
gggccugagccuuucauu

SEQ ID NO: 671486 - RNA, 19 nt, Artificial Sequence
  Synthetic
ugggccugagccuuucauu

SEQ ID NO: 671487 - RNA, 20 nt, Artificial Sequence
  Synthetic
cugggccugagccuuucauu

SEQ ID NO: 671488 - RNA, 21 nt, Artificial Sequence
  Synthetic
ucugggccugagccuuucauu

SEQ ID NO: 671489 - RNA, 22 nt, Artificial Sequence
  Synthetic
uucugggccugagccuuucauu

SEQ ID NO: 671490 - RNA, 23 nt, Artificial Sequence
  Synthetic
cuucugggccugagccuuucauu

SEQ ID NO: 671491 - RNA, 24 nt, Artificial Sequence
  Synthetic
acuucugggccugagccuuucauu

SEQ ID NO: 671492 - RNA, 18 nt, Artificial Sequence
  Synthetic
caucauaacaguuucauu

SEQ ID NO: 671493 - RNA, 19 nt, Artificial Sequence
  Synthetic
acaucauaacaguuucauu

SEQ ID NO: 671494 - RNA, 20 nt, Artificial Sequence
  Synthetic
cacaucauaacaguuucauu

SEQ ID NO: 671495 - RNA, 21 nt, Artificial Sequence
  Synthetic
ccacaucauaacaguuucauu

SEQ ID NO: 671496 - RNA, 22 nt, Artificial Sequence
  Synthetic
accacaucauaacaguuucauu

SEQ ID NO: 671497 - RNA, 23 nt, Artificial Sequence
  Synthetic
aaccacaucauaacaguuucauu

SEQ ID NO: 671498 - RNA, 24 nt, Artificial Sequence
  Synthetic
caaccacaucauaacaguuucauu

SEQ ID NO: 671499 - RNA, 18 nt, Artificial Sequence
  Synthetic
gaugcucugaguuucauu

SEQ ID NO: 671500 - RNA, 19 nt, Artificial Sequence
  Synthetic
ugaugcucugaguuucauu

SEQ ID NO: 671501 - RNA, 20 nt, Artificial Sequence
  Synthetic
cugaugcucugaguuucauu

SEQ ID NO: 671502 - RNA, 21 nt, Artificial Sequence
  Synthetic
acugaugcucugaguuucauu

SEQ ID NO: 671503 - RNA, 22 nt, Artificial Sequence
  Synthetic
uacugaugcucugaguuucauu

SEQ ID NO: 671504 - RNA, 23 nt, Artificial Sequence
  Synthetic
uuacugaugcucugaguuucauu

SEQ ID NO: 671505 - RNA, 24 nt, Artificial Sequence
  Synthetic
auuacugaugcucugaguuucauu

SEQ ID NO: 671506 - RNA, 18 nt, Artificial Sequence
  Synthetic
aauuuggguaguuucauu

SEQ ID NO: 671507 - RNA, 19 nt, Artificial Sequence
  Synthetic
aaauuuggguaguuucauu

SEQ ID NO: 671508 - RNA, 20 nt, Artificial Sequence
  Synthetic
caaauuuggguaguuucauu

SEQ ID NO: 671509 - RNA, 21 nt, Artificial Sequence
  Synthetic
ucaaauuuggguaguuucauu

SEQ ID NO: 671510 - RNA, 22 nt, Artificial Sequence
  Synthetic
uucaaauuuggguaguuucauu

SEQ ID NO: 671511 - RNA, 23 nt, Artificial Sequence
  Synthetic
guucaaauuuggguaguuucauu

SEQ ID NO: 671512 - RNA, 24 nt, Artificial Sequence
  Synthetic
gguucaaauuuggguaguuucauu

SEQ ID NO: 671513 - RNA, 18 nt, Artificial Sequence
  Synthetic
agacauugaauuuucauu

SEQ ID NO: 671514 - RNA, 19 nt, Artificial Sequence
  Synthetic
gagacauugaauuuucauu

SEQ ID NO: 671515 - RNA, 20 nt, Artificial Sequence
  Synthetic
ugagacauugaauuuucauu

SEQ ID NO: 671516 - RNA, 21 nt, Artificial Sequence
  Synthetic
augagacauugaauuuucauu

SEQ ID NO: 671517 - RNA, 22 nt, Artificial Sequence
  Synthetic
aaugagacauugaauuuucauu

SEQ ID NO: 671518 - RNA, 23 nt, Artificial Sequence
  Synthetic
aaaugagacauugaauuuucauu

SEQ ID NO: 671519 - RNA, 24 nt, Artificial Sequence
  Synthetic
aaaaugagacauugaauuuucauu

SEQ ID NO: 671520 - RNA, 18 nt, Artificial Sequence
  Synthetic
cccguccucauuuucauu

SEQ ID NO: 671521 - RNA, 19 nt, Artificial Sequence
  Synthetic
acccguccucauuuucauu

SEQ ID NO: 671522 - RNA, 20 nt, Artificial Sequence
  Synthetic
gacccguccucauuuucauu

SEQ ID NO: 671523 - RNA, 21 nt, Artificial Sequence
  Synthetic
ggacccguccucauuuucauu

SEQ ID NO: 671524 - RNA, 22 nt, Artificial Sequence
  Synthetic
uggacccguccucauuuucauu

SEQ ID NO: 671525 - RNA, 23 nt, Artificial Sequence
  Synthetic
cuggacccguccucauuuucauu

SEQ ID NO: 671526 - RNA, 24 nt, Artificial Sequence
  Synthetic
ucuggacccguccucauuuucauu

SEQ ID NO: 671527 - RNA, 18 nt, Artificial Sequence
  Synthetic
aaugaagaaguuuucauu

SEQ ID NO: 671528 - RNA, 19 nt, Artificial Sequence
  Synthetic
aaaugaagaaguuuucauu

SEQ ID NO: 671529 - RNA, 20 nt, Artificial Sequence
  Synthetic
uaaaugaagaaguuuucauu

SEQ ID NO: 671530 - RNA, 21 nt, Artificial Sequence
  Synthetic
auaaaugaagaaguuuucauu

SEQ ID NO: 671531 - RNA, 22 nt, Artificial Sequence
  Synthetic
aauaaaugaagaaguuuucauu

SEQ ID NO: 671532 - RNA, 23 nt, Artificial Sequence
  Synthetic
aaauaaaugaagaaguuuucauu

SEQ ID NO: 671533 - RNA, 24 nt, Artificial Sequence
  Synthetic
gaaauaaaugaagaaguuuucauu

SEQ ID NO: 671534 - RNA, 18 nt, Artificial Sequence
  Synthetic
uagaaggaaaaaaagauu

SEQ ID NO: 671535 - RNA, 19 nt, Artificial Sequence
  Synthetic
uuagaaggaaaaaaagauu

SEQ ID NO: 671536 - RNA, 20 nt, Artificial Sequence
  Synthetic
cuuagaaggaaaaaaagauu

SEQ ID NO: 671537 - RNA, 21 nt, Artificial Sequence
  Synthetic
acuuagaaggaaaaaaagauu

SEQ ID NO: 671538 - RNA, 22 nt, Artificial Sequence
  Synthetic
uacuuagaaggaaaaaaagauu

SEQ ID NO: 671539 - RNA, 23 nt, Artificial Sequence
  Synthetic
uuacuuagaaggaaaaaaagauu

SEQ ID NO: 671540 - RNA, 24 nt, Artificial Sequence
  Synthetic
auuacuuagaaggaaaaaaagauu

SEQ ID NO: 671541 - RNA, 18 nt, Artificial Sequence
  Synthetic
augcuacgaagaaagauu

SEQ ID NO: 671542 - RNA, 19 nt, Artificial Sequence
  Synthetic
gaugcuacgaagaaagauu

SEQ ID NO: 671543 - RNA, 20 nt, Artificial Sequence
  Synthetic
ugaugcuacgaagaaagauu

SEQ ID NO: 671544 - RNA, 21 nt, Artificial Sequence
  Synthetic
augaugcuacgaagaaagauu

SEQ ID NO: 671545 - RNA, 22 nt, Artificial Sequence
  Synthetic
aaugaugcuacgaagaaagauu

SEQ ID NO: 671546 - RNA, 23 nt, Artificial Sequence
  Synthetic
caaugaugcuacgaagaaagauu

SEQ ID NO: 671547 - RNA, 24 nt, Artificial Sequence
  Synthetic
acaaugaugcuacgaagaaagauu

SEQ ID NO: 671548 - RNA, 18 nt, Artificial Sequence
  Synthetic
auaacagauaacaagauu

SEQ ID NO: 671549 - RNA, 19 nt, Artificial Sequence
  Synthetic
aauaacagauaacaagauu

SEQ ID NO: 671550 - RNA, 20 nt, Artificial Sequence
  Synthetic
caauaacagauaacaagauu

SEQ ID NO: 671551 - RNA, 21 nt, Artificial Sequence
  Synthetic
ccaauaacagauaacaagauu

SEQ ID NO: 671552 - RNA, 22 nt, Artificial Sequence
  Synthetic
cccaauaacagauaacaagauu

SEQ ID NO: 671553 - RNA, 23 nt, Artificial Sequence
  Synthetic
gcccaauaacagauaacaagauu

SEQ ID NO: 671554 - RNA, 24 nt, Artificial Sequence
  Synthetic
agcccaauaacagauaacaagauu

SEQ ID NO: 671555 - RNA, 18 nt, Artificial Sequence
  Synthetic
gugacauuaaccaagauu

SEQ ID NO: 671556 - RNA, 19 nt, Artificial Sequence
  Synthetic
agugacauuaaccaagauu

SEQ ID NO: 671557 - RNA, 20 nt, Artificial Sequence
  Synthetic
gagugacauuaaccaagauu

SEQ ID NO: 671558 - RNA, 21 nt, Artificial Sequence
  Synthetic
agagugacauuaaccaagauu

SEQ ID NO: 671559 - RNA, 22 nt, Artificial Sequence
  Synthetic
gagagugacauuaaccaagauu

SEQ ID NO: 671560 - RNA, 23 nt, Artificial Sequence
  Synthetic
ugagagugacauuaaccaagauu

SEQ ID NO: 671561 - RNA, 24 nt, Artificial Sequence
  Synthetic
augagagugacauuaaccaagauu

SEQ ID NO: 671562 - RNA, 18 nt, Artificial Sequence
  Synthetic
uucacaauagccaagauu

SEQ ID NO: 671563 - RNA, 19 nt, Artificial Sequence
  Synthetic
auucacaauagccaagauu

SEQ ID NO: 671564 - RNA, 20 nt, Artificial Sequence
  Synthetic
uauucacaauagccaagauu

SEQ ID NO: 671565 - RNA, 21 nt, Artificial Sequence
  Synthetic
cuauucacaauagccaagauu

SEQ ID NO: 671566 - RNA, 22 nt, Artificial Sequence
  Synthetic
gcuauucacaauagccaagauu

SEQ ID NO: 671567 - RNA, 23 nt, Artificial Sequence
  Synthetic
cgcuauucacaauagccaagauu

SEQ ID NO: 671568 - RNA, 24 nt, Artificial Sequence
  Synthetic
gcgcuauucacaauagccaagauu

SEQ ID NO: 671569 - RNA, 18 nt, Artificial Sequence
  Synthetic
uucauaauagccaagauu

SEQ ID NO: 671570 - RNA, 19 nt, Artificial Sequence
  Synthetic
guucauaauagccaagauu

SEQ ID NO: 671571 - RNA, 20 nt, Artificial Sequence
  Synthetic
uguucauaauagccaagauu

SEQ ID NO: 671572 - RNA, 21 nt, Artificial Sequence
  Synthetic
cuguucauaauagccaagauu

SEQ ID NO: 671573 - RNA, 22 nt, Artificial Sequence
  Synthetic
acuguucauaauagccaagauu

SEQ ID NO: 671574 - RNA, 23 nt, Artificial Sequence
  Synthetic
cacuguucauaauagccaagauu

SEQ ID NO: 671575 - RNA, 24 nt, Artificial Sequence
  Synthetic
gcacuguucauaauagccaagauu

SEQ ID NO: 671576 - RNA, 18 nt, Artificial Sequence
  Synthetic
uugccuucugccaagauu

SEQ ID NO: 671577 - RNA, 19 nt, Artificial Sequence
  Synthetic
cuugccuucugccaagauu

SEQ ID NO: 671578 - RNA, 20 nt, Artificial Sequence
  Synthetic
ccuugccuucugccaagauu

SEQ ID NO: 671579 - RNA, 21 nt, Artificial Sequence
  Synthetic
uccuugccuucugccaagauu

SEQ ID NO: 671580 - RNA, 22 nt, Artificial Sequence
  Synthetic
cuccuugccuucugccaagauu

SEQ ID NO: 671581 - RNA, 23 nt, Artificial Sequence
  Synthetic
ccuccuugccuucugccaagauu

SEQ ID NO: 671582 - RNA, 24 nt, Artificial Sequence
  Synthetic
uccuccuugccuucugccaagauu

SEQ ID NO: 671583 - RNA, 18 nt, Artificial Sequence
  Synthetic
uaguaagccuccaagauu

SEQ ID NO: 671584 - RNA, 19 nt, Artificial Sequence
  Synthetic
guaguaagccuccaagauu

SEQ ID NO: 671585 - RNA, 20 nt, Artificial Sequence
  Synthetic
uguaguaagccuccaagauu

SEQ ID NO: 671586 - RNA, 21 nt, Artificial Sequence
  Synthetic
cuguaguaagccuccaagauu

SEQ ID NO: 671587 - RNA, 22 nt, Artificial Sequence
  Synthetic
gcuguaguaagccuccaagauu

SEQ ID NO: 671588 - RNA, 23 nt, Artificial Sequence
  Synthetic
ugcuguaguaagccuccaagauu

SEQ ID NO: 671589 - RNA, 24 nt, Artificial Sequence
  Synthetic
cugcuguaguaagccuccaagauu

SEQ ID NO: 671590 - RNA, 18 nt, Artificial Sequence
  Synthetic
aauaaaugcagcaagauu

SEQ ID NO: 671591 - RNA, 19 nt, Artificial Sequence
  Synthetic
uaauaaaugcagcaagauu

SEQ ID NO: 671592 - RNA, 20 nt, Artificial Sequence
  Synthetic
cuaauaaaugcagcaagauu

SEQ ID NO: 671593 - RNA, 21 nt, Artificial Sequence
  Synthetic
gcuaauaaaugcagcaagauu

SEQ ID NO: 671594 - RNA, 22 nt, Artificial Sequence
  Synthetic
agcuaauaaaugcagcaagauu

SEQ ID NO: 671595 - RNA, 23 nt, Artificial Sequence
  Synthetic
cagcuaauaaaugcagcaagauu

SEQ ID NO: 671596 - RNA, 24 nt, Artificial Sequence
  Synthetic
acagcuaauaaaugcagcaagauu

SEQ ID NO: 671597 - RNA, 18 nt, Artificial Sequence
  Synthetic
uucacaacaggcaagauu

SEQ ID NO: 671598 - RNA, 19 nt, Artificial Sequence
  Synthetic
guucacaacaggcaagauu

SEQ ID NO: 671599 - RNA, 20 nt, Artificial Sequence
  Synthetic
uguucacaacaggcaagauu

SEQ ID NO: 671600 - RNA, 21 nt, Artificial Sequence
  Synthetic
cuguucacaacaggcaagauu

SEQ ID NO: 671601 - RNA, 22 nt, Artificial Sequence
  Synthetic
acuguucacaacaggcaagauu

SEQ ID NO: 671602 - RNA, 23 nt, Artificial Sequence
  Synthetic
cacuguucacaacaggcaagauu

SEQ ID NO: 671603 - RNA, 24 nt, Artificial Sequence
  Synthetic
gcacuguucacaacaggcaagauu

SEQ ID NO: 671604 - RNA, 18 nt, Artificial Sequence
  Synthetic
agaauucagugcaagauu

SEQ ID NO: 671605 - RNA, 19 nt, Artificial Sequence
  Synthetic
aagaauucagugcaagauu

SEQ ID NO: 671606 - RNA, 20 nt, Artificial Sequence
  Synthetic
uaagaauucagugcaagauu

SEQ ID NO: 671607 - RNA, 21 nt, Artificial Sequence
  Synthetic
guaagaauucagugcaagauu

SEQ ID NO: 671608 - RNA, 22 nt, Artificial Sequence
  Synthetic
uguaagaauucagugcaagauu

SEQ ID NO: 671609 - RNA, 23 nt, Artificial Sequence
  Synthetic
uuguaagaauucagugcaagauu

SEQ ID NO: 671610 - RNA, 24 nt, Artificial Sequence
  Synthetic
auuguaagaauucagugcaagauu

SEQ ID NO: 671611 - RNA, 18 nt, Artificial Sequence
  Synthetic
uacuuucaaaagaagauu

SEQ ID NO: 671612 - RNA, 19 nt, Artificial Sequence
  Synthetic
cuacuuucaaaagaagauu

SEQ ID NO: 671613 - RNA, 20 nt, Artificial Sequence
  Synthetic
acuacuuucaaaagaagauu

SEQ ID NO: 671614 - RNA, 21 nt, Artificial Sequence
  Synthetic
uacuacuuucaaaagaagauu

SEQ ID NO: 671615 - RNA, 22 nt, Artificial Sequence
  Synthetic
cuacuacuuucaaaagaagauu

SEQ ID NO: 671616 - RNA, 23 nt, Artificial Sequence
  Synthetic
ucuacuacuuucaaaagaagauu

SEQ ID NO: 671617 - RNA, 24 nt, Artificial Sequence
  Synthetic
cucuacuacuuucaaaagaagauu

SEQ ID NO: 671618 - RNA, 18 nt, Artificial Sequence
  Synthetic
aagaagcacaagaagauu

SEQ ID NO: 671619 - RNA, 19 nt, Artificial Sequence
  Synthetic
uaagaagcacaagaagauu

SEQ ID NO: 671620 - RNA, 20 nt, Artificial Sequence
  Synthetic
auaagaagcacaagaagauu

SEQ ID NO: 671621 - RNA, 21 nt, Artificial Sequence
  Synthetic
aauaagaagcacaagaagauu

SEQ ID NO: 671622 - RNA, 22 nt, Artificial Sequence
  Synthetic
aaauaagaagcacaagaagauu

SEQ ID NO: 671623 - RNA, 23 nt, Artificial Sequence
  Synthetic
gaaauaagaagcacaagaagauu

SEQ ID NO: 671624 - RNA, 24 nt, Artificial Sequence
  Synthetic
agaaauaagaagcacaagaagauu

SEQ ID NO: 671625 - RNA, 18 nt, Artificial Sequence
  Synthetic
ggaagccuuaagaagauu

SEQ ID NO: 671626 - RNA, 19 nt, Artificial Sequence
  Synthetic
aggaagccuuaagaagauu

SEQ ID NO: 671627 - RNA, 20 nt, Artificial Sequence
  Synthetic
gaggaagccuuaagaagauu

SEQ ID NO: 671628 - RNA, 21 nt, Artificial Sequence
  Synthetic
ggaggaagccuuaagaagauu

SEQ ID NO: 671629 - RNA, 22 nt, Artificial Sequence
  Synthetic
uggaggaagccuuaagaagauu

SEQ ID NO: 671630 - RNA, 23 nt, Artificial Sequence
  Synthetic
cuggaggaagccuuaagaagauu

SEQ ID NO: 671631 - RNA, 24 nt, Artificial Sequence
  Synthetic
ccuggaggaagccuuaagaagauu

SEQ ID NO: 671632 - RNA, 18 nt, Artificial Sequence
  Synthetic
ccagauauggagaagauu

SEQ ID NO: 671633 - RNA, 19 nt, Artificial Sequence
  Synthetic
accagauauggagaagauu

SEQ ID NO: 671634 - RNA, 20 nt, Artificial Sequence
  Synthetic
caccagauauggagaagauu

SEQ ID NO: 671635 - RNA, 21 nt, Artificial Sequence
  Synthetic
acaccagauauggagaagauu

SEQ ID NO: 671636 - RNA, 22 nt, Artificial Sequence
  Synthetic
gacaccagauauggagaagauu

SEQ ID NO: 671637 - RNA, 23 nt, Artificial Sequence
  Synthetic
agacaccagauauggagaagauu

SEQ ID NO: 671638 - RNA, 24 nt, Artificial Sequence
  Synthetic
aagacaccagauauggagaagauu

SEQ ID NO: 671639 - RNA, 18 nt, Artificial Sequence
  Synthetic
ccauuccagaggaagauu

SEQ ID NO: 671640 - RNA, 19 nt, Artificial Sequence
  Synthetic
uccauuccagaggaagauu

SEQ ID NO: 671641 - RNA, 20 nt, Artificial Sequence
  Synthetic
auccauuccagaggaagauu

SEQ ID NO: 671642 - RNA, 21 nt, Artificial Sequence
  Synthetic
cauccauuccagaggaagauu

SEQ ID NO: 671643 - RNA, 22 nt, Artificial Sequence
  Synthetic
gcauccauuccagaggaagauu

SEQ ID NO: 671644 - RNA, 23 nt, Artificial Sequence
  Synthetic
agcauccauuccagaggaagauu

SEQ ID NO: 671645 - RNA, 24 nt, Artificial Sequence
  Synthetic
cagcauccauuccagaggaagauu

SEQ ID NO: 671646 - RNA, 18 nt, Artificial Sequence
  Synthetic
uucugcaucuggaagauu

SEQ ID NO: 671647 - RNA, 19 nt, Artificial Sequence
  Synthetic
uuucugcaucuggaagauu

SEQ ID NO: 671648 - RNA, 20 nt, Artificial Sequence
  Synthetic
guuucugcaucuggaagauu

SEQ ID NO: 671649 - RNA, 21 nt, Artificial Sequence
  Synthetic
aguuucugcaucuggaagauu

SEQ ID NO: 671650 - RNA, 22 nt, Artificial Sequence
  Synthetic
aaguuucugcaucuggaagauu

SEQ ID NO: 671651 - RNA, 23 nt, Artificial Sequence
  Synthetic
aaaguuucugcaucuggaagauu

SEQ ID NO: 671652 - RNA, 24 nt, Artificial Sequence
  Synthetic
gaaaguuucugcaucuggaagauu

SEQ ID NO: 671653 - RNA, 18 nt, Artificial Sequence
  Synthetic
acauuucaauauaagauu

SEQ ID NO: 671654 - RNA, 19 nt, Artificial Sequence
  Synthetic
cacauuucaauauaagauu

SEQ ID NO: 671655 - RNA, 20 nt, Artificial Sequence
  Synthetic
ucacauuucaauauaagauu

SEQ ID NO: 671656 - RNA, 21 nt, Artificial Sequence
  Synthetic
aucacauuucaauauaagauu

SEQ ID NO: 671657 - RNA, 22 nt, Artificial Sequence
  Synthetic
aaucacauuucaauauaagauu

SEQ ID NO: 671658 - RNA, 23 nt, Artificial Sequence
  Synthetic
aaaucacauuucaauauaagauu

SEQ ID NO: 671659 - RNA, 24 nt, Artificial Sequence
  Synthetic
gaaaucacauuucaauauaagauu

SEQ ID NO: 671660 - RNA, 18 nt, Artificial Sequence
  Synthetic
gcuaaacaaacuaagauu

SEQ ID NO: 671661 - RNA, 19 nt, Artificial Sequence
  Synthetic
agcuaaacaaacuaagauu

SEQ ID NO: 671662 - RNA, 20 nt, Artificial Sequence
  Synthetic
aagcuaaacaaacuaagauu

SEQ ID NO: 671663 - RNA, 21 nt, Artificial Sequence
  Synthetic
aaagcuaaacaaacuaagauu

SEQ ID NO: 671664 - RNA, 22 nt, Artificial Sequence
  Synthetic
aaaagcuaaacaaacuaagauu

SEQ ID NO: 671665 - RNA, 23 nt, Artificial Sequence
  Synthetic
aaaaagcuaaacaaacuaagauu

SEQ ID NO: 671666 - RNA, 24 nt, Artificial Sequence
  Synthetic
aaaaaagcuaaacaaacuaagauu

SEQ ID NO: 671667 - RNA, 18 nt, Artificial Sequence
  Synthetic
aaaccagcuucuaagauu

SEQ ID NO: 671668 - RNA, 19 nt, Artificial Sequence
  Synthetic
aaaaccagcuucuaagauu

SEQ ID NO: 671669 - RNA, 20 nt, Artificial Sequence
  Synthetic
gaaaaccagcuucuaagauu

SEQ ID NO: 671670 - RNA, 21 nt, Artificial Sequence
  Synthetic
agaaaaccagcuucuaagauu

SEQ ID NO: 671671 - RNA, 22 nt, Artificial Sequence
  Synthetic
aagaaaaccagcuucuaagauu

SEQ ID NO: 671672 - RNA, 23 nt, Artificial Sequence
  Synthetic
aaagaaaaccagcuucuaagauu

SEQ ID NO: 671673 - RNA, 24 nt, Artificial Sequence
  Synthetic
aaaagaaaaccagcuucuaagauu

SEQ ID NO: 671674 - RNA, 18 nt, Artificial Sequence
  Synthetic
gaaaagauuaguaagauu

SEQ ID NO: 671675 - RNA, 19 nt, Artificial Sequence
  Synthetic
agaaaagauuaguaagauu

SEQ ID NO: 671676 - RNA, 20 nt, Artificial Sequence
  Synthetic
aagaaaagauuaguaagauu

SEQ ID NO: 671677 - RNA, 21 nt, Artificial Sequence
  Synthetic
uaagaaaagauuaguaagauu

SEQ ID NO: 671678 - RNA, 22 nt, Artificial Sequence
  Synthetic
auaagaaaagauuaguaagauu

SEQ ID NO: 671679 - RNA, 23 nt, Artificial Sequence
  Synthetic
gauaagaaaagauuaguaagauu

SEQ ID NO: 671680 - RNA, 24 nt, Artificial Sequence
  Synthetic
agauaagaaaagauuaguaagauu

SEQ ID NO: 671681 - RNA, 18 nt, Artificial Sequence
  Synthetic
uaagggauguguaagauu

SEQ ID NO: 671682 - RNA, 19 nt, Artificial Sequence
  Synthetic
uuaagggauguguaagauu

SEQ ID NO: 671683 - RNA, 20 nt, Artificial Sequence
  Synthetic
cuuaagggauguguaagauu

SEQ ID NO: 671684 - RNA, 21 nt, Artificial Sequence
  Synthetic
ucuuaagggauguguaagauu

SEQ ID NO: 671685 - RNA, 22 nt, Artificial Sequence
  Synthetic
gucuuaagggauguguaagauu

SEQ ID NO: 671686 - RNA, 23 nt, Artificial Sequence
  Synthetic
agucuuaagggauguguaagauu

SEQ ID NO: 671687 - RNA, 24 nt, Artificial Sequence
  Synthetic
gagucuuaagggauguguaagauu

SEQ ID NO: 671688 - RNA, 18 nt, Artificial Sequence
  Synthetic
cuggaacaaauuaagauu

SEQ ID NO: 671689 - RNA, 19 nt, Artificial Sequence
  Synthetic
ucuggaacaaauuaagauu

SEQ ID NO: 671690 - RNA, 20 nt, Artificial Sequence
  Synthetic
gucuggaacaaauuaagauu

SEQ ID NO: 671691 - RNA, 21 nt, Artificial Sequence
  Synthetic
ugucuggaacaaauuaagauu

SEQ ID NO: 671692 - RNA, 22 nt, Artificial Sequence
  Synthetic
uugucuggaacaaauuaagauu

SEQ ID NO: 671693 - RNA, 23 nt, Artificial Sequence
  Synthetic
cuugucuggaacaaauuaagauu

SEQ ID NO: 671694 - RNA, 24 nt, Artificial Sequence
  Synthetic
gcuugucuggaacaaauuaagauu

SEQ ID NO: 671695 - RNA, 18 nt, Artificial Sequence
  Synthetic
acugaacuucuuaagauu

SEQ ID NO: 671696 - RNA, 19 nt, Artificial Sequence
  Synthetic
aacugaacuucuuaagauu

SEQ ID NO: 671697 - RNA, 20 nt, Artificial Sequence
  Synthetic
aaacugaacuucuuaagauu

SEQ ID NO: 671698 - RNA, 21 nt, Artificial Sequence
  Synthetic
gaaacugaacuucuuaagauu

SEQ ID NO: 671699 - RNA, 22 nt, Artificial Sequence
  Synthetic
cgaaacugaacuucuuaagauu

SEQ ID NO: 671700 - RNA, 23 nt, Artificial Sequence
  Synthetic
gcgaaacugaacuucuuaagauu

SEQ ID NO: 671701 - RNA, 24 nt, Artificial Sequence
  Synthetic
ugcgaaacugaacuucuuaagauu

SEQ ID NO: 671702 - RNA, 18 nt, Artificial Sequence
  Synthetic
agccuaaacuuuaagauu

SEQ ID NO: 671703 - RNA, 19 nt, Artificial Sequence
  Synthetic
aagccuaaacuuuaagauu

SEQ ID NO: 671704 - RNA, 20 nt, Artificial Sequence
  Synthetic
uaagccuaaacuuuaagauu

SEQ ID NO: 671705 - RNA, 21 nt, Artificial Sequence
  Synthetic
uuaagccuaaacuuuaagauu

SEQ ID NO: 671706 - RNA, 22 nt, Artificial Sequence
  Synthetic
auuaagccuaaacuuuaagauu

SEQ ID NO: 671707 - RNA, 23 nt, Artificial Sequence
  Synthetic
cauuaagccuaaacuuuaagauu

SEQ ID NO: 671708 - RNA, 24 nt, Artificial Sequence
  Synthetic
ucauuaagccuaaacuuuaagauu

SEQ ID NO: 671709 - RNA, 18 nt, Artificial Sequence
  Synthetic
caaaacaguuuuaagauu

SEQ ID NO: 671710 - RNA, 19 nt, Artificial Sequence
  Synthetic
ucaaaacaguuuuaagauu

SEQ ID NO: 671711 - RNA, 20 nt, Artificial Sequence
  Synthetic
gucaaaacaguuuuaagauu

SEQ ID NO: 671712 - RNA, 21 nt, Artificial Sequence
  Synthetic
agucaaaacaguuuuaagauu

SEQ ID NO: 671713 - RNA, 22 nt, Artificial Sequence
  Synthetic
aagucaaaacaguuuuaagauu

SEQ ID NO: 671714 - RNA, 23 nt, Artificial Sequence
  Synthetic
aaagucaaaacaguuuuaagauu

SEQ ID NO: 671715 - RNA, 24 nt, Artificial Sequence
  Synthetic
uaaagucaaaacaguuuuaagauu

SEQ ID NO: 671716 - RNA, 18 nt, Artificial Sequence
  Synthetic
agagacaacccacagauu

SEQ ID NO: 671717 - RNA, 19 nt, Artificial Sequence
  Synthetic
aagagacaacccacagauu

SEQ ID NO: 671718 - RNA, 20 nt, Artificial Sequence
  Synthetic
aaagagacaacccacagauu

SEQ ID NO: 671719 - RNA, 21 nt, Artificial Sequence
  Synthetic
uaaagagacaacccacagauu

SEQ ID NO: 671720 - RNA, 22 nt, Artificial Sequence
  Synthetic
auaaagagacaacccacagauu

SEQ ID NO: 671721 - RNA, 23 nt, Artificial Sequence
  Synthetic
aauaaagagacaacccacagauu

SEQ ID NO: 671722 - RNA, 24 nt, Artificial Sequence
  Synthetic
gaauaaagagacaacccacagauu

SEQ ID NO: 671723 - RNA, 18 nt, Artificial Sequence
  Synthetic
acaggcaaacuacagauu

SEQ ID NO: 671724 - RNA, 19 nt, Artificial Sequence
  Synthetic
aacaggcaaacuacagauu

SEQ ID NO: 671725 - RNA, 20 nt, Artificial Sequence
  Synthetic
gaacaggcaaacuacagauu

SEQ ID NO: 671726 - RNA, 21 nt, Artificial Sequence
  Synthetic
ugaacaggcaaacuacagauu

SEQ ID NO: 671727 - RNA, 22 nt, Artificial Sequence
  Synthetic
gugaacaggcaaacuacagauu

SEQ ID NO: 671728 - RNA, 23 nt, Artificial Sequence
  Synthetic
agugaacaggcaaacuacagauu

SEQ ID NO: 671729 - RNA, 24 nt, Artificial Sequence
  Synthetic
gagugaacaggcaaacuacagauu

SEQ ID NO: 671730 - RNA, 18 nt, Artificial Sequence
  Synthetic
cuugaaugucaccagauu

SEQ ID NO: 671731 - RNA, 19 nt, Artificial Sequence
  Synthetic
ccuugaaugucaccagauu

SEQ ID NO: 671732 - RNA, 20 nt, Artificial Sequence
  Synthetic
accuugaaugucaccagauu

SEQ ID NO: 671733 - RNA, 21 nt, Artificial Sequence
  Synthetic
aaccuugaaugucaccagauu

SEQ ID NO: 671734 - RNA, 22 nt, Artificial Sequence
  Synthetic
aaaccuugaaugucaccagauu

SEQ ID NO: 671735 - RNA, 23 nt, Artificial Sequence
  Synthetic
gaaaccuugaaugucaccagauu

SEQ ID NO: 671736 - RNA, 24 nt, Artificial Sequence
  Synthetic
ugaaaccuugaaugucaccagauu

SEQ ID NO: 671737 - RNA, 18 nt, Artificial Sequence
  Synthetic
ugccuccuucaccagauu

SEQ ID NO: 671738 - RNA, 19 nt, Artificial Sequence
  Synthetic
cugccuccuucaccagauu

SEQ ID NO: 671739 - RNA, 20 nt, Artificial Sequence
  Synthetic
ucugccuccuucaccagauu

SEQ ID NO: 671740 - RNA, 21 nt, Artificial Sequence
  Synthetic
gucugccuccuucaccagauu

SEQ ID NO: 671741 - RNA, 22 nt, Artificial Sequence
  Synthetic
ugucugccuccuucaccagauu

SEQ ID NO: 671742 - RNA, 23 nt, Artificial Sequence
  Synthetic
augucugccuccuucaccagauu

SEQ ID NO: 671743 - RNA, 24 nt, Artificial Sequence
  Synthetic
caugucugccuccuucaccagauu

SEQ ID NO: 671744 - RNA, 18 nt, Artificial Sequence
  Synthetic
uauuagcaucuccagauu

SEQ ID NO: 671745 - RNA, 19 nt, Artificial Sequence
  Synthetic
uuauuagcaucuccagauu

SEQ ID NO: 671746 - RNA, 20 nt, Artificial Sequence
  Synthetic
uuuauuagcaucuccagauu

SEQ ID NO: 671747 - RNA, 21 nt, Artificial Sequence
  Synthetic
cuuuauuagcaucuccagauu

SEQ ID NO: 671748 - RNA, 22 nt, Artificial Sequence
  Synthetic
gcuuuauuagcaucuccagauu

SEQ ID NO: 671749 - RNA, 23 nt, Artificial Sequence
  Synthetic
ggcuuuauuagcaucuccagauu

SEQ ID NO: 671750 - RNA, 24 nt, Artificial Sequence
  Synthetic
uggcuuuauuagcaucuccagauu

SEQ ID NO: 671751 - RNA, 18 nt, Artificial Sequence
  Synthetic
aggaacuuucuccagauu

SEQ ID NO: 671752 - RNA, 19 nt, Artificial Sequence
  Synthetic
caggaacuuucuccagauu

SEQ ID NO: 671753 - RNA, 20 nt, Artificial Sequence
  Synthetic
ucaggaacuuucuccagauu

SEQ ID NO: 671754 - RNA, 21 nt, Artificial Sequence
  Synthetic
cucaggaacuuucuccagauu

SEQ ID NO: 671755 - RNA, 22 nt, Artificial Sequence
  Synthetic
ccucaggaacuuucuccagauu

SEQ ID NO: 671756 - RNA, 23 nt, Artificial Sequence
  Synthetic
gccucaggaacuuucuccagauu

SEQ ID NO: 671757 - RNA, 24 nt, Artificial Sequence
  Synthetic
agccucaggaacuuucuccagauu

SEQ ID NO: 671758 - RNA, 18 nt, Artificial Sequence
  Synthetic
ugcaauacauuccagauu

SEQ ID NO: 671759 - RNA, 19 nt, Artificial Sequence
  Synthetic
cugcaauacauuccagauu

SEQ ID NO: 671760 - RNA, 20 nt, Artificial Sequence
  Synthetic
ucugcaauacauuccagauu

SEQ ID NO: 671761 - RNA, 21 nt, Artificial Sequence
  Synthetic
aucugcaauacauuccagauu

SEQ ID NO: 671762 - RNA, 22 nt, Artificial Sequence
  Synthetic
caucugcaauacauuccagauu

SEQ ID NO: 671763 - RNA, 23 nt, Artificial Sequence
  Synthetic
acaucugcaauacauuccagauu

SEQ ID NO: 671764 - RNA, 24 nt, Artificial Sequence
  Synthetic
gacaucugcaauacauuccagauu

SEQ ID NO: 671765 - RNA, 18 nt, Artificial Sequence
  Synthetic
ggcaguugaaaucagauu

SEQ ID NO: 671766 - RNA, 19 nt, Artificial Sequence
  Synthetic
aggcaguugaaaucagauu

SEQ ID NO: 671767 - RNA, 20 nt, Artificial Sequence
  Synthetic
gaggcaguugaaaucagauu

SEQ ID NO: 671768 - RNA, 21 nt, Artificial Sequence
  Synthetic
agaggcaguugaaaucagauu

SEQ ID NO: 671769 - RNA, 22 nt, Artificial Sequence
  Synthetic
cagaggcaguugaaaucagauu

SEQ ID NO: 671770 - RNA, 23 nt, Artificial Sequence
  Synthetic
ccagaggcaguugaaaucagauu

SEQ ID NO: 671771 - RNA, 24 nt, Artificial Sequence
  Synthetic
uccagaggcaguugaaaucagauu

SEQ ID NO: 671772 - RNA, 18 nt, Artificial Sequence
  Synthetic
gaaaggagaagucagauu

SEQ ID NO: 671773 - RNA, 19 nt, Artificial Sequence
  Synthetic
agaaaggagaagucagauu

SEQ ID NO: 671774 - RNA, 20 nt, Artificial Sequence
  Synthetic
uagaaaggagaagucagauu

SEQ ID NO: 671775 - RNA, 21 nt, Artificial Sequence
  Synthetic
uuagaaaggagaagucagauu

SEQ ID NO: 671776 - RNA, 22 nt, Artificial Sequence
  Synthetic
auuagaaaggagaagucagauu

SEQ ID NO: 671777 - RNA, 23 nt, Artificial Sequence
  Synthetic
gauuagaaaggagaagucagauu

SEQ ID NO: 671778 - RNA, 24 nt, Artificial Sequence
  Synthetic
ggauuagaaaggagaagucagauu

SEQ ID NO: 671779 - RNA, 18 nt, Artificial Sequence
  Synthetic
uugaauuacagucagauu

SEQ ID NO: 671780 - RNA, 19 nt, Artificial Sequence
  Synthetic
uuugaauuacagucagauu

SEQ ID NO: 671781 - RNA, 20 nt, Artificial Sequence
  Synthetic
cuuugaauuacagucagauu

SEQ ID NO: 671782 - RNA, 21 nt, Artificial Sequence
  Synthetic
ucuuugaauuacagucagauu

SEQ ID NO: 671783 - RNA, 22 nt, Artificial Sequence
  Synthetic
uucuuugaauuacagucagauu

SEQ ID NO: 671784 - RNA, 23 nt, Artificial Sequence
  Synthetic
uuucuuugaauuacagucagauu

SEQ ID NO: 671785 - RNA, 24 nt, Artificial Sequence
  Synthetic
guuucuuugaauuacagucagauu

SEQ ID NO: 671786 - RNA, 18 nt, Artificial Sequence
  Synthetic
uuaagaucaugucagauu

SEQ ID NO: 671787 - RNA, 19 nt, Artificial Sequence
  Synthetic
guuaagaucaugucagauu

SEQ ID NO: 671788 - RNA, 20 nt, Artificial Sequence
  Synthetic
uguuaagaucaugucagauu

SEQ ID NO: 671789 - RNA, 21 nt, Artificial Sequence
  Synthetic
auguuaagaucaugucagauu

SEQ ID NO: 671790 - RNA, 22 nt, Artificial Sequence
  Synthetic
aauguuaagaucaugucagauu

SEQ ID NO: 671791 - RNA, 23 nt, Artificial Sequence
  Synthetic
aaauguuaagaucaugucagauu

SEQ ID NO: 671792 - RNA, 24 nt, Artificial Sequence
  Synthetic
uaaauguuaagaucaugucagauu

SEQ ID NO: 671793 - RNA, 18 nt, Artificial Sequence
  Synthetic
caggccaacguucagauu

SEQ ID NO: 671794 - RNA, 19 nt, Artificial Sequence
  Synthetic
gcaggccaacguucagauu

SEQ ID NO: 671795 - RNA, 20 nt, Artificial Sequence
  Synthetic
ggcaggccaacguucagauu

SEQ ID NO: 671796 - RNA, 21 nt, Artificial Sequence
  Synthetic
aggcaggccaacguucagauu

SEQ ID NO: 671797 - RNA, 22 nt, Artificial Sequence
  Synthetic
aaggcaggccaacguucagauu

SEQ ID NO: 671798 - RNA, 23 nt, Artificial Sequence
  Synthetic
uaaggcaggccaacguucagauu

SEQ ID NO: 671799 - RNA, 24 nt, Artificial Sequence
  Synthetic
guaaggcaggccaacguucagauu

SEQ ID NO: 671800 - RNA, 18 nt, Artificial Sequence
  Synthetic
cucaaaacgucagagauu

SEQ ID NO: 671801 - RNA, 19 nt, Artificial Sequence
  Synthetic
gcucaaaacgucagagauu

SEQ ID NO: 671802 - RNA, 20 nt, Artificial Sequence
  Synthetic
ggcucaaaacgucagagauu

SEQ ID NO: 671803 - RNA, 21 nt, Artificial Sequence
  Synthetic
uggcucaaaacgucagagauu

SEQ ID NO: 671804 - RNA, 22 nt, Artificial Sequence
  Synthetic
uuggcucaaaacgucagagauu

SEQ ID NO: 671805 - RNA, 23 nt, Artificial Sequence
  Synthetic
uuuggcucaaaacgucagagauu

SEQ ID NO: 671806 - RNA, 24 nt, Artificial Sequence
  Synthetic
auuuggcucaaaacgucagagauu

SEQ ID NO: 671807 - RNA, 18 nt, Artificial Sequence
  Synthetic
gugacaagaggagagauu

SEQ ID NO: 671808 - RNA, 19 nt, Artificial Sequence
  Synthetic
ugugacaagaggagagauu

SEQ ID NO: 671809 - RNA, 20 nt, Artificial Sequence
  Synthetic
augugacaagaggagagauu

SEQ ID NO: 671810 - RNA, 21 nt, Artificial Sequence
  Synthetic
aaugugacaagaggagagauu

SEQ ID NO: 671811 - RNA, 22 nt, Artificial Sequence
  Synthetic
aaaugugacaagaggagagauu

SEQ ID NO: 671812 - RNA, 23 nt, Artificial Sequence
  Synthetic
caaaugugacaagaggagagauu

SEQ ID NO: 671813 - RNA, 24 nt, Artificial Sequence
  Synthetic
acaaaugugacaagaggagagauu

SEQ ID NO: 671814 - RNA, 18 nt, Artificial Sequence
  Synthetic
caaauagguggagagauu

SEQ ID NO: 671815 - RNA, 19 nt, Artificial Sequence
  Synthetic
acaaauagguggagagauu

SEQ ID NO: 671816 - RNA, 20 nt, Artificial Sequence
  Synthetic
aacaaauagguggagagauu

SEQ ID NO: 671817 - RNA, 21 nt, Artificial Sequence
  Synthetic
gaacaaauagguggagagauu

SEQ ID NO: 671818 - RNA, 22 nt, Artificial Sequence
  Synthetic
ggaacaaauagguggagagauu

SEQ ID NO: 671819 - RNA, 23 nt, Artificial Sequence
  Synthetic
aggaacaaauagguggagagauu

SEQ ID NO: 671820 - RNA, 24 nt, Artificial Sequence
  Synthetic
aaggaacaaauagguggagagauu

SEQ ID NO: 671821 - RNA, 18 nt, Artificial Sequence
  Synthetic
agaaaggauugagagauu

SEQ ID NO: 671822 - RNA, 19 nt, Artificial Sequence
  Synthetic
uagaaaggauugagagauu

SEQ ID NO: 671823 - RNA, 20 nt, Artificial Sequence
  Synthetic
uuagaaaggauugagagauu

SEQ ID NO: 671824 - RNA, 21 nt, Artificial Sequence
  Synthetic
guuagaaaggauugagagauu

SEQ ID NO: 671825 - RNA, 22 nt, Artificial Sequence
  Synthetic
uguuagaaaggauugagagauu

SEQ ID NO: 671826 - RNA, 23 nt, Artificial Sequence
  Synthetic
auguuagaaaggauugagagauu

SEQ ID NO: 671827 - RNA, 24 nt, Artificial Sequence
  Synthetic
gauguuagaaaggauugagagauu

SEQ ID NO: 671828 - RNA, 18 nt, Artificial Sequence
  Synthetic
uagguaaaacacgagauu

SEQ ID NO: 671829 - RNA, 19 nt, Artificial Sequence
  Synthetic
guagguaaaacacgagauu

SEQ ID NO: 671830 - RNA, 20 nt, Artificial Sequence
  Synthetic
cguagguaaaacacgagauu

SEQ ID NO: 671831 - RNA, 21 nt, Artificial Sequence
  Synthetic
acguagguaaaacacgagauu

SEQ ID NO: 671832 - RNA, 22 nt, Artificial Sequence
  Synthetic
gacguagguaaaacacgagauu

SEQ ID NO: 671833 - RNA, 23 nt, Artificial Sequence
  Synthetic
agacguagguaaaacacgagauu

SEQ ID NO: 671834 - RNA, 24 nt, Artificial Sequence
  Synthetic
gagacguagguaaaacacgagauu

SEQ ID NO: 671835 - RNA, 18 nt, Artificial Sequence
  Synthetic
gcaaguaagugggagauu

SEQ ID NO: 671836 - RNA, 19 nt, Artificial Sequence
  Synthetic
ggcaaguaagugggagauu

SEQ ID NO: 671837 - RNA, 20 nt, Artificial Sequence
  Synthetic
aggcaaguaagugggagauu

SEQ ID NO: 671838 - RNA, 21 nt, Artificial Sequence
  Synthetic
gaggcaaguaagugggagauu

SEQ ID NO: 671839 - RNA, 22 nt, Artificial Sequence
  Synthetic
ugaggcaaguaagugggagauu

SEQ ID NO: 671840 - RNA, 23 nt, Artificial Sequence
  Synthetic
gugaggcaaguaagugggagauu

SEQ ID NO: 671841 - RNA, 24 nt, Artificial Sequence
  Synthetic
agugaggcaaguaagugggagauu

SEQ ID NO: 671842 - RNA, 18 nt, Artificial Sequence
  Synthetic
gggaccagcauggagauu

SEQ ID NO: 671843 - RNA, 19 nt, Artificial Sequence
  Synthetic
ugggaccagcauggagauu

SEQ ID NO: 671844 - RNA, 20 nt, Artificial Sequence
  Synthetic
gugggaccagcauggagauu

SEQ ID NO: 671845 - RNA, 21 nt, Artificial Sequence
  Synthetic
ugugggaccagcauggagauu

SEQ ID NO: 671846 - RNA, 22 nt, Artificial Sequence
  Synthetic
uugugggaccagcauggagauu

SEQ ID NO: 671847 - RNA, 23 nt, Artificial Sequence
  Synthetic
uuugugggaccagcauggagauu

SEQ ID NO: 671848 - RNA, 24 nt, Artificial Sequence
  Synthetic
auuugugggaccagcauggagauu

SEQ ID NO: 671849 - RNA, 18 nt, Artificial Sequence
  Synthetic
ugaaagggacaugagauu

SEQ ID NO: 671850 - RNA, 19 nt, Artificial Sequence
  Synthetic
gugaaagggacaugagauu

SEQ ID NO: 671851 - RNA, 20 nt, Artificial Sequence
  Synthetic
ugugaaagggacaugagauu

SEQ ID NO: 671852 - RNA, 21 nt, Artificial Sequence
  Synthetic
augugaaagggacaugagauu

SEQ ID NO: 671853 - RNA, 22 nt, Artificial Sequence
  Synthetic
aaugugaaagggacaugagauu

SEQ ID NO: 671854 - RNA, 23 nt, Artificial Sequence
  Synthetic
aaaugugaaagggacaugagauu

SEQ ID NO: 671855 - RNA, 24 nt, Artificial Sequence
  Synthetic
gaaaugugaaagggacaugagauu

SEQ ID NO: 671856 - RNA, 18 nt, Artificial Sequence
  Synthetic
guaaauuaggaugagauu

SEQ ID NO: 671857 - RNA, 19 nt, Artificial Sequence
  Synthetic
aguaaauuaggaugagauu

SEQ ID NO: 671858 - RNA, 20 nt, Artificial Sequence
  Synthetic
uaguaaauuaggaugagauu

SEQ ID NO: 671859 - RNA, 21 nt, Artificial Sequence
  Synthetic
auaguaaauuaggaugagauu

SEQ ID NO: 671860 - RNA, 22 nt, Artificial Sequence
  Synthetic
cauaguaaauuaggaugagauu

SEQ ID NO: 671861 - RNA, 23 nt, Artificial Sequence
  Synthetic
ccauaguaaauuaggaugagauu

SEQ ID NO: 671862 - RNA, 24 nt, Artificial Sequence
  Synthetic
accauaguaaauuaggaugagauu

SEQ ID NO: 671863 - RNA, 18 nt, Artificial Sequence
  Synthetic
gggcuuacuacugagauu

SEQ ID NO: 671864 - RNA, 19 nt, Artificial Sequence
  Synthetic
agggcuuacuacugagauu

SEQ ID NO: 671865 - RNA, 20 nt, Artificial Sequence
  Synthetic
uagggcuuacuacugagauu

SEQ ID NO: 671866 - RNA, 21 nt, Artificial Sequence
  Synthetic
auagggcuuacuacugagauu

SEQ ID NO: 671867 - RNA, 22 nt, Artificial Sequence
  Synthetic
aauagggcuuacuacugagauu

SEQ ID NO: 671868 - RNA, 23 nt, Artificial Sequence
  Synthetic
aaauagggcuuacuacugagauu

SEQ ID NO: 671869 - RNA, 24 nt, Artificial Sequence
  Synthetic
aaaauagggcuuacuacugagauu

SEQ ID NO: 671870 - RNA, 18 nt, Artificial Sequence
  Synthetic
cacaaaacagcugagauu

SEQ ID NO: 671871 - RNA, 19 nt, Artificial Sequence
  Synthetic
gcacaaaacagcugagauu

SEQ ID NO: 671872 - RNA, 20 nt, Artificial Sequence
  Synthetic
ggcacaaaacagcugagauu

SEQ ID NO: 671873 - RNA, 21 nt, Artificial Sequence
  Synthetic
cggcacaaaacagcugagauu

SEQ ID NO: 671874 - RNA, 22 nt, Artificial Sequence
  Synthetic
acggcacaaaacagcugagauu

SEQ ID NO: 671875 - RNA, 23 nt, Artificial Sequence
  Synthetic
aacggcacaaaacagcugagauu

SEQ ID NO: 671876 - RNA, 24 nt, Artificial Sequence
  Synthetic
uaacggcacaaaacagcugagauu

SEQ ID NO: 671877 - RNA, 18 nt, Artificial Sequence
  Synthetic
uacauucuaucugagauu

SEQ ID NO: 671878 - RNA, 19 nt, Artificial Sequence
  Synthetic
guacauucuaucugagauu

SEQ ID NO: 671879 - RNA, 20 nt, Artificial Sequence
  Synthetic
uguacauucuaucugagauu

SEQ ID NO: 671880 - RNA, 21 nt, Artificial Sequence
  Synthetic
auguacauucuaucugagauu

SEQ ID NO: 671881 - RNA, 22 nt, Artificial Sequence
  Synthetic
cauguacauucuaucugagauu

SEQ ID NO: 671882 - RNA, 23 nt, Artificial Sequence
  Synthetic
acauguacauucuaucugagauu

SEQ ID NO: 671883 - RNA, 24 nt, Artificial Sequence
  Synthetic
aacauguacauucuaucugagauu

SEQ ID NO: 671884 - RNA, 18 nt, Artificial Sequence
  Synthetic
ucuuccacaagugagauu

SEQ ID NO: 671885 - RNA, 19 nt, Artificial Sequence
  Synthetic
gucuuccacaagugagauu

SEQ ID NO: 671886 - RNA, 20 nt, Artificial Sequence
  Synthetic
agucuuccacaagugagauu

SEQ ID NO: 671887 - RNA, 21 nt, Artificial Sequence
  Synthetic
aagucuuccacaagugagauu

SEQ ID NO: 671888 - RNA, 22 nt, Artificial Sequence
  Synthetic
aaagucuuccacaagugagauu

SEQ ID NO: 671889 - RNA, 23 nt, Artificial Sequence
  Synthetic
caaagucuuccacaagugagauu

SEQ ID NO: 671890 - RNA, 24 nt, Artificial Sequence
  Synthetic
ucaaagucuuccacaagugagauu

SEQ ID NO: 671891 - RNA, 18 nt, Artificial Sequence
  Synthetic
ggaaaaugaagugagauu

SEQ ID NO: 671892 - RNA, 19 nt, Artificial Sequence
  Synthetic
gggaaaaugaagugagauu

SEQ ID NO: 671893 - RNA, 20 nt, Artificial Sequence
  Synthetic
agggaaaaugaagugagauu

SEQ ID NO: 671894 - RNA, 21 nt, Artificial Sequence
  Synthetic
aagggaaaaugaagugagauu

SEQ ID NO: 671895 - RNA, 22 nt, Artificial Sequence
  Synthetic
uaagggaaaaugaagugagauu

SEQ ID NO: 671896 - RNA, 23 nt, Artificial Sequence
  Synthetic
guaagggaaaaugaagugagauu

SEQ ID NO: 671897 - RNA, 24 nt, Artificial Sequence
  Synthetic
gguaagggaaaaugaagugagauu

SEQ ID NO: 671898 - RNA, 18 nt, Artificial Sequence
  Synthetic
ccuuuucccagugagauu

SEQ ID NO: 671899 - RNA, 19 nt, Artificial Sequence
  Synthetic
accuuuucccagugagauu

SEQ ID NO: 671900 - RNA, 20 nt, Artificial Sequence
  Synthetic
uaccuuuucccagugagauu

SEQ ID NO: 671901 - RNA, 21 nt, Artificial Sequence
  Synthetic
guaccuuuucccagugagauu

SEQ ID NO: 671902 - RNA, 22 nt, Artificial Sequence
  Synthetic
aguaccuuuucccagugagauu

SEQ ID NO: 671903 - RNA, 23 nt, Artificial Sequence
  Synthetic
aaguaccuuuucccagugagauu

SEQ ID NO: 671904 - RNA, 24 nt, Artificial Sequence
  Synthetic
gaaguaccuuuucccagugagauu

SEQ ID NO: 671905 - RNA, 18 nt, Artificial Sequence
  Synthetic
guuauccugagugagauu

SEQ ID NO: 671906 - RNA, 19 nt, Artificial Sequence
  Synthetic
uguuauccugagugagauu

SEQ ID NO: 671907 - RNA, 20 nt, Artificial Sequence
  Synthetic
cuguuauccugagugagauu

SEQ ID NO: 671908 - RNA, 21 nt, Artificial Sequence
  Synthetic
gcuguuauccugagugagauu

SEQ ID NO: 671909 - RNA, 22 nt, Artificial Sequence
  Synthetic
ggcuguuauccugagugagauu

SEQ ID NO: 671910 - RNA, 23 nt, Artificial Sequence
  Synthetic
uggcuguuauccugagugagauu

SEQ ID NO: 671911 - RNA, 24 nt, Artificial Sequence
  Synthetic
uuggcuguuauccugagugagauu

SEQ ID NO: 671912 - RNA, 18 nt, Artificial Sequence
  Synthetic
ccuuugauaguugagauu

SEQ ID NO: 671913 - RNA, 19 nt, Artificial Sequence
  Synthetic
gccuuugauaguugagauu

SEQ ID NO: 671914 - RNA, 20 nt, Artificial Sequence
  Synthetic
ugccuuugauaguugagauu

SEQ ID NO: 671915 - RNA, 21 nt, Artificial Sequence
  Synthetic
uugccuuugauaguugagauu

SEQ ID NO: 671916 - RNA, 22 nt, Artificial Sequence
  Synthetic
cuugccuuugauaguugagauu

SEQ ID NO: 671917 - RNA, 23 nt, Artificial Sequence
  Synthetic
ucuugccuuugauaguugagauu

SEQ ID NO: 671918 - RNA, 24 nt, Artificial Sequence
  Synthetic
uucuugccuuugauaguugagauu

SEQ ID NO: 671919 - RNA, 18 nt, Artificial Sequence
  Synthetic
aucauuaaauaauagauu

SEQ ID NO: 671920 - RNA, 19 nt, Artificial Sequence
  Synthetic
gaucauuaaauaauagauu

SEQ ID NO: 671921 - RNA, 20 nt, Artificial Sequence
  Synthetic
ugaucauuaaauaauagauu

SEQ ID NO: 671922 - RNA, 21 nt, Artificial Sequence
  Synthetic
augaucauuaaauaauagauu

SEQ ID NO: 671923 - RNA, 22 nt, Artificial Sequence
  Synthetic
gaugaucauuaaauaauagauu

SEQ ID NO: 671924 - RNA, 23 nt, Artificial Sequence
  Synthetic
agaugaucauuaaauaauagauu

SEQ ID NO: 671925 - RNA, 24 nt, Artificial Sequence
  Synthetic
aagaugaucauuaaauaauagauu

SEQ ID NO: 671926 - RNA, 18 nt, Artificial Sequence
  Synthetic
guuggaggauaauagauu

SEQ ID NO: 671927 - RNA, 19 nt, Artificial Sequence
  Synthetic
gguuggaggauaauagauu

SEQ ID NO: 671928 - RNA, 20 nt, Artificial Sequence
  Synthetic
ugguuggaggauaauagauu

SEQ ID NO: 671929 - RNA, 21 nt, Artificial Sequence
  Synthetic
cugguuggaggauaauagauu

SEQ ID NO: 671930 - RNA, 22 nt, Artificial Sequence
  Synthetic
acugguuggaggauaauagauu

SEQ ID NO: 671931 - RNA, 23 nt, Artificial Sequence
  Synthetic
cacugguuggaggauaauagauu

SEQ ID NO: 671932 - RNA, 24 nt, Artificial Sequence
  Synthetic
ccacugguuggaggauaauagauu

SEQ ID NO: 671933 - RNA, 18 nt, Artificial Sequence
  Synthetic
ugacugcccugauagauu

SEQ ID NO: 671934 - RNA, 19 nt, Artificial Sequence
  Synthetic
uugacugcccugauagauu

SEQ ID NO: 671935 - RNA, 20 nt, Artificial Sequence
  Synthetic
uuugacugcccugauagauu

SEQ ID NO: 671936 - RNA, 21 nt, Artificial Sequence
  Synthetic
auuugacugcccugauagauu

SEQ ID NO: 671937 - RNA, 22 nt, Artificial Sequence
  Synthetic
gauuugacugcccugauagauu

SEQ ID NO: 671938 - RNA, 23 nt, Artificial Sequence
  Synthetic
agauuugacugcccugauagauu

SEQ ID NO: 671939 - RNA, 24 nt, Artificial Sequence
  Synthetic
aagauuugacugcccugauagauu

SEQ ID NO: 671940 - RNA, 18 nt, Artificial Sequence
  Synthetic
uaauguuguugauagauu

SEQ ID NO: 671941 - RNA, 19 nt, Artificial Sequence
  Synthetic
uuaauguuguugauagauu

SEQ ID NO: 671942 - RNA, 20 nt, Artificial Sequence
  Synthetic
auuaauguuguugauagauu

SEQ ID NO: 671943 - RNA, 21 nt, Artificial Sequence
  Synthetic
aauuaauguuguugauagauu

SEQ ID NO: 671944 - RNA, 22 nt, Artificial Sequence
  Synthetic
caauuaauguuguugauagauu

SEQ ID NO: 671945 - RNA, 23 nt, Artificial Sequence
  Synthetic
ucaauuaauguuguugauagauu

SEQ ID NO: 671946 - RNA, 24 nt, Artificial Sequence
  Synthetic
aucaauuaauguuguugauagauu

SEQ ID NO: 671947 - RNA, 18 nt, Artificial Sequence
  Synthetic
uuaucucaucuauagauu

SEQ ID NO: 671948 - RNA, 19 nt, Artificial Sequence
  Synthetic
cuuaucucaucuauagauu

SEQ ID NO: 671949 - RNA, 20 nt, Artificial Sequence
  Synthetic
ucuuaucucaucuauagauu

SEQ ID NO: 671950 - RNA, 21 nt, Artificial Sequence
  Synthetic
uucuuaucucaucuauagauu

SEQ ID NO: 671951 - RNA, 22 nt, Artificial Sequence
  Synthetic
uuucuuaucucaucuauagauu

SEQ ID NO: 671952 - RNA, 23 nt, Artificial Sequence
  Synthetic
uuuucuuaucucaucuauagauu

SEQ ID NO: 671953 - RNA, 24 nt, Artificial Sequence
  Synthetic
uuuuucuuaucucaucuauagauu

SEQ ID NO: 671954 - RNA, 18 nt, Artificial Sequence
  Synthetic
ugucuccgcuacuagauu

SEQ ID NO: 671955 - RNA, 19 nt, Artificial Sequence
  Synthetic
cugucuccgcuacuagauu

SEQ ID NO: 671956 - RNA, 20 nt, Artificial Sequence
  Synthetic
ucugucuccgcuacuagauu

SEQ ID NO: 671957 - RNA, 21 nt, Artificial Sequence
  Synthetic
aucugucuccgcuacuagauu

SEQ ID NO: 671958 - RNA, 22 nt, Artificial Sequence
  Synthetic
aaucugucuccgcuacuagauu

SEQ ID NO: 671959 - RNA, 23 nt, Artificial Sequence
  Synthetic
aaaucugucuccgcuacuagauu

SEQ ID NO: 671960 - RNA, 24 nt, Artificial Sequence
  Synthetic
aaaaucugucuccgcuacuagauu

SEQ ID NO: 671961 - RNA, 18 nt, Artificial Sequence
  Synthetic
uuuuuaauauccuagauu

SEQ ID NO: 671962 - RNA, 19 nt, Artificial Sequence
  Synthetic
auuuuuaauauccuagauu

SEQ ID NO: 671963 - RNA, 20 nt, Artificial Sequence
  Synthetic
uauuuuuaauauccuagauu

SEQ ID NO: 671964 - RNA, 21 nt, Artificial Sequence
  Synthetic
cuauuuuuaauauccuagauu

SEQ ID NO: 671965 - RNA, 22 nt, Artificial Sequence
  Synthetic
acuauuuuuaauauccuagauu

SEQ ID NO: 671966 - RNA, 23 nt, Artificial Sequence
  Synthetic
aacuauuuuuaauauccuagauu

SEQ ID NO: 671967 - RNA, 24 nt, Artificial Sequence
  Synthetic
caacuauuuuuaauauccuagauu

SEQ ID NO: 671968 - RNA, 18 nt, Artificial Sequence
  Synthetic
gcauccugccucuagauu

SEQ ID NO: 671969 - RNA, 19 nt, Artificial Sequence
  Synthetic
ugcauccugccucuagauu

SEQ ID NO: 671970 - RNA, 20 nt, Artificial Sequence
  Synthetic
cugcauccugccucuagauu

SEQ ID NO: 671971 - RNA, 21 nt, Artificial Sequence
  Synthetic
acugcauccugccucuagauu

SEQ ID NO: 671972 - RNA, 22 nt, Artificial Sequence
  Synthetic
aacugcauccugccucuagauu

SEQ ID NO: 671973 - RNA, 23 nt, Artificial Sequence
  Synthetic
uaacugcauccugccucuagauu

SEQ ID NO: 671974 - RNA, 24 nt, Artificial Sequence
  Synthetic
uuaacugcauccugccucuagauu

SEQ ID NO: 671975 - RNA, 18 nt, Artificial Sequence
  Synthetic
auuccuugggucuagauu

SEQ ID NO: 671976 - RNA, 19 nt, Artificial Sequence
  Synthetic
aauuccuugggucuagauu

SEQ ID NO: 671977 - RNA, 20 nt, Artificial Sequence
  Synthetic
uaauuccuugggucuagauu

SEQ ID NO: 671978 - RNA, 21 nt, Artificial Sequence
  Synthetic
uuaauuccuugggucuagauu

SEQ ID NO: 671979 - RNA, 22 nt, Artificial Sequence
  Synthetic
uuuaauuccuugggucuagauu

SEQ ID NO: 671980 - RNA, 23 nt, Artificial Sequence
  Synthetic
auuuaauuccuugggucuagauu

SEQ ID NO: 671981 - RNA, 24 nt, Artificial Sequence
  Synthetic
gauuuaauuccuugggucuagauu

SEQ ID NO: 671982 - RNA, 18 nt, Artificial Sequence
  Synthetic
uaucacccacaguagauu

SEQ ID NO: 671983 - RNA, 19 nt, Artificial Sequence
  Synthetic
auaucacccacaguagauu

SEQ ID NO: 671984 - RNA, 20 nt, Artificial Sequence
  Synthetic
gauaucacccacaguagauu

SEQ ID NO: 671985 - RNA, 21 nt, Artificial Sequence
  Synthetic
ugauaucacccacaguagauu

SEQ ID NO: 671986 - RNA, 22 nt, Artificial Sequence
  Synthetic
gugauaucacccacaguagauu

SEQ ID NO: 671987 - RNA, 23 nt, Artificial Sequence
  Synthetic
agugauaucacccacaguagauu

SEQ ID NO: 671988 - RNA, 24 nt, Artificial Sequence
  Synthetic
uagugauaucacccacaguagauu

SEQ ID NO: 671989 - RNA, 18 nt, Artificial Sequence
  Synthetic
uacaugugucaguagauu

SEQ ID NO: 671990 - RNA, 19 nt, Artificial Sequence
  Synthetic
auacaugugucaguagauu

SEQ ID NO: 671991 - RNA, 20 nt, Artificial Sequence
  Synthetic
aauacaugugucaguagauu

SEQ ID NO: 671992 - RNA, 21 nt, Artificial Sequence
  Synthetic
uaauacaugugucaguagauu

SEQ ID NO: 671993 - RNA, 22 nt, Artificial Sequence
  Synthetic
uuaauacaugugucaguagauu

SEQ ID NO: 671994 - RNA, 23 nt, Artificial Sequence
  Synthetic
uuuaauacaugugucaguagauu

SEQ ID NO: 671995 - RNA, 24 nt, Artificial Sequence
  Synthetic
guuuaauacaugugucaguagauu

SEQ ID NO: 671996 - RNA, 18 nt, Artificial Sequence
  Synthetic
aucuagcaugcguagauu

SEQ ID NO: 671997 - RNA, 19 nt, Artificial Sequence
  Synthetic
uaucuagcaugcguagauu

SEQ ID NO: 671998 - RNA, 20 nt, Artificial Sequence
  Synthetic
auaucuagcaugcguagauu

SEQ ID NO: 671999 - RNA, 21 nt, Artificial Sequence
  Synthetic
uauaucuagcaugcguagauu

SEQ ID NO: 672000 - RNA, 22 nt, Artificial Sequence
  Synthetic
uuauaucuagcaugcguagauu

SEQ ID NO: 672001 - RNA, 23 nt, Artificial Sequence
  Synthetic
uuuauaucuagcaugcguagauu

SEQ ID NO: 672002 - RNA, 24 nt, Artificial Sequence
  Synthetic
cuuuauaucuagcaugcguagauu

SEQ ID NO: 672003 - RNA, 18 nt, Artificial Sequence
  Synthetic
augccuccucuguagauu

SEQ ID NO: 672004 - RNA, 19 nt, Artificial Sequence
  Synthetic
aaugccuccucuguagauu

SEQ ID NO: 672005 - RNA, 20 nt, Artificial Sequence
  Synthetic
caaugccuccucuguagauu

SEQ ID NO: 672006 - RNA, 21 nt, Artificial Sequence
  Synthetic
ucaaugccuccucuguagauu

SEQ ID NO: 672007 - RNA, 22 nt, Artificial Sequence
  Synthetic
cucaaugccuccucuguagauu

SEQ ID NO: 672008 - RNA, 23 nt, Artificial Sequence
  Synthetic
ucucaaugccuccucuguagauu

SEQ ID NO: 672009 - RNA, 24 nt, Artificial Sequence
  Synthetic
cucucaaugccuccucuguagauu

SEQ ID NO: 672010 - RNA, 18 nt, Artificial Sequence
  Synthetic
guguauguuuauuagauu

SEQ ID NO: 672011 - RNA, 19 nt, Artificial Sequence
  Synthetic
gguguauguuuauuagauu

SEQ ID NO: 672012 - RNA, 20 nt, Artificial Sequence
  Synthetic
ggguguauguuuauuagauu

SEQ ID NO: 672013 - RNA, 21 nt, Artificial Sequence
  Synthetic
gggguguauguuuauuagauu

SEQ ID NO: 672014 - RNA, 22 nt, Artificial Sequence
  Synthetic
ggggguguauguuuauuagauu

SEQ ID NO: 672015 - RNA, 23 nt, Artificial Sequence
  Synthetic
uggggguguauguuuauuagauu

SEQ ID NO: 672016 - RNA, 24 nt, Artificial Sequence
  Synthetic
guggggguguauguuuauuagauu

SEQ ID NO: 672017 - RNA, 18 nt, Artificial Sequence
  Synthetic
gacgguaugacuuagauu

SEQ ID NO: 672018 - RNA, 19 nt, Artificial Sequence
  Synthetic
agacgguaugacuuagauu

SEQ ID NO: 672019 - RNA, 20 nt, Artificial Sequence
  Synthetic
uagacgguaugacuuagauu

SEQ ID NO: 672020 - RNA, 21 nt, Artificial Sequence
  Synthetic
guagacgguaugacuuagauu

SEQ ID NO: 672021 - RNA, 22 nt, Artificial Sequence
  Synthetic
uguagacgguaugacuuagauu

SEQ ID NO: 672022 - RNA, 23 nt, Artificial Sequence
  Synthetic
auguagacgguaugacuuagauu

SEQ ID NO: 672023 - RNA, 24 nt, Artificial Sequence
  Synthetic
uauguagacgguaugacuuagauu

SEQ ID NO: 672024 - RNA, 18 nt, Artificial Sequence
  Synthetic
cauaaagccaguuagauu

SEQ ID NO: 672025 - RNA, 19 nt, Artificial Sequence
  Synthetic
acauaaagccaguuagauu

SEQ ID NO: 672026 - RNA, 20 nt, Artificial Sequence
  Synthetic
uacauaaagccaguuagauu

SEQ ID NO: 672027 - RNA, 21 nt, Artificial Sequence
  Synthetic
uuacauaaagccaguuagauu

SEQ ID NO: 672028 - RNA, 22 nt, Artificial Sequence
  Synthetic
cuuacauaaagccaguuagauu

SEQ ID NO: 672029 - RNA, 23 nt, Artificial Sequence
  Synthetic
ucuuacauaaagccaguuagauu

SEQ ID NO: 672030 - RNA, 24 nt, Artificial Sequence
  Synthetic
aucuuacauaaagccaguuagauu

SEQ ID NO: 672031 - RNA, 18 nt, Artificial Sequence
  Synthetic
ccauuucuuauuuagauu

SEQ ID NO: 672032 - RNA, 19 nt, Artificial Sequence
  Synthetic
gccauuucuuauuuagauu

SEQ ID NO: 672033 - RNA, 20 nt, Artificial Sequence
  Synthetic
ugccauuucuuauuuagauu

SEQ ID NO: 672034 - RNA, 21 nt, Artificial Sequence
  Synthetic
uugccauuucuuauuuagauu

SEQ ID NO: 672035 - RNA, 22 nt, Artificial Sequence
  Synthetic
uuugccauuucuuauuuagauu

SEQ ID NO: 672036 - RNA, 23 nt, Artificial Sequence
  Synthetic
uuuugccauuucuuauuuagauu

SEQ ID NO: 672037 - RNA, 24 nt, Artificial Sequence
  Synthetic
guuuugccauuucuuauuuagauu

SEQ ID NO: 672038 - RNA, 18 nt, Artificial Sequence
  Synthetic
caugacuggcuuuagauu

SEQ ID NO: 672039 - RNA, 19 nt, Artificial Sequence
  Synthetic
acaugacuggcuuuagauu

SEQ ID NO: 672040 - RNA, 20 nt, Artificial Sequence
  Synthetic
uacaugacuggcuuuagauu

SEQ ID NO: 672041 - RNA, 21 nt, Artificial Sequence
  Synthetic
uuacaugacuggcuuuagauu

SEQ ID NO: 672042 - RNA, 22 nt, Artificial Sequence
  Synthetic
auuacaugacuggcuuuagauu

SEQ ID NO: 672043 - RNA, 23 nt, Artificial Sequence
  Synthetic
gauuacaugacuggcuuuagauu

SEQ ID NO: 672044 - RNA, 24 nt, Artificial Sequence
  Synthetic
ugauuacaugacuggcuuuagauu

SEQ ID NO: 672045 - RNA, 18 nt, Artificial Sequence
  Synthetic
auuuuuauugaaacgauu

SEQ ID NO: 672046 - RNA, 19 nt, Artificial Sequence
  Synthetic
uauuuuuauugaaacgauu

SEQ ID NO: 672047 - RNA, 20 nt, Artificial Sequence
  Synthetic
uuauuuuuauugaaacgauu

SEQ ID NO: 672048 - RNA, 21 nt, Artificial Sequence
  Synthetic
cuuauuuuuauugaaacgauu

SEQ ID NO: 672049 - RNA, 22 nt, Artificial Sequence
  Synthetic
ccuuauuuuuauugaaacgauu

SEQ ID NO: 672050 - RNA, 23 nt, Artificial Sequence
  Synthetic
cccuuauuuuuauugaaacgauu

SEQ ID NO: 672051 - RNA, 24 nt, Artificial Sequence
  Synthetic
ucccuuauuuuuauugaaacgauu

SEQ ID NO: 672052 - RNA, 18 nt, Artificial Sequence
  Synthetic
ggucccgggaacacgauu

SEQ ID NO: 672053 - RNA, 19 nt, Artificial Sequence
  Synthetic
aggucccgggaacacgauu

SEQ ID NO: 672054 - RNA, 20 nt, Artificial Sequence
  Synthetic
uaggucccgggaacacgauu

SEQ ID NO: 672055 - RNA, 21 nt, Artificial Sequence
  Synthetic
cuaggucccgggaacacgauu

SEQ ID NO: 672056 - RNA, 22 nt, Artificial Sequence
  Synthetic
gcuaggucccgggaacacgauu

SEQ ID NO: 672057 - RNA, 23 nt, Artificial Sequence
  Synthetic
ugcuaggucccgggaacacgauu

SEQ ID NO: 672058 - RNA, 24 nt, Artificial Sequence
  Synthetic
augcuaggucccgggaacacgauu

SEQ ID NO: 672059 - RNA, 18 nt, Artificial Sequence
  Synthetic
cugaauacagagacgauu

SEQ ID NO: 672060 - RNA, 19 nt, Artificial Sequence
  Synthetic
ucugaauacagagacgauu

SEQ ID NO: 672061 - RNA, 20 nt, Artificial Sequence
  Synthetic
gucugaauacagagacgauu

SEQ ID NO: 672062 - RNA, 21 nt, Artificial Sequence
  Synthetic
ugucugaauacagagacgauu

SEQ ID NO: 672063 - RNA, 22 nt, Artificial Sequence
  Synthetic
cugucugaauacagagacgauu

SEQ ID NO: 672064 - RNA, 23 nt, Artificial Sequence
  Synthetic
acugucugaauacagagacgauu

SEQ ID NO: 672065 - RNA, 24 nt, Artificial Sequence
  Synthetic
uacugucugaauacagagacgauu

SEQ ID NO: 672066 - RNA, 18 nt, Artificial Sequence
  Synthetic
ugagggauguauacgauu

SEQ ID NO: 672067 - RNA, 19 nt, Artificial Sequence
  Synthetic
uugagggauguauacgauu

SEQ ID NO: 672068 - RNA, 20 nt, Artificial Sequence
  Synthetic
cuugagggauguauacgauu

SEQ ID NO: 672069 - RNA, 21 nt, Artificial Sequence
  Synthetic
ccuugagggauguauacgauu

SEQ ID NO: 672070 - RNA, 22 nt, Artificial Sequence
  Synthetic
gccuugagggauguauacgauu

SEQ ID NO: 672071 - RNA, 23 nt, Artificial Sequence
  Synthetic
agccuugagggauguauacgauu

SEQ ID NO: 672072 - RNA, 24 nt, Artificial Sequence
  Synthetic
gagccuugagggauguauacgauu

SEQ ID NO: 672073 - RNA, 18 nt, Artificial Sequence
  Synthetic
guacaaaaugacccgauu

SEQ ID NO: 672074 - RNA, 19 nt, Artificial Sequence
  Synthetic
cguacaaaaugacccgauu

SEQ ID NO: 672075 - RNA, 20 nt, Artificial Sequence
  Synthetic
acguacaaaaugacccgauu

SEQ ID NO: 672076 - RNA, 21 nt, Artificial Sequence
  Synthetic
uacguacaaaaugacccgauu

SEQ ID NO: 672077 - RNA, 22 nt, Artificial Sequence
  Synthetic
cuacguacaaaaugacccgauu

SEQ ID NO: 672078 - RNA, 23 nt, Artificial Sequence
  Synthetic
ccuacguacaaaaugacccgauu

SEQ ID NO: 672079 - RNA, 24 nt, Artificial Sequence
  Synthetic
gccuacguacaaaaugacccgauu

SEQ ID NO: 672080 - RNA, 18 nt, Artificial Sequence
  Synthetic
gcacaaaugaagccgauu

SEQ ID NO: 672081 - RNA, 19 nt, Artificial Sequence
  Synthetic
ggcacaaaugaagccgauu

SEQ ID NO: 672082 - RNA, 20 nt, Artificial Sequence
  Synthetic
uggcacaaaugaagccgauu

SEQ ID NO: 672083 - RNA, 21 nt, Artificial Sequence
  Synthetic
auggcacaaaugaagccgauu

SEQ ID NO: 672084 - RNA, 22 nt, Artificial Sequence
  Synthetic
cauggcacaaaugaagccgauu

SEQ ID NO: 672085 - RNA, 23 nt, Artificial Sequence
  Synthetic
acauggcacaaaugaagccgauu

SEQ ID NO: 672086 - RNA, 24 nt, Artificial Sequence
  Synthetic
cacauggcacaaaugaagccgauu

SEQ ID NO: 672087 - RNA, 18 nt, Artificial Sequence
  Synthetic
uggaccuuacauccgauu

SEQ ID NO: 672088 - RNA, 19 nt, Artificial Sequence
  Synthetic
auggaccuuacauccgauu

SEQ ID NO: 672089 - RNA, 20 nt, Artificial Sequence
  Synthetic
cauggaccuuacauccgauu

SEQ ID NO: 672090 - RNA, 21 nt, Artificial Sequence
  Synthetic
ucauggaccuuacauccgauu

SEQ ID NO: 672091 - RNA, 22 nt, Artificial Sequence
  Synthetic
cucauggaccuuacauccgauu

SEQ ID NO: 672092 - RNA, 23 nt, Artificial Sequence
  Synthetic
ccucauggaccuuacauccgauu

SEQ ID NO: 672093 - RNA, 24 nt, Artificial Sequence
  Synthetic
gccucauggaccuuacauccgauu

SEQ ID NO: 672094 - RNA, 18 nt, Artificial Sequence
  Synthetic
cccuccaacagagcgauu

SEQ ID NO: 672095 - RNA, 19 nt, Artificial Sequence
  Synthetic
acccuccaacagagcgauu

SEQ ID NO: 672096 - RNA, 20 nt, Artificial Sequence
  Synthetic
cacccuccaacagagcgauu

SEQ ID NO: 672097 - RNA, 21 nt, Artificial Sequence
  Synthetic
ccacccuccaacagagcgauu

SEQ ID NO: 672098 - RNA, 22 nt, Artificial Sequence
  Synthetic
gccacccuccaacagagcgauu

SEQ ID NO: 672099 - RNA, 23 nt, Artificial Sequence
  Synthetic
ggccacccuccaacagagcgauu

SEQ ID NO: 672100 - RNA, 24 nt, Artificial Sequence
  Synthetic
aggccacccuccaacagagcgauu

SEQ ID NO: 672101 - RNA, 18 nt, Artificial Sequence
  Synthetic
aaucuccaaaaaaggauu

SEQ ID NO: 672102 - RNA, 19 nt, Artificial Sequence
  Synthetic
aaaucuccaaaaaaggauu

SEQ ID NO: 672103 - RNA, 20 nt, Artificial Sequence
  Synthetic
aaaaucuccaaaaaaggauu

SEQ ID NO: 672104 - RNA, 21 nt, Artificial Sequence
  Synthetic
aaaaaucuccaaaaaaggauu

SEQ ID NO: 672105 - RNA, 22 nt, Artificial Sequence
  Synthetic
aaaaaaucuccaaaaaaggauu

SEQ ID NO: 672106 - RNA, 23 nt, Artificial Sequence
  Synthetic
uaaaaaaucuccaaaaaaggauu

SEQ ID NO: 672107 - RNA, 24 nt, Artificial Sequence
  Synthetic
uuaaaaaaucuccaaaaaaggauu

SEQ ID NO: 672108 - RNA, 18 nt, Artificial Sequence
  Synthetic
auauaccccaaaaggauu

SEQ ID NO: 672109 - RNA, 19 nt, Artificial Sequence
  Synthetic
uauauaccccaaaaggauu

SEQ ID NO: 672110 - RNA, 20 nt, Artificial Sequence
  Synthetic
uuauauaccccaaaaggauu

SEQ ID NO: 672111 - RNA, 21 nt, Artificial Sequence
  Synthetic
auuauauaccccaaaaggauu

SEQ ID NO: 672112 - RNA, 22 nt, Artificial Sequence
  Synthetic
gauuauauaccccaaaaggauu

SEQ ID NO: 672113 - RNA, 23 nt, Artificial Sequence
  Synthetic
ggauuauauaccccaaaaggauu

SEQ ID NO: 672114 - RNA, 24 nt, Artificial Sequence
  Synthetic
uggauuauauaccccaaaaggauu

SEQ ID NO: 672115 - RNA, 18 nt, Artificial Sequence
  Synthetic
cggauguuagaaaggauu

SEQ ID NO: 672116 - RNA, 19 nt, Artificial Sequence
  Synthetic
gcggauguuagaaaggauu

SEQ ID NO: 672117 - RNA, 20 nt, Artificial Sequence
  Synthetic
ugcggauguuagaaaggauu

SEQ ID NO: 672118 - RNA, 21 nt, Artificial Sequence
  Synthetic
uugcggauguuagaaaggauu

SEQ ID NO: 672119 - RNA, 22 nt, Artificial Sequence
  Synthetic
guugcggauguuagaaaggauu

SEQ ID NO: 672120 - RNA, 23 nt, Artificial Sequence
  Synthetic
uguugcggauguuagaaaggauu

SEQ ID NO: 672121 - RNA, 24 nt, Artificial Sequence
  Synthetic
auguugcggauguuagaaaggauu

SEQ ID NO: 672122 - RNA, 18 nt, Artificial Sequence
  Synthetic
aauauuuuauaaaggauu

SEQ ID NO: 672123 - RNA, 19 nt, Artificial Sequence
  Synthetic
uaauauuuuauaaaggauu

SEQ ID NO: 672124 - RNA, 20 nt, Artificial Sequence
  Synthetic
uuaauauuuuauaaaggauu

SEQ ID NO: 672125 - RNA, 21 nt, Artificial Sequence
  Synthetic
auuaauauuuuauaaaggauu

SEQ ID NO: 672126 - RNA, 22 nt, Artificial Sequence
  Synthetic
uauuaauauuuuauaaaggauu

SEQ ID NO: 672127 - RNA, 23 nt, Artificial Sequence
  Synthetic
guauuaauauuuuauaaaggauu

SEQ ID NO: 672128 - RNA, 24 nt, Artificial Sequence
  Synthetic
uguauuaauauuuuauaaaggauu

SEQ ID NO: 672129 - RNA, 18 nt, Artificial Sequence
  Synthetic
aggaggugauuaaggauu

SEQ ID NO: 672130 - RNA, 19 nt, Artificial Sequence
  Synthetic
uaggaggugauuaaggauu

SEQ ID NO: 672131 - RNA, 20 nt, Artificial Sequence
  Synthetic
uuaggaggugauuaaggauu

SEQ ID NO: 672132 - RNA, 21 nt, Artificial Sequence
  Synthetic
uuuaggaggugauuaaggauu

SEQ ID NO: 672133 - RNA, 22 nt, Artificial Sequence
  Synthetic
cuuuaggaggugauuaaggauu

SEQ ID NO: 672134 - RNA, 23 nt, Artificial Sequence
  Synthetic
gcuuuaggaggugauuaaggauu

SEQ ID NO: 672135 - RNA, 24 nt, Artificial Sequence
  Synthetic
agcuuuaggaggugauuaaggauu

SEQ ID NO: 672136 - RNA, 18 nt, Artificial Sequence
  Synthetic
aguuguaaagccaggauu

SEQ ID NO: 672137 - RNA, 19 nt, Artificial Sequence
  Synthetic
gaguuguaaagccaggauu

SEQ ID NO: 672138 - RNA, 20 nt, Artificial Sequence
  Synthetic
ugaguuguaaagccaggauu

SEQ ID NO: 672139 - RNA, 21 nt, Artificial Sequence
  Synthetic
augaguuguaaagccaggauu

SEQ ID NO: 672140 - RNA, 22 nt, Artificial Sequence
  Synthetic
uaugaguuguaaagccaggauu

SEQ ID NO: 672141 - RNA, 23 nt, Artificial Sequence
  Synthetic
cuaugaguuguaaagccaggauu

SEQ ID NO: 672142 - RNA, 24 nt, Artificial Sequence
  Synthetic
acuaugaguuguaaagccaggauu

SEQ ID NO: 672143 - RNA, 18 nt, Artificial Sequence
  Synthetic
uucaauguccucaggauu

SEQ ID NO: 672144 - RNA, 19 nt, Artificial Sequence
  Synthetic
guucaauguccucaggauu

SEQ ID NO: 672145 - RNA, 20 nt, Artificial Sequence
  Synthetic
uguucaauguccucaggauu

SEQ ID NO: 672146 - RNA, 21 nt, Artificial Sequence
  Synthetic
guguucaauguccucaggauu

SEQ ID NO: 672147 - RNA, 22 nt, Artificial Sequence
  Synthetic
aguguucaauguccucaggauu

SEQ ID NO: 672148 - RNA, 23 nt, Artificial Sequence
  Synthetic
gaguguucaauguccucaggauu

SEQ ID NO: 672149 - RNA, 24 nt, Artificial Sequence
  Synthetic
cgaguguucaauguccucaggauu

SEQ ID NO: 672150 - RNA, 18 nt, Artificial Sequence
  Synthetic
cgaggcaaagggaggauu

SEQ ID NO: 672151 - RNA, 19 nt, Artificial Sequence
  Synthetic
acgaggcaaagggaggauu

SEQ ID NO: 672152 - RNA, 20 nt, Artificial Sequence
  Synthetic
uacgaggcaaagggaggauu

SEQ ID NO: 672153 - RNA, 21 nt, Artificial Sequence
  Synthetic
cuacgaggcaaagggaggauu

SEQ ID NO: 672154 - RNA, 22 nt, Artificial Sequence
  Synthetic
acuacgaggcaaagggaggauu

SEQ ID NO: 672155 - RNA, 23 nt, Artificial Sequence
  Synthetic
uacuacgaggcaaagggaggauu

SEQ ID NO: 672156 - RNA, 24 nt, Artificial Sequence
  Synthetic
auacuacgaggcaaagggaggauu

SEQ ID NO: 672157 - RNA, 18 nt, Artificial Sequence
  Synthetic
auuagguuuuggaggauu

SEQ ID NO: 672158 - RNA, 19 nt, Artificial Sequence
  Synthetic
uauuagguuuuggaggauu

SEQ ID NO: 672159 - RNA, 20 nt, Artificial Sequence
  Synthetic
cuauuagguuuuggaggauu

SEQ ID NO: 672160 - RNA, 21 nt, Artificial Sequence
  Synthetic
acuauuagguuuuggaggauu

SEQ ID NO: 672161 - RNA, 22 nt, Artificial Sequence
  Synthetic
cacuauuagguuuuggaggauu

SEQ ID NO: 672162 - RNA, 23 nt, Artificial Sequence
  Synthetic
ccacuauuagguuuuggaggauu

SEQ ID NO: 672163 - RNA, 24 nt, Artificial Sequence
  Synthetic
accacuauuagguuuuggaggauu

SEQ ID NO: 672164 - RNA, 18 nt, Artificial Sequence
  Synthetic
ucuuaaauugugaggauu

SEQ ID NO: 672165 - RNA, 19 nt, Artificial Sequence
  Synthetic
uucuuaaauugugaggauu

SEQ ID NO: 672166 - RNA, 20 nt, Artificial Sequence
  Synthetic
auucuuaaauugugaggauu

SEQ ID NO: 672167 - RNA, 21 nt, Artificial Sequence
  Synthetic
aauucuuaaauugugaggauu

SEQ ID NO: 672168 - RNA, 22 nt, Artificial Sequence
  Synthetic
uaauucuuaaauugugaggauu

SEQ ID NO: 672169 - RNA, 23 nt, Artificial Sequence
  Synthetic
uuaauucuuaaauugugaggauu

SEQ ID NO: 672170 - RNA, 24 nt, Artificial Sequence
  Synthetic
auuaauucuuaaauugugaggauu

SEQ ID NO: 672171 - RNA, 18 nt, Artificial Sequence
  Synthetic
auuauaugaauuaggauu

SEQ ID NO: 672172 - RNA, 19 nt, Artificial Sequence
  Synthetic
uauuauaugaauuaggauu

SEQ ID NO: 672173 - RNA, 20 nt, Artificial Sequence
  Synthetic
uuauuauaugaauuaggauu

SEQ ID NO: 672174 - RNA, 21 nt, Artificial Sequence
  Synthetic
auuauuauaugaauuaggauu

SEQ ID NO: 672175 - RNA, 22 nt, Artificial Sequence
  Synthetic
uauuauuauaugaauuaggauu

SEQ ID NO: 672176 - RNA, 23 nt, Artificial Sequence
  Synthetic
uuauuauuauaugaauuaggauu

SEQ ID NO: 672177 - RNA, 24 nt, Artificial Sequence
  Synthetic
guuauuauuauaugaauuaggauu

SEQ ID NO: 672178 - RNA, 18 nt, Artificial Sequence
  Synthetic
uucuuuacauuuaggauu

SEQ ID NO: 672179 - RNA, 19 nt, Artificial Sequence
  Synthetic
uuucuuuacauuuaggauu

SEQ ID NO: 672180 - RNA, 20 nt, Artificial Sequence
  Synthetic
guuucuuuacauuuaggauu

SEQ ID NO: 672181 - RNA, 21 nt, Artificial Sequence
  Synthetic
aguuucuuuacauuuaggauu

SEQ ID NO: 672182 - RNA, 22 nt, Artificial Sequence
  Synthetic
aaguuucuuuacauuuaggauu

SEQ ID NO: 672183 - RNA, 23 nt, Artificial Sequence
  Synthetic
caaguuucuuuacauuuaggauu

SEQ ID NO: 672184 - RNA, 24 nt, Artificial Sequence
  Synthetic
gcaaguuucuuuacauuuaggauu

SEQ ID NO: 672185 - RNA, 18 nt, Artificial Sequence
  Synthetic
uuuuauaauggggggauu

SEQ ID NO: 672186 - RNA, 19 nt, Artificial Sequence
  Synthetic
uuuuuauaauggggggauu

SEQ ID NO: 672187 - RNA, 20 nt, Artificial Sequence
  Synthetic
auuuuuauaauggggggauu

SEQ ID NO: 672188 - RNA, 21 nt, Artificial Sequence
  Synthetic
aauuuuuauaauggggggauu

SEQ ID NO: 672189 - RNA, 22 nt, Artificial Sequence
  Synthetic
caauuuuuauaauggggggauu

SEQ ID NO: 672190 - RNA, 23 nt, Artificial Sequence
  Synthetic
acaauuuuuauaauggggggauu

SEQ ID NO: 672191 - RNA, 24 nt, Artificial Sequence
  Synthetic
gacaauuuuuauaauggggggauu

SEQ ID NO: 672192 - RNA, 18 nt, Artificial Sequence
  Synthetic
aaaucaagaauggggauu

SEQ ID NO: 672193 - RNA, 19 nt, Artificial Sequence
  Synthetic
gaaaucaagaauggggauu

SEQ ID NO: 672194 - RNA, 20 nt, Artificial Sequence
  Synthetic
agaaaucaagaauggggauu

SEQ ID NO: 672195 - RNA, 21 nt, Artificial Sequence
  Synthetic
cagaaaucaagaauggggauu

SEQ ID NO: 672196 - RNA, 22 nt, Artificial Sequence
  Synthetic
ccagaaaucaagaauggggauu

SEQ ID NO: 672197 - RNA, 23 nt, Artificial Sequence
  Synthetic
uccagaaaucaagaauggggauu

SEQ ID NO: 672198 - RNA, 24 nt, Artificial Sequence
  Synthetic
auccagaaaucaagaauggggauu

SEQ ID NO: 672199 - RNA, 18 nt, Artificial Sequence
  Synthetic
cuuuacacgauggggauu

SEQ ID NO: 672200 - RNA, 19 nt, Artificial Sequence
  Synthetic
acuuuacacgauggggauu

SEQ ID NO: 672201 - RNA, 20 nt, Artificial Sequence
  Synthetic
cacuuuacacgauggggauu

SEQ ID NO: 672202 - RNA, 21 nt, Artificial Sequence
  Synthetic
acacuuuacacgauggggauu

SEQ ID NO: 672203 - RNA, 22 nt, Artificial Sequence
  Synthetic
uacacuuuacacgauggggauu

SEQ ID NO: 672204 - RNA, 23 nt, Artificial Sequence
  Synthetic
cuacacuuuacacgauggggauu

SEQ ID NO: 672205 - RNA, 24 nt, Artificial Sequence
  Synthetic
ucuacacuuuacacgauggggauu

SEQ ID NO: 672206 - RNA, 18 nt, Artificial Sequence
  Synthetic
ccaugacaccuggggauu

SEQ ID NO: 672207 - RNA, 19 nt, Artificial Sequence
  Synthetic
cccaugacaccuggggauu

SEQ ID NO: 672208 - RNA, 20 nt, Artificial Sequence
  Synthetic
ucccaugacaccuggggauu

SEQ ID NO: 672209 - RNA, 21 nt, Artificial Sequence
  Synthetic
cucccaugacaccuggggauu

SEQ ID NO: 672210 - RNA, 22 nt, Artificial Sequence
  Synthetic
ccucccaugacaccuggggauu

SEQ ID NO: 672211 - RNA, 23 nt, Artificial Sequence
  Synthetic
cccucccaugacaccuggggauu

SEQ ID NO: 672212 - RNA, 24 nt, Artificial Sequence
  Synthetic
ucccucccaugacaccuggggauu

SEQ ID NO: 672213 - RNA, 18 nt, Artificial Sequence
  Synthetic
ccuugacauguggggauu

SEQ ID NO: 672214 - RNA, 19 nt, Artificial Sequence
  Synthetic
cccuugacauguggggauu

SEQ ID NO: 672215 - RNA, 20 nt, Artificial Sequence
  Synthetic
ucccuugacauguggggauu

SEQ ID NO: 672216 - RNA, 21 nt, Artificial Sequence
  Synthetic
cucccuugacauguggggauu

SEQ ID NO: 672217 - RNA, 22 nt, Artificial Sequence
  Synthetic
ucucccuugacauguggggauu

SEQ ID NO: 672218 - RNA, 23 nt, Artificial Sequence
  Synthetic
cucucccuugacauguggggauu

SEQ ID NO: 672219 - RNA, 24 nt, Artificial Sequence
  Synthetic
ucucucccuugacauguggggauu

SEQ ID NO: 672220 - RNA, 18 nt, Artificial Sequence
  Synthetic
uccuacccuaaugggauu

SEQ ID NO: 672221 - RNA, 19 nt, Artificial Sequence
  Synthetic
auccuacccuaaugggauu

SEQ ID NO: 672222 - RNA, 20 nt, Artificial Sequence
  Synthetic
uauccuacccuaaugggauu

SEQ ID NO: 672223 - RNA, 21 nt, Artificial Sequence
  Synthetic
auauccuacccuaaugggauu

SEQ ID NO: 672224 - RNA, 22 nt, Artificial Sequence
  Synthetic
cauauccuacccuaaugggauu

SEQ ID NO: 672225 - RNA, 23 nt, Artificial Sequence
  Synthetic
acauauccuacccuaaugggauu

SEQ ID NO: 672226 - RNA, 24 nt, Artificial Sequence
  Synthetic
cacauauccuacccuaaugggauu

SEQ ID NO: 672227 - RNA, 18 nt, Artificial Sequence
  Synthetic
guacguucagaugggauu

SEQ ID NO: 672228 - RNA, 19 nt, Artificial Sequence
  Synthetic
uguacguucagaugggauu

SEQ ID NO: 672229 - RNA, 20 nt, Artificial Sequence
  Synthetic
guguacguucagaugggauu

SEQ ID NO: 672230 - RNA, 21 nt, Artificial Sequence
  Synthetic
cguguacguucagaugggauu

SEQ ID NO: 672231 - RNA, 22 nt, Artificial Sequence
  Synthetic
ccguguacguucagaugggauu

SEQ ID NO: 672232 - RNA, 23 nt, Artificial Sequence
  Synthetic
accguguacguucagaugggauu

SEQ ID NO: 672233 - RNA, 24 nt, Artificial Sequence
  Synthetic
uaccguguacguucagaugggauu

SEQ ID NO: 672234 - RNA, 18 nt, Artificial Sequence
  Synthetic
gcaucuguggaugggauu

SEQ ID NO: 672235 - RNA, 19 nt, Artificial Sequence
  Synthetic
ggcaucuguggaugggauu

SEQ ID NO: 672236 - RNA, 20 nt, Artificial Sequence
  Synthetic
uggcaucuguggaugggauu

SEQ ID NO: 672237 - RNA, 21 nt, Artificial Sequence
  Synthetic
cuggcaucuguggaugggauu

SEQ ID NO: 672238 - RNA, 22 nt, Artificial Sequence
  Synthetic
ccuggcaucuguggaugggauu

SEQ ID NO: 672239 - RNA, 23 nt, Artificial Sequence
  Synthetic
accuggcaucuguggaugggauu

SEQ ID NO: 672240 - RNA, 24 nt, Artificial Sequence
  Synthetic
aaccuggcaucuguggaugggauu

SEQ ID NO: 672241 - RNA, 24 nt, Artificial Sequence
  Synthetic
ucggccucccaaagugcugggauu

SEQ ID NO: 672242 - RNA, 18 nt, Artificial Sequence
  Synthetic
agaccugcuauugggauu

SEQ ID NO: 672243 - RNA, 19 nt, Artificial Sequence
  Synthetic
cagaccugcuauugggauu

SEQ ID NO: 672244 - RNA, 20 nt, Artificial Sequence
  Synthetic
acagaccugcuauugggauu

SEQ ID NO: 672245 - RNA, 21 nt, Artificial Sequence
  Synthetic
aacagaccugcuauugggauu

SEQ ID NO: 672246 - RNA, 22 nt, Artificial Sequence
  Synthetic
caacagaccugcuauugggauu

SEQ ID NO: 672247 - RNA, 23 nt, Artificial Sequence
  Synthetic
acaacagaccugcuauugggauu

SEQ ID NO: 672248 - RNA, 24 nt, Artificial Sequence
  Synthetic
gacaacagaccugcuauugggauu

SEQ ID NO: 672249 - RNA, 18 nt, Artificial Sequence
  Synthetic
cacaaauguguugggauu

SEQ ID NO: 672250 - RNA, 19 nt, Artificial Sequence
  Synthetic
ucacaaauguguugggauu

SEQ ID NO: 672251 - RNA, 20 nt, Artificial Sequence
  Synthetic
cucacaaauguguugggauu

SEQ ID NO: 672252 - RNA, 21 nt, Artificial Sequence
  Synthetic
gcucacaaauguguugggauu

SEQ ID NO: 672253 - RNA, 22 nt, Artificial Sequence
  Synthetic
ugcucacaaauguguugggauu

SEQ ID NO: 672254 - RNA, 23 nt, Artificial Sequence
  Synthetic
augcucacaaauguguugggauu

SEQ ID NO: 672255 - RNA, 24 nt, Artificial Sequence
  Synthetic
uaugcucacaaauguguugggauu

SEQ ID NO: 672256 - RNA, 18 nt, Artificial Sequence
  Synthetic
uucaugagcuuugggauu

SEQ ID NO: 672257 - RNA, 19 nt, Artificial Sequence
  Synthetic
uuucaugagcuuugggauu

SEQ ID NO: 672258 - RNA, 20 nt, Artificial Sequence
  Synthetic
uuuucaugagcuuugggauu

SEQ ID NO: 672259 - RNA, 21 nt, Artificial Sequence
  Synthetic
guuuucaugagcuuugggauu

SEQ ID NO: 672260 - RNA, 22 nt, Artificial Sequence
  Synthetic
uguuuucaugagcuuugggauu

SEQ ID NO: 672261 - RNA, 23 nt, Artificial Sequence
  Synthetic
auguuuucaugagcuuugggauu

SEQ ID NO: 672262 - RNA, 24 nt, Artificial Sequence
  Synthetic
uauguuuucaugagcuuugggauu

SEQ ID NO: 672263 - RNA, 18 nt, Artificial Sequence
  Synthetic
guuuuuaaccaauggauu

SEQ ID NO: 672264 - RNA, 19 nt, Artificial Sequence
  Synthetic
aguuuuuaaccaauggauu

SEQ ID NO: 672265 - RNA, 20 nt, Artificial Sequence
  Synthetic
uaguuuuuaaccaauggauu

SEQ ID NO: 672266 - RNA, 21 nt, Artificial Sequence
  Synthetic
uuaguuuuuaaccaauggauu

SEQ ID NO: 672267 - RNA, 22 nt, Artificial Sequence
  Synthetic
uuuaguuuuuaaccaauggauu

SEQ ID NO: 672268 - RNA, 23 nt, Artificial Sequence
  Synthetic
auuuaguuuuuaaccaauggauu

SEQ ID NO: 672269 - RNA, 24 nt, Artificial Sequence
  Synthetic
gauuuaguuuuuaaccaauggauu

SEQ ID NO: 672270 - RNA, 18 nt, Artificial Sequence
  Synthetic
cguaaugccacauggauu

SEQ ID NO: 672271 - RNA, 19 nt, Artificial Sequence
  Synthetic
ucguaaugccacauggauu

SEQ ID NO: 672272 - RNA, 20 nt, Artificial Sequence
  Synthetic
aucguaaugccacauggauu

SEQ ID NO: 672273 - RNA, 21 nt, Artificial Sequence
  Synthetic
gaucguaaugccacauggauu

SEQ ID NO: 672274 - RNA, 22 nt, Artificial Sequence
  Synthetic
ugaucguaaugccacauggauu

SEQ ID NO: 672275 - RNA, 23 nt, Artificial Sequence
  Synthetic
gugaucguaaugccacauggauu

SEQ ID NO: 672276 - RNA, 24 nt, Artificial Sequence
  Synthetic
ugugaucguaaugccacauggauu

SEQ ID NO: 672277 - RNA, 18 nt, Artificial Sequence
  Synthetic
agcuugaugucauggauu

SEQ ID NO: 672278 - RNA, 19 nt, Artificial Sequence
  Synthetic
uagcuugaugucauggauu

SEQ ID NO: 672279 - RNA, 20 nt, Artificial Sequence
  Synthetic
uuagcuugaugucauggauu

SEQ ID NO: 672280 - RNA, 21 nt, Artificial Sequence
  Synthetic
guuagcuugaugucauggauu

SEQ ID NO: 672281 - RNA, 22 nt, Artificial Sequence
  Synthetic
aguuagcuugaugucauggauu

SEQ ID NO: 672282 - RNA, 23 nt, Artificial Sequence
  Synthetic
uaguuagcuugaugucauggauu

SEQ ID NO: 672283 - RNA, 24 nt, Artificial Sequence
  Synthetic
uuaguuagcuugaugucauggauu

SEQ ID NO: 672284 - RNA, 18 nt, Artificial Sequence
  Synthetic
gauuauccuauauggauu

SEQ ID NO: 672285 - RNA, 19 nt, Artificial Sequence
  Synthetic
ugauuauccuauauggauu

SEQ ID NO: 672286 - RNA, 20 nt, Artificial Sequence
  Synthetic
augauuauccuauauggauu

SEQ ID NO: 672287 - RNA, 21 nt, Artificial Sequence
  Synthetic
uaugauuauccuauauggauu

SEQ ID NO: 672288 - RNA, 22 nt, Artificial Sequence
  Synthetic
auaugauuauccuauauggauu

SEQ ID NO: 672289 - RNA, 23 nt, Artificial Sequence
  Synthetic
aauaugauuauccuauauggauu

SEQ ID NO: 672290 - RNA, 24 nt, Artificial Sequence
  Synthetic
uaauaugauuauccuauauggauu

SEQ ID NO: 672291 - RNA, 18 nt, Artificial Sequence
  Synthetic
aacgagcagcuauggauu

SEQ ID NO: 672292 - RNA, 19 nt, Artificial Sequence
  Synthetic
aaacgagcagcuauggauu

SEQ ID NO: 672293 - RNA, 20 nt, Artificial Sequence
  Synthetic
uaaacgagcagcuauggauu

SEQ ID NO: 672294 - RNA, 21 nt, Artificial Sequence
  Synthetic
uuaaacgagcagcuauggauu

SEQ ID NO: 672295 - RNA, 22 nt, Artificial Sequence
  Synthetic
cuuaaacgagcagcuauggauu

SEQ ID NO: 672296 - RNA, 23 nt, Artificial Sequence
  Synthetic
ucuuaaacgagcagcuauggauu

SEQ ID NO: 672297 - RNA, 24 nt, Artificial Sequence
  Synthetic
aucuuaaacgagcagcuauggauu

SEQ ID NO: 672298 - RNA, 18 nt, Artificial Sequence
  Synthetic
aaagguguuuuauggauu

SEQ ID NO: 672299 - RNA, 19 nt, Artificial Sequence
  Synthetic
gaaagguguuuuauggauu

SEQ ID NO: 672300 - RNA, 20 nt, Artificial Sequence
  Synthetic
ugaaagguguuuuauggauu

SEQ ID NO: 672301 - RNA, 21 nt, Artificial Sequence
  Synthetic
cugaaagguguuuuauggauu

SEQ ID NO: 672302 - RNA, 22 nt, Artificial Sequence
  Synthetic
gcugaaagguguuuuauggauu

SEQ ID NO: 672303 - RNA, 23 nt, Artificial Sequence
  Synthetic
ugcugaaagguguuuuauggauu

SEQ ID NO: 672304 - RNA, 24 nt, Artificial Sequence
  Synthetic
augcugaaagguguuuuauggauu

SEQ ID NO: 672305 - RNA, 18 nt, Artificial Sequence
  Synthetic
uggaaucuaaacuggauu

SEQ ID NO: 672306 - RNA, 19 nt, Artificial Sequence
  Synthetic
guggaaucuaaacuggauu

SEQ ID NO: 672307 - RNA, 20 nt, Artificial Sequence
  Synthetic
uguggaaucuaaacuggauu

SEQ ID NO: 672308 - RNA, 21 nt, Artificial Sequence
  Synthetic
cuguggaaucuaaacuggauu

SEQ ID NO: 672309 - RNA, 22 nt, Artificial Sequence
  Synthetic
acuguggaaucuaaacuggauu

SEQ ID NO: 672310 - RNA, 23 nt, Artificial Sequence
  Synthetic
uacuguggaaucuaaacuggauu

SEQ ID NO: 672311 - RNA, 24 nt, Artificial Sequence
  Synthetic
auacuguggaaucuaaacuggauu

SEQ ID NO: 672312 - RNA, 21 nt, Artificial Sequence
  Synthetic
ccaacaaugauagacuggauu

SEQ ID NO: 672313 - RNA, 22 nt, Artificial Sequence
  Synthetic
uccaacaaugauagacuggauu

SEQ ID NO: 672314 - RNA, 23 nt, Artificial Sequence
  Synthetic
guccaacaaugauagacuggauu

SEQ ID NO: 672315 - RNA, 24 nt, Artificial Sequence
  Synthetic
uguccaacaaugauagacuggauu

SEQ ID NO: 672316 - RNA, 18 nt, Artificial Sequence
  Synthetic
ucaaugauagacuggauu

SEQ ID NO: 672317 - RNA, 19 nt, Artificial Sequence
  Synthetic
aucaaugauagacuggauu

SEQ ID NO: 672318 - RNA, 20 nt, Artificial Sequence
  Synthetic
caucaaugauagacuggauu

SEQ ID NO: 672319 - RNA, 21 nt, Artificial Sequence
  Synthetic
ccaucaaugauagacuggauu

SEQ ID NO: 672320 - RNA, 22 nt, Artificial Sequence
  Synthetic
uccaucaaugauagacuggauu

SEQ ID NO: 672321 - RNA, 23 nt, Artificial Sequence
  Synthetic
guccaucaaugauagacuggauu

SEQ ID NO: 672322 - RNA, 24 nt, Artificial Sequence
  Synthetic
uguccaucaaugauagacuggauu

SEQ ID NO: 672323 - RNA, 18 nt, Artificial Sequence
  Synthetic
ucagugauagacuggauu

SEQ ID NO: 672324 - RNA, 19 nt, Artificial Sequence
  Synthetic
aucagugauagacuggauu

SEQ ID NO: 672325 - RNA, 20 nt, Artificial Sequence
  Synthetic
caucagugauagacuggauu

SEQ ID NO: 672326 - RNA, 21 nt, Artificial Sequence
  Synthetic
ccaucagugauagacuggauu

SEQ ID NO: 672327 - RNA, 22 nt, Artificial Sequence
  Synthetic
uccaucagugauagacuggauu

SEQ ID NO: 672328 - RNA, 23 nt, Artificial Sequence
  Synthetic
guccaucagugauagacuggauu

SEQ ID NO: 672329 - RNA, 24 nt, Artificial Sequence
  Synthetic
uguccaucagugauagacuggauu

SEQ ID NO: 672330 - RNA, 18 nt, Artificial Sequence
  Synthetic
ucaaugauauacuggauu

SEQ ID NO: 672331 - RNA, 19 nt, Artificial Sequence
  Synthetic
aucaaugauauacuggauu

SEQ ID NO: 672332 - RNA, 20 nt, Artificial Sequence
  Synthetic
caucaaugauauacuggauu

SEQ ID NO: 672333 - RNA, 21 nt, Artificial Sequence
  Synthetic
ccaucaaugauauacuggauu

SEQ ID NO: 672334 - RNA, 22 nt, Artificial Sequence
  Synthetic
cccaucaaugauauacuggauu

SEQ ID NO: 672335 - RNA, 23 nt, Artificial Sequence
  Synthetic
gcccaucaaugauauacuggauu

SEQ ID NO: 672336 - RNA, 24 nt, Artificial Sequence
  Synthetic
ugcccaucaaugauauacuggauu

SEQ ID NO: 672337 - RNA, 18 nt, Artificial Sequence
  Synthetic
ggaaggagggccuggauu

SEQ ID NO: 672338 - RNA, 19 nt, Artificial Sequence
  Synthetic
aggaaggagggccuggauu

SEQ ID NO: 672339 - RNA, 20 nt, Artificial Sequence
  Synthetic
caggaaggagggccuggauu

SEQ ID NO: 672340 - RNA, 21 nt, Artificial Sequence
  Synthetic
acaggaaggagggccuggauu

SEQ ID NO: 672341 - RNA, 22 nt, Artificial Sequence
  Synthetic
cacaggaaggagggccuggauu

SEQ ID NO: 672342 - RNA, 23 nt, Artificial Sequence
  Synthetic
gcacaggaaggagggccuggauu

SEQ ID NO: 672343 - RNA, 24 nt, Artificial Sequence
  Synthetic
ugcacaggaaggagggccuggauu

SEQ ID NO: 672344 - RNA, 18 nt, Artificial Sequence
  Synthetic
aaguaccuaugcuggauu

SEQ ID NO: 672345 - RNA, 19 nt, Artificial Sequence
  Synthetic
gaaguaccuaugcuggauu

SEQ ID NO: 672346 - RNA, 20 nt, Artificial Sequence
  Synthetic
agaaguaccuaugcuggauu

SEQ ID NO: 672347 - RNA, 21 nt, Artificial Sequence
  Synthetic
aagaaguaccuaugcuggauu

SEQ ID NO: 672348 - RNA, 22 nt, Artificial Sequence
  Synthetic
gaagaaguaccuaugcuggauu

SEQ ID NO: 672349 - RNA, 23 nt, Artificial Sequence
  Synthetic
agaagaaguaccuaugcuggauu

SEQ ID NO: 672350 - RNA, 24 nt, Artificial Sequence
  Synthetic
uagaagaaguaccuaugcuggauu

SEQ ID NO: 672351 - RNA, 18 nt, Artificial Sequence
  Synthetic
gggaguuuuaucuggauu

SEQ ID NO: 672352 - RNA, 19 nt, Artificial Sequence
  Synthetic
ugggaguuuuaucuggauu

SEQ ID NO: 672353 - RNA, 20 nt, Artificial Sequence
  Synthetic
augggaguuuuaucuggauu

SEQ ID NO: 672354 - RNA, 21 nt, Artificial Sequence
  Synthetic
uaugggaguuuuaucuggauu

SEQ ID NO: 672355 - RNA, 22 nt, Artificial Sequence
  Synthetic
cuaugggaguuuuaucuggauu

SEQ ID NO: 672356 - RNA, 23 nt, Artificial Sequence
  Synthetic
ucuaugggaguuuuaucuggauu

SEQ ID NO: 672357 - RNA, 24 nt, Artificial Sequence
  Synthetic
cucuaugggaguuuuaucuggauu

SEQ ID NO: 672358 - RNA, 18 nt, Artificial Sequence
  Synthetic
aacaaaugugucuggauu

SEQ ID NO: 672359 - RNA, 19 nt, Artificial Sequence
  Synthetic
aaacaaaugugucuggauu

SEQ ID NO: 672360 - RNA, 20 nt, Artificial Sequence
  Synthetic
uaaacaaaugugucuggauu

SEQ ID NO: 672361 - RNA, 21 nt, Artificial Sequence
  Synthetic
uuaaacaaaugugucuggauu

SEQ ID NO: 672362 - RNA, 22 nt, Artificial Sequence
  Synthetic
cuuaaacaaaugugucuggauu

SEQ ID NO: 672363 - RNA, 23 nt, Artificial Sequence
  Synthetic
ccuuaaacaaaugugucuggauu

SEQ ID NO: 672364 - RNA, 24 nt, Artificial Sequence
  Synthetic
uccuuaaacaaaugugucuggauu

SEQ ID NO: 672365 - RNA, 18 nt, Artificial Sequence
  Synthetic
uaaaauacauauuggauu

SEQ ID NO: 672366 - RNA, 19 nt, Artificial Sequence
  Synthetic
guaaaauacauauuggauu

SEQ ID NO: 672367 - RNA, 20 nt, Artificial Sequence
  Synthetic
uguaaaauacauauuggauu

SEQ ID NO: 672368 - RNA, 21 nt, Artificial Sequence
  Synthetic
cuguaaaauacauauuggauu

SEQ ID NO: 672369 - RNA, 22 nt, Artificial Sequence
  Synthetic
gcuguaaaauacauauuggauu

SEQ ID NO: 672370 - RNA, 23 nt, Artificial Sequence
  Synthetic
ugcuguaaaauacauauuggauu

SEQ ID NO: 672371 - RNA, 24 nt, Artificial Sequence
  Synthetic
augcuguaaaauacauauuggauu

SEQ ID NO: 672372 - RNA, 18 nt, Artificial Sequence
  Synthetic
aagauggucgcuuggauu

SEQ ID NO: 672373 - RNA, 19 nt, Artificial Sequence
  Synthetic
aaagauggucgcuuggauu

SEQ ID NO: 672374 - RNA, 20 nt, Artificial Sequence
  Synthetic
gaaagauggucgcuuggauu

SEQ ID NO: 672375 - RNA, 21 nt, Artificial Sequence
  Synthetic
ggaaagauggucgcuuggauu

SEQ ID NO: 672376 - RNA, 22 nt, Artificial Sequence
  Synthetic
aggaaagauggucgcuuggauu

SEQ ID NO: 672377 - RNA, 23 nt, Artificial Sequence
  Synthetic
gaggaaagauggucgcuuggauu

SEQ ID NO: 672378 - RNA, 24 nt, Artificial Sequence
  Synthetic
ugaggaaagauggucgcuuggauu

SEQ ID NO: 672379 - RNA, 18 nt, Artificial Sequence
  Synthetic
uuaaaggacaaaaugauu

SEQ ID NO: 672380 - RNA, 19 nt, Artificial Sequence
  Synthetic
guuaaaggacaaaaugauu

SEQ ID NO: 672381 - RNA, 20 nt, Artificial Sequence
  Synthetic
aguuaaaggacaaaaugauu

SEQ ID NO: 672382 - RNA, 21 nt, Artificial Sequence
  Synthetic
uaguuaaaggacaaaaugauu

SEQ ID NO: 672383 - RNA, 22 nt, Artificial Sequence
  Synthetic
auaguuaaaggacaaaaugauu

SEQ ID NO: 672384 - RNA, 23 nt, Artificial Sequence
  Synthetic
uauaguuaaaggacaaaaugauu

SEQ ID NO: 672385 - RNA, 24 nt, Artificial Sequence
  Synthetic
auauaguuaaaggacaaaaugauu

SEQ ID NO: 672386 - RNA, 18 nt, Artificial Sequence
  Synthetic
uauacuuaggaaaugauu

SEQ ID NO: 672387 - RNA, 19 nt, Artificial Sequence
  Synthetic
auauacuuaggaaaugauu

SEQ ID NO: 672388 - RNA, 20 nt, Artificial Sequence
  Synthetic
gauauacuuaggaaaugauu

SEQ ID NO: 672389 - RNA, 21 nt, Artificial Sequence
  Synthetic
agauauacuuaggaaaugauu

SEQ ID NO: 672390 - RNA, 22 nt, Artificial Sequence
  Synthetic
cagauauacuuaggaaaugauu

SEQ ID NO: 672391 - RNA, 23 nt, Artificial Sequence
  Synthetic
ccagauauacuuaggaaaugauu

SEQ ID NO: 672392 - RNA, 24 nt, Artificial Sequence
  Synthetic
accagauauacuuaggaaaugauu

SEQ ID NO: 672393 - RNA, 18 nt, Artificial Sequence
  Synthetic
cugucuaccuaaaugauu

SEQ ID NO: 672394 - RNA, 19 nt, Artificial Sequence
  Synthetic
ccugucuaccuaaaugauu

SEQ ID NO: 672395 - RNA, 20 nt, Artificial Sequence
  Synthetic
uccugucuaccuaaaugauu

SEQ ID NO: 672396 - RNA, 21 nt, Artificial Sequence
  Synthetic
guccugucuaccuaaaugauu

SEQ ID NO: 672397 - RNA, 22 nt, Artificial Sequence
  Synthetic
aguccugucuaccuaaaugauu

SEQ ID NO: 672398 - RNA, 23 nt, Artificial Sequence
  Synthetic
aaguccugucuaccuaaaugauu

SEQ ID NO: 672399 - RNA, 24 nt, Artificial Sequence
  Synthetic
aaaguccugucuaccuaaaugauu

SEQ ID NO: 672400 - RNA, 18 nt, Artificial Sequence
  Synthetic
aucugcucuugaaugauu

SEQ ID NO: 672401 - RNA, 19 nt, Artificial Sequence
  Synthetic
aaucugcucuugaaugauu

SEQ ID NO: 672402 - RNA, 20 nt, Artificial Sequence
  Synthetic
aaaucugcucuugaaugauu

SEQ ID NO: 672403 - RNA, 21 nt, Artificial Sequence
  Synthetic
gaaaucugcucuugaaugauu

SEQ ID NO: 672404 - RNA, 22 nt, Artificial Sequence
  Synthetic
agaaaucugcucuugaaugauu

SEQ ID NO: 672405 - RNA, 23 nt, Artificial Sequence
  Synthetic
aagaaaucugcucuugaaugauu

SEQ ID NO: 672406 - RNA, 24 nt, Artificial Sequence
  Synthetic
uaagaaaucugcucuugaaugauu

SEQ ID NO: 672407 - RNA, 18 nt, Artificial Sequence
  Synthetic
ucauuugaauuaaugauu

SEQ ID NO: 672408 - RNA, 19 nt, Artificial Sequence
  Synthetic
aucauuugaauuaaugauu

SEQ ID NO: 672409 - RNA, 20 nt, Artificial Sequence
  Synthetic
aaucauuugaauuaaugauu

SEQ ID NO: 672410 - RNA, 21 nt, Artificial Sequence
  Synthetic
aaaucauuugaauuaaugauu

SEQ ID NO: 672411 - RNA, 22 nt, Artificial Sequence
  Synthetic
gaaaucauuugaauuaaugauu

SEQ ID NO: 672412 - RNA, 23 nt, Artificial Sequence
  Synthetic
agaaaucauuugaauuaaugauu

SEQ ID NO: 672413 - RNA, 24 nt, Artificial Sequence
  Synthetic
aagaaaucauuugaauuaaugauu

SEQ ID NO: 672414 - RNA, 18 nt, Artificial Sequence
  Synthetic
aguugaucauuaaugauu

SEQ ID NO: 672415 - RNA, 19 nt, Artificial Sequence
  Synthetic
gaguugaucauuaaugauu

SEQ ID NO: 672416 - RNA, 20 nt, Artificial Sequence
  Synthetic
ugaguugaucauuaaugauu

SEQ ID NO: 672417 - RNA, 21 nt, Artificial Sequence
  Synthetic
augaguugaucauuaaugauu

SEQ ID NO: 672418 - RNA, 22 nt, Artificial Sequence
  Synthetic
uaugaguugaucauuaaugauu

SEQ ID NO: 672419 - RNA, 23 nt, Artificial Sequence
  Synthetic
cuaugaguugaucauuaaugauu

SEQ ID NO: 672420 - RNA, 24 nt, Artificial Sequence
  Synthetic
gcuaugaguugaucauuaaugauu

SEQ ID NO: 672421 - RNA, 18 nt, Artificial Sequence
  Synthetic
aucuucccuuuaaugauu

SEQ ID NO: 672422 - RNA, 19 nt, Artificial Sequence
  Synthetic
aaucuucccuuuaaugauu

SEQ ID NO: 672423 - RNA, 20 nt, Artificial Sequence
  Synthetic
gaaucuucccuuuaaugauu

SEQ ID NO: 672424 - RNA, 21 nt, Artificial Sequence
  Synthetic
ugaaucuucccuuuaaugauu

SEQ ID NO: 672425 - RNA, 22 nt, Artificial Sequence
  Synthetic
gugaaucuucccuuuaaugauu

SEQ ID NO: 672426 - RNA, 23 nt, Artificial Sequence
  Synthetic
ggugaaucuucccuuuaaugauu

SEQ ID NO: 672427 - RNA, 24 nt, Artificial Sequence
  Synthetic
uggugaaucuucccuuuaaugauu

SEQ ID NO: 672428 - RNA, 18 nt, Artificial Sequence
  Synthetic
ucaccuuccaccaugauu

SEQ ID NO: 672429 - RNA, 19 nt, Artificial Sequence
  Synthetic
uucaccuuccaccaugauu

SEQ ID NO: 672430 - RNA, 20 nt, Artificial Sequence
  Synthetic
cuucaccuuccaccaugauu

SEQ ID NO: 672431 - RNA, 21 nt, Artificial Sequence
  Synthetic
ccuucaccuuccaccaugauu

SEQ ID NO: 672432 - RNA, 22 nt, Artificial Sequence
  Synthetic
cccuucaccuuccaccaugauu

SEQ ID NO: 672433 - RNA, 23 nt, Artificial Sequence
  Synthetic
ccccuucaccuuccaccaugauu

SEQ ID NO: 672434 - RNA, 24 nt, Artificial Sequence
  Synthetic
accccuucaccuuccaccaugauu

SEQ ID NO: 672435 - RNA, 18 nt, Artificial Sequence
  Synthetic
ucgccuucugccaugauu

SEQ ID NO: 672436 - RNA, 19 nt, Artificial Sequence
  Synthetic
uucgccuucugccaugauu

SEQ ID NO: 672437 - RNA, 20 nt, Artificial Sequence
  Synthetic
cuucgccuucugccaugauu

SEQ ID NO: 672438 - RNA, 21 nt, Artificial Sequence
  Synthetic
ccuucgccuucugccaugauu

SEQ ID NO: 672439 - RNA, 22 nt, Artificial Sequence
  Synthetic
uccuucgccuucugccaugauu

SEQ ID NO: 672440 - RNA, 23 nt, Artificial Sequence
  Synthetic
uuccuucgccuucugccaugauu

SEQ ID NO: 672441 - RNA, 24 nt, Artificial Sequence
  Synthetic
cuuccuucgccuucugccaugauu

SEQ ID NO: 672442 - RNA, 18 nt, Artificial Sequence
  Synthetic
auguucauaugcaugauu

SEQ ID NO: 672443 - RNA, 19 nt, Artificial Sequence
  Synthetic
cauguucauaugcaugauu

SEQ ID NO: 672444 - RNA, 20 nt, Artificial Sequence
  Synthetic
acauguucauaugcaugauu

SEQ ID NO: 672445 - RNA, 21 nt, Artificial Sequence
  Synthetic
cacauguucauaugcaugauu

SEQ ID NO: 672446 - RNA, 22 nt, Artificial Sequence
  Synthetic
gcacauguucauaugcaugauu

SEQ ID NO: 672447 - RNA, 23 nt, Artificial Sequence
  Synthetic
ugcacauguucauaugcaugauu

SEQ ID NO: 672448 - RNA, 24 nt, Artificial Sequence
  Synthetic
gugcacauguucauaugcaugauu

SEQ ID NO: 672449 - RNA, 18 nt, Artificial Sequence
  Synthetic
uauauauaugucaugauu

SEQ ID NO: 672450 - RNA, 19 nt, Artificial Sequence
  Synthetic
auauauauaugucaugauu

SEQ ID NO: 672451 - RNA, 20 nt, Artificial Sequence
  Synthetic
uauauauauaugucaugauu

SEQ ID NO: 672452 - RNA, 21 nt, Artificial Sequence
  Synthetic
auauauauauaugucaugauu

SEQ ID NO: 672453 - RNA, 22 nt, Artificial Sequence
  Synthetic
cauauauauauaugucaugauu

SEQ ID NO: 672454 - RNA, 23 nt, Artificial Sequence
  Synthetic
gcauauauauauaugucaugauu

SEQ ID NO: 672455 - RNA, 24 nt, Artificial Sequence
  Synthetic
ggcauauauauauaugucaugauu

SEQ ID NO: 672456 - RNA, 18 nt, Artificial Sequence
  Synthetic
aaaaaagaaaagaugauu

SEQ ID NO: 672457 - RNA, 19 nt, Artificial Sequence
  Synthetic
gaaaaaagaaaagaugauu

SEQ ID NO: 672458 - RNA, 20 nt, Artificial Sequence
  Synthetic
agaaaaaagaaaagaugauu

SEQ ID NO: 672459 - RNA, 21 nt, Artificial Sequence
  Synthetic
aagaaaaaagaaaagaugauu

SEQ ID NO: 672460 - RNA, 22 nt, Artificial Sequence
  Synthetic
aaagaaaaaagaaaagaugauu

SEQ ID NO: 672461 - RNA, 23 nt, Artificial Sequence
  Synthetic
aaaagaaaaaagaaaagaugauu

SEQ ID NO: 672462 - RNA, 24 nt, Artificial Sequence
  Synthetic
gaaaagaaaaaagaaaagaugauu

SEQ ID NO: 672463 - RNA, 18 nt, Artificial Sequence
  Synthetic
aacaugagagagaugauu

SEQ ID NO: 672464 - RNA, 19 nt, Artificial Sequence
  Synthetic
gaacaugagagagaugauu

SEQ ID NO: 672465 - RNA, 20 nt, Artificial Sequence
  Synthetic
ugaacaugagagagaugauu

SEQ ID NO: 672466 - RNA, 21 nt, Artificial Sequence
  Synthetic
uugaacaugagagagaugauu

SEQ ID NO: 672467 - RNA, 22 nt, Artificial Sequence
  Synthetic
uuugaacaugagagagaugauu

SEQ ID NO: 672468 - RNA, 23 nt, Artificial Sequence
  Synthetic
uuuugaacaugagagagaugauu

SEQ ID NO: 672469 - RNA, 24 nt, Artificial Sequence
  Synthetic
auuuugaacaugagagagaugauu

SEQ ID NO: 672470 - RNA, 18 nt, Artificial Sequence
  Synthetic
gcugugaucgggaugauu

SEQ ID NO: 672471 - RNA, 19 nt, Artificial Sequence
  Synthetic
ggcugugaucgggaugauu

SEQ ID NO: 672472 - RNA, 20 nt, Artificial Sequence
  Synthetic
gggcugugaucgggaugauu

SEQ ID NO: 672473 - RNA, 21 nt, Artificial Sequence
  Synthetic
ggggcugugaucgggaugauu

SEQ ID NO: 672474 - RNA, 22 nt, Artificial Sequence
  Synthetic
uggggcugugaucgggaugauu

SEQ ID NO: 672475 - RNA, 23 nt, Artificial Sequence
  Synthetic
cuggggcugugaucgggaugauu

SEQ ID NO: 672476 - RNA, 24 nt, Artificial Sequence
  Synthetic
ccuggggcugugaucgggaugauu

SEQ ID NO: 672477 - RNA, 18 nt, Artificial Sequence
  Synthetic
uuauucuuucugaugauu

SEQ ID NO: 672478 - RNA, 19 nt, Artificial Sequence
  Synthetic
uuuauucuuucugaugauu

SEQ ID NO: 672479 - RNA, 20 nt, Artificial Sequence
  Synthetic
cuuuauucuuucugaugauu

SEQ ID NO: 672480 - RNA, 21 nt, Artificial Sequence
  Synthetic
gcuuuauucuuucugaugauu

SEQ ID NO: 672481 - RNA, 22 nt, Artificial Sequence
  Synthetic
ugcuuuauucuuucugaugauu

SEQ ID NO: 672482 - RNA, 23 nt, Artificial Sequence
  Synthetic
augcuuuauucuuucugaugauu

SEQ ID NO: 672483 - RNA, 24 nt, Artificial Sequence
  Synthetic
uaugcuuuauucuuucugaugauu

SEQ ID NO: 672484 - RNA, 18 nt, Artificial Sequence
  Synthetic
acuuuggguuauaugauu

SEQ ID NO: 672485 - RNA, 19 nt, Artificial Sequence
  Synthetic
gacuuuggguuauaugauu

SEQ ID NO: 672486 - RNA, 20 nt, Artificial Sequence
  Synthetic
ugacuuuggguuauaugauu

SEQ ID NO: 672487 - RNA, 21 nt, Artificial Sequence
  Synthetic
augacuuuggguuauaugauu

SEQ ID NO: 672488 - RNA, 22 nt, Artificial Sequence
  Synthetic
caugacuuuggguuauaugauu

SEQ ID NO: 672489 - RNA, 23 nt, Artificial Sequence
  Synthetic
gcaugacuuuggguuauaugauu

SEQ ID NO: 672490 - RNA, 24 nt, Artificial Sequence
  Synthetic
agcaugacuuuggguuauaugauu

SEQ ID NO: 672491 - RNA, 18 nt, Artificial Sequence
  Synthetic
uaaaauacuuguaugauu

SEQ ID NO: 672492 - RNA, 19 nt, Artificial Sequence
  Synthetic
auaaaauacuuguaugauu

SEQ ID NO: 672493 - RNA, 20 nt, Artificial Sequence
  Synthetic
aauaaaauacuuguaugauu

SEQ ID NO: 672494 - RNA, 21 nt, Artificial Sequence
  Synthetic
uaauaaaauacuuguaugauu

SEQ ID NO: 672495 - RNA, 22 nt, Artificial Sequence
  Synthetic
auaauaaaauacuuguaugauu

SEQ ID NO: 672496 - RNA, 23 nt, Artificial Sequence
  Synthetic
aauaauaaaauacuuguaugauu

SEQ ID NO: 672497 - RNA, 24 nt, Artificial Sequence
  Synthetic
aaauaauaaaauacuuguaugauu

SEQ ID NO: 672498 - RNA, 18 nt, Artificial Sequence
  Synthetic
uugcuaaggauuaugauu

SEQ ID NO: 672499 - RNA, 19 nt, Artificial Sequence
  Synthetic
auugcuaaggauuaugauu

SEQ ID NO: 672500 - RNA, 20 nt, Artificial Sequence
  Synthetic
uauugcuaaggauuaugauu

SEQ ID NO: 672501 - RNA, 21 nt, Artificial Sequence
  Synthetic
uuauugcuaaggauuaugauu

SEQ ID NO: 672502 - RNA, 22 nt, Artificial Sequence
  Synthetic
auuauugcuaaggauuaugauu

SEQ ID NO: 672503 - RNA, 23 nt, Artificial Sequence
  Synthetic
uauuauugcuaaggauuaugauu

SEQ ID NO: 672504 - RNA, 24 nt, Artificial Sequence
  Synthetic
uuauuauugcuaaggauuaugauu

SEQ ID NO: 672505 - RNA, 18 nt, Artificial Sequence
  Synthetic
gaucugauucaacugauu

SEQ ID NO: 672506 - RNA, 19 nt, Artificial Sequence
  Synthetic
agaucugauucaacugauu

SEQ ID NO: 672507 - RNA, 20 nt, Artificial Sequence
  Synthetic
gagaucugauucaacugauu

SEQ ID NO: 672508 - RNA, 21 nt, Artificial Sequence
  Synthetic
agagaucugauucaacugauu

SEQ ID NO: 672509 - RNA, 22 nt, Artificial Sequence
  Synthetic
cagagaucugauucaacugauu

SEQ ID NO: 672510 - RNA, 23 nt, Artificial Sequence
  Synthetic
ccagagaucugauucaacugauu

SEQ ID NO: 672511 - RNA, 24 nt, Artificial Sequence
  Synthetic
accagagaucugauucaacugauu

SEQ ID NO: 672512 - RNA, 18 nt, Artificial Sequence
  Synthetic
uccucuugcccacugauu

SEQ ID NO: 672513 - RNA, 19 nt, Artificial Sequence
  Synthetic
uuccucuugcccacugauu

SEQ ID NO: 672514 - RNA, 20 nt, Artificial Sequence
  Synthetic
cuuccucuugcccacugauu

SEQ ID NO: 672515 - RNA, 21 nt, Artificial Sequence
  Synthetic
acuuccucuugcccacugauu

SEQ ID NO: 672516 - RNA, 22 nt, Artificial Sequence
  Synthetic
aacuuccucuugcccacugauu

SEQ ID NO: 672517 - RNA, 23 nt, Artificial Sequence
  Synthetic
caacuuccucuugcccacugauu

SEQ ID NO: 672518 - RNA, 24 nt, Artificial Sequence
  Synthetic
acaacuuccucuugcccacugauu

SEQ ID NO: 672519 - RNA, 18 nt, Artificial Sequence
  Synthetic
uuaagagaagcacugauu

SEQ ID NO: 672520 - RNA, 19 nt, Artificial Sequence
  Synthetic
auuaagagaagcacugauu

SEQ ID NO: 672521 - RNA, 20 nt, Artificial Sequence
  Synthetic
uauuaagagaagcacugauu

SEQ ID NO: 672522 - RNA, 21 nt, Artificial Sequence
  Synthetic
auauuaagagaagcacugauu

SEQ ID NO: 672523 - RNA, 22 nt, Artificial Sequence
  Synthetic
cauauuaagagaagcacugauu

SEQ ID NO: 672524 - RNA, 23 nt, Artificial Sequence
  Synthetic
gcauauuaagagaagcacugauu

SEQ ID NO: 672525 - RNA, 24 nt, Artificial Sequence
  Synthetic
ugcauauuaagagaagcacugauu

SEQ ID NO: 672526 - RNA, 18 nt, Artificial Sequence
  Synthetic
acauguauauuacugauu

SEQ ID NO: 672527 - RNA, 19 nt, Artificial Sequence
  Synthetic
cacauguauauuacugauu

SEQ ID NO: 672528 - RNA, 20 nt, Artificial Sequence
  Synthetic
ucacauguauauuacugauu

SEQ ID NO: 672529 - RNA, 21 nt, Artificial Sequence
  Synthetic
uucacauguauauuacugauu

SEQ ID NO: 672530 - RNA, 22 nt, Artificial Sequence
  Synthetic
cuucacauguauauuacugauu

SEQ ID NO: 672531 - RNA, 23 nt, Artificial Sequence
  Synthetic
gcuucacauguauauuacugauu

SEQ ID NO: 672532 - RNA, 24 nt, Artificial Sequence
  Synthetic
agcuucacauguauauuacugauu

SEQ ID NO: 672533 - RNA, 18 nt, Artificial Sequence
  Synthetic
aggccgugugaccugauu

SEQ ID NO: 672534 - RNA, 19 nt, Artificial Sequence
  Synthetic
gaggccgugugaccugauu

SEQ ID NO: 672535 - RNA, 20 nt, Artificial Sequence
  Synthetic
ugaggccgugugaccugauu

SEQ ID NO: 672536 - RNA, 21 nt, Artificial Sequence
  Synthetic
cugaggccgugugaccugauu

SEQ ID NO: 672537 - RNA, 22 nt, Artificial Sequence
  Synthetic
ccugaggccgugugaccugauu

SEQ ID NO: 672538 - RNA, 23 nt, Artificial Sequence
  Synthetic
uccugaggccgugugaccugauu

SEQ ID NO: 672539 - RNA, 24 nt, Artificial Sequence
  Synthetic
uuccugaggccgugugaccugauu

SEQ ID NO: 672540 - RNA, 18 nt, Artificial Sequence
  Synthetic
gaaggauauagccugauu

SEQ ID NO: 672541 - RNA, 19 nt, Artificial Sequence
  Synthetic
ggaaggauauagccugauu

SEQ ID NO: 672542 - RNA, 20 nt, Artificial Sequence
  Synthetic
uggaaggauauagccugauu

SEQ ID NO: 672543 - RNA, 21 nt, Artificial Sequence
  Synthetic
cuggaaggauauagccugauu

SEQ ID NO: 672544 - RNA, 22 nt, Artificial Sequence
  Synthetic
acuggaaggauauagccugauu

SEQ ID NO: 672545 - RNA, 23 nt, Artificial Sequence
  Synthetic
uacuggaaggauauagccugauu

SEQ ID NO: 672546 - RNA, 24 nt, Artificial Sequence
  Synthetic
guacuggaaggauauagccugauu

SEQ ID NO: 672547 - RNA, 18 nt, Artificial Sequence
  Synthetic
cacaucacaguccugauu

SEQ ID NO: 672548 - RNA, 19 nt, Artificial Sequence
  Synthetic
ucacaucacaguccugauu

SEQ ID NO: 672549 - RNA, 20 nt, Artificial Sequence
  Synthetic
uucacaucacaguccugauu

SEQ ID NO: 672550 - RNA, 21 nt, Artificial Sequence
  Synthetic
auucacaucacaguccugauu

SEQ ID NO: 672551 - RNA, 22 nt, Artificial Sequence
  Synthetic
aauucacaucacaguccugauu

SEQ ID NO: 672552 - RNA, 23 nt, Artificial Sequence
  Synthetic
gaauucacaucacaguccugauu

SEQ ID NO: 672553 - RNA, 24 nt, Artificial Sequence
  Synthetic
agaauucacaucacaguccugauu

SEQ ID NO: 672554 - RNA, 18 nt, Artificial Sequence
  Synthetic
acguuaggaucgcugauu

SEQ ID NO: 672555 - RNA, 19 nt, Artificial Sequence
  Synthetic
aacguuaggaucgcugauu

SEQ ID NO: 672556 - RNA, 20 nt, Artificial Sequence
  Synthetic
gaacguuaggaucgcugauu

SEQ ID NO: 672557 - RNA, 21 nt, Artificial Sequence
  Synthetic
ggaacguuaggaucgcugauu

SEQ ID NO: 672558 - RNA, 22 nt, Artificial Sequence
  Synthetic
gggaacguuaggaucgcugauu

SEQ ID NO: 672559 - RNA, 23 nt, Artificial Sequence
  Synthetic
agggaacguuaggaucgcugauu

SEQ ID NO: 672560 - RNA, 24 nt, Artificial Sequence
  Synthetic
cagggaacguuaggaucgcugauu

SEQ ID NO: 672561 - RNA, 18 nt, Artificial Sequence
  Synthetic
uauuggacauugcugauu

SEQ ID NO: 672562 - RNA, 19 nt, Artificial Sequence
  Synthetic
auauuggacauugcugauu

SEQ ID NO: 672563 - RNA, 20 nt, Artificial Sequence
  Synthetic
uauauuggacauugcugauu

SEQ ID NO: 672564 - RNA, 21 nt, Artificial Sequence
  Synthetic
uuauauuggacauugcugauu

SEQ ID NO: 672565 - RNA, 22 nt, Artificial Sequence
  Synthetic
guuauauuggacauugcugauu

SEQ ID NO: 672566 - RNA, 23 nt, Artificial Sequence
  Synthetic
aguuauauuggacauugcugauu

SEQ ID NO: 672567 - RNA, 24 nt, Artificial Sequence
  Synthetic
aaguuauauuggacauugcugauu

SEQ ID NO: 672568 - RNA, 18 nt, Artificial Sequence
  Synthetic
agagcuuaauaucugauu

SEQ ID NO: 672569 - RNA, 19 nt, Artificial Sequence
  Synthetic
aagagcuuaauaucugauu

SEQ ID NO: 672570 - RNA, 20 nt, Artificial Sequence
  Synthetic
caagagcuuaauaucugauu

SEQ ID NO: 672571 - RNA, 21 nt, Artificial Sequence
  Synthetic
gcaagagcuuaauaucugauu

SEQ ID NO: 672572 - RNA, 22 nt, Artificial Sequence
  Synthetic
agcaagagcuuaauaucugauu

SEQ ID NO: 672573 - RNA, 23 nt, Artificial Sequence
  Synthetic
cagcaagagcuuaauaucugauu

SEQ ID NO: 672574 - RNA, 24 nt, Artificial Sequence
  Synthetic
gcagcaagagcuuaauaucugauu

SEQ ID NO: 672575 - RNA, 18 nt, Artificial Sequence
  Synthetic
ugaaaucugccucugauu

SEQ ID NO: 672576 - RNA, 19 nt, Artificial Sequence
  Synthetic
augaaaucugccucugauu

SEQ ID NO: 672577 - RNA, 20 nt, Artificial Sequence
  Synthetic
aaugaaaucugccucugauu

SEQ ID NO: 672578 - RNA, 21 nt, Artificial Sequence
  Synthetic
aaaugaaaucugccucugauu

SEQ ID NO: 672579 - RNA, 22 nt, Artificial Sequence
  Synthetic
uaaaugaaaucugccucugauu

SEQ ID NO: 672580 - RNA, 23 nt, Artificial Sequence
  Synthetic
uuaaaugaaaucugccucugauu

SEQ ID NO: 672581 - RNA, 24 nt, Artificial Sequence
  Synthetic
auuaaaugaaaucugccucugauu

SEQ ID NO: 672582 - RNA, 18 nt, Artificial Sequence
  Synthetic
uuuccuuggcuucugauu

SEQ ID NO: 672583 - RNA, 19 nt, Artificial Sequence
  Synthetic
uuuuccuuggcuucugauu

SEQ ID NO: 672584 - RNA, 20 nt, Artificial Sequence
  Synthetic
uuuuuccuuggcuucugauu

SEQ ID NO: 672585 - RNA, 21 nt, Artificial Sequence
  Synthetic
uuuuuuccuuggcuucugauu

SEQ ID NO: 672586 - RNA, 22 nt, Artificial Sequence
  Synthetic
auuuuuuccuuggcuucugauu

SEQ ID NO: 672587 - RNA, 23 nt, Artificial Sequence
  Synthetic
gauuuuuuccuuggcuucugauu

SEQ ID NO: 672588 - RNA, 24 nt, Artificial Sequence
  Synthetic
agauuuuuuccuuggcuucugauu

SEQ ID NO: 672589 - RNA, 18 nt, Artificial Sequence
  Synthetic
uagguagaaaaagugauu

SEQ ID NO: 672590 - RNA, 19 nt, Artificial Sequence
  Synthetic
uuagguagaaaaagugauu

SEQ ID NO: 672591 - RNA, 20 nt, Artificial Sequence
  Synthetic
cuuagguagaaaaagugauu

SEQ ID NO: 672592 - RNA, 21 nt, Artificial Sequence
  Synthetic
ucuuagguagaaaaagugauu

SEQ ID NO: 672593 - RNA, 22 nt, Artificial Sequence
  Synthetic
aucuuagguagaaaaagugauu

SEQ ID NO: 672594 - RNA, 23 nt, Artificial Sequence
  Synthetic
uaucuuagguagaaaaagugauu

SEQ ID NO: 672595 - RNA, 24 nt, Artificial Sequence
  Synthetic
guaucuuagguagaaaaagugauu

SEQ ID NO: 672596 - RNA, 18 nt, Artificial Sequence
  Synthetic
gggagccaaacagugauu

SEQ ID NO: 672597 - RNA, 19 nt, Artificial Sequence
  Synthetic
agggagccaaacagugauu

SEQ ID NO: 672598 - RNA, 20 nt, Artificial Sequence
  Synthetic
gagggagccaaacagugauu

SEQ ID NO: 672599 - RNA, 21 nt, Artificial Sequence
  Synthetic
ugagggagccaaacagugauu

SEQ ID NO: 672600 - RNA, 22 nt, Artificial Sequence
  Synthetic
augagggagccaaacagugauu

SEQ ID NO: 672601 - RNA, 23 nt, Artificial Sequence
  Synthetic
aaugagggagccaaacagugauu

SEQ ID NO: 672602 - RNA, 24 nt, Artificial Sequence
  Synthetic
gaaugagggagccaaacagugauu

SEQ ID NO: 672603 - RNA, 18 nt, Artificial Sequence
  Synthetic
uacaagagcacagugauu

SEQ ID NO: 672604 - RNA, 19 nt, Artificial Sequence
  Synthetic
guacaagagcacagugauu

SEQ ID NO: 672605 - RNA, 20 nt, Artificial Sequence
  Synthetic
uguacaagagcacagugauu

SEQ ID NO: 672606 - RNA, 21 nt, Artificial Sequence
  Synthetic
auguacaagagcacagugauu

SEQ ID NO: 672607 - RNA, 22 nt, Artificial Sequence
  Synthetic
uauguacaagagcacagugauu

SEQ ID NO: 672608 - RNA, 23 nt, Artificial Sequence
  Synthetic
uuauguacaagagcacagugauu

SEQ ID NO: 672609 - RNA, 24 nt, Artificial Sequence
  Synthetic
cuuauguacaagagcacagugauu

SEQ ID NO: 672610 - RNA, 18 nt, Artificial Sequence
  Synthetic
uccagcgaaagagugauu

SEQ ID NO: 672611 - RNA, 19 nt, Artificial Sequence
  Synthetic
guccagcgaaagagugauu

SEQ ID NO: 672612 - RNA, 20 nt, Artificial Sequence
  Synthetic
gguccagcgaaagagugauu

SEQ ID NO: 672613 - RNA, 21 nt, Artificial Sequence
  Synthetic
ugguccagcgaaagagugauu

SEQ ID NO: 672614 - RNA, 22 nt, Artificial Sequence
  Synthetic
cugguccagcgaaagagugauu

SEQ ID NO: 672615 - RNA, 23 nt, Artificial Sequence
  Synthetic
gcugguccagcgaaagagugauu

SEQ ID NO: 672616 - RNA, 24 nt, Artificial Sequence
  Synthetic
ugcugguccagcgaaagagugauu

SEQ ID NO: 672617 - RNA, 18 nt, Artificial Sequence
  Synthetic
accagaccuggagugauu

SEQ ID NO: 672618 - RNA, 19 nt, Artificial Sequence
  Synthetic
aaccagaccuggagugauu

SEQ ID NO: 672619 - RNA, 20 nt, Artificial Sequence
  Synthetic
aaaccagaccuggagugauu

SEQ ID NO: 672620 - RNA, 21 nt, Artificial Sequence
  Synthetic
gaaaccagaccuggagugauu

SEQ ID NO: 672621 - RNA, 22 nt, Artificial Sequence
  Synthetic
agaaaccagaccuggagugauu

SEQ ID NO: 672622 - RNA, 23 nt, Artificial Sequence
  Synthetic
uagaaaccagaccuggagugauu

SEQ ID NO: 672623 - RNA, 24 nt, Artificial Sequence
  Synthetic
uuagaaaccagaccuggagugauu

SEQ ID NO: 672624 - RNA, 18 nt, Artificial Sequence
  Synthetic
uagggguugcuagugauu

SEQ ID NO: 672625 - RNA, 19 nt, Artificial Sequence
  Synthetic
uuagggguugcuagugauu

SEQ ID NO: 672626 - RNA, 20 nt, Artificial Sequence
  Synthetic
auuagggguugcuagugauu

SEQ ID NO: 672627 - RNA, 21 nt, Artificial Sequence
  Synthetic
gauuagggguugcuagugauu

SEQ ID NO: 672628 - RNA, 22 nt, Artificial Sequence
  Synthetic
agauuagggguugcuagugauu

SEQ ID NO: 672629 - RNA, 23 nt, Artificial Sequence
  Synthetic
cagauuagggguugcuagugauu

SEQ ID NO: 672630 - RNA, 24 nt, Artificial Sequence
  Synthetic
acagauuagggguugcuagugauu

SEQ ID NO: 672631 - RNA, 18 nt, Artificial Sequence
  Synthetic
ccuggggguggggugauu

SEQ ID NO: 672632 - RNA, 19 nt, Artificial Sequence
  Synthetic
uccuggggguggggugauu

SEQ ID NO: 672633 - RNA, 20 nt, Artificial Sequence
  Synthetic
auccuggggguggggugauu

SEQ ID NO: 672634 - RNA, 21 nt, Artificial Sequence
  Synthetic
gauccuggggguggggugauu

SEQ ID NO: 672635 - RNA, 22 nt, Artificial Sequence
  Synthetic
agauccuggggguggggugauu

SEQ ID NO: 672636 - RNA, 23 nt, Artificial Sequence
  Synthetic
uagauccuggggguggggugauu

SEQ ID NO: 672637 - RNA, 24 nt, Artificial Sequence
  Synthetic
uuagauccuggggguggggugauu

SEQ ID NO: 672638 - RNA, 18 nt, Artificial Sequence
  Synthetic
gcugcguuaauggugauu

SEQ ID NO: 672639 - RNA, 19 nt, Artificial Sequence
  Synthetic
ugcugcguuaauggugauu

SEQ ID NO: 672640 - RNA, 20 nt, Artificial Sequence
  Synthetic
augcugcguuaauggugauu

SEQ ID NO: 672641 - RNA, 21 nt, Artificial Sequence
  Synthetic
aaugcugcguuaauggugauu

SEQ ID NO: 672642 - RNA, 22 nt, Artificial Sequence
  Synthetic
caaugcugcguuaauggugauu

SEQ ID NO: 672643 - RNA, 23 nt, Artificial Sequence
  Synthetic
acaaugcugcguuaauggugauu

SEQ ID NO: 672644 - RNA, 24 nt, Artificial Sequence
  Synthetic
cacaaugcugcguuaauggugauu

SEQ ID NO: 672645 - RNA, 18 nt, Artificial Sequence
  Synthetic
aggcagcaauuggugauu

SEQ ID NO: 672646 - RNA, 19 nt, Artificial Sequence
  Synthetic
aaggcagcaauuggugauu

SEQ ID NO: 672647 - RNA, 20 nt, Artificial Sequence
  Synthetic
aaaggcagcaauuggugauu

SEQ ID NO: 672648 - RNA, 21 nt, Artificial Sequence
  Synthetic
uaaaggcagcaauuggugauu

SEQ ID NO: 672649 - RNA, 22 nt, Artificial Sequence
  Synthetic
auaaaggcagcaauuggugauu

SEQ ID NO: 672650 - RNA, 23 nt, Artificial Sequence
  Synthetic
uauaaaggcagcaauuggugauu

SEQ ID NO: 672651 - RNA, 24 nt, Artificial Sequence
  Synthetic
guauaaaggcagcaauuggugauu

SEQ ID NO: 672652 - RNA, 18 nt, Artificial Sequence
  Synthetic
uuguauuucaaugugauu

SEQ ID NO: 672653 - RNA, 19 nt, Artificial Sequence
  Synthetic
cuuguauuucaaugugauu

SEQ ID NO: 672654 - RNA, 20 nt, Artificial Sequence
  Synthetic
ccuuguauuucaaugugauu

SEQ ID NO: 672655 - RNA, 21 nt, Artificial Sequence
  Synthetic
uccuuguauuucaaugugauu

SEQ ID NO: 672656 - RNA, 22 nt, Artificial Sequence
  Synthetic
auccuuguauuucaaugugauu

SEQ ID NO: 672657 - RNA, 23 nt, Artificial Sequence
  Synthetic
aauccuuguauuucaaugugauu

SEQ ID NO: 672658 - RNA, 24 nt, Artificial Sequence
  Synthetic
aaauccuuguauuucaaugugauu

SEQ ID NO: 672659 - RNA, 18 nt, Artificial Sequence
  Synthetic
uggcagugguaugugauu

SEQ ID NO: 672660 - RNA, 19 nt, Artificial Sequence
  Synthetic
guggcagugguaugugauu

SEQ ID NO: 672661 - RNA, 20 nt, Artificial Sequence
  Synthetic
gguggcagugguaugugauu

SEQ ID NO: 672662 - RNA, 21 nt, Artificial Sequence
  Synthetic
ugguggcagugguaugugauu

SEQ ID NO: 672663 - RNA, 22 nt, Artificial Sequence
  Synthetic
cugguggcagugguaugugauu

SEQ ID NO: 672664 - RNA, 23 nt, Artificial Sequence
  Synthetic
gcugguggcagugguaugugauu

SEQ ID NO: 672665 - RNA, 24 nt, Artificial Sequence
  Synthetic
agcugguggcagugguaugugauu

SEQ ID NO: 672666 - RNA, 18 nt, Artificial Sequence
  Synthetic
uuaacuugagcugugauu

SEQ ID NO: 672667 - RNA, 19 nt, Artificial Sequence
  Synthetic
guuaacuugagcugugauu

SEQ ID NO: 672668 - RNA, 20 nt, Artificial Sequence
  Synthetic
aguuaacuugagcugugauu

SEQ ID NO: 672669 - RNA, 21 nt, Artificial Sequence
  Synthetic
aaguuaacuugagcugugauu

SEQ ID NO: 672670 - RNA, 22 nt, Artificial Sequence
  Synthetic
aaaguuaacuugagcugugauu

SEQ ID NO: 672671 - RNA, 23 nt, Artificial Sequence
  Synthetic
caaaguuaacuugagcugugauu

SEQ ID NO: 672672 - RNA, 24 nt, Artificial Sequence
  Synthetic
acaaaguuaacuugagcugugauu

SEQ ID NO: 672673 - RNA, 18 nt, Artificial Sequence
  Synthetic
aacaucaauuaauugauu

SEQ ID NO: 672674 - RNA, 19 nt, Artificial Sequence
  Synthetic
uaacaucaauuaauugauu

SEQ ID NO: 672675 - RNA, 20 nt, Artificial Sequence
  Synthetic
cuaacaucaauuaauugauu

SEQ ID NO: 672676 - RNA, 21 nt, Artificial Sequence
  Synthetic
ucuaacaucaauuaauugauu

SEQ ID NO: 672677 - RNA, 22 nt, Artificial Sequence
  Synthetic
gucuaacaucaauuaauugauu

SEQ ID NO: 672678 - RNA, 23 nt, Artificial Sequence
  Synthetic
ugucuaacaucaauuaauugauu

SEQ ID NO: 672679 - RNA, 24 nt, Artificial Sequence
  Synthetic
gugucuaacaucaauuaauugauu

SEQ ID NO: 672680 - RNA, 18 nt, Artificial Sequence
  Synthetic
aaccagcagucauugauu

SEQ ID NO: 672681 - RNA, 19 nt, Artificial Sequence
  Synthetic
caaccagcagucauugauu

SEQ ID NO: 672682 - RNA, 20 nt, Artificial Sequence
  Synthetic
gcaaccagcagucauugauu

SEQ ID NO: 672683 - RNA, 21 nt, Artificial Sequence
  Synthetic
ugcaaccagcagucauugauu

SEQ ID NO: 672684 - RNA, 22 nt, Artificial Sequence
  Synthetic
cugcaaccagcagucauugauu

SEQ ID NO: 672685 - RNA, 23 nt, Artificial Sequence
  Synthetic
ucugcaaccagcagucauugauu

SEQ ID NO: 672686 - RNA, 24 nt, Artificial Sequence
  Synthetic
gucugcaaccagcagucauugauu

SEQ ID NO: 672687 - RNA, 18 nt, Artificial Sequence
  Synthetic
gggcuggagagauugauu

SEQ ID NO: 672688 - RNA, 19 nt, Artificial Sequence
  Synthetic
agggcuggagagauugauu

SEQ ID NO: 672689 - RNA, 20 nt, Artificial Sequence
  Synthetic
uagggcuggagagauugauu

SEQ ID NO: 672690 - RNA, 21 nt, Artificial Sequence
  Synthetic
uuagggcuggagagauugauu

SEQ ID NO: 672691 - RNA, 22 nt, Artificial Sequence
  Synthetic
uuuagggcuggagagauugauu

SEQ ID NO: 672692 - RNA, 23 nt, Artificial Sequence
  Synthetic
uuuuagggcuggagagauugauu

SEQ ID NO: 672693 - RNA, 24 nt, Artificial Sequence
  Synthetic
auuuuagggcuggagagauugauu

SEQ ID NO: 672694 - RNA, 18 nt, Artificial Sequence
  Synthetic
ugaauauagguauugauu

SEQ ID NO: 672695 - RNA, 19 nt, Artificial Sequence
  Synthetic
augaauauagguauugauu

SEQ ID NO: 672696 - RNA, 20 nt, Artificial Sequence
  Synthetic
uaugaauauagguauugauu

SEQ ID NO: 672697 - RNA, 21 nt, Artificial Sequence
  Synthetic
guaugaauauagguauugauu

SEQ ID NO: 672698 - RNA, 22 nt, Artificial Sequence
  Synthetic
aguaugaauauagguauugauu

SEQ ID NO: 672699 - RNA, 23 nt, Artificial Sequence
  Synthetic
gaguaugaauauagguauugauu

SEQ ID NO: 672700 - RNA, 24 nt, Artificial Sequence
  Synthetic
ugaguaugaauauagguauugauu

SEQ ID NO: 672701 - RNA, 18 nt, Artificial Sequence
  Synthetic
uuugucagugacuugauu

SEQ ID NO: 672702 - RNA, 19 nt, Artificial Sequence
  Synthetic
auuugucagugacuugauu

SEQ ID NO: 672703 - RNA, 20 nt, Artificial Sequence
  Synthetic
cauuugucagugacuugauu

SEQ ID NO: 672704 - RNA, 21 nt, Artificial Sequence
  Synthetic
gcauuugucagugacuugauu

SEQ ID NO: 672705 - RNA, 22 nt, Artificial Sequence
  Synthetic
ggcauuugucagugacuugauu

SEQ ID NO: 672706 - RNA, 23 nt, Artificial Sequence
  Synthetic
uggcauuugucagugacuugauu

SEQ ID NO: 672707 - RNA, 24 nt, Artificial Sequence
  Synthetic
guggcauuugucagugacuugauu

SEQ ID NO: 672708 - RNA, 18 nt, Artificial Sequence
  Synthetic
ggauaauugaccuugauu

SEQ ID NO: 672709 - RNA, 19 nt, Artificial Sequence
  Synthetic
gggauaauugaccuugauu

SEQ ID NO: 672710 - RNA, 20 nt, Artificial Sequence
  Synthetic
agggauaauugaccuugauu

SEQ ID NO: 672711 - RNA, 21 nt, Artificial Sequence
  Synthetic
gagggauaauugaccuugauu

SEQ ID NO: 672712 - RNA, 22 nt, Artificial Sequence
  Synthetic
agagggauaauugaccuugauu

SEQ ID NO: 672713 - RNA, 23 nt, Artificial Sequence
  Synthetic
cagagggauaauugaccuugauu

SEQ ID NO: 672714 - RNA, 24 nt, Artificial Sequence
  Synthetic
ucagagggauaauugaccuugauu

SEQ ID NO: 672715 - RNA, 18 nt, Artificial Sequence
  Synthetic
uuuuccaaaagcuugauu

SEQ ID NO: 672716 - RNA, 19 nt, Artificial Sequence
  Synthetic
cuuuuccaaaagcuugauu

SEQ ID NO: 672717 - RNA, 20 nt, Artificial Sequence
  Synthetic
acuuuuccaaaagcuugauu

SEQ ID NO: 672718 - RNA, 21 nt, Artificial Sequence
  Synthetic
gacuuuuccaaaagcuugauu

SEQ ID NO: 672719 - RNA, 22 nt, Artificial Sequence
  Synthetic
ugacuuuuccaaaagcuugauu

SEQ ID NO: 672720 - RNA, 23 nt, Artificial Sequence
  Synthetic
uugacuuuuccaaaagcuugauu

SEQ ID NO: 672721 - RNA, 24 nt, Artificial Sequence
  Synthetic
uuugacuuuuccaaaagcuugauu

SEQ ID NO: 672722 - RNA, 18 nt, Artificial Sequence
  Synthetic
aauacauuauuguugauu

SEQ ID NO: 672723 - RNA, 19 nt, Artificial Sequence
  Synthetic
aaauacauuauuguugauu

SEQ ID NO: 672724 - RNA, 20 nt, Artificial Sequence
  Synthetic
caaauacauuauuguugauu

SEQ ID NO: 672725 - RNA, 21 nt, Artificial Sequence
  Synthetic
gcaaauacauuauuguugauu

SEQ ID NO: 672726 - RNA, 22 nt, Artificial Sequence
  Synthetic
ggcaaauacauuauuguugauu

SEQ ID NO: 672727 - RNA, 23 nt, Artificial Sequence
  Synthetic
uggcaaauacauuauuguugauu

SEQ ID NO: 672728 - RNA, 24 nt, Artificial Sequence
  Synthetic
uuggcaaauacauuauuguugauu

SEQ ID NO: 672729 - RNA, 18 nt, Artificial Sequence
  Synthetic
aaauacccacauuugauu

SEQ ID NO: 672730 - RNA, 19 nt, Artificial Sequence
  Synthetic
caaauacccacauuugauu

SEQ ID NO: 672731 - RNA, 20 nt, Artificial Sequence
  Synthetic
ccaaauacccacauuugauu

SEQ ID NO: 672732 - RNA, 21 nt, Artificial Sequence
  Synthetic
uccaaauacccacauuugauu

SEQ ID NO: 672733 - RNA, 22 nt, Artificial Sequence
  Synthetic
guccaaauacccacauuugauu

SEQ ID NO: 672734 - RNA, 23 nt, Artificial Sequence
  Synthetic
uguccaaauacccacauuugauu

SEQ ID NO: 672735 - RNA, 24 nt, Artificial Sequence
  Synthetic
uuguccaaauacccacauuugauu

SEQ ID NO: 672736 - RNA, 18 nt, Artificial Sequence
  Synthetic
aagcuugaggauuugauu

SEQ ID NO: 672737 - RNA, 19 nt, Artificial Sequence
  Synthetic
uaagcuugaggauuugauu

SEQ ID NO: 672738 - RNA, 20 nt, Artificial Sequence
  Synthetic
guaagcuugaggauuugauu

SEQ ID NO: 672739 - RNA, 21 nt, Artificial Sequence
  Synthetic
gguaagcuugaggauuugauu

SEQ ID NO: 672740 - RNA, 22 nt, Artificial Sequence
  Synthetic
agguaagcuugaggauuugauu

SEQ ID NO: 672741 - RNA, 23 nt, Artificial Sequence
  Synthetic
gagguaagcuugaggauuugauu

SEQ ID NO: 672742 - RNA, 24 nt, Artificial Sequence
  Synthetic
cgagguaagcuugaggauuugauu

SEQ ID NO: 672743 - RNA, 18 nt, Artificial Sequence
  Synthetic
gcuuauuaugauuugauu

SEQ ID NO: 672744 - RNA, 19 nt, Artificial Sequence
  Synthetic
ugcuuauuaugauuugauu

SEQ ID NO: 672745 - RNA, 20 nt, Artificial Sequence
  Synthetic
cugcuuauuaugauuugauu

SEQ ID NO: 672746 - RNA, 21 nt, Artificial Sequence
  Synthetic
ucugcuuauuaugauuugauu

SEQ ID NO: 672747 - RNA, 22 nt, Artificial Sequence
  Synthetic
uucugcuuauuaugauuugauu

SEQ ID NO: 672748 - RNA, 23 nt, Artificial Sequence
  Synthetic
cuucugcuuauuaugauuugauu

SEQ ID NO: 672749 - RNA, 24 nt, Artificial Sequence
  Synthetic
acuucugcuuauuaugauuugauu

SEQ ID NO: 672750 - RNA, 18 nt, Artificial Sequence
  Synthetic
auauuuacaacuuugauu

SEQ ID NO: 672751 - RNA, 19 nt, Artificial Sequence
  Synthetic
cauauuuacaacuuugauu

SEQ ID NO: 672752 - RNA, 20 nt, Artificial Sequence
  Synthetic
ccauauuuacaacuuugauu

SEQ ID NO: 672753 - RNA, 21 nt, Artificial Sequence
  Synthetic
gccauauuuacaacuuugauu

SEQ ID NO: 672754 - RNA, 22 nt, Artificial Sequence
  Synthetic
agccauauuuacaacuuugauu

SEQ ID NO: 672755 - RNA, 23 nt, Artificial Sequence
  Synthetic
gagccauauuuacaacuuugauu

SEQ ID NO: 672756 - RNA, 24 nt, Artificial Sequence
  Synthetic
agagccauauuuacaacuuugauu

SEQ ID NO: 672757 - RNA, 18 nt, Artificial Sequence
  Synthetic
ucccuucucauuuugauu

SEQ ID NO: 672758 - RNA, 19 nt, Artificial Sequence
  Synthetic
gucccuucucauuuugauu

SEQ ID NO: 672759 - RNA, 20 nt, Artificial Sequence
  Synthetic
agucccuucucauuuugauu

SEQ ID NO: 672760 - RNA, 21 nt, Artificial Sequence
  Synthetic
uagucccuucucauuuugauu

SEQ ID NO: 672761 - RNA, 22 nt, Artificial Sequence
  Synthetic
guagucccuucucauuuugauu

SEQ ID NO: 672762 - RNA, 23 nt, Artificial Sequence
  Synthetic
uguagucccuucucauuuugauu

SEQ ID NO: 672763 - RNA, 24 nt, Artificial Sequence
  Synthetic
guguagucccuucucauuuugauu

SEQ ID NO: 672764 - RNA, 18 nt, Artificial Sequence
  Synthetic
gaauggcagauuuugauu

SEQ ID NO: 672765 - RNA, 19 nt, Artificial Sequence
  Synthetic
cgaauggcagauuuugauu

SEQ ID NO: 672766 - RNA, 20 nt, Artificial Sequence
  Synthetic
acgaauggcagauuuugauu

SEQ ID NO: 672767 - RNA, 21 nt, Artificial Sequence
  Synthetic
aacgaauggcagauuuugauu

SEQ ID NO: 672768 - RNA, 22 nt, Artificial Sequence
  Synthetic
aaacgaauggcagauuuugauu

SEQ ID NO: 672769 - RNA, 23 nt, Artificial Sequence
  Synthetic
aaaacgaauggcagauuuugauu

SEQ ID NO: 672770 - RNA, 24 nt, Artificial Sequence
  Synthetic
uaaaacgaauggcagauuuugauu

SEQ ID NO: 672771 - RNA, 18 nt, Artificial Sequence
  Synthetic
uuauagggccuuuugauu

SEQ ID NO: 672772 - RNA, 19 nt, Artificial Sequence
  Synthetic
uuuauagggccuuuugauu

SEQ ID NO: 672773 - RNA, 20 nt, Artificial Sequence
  Synthetic
uuuuauagggccuuuugauu

SEQ ID NO: 672774 - RNA, 21 nt, Artificial Sequence
  Synthetic
guuuuauagggccuuuugauu

SEQ ID NO: 672775 - RNA, 22 nt, Artificial Sequence
  Synthetic
uguuuuauagggccuuuugauu

SEQ ID NO: 672776 - RNA, 23 nt, Artificial Sequence
  Synthetic
auguuuuauagggccuuuugauu

SEQ ID NO: 672777 - RNA, 24 nt, Artificial Sequence
  Synthetic
aauguuuuauagggccuuuugauu

SEQ ID NO: 672778 - RNA, 18 nt, Artificial Sequence
  Synthetic
aacaacaauaaaaauauu

SEQ ID NO: 672779 - RNA, 19 nt, Artificial Sequence
  Synthetic
aaacaacaauaaaaauauu

SEQ ID NO: 672780 - RNA, 20 nt, Artificial Sequence
  Synthetic
gaaacaacaauaaaaauauu

SEQ ID NO: 672781 - RNA, 21 nt, Artificial Sequence
  Synthetic
agaaacaacaauaaaaauauu

SEQ ID NO: 672782 - RNA, 22 nt, Artificial Sequence
  Synthetic
gagaaacaacaauaaaaauauu

SEQ ID NO: 672783 - RNA, 23 nt, Artificial Sequence
  Synthetic
cgagaaacaacaauaaaaauauu

SEQ ID NO: 672784 - RNA, 24 nt, Artificial Sequence
  Synthetic
ccgagaaacaacaauaaaaauauu

SEQ ID NO: 672785 - RNA, 18 nt, Artificial Sequence
  Synthetic
cuccaacauaaaaauauu

SEQ ID NO: 672786 - RNA, 19 nt, Artificial Sequence
  Synthetic
ucuccaacauaaaaauauu

SEQ ID NO: 672787 - RNA, 20 nt, Artificial Sequence
  Synthetic
uucuccaacauaaaaauauu

SEQ ID NO: 672788 - RNA, 21 nt, Artificial Sequence
  Synthetic
uuucuccaacauaaaaauauu

SEQ ID NO: 672789 - RNA, 22 nt, Artificial Sequence
  Synthetic
cuuucuccaacauaaaaauauu

SEQ ID NO: 672790 - RNA, 23 nt, Artificial Sequence
  Synthetic
ucuuucuccaacauaaaaauauu

SEQ ID NO: 672791 - RNA, 24 nt, Artificial Sequence
  Synthetic
cucuuucuccaacauaaaaauauu

SEQ ID NO: 672792 - RNA, 18 nt, Artificial Sequence
  Synthetic
uuuuuacugcaaaauauu

SEQ ID NO: 672793 - RNA, 19 nt, Artificial Sequence
  Synthetic
uuuuuuacugcaaaauauu

SEQ ID NO: 672794 - RNA, 20 nt, Artificial Sequence
  Synthetic
cuuuuuuacugcaaaauauu

SEQ ID NO: 672795 - RNA, 21 nt, Artificial Sequence
  Synthetic
acuuuuuuacugcaaaauauu

SEQ ID NO: 672796 - RNA, 22 nt, Artificial Sequence
  Synthetic
uacuuuuuuacugcaaaauauu

SEQ ID NO: 672797 - RNA, 23 nt, Artificial Sequence
  Synthetic
cuacuuuuuuacugcaaaauauu

SEQ ID NO: 672798 - RNA, 24 nt, Artificial Sequence
  Synthetic
acuacuuuuuuacugcaaaauauu

SEQ ID NO: 672799 - RNA, 18 nt, Artificial Sequence
  Synthetic
gacaaaucucaaaauauu

SEQ ID NO: 672800 - RNA, 19 nt, Artificial Sequence
  Synthetic
ggacaaaucucaaaauauu

SEQ ID NO: 672801 - RNA, 20 nt, Artificial Sequence
  Synthetic
gggacaaaucucaaaauauu

SEQ ID NO: 672802 - RNA, 21 nt, Artificial Sequence
  Synthetic
ugggacaaaucucaaaauauu

SEQ ID NO: 672803 - RNA, 22 nt, Artificial Sequence
  Synthetic
augggacaaaucucaaaauauu

SEQ ID NO: 672804 - RNA, 23 nt, Artificial Sequence
  Synthetic
gaugggacaaaucucaaaauauu

SEQ ID NO: 672805 - RNA, 24 nt, Artificial Sequence
  Synthetic
ugaugggacaaaucucaaaauauu

SEQ ID NO: 672806 - RNA, 18 nt, Artificial Sequence
  Synthetic
auaaagaaggaaaauauu

SEQ ID NO: 672807 - RNA, 19 nt, Artificial Sequence
  Synthetic
gauaaagaaggaaaauauu

SEQ ID NO: 672808 - RNA, 20 nt, Artificial Sequence
  Synthetic
agauaaagaaggaaaauauu

SEQ ID NO: 672809 - RNA, 21 nt, Artificial Sequence
  Synthetic
aagauaaagaaggaaaauauu

SEQ ID NO: 672810 - RNA, 22 nt, Artificial Sequence
  Synthetic
gaagauaaagaaggaaaauauu

SEQ ID NO: 672811 - RNA, 23 nt, Artificial Sequence
  Synthetic
agaagauaaagaaggaaaauauu

SEQ ID NO: 672812 - RNA, 24 nt, Artificial Sequence
  Synthetic
aagaagauaaagaaggaaaauauu

SEQ ID NO: 672813 - RNA, 18 nt, Artificial Sequence
  Synthetic
acauaucuugaaaauauu

SEQ ID NO: 672814 - RNA, 19 nt, Artificial Sequence
  Synthetic
gacauaucuugaaaauauu

SEQ ID NO: 672815 - RNA, 20 nt, Artificial Sequence
  Synthetic
ggacauaucuugaaaauauu

SEQ ID NO: 672816 - RNA, 21 nt, Artificial Sequence
  Synthetic
uggacauaucuugaaaauauu

SEQ ID NO: 672817 - RNA, 22 nt, Artificial Sequence
  Synthetic
uuggacauaucuugaaaauauu

SEQ ID NO: 672818 - RNA, 23 nt, Artificial Sequence
  Synthetic
auuggacauaucuugaaaauauu

SEQ ID NO: 672819 - RNA, 24 nt, Artificial Sequence
  Synthetic
aauuggacauaucuugaaaauauu

SEQ ID NO: 672820 - RNA, 18 nt, Artificial Sequence
  Synthetic
auucauucaacaaauauu

SEQ ID NO: 672821 - RNA, 19 nt, Artificial Sequence
  Synthetic
cauucauucaacaaauauu

SEQ ID NO: 672822 - RNA, 20 nt, Artificial Sequence
  Synthetic
ucauucauucaacaaauauu

SEQ ID NO: 672823 - RNA, 21 nt, Artificial Sequence
  Synthetic
gucauucauucaacaaauauu

SEQ ID NO: 672824 - RNA, 22 nt, Artificial Sequence
  Synthetic
ggucauucauucaacaaauauu

SEQ ID NO: 672825 - RNA, 23 nt, Artificial Sequence
  Synthetic
aggucauucauucaacaaauauu

SEQ ID NO: 672826 - RNA, 24 nt, Artificial Sequence
  Synthetic
uaggucauucauucaacaaauauu

SEQ ID NO: 672827 - RNA, 18 nt, Artificial Sequence
  Synthetic
ggaggccaugcaaauauu

SEQ ID NO: 672828 - RNA, 19 nt, Artificial Sequence
  Synthetic
aggaggccaugcaaauauu

SEQ ID NO: 672829 - RNA, 20 nt, Artificial Sequence
  Synthetic
gaggaggccaugcaaauauu

SEQ ID NO: 672830 - RNA, 21 nt, Artificial Sequence
  Synthetic
ggaggaggccaugcaaauauu

SEQ ID NO: 672831 - RNA, 22 nt, Artificial Sequence
  Synthetic
gggaggaggccaugcaaauauu

SEQ ID NO: 672832 - RNA, 23 nt, Artificial Sequence
  Synthetic
agggaggaggccaugcaaauauu

SEQ ID NO: 672833 - RNA, 24 nt, Artificial Sequence
  Synthetic
gagggaggaggccaugcaaauauu

SEQ ID NO: 672834 - RNA, 18 nt, Artificial Sequence
  Synthetic
caugaggacucaaauauu

SEQ ID NO: 672835 - RNA, 19 nt, Artificial Sequence
  Synthetic
ccaugaggacucaaauauu

SEQ ID NO: 672836 - RNA, 20 nt, Artificial Sequence
  Synthetic
gccaugaggacucaaauauu

SEQ ID NO: 672837 - RNA, 21 nt, Artificial Sequence
  Synthetic
ggccaugaggacucaaauauu

SEQ ID NO: 672838 - RNA, 22 nt, Artificial Sequence
  Synthetic
uggccaugaggacucaaauauu

SEQ ID NO: 672839 - RNA, 23 nt, Artificial Sequence
  Synthetic
uuggccaugaggacucaaauauu

SEQ ID NO: 672840 - RNA, 24 nt, Artificial Sequence
  Synthetic
cuuggccaugaggacucaaauauu

SEQ ID NO: 672841 - RNA, 18 nt, Artificial Sequence
  Synthetic
gcugaaccaagaaauauu

SEQ ID NO: 672842 - RNA, 19 nt, Artificial Sequence
  Synthetic
agcugaaccaagaaauauu

SEQ ID NO: 672843 - RNA, 20 nt, Artificial Sequence
  Synthetic
aagcugaaccaagaaauauu

SEQ ID NO: 672844 - RNA, 21 nt, Artificial Sequence
  Synthetic
aaagcugaaccaagaaauauu

SEQ ID NO: 672845 - RNA, 22 nt, Artificial Sequence
  Synthetic
gaaagcugaaccaagaaauauu

SEQ ID NO: 672846 - RNA, 23 nt, Artificial Sequence
  Synthetic
ugaaagcugaaccaagaaauauu

SEQ ID NO: 672847 - RNA, 24 nt, Artificial Sequence
  Synthetic
augaaagcugaaccaagaaauauu

SEQ ID NO: 672848 - RNA, 18 nt, Artificial Sequence
  Synthetic
uuuaaauuccgaaauauu

SEQ ID NO: 672849 - RNA, 19 nt, Artificial Sequence
  Synthetic
cuuuaaauuccgaaauauu

SEQ ID NO: 672850 - RNA, 20 nt, Artificial Sequence
  Synthetic
gcuuuaaauuccgaaauauu

SEQ ID NO: 672851 - RNA, 21 nt, Artificial Sequence
  Synthetic
ggcuuuaaauuccgaaauauu

SEQ ID NO: 672852 - RNA, 22 nt, Artificial Sequence
  Synthetic
aggcuuuaaauuccgaaauauu

SEQ ID NO: 672853 - RNA, 23 nt, Artificial Sequence
  Synthetic
caggcuuuaaauuccgaaauauu

SEQ ID NO: 672854 - RNA, 24 nt, Artificial Sequence
  Synthetic
ccaggcuuuaaauuccgaaauauu

SEQ ID NO: 672855 - RNA, 18 nt, Artificial Sequence
  Synthetic
aaaagggauggaaauauu

SEQ ID NO: 672856 - RNA, 19 nt, Artificial Sequence
  Synthetic
gaaaagggauggaaauauu

SEQ ID NO: 672857 - RNA, 20 nt, Artificial Sequence
  Synthetic
ggaaaagggauggaaauauu

SEQ ID NO: 672858 - RNA, 21 nt, Artificial Sequence
  Synthetic
uggaaaagggauggaaauauu

SEQ ID NO: 672859 - RNA, 22 nt, Artificial Sequence
  Synthetic
auggaaaagggauggaaauauu

SEQ ID NO: 672860 - RNA, 23 nt, Artificial Sequence
  Synthetic
cauggaaaagggauggaaauauu

SEQ ID NO: 672861 - RNA, 24 nt, Artificial Sequence
  Synthetic
gcauggaaaagggauggaaauauu

SEQ ID NO: 672862 - RNA, 18 nt, Artificial Sequence
  Synthetic
cacguaguaugaaauauu

SEQ ID NO: 672863 - RNA, 19 nt, Artificial Sequence
  Synthetic
gcacguaguaugaaauauu

SEQ ID NO: 672864 - RNA, 20 nt, Artificial Sequence
  Synthetic
ugcacguaguaugaaauauu

SEQ ID NO: 672865 - RNA, 21 nt, Artificial Sequence
  Synthetic
augcacguaguaugaaauauu

SEQ ID NO: 672866 - RNA, 22 nt, Artificial Sequence
  Synthetic
aaugcacguaguaugaaauauu

SEQ ID NO: 672867 - RNA, 23 nt, Artificial Sequence
  Synthetic
aaaugcacguaguaugaaauauu

SEQ ID NO: 672868 - RNA, 24 nt, Artificial Sequence
  Synthetic
aaaaugcacguaguaugaaauauu

SEQ ID NO: 672869 - RNA, 18 nt, Artificial Sequence
  Synthetic
aaacucuugugaaauauu

SEQ ID NO: 672870 - RNA, 19 nt, Artificial Sequence
  Synthetic
gaaacucuugugaaauauu

SEQ ID NO: 672871 - RNA, 20 nt, Artificial Sequence
  Synthetic
ugaaacucuugugaaauauu

SEQ ID NO: 672872 - RNA, 21 nt, Artificial Sequence
  Synthetic
gugaaacucuugugaaauauu

SEQ ID NO: 672873 - RNA, 22 nt, Artificial Sequence
  Synthetic
ugugaaacucuugugaaauauu

SEQ ID NO: 672874 - RNA, 23 nt, Artificial Sequence
  Synthetic
uugugaaacucuugugaaauauu

SEQ ID NO: 672875 - RNA, 24 nt, Artificial Sequence
  Synthetic
uuugugaaacucuugugaaauauu

SEQ ID NO: 672876 - RNA, 18 nt, Artificial Sequence
  Synthetic
caaggagaccuaaauauu

SEQ ID NO: 672877 - RNA, 19 nt, Artificial Sequence
  Synthetic
ucaaggagaccuaaauauu

SEQ ID NO: 672878 - RNA, 20 nt, Artificial Sequence
  Synthetic
cucaaggagaccuaaauauu

SEQ ID NO: 672879 - RNA, 21 nt, Artificial Sequence
  Synthetic
acucaaggagaccuaaauauu

SEQ ID NO: 672880 - RNA, 22 nt, Artificial Sequence
  Synthetic
cacucaaggagaccuaaauauu

SEQ ID NO: 672881 - RNA, 23 nt, Artificial Sequence
  Synthetic
acacucaaggagaccuaaauauu

SEQ ID NO: 672882 - RNA, 24 nt, Artificial Sequence
  Synthetic
aacacucaaggagaccuaaauauu

SEQ ID NO: 672883 - RNA, 18 nt, Artificial Sequence
  Synthetic
uccauuaaaguaaauauu

SEQ ID NO: 672884 - RNA, 19 nt, Artificial Sequence
  Synthetic
guccauuaaaguaaauauu

SEQ ID NO: 672885 - RNA, 20 nt, Artificial Sequence
  Synthetic
cguccauuaaaguaaauauu

SEQ ID NO: 672886 - RNA, 21 nt, Artificial Sequence
  Synthetic
gcguccauuaaaguaaauauu

SEQ ID NO: 672887 - RNA, 22 nt, Artificial Sequence
  Synthetic
ugcguccauuaaaguaaauauu

SEQ ID NO: 672888 - RNA, 23 nt, Artificial Sequence
  Synthetic
uugcguccauuaaaguaaauauu

SEQ ID NO: 672889 - RNA, 24 nt, Artificial Sequence
  Synthetic
guugcguccauuaaaguaaauauu

SEQ ID NO: 672890 - RNA, 18 nt, Artificial Sequence
  Synthetic
aauuaauaaguaaauauu

SEQ ID NO: 672891 - RNA, 19 nt, Artificial Sequence
  Synthetic
gaauuaauaaguaaauauu

SEQ ID NO: 672892 - RNA, 20 nt, Artificial Sequence
  Synthetic
ugaauuaauaaguaaauauu

SEQ ID NO: 672893 - RNA, 21 nt, Artificial Sequence
  Synthetic
augaauuaauaaguaaauauu

SEQ ID NO: 672894 - RNA, 22 nt, Artificial Sequence
  Synthetic
aaugaauuaauaaguaaauauu

SEQ ID NO: 672895 - RNA, 23 nt, Artificial Sequence
  Synthetic
aaaugaauuaauaaguaaauauu

SEQ ID NO: 672896 - RNA, 24 nt, Artificial Sequence
  Synthetic
aaaaugaauuaauaaguaaauauu

SEQ ID NO: 672897 - RNA, 18 nt, Artificial Sequence
  Synthetic
aaaauaguuuuaaauauu

SEQ ID NO: 672898 - RNA, 19 nt, Artificial Sequence
  Synthetic
gaaaauaguuuuaaauauu

SEQ ID NO: 672899 - RNA, 20 nt, Artificial Sequence
  Synthetic
agaaaauaguuuuaaauauu

SEQ ID NO: 672900 - RNA, 21 nt, Artificial Sequence
  Synthetic
aagaaaauaguuuuaaauauu

SEQ ID NO: 672901 - RNA, 22 nt, Artificial Sequence
  Synthetic
aaagaaaauaguuuuaaauauu

SEQ ID NO: 672902 - RNA, 23 nt, Artificial Sequence
  Synthetic
aaaagaaaauaguuuuaaauauu

SEQ ID NO: 672903 - RNA, 24 nt, Artificial Sequence
  Synthetic
gaaaagaaaauaguuuuaaauauu

SEQ ID NO: 672904 - RNA, 18 nt, Artificial Sequence
  Synthetic
acuaauuaaaacaauauu

SEQ ID NO: 672905 - RNA, 19 nt, Artificial Sequence
  Synthetic
cacuaauuaaaacaauauu

SEQ ID NO: 672906 - RNA, 20 nt, Artificial Sequence
  Synthetic
acacuaauuaaaacaauauu

SEQ ID NO: 672907 - RNA, 21 nt, Artificial Sequence
  Synthetic
uacacuaauuaaaacaauauu

SEQ ID NO: 672908 - RNA, 22 nt, Artificial Sequence
  Synthetic
auacacuaauuaaaacaauauu

SEQ ID NO: 672909 - RNA, 23 nt, Artificial Sequence
  Synthetic
aauacacuaauuaaaacaauauu

SEQ ID NO: 672910 - RNA, 24 nt, Artificial Sequence
  Synthetic
uaauacacuaauuaaaacaauauu

SEQ ID NO: 672911 - RNA, 18 nt, Artificial Sequence
  Synthetic
gccaauuuuaacaauauu

SEQ ID NO: 672912 - RNA, 19 nt, Artificial Sequence
  Synthetic
ugccaauuuuaacaauauu

SEQ ID NO: 672913 - RNA, 20 nt, Artificial Sequence
  Synthetic
uugccaauuuuaacaauauu

SEQ ID NO: 672914 - RNA, 21 nt, Artificial Sequence
  Synthetic
cuugccaauuuuaacaauauu

SEQ ID NO: 672915 - RNA, 22 nt, Artificial Sequence
  Synthetic
ccuugccaauuuuaacaauauu

SEQ ID NO: 672916 - RNA, 23 nt, Artificial Sequence
  Synthetic
cccuugccaauuuuaacaauauu

SEQ ID NO: 672917 - RNA, 24 nt, Artificial Sequence
  Synthetic
ccccuugccaauuuuaacaauauu

SEQ ID NO: 672918 - RNA, 18 nt, Artificial Sequence
  Synthetic
uaauuggcucccaauauu

SEQ ID NO: 672919 - RNA, 19 nt, Artificial Sequence
  Synthetic
cuaauuggcucccaauauu

SEQ ID NO: 672920 - RNA, 20 nt, Artificial Sequence
  Synthetic
acuaauuggcucccaauauu

SEQ ID NO: 672921 - RNA, 21 nt, Artificial Sequence
  Synthetic
uacuaauuggcucccaauauu

SEQ ID NO: 672922 - RNA, 22 nt, Artificial Sequence
  Synthetic
cuacuaauuggcucccaauauu

SEQ ID NO: 672923 - RNA, 23 nt, Artificial Sequence
  Synthetic
acuacuaauuggcucccaauauu

SEQ ID NO: 672924 - RNA, 24 nt, Artificial Sequence
  Synthetic
uacuacuaauuggcucccaauauu

SEQ ID NO: 672925 - RNA, 18 nt, Artificial Sequence
  Synthetic
acacauggaaagaauauu

SEQ ID NO: 672926 - RNA, 19 nt, Artificial Sequence
  Synthetic
uacacauggaaagaauauu

SEQ ID NO: 672927 - RNA, 20 nt, Artificial Sequence
  Synthetic
cuacacauggaaagaauauu

SEQ ID NO: 672928 - RNA, 21 nt, Artificial Sequence
  Synthetic
acuacacauggaaagaauauu

SEQ ID NO: 672929 - RNA, 22 nt, Artificial Sequence
  Synthetic
uacuacacauggaaagaauauu

SEQ ID NO: 672930 - RNA, 23 nt, Artificial Sequence
  Synthetic
auacuacacauggaaagaauauu

SEQ ID NO: 672931 - RNA, 24 nt, Artificial Sequence
  Synthetic
aauacuacacauggaaagaauauu

SEQ ID NO: 672932 - RNA, 18 nt, Artificial Sequence
  Synthetic
auuaagguaaagaauauu

SEQ ID NO: 672933 - RNA, 19 nt, Artificial Sequence
  Synthetic
aauuaagguaaagaauauu

SEQ ID NO: 672934 - RNA, 20 nt, Artificial Sequence
  Synthetic
gaauuaagguaaagaauauu

SEQ ID NO: 672935 - RNA, 21 nt, Artificial Sequence
  Synthetic
ggaauuaagguaaagaauauu

SEQ ID NO: 672936 - RNA, 22 nt, Artificial Sequence
  Synthetic
gggaauuaagguaaagaauauu

SEQ ID NO: 672937 - RNA, 23 nt, Artificial Sequence
  Synthetic
ugggaauuaagguaaagaauauu

SEQ ID NO: 672938 - RNA, 24 nt, Artificial Sequence
  Synthetic
uugggaauuaagguaaagaauauu

SEQ ID NO: 672939 - RNA, 18 nt, Artificial Sequence
  Synthetic
aggagucuguagaauauu

SEQ ID NO: 672940 - RNA, 19 nt, Artificial Sequence
  Synthetic
aaggagucuguagaauauu

SEQ ID NO: 672941 - RNA, 20 nt, Artificial Sequence
  Synthetic
gaaggagucuguagaauauu

SEQ ID NO: 672942 - RNA, 21 nt, Artificial Sequence
  Synthetic
ugaaggagucuguagaauauu

SEQ ID NO: 672943 - RNA, 22 nt, Artificial Sequence
  Synthetic
gugaaggagucuguagaauauu

SEQ ID NO: 672944 - RNA, 23 nt, Artificial Sequence
  Synthetic
ggugaaggagucuguagaauauu

SEQ ID NO: 672945 - RNA, 24 nt, Artificial Sequence
  Synthetic
aggugaaggagucuguagaauauu

SEQ ID NO: 672946 - RNA, 18 nt, Artificial Sequence
  Synthetic
uuccugaauaggaauauu

SEQ ID NO: 672947 - RNA, 19 nt, Artificial Sequence
  Synthetic
uuuccugaauaggaauauu

SEQ ID NO: 672948 - RNA, 20 nt, Artificial Sequence
  Synthetic
auuuccugaauaggaauauu

SEQ ID NO: 672949 - RNA, 21 nt, Artificial Sequence
  Synthetic
gauuuccugaauaggaauauu

SEQ ID NO: 672950 - RNA, 22 nt, Artificial Sequence
  Synthetic
ggauuuccugaauaggaauauu

SEQ ID NO: 672951 - RNA, 23 nt, Artificial Sequence
  Synthetic
aggauuuccugaauaggaauauu

SEQ ID NO: 672952 - RNA, 24 nt, Artificial Sequence
  Synthetic
caggauuuccugaauaggaauauu

SEQ ID NO: 672953 - RNA, 18 nt, Artificial Sequence
  Synthetic
aauauuaauaugaauauu

SEQ ID NO: 672954 - RNA, 19 nt, Artificial Sequence
  Synthetic
gaauauuaauaugaauauu

SEQ ID NO: 672955 - RNA, 20 nt, Artificial Sequence
  Synthetic
ugaauauuaauaugaauauu

SEQ ID NO: 672956 - RNA, 21 nt, Artificial Sequence
  Synthetic
augaauauuaauaugaauauu

SEQ ID NO: 672957 - RNA, 22 nt, Artificial Sequence
  Synthetic
aaugaauauuaauaugaauauu

SEQ ID NO: 672958 - RNA, 23 nt, Artificial Sequence
  Synthetic
aaaugaauauuaauaugaauauu

SEQ ID NO: 672959 - RNA, 24 nt, Artificial Sequence
  Synthetic
aaaaugaauauuaauaugaauauu

SEQ ID NO: 672960 - RNA, 18 nt, Artificial Sequence
  Synthetic
uugccgguacugaauauu

SEQ ID NO: 672961 - RNA, 19 nt, Artificial Sequence
  Synthetic
uuugccgguacugaauauu

SEQ ID NO: 672962 - RNA, 20 nt, Artificial Sequence
  Synthetic
uuuugccgguacugaauauu

SEQ ID NO: 672963 - RNA, 21 nt, Artificial Sequence
  Synthetic
auuuugccgguacugaauauu

SEQ ID NO: 672964 - RNA, 22 nt, Artificial Sequence
  Synthetic
uauuuugccgguacugaauauu

SEQ ID NO: 672965 - RNA, 23 nt, Artificial Sequence
  Synthetic
uuauuuugccgguacugaauauu

SEQ ID NO: 672966 - RNA, 24 nt, Artificial Sequence
  Synthetic
auuauuuugccgguacugaauauu

SEQ ID NO: 672967 - RNA, 18 nt, Artificial Sequence
  Synthetic
auuuaaauaaauaauauu

SEQ ID NO: 672968 - RNA, 19 nt, Artificial Sequence
  Synthetic
uauuuaaauaaauaauauu

SEQ ID NO: 672969 - RNA, 20 nt, Artificial Sequence
  Synthetic
auauuuaaauaaauaauauu

SEQ ID NO: 672970 - RNA, 21 nt, Artificial Sequence
  Synthetic
aauauuuaaauaaauaauauu

SEQ ID NO: 672971 - RNA, 22 nt, Artificial Sequence
  Synthetic
uaauauuuaaauaaauaauauu

SEQ ID NO: 672972 - RNA, 23 nt, Artificial Sequence
  Synthetic
uuaauauuuaaauaaauaauauu

SEQ ID NO: 672973 - RNA, 24 nt, Artificial Sequence
  Synthetic
guuaauauuuaaauaaauaauauu

SEQ ID NO: 672974 - RNA, 18 nt, Artificial Sequence
  Synthetic
uuguugauacauaauauu

SEQ ID NO: 672975 - RNA, 19 nt, Artificial Sequence
  Synthetic
guuguugauacauaauauu

SEQ ID NO: 672976 - RNA, 20 nt, Artificial Sequence
  Synthetic
aguuguugauacauaauauu

SEQ ID NO: 672977 - RNA, 21 nt, Artificial Sequence
  Synthetic
uaguuguugauacauaauauu

SEQ ID NO: 672978 - RNA, 22 nt, Artificial Sequence
  Synthetic
uuaguuguugauacauaauauu

SEQ ID NO: 672979 - RNA, 23 nt, Artificial Sequence
  Synthetic
guuaguuguugauacauaauauu

SEQ ID NO: 672980 - RNA, 24 nt, Artificial Sequence
  Synthetic
uguuaguuguugauacauaauauu

SEQ ID NO: 672981 - RNA, 18 nt, Artificial Sequence
  Synthetic
uuucuagccacuaauauu

SEQ ID NO: 672982 - RNA, 19 nt, Artificial Sequence
  Synthetic
guuucuagccacuaauauu

SEQ ID NO: 672983 - RNA, 20 nt, Artificial Sequence
  Synthetic
uguuucuagccacuaauauu

SEQ ID NO: 672984 - RNA, 21 nt, Artificial Sequence
  Synthetic
guguuucuagccacuaauauu

SEQ ID NO: 672985 - RNA, 22 nt, Artificial Sequence
  Synthetic
uguguuucuagccacuaauauu

SEQ ID NO: 672986 - RNA, 23 nt, Artificial Sequence
  Synthetic
uuguguuucuagccacuaauauu

SEQ ID NO: 672987 - RNA, 24 nt, Artificial Sequence
  Synthetic
uuuguguuucuagccacuaauauu

SEQ ID NO: 672988 - RNA, 18 nt, Artificial Sequence
  Synthetic
ucaaagagcaguaauauu

SEQ ID NO: 672989 - RNA, 19 nt, Artificial Sequence
  Synthetic
gucaaagagcaguaauauu

SEQ ID NO: 672990 - RNA, 20 nt, Artificial Sequence
  Synthetic
ugucaaagagcaguaauauu

SEQ ID NO: 672991 - RNA, 21 nt, Artificial Sequence
  Synthetic
uugucaaagagcaguaauauu

SEQ ID NO: 672992 - RNA, 22 nt, Artificial Sequence
  Synthetic
auugucaaagagcaguaauauu

SEQ ID NO: 672993 - RNA, 23 nt, Artificial Sequence
  Synthetic
cauugucaaagagcaguaauauu

SEQ ID NO: 672994 - RNA, 24 nt, Artificial Sequence
  Synthetic
acauugucaaagagcaguaauauu

SEQ ID NO: 672995 - RNA, 18 nt, Artificial Sequence
  Synthetic
augauauauauuaauauu

SEQ ID NO: 672996 - RNA, 19 nt, Artificial Sequence
  Synthetic
aaugauauauauuaauauu

SEQ ID NO: 672997 - RNA, 20 nt, Artificial Sequence
  Synthetic
uaaugauauauauuaauauu

SEQ ID NO: 672998 - RNA, 21 nt, Artificial Sequence
  Synthetic
uuaaugauauauauuaauauu

SEQ ID NO: 672999 - RNA, 22 nt, Artificial Sequence
  Synthetic
uuuaaugauauauauuaauauu

SEQ ID NO: 673000 - RNA, 23 nt, Artificial Sequence
  Synthetic
guuuaaugauauauauuaauauu

SEQ ID NO: 673001 - RNA, 24 nt, Artificial Sequence
  Synthetic
uguuuaaugauauauauuaauauu

SEQ ID NO: 673002 - RNA, 18 nt, Artificial Sequence
  Synthetic
aucguggggcuuaauauu

SEQ ID NO: 673003 - RNA, 19 nt, Artificial Sequence
  Synthetic
uaucguggggcuuaauauu

SEQ ID NO: 673004 - RNA, 20 nt, Artificial Sequence
  Synthetic
uuaucguggggcuuaauauu

SEQ ID NO: 673005 - RNA, 21 nt, Artificial Sequence
  Synthetic
uuuaucguggggcuuaauauu

SEQ ID NO: 673006 - RNA, 22 nt, Artificial Sequence
  Synthetic
auuuaucguggggcuuaauauu

SEQ ID NO: 673007 - RNA, 23 nt, Artificial Sequence
  Synthetic
aauuuaucguggggcuuaauauu

SEQ ID NO: 673008 - RNA, 24 nt, Artificial Sequence
  Synthetic
uaauuuaucguggggcuuaauauu

SEQ ID NO: 673009 - RNA, 18 nt, Artificial Sequence
  Synthetic
caccuaaauguuaauauu

SEQ ID NO: 673010 - RNA, 19 nt, Artificial Sequence
  Synthetic
acaccuaaauguuaauauu

SEQ ID NO: 673011 - RNA, 20 nt, Artificial Sequence
  Synthetic
gacaccuaaauguuaauauu

SEQ ID NO: 673012 - RNA, 21 nt, Artificial Sequence
  Synthetic
ugacaccuaaauguuaauauu

SEQ ID NO: 673013 - RNA, 22 nt, Artificial Sequence
  Synthetic
augacaccuaaauguuaauauu

SEQ ID NO: 673014 - RNA, 23 nt, Artificial Sequence
  Synthetic
caugacaccuaaauguuaauauu

SEQ ID NO: 673015 - RNA, 24 nt, Artificial Sequence
  Synthetic
acaugacaccuaaauguuaauauu

SEQ ID NO: 673016 - RNA, 18 nt, Artificial Sequence
  Synthetic
aaaagcuaauuuaauauu

SEQ ID NO: 673017 - RNA, 19 nt, Artificial Sequence
  Synthetic
caaaagcuaauuuaauauu

SEQ ID NO: 673018 - RNA, 20 nt, Artificial Sequence
  Synthetic
acaaaagcuaauuuaauauu

SEQ ID NO: 673019 - RNA, 21 nt, Artificial Sequence
  Synthetic
cacaaaagcuaauuuaauauu

SEQ ID NO: 673020 - RNA, 22 nt, Artificial Sequence
  Synthetic
ccacaaaagcuaauuuaauauu

SEQ ID NO: 673021 - RNA, 23 nt, Artificial Sequence
  Synthetic
accacaaaagcuaauuuaauauu

SEQ ID NO: 673022 - RNA, 24 nt, Artificial Sequence
  Synthetic
uaccacaaaagcuaauuuaauauu

SEQ ID NO: 673023 - RNA, 18 nt, Artificial Sequence
  Synthetic
ucauaauccaaacauauu

SEQ ID NO: 673024 - RNA, 19 nt, Artificial Sequence
  Synthetic
aucauaauccaaacauauu

SEQ ID NO: 673025 - RNA, 20 nt, Artificial Sequence
  Synthetic
aaucauaauccaaacauauu

SEQ ID NO: 673026 - RNA, 21 nt, Artificial Sequence
  Synthetic
caaucauaauccaaacauauu

SEQ ID NO: 673027 - RNA, 22 nt, Artificial Sequence
  Synthetic
gcaaucauaauccaaacauauu

SEQ ID NO: 673028 - RNA, 23 nt, Artificial Sequence
  Synthetic
agcaaucauaauccaaacauauu

SEQ ID NO: 673029 - RNA, 24 nt, Artificial Sequence
  Synthetic
uagcaaucauaauccaaacauauu

SEQ ID NO: 673030 - RNA, 18 nt, Artificial Sequence
  Synthetic
caugcaaguaaacauauu

SEQ ID NO: 673031 - RNA, 19 nt, Artificial Sequence
  Synthetic
gcaugcaaguaaacauauu

SEQ ID NO: 673032 - RNA, 20 nt, Artificial Sequence
  Synthetic
ugcaugcaaguaaacauauu

SEQ ID NO: 673033 - RNA, 21 nt, Artificial Sequence
  Synthetic
augcaugcaaguaaacauauu

SEQ ID NO: 673034 - RNA, 22 nt, Artificial Sequence
  Synthetic
aaugcaugcaaguaaacauauu

SEQ ID NO: 673035 - RNA, 23 nt, Artificial Sequence
  Synthetic
aaaugcaugcaaguaaacauauu

SEQ ID NO: 673036 - RNA, 24 nt, Artificial Sequence
  Synthetic
gaaaugcaugcaaguaaacauauu

SEQ ID NO: 673037 - RNA, 18 nt, Artificial Sequence
  Synthetic
auuuaauucugacauauu

SEQ ID NO: 673038 - RNA, 19 nt, Artificial Sequence
  Synthetic
aauuuaauucugacauauu

SEQ ID NO: 673039 - RNA, 20 nt, Artificial Sequence
  Synthetic
caauuuaauucugacauauu

SEQ ID NO: 673040 - RNA, 21 nt, Artificial Sequence
  Synthetic
ccaauuuaauucugacauauu

SEQ ID NO: 673041 - RNA, 22 nt, Artificial Sequence
  Synthetic
uccaauuuaauucugacauauu

SEQ ID NO: 673042 - RNA, 23 nt, Artificial Sequence
  Synthetic
uuccaauuuaauucugacauauu

SEQ ID NO: 673043 - RNA, 24 nt, Artificial Sequence
  Synthetic
auuccaauuuaauucugacauauu

SEQ ID NO: 673044 - RNA, 18 nt, Artificial Sequence
  Synthetic
acuccucagauacauauu

SEQ ID NO: 673045 - RNA, 19 nt, Artificial Sequence
  Synthetic
uacuccucagauacauauu

SEQ ID NO: 673046 - RNA, 20 nt, Artificial Sequence
  Synthetic
uuacuccucagauacauauu

SEQ ID NO: 673047 - RNA, 21 nt, Artificial Sequence
  Synthetic
uuuacuccucagauacauauu

SEQ ID NO: 673048 - RNA, 22 nt, Artificial Sequence
  Synthetic
guuuacuccucagauacauauu

SEQ ID NO: 673049 - RNA, 23 nt, Artificial Sequence
  Synthetic
uguuuacuccucagauacauauu

SEQ ID NO: 673050 - RNA, 24 nt, Artificial Sequence
  Synthetic
auguuuacuccucagauacauauu

SEQ ID NO: 673051 - RNA, 18 nt, Artificial Sequence
  Synthetic
gauacgcauguacauauu

SEQ ID NO: 673052 - RNA, 19 nt, Artificial Sequence
  Synthetic
agauacgcauguacauauu

SEQ ID NO: 673053 - RNA, 20 nt, Artificial Sequence
  Synthetic
gagauacgcauguacauauu

SEQ ID NO: 673054 - RNA, 21 nt, Artificial Sequence
  Synthetic
cgagauacgcauguacauauu

SEQ ID NO: 673055 - RNA, 22 nt, Artificial Sequence
  Synthetic
acgagauacgcauguacauauu

SEQ ID NO: 673056 - RNA, 23 nt, Artificial Sequence
  Synthetic
aacgagauacgcauguacauauu

SEQ ID NO: 673057 - RNA, 24 nt, Artificial Sequence
  Synthetic
aaacgagauacgcauguacauauu

SEQ ID NO: 673058 - RNA, 18 nt, Artificial Sequence
  Synthetic
cuacacaauaaccauauu

SEQ ID NO: 673059 - RNA, 19 nt, Artificial Sequence
  Synthetic
ucuacacaauaaccauauu

SEQ ID NO: 673060 - RNA, 20 nt, Artificial Sequence
  Synthetic
aucuacacaauaaccauauu

SEQ ID NO: 673061 - RNA, 21 nt, Artificial Sequence
  Synthetic
caucuacacaauaaccauauu

SEQ ID NO: 673062 - RNA, 22 nt, Artificial Sequence
  Synthetic
acaucuacacaauaaccauauu

SEQ ID NO: 673063 - RNA, 23 nt, Artificial Sequence
  Synthetic
gacaucuacacaauaaccauauu

SEQ ID NO: 673064 - RNA, 24 nt, Artificial Sequence
  Synthetic
ugacaucuacacaauaaccauauu

SEQ ID NO: 673065 - RNA, 18 nt, Artificial Sequence
  Synthetic
uaagccaauggccauauu

SEQ ID NO: 673066 - RNA, 19 nt, Artificial Sequence
  Synthetic
guaagccaauggccauauu

SEQ ID NO: 673067 - RNA, 20 nt, Artificial Sequence
  Synthetic
aguaagccaauggccauauu

SEQ ID NO: 673068 - RNA, 21 nt, Artificial Sequence
  Synthetic
aaguaagccaauggccauauu

SEQ ID NO: 673069 - RNA, 22 nt, Artificial Sequence
  Synthetic
aaaguaagccaauggccauauu

SEQ ID NO: 673070 - RNA, 23 nt, Artificial Sequence
  Synthetic
uaaaguaagccaauggccauauu

SEQ ID NO: 673071 - RNA, 24 nt, Artificial Sequence
  Synthetic
auaaaguaagccaauggccauauu

SEQ ID NO: 673072 - RNA, 18 nt, Artificial Sequence
  Synthetic
aaaaaugcaauccauauu

SEQ ID NO: 673073 - RNA, 19 nt, Artificial Sequence
  Synthetic
aaaaaaugcaauccauauu

SEQ ID NO: 673074 - RNA, 20 nt, Artificial Sequence
  Synthetic
aaaaaaaugcaauccauauu

SEQ ID NO: 673075 - RNA, 21 nt, Artificial Sequence
  Synthetic
aaaaaaaaugcaauccauauu

SEQ ID NO: 673076 - RNA, 22 nt, Artificial Sequence
  Synthetic
uaaaaaaaaugcaauccauauu

SEQ ID NO: 673077 - RNA, 23 nt, Artificial Sequence
  Synthetic
uuaaaaaaaaugcaauccauauu

SEQ ID NO: 673078 - RNA, 24 nt, Artificial Sequence
  Synthetic
auuaaaaaaaaugcaauccauauu

SEQ ID NO: 673079 - RNA, 18 nt, Artificial Sequence
  Synthetic
auaauuuauauccauauu

SEQ ID NO: 673080 - RNA, 19 nt, Artificial Sequence
  Synthetic
uauaauuuauauccauauu

SEQ ID NO: 673081 - RNA, 20 nt, Artificial Sequence
  Synthetic
uuauaauuuauauccauauu

SEQ ID NO: 673082 - RNA, 21 nt, Artificial Sequence
  Synthetic
cuuauaauuuauauccauauu

SEQ ID NO: 673083 - RNA, 22 nt, Artificial Sequence
  Synthetic
ucuuauaauuuauauccauauu

SEQ ID NO: 673084 - RNA, 23 nt, Artificial Sequence
  Synthetic
uucuuauaauuuauauccauauu

SEQ ID NO: 673085 - RNA, 24 nt, Artificial Sequence
  Synthetic
auucuuauaauuuauauccauauu

SEQ ID NO: 673086 - RNA, 18 nt, Artificial Sequence
  Synthetic
aauuagcugaagcauauu

SEQ ID NO: 673087 - RNA, 19 nt, Artificial Sequence
  Synthetic
aaauuagcugaagcauauu

SEQ ID NO: 673088 - RNA, 20 nt, Artificial Sequence
  Synthetic
uaaauuagcugaagcauauu

SEQ ID NO: 673089 - RNA, 21 nt, Artificial Sequence
  Synthetic
auaaauuagcugaagcauauu

SEQ ID NO: 673090 - RNA, 22 nt, Artificial Sequence
  Synthetic
gauaaauuagcugaagcauauu

SEQ ID NO: 673091 - RNA, 23 nt, Artificial Sequence
  Synthetic
ugauaaauuagcugaagcauauu

SEQ ID NO: 673092 - RNA, 24 nt, Artificial Sequence
  Synthetic
augauaaauuagcugaagcauauu

SEQ ID NO: 673093 - RNA, 18 nt, Artificial Sequence
  Synthetic
ucucuguuuaagcauauu

SEQ ID NO: 673094 - RNA, 19 nt, Artificial Sequence
  Synthetic
uucucuguuuaagcauauu

SEQ ID NO: 673095 - RNA, 20 nt, Artificial Sequence
  Synthetic
guucucuguuuaagcauauu

SEQ ID NO: 673096 - RNA, 21 nt, Artificial Sequence
  Synthetic
aguucucuguuuaagcauauu

SEQ ID NO: 673097 - RNA, 22 nt, Artificial Sequence
  Synthetic
gaguucucuguuuaagcauauu

SEQ ID NO: 673098 - RNA, 23 nt, Artificial Sequence
  Synthetic
ggaguucucuguuuaagcauauu

SEQ ID NO: 673099 - RNA, 24 nt, Artificial Sequence
  Synthetic
uggaguucucuguuuaagcauauu

SEQ ID NO: 673100 - RNA, 18 nt, Artificial Sequence
  Synthetic
agaggcuccaggcauauu

SEQ ID NO: 673101 - RNA, 19 nt, Artificial Sequence
  Synthetic
uagaggcuccaggcauauu

SEQ ID NO: 673102 - RNA, 20 nt, Artificial Sequence
  Synthetic
uuagaggcuccaggcauauu

SEQ ID NO: 673103 - RNA, 21 nt, Artificial Sequence
  Synthetic
uuuagaggcuccaggcauauu

SEQ ID NO: 673104 - RNA, 22 nt, Artificial Sequence
  Synthetic
auuuagaggcuccaggcauauu

SEQ ID NO: 673105 - RNA, 23 nt, Artificial Sequence
  Synthetic
cauuuagaggcuccaggcauauu

SEQ ID NO: 673106 - RNA, 24 nt, Artificial Sequence
  Synthetic
ccauuuagaggcuccaggcauauu

SEQ ID NO: 673107 - RNA, 18 nt, Artificial Sequence
  Synthetic
agagaaaaaaugcauauu

SEQ ID NO: 673108 - RNA, 19 nt, Artificial Sequence
  Synthetic
uagagaaaaaaugcauauu

SEQ ID NO: 673109 - RNA, 20 nt, Artificial Sequence
  Synthetic
guagagaaaaaaugcauauu

SEQ ID NO: 673110 - RNA, 21 nt, Artificial Sequence
  Synthetic
gguagagaaaaaaugcauauu

SEQ ID NO: 673111 - RNA, 22 nt, Artificial Sequence
  Synthetic
agguagagaaaaaaugcauauu

SEQ ID NO: 673112 - RNA, 23 nt, Artificial Sequence
  Synthetic
cagguagagaaaaaaugcauauu

SEQ ID NO: 673113 - RNA, 24 nt, Artificial Sequence
  Synthetic
ccagguagagaaaaaaugcauauu

SEQ ID NO: 673114 - RNA, 18 nt, Artificial Sequence
  Synthetic
gcaauugcuaugcauauu

SEQ ID NO: 673115 - RNA, 19 nt, Artificial Sequence
  Synthetic
ggcaauugcuaugcauauu

SEQ ID NO: 673116 - RNA, 20 nt, Artificial Sequence
  Synthetic
aggcaauugcuaugcauauu

SEQ ID NO: 673117 - RNA, 21 nt, Artificial Sequence
  Synthetic
caggcaauugcuaugcauauu

SEQ ID NO: 673118 - RNA, 22 nt, Artificial Sequence
  Synthetic
ccaggcaauugcuaugcauauu

SEQ ID NO: 673119 - RNA, 23 nt, Artificial Sequence
  Synthetic
uccaggcaauugcuaugcauauu

SEQ ID NO: 673120 - RNA, 24 nt, Artificial Sequence
  Synthetic
cuccaggcaauugcuaugcauauu

SEQ ID NO: 673121 - RNA, 18 nt, Artificial Sequence
  Synthetic
caauauuauuugcauauu

SEQ ID NO: 673122 - RNA, 19 nt, Artificial Sequence
  Synthetic
ccaauauuauuugcauauu

SEQ ID NO: 673123 - RNA, 20 nt, Artificial Sequence
  Synthetic
accaauauuauuugcauauu

SEQ ID NO: 673124 - RNA, 21 nt, Artificial Sequence
  Synthetic
aaccaauauuauuugcauauu

SEQ ID NO: 673125 - RNA, 22 nt, Artificial Sequence
  Synthetic
aaaccaauauuauuugcauauu

SEQ ID NO: 673126 - RNA, 23 nt, Artificial Sequence
  Synthetic
uaaaccaauauuauuugcauauu

SEQ ID NO: 673127 - RNA, 24 nt, Artificial Sequence
  Synthetic
auaaaccaauauuauuugcauauu

SEQ ID NO: 673128 - RNA, 18 nt, Artificial Sequence
  Synthetic
ucuucuuuucaucauauu

SEQ ID NO: 673129 - RNA, 19 nt, Artificial Sequence
  Synthetic
aucuucuuuucaucauauu

SEQ ID NO: 673130 - RNA, 20 nt, Artificial Sequence
  Synthetic
caucuucuuuucaucauauu

SEQ ID NO: 673131 - RNA, 21 nt, Artificial Sequence
  Synthetic
ucaucuucuuuucaucauauu

SEQ ID NO: 673132 - RNA, 22 nt, Artificial Sequence
  Synthetic
uucaucuucuuuucaucauauu

SEQ ID NO: 673133 - RNA, 23 nt, Artificial Sequence
  Synthetic
guucaucuucuuuucaucauauu

SEQ ID NO: 673134 - RNA, 24 nt, Artificial Sequence
  Synthetic
gguucaucuucuuuucaucauauu

SEQ ID NO: 673135 - RNA, 18 nt, Artificial Sequence
  Synthetic
ugcccucagccucauauu

SEQ ID NO: 673136 - RNA, 19 nt, Artificial Sequence
  Synthetic
cugcccucagccucauauu

SEQ ID NO: 673137 - RNA, 20 nt, Artificial Sequence
  Synthetic
gcugcccucagccucauauu

SEQ ID NO: 673138 - RNA, 21 nt, Artificial Sequence
  Synthetic
ugcugcccucagccucauauu

SEQ ID NO: 673139 - RNA, 22 nt, Artificial Sequence
  Synthetic
cugcugcccucagccucauauu

SEQ ID NO: 673140 - RNA, 23 nt, Artificial Sequence
  Synthetic
acugcugcccucagccucauauu

SEQ ID NO: 673141 - RNA, 24 nt, Artificial Sequence
  Synthetic
cacugcugcccucagccucauauu

SEQ ID NO: 673142 - RNA, 18 nt, Artificial Sequence
  Synthetic
cacuauugucgucauauu

SEQ ID NO: 673143 - RNA, 19 nt, Artificial Sequence
  Synthetic
gcacuauugucgucauauu

SEQ ID NO: 673144 - RNA, 20 nt, Artificial Sequence
  Synthetic
ggcacuauugucgucauauu

SEQ ID NO: 673145 - RNA, 21 nt, Artificial Sequence
  Synthetic
aggcacuauugucgucauauu

SEQ ID NO: 673146 - RNA, 22 nt, Artificial Sequence
  Synthetic
uaggcacuauugucgucauauu

SEQ ID NO: 673147 - RNA, 23 nt, Artificial Sequence
  Synthetic
cuaggcacuauugucgucauauu

SEQ ID NO: 673148 - RNA, 24 nt, Artificial Sequence
  Synthetic
ucuaggcacuauugucgucauauu

SEQ ID NO: 673149 - RNA, 18 nt, Artificial Sequence
  Synthetic
aguaauugaugucauauu

SEQ ID NO: 673150 - RNA, 19 nt, Artificial Sequence
  Synthetic
caguaauugaugucauauu

SEQ ID NO: 673151 - RNA, 20 nt, Artificial Sequence
  Synthetic
ucaguaauugaugucauauu

SEQ ID NO: 673152 - RNA, 21 nt, Artificial Sequence
  Synthetic
uucaguaauugaugucauauu

SEQ ID NO: 673153 - RNA, 22 nt, Artificial Sequence
  Synthetic
uuucaguaauugaugucauauu

SEQ ID NO: 673154 - RNA, 23 nt, Artificial Sequence
  Synthetic
uuuucaguaauugaugucauauu

SEQ ID NO: 673155 - RNA, 24 nt, Artificial Sequence
  Synthetic
uuuuucaguaauugaugucauauu

SEQ ID NO: 673156 - RNA, 18 nt, Artificial Sequence
  Synthetic
auaauugcauuucauauu

SEQ ID NO: 673157 - RNA, 19 nt, Artificial Sequence
  Synthetic
uauaauugcauuucauauu

SEQ ID NO: 673158 - RNA, 20 nt, Artificial Sequence
  Synthetic
uuauaauugcauuucauauu

SEQ ID NO: 673159 - RNA, 21 nt, Artificial Sequence
  Synthetic
auuauaauugcauuucauauu

SEQ ID NO: 673160 - RNA, 22 nt, Artificial Sequence
  Synthetic
uauuauaauugcauuucauauu

SEQ ID NO: 673161 - RNA, 23 nt, Artificial Sequence
  Synthetic
cuauuauaauugcauuucauauu

SEQ ID NO: 673162 - RNA, 24 nt, Artificial Sequence
  Synthetic
ccuauuauaauugcauuucauauu

SEQ ID NO: 673163 - RNA, 18 nt, Artificial Sequence
  Synthetic
ucugaaauguuucauauu

SEQ ID NO: 673164 - RNA, 19 nt, Artificial Sequence
  Synthetic
gucugaaauguuucauauu

SEQ ID NO: 673165 - RNA, 20 nt, Artificial Sequence
  Synthetic
ugucugaaauguuucauauu

SEQ ID NO: 673166 - RNA, 21 nt, Artificial Sequence
  Synthetic
uugucugaaauguuucauauu

SEQ ID NO: 673167 - RNA, 22 nt, Artificial Sequence
  Synthetic
auugucugaaauguuucauauu

SEQ ID NO: 673168 - RNA, 23 nt, Artificial Sequence
  Synthetic
aauugucugaaauguuucauauu

SEQ ID NO: 673169 - RNA, 24 nt, Artificial Sequence
  Synthetic
aaauugucugaaauguuucauauu

SEQ ID NO: 673170 - RNA, 18 nt, Artificial Sequence
  Synthetic
guguauauaccagauauu

SEQ ID NO: 673171 - RNA, 19 nt, Artificial Sequence
  Synthetic
aguguauauaccagauauu

SEQ ID NO: 673172 - RNA, 20 nt, Artificial Sequence
  Synthetic
gaguguauauaccagauauu

SEQ ID NO: 673173 - RNA, 21 nt, Artificial Sequence
  Synthetic
ugaguguauauaccagauauu

SEQ ID NO: 673174 - RNA, 22 nt, Artificial Sequence
  Synthetic
augaguguauauaccagauauu

SEQ ID NO: 673175 - RNA, 23 nt, Artificial Sequence
  Synthetic
caugaguguauauaccagauauu

SEQ ID NO: 673176 - RNA, 24 nt, Artificial Sequence
  Synthetic
ucaugaguguauauaccagauauu

SEQ ID NO: 673177 - RNA, 18 nt, Artificial Sequence
  Synthetic
uuaaugauaucagauauu

SEQ ID NO: 673178 - RNA, 19 nt, Artificial Sequence
  Synthetic
uuuaaugauaucagauauu

SEQ ID NO: 673179 - RNA, 20 nt, Artificial Sequence
  Synthetic
uuuuaaugauaucagauauu

SEQ ID NO: 673180 - RNA, 21 nt, Artificial Sequence
  Synthetic
cuuuuaaugauaucagauauu

SEQ ID NO: 673181 - RNA, 22 nt, Artificial Sequence
  Synthetic
acuuuuaaugauaucagauauu

SEQ ID NO: 673182 - RNA, 23 nt, Artificial Sequence
  Synthetic
gacuuuuaaugauaucagauauu

SEQ ID NO: 673183 - RNA, 24 nt, Artificial Sequence
  Synthetic
agacuuuuaaugauaucagauauu

SEQ ID NO: 673184 - RNA, 18 nt, Artificial Sequence
  Synthetic
cuuuggacuagagauauu

SEQ ID NO: 673185 - RNA, 19 nt, Artificial Sequence
  Synthetic
gcuuuggacuagagauauu

SEQ ID NO: 673186 - RNA, 20 nt, Artificial Sequence
  Synthetic
ggcuuuggacuagagauauu

SEQ ID NO: 673187 - RNA, 21 nt, Artificial Sequence
  Synthetic
uggcuuuggacuagagauauu

SEQ ID NO: 673188 - RNA, 22 nt, Artificial Sequence
  Synthetic
auggcuuuggacuagagauauu

SEQ ID NO: 673189 - RNA, 23 nt, Artificial Sequence
  Synthetic
gauggcuuuggacuagagauauu

SEQ ID NO: 673190 - RNA, 24 nt, Artificial Sequence
  Synthetic
ugauggcuuuggacuagagauauu

SEQ ID NO: 673191 - RNA, 18 nt, Artificial Sequence
  Synthetic
aaaaacuguagagauauu

SEQ ID NO: 673192 - RNA, 19 nt, Artificial Sequence
  Synthetic
gaaaaacuguagagauauu

SEQ ID NO: 673193 - RNA, 20 nt, Artificial Sequence
  Synthetic
agaaaaacuguagagauauu

SEQ ID NO: 673194 - RNA, 21 nt, Artificial Sequence
  Synthetic
aagaaaaacuguagagauauu

SEQ ID NO: 673195 - RNA, 22 nt, Artificial Sequence
  Synthetic
aaagaaaaacuguagagauauu

SEQ ID NO: 673196 - RNA, 23 nt, Artificial Sequence
  Synthetic
uaaagaaaaacuguagagauauu

SEQ ID NO: 673197 - RNA, 24 nt, Artificial Sequence
  Synthetic
auaaagaaaaacuguagagauauu

SEQ ID NO: 673198 - RNA, 18 nt, Artificial Sequence
  Synthetic
aaaaauguccuagauauu

SEQ ID NO: 673199 - RNA, 19 nt, Artificial Sequence
  Synthetic
aaaaaauguccuagauauu

SEQ ID NO: 673200 - RNA, 20 nt, Artificial Sequence
  Synthetic
aaaaaaauguccuagauauu

SEQ ID NO: 673201 - RNA, 21 nt, Artificial Sequence
  Synthetic
gaaaaaaauguccuagauauu

SEQ ID NO: 673202 - RNA, 22 nt, Artificial Sequence
  Synthetic
agaaaaaaauguccuagauauu

SEQ ID NO: 673203 - RNA, 23 nt, Artificial Sequence
  Synthetic
aagaaaaaaauguccuagauauu

SEQ ID NO: 673204 - RNA, 24 nt, Artificial Sequence
  Synthetic
aaagaaaaaaauguccuagauauu

SEQ ID NO: 673205 - RNA, 18 nt, Artificial Sequence
  Synthetic
aggccaucucuagauauu

SEQ ID NO: 673206 - RNA, 19 nt, Artificial Sequence
  Synthetic
aaggccaucucuagauauu

SEQ ID NO: 673207 - RNA, 20 nt, Artificial Sequence
  Synthetic
aaaggccaucucuagauauu

SEQ ID NO: 673208 - RNA, 21 nt, Artificial Sequence
  Synthetic
aaaaggccaucucuagauauu

SEQ ID NO: 673209 - RNA, 22 nt, Artificial Sequence
  Synthetic
uaaaaggccaucucuagauauu

SEQ ID NO: 673210 - RNA, 23 nt, Artificial Sequence
  Synthetic
uuaaaaggccaucucuagauauu

SEQ ID NO: 673211 - RNA, 24 nt, Artificial Sequence
  Synthetic
uuuaaaaggccaucucuagauauu

SEQ ID NO: 673212 - RNA, 18 nt, Artificial Sequence
  Synthetic
gacccuuugggggauauu

SEQ ID NO: 673213 - RNA, 19 nt, Artificial Sequence
  Synthetic
ggacccuuugggggauauu

SEQ ID NO: 673214 - RNA, 20 nt, Artificial Sequence
  Synthetic
gggacccuuugggggauauu

SEQ ID NO: 673215 - RNA, 21 nt, Artificial Sequence
  Synthetic
agggacccuuugggggauauu

SEQ ID NO: 673216 - RNA, 22 nt, Artificial Sequence
  Synthetic
uagggacccuuugggggauauu

SEQ ID NO: 673217 - RNA, 23 nt, Artificial Sequence
  Synthetic
uuagggacccuuugggggauauu

SEQ ID NO: 673218 - RNA, 24 nt, Artificial Sequence
  Synthetic
uuuagggacccuuugggggauauu

SEQ ID NO: 673219 - RNA, 18 nt, Artificial Sequence
  Synthetic
uaacccccaauggauauu

SEQ ID NO: 673220 - RNA, 19 nt, Artificial Sequence
  Synthetic
cuaacccccaauggauauu

SEQ ID NO: 673221 - RNA, 20 nt, Artificial Sequence
  Synthetic
gcuaacccccaauggauauu

SEQ ID NO: 673222 - RNA, 21 nt, Artificial Sequence
  Synthetic
ugcuaacccccaauggauauu

SEQ ID NO: 673223 - RNA, 22 nt, Artificial Sequence
  Synthetic
gugcuaacccccaauggauauu

SEQ ID NO: 673224 - RNA, 23 nt, Artificial Sequence
  Synthetic
agugcuaacccccaauggauauu

SEQ ID NO: 673225 - RNA, 24 nt, Artificial Sequence
  Synthetic
aagugcuaacccccaauggauauu

SEQ ID NO: 673226 - RNA, 18 nt, Artificial Sequence
  Synthetic
gcuuaagucauggauauu

SEQ ID NO: 673227 - RNA, 19 nt, Artificial Sequence
  Synthetic
ugcuuaagucauggauauu

SEQ ID NO: 673228 - RNA, 20 nt, Artificial Sequence
  Synthetic
uugcuuaagucauggauauu

SEQ ID NO: 673229 - RNA, 21 nt, Artificial Sequence
  Synthetic
cuugcuuaagucauggauauu

SEQ ID NO: 673230 - RNA, 22 nt, Artificial Sequence
  Synthetic
ccuugcuuaagucauggauauu

SEQ ID NO: 673231 - RNA, 23 nt, Artificial Sequence
  Synthetic
accuugcuuaagucauggauauu

SEQ ID NO: 673232 - RNA, 24 nt, Artificial Sequence
  Synthetic
uaccuugcuuaagucauggauauu

SEQ ID NO: 673233 - RNA, 18 nt, Artificial Sequence
  Synthetic
cuauuuuugcuggauauu

SEQ ID NO: 673234 - RNA, 19 nt, Artificial Sequence
  Synthetic
acuauuuuugcuggauauu

SEQ ID NO: 673235 - RNA, 20 nt, Artificial Sequence
  Synthetic
uacuauuuuugcuggauauu

SEQ ID NO: 673236 - RNA, 21 nt, Artificial Sequence
  Synthetic
auacuauuuuugcuggauauu

SEQ ID NO: 673237 - RNA, 22 nt, Artificial Sequence
  Synthetic
uauacuauuuuugcuggauauu

SEQ ID NO: 673238 - RNA, 23 nt, Artificial Sequence
  Synthetic
cuauacuauuuuugcuggauauu

SEQ ID NO: 673239 - RNA, 24 nt, Artificial Sequence
  Synthetic
acuauacuauuuuugcuggauauu

SEQ ID NO: 673240 - RNA, 18 nt, Artificial Sequence
  Synthetic
ccaaagaaggcugauauu

SEQ ID NO: 673241 - RNA, 19 nt, Artificial Sequence
  Synthetic
gccaaagaaggcugauauu

SEQ ID NO: 673242 - RNA, 20 nt, Artificial Sequence
  Synthetic
agccaaagaaggcugauauu

SEQ ID NO: 673243 - RNA, 21 nt, Artificial Sequence
  Synthetic
gagccaaagaaggcugauauu

SEQ ID NO: 673244 - RNA, 22 nt, Artificial Sequence
  Synthetic
ugagccaaagaaggcugauauu

SEQ ID NO: 673245 - RNA, 23 nt, Artificial Sequence
  Synthetic
augagccaaagaaggcugauauu

SEQ ID NO: 673246 - RNA, 24 nt, Artificial Sequence
  Synthetic
aaugagccaaagaaggcugauauu

SEQ ID NO: 673247 - RNA, 18 nt, Artificial Sequence
  Synthetic
agaguaaccagugauauu

SEQ ID NO: 673248 - RNA, 19 nt, Artificial Sequence
  Synthetic
aagaguaaccagugauauu

SEQ ID NO: 673249 - RNA, 20 nt, Artificial Sequence
  Synthetic
gaagaguaaccagugauauu

SEQ ID NO: 673250 - RNA, 21 nt, Artificial Sequence
  Synthetic
ugaagaguaaccagugauauu

SEQ ID NO: 673251 - RNA, 22 nt, Artificial Sequence
  Synthetic
uugaagaguaaccagugauauu

SEQ ID NO: 673252 - RNA, 23 nt, Artificial Sequence
  Synthetic
uuugaagaguaaccagugauauu

SEQ ID NO: 673253 - RNA, 24 nt, Artificial Sequence
  Synthetic
cuuugaagaguaaccagugauauu

SEQ ID NO: 673254 - RNA, 18 nt, Artificial Sequence
  Synthetic
uuucaauuuguugauauu

SEQ ID NO: 673255 - RNA, 19 nt, Artificial Sequence
  Synthetic
guuucaauuuguugauauu

SEQ ID NO: 673256 - RNA, 20 nt, Artificial Sequence
  Synthetic
uguuucaauuuguugauauu

SEQ ID NO: 673257 - RNA, 21 nt, Artificial Sequence
  Synthetic
auguuucaauuuguugauauu

SEQ ID NO: 673258 - RNA, 22 nt, Artificial Sequence
  Synthetic
aauguuucaauuuguugauauu

SEQ ID NO: 673259 - RNA, 23 nt, Artificial Sequence
  Synthetic
uaauguuucaauuuguugauauu

SEQ ID NO: 673260 - RNA, 24 nt, Artificial Sequence
  Synthetic
guaauguuucaauuuguugauauu

SEQ ID NO: 673261 - RNA, 18 nt, Artificial Sequence
  Synthetic
cugguagauaaauauauu

SEQ ID NO: 673262 - RNA, 19 nt, Artificial Sequence
  Synthetic
acugguagauaaauauauu

SEQ ID NO: 673263 - RNA, 20 nt, Artificial Sequence
  Synthetic
cacugguagauaaauauauu

SEQ ID NO: 673264 - RNA, 21 nt, Artificial Sequence
  Synthetic
acacugguagauaaauauauu

SEQ ID NO: 673265 - RNA, 22 nt, Artificial Sequence
  Synthetic
aacacugguagauaaauauauu

SEQ ID NO: 673266 - RNA, 23 nt, Artificial Sequence
  Synthetic
aaacacugguagauaaauauauu

SEQ ID NO: 673267 - RNA, 24 nt, Artificial Sequence
  Synthetic
uaaacacugguagauaaauauauu

SEQ ID NO: 673268 - RNA, 18 nt, Artificial Sequence
  Synthetic
cauuuuagaucauauauu

SEQ ID NO: 673269 - RNA, 19 nt, Artificial Sequence
  Synthetic
ccauuuuagaucauauauu

SEQ ID NO: 673270 - RNA, 20 nt, Artificial Sequence
  Synthetic
uccauuuuagaucauauauu

SEQ ID NO: 673271 - RNA, 21 nt, Artificial Sequence
  Synthetic
cuccauuuuagaucauauauu

SEQ ID NO: 673272 - RNA, 22 nt, Artificial Sequence
  Synthetic
acuccauuuuagaucauauauu

SEQ ID NO: 673273 - RNA, 23 nt, Artificial Sequence
  Synthetic
cacuccauuuuagaucauauauu

SEQ ID NO: 673274 - RNA, 24 nt, Artificial Sequence
  Synthetic
ucacuccauuuuagaucauauauu

SEQ ID NO: 673275 - RNA, 18 nt, Artificial Sequence
  Synthetic
uuuguugucucauauauu

SEQ ID NO: 673276 - RNA, 19 nt, Artificial Sequence
  Synthetic
uuuuguugucucauauauu

SEQ ID NO: 673277 - RNA, 20 nt, Artificial Sequence
  Synthetic
auuuuguugucucauauauu

SEQ ID NO: 673278 - RNA, 21 nt, Artificial Sequence
  Synthetic
uauuuuguugucucauauauu

SEQ ID NO: 673279 - RNA, 22 nt, Artificial Sequence
  Synthetic
auauuuuguugucucauauauu

SEQ ID NO: 673280 - RNA, 23 nt, Artificial Sequence
  Synthetic
uauauuuuguugucucauauauu

SEQ ID NO: 673281 - RNA, 24 nt, Artificial Sequence
  Synthetic
guauauuuuguugucucauauauu

SEQ ID NO: 673282 - RNA, 18 nt, Artificial Sequence
  Synthetic
uaaagcagaugauauauu

SEQ ID NO: 673283 - RNA, 19 nt, Artificial Sequence
  Synthetic
uuaaagcagaugauauauu

SEQ ID NO: 673284 - RNA, 20 nt, Artificial Sequence
  Synthetic
uuuaaagcagaugauauauu

SEQ ID NO: 673285 - RNA, 21 nt, Artificial Sequence
  Synthetic
cuuuaaagcagaugauauauu

SEQ ID NO: 673286 - RNA, 22 nt, Artificial Sequence
  Synthetic
ucuuuaaagcagaugauauauu

SEQ ID NO: 673287 - RNA, 23 nt, Artificial Sequence
  Synthetic
uucuuuaaagcagaugauauauu

SEQ ID NO: 673288 - RNA, 24 nt, Artificial Sequence
  Synthetic
uuucuuuaaagcagaugauauauu

SEQ ID NO: 673289 - RNA, 18 nt, Artificial Sequence
  Synthetic
augugccacauauauauu

SEQ ID NO: 673290 - RNA, 19 nt, Artificial Sequence
  Synthetic
aaugugccacauauauauu

SEQ ID NO: 673291 - RNA, 20 nt, Artificial Sequence
  Synthetic
aaaugugccacauauauauu

SEQ ID NO: 673292 - RNA, 21 nt, Artificial Sequence
  Synthetic
aaaaugugccacauauauauu

SEQ ID NO: 673293 - RNA, 22 nt, Artificial Sequence
  Synthetic
uaaaaugugccacauauauauu

SEQ ID NO: 673294 - RNA, 23 nt, Artificial Sequence
  Synthetic
auaaaaugugccacauauauauu

SEQ ID NO: 673295 - RNA, 24 nt, Artificial Sequence
  Synthetic
aauaaaaugugccacauauauauu

SEQ ID NO: 673296 - RNA, 18 nt, Artificial Sequence
  Synthetic
agucuaaauauauauauu

SEQ ID NO: 673297 - RNA, 19 nt, Artificial Sequence
  Synthetic
uagucuaaauauauauauu

SEQ ID NO: 673298 - RNA, 20 nt, Artificial Sequence
  Synthetic
auagucuaaauauauauauu

SEQ ID NO: 673299 - RNA, 21 nt, Artificial Sequence
  Synthetic
uauagucuaaauauauauauu

SEQ ID NO: 673300 - RNA, 22 nt, Artificial Sequence
  Synthetic
auauagucuaaauauauauauu

SEQ ID NO: 673301 - RNA, 23 nt, Artificial Sequence
  Synthetic
uauauagucuaaauauauauauu

SEQ ID NO: 673302 - RNA, 24 nt, Artificial Sequence
  Synthetic
auauauagucuaaauauauauauu

SEQ ID NO: 673303 - RNA, 18 nt, Artificial Sequence
  Synthetic
acuugauauauauauauu

SEQ ID NO: 673304 - RNA, 19 nt, Artificial Sequence
  Synthetic
aacuugauauauauauauu

SEQ ID NO: 673305 - RNA, 20 nt, Artificial Sequence
  Synthetic
caacuugauauauauauauu

SEQ ID NO: 673306 - RNA, 21 nt, Artificial Sequence
  Synthetic
ucaacuugauauauauauauu

SEQ ID NO: 673307 - RNA, 22 nt, Artificial Sequence
  Synthetic
aucaacuugauauauauauauu

SEQ ID NO: 673308 - RNA, 23 nt, Artificial Sequence
  Synthetic
uaucaacuugauauauauauauu

SEQ ID NO: 673309 - RNA, 24 nt, Artificial Sequence
  Synthetic
cuaucaacuugauauauauauauu

SEQ ID NO: 673310 - RNA, 18 nt, Artificial Sequence
  Synthetic
uaugcauccuccuauauu

SEQ ID NO: 673311 - RNA, 19 nt, Artificial Sequence
  Synthetic
cuaugcauccuccuauauu

SEQ ID NO: 673312 - RNA, 20 nt, Artificial Sequence
  Synthetic
ucuaugcauccuccuauauu

SEQ ID NO: 673313 - RNA, 21 nt, Artificial Sequence
  Synthetic
uucuaugcauccuccuauauu

SEQ ID NO: 673314 - RNA, 22 nt, Artificial Sequence
  Synthetic
uuucuaugcauccuccuauauu

SEQ ID NO: 673315 - RNA, 23 nt, Artificial Sequence
  Synthetic
guuucuaugcauccuccuauauu

SEQ ID NO: 673316 - RNA, 24 nt, Artificial Sequence
  Synthetic
aguuucuaugcauccuccuauauu

SEQ ID NO: 673317 - RNA, 18 nt, Artificial Sequence
  Synthetic
aguuucuagaaguauauu

SEQ ID NO: 673318 - RNA, 19 nt, Artificial Sequence
  Synthetic
caguuucuagaaguauauu

SEQ ID NO: 673319 - RNA, 20 nt, Artificial Sequence
  Synthetic
acaguuucuagaaguauauu

SEQ ID NO: 673320 - RNA, 21 nt, Artificial Sequence
  Synthetic
uacaguuucuagaaguauauu

SEQ ID NO: 673321 - RNA, 22 nt, Artificial Sequence
  Synthetic
guacaguuucuagaaguauauu

SEQ ID NO: 673322 - RNA, 23 nt, Artificial Sequence
  Synthetic
aguacaguuucuagaaguauauu

SEQ ID NO: 673323 - RNA, 24 nt, Artificial Sequence
  Synthetic
aaguacaguuucuagaaguauauu

SEQ ID NO: 673324 - RNA, 18 nt, Artificial Sequence
  Synthetic
uaaagagaacaguauauu

SEQ ID NO: 673325 - RNA, 19 nt, Artificial Sequence
  Synthetic
guaaagagaacaguauauu

SEQ ID NO: 673326 - RNA, 20 nt, Artificial Sequence
  Synthetic
aguaaagagaacaguauauu

SEQ ID NO: 673327 - RNA, 21 nt, Artificial Sequence
  Synthetic
aaguaaagagaacaguauauu

SEQ ID NO: 673328 - RNA, 22 nt, Artificial Sequence
  Synthetic
uaaguaaagagaacaguauauu

SEQ ID NO: 673329 - RNA, 23 nt, Artificial Sequence
  Synthetic
auaaguaaagagaacaguauauu

SEQ ID NO: 673330 - RNA, 24 nt, Artificial Sequence
  Synthetic
uauaaguaaagagaacaguauauu

SEQ ID NO: 673331 - RNA, 18 nt, Artificial Sequence
  Synthetic
aaacaauuuuaguauauu

SEQ ID NO: 673332 - RNA, 19 nt, Artificial Sequence
  Synthetic
aaaacaauuuuaguauauu

SEQ ID NO: 673333 - RNA, 20 nt, Artificial Sequence
  Synthetic
aaaaacaauuuuaguauauu

SEQ ID NO: 673334 - RNA, 21 nt, Artificial Sequence
  Synthetic
gaaaaacaauuuuaguauauu

SEQ ID NO: 673335 - RNA, 22 nt, Artificial Sequence
  Synthetic
agaaaaacaauuuuaguauauu

SEQ ID NO: 673336 - RNA, 23 nt, Artificial Sequence
  Synthetic
uagaaaaacaauuuuaguauauu

SEQ ID NO: 673337 - RNA, 24 nt, Artificial Sequence
  Synthetic
uuagaaaaacaauuuuaguauauu

SEQ ID NO: 673338 - RNA, 18 nt, Artificial Sequence
  Synthetic
uccaagagcauguauauu

SEQ ID NO: 673339 - RNA, 19 nt, Artificial Sequence
  Synthetic
uuccaagagcauguauauu

SEQ ID NO: 673340 - RNA, 20 nt, Artificial Sequence
  Synthetic
cuuccaagagcauguauauu

SEQ ID NO: 673341 - RNA, 21 nt, Artificial Sequence
  Synthetic
ccuuccaagagcauguauauu

SEQ ID NO: 673342 - RNA, 22 nt, Artificial Sequence
  Synthetic
gccuuccaagagcauguauauu

SEQ ID NO: 673343 - RNA, 23 nt, Artificial Sequence
  Synthetic
agccuuccaagagcauguauauu

SEQ ID NO: 673344 - RNA, 24 nt, Artificial Sequence
  Synthetic
cagccuuccaagagcauguauauu

SEQ ID NO: 673345 - RNA, 18 nt, Artificial Sequence
  Synthetic
uacagccaacuguauauu

SEQ ID NO: 673346 - RNA, 19 nt, Artificial Sequence
  Synthetic
auacagccaacuguauauu

SEQ ID NO: 673347 - RNA, 20 nt, Artificial Sequence
  Synthetic
gauacagccaacuguauauu

SEQ ID NO: 673348 - RNA, 21 nt, Artificial Sequence
  Synthetic
agauacagccaacuguauauu

SEQ ID NO: 673349 - RNA, 22 nt, Artificial Sequence
  Synthetic
uagauacagccaacuguauauu

SEQ ID NO: 673350 - RNA, 23 nt, Artificial Sequence
  Synthetic
uuagauacagccaacuguauauu

SEQ ID NO: 673351 - RNA, 24 nt, Artificial Sequence
  Synthetic
uuuagauacagccaacuguauauu

SEQ ID NO: 673352 - RNA, 18 nt, Artificial Sequence
  Synthetic
acgacaugauuguauauu

SEQ ID NO: 673353 - RNA, 19 nt, Artificial Sequence
  Synthetic
gacgacaugauuguauauu

SEQ ID NO: 673354 - RNA, 20 nt, Artificial Sequence
  Synthetic
agacgacaugauuguauauu

SEQ ID NO: 673355 - RNA, 21 nt, Artificial Sequence
  Synthetic
cagacgacaugauuguauauu

SEQ ID NO: 673356 - RNA, 22 nt, Artificial Sequence
  Synthetic
gcagacgacaugauuguauauu

SEQ ID NO: 673357 - RNA, 23 nt, Artificial Sequence
  Synthetic
ugcagacgacaugauuguauauu

SEQ ID NO: 673358 - RNA, 24 nt, Artificial Sequence
  Synthetic
uugcagacgacaugauuguauauu

SEQ ID NO: 673359 - RNA, 18 nt, Artificial Sequence
  Synthetic
augacaugauuguauauu

SEQ ID NO: 673360 - RNA, 19 nt, Artificial Sequence
  Synthetic
gaugacaugauuguauauu

SEQ ID NO: 673361 - RNA, 20 nt, Artificial Sequence
  Synthetic
agaugacaugauuguauauu

SEQ ID NO: 673362 - RNA, 21 nt, Artificial Sequence
  Synthetic
cagaugacaugauuguauauu

SEQ ID NO: 673363 - RNA, 22 nt, Artificial Sequence
  Synthetic
gcagaugacaugauuguauauu

SEQ ID NO: 673364 - RNA, 23 nt, Artificial Sequence
  Synthetic
ugcagaugacaugauuguauauu

SEQ ID NO: 673365 - RNA, 24 nt, Artificial Sequence
  Synthetic
uugcagaugacaugauuguauauu

SEQ ID NO: 673366 - RNA, 18 nt, Artificial Sequence
  Synthetic
acaaaggaaaauuauauu

SEQ ID NO: 673367 - RNA, 19 nt, Artificial Sequence
  Synthetic
aacaaaggaaaauuauauu

SEQ ID NO: 673368 - RNA, 20 nt, Artificial Sequence
  Synthetic
uaacaaaggaaaauuauauu

SEQ ID NO: 673369 - RNA, 21 nt, Artificial Sequence
  Synthetic
cuaacaaaggaaaauuauauu

SEQ ID NO: 673370 - RNA, 22 nt, Artificial Sequence
  Synthetic
gcuaacaaaggaaaauuauauu

SEQ ID NO: 673371 - RNA, 23 nt, Artificial Sequence
  Synthetic
ugcuaacaaaggaaaauuauauu

SEQ ID NO: 673372 - RNA, 24 nt, Artificial Sequence
  Synthetic
gugcuaacaaaggaaaauuauauu

SEQ ID NO: 673373 - RNA, 18 nt, Artificial Sequence
  Synthetic
uaacacaguaauuauauu

SEQ ID NO: 673374 - RNA, 19 nt, Artificial Sequence
  Synthetic
uuaacacaguaauuauauu

SEQ ID NO: 673375 - RNA, 20 nt, Artificial Sequence
  Synthetic
uuuaacacaguaauuauauu

SEQ ID NO: 673376 - RNA, 21 nt, Artificial Sequence
  Synthetic
guuuaacacaguaauuauauu

SEQ ID NO: 673377 - RNA, 22 nt, Artificial Sequence
  Synthetic
gguuuaacacaguaauuauauu

SEQ ID NO: 673378 - RNA, 23 nt, Artificial Sequence
  Synthetic
cgguuuaacacaguaauuauauu

SEQ ID NO: 673379 - RNA, 24 nt, Artificial Sequence
  Synthetic
acgguuuaacacaguaauuauauu

SEQ ID NO: 673380 - RNA, 18 nt, Artificial Sequence
  Synthetic
acauuuauaauuuauauu

SEQ ID NO: 673381 - RNA, 19 nt, Artificial Sequence
  Synthetic
uacauuuauaauuuauauu

SEQ ID NO: 673382 - RNA, 20 nt, Artificial Sequence
  Synthetic
uuacauuuauaauuuauauu

SEQ ID NO: 673383 - RNA, 21 nt, Artificial Sequence
  Synthetic
uuuacauuuauaauuuauauu

SEQ ID NO: 673384 - RNA, 22 nt, Artificial Sequence
  Synthetic
auuuacauuuauaauuuauauu

SEQ ID NO: 673385 - RNA, 23 nt, Artificial Sequence
  Synthetic
gauuuacauuuauaauuuauauu

SEQ ID NO: 673386 - RNA, 24 nt, Artificial Sequence
  Synthetic
ggauuuacauuuauaauuuauauu

SEQ ID NO: 673387 - RNA, 18 nt, Artificial Sequence
  Synthetic
uacuguaccuuuuauauu

SEQ ID NO: 673388 - RNA, 19 nt, Artificial Sequence
  Synthetic
uuacuguaccuuuuauauu

SEQ ID NO: 673389 - RNA, 20 nt, Artificial Sequence
  Synthetic
uuuacuguaccuuuuauauu

SEQ ID NO: 673390 - RNA, 21 nt, Artificial Sequence
  Synthetic
uuuuacuguaccuuuuauauu

SEQ ID NO: 673391 - RNA, 22 nt, Artificial Sequence
  Synthetic
uuuuuacuguaccuuuuauauu

SEQ ID NO: 673392 - RNA, 23 nt, Artificial Sequence
  Synthetic
uuuuuuacuguaccuuuuauauu

SEQ ID NO: 673393 - RNA, 24 nt, Artificial Sequence
  Synthetic
auuuuuuacuguaccuuuuauauu

SEQ ID NO: 673394 - RNA, 18 nt, Artificial Sequence
  Synthetic
caaaaaaaaaaaacuauu

SEQ ID NO: 673395 - RNA, 19 nt, Artificial Sequence
  Synthetic
acaaaaaaaaaaaacuauu

SEQ ID NO: 673396 - RNA, 20 nt, Artificial Sequence
  Synthetic
uacaaaaaaaaaaaacuauu

SEQ ID NO: 673397 - RNA, 21 nt, Artificial Sequence
  Synthetic
uuacaaaaaaaaaaaacuauu

SEQ ID NO: 673398 - RNA, 22 nt, Artificial Sequence
  Synthetic
auuacaaaaaaaaaaaacuauu

SEQ ID NO: 673399 - RNA, 23 nt, Artificial Sequence
  Synthetic
cauuacaaaaaaaaaaaacuauu

SEQ ID NO: 673400 - RNA, 24 nt, Artificial Sequence
  Synthetic
acauuacaaaaaaaaaaaacuauu

SEQ ID NO: 673401 - RNA, 18 nt, Artificial Sequence
  Synthetic
cuuucuuaggaaacuauu

SEQ ID NO: 673402 - RNA, 19 nt, Artificial Sequence
  Synthetic
acuuucuuaggaaacuauu

SEQ ID NO: 673403 - RNA, 20 nt, Artificial Sequence
  Synthetic
gacuuucuuaggaaacuauu

SEQ ID NO: 673404 - RNA, 21 nt, Artificial Sequence
  Synthetic
agacuuucuuaggaaacuauu

SEQ ID NO: 673405 - RNA, 22 nt, Artificial Sequence
  Synthetic
uagacuuucuuaggaaacuauu

SEQ ID NO: 673406 - RNA, 23 nt, Artificial Sequence
  Synthetic
auagacuuucuuaggaaacuauu

SEQ ID NO: 673407 - RNA, 24 nt, Artificial Sequence
  Synthetic
aauagacuuucuuaggaaacuauu

SEQ ID NO: 673408 - RNA, 18 nt, Artificial Sequence
  Synthetic
aaagauaaagcaacuauu

SEQ ID NO: 673409 - RNA, 19 nt, Artificial Sequence
  Synthetic
gaaagauaaagcaacuauu

SEQ ID NO: 673410 - RNA, 20 nt, Artificial Sequence
  Synthetic
agaaagauaaagcaacuauu

SEQ ID NO: 673411 - RNA, 21 nt, Artificial Sequence
  Synthetic
aagaaagauaaagcaacuauu

SEQ ID NO: 673412 - RNA, 22 nt, Artificial Sequence
  Synthetic
aaagaaagauaaagcaacuauu

SEQ ID NO: 673413 - RNA, 23 nt, Artificial Sequence
  Synthetic
aaaagaaagauaaagcaacuauu

SEQ ID NO: 673414 - RNA, 24 nt, Artificial Sequence
  Synthetic
uaaaagaaagauaaagcaacuauu

SEQ ID NO: 673415 - RNA, 18 nt, Artificial Sequence
  Synthetic
ugcagacugucaacuauu

SEQ ID NO: 673416 - RNA, 19 nt, Artificial Sequence
  Synthetic
uugcagacugucaacuauu

SEQ ID NO: 673417 - RNA, 20 nt, Artificial Sequence
  Synthetic
uuugcagacugucaacuauu

SEQ ID NO: 673418 - RNA, 21 nt, Artificial Sequence
  Synthetic
uuuugcagacugucaacuauu

SEQ ID NO: 673419 - RNA, 22 nt, Artificial Sequence
  Synthetic
auuuugcagacugucaacuauu

SEQ ID NO: 673420 - RNA, 23 nt, Artificial Sequence
  Synthetic
uauuuugcagacugucaacuauu

SEQ ID NO: 673421 - RNA, 24 nt, Artificial Sequence
  Synthetic
auauuuugcagacugucaacuauu

SEQ ID NO: 673422 - RNA, 18 nt, Artificial Sequence
  Synthetic
aauauuacaugaacuauu

SEQ ID NO: 673423 - RNA, 19 nt, Artificial Sequence
  Synthetic
aaauauuacaugaacuauu

SEQ ID NO: 673424 - RNA, 20 nt, Artificial Sequence
  Synthetic
caaauauuacaugaacuauu

SEQ ID NO: 673425 - RNA, 21 nt, Artificial Sequence
  Synthetic
ucaaauauuacaugaacuauu

SEQ ID NO: 673426 - RNA, 22 nt, Artificial Sequence
  Synthetic
uucaaauauuacaugaacuauu

SEQ ID NO: 673427 - RNA, 23 nt, Artificial Sequence
  Synthetic
uuucaaauauuacaugaacuauu

SEQ ID NO: 673428 - RNA, 24 nt, Artificial Sequence
  Synthetic
guuucaaauauuacaugaacuauu

SEQ ID NO: 673429 - RNA, 18 nt, Artificial Sequence
  Synthetic
uaagcaaucugaacuauu

SEQ ID NO: 673430 - RNA, 19 nt, Artificial Sequence
  Synthetic
cuaagcaaucugaacuauu

SEQ ID NO: 673431 - RNA, 20 nt, Artificial Sequence
  Synthetic
acuaagcaaucugaacuauu

SEQ ID NO: 673432 - RNA, 21 nt, Artificial Sequence
  Synthetic
gacuaagcaaucugaacuauu

SEQ ID NO: 673433 - RNA, 22 nt, Artificial Sequence
  Synthetic
agacuaagcaaucugaacuauu

SEQ ID NO: 673434 - RNA, 23 nt, Artificial Sequence
  Synthetic
cagacuaagcaaucugaacuauu

SEQ ID NO: 673435 - RNA, 24 nt, Artificial Sequence
  Synthetic
ucagacuaagcaaucugaacuauu

SEQ ID NO: 673436 - RNA, 18 nt, Artificial Sequence
  Synthetic
agacauuuuugaacuauu

SEQ ID NO: 673437 - RNA, 19 nt, Artificial Sequence
  Synthetic
aagacauuuuugaacuauu

SEQ ID NO: 673438 - RNA, 20 nt, Artificial Sequence
  Synthetic
aaagacauuuuugaacuauu

SEQ ID NO: 673439 - RNA, 21 nt, Artificial Sequence
  Synthetic
aaaagacauuuuugaacuauu

SEQ ID NO: 673440 - RNA, 22 nt, Artificial Sequence
  Synthetic
uaaaagacauuuuugaacuauu

SEQ ID NO: 673441 - RNA, 23 nt, Artificial Sequence
  Synthetic
auaaaagacauuuuugaacuauu

SEQ ID NO: 673442 - RNA, 24 nt, Artificial Sequence
  Synthetic
uauaaaagacauuuuugaacuauu

SEQ ID NO: 673443 - RNA, 18 nt, Artificial Sequence
  Synthetic
cauuuaugccucacuauu

SEQ ID NO: 673444 - RNA, 19 nt, Artificial Sequence
  Synthetic
ucauuuaugccucacuauu

SEQ ID NO: 673445 - RNA, 20 nt, Artificial Sequence
  Synthetic
gucauuuaugccucacuauu

SEQ ID NO: 673446 - RNA, 21 nt, Artificial Sequence
  Synthetic
agucauuuaugccucacuauu

SEQ ID NO: 673447 - RNA, 22 nt, Artificial Sequence
  Synthetic
cagucauuuaugccucacuauu

SEQ ID NO: 673448 - RNA, 23 nt, Artificial Sequence
  Synthetic
ucagucauuuaugccucacuauu

SEQ ID NO: 673449 - RNA, 24 nt, Artificial Sequence
  Synthetic
cucagucauuuaugccucacuauu

SEQ ID NO: 673450 - RNA, 18 nt, Artificial Sequence
  Synthetic
acaggaaaaaagacuauu

SEQ ID NO: 673451 - RNA, 19 nt, Artificial Sequence
  Synthetic
aacaggaaaaaagacuauu

SEQ ID NO: 673452 - RNA, 20 nt, Artificial Sequence
  Synthetic
uaacaggaaaaaagacuauu

SEQ ID NO: 673453 - RNA, 21 nt, Artificial Sequence
  Synthetic
auaacaggaaaaaagacuauu

SEQ ID NO: 673454 - RNA, 22 nt, Artificial Sequence
  Synthetic
uauaacaggaaaaaagacuauu

SEQ ID NO: 673455 - RNA, 23 nt, Artificial Sequence
  Synthetic
auauaacaggaaaaaagacuauu

SEQ ID NO: 673456 - RNA, 24 nt, Artificial Sequence
  Synthetic
uauauaacaggaaaaaagacuauu

SEQ ID NO: 673457 - RNA, 18 nt, Artificial Sequence
  Synthetic
gacaagguggagacuauu

SEQ ID NO: 673458 - RNA, 19 nt, Artificial Sequence
  Synthetic
agacaagguggagacuauu

SEQ ID NO: 673459 - RNA, 20 nt, Artificial Sequence
  Synthetic
aagacaagguggagacuauu

SEQ ID NO: 673460 - RNA, 21 nt, Artificial Sequence
  Synthetic
gaagacaagguggagacuauu

SEQ ID NO: 673461 - RNA, 22 nt, Artificial Sequence
  Synthetic
agaagacaagguggagacuauu

SEQ ID NO: 673462 - RNA, 23 nt, Artificial Sequence
  Synthetic
cagaagacaagguggagacuauu

SEQ ID NO: 673463 - RNA, 24 nt, Artificial Sequence
  Synthetic
ucagaagacaagguggagacuauu

SEQ ID NO: 673464 - RNA, 18 nt, Artificial Sequence
  Synthetic
ucagcauuucugacuauu

SEQ ID NO: 673465 - RNA, 19 nt, Artificial Sequence
  Synthetic
aucagcauuucugacuauu

SEQ ID NO: 673466 - RNA, 20 nt, Artificial Sequence
  Synthetic
uaucagcauuucugacuauu

SEQ ID NO: 673467 - RNA, 21 nt, Artificial Sequence
  Synthetic
cuaucagcauuucugacuauu

SEQ ID NO: 673468 - RNA, 22 nt, Artificial Sequence
  Synthetic
acuaucagcauuucugacuauu

SEQ ID NO: 673469 - RNA, 23 nt, Artificial Sequence
  Synthetic
aacuaucagcauuucugacuauu

SEQ ID NO: 673470 - RNA, 24 nt, Artificial Sequence
  Synthetic
aaacuaucagcauuucugacuauu

SEQ ID NO: 673471 - RNA, 18 nt, Artificial Sequence
  Synthetic
auacgaaaagguacuauu

SEQ ID NO: 673472 - RNA, 19 nt, Artificial Sequence
  Synthetic
aauacgaaaagguacuauu

SEQ ID NO: 673473 - RNA, 20 nt, Artificial Sequence
  Synthetic
caauacgaaaagguacuauu

SEQ ID NO: 673474 - RNA, 21 nt, Artificial Sequence
  Synthetic
acaauacgaaaagguacuauu

SEQ ID NO: 673475 - RNA, 22 nt, Artificial Sequence
  Synthetic
uacaauacgaaaagguacuauu

SEQ ID NO: 673476 - RNA, 23 nt, Artificial Sequence
  Synthetic
auacaauacgaaaagguacuauu

SEQ ID NO: 673477 - RNA, 24 nt, Artificial Sequence
  Synthetic
gauacaauacgaaaagguacuauu

SEQ ID NO: 673478 - RNA, 18 nt, Artificial Sequence
  Synthetic
cccucccuugguacuauu

SEQ ID NO: 673479 - RNA, 19 nt, Artificial Sequence
  Synthetic
ucccucccuugguacuauu

SEQ ID NO: 673480 - RNA, 20 nt, Artificial Sequence
  Synthetic
cucccucccuugguacuauu

SEQ ID NO: 673481 - RNA, 21 nt, Artificial Sequence
  Synthetic
acucccucccuugguacuauu

SEQ ID NO: 673482 - RNA, 22 nt, Artificial Sequence
  Synthetic
aacucccucccuugguacuauu

SEQ ID NO: 673483 - RNA, 23 nt, Artificial Sequence
  Synthetic
aaacucccucccuugguacuauu

SEQ ID NO: 673484 - RNA, 24 nt, Artificial Sequence
  Synthetic
uaaacucccucccuugguacuauu

SEQ ID NO: 673485 - RNA, 18 nt, Artificial Sequence
  Synthetic
gccaucuaccuuacuauu

SEQ ID NO: 673486 - RNA, 19 nt, Artificial Sequence
  Synthetic
ugccaucuaccuuacuauu

SEQ ID NO: 673487 - RNA, 20 nt, Artificial Sequence
  Synthetic
gugccaucuaccuuacuauu

SEQ ID NO: 673488 - RNA, 21 nt, Artificial Sequence
  Synthetic
agugccaucuaccuuacuauu

SEQ ID NO: 673489 - RNA, 22 nt, Artificial Sequence
  Synthetic
uagugccaucuaccuuacuauu

SEQ ID NO: 673490 - RNA, 23 nt, Artificial Sequence
  Synthetic
auagugccaucuaccuuacuauu

SEQ ID NO: 673491 - RNA, 24 nt, Artificial Sequence
  Synthetic
aauagugccaucuaccuuacuauu

SEQ ID NO: 673492 - RNA, 18 nt, Artificial Sequence
  Synthetic
gcugaaguguuuacuauu

SEQ ID NO: 673493 - RNA, 19 nt, Artificial Sequence
  Synthetic
agcugaaguguuuacuauu

SEQ ID NO: 673494 - RNA, 20 nt, Artificial Sequence
  Synthetic
cagcugaaguguuuacuauu

SEQ ID NO: 673495 - RNA, 21 nt, Artificial Sequence
  Synthetic
acagcugaaguguuuacuauu

SEQ ID NO: 673496 - RNA, 22 nt, Artificial Sequence
  Synthetic
aacagcugaaguguuuacuauu

SEQ ID NO: 673497 - RNA, 23 nt, Artificial Sequence
  Synthetic
caacagcugaaguguuuacuauu

SEQ ID NO: 673498 - RNA, 24 nt, Artificial Sequence
  Synthetic
ccaacagcugaaguguuuacuauu

SEQ ID NO: 673499 - RNA, 18 nt, Artificial Sequence
  Synthetic
aaguacaauaaaccuauu

SEQ ID NO: 673500 - RNA, 19 nt, Artificial Sequence
  Synthetic
aaaguacaauaaaccuauu

SEQ ID NO: 673501 - RNA, 20 nt, Artificial Sequence
  Synthetic
aaaaguacaauaaaccuauu

SEQ ID NO: 673502 - RNA, 21 nt, Artificial Sequence
  Synthetic
aaaaaguacaauaaaccuauu

SEQ ID NO: 673503 - RNA, 22 nt, Artificial Sequence
  Synthetic
gaaaaaguacaauaaaccuauu

SEQ ID NO: 673504 - RNA, 23 nt, Artificial Sequence
  Synthetic
ugaaaaaguacaauaaaccuauu

SEQ ID NO: 673505 - RNA, 24 nt, Artificial Sequence
  Synthetic
uugaaaaaguacaauaaaccuauu

SEQ ID NO: 673506 - RNA, 18 nt, Artificial Sequence
  Synthetic
cccaaugccuaaccuauu

SEQ ID NO: 673507 - RNA, 19 nt, Artificial Sequence
  Synthetic
acccaaugccuaaccuauu

SEQ ID NO: 673508 - RNA, 20 nt, Artificial Sequence
  Synthetic
aacccaaugccuaaccuauu

SEQ ID NO: 673509 - RNA, 21 nt, Artificial Sequence
  Synthetic
uaacccaaugccuaaccuauu

SEQ ID NO: 673510 - RNA, 22 nt, Artificial Sequence
  Synthetic
cuaacccaaugccuaaccuauu

SEQ ID NO: 673511 - RNA, 23 nt, Artificial Sequence
  Synthetic
ccuaacccaaugccuaaccuauu

SEQ ID NO: 673512 - RNA, 24 nt, Artificial Sequence
  Synthetic
accuaacccaaugccuaaccuauu

SEQ ID NO: 673513 - RNA, 18 nt, Artificial Sequence
  Synthetic
ucagaaugugacccuauu

SEQ ID NO: 673514 - RNA, 19 nt, Artificial Sequence
  Synthetic
cucagaaugugacccuauu

SEQ ID NO: 673515 - RNA, 20 nt, Artificial Sequence
  Synthetic
ccucagaaugugacccuauu

SEQ ID NO: 673516 - RNA, 21 nt, Artificial Sequence
  Synthetic
accucagaaugugacccuauu

SEQ ID NO: 673517 - RNA, 22 nt, Artificial Sequence
  Synthetic
uaccucagaaugugacccuauu

SEQ ID NO: 673518 - RNA, 23 nt, Artificial Sequence
  Synthetic
guaccucagaaugugacccuauu

SEQ ID NO: 673519 - RNA, 24 nt, Artificial Sequence
  Synthetic
gguaccucagaaugugacccuauu

SEQ ID NO: 673520 - RNA, 18 nt, Artificial Sequence
  Synthetic
uccuugggccucccuauu

SEQ ID NO: 673521 - RNA, 19 nt, Artificial Sequence
  Synthetic
cuccuugggccucccuauu

SEQ ID NO: 673522 - RNA, 20 nt, Artificial Sequence
  Synthetic
ucuccuugggccucccuauu

SEQ ID NO: 673523 - RNA, 21 nt, Artificial Sequence
  Synthetic
cucuccuugggccucccuauu

SEQ ID NO: 673524 - RNA, 22 nt, Artificial Sequence
  Synthetic
ccucuccuugggccucccuauu

SEQ ID NO: 673525 - RNA, 23 nt, Artificial Sequence
  Synthetic
uccucuccuugggccucccuauu

SEQ ID NO: 673526 - RNA, 24 nt, Artificial Sequence
  Synthetic
uuccucuccuugggccucccuauu

SEQ ID NO: 673527 - RNA, 18 nt, Artificial Sequence
  Synthetic
aauucucuugucccuauu

SEQ ID NO: 673528 - RNA, 19 nt, Artificial Sequence
  Synthetic
gaauucucuugucccuauu

SEQ ID NO: 673529 - RNA, 20 nt, Artificial Sequence
  Synthetic
cgaauucucuugucccuauu

SEQ ID NO: 673530 - RNA, 21 nt, Artificial Sequence
  Synthetic
acgaauucucuugucccuauu

SEQ ID NO: 673531 - RNA, 22 nt, Artificial Sequence
  Synthetic
gacgaauucucuugucccuauu

SEQ ID NO: 673532 - RNA, 23 nt, Artificial Sequence
  Synthetic
agacgaauucucuugucccuauu

SEQ ID NO: 673533 - RNA, 24 nt, Artificial Sequence
  Synthetic
aagacgaauucucuugucccuauu

SEQ ID NO: 673534 - RNA, 18 nt, Artificial Sequence
  Synthetic
guguuaaguguuccuauu

SEQ ID NO: 673535 - RNA, 19 nt, Artificial Sequence
  Synthetic
uguguuaaguguuccuauu

SEQ ID NO: 673536 - RNA, 20 nt, Artificial Sequence
  Synthetic
guguguuaaguguuccuauu

SEQ ID NO: 673537 - RNA, 21 nt, Artificial Sequence
  Synthetic
aguguguuaaguguuccuauu

SEQ ID NO: 673538 - RNA, 22 nt, Artificial Sequence
  Synthetic
caguguguuaaguguuccuauu

SEQ ID NO: 673539 - RNA, 23 nt, Artificial Sequence
  Synthetic
gcaguguguuaaguguuccuauu

SEQ ID NO: 673540 - RNA, 24 nt, Artificial Sequence
  Synthetic
agcaguguguuaaguguuccuauu

SEQ ID NO: 673541 - RNA, 18 nt, Artificial Sequence
  Synthetic
uguguuuguaaagcuauu

SEQ ID NO: 673542 - RNA, 19 nt, Artificial Sequence
  Synthetic
cuguguuuguaaagcuauu

SEQ ID NO: 673543 - RNA, 20 nt, Artificial Sequence
  Synthetic
gcuguguuuguaaagcuauu

SEQ ID NO: 673544 - RNA, 21 nt, Artificial Sequence
  Synthetic
cgcuguguuuguaaagcuauu

SEQ ID NO: 673545 - RNA, 22 nt, Artificial Sequence
  Synthetic
gcgcuguguuuguaaagcuauu

SEQ ID NO: 673546 - RNA, 23 nt, Artificial Sequence
  Synthetic
agcgcuguguuuguaaagcuauu

SEQ ID NO: 673547 - RNA, 24 nt, Artificial Sequence
  Synthetic
aagcgcuguguuuguaaagcuauu

SEQ ID NO: 673548 - RNA, 18 nt, Artificial Sequence
  Synthetic
cagacuauguaagcuauu

SEQ ID NO: 673549 - RNA, 19 nt, Artificial Sequence
  Synthetic
ucagacuauguaagcuauu

SEQ ID NO: 673550 - RNA, 20 nt, Artificial Sequence
  Synthetic
gucagacuauguaagcuauu

SEQ ID NO: 673551 - RNA, 21 nt, Artificial Sequence
  Synthetic
ugucagacuauguaagcuauu

SEQ ID NO: 673552 - RNA, 22 nt, Artificial Sequence
  Synthetic
uugucagacuauguaagcuauu

SEQ ID NO: 673553 - RNA, 23 nt, Artificial Sequence
  Synthetic
uuugucagacuauguaagcuauu

SEQ ID NO: 673554 - RNA, 24 nt, Artificial Sequence
  Synthetic
auuugucagacuauguaagcuauu

SEQ ID NO: 673555 - RNA, 18 nt, Artificial Sequence
  Synthetic
agauucacuuaagcuauu

SEQ ID NO: 673556 - RNA, 19 nt, Artificial Sequence
  Synthetic
aagauucacuuaagcuauu

SEQ ID NO: 673557 - RNA, 20 nt, Artificial Sequence
  Synthetic
uaagauucacuuaagcuauu

SEQ ID NO: 673558 - RNA, 21 nt, Artificial Sequence
  Synthetic
uuaagauucacuuaagcuauu

SEQ ID NO: 673559 - RNA, 22 nt, Artificial Sequence
  Synthetic
uuuaagauucacuuaagcuauu

SEQ ID NO: 673560 - RNA, 23 nt, Artificial Sequence
  Synthetic
auuuaagauucacuuaagcuauu

SEQ ID NO: 673561 - RNA, 24 nt, Artificial Sequence
  Synthetic
aauuuaagauucacuuaagcuauu

SEQ ID NO: 673562 - RNA, 18 nt, Artificial Sequence
  Synthetic
aacugagguacagcuauu

SEQ ID NO: 673563 - RNA, 19 nt, Artificial Sequence
  Synthetic
gaacugagguacagcuauu

SEQ ID NO: 673564 - RNA, 20 nt, Artificial Sequence
  Synthetic
agaacugagguacagcuauu

SEQ ID NO: 673565 - RNA, 21 nt, Artificial Sequence
  Synthetic
aagaacugagguacagcuauu

SEQ ID NO: 673566 - RNA, 22 nt, Artificial Sequence
  Synthetic
aaagaacugagguacagcuauu

SEQ ID NO: 673567 - RNA, 23 nt, Artificial Sequence
  Synthetic
caaagaacugagguacagcuauu

SEQ ID NO: 673568 - RNA, 24 nt, Artificial Sequence
  Synthetic
ucaaagaacugagguacagcuauu

SEQ ID NO: 673569 - RNA, 18 nt, Artificial Sequence
  Synthetic
ccuguaaucccagcuauu

SEQ ID NO: 673570 - RNA, 19 nt, Artificial Sequence
  Synthetic
accuguaaucccagcuauu

SEQ ID NO: 673571 - RNA, 20 nt, Artificial Sequence
  Synthetic
caccuguaaucccagcuauu

SEQ ID NO: 673572 - RNA, 21 nt, Artificial Sequence
  Synthetic
acaccuguaaucccagcuauu

SEQ ID NO: 673573 - RNA, 22 nt, Artificial Sequence
  Synthetic
cacaccuguaaucccagcuauu

SEQ ID NO: 673574 - RNA, 23 nt, Artificial Sequence
  Synthetic
gcacaccuguaaucccagcuauu

SEQ ID NO: 673575 - RNA, 24 nt, Artificial Sequence
  Synthetic
ugcacaccuguaaucccagcuauu

SEQ ID NO: 673576 - RNA, 18 nt, Artificial Sequence
  Synthetic
ccuguagucccagcuauu

SEQ ID NO: 673577 - RNA, 19 nt, Artificial Sequence
  Synthetic
gccuguagucccagcuauu

SEQ ID NO: 673578 - RNA, 20 nt, Artificial Sequence
  Synthetic
cgccuguagucccagcuauu

SEQ ID NO: 673579 - RNA, 21 nt, Artificial Sequence
  Synthetic
gcgccuguagucccagcuauu

SEQ ID NO: 673580 - RNA, 22 nt, Artificial Sequence
  Synthetic
ggcgccuguagucccagcuauu

SEQ ID NO: 673581 - RNA, 23 nt, Artificial Sequence
  Synthetic
gggcgccuguagucccagcuauu

SEQ ID NO: 673582 - RNA, 24 nt, Artificial Sequence
  Synthetic
ugggcgccuguagucccagcuauu

SEQ ID NO: 673583 - RNA, 18 nt, Artificial Sequence
  Synthetic
aaacacaaaagagcuauu

SEQ ID NO: 673584 - RNA, 19 nt, Artificial Sequence
  Synthetic
aaaacacaaaagagcuauu

SEQ ID NO: 673585 - RNA, 20 nt, Artificial Sequence
  Synthetic
gaaaacacaaaagagcuauu

SEQ ID NO: 673586 - RNA, 21 nt, Artificial Sequence
  Synthetic
agaaaacacaaaagagcuauu

SEQ ID NO: 673587 - RNA, 22 nt, Artificial Sequence
  Synthetic
gagaaaacacaaaagagcuauu

SEQ ID NO: 673588 - RNA, 23 nt, Artificial Sequence
  Synthetic
agagaaaacacaaaagagcuauu

SEQ ID NO: 673589 - RNA, 24 nt, Artificial Sequence
  Synthetic
gagagaaaacacaaaagagcuauu

SEQ ID NO: 673590 - RNA, 18 nt, Artificial Sequence
  Synthetic
ugcguuaaaauagcuauu

SEQ ID NO: 673591 - RNA, 19 nt, Artificial Sequence
  Synthetic
augcguuaaaauagcuauu

SEQ ID NO: 673592 - RNA, 20 nt, Artificial Sequence
  Synthetic
caugcguuaaaauagcuauu

SEQ ID NO: 673593 - RNA, 21 nt, Artificial Sequence
  Synthetic
acaugcguuaaaauagcuauu

SEQ ID NO: 673594 - RNA, 22 nt, Artificial Sequence
  Synthetic
uacaugcguuaaaauagcuauu

SEQ ID NO: 673595 - RNA, 23 nt, Artificial Sequence
  Synthetic
uuacaugcguuaaaauagcuauu

SEQ ID NO: 673596 - RNA, 24 nt, Artificial Sequence
  Synthetic
uuuacaugcguuaaaauagcuauu

SEQ ID NO: 673597 - RNA, 18 nt, Artificial Sequence
  Synthetic
uauauucuuaaugcuauu

SEQ ID NO: 673598 - RNA, 19 nt, Artificial Sequence
  Synthetic
cuauauucuuaaugcuauu

SEQ ID NO: 673599 - RNA, 20 nt, Artificial Sequence
  Synthetic
acuauauucuuaaugcuauu

SEQ ID NO: 673600 - RNA, 21 nt, Artificial Sequence
  Synthetic
aacuauauucuuaaugcuauu

SEQ ID NO: 673601 - RNA, 22 nt, Artificial Sequence
  Synthetic
aaacuauauucuuaaugcuauu

SEQ ID NO: 673602 - RNA, 23 nt, Artificial Sequence
  Synthetic
gaaacuauauucuuaaugcuauu

SEQ ID NO: 673603 - RNA, 24 nt, Artificial Sequence
  Synthetic
ugaaacuauauucuuaaugcuauu

SEQ ID NO: 673604 - RNA, 18 nt, Artificial Sequence
  Synthetic
gaaagucaugaugcuauu

SEQ ID NO: 673605 - RNA, 19 nt, Artificial Sequence
  Synthetic
ggaaagucaugaugcuauu

SEQ ID NO: 673606 - RNA, 20 nt, Artificial Sequence
  Synthetic
uggaaagucaugaugcuauu

SEQ ID NO: 673607 - RNA, 21 nt, Artificial Sequence
  Synthetic
auggaaagucaugaugcuauu

SEQ ID NO: 673608 - RNA, 22 nt, Artificial Sequence
  Synthetic
uauggaaagucaugaugcuauu

SEQ ID NO: 673609 - RNA, 23 nt, Artificial Sequence
  Synthetic
guauggaaagucaugaugcuauu

SEQ ID NO: 673610 - RNA, 24 nt, Artificial Sequence
  Synthetic
gguauggaaagucaugaugcuauu

SEQ ID NO: 673611 - RNA, 18 nt, Artificial Sequence
  Synthetic
gcuaaauggggugcuauu

SEQ ID NO: 673612 - RNA, 19 nt, Artificial Sequence
  Synthetic
ugcuaaauggggugcuauu

SEQ ID NO: 673613 - RNA, 20 nt, Artificial Sequence
  Synthetic
cugcuaaauggggugcuauu

SEQ ID NO: 673614 - RNA, 21 nt, Artificial Sequence
  Synthetic
acugcuaaauggggugcuauu

SEQ ID NO: 673615 - RNA, 22 nt, Artificial Sequence
  Synthetic
aacugcuaaauggggugcuauu

SEQ ID NO: 673616 - RNA, 23 nt, Artificial Sequence
  Synthetic
aaacugcuaaauggggugcuauu

SEQ ID NO: 673617 - RNA, 24 nt, Artificial Sequence
  Synthetic
uaaacugcuaaauggggugcuauu

SEQ ID NO: 673618 - RNA, 21 nt, Artificial Sequence
  Synthetic
ugguuccaagucuuugcuauu

SEQ ID NO: 673619 - RNA, 22 nt, Artificial Sequence
  Synthetic
uugguuccaagucuuugcuauu

SEQ ID NO: 673620 - RNA, 23 nt, Artificial Sequence
  Synthetic
guugguuccaagucuuugcuauu

SEQ ID NO: 673621 - RNA, 24 nt, Artificial Sequence
  Synthetic
gguugguuccaagucuuugcuauu

SEQ ID NO: 673622 - RNA, 18 nt, Artificial Sequence
  Synthetic
gaaaaauuugaaucuauu

SEQ ID NO: 673623 - RNA, 19 nt, Artificial Sequence
  Synthetic
ugaaaaauuugaaucuauu

SEQ ID NO: 673624 - RNA, 20 nt, Artificial Sequence
  Synthetic
cugaaaaauuugaaucuauu

SEQ ID NO: 673625 - RNA, 21 nt, Artificial Sequence
  Synthetic
acugaaaaauuugaaucuauu

SEQ ID NO: 673626 - RNA, 22 nt, Artificial Sequence
  Synthetic
aacugaaaaauuugaaucuauu

SEQ ID NO: 673627 - RNA, 23 nt, Artificial Sequence
  Synthetic
caacugaaaaauuugaaucuauu

SEQ ID NO: 673628 - RNA, 24 nt, Artificial Sequence
  Synthetic
ccaacugaaaaauuugaaucuauu

SEQ ID NO: 673629 - RNA, 18 nt, Artificial Sequence
  Synthetic
ucugggcacccaucuauu

SEQ ID NO: 673630 - RNA, 19 nt, Artificial Sequence
  Synthetic
aucugggcacccaucuauu

SEQ ID NO: 673631 - RNA, 20 nt, Artificial Sequence
  Synthetic
caucugggcacccaucuauu

SEQ ID NO: 673632 - RNA, 21 nt, Artificial Sequence
  Synthetic
ccaucugggcacccaucuauu

SEQ ID NO: 673633 - RNA, 22 nt, Artificial Sequence
  Synthetic
accaucugggcacccaucuauu

SEQ ID NO: 673634 - RNA, 23 nt, Artificial Sequence
  Synthetic
caccaucugggcacccaucuauu

SEQ ID NO: 673635 - RNA, 24 nt, Artificial Sequence
  Synthetic
ucaccaucugggcacccaucuauu

SEQ ID NO: 673636 - RNA, 18 nt, Artificial Sequence
  Synthetic
aucuguaagagaucuauu

SEQ ID NO: 673637 - RNA, 19 nt, Artificial Sequence
  Synthetic
caucuguaagagaucuauu

SEQ ID NO: 673638 - RNA, 20 nt, Artificial Sequence
  Synthetic
ucaucuguaagagaucuauu

SEQ ID NO: 673639 - RNA, 21 nt, Artificial Sequence
  Synthetic
cucaucuguaagagaucuauu

SEQ ID NO: 673640 - RNA, 22 nt, Artificial Sequence
  Synthetic
ccucaucuguaagagaucuauu

SEQ ID NO: 673641 - RNA, 23 nt, Artificial Sequence
  Synthetic
uccucaucuguaagagaucuauu

SEQ ID NO: 673642 - RNA, 24 nt, Artificial Sequence
  Synthetic
uuccucaucuguaagagaucuauu

SEQ ID NO: 673643 - RNA, 18 nt, Artificial Sequence
  Synthetic
auucaguugguaucuauu

SEQ ID NO: 673644 - RNA, 19 nt, Artificial Sequence
  Synthetic
aauucaguugguaucuauu

SEQ ID NO: 673645 - RNA, 20 nt, Artificial Sequence
  Synthetic
caauucaguugguaucuauu

SEQ ID NO: 673646 - RNA, 21 nt, Artificial Sequence
  Synthetic
ucaauucaguugguaucuauu

SEQ ID NO: 673647 - RNA, 22 nt, Artificial Sequence
  Synthetic
cucaauucaguugguaucuauu

SEQ ID NO: 673648 - RNA, 23 nt, Artificial Sequence
  Synthetic
gcucaauucaguugguaucuauu

SEQ ID NO: 673649 - RNA, 24 nt, Artificial Sequence
  Synthetic
ugcucaauucaguugguaucuauu

SEQ ID NO: 673650 - RNA, 18 nt, Artificial Sequence
  Synthetic
acagcuucuguaucuauu

SEQ ID NO: 673651 - RNA, 19 nt, Artificial Sequence
  Synthetic
uacagcuucuguaucuauu

SEQ ID NO: 673652 - RNA, 20 nt, Artificial Sequence
  Synthetic
auacagcuucuguaucuauu

SEQ ID NO: 673653 - RNA, 21 nt, Artificial Sequence
  Synthetic
uauacagcuucuguaucuauu

SEQ ID NO: 673654 - RNA, 22 nt, Artificial Sequence
  Synthetic
cuauacagcuucuguaucuauu

SEQ ID NO: 673655 - RNA, 23 nt, Artificial Sequence
  Synthetic
gcuauacagcuucuguaucuauu

SEQ ID NO: 673656 - RNA, 24 nt, Artificial Sequence
  Synthetic
agcuauacagcuucuguaucuauu

SEQ ID NO: 673657 - RNA, 18 nt, Artificial Sequence
  Synthetic
cauuucacauuaucuauu

SEQ ID NO: 673658 - RNA, 19 nt, Artificial Sequence
  Synthetic
acauuucacauuaucuauu

SEQ ID NO: 673659 - RNA, 20 nt, Artificial Sequence
  Synthetic
cacauuucacauuaucuauu

SEQ ID NO: 673660 - RNA, 21 nt, Artificial Sequence
  Synthetic
ucacauuucacauuaucuauu

SEQ ID NO: 673661 - RNA, 22 nt, Artificial Sequence
  Synthetic
aucacauuucacauuaucuauu

SEQ ID NO: 673662 - RNA, 23 nt, Artificial Sequence
  Synthetic
uaucacauuucacauuaucuauu

SEQ ID NO: 673663 - RNA, 24 nt, Artificial Sequence
  Synthetic
auaucacauuucacauuaucuauu

SEQ ID NO: 673664 - RNA, 18 nt, Artificial Sequence
  Synthetic
uaaaauugauacucuauu

SEQ ID NO: 673665 - RNA, 19 nt, Artificial Sequence
  Synthetic
uuaaaauugauacucuauu

SEQ ID NO: 673666 - RNA, 20 nt, Artificial Sequence
  Synthetic
uuuaaaauugauacucuauu

SEQ ID NO: 673667 - RNA, 21 nt, Artificial Sequence
  Synthetic
auuuaaaauugauacucuauu

SEQ ID NO: 673668 - RNA, 22 nt, Artificial Sequence
  Synthetic
uauuuaaaauugauacucuauu

SEQ ID NO: 673669 - RNA, 23 nt, Artificial Sequence
  Synthetic
guauuuaaaauugauacucuauu

SEQ ID NO: 673670 - RNA, 24 nt, Artificial Sequence
  Synthetic
aguauuuaaaauugauacucuauu

SEQ ID NO: 673671 - RNA, 18 nt, Artificial Sequence
  Synthetic
uuacauacuaccucuauu

SEQ ID NO: 673672 - RNA, 19 nt, Artificial Sequence
  Synthetic
uuuacauacuaccucuauu

SEQ ID NO: 673673 - RNA, 20 nt, Artificial Sequence
  Synthetic
uuuuacauacuaccucuauu

SEQ ID NO: 673674 - RNA, 21 nt, Artificial Sequence
  Synthetic
uuuuuacauacuaccucuauu

SEQ ID NO: 673675 - RNA, 22 nt, Artificial Sequence
  Synthetic
auuuuuacauacuaccucuauu

SEQ ID NO: 673676 - RNA, 23 nt, Artificial Sequence
  Synthetic
uauuuuuacauacuaccucuauu

SEQ ID NO: 673677 - RNA, 24 nt, Artificial Sequence
  Synthetic
guauuuuuacauacuaccucuauu

SEQ ID NO: 673678 - RNA, 18 nt, Artificial Sequence
  Synthetic
uacuccuauuccucuauu

SEQ ID NO: 673679 - RNA, 19 nt, Artificial Sequence
  Synthetic
cuacuccuauuccucuauu

SEQ ID NO: 673680 - RNA, 20 nt, Artificial Sequence
  Synthetic
ucuacuccuauuccucuauu

SEQ ID NO: 673681 - RNA, 21 nt, Artificial Sequence
  Synthetic
cucuacuccuauuccucuauu

SEQ ID NO: 673682 - RNA, 22 nt, Artificial Sequence
  Synthetic
ucucuacuccuauuccucuauu

SEQ ID NO: 673683 - RNA, 23 nt, Artificial Sequence
  Synthetic
aucucuacuccuauuccucuauu

SEQ ID NO: 673684 - RNA, 24 nt, Artificial Sequence
  Synthetic
aaucucuacuccuauuccucuauu

SEQ ID NO: 673685 - RNA, 18 nt, Artificial Sequence
  Synthetic
caaucaccuugcucuauu

SEQ ID NO: 673686 - RNA, 19 nt, Artificial Sequence
  Synthetic
acaaucaccuugcucuauu

SEQ ID NO: 673687 - RNA, 20 nt, Artificial Sequence
  Synthetic
cacaaucaccuugcucuauu

SEQ ID NO: 673688 - RNA, 21 nt, Artificial Sequence
  Synthetic
acacaaucaccuugcucuauu

SEQ ID NO: 673689 - RNA, 22 nt, Artificial Sequence
  Synthetic
aacacaaucaccuugcucuauu

SEQ ID NO: 673690 - RNA, 23 nt, Artificial Sequence
  Synthetic
aaacacaaucaccuugcucuauu

SEQ ID NO: 673691 - RNA, 24 nt, Artificial Sequence
  Synthetic
caaacacaaucaccuugcucuauu

SEQ ID NO: 673692 - RNA, 18 nt, Artificial Sequence
  Synthetic
acucguuauuggucuauu

SEQ ID NO: 673693 - RNA, 19 nt, Artificial Sequence
  Synthetic
aacucguuauuggucuauu

SEQ ID NO: 673694 - RNA, 20 nt, Artificial Sequence
  Synthetic
gaacucguuauuggucuauu

SEQ ID NO: 673695 - RNA, 21 nt, Artificial Sequence
  Synthetic
agaacucguuauuggucuauu

SEQ ID NO: 673696 - RNA, 22 nt, Artificial Sequence
  Synthetic
cagaacucguuauuggucuauu

SEQ ID NO: 673697 - RNA, 23 nt, Artificial Sequence
  Synthetic
ucagaacucguuauuggucuauu

SEQ ID NO: 673698 - RNA, 24 nt, Artificial Sequence
  Synthetic
uucagaacucguuauuggucuauu

SEQ ID NO: 673699 - RNA, 18 nt, Artificial Sequence
  Synthetic
uccuguuauuggucuauu

SEQ ID NO: 673700 - RNA, 19 nt, Artificial Sequence
  Synthetic
cuccuguuauuggucuauu

SEQ ID NO: 673701 - RNA, 20 nt, Artificial Sequence
  Synthetic
gcuccuguuauuggucuauu

SEQ ID NO: 673702 - RNA, 21 nt, Artificial Sequence
  Synthetic
agcuccuguuauuggucuauu

SEQ ID NO: 673703 - RNA, 22 nt, Artificial Sequence
  Synthetic
cagcuccuguuauuggucuauu

SEQ ID NO: 673704 - RNA, 23 nt, Artificial Sequence
  Synthetic
ucagcuccuguuauuggucuauu

SEQ ID NO: 673705 - RNA, 24 nt, Artificial Sequence
  Synthetic
uucagcuccuguuauuggucuauu

SEQ ID NO: 673706 - RNA, 18 nt, Artificial Sequence
  Synthetic
acuaagaaaaauucuauu

SEQ ID NO: 673707 - RNA, 19 nt, Artificial Sequence
  Synthetic
uacuaagaaaaauucuauu

SEQ ID NO: 673708 - RNA, 20 nt, Artificial Sequence
  Synthetic
uuacuaagaaaaauucuauu

SEQ ID NO: 673709 - RNA, 21 nt, Artificial Sequence
  Synthetic
uuuacuaagaaaaauucuauu

SEQ ID NO: 673710 - RNA, 22 nt, Artificial Sequence
  Synthetic
cuuuacuaagaaaaauucuauu

SEQ ID NO: 673711 - RNA, 23 nt, Artificial Sequence
  Synthetic
ucuuuacuaagaaaaauucuauu

SEQ ID NO: 673712 - RNA, 24 nt, Artificial Sequence
  Synthetic
aucuuuacuaagaaaaauucuauu

SEQ ID NO: 673713 - RNA, 18 nt, Artificial Sequence
  Synthetic
agaaacagauauucuauu

SEQ ID NO: 673714 - RNA, 19 nt, Artificial Sequence
  Synthetic
cagaaacagauauucuauu

SEQ ID NO: 673715 - RNA, 20 nt, Artificial Sequence
  Synthetic
acagaaacagauauucuauu

SEQ ID NO: 673716 - RNA, 21 nt, Artificial Sequence
  Synthetic
cacagaaacagauauucuauu

SEQ ID NO: 673717 - RNA, 22 nt, Artificial Sequence
  Synthetic
acacagaaacagauauucuauu

SEQ ID NO: 673718 - RNA, 23 nt, Artificial Sequence
  Synthetic
cacacagaaacagauauucuauu

SEQ ID NO: 673719 - RNA, 24 nt, Artificial Sequence
  Synthetic
acacacagaaacagauauucuauu

SEQ ID NO: 673720 - RNA, 18 nt, Artificial Sequence
  Synthetic
gcccaaaagccuucuauu

SEQ ID NO: 673721 - RNA, 19 nt, Artificial Sequence
  Synthetic
ggcccaaaagccuucuauu

SEQ ID NO: 673722 - RNA, 20 nt, Artificial Sequence
  Synthetic
uggcccaaaagccuucuauu

SEQ ID NO: 673723 - RNA, 21 nt, Artificial Sequence
  Synthetic
guggcccaaaagccuucuauu

SEQ ID NO: 673724 - RNA, 22 nt, Artificial Sequence
  Synthetic
uguggcccaaaagccuucuauu

SEQ ID NO: 673725 - RNA, 23 nt, Artificial Sequence
  Synthetic
auguggcccaaaagccuucuauu

SEQ ID NO: 673726 - RNA, 24 nt, Artificial Sequence
  Synthetic
gauguggcccaaaagccuucuauu

SEQ ID NO: 673727 - RNA, 18 nt, Artificial Sequence
  Synthetic
aaaauaauaucuucuauu

SEQ ID NO: 673728 - RNA, 19 nt, Artificial Sequence
  Synthetic
aaaaauaauaucuucuauu

SEQ ID NO: 673729 - RNA, 20 nt, Artificial Sequence
  Synthetic
caaaaauaauaucuucuauu

SEQ ID NO: 673730 - RNA, 21 nt, Artificial Sequence
  Synthetic
ucaaaaauaauaucuucuauu

SEQ ID NO: 673731 - RNA, 22 nt, Artificial Sequence
  Synthetic
uucaaaaauaauaucuucuauu

SEQ ID NO: 673732 - RNA, 23 nt, Artificial Sequence
  Synthetic
uuucaaaaauaauaucuucuauu

SEQ ID NO: 673733 - RNA, 24 nt, Artificial Sequence
  Synthetic
uuuucaaaaauaauaucuucuauu

SEQ ID NO: 673734 - RNA, 18 nt, Artificial Sequence
  Synthetic
cucauuuccucuucuauu

SEQ ID NO: 673735 - RNA, 19 nt, Artificial Sequence
  Synthetic
acucauuuccucuucuauu

SEQ ID NO: 673736 - RNA, 20 nt, Artificial Sequence
  Synthetic
gacucauuuccucuucuauu

SEQ ID NO: 673737 - RNA, 21 nt, Artificial Sequence
  Synthetic
agacucauuuccucuucuauu

SEQ ID NO: 673738 - RNA, 22 nt, Artificial Sequence
  Synthetic
cagacucauuuccucuucuauu

SEQ ID NO: 673739 - RNA, 23 nt, Artificial Sequence
  Synthetic
ucagacucauuuccucuucuauu

SEQ ID NO: 673740 - RNA, 24 nt, Artificial Sequence
  Synthetic
cucagacucauuuccucuucuauu

SEQ ID NO: 673741 - RNA, 18 nt, Artificial Sequence
  Synthetic
aguuacgucauuucuauu

SEQ ID NO: 673742 - RNA, 19 nt, Artificial Sequence
  Synthetic
caguuacgucauuucuauu

SEQ ID NO: 673743 - RNA, 20 nt, Artificial Sequence
  Synthetic
ucaguuacgucauuucuauu

SEQ ID NO: 673744 - RNA, 21 nt, Artificial Sequence
  Synthetic
uucaguuacgucauuucuauu

SEQ ID NO: 673745 - RNA, 22 nt, Artificial Sequence
  Synthetic
cuucaguuacgucauuucuauu

SEQ ID NO: 673746 - RNA, 23 nt, Artificial Sequence
  Synthetic
acuucaguuacgucauuucuauu

SEQ ID NO: 673747 - RNA, 24 nt, Artificial Sequence
  Synthetic
uacuucaguuacgucauuucuauu

SEQ ID NO: 673748 - RNA, 18 nt, Artificial Sequence
  Synthetic
aaaacagcccuuucuauu

SEQ ID NO: 673749 - RNA, 19 nt, Artificial Sequence
  Synthetic
caaaacagcccuuucuauu

SEQ ID NO: 673750 - RNA, 20 nt, Artificial Sequence
  Synthetic
gcaaaacagcccuuucuauu

SEQ ID NO: 673751 - RNA, 21 nt, Artificial Sequence
  Synthetic
ugcaaaacagcccuuucuauu

SEQ ID NO: 673752 - RNA, 22 nt, Artificial Sequence
  Synthetic
augcaaaacagcccuuucuauu

SEQ ID NO: 673753 - RNA, 23 nt, Artificial Sequence
  Synthetic
aaugcaaaacagcccuuucuauu

SEQ ID NO: 673754 - RNA, 24 nt, Artificial Sequence
  Synthetic
gaaugcaaaacagcccuuucuauu

SEQ ID NO: 673755 - RNA, 18 nt, Artificial Sequence
  Synthetic
uagaacccaguuucuauu

SEQ ID NO: 673756 - RNA, 19 nt, Artificial Sequence
  Synthetic
auagaacccaguuucuauu

SEQ ID NO: 673757 - RNA, 20 nt, Artificial Sequence
  Synthetic
aauagaacccaguuucuauu

SEQ ID NO: 673758 - RNA, 21 nt, Artificial Sequence
  Synthetic
caauagaacccaguuucuauu

SEQ ID NO: 673759 - RNA, 22 nt, Artificial Sequence
  Synthetic
ucaauagaacccaguuucuauu

SEQ ID NO: 673760 - RNA, 23 nt, Artificial Sequence
  Synthetic
gucaauagaacccaguuucuauu

SEQ ID NO: 673761 - RNA, 24 nt, Artificial Sequence
  Synthetic
ugucaauagaacccaguuucuauu

SEQ ID NO: 673762 - RNA, 18 nt, Artificial Sequence
  Synthetic
aaggauauaguuucuauu

SEQ ID NO: 673763 - RNA, 19 nt, Artificial Sequence
  Synthetic
uaaggauauaguuucuauu

SEQ ID NO: 673764 - RNA, 20 nt, Artificial Sequence
  Synthetic
auaaggauauaguuucuauu

SEQ ID NO: 673765 - RNA, 21 nt, Artificial Sequence
  Synthetic
gauaaggauauaguuucuauu

SEQ ID NO: 673766 - RNA, 22 nt, Artificial Sequence
  Synthetic
ugauaaggauauaguuucuauu

SEQ ID NO: 673767 - RNA, 23 nt, Artificial Sequence
  Synthetic
uugauaaggauauaguuucuauu

SEQ ID NO: 673768 - RNA, 24 nt, Artificial Sequence
  Synthetic
guugauaaggauauaguuucuauu

SEQ ID NO: 673769 - RNA, 18 nt, Artificial Sequence
  Synthetic
aaagauuuauuuucuauu

SEQ ID NO: 673770 - RNA, 19 nt, Artificial Sequence
  Synthetic
aaaagauuuauuuucuauu

SEQ ID NO: 673771 - RNA, 20 nt, Artificial Sequence
  Synthetic
gaaaagauuuauuuucuauu

SEQ ID NO: 673772 - RNA, 21 nt, Artificial Sequence
  Synthetic
ugaaaagauuuauuuucuauu

SEQ ID NO: 673773 - RNA, 22 nt, Artificial Sequence
  Synthetic
uugaaaagauuuauuuucuauu

SEQ ID NO: 673774 - RNA, 23 nt, Artificial Sequence
  Synthetic
uuugaaaagauuuauuuucuauu

SEQ ID NO: 673775 - RNA, 24 nt, Artificial Sequence
  Synthetic
cuuugaaaagauuuauuuucuauu

SEQ ID NO: 673776 - RNA, 18 nt, Artificial Sequence
  Synthetic
uuacugaugcaaaguauu

SEQ ID NO: 673777 - RNA, 19 nt, Artificial Sequence
  Synthetic
cuuacugaugcaaaguauu

SEQ ID NO: 673778 - RNA, 20 nt, Artificial Sequence
  Synthetic
acuuacugaugcaaaguauu

SEQ ID NO: 673779 - RNA, 21 nt, Artificial Sequence
  Synthetic
uacuuacugaugcaaaguauu

SEQ ID NO: 673780 - RNA, 22 nt, Artificial Sequence
  Synthetic
guacuuacugaugcaaaguauu

SEQ ID NO: 673781 - RNA, 23 nt, Artificial Sequence
  Synthetic
gguacuuacugaugcaaaguauu

SEQ ID NO: 673782 - RNA, 24 nt, Artificial Sequence
  Synthetic
ugguacuuacugaugcaaaguauu

SEQ ID NO: 673783 - RNA, 18 nt, Artificial Sequence
  Synthetic
ggagcagaggaaaguauu

SEQ ID NO: 673784 - RNA, 19 nt, Artificial Sequence
  Synthetic
uggagcagaggaaaguauu

SEQ ID NO: 673785 - RNA, 20 nt, Artificial Sequence
  Synthetic
guggagcagaggaaaguauu

SEQ ID NO: 673786 - RNA, 21 nt, Artificial Sequence
  Synthetic
gguggagcagaggaaaguauu

SEQ ID NO: 673787 - RNA, 22 nt, Artificial Sequence
  Synthetic
agguggagcagaggaaaguauu

SEQ ID NO: 673788 - RNA, 23 nt, Artificial Sequence
  Synthetic
uagguggagcagaggaaaguauu

SEQ ID NO: 673789 - RNA, 24 nt, Artificial Sequence
  Synthetic
auagguggagcagaggaaaguauu

SEQ ID NO: 673790 - RNA, 18 nt, Artificial Sequence
  Synthetic
cagcugaacuaaaguauu

SEQ ID NO: 673791 - RNA, 19 nt, Artificial Sequence
  Synthetic
ucagcugaacuaaaguauu

SEQ ID NO: 673792 - RNA, 20 nt, Artificial Sequence
  Synthetic
cucagcugaacuaaaguauu

SEQ ID NO: 673793 - RNA, 21 nt, Artificial Sequence
  Synthetic
ucucagcugaacuaaaguauu

SEQ ID NO: 673794 - RNA, 22 nt, Artificial Sequence
  Synthetic
uucucagcugaacuaaaguauu

SEQ ID NO: 673795 - RNA, 23 nt, Artificial Sequence
  Synthetic
auucucagcugaacuaaaguauu

SEQ ID NO: 673796 - RNA, 24 nt, Artificial Sequence
  Synthetic
aauucucagcugaacuaaaguauu

SEQ ID NO: 673797 - RNA, 18 nt, Artificial Sequence
  Synthetic
auauugacuggaaguauu

SEQ ID NO: 673798 - RNA, 19 nt, Artificial Sequence
  Synthetic
uauauugacuggaaguauu

SEQ ID NO: 673799 - RNA, 20 nt, Artificial Sequence
  Synthetic
auauauugacuggaaguauu

SEQ ID NO: 673800 - RNA, 21 nt, Artificial Sequence
  Synthetic
uauauauugacuggaaguauu

SEQ ID NO: 673801 - RNA, 22 nt, Artificial Sequence
  Synthetic
guauauauugacuggaaguauu

SEQ ID NO: 673802 - RNA, 23 nt, Artificial Sequence
  Synthetic
gguauauauugacuggaaguauu

SEQ ID NO: 673803 - RNA, 24 nt, Artificial Sequence
  Synthetic
agguauauauugacuggaaguauu

SEQ ID NO: 673804 - RNA, 18 nt, Artificial Sequence
  Synthetic
aaaaggaagguaaguauu

SEQ ID NO: 673805 - RNA, 19 nt, Artificial Sequence
  Synthetic
uaaaaggaagguaaguauu

SEQ ID NO: 673806 - RNA, 20 nt, Artificial Sequence
  Synthetic
cuaaaaggaagguaaguauu

SEQ ID NO: 673807 - RNA, 21 nt, Artificial Sequence
  Synthetic
ccuaaaaggaagguaaguauu

SEQ ID NO: 673808 - RNA, 22 nt, Artificial Sequence
  Synthetic
cccuaaaaggaagguaaguauu

SEQ ID NO: 673809 - RNA, 23 nt, Artificial Sequence
  Synthetic
gcccuaaaaggaagguaaguauu

SEQ ID NO: 673810 - RNA, 24 nt, Artificial Sequence
  Synthetic
ugcccuaaaaggaagguaaguauu

SEQ ID NO: 673811 - RNA, 18 nt, Artificial Sequence
  Synthetic
uauuaaaacaacaguauu

SEQ ID NO: 673812 - RNA, 19 nt, Artificial Sequence
  Synthetic
auauuaaaacaacaguauu

SEQ ID NO: 673813 - RNA, 20 nt, Artificial Sequence
  Synthetic
cauauuaaaacaacaguauu

SEQ ID NO: 673814 - RNA, 21 nt, Artificial Sequence
  Synthetic
acauauuaaaacaacaguauu

SEQ ID NO: 673815 - RNA, 22 nt, Artificial Sequence
  Synthetic
aacauauuaaaacaacaguauu

SEQ ID NO: 673816 - RNA, 23 nt, Artificial Sequence
  Synthetic
caacauauuaaaacaacaguauu

SEQ ID NO: 673817 - RNA, 24 nt, Artificial Sequence
  Synthetic
acaacauauuaaaacaacaguauu

SEQ ID NO: 673818 - RNA, 18 nt, Artificial Sequence
  Synthetic
uuuauugauaacaguauu

SEQ ID NO: 673819 - RNA, 19 nt, Artificial Sequence
  Synthetic
auuuauugauaacaguauu

SEQ ID NO: 673820 - RNA, 20 nt, Artificial Sequence
  Synthetic
aauuuauugauaacaguauu

SEQ ID NO: 673821 - RNA, 21 nt, Artificial Sequence
  Synthetic
gaauuuauugauaacaguauu

SEQ ID NO: 673822 - RNA, 22 nt, Artificial Sequence
  Synthetic
ugaauuuauugauaacaguauu

SEQ ID NO: 673823 - RNA, 23 nt, Artificial Sequence
  Synthetic
cugaauuuauugauaacaguauu

SEQ ID NO: 673824 - RNA, 24 nt, Artificial Sequence
  Synthetic
gcugaauuuauugauaacaguauu

SEQ ID NO: 673825 - RNA, 18 nt, Artificial Sequence
  Synthetic
ugccauugugacaguauu

SEQ ID NO: 673826 - RNA, 19 nt, Artificial Sequence
  Synthetic
uugccauugugacaguauu

SEQ ID NO: 673827 - RNA, 20 nt, Artificial Sequence
  Synthetic
auugccauugugacaguauu

SEQ ID NO: 673828 - RNA, 21 nt, Artificial Sequence
  Synthetic
aauugccauugugacaguauu

SEQ ID NO: 673829 - RNA, 22 nt, Artificial Sequence
  Synthetic
uaauugccauugugacaguauu

SEQ ID NO: 673830 - RNA, 23 nt, Artificial Sequence
  Synthetic
uuaauugccauugugacaguauu

SEQ ID NO: 673831 - RNA, 24 nt, Artificial Sequence
  Synthetic
uuuaauugccauugugacaguauu

SEQ ID NO: 673832 - RNA, 18 nt, Artificial Sequence
  Synthetic
uuuaaacauuacaguauu

SEQ ID NO: 673833 - RNA, 19 nt, Artificial Sequence
  Synthetic
uuuuaaacauuacaguauu

SEQ ID NO: 673834 - RNA, 20 nt, Artificial Sequence
  Synthetic
cuuuuaaacauuacaguauu

SEQ ID NO: 673835 - RNA, 21 nt, Artificial Sequence
  Synthetic
gcuuuuaaacauuacaguauu

SEQ ID NO: 673836 - RNA, 22 nt, Artificial Sequence
  Synthetic
agcuuuuaaacauuacaguauu

SEQ ID NO: 673837 - RNA, 23 nt, Artificial Sequence
  Synthetic
cagcuuuuaaacauuacaguauu

SEQ ID NO: 673838 - RNA, 24 nt, Artificial Sequence
  Synthetic
acagcuuuuaaacauuacaguauu

SEQ ID NO: 673839 - RNA, 18 nt, Artificial Sequence
  Synthetic
caaucagacaccaguauu

SEQ ID NO: 673840 - RNA, 19 nt, Artificial Sequence
  Synthetic
gcaaucagacaccaguauu

SEQ ID NO: 673841 - RNA, 20 nt, Artificial Sequence
  Synthetic
ggcaaucagacaccaguauu

SEQ ID NO: 673842 - RNA, 21 nt, Artificial Sequence
  Synthetic
aggcaaucagacaccaguauu

SEQ ID NO: 673843 - RNA, 22 nt, Artificial Sequence
  Synthetic
caggcaaucagacaccaguauu

SEQ ID NO: 673844 - RNA, 23 nt, Artificial Sequence
  Synthetic
acaggcaaucagacaccaguauu

SEQ ID NO: 673845 - RNA, 24 nt, Artificial Sequence
  Synthetic
cacaggcaaucagacaccaguauu

SEQ ID NO: 673846 - RNA, 18 nt, Artificial Sequence
  Synthetic
agaacugaaaucaguauu

SEQ ID NO: 673847 - RNA, 19 nt, Artificial Sequence
  Synthetic
aagaacugaaaucaguauu

SEQ ID NO: 673848 - RNA, 20 nt, Artificial Sequence
  Synthetic
aaagaacugaaaucaguauu

SEQ ID NO: 673849 - RNA, 21 nt, Artificial Sequence
  Synthetic
aaaagaacugaaaucaguauu

SEQ ID NO: 673850 - RNA, 22 nt, Artificial Sequence
  Synthetic
caaaagaacugaaaucaguauu

SEQ ID NO: 673851 - RNA, 23 nt, Artificial Sequence
  Synthetic
ccaaaagaacugaaaucaguauu

SEQ ID NO: 673852 - RNA, 24 nt, Artificial Sequence
  Synthetic
uccaaaagaacugaaaucaguauu

SEQ ID NO: 673853 - RNA, 18 nt, Artificial Sequence
  Synthetic
cuucagauuuucaguauu

SEQ ID NO: 673854 - RNA, 19 nt, Artificial Sequence
  Synthetic
acuucagauuuucaguauu

SEQ ID NO: 673855 - RNA, 20 nt, Artificial Sequence
  Synthetic
aacuucagauuuucaguauu

SEQ ID NO: 673856 - RNA, 21 nt, Artificial Sequence
  Synthetic
caacuucagauuuucaguauu

SEQ ID NO: 673857 - RNA, 22 nt, Artificial Sequence
  Synthetic
ucaacuucagauuuucaguauu

SEQ ID NO: 673858 - RNA, 23 nt, Artificial Sequence
  Synthetic
uucaacuucagauuuucaguauu

SEQ ID NO: 673859 - RNA, 24 nt, Artificial Sequence
  Synthetic
guucaacuucagauuuucaguauu

SEQ ID NO: 673860 - RNA, 18 nt, Artificial Sequence
  Synthetic
guaaauuagaauaguauu

SEQ ID NO: 673861 - RNA, 19 nt, Artificial Sequence
  Synthetic
uguaaauuagaauaguauu

SEQ ID NO: 673862 - RNA, 20 nt, Artificial Sequence
  Synthetic
guguaaauuagaauaguauu

SEQ ID NO: 673863 - RNA, 21 nt, Artificial Sequence
  Synthetic
aguguaaauuagaauaguauu

SEQ ID NO: 673864 - RNA, 22 nt, Artificial Sequence
  Synthetic
aaguguaaauuagaauaguauu

SEQ ID NO: 673865 - RNA, 23 nt, Artificial Sequence
  Synthetic
caaguguaaauuagaauaguauu

SEQ ID NO: 673866 - RNA, 24 nt, Artificial Sequence
  Synthetic
ucaaguguaaauuagaauaguauu

SEQ ID NO: 673867 - RNA, 18 nt, Artificial Sequence
  Synthetic
uauguaaaacauaguauu

SEQ ID NO: 673868 - RNA, 19 nt, Artificial Sequence
  Synthetic
auauguaaaacauaguauu

SEQ ID NO: 673869 - RNA, 20 nt, Artificial Sequence
  Synthetic
aauauguaaaacauaguauu

SEQ ID NO: 673870 - RNA, 21 nt, Artificial Sequence
  Synthetic
aaauauguaaaacauaguauu

SEQ ID NO: 673871 - RNA, 22 nt, Artificial Sequence
  Synthetic
uaaauauguaaaacauaguauu

SEQ ID NO: 673872 - RNA, 23 nt, Artificial Sequence
  Synthetic
guaaauauguaaaacauaguauu

SEQ ID NO: 673873 - RNA, 24 nt, Artificial Sequence
  Synthetic
cguaaauauguaaaacauaguauu

SEQ ID NO: 673874 - RNA, 18 nt, Artificial Sequence
  Synthetic
auuuuuuguuguaguauu

SEQ ID NO: 673875 - RNA, 19 nt, Artificial Sequence
  Synthetic
uauuuuuuguuguaguauu

SEQ ID NO: 673876 - RNA, 20 nt, Artificial Sequence
  Synthetic
guauuuuuuguuguaguauu

SEQ ID NO: 673877 - RNA, 21 nt, Artificial Sequence
  Synthetic
aguauuuuuuguuguaguauu

SEQ ID NO: 673878 - RNA, 22 nt, Artificial Sequence
  Synthetic
caguauuuuuuguuguaguauu

SEQ ID NO: 673879 - RNA, 23 nt, Artificial Sequence
  Synthetic
ucaguauuuuuuguuguaguauu

SEQ ID NO: 673880 - RNA, 24 nt, Artificial Sequence
  Synthetic
uucaguauuuuuuguuguaguauu

SEQ ID NO: 673881 - RNA, 18 nt, Artificial Sequence
  Synthetic
aagagugacuuuaguauu

SEQ ID NO: 673882 - RNA, 19 nt, Artificial Sequence
  Synthetic
uaagagugacuuuaguauu

SEQ ID NO: 673883 - RNA, 20 nt, Artificial Sequence
  Synthetic
guaagagugacuuuaguauu

SEQ ID NO: 673884 - RNA, 21 nt, Artificial Sequence
  Synthetic
uguaagagugacuuuaguauu

SEQ ID NO: 673885 - RNA, 22 nt, Artificial Sequence
  Synthetic
uuguaagagugacuuuaguauu

SEQ ID NO: 673886 - RNA, 23 nt, Artificial Sequence
  Synthetic
auuguaagagugacuuuaguauu

SEQ ID NO: 673887 - RNA, 24 nt, Artificial Sequence
  Synthetic
cauuguaagagugacuuuaguauu

SEQ ID NO: 673888 - RNA, 18 nt, Artificial Sequence
  Synthetic
agcagcacaaaacguauu

SEQ ID NO: 673889 - RNA, 19 nt, Artificial Sequence
  Synthetic
cagcagcacaaaacguauu

SEQ ID NO: 673890 - RNA, 20 nt, Artificial Sequence
  Synthetic
acagcagcacaaaacguauu

SEQ ID NO: 673891 - RNA, 21 nt, Artificial Sequence
  Synthetic
uacagcagcacaaaacguauu

SEQ ID NO: 673892 - RNA, 22 nt, Artificial Sequence
  Synthetic
uuacagcagcacaaaacguauu

SEQ ID NO: 673893 - RNA, 23 nt, Artificial Sequence
  Synthetic
guuacagcagcacaaaacguauu

SEQ ID NO: 673894 - RNA, 24 nt, Artificial Sequence
  Synthetic
uguuacagcagcacaaaacguauu

SEQ ID NO: 673895 - RNA, 18 nt, Artificial Sequence
  Synthetic
aagauuuguuaagguauu

SEQ ID NO: 673896 - RNA, 19 nt, Artificial Sequence
  Synthetic
uaagauuuguuaagguauu

SEQ ID NO: 673897 - RNA, 20 nt, Artificial Sequence
  Synthetic
auaagauuuguuaagguauu

SEQ ID NO: 673898 - RNA, 21 nt, Artificial Sequence
  Synthetic
aauaagauuuguuaagguauu

SEQ ID NO: 673899 - RNA, 22 nt, Artificial Sequence
  Synthetic
gaauaagauuuguuaagguauu

SEQ ID NO: 673900 - RNA, 23 nt, Artificial Sequence
  Synthetic
agaauaagauuuguuaagguauu

SEQ ID NO: 673901 - RNA, 24 nt, Artificial Sequence
  Synthetic
gagaauaagauuuguuaagguauu

SEQ ID NO: 673902 - RNA, 18 nt, Artificial Sequence
  Synthetic
agaugucagggagguauu

SEQ ID NO: 673903 - RNA, 19 nt, Artificial Sequence
  Synthetic
uagaugucagggagguauu

SEQ ID NO: 673904 - RNA, 20 nt, Artificial Sequence
  Synthetic
auagaugucagggagguauu

SEQ ID NO: 673905 - RNA, 21 nt, Artificial Sequence
  Synthetic
cauagaugucagggagguauu

SEQ ID NO: 673906 - RNA, 22 nt, Artificial Sequence
  Synthetic
acauagaugucagggagguauu

SEQ ID NO: 673907 - RNA, 23 nt, Artificial Sequence
  Synthetic
aacauagaugucagggagguauu

SEQ ID NO: 673908 - RNA, 24 nt, Artificial Sequence
  Synthetic
aaacauagaugucagggagguauu

SEQ ID NO: 673909 - RNA, 18 nt, Artificial Sequence
  Synthetic
aaggagagaaaggguauu

SEQ ID NO: 673910 - RNA, 19 nt, Artificial Sequence
  Synthetic
caaggagagaaaggguauu

SEQ ID NO: 673911 - RNA, 20 nt, Artificial Sequence
  Synthetic
acaaggagagaaaggguauu

SEQ ID NO: 673912 - RNA, 21 nt, Artificial Sequence
  Synthetic
gacaaggagagaaaggguauu

SEQ ID NO: 673913 - RNA, 22 nt, Artificial Sequence
  Synthetic
agacaaggagagaaaggguauu

SEQ ID NO: 673914 - RNA, 23 nt, Artificial Sequence
  Synthetic
uagacaaggagagaaaggguauu

SEQ ID NO: 673915 - RNA, 24 nt, Artificial Sequence
  Synthetic
guagacaaggagagaaaggguauu

SEQ ID NO: 673916 - RNA, 18 nt, Artificial Sequence
  Synthetic
aauaggucucaggguauu

SEQ ID NO: 673917 - RNA, 19 nt, Artificial Sequence
  Synthetic
aaauaggucucaggguauu

SEQ ID NO: 673918 - RNA, 20 nt, Artificial Sequence
  Synthetic
aaaauaggucucaggguauu

SEQ ID NO: 673919 - RNA, 21 nt, Artificial Sequence
  Synthetic
caaaauaggucucaggguauu

SEQ ID NO: 673920 - RNA, 22 nt, Artificial Sequence
  Synthetic
acaaaauaggucucaggguauu

SEQ ID NO: 673921 - RNA, 23 nt, Artificial Sequence
  Synthetic
aacaaaauaggucucaggguauu

SEQ ID NO: 673922 - RNA, 24 nt, Artificial Sequence
  Synthetic
gaacaaaauaggucucaggguauu

SEQ ID NO: 673923 - RNA, 18 nt, Artificial Sequence
  Synthetic
uuuucucuugaggguauu

SEQ ID NO: 673924 - RNA, 19 nt, Artificial Sequence
  Synthetic
cuuuucucuugaggguauu

SEQ ID NO: 673925 - RNA, 20 nt, Artificial Sequence
  Synthetic
gcuuuucucuugaggguauu

SEQ ID NO: 673926 - RNA, 21 nt, Artificial Sequence
  Synthetic
ggcuuuucucuugaggguauu

SEQ ID NO: 673927 - RNA, 22 nt, Artificial Sequence
  Synthetic
gggcuuuucucuugaggguauu

SEQ ID NO: 673928 - RNA, 23 nt, Artificial Sequence
  Synthetic
ugggcuuuucucuugaggguauu

SEQ ID NO: 673929 - RNA, 24 nt, Artificial Sequence
  Synthetic
gugggcuuuucucuugaggguauu

SEQ ID NO: 673930 - RNA, 18 nt, Artificial Sequence
  Synthetic
ugcugcuguagggguauu

SEQ ID NO: 673931 - RNA, 19 nt, Artificial Sequence
  Synthetic
uugcugcuguagggguauu

SEQ ID NO: 673932 - RNA, 20 nt, Artificial Sequence
  Synthetic
cuugcugcuguagggguauu

SEQ ID NO: 673933 - RNA, 21 nt, Artificial Sequence
  Synthetic
acuugcugcuguagggguauu

SEQ ID NO: 673934 - RNA, 22 nt, Artificial Sequence
  Synthetic
aacuugcugcuguagggguauu

SEQ ID NO: 673935 - RNA, 23 nt, Artificial Sequence
  Synthetic
caacuugcugcuguagggguauu

SEQ ID NO: 673936 - RNA, 24 nt, Artificial Sequence
  Synthetic
ccaacuugcugcuguagggguauu

SEQ ID NO: 673937 - RNA, 18 nt, Artificial Sequence
  Synthetic
ucuucaauaaaugguauu

SEQ ID NO: 673938 - RNA, 19 nt, Artificial Sequence
  Synthetic
cucuucaauaaaugguauu

SEQ ID NO: 673939 - RNA, 20 nt, Artificial Sequence
  Synthetic
ucucuucaauaaaugguauu

SEQ ID NO: 673940 - RNA, 21 nt, Artificial Sequence
  Synthetic
gucucuucaauaaaugguauu

SEQ ID NO: 673941 - RNA, 22 nt, Artificial Sequence
  Synthetic
agucucuucaauaaaugguauu

SEQ ID NO: 673942 - RNA, 23 nt, Artificial Sequence
  Synthetic
cagucucuucaauaaaugguauu

SEQ ID NO: 673943 - RNA, 24 nt, Artificial Sequence
  Synthetic
acagucucuucaauaaaugguauu

SEQ ID NO: 673944 - RNA, 18 nt, Artificial Sequence
  Synthetic
accuaaggcaaugguauu

SEQ ID NO: 673945 - RNA, 19 nt, Artificial Sequence
  Synthetic
caccuaaggcaaugguauu

SEQ ID NO: 673946 - RNA, 20 nt, Artificial Sequence
  Synthetic
acaccuaaggcaaugguauu

SEQ ID NO: 673947 - RNA, 21 nt, Artificial Sequence
  Synthetic
aacaccuaaggcaaugguauu

SEQ ID NO: 673948 - RNA, 22 nt, Artificial Sequence
  Synthetic
aaacaccuaaggcaaugguauu

SEQ ID NO: 673949 - RNA, 23 nt, Artificial Sequence
  Synthetic
aaaacaccuaaggcaaugguauu

SEQ ID NO: 673950 - RNA, 24 nt, Artificial Sequence
  Synthetic
caaaacaccuaaggcaaugguauu

SEQ ID NO: 673951 - RNA, 18 nt, Artificial Sequence
  Synthetic
accauguagaaugguauu

SEQ ID NO: 673952 - RNA, 19 nt, Artificial Sequence
  Synthetic
uaccauguagaaugguauu

SEQ ID NO: 673953 - RNA, 20 nt, Artificial Sequence
  Synthetic
uuaccauguagaaugguauu

SEQ ID NO: 673954 - RNA, 21 nt, Artificial Sequence
  Synthetic
auuaccauguagaaugguauu

SEQ ID NO: 673955 - RNA, 22 nt, Artificial Sequence
  Synthetic
cauuaccauguagaaugguauu

SEQ ID NO: 673956 - RNA, 23 nt, Artificial Sequence
  Synthetic
gcauuaccauguagaaugguauu

SEQ ID NO: 673957 - RNA, 24 nt, Artificial Sequence
  Synthetic
agcauuaccauguagaaugguauu

SEQ ID NO: 673958 - RNA, 18 nt, Artificial Sequence
  Synthetic
uuagagauuggugguauu

SEQ ID NO: 673959 - RNA, 19 nt, Artificial Sequence
  Synthetic
uuuagagauuggugguauu

SEQ ID NO: 673960 - RNA, 20 nt, Artificial Sequence
  Synthetic
auuuagagauuggugguauu

SEQ ID NO: 673961 - RNA, 21 nt, Artificial Sequence
  Synthetic
gauuuagagauuggugguauu

SEQ ID NO: 673962 - RNA, 22 nt, Artificial Sequence
  Synthetic
agauuuagagauuggugguauu

SEQ ID NO: 673963 - RNA, 23 nt, Artificial Sequence
  Synthetic
cagauuuagagauuggugguauu

SEQ ID NO: 673964 - RNA, 24 nt, Artificial Sequence
  Synthetic
ucagauuuagagauuggugguauu

SEQ ID NO: 673965 - RNA, 18 nt, Artificial Sequence
  Synthetic
ggaaacaacguugguauu

SEQ ID NO: 673966 - RNA, 19 nt, Artificial Sequence
  Synthetic
uggaaacaacguugguauu

SEQ ID NO: 673967 - RNA, 20 nt, Artificial Sequence
  Synthetic
guggaaacaacguugguauu

SEQ ID NO: 673968 - RNA, 21 nt, Artificial Sequence
  Synthetic
uguggaaacaacguugguauu

SEQ ID NO: 673969 - RNA, 22 nt, Artificial Sequence
  Synthetic
guguggaaacaacguugguauu

SEQ ID NO: 673970 - RNA, 23 nt, Artificial Sequence
  Synthetic
aguguggaaacaacguugguauu

SEQ ID NO: 673971 - RNA, 24 nt, Artificial Sequence
  Synthetic
gaguguggaaacaacguugguauu

SEQ ID NO: 673972 - RNA, 18 nt, Artificial Sequence
  Synthetic
gaagcuaaaaaauguauu

SEQ ID NO: 673973 - RNA, 19 nt, Artificial Sequence
  Synthetic
ugaagcuaaaaaauguauu

SEQ ID NO: 673974 - RNA, 20 nt, Artificial Sequence
  Synthetic
augaagcuaaaaaauguauu

SEQ ID NO: 673975 - RNA, 21 nt, Artificial Sequence
  Synthetic
uaugaagcuaaaaaauguauu

SEQ ID NO: 673976 - RNA, 22 nt, Artificial Sequence
  Synthetic
uuaugaagcuaaaaaauguauu

SEQ ID NO: 673977 - RNA, 23 nt, Artificial Sequence
  Synthetic
guuaugaagcuaaaaaauguauu

SEQ ID NO: 673978 - RNA, 24 nt, Artificial Sequence
  Synthetic
aguuaugaagcuaaaaaauguauu

SEQ ID NO: 673979 - RNA, 18 nt, Artificial Sequence
  Synthetic
cucaaguggaaauguauu

SEQ ID NO: 673980 - RNA, 19 nt, Artificial Sequence
  Synthetic
gcucaaguggaaauguauu

SEQ ID NO: 673981 - RNA, 20 nt, Artificial Sequence
  Synthetic
agcucaaguggaaauguauu

SEQ ID NO: 673982 - RNA, 21 nt, Artificial Sequence
  Synthetic
cagcucaaguggaaauguauu

SEQ ID NO: 673983 - RNA, 22 nt, Artificial Sequence
  Synthetic
ucagcucaaguggaaauguauu

SEQ ID NO: 673984 - RNA, 23 nt, Artificial Sequence
  Synthetic
cucagcucaaguggaaauguauu

SEQ ID NO: 673985 - RNA, 24 nt, Artificial Sequence
  Synthetic
gcucagcucaaguggaaauguauu

SEQ ID NO: 673986 - RNA, 18 nt, Artificial Sequence
  Synthetic
uucuuuagguaauguauu

SEQ ID NO: 673987 - RNA, 19 nt, Artificial Sequence
  Synthetic
cuucuuuagguaauguauu

SEQ ID NO: 673988 - RNA, 20 nt, Artificial Sequence
  Synthetic
ccuucuuuagguaauguauu

SEQ ID NO: 673989 - RNA, 21 nt, Artificial Sequence
  Synthetic
accuucuuuagguaauguauu

SEQ ID NO: 673990 - RNA, 22 nt, Artificial Sequence
  Synthetic
aaccuucuuuagguaauguauu

SEQ ID NO: 673991 - RNA, 23 nt, Artificial Sequence
  Synthetic
aaaccuucuuuagguaauguauu

SEQ ID NO: 673992 - RNA, 24 nt, Artificial Sequence
  Synthetic
caaaccuucuuuagguaauguauu

SEQ ID NO: 673993 - RNA, 18 nt, Artificial Sequence
  Synthetic
uuuuaacuuccauguauu

SEQ ID NO: 673994 - RNA, 19 nt, Artificial Sequence
  Synthetic
cuuuuaacuuccauguauu

SEQ ID NO: 673995 - RNA, 20 nt, Artificial Sequence
  Synthetic
acuuuuaacuuccauguauu

SEQ ID NO: 673996 - RNA, 21 nt, Artificial Sequence
  Synthetic
uacuuuuaacuuccauguauu

SEQ ID NO: 673997 - RNA, 22 nt, Artificial Sequence
  Synthetic
uuacuuuuaacuuccauguauu

SEQ ID NO: 673998 - RNA, 23 nt, Artificial Sequence
  Synthetic
cuuacuuuuaacuuccauguauu

SEQ ID NO: 673999 - RNA, 24 nt, Artificial Sequence
  Synthetic
acuuacuuuuaacuuccauguauu

SEQ ID NO: 674000 - RNA, 18 nt, Artificial Sequence
  Synthetic
cagauauuaucauguauu

SEQ ID NO: 674001 - RNA, 19 nt, Artificial Sequence
  Synthetic
gcagauauuaucauguauu

SEQ ID NO: 674002 - RNA, 20 nt, Artificial Sequence
  Synthetic
cgcagauauuaucauguauu

SEQ ID NO: 674003 - RNA, 21 nt, Artificial Sequence
  Synthetic
acgcagauauuaucauguauu

SEQ ID NO: 674004 - RNA, 22 nt, Artificial Sequence
  Synthetic
aacgcagauauuaucauguauu

SEQ ID NO: 674005 - RNA, 23 nt, Artificial Sequence
  Synthetic
aaacgcagauauuaucauguauu

SEQ ID NO: 674006 - RNA, 24 nt, Artificial Sequence
  Synthetic
aaaacgcagauauuaucauguauu

SEQ ID NO: 674007 - RNA, 18 nt, Artificial Sequence
  Synthetic
auuuuugcuucauguauu

SEQ ID NO: 674008 - RNA, 19 nt, Artificial Sequence
  Synthetic
cauuuuugcuucauguauu

SEQ ID NO: 674009 - RNA, 20 nt, Artificial Sequence
  Synthetic
ucauuuuugcuucauguauu

SEQ ID NO: 674010 - RNA, 21 nt, Artificial Sequence
  Synthetic
uucauuuuugcuucauguauu

SEQ ID NO: 674011 - RNA, 22 nt, Artificial Sequence
  Synthetic
auucauuuuugcuucauguauu

SEQ ID NO: 674012 - RNA, 23 nt, Artificial Sequence
  Synthetic
uauucauuuuugcuucauguauu

SEQ ID NO: 674013 - RNA, 24 nt, Artificial Sequence
  Synthetic
cuauucauuuuugcuucauguauu

SEQ ID NO: 674014 - RNA, 18 nt, Artificial Sequence
  Synthetic
auauauuuuugauguauu

SEQ ID NO: 674015 - RNA, 19 nt, Artificial Sequence
  Synthetic
aauauauuuuugauguauu

SEQ ID NO: 674016 - RNA, 20 nt, Artificial Sequence
  Synthetic
aaauauauuuuugauguauu

SEQ ID NO: 674017 - RNA, 21 nt, Artificial Sequence
  Synthetic
aaaauauauuuuugauguauu

SEQ ID NO: 674018 - RNA, 22 nt, Artificial Sequence
  Synthetic
gaaaauauauuuuugauguauu

SEQ ID NO: 674019 - RNA, 23 nt, Artificial Sequence
  Synthetic
ggaaaauauauuuuugauguauu

SEQ ID NO: 674020 - RNA, 24 nt, Artificial Sequence
  Synthetic
uggaaaauauauuuuugauguauu

SEQ ID NO: 674021 - RNA, 18 nt, Artificial Sequence
  Synthetic
ucugaaugucuauguauu

SEQ ID NO: 674022 - RNA, 19 nt, Artificial Sequence
  Synthetic
aucugaaugucuauguauu

SEQ ID NO: 674023 - RNA, 20 nt, Artificial Sequence
  Synthetic
uaucugaaugucuauguauu

SEQ ID NO: 674024 - RNA, 21 nt, Artificial Sequence
  Synthetic
guaucugaaugucuauguauu

SEQ ID NO: 674025 - RNA, 22 nt, Artificial Sequence
  Synthetic
aguaucugaaugucuauguauu

SEQ ID NO: 674026 - RNA, 23 nt, Artificial Sequence
  Synthetic
gaguaucugaaugucuauguauu

SEQ ID NO: 674027 - RNA, 24 nt, Artificial Sequence
  Synthetic
agaguaucugaaugucuauguauu

SEQ ID NO: 674028 - RNA, 18 nt, Artificial Sequence
  Synthetic
uccauuaauguauguauu

SEQ ID NO: 674029 - RNA, 19 nt, Artificial Sequence
  Synthetic
auccauuaauguauguauu

SEQ ID NO: 674030 - RNA, 20 nt, Artificial Sequence
  Synthetic
aauccauuaauguauguauu

SEQ ID NO: 674031 - RNA, 21 nt, Artificial Sequence
  Synthetic
uaauccauuaauguauguauu

SEQ ID NO: 674032 - RNA, 22 nt, Artificial Sequence
  Synthetic
uuaauccauuaauguauguauu

SEQ ID NO: 674033 - RNA, 23 nt, Artificial Sequence
  Synthetic
cuuaauccauuaauguauguauu

SEQ ID NO: 674034 - RNA, 24 nt, Artificial Sequence
  Synthetic
acuuaauccauuaauguauguauu

SEQ ID NO: 674035 - RNA, 18 nt, Artificial Sequence
  Synthetic
uugguuaauuuauguauu

SEQ ID NO: 674036 - RNA, 19 nt, Artificial Sequence
  Synthetic
uuugguuaauuuauguauu

SEQ ID NO: 674037 - RNA, 20 nt, Artificial Sequence
  Synthetic
auuugguuaauuuauguauu

SEQ ID NO: 674038 - RNA, 21 nt, Artificial Sequence
  Synthetic
uauuugguuaauuuauguauu

SEQ ID NO: 674039 - RNA, 22 nt, Artificial Sequence
  Synthetic
auauuugguuaauuuauguauu

SEQ ID NO: 674040 - RNA, 23 nt, Artificial Sequence
  Synthetic
aauauuugguuaauuuauguauu

SEQ ID NO: 674041 - RNA, 24 nt, Artificial Sequence
  Synthetic
aaauauuugguuaauuuauguauu

SEQ ID NO: 674042 - RNA, 18 nt, Artificial Sequence
  Synthetic
uuuaccgucaacuguauu

SEQ ID NO: 674043 - RNA, 19 nt, Artificial Sequence
  Synthetic
cuuuaccgucaacuguauu

SEQ ID NO: 674044 - RNA, 20 nt, Artificial Sequence
  Synthetic
gcuuuaccgucaacuguauu

SEQ ID NO: 674045 - RNA, 21 nt, Artificial Sequence
  Synthetic
ugcuuuaccgucaacuguauu

SEQ ID NO: 674046 - RNA, 22 nt, Artificial Sequence
  Synthetic
gugcuuuaccgucaacuguauu

SEQ ID NO: 674047 - RNA, 23 nt, Artificial Sequence
  Synthetic
agugcuuuaccgucaacuguauu

SEQ ID NO: 674048 - RNA, 24 nt, Artificial Sequence
  Synthetic
gagugcuuuaccgucaacuguauu

SEQ ID NO: 674049 - RNA, 18 nt, Artificial Sequence
  Synthetic
caacuguuuaacuguauu

SEQ ID NO: 674050 - RNA, 19 nt, Artificial Sequence
  Synthetic
ccaacuguuuaacuguauu

SEQ ID NO: 674051 - RNA, 20 nt, Artificial Sequence
  Synthetic
cccaacuguuuaacuguauu

SEQ ID NO: 674052 - RNA, 21 nt, Artificial Sequence
  Synthetic
gcccaacuguuuaacuguauu

SEQ ID NO: 674053 - RNA, 22 nt, Artificial Sequence
  Synthetic
ugcccaacuguuuaacuguauu

SEQ ID NO: 674054 - RNA, 23 nt, Artificial Sequence
  Synthetic
gugcccaacuguuuaacuguauu

SEQ ID NO: 674055 - RNA, 24 nt, Artificial Sequence
  Synthetic
agugcccaacuguuuaacuguauu

SEQ ID NO: 674056 - RNA, 24 nt, Artificial Sequence
  Synthetic
caagacccaucagugugcuguauu

SEQ ID NO: 674057 - RNA, 18 nt, Artificial Sequence
  Synthetic
uuuuuucauugcuguauu

SEQ ID NO: 674058 - RNA, 19 nt, Artificial Sequence
  Synthetic
auuuuuucauugcuguauu

SEQ ID NO: 674059 - RNA, 20 nt, Artificial Sequence
  Synthetic
uauuuuuucauugcuguauu

SEQ ID NO: 674060 - RNA, 21 nt, Artificial Sequence
  Synthetic
cuauuuuuucauugcuguauu

SEQ ID NO: 674061 - RNA, 22 nt, Artificial Sequence
  Synthetic
ucuauuuuuucauugcuguauu

SEQ ID NO: 674062 - RNA, 23 nt, Artificial Sequence
  Synthetic
uucuauuuuuucauugcuguauu

SEQ ID NO: 674063 - RNA, 24 nt, Artificial Sequence
  Synthetic
uuucuauuuuuucauugcuguauu

SEQ ID NO: 674064 - RNA, 18 nt, Artificial Sequence
  Synthetic
auaugaaucaucuguauu

SEQ ID NO: 674065 - RNA, 19 nt, Artificial Sequence
  Synthetic
cauaugaaucaucuguauu

SEQ ID NO: 674066 - RNA, 20 nt, Artificial Sequence
  Synthetic
acauaugaaucaucuguauu

SEQ ID NO: 674067 - RNA, 21 nt, Artificial Sequence
  Synthetic
uacauaugaaucaucuguauu

SEQ ID NO: 674068 - RNA, 22 nt, Artificial Sequence
  Synthetic
auacauaugaaucaucuguauu

SEQ ID NO: 674069 - RNA, 23 nt, Artificial Sequence
  Synthetic
aauacauaugaaucaucuguauu

SEQ ID NO: 674070 - RNA, 24 nt, Artificial Sequence
  Synthetic
aaauacauaugaaucaucuguauu

SEQ ID NO: 674071 - RNA, 18 nt, Artificial Sequence
  Synthetic
acauauaagaucuguauu

SEQ ID NO: 674072 - RNA, 19 nt, Artificial Sequence
  Synthetic
cacauauaagaucuguauu

SEQ ID NO: 674073 - RNA, 20 nt, Artificial Sequence
  Synthetic
acacauauaagaucuguauu

SEQ ID NO: 674074 - RNA, 21 nt, Artificial Sequence
  Synthetic
aacacauauaagaucuguauu

SEQ ID NO: 674075 - RNA, 22 nt, Artificial Sequence
  Synthetic
gaacacauauaagaucuguauu

SEQ ID NO: 674076 - RNA, 23 nt, Artificial Sequence
  Synthetic
ugaacacauauaagaucuguauu

SEQ ID NO: 674077 - RNA, 24 nt, Artificial Sequence
  Synthetic
uugaacacauauaagaucuguauu

SEQ ID NO: 674078 - RNA, 18 nt, Artificial Sequence
  Synthetic
uuuaguuuuaucuguauu

SEQ ID NO: 674079 - RNA, 19 nt, Artificial Sequence
  Synthetic
auuuaguuuuaucuguauu

SEQ ID NO: 674080 - RNA, 20 nt, Artificial Sequence
  Synthetic
cauuuaguuuuaucuguauu

SEQ ID NO: 674081 - RNA, 21 nt, Artificial Sequence
  Synthetic
ucauuuaguuuuaucuguauu

SEQ ID NO: 674082 - RNA, 22 nt, Artificial Sequence
  Synthetic
uucauuuaguuuuaucuguauu

SEQ ID NO: 674083 - RNA, 23 nt, Artificial Sequence
  Synthetic
auucauuuaguuuuaucuguauu

SEQ ID NO: 674084 - RNA, 24 nt, Artificial Sequence
  Synthetic
uauucauuuaguuuuaucuguauu

SEQ ID NO: 674085 - RNA, 18 nt, Artificial Sequence
  Synthetic
aauuaacaaauguguauu

SEQ ID NO: 674086 - RNA, 19 nt, Artificial Sequence
  Synthetic
aaauuaacaaauguguauu

SEQ ID NO: 674087 - RNA, 20 nt, Artificial Sequence
  Synthetic
caaauuaacaaauguguauu

SEQ ID NO: 674088 - RNA, 21 nt, Artificial Sequence
  Synthetic
ucaaauuaacaaauguguauu

SEQ ID NO: 674089 - RNA, 22 nt, Artificial Sequence
  Synthetic
uucaaauuaacaaauguguauu

SEQ ID NO: 674090 - RNA, 23 nt, Artificial Sequence
  Synthetic
cuucaaauuaacaaauguguauu

SEQ ID NO: 674091 - RNA, 24 nt, Artificial Sequence
  Synthetic
gcuucaaauuaacaaauguguauu

SEQ ID NO: 674092 - RNA, 18 nt, Artificial Sequence
  Synthetic
auagcauagcuguguauu

SEQ ID NO: 674093 - RNA, 19 nt, Artificial Sequence
  Synthetic
uauagcauagcuguguauu

SEQ ID NO: 674094 - RNA, 20 nt, Artificial Sequence
  Synthetic
cuauagcauagcuguguauu

SEQ ID NO: 674095 - RNA, 21 nt, Artificial Sequence
  Synthetic
ucuauagcauagcuguguauu

SEQ ID NO: 674096 - RNA, 22 nt, Artificial Sequence
  Synthetic
aucuauagcauagcuguguauu

SEQ ID NO: 674097 - RNA, 23 nt, Artificial Sequence
  Synthetic
gaucuauagcauagcuguguauu

SEQ ID NO: 674098 - RNA, 24 nt, Artificial Sequence
  Synthetic
ggaucuauagcauagcuguguauu

SEQ ID NO: 674099 - RNA, 18 nt, Artificial Sequence
  Synthetic
acugaacauuuguguauu

SEQ ID NO: 674100 - RNA, 19 nt, Artificial Sequence
  Synthetic
uacugaacauuuguguauu

SEQ ID NO: 674101 - RNA, 20 nt, Artificial Sequence
  Synthetic
guacugaacauuuguguauu

SEQ ID NO: 674102 - RNA, 21 nt, Artificial Sequence
  Synthetic
uguacugaacauuuguguauu

SEQ ID NO: 674103 - RNA, 22 nt, Artificial Sequence
  Synthetic
cuguacugaacauuuguguauu

SEQ ID NO: 674104 - RNA, 23 nt, Artificial Sequence
  Synthetic
gcuguacugaacauuuguguauu

SEQ ID NO: 674105 - RNA, 24 nt, Artificial Sequence
  Synthetic
ggcuguacugaacauuuguguauu

SEQ ID NO: 674106 - RNA, 18 nt, Artificial Sequence
  Synthetic
acaauauggacuuguauu

SEQ ID NO: 674107 - RNA, 19 nt, Artificial Sequence
  Synthetic
uacaauauggacuuguauu

SEQ ID NO: 674108 - RNA, 20 nt, Artificial Sequence
  Synthetic
auacaauauggacuuguauu

SEQ ID NO: 674109 - RNA, 21 nt, Artificial Sequence
  Synthetic
gauacaauauggacuuguauu

SEQ ID NO: 674110 - RNA, 22 nt, Artificial Sequence
  Synthetic
cgauacaauauggacuuguauu

SEQ ID NO: 674111 - RNA, 23 nt, Artificial Sequence
  Synthetic
acgauacaauauggacuuguauu

SEQ ID NO: 674112 - RNA, 24 nt, Artificial Sequence
  Synthetic
aacgauacaauauggacuuguauu

SEQ ID NO: 674113 - RNA, 18 nt, Artificial Sequence
  Synthetic
uugaaucuaaguuguauu

SEQ ID NO: 674114 - RNA, 19 nt, Artificial Sequence
  Synthetic
auugaaucuaaguuguauu

SEQ ID NO: 674115 - RNA, 20 nt, Artificial Sequence
  Synthetic
gauugaaucuaaguuguauu

SEQ ID NO: 674116 - RNA, 21 nt, Artificial Sequence
  Synthetic
ugauugaaucuaaguuguauu

SEQ ID NO: 674117 - RNA, 22 nt, Artificial Sequence
  Synthetic
augauugaaucuaaguuguauu

SEQ ID NO: 674118 - RNA, 23 nt, Artificial Sequence
  Synthetic
gaugauugaaucuaaguuguauu

SEQ ID NO: 674119 - RNA, 24 nt, Artificial Sequence
  Synthetic
agaugauugaaucuaaguuguauu

SEQ ID NO: 674120 - RNA, 18 nt, Artificial Sequence
  Synthetic
ugaguuuguaguuguauu

SEQ ID NO: 674121 - RNA, 19 nt, Artificial Sequence
  Synthetic
augaguuuguaguuguauu

SEQ ID NO: 674122 - RNA, 20 nt, Artificial Sequence
  Synthetic
gaugaguuuguaguuguauu

SEQ ID NO: 674123 - RNA, 21 nt, Artificial Sequence
  Synthetic
agaugaguuuguaguuguauu

SEQ ID NO: 674124 - RNA, 22 nt, Artificial Sequence
  Synthetic
cagaugaguuuguaguuguauu

SEQ ID NO: 674125 - RNA, 23 nt, Artificial Sequence
  Synthetic
ucagaugaguuuguaguuguauu

SEQ ID NO: 674126 - RNA, 24 nt, Artificial Sequence
  Synthetic
aucagaugaguuuguaguuguauu

SEQ ID NO: 674127 - RNA, 18 nt, Artificial Sequence
  Synthetic
uaaaguaaguguuguauu

SEQ ID NO: 674128 - RNA, 19 nt, Artificial Sequence
  Synthetic
guaaaguaaguguuguauu

SEQ ID NO: 674129 - RNA, 20 nt, Artificial Sequence
  Synthetic
uguaaaguaaguguuguauu

SEQ ID NO: 674130 - RNA, 21 nt, Artificial Sequence
  Synthetic
guguaaaguaaguguuguauu

SEQ ID NO: 674131 - RNA, 22 nt, Artificial Sequence
  Synthetic
uguguaaaguaaguguuguauu

SEQ ID NO: 674132 - RNA, 23 nt, Artificial Sequence
  Synthetic
auguguaaaguaaguguuguauu

SEQ ID NO: 674133 - RNA, 24 nt, Artificial Sequence
  Synthetic
uauguguaaaguaaguguuguauu

SEQ ID NO: 674134 - RNA, 18 nt, Artificial Sequence
  Synthetic
aacaguuuaguuuguauu

SEQ ID NO: 674135 - RNA, 19 nt, Artificial Sequence
  Synthetic
aaacaguuuaguuuguauu

SEQ ID NO: 674136 - RNA, 20 nt, Artificial Sequence
  Synthetic
caaacaguuuaguuuguauu

SEQ ID NO: 674137 - RNA, 21 nt, Artificial Sequence
  Synthetic
ccaaacaguuuaguuuguauu

SEQ ID NO: 674138 - RNA, 22 nt, Artificial Sequence
  Synthetic
accaaacaguuuaguuuguauu

SEQ ID NO: 674139 - RNA, 23 nt, Artificial Sequence
  Synthetic
aaccaaacaguuuaguuuguauu

SEQ ID NO: 674140 - RNA, 24 nt, Artificial Sequence
  Synthetic
aaaccaaacaguuuaguuuguauu

SEQ ID NO: 674141 - RNA, 18 nt, Artificial Sequence
  Synthetic
aaauggggcuuuuguauu

SEQ ID NO: 674142 - RNA, 19 nt, Artificial Sequence
  Synthetic
aaaauggggcuuuuguauu

SEQ ID NO: 674143 - RNA, 20 nt, Artificial Sequence
  Synthetic
gaaaauggggcuuuuguauu

SEQ ID NO: 674144 - RNA, 21 nt, Artificial Sequence
  Synthetic
ugaaaauggggcuuuuguauu

SEQ ID NO: 674145 - RNA, 22 nt, Artificial Sequence
  Synthetic
gugaaaauggggcuuuuguauu

SEQ ID NO: 674146 - RNA, 23 nt, Artificial Sequence
  Synthetic
agugaaaauggggcuuuuguauu

SEQ ID NO: 674147 - RNA, 24 nt, Artificial Sequence
  Synthetic
gagugaaaauggggcuuuuguauu

SEQ ID NO: 674148 - RNA, 18 nt, Artificial Sequence
  Synthetic
guuaaaagaaaaauuauu

SEQ ID NO: 674149 - RNA, 19 nt, Artificial Sequence
  Synthetic
gguuaaaagaaaaauuauu

SEQ ID NO: 674150 - RNA, 20 nt, Artificial Sequence
  Synthetic
ugguuaaaagaaaaauuauu

SEQ ID NO: 674151 - RNA, 21 nt, Artificial Sequence
  Synthetic
cugguuaaaagaaaaauuauu

SEQ ID NO: 674152 - RNA, 22 nt, Artificial Sequence
  Synthetic
acugguuaaaagaaaaauuauu

SEQ ID NO: 674153 - RNA, 23 nt, Artificial Sequence
  Synthetic
uacugguuaaaagaaaaauuauu

SEQ ID NO: 674154 - RNA, 24 nt, Artificial Sequence
  Synthetic
uuacugguuaaaagaaaaauuauu

SEQ ID NO: 674155 - RNA, 18 nt, Artificial Sequence
  Synthetic
acauuguaauaaauuauu

SEQ ID NO: 674156 - RNA, 19 nt, Artificial Sequence
  Synthetic
aacauuguaauaaauuauu

SEQ ID NO: 674157 - RNA, 20 nt, Artificial Sequence
  Synthetic
uaacauuguaauaaauuauu

SEQ ID NO: 674158 - RNA, 21 nt, Artificial Sequence
  Synthetic
uuaacauuguaauaaauuauu

SEQ ID NO: 674159 - RNA, 22 nt, Artificial Sequence
  Synthetic
cuuaacauuguaauaaauuauu

SEQ ID NO: 674160 - RNA, 23 nt, Artificial Sequence
  Synthetic
ucuuaacauuguaauaaauuauu

SEQ ID NO: 674161 - RNA, 24 nt, Artificial Sequence
  Synthetic
aucuuaacauuguaauaaauuauu

SEQ ID NO: 674162 - RNA, 18 nt, Artificial Sequence
  Synthetic
uucaccgauuaaauuauu

SEQ ID NO: 674163 - RNA, 19 nt, Artificial Sequence
  Synthetic
cuucaccgauuaaauuauu

SEQ ID NO: 674164 - RNA, 20 nt, Artificial Sequence
  Synthetic
gcuucaccgauuaaauuauu

SEQ ID NO: 674165 - RNA, 21 nt, Artificial Sequence
  Synthetic
ugcuucaccgauuaaauuauu

SEQ ID NO: 674166 - RNA, 22 nt, Artificial Sequence
  Synthetic
augcuucaccgauuaaauuauu

SEQ ID NO: 674167 - RNA, 23 nt, Artificial Sequence
  Synthetic
uaugcuucaccgauuaaauuauu

SEQ ID NO: 674168 - RNA, 24 nt, Artificial Sequence
  Synthetic
uuaugcuucaccgauuaaauuauu

SEQ ID NO: 674169 - RNA, 18 nt, Artificial Sequence
  Synthetic
guacacuuuuaaauuauu

SEQ ID NO: 674170 - RNA, 19 nt, Artificial Sequence
  Synthetic
uguacacuuuuaaauuauu

SEQ ID NO: 674171 - RNA, 20 nt, Artificial Sequence
  Synthetic
uuguacacuuuuaaauuauu

SEQ ID NO: 674172 - RNA, 21 nt, Artificial Sequence
  Synthetic
guuguacacuuuuaaauuauu

SEQ ID NO: 674173 - RNA, 22 nt, Artificial Sequence
  Synthetic
aguuguacacuuuuaaauuauu

SEQ ID NO: 674174 - RNA, 23 nt, Artificial Sequence
  Synthetic
aaguuguacacuuuuaaauuauu

SEQ ID NO: 674175 - RNA, 24 nt, Artificial Sequence
  Synthetic
caaguuguacacuuuuaaauuauu

SEQ ID NO: 674176 - RNA, 18 nt, Artificial Sequence
  Synthetic
cagaaccacagaauuauu

SEQ ID NO: 674177 - RNA, 19 nt, Artificial Sequence
  Synthetic
gcagaaccacagaauuauu

SEQ ID NO: 674178 - RNA, 20 nt, Artificial Sequence
  Synthetic
ugcagaaccacagaauuauu

SEQ ID NO: 674179 - RNA, 21 nt, Artificial Sequence
  Synthetic
cugcagaaccacagaauuauu

SEQ ID NO: 674180 - RNA, 22 nt, Artificial Sequence
  Synthetic
acugcagaaccacagaauuauu

SEQ ID NO: 674181 - RNA, 23 nt, Artificial Sequence
  Synthetic
aacugcagaaccacagaauuauu

SEQ ID NO: 674182 - RNA, 24 nt, Artificial Sequence
  Synthetic
caacugcagaaccacagaauuauu

SEQ ID NO: 674183 - RNA, 18 nt, Artificial Sequence
  Synthetic
uuucccuguagaauuauu

SEQ ID NO: 674184 - RNA, 19 nt, Artificial Sequence
  Synthetic
uuuucccuguagaauuauu

SEQ ID NO: 674185 - RNA, 20 nt, Artificial Sequence
  Synthetic
auuuucccuguagaauuauu

SEQ ID NO: 674186 - RNA, 21 nt, Artificial Sequence
  Synthetic
uauuuucccuguagaauuauu

SEQ ID NO: 674187 - RNA, 22 nt, Artificial Sequence
  Synthetic
uuauuuucccuguagaauuauu

SEQ ID NO: 674188 - RNA, 23 nt, Artificial Sequence
  Synthetic
cuuauuuucccuguagaauuauu

SEQ ID NO: 674189 - RNA, 24 nt, Artificial Sequence
  Synthetic
ucuuauuuucccuguagaauuauu

SEQ ID NO: 674190 - RNA, 18 nt, Artificial Sequence
  Synthetic
uuuuguucaugaauuauu

SEQ ID NO: 674191 - RNA, 19 nt, Artificial Sequence
  Synthetic
auuuuguucaugaauuauu

SEQ ID NO: 674192 - RNA, 20 nt, Artificial Sequence
  Synthetic
aauuuuguucaugaauuauu

SEQ ID NO: 674193 - RNA, 21 nt, Artificial Sequence
  Synthetic
uaauuuuguucaugaauuauu

SEQ ID NO: 674194 - RNA, 22 nt, Artificial Sequence
  Synthetic
guaauuuuguucaugaauuauu

SEQ ID NO: 674195 - RNA, 23 nt, Artificial Sequence
  Synthetic
uguaauuuuguucaugaauuauu

SEQ ID NO: 674196 - RNA, 24 nt, Artificial Sequence
  Synthetic
uuguaauuuuguucaugaauuauu

SEQ ID NO: 674197 - RNA, 18 nt, Artificial Sequence
  Synthetic
gacacaugcugaauuauu

SEQ ID NO: 674198 - RNA, 19 nt, Artificial Sequence
  Synthetic
cgacacaugcugaauuauu

SEQ ID NO: 674199 - RNA, 20 nt, Artificial Sequence
  Synthetic
gcgacacaugcugaauuauu

SEQ ID NO: 674200 - RNA, 21 nt, Artificial Sequence
  Synthetic
agcgacacaugcugaauuauu

SEQ ID NO: 674201 - RNA, 22 nt, Artificial Sequence
  Synthetic
aagcgacacaugcugaauuauu

SEQ ID NO: 674202 - RNA, 23 nt, Artificial Sequence
  Synthetic
aaagcgacacaugcugaauuauu

SEQ ID NO: 674203 - RNA, 24 nt, Artificial Sequence
  Synthetic
caaagcgacacaugcugaauuauu

SEQ ID NO: 674204 - RNA, 18 nt, Artificial Sequence
  Synthetic
uaaauuaguauaauuauu

SEQ ID NO: 674205 - RNA, 19 nt, Artificial Sequence
  Synthetic
guaaauuaguauaauuauu

SEQ ID NO: 674206 - RNA, 20 nt, Artificial Sequence
  Synthetic
uguaaauuaguauaauuauu

SEQ ID NO: 674207 - RNA, 21 nt, Artificial Sequence
  Synthetic
auguaaauuaguauaauuauu

SEQ ID NO: 674208 - RNA, 22 nt, Artificial Sequence
  Synthetic
aauguaaauuaguauaauuauu

SEQ ID NO: 674209 - RNA, 23 nt, Artificial Sequence
  Synthetic
gaauguaaauuaguauaauuauu

SEQ ID NO: 674210 - RNA, 24 nt, Artificial Sequence
  Synthetic
ggaauguaaauuaguauaauuauu

SEQ ID NO: 674211 - RNA, 18 nt, Artificial Sequence
  Synthetic
aagaaagcacuaauuauu

SEQ ID NO: 674212 - RNA, 19 nt, Artificial Sequence
  Synthetic
uaagaaagcacuaauuauu

SEQ ID NO: 674213 - RNA, 20 nt, Artificial Sequence
  Synthetic
cuaagaaagcacuaauuauu

SEQ ID NO: 674214 - RNA, 21 nt, Artificial Sequence
  Synthetic
acuaagaaagcacuaauuauu

SEQ ID NO: 674215 - RNA, 22 nt, Artificial Sequence
  Synthetic
aacuaagaaagcacuaauuauu

SEQ ID NO: 674216 - RNA, 23 nt, Artificial Sequence
  Synthetic
uaacuaagaaagcacuaauuauu

SEQ ID NO: 674217 - RNA, 24 nt, Artificial Sequence
  Synthetic
uuaacuaagaaagcacuaauuauu

SEQ ID NO: 674218 - RNA, 18 nt, Artificial Sequence
  Synthetic
uuucuuuuuuuaauuauu

SEQ ID NO: 674219 - RNA, 19 nt, Artificial Sequence
  Synthetic
guuucuuuuuuuaauuauu

SEQ ID NO: 674220 - RNA, 20 nt, Artificial Sequence
  Synthetic
uguuucuuuuuuuaauuauu

SEQ ID NO: 674221 - RNA, 21 nt, Artificial Sequence
  Synthetic
uuguuucuuuuuuuaauuauu

SEQ ID NO: 674222 - RNA, 22 nt, Artificial Sequence
  Synthetic
uuuguuucuuuuuuuaauuauu

SEQ ID NO: 674223 - RNA, 23 nt, Artificial Sequence
  Synthetic
guuuguuucuuuuuuuaauuauu

SEQ ID NO: 674224 - RNA, 24 nt, Artificial Sequence
  Synthetic
uguuuguuucuuuuuuuaauuauu

SEQ ID NO: 674225 - RNA, 18 nt, Artificial Sequence
  Synthetic
ugcauccucaccauuauu

SEQ ID NO: 674226 - RNA, 19 nt, Artificial Sequence
  Synthetic
cugcauccucaccauuauu

SEQ ID NO: 674227 - RNA, 20 nt, Artificial Sequence
  Synthetic
acugcauccucaccauuauu

SEQ ID NO: 674228 - RNA, 21 nt, Artificial Sequence
  Synthetic
aacugcauccucaccauuauu

SEQ ID NO: 674229 - RNA, 22 nt, Artificial Sequence
  Synthetic
uaacugcauccucaccauuauu

SEQ ID NO: 674230 - RNA, 23 nt, Artificial Sequence
  Synthetic
uuaacugcauccucaccauuauu

SEQ ID NO: 674231 - RNA, 24 nt, Artificial Sequence
  Synthetic
uuuaacugcauccucaccauuauu

SEQ ID NO: 674232 - RNA, 18 nt, Artificial Sequence
  Synthetic
aaaccugaagccauuauu

SEQ ID NO: 674233 - RNA, 19 nt, Artificial Sequence
  Synthetic
aaaaccugaagccauuauu

SEQ ID NO: 674234 - RNA, 20 nt, Artificial Sequence
  Synthetic
gaaaaccugaagccauuauu

SEQ ID NO: 674235 - RNA, 21 nt, Artificial Sequence
  Synthetic
ugaaaaccugaagccauuauu

SEQ ID NO: 674236 - RNA, 22 nt, Artificial Sequence
  Synthetic
gugaaaaccugaagccauuauu

SEQ ID NO: 674237 - RNA, 23 nt, Artificial Sequence
  Synthetic
ugugaaaaccugaagccauuauu

SEQ ID NO: 674238 - RNA, 24 nt, Artificial Sequence
  Synthetic
uugugaaaaccugaagccauuauu

SEQ ID NO: 674239 - RNA, 18 nt, Artificial Sequence
  Synthetic
aaccuuuaaggcauuauu

SEQ ID NO: 674240 - RNA, 19 nt, Artificial Sequence
  Synthetic
uaaccuuuaaggcauuauu

SEQ ID NO: 674241 - RNA, 20 nt, Artificial Sequence
  Synthetic
guaaccuuuaaggcauuauu

SEQ ID NO: 674242 - RNA, 21 nt, Artificial Sequence
  Synthetic
aguaaccuuuaaggcauuauu

SEQ ID NO: 674243 - RNA, 22 nt, Artificial Sequence
  Synthetic
gaguaaccuuuaaggcauuauu

SEQ ID NO: 674244 - RNA, 23 nt, Artificial Sequence
  Synthetic
ggaguaaccuuuaaggcauuauu

SEQ ID NO: 674245 - RNA, 24 nt, Artificial Sequence
  Synthetic
uggaguaaccuuuaaggcauuauu

SEQ ID NO: 674246 - RNA, 18 nt, Artificial Sequence
  Synthetic
cggauuagcaucauuauu

SEQ ID NO: 674247 - RNA, 19 nt, Artificial Sequence
  Synthetic
acggauuagcaucauuauu

SEQ ID NO: 674248 - RNA, 20 nt, Artificial Sequence
  Synthetic
aacggauuagcaucauuauu

SEQ ID NO: 674249 - RNA, 21 nt, Artificial Sequence
  Synthetic
gaacggauuagcaucauuauu

SEQ ID NO: 674250 - RNA, 22 nt, Artificial Sequence
  Synthetic
ugaacggauuagcaucauuauu

SEQ ID NO: 674251 - RNA, 23 nt, Artificial Sequence
  Synthetic
augaacggauuagcaucauuauu

SEQ ID NO: 674252 - RNA, 24 nt, Artificial Sequence
  Synthetic
caugaacggauuagcaucauuauu

SEQ ID NO: 674253 - RNA, 18 nt, Artificial Sequence
  Synthetic
guaagcccgaucauuauu

SEQ ID NO: 674254 - RNA, 19 nt, Artificial Sequence
  Synthetic
aguaagcccgaucauuauu

SEQ ID NO: 674255 - RNA, 20 nt, Artificial Sequence
  Synthetic
gaguaagcccgaucauuauu

SEQ ID NO: 674256 - RNA, 21 nt, Artificial Sequence
  Synthetic
agaguaagcccgaucauuauu

SEQ ID NO: 674257 - RNA, 22 nt, Artificial Sequence
  Synthetic
gagaguaagcccgaucauuauu

SEQ ID NO: 674258 - RNA, 23 nt, Artificial Sequence
  Synthetic
ugagaguaagcccgaucauuauu

SEQ ID NO: 674259 - RNA, 24 nt, Artificial Sequence
  Synthetic
uugagaguaagcccgaucauuauu

SEQ ID NO: 674260 - RNA, 18 nt, Artificial Sequence
  Synthetic
cagagaugguucauuauu

SEQ ID NO: 674261 - RNA, 19 nt, Artificial Sequence
  Synthetic
gcagagaugguucauuauu

SEQ ID NO: 674262 - RNA, 20 nt, Artificial Sequence
  Synthetic
ugcagagaugguucauuauu

SEQ ID NO: 674263 - RNA, 21 nt, Artificial Sequence
  Synthetic
uugcagagaugguucauuauu

SEQ ID NO: 674264 - RNA, 22 nt, Artificial Sequence
  Synthetic
auugcagagaugguucauuauu

SEQ ID NO: 674265 - RNA, 23 nt, Artificial Sequence
  Synthetic
uauugcagagaugguucauuauu

SEQ ID NO: 674266 - RNA, 24 nt, Artificial Sequence
  Synthetic
guauugcagagaugguucauuauu

SEQ ID NO: 674267 - RNA, 18 nt, Artificial Sequence
  Synthetic
guuaaguuugagauuauu

SEQ ID NO: 674268 - RNA, 19 nt, Artificial Sequence
  Synthetic
gguuaaguuugagauuauu

SEQ ID NO: 674269 - RNA, 20 nt, Artificial Sequence
  Synthetic
agguuaaguuugagauuauu

SEQ ID NO: 674270 - RNA, 21 nt, Artificial Sequence
  Synthetic
uagguuaaguuugagauuauu

SEQ ID NO: 674271 - RNA, 22 nt, Artificial Sequence
  Synthetic
auagguuaaguuugagauuauu

SEQ ID NO: 674272 - RNA, 23 nt, Artificial Sequence
  Synthetic
cauagguuaaguuugagauuauu

SEQ ID NO: 674273 - RNA, 24 nt, Artificial Sequence
  Synthetic
ccauagguuaaguuugagauuauu

SEQ ID NO: 674274 - RNA, 18 nt, Artificial Sequence
  Synthetic
cucuucaacuagauuauu

SEQ ID NO: 674275 - RNA, 19 nt, Artificial Sequence
  Synthetic
ccucuucaacuagauuauu

SEQ ID NO: 674276 - RNA, 20 nt, Artificial Sequence
  Synthetic
accucuucaacuagauuauu

SEQ ID NO: 674277 - RNA, 21 nt, Artificial Sequence
  Synthetic
caccucuucaacuagauuauu

SEQ ID NO: 674278 - RNA, 22 nt, Artificial Sequence
  Synthetic
ucaccucuucaacuagauuauu

SEQ ID NO: 674279 - RNA, 23 nt, Artificial Sequence
  Synthetic
cucaccucuucaacuagauuauu

SEQ ID NO: 674280 - RNA, 24 nt, Artificial Sequence
  Synthetic
acucaccucuucaacuagauuauu

SEQ ID NO: 674281 - RNA, 18 nt, Artificial Sequence
  Synthetic
cuaauacauaggauuauu

SEQ ID NO: 674282 - RNA, 19 nt, Artificial Sequence
  Synthetic
acuaauacauaggauuauu

SEQ ID NO: 674283 - RNA, 20 nt, Artificial Sequence
  Synthetic
aacuaauacauaggauuauu

SEQ ID NO: 674284 - RNA, 21 nt, Artificial Sequence
  Synthetic
gaacuaauacauaggauuauu

SEQ ID NO: 674285 - RNA, 22 nt, Artificial Sequence
  Synthetic
ugaacuaauacauaggauuauu

SEQ ID NO: 674286 - RNA, 23 nt, Artificial Sequence
  Synthetic
augaacuaauacauaggauuauu

SEQ ID NO: 674287 - RNA, 24 nt, Artificial Sequence
  Synthetic
aaugaacuaauacauaggauuauu

SEQ ID NO: 674288 - RNA, 18 nt, Artificial Sequence
  Synthetic
caucugguaaugauuauu

SEQ ID NO: 674289 - RNA, 19 nt, Artificial Sequence
  Synthetic
gcaucugguaaugauuauu

SEQ ID NO: 674290 - RNA, 20 nt, Artificial Sequence
  Synthetic
agcaucugguaaugauuauu

SEQ ID NO: 674291 - RNA, 21 nt, Artificial Sequence
  Synthetic
uagcaucugguaaugauuauu

SEQ ID NO: 674292 - RNA, 22 nt, Artificial Sequence
  Synthetic
auagcaucugguaaugauuauu

SEQ ID NO: 674293 - RNA, 23 nt, Artificial Sequence
  Synthetic
aauagcaucugguaaugauuauu

SEQ ID NO: 674294 - RNA, 24 nt, Artificial Sequence
  Synthetic
aaauagcaucugguaaugauuauu

SEQ ID NO: 674295 - RNA, 18 nt, Artificial Sequence
  Synthetic
auuuguuuaaugauuauu

SEQ ID NO: 674296 - RNA, 19 nt, Artificial Sequence
  Synthetic
cauuuguuuaaugauuauu

SEQ ID NO: 674297 - RNA, 20 nt, Artificial Sequence
  Synthetic
acauuuguuuaaugauuauu

SEQ ID NO: 674298 - RNA, 21 nt, Artificial Sequence
  Synthetic
cacauuuguuuaaugauuauu

SEQ ID NO: 674299 - RNA, 22 nt, Artificial Sequence
  Synthetic
acacauuuguuuaaugauuauu

SEQ ID NO: 674300 - RNA, 23 nt, Artificial Sequence
  Synthetic
cacacauuuguuuaaugauuauu

SEQ ID NO: 674301 - RNA, 24 nt, Artificial Sequence
  Synthetic
acacacauuuguuuaaugauuauu

SEQ ID NO: 674302 - RNA, 18 nt, Artificial Sequence
  Synthetic
auguguucuaauauuauu

SEQ ID NO: 674303 - RNA, 19 nt, Artificial Sequence
  Synthetic
uauguguucuaauauuauu

SEQ ID NO: 674304 - RNA, 20 nt, Artificial Sequence
  Synthetic
uuauguguucuaauauuauu

SEQ ID NO: 674305 - RNA, 21 nt, Artificial Sequence
  Synthetic
uuuauguguucuaauauuauu

SEQ ID NO: 674306 - RNA, 22 nt, Artificial Sequence
  Synthetic
auuuauguguucuaauauuauu

SEQ ID NO: 674307 - RNA, 23 nt, Artificial Sequence
  Synthetic
aauuuauguguucuaauauuauu

SEQ ID NO: 674308 - RNA, 24 nt, Artificial Sequence
  Synthetic
uaauuuauguguucuaauauuauu

SEQ ID NO: 674309 - RNA, 18 nt, Artificial Sequence
  Synthetic
acauucuuuaauauuauu

SEQ ID NO: 674310 - RNA, 19 nt, Artificial Sequence
  Synthetic
aacauucuuuaauauuauu

SEQ ID NO: 674311 - RNA, 20 nt, Artificial Sequence
  Synthetic
caacauucuuuaauauuauu

SEQ ID NO: 674312 - RNA, 21 nt, Artificial Sequence
  Synthetic
ucaacauucuuuaauauuauu

SEQ ID NO: 674313 - RNA, 22 nt, Artificial Sequence
  Synthetic
gucaacauucuuuaauauuauu

SEQ ID NO: 674314 - RNA, 23 nt, Artificial Sequence
  Synthetic
agucaacauucuuuaauauuauu

SEQ ID NO: 674315 - RNA, 24 nt, Artificial Sequence
  Synthetic
aagucaacauucuuuaauauuauu

SEQ ID NO: 674316 - RNA, 18 nt, Artificial Sequence
  Synthetic
uaguaauauacuauuauu

SEQ ID NO: 674317 - RNA, 19 nt, Artificial Sequence
  Synthetic
auaguaauauacuauuauu

SEQ ID NO: 674318 - RNA, 20 nt, Artificial Sequence
  Synthetic
aauaguaauauacuauuauu

SEQ ID NO: 674319 - RNA, 21 nt, Artificial Sequence
  Synthetic
caauaguaauauacuauuauu

SEQ ID NO: 674320 - RNA, 22 nt, Artificial Sequence
  Synthetic
ccaauaguaauauacuauuauu

SEQ ID NO: 674321 - RNA, 23 nt, Artificial Sequence
  Synthetic
cccaauaguaauauacuauuauu

SEQ ID NO: 674322 - RNA, 24 nt, Artificial Sequence
  Synthetic
acccaauaguaauauacuauuauu

SEQ ID NO: 674323 - RNA, 18 nt, Artificial Sequence
  Synthetic
aggaaggaugguauuauu

SEQ ID NO: 674324 - RNA, 19 nt, Artificial Sequence
  Synthetic
uaggaaggaugguauuauu

SEQ ID NO: 674325 - RNA, 20 nt, Artificial Sequence
  Synthetic
guaggaaggaugguauuauu

SEQ ID NO: 674326 - RNA, 21 nt, Artificial Sequence
  Synthetic
aguaggaaggaugguauuauu

SEQ ID NO: 674327 - RNA, 22 nt, Artificial Sequence
  Synthetic
uaguaggaaggaugguauuauu

SEQ ID NO: 674328 - RNA, 23 nt, Artificial Sequence
  Synthetic
auaguaggaaggaugguauuauu

SEQ ID NO: 674329 - RNA, 24 nt, Artificial Sequence
  Synthetic
aauaguaggaaggaugguauuauu

SEQ ID NO: 674330 - RNA, 21 nt, Artificial Sequence
  Synthetic
ucauagauagcucuuauuauu

SEQ ID NO: 674331 - RNA, 22 nt, Artificial Sequence
  Synthetic
gucauagauagcucuuauuauu

SEQ ID NO: 674332 - RNA, 23 nt, Artificial Sequence
  Synthetic
ugucauagauagcucuuauuauu

SEQ ID NO: 674333 - RNA, 24 nt, Artificial Sequence
  Synthetic
uugucauagauagcucuuauuauu

SEQ ID NO: 674334 - RNA, 18 nt, Artificial Sequence
  Synthetic
uaaguagcucuuauuauu

SEQ ID NO: 674335 - RNA, 19 nt, Artificial Sequence
  Synthetic
auaaguagcucuuauuauu

SEQ ID NO: 674336 - RNA, 20 nt, Artificial Sequence
  Synthetic
cauaaguagcucuuauuauu

SEQ ID NO: 674337 - RNA, 21 nt, Artificial Sequence
  Synthetic
ucauaaguagcucuuauuauu

SEQ ID NO: 674338 - RNA, 22 nt, Artificial Sequence
  Synthetic
gucauaaguagcucuuauuauu

SEQ ID NO: 674339 - RNA, 23 nt, Artificial Sequence
  Synthetic
ugucauaaguagcucuuauuauu

SEQ ID NO: 674340 - RNA, 24 nt, Artificial Sequence
  Synthetic
uugucauaaguagcucuuauuauu

SEQ ID NO: 674341 - RNA, 18 nt, Artificial Sequence
  Synthetic
gcacaaaguuaacuuauu

SEQ ID NO: 674342 - RNA, 19 nt, Artificial Sequence
  Synthetic
cgcacaaaguuaacuuauu

SEQ ID NO: 674343 - RNA, 20 nt, Artificial Sequence
  Synthetic
ucgcacaaaguuaacuuauu

SEQ ID NO: 674344 - RNA, 21 nt, Artificial Sequence
  Synthetic
uucgcacaaaguuaacuuauu

SEQ ID NO: 674345 - RNA, 22 nt, Artificial Sequence
  Synthetic
cuucgcacaaaguuaacuuauu

SEQ ID NO: 674346 - RNA, 23 nt, Artificial Sequence
  Synthetic
ccuucgcacaaaguuaacuuauu

SEQ ID NO: 674347 - RNA, 24 nt, Artificial Sequence
  Synthetic
accuucgcacaaaguuaacuuauu

SEQ ID NO: 674348 - RNA, 18 nt, Artificial Sequence
  Synthetic
cuucuaugaacacuuauu

SEQ ID NO: 674349 - RNA, 19 nt, Artificial Sequence
  Synthetic
ccuucuaugaacacuuauu

SEQ ID NO: 674350 - RNA, 20 nt, Artificial Sequence
  Synthetic
cccuucuaugaacacuuauu

SEQ ID NO: 674351 - RNA, 21 nt, Artificial Sequence
  Synthetic
ucccuucuaugaacacuuauu

SEQ ID NO: 674352 - RNA, 22 nt, Artificial Sequence
  Synthetic
cucccuucuaugaacacuuauu

SEQ ID NO: 674353 - RNA, 23 nt, Artificial Sequence
  Synthetic
ccucccuucuaugaacacuuauu

SEQ ID NO: 674354 - RNA, 24 nt, Artificial Sequence
  Synthetic
cccucccuucuaugaacacuuauu

SEQ ID NO: 674355 - RNA, 18 nt, Artificial Sequence
  Synthetic
cuuaauaagagacuuauu

SEQ ID NO: 674356 - RNA, 19 nt, Artificial Sequence
  Synthetic
acuuaauaagagacuuauu

SEQ ID NO: 674357 - RNA, 20 nt, Artificial Sequence
  Synthetic
aacuuaauaagagacuuauu

SEQ ID NO: 674358 - RNA, 21 nt, Artificial Sequence
  Synthetic
gaacuuaauaagagacuuauu

SEQ ID NO: 674359 - RNA, 22 nt, Artificial Sequence
  Synthetic
agaacuuaauaagagacuuauu

SEQ ID NO: 674360 - RNA, 23 nt, Artificial Sequence
  Synthetic
cagaacuuaauaagagacuuauu

SEQ ID NO: 674361 - RNA, 24 nt, Artificial Sequence
  Synthetic
gcagaacuuaauaagagacuuauu

SEQ ID NO: 674362 - RNA, 18 nt, Artificial Sequence
  Synthetic
ggagcagccauacuuauu

SEQ ID NO: 674363 - RNA, 19 nt, Artificial Sequence
  Synthetic
gggagcagccauacuuauu

SEQ ID NO: 674364 - RNA, 20 nt, Artificial Sequence
  Synthetic
ggggagcagccauacuuauu

SEQ ID NO: 674365 - RNA, 21 nt, Artificial Sequence
  Synthetic
uggggagcagccauacuuauu

SEQ ID NO: 674366 - RNA, 22 nt, Artificial Sequence
  Synthetic
cuggggagcagccauacuuauu

SEQ ID NO: 674367 - RNA, 23 nt, Artificial Sequence
  Synthetic
ucuggggagcagccauacuuauu

SEQ ID NO: 674368 - RNA, 24 nt, Artificial Sequence
  Synthetic
aucuggggagcagccauacuuauu

SEQ ID NO: 674369 - RNA, 18 nt, Artificial Sequence
  Synthetic
ugguguuuaguacuuauu

SEQ ID NO: 674370 - RNA, 19 nt, Artificial Sequence
  Synthetic
cugguguuuaguacuuauu

SEQ ID NO: 674371 - RNA, 20 nt, Artificial Sequence
  Synthetic
acugguguuuaguacuuauu

SEQ ID NO: 674372 - RNA, 21 nt, Artificial Sequence
  Synthetic
uacugguguuuaguacuuauu

SEQ ID NO: 674373 - RNA, 22 nt, Artificial Sequence
  Synthetic
auacugguguuuaguacuuauu

SEQ ID NO: 674374 - RNA, 23 nt, Artificial Sequence
  Synthetic
aauacugguguuuaguacuuauu

SEQ ID NO: 674375 - RNA, 24 nt, Artificial Sequence
  Synthetic
aaauacugguguuuaguacuuauu

SEQ ID NO: 674376 - RNA, 18 nt, Artificial Sequence
  Synthetic
ugagaaagguaccuuauu

SEQ ID NO: 674377 - RNA, 19 nt, Artificial Sequence
  Synthetic
uugagaaagguaccuuauu

SEQ ID NO: 674378 - RNA, 20 nt, Artificial Sequence
  Synthetic
cuugagaaagguaccuuauu

SEQ ID NO: 674379 - RNA, 21 nt, Artificial Sequence
  Synthetic
acuugagaaagguaccuuauu

SEQ ID NO: 674380 - RNA, 22 nt, Artificial Sequence
  Synthetic
gacuugagaaagguaccuuauu

SEQ ID NO: 674381 - RNA, 23 nt, Artificial Sequence
  Synthetic
ugacuugagaaagguaccuuauu

SEQ ID NO: 674382 - RNA, 24 nt, Artificial Sequence
  Synthetic
augacuugagaaagguaccuuauu

SEQ ID NO: 674383 - RNA, 18 nt, Artificial Sequence
  Synthetic
guucuauaaauccuuauu

SEQ ID NO: 674384 - RNA, 19 nt, Artificial Sequence
  Synthetic
uguucuauaaauccuuauu

SEQ ID NO: 674385 - RNA, 20 nt, Artificial Sequence
  Synthetic
auguucuauaaauccuuauu

SEQ ID NO: 674386 - RNA, 21 nt, Artificial Sequence
  Synthetic
aauguucuauaaauccuuauu

SEQ ID NO: 674387 - RNA, 22 nt, Artificial Sequence
  Synthetic
uaauguucuauaaauccuuauu

SEQ ID NO: 674388 - RNA, 23 nt, Artificial Sequence
  Synthetic
uuaauguucuauaaauccuuauu

SEQ ID NO: 674389 - RNA, 24 nt, Artificial Sequence
  Synthetic
auuaauguucuauaaauccuuauu

SEQ ID NO: 674390 - RNA, 18 nt, Artificial Sequence
  Synthetic
cacauucauuuccuuauu

SEQ ID NO: 674391 - RNA, 19 nt, Artificial Sequence
  Synthetic
ucacauucauuuccuuauu

SEQ ID NO: 674392 - RNA, 20 nt, Artificial Sequence
  Synthetic
cucacauucauuuccuuauu

SEQ ID NO: 674393 - RNA, 21 nt, Artificial Sequence
  Synthetic
gcucacauucauuuccuuauu

SEQ ID NO: 674394 - RNA, 22 nt, Artificial Sequence
  Synthetic
agcucacauucauuuccuuauu

SEQ ID NO: 674395 - RNA, 23 nt, Artificial Sequence
  Synthetic
cagcucacauucauuuccuuauu

SEQ ID NO: 674396 - RNA, 24 nt, Artificial Sequence
  Synthetic
ccagcucacauucauuuccuuauu

SEQ ID NO: 674397 - RNA, 18 nt, Artificial Sequence
  Synthetic
cacuguuguuuccuuauu

SEQ ID NO: 674398 - RNA, 19 nt, Artificial Sequence
  Synthetic
ccacuguuguuuccuuauu

SEQ ID NO: 674399 - RNA, 20 nt, Artificial Sequence
  Synthetic
gccacuguuguuuccuuauu

SEQ ID NO: 674400 - RNA, 21 nt, Artificial Sequence
  Synthetic
ugccacuguuguuuccuuauu

SEQ ID NO: 674401 - RNA, 22 nt, Artificial Sequence
  Synthetic
uugccacuguuguuuccuuauu

SEQ ID NO: 674402 - RNA, 23 nt, Artificial Sequence
  Synthetic
uuugccacuguuguuuccuuauu

SEQ ID NO: 674403 - RNA, 24 nt, Artificial Sequence
  Synthetic
auuugccacuguuguuuccuuauu

SEQ ID NO: 674404 - RNA, 18 nt, Artificial Sequence
  Synthetic
cauagagggcugcuuauu

SEQ ID NO: 674405 - RNA, 19 nt, Artificial Sequence
  Synthetic
ucauagagggcugcuuauu

SEQ ID NO: 674406 - RNA, 20 nt, Artificial Sequence
  Synthetic
uucauagagggcugcuuauu

SEQ ID NO: 674407 - RNA, 21 nt, Artificial Sequence
  Synthetic
cuucauagagggcugcuuauu

SEQ ID NO: 674408 - RNA, 22 nt, Artificial Sequence
  Synthetic
acuucauagagggcugcuuauu

SEQ ID NO: 674409 - RNA, 23 nt, Artificial Sequence
  Synthetic
gacuucauagagggcugcuuauu

SEQ ID NO: 674410 - RNA, 24 nt, Artificial Sequence
  Synthetic
ugacuucauagagggcugcuuauu

SEQ ID NO: 674411 - RNA, 18 nt, Artificial Sequence
  Synthetic
cucauuucucugcuuauu

SEQ ID NO: 674412 - RNA, 19 nt, Artificial Sequence
  Synthetic
ucucauuucucugcuuauu

SEQ ID NO: 674413 - RNA, 20 nt, Artificial Sequence
  Synthetic
uucucauuucucugcuuauu

SEQ ID NO: 674414 - RNA, 21 nt, Artificial Sequence
  Synthetic
guucucauuucucugcuuauu

SEQ ID NO: 674415 - RNA, 22 nt, Artificial Sequence
  Synthetic
aguucucauuucucugcuuauu

SEQ ID NO: 674416 - RNA, 23 nt, Artificial Sequence
  Synthetic
uaguucucauuucucugcuuauu

SEQ ID NO: 674417 - RNA, 24 nt, Artificial Sequence
  Synthetic
auaguucucauuucucugcuuauu

SEQ ID NO: 674418 - RNA, 18 nt, Artificial Sequence
  Synthetic
acaugaaaaaaucuuauu

SEQ ID NO: 674419 - RNA, 19 nt, Artificial Sequence
  Synthetic
aacaugaaaaaaucuuauu

SEQ ID NO: 674420 - RNA, 20 nt, Artificial Sequence
  Synthetic
uaacaugaaaaaaucuuauu

SEQ ID NO: 674421 - RNA, 21 nt, Artificial Sequence
  Synthetic
uuaacaugaaaaaaucuuauu

SEQ ID NO: 674422 - RNA, 22 nt, Artificial Sequence
  Synthetic
uuuaacaugaaaaaaucuuauu

SEQ ID NO: 674423 - RNA, 23 nt, Artificial Sequence
  Synthetic
uuuuaacaugaaaaaaucuuauu

SEQ ID NO: 674424 - RNA, 24 nt, Artificial Sequence
  Synthetic
auuuuaacaugaaaaaaucuuauu

SEQ ID NO: 674425 - RNA, 18 nt, Artificial Sequence
  Synthetic
ucccaucuaaaaguuauu

SEQ ID NO: 674426 - RNA, 19 nt, Artificial Sequence
  Synthetic
cucccaucuaaaaguuauu

SEQ ID NO: 674427 - RNA, 20 nt, Artificial Sequence
  Synthetic
ccucccaucuaaaaguuauu

SEQ ID NO: 674428 - RNA, 21 nt, Artificial Sequence
  Synthetic
cccucccaucuaaaaguuauu

SEQ ID NO: 674429 - RNA, 22 nt, Artificial Sequence
  Synthetic
ccccucccaucuaaaaguuauu

SEQ ID NO: 674430 - RNA, 23 nt, Artificial Sequence
  Synthetic
cccccucccaucuaaaaguuauu

SEQ ID NO: 674431 - RNA, 24 nt, Artificial Sequence
  Synthetic
acccccucccaucuaaaaguuauu

SEQ ID NO: 674432 - RNA, 18 nt, Artificial Sequence
  Synthetic
uauuuccgcaaaguuauu

SEQ ID NO: 674433 - RNA, 19 nt, Artificial Sequence
  Synthetic
uuauuuccgcaaaguuauu

SEQ ID NO: 674434 - RNA, 20 nt, Artificial Sequence
  Synthetic
auuauuuccgcaaaguuauu

SEQ ID NO: 674435 - RNA, 21 nt, Artificial Sequence
  Synthetic
uauuauuuccgcaaaguuauu

SEQ ID NO: 674436 - RNA, 22 nt, Artificial Sequence
  Synthetic
auauuauuuccgcaaaguuauu

SEQ ID NO: 674437 - RNA, 23 nt, Artificial Sequence
  Synthetic
cauauuauuuccgcaaaguuauu

SEQ ID NO: 674438 - RNA, 24 nt, Artificial Sequence
  Synthetic
acauauuauuuccgcaaaguuauu

SEQ ID NO: 674439 - RNA, 18 nt, Artificial Sequence
  Synthetic
cacaaauaacaaguuauu

SEQ ID NO: 674440 - RNA, 19 nt, Artificial Sequence
  Synthetic
ccacaaauaacaaguuauu

SEQ ID NO: 674441 - RNA, 20 nt, Artificial Sequence
  Synthetic
accacaaauaacaaguuauu

SEQ ID NO: 674442 - RNA, 21 nt, Artificial Sequence
  Synthetic
uaccacaaauaacaaguuauu

SEQ ID NO: 674443 - RNA, 22 nt, Artificial Sequence
  Synthetic
cuaccacaaauaacaaguuauu

SEQ ID NO: 674444 - RNA, 23 nt, Artificial Sequence
  Synthetic
ccuaccacaaauaacaaguuauu

SEQ ID NO: 674445 - RNA, 24 nt, Artificial Sequence
  Synthetic
uccuaccacaaauaacaaguuauu

SEQ ID NO: 674446 - RNA, 18 nt, Artificial Sequence
  Synthetic
agagagagagaaguuauu

SEQ ID NO: 674447 - RNA, 19 nt, Artificial Sequence
  Synthetic
gagagagagagaaguuauu

SEQ ID NO: 674448 - RNA, 20 nt, Artificial Sequence
  Synthetic
agagagagagagaaguuauu

SEQ ID NO: 674449 - RNA, 21 nt, Artificial Sequence
  Synthetic
gagagagagagagaaguuauu

SEQ ID NO: 674450 - RNA, 22 nt, Artificial Sequence
  Synthetic
agagagagagagagaaguuauu

SEQ ID NO: 674451 - RNA, 23 nt, Artificial Sequence
  Synthetic
gagagagagagagagaaguuauu

SEQ ID NO: 674452 - RNA, 24 nt, Artificial Sequence
  Synthetic
agagagagagagagagaaguuauu

SEQ ID NO: 674453 - RNA, 18 nt, Artificial Sequence
  Synthetic
uuuuaaaauacaguuauu

SEQ ID NO: 674454 - RNA, 19 nt, Artificial Sequence
  Synthetic
cuuuuaaaauacaguuauu

SEQ ID NO: 674455 - RNA, 20 nt, Artificial Sequence
  Synthetic
acuuuuaaaauacaguuauu

SEQ ID NO: 674456 - RNA, 21 nt, Artificial Sequence
  Synthetic
aacuuuuaaaauacaguuauu

SEQ ID NO: 674457 - RNA, 22 nt, Artificial Sequence
  Synthetic
aaacuuuuaaaauacaguuauu

SEQ ID NO: 674458 - RNA, 23 nt, Artificial Sequence
  Synthetic
aaaacuuuuaaaauacaguuauu

SEQ ID NO: 674459 - RNA, 24 nt, Artificial Sequence
  Synthetic
uaaaacuuuuaaaauacaguuauu

SEQ ID NO: 674460 - RNA, 18 nt, Artificial Sequence
  Synthetic
ccucuagucccaguuauu

SEQ ID NO: 674461 - RNA, 19 nt, Artificial Sequence
  Synthetic
gccucuagucccaguuauu

SEQ ID NO: 674462 - RNA, 20 nt, Artificial Sequence
  Synthetic
ugccucuagucccaguuauu

SEQ ID NO: 674463 - RNA, 21 nt, Artificial Sequence
  Synthetic
augccucuagucccaguuauu

SEQ ID NO: 674464 - RNA, 22 nt, Artificial Sequence
  Synthetic
caugccucuagucccaguuauu

SEQ ID NO: 674465 - RNA, 23 nt, Artificial Sequence
  Synthetic
gcaugccucuagucccaguuauu

SEQ ID NO: 674466 - RNA, 24 nt, Artificial Sequence
  Synthetic
ugcaugccucuagucccaguuauu

SEQ ID NO: 674467 - RNA, 18 nt, Artificial Sequence
  Synthetic
auguucuuugcaguuauu

SEQ ID NO: 674468 - RNA, 19 nt, Artificial Sequence
  Synthetic
uauguucuuugcaguuauu

SEQ ID NO: 674469 - RNA, 20 nt, Artificial Sequence
  Synthetic
auauguucuuugcaguuauu

SEQ ID NO: 674470 - RNA, 21 nt, Artificial Sequence
  Synthetic
uauauguucuuugcaguuauu

SEQ ID NO: 674471 - RNA, 22 nt, Artificial Sequence
  Synthetic
cuauauguucuuugcaguuauu

SEQ ID NO: 674472 - RNA, 23 nt, Artificial Sequence
  Synthetic
ucuauauguucuuugcaguuauu

SEQ ID NO: 674473 - RNA, 24 nt, Artificial Sequence
  Synthetic
aucuauauguucuuugcaguuauu

SEQ ID NO: 674474 - RNA, 18 nt, Artificial Sequence
  Synthetic
aaagauaggucaguuauu

SEQ ID NO: 674475 - RNA, 19 nt, Artificial Sequence
  Synthetic
caaagauaggucaguuauu

SEQ ID NO: 674476 - RNA, 20 nt, Artificial Sequence
  Synthetic
ucaaagauaggucaguuauu

SEQ ID NO: 674477 - RNA, 21 nt, Artificial Sequence
  Synthetic
uucaaagauaggucaguuauu

SEQ ID NO: 674478 - RNA, 22 nt, Artificial Sequence
  Synthetic
guucaaagauaggucaguuauu

SEQ ID NO: 674479 - RNA, 23 nt, Artificial Sequence
  Synthetic
aguucaaagauaggucaguuauu

SEQ ID NO: 674480 - RNA, 24 nt, Artificial Sequence
  Synthetic
uaguucaaagauaggucaguuauu

SEQ ID NO: 674481 - RNA, 18 nt, Artificial Sequence
  Synthetic
acuggcuuuggaguuauu

SEQ ID NO: 674482 - RNA, 19 nt, Artificial Sequence
  Synthetic
gacuggcuuuggaguuauu

SEQ ID NO: 674483 - RNA, 20 nt, Artificial Sequence
  Synthetic
ggacuggcuuuggaguuauu

SEQ ID NO: 674484 - RNA, 21 nt, Artificial Sequence
  Synthetic
aggacuggcuuuggaguuauu

SEQ ID NO: 674485 - RNA, 22 nt, Artificial Sequence
  Synthetic
caggacuggcuuuggaguuauu

SEQ ID NO: 674486 - RNA, 23 nt, Artificial Sequence
  Synthetic
acaggacuggcuuuggaguuauu

SEQ ID NO: 674487 - RNA, 24 nt, Artificial Sequence
  Synthetic
cacaggacuggcuuuggaguuauu

SEQ ID NO: 674488 - RNA, 18 nt, Artificial Sequence
  Synthetic
uuaaacucuuuaguuauu

SEQ ID NO: 674489 - RNA, 19 nt, Artificial Sequence
  Synthetic
uuuaaacucuuuaguuauu

SEQ ID NO: 674490 - RNA, 20 nt, Artificial Sequence
  Synthetic
guuuaaacucuuuaguuauu

SEQ ID NO: 674491 - RNA, 21 nt, Artificial Sequence
  Synthetic
uguuuaaacucuuuaguuauu

SEQ ID NO: 674492 - RNA, 22 nt, Artificial Sequence
  Synthetic
uuguuuaaacucuuuaguuauu

SEQ ID NO: 674493 - RNA, 23 nt, Artificial Sequence
  Synthetic
uuuguuuaaacucuuuaguuauu

SEQ ID NO: 674494 - RNA, 24 nt, Artificial Sequence
  Synthetic
guuuguuuaaacucuuuaguuauu

SEQ ID NO: 674495 - RNA, 18 nt, Artificial Sequence
  Synthetic
aauaagcuaaccguuauu

SEQ ID NO: 674496 - RNA, 19 nt, Artificial Sequence
  Synthetic
uaauaagcuaaccguuauu

SEQ ID NO: 674497 - RNA, 20 nt, Artificial Sequence
  Synthetic
uuaauaagcuaaccguuauu

SEQ ID NO: 674498 - RNA, 21 nt, Artificial Sequence
  Synthetic
uuuaauaagcuaaccguuauu

SEQ ID NO: 674499 - RNA, 22 nt, Artificial Sequence
  Synthetic
guuuaauaagcuaaccguuauu

SEQ ID NO: 674500 - RNA, 23 nt, Artificial Sequence
  Synthetic
uguuuaauaagcuaaccguuauu

SEQ ID NO: 674501 - RNA, 24 nt, Artificial Sequence
  Synthetic
cuguuuaauaagcuaaccguuauu

SEQ ID NO: 674502 - RNA, 18 nt, Artificial Sequence
  Synthetic
uugguuagcacuguuauu

SEQ ID NO: 674503 - RNA, 19 nt, Artificial Sequence
  Synthetic
cuugguuagcacuguuauu

SEQ ID NO: 674504 - RNA, 20 nt, Artificial Sequence
  Synthetic
ucuugguuagcacuguuauu

SEQ ID NO: 674505 - RNA, 21 nt, Artificial Sequence
  Synthetic
uucuugguuagcacuguuauu

SEQ ID NO: 674506 - RNA, 22 nt, Artificial Sequence
  Synthetic
cuucuugguuagcacuguuauu

SEQ ID NO: 674507 - RNA, 23 nt, Artificial Sequence
  Synthetic
ucuucuugguuagcacuguuauu

SEQ ID NO: 674508 - RNA, 24 nt, Artificial Sequence
  Synthetic
cucuucuugguuagcacuguuauu

SEQ ID NO: 674509 - RNA, 18 nt, Artificial Sequence
  Synthetic
uauauaauuucuguuauu

SEQ ID NO: 674510 - RNA, 19 nt, Artificial Sequence
  Synthetic
guauauaauuucuguuauu

SEQ ID NO: 674511 - RNA, 20 nt, Artificial Sequence
  Synthetic
aguauauaauuucuguuauu

SEQ ID NO: 674512 - RNA, 21 nt, Artificial Sequence
  Synthetic
caguauauaauuucuguuauu

SEQ ID NO: 674513 - RNA, 22 nt, Artificial Sequence
  Synthetic
acaguauauaauuucuguuauu

SEQ ID NO: 674514 - RNA, 23 nt, Artificial Sequence
  Synthetic
uacaguauauaauuucuguuauu

SEQ ID NO: 674515 - RNA, 24 nt, Artificial Sequence
  Synthetic
auacaguauauaauuucuguuauu

SEQ ID NO: 674516 - RNA, 18 nt, Artificial Sequence
  Synthetic
ggucccaucauuguuauu

SEQ ID NO: 674517 - RNA, 19 nt, Artificial Sequence
  Synthetic
aggucccaucauuguuauu

SEQ ID NO: 674518 - RNA, 20 nt, Artificial Sequence
  Synthetic
aaggucccaucauuguuauu

SEQ ID NO: 674519 - RNA, 21 nt, Artificial Sequence
  Synthetic
gaaggucccaucauuguuauu

SEQ ID NO: 674520 - RNA, 22 nt, Artificial Sequence
  Synthetic
ggaaggucccaucauuguuauu

SEQ ID NO: 674521 - RNA, 23 nt, Artificial Sequence
  Synthetic
uggaaggucccaucauuguuauu

SEQ ID NO: 674522 - RNA, 24 nt, Artificial Sequence
  Synthetic
auggaaggucccaucauuguuauu

SEQ ID NO: 674523 - RNA, 18 nt, Artificial Sequence
  Synthetic
ugaaggugaaaauuuauu

SEQ ID NO: 674524 - RNA, 19 nt, Artificial Sequence
  Synthetic
uugaaggugaaaauuuauu

SEQ ID NO: 674525 - RNA, 20 nt, Artificial Sequence
  Synthetic
cuugaaggugaaaauuuauu

SEQ ID NO: 674526 - RNA, 21 nt, Artificial Sequence
  Synthetic
gcuugaaggugaaaauuuauu

SEQ ID NO: 674527 - RNA, 22 nt, Artificial Sequence
  Synthetic
agcuugaaggugaaaauuuauu

SEQ ID NO: 674528 - RNA, 23 nt, Artificial Sequence
  Synthetic
aagcuugaaggugaaaauuuauu

SEQ ID NO: 674529 - RNA, 24 nt, Artificial Sequence
  Synthetic
uaagcuugaaggugaaaauuuauu

SEQ ID NO: 674530 - RNA, 18 nt, Artificial Sequence
  Synthetic
gugcacuuaaaauuuauu

SEQ ID NO: 674531 - RNA, 19 nt, Artificial Sequence
  Synthetic
ugugcacuuaaaauuuauu

SEQ ID NO: 674532 - RNA, 20 nt, Artificial Sequence
  Synthetic
uugugcacuuaaaauuuauu

SEQ ID NO: 674533 - RNA, 21 nt, Artificial Sequence
  Synthetic
auugugcacuuaaaauuuauu

SEQ ID NO: 674534 - RNA, 22 nt, Artificial Sequence
  Synthetic
uauugugcacuuaaaauuuauu

SEQ ID NO: 674535 - RNA, 23 nt, Artificial Sequence
  Synthetic
guauugugcacuuaaaauuuauu

SEQ ID NO: 674536 - RNA, 24 nt, Artificial Sequence
  Synthetic
uguauugugcacuuaaaauuuauu

SEQ ID NO: 674537 - RNA, 18 nt, Artificial Sequence
  Synthetic
acuuuuuggaaauuuauu

SEQ ID NO: 674538 - RNA, 19 nt, Artificial Sequence
  Synthetic
uacuuuuuggaaauuuauu

SEQ ID NO: 674539 - RNA, 20 nt, Artificial Sequence
  Synthetic
cuacuuuuuggaaauuuauu

SEQ ID NO: 674540 - RNA, 21 nt, Artificial Sequence
  Synthetic
ucuacuuuuuggaaauuuauu

SEQ ID NO: 674541 - RNA, 22 nt, Artificial Sequence
  Synthetic
aucuacuuuuuggaaauuuauu

SEQ ID NO: 674542 - RNA, 23 nt, Artificial Sequence
  Synthetic
caucuacuuuuuggaaauuuauu

SEQ ID NO: 674543 - RNA, 24 nt, Artificial Sequence
  Synthetic
acaucuacuuuuuggaaauuuauu

SEQ ID NO: 674544 - RNA, 18 nt, Artificial Sequence
  Synthetic
aggaaauuuaaauuuauu

SEQ ID NO: 674545 - RNA, 19 nt, Artificial Sequence
  Synthetic
caggaaauuuaaauuuauu

SEQ ID NO: 674546 - RNA, 20 nt, Artificial Sequence
  Synthetic
acaggaaauuuaaauuuauu

SEQ ID NO: 674547 - RNA, 21 nt, Artificial Sequence
  Synthetic
uacaggaaauuuaaauuuauu

SEQ ID NO: 674548 - RNA, 22 nt, Artificial Sequence
  Synthetic
uuacaggaaauuuaaauuuauu

SEQ ID NO: 674549 - RNA, 23 nt, Artificial Sequence
  Synthetic
uuuacaggaaauuuaaauuuauu

SEQ ID NO: 674550 - RNA, 24 nt, Artificial Sequence
  Synthetic
cuuuacaggaaauuuaaauuuauu

SEQ ID NO: 674551 - RNA, 18 nt, Artificial Sequence
  Synthetic
cuaacauuugaauuuauu

SEQ ID NO: 674552 - RNA, 19 nt, Artificial Sequence
  Synthetic
gcuaacauuugaauuuauu

SEQ ID NO: 674553 - RNA, 20 nt, Artificial Sequence
  Synthetic
agcuaacauuugaauuuauu

SEQ ID NO: 674554 - RNA, 21 nt, Artificial Sequence
  Synthetic
aagcuaacauuugaauuuauu

SEQ ID NO: 674555 - RNA, 22 nt, Artificial Sequence
  Synthetic
aaagcuaacauuugaauuuauu

SEQ ID NO: 674556 - RNA, 23 nt, Artificial Sequence
  Synthetic
aaaagcuaacauuugaauuuauu

SEQ ID NO: 674557 - RNA, 24 nt, Artificial Sequence
  Synthetic
caaaagcuaacauuugaauuuauu

SEQ ID NO: 674558 - RNA, 18 nt, Artificial Sequence
  Synthetic
gaaaaggacacauuuauu

SEQ ID NO: 674559 - RNA, 19 nt, Artificial Sequence
  Synthetic
ugaaaaggacacauuuauu

SEQ ID NO: 674560 - RNA, 20 nt, Artificial Sequence
  Synthetic
cugaaaaggacacauuuauu

SEQ ID NO: 674561 - RNA, 21 nt, Artificial Sequence
  Synthetic
ucugaaaaggacacauuuauu

SEQ ID NO: 674562 - RNA, 22 nt, Artificial Sequence
  Synthetic
uucugaaaaggacacauuuauu

SEQ ID NO: 674563 - RNA, 23 nt, Artificial Sequence
  Synthetic
uuucugaaaaggacacauuuauu

SEQ ID NO: 674564 - RNA, 24 nt, Artificial Sequence
  Synthetic
cuuucugaaaaggacacauuuauu

SEQ ID NO: 674565 - RNA, 18 nt, Artificial Sequence
  Synthetic
aagcuauccacauuuauu

SEQ ID NO: 674566 - RNA, 19 nt, Artificial Sequence
  Synthetic
caagcuauccacauuuauu

SEQ ID NO: 674567 - RNA, 20 nt, Artificial Sequence
  Synthetic
ucaagcuauccacauuuauu

SEQ ID NO: 674568 - RNA, 21 nt, Artificial Sequence
  Synthetic
aucaagcuauccacauuuauu

SEQ ID NO: 674569 - RNA, 22 nt, Artificial Sequence
  Synthetic
caucaagcuauccacauuuauu

SEQ ID NO: 674570 - RNA, 23 nt, Artificial Sequence
  Synthetic
ccaucaagcuauccacauuuauu

SEQ ID NO: 674571 - RNA, 24 nt, Artificial Sequence
  Synthetic
uccaucaagcuauccacauuuauu

SEQ ID NO: 674572 - RNA, 18 nt, Artificial Sequence
  Synthetic
gauaaacaagcauuuauu

SEQ ID NO: 674573 - RNA, 19 nt, Artificial Sequence
  Synthetic
ugauaaacaagcauuuauu

SEQ ID NO: 674574 - RNA, 20 nt, Artificial Sequence
  Synthetic
uugauaaacaagcauuuauu

SEQ ID NO: 674575 - RNA, 21 nt, Artificial Sequence
  Synthetic
auugauaaacaagcauuuauu

SEQ ID NO: 674576 - RNA, 22 nt, Artificial Sequence
  Synthetic
aauugauaaacaagcauuuauu

SEQ ID NO: 674577 - RNA, 23 nt, Artificial Sequence
  Synthetic
aaauugauaaacaagcauuuauu

SEQ ID NO: 674578 - RNA, 24 nt, Artificial Sequence
  Synthetic
aaaauugauaaacaagcauuuauu

SEQ ID NO: 674579 - RNA, 18 nt, Artificial Sequence
  Synthetic
uaaggaagaucauuuauu

SEQ ID NO: 674580 - RNA, 19 nt, Artificial Sequence
  Synthetic
uuaaggaagaucauuuauu

SEQ ID NO: 674581 - RNA, 20 nt, Artificial Sequence
  Synthetic
uuuaaggaagaucauuuauu

SEQ ID NO: 674582 - RNA, 21 nt, Artificial Sequence
  Synthetic
cuuuaaggaagaucauuuauu

SEQ ID NO: 674583 - RNA, 22 nt, Artificial Sequence
  Synthetic
acuuuaaggaagaucauuuauu

SEQ ID NO: 674584 - RNA, 23 nt, Artificial Sequence
  Synthetic
uacuuuaaggaagaucauuuauu

SEQ ID NO: 674585 - RNA, 24 nt, Artificial Sequence
  Synthetic
auacuuuaaggaagaucauuuauu

SEQ ID NO: 674586 - RNA, 18 nt, Artificial Sequence
  Synthetic
auucaaaaaauauuuauu

SEQ ID NO: 674587 - RNA, 19 nt, Artificial Sequence
  Synthetic
cauucaaaaaauauuuauu

SEQ ID NO: 674588 - RNA, 20 nt, Artificial Sequence
  Synthetic
ucauucaaaaaauauuuauu

SEQ ID NO: 674589 - RNA, 21 nt, Artificial Sequence
  Synthetic
uucauucaaaaaauauuuauu

SEQ ID NO: 674590 - RNA, 22 nt, Artificial Sequence
  Synthetic
guucauucaaaaaauauuuauu

SEQ ID NO: 674591 - RNA, 23 nt, Artificial Sequence
  Synthetic
uguucauucaaaaaauauuuauu

SEQ ID NO: 674592 - RNA, 24 nt, Artificial Sequence
  Synthetic
uuguucauucaaaaaauauuuauu

SEQ ID NO: 674593 - RNA, 18 nt, Artificial Sequence
  Synthetic
aagauaaaucuauuuauu

SEQ ID NO: 674594 - RNA, 19 nt, Artificial Sequence
  Synthetic
caagauaaaucuauuuauu

SEQ ID NO: 674595 - RNA, 20 nt, Artificial Sequence
  Synthetic
ucaagauaaaucuauuuauu

SEQ ID NO: 674596 - RNA, 21 nt, Artificial Sequence
  Synthetic
cucaagauaaaucuauuuauu

SEQ ID NO: 674597 - RNA, 22 nt, Artificial Sequence
  Synthetic
ucucaagauaaaucuauuuauu

SEQ ID NO: 674598 - RNA, 23 nt, Artificial Sequence
  Synthetic
aucucaagauaaaucuauuuauu

SEQ ID NO: 674599 - RNA, 24 nt, Artificial Sequence
  Synthetic
aaucucaagauaaaucuauuuauu

SEQ ID NO: 674600 - RNA, 18 nt, Artificial Sequence
  Synthetic
uauuguauuguauuuauu

SEQ ID NO: 674601 - RNA, 19 nt, Artificial Sequence
  Synthetic
guauuguauuguauuuauu

SEQ ID NO: 674602 - RNA, 20 nt, Artificial Sequence
  Synthetic
uguauuguauuguauuuauu

SEQ ID NO: 674603 - RNA, 21 nt, Artificial Sequence
  Synthetic
uuguauuguauuguauuuauu

SEQ ID NO: 674604 - RNA, 22 nt, Artificial Sequence
  Synthetic
auuguauuguauuguauuuauu

SEQ ID NO: 674605 - RNA, 23 nt, Artificial Sequence
  Synthetic
uauuguauuguauuguauuuauu

SEQ ID NO: 674606 - RNA, 24 nt, Artificial Sequence
  Synthetic
uuauuguauuguauuguauuuauu

SEQ ID NO: 674607 - RNA, 18 nt, Artificial Sequence
  Synthetic
gauaacucauuauuuauu

SEQ ID NO: 674608 - RNA, 19 nt, Artificial Sequence
  Synthetic
ugauaacucauuauuuauu

SEQ ID NO: 674609 - RNA, 20 nt, Artificial Sequence
  Synthetic
gugauaacucauuauuuauu

SEQ ID NO: 674610 - RNA, 21 nt, Artificial Sequence
  Synthetic
agugauaacucauuauuuauu

SEQ ID NO: 674611 - RNA, 22 nt, Artificial Sequence
  Synthetic
gagugauaacucauuauuuauu

SEQ ID NO: 674612 - RNA, 23 nt, Artificial Sequence
  Synthetic
ggagugauaacucauuauuuauu

SEQ ID NO: 674613 - RNA, 24 nt, Artificial Sequence
  Synthetic
uggagugauaacucauuauuuauu

SEQ ID NO: 674614 - RNA, 18 nt, Artificial Sequence
  Synthetic
agcuucuauuuauuuauu

SEQ ID NO: 674615 - RNA, 19 nt, Artificial Sequence
  Synthetic
aagcuucuauuuauuuauu

SEQ ID NO: 674616 - RNA, 20 nt, Artificial Sequence
  Synthetic
aaagcuucuauuuauuuauu

SEQ ID NO: 674617 - RNA, 21 nt, Artificial Sequence
  Synthetic
uaaagcuucuauuuauuuauu

SEQ ID NO: 674618 - RNA, 22 nt, Artificial Sequence
  Synthetic
uuaaagcuucuauuuauuuauu

SEQ ID NO: 674619 - RNA, 23 nt, Artificial Sequence
  Synthetic
uuuaaagcuucuauuuauuuauu

SEQ ID NO: 674620 - RNA, 24 nt, Artificial Sequence
  Synthetic
uuuuaaagcuucuauuuauuuauu

SEQ ID NO: 674621 - RNA, 18 nt, Artificial Sequence
  Synthetic
auuauuuauuuauuuauu

SEQ ID NO: 674622 - RNA, 19 nt, Artificial Sequence
  Synthetic
cauuauuuauuuauuuauu

SEQ ID NO: 674623 - RNA, 20 nt, Artificial Sequence
  Synthetic
acauuauuuauuuauuuauu

SEQ ID NO: 674624 - RNA, 21 nt, Artificial Sequence
  Synthetic
cacauuauuuauuuauuuauu

SEQ ID NO: 674625 - RNA, 22 nt, Artificial Sequence
  Synthetic
ccacauuauuuauuuauuuauu

SEQ ID NO: 674626 - RNA, 23 nt, Artificial Sequence
  Synthetic
gccacauuauuuauuuauuuauu

SEQ ID NO: 674627 - RNA, 24 nt, Artificial Sequence
  Synthetic
ugccacauuauuuauuuauuuauu

SEQ ID NO: 674628 - RNA, 19 nt, Artificial Sequence
  Synthetic
uauuauuuauuuauuuauu

SEQ ID NO: 674629 - RNA, 20 nt, Artificial Sequence
  Synthetic
uuauuauuuauuuauuuauu

SEQ ID NO: 674630 - RNA, 21 nt, Artificial Sequence
  Synthetic
uuuauuauuuauuuauuuauu

SEQ ID NO: 674631 - RNA, 22 nt, Artificial Sequence
  Synthetic
auuuauuauuuauuuauuuauu

SEQ ID NO: 674632 - RNA, 23 nt, Artificial Sequence
  Synthetic
uauuuauuauuuauuuauuuauu

SEQ ID NO: 674633 - RNA, 24 nt, Artificial Sequence
  Synthetic
uuauuuauuauuuauuuauuuauu

SEQ ID NO: 674634 - RNA, 18 nt, Artificial Sequence
  Synthetic
cuggucaugcacuuuauu

SEQ ID NO: 674635 - RNA, 19 nt, Artificial Sequence
  Synthetic
ccuggucaugcacuuuauu

SEQ ID NO: 674636 - RNA, 20 nt, Artificial Sequence
  Synthetic
uccuggucaugcacuuuauu

SEQ ID NO: 674637 - RNA, 21 nt, Artificial Sequence
  Synthetic
uuccuggucaugcacuuuauu

SEQ ID NO: 674638 - RNA, 22 nt, Artificial Sequence
  Synthetic
uuuccuggucaugcacuuuauu

SEQ ID NO: 674639 - RNA, 23 nt, Artificial Sequence
  Synthetic
cuuuccuggucaugcacuuuauu

SEQ ID NO: 674640 - RNA, 24 nt, Artificial Sequence
  Synthetic
acuuuccuggucaugcacuuuauu

SEQ ID NO: 674641 - RNA, 18 nt, Artificial Sequence
  Synthetic
uucaucgaucccuuuauu

SEQ ID NO: 674642 - RNA, 19 nt, Artificial Sequence
  Synthetic
auucaucgaucccuuuauu

SEQ ID NO: 674643 - RNA, 20 nt, Artificial Sequence
  Synthetic
uauucaucgaucccuuuauu

SEQ ID NO: 674644 - RNA, 21 nt, Artificial Sequence
  Synthetic
auauucaucgaucccuuuauu

SEQ ID NO: 674645 - RNA, 22 nt, Artificial Sequence
  Synthetic
aauauucaucgaucccuuuauu

SEQ ID NO: 674646 - RNA, 23 nt, Artificial Sequence
  Synthetic
aaauauucaucgaucccuuuauu

SEQ ID NO: 674647 - RNA, 24 nt, Artificial Sequence
  Synthetic
uaaauauucaucgaucccuuuauu

SEQ ID NO: 674648 - RNA, 18 nt, Artificial Sequence
  Synthetic
uaauuucuauucuuuauu

SEQ ID NO: 674649 - RNA, 19 nt, Artificial Sequence
  Synthetic
guaauuucuauucuuuauu

SEQ ID NO: 674650 - RNA, 20 nt, Artificial Sequence
  Synthetic
uguaauuucuauucuuuauu

SEQ ID NO: 674651 - RNA, 21 nt, Artificial Sequence
  Synthetic
cuguaauuucuauucuuuauu

SEQ ID NO: 674652 - RNA, 22 nt, Artificial Sequence
  Synthetic
acuguaauuucuauucuuuauu

SEQ ID NO: 674653 - RNA, 23 nt, Artificial Sequence
  Synthetic
cacuguaauuucuauucuuuauu

SEQ ID NO: 674654 - RNA, 24 nt, Artificial Sequence
  Synthetic
ucacuguaauuucuauucuuuauu

SEQ ID NO: 674655 - RNA, 18 nt, Artificial Sequence
  Synthetic
aaaaaaaaaaaguuuauu

SEQ ID NO: 674656 - RNA, 19 nt, Artificial Sequence
  Synthetic
aaaaaaaaaaaaguuuauu

SEQ ID NO: 674657 - RNA, 20 nt, Artificial Sequence
  Synthetic
caaaaaaaaaaaaguuuauu

SEQ ID NO: 674658 - RNA, 21 nt, Artificial Sequence
  Synthetic
ccaaaaaaaaaaaaguuuauu

SEQ ID NO: 674659 - RNA, 22 nt, Artificial Sequence
  Synthetic
gccaaaaaaaaaaaaguuuauu

SEQ ID NO: 674660 - RNA, 23 nt, Artificial Sequence
  Synthetic
ugccaaaaaaaaaaaaguuuauu

SEQ ID NO: 674661 - RNA, 24 nt, Artificial Sequence
  Synthetic
augccaaaaaaaaaaaaguuuauu

SEQ ID NO: 674662 - RNA, 18 nt, Artificial Sequence
  Synthetic
uuucacaauuaguuuauu

SEQ ID NO: 674663 - RNA, 19 nt, Artificial Sequence
  Synthetic
uuuucacaauuaguuuauu

SEQ ID NO: 674664 - RNA, 20 nt, Artificial Sequence
  Synthetic
uuuuucacaauuaguuuauu

SEQ ID NO: 674665 - RNA, 21 nt, Artificial Sequence
  Synthetic
cuuuuucacaauuaguuuauu

SEQ ID NO: 674666 - RNA, 22 nt, Artificial Sequence
  Synthetic
ccuuuuucacaauuaguuuauu

SEQ ID NO: 674667 - RNA, 23 nt, Artificial Sequence
  Synthetic
gccuuuuucacaauuaguuuauu

SEQ ID NO: 674668 - RNA, 24 nt, Artificial Sequence
  Synthetic
ugccuuuuucacaauuaguuuauu

SEQ ID NO: 674669 - RNA, 18 nt, Artificial Sequence
  Synthetic
cuucucugaggguuuauu

SEQ ID NO: 674670 - RNA, 19 nt, Artificial Sequence
  Synthetic
ucuucucugaggguuuauu

SEQ ID NO: 674671 - RNA, 20 nt, Artificial Sequence
  Synthetic
aucuucucugaggguuuauu

SEQ ID NO: 674672 - RNA, 21 nt, Artificial Sequence
  Synthetic
gaucuucucugaggguuuauu

SEQ ID NO: 674673 - RNA, 22 nt, Artificial Sequence
  Synthetic
agaucuucucugaggguuuauu

SEQ ID NO: 674674 - RNA, 23 nt, Artificial Sequence
  Synthetic
aagaucuucucugaggguuuauu

SEQ ID NO: 674675 - RNA, 24 nt, Artificial Sequence
  Synthetic
aaagaucuucucugaggguuuauu

SEQ ID NO: 674676 - RNA, 18 nt, Artificial Sequence
  Synthetic
aaaccccuacuguuuauu

SEQ ID NO: 674677 - RNA, 19 nt, Artificial Sequence
  Synthetic
aaaaccccuacuguuuauu

SEQ ID NO: 674678 - RNA, 20 nt, Artificial Sequence
  Synthetic
uaaaaccccuacuguuuauu

SEQ ID NO: 674679 - RNA, 21 nt, Artificial Sequence
  Synthetic
uuaaaaccccuacuguuuauu

SEQ ID NO: 674680 - RNA, 22 nt, Artificial Sequence
  Synthetic
guuaaaaccccuacuguuuauu

SEQ ID NO: 674681 - RNA, 23 nt, Artificial Sequence
  Synthetic
gguuaaaaccccuacuguuuauu

SEQ ID NO: 674682 - RNA, 24 nt, Artificial Sequence
  Synthetic
agguuaaaaccccuacuguuuauu

SEQ ID NO: 674683 - RNA, 18 nt, Artificial Sequence
  Synthetic
uauccaacucuguuuauu

SEQ ID NO: 674684 - RNA, 19 nt, Artificial Sequence
  Synthetic
auauccaacucuguuuauu

SEQ ID NO: 674685 - RNA, 20 nt, Artificial Sequence
  Synthetic
cauauccaacucuguuuauu

SEQ ID NO: 674686 - RNA, 21 nt, Artificial Sequence
  Synthetic
acauauccaacucuguuuauu

SEQ ID NO: 674687 - RNA, 22 nt, Artificial Sequence
  Synthetic
aacauauccaacucuguuuauu

SEQ ID NO: 674688 - RNA, 23 nt, Artificial Sequence
  Synthetic
aaacauauccaacucuguuuauu

SEQ ID NO: 674689 - RNA, 24 nt, Artificial Sequence
  Synthetic
gaaacauauccaacucuguuuauu

SEQ ID NO: 674690 - RNA, 18 nt, Artificial Sequence
  Synthetic
acacaaaggaauuuuauu

SEQ ID NO: 674691 - RNA, 19 nt, Artificial Sequence
  Synthetic
gacacaaaggaauuuuauu

SEQ ID NO: 674692 - RNA, 20 nt, Artificial Sequence
  Synthetic
ugacacaaaggaauuuuauu

SEQ ID NO: 674693 - RNA, 21 nt, Artificial Sequence
  Synthetic
uugacacaaaggaauuuuauu

SEQ ID NO: 674694 - RNA, 22 nt, Artificial Sequence
  Synthetic
uuugacacaaaggaauuuuauu

SEQ ID NO: 674695 - RNA, 23 nt, Artificial Sequence
  Synthetic
cuuugacacaaaggaauuuuauu

SEQ ID NO: 674696 - RNA, 24 nt, Artificial Sequence
  Synthetic
acuuugacacaaaggaauuuuauu

SEQ ID NO: 674697 - RNA, 18 nt, Artificial Sequence
  Synthetic
ugucucaauuauuuuauu

SEQ ID NO: 674698 - RNA, 19 nt, Artificial Sequence
  Synthetic
augucucaauuauuuuauu

SEQ ID NO: 674699 - RNA, 20 nt, Artificial Sequence
  Synthetic
uaugucucaauuauuuuauu

SEQ ID NO: 674700 - RNA, 21 nt, Artificial Sequence
  Synthetic
uuaugucucaauuauuuuauu

SEQ ID NO: 674701 - RNA, 22 nt, Artificial Sequence
  Synthetic
cuuaugucucaauuauuuuauu

SEQ ID NO: 674702 - RNA, 23 nt, Artificial Sequence
  Synthetic
ucuuaugucucaauuauuuuauu

SEQ ID NO: 674703 - RNA, 24 nt, Artificial Sequence
  Synthetic
cucuuaugucucaauuauuuuauu

SEQ ID NO: 674704 - RNA, 18 nt, Artificial Sequence
  Synthetic
uuguccccuucuuuuauu

SEQ ID NO: 674705 - RNA, 19 nt, Artificial Sequence
  Synthetic
auuguccccuucuuuuauu

SEQ ID NO: 674706 - RNA, 20 nt, Artificial Sequence
  Synthetic
cauuguccccuucuuuuauu

SEQ ID NO: 674707 - RNA, 21 nt, Artificial Sequence
  Synthetic
ucauuguccccuucuuuuauu

SEQ ID NO: 674708 - RNA, 22 nt, Artificial Sequence
  Synthetic
gucauuguccccuucuuuuauu

SEQ ID NO: 674709 - RNA, 23 nt, Artificial Sequence
  Synthetic
agucauuguccccuucuuuuauu

SEQ ID NO: 674710 - RNA, 24 nt, Artificial Sequence
  Synthetic
uagucauuguccccuucuuuuauu

SEQ ID NO: 674711 - RNA, 18 nt, Artificial Sequence
  Synthetic
agcaauucauguuuuauu

SEQ ID NO: 674712 - RNA, 19 nt, Artificial Sequence
  Synthetic
uagcaauucauguuuuauu

SEQ ID NO: 674713 - RNA, 20 nt, Artificial Sequence
  Synthetic
guagcaauucauguuuuauu

SEQ ID NO: 674714 - RNA, 21 nt, Artificial Sequence
  Synthetic
gguagcaauucauguuuuauu

SEQ ID NO: 674715 - RNA, 22 nt, Artificial Sequence
  Synthetic
ugguagcaauucauguuuuauu

SEQ ID NO: 674716 - RNA, 23 nt, Artificial Sequence
  Synthetic
cugguagcaauucauguuuuauu

SEQ ID NO: 674717 - RNA, 24 nt, Artificial Sequence
  Synthetic
ucugguagcaauucauguuuuauu

SEQ ID NO: 674718 - RNA, 18 nt, Artificial Sequence
  Synthetic
uuuuuugaaauuuuuauu

SEQ ID NO: 674719 - RNA, 19 nt, Artificial Sequence
  Synthetic
uuuuuuugaaauuuuuauu

SEQ ID NO: 674720 - RNA, 20 nt, Artificial Sequence
  Synthetic
cuuuuuuugaaauuuuuauu

SEQ ID NO: 674721 - RNA, 21 nt, Artificial Sequence
  Synthetic
ucuuuuuuugaaauuuuuauu

SEQ ID NO: 674722 - RNA, 22 nt, Artificial Sequence
  Synthetic
uucuuuuuuugaaauuuuuauu

SEQ ID NO: 674723 - RNA, 23 nt, Artificial Sequence
  Synthetic
uuucuuuuuuugaaauuuuuauu

SEQ ID NO: 674724 - RNA, 24 nt, Artificial Sequence
  Synthetic
auuucuuuuuuugaaauuuuuauu

SEQ ID NO: 674725 - RNA, 18 nt, Artificial Sequence
  Synthetic
gagauuacuauuuuuauu

SEQ ID NO: 674726 - RNA, 19 nt, Artificial Sequence
  Synthetic
agagauuacuauuuuuauu

SEQ ID NO: 674727 - RNA, 20 nt, Artificial Sequence
  Synthetic
cagagauuacuauuuuuauu

SEQ ID NO: 674728 - RNA, 21 nt, Artificial Sequence
  Synthetic
acagagauuacuauuuuuauu

SEQ ID NO: 674729 - RNA, 22 nt, Artificial Sequence
  Synthetic
gacagagauuacuauuuuuauu

SEQ ID NO: 674730 - RNA, 23 nt, Artificial Sequence
  Synthetic
ggacagagauuacuauuuuuauu

SEQ ID NO: 674731 - RNA, 24 nt, Artificial Sequence
  Synthetic
uggacagagauuacuauuuuuauu

SEQ ID NO: 674732 - RNA, 18 nt, Artificial Sequence
  Synthetic
ucuggaauuauuuuuauu

SEQ ID NO: 674733 - RNA, 19 nt, Artificial Sequence
  Synthetic
cucuggaauuauuuuuauu

SEQ ID NO: 674734 - RNA, 20 nt, Artificial Sequence
  Synthetic
ucucuggaauuauuuuuauu

SEQ ID NO: 674735 - RNA, 21 nt, Artificial Sequence
  Synthetic
aucucuggaauuauuuuuauu

SEQ ID NO: 674736 - RNA, 22 nt, Artificial Sequence
  Synthetic
uaucucuggaauuauuuuuauu

SEQ ID NO: 674737 - RNA, 23 nt, Artificial Sequence
  Synthetic
auaucucuggaauuauuuuuauu

SEQ ID NO: 674738 - RNA, 24 nt, Artificial Sequence
  Synthetic
aauaucucuggaauuauuuuuauu

SEQ ID NO: 674739 - RNA, 18 nt, Artificial Sequence
  Synthetic
uuauagguuauuuuuauu

SEQ ID NO: 674740 - RNA, 19 nt, Artificial Sequence
  Synthetic
auuauagguuauuuuuauu

SEQ ID NO: 674741 - RNA, 20 nt, Artificial Sequence
  Synthetic
gauuauagguuauuuuuauu

SEQ ID NO: 674742 - RNA, 21 nt, Artificial Sequence
  Synthetic
ugauuauagguuauuuuuauu

SEQ ID NO: 674743 - RNA, 22 nt, Artificial Sequence
  Synthetic
augauuauagguuauuuuuauu

SEQ ID NO: 674744 - RNA, 23 nt, Artificial Sequence
  Synthetic
aaugauuauagguuauuuuuauu

SEQ ID NO: 674745 - RNA, 24 nt, Artificial Sequence
  Synthetic
gaaugauuauagguuauuuuuauu

SEQ ID NO: 674746 - RNA, 18 nt, Artificial Sequence
  Synthetic
auccuauaauuuuuuauu

SEQ ID NO: 674747 - RNA, 19 nt, Artificial Sequence
  Synthetic
uauccuauaauuuuuuauu

SEQ ID NO: 674748 - RNA, 20 nt, Artificial Sequence
  Synthetic
guauccuauaauuuuuuauu

SEQ ID NO: 674749 - RNA, 21 nt, Artificial Sequence
  Synthetic
gguauccuauaauuuuuuauu

SEQ ID NO: 674750 - RNA, 22 nt, Artificial Sequence
  Synthetic
ugguauccuauaauuuuuuauu

SEQ ID NO: 674751 - RNA, 23 nt, Artificial Sequence
  Synthetic
uugguauccuauaauuuuuuauu

SEQ ID NO: 674752 - RNA, 24 nt, Artificial Sequence
  Synthetic
guugguauccuauaauuuuuuauu

SEQ ID NO: 674753 - RNA, 18 nt, Artificial Sequence
  Synthetic
cacaacauagaaaaacuu

SEQ ID NO: 674754 - RNA, 19 nt, Artificial Sequence
  Synthetic
acacaacauagaaaaacuu

SEQ ID NO: 674755 - RNA, 20 nt, Artificial Sequence
  Synthetic
aacacaacauagaaaaacuu

SEQ ID NO: 674756 - RNA, 21 nt, Artificial Sequence
  Synthetic
aaacacaacauagaaaaacuu

SEQ ID NO: 674757 - RNA, 22 nt, Artificial Sequence
  Synthetic
aaaacacaacauagaaaaacuu

SEQ ID NO: 674758 - RNA, 23 nt, Artificial Sequence
  Synthetic
gaaaacacaacauagaaaaacuu

SEQ ID NO: 674759 - RNA, 24 nt, Artificial Sequence
  Synthetic
ugaaaacacaacauagaaaaacuu

SEQ ID NO: 674760 - RNA, 18 nt, Artificial Sequence
  Synthetic
gcuaauuauacaaaacuu

SEQ ID NO: 674761 - RNA, 19 nt, Artificial Sequence
  Synthetic
ugcuaauuauacaaaacuu

SEQ ID NO: 674762 - RNA, 20 nt, Artificial Sequence
  Synthetic
augcuaauuauacaaaacuu

SEQ ID NO: 674763 - RNA, 21 nt, Artificial Sequence
  Synthetic
gaugcuaauuauacaaaacuu

SEQ ID NO: 674764 - RNA, 22 nt, Artificial Sequence
  Synthetic
ggaugcuaauuauacaaaacuu

SEQ ID NO: 674765 - RNA, 23 nt, Artificial Sequence
  Synthetic
uggaugcuaauuauacaaaacuu

SEQ ID NO: 674766 - RNA, 24 nt, Artificial Sequence
  Synthetic
uuggaugcuaauuauacaaaacuu

SEQ ID NO: 674767 - RNA, 18 nt, Artificial Sequence
  Synthetic
gaauuagaaagaaaacuu

SEQ ID NO: 674768 - RNA, 19 nt, Artificial Sequence
  Synthetic
ugaauuagaaagaaaacuu

SEQ ID NO: 674769 - RNA, 20 nt, Artificial Sequence
  Synthetic
uugaauuagaaagaaaacuu

SEQ ID NO: 674770 - RNA, 21 nt, Artificial Sequence
  Synthetic
auugaauuagaaagaaaacuu

SEQ ID NO: 674771 - RNA, 22 nt, Artificial Sequence
  Synthetic
cauugaauuagaaagaaaacuu

SEQ ID NO: 674772 - RNA, 23 nt, Artificial Sequence
  Synthetic
acauugaauuagaaagaaaacuu

SEQ ID NO: 674773 - RNA, 24 nt, Artificial Sequence
  Synthetic
cacauugaauuagaaagaaaacuu

SEQ ID NO: 674774 - RNA, 18 nt, Artificial Sequence
  Synthetic
caaaguuaaagaaaacuu

SEQ ID NO: 674775 - RNA, 19 nt, Artificial Sequence
  Synthetic
ccaaaguuaaagaaaacuu

SEQ ID NO: 674776 - RNA, 20 nt, Artificial Sequence
  Synthetic
gccaaaguuaaagaaaacuu

SEQ ID NO: 674777 - RNA, 21 nt, Artificial Sequence
  Synthetic
agccaaaguuaaagaaaacuu

SEQ ID NO: 674778 - RNA, 22 nt, Artificial Sequence
  Synthetic
aagccaaaguuaaagaaaacuu

SEQ ID NO: 674779 - RNA, 23 nt, Artificial Sequence
  Synthetic
gaagccaaaguuaaagaaaacuu

SEQ ID NO: 674780 - RNA, 24 nt, Artificial Sequence
  Synthetic
agaagccaaaguuaaagaaaacuu

SEQ ID NO: 674781 - RNA, 18 nt, Artificial Sequence
  Synthetic
acaauaagaagaaaacuu

SEQ ID NO: 674782 - RNA, 19 nt, Artificial Sequence
  Synthetic
uacaauaagaagaaaacuu

SEQ ID NO: 674783 - RNA, 20 nt, Artificial Sequence
  Synthetic
auacaauaagaagaaaacuu

SEQ ID NO: 674784 - RNA, 21 nt, Artificial Sequence
  Synthetic
aauacaauaagaagaaaacuu

SEQ ID NO: 674785 - RNA, 22 nt, Artificial Sequence
  Synthetic
uaauacaauaagaagaaaacuu

SEQ ID NO: 674786 - RNA, 23 nt, Artificial Sequence
  Synthetic
uuaauacaauaagaagaaaacuu

SEQ ID NO: 674787 - RNA, 24 nt, Artificial Sequence
  Synthetic
auuaauacaauaagaagaaaacuu

SEQ ID NO: 674788 - RNA, 18 nt, Artificial Sequence
  Synthetic
aaaaguaauagaaaacuu

SEQ ID NO: 674789 - RNA, 19 nt, Artificial Sequence
  Synthetic
aaaaaguaauagaaaacuu

SEQ ID NO: 674790 - RNA, 20 nt, Artificial Sequence
  Synthetic
gaaaaaguaauagaaaacuu

SEQ ID NO: 674791 - RNA, 21 nt, Artificial Sequence
  Synthetic
ggaaaaaguaauagaaaacuu

SEQ ID NO: 674792 - RNA, 22 nt, Artificial Sequence
  Synthetic
aggaaaaaguaauagaaaacuu

SEQ ID NO: 674793 - RNA, 23 nt, Artificial Sequence
  Synthetic
caggaaaaaguaauagaaaacuu

SEQ ID NO: 674794 - RNA, 24 nt, Artificial Sequence
  Synthetic
acaggaaaaaguaauagaaaacuu

SEQ ID NO: 674795 - RNA, 18 nt, Artificial Sequence
  Synthetic
auggaccauugaaaacuu

SEQ ID NO: 674796 - RNA, 19 nt, Artificial Sequence
  Synthetic
uauggaccauugaaaacuu

SEQ ID NO: 674797 - RNA, 20 nt, Artificial Sequence
  Synthetic
uuauggaccauugaaaacuu

SEQ ID NO: 674798 - RNA, 21 nt, Artificial Sequence
  Synthetic
cuuauggaccauugaaaacuu

SEQ ID NO: 674799 - RNA, 22 nt, Artificial Sequence
  Synthetic
ccuuauggaccauugaaaacuu

SEQ ID NO: 674800 - RNA, 23 nt, Artificial Sequence
  Synthetic
uccuuauggaccauugaaaacuu

SEQ ID NO: 674801 - RNA, 24 nt, Artificial Sequence
  Synthetic
uuccuuauggaccauugaaaacuu

SEQ ID NO: 674802 - RNA, 18 nt, Artificial Sequence
  Synthetic
uguuguuaaauaaaacuu

SEQ ID NO: 674803 - RNA, 19 nt, Artificial Sequence
  Synthetic
cuguuguuaaauaaaacuu

SEQ ID NO: 674804 - RNA, 20 nt, Artificial Sequence
  Synthetic
acuguuguuaaauaaaacuu

SEQ ID NO: 674805 - RNA, 21 nt, Artificial Sequence
  Synthetic
aacuguuguuaaauaaaacuu

SEQ ID NO: 674806 - RNA, 22 nt, Artificial Sequence
  Synthetic
caacuguuguuaaauaaaacuu

SEQ ID NO: 674807 - RNA, 23 nt, Artificial Sequence
  Synthetic
acaacuguuguuaaauaaaacuu

SEQ ID NO: 674808 - RNA, 24 nt, Artificial Sequence
  Synthetic
uacaacuguuguuaaauaaaacuu

SEQ ID NO: 674809 - RNA, 18 nt, Artificial Sequence
  Synthetic
aagccagggugcaaacuu

SEQ ID NO: 674810 - RNA, 19 nt, Artificial Sequence
  Synthetic
gaagccagggugcaaacuu

SEQ ID NO: 674811 - RNA, 20 nt, Artificial Sequence
  Synthetic
ggaagccagggugcaaacuu

SEQ ID NO: 674812 - RNA, 21 nt, Artificial Sequence
  Synthetic
gggaagccagggugcaaacuu

SEQ ID NO: 674813 - RNA, 22 nt, Artificial Sequence
  Synthetic
ugggaagccagggugcaaacuu

SEQ ID NO: 674814 - RNA, 23 nt, Artificial Sequence
  Synthetic
cugggaagccagggugcaaacuu

SEQ ID NO: 674815 - RNA, 24 nt, Artificial Sequence
  Synthetic
ucugggaagccagggugcaaacuu

SEQ ID NO: 674816 - RNA, 18 nt, Artificial Sequence
  Synthetic
uccaaggauaucaaacuu

SEQ ID NO: 674817 - RNA, 19 nt, Artificial Sequence
  Synthetic
uuccaaggauaucaaacuu

SEQ ID NO: 674818 - RNA, 20 nt, Artificial Sequence
  Synthetic
auuccaaggauaucaaacuu

SEQ ID NO: 674819 - RNA, 21 nt, Artificial Sequence
  Synthetic
gauuccaaggauaucaaacuu

SEQ ID NO: 674820 - RNA, 22 nt, Artificial Sequence
  Synthetic
ugauuccaaggauaucaaacuu

SEQ ID NO: 674821 - RNA, 23 nt, Artificial Sequence
  Synthetic
augauuccaaggauaucaaacuu

SEQ ID NO: 674822 - RNA, 24 nt, Artificial Sequence
  Synthetic
aaugauuccaaggauaucaaacuu

SEQ ID NO: 674823 - RNA, 18 nt, Artificial Sequence
  Synthetic
caggcuagacucaaacuu

SEQ ID NO: 674824 - RNA, 19 nt, Artificial Sequence
  Synthetic
ccaggcuagacucaaacuu

SEQ ID NO: 674825 - RNA, 20 nt, Artificial Sequence
  Synthetic
gccaggcuagacucaaacuu

SEQ ID NO: 674826 - RNA, 21 nt, Artificial Sequence
  Synthetic
ggccaggcuagacucaaacuu

SEQ ID NO: 674827 - RNA, 22 nt, Artificial Sequence
  Synthetic
aggccaggcuagacucaaacuu

SEQ ID NO: 674828 - RNA, 23 nt, Artificial Sequence
  Synthetic
uaggccaggcuagacucaaacuu

SEQ ID NO: 674829 - RNA, 24 nt, Artificial Sequence
  Synthetic
guaggccaggcuagacucaaacuu

SEQ ID NO: 674830 - RNA, 18 nt, Artificial Sequence
  Synthetic
gaaaucgaucucaaacuu

SEQ ID NO: 674831 - RNA, 19 nt, Artificial Sequence
  Synthetic
agaaaucgaucucaaacuu

SEQ ID NO: 674832 - RNA, 20 nt, Artificial Sequence
  Synthetic
uagaaaucgaucucaaacuu

SEQ ID NO: 674833 - RNA, 21 nt, Artificial Sequence
  Synthetic
guagaaaucgaucucaaacuu

SEQ ID NO: 674834 - RNA, 22 nt, Artificial Sequence
  Synthetic
uguagaaaucgaucucaaacuu

SEQ ID NO: 674835 - RNA, 23 nt, Artificial Sequence
  Synthetic
uuguagaaaucgaucucaaacuu

SEQ ID NO: 674836 - RNA, 24 nt, Artificial Sequence
  Synthetic
cuuguagaaaucgaucucaaacuu

SEQ ID NO: 674837 - RNA, 18 nt, Artificial Sequence
  Synthetic
cagacuggucucaaacuu

SEQ ID NO: 674838 - RNA, 19 nt, Artificial Sequence
  Synthetic
ccagacuggucucaaacuu

SEQ ID NO: 674839 - RNA, 20 nt, Artificial Sequence
  Synthetic
cccagacuggucucaaacuu

SEQ ID NO: 674840 - RNA, 21 nt, Artificial Sequence
  Synthetic
ucccagacuggucucaaacuu

SEQ ID NO: 674841 - RNA, 22 nt, Artificial Sequence
  Synthetic
uucccagacuggucucaaacuu

SEQ ID NO: 674842 - RNA, 23 nt, Artificial Sequence
  Synthetic
uuucccagacuggucucaaacuu

SEQ ID NO: 674843 - RNA, 24 nt, Artificial Sequence
  Synthetic
guuucccagacuggucucaaacuu

SEQ ID NO: 674844 - RNA, 18 nt, Artificial Sequence
  Synthetic
cucgcuugucucaaacuu

SEQ ID NO: 674845 - RNA, 19 nt, Artificial Sequence
  Synthetic
acucgcuugucucaaacuu

SEQ ID NO: 674846 - RNA, 20 nt, Artificial Sequence
  Synthetic
gacucgcuugucucaaacuu

SEQ ID NO: 674847 - RNA, 21 nt, Artificial Sequence
  Synthetic
ggacucgcuugucucaaacuu

SEQ ID NO: 674848 - RNA, 22 nt, Artificial Sequence
  Synthetic
uggacucgcuugucucaaacuu

SEQ ID NO: 674849 - RNA, 23 nt, Artificial Sequence
  Synthetic
auggacucgcuugucucaaacuu

SEQ ID NO: 674850 - RNA, 24 nt, Artificial Sequence
  Synthetic
cauggacucgcuugucucaaacuu

SEQ ID NO: 674851 - RNA, 18 nt, Artificial Sequence
  Synthetic
aaauaaaagcagaaacuu

SEQ ID NO: 674852 - RNA, 19 nt, Artificial Sequence
  Synthetic
uaaauaaaagcagaaacuu

SEQ ID NO: 674853 - RNA, 20 nt, Artificial Sequence
  Synthetic
cuaaauaaaagcagaaacuu

SEQ ID NO: 674854 - RNA, 21 nt, Artificial Sequence
  Synthetic
ucuaaauaaaagcagaaacuu

SEQ ID NO: 674855 - RNA, 22 nt, Artificial Sequence
  Synthetic
gucuaaauaaaagcagaaacuu

SEQ ID NO: 674856 - RNA, 23 nt, Artificial Sequence
  Synthetic
ugucuaaauaaaagcagaaacuu

SEQ ID NO: 674857 - RNA, 24 nt, Artificial Sequence
  Synthetic
uugucuaaauaaaagcagaaacuu

SEQ ID NO: 674858 - RNA, 18 nt, Artificial Sequence
  Synthetic
uuguaauuugagaaacuu

SEQ ID NO: 674859 - RNA, 19 nt, Artificial Sequence
  Synthetic
cuuguaauuugagaaacuu

SEQ ID NO: 674860 - RNA, 20 nt, Artificial Sequence
  Synthetic
ucuuguaauuugagaaacuu

SEQ ID NO: 674861 - RNA, 21 nt, Artificial Sequence
  Synthetic
aucuuguaauuugagaaacuu

SEQ ID NO: 674862 - RNA, 22 nt, Artificial Sequence
  Synthetic
caucuuguaauuugagaaacuu

SEQ ID NO: 674863 - RNA, 23 nt, Artificial Sequence
  Synthetic
ccaucuuguaauuugagaaacuu

SEQ ID NO: 674864 - RNA, 24 nt, Artificial Sequence
  Synthetic
accaucuuguaauuugagaaacuu

SEQ ID NO: 674865 - RNA, 18 nt, Artificial Sequence
  Synthetic
ccuuuaacauagaaacuu

SEQ ID NO: 674866 - RNA, 19 nt, Artificial Sequence
  Synthetic
accuuuaacauagaaacuu

SEQ ID NO: 674867 - RNA, 20 nt, Artificial Sequence
  Synthetic
caccuuuaacauagaaacuu

SEQ ID NO: 674868 - RNA, 21 nt, Artificial Sequence
  Synthetic
ucaccuuuaacauagaaacuu

SEQ ID NO: 674869 - RNA, 22 nt, Artificial Sequence
  Synthetic
aucaccuuuaacauagaaacuu

SEQ ID NO: 674870 - RNA, 23 nt, Artificial Sequence
  Synthetic
gaucaccuuuaacauagaaacuu

SEQ ID NO: 674871 - RNA, 24 nt, Artificial Sequence
  Synthetic
ugaucaccuuuaacauagaaacuu

SEQ ID NO: 674872 - RNA, 18 nt, Artificial Sequence
  Synthetic
cccagaggauagaaacuu

SEQ ID NO: 674873 - RNA, 19 nt, Artificial Sequence
  Synthetic
gcccagaggauagaaacuu

SEQ ID NO: 674874 - RNA, 20 nt, Artificial Sequence
  Synthetic
ugcccagaggauagaaacuu

SEQ ID NO: 674875 - RNA, 21 nt, Artificial Sequence
  Synthetic
cugcccagaggauagaaacuu

SEQ ID NO: 674876 - RNA, 22 nt, Artificial Sequence
  Synthetic
acugcccagaggauagaaacuu

SEQ ID NO: 674877 - RNA, 23 nt, Artificial Sequence
  Synthetic
uacugcccagaggauagaaacuu

SEQ ID NO: 674878 - RNA, 24 nt, Artificial Sequence
  Synthetic
cuacugcccagaggauagaaacuu

SEQ ID NO: 674879 - RNA, 18 nt, Artificial Sequence
  Synthetic
aaaccagacaggaaacuu

SEQ ID NO: 674880 - RNA, 19 nt, Artificial Sequence
  Synthetic
aaaaccagacaggaaacuu

SEQ ID NO: 674881 - RNA, 20 nt, Artificial Sequence
  Synthetic
caaaaccagacaggaaacuu

SEQ ID NO: 674882 - RNA, 21 nt, Artificial Sequence
  Synthetic
gcaaaaccagacaggaaacuu

SEQ ID NO: 674883 - RNA, 22 nt, Artificial Sequence
  Synthetic
agcaaaaccagacaggaaacuu

SEQ ID NO: 674884 - RNA, 23 nt, Artificial Sequence
  Synthetic
aagcaaaaccagacaggaaacuu

SEQ ID NO: 674885 - RNA, 24 nt, Artificial Sequence
  Synthetic
aaagcaaaaccagacaggaaacuu

SEQ ID NO: 674886 - RNA, 18 nt, Artificial Sequence
  Synthetic
agcacuguccugaaacuu

SEQ ID NO: 674887 - RNA, 19 nt, Artificial Sequence
  Synthetic
cagcacuguccugaaacuu

SEQ ID NO: 674888 - RNA, 20 nt, Artificial Sequence
  Synthetic
gcagcacuguccugaaacuu

SEQ ID NO: 674889 - RNA, 21 nt, Artificial Sequence
  Synthetic
ugcagcacuguccugaaacuu

SEQ ID NO: 674890 - RNA, 22 nt, Artificial Sequence
  Synthetic
cugcagcacuguccugaaacuu

SEQ ID NO: 674891 - RNA, 23 nt, Artificial Sequence
  Synthetic
ucugcagcacuguccugaaacuu

SEQ ID NO: 674892 - RNA, 24 nt, Artificial Sequence
  Synthetic
gucugcagcacuguccugaaacuu

SEQ ID NO: 674893 - RNA, 18 nt, Artificial Sequence
  Synthetic
accaaaauggauaaacuu

SEQ ID NO: 674894 - RNA, 19 nt, Artificial Sequence
  Synthetic
uaccaaaauggauaaacuu

SEQ ID NO: 674895 - RNA, 20 nt, Artificial Sequence
  Synthetic
cuaccaaaauggauaaacuu

SEQ ID NO: 674896 - RNA, 21 nt, Artificial Sequence
  Synthetic
ucuaccaaaauggauaaacuu

SEQ ID NO: 674897 - RNA, 22 nt, Artificial Sequence
  Synthetic
uucuaccaaaauggauaaacuu

SEQ ID NO: 674898 - RNA, 23 nt, Artificial Sequence
  Synthetic
guucuaccaaaauggauaaacuu

SEQ ID NO: 674899 - RNA, 24 nt, Artificial Sequence
  Synthetic
uguucuaccaaaauggauaaacuu

SEQ ID NO: 674900 - RNA, 18 nt, Artificial Sequence
  Synthetic
aaggcagguccuaaacuu

SEQ ID NO: 674901 - RNA, 19 nt, Artificial Sequence
  Synthetic
aaaggcagguccuaaacuu

SEQ ID NO: 674902 - RNA, 20 nt, Artificial Sequence
  Synthetic
aaaaggcagguccuaaacuu

SEQ ID NO: 674903 - RNA, 21 nt, Artificial Sequence
  Synthetic
uaaaaggcagguccuaaacuu

SEQ ID NO: 674904 - RNA, 22 nt, Artificial Sequence
  Synthetic
cuaaaaggcagguccuaaacuu

SEQ ID NO: 674905 - RNA, 23 nt, Artificial Sequence
  Synthetic
ccuaaaaggcagguccuaaacuu

SEQ ID NO: 674906 - RNA, 24 nt, Artificial Sequence
  Synthetic
gccuaaaaggcagguccuaaacuu

SEQ ID NO: 674907 - RNA, 18 nt, Artificial Sequence
  Synthetic
acuugccuuccuaaacuu

SEQ ID NO: 674908 - RNA, 19 nt, Artificial Sequence
  Synthetic
gacuugccuuccuaaacuu

SEQ ID NO: 674909 - RNA, 20 nt, Artificial Sequence
  Synthetic
ugacuugccuuccuaaacuu

SEQ ID NO: 674910 - RNA, 21 nt, Artificial Sequence
  Synthetic
uugacuugccuuccuaaacuu

SEQ ID NO: 674911 - RNA, 22 nt, Artificial Sequence
  Synthetic
cuugacuugccuuccuaaacuu

SEQ ID NO: 674912 - RNA, 23 nt, Artificial Sequence
  Synthetic
ucuugacuugccuuccuaaacuu

SEQ ID NO: 674913 - RNA, 24 nt, Artificial Sequence
  Synthetic
uucuugacuugccuuccuaaacuu

SEQ ID NO: 674914 - RNA, 18 nt, Artificial Sequence
  Synthetic
aggaaauaaaguaaacuu

SEQ ID NO: 674915 - RNA, 19 nt, Artificial Sequence
  Synthetic
aaggaaauaaaguaaacuu

SEQ ID NO: 674916 - RNA, 20 nt, Artificial Sequence
  Synthetic
uaaggaaauaaaguaaacuu

SEQ ID NO: 674917 - RNA, 21 nt, Artificial Sequence
  Synthetic
auaaggaaauaaaguaaacuu

SEQ ID NO: 674918 - RNA, 22 nt, Artificial Sequence
  Synthetic
aauaaggaaauaaaguaaacuu

SEQ ID NO: 674919 - RNA, 23 nt, Artificial Sequence
  Synthetic
caauaaggaaauaaaguaaacuu

SEQ ID NO: 674920 - RNA, 24 nt, Artificial Sequence
  Synthetic
acaauaaggaaauaaaguaaacuu

SEQ ID NO: 674921 - RNA, 18 nt, Artificial Sequence
  Synthetic
aguuuacauuuuaaacuu

SEQ ID NO: 674922 - RNA, 19 nt, Artificial Sequence
  Synthetic
gaguuuacauuuuaaacuu

SEQ ID NO: 674923 - RNA, 20 nt, Artificial Sequence
  Synthetic
ugaguuuacauuuuaaacuu

SEQ ID NO: 674924 - RNA, 21 nt, Artificial Sequence
  Synthetic
uugaguuuacauuuuaaacuu

SEQ ID NO: 674925 - RNA, 22 nt, Artificial Sequence
  Synthetic
cuugaguuuacauuuuaaacuu

SEQ ID NO: 674926 - RNA, 23 nt, Artificial Sequence
  Synthetic
ucuugaguuuacauuuuaaacuu

SEQ ID NO: 674927 - RNA, 24 nt, Artificial Sequence
  Synthetic
uucuugaguuuacauuuuaaacuu

SEQ ID NO: 674928 - RNA, 18 nt, Artificial Sequence
  Synthetic
gaaaaaagaaaacaacuu

SEQ ID NO: 674929 - RNA, 19 nt, Artificial Sequence
  Synthetic
agaaaaaagaaaacaacuu

SEQ ID NO: 674930 - RNA, 20 nt, Artificial Sequence
  Synthetic
aagaaaaaagaaaacaacuu

SEQ ID NO: 674931 - RNA, 21 nt, Artificial Sequence
  Synthetic
gaagaaaaaagaaaacaacuu

SEQ ID NO: 674932 - RNA, 22 nt, Artificial Sequence
  Synthetic
ugaagaaaaaagaaaacaacuu

SEQ ID NO: 674933 - RNA, 23 nt, Artificial Sequence
  Synthetic
augaagaaaaaagaaaacaacuu

SEQ ID NO: 674934 - RNA, 24 nt, Artificial Sequence
  Synthetic
uaugaagaaaaaagaaaacaacuu

SEQ ID NO: 674935 - RNA, 18 nt, Artificial Sequence
  Synthetic
guuaaaaaaacacaacuu

SEQ ID NO: 674936 - RNA, 19 nt, Artificial Sequence
  Synthetic
aguuaaaaaaacacaacuu

SEQ ID NO: 674937 - RNA, 20 nt, Artificial Sequence
  Synthetic
caguuaaaaaaacacaacuu

SEQ ID NO: 674938 - RNA, 21 nt, Artificial Sequence
  Synthetic
gcaguuaaaaaaacacaacuu

SEQ ID NO: 674939 - RNA, 22 nt, Artificial Sequence
  Synthetic
ggcaguuaaaaaaacacaacuu

SEQ ID NO: 674940 - RNA, 23 nt, Artificial Sequence
  Synthetic
aggcaguuaaaaaaacacaacuu

SEQ ID NO: 674941 - RNA, 24 nt, Artificial Sequence
  Synthetic
caggcaguuaaaaaaacacaacuu

SEQ ID NO: 674942 - RNA, 18 nt, Artificial Sequence
  Synthetic
agucaaaggagacaacuu

SEQ ID NO: 674943 - RNA, 19 nt, Artificial Sequence
  Synthetic
gagucaaaggagacaacuu

SEQ ID NO: 674944 - RNA, 20 nt, Artificial Sequence
  Synthetic
ggagucaaaggagacaacuu

SEQ ID NO: 674945 - RNA, 21 nt, Artificial Sequence
  Synthetic
uggagucaaaggagacaacuu

SEQ ID NO: 674946 - RNA, 22 nt, Artificial Sequence
  Synthetic
auggagucaaaggagacaacuu

SEQ ID NO: 674947 - RNA, 23 nt, Artificial Sequence
  Synthetic
aauggagucaaaggagacaacuu

SEQ ID NO: 674948 - RNA, 24 nt, Artificial Sequence
  Synthetic
aaauggagucaaaggagacaacuu

SEQ ID NO: 674949 - RNA, 18 nt, Artificial Sequence
  Synthetic
uacucagauugacaacuu

SEQ ID NO: 674950 - RNA, 19 nt, Artificial Sequence
  Synthetic
uuacucagauugacaacuu

SEQ ID NO: 674951 - RNA, 20 nt, Artificial Sequence
  Synthetic
auuacucagauugacaacuu

SEQ ID NO: 674952 - RNA, 21 nt, Artificial Sequence
  Synthetic
aauuacucagauugacaacuu

SEQ ID NO: 674953 - RNA, 22 nt, Artificial Sequence
  Synthetic
caauuacucagauugacaacuu

SEQ ID NO: 674954 - RNA, 23 nt, Artificial Sequence
  Synthetic
acaauuacucagauugacaacuu

SEQ ID NO: 674955 - RNA, 24 nt, Artificial Sequence
  Synthetic
aacaauuacucagauugacaacuu

SEQ ID NO: 674956 - RNA, 18 nt, Artificial Sequence
  Synthetic
uuggaugucaagcaacuu

SEQ ID NO: 674957 - RNA, 19 nt, Artificial Sequence
  Synthetic
uuuggaugucaagcaacuu

SEQ ID NO: 674958 - RNA, 20 nt, Artificial Sequence
  Synthetic
cuuuggaugucaagcaacuu

SEQ ID NO: 674959 - RNA, 21 nt, Artificial Sequence
  Synthetic
gcuuuggaugucaagcaacuu

SEQ ID NO: 674960 - RNA, 22 nt, Artificial Sequence
  Synthetic
ugcuuuggaugucaagcaacuu

SEQ ID NO: 674961 - RNA, 23 nt, Artificial Sequence
  Synthetic
gugcuuuggaugucaagcaacuu

SEQ ID NO: 674962 - RNA, 24 nt, Artificial Sequence
  Synthetic
ugugcuuuggaugucaagcaacuu

SEQ ID NO: 674963 - RNA, 18 nt, Artificial Sequence
  Synthetic
aaaauguggaagcaacuu

SEQ ID NO: 674964 - RNA, 19 nt, Artificial Sequence
  Synthetic
aaaaauguggaagcaacuu

SEQ ID NO: 674965 - RNA, 20 nt, Artificial Sequence
  Synthetic
caaaaauguggaagcaacuu

SEQ ID NO: 674966 - RNA, 21 nt, Artificial Sequence
  Synthetic
ccaaaaauguggaagcaacuu

SEQ ID NO: 674967 - RNA, 22 nt, Artificial Sequence
  Synthetic
cccaaaaauguggaagcaacuu

SEQ ID NO: 674968 - RNA, 23 nt, Artificial Sequence
  Synthetic
acccaaaaauguggaagcaacuu

SEQ ID NO: 674969 - RNA, 24 nt, Artificial Sequence
  Synthetic
aacccaaaaauguggaagcaacuu

SEQ ID NO: 674970 - RNA, 19 nt, Artificial Sequence
  Synthetic
gaaaauguggaagcaacuu

SEQ ID NO: 674971 - RNA, 20 nt, Artificial Sequence
  Synthetic
ugaaaauguggaagcaacuu

SEQ ID NO: 674972 - RNA, 21 nt, Artificial Sequence
  Synthetic
uugaaaauguggaagcaacuu

SEQ ID NO: 674973 - RNA, 22 nt, Artificial Sequence
  Synthetic
cuugaaaauguggaagcaacuu

SEQ ID NO: 674974 - RNA, 23 nt, Artificial Sequence
  Synthetic
acuugaaaauguggaagcaacuu

SEQ ID NO: 674975 - RNA, 24 nt, Artificial Sequence
  Synthetic
uacuugaaaauguggaagcaacuu

SEQ ID NO: 674976 - RNA, 18 nt, Artificial Sequence
  Synthetic
aaauaaauacugcaacuu

SEQ ID NO: 674977 - RNA, 19 nt, Artificial Sequence
  Synthetic
uaaauaaauacugcaacuu

SEQ ID NO: 674978 - RNA, 20 nt, Artificial Sequence
  Synthetic
uuaaauaaauacugcaacuu

SEQ ID NO: 674979 - RNA, 21 nt, Artificial Sequence
  Synthetic
uuuaaauaaauacugcaacuu

SEQ ID NO: 674980 - RNA, 22 nt, Artificial Sequence
  Synthetic
uuuuaaauaaauacugcaacuu

SEQ ID NO: 674981 - RNA, 23 nt, Artificial Sequence
  Synthetic
auuuuaaauaaauacugcaacuu

SEQ ID NO: 674982 - RNA, 24 nt, Artificial Sequence
  Synthetic
aauuuuaaauaaauacugcaacuu

SEQ ID NO: 674983 - RNA, 18 nt, Artificial Sequence
  Synthetic
ucacuuucuuugcaacuu

SEQ ID NO: 674984 - RNA, 19 nt, Artificial Sequence
  Synthetic
uucacuuucuuugcaacuu

SEQ ID NO: 674985 - RNA, 20 nt, Artificial Sequence
  Synthetic
auucacuuucuuugcaacuu

SEQ ID NO: 674986 - RNA, 21 nt, Artificial Sequence
  Synthetic
cauucacuuucuuugcaacuu

SEQ ID NO: 674987 - RNA, 22 nt, Artificial Sequence
  Synthetic
ccauucacuuucuuugcaacuu

SEQ ID NO: 674988 - RNA, 23 nt, Artificial Sequence
  Synthetic
uccauucacuuucuuugcaacuu

SEQ ID NO: 674989 - RNA, 24 nt, Artificial Sequence
  Synthetic
uuccauucacuuucuuugcaacuu

SEQ ID NO: 674990 - RNA, 18 nt, Artificial Sequence
  Synthetic
uccauuacaggucaacuu

SEQ ID NO: 674991 - RNA, 19 nt, Artificial Sequence
  Synthetic
uuccauuacaggucaacuu

SEQ ID NO: 674992 - RNA, 20 nt, Artificial Sequence
  Synthetic
auuccauuacaggucaacuu

SEQ ID NO: 674993 - RNA, 21 nt, Artificial Sequence
  Synthetic
gauuccauuacaggucaacuu

SEQ ID NO: 674994 - RNA, 22 nt, Artificial Sequence
  Synthetic
agauuccauuacaggucaacuu

SEQ ID NO: 674995 - RNA, 23 nt, Artificial Sequence
  Synthetic
aagauuccauuacaggucaacuu

SEQ ID NO: 674996 - RNA, 24 nt, Artificial Sequence
  Synthetic
gaagauuccauuacaggucaacuu

SEQ ID NO: 674997 - RNA, 18 nt, Artificial Sequence
  Synthetic
aucuuagacguucaacuu

SEQ ID NO: 674998 - RNA, 19 nt, Artificial Sequence
  Synthetic
aaucuuagacguucaacuu

SEQ ID NO: 674999 - RNA, 20 nt, Artificial Sequence
  Synthetic
uaaucuuagacguucaacuu

SEQ ID NO: 675000 - RNA, 21 nt, Artificial Sequence
  Synthetic
uuaaucuuagacguucaacuu

SEQ ID NO: 675001 - RNA, 22 nt, Artificial Sequence
  Synthetic
cuuaaucuuagacguucaacuu

SEQ ID NO: 675002 - RNA, 23 nt, Artificial Sequence
  Synthetic
ccuuaaucuuagacguucaacuu

SEQ ID NO: 675003 - RNA, 24 nt, Artificial Sequence
  Synthetic
accuuaaucuuagacguucaacuu

SEQ ID NO: 675004 - RNA, 18 nt, Artificial Sequence
  Synthetic
cagacucagaaagaacuu

SEQ ID NO: 675005 - RNA, 19 nt, Artificial Sequence
  Synthetic
acagacucagaaagaacuu

SEQ ID NO: 675006 - RNA, 20 nt, Artificial Sequence
  Synthetic
cacagacucagaaagaacuu

SEQ ID NO: 675007 - RNA, 21 nt, Artificial Sequence
  Synthetic
acacagacucagaaagaacuu

SEQ ID NO: 675008 - RNA, 22 nt, Artificial Sequence
  Synthetic
cacacagacucagaaagaacuu

SEQ ID NO: 675009 - RNA, 23 nt, Artificial Sequence
  Synthetic
gcacacagacucagaaagaacuu

SEQ ID NO: 675010 - RNA, 24 nt, Artificial Sequence
  Synthetic
ggcacacagacucagaaagaacuu

SEQ ID NO: 675011 - RNA, 18 nt, Artificial Sequence
  Synthetic
uagcauuaacaagaacuu

SEQ ID NO: 675012 - RNA, 19 nt, Artificial Sequence
  Synthetic
guagcauuaacaagaacuu

SEQ ID NO: 675013 - RNA, 20 nt, Artificial Sequence
  Synthetic
gguagcauuaacaagaacuu

SEQ ID NO: 675014 - RNA, 21 nt, Artificial Sequence
  Synthetic
agguagcauuaacaagaacuu

SEQ ID NO: 675015 - RNA, 22 nt, Artificial Sequence
  Synthetic
aagguagcauuaacaagaacuu

SEQ ID NO: 675016 - RNA, 23 nt, Artificial Sequence
  Synthetic
uaagguagcauuaacaagaacuu

SEQ ID NO: 675017 - RNA, 24 nt, Artificial Sequence
  Synthetic
uuaagguagcauuaacaagaacuu

SEQ ID NO: 675018 - RNA, 18 nt, Artificial Sequence
  Synthetic
aagaauucaagagaacuu

SEQ ID NO: 675019 - RNA, 19 nt, Artificial Sequence
  Synthetic
uaagaauucaagagaacuu

SEQ ID NO: 675020 - RNA, 20 nt, Artificial Sequence
  Synthetic
guaagaauucaagagaacuu

SEQ ID NO: 675021 - RNA, 21 nt, Artificial Sequence
  Synthetic
cguaagaauucaagagaacuu

SEQ ID NO: 675022 - RNA, 22 nt, Artificial Sequence
  Synthetic
ccguaagaauucaagagaacuu

SEQ ID NO: 675023 - RNA, 23 nt, Artificial Sequence
  Synthetic
uccguaagaauucaagagaacuu

SEQ ID NO: 675024 - RNA, 24 nt, Artificial Sequence
  Synthetic
uuccguaagaauucaagagaacuu

SEQ ID NO: 675025 - RNA, 18 nt, Artificial Sequence
  Synthetic
acucauucaugagaacuu

SEQ ID NO: 675026 - RNA, 19 nt, Artificial Sequence
  Synthetic
aacucauucaugagaacuu

SEQ ID NO: 675027 - RNA, 20 nt, Artificial Sequence
  Synthetic
uaacucauucaugagaacuu

SEQ ID NO: 675028 - RNA, 21 nt, Artificial Sequence
  Synthetic
cuaacucauucaugagaacuu

SEQ ID NO: 675029 - RNA, 22 nt, Artificial Sequence
  Synthetic
ucuaacucauucaugagaacuu

SEQ ID NO: 675030 - RNA, 23 nt, Artificial Sequence
  Synthetic
uucuaacucauucaugagaacuu

SEQ ID NO: 675031 - RNA, 24 nt, Artificial Sequence
  Synthetic
cuucuaacucauucaugagaacuu

SEQ ID NO: 675032 - RNA, 18 nt, Artificial Sequence
  Synthetic
aacguuaagaacgaacuu

SEQ ID NO: 675033 - RNA, 19 nt, Artificial Sequence
  Synthetic
aaacguuaagaacgaacuu

SEQ ID NO: 675034 - RNA, 20 nt, Artificial Sequence
  Synthetic
aaaacguuaagaacgaacuu

SEQ ID NO: 675035 - RNA, 21 nt, Artificial Sequence
  Synthetic
aaaaacguuaagaacgaacuu

SEQ ID NO: 675036 - RNA, 22 nt, Artificial Sequence
  Synthetic
caaaaacguuaagaacgaacuu

SEQ ID NO: 675037 - RNA, 23 nt, Artificial Sequence
  Synthetic
gcaaaaacguuaagaacgaacuu

SEQ ID NO: 675038 - RNA, 24 nt, Artificial Sequence
  Synthetic
ugcaaaaacguuaagaacgaacuu

SEQ ID NO: 675039 - RNA, 18 nt, Artificial Sequence
  Synthetic
agauggcaaaaggaacuu

SEQ ID NO: 675040 - RNA, 19 nt, Artificial Sequence
  Synthetic
gagauggcaaaaggaacuu

SEQ ID NO: 675041 - RNA, 20 nt, Artificial Sequence
  Synthetic
agagauggcaaaaggaacuu

SEQ ID NO: 675042 - RNA, 21 nt, Artificial Sequence
  Synthetic
aagagauggcaaaaggaacuu

SEQ ID NO: 675043 - RNA, 22 nt, Artificial Sequence
  Synthetic
caagagauggcaaaaggaacuu

SEQ ID NO: 675044 - RNA, 23 nt, Artificial Sequence
  Synthetic
gcaagagauggcaaaaggaacuu

SEQ ID NO: 675045 - RNA, 24 nt, Artificial Sequence
  Synthetic
ugcaagagauggcaaaaggaacuu

SEQ ID NO: 675046 - RNA, 18 nt, Artificial Sequence
  Synthetic
caagguacagaugaacuu

SEQ ID NO: 675047 - RNA, 19 nt, Artificial Sequence
  Synthetic
acaagguacagaugaacuu

SEQ ID NO: 675048 - RNA, 20 nt, Artificial Sequence
  Synthetic
uacaagguacagaugaacuu

SEQ ID NO: 675049 - RNA, 21 nt, Artificial Sequence
  Synthetic
guacaagguacagaugaacuu

SEQ ID NO: 675050 - RNA, 22 nt, Artificial Sequence
  Synthetic
gguacaagguacagaugaacuu

SEQ ID NO: 675051 - RNA, 23 nt, Artificial Sequence
  Synthetic
ugguacaagguacagaugaacuu

SEQ ID NO: 675052 - RNA, 24 nt, Artificial Sequence
  Synthetic
uugguacaagguacagaugaacuu

SEQ ID NO: 675053 - RNA, 18 nt, Artificial Sequence
  Synthetic
aggguggcaacugaacuu

SEQ ID NO: 675054 - RNA, 19 nt, Artificial Sequence
  Synthetic
caggguggcaacugaacuu

SEQ ID NO: 675055 - RNA, 20 nt, Artificial Sequence
  Synthetic
ccaggguggcaacugaacuu

SEQ ID NO: 675056 - RNA, 21 nt, Artificial Sequence
  Synthetic
uccaggguggcaacugaacuu

SEQ ID NO: 675057 - RNA, 22 nt, Artificial Sequence
  Synthetic
cuccaggguggcaacugaacuu

SEQ ID NO: 675058 - RNA, 23 nt, Artificial Sequence
  Synthetic
ccuccaggguggcaacugaacuu

SEQ ID NO: 675059 - RNA, 24 nt, Artificial Sequence
  Synthetic
cccuccaggguggcaacugaacuu

SEQ ID NO: 675060 - RNA, 18 nt, Artificial Sequence
  Synthetic
uagcccagcagugaacuu

SEQ ID NO: 675061 - RNA, 19 nt, Artificial Sequence
  Synthetic
uuagcccagcagugaacuu

SEQ ID NO: 675062 - RNA, 20 nt, Artificial Sequence
  Synthetic
cuuagcccagcagugaacuu

SEQ ID NO: 675063 - RNA, 21 nt, Artificial Sequence
  Synthetic
acuuagcccagcagugaacuu

SEQ ID NO: 675064 - RNA, 22 nt, Artificial Sequence
  Synthetic
cacuuagcccagcagugaacuu

SEQ ID NO: 675065 - RNA, 23 nt, Artificial Sequence
  Synthetic
ucacuuagcccagcagugaacuu

SEQ ID NO: 675066 - RNA, 24 nt, Artificial Sequence
  Synthetic
uucacuuagcccagcagugaacuu

SEQ ID NO: 675067 - RNA, 18 nt, Artificial Sequence
  Synthetic
ggagaauggugugaacuu

SEQ ID NO: 675068 - RNA, 19 nt, Artificial Sequence
  Synthetic
aggagaauggugugaacuu

SEQ ID NO: 675069 - RNA, 20 nt, Artificial Sequence
  Synthetic
caggagaauggugugaacuu

SEQ ID NO: 675070 - RNA, 21 nt, Artificial Sequence
  Synthetic
gcaggagaauggugugaacuu

SEQ ID NO: 675071 - RNA, 22 nt, Artificial Sequence
  Synthetic
ggcaggagaauggugugaacuu

SEQ ID NO: 675072 - RNA, 23 nt, Artificial Sequence
  Synthetic
aggcaggagaauggugugaacuu

SEQ ID NO: 675073 - RNA, 24 nt, Artificial Sequence
  Synthetic
gaggcaggagaauggugugaacuu

SEQ ID NO: 675074 - RNA, 18 nt, Artificial Sequence
  Synthetic
ggagaaucacuugaacuu

SEQ ID NO: 675075 - RNA, 19 nt, Artificial Sequence
  Synthetic
aggagaaucacuugaacuu

SEQ ID NO: 675076 - RNA, 20 nt, Artificial Sequence
  Synthetic
caggagaaucacuugaacuu

SEQ ID NO: 675077 - RNA, 21 nt, Artificial Sequence
  Synthetic
gcaggagaaucacuugaacuu

SEQ ID NO: 675078 - RNA, 22 nt, Artificial Sequence
  Synthetic
ggcaggagaaucacuugaacuu

SEQ ID NO: 675079 - RNA, 23 nt, Artificial Sequence
  Synthetic
aggcaggagaaucacuugaacuu

SEQ ID NO: 675080 - RNA, 24 nt, Artificial Sequence
  Synthetic
gaggcaggagaaucacuugaacuu

SEQ ID NO: 675081 - RNA, 18 nt, Artificial Sequence
  Synthetic
guggagucccuugaacuu

SEQ ID NO: 675082 - RNA, 19 nt, Artificial Sequence
  Synthetic
uguggagucccuugaacuu

SEQ ID NO: 675083 - RNA, 20 nt, Artificial Sequence
  Synthetic
cuguggagucccuugaacuu

SEQ ID NO: 675084 - RNA, 21 nt, Artificial Sequence
  Synthetic
acuguggagucccuugaacuu

SEQ ID NO: 675085 - RNA, 22 nt, Artificial Sequence
  Synthetic
cacuguggagucccuugaacuu

SEQ ID NO: 675086 - RNA, 23 nt, Artificial Sequence
  Synthetic
gcacuguggagucccuugaacuu

SEQ ID NO: 675087 - RNA, 24 nt, Artificial Sequence
  Synthetic
agcacuguggagucccuugaacuu

SEQ ID NO: 675088 - RNA, 18 nt, Artificial Sequence
  Synthetic
ccacuauuauuugaacuu

SEQ ID NO: 675089 - RNA, 19 nt, Artificial Sequence
  Synthetic
uccacuauuauuugaacuu

SEQ ID NO: 675090 - RNA, 20 nt, Artificial Sequence
  Synthetic
guccacuauuauuugaacuu

SEQ ID NO: 675091 - RNA, 21 nt, Artificial Sequence
  Synthetic
uguccacuauuauuugaacuu

SEQ ID NO: 675092 - RNA, 22 nt, Artificial Sequence
  Synthetic
auguccacuauuauuugaacuu

SEQ ID NO: 675093 - RNA, 23 nt, Artificial Sequence
  Synthetic
gauguccacuauuauuugaacuu

SEQ ID NO: 675094 - RNA, 24 nt, Artificial Sequence
  Synthetic
ggauguccacuauuauuugaacuu

SEQ ID NO: 675095 - RNA, 18 nt, Artificial Sequence
  Synthetic
cuguggaacuuugaacuu

SEQ ID NO: 675096 - RNA, 19 nt, Artificial Sequence
  Synthetic
ucuguggaacuuugaacuu

SEQ ID NO: 675097 - RNA, 20 nt, Artificial Sequence
  Synthetic
aucuguggaacuuugaacuu

SEQ ID NO: 675098 - RNA, 21 nt, Artificial Sequence
  Synthetic
gaucuguggaacuuugaacuu

SEQ ID NO: 675099 - RNA, 22 nt, Artificial Sequence
  Synthetic
agaucuguggaacuuugaacuu

SEQ ID NO: 675100 - RNA, 23 nt, Artificial Sequence
  Synthetic
gagaucuguggaacuuugaacuu

SEQ ID NO: 675101 - RNA, 24 nt, Artificial Sequence
  Synthetic
agagaucuguggaacuuugaacuu

SEQ ID NO: 675102 - RNA, 21 nt, Artificial Sequence
  Synthetic
gucagccuguccuuugaacuu

SEQ ID NO: 675103 - RNA, 22 nt, Artificial Sequence
  Synthetic
agucagccuguccuuugaacuu

SEQ ID NO: 675104 - RNA, 23 nt, Artificial Sequence
  Synthetic
cagucagccuguccuuugaacuu

SEQ ID NO: 675105 - RNA, 24 nt, Artificial Sequence
  Synthetic
acagucagccuguccuuugaacuu

SEQ ID NO: 675106 - RNA, 18 nt, Artificial Sequence
  Synthetic
aaauuauccagauaacuu

SEQ ID NO: 675107 - RNA, 19 nt, Artificial Sequence
  Synthetic
aaaauuauccagauaacuu

SEQ ID NO: 675108 - RNA, 20 nt, Artificial Sequence
  Synthetic
uaaaauuauccagauaacuu

SEQ ID NO: 675109 - RNA, 21 nt, Artificial Sequence
  Synthetic
cuaaaauuauccagauaacuu

SEQ ID NO: 675110 - RNA, 22 nt, Artificial Sequence
  Synthetic
acuaaaauuauccagauaacuu

SEQ ID NO: 675111 - RNA, 23 nt, Artificial Sequence
  Synthetic
uacuaaaauuauccagauaacuu

SEQ ID NO: 675112 - RNA, 24 nt, Artificial Sequence
  Synthetic
auacuaaaauuauccagauaacuu

SEQ ID NO: 675113 - RNA, 18 nt, Artificial Sequence
  Synthetic
auuauuuuuugauaacuu

SEQ ID NO: 675114 - RNA, 19 nt, Artificial Sequence
  Synthetic
cauuauuuuuugauaacuu

SEQ ID NO: 675115 - RNA, 20 nt, Artificial Sequence
  Synthetic
ucauuauuuuuugauaacuu

SEQ ID NO: 675116 - RNA, 21 nt, Artificial Sequence
  Synthetic
cucauuauuuuuugauaacuu

SEQ ID NO: 675117 - RNA, 22 nt, Artificial Sequence
  Synthetic
ucucauuauuuuuugauaacuu

SEQ ID NO: 675118 - RNA, 23 nt, Artificial Sequence
  Synthetic
aucucauuauuuuuugauaacuu

SEQ ID NO: 675119 - RNA, 24 nt, Artificial Sequence
  Synthetic
uaucucauuauuuuuugauaacuu

SEQ ID NO: 675120 - RNA, 18 nt, Artificial Sequence
  Synthetic
uacaauuuucuauaacuu

SEQ ID NO: 675121 - RNA, 19 nt, Artificial Sequence
  Synthetic
cuacaauuuucuauaacuu

SEQ ID NO: 675122 - RNA, 20 nt, Artificial Sequence
  Synthetic
ccuacaauuuucuauaacuu

SEQ ID NO: 675123 - RNA, 21 nt, Artificial Sequence
  Synthetic
cccuacaauuuucuauaacuu

SEQ ID NO: 675124 - RNA, 22 nt, Artificial Sequence
  Synthetic
ucccuacaauuuucuauaacuu

SEQ ID NO: 675125 - RNA, 23 nt, Artificial Sequence
  Synthetic
aucccuacaauuuucuauaacuu

SEQ ID NO: 675126 - RNA, 24 nt, Artificial Sequence
  Synthetic
aaucccuacaauuuucuauaacuu

SEQ ID NO: 675127 - RNA, 18 nt, Artificial Sequence
  Synthetic
accaagauuuuauaacuu

SEQ ID NO: 675128 - RNA, 19 nt, Artificial Sequence
  Synthetic
caccaagauuuuauaacuu

SEQ ID NO: 675129 - RNA, 20 nt, Artificial Sequence
  Synthetic
ucaccaagauuuuauaacuu

SEQ ID NO: 675130 - RNA, 21 nt, Artificial Sequence
  Synthetic
aucaccaagauuuuauaacuu

SEQ ID NO: 675131 - RNA, 22 nt, Artificial Sequence
  Synthetic
aaucaccaagauuuuauaacuu

SEQ ID NO: 675132 - RNA, 23 nt, Artificial Sequence
  Synthetic
gaaucaccaagauuuuauaacuu

SEQ ID NO: 675133 - RNA, 24 nt, Artificial Sequence
  Synthetic
agaaucaccaagauuuuauaacuu

SEQ ID NO: 675134 - RNA, 18 nt, Artificial Sequence
  Synthetic
aacacgguaaacuaacuu

SEQ ID NO: 675135 - RNA, 19 nt, Artificial Sequence
  Synthetic
aaacacgguaaacuaacuu

SEQ ID NO: 675136 - RNA, 20 nt, Artificial Sequence
  Synthetic
aaaacacgguaaacuaacuu

SEQ ID NO: 675137 - RNA, 21 nt, Artificial Sequence
  Synthetic
gaaaacacgguaaacuaacuu

SEQ ID NO: 675138 - RNA, 22 nt, Artificial Sequence
  Synthetic
agaaaacacgguaaacuaacuu

SEQ ID NO: 675139 - RNA, 23 nt, Artificial Sequence
  Synthetic
gagaaaacacgguaaacuaacuu

SEQ ID NO: 675140 - RNA, 24 nt, Artificial Sequence
  Synthetic
agagaaaacacgguaaacuaacuu

SEQ ID NO: 675141 - RNA, 18 nt, Artificial Sequence
  Synthetic
cggaaaaauuucuaacuu

SEQ ID NO: 675142 - RNA, 19 nt, Artificial Sequence
  Synthetic
ucggaaaaauuucuaacuu

SEQ ID NO: 675143 - RNA, 20 nt, Artificial Sequence
  Synthetic
uucggaaaaauuucuaacuu

SEQ ID NO: 675144 - RNA, 21 nt, Artificial Sequence
  Synthetic
cuucggaaaaauuucuaacuu

SEQ ID NO: 675145 - RNA, 22 nt, Artificial Sequence
  Synthetic
acuucggaaaaauuucuaacuu

SEQ ID NO: 675146 - RNA, 23 nt, Artificial Sequence
  Synthetic
aacuucggaaaaauuucuaacuu

SEQ ID NO: 675147 - RNA, 24 nt, Artificial Sequence
  Synthetic
caacuucggaaaaauuucuaacuu

SEQ ID NO: 675148 - RNA, 18 nt, Artificial Sequence
  Synthetic
uauagguuauaguaacuu

SEQ ID NO: 675149 - RNA, 19 nt, Artificial Sequence
  Synthetic
auauagguuauaguaacuu

SEQ ID NO: 675150 - RNA, 20 nt, Artificial Sequence
  Synthetic
aauauagguuauaguaacuu

SEQ ID NO: 675151 - RNA, 21 nt, Artificial Sequence
  Synthetic
aaauauagguuauaguaacuu

SEQ ID NO: 675152 - RNA, 22 nt, Artificial Sequence
  Synthetic
aaaauauagguuauaguaacuu

SEQ ID NO: 675153 - RNA, 23 nt, Artificial Sequence
  Synthetic
gaaaauauagguuauaguaacuu

SEQ ID NO: 675154 - RNA, 24 nt, Artificial Sequence
  Synthetic
ugaaaauauagguuauaguaacuu

SEQ ID NO: 675155 - RNA, 18 nt, Artificial Sequence
  Synthetic
acauguuggaauuaacuu

SEQ ID NO: 675156 - RNA, 19 nt, Artificial Sequence
  Synthetic
gacauguuggaauuaacuu

SEQ ID NO: 675157 - RNA, 20 nt, Artificial Sequence
  Synthetic
agacauguuggaauuaacuu

SEQ ID NO: 675158 - RNA, 21 nt, Artificial Sequence
  Synthetic
aagacauguuggaauuaacuu

SEQ ID NO: 675159 - RNA, 22 nt, Artificial Sequence
  Synthetic
gaagacauguuggaauuaacuu

SEQ ID NO: 675160 - RNA, 23 nt, Artificial Sequence
  Synthetic
ugaagacauguuggaauuaacuu

SEQ ID NO: 675161 - RNA, 24 nt, Artificial Sequence
  Synthetic
augaagacauguuggaauuaacuu

SEQ ID NO: 675162 - RNA, 18 nt, Artificial Sequence
  Synthetic
augaauaugguuuaacuu

SEQ ID NO: 675163 - RNA, 19 nt, Artificial Sequence
  Synthetic
aaugaauaugguuuaacuu

SEQ ID NO: 675164 - RNA, 20 nt, Artificial Sequence
  Synthetic
gaaugaauaugguuuaacuu

SEQ ID NO: 675165 - RNA, 21 nt, Artificial Sequence
  Synthetic
agaaugaauaugguuuaacuu

SEQ ID NO: 675166 - RNA, 22 nt, Artificial Sequence
  Synthetic
uagaaugaauaugguuuaacuu

SEQ ID NO: 675167 - RNA, 23 nt, Artificial Sequence
  Synthetic
cuagaaugaauaugguuuaacuu

SEQ ID NO: 675168 - RNA, 24 nt, Artificial Sequence
  Synthetic
ccuagaaugaauaugguuuaacuu

SEQ ID NO: 675169 - RNA, 18 nt, Artificial Sequence
  Synthetic
gcauaaucagaaacacuu

SEQ ID NO: 675170 - RNA, 19 nt, Artificial Sequence
  Synthetic
agcauaaucagaaacacuu

SEQ ID NO: 675171 - RNA, 20 nt, Artificial Sequence
  Synthetic
uagcauaaucagaaacacuu

SEQ ID NO: 675172 - RNA, 21 nt, Artificial Sequence
  Synthetic
uuagcauaaucagaaacacuu

SEQ ID NO: 675173 - RNA, 22 nt, Artificial Sequence
  Synthetic
uuuagcauaaucagaaacacuu

SEQ ID NO: 675174 - RNA, 23 nt, Artificial Sequence
  Synthetic
auuuagcauaaucagaaacacuu

SEQ ID NO: 675175 - RNA, 24 nt, Artificial Sequence
  Synthetic
gauuuagcauaaucagaaacacuu

SEQ ID NO: 675176 - RNA, 18 nt, Artificial Sequence
  Synthetic
cuacagggauaaacacuu

SEQ ID NO: 675177 - RNA, 19 nt, Artificial Sequence
  Synthetic
ucuacagggauaaacacuu

SEQ ID NO: 675178 - RNA, 20 nt, Artificial Sequence
  Synthetic
uucuacagggauaaacacuu

SEQ ID NO: 675179 - RNA, 21 nt, Artificial Sequence
  Synthetic
auucuacagggauaaacacuu

SEQ ID NO: 675180 - RNA, 22 nt, Artificial Sequence
  Synthetic
uauucuacagggauaaacacuu

SEQ ID NO: 675181 - RNA, 23 nt, Artificial Sequence
  Synthetic
uuauucuacagggauaaacacuu

SEQ ID NO: 675182 - RNA, 24 nt, Artificial Sequence
  Synthetic
cuuauucuacagggauaaacacuu

SEQ ID NO: 675183 - RNA, 18 nt, Artificial Sequence
  Synthetic
ccuauaaucccaacacuu

SEQ ID NO: 675184 - RNA, 19 nt, Artificial Sequence
  Synthetic
accuauaaucccaacacuu

SEQ ID NO: 675185 - RNA, 20 nt, Artificial Sequence
  Synthetic
caccuauaaucccaacacuu

SEQ ID NO: 675186 - RNA, 21 nt, Artificial Sequence
  Synthetic
acaccuauaaucccaacacuu

SEQ ID NO: 675187 - RNA, 22 nt, Artificial Sequence
  Synthetic
cacaccuauaaucccaacacuu

SEQ ID NO: 675188 - RNA, 23 nt, Artificial Sequence
  Synthetic
ucacaccuauaaucccaacacuu

SEQ ID NO: 675189 - RNA, 24 nt, Artificial Sequence
  Synthetic
aucacaccuauaaucccaacacuu

SEQ ID NO: 675190 - RNA, 18 nt, Artificial Sequence
  Synthetic
ugauucacaugaacacuu

SEQ ID NO: 675191 - RNA, 19 nt, Artificial Sequence
  Synthetic
augauucacaugaacacuu

SEQ ID NO: 675192 - RNA, 20 nt, Artificial Sequence
  Synthetic
gaugauucacaugaacacuu

SEQ ID NO: 675193 - RNA, 21 nt, Artificial Sequence
  Synthetic
ggaugauucacaugaacacuu

SEQ ID NO: 675194 - RNA, 22 nt, Artificial Sequence
  Synthetic
uggaugauucacaugaacacuu

SEQ ID NO: 675195 - RNA, 23 nt, Artificial Sequence
  Synthetic
auggaugauucacaugaacacuu

SEQ ID NO: 675196 - RNA, 24 nt, Artificial Sequence
  Synthetic
aauggaugauucacaugaacacuu

SEQ ID NO: 675197 - RNA, 18 nt, Artificial Sequence
  Synthetic
cgugcuucaugaacacuu

SEQ ID NO: 675198 - RNA, 19 nt, Artificial Sequence
  Synthetic
acgugcuucaugaacacuu

SEQ ID NO: 675199 - RNA, 20 nt, Artificial Sequence
  Synthetic
uacgugcuucaugaacacuu

SEQ ID NO: 675200 - RNA, 21 nt, Artificial Sequence
  Synthetic
auacgugcuucaugaacacuu

SEQ ID NO: 675201 - RNA, 22 nt, Artificial Sequence
  Synthetic
cauacgugcuucaugaacacuu

SEQ ID NO: 675202 - RNA, 23 nt, Artificial Sequence
  Synthetic
ccauacgugcuucaugaacacuu

SEQ ID NO: 675203 - RNA, 24 nt, Artificial Sequence
  Synthetic
gccauacgugcuucaugaacacuu

SEQ ID NO: 675204 - RNA, 18 nt, Artificial Sequence
  Synthetic
guccaaaccugaacacuu

SEQ ID NO: 675205 - RNA, 19 nt, Artificial Sequence
  Synthetic
uguccaaaccugaacacuu

SEQ ID NO: 675206 - RNA, 20 nt, Artificial Sequence
  Synthetic
uuguccaaaccugaacacuu

SEQ ID NO: 675207 - RNA, 21 nt, Artificial Sequence
  Synthetic
auuguccaaaccugaacacuu

SEQ ID NO: 675208 - RNA, 22 nt, Artificial Sequence
  Synthetic
cauuguccaaaccugaacacuu

SEQ ID NO: 675209 - RNA, 23 nt, Artificial Sequence
  Synthetic
ucauuguccaaaccugaacacuu

SEQ ID NO: 675210 - RNA, 24 nt, Artificial Sequence
  Synthetic
uucauuguccaaaccugaacacuu

SEQ ID NO: 675211 - RNA, 18 nt, Artificial Sequence
  Synthetic
gggcauacuuuaacacuu

SEQ ID NO: 675212 - RNA, 19 nt, Artificial Sequence
  Synthetic
ggggcauacuuuaacacuu

SEQ ID NO: 675213 - RNA, 20 nt, Artificial Sequence
  Synthetic
uggggcauacuuuaacacuu

SEQ ID NO: 675214 - RNA, 21 nt, Artificial Sequence
  Synthetic
cuggggcauacuuuaacacuu

SEQ ID NO: 675215 - RNA, 22 nt, Artificial Sequence
  Synthetic
ucuggggcauacuuuaacacuu

SEQ ID NO: 675216 - RNA, 23 nt, Artificial Sequence
  Synthetic
cucuggggcauacuuuaacacuu

SEQ ID NO: 675217 - RNA, 24 nt, Artificial Sequence
  Synthetic
acucuggggcauacuuuaacacuu

SEQ ID NO: 675218 - RNA, 18 nt, Artificial Sequence
  Synthetic
auaauaaugaacacacuu

SEQ ID NO: 675219 - RNA, 19 nt, Artificial Sequence
  Synthetic
aauaauaaugaacacacuu

SEQ ID NO: 675220 - RNA, 20 nt, Artificial Sequence
  Synthetic
uaauaauaaugaacacacuu

SEQ ID NO: 675221 - RNA, 21 nt, Artificial Sequence
  Synthetic
auaauaauaaugaacacacuu

SEQ ID NO: 675222 - RNA, 22 nt, Artificial Sequence
  Synthetic
gauaauaauaaugaacacacuu

SEQ ID NO: 675223 - RNA, 23 nt, Artificial Sequence
  Synthetic
agauaauaauaaugaacacacuu

SEQ ID NO: 675224 - RNA, 24 nt, Artificial Sequence
  Synthetic
gagauaauaauaaugaacacacuu

SEQ ID NO: 675225 - RNA, 18 nt, Artificial Sequence
  Synthetic
cccaaagcccacacacuu

SEQ ID NO: 675226 - RNA, 19 nt, Artificial Sequence
  Synthetic
ccccaaagcccacacacuu

SEQ ID NO: 675227 - RNA, 20 nt, Artificial Sequence
  Synthetic
gccccaaagcccacacacuu

SEQ ID NO: 675228 - RNA, 21 nt, Artificial Sequence
  Synthetic
ggccccaaagcccacacacuu

SEQ ID NO: 675229 - RNA, 22 nt, Artificial Sequence
  Synthetic
uggccccaaagcccacacacuu

SEQ ID NO: 675230 - RNA, 23 nt, Artificial Sequence
  Synthetic
uuggccccaaagcccacacacuu

SEQ ID NO: 675231 - RNA, 24 nt, Artificial Sequence
  Synthetic
guuggccccaaagcccacacacuu

SEQ ID NO: 675232 - RNA, 18 nt, Artificial Sequence
  Synthetic
uuuucaaccuucacacuu

SEQ ID NO: 675233 - RNA, 19 nt, Artificial Sequence
  Synthetic
cuuuucaaccuucacacuu

SEQ ID NO: 675234 - RNA, 20 nt, Artificial Sequence
  Synthetic
gcuuuucaaccuucacacuu

SEQ ID NO: 675235 - RNA, 21 nt, Artificial Sequence
  Synthetic
ugcuuuucaaccuucacacuu

SEQ ID NO: 675236 - RNA, 22 nt, Artificial Sequence
  Synthetic
uugcuuuucaaccuucacacuu

SEQ ID NO: 675237 - RNA, 23 nt, Artificial Sequence
  Synthetic
cuugcuuuucaaccuucacacuu

SEQ ID NO: 675238 - RNA, 24 nt, Artificial Sequence
  Synthetic
ccuugcuuuucaaccuucacacuu

SEQ ID NO: 675239 - RNA, 18 nt, Artificial Sequence
  Synthetic
ccaacaaauuucacacuu

SEQ ID NO: 675240 - RNA, 19 nt, Artificial Sequence
  Synthetic
cccaacaaauuucacacuu

SEQ ID NO: 675241 - RNA, 20 nt, Artificial Sequence
  Synthetic
gcccaacaaauuucacacuu

SEQ ID NO: 675242 - RNA, 21 nt, Artificial Sequence
  Synthetic
ggcccaacaaauuucacacuu

SEQ ID NO: 675243 - RNA, 22 nt, Artificial Sequence
  Synthetic
cggcccaacaaauuucacacuu

SEQ ID NO: 675244 - RNA, 23 nt, Artificial Sequence
  Synthetic
ccggcccaacaaauuucacacuu

SEQ ID NO: 675245 - RNA, 24 nt, Artificial Sequence
  Synthetic
gccggcccaacaaauuucacacuu

SEQ ID NO: 675246 - RNA, 18 nt, Artificial Sequence
  Synthetic
accaaagcucuuacacuu

SEQ ID NO: 675247 - RNA, 19 nt, Artificial Sequence
  Synthetic
uaccaaagcucuuacacuu

SEQ ID NO: 675248 - RNA, 20 nt, Artificial Sequence
  Synthetic
guaccaaagcucuuacacuu

SEQ ID NO: 675249 - RNA, 21 nt, Artificial Sequence
  Synthetic
aguaccaaagcucuuacacuu

SEQ ID NO: 675250 - RNA, 22 nt, Artificial Sequence
  Synthetic
uaguaccaaagcucuuacacuu

SEQ ID NO: 675251 - RNA, 23 nt, Artificial Sequence
  Synthetic
auaguaccaaagcucuuacacuu

SEQ ID NO: 675252 - RNA, 24 nt, Artificial Sequence
  Synthetic
uauaguaccaaagcucuuacacuu

SEQ ID NO: 675253 - RNA, 18 nt, Artificial Sequence
  Synthetic
aaaauggcacaaccacuu

SEQ ID NO: 675254 - RNA, 19 nt, Artificial Sequence
  Synthetic
caaaauggcacaaccacuu

SEQ ID NO: 675255 - RNA, 20 nt, Artificial Sequence
  Synthetic
gcaaaauggcacaaccacuu

SEQ ID NO: 675256 - RNA, 21 nt, Artificial Sequence
  Synthetic
ugcaaaauggcacaaccacuu

SEQ ID NO: 675257 - RNA, 22 nt, Artificial Sequence
  Synthetic
uugcaaaauggcacaaccacuu

SEQ ID NO: 675258 - RNA, 23 nt, Artificial Sequence
  Synthetic
auugcaaaauggcacaaccacuu

SEQ ID NO: 675259 - RNA, 24 nt, Artificial Sequence
  Synthetic
cauugcaaaauggcacaaccacuu

SEQ ID NO: 675260 - RNA, 18 nt, Artificial Sequence
  Synthetic
ccuguaaucccaccacuu

SEQ ID NO: 675261 - RNA, 19 nt, Artificial Sequence
  Synthetic
gccuguaaucccaccacuu

SEQ ID NO: 675262 - RNA, 20 nt, Artificial Sequence
  Synthetic
cgccuguaaucccaccacuu

SEQ ID NO: 675263 - RNA, 21 nt, Artificial Sequence
  Synthetic
acgccuguaaucccaccacuu

SEQ ID NO: 675264 - RNA, 22 nt, Artificial Sequence
  Synthetic
cacgccuguaaucccaccacuu

SEQ ID NO: 675265 - RNA, 23 nt, Artificial Sequence
  Synthetic
ucacgccuguaaucccaccacuu

SEQ ID NO: 675266 - RNA, 24 nt, Artificial Sequence
  Synthetic
cucacgccuguaaucccaccacuu

SEQ ID NO: 675267 - RNA, 18 nt, Artificial Sequence
  Synthetic
cagauaauuauaccacuu

SEQ ID NO: 675268 - RNA, 19 nt, Artificial Sequence
  Synthetic
ucagauaauuauaccacuu

SEQ ID NO: 675269 - RNA, 20 nt, Artificial Sequence
  Synthetic
aucagauaauuauaccacuu

SEQ ID NO: 675270 - RNA, 21 nt, Artificial Sequence
  Synthetic
aaucagauaauuauaccacuu

SEQ ID NO: 675271 - RNA, 22 nt, Artificial Sequence
  Synthetic
aaaucagauaauuauaccacuu

SEQ ID NO: 675272 - RNA, 23 nt, Artificial Sequence
  Synthetic
caaaucagauaauuauaccacuu

SEQ ID NO: 675273 - RNA, 24 nt, Artificial Sequence
  Synthetic
acaaaucagauaauuauaccacuu

SEQ ID NO: 675274 - RNA, 18 nt, Artificial Sequence
  Synthetic
aguuagcuuguaccacuu

SEQ ID NO: 675275 - RNA, 19 nt, Artificial Sequence
  Synthetic
caguuagcuuguaccacuu

SEQ ID NO: 675276 - RNA, 20 nt, Artificial Sequence
  Synthetic
ccaguuagcuuguaccacuu

SEQ ID NO: 675277 - RNA, 21 nt, Artificial Sequence
  Synthetic
gccaguuagcuuguaccacuu

SEQ ID NO: 675278 - RNA, 22 nt, Artificial Sequence
  Synthetic
cgccaguuagcuuguaccacuu

SEQ ID NO: 675279 - RNA, 23 nt, Artificial Sequence
  Synthetic
acgccaguuagcuuguaccacuu

SEQ ID NO: 675280 - RNA, 24 nt, Artificial Sequence
  Synthetic
aacgccaguuagcuuguaccacuu

SEQ ID NO: 675281 - RNA, 18 nt, Artificial Sequence
  Synthetic
ggggucaggaccccacuu

SEQ ID NO: 675282 - RNA, 19 nt, Artificial Sequence
  Synthetic
gggggucaggaccccacuu

SEQ ID NO: 675283 - RNA, 20 nt, Artificial Sequence
  Synthetic
cgggggucaggaccccacuu

SEQ ID NO: 675284 - RNA, 21 nt, Artificial Sequence
  Synthetic
acgggggucaggaccccacuu

SEQ ID NO: 675285 - RNA, 22 nt, Artificial Sequence
  Synthetic
cacgggggucaggaccccacuu

SEQ ID NO: 675286 - RNA, 23 nt, Artificial Sequence
  Synthetic
gcacgggggucaggaccccacuu

SEQ ID NO: 675287 - RNA, 24 nt, Artificial Sequence
  Synthetic
ggcacgggggucaggaccccacuu

SEQ ID NO: 675288 - RNA, 18 nt, Artificial Sequence
  Synthetic
uuuccuagucucccacuu

SEQ ID NO: 675289 - RNA, 19 nt, Artificial Sequence
  Synthetic
uuuuccuagucucccacuu

SEQ ID NO: 675290 - RNA, 20 nt, Artificial Sequence
  Synthetic
uuuuuccuagucucccacuu

SEQ ID NO: 675291 - RNA, 21 nt, Artificial Sequence
  Synthetic
auuuuuccuagucucccacuu

SEQ ID NO: 675292 - RNA, 22 nt, Artificial Sequence
  Synthetic
gauuuuuccuagucucccacuu

SEQ ID NO: 675293 - RNA, 23 nt, Artificial Sequence
  Synthetic
ugauuuuuccuagucucccacuu

SEQ ID NO: 675294 - RNA, 24 nt, Artificial Sequence
  Synthetic
augauuuuuccuagucucccacuu

SEQ ID NO: 675295 - RNA, 18 nt, Artificial Sequence
  Synthetic
cuguagucccagccacuu

SEQ ID NO: 675296 - RNA, 19 nt, Artificial Sequence
  Synthetic
ccuguagucccagccacuu

SEQ ID NO: 675297 - RNA, 20 nt, Artificial Sequence
  Synthetic
gccuguagucccagccacuu

SEQ ID NO: 675298 - RNA, 21 nt, Artificial Sequence
  Synthetic
ugccuguagucccagccacuu

SEQ ID NO: 675299 - RNA, 22 nt, Artificial Sequence
  Synthetic
gugccuguagucccagccacuu

SEQ ID NO: 675300 - RNA, 23 nt, Artificial Sequence
  Synthetic
cgugccuguagucccagccacuu

SEQ ID NO: 675301 - RNA, 24 nt, Artificial Sequence
  Synthetic
acgugccuguagucccagccacuu

SEQ ID NO: 675302 - RNA, 18 nt, Artificial Sequence
  Synthetic
uguaaagauuugccacuu

SEQ ID NO: 675303 - RNA, 19 nt, Artificial Sequence
  Synthetic
auguaaagauuugccacuu

SEQ ID NO: 675304 - RNA, 20 nt, Artificial Sequence
  Synthetic
aauguaaagauuugccacuu

SEQ ID NO: 675305 - RNA, 21 nt, Artificial Sequence
  Synthetic
uaauguaaagauuugccacuu

SEQ ID NO: 675306 - RNA, 22 nt, Artificial Sequence
  Synthetic
uuaauguaaagauuugccacuu

SEQ ID NO: 675307 - RNA, 23 nt, Artificial Sequence
  Synthetic
guuaauguaaagauuugccacuu

SEQ ID NO: 675308 - RNA, 24 nt, Artificial Sequence
  Synthetic
uguuaauguaaagauuugccacuu

SEQ ID NO: 675309 - RNA, 18 nt, Artificial Sequence
  Synthetic
cagugcuguaauccacuu

SEQ ID NO: 675310 - RNA, 19 nt, Artificial Sequence
  Synthetic
ucagugcuguaauccacuu

SEQ ID NO: 675311 - RNA, 20 nt, Artificial Sequence
  Synthetic
aucagugcuguaauccacuu

SEQ ID NO: 675312 - RNA, 21 nt, Artificial Sequence
  Synthetic
uaucagugcuguaauccacuu

SEQ ID NO: 675313 - RNA, 22 nt, Artificial Sequence
  Synthetic
uuaucagugcuguaauccacuu

SEQ ID NO: 675314 - RNA, 23 nt, Artificial Sequence
  Synthetic
guuaucagugcuguaauccacuu

SEQ ID NO: 675315 - RNA, 24 nt, Artificial Sequence
  Synthetic
aguuaucagugcuguaauccacuu

SEQ ID NO: 675316 - RNA, 18 nt, Artificial Sequence
  Synthetic
ugagauauacauccacuu

SEQ ID NO: 675317 - RNA, 19 nt, Artificial Sequence
  Synthetic
gugagauauacauccacuu

SEQ ID NO: 675318 - RNA, 20 nt, Artificial Sequence
  Synthetic
ugugagauauacauccacuu

SEQ ID NO: 675319 - RNA, 21 nt, Artificial Sequence
  Synthetic
augugagauauacauccacuu

SEQ ID NO: 675320 - RNA, 22 nt, Artificial Sequence
  Synthetic
aaugugagauauacauccacuu

SEQ ID NO: 675321 - RNA, 23 nt, Artificial Sequence
  Synthetic
aaaugugagauauacauccacuu

SEQ ID NO: 675322 - RNA, 24 nt, Artificial Sequence
  Synthetic
uaaaugugagauauacauccacuu

SEQ ID NO: 675323 - RNA, 18 nt, Artificial Sequence
  Synthetic
caaccauugccuccacuu

SEQ ID NO: 675324 - RNA, 19 nt, Artificial Sequence
  Synthetic
acaaccauugccuccacuu

SEQ ID NO: 675325 - RNA, 20 nt, Artificial Sequence
  Synthetic
aacaaccauugccuccacuu

SEQ ID NO: 675326 - RNA, 21 nt, Artificial Sequence
  Synthetic
aaacaaccauugccuccacuu

SEQ ID NO: 675327 - RNA, 22 nt, Artificial Sequence
  Synthetic
aaaacaaccauugccuccacuu

SEQ ID NO: 675328 - RNA, 23 nt, Artificial Sequence
  Synthetic
aaaaacaaccauugccuccacuu

SEQ ID NO: 675329 - RNA, 24 nt, Artificial Sequence
  Synthetic
uaaaaacaaccauugccuccacuu

SEQ ID NO: 675330 - RNA, 18 nt, Artificial Sequence
  Synthetic
guccucauaaguccacuu

SEQ ID NO: 675331 - RNA, 19 nt, Artificial Sequence
  Synthetic
uguccucauaaguccacuu

SEQ ID NO: 675332 - RNA, 20 nt, Artificial Sequence
  Synthetic
auguccucauaaguccacuu

SEQ ID NO: 675333 - RNA, 21 nt, Artificial Sequence
  Synthetic
cauguccucauaaguccacuu

SEQ ID NO: 675334 - RNA, 22 nt, Artificial Sequence
  Synthetic
gcauguccucauaaguccacuu

SEQ ID NO: 675335 - RNA, 23 nt, Artificial Sequence
  Synthetic
agcauguccucauaaguccacuu

SEQ ID NO: 675336 - RNA, 24 nt, Artificial Sequence
  Synthetic
aagcauguccucauaaguccacuu

SEQ ID NO: 675337 - RNA, 18 nt, Artificial Sequence
  Synthetic
ugcuuccauuuuccacuu

SEQ ID NO: 675338 - RNA, 19 nt, Artificial Sequence
  Synthetic
augcuuccauuuuccacuu

SEQ ID NO: 675339 - RNA, 20 nt, Artificial Sequence
  Synthetic
uaugcuuccauuuuccacuu

SEQ ID NO: 675340 - RNA, 21 nt, Artificial Sequence
  Synthetic
auaugcuuccauuuuccacuu

SEQ ID NO: 675341 - RNA, 22 nt, Artificial Sequence
  Synthetic
aauaugcuuccauuuuccacuu

SEQ ID NO: 675342 - RNA, 23 nt, Artificial Sequence
  Synthetic
caauaugcuuccauuuuccacuu

SEQ ID NO: 675343 - RNA, 24 nt, Artificial Sequence
  Synthetic
ucaauaugcuuccauuuuccacuu

SEQ ID NO: 675344 - RNA, 18 nt, Artificial Sequence
  Synthetic
augggcuggcaagcacuu

SEQ ID NO: 675345 - RNA, 19 nt, Artificial Sequence
  Synthetic
caugggcuggcaagcacuu

SEQ ID NO: 675346 - RNA, 20 nt, Artificial Sequence
  Synthetic
gcaugggcuggcaagcacuu

SEQ ID NO: 675347 - RNA, 21 nt, Artificial Sequence
  Synthetic
agcaugggcuggcaagcacuu

SEQ ID NO: 675348 - RNA, 22 nt, Artificial Sequence
  Synthetic
cagcaugggcuggcaagcacuu

SEQ ID NO: 675349 - RNA, 23 nt, Artificial Sequence
  Synthetic
ucagcaugggcuggcaagcacuu

SEQ ID NO: 675350 - RNA, 24 nt, Artificial Sequence
  Synthetic
cucagcaugggcuggcaagcacuu

SEQ ID NO: 675351 - RNA, 18 nt, Artificial Sequence
  Synthetic
ccuguaauaccagcacuu

SEQ ID NO: 675352 - RNA, 19 nt, Artificial Sequence
  Synthetic
gccuguaauaccagcacuu

SEQ ID NO: 675353 - RNA, 20 nt, Artificial Sequence
  Synthetic
ugccuguaauaccagcacuu

SEQ ID NO: 675354 - RNA, 21 nt, Artificial Sequence
  Synthetic
augccuguaauaccagcacuu

SEQ ID NO: 675355 - RNA, 22 nt, Artificial Sequence
  Synthetic
caugccuguaauaccagcacuu

SEQ ID NO: 675356 - RNA, 23 nt, Artificial Sequence
  Synthetic
ucaugccuguaauaccagcacuu

SEQ ID NO: 675357 - RNA, 24 nt, Artificial Sequence
  Synthetic
cucaugccuguaauaccagcacuu

SEQ ID NO: 675358 - RNA, 18 nt, Artificial Sequence
  Synthetic
ccuguaaacccagcacuu

SEQ ID NO: 675359 - RNA, 19 nt, Artificial Sequence
  Synthetic
gccuguaaacccagcacuu

SEQ ID NO: 675360 - RNA, 20 nt, Artificial Sequence
  Synthetic
cgccuguaaacccagcacuu

SEQ ID NO: 675361 - RNA, 21 nt, Artificial Sequence
  Synthetic
acgccuguaaacccagcacuu

SEQ ID NO: 675362 - RNA, 22 nt, Artificial Sequence
  Synthetic
cacgccuguaaacccagcacuu

SEQ ID NO: 675363 - RNA, 23 nt, Artificial Sequence
  Synthetic
ucacgccuguaaacccagcacuu

SEQ ID NO: 675364 - RNA, 24 nt, Artificial Sequence
  Synthetic
cucacgccuguaaacccagcacuu

SEQ ID NO: 675365 - RNA, 18 nt, Artificial Sequence
  Synthetic
acugaaaucccagcacuu

SEQ ID NO: 675366 - RNA, 19 nt, Artificial Sequence
  Synthetic
aacugaaaucccagcacuu

SEQ ID NO: 675367 - RNA, 20 nt, Artificial Sequence
  Synthetic
caacugaaaucccagcacuu

SEQ ID NO: 675368 - RNA, 21 nt, Artificial Sequence
  Synthetic
acaacugaaaucccagcacuu

SEQ ID NO: 675369 - RNA, 22 nt, Artificial Sequence
  Synthetic
cacaacugaaaucccagcacuu

SEQ ID NO: 675370 - RNA, 23 nt, Artificial Sequence
  Synthetic
ucacaacugaaaucccagcacuu

SEQ ID NO: 675371 - RNA, 24 nt, Artificial Sequence
  Synthetic
gucacaacugaaaucccagcacuu

SEQ ID NO: 675372 - RNA, 18 nt, Artificial Sequence
  Synthetic
cuguaaaucccagcacuu

SEQ ID NO: 675373 - RNA, 19 nt, Artificial Sequence
  Synthetic
ccuguaaaucccagcacuu

SEQ ID NO: 675374 - RNA, 20 nt, Artificial Sequence
  Synthetic
gccuguaaaucccagcacuu

SEQ ID NO: 675375 - RNA, 21 nt, Artificial Sequence
  Synthetic
cgccuguaaaucccagcacuu

SEQ ID NO: 675376 - RNA, 22 nt, Artificial Sequence
  Synthetic
acgccuguaaaucccagcacuu

SEQ ID NO: 675377 - RNA, 23 nt, Artificial Sequence
  Synthetic
cacgccuguaaaucccagcacuu

SEQ ID NO: 675378 - RNA, 24 nt, Artificial Sequence
  Synthetic
ucacgccuguaaaucccagcacuu

SEQ ID NO: 675379 - RNA, 18 nt, Artificial Sequence
  Synthetic
ucugcaaucccagcacuu

SEQ ID NO: 675380 - RNA, 19 nt, Artificial Sequence
  Synthetic
gucugcaaucccagcacuu

SEQ ID NO: 675381 - RNA, 20 nt, Artificial Sequence
  Synthetic
cgucugcaaucccagcacuu

SEQ ID NO: 675382 - RNA, 21 nt, Artificial Sequence
  Synthetic
acgucugcaaucccagcacuu

SEQ ID NO: 675383 - RNA, 22 nt, Artificial Sequence
  Synthetic
cacgucugcaaucccagcacuu

SEQ ID NO: 675384 - RNA, 23 nt, Artificial Sequence
  Synthetic
ucacgucugcaaucccagcacuu

SEQ ID NO: 675385 - RNA, 24 nt, Artificial Sequence
  Synthetic
cucacgucugcaaucccagcacuu

SEQ ID NO: 675386 - RNA, 18 nt, Artificial Sequence
  Synthetic
ccaguaaucccagcacuu

SEQ ID NO: 675387 - RNA, 19 nt, Artificial Sequence
  Synthetic
accaguaaucccagcacuu

SEQ ID NO: 675388 - RNA, 20 nt, Artificial Sequence
  Synthetic
caccaguaaucccagcacuu

SEQ ID NO: 675389 - RNA, 21 nt, Artificial Sequence
  Synthetic
acaccaguaaucccagcacuu

SEQ ID NO: 675390 - RNA, 22 nt, Artificial Sequence
  Synthetic
cacaccaguaaucccagcacuu

SEQ ID NO: 675391 - RNA, 23 nt, Artificial Sequence
  Synthetic
ucacaccaguaaucccagcacuu

SEQ ID NO: 675392 - RNA, 24 nt, Artificial Sequence
  Synthetic
cucacaccaguaaucccagcacuu

SEQ ID NO: 675393 - RNA, 18 nt, Artificial Sequence
  Synthetic
cccguaaucccagcacuu

SEQ ID NO: 675394 - RNA, 19 nt, Artificial Sequence
  Synthetic
gcccguaaucccagcacuu

SEQ ID NO: 675395 - RNA, 20 nt, Artificial Sequence
  Synthetic
ugcccguaaucccagcacuu

SEQ ID NO: 675396 - RNA, 21 nt, Artificial Sequence
  Synthetic
augcccguaaucccagcacuu

SEQ ID NO: 675397 - RNA, 22 nt, Artificial Sequence
  Synthetic
caugcccguaaucccagcacuu

SEQ ID NO: 675398 - RNA, 23 nt, Artificial Sequence
  Synthetic
ucaugcccguaaucccagcacuu

SEQ ID NO: 675399 - RNA, 24 nt, Artificial Sequence
  Synthetic
cucaugcccguaaucccagcacuu

SEQ ID NO: 675400 - RNA, 18 nt, Artificial Sequence
  Synthetic
acuguaaucccagcacuu

SEQ ID NO: 675401 - RNA, 19 nt, Artificial Sequence
  Synthetic
gacuguaaucccagcacuu

SEQ ID NO: 675402 - RNA, 20 nt, Artificial Sequence
  Synthetic
agacuguaaucccagcacuu

SEQ ID NO: 675403 - RNA, 21 nt, Artificial Sequence
  Synthetic
aagacuguaaucccagcacuu

SEQ ID NO: 675404 - RNA, 22 nt, Artificial Sequence
  Synthetic
caagacuguaaucccagcacuu

SEQ ID NO: 675405 - RNA, 23 nt, Artificial Sequence
  Synthetic
ucaagacuguaaucccagcacuu

SEQ ID NO: 675406 - RNA, 24 nt, Artificial Sequence
  Synthetic
cucaagacuguaaucccagcacuu

SEQ ID NO: 675407 - RNA, 21 nt, Artificial Sequence
  Synthetic
acaccuguaaucccagcacuu

SEQ ID NO: 675408 - RNA, 22 nt, Artificial Sequence
  Synthetic
cacaccuguaaucccagcacuu

SEQ ID NO: 675409 - RNA, 23 nt, Artificial Sequence
  Synthetic
ucacaccuguaaucccagcacuu

SEQ ID NO: 675410 - RNA, 24 nt, Artificial Sequence
  Synthetic
cucacaccuguaaucccagcacuu

SEQ ID NO: 675411 - RNA, 21 nt, Artificial Sequence
  Synthetic
uugccuguaaucccagcacuu

SEQ ID NO: 675412 - RNA, 22 nt, Artificial Sequence
  Synthetic
cuugccuguaaucccagcacuu

SEQ ID NO: 675413 - RNA, 23 nt, Artificial Sequence
  Synthetic
ucuugccuguaaucccagcacuu

SEQ ID NO: 675414 - RNA, 24 nt, Artificial Sequence
  Synthetic
cucuugccuguaaucccagcacuu

SEQ ID NO: 675415 - RNA, 18 nt, Artificial Sequence
  Synthetic
ucuguaaucccagcacuu

SEQ ID NO: 675416 - RNA, 19 nt, Artificial Sequence
  Synthetic
gucuguaaucccagcacuu

SEQ ID NO: 675417 - RNA, 20 nt, Artificial Sequence
  Synthetic
ggucuguaaucccagcacuu

SEQ ID NO: 675418 - RNA, 21 nt, Artificial Sequence
  Synthetic
aggucuguaaucccagcacuu

SEQ ID NO: 675419 - RNA, 22 nt, Artificial Sequence
  Synthetic
caggucuguaaucccagcacuu

SEQ ID NO: 675420 - RNA, 23 nt, Artificial Sequence
  Synthetic
ucaggucuguaaucccagcacuu

SEQ ID NO: 675421 - RNA, 24 nt, Artificial Sequence
  Synthetic
cucaggucuguaaucccagcacuu

SEQ ID NO: 675422 - RNA, 18 nt, Artificial Sequence
  Synthetic
gccuguaucccagcacuu

SEQ ID NO: 675423 - RNA, 19 nt, Artificial Sequence
  Synthetic
cgccuguaucccagcacuu

SEQ ID NO: 675424 - RNA, 20 nt, Artificial Sequence
  Synthetic
acgccuguaucccagcacuu

SEQ ID NO: 675425 - RNA, 21 nt, Artificial Sequence
  Synthetic
cacgccuguaucccagcacuu

SEQ ID NO: 675426 - RNA, 22 nt, Artificial Sequence
  Synthetic
ucacgccuguaucccagcacuu

SEQ ID NO: 675427 - RNA, 23 nt, Artificial Sequence
  Synthetic
cucacgccuguaucccagcacuu

SEQ ID NO: 675428 - RNA, 24 nt, Artificial Sequence
  Synthetic
gcucacgccuguaucccagcacuu

SEQ ID NO: 675429 - RNA, 18 nt, Artificial Sequence
  Synthetic
ugcgguggcucagcacuu

SEQ ID NO: 675430 - RNA, 19 nt, Artificial Sequence
  Synthetic
gugcgguggcucagcacuu

SEQ ID NO: 675431 - RNA, 20 nt, Artificial Sequence
  Synthetic
ggugcgguggcucagcacuu

SEQ ID NO: 675432 - RNA, 21 nt, Artificial Sequence
  Synthetic
gggugcgguggcucagcacuu

SEQ ID NO: 675433 - RNA, 22 nt, Artificial Sequence
  Synthetic
ugggugcgguggcucagcacuu

SEQ ID NO: 675434 - RNA, 23 nt, Artificial Sequence
  Synthetic
cugggugcgguggcucagcacuu

SEQ ID NO: 675435 - RNA, 24 nt, Artificial Sequence
  Synthetic
gcugggugcgguggcucagcacuu

SEQ ID NO: 675436 - RNA, 18 nt, Artificial Sequence
  Synthetic
ccuguaaucucagcacuu

SEQ ID NO: 675437 - RNA, 19 nt, Artificial Sequence
  Synthetic
gccuguaaucucagcacuu

SEQ ID NO: 675438 - RNA, 20 nt, Artificial Sequence
  Synthetic
cgccuguaaucucagcacuu

SEQ ID NO: 675439 - RNA, 21 nt, Artificial Sequence
  Synthetic
acgccuguaaucucagcacuu

SEQ ID NO: 675440 - RNA, 22 nt, Artificial Sequence
  Synthetic
gacgccuguaaucucagcacuu

SEQ ID NO: 675441 - RNA, 23 nt, Artificial Sequence
  Synthetic
ugacgccuguaaucucagcacuu

SEQ ID NO: 675442 - RNA, 24 nt, Artificial Sequence
  Synthetic
cugacgccuguaaucucagcacuu

SEQ ID NO: 675443 - RNA, 18 nt, Artificial Sequence
  Synthetic
ucuguaauuucagcacuu

SEQ ID NO: 675444 - RNA, 19 nt, Artificial Sequence
  Synthetic
gucuguaauuucagcacuu

SEQ ID NO: 675445 - RNA, 20 nt, Artificial Sequence
  Synthetic
ugucuguaauuucagcacuu

SEQ ID NO: 675446 - RNA, 21 nt, Artificial Sequence
  Synthetic
augucuguaauuucagcacuu

SEQ ID NO: 675447 - RNA, 22 nt, Artificial Sequence
  Synthetic
caugucuguaauuucagcacuu

SEQ ID NO: 675448 - RNA, 23 nt, Artificial Sequence
  Synthetic
ccaugucuguaauuucagcacuu

SEQ ID NO: 675449 - RNA, 24 nt, Artificial Sequence
  Synthetic
accaugucuguaauuucagcacuu

SEQ ID NO: 675450 - RNA, 18 nt, Artificial Sequence
  Synthetic
cagacugacauagcacuu

SEQ ID NO: 675451 - RNA, 19 nt, Artificial Sequence
  Synthetic
gcagacugacauagcacuu

SEQ ID NO: 675452 - RNA, 20 nt, Artificial Sequence
  Synthetic
agcagacugacauagcacuu

SEQ ID NO: 675453 - RNA, 21 nt, Artificial Sequence
  Synthetic
cagcagacugacauagcacuu

SEQ ID NO: 675454 - RNA, 22 nt, Artificial Sequence
  Synthetic
acagcagacugacauagcacuu

SEQ ID NO: 675455 - RNA, 23 nt, Artificial Sequence
  Synthetic
uacagcagacugacauagcacuu

SEQ ID NO: 675456 - RNA, 24 nt, Artificial Sequence
  Synthetic
auacagcagacugacauagcacuu

SEQ ID NO: 675457 - RNA, 18 nt, Artificial Sequence
  Synthetic
ccuauaauccuagcacuu

SEQ ID NO: 675458 - RNA, 19 nt, Artificial Sequence
  Synthetic
gccuauaauccuagcacuu

SEQ ID NO: 675459 - RNA, 20 nt, Artificial Sequence
  Synthetic
ugccuauaauccuagcacuu

SEQ ID NO: 675460 - RNA, 21 nt, Artificial Sequence
  Synthetic
cugccuauaauccuagcacuu

SEQ ID NO: 675461 - RNA, 22 nt, Artificial Sequence
  Synthetic
ccugccuauaauccuagcacuu

SEQ ID NO: 675462 - RNA, 23 nt, Artificial Sequence
  Synthetic
gccugccuauaauccuagcacuu

SEQ ID NO: 675463 - RNA, 24 nt, Artificial Sequence
  Synthetic
ugccugccuauaauccuagcacuu

SEQ ID NO: 675464 - RNA, 18 nt, Artificial Sequence
  Synthetic
ccuguaauccuagcacuu

SEQ ID NO: 675465 - RNA, 19 nt, Artificial Sequence
  Synthetic
gccuguaauccuagcacuu

SEQ ID NO: 675466 - RNA, 20 nt, Artificial Sequence
  Synthetic
cgccuguaauccuagcacuu

SEQ ID NO: 675467 - RNA, 21 nt, Artificial Sequence
  Synthetic
acgccuguaauccuagcacuu

SEQ ID NO: 675468 - RNA, 22 nt, Artificial Sequence
  Synthetic
cacgccuguaauccuagcacuu

SEQ ID NO: 675469 - RNA, 23 nt, Artificial Sequence
  Synthetic
ucacgccuguaauccuagcacuu

SEQ ID NO: 675470 - RNA, 24 nt, Artificial Sequence
  Synthetic
cucacgccuguaauccuagcacuu

SEQ ID NO: 675471 - RNA, 18 nt, Artificial Sequence
  Synthetic
cuucguuuccuagcacuu

SEQ ID NO: 675472 - RNA, 19 nt, Artificial Sequence
  Synthetic
ucuucguuuccuagcacuu

SEQ ID NO: 675473 - RNA, 20 nt, Artificial Sequence
  Synthetic
uucuucguuuccuagcacuu

SEQ ID NO: 675474 - RNA, 21 nt, Artificial Sequence
  Synthetic
uuucuucguuuccuagcacuu

SEQ ID NO: 675475 - RNA, 22 nt, Artificial Sequence
  Synthetic
cuuucuucguuuccuagcacuu

SEQ ID NO: 675476 - RNA, 23 nt, Artificial Sequence
  Synthetic
ccuuucuucguuuccuagcacuu

SEQ ID NO: 675477 - RNA, 24 nt, Artificial Sequence
  Synthetic
cccuuucuucguuuccuagcacuu

SEQ ID NO: 675478 - RNA, 18 nt, Artificial Sequence
  Synthetic
ucugugauuuuagcacuu

SEQ ID NO: 675479 - RNA, 19 nt, Artificial Sequence
  Synthetic
gucugugauuuuagcacuu

SEQ ID NO: 675480 - RNA, 20 nt, Artificial Sequence
  Synthetic
cgucugugauuuuagcacuu

SEQ ID NO: 675481 - RNA, 21 nt, Artificial Sequence
  Synthetic
acgucugugauuuuagcacuu

SEQ ID NO: 675482 - RNA, 22 nt, Artificial Sequence
  Synthetic
cacgucugugauuuuagcacuu

SEQ ID NO: 675483 - RNA, 23 nt, Artificial Sequence
  Synthetic
ucacgucugugauuuuagcacuu

SEQ ID NO: 675484 - RNA, 24 nt, Artificial Sequence
  Synthetic
cucacgucugugauuuuagcacuu

SEQ ID NO: 675485 - RNA, 18 nt, Artificial Sequence
  Synthetic
ugucuaguuuuagcacuu

SEQ ID NO: 675486 - RNA, 19 nt, Artificial Sequence
  Synthetic
uugucuaguuuuagcacuu

SEQ ID NO: 675487 - RNA, 20 nt, Artificial Sequence
  Synthetic
auugucuaguuuuagcacuu

SEQ ID NO: 675488 - RNA, 21 nt, Artificial Sequence
  Synthetic
uauugucuaguuuuagcacuu

SEQ ID NO: 675489 - RNA, 22 nt, Artificial Sequence
  Synthetic
uuauugucuaguuuuagcacuu

SEQ ID NO: 675490 - RNA, 23 nt, Artificial Sequence
  Synthetic
uuuauugucuaguuuuagcacuu

SEQ ID NO: 675491 - RNA, 24 nt, Artificial Sequence
  Synthetic
auuuauugucuaguuuuagcacuu

SEQ ID NO: 675492 - RNA, 18 nt, Artificial Sequence
  Synthetic
ccuguaauccccgcacuu

SEQ ID NO: 675493 - RNA, 19 nt, Artificial Sequence
  Synthetic
accuguaauccccgcacuu

SEQ ID NO: 675494 - RNA, 20 nt, Artificial Sequence
  Synthetic
caccuguaauccccgcacuu

SEQ ID NO: 675495 - RNA, 21 nt, Artificial Sequence
  Synthetic
acaccuguaauccccgcacuu

SEQ ID NO: 675496 - RNA, 22 nt, Artificial Sequence
  Synthetic
cacaccuguaauccccgcacuu

SEQ ID NO: 675497 - RNA, 23 nt, Artificial Sequence
  Synthetic
ucacaccuguaauccccgcacuu

SEQ ID NO: 675498 - RNA, 24 nt, Artificial Sequence
  Synthetic
cucacaccuguaauccccgcacuu

SEQ ID NO: 675499 - RNA, 19 nt, Artificial Sequence
  Synthetic
gccuguaauccccgcacuu

SEQ ID NO: 675500 - RNA, 20 nt, Artificial Sequence
  Synthetic
cgccuguaauccccgcacuu

SEQ ID NO: 675501 - RNA, 21 nt, Artificial Sequence
  Synthetic
acgccuguaauccccgcacuu

SEQ ID NO: 675502 - RNA, 22 nt, Artificial Sequence
  Synthetic
cacgccuguaauccccgcacuu

SEQ ID NO: 675503 - RNA, 23 nt, Artificial Sequence
  Synthetic
ucacgccuguaauccccgcacuu

SEQ ID NO: 675504 - RNA, 24 nt, Artificial Sequence
  Synthetic
cucacgccuguaauccccgcacuu

SEQ ID NO: 675505 - RNA, 20 nt, Artificial Sequence
  Synthetic
ugccuguaauccccgcacuu

SEQ ID NO: 675506 - RNA, 21 nt, Artificial Sequence
  Synthetic
augccuguaauccccgcacuu

SEQ ID NO: 675507 - RNA, 22 nt, Artificial Sequence
  Synthetic
caugccuguaauccccgcacuu

SEQ ID NO: 675508 - RNA, 23 nt, Artificial Sequence
  Synthetic
ucaugccuguaauccccgcacuu

SEQ ID NO: 675509 - RNA, 24 nt, Artificial Sequence
  Synthetic
cucaugccuguaauccccgcacuu

SEQ ID NO: 675510 - RNA, 18 nt, Artificial Sequence
  Synthetic
uuguguugucuggcacuu

SEQ ID NO: 675511 - RNA, 19 nt, Artificial Sequence
  Synthetic
uuuguguugucuggcacuu

SEQ ID NO: 675512 - RNA, 20 nt, Artificial Sequence
  Synthetic
uuuuguguugucuggcacuu

SEQ ID NO: 675513 - RNA, 21 nt, Artificial Sequence
  Synthetic
guuuuguguugucuggcacuu

SEQ ID NO: 675514 - RNA, 22 nt, Artificial Sequence
  Synthetic
cguuuuguguugucuggcacuu

SEQ ID NO: 675515 - RNA, 23 nt, Artificial Sequence
  Synthetic
acguuuuguguugucuggcacuu

SEQ ID NO: 675516 - RNA, 24 nt, Artificial Sequence
  Synthetic
uacguuuuguguugucuggcacuu

SEQ ID NO: 675517 - RNA, 18 nt, Artificial Sequence
  Synthetic
ccuuuuguguaugcacuu

SEQ ID NO: 675518 - RNA, 19 nt, Artificial Sequence
  Synthetic
uccuuuuguguaugcacuu

SEQ ID NO: 675519 - RNA, 20 nt, Artificial Sequence
  Synthetic
uuccuuuuguguaugcacuu

SEQ ID NO: 675520 - RNA, 21 nt, Artificial Sequence
  Synthetic
uuuccuuuuguguaugcacuu

SEQ ID NO: 675521 - RNA, 22 nt, Artificial Sequence
  Synthetic
cuuuccuuuuguguaugcacuu

SEQ ID NO: 675522 - RNA, 23 nt, Artificial Sequence
  Synthetic
acuuuccuuuuguguaugcacuu

SEQ ID NO: 675523 - RNA, 24 nt, Artificial Sequence
  Synthetic
uacuuuccuuuuguguaugcacuu

SEQ ID NO: 675524 - RNA, 18 nt, Artificial Sequence
  Synthetic
cacuucauaguugcacuu

SEQ ID NO: 675525 - RNA, 19 nt, Artificial Sequence
  Synthetic
ucacuucauaguugcacuu

SEQ ID NO: 675526 - RNA, 20 nt, Artificial Sequence
  Synthetic
aucacuucauaguugcacuu

SEQ ID NO: 675527 - RNA, 21 nt, Artificial Sequence
  Synthetic
caucacuucauaguugcacuu

SEQ ID NO: 675528 - RNA, 22 nt, Artificial Sequence
  Synthetic
ucaucacuucauaguugcacuu

SEQ ID NO: 675529 - RNA, 23 nt, Artificial Sequence
  Synthetic
gucaucacuucauaguugcacuu

SEQ ID NO: 675530 - RNA, 24 nt, Artificial Sequence
  Synthetic
agucaucacuucauaguugcacuu

SEQ ID NO: 675531 - RNA, 18 nt, Artificial Sequence
  Synthetic
gagggaaucuuugcacuu

SEQ ID NO: 675532 - RNA, 19 nt, Artificial Sequence
  Synthetic
agagggaaucuuugcacuu

SEQ ID NO: 675533 - RNA, 20 nt, Artificial Sequence
  Synthetic
gagagggaaucuuugcacuu

SEQ ID NO: 675534 - RNA, 21 nt, Artificial Sequence
  Synthetic
agagagggaaucuuugcacuu

SEQ ID NO: 675535 - RNA, 22 nt, Artificial Sequence
  Synthetic
cagagagggaaucuuugcacuu

SEQ ID NO: 675536 - RNA, 23 nt, Artificial Sequence
  Synthetic
gcagagagggaaucuuugcacuu

SEQ ID NO: 675537 - RNA, 24 nt, Artificial Sequence
  Synthetic
ugcagagagggaaucuuugcacuu

SEQ ID NO: 675538 - RNA, 18 nt, Artificial Sequence
  Synthetic
accuuugauagaucacuu

SEQ ID NO: 675539 - RNA, 19 nt, Artificial Sequence
  Synthetic
caccuuugauagaucacuu

SEQ ID NO: 675540 - RNA, 20 nt, Artificial Sequence
  Synthetic
gcaccuuugauagaucacuu

SEQ ID NO: 675541 - RNA, 21 nt, Artificial Sequence
  Synthetic
ugcaccuuugauagaucacuu

SEQ ID NO: 675542 - RNA, 22 nt, Artificial Sequence
  Synthetic
augcaccuuugauagaucacuu

SEQ ID NO: 675543 - RNA, 23 nt, Artificial Sequence
  Synthetic
aaugcaccuuugauagaucacuu

SEQ ID NO: 675544 - RNA, 24 nt, Artificial Sequence
  Synthetic
aaaugcaccuuugauagaucacuu

SEQ ID NO: 675545 - RNA, 18 nt, Artificial Sequence
  Synthetic
gagguagguggaucacuu

SEQ ID NO: 675546 - RNA, 19 nt, Artificial Sequence
  Synthetic
cgagguagguggaucacuu

SEQ ID NO: 675547 - RNA, 20 nt, Artificial Sequence
  Synthetic
ccgagguagguggaucacuu

SEQ ID NO: 675548 - RNA, 21 nt, Artificial Sequence
  Synthetic
gccgagguagguggaucacuu

SEQ ID NO: 675549 - RNA, 22 nt, Artificial Sequence
  Synthetic
ggccgagguagguggaucacuu

SEQ ID NO: 675550 - RNA, 23 nt, Artificial Sequence
  Synthetic
aggccgagguagguggaucacuu

SEQ ID NO: 675551 - RNA, 24 nt, Artificial Sequence
  Synthetic
gaggccgagguagguggaucacuu

SEQ ID NO: 675552 - RNA, 18 nt, Artificial Sequence
  Synthetic
uaaugucaaauaucacuu

SEQ ID NO: 675553 - RNA, 19 nt, Artificial Sequence
  Synthetic
cuaaugucaaauaucacuu

SEQ ID NO: 675554 - RNA, 20 nt, Artificial Sequence
  Synthetic
ucuaaugucaaauaucacuu

SEQ ID NO: 675555 - RNA, 21 nt, Artificial Sequence
  Synthetic
uucuaaugucaaauaucacuu

SEQ ID NO: 675556 - RNA, 22 nt, Artificial Sequence
  Synthetic
uuucuaaugucaaauaucacuu

SEQ ID NO: 675557 - RNA, 23 nt, Artificial Sequence
  Synthetic
cuuucuaaugucaaauaucacuu

SEQ ID NO: 675558 - RNA, 24 nt, Artificial Sequence
  Synthetic
gcuuucuaaugucaaauaucacuu

SEQ ID NO: 675559 - RNA, 18 nt, Artificial Sequence
  Synthetic
ucacagcacuuaucacuu

SEQ ID NO: 675560 - RNA, 19 nt, Artificial Sequence
  Synthetic
uucacagcacuuaucacuu

SEQ ID NO: 675561 - RNA, 20 nt, Artificial Sequence
  Synthetic
uuucacagcacuuaucacuu

SEQ ID NO: 675562 - RNA, 21 nt, Artificial Sequence
  Synthetic
uuuucacagcacuuaucacuu

SEQ ID NO: 675563 - RNA, 22 nt, Artificial Sequence
  Synthetic
uuuuucacagcacuuaucacuu

SEQ ID NO: 675564 - RNA, 23 nt, Artificial Sequence
  Synthetic
uuuuuucacagcacuuaucacuu

SEQ ID NO: 675565 - RNA, 24 nt, Artificial Sequence
  Synthetic
uuuuuuucacagcacuuaucacuu

SEQ ID NO: 675566 - RNA, 18 nt, Artificial Sequence
  Synthetic
ggcuucauuuuaucacuu

SEQ ID NO: 675567 - RNA, 19 nt, Artificial Sequence
  Synthetic
uggcuucauuuuaucacuu

SEQ ID NO: 675568 - RNA, 20 nt, Artificial Sequence
  Synthetic
cuggcuucauuuuaucacuu

SEQ ID NO: 675569 - RNA, 21 nt, Artificial Sequence
  Synthetic
gcuggcuucauuuuaucacuu

SEQ ID NO: 675570 - RNA, 22 nt, Artificial Sequence
  Synthetic
agcuggcuucauuuuaucacuu

SEQ ID NO: 675571 - RNA, 23 nt, Artificial Sequence
  Synthetic
cagcuggcuucauuuuaucacuu

SEQ ID NO: 675572 - RNA, 24 nt, Artificial Sequence
  Synthetic
ccagcuggcuucauuuuaucacuu

SEQ ID NO: 675573 - RNA, 18 nt, Artificial Sequence
  Synthetic
auaaagccaaacucacuu

SEQ ID NO: 675574 - RNA, 19 nt, Artificial Sequence
  Synthetic
uauaaagccaaacucacuu

SEQ ID NO: 675575 - RNA, 20 nt, Artificial Sequence
  Synthetic
cuauaaagccaaacucacuu

SEQ ID NO: 675576 - RNA, 21 nt, Artificial Sequence
  Synthetic
acuauaaagccaaacucacuu

SEQ ID NO: 675577 - RNA, 22 nt, Artificial Sequence
  Synthetic
aacuauaaagccaaacucacuu

SEQ ID NO: 675578 - RNA, 23 nt, Artificial Sequence
  Synthetic
uaacuauaaagccaaacucacuu

SEQ ID NO: 675579 - RNA, 24 nt, Artificial Sequence
  Synthetic
auaacuauaaagccaaacucacuu

SEQ ID NO: 675580 - RNA, 18 nt, Artificial Sequence
  Synthetic
ggacaaauucccucacuu

SEQ ID NO: 675581 - RNA, 19 nt, Artificial Sequence
  Synthetic
gggacaaauucccucacuu

SEQ ID NO: 675582 - RNA, 20 nt, Artificial Sequence
  Synthetic
agggacaaauucccucacuu

SEQ ID NO: 675583 - RNA, 21 nt, Artificial Sequence
  Synthetic
aagggacaaauucccucacuu

SEQ ID NO: 675584 - RNA, 22 nt, Artificial Sequence
  Synthetic
uaagggacaaauucccucacuu

SEQ ID NO: 675585 - RNA, 23 nt, Artificial Sequence
  Synthetic
cuaagggacaaauucccucacuu

SEQ ID NO: 675586 - RNA, 24 nt, Artificial Sequence
  Synthetic
ucuaagggacaaauucccucacuu

SEQ ID NO: 675587 - RNA, 18 nt, Artificial Sequence
  Synthetic
uuuaccaaaugcucacuu

SEQ ID NO: 675588 - RNA, 19 nt, Artificial Sequence
  Synthetic
uuuuaccaaaugcucacuu

SEQ ID NO: 675589 - RNA, 20 nt, Artificial Sequence
  Synthetic
auuuuaccaaaugcucacuu

SEQ ID NO: 675590 - RNA, 21 nt, Artificial Sequence
  Synthetic
uauuuuaccaaaugcucacuu

SEQ ID NO: 675591 - RNA, 22 nt, Artificial Sequence
  Synthetic
auauuuuaccaaaugcucacuu

SEQ ID NO: 675592 - RNA, 23 nt, Artificial Sequence
  Synthetic
aauauuuuaccaaaugcucacuu

SEQ ID NO: 675593 - RNA, 24 nt, Artificial Sequence
  Synthetic
gaauauuuuaccaaaugcucacuu

SEQ ID NO: 675594 - RNA, 18 nt, Artificial Sequence
  Synthetic
auguagcuuuucucacuu

SEQ ID NO: 675595 - RNA, 19 nt, Artificial Sequence
  Synthetic
uauguagcuuuucucacuu

SEQ ID NO: 675596 - RNA, 20 nt, Artificial Sequence
  Synthetic
uuauguagcuuuucucacuu

SEQ ID NO: 675597 - RNA, 21 nt, Artificial Sequence
  Synthetic
uuuauguagcuuuucucacuu

SEQ ID NO: 675598 - RNA, 22 nt, Artificial Sequence
  Synthetic
guuuauguagcuuuucucacuu

SEQ ID NO: 675599 - RNA, 23 nt, Artificial Sequence
  Synthetic
aguuuauguagcuuuucucacuu

SEQ ID NO: 675600 - RNA, 24 nt, Artificial Sequence
  Synthetic
uaguuuauguagcuuuucucacuu

SEQ ID NO: 675601 - RNA, 18 nt, Artificial Sequence
  Synthetic
uuaaccugccauucacuu

SEQ ID NO: 675602 - RNA, 19 nt, Artificial Sequence
  Synthetic
uuuaaccugccauucacuu

SEQ ID NO: 675603 - RNA, 20 nt, Artificial Sequence
  Synthetic
uuuuaaccugccauucacuu

SEQ ID NO: 675604 - RNA, 21 nt, Artificial Sequence
  Synthetic
auuuuaaccugccauucacuu

SEQ ID NO: 675605 - RNA, 22 nt, Artificial Sequence
  Synthetic
cauuuuaaccugccauucacuu

SEQ ID NO: 675606 - RNA, 23 nt, Artificial Sequence
  Synthetic
ccauuuuaaccugccauucacuu

SEQ ID NO: 675607 - RNA, 24 nt, Artificial Sequence
  Synthetic
cccauuuuaaccugccauucacuu

SEQ ID NO: 675608 - RNA, 18 nt, Artificial Sequence
  Synthetic
gggggcaaagguucacuu

SEQ ID NO: 675609 - RNA, 19 nt, Artificial Sequence
  Synthetic
ugggggcaaagguucacuu

SEQ ID NO: 675610 - RNA, 20 nt, Artificial Sequence
  Synthetic
cugggggcaaagguucacuu

SEQ ID NO: 675611 - RNA, 21 nt, Artificial Sequence
  Synthetic
acugggggcaaagguucacuu

SEQ ID NO: 675612 - RNA, 22 nt, Artificial Sequence
  Synthetic
aacugggggcaaagguucacuu

SEQ ID NO: 675613 - RNA, 23 nt, Artificial Sequence
  Synthetic
uaacugggggcaaagguucacuu

SEQ ID NO: 675614 - RNA, 24 nt, Artificial Sequence
  Synthetic
auaacugggggcaaagguucacuu

SEQ ID NO: 675615 - RNA, 18 nt, Artificial Sequence
  Synthetic
ugcacauuauuuucacuu

SEQ ID NO: 675616 - RNA, 19 nt, Artificial Sequence
  Synthetic
gugcacauuauuuucacuu

SEQ ID NO: 675617 - RNA, 20 nt, Artificial Sequence
  Synthetic
ugugcacauuauuuucacuu

SEQ ID NO: 675618 - RNA, 21 nt, Artificial Sequence
  Synthetic
cugugcacauuauuuucacuu

SEQ ID NO: 675619 - RNA, 22 nt, Artificial Sequence
  Synthetic
ccugugcacauuauuuucacuu

SEQ ID NO: 675620 - RNA, 23 nt, Artificial Sequence
  Synthetic
accugugcacauuauuuucacuu

SEQ ID NO: 675621 - RNA, 24 nt, Artificial Sequence
  Synthetic
gaccugugcacauuauuuucacuu

SEQ ID NO: 675622 - RNA, 18 nt, Artificial Sequence
  Synthetic
agaaaugaguuuucacuu

SEQ ID NO: 675623 - RNA, 19 nt, Artificial Sequence
  Synthetic
uagaaaugaguuuucacuu

SEQ ID NO: 675624 - RNA, 20 nt, Artificial Sequence
  Synthetic
uuagaaaugaguuuucacuu

SEQ ID NO: 675625 - RNA, 21 nt, Artificial Sequence
  Synthetic
auuagaaaugaguuuucacuu

SEQ ID NO: 675626 - RNA, 22 nt, Artificial Sequence
  Synthetic
uauuagaaaugaguuuucacuu

SEQ ID NO: 675627 - RNA, 23 nt, Artificial Sequence
  Synthetic
auauuagaaaugaguuuucacuu

SEQ ID NO: 675628 - RNA, 24 nt, Artificial Sequence
  Synthetic
aauauuagaaaugaguuuucacuu

SEQ ID NO: 675629 - RNA, 18 nt, Artificial Sequence
  Synthetic
uuuuucacaaaaagacuu

SEQ ID NO: 675630 - RNA, 19 nt, Artificial Sequence
  Synthetic
auuuuucacaaaaagacuu

SEQ ID NO: 675631 - RNA, 20 nt, Artificial Sequence
  Synthetic
aauuuuucacaaaaagacuu

SEQ ID NO: 675632 - RNA, 21 nt, Artificial Sequence
  Synthetic
aaauuuuucacaaaaagacuu

SEQ ID NO: 675633 - RNA, 22 nt, Artificial Sequence
  Synthetic
gaaauuuuucacaaaaagacuu

SEQ ID NO: 675634 - RNA, 23 nt, Artificial Sequence
  Synthetic
ugaaauuuuucacaaaaagacuu

SEQ ID NO: 675635 - RNA, 24 nt, Artificial Sequence
  Synthetic
uugaaauuuuucacaaaaagacuu

SEQ ID NO: 675636 - RNA, 18 nt, Artificial Sequence
  Synthetic
uuucuugaugaaagacuu

SEQ ID NO: 675637 - RNA, 19 nt, Artificial Sequence
  Synthetic
cuuucuugaugaaagacuu

SEQ ID NO: 675638 - RNA, 20 nt, Artificial Sequence
  Synthetic
ucuuucuugaugaaagacuu

SEQ ID NO: 675639 - RNA, 21 nt, Artificial Sequence
  Synthetic
cucuuucuugaugaaagacuu

SEQ ID NO: 675640 - RNA, 22 nt, Artificial Sequence
  Synthetic
ccucuuucuugaugaaagacuu

SEQ ID NO: 675641 - RNA, 23 nt, Artificial Sequence
  Synthetic
gccucuuucuugaugaaagacuu

SEQ ID NO: 675642 - RNA, 24 nt, Artificial Sequence
  Synthetic
ugccucuuucuugaugaaagacuu

SEQ ID NO: 675643 - RNA, 18 nt, Artificial Sequence
  Synthetic
ccuugaggauaaagacuu

SEQ ID NO: 675644 - RNA, 19 nt, Artificial Sequence
  Synthetic
accuugaggauaaagacuu

SEQ ID NO: 675645 - RNA, 20 nt, Artificial Sequence
  Synthetic
uaccuugaggauaaagacuu

SEQ ID NO: 675646 - RNA, 21 nt, Artificial Sequence
  Synthetic
cuaccuugaggauaaagacuu

SEQ ID NO: 675647 - RNA, 22 nt, Artificial Sequence
  Synthetic
ccuaccuugaggauaaagacuu

SEQ ID NO: 675648 - RNA, 23 nt, Artificial Sequence
  Synthetic
gccuaccuugaggauaaagacuu

SEQ ID NO: 675649 - RNA, 24 nt, Artificial Sequence
  Synthetic
agccuaccuugaggauaaagacuu

SEQ ID NO: 675650 - RNA, 18 nt, Artificial Sequence
  Synthetic
uguggaggcagaagacuu

SEQ ID NO: 675651 - RNA, 19 nt, Artificial Sequence
  Synthetic
uuguggaggcagaagacuu

SEQ ID NO: 675652 - RNA, 20 nt, Artificial Sequence
  Synthetic
uuuguggaggcagaagacuu

SEQ ID NO: 675653 - RNA, 21 nt, Artificial Sequence
  Synthetic
guuuguggaggcagaagacuu

SEQ ID NO: 675654 - RNA, 22 nt, Artificial Sequence
  Synthetic
gguuuguggaggcagaagacuu

SEQ ID NO: 675655 - RNA, 23 nt, Artificial Sequence
  Synthetic
ggguuuguggaggcagaagacuu

SEQ ID NO: 675656 - RNA, 24 nt, Artificial Sequence
  Synthetic
gggguuuguggaggcagaagacuu

SEQ ID NO: 675657 - RNA, 18 nt, Artificial Sequence
  Synthetic
uauuuugagagaagacuu

SEQ ID NO: 675658 - RNA, 19 nt, Artificial Sequence
  Synthetic
cuauuuugagagaagacuu

SEQ ID NO: 675659 - RNA, 20 nt, Artificial Sequence
  Synthetic
acuauuuugagagaagacuu

SEQ ID NO: 675660 - RNA, 21 nt, Artificial Sequence
  Synthetic
uacuauuuugagagaagacuu

SEQ ID NO: 675661 - RNA, 22 nt, Artificial Sequence
  Synthetic
uuacuauuuugagagaagacuu

SEQ ID NO: 675662 - RNA, 23 nt, Artificial Sequence
  Synthetic
uuuacuauuuugagagaagacuu

SEQ ID NO: 675663 - RNA, 24 nt, Artificial Sequence
  Synthetic
guuuacuauuuugagagaagacuu

SEQ ID NO: 675664 - RNA, 18 nt, Artificial Sequence
  Synthetic
uuucuuuugagaagacuu

SEQ ID NO: 675665 - RNA, 19 nt, Artificial Sequence
  Synthetic
cuuucuuuugagaagacuu

SEQ ID NO: 675666 - RNA, 20 nt, Artificial Sequence
  Synthetic
ucuuucuuuugagaagacuu

SEQ ID NO: 675667 - RNA, 21 nt, Artificial Sequence
  Synthetic
cucuuucuuuugagaagacuu

SEQ ID NO: 675668 - RNA, 22 nt, Artificial Sequence
  Synthetic
ucucuuucuuuugagaagacuu

SEQ ID NO: 675669 - RNA, 23 nt, Artificial Sequence
  Synthetic
cucucuuucuuuugagaagacuu

SEQ ID NO: 675670 - RNA, 24 nt, Artificial Sequence
  Synthetic
gcucucuuucuuuugagaagacuu

SEQ ID NO: 675671 - RNA, 18 nt, Artificial Sequence
  Synthetic
uucaucgggggaagacuu

SEQ ID NO: 675672 - RNA, 19 nt, Artificial Sequence
  Synthetic
auucaucgggggaagacuu

SEQ ID NO: 675673 - RNA, 20 nt, Artificial Sequence
  Synthetic
aauucaucgggggaagacuu

SEQ ID NO: 675674 - RNA, 21 nt, Artificial Sequence
  Synthetic
gaauucaucgggggaagacuu

SEQ ID NO: 675675 - RNA, 22 nt, Artificial Sequence
  Synthetic
agaauucaucgggggaagacuu

SEQ ID NO: 675676 - RNA, 23 nt, Artificial Sequence
  Synthetic
uagaauucaucgggggaagacuu

SEQ ID NO: 675677 - RNA, 24 nt, Artificial Sequence
  Synthetic
guagaauucaucgggggaagacuu

SEQ ID NO: 675678 - RNA, 18 nt, Artificial Sequence
  Synthetic
uucucguugcuaagacuu

SEQ ID NO: 675679 - RNA, 19 nt, Artificial Sequence
  Synthetic
guucucguugcuaagacuu

SEQ ID NO: 675680 - RNA, 20 nt, Artificial Sequence
  Synthetic
uguucucguugcuaagacuu

SEQ ID NO: 675681 - RNA, 21 nt, Artificial Sequence
  Synthetic
auguucucguugcuaagacuu

SEQ ID NO: 675682 - RNA, 22 nt, Artificial Sequence
  Synthetic
aauguucucguugcuaagacuu

SEQ ID NO: 675683 - RNA, 23 nt, Artificial Sequence
  Synthetic
uaauguucucguugcuaagacuu

SEQ ID NO: 675684 - RNA, 24 nt, Artificial Sequence
  Synthetic
auaauguucucguugcuaagacuu

SEQ ID NO: 675685 - RNA, 18 nt, Artificial Sequence
  Synthetic
agaggcaaauuaagacuu

SEQ ID NO: 675686 - RNA, 19 nt, Artificial Sequence
  Synthetic
uagaggcaaauuaagacuu

SEQ ID NO: 675687 - RNA, 20 nt, Artificial Sequence
  Synthetic
uuagaggcaaauuaagacuu

SEQ ID NO: 675688 - RNA, 21 nt, Artificial Sequence
  Synthetic
uuuagaggcaaauuaagacuu

SEQ ID NO: 675689 - RNA, 22 nt, Artificial Sequence
  Synthetic
guuuagaggcaaauuaagacuu

SEQ ID NO: 675690 - RNA, 23 nt, Artificial Sequence
  Synthetic
aguuuagaggcaaauuaagacuu

SEQ ID NO: 675691 - RNA, 24 nt, Artificial Sequence
  Synthetic
aaguuuagaggcaaauuaagacuu

SEQ ID NO: 675692 - RNA, 18 nt, Artificial Sequence
  Synthetic
auuaccgaaaacagacuu

SEQ ID NO: 675693 - RNA, 19 nt, Artificial Sequence
  Synthetic
gauuaccgaaaacagacuu

SEQ ID NO: 675694 - RNA, 20 nt, Artificial Sequence
  Synthetic
ugauuaccgaaaacagacuu

SEQ ID NO: 675695 - RNA, 21 nt, Artificial Sequence
  Synthetic
gugauuaccgaaaacagacuu

SEQ ID NO: 675696 - RNA, 22 nt, Artificial Sequence
  Synthetic
agugauuaccgaaaacagacuu

SEQ ID NO: 675697 - RNA, 23 nt, Artificial Sequence
  Synthetic
gagugauuaccgaaaacagacuu

SEQ ID NO: 675698 - RNA, 24 nt, Artificial Sequence
  Synthetic
agagugauuaccgaaaacagacuu

SEQ ID NO: 675699 - RNA, 18 nt, Artificial Sequence
  Synthetic
cugcuuuaagacagacuu

SEQ ID NO: 675700 - RNA, 19 nt, Artificial Sequence
  Synthetic
ucugcuuuaagacagacuu

SEQ ID NO: 675701 - RNA, 20 nt, Artificial Sequence
  Synthetic
aucugcuuuaagacagacuu

SEQ ID NO: 675702 - RNA, 21 nt, Artificial Sequence
  Synthetic
aaucugcuuuaagacagacuu

SEQ ID NO: 675703 - RNA, 22 nt, Artificial Sequence
  Synthetic
aaaucugcuuuaagacagacuu

SEQ ID NO: 675704 - RNA, 23 nt, Artificial Sequence
  Synthetic
aaaaucugcuuuaagacagacuu

SEQ ID NO: 675705 - RNA, 24 nt, Artificial Sequence
  Synthetic
aaaaaucugcuuuaagacagacuu

SEQ ID NO: 675706 - RNA, 18 nt, Artificial Sequence
  Synthetic
uaucuuaaaaucagacuu

SEQ ID NO: 675707 - RNA, 19 nt, Artificial Sequence
  Synthetic
uuaucuuaaaaucagacuu

SEQ ID NO: 675708 - RNA, 20 nt, Artificial Sequence
  Synthetic
auuaucuuaaaaucagacuu

SEQ ID NO: 675709 - RNA, 21 nt, Artificial Sequence
  Synthetic
cauuaucuuaaaaucagacuu

SEQ ID NO: 675710 - RNA, 22 nt, Artificial Sequence
  Synthetic
ccauuaucuuaaaaucagacuu

SEQ ID NO: 675711 - RNA, 23 nt, Artificial Sequence
  Synthetic
uccauuaucuuaaaaucagacuu

SEQ ID NO: 675712 - RNA, 24 nt, Artificial Sequence
  Synthetic
uuccauuaucuuaaaaucagacuu

SEQ ID NO: 675713 - RNA, 18 nt, Artificial Sequence
  Synthetic
acucuggacaucagacuu

SEQ ID NO: 675714 - RNA, 19 nt, Artificial Sequence
  Synthetic
cacucuggacaucagacuu

SEQ ID NO: 675715 - RNA, 20 nt, Artificial Sequence
  Synthetic
ccacucuggacaucagacuu

SEQ ID NO: 675716 - RNA, 21 nt, Artificial Sequence
  Synthetic
accacucuggacaucagacuu

SEQ ID NO: 675717 - RNA, 22 nt, Artificial Sequence
  Synthetic
caccacucuggacaucagacuu

SEQ ID NO: 675718 - RNA, 23 nt, Artificial Sequence
  Synthetic
acaccacucuggacaucagacuu

SEQ ID NO: 675719 - RNA, 24 nt, Artificial Sequence
  Synthetic
aacaccacucuggacaucagacuu

SEQ ID NO: 675720 - RNA, 18 nt, Artificial Sequence
  Synthetic
acucauugucucagacuu

SEQ ID NO: 675721 - RNA, 19 nt, Artificial Sequence
  Synthetic
aacucauugucucagacuu

SEQ ID NO: 675722 - RNA, 20 nt, Artificial Sequence
  Synthetic
aaacucauugucucagacuu

SEQ ID NO: 675723 - RNA, 21 nt, Artificial Sequence
  Synthetic
aaaacucauugucucagacuu

SEQ ID NO: 675724 - RNA, 22 nt, Artificial Sequence
  Synthetic
caaaacucauugucucagacuu

SEQ ID NO: 675725 - RNA, 23 nt, Artificial Sequence
  Synthetic
acaaaacucauugucucagacuu

SEQ ID NO: 675726 - RNA, 24 nt, Artificial Sequence
  Synthetic
gacaaaacucauugucucagacuu

SEQ ID NO: 675727 - RNA, 18 nt, Artificial Sequence
  Synthetic
accucgucagucagacuu

SEQ ID NO: 675728 - RNA, 19 nt, Artificial Sequence
  Synthetic
aaccucgucagucagacuu

SEQ ID NO: 675729 - RNA, 20 nt, Artificial Sequence
  Synthetic
gaaccucgucagucagacuu

SEQ ID NO: 675730 - RNA, 21 nt, Artificial Sequence
  Synthetic
agaaccucgucagucagacuu

SEQ ID NO: 675731 - RNA, 22 nt, Artificial Sequence
  Synthetic
uagaaccucgucagucagacuu

SEQ ID NO: 675732 - RNA, 23 nt, Artificial Sequence
  Synthetic
uuagaaccucgucagucagacuu

SEQ ID NO: 675733 - RNA, 24 nt, Artificial Sequence
  Synthetic
uuuagaaccucgucagucagacuu

SEQ ID NO: 675734 - RNA, 18 nt, Artificial Sequence
  Synthetic
uauucuaccuucagacuu

SEQ ID NO: 675735 - RNA, 19 nt, Artificial Sequence
  Synthetic
cuauucuaccuucagacuu

SEQ ID NO: 675736 - RNA, 20 nt, Artificial Sequence
  Synthetic
gcuauucuaccuucagacuu

SEQ ID NO: 675737 - RNA, 21 nt, Artificial Sequence
  Synthetic
ggcuauucuaccuucagacuu

SEQ ID NO: 675738 - RNA, 22 nt, Artificial Sequence
  Synthetic
gggcuauucuaccuucagacuu

SEQ ID NO: 675739 - RNA, 23 nt, Artificial Sequence
  Synthetic
agggcuauucuaccuucagacuu

SEQ ID NO: 675740 - RNA, 24 nt, Artificial Sequence
  Synthetic
aagggcuauucuaccuucagacuu

SEQ ID NO: 675741 - RNA, 18 nt, Artificial Sequence
  Synthetic
gcaaaggguuucagacuu

SEQ ID NO: 675742 - RNA, 19 nt, Artificial Sequence
  Synthetic
agcaaaggguuucagacuu

SEQ ID NO: 675743 - RNA, 20 nt, Artificial Sequence
  Synthetic
aagcaaaggguuucagacuu

SEQ ID NO: 675744 - RNA, 21 nt, Artificial Sequence
  Synthetic
gaagcaaaggguuucagacuu

SEQ ID NO: 675745 - RNA, 22 nt, Artificial Sequence
  Synthetic
agaagcaaaggguuucagacuu

SEQ ID NO: 675746 - RNA, 23 nt, Artificial Sequence
  Synthetic
aagaagcaaaggguuucagacuu

SEQ ID NO: 675747 - RNA, 24 nt, Artificial Sequence
  Synthetic
aaagaagcaaaggguuucagacuu

SEQ ID NO: 675748 - RNA, 18 nt, Artificial Sequence
  Synthetic
aaugggcuuuggagacuu

SEQ ID NO: 675749 - RNA, 19 nt, Artificial Sequence
  Synthetic
caaugggcuuuggagacuu

SEQ ID NO: 675750 - RNA, 20 nt, Artificial Sequence
  Synthetic
acaaugggcuuuggagacuu

SEQ ID NO: 675751 - RNA, 21 nt, Artificial Sequence
  Synthetic
uacaaugggcuuuggagacuu

SEQ ID NO: 675752 - RNA, 22 nt, Artificial Sequence
  Synthetic
auacaaugggcuuuggagacuu

SEQ ID NO: 675753 - RNA, 23 nt, Artificial Sequence
  Synthetic
gauacaaugggcuuuggagacuu

SEQ ID NO: 675754 - RNA, 24 nt, Artificial Sequence
  Synthetic
ugauacaaugggcuuuggagacuu

SEQ ID NO: 675755 - RNA, 18 nt, Artificial Sequence
  Synthetic
augagaaaacugagacuu

SEQ ID NO: 675756 - RNA, 19 nt, Artificial Sequence
  Synthetic
aaugagaaaacugagacuu

SEQ ID NO: 675757 - RNA, 20 nt, Artificial Sequence
  Synthetic
aaaugagaaaacugagacuu

SEQ ID NO: 675758 - RNA, 21 nt, Artificial Sequence
  Synthetic
caaaugagaaaacugagacuu

SEQ ID NO: 675759 - RNA, 22 nt, Artificial Sequence
  Synthetic
gcaaaugagaaaacugagacuu

SEQ ID NO: 675760 - RNA, 23 nt, Artificial Sequence
  Synthetic
ugcaaaugagaaaacugagacuu

SEQ ID NO: 675761 - RNA, 24 nt, Artificial Sequence
  Synthetic
uugcaaaugagaaaacugagacuu

SEQ ID NO: 675762 - RNA, 18 nt, Artificial Sequence
  Synthetic
auuaagaaggugagacuu

SEQ ID NO: 675763 - RNA, 19 nt, Artificial Sequence
  Synthetic
gauuaagaaggugagacuu

SEQ ID NO: 675764 - RNA, 20 nt, Artificial Sequence
  Synthetic
ugauuaagaaggugagacuu

SEQ ID NO: 675765 - RNA, 21 nt, Artificial Sequence
  Synthetic
uugauuaagaaggugagacuu

SEQ ID NO: 675766 - RNA, 22 nt, Artificial Sequence
  Synthetic
uuugauuaagaaggugagacuu

SEQ ID NO: 675767 - RNA, 23 nt, Artificial Sequence
  Synthetic
cuuugauuaagaaggugagacuu

SEQ ID NO: 675768 - RNA, 24 nt, Artificial Sequence
  Synthetic
acuuugauuaagaaggugagacuu

SEQ ID NO: 675769 - RNA, 18 nt, Artificial Sequence
  Synthetic
ucccuaauuuugagacuu

SEQ ID NO: 675770 - RNA, 19 nt, Artificial Sequence
  Synthetic
uucccuaauuuugagacuu

SEQ ID NO: 675771 - RNA, 20 nt, Artificial Sequence
  Synthetic
uuucccuaauuuugagacuu

SEQ ID NO: 675772 - RNA, 21 nt, Artificial Sequence
  Synthetic
cuuucccuaauuuugagacuu

SEQ ID NO: 675773 - RNA, 22 nt, Artificial Sequence
  Synthetic
ccuuucccuaauuuugagacuu

SEQ ID NO: 675774 - RNA, 23 nt, Artificial Sequence
  Synthetic
gccuuucccuaauuuugagacuu

SEQ ID NO: 675775 - RNA, 24 nt, Artificial Sequence
  Synthetic
ugccuuucccuaauuuugagacuu

SEQ ID NO: 675776 - RNA, 18 nt, Artificial Sequence
  Synthetic
caaggcuaggauagacuu

SEQ ID NO: 675777 - RNA, 19 nt, Artificial Sequence
  Synthetic
ccaaggcuaggauagacuu

SEQ ID NO: 675778 - RNA, 20 nt, Artificial Sequence
  Synthetic
uccaaggcuaggauagacuu

SEQ ID NO: 675779 - RNA, 21 nt, Artificial Sequence
  Synthetic
uuccaaggcuaggauagacuu

SEQ ID NO: 675780 - RNA, 22 nt, Artificial Sequence
  Synthetic
uuuccaaggcuaggauagacuu

SEQ ID NO: 675781 - RNA, 23 nt, Artificial Sequence
  Synthetic
guuuccaaggcuaggauagacuu

SEQ ID NO: 675782 - RNA, 24 nt, Artificial Sequence
  Synthetic
uguuuccaaggcuaggauagacuu

SEQ ID NO: 675783 - RNA, 18 nt, Artificial Sequence
  Synthetic
aauuuugcaugacgacuu

SEQ ID NO: 675784 - RNA, 19 nt, Artificial Sequence
  Synthetic
caauuuugcaugacgacuu

SEQ ID NO: 675785 - RNA, 20 nt, Artificial Sequence
  Synthetic
ucaauuuugcaugacgacuu

SEQ ID NO: 675786 - RNA, 21 nt, Artificial Sequence
  Synthetic
uucaauuuugcaugacgacuu

SEQ ID NO: 675787 - RNA, 22 nt, Artificial Sequence
  Synthetic
uuucaauuuugcaugacgacuu

SEQ ID NO: 675788 - RNA, 23 nt, Artificial Sequence
  Synthetic
uuuucaauuuugcaugacgacuu

SEQ ID NO: 675789 - RNA, 24 nt, Artificial Sequence
  Synthetic
uuuuucaauuuugcaugacgacuu

SEQ ID NO: 675790 - RNA, 18 nt, Artificial Sequence
  Synthetic
aaaauguggaagcgacuu

SEQ ID NO: 675791 - RNA, 19 nt, Artificial Sequence
  Synthetic
gaaaauguggaagcgacuu

SEQ ID NO: 675792 - RNA, 20 nt, Artificial Sequence
  Synthetic
cgaaaauguggaagcgacuu

SEQ ID NO: 675793 - RNA, 21 nt, Artificial Sequence
  Synthetic
ccgaaaauguggaagcgacuu

SEQ ID NO: 675794 - RNA, 22 nt, Artificial Sequence
  Synthetic
cccgaaaauguggaagcgacuu

SEQ ID NO: 675795 - RNA, 23 nt, Artificial Sequence
  Synthetic
acccgaaaauguggaagcgacuu

SEQ ID NO: 675796 - RNA, 24 nt, Artificial Sequence
  Synthetic
cacccgaaaauguggaagcgacuu

SEQ ID NO: 675797 - RNA, 18 nt, Artificial Sequence
  Synthetic
uucacuuaaugucgacuu

SEQ ID NO: 675798 - RNA, 19 nt, Artificial Sequence
  Synthetic
auucacuuaaugucgacuu

SEQ ID NO: 675799 - RNA, 20 nt, Artificial Sequence
  Synthetic
uauucacuuaaugucgacuu

SEQ ID NO: 675800 - RNA, 21 nt, Artificial Sequence
  Synthetic
auauucacuuaaugucgacuu

SEQ ID NO: 675801 - RNA, 22 nt, Artificial Sequence
  Synthetic
aauauucacuuaaugucgacuu

SEQ ID NO: 675802 - RNA, 23 nt, Artificial Sequence
  Synthetic
uaauauucacuuaaugucgacuu

SEQ ID NO: 675803 - RNA, 24 nt, Artificial Sequence
  Synthetic
auaauauucacuuaaugucgacuu

SEQ ID NO: 675804 - RNA, 18 nt, Artificial Sequence
  Synthetic
aaacuuucucaaggacuu

SEQ ID NO: 675805 - RNA, 19 nt, Artificial Sequence
  Synthetic
uaaacuuucucaaggacuu

SEQ ID NO: 675806 - RNA, 20 nt, Artificial Sequence
  Synthetic
auaaacuuucucaaggacuu

SEQ ID NO: 675807 - RNA, 21 nt, Artificial Sequence
  Synthetic
aauaaacuuucucaaggacuu

SEQ ID NO: 675808 - RNA, 22 nt, Artificial Sequence
  Synthetic
gaauaaacuuucucaaggacuu

SEQ ID NO: 675809 - RNA, 23 nt, Artificial Sequence
  Synthetic
ggaauaaacuuucucaaggacuu

SEQ ID NO: 675810 - RNA, 24 nt, Artificial Sequence
  Synthetic
aggaauaaacuuucucaaggacuu

SEQ ID NO: 675811 - RNA, 18 nt, Artificial Sequence
  Synthetic
ccuguaaucccaggacuu

SEQ ID NO: 675812 - RNA, 19 nt, Artificial Sequence
  Synthetic
gccuguaaucccaggacuu

SEQ ID NO: 675813 - RNA, 20 nt, Artificial Sequence
  Synthetic
cgccuguaaucccaggacuu

SEQ ID NO: 675814 - RNA, 21 nt, Artificial Sequence
  Synthetic
acgccuguaaucccaggacuu

SEQ ID NO: 675815 - RNA, 22 nt, Artificial Sequence
  Synthetic
cacgccuguaaucccaggacuu

SEQ ID NO: 675816 - RNA, 23 nt, Artificial Sequence
  Synthetic
ucacgccuguaaucccaggacuu

SEQ ID NO: 675817 - RNA, 24 nt, Artificial Sequence
  Synthetic
cucacgccuguaaucccaggacuu

SEQ ID NO: 675818 - RNA, 20 nt, Artificial Sequence
  Synthetic
ugccuguaaucccaggacuu

SEQ ID NO: 675819 - RNA, 21 nt, Artificial Sequence
  Synthetic
augccuguaaucccaggacuu

SEQ ID NO: 675820 - RNA, 22 nt, Artificial Sequence
  Synthetic
caugccuguaaucccaggacuu

SEQ ID NO: 675821 - RNA, 23 nt, Artificial Sequence
  Synthetic
ucaugccuguaaucccaggacuu

SEQ ID NO: 675822 - RNA, 24 nt, Artificial Sequence
  Synthetic
cucaugccuguaaucccaggacuu

SEQ ID NO: 675823 - RNA, 18 nt, Artificial Sequence
  Synthetic
gcuguaaucccaggacuu

SEQ ID NO: 675824 - RNA, 19 nt, Artificial Sequence
  Synthetic
cgcuguaaucccaggacuu

SEQ ID NO: 675825 - RNA, 20 nt, Artificial Sequence
  Synthetic
acgcuguaaucccaggacuu

SEQ ID NO: 675826 - RNA, 21 nt, Artificial Sequence
  Synthetic
cacgcuguaaucccaggacuu

SEQ ID NO: 675827 - RNA, 22 nt, Artificial Sequence
  Synthetic
ucacgcuguaaucccaggacuu

SEQ ID NO: 675828 - RNA, 23 nt, Artificial Sequence
  Synthetic
cucacgcuguaaucccaggacuu

SEQ ID NO: 675829 - RNA, 24 nt, Artificial Sequence
  Synthetic
gcucacgcuguaaucccaggacuu

SEQ ID NO: 675830 - RNA, 18 nt, Artificial Sequence
  Synthetic
auuccaguucagggacuu

SEQ ID NO: 675831 - RNA, 19 nt, Artificial Sequence
  Synthetic
uauuccaguucagggacuu

SEQ ID NO: 675832 - RNA, 20 nt, Artificial Sequence
  Synthetic
guauuccaguucagggacuu

SEQ ID NO: 675833 - RNA, 21 nt, Artificial Sequence
  Synthetic
cguauuccaguucagggacuu

SEQ ID NO: 675834 - RNA, 22 nt, Artificial Sequence
  Synthetic
acguauuccaguucagggacuu

SEQ ID NO: 675835 - RNA, 23 nt, Artificial Sequence
  Synthetic
cacguauuccaguucagggacuu

SEQ ID NO: 675836 - RNA, 24 nt, Artificial Sequence
  Synthetic
ccacguauuccaguucagggacuu

SEQ ID NO: 675837 - RNA, 18 nt, Artificial Sequence
  Synthetic
ugggucgaguggggacuu

SEQ ID NO: 675838 - RNA, 19 nt, Artificial Sequence
  Synthetic
cugggucgaguggggacuu

SEQ ID NO: 675839 - RNA, 20 nt, Artificial Sequence
  Synthetic
ucugggucgaguggggacuu

SEQ ID NO: 675840 - RNA, 21 nt, Artificial Sequence
  Synthetic
uucugggucgaguggggacuu

SEQ ID NO: 675841 - RNA, 22 nt, Artificial Sequence
  Synthetic
uuucugggucgaguggggacuu

SEQ ID NO: 675842 - RNA, 23 nt, Artificial Sequence
  Synthetic
cuuucugggucgaguggggacuu

SEQ ID NO: 675843 - RNA, 24 nt, Artificial Sequence
  Synthetic
acuuucugggucgaguggggacuu

SEQ ID NO: 675844 - RNA, 18 nt, Artificial Sequence
  Synthetic
gagugauacaauggacuu

SEQ ID NO: 675845 - RNA, 19 nt, Artificial Sequence
  Synthetic
ggagugauacaauggacuu

SEQ ID NO: 675846 - RNA, 20 nt, Artificial Sequence
  Synthetic
cggagugauacaauggacuu

SEQ ID NO: 675847 - RNA, 21 nt, Artificial Sequence
  Synthetic
acggagugauacaauggacuu

SEQ ID NO: 675848 - RNA, 22 nt, Artificial Sequence
  Synthetic
uacggagugauacaauggacuu

SEQ ID NO: 675849 - RNA, 23 nt, Artificial Sequence
  Synthetic
auacggagugauacaauggacuu

SEQ ID NO: 675850 - RNA, 24 nt, Artificial Sequence
  Synthetic
cauacggagugauacaauggacuu

SEQ ID NO: 675851 - RNA, 18 nt, Artificial Sequence
  Synthetic
auguaauacauuggacuu

SEQ ID NO: 675852 - RNA, 19 nt, Artificial Sequence
  Synthetic
aauguaauacauuggacuu

SEQ ID NO: 675853 - RNA, 20 nt, Artificial Sequence
  Synthetic
uaauguaauacauuggacuu

SEQ ID NO: 675854 - RNA, 21 nt, Artificial Sequence
  Synthetic
guaauguaauacauuggacuu

SEQ ID NO: 675855 - RNA, 22 nt, Artificial Sequence
  Synthetic
aguaauguaauacauuggacuu

SEQ ID NO: 675856 - RNA, 23 nt, Artificial Sequence
  Synthetic
caguaauguaauacauuggacuu

SEQ ID NO: 675857 - RNA, 24 nt, Artificial Sequence
  Synthetic
gcaguaauguaauacauuggacuu

SEQ ID NO: 675858 - RNA, 18 nt, Artificial Sequence
  Synthetic
cccuuguagcaaugacuu

SEQ ID NO: 675859 - RNA, 19 nt, Artificial Sequence
  Synthetic
gcccuuguagcaaugacuu

SEQ ID NO: 675860 - RNA, 20 nt, Artificial Sequence
  Synthetic
agcccuuguagcaaugacuu

SEQ ID NO: 675861 - RNA, 21 nt, Artificial Sequence
  Synthetic
uagcccuuguagcaaugacuu

SEQ ID NO: 675862 - RNA, 22 nt, Artificial Sequence
  Synthetic
uuagcccuuguagcaaugacuu

SEQ ID NO: 675863 - RNA, 23 nt, Artificial Sequence
  Synthetic
uuuagcccuuguagcaaugacuu

SEQ ID NO: 675864 - RNA, 24 nt, Artificial Sequence
  Synthetic
uuuuagcccuuguagcaaugacuu

SEQ ID NO: 675865 - RNA, 18 nt, Artificial Sequence
  Synthetic
uuagcaaauuaaugacuu

SEQ ID NO: 675866 - RNA, 19 nt, Artificial Sequence
  Synthetic
guuagcaaauuaaugacuu

SEQ ID NO: 675867 - RNA, 20 nt, Artificial Sequence
  Synthetic
gguuagcaaauuaaugacuu

SEQ ID NO: 675868 - RNA, 21 nt, Artificial Sequence
  Synthetic
ugguuagcaaauuaaugacuu

SEQ ID NO: 675869 - RNA, 22 nt, Artificial Sequence
  Synthetic
cugguuagcaaauuaaugacuu

SEQ ID NO: 675870 - RNA, 23 nt, Artificial Sequence
  Synthetic
acugguuagcaaauuaaugacuu

SEQ ID NO: 675871 - RNA, 24 nt, Artificial Sequence
  Synthetic
uacugguuagcaaauuaaugacuu

SEQ ID NO: 675872 - RNA, 18 nt, Artificial Sequence
  Synthetic
ucucauuauuaaugacuu

SEQ ID NO: 675873 - RNA, 19 nt, Artificial Sequence
  Synthetic
aucucauuauuaaugacuu

SEQ ID NO: 675874 - RNA, 20 nt, Artificial Sequence
  Synthetic
aaucucauuauuaaugacuu

SEQ ID NO: 675875 - RNA, 21 nt, Artificial Sequence
  Synthetic
aaaucucauuauuaaugacuu

SEQ ID NO: 675876 - RNA, 22 nt, Artificial Sequence
  Synthetic
aaaaucucauuauuaaugacuu

SEQ ID NO: 675877 - RNA, 23 nt, Artificial Sequence
  Synthetic
aaaaaucucauuauuaaugacuu

SEQ ID NO: 675878 - RNA, 24 nt, Artificial Sequence
  Synthetic
uaaaaaucucauuauuaaugacuu

SEQ ID NO: 675879 - RNA, 18 nt, Artificial Sequence
  Synthetic
uaauucucuuaaugacuu

SEQ ID NO: 675880 - RNA, 19 nt, Artificial Sequence
  Synthetic
uuaauucucuuaaugacuu

SEQ ID NO: 675881 - RNA, 20 nt, Artificial Sequence
  Synthetic
cuuaauucucuuaaugacuu

SEQ ID NO: 675882 - RNA, 21 nt, Artificial Sequence
  Synthetic
acuuaauucucuuaaugacuu

SEQ ID NO: 675883 - RNA, 22 nt, Artificial Sequence
  Synthetic
uacuuaauucucuuaaugacuu

SEQ ID NO: 675884 - RNA, 23 nt, Artificial Sequence
  Synthetic
guacuuaauucucuuaaugacuu

SEQ ID NO: 675885 - RNA, 24 nt, Artificial Sequence
  Synthetic
cguacuuaauucucuuaaugacuu

SEQ ID NO: 675886 - RNA, 18 nt, Artificial Sequence
  Synthetic
caauuguggggaugacuu

SEQ ID NO: 675887 - RNA, 19 nt, Artificial Sequence
  Synthetic
ucaauuguggggaugacuu

SEQ ID NO: 675888 - RNA, 20 nt, Artificial Sequence
  Synthetic
gucaauuguggggaugacuu

SEQ ID NO: 675889 - RNA, 21 nt, Artificial Sequence
  Synthetic
agucaauuguggggaugacuu

SEQ ID NO: 675890 - RNA, 22 nt, Artificial Sequence
  Synthetic
aagucaauuguggggaugacuu

SEQ ID NO: 675891 - RNA, 23 nt, Artificial Sequence
  Synthetic
gaagucaauuguggggaugacuu

SEQ ID NO: 675892 - RNA, 24 nt, Artificial Sequence
  Synthetic
ggaagucaauuguggggaugacuu

SEQ ID NO: 675893 - RNA, 18 nt, Artificial Sequence
  Synthetic
ugacaaauacacugacuu

SEQ ID NO: 675894 - RNA, 19 nt, Artificial Sequence
  Synthetic
uugacaaauacacugacuu

SEQ ID NO: 675895 - RNA, 20 nt, Artificial Sequence
  Synthetic
uuugacaaauacacugacuu

SEQ ID NO: 675896 - RNA, 21 nt, Artificial Sequence
  Synthetic
auuugacaaauacacugacuu

SEQ ID NO: 675897 - RNA, 22 nt, Artificial Sequence
  Synthetic
uauuugacaaauacacugacuu

SEQ ID NO: 675898 - RNA, 23 nt, Artificial Sequence
  Synthetic
auauuugacaaauacacugacuu

SEQ ID NO: 675899 - RNA, 24 nt, Artificial Sequence
  Synthetic
gauauuugacaaauacacugacuu

SEQ ID NO: 675900 - RNA, 18 nt, Artificial Sequence
  Synthetic
cucacuuuguggugacuu

SEQ ID NO: 675901 - RNA, 19 nt, Artificial Sequence
  Synthetic
ucucacuuuguggugacuu

SEQ ID NO: 675902 - RNA, 20 nt, Artificial Sequence
  Synthetic
cucucacuuuguggugacuu

SEQ ID NO: 675903 - RNA, 21 nt, Artificial Sequence
  Synthetic
ucucucacuuuguggugacuu

SEQ ID NO: 675904 - RNA, 22 nt, Artificial Sequence
  Synthetic
gucucucacuuuguggugacuu

SEQ ID NO: 675905 - RNA, 23 nt, Artificial Sequence
  Synthetic
ugucucucacuuuguggugacuu

SEQ ID NO: 675906 - RNA, 24 nt, Artificial Sequence
  Synthetic
cugucucucacuuuguggugacuu

SEQ ID NO: 675907 - RNA, 18 nt, Artificial Sequence
  Synthetic
caagcaucacugugacuu

SEQ ID NO: 675908 - RNA, 19 nt, Artificial Sequence
  Synthetic
ucaagcaucacugugacuu

SEQ ID NO: 675909 - RNA, 20 nt, Artificial Sequence
  Synthetic
uucaagcaucacugugacuu

SEQ ID NO: 675910 - RNA, 21 nt, Artificial Sequence
  Synthetic
guucaagcaucacugugacuu

SEQ ID NO: 675911 - RNA, 22 nt, Artificial Sequence
  Synthetic
cguucaagcaucacugugacuu

SEQ ID NO: 675912 - RNA, 23 nt, Artificial Sequence
  Synthetic
ccguucaagcaucacugugacuu

SEQ ID NO: 675913 - RNA, 24 nt, Artificial Sequence
  Synthetic
uccguucaagcaucacugugacuu

SEQ ID NO: 675914 - RNA, 18 nt, Artificial Sequence
  Synthetic
cuugaaauggauugacuu

SEQ ID NO: 675915 - RNA, 19 nt, Artificial Sequence
  Synthetic
ucuugaaauggauugacuu

SEQ ID NO: 675916 - RNA, 20 nt, Artificial Sequence
  Synthetic
aucuugaaauggauugacuu

SEQ ID NO: 675917 - RNA, 21 nt, Artificial Sequence
  Synthetic
aaucuugaaauggauugacuu

SEQ ID NO: 675918 - RNA, 22 nt, Artificial Sequence
  Synthetic
aaaucuugaaauggauugacuu

SEQ ID NO: 675919 - RNA, 23 nt, Artificial Sequence
  Synthetic
aaaaucuugaaauggauugacuu

SEQ ID NO: 675920 - RNA, 24 nt, Artificial Sequence
  Synthetic
aaaaaucuugaaauggauugacuu

SEQ ID NO: 675921 - RNA, 18 nt, Artificial Sequence
  Synthetic
uuuauacaaaguugacuu

SEQ ID NO: 675922 - RNA, 19 nt, Artificial Sequence
  Synthetic
guuuauacaaaguugacuu

SEQ ID NO: 675923 - RNA, 20 nt, Artificial Sequence
  Synthetic
aguuuauacaaaguugacuu

SEQ ID NO: 675924 - RNA, 21 nt, Artificial Sequence
  Synthetic
gaguuuauacaaaguugacuu

SEQ ID NO: 675925 - RNA, 22 nt, Artificial Sequence
  Synthetic
agaguuuauacaaaguugacuu

SEQ ID NO: 675926 - RNA, 23 nt, Artificial Sequence
  Synthetic
aagaguuuauacaaaguugacuu

SEQ ID NO: 675927 - RNA, 24 nt, Artificial Sequence
  Synthetic
aaagaguuuauacaaaguugacuu

SEQ ID NO: 675928 - RNA, 18 nt, Artificial Sequence
  Synthetic
auugagaaagguugacuu

SEQ ID NO: 675929 - RNA, 19 nt, Artificial Sequence
  Synthetic
gauugagaaagguugacuu

SEQ ID NO: 675930 - RNA, 20 nt, Artificial Sequence
  Synthetic
ggauugagaaagguugacuu

SEQ ID NO: 675931 - RNA, 21 nt, Artificial Sequence
  Synthetic
uggauugagaaagguugacuu

SEQ ID NO: 675932 - RNA, 22 nt, Artificial Sequence
  Synthetic
auggauugagaaagguugacuu

SEQ ID NO: 675933 - RNA, 23 nt, Artificial Sequence
  Synthetic
uauggauugagaaagguugacuu

SEQ ID NO: 675934 - RNA, 24 nt, Artificial Sequence
  Synthetic
auauggauugagaaagguugacuu

SEQ ID NO: 675935 - RNA, 18 nt, Artificial Sequence
  Synthetic
aggagaucuguuugacuu

SEQ ID NO: 675936 - RNA, 19 nt, Artificial Sequence
  Synthetic
aaggagaucuguuugacuu

SEQ ID NO: 675937 - RNA, 20 nt, Artificial Sequence
  Synthetic
uaaggagaucuguuugacuu

SEQ ID NO: 675938 - RNA, 21 nt, Artificial Sequence
  Synthetic
uuaaggagaucuguuugacuu

SEQ ID NO: 675939 - RNA, 22 nt, Artificial Sequence
  Synthetic
uuuaaggagaucuguuugacuu

SEQ ID NO: 675940 - RNA, 23 nt, Artificial Sequence
  Synthetic
auuuaaggagaucuguuugacuu

SEQ ID NO: 675941 - RNA, 24 nt, Artificial Sequence
  Synthetic
gauuuaaggagaucuguuugacuu

SEQ ID NO: 675942 - RNA, 18 nt, Artificial Sequence
  Synthetic
uggguacaaaaaauacuu

SEQ ID NO: 675943 - RNA, 19 nt, Artificial Sequence
  Synthetic
auggguacaaaaaauacuu

SEQ ID NO: 675944 - RNA, 20 nt, Artificial Sequence
  Synthetic
aauggguacaaaaaauacuu

SEQ ID NO: 675945 - RNA, 21 nt, Artificial Sequence
  Synthetic
uaauggguacaaaaaauacuu

SEQ ID NO: 675946 - RNA, 22 nt, Artificial Sequence
  Synthetic
uuaauggguacaaaaaauacuu

SEQ ID NO: 675947 - RNA, 23 nt, Artificial Sequence
  Synthetic
guuaauggguacaaaaaauacuu

SEQ ID NO: 675948 - RNA, 24 nt, Artificial Sequence
  Synthetic
gguuaauggguacaaaaaauacuu

SEQ ID NO: 675949 - RNA, 18 nt, Artificial Sequence
  Synthetic
aauuauuagcaaauacuu

SEQ ID NO: 675950 - RNA, 19 nt, Artificial Sequence
  Synthetic
uaauuauuagcaaauacuu

SEQ ID NO: 675951 - RNA, 20 nt, Artificial Sequence
  Synthetic
auaauuauuagcaaauacuu

SEQ ID NO: 675952 - RNA, 21 nt, Artificial Sequence
  Synthetic
uauaauuauuagcaaauacuu

SEQ ID NO: 675953 - RNA, 22 nt, Artificial Sequence
  Synthetic
uuauaauuauuagcaaauacuu

SEQ ID NO: 675954 - RNA, 23 nt, Artificial Sequence
  Synthetic
uuuauaauuauuagcaaauacuu

SEQ ID NO: 675955 - RNA, 24 nt, Artificial Sequence
  Synthetic
uuuuauaauuauuagcaaauacuu

SEQ ID NO: 675956 - RNA, 18 nt, Artificial Sequence
  Synthetic
auugagaaagaaauacuu

SEQ ID NO: 675957 - RNA, 19 nt, Artificial Sequence
  Synthetic
aauugagaaagaaauacuu

SEQ ID NO: 675958 - RNA, 20 nt, Artificial Sequence
  Synthetic
uaauugagaaagaaauacuu

SEQ ID NO: 675959 - RNA, 21 nt, Artificial Sequence
  Synthetic
auaauugagaaagaaauacuu

SEQ ID NO: 675960 - RNA, 22 nt, Artificial Sequence
  Synthetic
cauaauugagaaagaaauacuu

SEQ ID NO: 675961 - RNA, 23 nt, Artificial Sequence
  Synthetic
ccauaauugagaaagaaauacuu

SEQ ID NO: 675962 - RNA, 24 nt, Artificial Sequence
  Synthetic
accauaauugagaaagaaauacuu

SEQ ID NO: 675963 - RNA, 18 nt, Artificial Sequence
  Synthetic
ccaaaaugugaaauacuu

SEQ ID NO: 675964 - RNA, 19 nt, Artificial Sequence
  Synthetic
cccaaaaugugaaauacuu

SEQ ID NO: 675965 - RNA, 20 nt, Artificial Sequence
  Synthetic
ccccaaaaugugaaauacuu

SEQ ID NO: 675966 - RNA, 21 nt, Artificial Sequence
  Synthetic
gccccaaaaugugaaauacuu

SEQ ID NO: 675967 - RNA, 22 nt, Artificial Sequence
  Synthetic
ggccccaaaaugugaaauacuu

SEQ ID NO: 675968 - RNA, 23 nt, Artificial Sequence
  Synthetic
aggccccaaaaugugaaauacuu

SEQ ID NO: 675969 - RNA, 24 nt, Artificial Sequence
  Synthetic
aaggccccaaaaugugaaauacuu

SEQ ID NO: 675970 - RNA, 18 nt, Artificial Sequence
  Synthetic
guggcacucuaaauacuu

SEQ ID NO: 675971 - RNA, 19 nt, Artificial Sequence
  Synthetic
aguggcacucuaaauacuu

SEQ ID NO: 675972 - RNA, 20 nt, Artificial Sequence
  Synthetic
aaguggcacucuaaauacuu

SEQ ID NO: 675973 - RNA, 21 nt, Artificial Sequence
  Synthetic
aaaguggcacucuaaauacuu

SEQ ID NO: 675974 - RNA, 22 nt, Artificial Sequence
  Synthetic
aaaaguggcacucuaaauacuu

SEQ ID NO: 675975 - RNA, 23 nt, Artificial Sequence
  Synthetic
aaaaaguggcacucuaaauacuu

SEQ ID NO: 675976 - RNA, 24 nt, Artificial Sequence
  Synthetic
aaaaaaguggcacucuaaauacuu

SEQ ID NO: 675977 - RNA, 18 nt, Artificial Sequence
  Synthetic
auauuugccacaauacuu

SEQ ID NO: 675978 - RNA, 19 nt, Artificial Sequence
  Synthetic
aauauuugccacaauacuu

SEQ ID NO: 675979 - RNA, 20 nt, Artificial Sequence
  Synthetic
aaauauuugccacaauacuu

SEQ ID NO: 675980 - RNA, 21 nt, Artificial Sequence
  Synthetic
gaaauauuugccacaauacuu

SEQ ID NO: 675981 - RNA, 22 nt, Artificial Sequence
  Synthetic
ggaaauauuugccacaauacuu

SEQ ID NO: 675982 - RNA, 23 nt, Artificial Sequence
  Synthetic
aggaaauauuugccacaauacuu

SEQ ID NO: 675983 - RNA, 24 nt, Artificial Sequence
  Synthetic
uaggaaauauuugccacaauacuu

SEQ ID NO: 675984 - RNA, 18 nt, Artificial Sequence
  Synthetic
agaaaagucucaauacuu

SEQ ID NO: 675985 - RNA, 19 nt, Artificial Sequence
  Synthetic
gagaaaagucucaauacuu

SEQ ID NO: 675986 - RNA, 20 nt, Artificial Sequence
  Synthetic
agagaaaagucucaauacuu

SEQ ID NO: 675987 - RNA, 21 nt, Artificial Sequence
  Synthetic
aagagaaaagucucaauacuu

SEQ ID NO: 675988 - RNA, 22 nt, Artificial Sequence
  Synthetic
uaagagaaaagucucaauacuu

SEQ ID NO: 675989 - RNA, 23 nt, Artificial Sequence
  Synthetic
cuaagagaaaagucucaauacuu

SEQ ID NO: 675990 - RNA, 24 nt, Artificial Sequence
  Synthetic
gcuaagagaaaagucucaauacuu

SEQ ID NO: 675991 - RNA, 18 nt, Artificial Sequence
  Synthetic
aagggaaaacuaauacuu

SEQ ID NO: 675992 - RNA, 19 nt, Artificial Sequence
  Synthetic
caagggaaaacuaauacuu

SEQ ID NO: 675993 - RNA, 20 nt, Artificial Sequence
  Synthetic
ucaagggaaaacuaauacuu

SEQ ID NO: 675994 - RNA, 21 nt, Artificial Sequence
  Synthetic
aucaagggaaaacuaauacuu

SEQ ID NO: 675995 - RNA, 22 nt, Artificial Sequence
  Synthetic
aaucaagggaaaacuaauacuu

SEQ ID NO: 675996 - RNA, 23 nt, Artificial Sequence
  Synthetic
aaaucaagggaaaacuaauacuu

SEQ ID NO: 675997 - RNA, 24 nt, Artificial Sequence
  Synthetic
aaaaucaagggaaaacuaauacuu

SEQ ID NO: 675998 - RNA, 18 nt, Artificial Sequence
  Synthetic
auugcccagaccauacuu

SEQ ID NO: 675999 - RNA, 19 nt, Artificial Sequence
  Synthetic
aauugcccagaccauacuu

SEQ ID NO: 676000 - RNA, 20 nt, Artificial Sequence
  Synthetic
uaauugcccagaccauacuu

SEQ ID NO: 676001 - RNA, 21 nt, Artificial Sequence
  Synthetic
auaauugcccagaccauacuu

SEQ ID NO: 676002 - RNA, 22 nt, Artificial Sequence
  Synthetic
uauaauugcccagaccauacuu

SEQ ID NO: 676003 - RNA, 23 nt, Artificial Sequence
  Synthetic
uuauaauugcccagaccauacuu

SEQ ID NO: 676004 - RNA, 24 nt, Artificial Sequence
  Synthetic
uuuauaauugcccagaccauacuu

SEQ ID NO: 676005 - RNA, 18 nt, Artificial Sequence
  Synthetic
auaguaacaugcauacuu

SEQ ID NO: 676006 - RNA, 19 nt, Artificial Sequence
  Synthetic
gauaguaacaugcauacuu

SEQ ID NO: 676007 - RNA, 20 nt, Artificial Sequence
  Synthetic
ggauaguaacaugcauacuu

SEQ ID NO: 676008 - RNA, 21 nt, Artificial Sequence
  Synthetic
gggauaguaacaugcauacuu

SEQ ID NO: 676009 - RNA, 22 nt, Artificial Sequence
  Synthetic
agggauaguaacaugcauacuu

SEQ ID NO: 676010 - RNA, 23 nt, Artificial Sequence
  Synthetic
aagggauaguaacaugcauacuu

SEQ ID NO: 676011 - RNA, 24 nt, Artificial Sequence
  Synthetic
aaagggauaguaacaugcauacuu

SEQ ID NO: 676012 - RNA, 18 nt, Artificial Sequence
  Synthetic
agaguuucaugcauacuu

SEQ ID NO: 676013 - RNA, 19 nt, Artificial Sequence
  Synthetic
aagaguuucaugcauacuu

SEQ ID NO: 676014 - RNA, 20 nt, Artificial Sequence
  Synthetic
uaagaguuucaugcauacuu

SEQ ID NO: 676015 - RNA, 21 nt, Artificial Sequence
  Synthetic
uuaagaguuucaugcauacuu

SEQ ID NO: 676016 - RNA, 22 nt, Artificial Sequence
  Synthetic
uuuaagaguuucaugcauacuu

SEQ ID NO: 676017 - RNA, 23 nt, Artificial Sequence
  Synthetic
cuuuaagaguuucaugcauacuu

SEQ ID NO: 676018 - RNA, 24 nt, Artificial Sequence
  Synthetic
acuuuaagaguuucaugcauacuu

SEQ ID NO: 676019 - RNA, 18 nt, Artificial Sequence
  Synthetic
guagacugcgggauacuu

SEQ ID NO: 676020 - RNA, 19 nt, Artificial Sequence
  Synthetic
aguagacugcgggauacuu

SEQ ID NO: 676021 - RNA, 20 nt, Artificial Sequence
  Synthetic
caguagacugcgggauacuu

SEQ ID NO: 676022 - RNA, 21 nt, Artificial Sequence
  Synthetic
acaguagacugcgggauacuu

SEQ ID NO: 676023 - RNA, 22 nt, Artificial Sequence
  Synthetic
aacaguagacugcgggauacuu

SEQ ID NO: 676024 - RNA, 23 nt, Artificial Sequence
  Synthetic
aaacaguagacugcgggauacuu

SEQ ID NO: 676025 - RNA, 24 nt, Artificial Sequence
  Synthetic
gaaacaguagacugcgggauacuu

SEQ ID NO: 676026 - RNA, 18 nt, Artificial Sequence
  Synthetic
acaaagaaaaugauacuu

SEQ ID NO: 676027 - RNA, 19 nt, Artificial Sequence
  Synthetic
gacaaagaaaaugauacuu

SEQ ID NO: 676028 - RNA, 20 nt, Artificial Sequence
  Synthetic
ugacaaagaaaaugauacuu

SEQ ID NO: 676029 - RNA, 21 nt, Artificial Sequence
  Synthetic
augacaaagaaaaugauacuu

SEQ ID NO: 676030 - RNA, 22 nt, Artificial Sequence
  Synthetic
aaugacaaagaaaaugauacuu

SEQ ID NO: 676031 - RNA, 23 nt, Artificial Sequence
  Synthetic
aaaugacaaagaaaaugauacuu

SEQ ID NO: 676032 - RNA, 24 nt, Artificial Sequence
  Synthetic
aaaaugacaaagaaaaugauacuu

SEQ ID NO: 676033 - RNA, 18 nt, Artificial Sequence
  Synthetic
ugaucaccagauauacuu

SEQ ID NO: 676034 - RNA, 19 nt, Artificial Sequence
  Synthetic
cugaucaccagauauacuu

SEQ ID NO: 676035 - RNA, 20 nt, Artificial Sequence
  Synthetic
ccugaucaccagauauacuu

SEQ ID NO: 676036 - RNA, 21 nt, Artificial Sequence
  Synthetic
uccugaucaccagauauacuu

SEQ ID NO: 676037 - RNA, 22 nt, Artificial Sequence
  Synthetic
auccugaucaccagauauacuu

SEQ ID NO: 676038 - RNA, 23 nt, Artificial Sequence
  Synthetic
aauccugaucaccagauauacuu

SEQ ID NO: 676039 - RNA, 24 nt, Artificial Sequence
  Synthetic
aaauccugaucaccagauauacuu

SEQ ID NO: 676040 - RNA, 18 nt, Artificial Sequence
  Synthetic
uuuaauuaaaguauacuu

SEQ ID NO: 676041 - RNA, 19 nt, Artificial Sequence
  Synthetic
guuuaauuaaaguauacuu

SEQ ID NO: 676042 - RNA, 20 nt, Artificial Sequence
  Synthetic
uguuuaauuaaaguauacuu

SEQ ID NO: 676043 - RNA, 21 nt, Artificial Sequence
  Synthetic
auguuuaauuaaaguauacuu

SEQ ID NO: 676044 - RNA, 22 nt, Artificial Sequence
  Synthetic
aauguuuaauuaaaguauacuu

SEQ ID NO: 676045 - RNA, 23 nt, Artificial Sequence
  Synthetic
aaauguuuaauuaaaguauacuu

SEQ ID NO: 676046 - RNA, 24 nt, Artificial Sequence
  Synthetic
aaaauguuuaauuaaaguauacuu

SEQ ID NO: 676047 - RNA, 18 nt, Artificial Sequence
  Synthetic
ugccaaauguguauacuu

SEQ ID NO: 676048 - RNA, 19 nt, Artificial Sequence
  Synthetic
uugccaaauguguauacuu

SEQ ID NO: 676049 - RNA, 20 nt, Artificial Sequence
  Synthetic
uuugccaaauguguauacuu

SEQ ID NO: 676050 - RNA, 21 nt, Artificial Sequence
  Synthetic
uuuugccaaauguguauacuu

SEQ ID NO: 676051 - RNA, 22 nt, Artificial Sequence
  Synthetic
guuuugccaaauguguauacuu

SEQ ID NO: 676052 - RNA, 23 nt, Artificial Sequence
  Synthetic
cguuuugccaaauguguauacuu

SEQ ID NO: 676053 - RNA, 24 nt, Artificial Sequence
  Synthetic
acguuuugccaaauguguauacuu

SEQ ID NO: 676054 - RNA, 18 nt, Artificial Sequence
  Synthetic
caauuuguaauuauacuu

SEQ ID NO: 676055 - RNA, 19 nt, Artificial Sequence
  Synthetic
ccaauuuguaauuauacuu

SEQ ID NO: 676056 - RNA, 20 nt, Artificial Sequence
  Synthetic
gccaauuuguaauuauacuu

SEQ ID NO: 676057 - RNA, 21 nt, Artificial Sequence
  Synthetic
ggccaauuuguaauuauacuu

SEQ ID NO: 676058 - RNA, 22 nt, Artificial Sequence
  Synthetic
uggccaauuuguaauuauacuu

SEQ ID NO: 676059 - RNA, 23 nt, Artificial Sequence
  Synthetic
cuggccaauuuguaauuauacuu

SEQ ID NO: 676060 - RNA, 24 nt, Artificial Sequence
  Synthetic
ccuggccaauuuguaauuauacuu

SEQ ID NO: 676061 - RNA, 18 nt, Artificial Sequence
  Synthetic
aguaaaucaucacuacuu

SEQ ID NO: 676062 - RNA, 19 nt, Artificial Sequence
  Synthetic
aaguaaaucaucacuacuu

SEQ ID NO: 676063 - RNA, 20 nt, Artificial Sequence
  Synthetic
gaaguaaaucaucacuacuu

SEQ ID NO: 676064 - RNA, 21 nt, Artificial Sequence
  Synthetic
ugaaguaaaucaucacuacuu

SEQ ID NO: 676065 - RNA, 22 nt, Artificial Sequence
  Synthetic
augaaguaaaucaucacuacuu

SEQ ID NO: 676066 - RNA, 23 nt, Artificial Sequence
  Synthetic
uaugaaguaaaucaucacuacuu

SEQ ID NO: 676067 - RNA, 24 nt, Artificial Sequence
  Synthetic
guaugaaguaaaucaucacuacuu

SEQ ID NO: 676068 - RNA, 18 nt, Artificial Sequence
  Synthetic
auugguuauuuacuacuu

SEQ ID NO: 676069 - RNA, 19 nt, Artificial Sequence
  Synthetic
aauugguuauuuacuacuu

SEQ ID NO: 676070 - RNA, 20 nt, Artificial Sequence
  Synthetic
aaauugguuauuuacuacuu

SEQ ID NO: 676071 - RNA, 21 nt, Artificial Sequence
  Synthetic
uaaauugguuauuuacuacuu

SEQ ID NO: 676072 - RNA, 22 nt, Artificial Sequence
  Synthetic
guaaauugguuauuuacuacuu

SEQ ID NO: 676073 - RNA, 23 nt, Artificial Sequence
  Synthetic
aguaaauugguuauuuacuacuu

SEQ ID NO: 676074 - RNA, 24 nt, Artificial Sequence
  Synthetic
caguaaauugguuauuuacuacuu

SEQ ID NO: 676075 - RNA, 18 nt, Artificial Sequence
  Synthetic
cucuaaucccagcuacuu

SEQ ID NO: 676076 - RNA, 19 nt, Artificial Sequence
  Synthetic
ccucuaaucccagcuacuu

SEQ ID NO: 676077 - RNA, 20 nt, Artificial Sequence
  Synthetic
gccucuaaucccagcuacuu

SEQ ID NO: 676078 - RNA, 21 nt, Artificial Sequence
  Synthetic
cgccucuaaucccagcuacuu

SEQ ID NO: 676079 - RNA, 22 nt, Artificial Sequence
  Synthetic
gcgccucuaaucccagcuacuu

SEQ ID NO: 676080 - RNA, 23 nt, Artificial Sequence
  Synthetic
ggcgccucuaaucccagcuacuu

SEQ ID NO: 676081 - RNA, 24 nt, Artificial Sequence
  Synthetic
aggcgccucuaaucccagcuacuu

SEQ ID NO: 676082 - RNA, 22 nt, Artificial Sequence
  Synthetic
gcaccuguaaucccagcuacuu

SEQ ID NO: 676083 - RNA, 23 nt, Artificial Sequence
  Synthetic
agcaccuguaaucccagcuacuu

SEQ ID NO: 676084 - RNA, 24 nt, Artificial Sequence
  Synthetic
gagcaccuguaaucccagcuacuu

SEQ ID NO: 676085 - RNA, 21 nt, Artificial Sequence
  Synthetic
cgccuguaaucccagcuacuu

SEQ ID NO: 676086 - RNA, 22 nt, Artificial Sequence
  Synthetic
gcgccuguaaucccagcuacuu

SEQ ID NO: 676087 - RNA, 23 nt, Artificial Sequence
  Synthetic
ggcgccuguaaucccagcuacuu

SEQ ID NO: 676088 - RNA, 24 nt, Artificial Sequence
  Synthetic
gggcgccuguaaucccagcuacuu

SEQ ID NO: 676089 - RNA, 19 nt, Artificial Sequence
  Synthetic
gcuguaaucccagcuacuu

SEQ ID NO: 676090 - RNA, 20 nt, Artificial Sequence
  Synthetic
ggcuguaaucccagcuacuu

SEQ ID NO: 676091 - RNA, 21 nt, Artificial Sequence
  Synthetic
uggcuguaaucccagcuacuu

SEQ ID NO: 676092 - RNA, 22 nt, Artificial Sequence
  Synthetic
auggcuguaaucccagcuacuu

SEQ ID NO: 676093 - RNA, 23 nt, Artificial Sequence
  Synthetic
cauggcuguaaucccagcuacuu

SEQ ID NO: 676094 - RNA, 24 nt, Artificial Sequence
  Synthetic
gcauggcuguaaucccagcuacuu

SEQ ID NO: 676095 - RNA, 18 nt, Artificial Sequence
  Synthetic
cugugaucccagcuacuu

SEQ ID NO: 676096 - RNA, 19 nt, Artificial Sequence
  Synthetic
ucugugaucccagcuacuu

SEQ ID NO: 676097 - RNA, 20 nt, Artificial Sequence
  Synthetic
aucugugaucccagcuacuu

SEQ ID NO: 676098 - RNA, 21 nt, Artificial Sequence
  Synthetic
caucugugaucccagcuacuu

SEQ ID NO: 676099 - RNA, 22 nt, Artificial Sequence
  Synthetic
acaucugugaucccagcuacuu

SEQ ID NO: 676100 - RNA, 23 nt, Artificial Sequence
  Synthetic
cacaucugugaucccagcuacuu

SEQ ID NO: 676101 - RNA, 24 nt, Artificial Sequence
  Synthetic
ucacaucugugaucccagcuacuu

SEQ ID NO: 676102 - RNA, 18 nt, Artificial Sequence
  Synthetic
ccuguaucccagcuacuu

SEQ ID NO: 676103 - RNA, 19 nt, Artificial Sequence
  Synthetic
accuguaucccagcuacuu

SEQ ID NO: 676104 - RNA, 20 nt, Artificial Sequence
  Synthetic
caccuguaucccagcuacuu

SEQ ID NO: 676105 - RNA, 21 nt, Artificial Sequence
  Synthetic
gcaccuguaucccagcuacuu

SEQ ID NO: 676106 - RNA, 22 nt, Artificial Sequence
  Synthetic
cgcaccuguaucccagcuacuu

SEQ ID NO: 676107 - RNA, 23 nt, Artificial Sequence
  Synthetic
gcgcaccuguaucccagcuacuu

SEQ ID NO: 676108 - RNA, 24 nt, Artificial Sequence
  Synthetic
ugcgcaccuguaucccagcuacuu

SEQ ID NO: 676109 - RNA, 21 nt, Artificial Sequence
  Synthetic
cgccuguagucccagcuacuu

SEQ ID NO: 676110 - RNA, 22 nt, Artificial Sequence
  Synthetic
ccgccuguagucccagcuacuu

SEQ ID NO: 676111 - RNA, 23 nt, Artificial Sequence
  Synthetic
gccgccuguagucccagcuacuu

SEQ ID NO: 676112 - RNA, 24 nt, Artificial Sequence
  Synthetic
ggccgccuguagucccagcuacuu

SEQ ID NO: 676113 - RNA, 18 nt, Artificial Sequence
  Synthetic
cuguaaucucagcuacuu

SEQ ID NO: 676114 - RNA, 19 nt, Artificial Sequence
  Synthetic
ccuguaaucucagcuacuu

SEQ ID NO: 676115 - RNA, 20 nt, Artificial Sequence
  Synthetic
accuguaaucucagcuacuu

SEQ ID NO: 676116 - RNA, 21 nt, Artificial Sequence
  Synthetic
caccuguaaucucagcuacuu

SEQ ID NO: 676117 - RNA, 22 nt, Artificial Sequence
  Synthetic
gcaccuguaaucucagcuacuu

SEQ ID NO: 676118 - RNA, 23 nt, Artificial Sequence
  Synthetic
ggcaccuguaaucucagcuacuu

SEQ ID NO: 676119 - RNA, 24 nt, Artificial Sequence
  Synthetic
gggcaccuguaaucucagcuacuu

SEQ ID NO: 676120 - RNA, 18 nt, Artificial Sequence
  Synthetic
cuguagaccuggcuacuu

SEQ ID NO: 676121 - RNA, 19 nt, Artificial Sequence
  Synthetic
ccuguagaccuggcuacuu

SEQ ID NO: 676122 - RNA, 20 nt, Artificial Sequence
  Synthetic
gccuguagaccuggcuacuu

SEQ ID NO: 676123 - RNA, 21 nt, Artificial Sequence
  Synthetic
ugccuguagaccuggcuacuu

SEQ ID NO: 676124 - RNA, 22 nt, Artificial Sequence
  Synthetic
augccuguagaccuggcuacuu

SEQ ID NO: 676125 - RNA, 23 nt, Artificial Sequence
  Synthetic
caugccuguagaccuggcuacuu

SEQ ID NO: 676126 - RNA, 24 nt, Artificial Sequence
  Synthetic
acaugccuguagaccuggcuacuu

SEQ ID NO: 676127 - RNA, 18 nt, Artificial Sequence
  Synthetic
cuguagucucugcuacuu

SEQ ID NO: 676128 - RNA, 19 nt, Artificial Sequence
  Synthetic
ccuguagucucugcuacuu

SEQ ID NO: 676129 - RNA, 20 nt, Artificial Sequence
  Synthetic
gccuguagucucugcuacuu

SEQ ID NO: 676130 - RNA, 21 nt, Artificial Sequence
  Synthetic
ugccuguagucucugcuacuu

SEQ ID NO: 676131 - RNA, 22 nt, Artificial Sequence
  Synthetic
uugccuguagucucugcuacuu

SEQ ID NO: 676132 - RNA, 23 nt, Artificial Sequence
  Synthetic
cuugccuguagucucugcuacuu

SEQ ID NO: 676133 - RNA, 24 nt, Artificial Sequence
  Synthetic
acuugccuguagucucugcuacuu

SEQ ID NO: 676134 - RNA, 18 nt, Artificial Sequence
  Synthetic
aaaugauuauugcuacuu

SEQ ID NO: 676135 - RNA, 19 nt, Artificial Sequence
  Synthetic
uaaaugauuauugcuacuu

SEQ ID NO: 676136 - RNA, 20 nt, Artificial Sequence
  Synthetic
auaaaugauuauugcuacuu

SEQ ID NO: 676137 - RNA, 21 nt, Artificial Sequence
  Synthetic
aauaaaugauuauugcuacuu

SEQ ID NO: 676138 - RNA, 22 nt, Artificial Sequence
  Synthetic
uaauaaaugauuauugcuacuu

SEQ ID NO: 676139 - RNA, 23 nt, Artificial Sequence
  Synthetic
auaauaaaugauuauugcuacuu

SEQ ID NO: 676140 - RNA, 24 nt, Artificial Sequence
  Synthetic
gauaauaaaugauuauugcuacuu

SEQ ID NO: 676141 - RNA, 18 nt, Artificial Sequence
  Synthetic
agaucuauacaucuacuu

SEQ ID NO: 676142 - RNA, 19 nt, Artificial Sequence
  Synthetic
gagaucuauacaucuacuu

SEQ ID NO: 676143 - RNA, 20 nt, Artificial Sequence
  Synthetic
ggagaucuauacaucuacuu

SEQ ID NO: 676144 - RNA, 21 nt, Artificial Sequence
  Synthetic
uggagaucuauacaucuacuu

SEQ ID NO: 676145 - RNA, 22 nt, Artificial Sequence
  Synthetic
auggagaucuauacaucuacuu

SEQ ID NO: 676146 - RNA, 23 nt, Artificial Sequence
  Synthetic
uauggagaucuauacaucuacuu

SEQ ID NO: 676147 - RNA, 24 nt, Artificial Sequence
  Synthetic
uuauggagaucuauacaucuacuu

SEQ ID NO: 676148 - RNA, 18 nt, Artificial Sequence
  Synthetic
caaauuuaucuucuacuu

SEQ ID NO: 676149 - RNA, 19 nt, Artificial Sequence
  Synthetic
ucaaauuuaucuucuacuu

SEQ ID NO: 676150 - RNA, 20 nt, Artificial Sequence
  Synthetic
uucaaauuuaucuucuacuu

SEQ ID NO: 676151 - RNA, 21 nt, Artificial Sequence
  Synthetic
cuucaaauuuaucuucuacuu

SEQ ID NO: 676152 - RNA, 22 nt, Artificial Sequence
  Synthetic
ucuucaaauuuaucuucuacuu

SEQ ID NO: 676153 - RNA, 23 nt, Artificial Sequence
  Synthetic
uucuucaaauuuaucuucuacuu

SEQ ID NO: 676154 - RNA, 24 nt, Artificial Sequence
  Synthetic
uuucuucaaauuuaucuucuacuu

SEQ ID NO: 676155 - RNA, 18 nt, Artificial Sequence
  Synthetic
uaguucccccaaguacuu

SEQ ID NO: 676156 - RNA, 19 nt, Artificial Sequence
  Synthetic
uuaguucccccaaguacuu

SEQ ID NO: 676157 - RNA, 20 nt, Artificial Sequence
  Synthetic
auuaguucccccaaguacuu

SEQ ID NO: 676158 - RNA, 21 nt, Artificial Sequence
  Synthetic
cauuaguucccccaaguacuu

SEQ ID NO: 676159 - RNA, 22 nt, Artificial Sequence
  Synthetic
ucauuaguucccccaaguacuu

SEQ ID NO: 676160 - RNA, 23 nt, Artificial Sequence
  Synthetic
aucauuaguucccccaaguacuu

SEQ ID NO: 676161 - RNA, 24 nt, Artificial Sequence
  Synthetic
aaucauuaguucccccaaguacuu

SEQ ID NO: 676162 - RNA, 18 nt, Artificial Sequence
  Synthetic
uaauuuaucuaaguacuu

SEQ ID NO: 676163 - RNA, 19 nt, Artificial Sequence
  Synthetic
uuaauuuaucuaaguacuu

SEQ ID NO: 676164 - RNA, 20 nt, Artificial Sequence
  Synthetic
guuaauuuaucuaaguacuu

SEQ ID NO: 676165 - RNA, 21 nt, Artificial Sequence
  Synthetic
aguuaauuuaucuaaguacuu

SEQ ID NO: 676166 - RNA, 22 nt, Artificial Sequence
  Synthetic
gaguuaauuuaucuaaguacuu

SEQ ID NO: 676167 - RNA, 23 nt, Artificial Sequence
  Synthetic
ugaguuaauuuaucuaaguacuu

SEQ ID NO: 676168 - RNA, 24 nt, Artificial Sequence
  Synthetic
gugaguuaauuuaucuaaguacuu

SEQ ID NO: 676169 - RNA, 18 nt, Artificial Sequence
  Synthetic
aaaucuguuccaguacuu

SEQ ID NO: 676170 - RNA, 19 nt, Artificial Sequence
  Synthetic
caaaucuguuccaguacuu

SEQ ID NO: 676171 - RNA, 20 nt, Artificial Sequence
  Synthetic
acaaaucuguuccaguacuu

SEQ ID NO: 676172 - RNA, 21 nt, Artificial Sequence
  Synthetic
cacaaaucuguuccaguacuu

SEQ ID NO: 676173 - RNA, 22 nt, Artificial Sequence
  Synthetic
gcacaaaucuguuccaguacuu

SEQ ID NO: 676174 - RNA, 23 nt, Artificial Sequence
  Synthetic
agcacaaaucuguuccaguacuu

SEQ ID NO: 676175 - RNA, 24 nt, Artificial Sequence
  Synthetic
cagcacaaaucuguuccaguacuu

SEQ ID NO: 676176 - RNA, 18 nt, Artificial Sequence
  Synthetic
uaacccaugaagguacuu

SEQ ID NO: 676177 - RNA, 19 nt, Artificial Sequence
  Synthetic
guaacccaugaagguacuu

SEQ ID NO: 676178 - RNA, 20 nt, Artificial Sequence
  Synthetic
gguaacccaugaagguacuu

SEQ ID NO: 676179 - RNA, 21 nt, Artificial Sequence
  Synthetic
ggguaacccaugaagguacuu

SEQ ID NO: 676180 - RNA, 22 nt, Artificial Sequence
  Synthetic
uggguaacccaugaagguacuu

SEQ ID NO: 676181 - RNA, 23 nt, Artificial Sequence
  Synthetic
guggguaacccaugaagguacuu

SEQ ID NO: 676182 - RNA, 24 nt, Artificial Sequence
  Synthetic
gguggguaacccaugaagguacuu

SEQ ID NO: 676183 - RNA, 18 nt, Artificial Sequence
  Synthetic
cuauuaucccagguacuu

SEQ ID NO: 676184 - RNA, 19 nt, Artificial Sequence
  Synthetic
ccuauuaucccagguacuu

SEQ ID NO: 676185 - RNA, 20 nt, Artificial Sequence
  Synthetic
accuauuaucccagguacuu

SEQ ID NO: 676186 - RNA, 21 nt, Artificial Sequence
  Synthetic
caccuauuaucccagguacuu

SEQ ID NO: 676187 - RNA, 22 nt, Artificial Sequence
  Synthetic
gcaccuauuaucccagguacuu

SEQ ID NO: 676188 - RNA, 23 nt, Artificial Sequence
  Synthetic
ggcaccuauuaucccagguacuu

SEQ ID NO: 676189 - RNA, 24 nt, Artificial Sequence
  Synthetic
gggcaccuauuaucccagguacuu

SEQ ID NO: 676190 - RNA, 18 nt, Artificial Sequence
  Synthetic
cuugcuuuaauuguacuu

SEQ ID NO: 676191 - RNA, 19 nt, Artificial Sequence
  Synthetic
ccuugcuuuaauuguacuu

SEQ ID NO: 676192 - RNA, 20 nt, Artificial Sequence
  Synthetic
uccuugcuuuaauuguacuu

SEQ ID NO: 676193 - RNA, 21 nt, Artificial Sequence
  Synthetic
auccuugcuuuaauuguacuu

SEQ ID NO: 676194 - RNA, 22 nt, Artificial Sequence
  Synthetic
gauccuugcuuuaauuguacuu

SEQ ID NO: 676195 - RNA, 23 nt, Artificial Sequence
  Synthetic
ugauccuugcuuuaauuguacuu

SEQ ID NO: 676196 - RNA, 24 nt, Artificial Sequence
  Synthetic
cugauccuugcuuuaauuguacuu

SEQ ID NO: 676197 - RNA, 18 nt, Artificial Sequence
  Synthetic
uaacuuuauauuguacuu

SEQ ID NO: 676198 - RNA, 19 nt, Artificial Sequence
  Synthetic
auaacuuuauauuguacuu

SEQ ID NO: 676199 - RNA, 20 nt, Artificial Sequence
  Synthetic
cauaacuuuauauuguacuu

SEQ ID NO: 676200 - RNA, 21 nt, Artificial Sequence
  Synthetic
acauaacuuuauauuguacuu

SEQ ID NO: 676201 - RNA, 22 nt, Artificial Sequence
  Synthetic
aacauaacuuuauauuguacuu

SEQ ID NO: 676202 - RNA, 23 nt, Artificial Sequence
  Synthetic
aaacauaacuuuauauuguacuu

SEQ ID NO: 676203 - RNA, 24 nt, Artificial Sequence
  Synthetic
aaaacauaacuuuauauuguacuu

SEQ ID NO: 676204 - RNA, 18 nt, Artificial Sequence
  Synthetic
uaauuugaauuuguacuu

SEQ ID NO: 676205 - RNA, 19 nt, Artificial Sequence
  Synthetic
auaauuugaauuuguacuu

SEQ ID NO: 676206 - RNA, 20 nt, Artificial Sequence
  Synthetic
aauaauuugaauuuguacuu

SEQ ID NO: 676207 - RNA, 21 nt, Artificial Sequence
  Synthetic
gaauaauuugaauuuguacuu

SEQ ID NO: 676208 - RNA, 22 nt, Artificial Sequence
  Synthetic
ugaauaauuugaauuuguacuu

SEQ ID NO: 676209 - RNA, 23 nt, Artificial Sequence
  Synthetic
augaauaauuugaauuuguacuu

SEQ ID NO: 676210 - RNA, 24 nt, Artificial Sequence
  Synthetic
gaugaauaauuugaauuuguacuu

SEQ ID NO: 676211 - RNA, 18 nt, Artificial Sequence
  Synthetic
aagauuuggaaauuacuu

SEQ ID NO: 676212 - RNA, 19 nt, Artificial Sequence
  Synthetic
uaagauuuggaaauuacuu

SEQ ID NO: 676213 - RNA, 20 nt, Artificial Sequence
  Synthetic
uuaagauuuggaaauuacuu

SEQ ID NO: 676214 - RNA, 21 nt, Artificial Sequence
  Synthetic
uuuaagauuuggaaauuacuu

SEQ ID NO: 676215 - RNA, 22 nt, Artificial Sequence
  Synthetic
cuuuaagauuuggaaauuacuu

SEQ ID NO: 676216 - RNA, 23 nt, Artificial Sequence
  Synthetic
acuuuaagauuuggaaauuacuu

SEQ ID NO: 676217 - RNA, 24 nt, Artificial Sequence
  Synthetic
aacuuuaagauuuggaaauuacuu

SEQ ID NO: 676218 - RNA, 18 nt, Artificial Sequence
  Synthetic
uacucccugugauuacuu

SEQ ID NO: 676219 - RNA, 19 nt, Artificial Sequence
  Synthetic
uuacucccugugauuacuu

SEQ ID NO: 676220 - RNA, 20 nt, Artificial Sequence
  Synthetic
guuacucccugugauuacuu

SEQ ID NO: 676221 - RNA, 21 nt, Artificial Sequence
  Synthetic
gguuacucccugugauuacuu

SEQ ID NO: 676222 - RNA, 22 nt, Artificial Sequence
  Synthetic
agguuacucccugugauuacuu

SEQ ID NO: 676223 - RNA, 23 nt, Artificial Sequence
  Synthetic
uagguuacucccugugauuacuu

SEQ ID NO: 676224 - RNA, 24 nt, Artificial Sequence
  Synthetic
uuagguuacucccugugauuacuu

SEQ ID NO: 676225 - RNA, 18 nt, Artificial Sequence
  Synthetic
agguauaguuuauuacuu

SEQ ID NO: 676226 - RNA, 19 nt, Artificial Sequence
  Synthetic
aagguauaguuuauuacuu

SEQ ID NO: 676227 - RNA, 20 nt, Artificial Sequence
  Synthetic
aaagguauaguuuauuacuu

SEQ ID NO: 676228 - RNA, 21 nt, Artificial Sequence
  Synthetic
aaaagguauaguuuauuacuu

SEQ ID NO: 676229 - RNA, 22 nt, Artificial Sequence
  Synthetic
aaaaagguauaguuuauuacuu

SEQ ID NO: 676230 - RNA, 23 nt, Artificial Sequence
  Synthetic
uaaaaagguauaguuuauuacuu

SEQ ID NO: 676231 - RNA, 24 nt, Artificial Sequence
  Synthetic
auaaaaagguauaguuuauuacuu

SEQ ID NO: 676232 - RNA, 18 nt, Artificial Sequence
  Synthetic
aaaucuggcuacuuacuu

SEQ ID NO: 676233 - RNA, 19 nt, Artificial Sequence
  Synthetic
aaaaucuggcuacuuacuu

SEQ ID NO: 676234 - RNA, 20 nt, Artificial Sequence
  Synthetic
aaaaaucuggcuacuuacuu

SEQ ID NO: 676235 - RNA, 21 nt, Artificial Sequence
  Synthetic
uaaaaaucuggcuacuuacuu

SEQ ID NO: 676236 - RNA, 22 nt, Artificial Sequence
  Synthetic
auaaaaaucuggcuacuuacuu

SEQ ID NO: 676237 - RNA, 23 nt, Artificial Sequence
  Synthetic
aauaaaaaucuggcuacuuacuu

SEQ ID NO: 676238 - RNA, 24 nt, Artificial Sequence
  Synthetic
gaauaaaaaucuggcuacuuacuu

SEQ ID NO: 676239 - RNA, 18 nt, Artificial Sequence
  Synthetic
uaacugaauaccuuacuu

SEQ ID NO: 676240 - RNA, 19 nt, Artificial Sequence
  Synthetic
uuaacugaauaccuuacuu

SEQ ID NO: 676241 - RNA, 20 nt, Artificial Sequence
  Synthetic
cuuaacugaauaccuuacuu

SEQ ID NO: 676242 - RNA, 21 nt, Artificial Sequence
  Synthetic
ucuuaacugaauaccuuacuu

SEQ ID NO: 676243 - RNA, 22 nt, Artificial Sequence
  Synthetic
aucuuaacugaauaccuuacuu

SEQ ID NO: 676244 - RNA, 23 nt, Artificial Sequence
  Synthetic
caucuuaacugaauaccuuacuu

SEQ ID NO: 676245 - RNA, 24 nt, Artificial Sequence
  Synthetic
gcaucuuaacugaauaccuuacuu

SEQ ID NO: 676246 - RNA, 18 nt, Artificial Sequence
  Synthetic
cuuucacuauaguuacuu

SEQ ID NO: 676247 - RNA, 19 nt, Artificial Sequence
  Synthetic
gcuuucacuauaguuacuu

SEQ ID NO: 676248 - RNA, 20 nt, Artificial Sequence
  Synthetic
ugcuuucacuauaguuacuu

SEQ ID NO: 676249 - RNA, 21 nt, Artificial Sequence
  Synthetic
gugcuuucacuauaguuacuu

SEQ ID NO: 676250 - RNA, 22 nt, Artificial Sequence
  Synthetic
cgugcuuucacuauaguuacuu

SEQ ID NO: 676251 - RNA, 23 nt, Artificial Sequence
  Synthetic
ucgugcuuucacuauaguuacuu

SEQ ID NO: 676252 - RNA, 24 nt, Artificial Sequence
  Synthetic
uucgugcuuucacuauaguuacuu

SEQ ID NO: 676253 - RNA, 21 nt, Artificial Sequence
  Synthetic
gguagauaugcggcguuacuu

SEQ ID NO: 676254 - RNA, 22 nt, Artificial Sequence
  Synthetic
ugguagauaugcggcguuacuu

SEQ ID NO: 676255 - RNA, 23 nt, Artificial Sequence
  Synthetic
gugguagauaugcggcguuacuu

SEQ ID NO: 676256 - RNA, 24 nt, Artificial Sequence
  Synthetic
agugguagauaugcggcguuacuu

SEQ ID NO: 676257 - RNA, 18 nt, Artificial Sequence
  Synthetic
ugugccacauauuuacuu

SEQ ID NO: 676258 - RNA, 19 nt, Artificial Sequence
  Synthetic
augugccacauauuuacuu

SEQ ID NO: 676259 - RNA, 20 nt, Artificial Sequence
  Synthetic
uaugugccacauauuuacuu

SEQ ID NO: 676260 - RNA, 21 nt, Artificial Sequence
  Synthetic
auaugugccacauauuuacuu

SEQ ID NO: 676261 - RNA, 22 nt, Artificial Sequence
  Synthetic
aauaugugccacauauuuacuu

SEQ ID NO: 676262 - RNA, 23 nt, Artificial Sequence
  Synthetic
uaauaugugccacauauuuacuu

SEQ ID NO: 676263 - RNA, 24 nt, Artificial Sequence
  Synthetic
cuaauaugugccacauauuuacuu

SEQ ID NO: 676264 - RNA, 18 nt, Artificial Sequence
  Synthetic
ucuugauuaacuuuacuu

SEQ ID NO: 676265 - RNA, 19 nt, Artificial Sequence
  Synthetic
cucuugauuaacuuuacuu

SEQ ID NO: 676266 - RNA, 20 nt, Artificial Sequence
  Synthetic
ucucuugauuaacuuuacuu

SEQ ID NO: 676267 - RNA, 21 nt, Artificial Sequence
  Synthetic
uucucuugauuaacuuuacuu

SEQ ID NO: 676268 - RNA, 22 nt, Artificial Sequence
  Synthetic
cuucucuugauuaacuuuacuu

SEQ ID NO: 676269 - RNA, 23 nt, Artificial Sequence
  Synthetic
ccuucucuugauuaacuuuacuu

SEQ ID NO: 676270 - RNA, 24 nt, Artificial Sequence
  Synthetic
uccuucucuugauuaacuuuacuu

SEQ ID NO: 676271 - RNA, 18 nt, Artificial Sequence
  Synthetic
aaaugcaaagguuuacuu

SEQ ID NO: 676272 - RNA, 19 nt, Artificial Sequence
  Synthetic
uaaaugcaaagguuuacuu

SEQ ID NO: 676273 - RNA, 20 nt, Artificial Sequence
  Synthetic
auaaaugcaaagguuuacuu

SEQ ID NO: 676274 - RNA, 21 nt, Artificial Sequence
  Synthetic
cauaaaugcaaagguuuacuu

SEQ ID NO: 676275 - RNA, 22 nt, Artificial Sequence
  Synthetic
ccauaaaugcaaagguuuacuu

SEQ ID NO: 676276 - RNA, 23 nt, Artificial Sequence
  Synthetic
accauaaaugcaaagguuuacuu

SEQ ID NO: 676277 - RNA, 24 nt, Artificial Sequence
  Synthetic
gaccauaaaugcaaagguuuacuu

SEQ ID NO: 676278 - RNA, 18 nt, Artificial Sequence
  Synthetic
uacauggaaauuuuacuu

SEQ ID NO: 676279 - RNA, 19 nt, Artificial Sequence
  Synthetic
cuacauggaaauuuuacuu

SEQ ID NO: 676280 - RNA, 20 nt, Artificial Sequence
  Synthetic
ccuacauggaaauuuuacuu

SEQ ID NO: 676281 - RNA, 21 nt, Artificial Sequence
  Synthetic
accuacauggaaauuuuacuu

SEQ ID NO: 676282 - RNA, 22 nt, Artificial Sequence
  Synthetic
caccuacauggaaauuuuacuu

SEQ ID NO: 676283 - RNA, 23 nt, Artificial Sequence
  Synthetic
acaccuacauggaaauuuuacuu

SEQ ID NO: 676284 - RNA, 24 nt, Artificial Sequence
  Synthetic
gacaccuacauggaaauuuuacuu

SEQ ID NO: 676285 - RNA, 18 nt, Artificial Sequence
  Synthetic
auuaugccuauuuuacuu

SEQ ID NO: 676286 - RNA, 19 nt, Artificial Sequence
  Synthetic
uauuaugccuauuuuacuu

SEQ ID NO: 676287 - RNA, 20 nt, Artificial Sequence
  Synthetic
guauuaugccuauuuuacuu

SEQ ID NO: 676288 - RNA, 21 nt, Artificial Sequence
  Synthetic
uguauuaugccuauuuuacuu

SEQ ID NO: 676289 - RNA, 22 nt, Artificial Sequence
  Synthetic
cuguauuaugccuauuuuacuu

SEQ ID NO: 676290 - RNA, 23 nt, Artificial Sequence
  Synthetic
gcuguauuaugccuauuuuacuu

SEQ ID NO: 676291 - RNA, 24 nt, Artificial Sequence
  Synthetic
agcuguauuaugccuauuuuacuu

SEQ ID NO: 676292 - RNA, 18 nt, Artificial Sequence
  Synthetic
auuuuuaccuuuuuacuu

SEQ ID NO: 676293 - RNA, 19 nt, Artificial Sequence
  Synthetic
uauuuuuaccuuuuuacuu

SEQ ID NO: 676294 - RNA, 20 nt, Artificial Sequence
  Synthetic
guauuuuuaccuuuuuacuu

SEQ ID NO: 676295 - RNA, 21 nt, Artificial Sequence
  Synthetic
uguauuuuuaccuuuuuacuu

SEQ ID NO: 676296 - RNA, 22 nt, Artificial Sequence
  Synthetic
cuguauuuuuaccuuuuuacuu

SEQ ID NO: 676297 - RNA, 23 nt, Artificial Sequence
  Synthetic
acuguauuuuuaccuuuuuacuu

SEQ ID NO: 676298 - RNA, 24 nt, Artificial Sequence
  Synthetic
aacuguauuuuuaccuuuuuacuu

SEQ ID NO: 676299 - RNA, 18 nt, Artificial Sequence
  Synthetic
aaggggcaagaaaaccuu

SEQ ID NO: 676300 - RNA, 19 nt, Artificial Sequence
  Synthetic
aaaggggcaagaaaaccuu

SEQ ID NO: 676301 - RNA, 20 nt, Artificial Sequence
  Synthetic
aaaaggggcaagaaaaccuu

SEQ ID NO: 676302 - RNA, 21 nt, Artificial Sequence
  Synthetic
aaaaaggggcaagaaaaccuu

SEQ ID NO: 676303 - RNA, 22 nt, Artificial Sequence
  Synthetic
uaaaaaggggcaagaaaaccuu

SEQ ID NO: 676304 - RNA, 23 nt, Artificial Sequence
  Synthetic
auaaaaaggggcaagaaaaccuu

SEQ ID NO: 676305 - RNA, 24 nt, Artificial Sequence
  Synthetic
uauaaaaaggggcaagaaaaccuu

SEQ ID NO: 676306 - RNA, 18 nt, Artificial Sequence
  Synthetic
ccuaguucuguaaaccuu

SEQ ID NO: 676307 - RNA, 19 nt, Artificial Sequence
  Synthetic
cccuaguucuguaaaccuu

SEQ ID NO: 676308 - RNA, 20 nt, Artificial Sequence
  Synthetic
ucccuaguucuguaaaccuu

SEQ ID NO: 676309 - RNA, 21 nt, Artificial Sequence
  Synthetic
cucccuaguucuguaaaccuu

SEQ ID NO: 676310 - RNA, 22 nt, Artificial Sequence
  Synthetic
ucucccuaguucuguaaaccuu

SEQ ID NO: 676311 - RNA, 23 nt, Artificial Sequence
  Synthetic
cucucccuaguucuguaaaccuu

SEQ ID NO: 676312 - RNA, 24 nt, Artificial Sequence
  Synthetic
ccucucccuaguucuguaaaccuu

SEQ ID NO: 676313 - RNA, 18 nt, Artificial Sequence
  Synthetic
ugccaauauuuaaaccuu

SEQ ID NO: 676314 - RNA, 19 nt, Artificial Sequence
  Synthetic
uugccaauauuuaaaccuu

SEQ ID NO: 676315 - RNA, 20 nt, Artificial Sequence
  Synthetic
auugccaauauuuaaaccuu

SEQ ID NO: 676316 - RNA, 21 nt, Artificial Sequence
  Synthetic
uauugccaauauuuaaaccuu

SEQ ID NO: 676317 - RNA, 22 nt, Artificial Sequence
  Synthetic
auauugccaauauuuaaaccuu

SEQ ID NO: 676318 - RNA, 23 nt, Artificial Sequence
  Synthetic
gauauugccaauauuuaaaccuu

SEQ ID NO: 676319 - RNA, 24 nt, Artificial Sequence
  Synthetic
agauauugccaauauuuaaaccuu

SEQ ID NO: 676320 - RNA, 18 nt, Artificial Sequence
  Synthetic
ugguauuauaucaaccuu

SEQ ID NO: 676321 - RNA, 19 nt, Artificial Sequence
  Synthetic
gugguauuauaucaaccuu

SEQ ID NO: 676322 - RNA, 20 nt, Artificial Sequence
  Synthetic
ugugguauuauaucaaccuu

SEQ ID NO: 676323 - RNA, 21 nt, Artificial Sequence
  Synthetic
uugugguauuauaucaaccuu

SEQ ID NO: 676324 - RNA, 22 nt, Artificial Sequence
  Synthetic
cuugugguauuauaucaaccuu

SEQ ID NO: 676325 - RNA, 23 nt, Artificial Sequence
  Synthetic
acuugugguauuauaucaaccuu

SEQ ID NO: 676326 - RNA, 24 nt, Artificial Sequence
  Synthetic
cacuugugguauuauaucaaccuu

SEQ ID NO: 676327 - RNA, 18 nt, Artificial Sequence
  Synthetic
acuuaauuguucaaccuu

SEQ ID NO: 676328 - RNA, 19 nt, Artificial Sequence
  Synthetic
uacuuaauuguucaaccuu

SEQ ID NO: 676329 - RNA, 20 nt, Artificial Sequence
  Synthetic
guacuuaauuguucaaccuu

SEQ ID NO: 676330 - RNA, 21 nt, Artificial Sequence
  Synthetic
cguacuuaauuguucaaccuu

SEQ ID NO: 676331 - RNA, 22 nt, Artificial Sequence
  Synthetic
gcguacuuaauuguucaaccuu

SEQ ID NO: 676332 - RNA, 23 nt, Artificial Sequence
  Synthetic
agcguacuuaauuguucaaccuu

SEQ ID NO: 676333 - RNA, 24 nt, Artificial Sequence
  Synthetic
aagcguacuuaauuguucaaccuu

SEQ ID NO: 676334 - RNA, 18 nt, Artificial Sequence
  Synthetic
aaaauuaaugugaaccuu

SEQ ID NO: 676335 - RNA, 19 nt, Artificial Sequence
  Synthetic
uaaaauuaaugugaaccuu

SEQ ID NO: 676336 - RNA, 20 nt, Artificial Sequence
  Synthetic
cuaaaauuaaugugaaccuu

SEQ ID NO: 676337 - RNA, 21 nt, Artificial Sequence
  Synthetic
gcuaaaauuaaugugaaccuu

SEQ ID NO: 676338 - RNA, 22 nt, Artificial Sequence
  Synthetic
ggcuaaaauuaaugugaaccuu

SEQ ID NO: 676339 - RNA, 23 nt, Artificial Sequence
  Synthetic
aggcuaaaauuaaugugaaccuu

SEQ ID NO: 676340 - RNA, 24 nt, Artificial Sequence
  Synthetic
aaggcuaaaauuaaugugaaccuu

SEQ ID NO: 676341 - RNA, 18 nt, Artificial Sequence
  Synthetic
ggaaggucugauaaccuu

SEQ ID NO: 676342 - RNA, 19 nt, Artificial Sequence
  Synthetic
uggaaggucugauaaccuu

SEQ ID NO: 676343 - RNA, 20 nt, Artificial Sequence
  Synthetic
guggaaggucugauaaccuu

SEQ ID NO: 676344 - RNA, 21 nt, Artificial Sequence
  Synthetic
gguggaaggucugauaaccuu

SEQ ID NO: 676345 - RNA, 22 nt, Artificial Sequence
  Synthetic
ugguggaaggucugauaaccuu

SEQ ID NO: 676346 - RNA, 23 nt, Artificial Sequence
  Synthetic
uugguggaaggucugauaaccuu

SEQ ID NO: 676347 - RNA, 24 nt, Artificial Sequence
  Synthetic
cuugguggaaggucugauaaccuu

SEQ ID NO: 676348 - RNA, 18 nt, Artificial Sequence
  Synthetic
caaaucccgucuaaccuu

SEQ ID NO: 676349 - RNA, 19 nt, Artificial Sequence
  Synthetic
acaaaucccgucuaaccuu

SEQ ID NO: 676350 - RNA, 20 nt, Artificial Sequence
  Synthetic
uacaaaucccgucuaaccuu

SEQ ID NO: 676351 - RNA, 21 nt, Artificial Sequence
  Synthetic
guacaaaucccgucuaaccuu

SEQ ID NO: 676352 - RNA, 22 nt, Artificial Sequence
  Synthetic
uguacaaaucccgucuaaccuu

SEQ ID NO: 676353 - RNA, 23 nt, Artificial Sequence
  Synthetic
guguacaaaucccgucuaaccuu

SEQ ID NO: 676354 - RNA, 24 nt, Artificial Sequence
  Synthetic
uguguacaaaucccgucuaaccuu

SEQ ID NO: 676355 - RNA, 18 nt, Artificial Sequence
  Synthetic
cacgcaauuauuaaccuu

SEQ ID NO: 676356 - RNA, 19 nt, Artificial Sequence
  Synthetic
gcacgcaauuauuaaccuu

SEQ ID NO: 676357 - RNA, 20 nt, Artificial Sequence
  Synthetic
cgcacgcaauuauuaaccuu

SEQ ID NO: 676358 - RNA, 21 nt, Artificial Sequence
  Synthetic
acgcacgcaauuauuaaccuu

SEQ ID NO: 676359 - RNA, 22 nt, Artificial Sequence
  Synthetic
cacgcacgcaauuauuaaccuu

SEQ ID NO: 676360 - RNA, 23 nt, Artificial Sequence
  Synthetic
acacgcacgcaauuauuaaccuu

SEQ ID NO: 676361 - RNA, 24 nt, Artificial Sequence
  Synthetic
cacacgcacgcaauuauuaaccuu

SEQ ID NO: 676362 - RNA, 18 nt, Artificial Sequence
  Synthetic
auccuaucuuuuaaccuu

SEQ ID NO: 676363 - RNA, 19 nt, Artificial Sequence
  Synthetic
aauccuaucuuuuaaccuu

SEQ ID NO: 676364 - RNA, 20 nt, Artificial Sequence
  Synthetic
gaauccuaucuuuuaaccuu

SEQ ID NO: 676365 - RNA, 21 nt, Artificial Sequence
  Synthetic
ugaauccuaucuuuuaaccuu

SEQ ID NO: 676366 - RNA, 22 nt, Artificial Sequence
  Synthetic
gugaauccuaucuuuuaaccuu

SEQ ID NO: 676367 - RNA, 23 nt, Artificial Sequence
  Synthetic
agugaauccuaucuuuuaaccuu

SEQ ID NO: 676368 - RNA, 24 nt, Artificial Sequence
  Synthetic
gagugaauccuaucuuuuaaccuu

SEQ ID NO: 676369 - RNA, 18 nt, Artificial Sequence
  Synthetic
ugccauuuuaaacaccuu

SEQ ID NO: 676370 - RNA, 19 nt, Artificial Sequence
  Synthetic
augccauuuuaaacaccuu

SEQ ID NO: 676371 - RNA, 20 nt, Artificial Sequence
  Synthetic
aaugccauuuuaaacaccuu

SEQ ID NO: 676372 - RNA, 21 nt, Artificial Sequence
  Synthetic
caaugccauuuuaaacaccuu

SEQ ID NO: 676373 - RNA, 22 nt, Artificial Sequence
  Synthetic
acaaugccauuuuaaacaccuu

SEQ ID NO: 676374 - RNA, 23 nt, Artificial Sequence
  Synthetic
uacaaugccauuuuaaacaccuu

SEQ ID NO: 676375 - RNA, 24 nt, Artificial Sequence
  Synthetic
auacaaugccauuuuaaacaccuu

SEQ ID NO: 676376 - RNA, 18 nt, Artificial Sequence
  Synthetic
uaacaauuuauacaccuu

SEQ ID NO: 676377 - RNA, 19 nt, Artificial Sequence
  Synthetic
uuaacaauuuauacaccuu

SEQ ID NO: 676378 - RNA, 20 nt, Artificial Sequence
  Synthetic
uuuaacaauuuauacaccuu

SEQ ID NO: 676379 - RNA, 21 nt, Artificial Sequence
  Synthetic
auuuaacaauuuauacaccuu

SEQ ID NO: 676380 - RNA, 22 nt, Artificial Sequence
  Synthetic
uauuuaacaauuuauacaccuu

SEQ ID NO: 676381 - RNA, 23 nt, Artificial Sequence
  Synthetic
guauuuaacaauuuauacaccuu

SEQ ID NO: 676382 - RNA, 24 nt, Artificial Sequence
  Synthetic
gguauuuaacaauuuauacaccuu

SEQ ID NO: 676383 - RNA, 18 nt, Artificial Sequence
  Synthetic
uuuguuauuacccaccuu

SEQ ID NO: 676384 - RNA, 19 nt, Artificial Sequence
  Synthetic
guuuguuauuacccaccuu

SEQ ID NO: 676385 - RNA, 20 nt, Artificial Sequence
  Synthetic
aguuuguuauuacccaccuu

SEQ ID NO: 676386 - RNA, 21 nt, Artificial Sequence
  Synthetic
gaguuuguuauuacccaccuu

SEQ ID NO: 676387 - RNA, 22 nt, Artificial Sequence
  Synthetic
agaguuuguuauuacccaccuu

SEQ ID NO: 676388 - RNA, 23 nt, Artificial Sequence
  Synthetic
aagaguuuguuauuacccaccuu

SEQ ID NO: 676389 - RNA, 24 nt, Artificial Sequence
  Synthetic
uaagaguuuguuauuacccaccuu

SEQ ID NO: 676390 - RNA, 18 nt, Artificial Sequence
  Synthetic
ucuccuuccugccaccuu

SEQ ID NO: 676391 - RNA, 19 nt, Artificial Sequence
  Synthetic
uucuccuuccugccaccuu

SEQ ID NO: 676392 - RNA, 20 nt, Artificial Sequence
  Synthetic
cuucuccuuccugccaccuu

SEQ ID NO: 676393 - RNA, 21 nt, Artificial Sequence
  Synthetic
acuucuccuuccugccaccuu

SEQ ID NO: 676394 - RNA, 22 nt, Artificial Sequence
  Synthetic
uacuucuccuuccugccaccuu

SEQ ID NO: 676395 - RNA, 23 nt, Artificial Sequence
  Synthetic
guacuucuccuuccugccaccuu

SEQ ID NO: 676396 - RNA, 24 nt, Artificial Sequence
  Synthetic
aguacuucuccuuccugccaccuu

SEQ ID NO: 676397 - RNA, 18 nt, Artificial Sequence
  Synthetic
cuguaauuccagcaccuu

SEQ ID NO: 676398 - RNA, 19 nt, Artificial Sequence
  Synthetic
ccuguaauuccagcaccuu

SEQ ID NO: 676399 - RNA, 20 nt, Artificial Sequence
  Synthetic
gccuguaauuccagcaccuu

SEQ ID NO: 676400 - RNA, 21 nt, Artificial Sequence
  Synthetic
ugccuguaauuccagcaccuu

SEQ ID NO: 676401 - RNA, 22 nt, Artificial Sequence
  Synthetic
augccuguaauuccagcaccuu

SEQ ID NO: 676402 - RNA, 23 nt, Artificial Sequence
  Synthetic
caugccuguaauuccagcaccuu

SEQ ID NO: 676403 - RNA, 24 nt, Artificial Sequence
  Synthetic
ucaugccuguaauuccagcaccuu

SEQ ID NO: 676404 - RNA, 18 nt, Artificial Sequence
  Synthetic
uuuuaauaccaagaccuu

SEQ ID NO: 676405 - RNA, 19 nt, Artificial Sequence
  Synthetic
cuuuuaauaccaagaccuu

SEQ ID NO: 676406 - RNA, 20 nt, Artificial Sequence
  Synthetic
acuuuuaauaccaagaccuu

SEQ ID NO: 676407 - RNA, 21 nt, Artificial Sequence
  Synthetic
uacuuuuaauaccaagaccuu

SEQ ID NO: 676408 - RNA, 22 nt, Artificial Sequence
  Synthetic
cuacuuuuaauaccaagaccuu

SEQ ID NO: 676409 - RNA, 23 nt, Artificial Sequence
  Synthetic
gcuacuuuuaauaccaagaccuu

SEQ ID NO: 676410 - RNA, 24 nt, Artificial Sequence
  Synthetic
ugcuacuuuuaauaccaagaccuu

SEQ ID NO: 676411 - RNA, 18 nt, Artificial Sequence
  Synthetic
cuacauaucauggaccuu

SEQ ID NO: 676412 - RNA, 19 nt, Artificial Sequence
  Synthetic
acuacauaucauggaccuu

SEQ ID NO: 676413 - RNA, 20 nt, Artificial Sequence
  Synthetic
cacuacauaucauggaccuu

SEQ ID NO: 676414 - RNA, 21 nt, Artificial Sequence
  Synthetic
ucacuacauaucauggaccuu

SEQ ID NO: 676415 - RNA, 22 nt, Artificial Sequence
  Synthetic
aucacuacauaucauggaccuu

SEQ ID NO: 676416 - RNA, 23 nt, Artificial Sequence
  Synthetic
aaucacuacauaucauggaccuu

SEQ ID NO: 676417 - RNA, 24 nt, Artificial Sequence
  Synthetic
aaaucacuacauaucauggaccuu

SEQ ID NO: 676418 - RNA, 18 nt, Artificial Sequence
  Synthetic
uggaaaauuauggaccuu

SEQ ID NO: 676419 - RNA, 19 nt, Artificial Sequence
  Synthetic
auggaaaauuauggaccuu

SEQ ID NO: 676420 - RNA, 20 nt, Artificial Sequence
  Synthetic
uauggaaaauuauggaccuu

SEQ ID NO: 676421 - RNA, 21 nt, Artificial Sequence
  Synthetic
uuauggaaaauuauggaccuu

SEQ ID NO: 676422 - RNA, 22 nt, Artificial Sequence
  Synthetic
auuauggaaaauuauggaccuu

SEQ ID NO: 676423 - RNA, 23 nt, Artificial Sequence
  Synthetic
uauuauggaaaauuauggaccuu

SEQ ID NO: 676424 - RNA, 24 nt, Artificial Sequence
  Synthetic
uuauuauggaaaauuauggaccuu

SEQ ID NO: 676425 - RNA, 18 nt, Artificial Sequence
  Synthetic
uagcaccuucaugaccuu

SEQ ID NO: 676426 - RNA, 19 nt, Artificial Sequence
  Synthetic
uuagcaccuucaugaccuu

SEQ ID NO: 676427 - RNA, 20 nt, Artificial Sequence
  Synthetic
guuagcaccuucaugaccuu

SEQ ID NO: 676428 - RNA, 21 nt, Artificial Sequence
  Synthetic
aguuagcaccuucaugaccuu

SEQ ID NO: 676429 - RNA, 22 nt, Artificial Sequence
  Synthetic
gaguuagcaccuucaugaccuu

SEQ ID NO: 676430 - RNA, 23 nt, Artificial Sequence
  Synthetic
agaguuagcaccuucaugaccuu

SEQ ID NO: 676431 - RNA, 24 nt, Artificial Sequence
  Synthetic
cagaguuagcaccuucaugaccuu

SEQ ID NO: 676432 - RNA, 18 nt, Artificial Sequence
  Synthetic
aaguucugagcugaccuu

SEQ ID NO: 676433 - RNA, 19 nt, Artificial Sequence
  Synthetic
uaaguucugagcugaccuu

SEQ ID NO: 676434 - RNA, 20 nt, Artificial Sequence
  Synthetic
uuaaguucugagcugaccuu

SEQ ID NO: 676435 - RNA, 21 nt, Artificial Sequence
  Synthetic
guuaaguucugagcugaccuu

SEQ ID NO: 676436 - RNA, 22 nt, Artificial Sequence
  Synthetic
uguuaaguucugagcugaccuu

SEQ ID NO: 676437 - RNA, 23 nt, Artificial Sequence
  Synthetic
uuguuaaguucugagcugaccuu

SEQ ID NO: 676438 - RNA, 24 nt, Artificial Sequence
  Synthetic
guuguuaaguucugagcugaccuu

SEQ ID NO: 676439 - RNA, 18 nt, Artificial Sequence
  Synthetic
cuccguuauauugaccuu

SEQ ID NO: 676440 - RNA, 19 nt, Artificial Sequence
  Synthetic
acuccguuauauugaccuu

SEQ ID NO: 676441 - RNA, 20 nt, Artificial Sequence
  Synthetic
aacuccguuauauugaccuu

SEQ ID NO: 676442 - RNA, 21 nt, Artificial Sequence
  Synthetic
gaacuccguuauauugaccuu

SEQ ID NO: 676443 - RNA, 22 nt, Artificial Sequence
  Synthetic
ugaacuccguuauauugaccuu

SEQ ID NO: 676444 - RNA, 23 nt, Artificial Sequence
  Synthetic
gugaacuccguuauauugaccuu

SEQ ID NO: 676445 - RNA, 24 nt, Artificial Sequence
  Synthetic
agugaacuccguuauauugaccuu

SEQ ID NO: 676446 - RNA, 18 nt, Artificial Sequence
  Synthetic
auauuauuaaaauaccuu

SEQ ID NO: 676447 - RNA, 19 nt, Artificial Sequence
  Synthetic
gauauuauuaaaauaccuu

SEQ ID NO: 676448 - RNA, 20 nt, Artificial Sequence
  Synthetic
cgauauuauuaaaauaccuu

SEQ ID NO: 676449 - RNA, 21 nt, Artificial Sequence
  Synthetic
ccgauauuauuaaaauaccuu

SEQ ID NO: 676450 - RNA, 22 nt, Artificial Sequence
  Synthetic
cccgauauuauuaaaauaccuu

SEQ ID NO: 676451 - RNA, 23 nt, Artificial Sequence
  Synthetic
acccgauauuauuaaaauaccuu

SEQ ID NO: 676452 - RNA, 24 nt, Artificial Sequence
  Synthetic
aacccgauauuauuaaaauaccuu

SEQ ID NO: 676453 - RNA, 18 nt, Artificial Sequence
  Synthetic
ggggaguuagaauaccuu

SEQ ID NO: 676454 - RNA, 19 nt, Artificial Sequence
  Synthetic
aggggaguuagaauaccuu

SEQ ID NO: 676455 - RNA, 20 nt, Artificial Sequence
  Synthetic
gaggggaguuagaauaccuu

SEQ ID NO: 676456 - RNA, 21 nt, Artificial Sequence
  Synthetic
ggaggggaguuagaauaccuu

SEQ ID NO: 676457 - RNA, 22 nt, Artificial Sequence
  Synthetic
aggaggggaguuagaauaccuu

SEQ ID NO: 676458 - RNA, 23 nt, Artificial Sequence
  Synthetic
uaggaggggaguuagaauaccuu

SEQ ID NO: 676459 - RNA, 24 nt, Artificial Sequence
  Synthetic
uuaggaggggaguuagaauaccuu

SEQ ID NO: 676460 - RNA, 18 nt, Artificial Sequence
  Synthetic
uucaaaugaguauaccuu

SEQ ID NO: 676461 - RNA, 19 nt, Artificial Sequence
  Synthetic
cuucaaaugaguauaccuu

SEQ ID NO: 676462 - RNA, 20 nt, Artificial Sequence
  Synthetic
acuucaaaugaguauaccuu

SEQ ID NO: 676463 - RNA, 21 nt, Artificial Sequence
  Synthetic
cacuucaaaugaguauaccuu

SEQ ID NO: 676464 - RNA, 22 nt, Artificial Sequence
  Synthetic
ccacuucaaaugaguauaccuu

SEQ ID NO: 676465 - RNA, 23 nt, Artificial Sequence
  Synthetic
uccacuucaaaugaguauaccuu

SEQ ID NO: 676466 - RNA, 24 nt, Artificial Sequence
  Synthetic
auccacuucaaaugaguauaccuu

SEQ ID NO: 676467 - RNA, 18 nt, Artificial Sequence
  Synthetic
cuucucuuguccuaccuu

SEQ ID NO: 676468 - RNA, 19 nt, Artificial Sequence
  Synthetic
ccuucucuuguccuaccuu

SEQ ID NO: 676469 - RNA, 20 nt, Artificial Sequence
  Synthetic
uccuucucuuguccuaccuu

SEQ ID NO: 676470 - RNA, 21 nt, Artificial Sequence
  Synthetic
auccuucucuuguccuaccuu

SEQ ID NO: 676471 - RNA, 22 nt, Artificial Sequence
  Synthetic
cauccuucucuuguccuaccuu

SEQ ID NO: 676472 - RNA, 23 nt, Artificial Sequence
  Synthetic
ccauccuucucuuguccuaccuu

SEQ ID NO: 676473 - RNA, 24 nt, Artificial Sequence
  Synthetic
uccauccuucucuuguccuaccuu

SEQ ID NO: 676474 - RNA, 18 nt, Artificial Sequence
  Synthetic
caagugauaagguaccuu

SEQ ID NO: 676475 - RNA, 19 nt, Artificial Sequence
  Synthetic
acaagugauaagguaccuu

SEQ ID NO: 676476 - RNA, 20 nt, Artificial Sequence
  Synthetic
aacaagugauaagguaccuu

SEQ ID NO: 676477 - RNA, 21 nt, Artificial Sequence
  Synthetic
aaacaagugauaagguaccuu

SEQ ID NO: 676478 - RNA, 22 nt, Artificial Sequence
  Synthetic
caaacaagugauaagguaccuu

SEQ ID NO: 676479 - RNA, 23 nt, Artificial Sequence
  Synthetic
acaaacaagugauaagguaccuu

SEQ ID NO: 676480 - RNA, 24 nt, Artificial Sequence
  Synthetic
aacaaacaagugauaagguaccuu

SEQ ID NO: 676481 - RNA, 18 nt, Artificial Sequence
  Synthetic
ggugggaaaugguaccuu

SEQ ID NO: 676482 - RNA, 19 nt, Artificial Sequence
  Synthetic
gggugggaaaugguaccuu

SEQ ID NO: 676483 - RNA, 20 nt, Artificial Sequence
  Synthetic
cgggugggaaaugguaccuu

SEQ ID NO: 676484 - RNA, 21 nt, Artificial Sequence
  Synthetic
gcgggugggaaaugguaccuu

SEQ ID NO: 676485 - RNA, 22 nt, Artificial Sequence
  Synthetic
ggcgggugggaaaugguaccuu

SEQ ID NO: 676486 - RNA, 23 nt, Artificial Sequence
  Synthetic
uggcgggugggaaaugguaccuu

SEQ ID NO: 676487 - RNA, 24 nt, Artificial Sequence
  Synthetic
uuggcgggugggaaaugguaccuu

SEQ ID NO: 676488 - RNA, 18 nt, Artificial Sequence
  Synthetic
gugaaaauucuguaccuu

SEQ ID NO: 676489 - RNA, 19 nt, Artificial Sequence
  Synthetic
agugaaaauucuguaccuu

SEQ ID NO: 676490 - RNA, 20 nt, Artificial Sequence
  Synthetic
cagugaaaauucuguaccuu

SEQ ID NO: 676491 - RNA, 21 nt, Artificial Sequence
  Synthetic
ccagugaaaauucuguaccuu

SEQ ID NO: 676492 - RNA, 22 nt, Artificial Sequence
  Synthetic
uccagugaaaauucuguaccuu

SEQ ID NO: 676493 - RNA, 23 nt, Artificial Sequence
  Synthetic
auccagugaaaauucuguaccuu

SEQ ID NO: 676494 - RNA, 24 nt, Artificial Sequence
  Synthetic
aauccagugaaaauucuguaccuu

SEQ ID NO: 676495 - RNA, 18 nt, Artificial Sequence
  Synthetic
agggaagucccuuaccuu

SEQ ID NO: 676496 - RNA, 19 nt, Artificial Sequence
  Synthetic
uagggaagucccuuaccuu

SEQ ID NO: 676497 - RNA, 20 nt, Artificial Sequence
  Synthetic
uuagggaagucccuuaccuu

SEQ ID NO: 676498 - RNA, 21 nt, Artificial Sequence
  Synthetic
uuuagggaagucccuuaccuu

SEQ ID NO: 676499 - RNA, 22 nt, Artificial Sequence
  Synthetic
cuuuagggaagucccuuaccuu

SEQ ID NO: 676500 - RNA, 23 nt, Artificial Sequence
  Synthetic
ucuuuagggaagucccuuaccuu

SEQ ID NO: 676501 - RNA, 24 nt, Artificial Sequence
  Synthetic
aucuuuagggaagucccuuaccuu

SEQ ID NO: 676502 - RNA, 18 nt, Artificial Sequence
  Synthetic
aauuccuaugcuuaccuu

SEQ ID NO: 676503 - RNA, 19 nt, Artificial Sequence
  Synthetic
aaauuccuaugcuuaccuu

SEQ ID NO: 676504 - RNA, 20 nt, Artificial Sequence
  Synthetic
uaaauuccuaugcuuaccuu

SEQ ID NO: 676505 - RNA, 21 nt, Artificial Sequence
  Synthetic
guaaauuccuaugcuuaccuu

SEQ ID NO: 676506 - RNA, 22 nt, Artificial Sequence
  Synthetic
uguaaauuccuaugcuuaccuu

SEQ ID NO: 676507 - RNA, 23 nt, Artificial Sequence
  Synthetic
cuguaaauuccuaugcuuaccuu

SEQ ID NO: 676508 - RNA, 24 nt, Artificial Sequence
  Synthetic
acuguaaauuccuaugcuuaccuu

SEQ ID NO: 676509 - RNA, 18 nt, Artificial Sequence
  Synthetic
gugcuuugguuuuaccuu

SEQ ID NO: 676510 - RNA, 19 nt, Artificial Sequence
  Synthetic
agugcuuugguuuuaccuu

SEQ ID NO: 676511 - RNA, 20 nt, Artificial Sequence
  Synthetic
aagugcuuugguuuuaccuu

SEQ ID NO: 676512 - RNA, 21 nt, Artificial Sequence
  Synthetic
aaagugcuuugguuuuaccuu

SEQ ID NO: 676513 - RNA, 22 nt, Artificial Sequence
  Synthetic
gaaagugcuuugguuuuaccuu

SEQ ID NO: 676514 - RNA, 23 nt, Artificial Sequence
  Synthetic
ugaaagugcuuugguuuuaccuu

SEQ ID NO: 676515 - RNA, 24 nt, Artificial Sequence
  Synthetic
augaaagugcuuugguuuuaccuu

SEQ ID NO: 676516 - RNA, 18 nt, Artificial Sequence
  Synthetic
cuaucauugucaacccuu

SEQ ID NO: 676517 - RNA, 19 nt, Artificial Sequence
  Synthetic
acuaucauugucaacccuu

SEQ ID NO: 676518 - RNA, 20 nt, Artificial Sequence
  Synthetic
cacuaucauugucaacccuu

SEQ ID NO: 676519 - RNA, 21 nt, Artificial Sequence
  Synthetic
gcacuaucauugucaacccuu

SEQ ID NO: 676520 - RNA, 22 nt, Artificial Sequence
  Synthetic
ggcacuaucauugucaacccuu

SEQ ID NO: 676521 - RNA, 23 nt, Artificial Sequence
  Synthetic
gggcacuaucauugucaacccuu

SEQ ID NO: 676522 - RNA, 24 nt, Artificial Sequence
  Synthetic
agggcacuaucauugucaacccuu

SEQ ID NO: 676523 - RNA, 18 nt, Artificial Sequence
  Synthetic
guaauuuccaucacccuu

SEQ ID NO: 676524 - RNA, 19 nt, Artificial Sequence
  Synthetic
aguaauuuccaucacccuu

SEQ ID NO: 676525 - RNA, 20 nt, Artificial Sequence
  Synthetic
aaguaauuuccaucacccuu

SEQ ID NO: 676526 - RNA, 21 nt, Artificial Sequence
  Synthetic
aaaguaauuuccaucacccuu

SEQ ID NO: 676527 - RNA, 22 nt, Artificial Sequence
  Synthetic
aaaaguaauuuccaucacccuu

SEQ ID NO: 676528 - RNA, 23 nt, Artificial Sequence
  Synthetic
caaaaguaauuuccaucacccuu

SEQ ID NO: 676529 - RNA, 24 nt, Artificial Sequence
  Synthetic
ucaaaaguaauuuccaucacccuu

SEQ ID NO: 676530 - RNA, 18 nt, Artificial Sequence
  Synthetic
aggauaguagucacccuu

SEQ ID NO: 676531 - RNA, 19 nt, Artificial Sequence
  Synthetic
aaggauaguagucacccuu

SEQ ID NO: 676532 - RNA, 20 nt, Artificial Sequence
  Synthetic
uaaggauaguagucacccuu

SEQ ID NO: 676533 - RNA, 21 nt, Artificial Sequence
  Synthetic
guaaggauaguagucacccuu

SEQ ID NO: 676534 - RNA, 22 nt, Artificial Sequence
  Synthetic
aguaaggauaguagucacccuu

SEQ ID NO: 676535 - RNA, 23 nt, Artificial Sequence
  Synthetic
aaguaaggauaguagucacccuu

SEQ ID NO: 676536 - RNA, 24 nt, Artificial Sequence
  Synthetic
gaaguaaggauaguagucacccuu

SEQ ID NO: 676537 - RNA, 18 nt, Artificial Sequence
  Synthetic
gugguuuuagggacccuu

SEQ ID NO: 676538 - RNA, 19 nt, Artificial Sequence
  Synthetic
ugugguuuuagggacccuu

SEQ ID NO: 676539 - RNA, 20 nt, Artificial Sequence
  Synthetic
uugugguuuuagggacccuu

SEQ ID NO: 676540 - RNA, 21 nt, Artificial Sequence
  Synthetic
guugugguuuuagggacccuu

SEQ ID NO: 676541 - RNA, 22 nt, Artificial Sequence
  Synthetic
aguugugguuuuagggacccuu

SEQ ID NO: 676542 - RNA, 23 nt, Artificial Sequence
  Synthetic
aaguugugguuuuagggacccuu

SEQ ID NO: 676543 - RNA, 24 nt, Artificial Sequence
  Synthetic
uaaguugugguuuuagggacccuu

SEQ ID NO: 676544 - RNA, 18 nt, Artificial Sequence
  Synthetic
acucuuagauugacccuu

SEQ ID NO: 676545 - RNA, 19 nt, Artificial Sequence
  Synthetic
aacucuuagauugacccuu

SEQ ID NO: 676546 - RNA, 20 nt, Artificial Sequence
  Synthetic
uaacucuuagauugacccuu

SEQ ID NO: 676547 - RNA, 21 nt, Artificial Sequence
  Synthetic
auaacucuuagauugacccuu

SEQ ID NO: 676548 - RNA, 22 nt, Artificial Sequence
  Synthetic
aauaacucuuagauugacccuu

SEQ ID NO: 676549 - RNA, 23 nt, Artificial Sequence
  Synthetic
caauaacucuuagauugacccuu

SEQ ID NO: 676550 - RNA, 24 nt, Artificial Sequence
  Synthetic
ccaauaacucuuagauugacccuu

SEQ ID NO: 676551 - RNA, 18 nt, Artificial Sequence
  Synthetic
gucccaccauauacccuu

SEQ ID NO: 676552 - RNA, 19 nt, Artificial Sequence
  Synthetic
ggucccaccauauacccuu

SEQ ID NO: 676553 - RNA, 20 nt, Artificial Sequence
  Synthetic
gggucccaccauauacccuu

SEQ ID NO: 676554 - RNA, 21 nt, Artificial Sequence
  Synthetic
agggucccaccauauacccuu

SEQ ID NO: 676555 - RNA, 22 nt, Artificial Sequence
  Synthetic
gagggucccaccauauacccuu

SEQ ID NO: 676556 - RNA, 23 nt, Artificial Sequence
  Synthetic
agagggucccaccauauacccuu

SEQ ID NO: 676557 - RNA, 24 nt, Artificial Sequence
  Synthetic
uagagggucccaccauauacccuu

SEQ ID NO: 676558 - RNA, 18 nt, Artificial Sequence
  Synthetic
uuggccaaaucuacccuu

SEQ ID NO: 676559 - RNA, 19 nt, Artificial Sequence
  Synthetic
auuggccaaaucuacccuu

SEQ ID NO: 676560 - RNA, 20 nt, Artificial Sequence
  Synthetic
cauuggccaaaucuacccuu

SEQ ID NO: 676561 - RNA, 21 nt, Artificial Sequence
  Synthetic
ucauuggccaaaucuacccuu

SEQ ID NO: 676562 - RNA, 22 nt, Artificial Sequence
  Synthetic
cucauuggccaaaucuacccuu

SEQ ID NO: 676563 - RNA, 23 nt, Artificial Sequence
  Synthetic
acucauuggccaaaucuacccuu

SEQ ID NO: 676564 - RNA, 24 nt, Artificial Sequence
  Synthetic
cacucauuggccaaaucuacccuu

SEQ ID NO: 676565 - RNA, 18 nt, Artificial Sequence
  Synthetic
aacuuaaauauuacccuu

SEQ ID NO: 676566 - RNA, 19 nt, Artificial Sequence
  Synthetic
caacuuaaauauuacccuu

SEQ ID NO: 676567 - RNA, 20 nt, Artificial Sequence
  Synthetic
acaacuuaaauauuacccuu

SEQ ID NO: 676568 - RNA, 21 nt, Artificial Sequence
  Synthetic
cacaacuuaaauauuacccuu

SEQ ID NO: 676569 - RNA, 22 nt, Artificial Sequence
  Synthetic
ucacaacuuaaauauuacccuu

SEQ ID NO: 676570 - RNA, 23 nt, Artificial Sequence
  Synthetic
cucacaacuuaaauauuacccuu

SEQ ID NO: 676571 - RNA, 24 nt, Artificial Sequence
  Synthetic
acucacaacuuaaauauuacccuu

SEQ ID NO: 676572 - RNA, 18 nt, Artificial Sequence
  Synthetic
guguuucugcuuacccuu

SEQ ID NO: 676573 - RNA, 19 nt, Artificial Sequence
  Synthetic
uguguuucugcuuacccuu

SEQ ID NO: 676574 - RNA, 20 nt, Artificial Sequence
  Synthetic
auguguuucugcuuacccuu

SEQ ID NO: 676575 - RNA, 21 nt, Artificial Sequence
  Synthetic
cauguguuucugcuuacccuu

SEQ ID NO: 676576 - RNA, 22 nt, Artificial Sequence
  Synthetic
ucauguguuucugcuuacccuu

SEQ ID NO: 676577 - RNA, 23 nt, Artificial Sequence
  Synthetic
aucauguguuucugcuuacccuu

SEQ ID NO: 676578 - RNA, 24 nt, Artificial Sequence
  Synthetic
caucauguguuucugcuuacccuu

SEQ ID NO: 676579 - RNA, 18 nt, Artificial Sequence
  Synthetic
gaccauagcagcccccuu

SEQ ID NO: 676580 - RNA, 19 nt, Artificial Sequence
  Synthetic
agaccauagcagcccccuu

SEQ ID NO: 676581 - RNA, 20 nt, Artificial Sequence
  Synthetic
cagaccauagcagcccccuu

SEQ ID NO: 676582 - RNA, 21 nt, Artificial Sequence
  Synthetic
ucagaccauagcagcccccuu

SEQ ID NO: 676583 - RNA, 22 nt, Artificial Sequence
  Synthetic
uucagaccauagcagcccccuu

SEQ ID NO: 676584 - RNA, 23 nt, Artificial Sequence
  Synthetic
auucagaccauagcagcccccuu

SEQ ID NO: 676585 - RNA, 24 nt, Artificial Sequence
  Synthetic
cauucagaccauagcagcccccuu

SEQ ID NO: 676586 - RNA, 18 nt, Artificial Sequence
  Synthetic
agcuaauauaagccccuu

SEQ ID NO: 676587 - RNA, 19 nt, Artificial Sequence
  Synthetic
gagcuaauauaagccccuu

SEQ ID NO: 676588 - RNA, 20 nt, Artificial Sequence
  Synthetic
ggagcuaauauaagccccuu

SEQ ID NO: 676589 - RNA, 21 nt, Artificial Sequence
  Synthetic
uggagcuaauauaagccccuu

SEQ ID NO: 676590 - RNA, 22 nt, Artificial Sequence
  Synthetic
auggagcuaauauaagccccuu

SEQ ID NO: 676591 - RNA, 23 nt, Artificial Sequence
  Synthetic
uauggagcuaauauaagccccuu

SEQ ID NO: 676592 - RNA, 24 nt, Artificial Sequence
  Synthetic
auauggagcuaauauaagccccuu

SEQ ID NO: 676593 - RNA, 18 nt, Artificial Sequence
  Synthetic
ugccaguuuucuccccuu

SEQ ID NO: 676594 - RNA, 19 nt, Artificial Sequence
  Synthetic
uugccaguuuucuccccuu

SEQ ID NO: 676595 - RNA, 20 nt, Artificial Sequence
  Synthetic
uuugccaguuuucuccccuu

SEQ ID NO: 676596 - RNA, 21 nt, Artificial Sequence
  Synthetic
uuuugccaguuuucuccccuu

SEQ ID NO: 676597 - RNA, 22 nt, Artificial Sequence
  Synthetic
auuuugccaguuuucuccccuu

SEQ ID NO: 676598 - RNA, 23 nt, Artificial Sequence
  Synthetic
uauuuugccaguuuucuccccuu

SEQ ID NO: 676599 - RNA, 24 nt, Artificial Sequence
  Synthetic
auauuuugccaguuuucuccccuu

SEQ ID NO: 676600 - RNA, 18 nt, Artificial Sequence
  Synthetic
gcugccuagauuccccuu

SEQ ID NO: 676601 - RNA, 19 nt, Artificial Sequence
  Synthetic
ugcugccuagauuccccuu

SEQ ID NO: 676602 - RNA, 20 nt, Artificial Sequence
  Synthetic
augcugccuagauuccccuu

SEQ ID NO: 676603 - RNA, 21 nt, Artificial Sequence
  Synthetic
uaugcugccuagauuccccuu

SEQ ID NO: 676604 - RNA, 22 nt, Artificial Sequence
  Synthetic
auaugcugccuagauuccccuu

SEQ ID NO: 676605 - RNA, 23 nt, Artificial Sequence
  Synthetic
aauaugcugccuagauuccccuu

SEQ ID NO: 676606 - RNA, 24 nt, Artificial Sequence
  Synthetic
aaauaugcugccuagauuccccuu

SEQ ID NO: 676607 - RNA, 18 nt, Artificial Sequence
  Synthetic
ccacgugacaaagcccuu

SEQ ID NO: 676608 - RNA, 19 nt, Artificial Sequence
  Synthetic
accacgugacaaagcccuu

SEQ ID NO: 676609 - RNA, 20 nt, Artificial Sequence
  Synthetic
aaccacgugacaaagcccuu

SEQ ID NO: 676610 - RNA, 21 nt, Artificial Sequence
  Synthetic
caaccacgugacaaagcccuu

SEQ ID NO: 676611 - RNA, 22 nt, Artificial Sequence
  Synthetic
acaaccacgugacaaagcccuu

SEQ ID NO: 676612 - RNA, 23 nt, Artificial Sequence
  Synthetic
gacaaccacgugacaaagcccuu

SEQ ID NO: 676613 - RNA, 24 nt, Artificial Sequence
  Synthetic
ugacaaccacgugacaaagcccuu

SEQ ID NO: 676614 - RNA, 18 nt, Artificial Sequence
  Synthetic
cacuauuugaaagcccuu

SEQ ID NO: 676615 - RNA, 19 nt, Artificial Sequence
  Synthetic
gcacuauuugaaagcccuu

SEQ ID NO: 676616 - RNA, 20 nt, Artificial Sequence
  Synthetic
cgcacuauuugaaagcccuu

SEQ ID NO: 676617 - RNA, 21 nt, Artificial Sequence
  Synthetic
ucgcacuauuugaaagcccuu

SEQ ID NO: 676618 - RNA, 22 nt, Artificial Sequence
  Synthetic
cucgcacuauuugaaagcccuu

SEQ ID NO: 676619 - RNA, 23 nt, Artificial Sequence
  Synthetic
ccucgcacuauuugaaagcccuu

SEQ ID NO: 676620 - RNA, 24 nt, Artificial Sequence
  Synthetic
uccucgcacuauuugaaagcccuu

SEQ ID NO: 676621 - RNA, 18 nt, Artificial Sequence
  Synthetic
ucaguuuauaaagcccuu

SEQ ID NO: 676622 - RNA, 19 nt, Artificial Sequence
  Synthetic
uucaguuuauaaagcccuu

SEQ ID NO: 676623 - RNA, 20 nt, Artificial Sequence
  Synthetic
uuucaguuuauaaagcccuu

SEQ ID NO: 676624 - RNA, 21 nt, Artificial Sequence
  Synthetic
uuuucaguuuauaaagcccuu

SEQ ID NO: 676625 - RNA, 22 nt, Artificial Sequence
  Synthetic
uuuuucaguuuauaaagcccuu

SEQ ID NO: 676626 - RNA, 23 nt, Artificial Sequence
  Synthetic
uuuuuucaguuuauaaagcccuu

SEQ ID NO: 676627 - RNA, 24 nt, Artificial Sequence
  Synthetic
uuuuuuucaguuuauaaagcccuu

SEQ ID NO: 676628 - RNA, 18 nt, Artificial Sequence
  Synthetic
aagacaggguuagcccuu

SEQ ID NO: 676629 - RNA, 19 nt, Artificial Sequence
  Synthetic
gaagacaggguuagcccuu

SEQ ID NO: 676630 - RNA, 20 nt, Artificial Sequence
  Synthetic
cgaagacaggguuagcccuu

SEQ ID NO: 676631 - RNA, 21 nt, Artificial Sequence
  Synthetic
ccgaagacaggguuagcccuu

SEQ ID NO: 676632 - RNA, 22 nt, Artificial Sequence
  Synthetic
uccgaagacaggguuagcccuu

SEQ ID NO: 676633 - RNA, 23 nt, Artificial Sequence
  Synthetic
uuccgaagacaggguuagcccuu

SEQ ID NO: 676634 - RNA, 24 nt, Artificial Sequence
  Synthetic
auuccgaagacaggguuagcccuu

SEQ ID NO: 676635 - RNA, 18 nt, Artificial Sequence
  Synthetic
uuuguaaauuaggcccuu

SEQ ID NO: 676636 - RNA, 19 nt, Artificial Sequence
  Synthetic
cuuuguaaauuaggcccuu

SEQ ID NO: 676637 - RNA, 20 nt, Artificial Sequence
  Synthetic
gcuuuguaaauuaggcccuu

SEQ ID NO: 676638 - RNA, 21 nt, Artificial Sequence
  Synthetic
ugcuuuguaaauuaggcccuu

SEQ ID NO: 676639 - RNA, 22 nt, Artificial Sequence
  Synthetic
cugcuuuguaaauuaggcccuu

SEQ ID NO: 676640 - RNA, 23 nt, Artificial Sequence
  Synthetic
gcugcuuuguaaauuaggcccuu

SEQ ID NO: 676641 - RNA, 24 nt, Artificial Sequence
  Synthetic
ugcugcuuuguaaauuaggcccuu

SEQ ID NO: 676642 - RNA, 18 nt, Artificial Sequence
  Synthetic
auauaaaacuuggcccuu

SEQ ID NO: 676643 - RNA, 19 nt, Artificial Sequence
  Synthetic
gauauaaaacuuggcccuu

SEQ ID NO: 676644 - RNA, 20 nt, Artificial Sequence
  Synthetic
ugauauaaaacuuggcccuu

SEQ ID NO: 676645 - RNA, 21 nt, Artificial Sequence
  Synthetic
gugauauaaaacuuggcccuu

SEQ ID NO: 676646 - RNA, 22 nt, Artificial Sequence
  Synthetic
ggugauauaaaacuuggcccuu

SEQ ID NO: 676647 - RNA, 23 nt, Artificial Sequence
  Synthetic
uggugauauaaaacuuggcccuu

SEQ ID NO: 676648 - RNA, 24 nt, Artificial Sequence
  Synthetic
uuggugauauaaaacuuggcccuu

SEQ ID NO: 676649 - RNA, 18 nt, Artificial Sequence
  Synthetic
gccuccuguguugcccuu

SEQ ID NO: 676650 - RNA, 19 nt, Artificial Sequence
  Synthetic
ugccuccuguguugcccuu

SEQ ID NO: 676651 - RNA, 20 nt, Artificial Sequence
  Synthetic
augccuccuguguugcccuu

SEQ ID NO: 676652 - RNA, 21 nt, Artificial Sequence
  Synthetic
gaugccuccuguguugcccuu

SEQ ID NO: 676653 - RNA, 22 nt, Artificial Sequence
  Synthetic
ggaugccuccuguguugcccuu

SEQ ID NO: 676654 - RNA, 23 nt, Artificial Sequence
  Synthetic
aggaugccuccuguguugcccuu

SEQ ID NO: 676655 - RNA, 24 nt, Artificial Sequence
  Synthetic
aaggaugccuccuguguugcccuu

SEQ ID NO: 676656 - RNA, 18 nt, Artificial Sequence
  Synthetic
aaugugagucucucccuu

SEQ ID NO: 676657 - RNA, 19 nt, Artificial Sequence
  Synthetic
aaaugugagucucucccuu

SEQ ID NO: 676658 - RNA, 20 nt, Artificial Sequence
  Synthetic
aaaaugugagucucucccuu

SEQ ID NO: 676659 - RNA, 21 nt, Artificial Sequence
  Synthetic
uaaaaugugagucucucccuu

SEQ ID NO: 676660 - RNA, 22 nt, Artificial Sequence
  Synthetic
uuaaaaugugagucucucccuu

SEQ ID NO: 676661 - RNA, 23 nt, Artificial Sequence
  Synthetic
uuuaaaaugugagucucucccuu

SEQ ID NO: 676662 - RNA, 24 nt, Artificial Sequence
  Synthetic
cuuuaaaaugugagucucucccuu

SEQ ID NO: 676663 - RNA, 18 nt, Artificial Sequence
  Synthetic
uucaacugucagucccuu

SEQ ID NO: 676664 - RNA, 19 nt, Artificial Sequence
  Synthetic
cuucaacugucagucccuu

SEQ ID NO: 676665 - RNA, 20 nt, Artificial Sequence
  Synthetic
ucuucaacugucagucccuu

SEQ ID NO: 676666 - RNA, 21 nt, Artificial Sequence
  Synthetic
uucuucaacugucagucccuu

SEQ ID NO: 676667 - RNA, 22 nt, Artificial Sequence
  Synthetic
auucuucaacugucagucccuu

SEQ ID NO: 676668 - RNA, 23 nt, Artificial Sequence
  Synthetic
cauucuucaacugucagucccuu

SEQ ID NO: 676669 - RNA, 24 nt, Artificial Sequence
  Synthetic
acauucuucaacugucagucccuu

SEQ ID NO: 676670 - RNA, 18 nt, Artificial Sequence
  Synthetic
cagaagcuaaauucccuu

SEQ ID NO: 676671 - RNA, 19 nt, Artificial Sequence
  Synthetic
acagaagcuaaauucccuu

SEQ ID NO: 676672 - RNA, 20 nt, Artificial Sequence
  Synthetic
uacagaagcuaaauucccuu

SEQ ID NO: 676673 - RNA, 21 nt, Artificial Sequence
  Synthetic
cuacagaagcuaaauucccuu

SEQ ID NO: 676674 - RNA, 22 nt, Artificial Sequence
  Synthetic
acuacagaagcuaaauucccuu

SEQ ID NO: 676675 - RNA, 23 nt, Artificial Sequence
  Synthetic
uacuacagaagcuaaauucccuu

SEQ ID NO: 676676 - RNA, 24 nt, Artificial Sequence
  Synthetic
guacuacagaagcuaaauucccuu

SEQ ID NO: 676677 - RNA, 18 nt, Artificial Sequence
  Synthetic
aaugacccaucuucccuu

SEQ ID NO: 676678 - RNA, 19 nt, Artificial Sequence
  Synthetic
gaaugacccaucuucccuu

SEQ ID NO: 676679 - RNA, 20 nt, Artificial Sequence
  Synthetic
agaaugacccaucuucccuu

SEQ ID NO: 676680 - RNA, 21 nt, Artificial Sequence
  Synthetic
aagaaugacccaucuucccuu

SEQ ID NO: 676681 - RNA, 22 nt, Artificial Sequence
  Synthetic
uaagaaugacccaucuucccuu

SEQ ID NO: 676682 - RNA, 23 nt, Artificial Sequence
  Synthetic
uuaagaaugacccaucuucccuu

SEQ ID NO: 676683 - RNA, 24 nt, Artificial Sequence
  Synthetic
guuaagaaugacccaucuucccuu

SEQ ID NO: 676684 - RNA, 18 nt, Artificial Sequence
  Synthetic
aguauguacucuucccuu

SEQ ID NO: 676685 - RNA, 19 nt, Artificial Sequence
  Synthetic
uaguauguacucuucccuu

SEQ ID NO: 676686 - RNA, 20 nt, Artificial Sequence
  Synthetic
guaguauguacucuucccuu

SEQ ID NO: 676687 - RNA, 21 nt, Artificial Sequence
  Synthetic
cguaguauguacucuucccuu

SEQ ID NO: 676688 - RNA, 22 nt, Artificial Sequence
  Synthetic
gcguaguauguacucuucccuu

SEQ ID NO: 676689 - RNA, 23 nt, Artificial Sequence
  Synthetic
ggcguaguauguacucuucccuu

SEQ ID NO: 676690 - RNA, 24 nt, Artificial Sequence
  Synthetic
uggcguaguauguacucuucccuu

SEQ ID NO: 676691 - RNA, 18 nt, Artificial Sequence
  Synthetic
gccaauguguguucccuu

SEQ ID NO: 676692 - RNA, 19 nt, Artificial Sequence
  Synthetic
agccaauguguguucccuu

SEQ ID NO: 676693 - RNA, 20 nt, Artificial Sequence
  Synthetic
gagccaauguguguucccuu

SEQ ID NO: 676694 - RNA, 21 nt, Artificial Sequence
  Synthetic
ugagccaauguguguucccuu

SEQ ID NO: 676695 - RNA, 22 nt, Artificial Sequence
  Synthetic
augagccaauguguguucccuu

SEQ ID NO: 676696 - RNA, 23 nt, Artificial Sequence
  Synthetic
aaugagccaauguguguucccuu

SEQ ID NO: 676697 - RNA, 24 nt, Artificial Sequence
  Synthetic
gaaugagccaauguguguucccuu

SEQ ID NO: 676698 - RNA, 18 nt, Artificial Sequence
  Synthetic
cagcccaugguuucccuu

SEQ ID NO: 676699 - RNA, 19 nt, Artificial Sequence
  Synthetic
acagcccaugguuucccuu

SEQ ID NO: 676700 - RNA, 20 nt, Artificial Sequence
  Synthetic
uacagcccaugguuucccuu

SEQ ID NO: 676701 - RNA, 21 nt, Artificial Sequence
  Synthetic
guacagcccaugguuucccuu

SEQ ID NO: 676702 - RNA, 22 nt, Artificial Sequence
  Synthetic
uguacagcccaugguuucccuu

SEQ ID NO: 676703 - RNA, 23 nt, Artificial Sequence
  Synthetic
cuguacagcccaugguuucccuu

SEQ ID NO: 676704 - RNA, 24 nt, Artificial Sequence
  Synthetic
ucuguacagcccaugguuucccuu

SEQ ID NO: 676705 - RNA, 18 nt, Artificial Sequence
  Synthetic
aaugggcaguuuucccuu

SEQ ID NO: 676706 - RNA, 19 nt, Artificial Sequence
  Synthetic
uaaugggcaguuuucccuu

SEQ ID NO: 676707 - RNA, 20 nt, Artificial Sequence
  Synthetic
guaaugggcaguuuucccuu

SEQ ID NO: 676708 - RNA, 21 nt, Artificial Sequence
  Synthetic
uguaaugggcaguuuucccuu

SEQ ID NO: 676709 - RNA, 22 nt, Artificial Sequence
  Synthetic
uuguaaugggcaguuuucccuu

SEQ ID NO: 676710 - RNA, 23 nt, Artificial Sequence
  Synthetic
cuuguaaugggcaguuuucccuu

SEQ ID NO: 676711 - RNA, 24 nt, Artificial Sequence
  Synthetic
gcuuguaaugggcaguuuucccuu

SEQ ID NO: 676712 - RNA, 18 nt, Artificial Sequence
  Synthetic
uccccuggaggaagccuu

SEQ ID NO: 676713 - RNA, 19 nt, Artificial Sequence
  Synthetic
uuccccuggaggaagccuu

SEQ ID NO: 676714 - RNA, 20 nt, Artificial Sequence
  Synthetic
uuuccccuggaggaagccuu

SEQ ID NO: 676715 - RNA, 21 nt, Artificial Sequence
  Synthetic
uuuuccccuggaggaagccuu

SEQ ID NO: 676716 - RNA, 22 nt, Artificial Sequence
  Synthetic
uuuuuccccuggaggaagccuu

SEQ ID NO: 676717 - RNA, 23 nt, Artificial Sequence
  Synthetic
uuuuuuccccuggaggaagccuu

SEQ ID NO: 676718 - RNA, 24 nt, Artificial Sequence
  Synthetic
auuuuuuccccuggaggaagccuu

SEQ ID NO: 676719 - RNA, 18 nt, Artificial Sequence
  Synthetic
aacauaaugggaagccuu

SEQ ID NO: 676720 - RNA, 19 nt, Artificial Sequence
  Synthetic
gaacauaaugggaagccuu

SEQ ID NO: 676721 - RNA, 20 nt, Artificial Sequence
  Synthetic
agaacauaaugggaagccuu

SEQ ID NO: 676722 - RNA, 21 nt, Artificial Sequence
  Synthetic
cagaacauaaugggaagccuu

SEQ ID NO: 676723 - RNA, 22 nt, Artificial Sequence
  Synthetic
ccagaacauaaugggaagccuu

SEQ ID NO: 676724 - RNA, 23 nt, Artificial Sequence
  Synthetic
uccagaacauaaugggaagccuu

SEQ ID NO: 676725 - RNA, 24 nt, Artificial Sequence
  Synthetic
auccagaacauaaugggaagccuu

SEQ ID NO: 676726 - RNA, 18 nt, Artificial Sequence
  Synthetic
aacuagcaucacagccuu

SEQ ID NO: 676727 - RNA, 19 nt, Artificial Sequence
  Synthetic
caacuagcaucacagccuu

SEQ ID NO: 676728 - RNA, 20 nt, Artificial Sequence
  Synthetic
ucaacuagcaucacagccuu

SEQ ID NO: 676729 - RNA, 21 nt, Artificial Sequence
  Synthetic
cucaacuagcaucacagccuu

SEQ ID NO: 676730 - RNA, 22 nt, Artificial Sequence
  Synthetic
ucucaacuagcaucacagccuu

SEQ ID NO: 676731 - RNA, 23 nt, Artificial Sequence
  Synthetic
aucucaacuagcaucacagccuu

SEQ ID NO: 676732 - RNA, 24 nt, Artificial Sequence
  Synthetic
uaucucaacuagcaucacagccuu

SEQ ID NO: 676733 - RNA, 18 nt, Artificial Sequence
  Synthetic
uugaggaucaucagccuu

SEQ ID NO: 676734 - RNA, 19 nt, Artificial Sequence
  Synthetic
cuugaggaucaucagccuu

SEQ ID NO: 676735 - RNA, 20 nt, Artificial Sequence
  Synthetic
acuugaggaucaucagccuu

SEQ ID NO: 676736 - RNA, 21 nt, Artificial Sequence
  Synthetic
gacuugaggaucaucagccuu

SEQ ID NO: 676737 - RNA, 22 nt, Artificial Sequence
  Synthetic
agacuugaggaucaucagccuu

SEQ ID NO: 676738 - RNA, 23 nt, Artificial Sequence
  Synthetic
aagacuugaggaucaucagccuu

SEQ ID NO: 676739 - RNA, 24 nt, Artificial Sequence
  Synthetic
caagacuugaggaucaucagccuu

SEQ ID NO: 676740 - RNA, 18 nt, Artificial Sequence
  Synthetic
ggaacucuauucagccuu

SEQ ID NO: 676741 - RNA, 19 nt, Artificial Sequence
  Synthetic
uggaacucuauucagccuu

SEQ ID NO: 676742 - RNA, 20 nt, Artificial Sequence
  Synthetic
auggaacucuauucagccuu

SEQ ID NO: 676743 - RNA, 21 nt, Artificial Sequence
  Synthetic
aauggaacucuauucagccuu

SEQ ID NO: 676744 - RNA, 22 nt, Artificial Sequence
  Synthetic
caauggaacucuauucagccuu

SEQ ID NO: 676745 - RNA, 23 nt, Artificial Sequence
  Synthetic
acaauggaacucuauucagccuu

SEQ ID NO: 676746 - RNA, 24 nt, Artificial Sequence
  Synthetic
cacaauggaacucuauucagccuu

SEQ ID NO: 676747 - RNA, 18 nt, Artificial Sequence
  Synthetic
auucuuccccagagccuu

SEQ ID NO: 676748 - RNA, 19 nt, Artificial Sequence
  Synthetic
aauucuuccccagagccuu

SEQ ID NO: 676749 - RNA, 20 nt, Artificial Sequence
  Synthetic
gaauucuuccccagagccuu

SEQ ID NO: 676750 - RNA, 21 nt, Artificial Sequence
  Synthetic
agaauucuuccccagagccuu

SEQ ID NO: 676751 - RNA, 22 nt, Artificial Sequence
  Synthetic
aagaauucuuccccagagccuu

SEQ ID NO: 676752 - RNA, 23 nt, Artificial Sequence
  Synthetic
gaagaauucuuccccagagccuu

SEQ ID NO: 676753 - RNA, 24 nt, Artificial Sequence
  Synthetic
ggaagaauucuuccccagagccuu

SEQ ID NO: 676754 - RNA, 18 nt, Artificial Sequence
  Synthetic
ggacuuggcuugagccuu

SEQ ID NO: 676755 - RNA, 19 nt, Artificial Sequence
  Synthetic
aggacuuggcuugagccuu

SEQ ID NO: 676756 - RNA, 20 nt, Artificial Sequence
  Synthetic
caggacuuggcuugagccuu

SEQ ID NO: 676757 - RNA, 21 nt, Artificial Sequence
  Synthetic
acaggacuuggcuugagccuu

SEQ ID NO: 676758 - RNA, 22 nt, Artificial Sequence
  Synthetic
uacaggacuuggcuugagccuu

SEQ ID NO: 676759 - RNA, 23 nt, Artificial Sequence
  Synthetic
uuacaggacuuggcuugagccuu

SEQ ID NO: 676760 - RNA, 24 nt, Artificial Sequence
  Synthetic
guuacaggacuuggcuugagccuu

SEQ ID NO: 676761 - RNA, 18 nt, Artificial Sequence
  Synthetic
uaaagagcccauagccuu

SEQ ID NO: 676762 - RNA, 19 nt, Artificial Sequence
  Synthetic
uuaaagagcccauagccuu

SEQ ID NO: 676763 - RNA, 20 nt, Artificial Sequence
  Synthetic
uuuaaagagcccauagccuu

SEQ ID NO: 676764 - RNA, 21 nt, Artificial Sequence
  Synthetic
uuuuaaagagcccauagccuu

SEQ ID NO: 676765 - RNA, 22 nt, Artificial Sequence
  Synthetic
auuuuaaagagcccauagccuu

SEQ ID NO: 676766 - RNA, 23 nt, Artificial Sequence
  Synthetic
uauuuuaaagagcccauagccuu

SEQ ID NO: 676767 - RNA, 24 nt, Artificial Sequence
  Synthetic
cuauuuuaaagagcccauagccuu

SEQ ID NO: 676768 - RNA, 18 nt, Artificial Sequence
  Synthetic
ugucuuuuucuacgccuu

SEQ ID NO: 676769 - RNA, 19 nt, Artificial Sequence
  Synthetic
cugucuuuuucuacgccuu

SEQ ID NO: 676770 - RNA, 20 nt, Artificial Sequence
  Synthetic
acugucuuuuucuacgccuu

SEQ ID NO: 676771 - RNA, 21 nt, Artificial Sequence
  Synthetic
cacugucuuuuucuacgccuu

SEQ ID NO: 676772 - RNA, 22 nt, Artificial Sequence
  Synthetic
ucacugucuuuuucuacgccuu

SEQ ID NO: 676773 - RNA, 23 nt, Artificial Sequence
  Synthetic
uucacugucuuuuucuacgccuu

SEQ ID NO: 676774 - RNA, 24 nt, Artificial Sequence
  Synthetic
auucacugucuuuuucuacgccuu

SEQ ID NO: 676775 - RNA, 18 nt, Artificial Sequence
  Synthetic
uuguucaaagcccgccuu

SEQ ID NO: 676776 - RNA, 19 nt, Artificial Sequence
  Synthetic
uuuguucaaagcccgccuu

SEQ ID NO: 676777 - RNA, 20 nt, Artificial Sequence
  Synthetic
guuuguucaaagcccgccuu

SEQ ID NO: 676778 - RNA, 21 nt, Artificial Sequence
  Synthetic
uguuuguucaaagcccgccuu

SEQ ID NO: 676779 - RNA, 22 nt, Artificial Sequence
  Synthetic
uuguuuguucaaagcccgccuu

SEQ ID NO: 676780 - RNA, 23 nt, Artificial Sequence
  Synthetic
uuuguuuguucaaagcccgccuu

SEQ ID NO: 676781 - RNA, 24 nt, Artificial Sequence
  Synthetic
uuuuguuuguucaaagcccgccuu

SEQ ID NO: 676782 - RNA, 18 nt, Artificial Sequence
  Synthetic
augagucaaacaggccuu

SEQ ID NO: 676783 - RNA, 19 nt, Artificial Sequence
  Synthetic
aaugagucaaacaggccuu

SEQ ID NO: 676784 - RNA, 20 nt, Artificial Sequence
  Synthetic
uaaugagucaaacaggccuu

SEQ ID NO: 676785 - RNA, 21 nt, Artificial Sequence
  Synthetic
uuaaugagucaaacaggccuu

SEQ ID NO: 676786 - RNA, 22 nt, Artificial Sequence
  Synthetic
auuaaugagucaaacaggccuu

SEQ ID NO: 676787 - RNA, 23 nt, Artificial Sequence
  Synthetic
uauuaaugagucaaacaggccuu

SEQ ID NO: 676788 - RNA, 24 nt, Artificial Sequence
  Synthetic
uuauuaaugagucaaacaggccuu

SEQ ID NO: 676789 - RNA, 18 nt, Artificial Sequence
  Synthetic
gcuuuuagggcaggccuu

SEQ ID NO: 676790 - RNA, 19 nt, Artificial Sequence
  Synthetic
ugcuuuuagggcaggccuu

SEQ ID NO: 676791 - RNA, 20 nt, Artificial Sequence
  Synthetic
uugcuuuuagggcaggccuu

SEQ ID NO: 676792 - RNA, 21 nt, Artificial Sequence
  Synthetic
cuugcuuuuagggcaggccuu

SEQ ID NO: 676793 - RNA, 22 nt, Artificial Sequence
  Synthetic
ucuugcuuuuagggcaggccuu

SEQ ID NO: 676794 - RNA, 23 nt, Artificial Sequence
  Synthetic
uucuugcuuuuagggcaggccuu

SEQ ID NO: 676795 - RNA, 24 nt, Artificial Sequence
  Synthetic
auucuugcuuuuagggcaggccuu

SEQ ID NO: 676796 - RNA, 18 nt, Artificial Sequence
  Synthetic
ggauaucaugcaggccuu

SEQ ID NO: 676797 - RNA, 19 nt, Artificial Sequence
  Synthetic
uggauaucaugcaggccuu

SEQ ID NO: 676798 - RNA, 20 nt, Artificial Sequence
  Synthetic
auggauaucaugcaggccuu

SEQ ID NO: 676799 - RNA, 21 nt, Artificial Sequence
  Synthetic
uauggauaucaugcaggccuu

SEQ ID NO: 676800 - RNA, 22 nt, Artificial Sequence
  Synthetic
cuauggauaucaugcaggccuu

SEQ ID NO: 676801 - RNA, 23 nt, Artificial Sequence
  Synthetic
ccuauggauaucaugcaggccuu

SEQ ID NO: 676802 - RNA, 24 nt, Artificial Sequence
  Synthetic
cccuauggauaucaugcaggccuu

SEQ ID NO: 676803 - RNA, 18 nt, Artificial Sequence
  Synthetic
cagcuauucucaggccuu

SEQ ID NO: 676804 - RNA, 19 nt, Artificial Sequence
  Synthetic
acagcuauucucaggccuu

SEQ ID NO: 676805 - RNA, 20 nt, Artificial Sequence
  Synthetic
cacagcuauucucaggccuu

SEQ ID NO: 676806 - RNA, 21 nt, Artificial Sequence
  Synthetic
acacagcuauucucaggccuu

SEQ ID NO: 676807 - RNA, 22 nt, Artificial Sequence
  Synthetic
gacacagcuauucucaggccuu

SEQ ID NO: 676808 - RNA, 23 nt, Artificial Sequence
  Synthetic
agacacagcuauucucaggccuu

SEQ ID NO: 676809 - RNA, 24 nt, Artificial Sequence
  Synthetic
gagacacagcuauucucaggccuu

SEQ ID NO: 676810 - RNA, 18 nt, Artificial Sequence
  Synthetic
ucaagaaauugaggccuu

SEQ ID NO: 676811 - RNA, 19 nt, Artificial Sequence
  Synthetic
cucaagaaauugaggccuu

SEQ ID NO: 676812 - RNA, 20 nt, Artificial Sequence
  Synthetic
acucaagaaauugaggccuu

SEQ ID NO: 676813 - RNA, 21 nt, Artificial Sequence
  Synthetic
aacucaagaaauugaggccuu

SEQ ID NO: 676814 - RNA, 22 nt, Artificial Sequence
  Synthetic
aaacucaagaaauugaggccuu

SEQ ID NO: 676815 - RNA, 23 nt, Artificial Sequence
  Synthetic
uaaacucaagaaauugaggccuu

SEQ ID NO: 676816 - RNA, 24 nt, Artificial Sequence
  Synthetic
uuaaacucaagaaauugaggccuu

SEQ ID NO: 676817 - RNA, 18 nt, Artificial Sequence
  Synthetic
ucuccuuccugcggccuu

SEQ ID NO: 676818 - RNA, 19 nt, Artificial Sequence
  Synthetic
uucuccuuccugcggccuu

SEQ ID NO: 676819 - RNA, 20 nt, Artificial Sequence
  Synthetic
cuucuccuuccugcggccuu

SEQ ID NO: 676820 - RNA, 21 nt, Artificial Sequence
  Synthetic
gcuucuccuuccugcggccuu

SEQ ID NO: 676821 - RNA, 22 nt, Artificial Sequence
  Synthetic
cgcuucuccuuccugcggccuu

SEQ ID NO: 676822 - RNA, 23 nt, Artificial Sequence
  Synthetic
gcgcuucuccuuccugcggccuu

SEQ ID NO: 676823 - RNA, 24 nt, Artificial Sequence
  Synthetic
ggcgcuucuccuuccugcggccuu

SEQ ID NO: 676824 - RNA, 18 nt, Artificial Sequence
  Synthetic
guucaaagacagggccuu

SEQ ID NO: 676825 - RNA, 19 nt, Artificial Sequence
  Synthetic
uguucaaagacagggccuu

SEQ ID NO: 676826 - RNA, 20 nt, Artificial Sequence
  Synthetic
cuguucaaagacagggccuu

SEQ ID NO: 676827 - RNA, 21 nt, Artificial Sequence
  Synthetic
ccuguucaaagacagggccuu

SEQ ID NO: 676828 - RNA, 22 nt, Artificial Sequence
  Synthetic
gccuguucaaagacagggccuu

SEQ ID NO: 676829 - RNA, 23 nt, Artificial Sequence
  Synthetic
agccuguucaaagacagggccuu

SEQ ID NO: 676830 - RNA, 24 nt, Artificial Sequence
  Synthetic
cagccuguucaaagacagggccuu

SEQ ID NO: 676831 - RNA, 18 nt, Artificial Sequence
  Synthetic
auuaggagauggggccuu

SEQ ID NO: 676832 - RNA, 19 nt, Artificial Sequence
  Synthetic
uauuaggagauggggccuu

SEQ ID NO: 676833 - RNA, 20 nt, Artificial Sequence
  Synthetic
guauuaggagauggggccuu

SEQ ID NO: 676834 - RNA, 21 nt, Artificial Sequence
  Synthetic
gguauuaggagauggggccuu

SEQ ID NO: 676835 - RNA, 22 nt, Artificial Sequence
  Synthetic
ugguauuaggagauggggccuu

SEQ ID NO: 676836 - RNA, 23 nt, Artificial Sequence
  Synthetic
augguauuaggagauggggccuu

SEQ ID NO: 676837 - RNA, 24 nt, Artificial Sequence
  Synthetic
aaugguauuaggagauggggccuu

SEQ ID NO: 676838 - RNA, 18 nt, Artificial Sequence
  Synthetic
auuaggaaguggggccuu

SEQ ID NO: 676839 - RNA, 19 nt, Artificial Sequence
  Synthetic
cauuaggaaguggggccuu

SEQ ID NO: 676840 - RNA, 20 nt, Artificial Sequence
  Synthetic
acauuaggaaguggggccuu

SEQ ID NO: 676841 - RNA, 21 nt, Artificial Sequence
  Synthetic
gacauuaggaaguggggccuu

SEQ ID NO: 676842 - RNA, 22 nt, Artificial Sequence
  Synthetic
ugacauuaggaaguggggccuu

SEQ ID NO: 676843 - RNA, 23 nt, Artificial Sequence
  Synthetic
augacauuaggaaguggggccuu

SEQ ID NO: 676844 - RNA, 24 nt, Artificial Sequence
  Synthetic
gaugacauuaggaaguggggccuu

SEQ ID NO: 676845 - RNA, 18 nt, Artificial Sequence
  Synthetic
guaaaccauaauggccuu

SEQ ID NO: 676846 - RNA, 19 nt, Artificial Sequence
  Synthetic
uguaaaccauaauggccuu

SEQ ID NO: 676847 - RNA, 20 nt, Artificial Sequence
  Synthetic
auguaaaccauaauggccuu

SEQ ID NO: 676848 - RNA, 21 nt, Artificial Sequence
  Synthetic
uauguaaaccauaauggccuu

SEQ ID NO: 676849 - RNA, 22 nt, Artificial Sequence
  Synthetic
auauguaaaccauaauggccuu

SEQ ID NO: 676850 - RNA, 23 nt, Artificial Sequence
  Synthetic
uauauguaaaccauaauggccuu

SEQ ID NO: 676851 - RNA, 24 nt, Artificial Sequence
  Synthetic
auauauguaaaccauaauggccuu

SEQ ID NO: 676852 - RNA, 18 nt, Artificial Sequence
  Synthetic
aggaugaugaguggccuu

SEQ ID NO: 676853 - RNA, 19 nt, Artificial Sequence
  Synthetic
caggaugaugaguggccuu

SEQ ID NO: 676854 - RNA, 20 nt, Artificial Sequence
  Synthetic
acaggaugaugaguggccuu

SEQ ID NO: 676855 - RNA, 21 nt, Artificial Sequence
  Synthetic
uacaggaugaugaguggccuu

SEQ ID NO: 676856 - RNA, 22 nt, Artificial Sequence
  Synthetic
cuacaggaugaugaguggccuu

SEQ ID NO: 676857 - RNA, 23 nt, Artificial Sequence
  Synthetic
ccuacaggaugaugaguggccuu

SEQ ID NO: 676858 - RNA, 24 nt, Artificial Sequence
  Synthetic
gccuacaggaugaugaguggccuu

SEQ ID NO: 676859 - RNA, 18 nt, Artificial Sequence
  Synthetic
ugaauucucuguggccuu

SEQ ID NO: 676860 - RNA, 19 nt, Artificial Sequence
  Synthetic
cugaauucucuguggccuu

SEQ ID NO: 676861 - RNA, 20 nt, Artificial Sequence
  Synthetic
gcugaauucucuguggccuu

SEQ ID NO: 676862 - RNA, 21 nt, Artificial Sequence
  Synthetic
ggcugaauucucuguggccuu

SEQ ID NO: 676863 - RNA, 22 nt, Artificial Sequence
  Synthetic
aggcugaauucucuguggccuu

SEQ ID NO: 676864 - RNA, 23 nt, Artificial Sequence
  Synthetic
gaggcugaauucucuguggccuu

SEQ ID NO: 676865 - RNA, 24 nt, Artificial Sequence
  Synthetic
cgaggcugaauucucuguggccuu

SEQ ID NO: 676866 - RNA, 18 nt, Artificial Sequence
  Synthetic
uagaaaaucaaaugccuu

SEQ ID NO: 676867 - RNA, 19 nt, Artificial Sequence
  Synthetic
uuagaaaaucaaaugccuu

SEQ ID NO: 676868 - RNA, 20 nt, Artificial Sequence
  Synthetic
guuagaaaaucaaaugccuu

SEQ ID NO: 676869 - RNA, 21 nt, Artificial Sequence
  Synthetic
gguuagaaaaucaaaugccuu

SEQ ID NO: 676870 - RNA, 22 nt, Artificial Sequence
  Synthetic
agguuagaaaaucaaaugccuu

SEQ ID NO: 676871 - RNA, 23 nt, Artificial Sequence
  Synthetic
gagguuagaaaaucaaaugccuu

SEQ ID NO: 676872 - RNA, 24 nt, Artificial Sequence
  Synthetic
ggagguuagaaaaucaaaugccuu

SEQ ID NO: 676873 - RNA, 18 nt, Artificial Sequence
  Synthetic
aaacauaggaaaugccuu

SEQ ID NO: 676874 - RNA, 19 nt, Artificial Sequence
  Synthetic
gaaacauaggaaaugccuu

SEQ ID NO: 676875 - RNA, 20 nt, Artificial Sequence
  Synthetic
agaaacauaggaaaugccuu

SEQ ID NO: 676876 - RNA, 21 nt, Artificial Sequence
  Synthetic
aagaaacauaggaaaugccuu

SEQ ID NO: 676877 - RNA, 22 nt, Artificial Sequence
  Synthetic
gaagaaacauaggaaaugccuu

SEQ ID NO: 676878 - RNA, 23 nt, Artificial Sequence
  Synthetic
ggaagaaacauaggaaaugccuu

SEQ ID NO: 676879 - RNA, 24 nt, Artificial Sequence
  Synthetic
uggaagaaacauaggaaaugccuu

SEQ ID NO: 676880 - RNA, 18 nt, Artificial Sequence
  Synthetic
gcucccauuccaugccuu

SEQ ID NO: 676881 - RNA, 19 nt, Artificial Sequence
  Synthetic
agcucccauuccaugccuu

SEQ ID NO: 676882 - RNA, 20 nt, Artificial Sequence
  Synthetic
gagcucccauuccaugccuu

SEQ ID NO: 676883 - RNA, 21 nt, Artificial Sequence
  Synthetic
ugagcucccauuccaugccuu

SEQ ID NO: 676884 - RNA, 22 nt, Artificial Sequence
  Synthetic
gugagcucccauuccaugccuu

SEQ ID NO: 676885 - RNA, 23 nt, Artificial Sequence
  Synthetic
agugagcucccauuccaugccuu

SEQ ID NO: 676886 - RNA, 24 nt, Artificial Sequence
  Synthetic
aagugagcucccauuccaugccuu

SEQ ID NO: 676887 - RNA, 18 nt, Artificial Sequence
  Synthetic
agaguucgaagaugccuu

SEQ ID NO: 676888 - RNA, 19 nt, Artificial Sequence
  Synthetic
aagaguucgaagaugccuu

SEQ ID NO: 676889 - RNA, 20 nt, Artificial Sequence
  Synthetic
aaagaguucgaagaugccuu

SEQ ID NO: 676890 - RNA, 21 nt, Artificial Sequence
  Synthetic
caaagaguucgaagaugccuu

SEQ ID NO: 676891 - RNA, 22 nt, Artificial Sequence
  Synthetic
ucaaagaguucgaagaugccuu

SEQ ID NO: 676892 - RNA, 23 nt, Artificial Sequence
  Synthetic
aucaaagaguucgaagaugccuu

SEQ ID NO: 676893 - RNA, 24 nt, Artificial Sequence
  Synthetic
aaucaaagaguucgaagaugccuu

SEQ ID NO: 676894 - RNA, 18 nt, Artificial Sequence
  Synthetic
aucuucagacacugccuu

SEQ ID NO: 676895 - RNA, 19 nt, Artificial Sequence
  Synthetic
uaucuucagacacugccuu

SEQ ID NO: 676896 - RNA, 20 nt, Artificial Sequence
  Synthetic
uuaucuucagacacugccuu

SEQ ID NO: 676897 - RNA, 21 nt, Artificial Sequence
  Synthetic
uuuaucuucagacacugccuu

SEQ ID NO: 676898 - RNA, 22 nt, Artificial Sequence
  Synthetic
auuuaucuucagacacugccuu

SEQ ID NO: 676899 - RNA, 23 nt, Artificial Sequence
  Synthetic
cauuuaucuucagacacugccuu

SEQ ID NO: 676900 - RNA, 24 nt, Artificial Sequence
  Synthetic
ucauuuaucuucagacacugccuu

SEQ ID NO: 676901 - RNA, 18 nt, Artificial Sequence
  Synthetic
uuguauggacacugccuu

SEQ ID NO: 676902 - RNA, 19 nt, Artificial Sequence
  Synthetic
cuuguauggacacugccuu

SEQ ID NO: 676903 - RNA, 20 nt, Artificial Sequence
  Synthetic
ucuuguauggacacugccuu

SEQ ID NO: 676904 - RNA, 21 nt, Artificial Sequence
  Synthetic
gucuuguauggacacugccuu

SEQ ID NO: 676905 - RNA, 22 nt, Artificial Sequence
  Synthetic
ugucuuguauggacacugccuu

SEQ ID NO: 676906 - RNA, 23 nt, Artificial Sequence
  Synthetic
augucuuguauggacacugccuu

SEQ ID NO: 676907 - RNA, 24 nt, Artificial Sequence
  Synthetic
aaugucuuguauggacacugccuu

SEQ ID NO: 676908 - RNA, 18 nt, Artificial Sequence
  Synthetic
ccuuggaccugcugccuu

SEQ ID NO: 676909 - RNA, 19 nt, Artificial Sequence
  Synthetic
cccuuggaccugcugccuu

SEQ ID NO: 676910 - RNA, 20 nt, Artificial Sequence
  Synthetic
ucccuuggaccugcugccuu

SEQ ID NO: 676911 - RNA, 21 nt, Artificial Sequence
  Synthetic
uucccuuggaccugcugccuu

SEQ ID NO: 676912 - RNA, 22 nt, Artificial Sequence
  Synthetic
guucccuuggaccugcugccuu

SEQ ID NO: 676913 - RNA, 23 nt, Artificial Sequence
  Synthetic
aguucccuuggaccugcugccuu

SEQ ID NO: 676914 - RNA, 24 nt, Artificial Sequence
  Synthetic
caguucccuuggaccugcugccuu

SEQ ID NO: 676915 - RNA, 18 nt, Artificial Sequence
  Synthetic
ucucucuccugcugccuu

SEQ ID NO: 676916 - RNA, 19 nt, Artificial Sequence
  Synthetic
cucucucuccugcugccuu

SEQ ID NO: 676917 - RNA, 20 nt, Artificial Sequence
  Synthetic
ucucucucuccugcugccuu

SEQ ID NO: 676918 - RNA, 21 nt, Artificial Sequence
  Synthetic
cucucucucuccugcugccuu

SEQ ID NO: 676919 - RNA, 22 nt, Artificial Sequence
  Synthetic
ucucucucucuccugcugccuu

SEQ ID NO: 676920 - RNA, 23 nt, Artificial Sequence
  Synthetic
uucucucucucuccugcugccuu

SEQ ID NO: 676921 - RNA, 24 nt, Artificial Sequence
  Synthetic
uuucucucucucuccugcugccuu

SEQ ID NO: 676922 - RNA, 18 nt, Artificial Sequence
  Synthetic
uauauuuccuucugccuu

SEQ ID NO: 676923 - RNA, 19 nt, Artificial Sequence
  Synthetic
cuauauuuccuucugccuu

SEQ ID NO: 676924 - RNA, 20 nt, Artificial Sequence
  Synthetic
acuauauuuccuucugccuu

SEQ ID NO: 676925 - RNA, 21 nt, Artificial Sequence
  Synthetic
uacuauauuuccuucugccuu

SEQ ID NO: 676926 - RNA, 22 nt, Artificial Sequence
  Synthetic
uuacuauauuuccuucugccuu

SEQ ID NO: 676927 - RNA, 23 nt, Artificial Sequence
  Synthetic
auuacuauauuuccuucugccuu

SEQ ID NO: 676928 - RNA, 24 nt, Artificial Sequence
  Synthetic
gauuacuauauuuccuucugccuu

SEQ ID NO: 676929 - RNA, 18 nt, Artificial Sequence
  Synthetic
uaaauuauaaugugccuu

SEQ ID NO: 676930 - RNA, 19 nt, Artificial Sequence
  Synthetic
auaaauuauaaugugccuu

SEQ ID NO: 676931 - RNA, 20 nt, Artificial Sequence
  Synthetic
uauaaauuauaaugugccuu

SEQ ID NO: 676932 - RNA, 21 nt, Artificial Sequence
  Synthetic
uuauaaauuauaaugugccuu

SEQ ID NO: 676933 - RNA, 22 nt, Artificial Sequence
  Synthetic
uuuauaaauuauaaugugccuu

SEQ ID NO: 676934 - RNA, 23 nt, Artificial Sequence
  Synthetic
guuuauaaauuauaaugugccuu

SEQ ID NO: 676935 - RNA, 24 nt, Artificial Sequence
  Synthetic
uguuuauaaauuauaaugugccuu

SEQ ID NO: 676936 - RNA, 18 nt, Artificial Sequence
  Synthetic
uaccuggagcauugccuu

SEQ ID NO: 676937 - RNA, 19 nt, Artificial Sequence
  Synthetic
cuaccuggagcauugccuu

SEQ ID NO: 676938 - RNA, 20 nt, Artificial Sequence
  Synthetic
gcuaccuggagcauugccuu

SEQ ID NO: 676939 - RNA, 21 nt, Artificial Sequence
  Synthetic
agcuaccuggagcauugccuu

SEQ ID NO: 676940 - RNA, 22 nt, Artificial Sequence
  Synthetic
uagcuaccuggagcauugccuu

SEQ ID NO: 676941 - RNA, 23 nt, Artificial Sequence
  Synthetic
guagcuaccuggagcauugccuu

SEQ ID NO: 676942 - RNA, 24 nt, Artificial Sequence
  Synthetic
gguagcuaccuggagcauugccuu

SEQ ID NO: 676943 - RNA, 18 nt, Artificial Sequence
  Synthetic
uagcuuugugauugccuu

SEQ ID NO: 676944 - RNA, 19 nt, Artificial Sequence
  Synthetic
auagcuuugugauugccuu

SEQ ID NO: 676945 - RNA, 20 nt, Artificial Sequence
  Synthetic
cauagcuuugugauugccuu

SEQ ID NO: 676946 - RNA, 21 nt, Artificial Sequence
  Synthetic
acauagcuuugugauugccuu

SEQ ID NO: 676947 - RNA, 22 nt, Artificial Sequence
  Synthetic
gacauagcuuugugauugccuu

SEQ ID NO: 676948 - RNA, 23 nt, Artificial Sequence
  Synthetic
agacauagcuuugugauugccuu

SEQ ID NO: 676949 - RNA, 24 nt, Artificial Sequence
  Synthetic
uagacauagcuuugugauugccuu

SEQ ID NO: 676950 - RNA, 18 nt, Artificial Sequence
  Synthetic
aggcuaggguauugccuu

SEQ ID NO: 676951 - RNA, 19 nt, Artificial Sequence
  Synthetic
aaggcuaggguauugccuu

SEQ ID NO: 676952 - RNA, 20 nt, Artificial Sequence
  Synthetic
aaaggcuaggguauugccuu

SEQ ID NO: 676953 - RNA, 21 nt, Artificial Sequence
  Synthetic
gaaaggcuaggguauugccuu

SEQ ID NO: 676954 - RNA, 22 nt, Artificial Sequence
  Synthetic
ggaaaggcuaggguauugccuu

SEQ ID NO: 676955 - RNA, 23 nt, Artificial Sequence
  Synthetic
aggaaaggcuaggguauugccuu

SEQ ID NO: 676956 - RNA, 24 nt, Artificial Sequence
  Synthetic
caggaaaggcuaggguauugccuu

SEQ ID NO: 676957 - RNA, 18 nt, Artificial Sequence
  Synthetic
uggaauucuuuuugccuu

SEQ ID NO: 676958 - RNA, 19 nt, Artificial Sequence
  Synthetic
cuggaauucuuuuugccuu

SEQ ID NO: 676959 - RNA, 20 nt, Artificial Sequence
  Synthetic
acuggaauucuuuuugccuu

SEQ ID NO: 676960 - RNA, 21 nt, Artificial Sequence
  Synthetic
uacuggaauucuuuuugccuu

SEQ ID NO: 676961 - RNA, 22 nt, Artificial Sequence
  Synthetic
guacuggaauucuuuuugccuu

SEQ ID NO: 676962 - RNA, 23 nt, Artificial Sequence
  Synthetic
aguacuggaauucuuuuugccuu

SEQ ID NO: 676963 - RNA, 24 nt, Artificial Sequence
  Synthetic
uaguacuggaauucuuuuugccuu

SEQ ID NO: 676964 - RNA, 18 nt, Artificial Sequence
  Synthetic
gccucuuugauaauccuu

SEQ ID NO: 676965 - RNA, 19 nt, Artificial Sequence
  Synthetic
agccucuuugauaauccuu

SEQ ID NO: 676966 - RNA, 20 nt, Artificial Sequence
  Synthetic
cagccucuuugauaauccuu

SEQ ID NO: 676967 - RNA, 21 nt, Artificial Sequence
  Synthetic
ccagccucuuugauaauccuu

SEQ ID NO: 676968 - RNA, 22 nt, Artificial Sequence
  Synthetic
gccagccucuuugauaauccuu

SEQ ID NO: 676969 - RNA, 23 nt, Artificial Sequence
  Synthetic
agccagccucuuugauaauccuu

SEQ ID NO: 676970 - RNA, 24 nt, Artificial Sequence
  Synthetic
cagccagccucuuugauaauccuu

SEQ ID NO: 676971 - RNA, 18 nt, Artificial Sequence
  Synthetic
caguauaccagcauccuu

SEQ ID NO: 676972 - RNA, 19 nt, Artificial Sequence
  Synthetic
acaguauaccagcauccuu

SEQ ID NO: 676973 - RNA, 20 nt, Artificial Sequence
  Synthetic
aacaguauaccagcauccuu

SEQ ID NO: 676974 - RNA, 21 nt, Artificial Sequence
  Synthetic
aaacaguauaccagcauccuu

SEQ ID NO: 676975 - RNA, 22 nt, Artificial Sequence
  Synthetic
uaaacaguauaccagcauccuu

SEQ ID NO: 676976 - RNA, 23 nt, Artificial Sequence
  Synthetic
cuaaacaguauaccagcauccuu

SEQ ID NO: 676977 - RNA, 24 nt, Artificial Sequence
  Synthetic
ccuaaacaguauaccagcauccuu

SEQ ID NO: 676978 - RNA, 18 nt, Artificial Sequence
  Synthetic
uucugguucuagauccuu

SEQ ID NO: 676979 - RNA, 19 nt, Artificial Sequence
  Synthetic
cuucugguucuagauccuu

SEQ ID NO: 676980 - RNA, 20 nt, Artificial Sequence
  Synthetic
acuucugguucuagauccuu

SEQ ID NO: 676981 - RNA, 21 nt, Artificial Sequence
  Synthetic
uacuucugguucuagauccuu

SEQ ID NO: 676982 - RNA, 22 nt, Artificial Sequence
  Synthetic
guacuucugguucuagauccuu

SEQ ID NO: 676983 - RNA, 23 nt, Artificial Sequence
  Synthetic
gguacuucugguucuagauccuu

SEQ ID NO: 676984 - RNA, 24 nt, Artificial Sequence
  Synthetic
ugguacuucugguucuagauccuu

SEQ ID NO: 676985 - RNA, 18 nt, Artificial Sequence
  Synthetic
uucugguuguagauccuu

SEQ ID NO: 676986 - RNA, 19 nt, Artificial Sequence
  Synthetic
uuucugguuguagauccuu

SEQ ID NO: 676987 - RNA, 20 nt, Artificial Sequence
  Synthetic
auuucugguuguagauccuu

SEQ ID NO: 676988 - RNA, 21 nt, Artificial Sequence
  Synthetic
uauuucugguuguagauccuu

SEQ ID NO: 676989 - RNA, 22 nt, Artificial Sequence
  Synthetic
guauuucugguuguagauccuu

SEQ ID NO: 676990 - RNA, 23 nt, Artificial Sequence
  Synthetic
gguauuucugguuguagauccuu

SEQ ID NO: 676991 - RNA, 24 nt, Artificial Sequence
  Synthetic
ugguauuucugguuguagauccuu

SEQ ID NO: 676992 - RNA, 18 nt, Artificial Sequence
  Synthetic
agcucugcaaugauccuu

SEQ ID NO: 676993 - RNA, 19 nt, Artificial Sequence
  Synthetic
aagcucugcaaugauccuu

SEQ ID NO: 676994 - RNA, 20 nt, Artificial Sequence
  Synthetic
caagcucugcaaugauccuu

SEQ ID NO: 676995 - RNA, 21 nt, Artificial Sequence
  Synthetic
ucaagcucugcaaugauccuu

SEQ ID NO: 676996 - RNA, 22 nt, Artificial Sequence
  Synthetic
uucaagcucugcaaugauccuu

SEQ ID NO: 676997 - RNA, 23 nt, Artificial Sequence
  Synthetic
uuucaagcucugcaaugauccuu

SEQ ID NO: 676998 - RNA, 24 nt, Artificial Sequence
  Synthetic
uuuucaagcucugcaaugauccuu

SEQ ID NO: 676999 - RNA, 18 nt, Artificial Sequence
  Synthetic
gagacucaaaauauccuu

SEQ ID NO: 677000 - RNA, 19 nt, Artificial Sequence
  Synthetic
agagacucaaaauauccuu

SEQ ID NO: 677001 - RNA, 20 nt, Artificial Sequence
  Synthetic
cagagacucaaaauauccuu

SEQ ID NO: 677002 - RNA, 21 nt, Artificial Sequence
  Synthetic
acagagacucaaaauauccuu

SEQ ID NO: 677003 - RNA, 22 nt, Artificial Sequence
  Synthetic
uacagagacucaaaauauccuu

SEQ ID NO: 677004 - RNA, 23 nt, Artificial Sequence
  Synthetic
auacagagacucaaaauauccuu

SEQ ID NO: 677005 - RNA, 24 nt, Artificial Sequence
  Synthetic
uauacagagacucaaaauauccuu

SEQ ID NO: 677006 - RNA, 18 nt, Artificial Sequence
  Synthetic
uucauuuaggauauccuu

SEQ ID NO: 677007 - RNA, 19 nt, Artificial Sequence
  Synthetic
auucauuuaggauauccuu

SEQ ID NO: 677008 - RNA, 20 nt, Artificial Sequence
  Synthetic
uauucauuuaggauauccuu

SEQ ID NO: 677009 - RNA, 21 nt, Artificial Sequence
  Synthetic
cuauucauuuaggauauccuu

SEQ ID NO: 677010 - RNA, 22 nt, Artificial Sequence
  Synthetic
gcuauucauuuaggauauccuu

SEQ ID NO: 677011 - RNA, 23 nt, Artificial Sequence
  Synthetic
ggcuauucauuuaggauauccuu

SEQ ID NO: 677012 - RNA, 24 nt, Artificial Sequence
  Synthetic
uggcuauucauuuaggauauccuu

SEQ ID NO: 677013 - RNA, 18 nt, Artificial Sequence
  Synthetic
ggcagggcuauacuccuu

SEQ ID NO: 677014 - RNA, 19 nt, Artificial Sequence
  Synthetic
uggcagggcuauacuccuu

SEQ ID NO: 677015 - RNA, 20 nt, Artificial Sequence
  Synthetic
uuggcagggcuauacuccuu

SEQ ID NO: 677016 - RNA, 21 nt, Artificial Sequence
  Synthetic
guuggcagggcuauacuccuu

SEQ ID NO: 677017 - RNA, 22 nt, Artificial Sequence
  Synthetic
uguuggcagggcuauacuccuu

SEQ ID NO: 677018 - RNA, 23 nt, Artificial Sequence
  Synthetic
guguuggcagggcuauacuccuu

SEQ ID NO: 677019 - RNA, 24 nt, Artificial Sequence
  Synthetic
aguguuggcagggcuauacuccuu

SEQ ID NO: 677020 - RNA, 18 nt, Artificial Sequence
  Synthetic
uaaauuaauuuacuccuu

SEQ ID NO: 677021 - RNA, 19 nt, Artificial Sequence
  Synthetic
auaaauuaauuuacuccuu

SEQ ID NO: 677022 - RNA, 20 nt, Artificial Sequence
  Synthetic
uauaaauuaauuuacuccuu

SEQ ID NO: 677023 - RNA, 21 nt, Artificial Sequence
  Synthetic
auauaaauuaauuuacuccuu

SEQ ID NO: 677024 - RNA, 22 nt, Artificial Sequence
  Synthetic
uauauaaauuaauuuacuccuu

SEQ ID NO: 677025 - RNA, 23 nt, Artificial Sequence
  Synthetic
uuauauaaauuaauuuacuccuu

SEQ ID NO: 677026 - RNA, 24 nt, Artificial Sequence
  Synthetic
uuuauauaaauuaauuuacuccuu

SEQ ID NO: 677027 - RNA, 18 nt, Artificial Sequence
  Synthetic
uucuccuccauccuccuu

SEQ ID NO: 677028 - RNA, 19 nt, Artificial Sequence
  Synthetic
uuucuccuccauccuccuu

SEQ ID NO: 677029 - RNA, 20 nt, Artificial Sequence
  Synthetic
auuucuccuccauccuccuu

SEQ ID NO: 677030 - RNA, 21 nt, Artificial Sequence
  Synthetic
aauuucuccuccauccuccuu

SEQ ID NO: 677031 - RNA, 22 nt, Artificial Sequence
  Synthetic
aaauuucuccuccauccuccuu

SEQ ID NO: 677032 - RNA, 23 nt, Artificial Sequence
  Synthetic
aaaauuucuccuccauccuccuu

SEQ ID NO: 677033 - RNA, 24 nt, Artificial Sequence
  Synthetic
aaaaauuucuccuccauccuccuu

SEQ ID NO: 677034 - RNA, 18 nt, Artificial Sequence
  Synthetic
cucccuccccuccuccuu

SEQ ID NO: 677035 - RNA, 19 nt, Artificial Sequence
  Synthetic
ccucccuccccuccuccuu

SEQ ID NO: 677036 - RNA, 20 nt, Artificial Sequence
  Synthetic
cccucccuccccuccuccuu

SEQ ID NO: 677037 - RNA, 21 nt, Artificial Sequence
  Synthetic
ccccucccuccccuccuccuu

SEQ ID NO: 677038 - RNA, 22 nt, Artificial Sequence
  Synthetic
uccccucccuccccuccuccuu

SEQ ID NO: 677039 - RNA, 23 nt, Artificial Sequence
  Synthetic
cuccccucccuccccuccuccuu

SEQ ID NO: 677040 - RNA, 24 nt, Artificial Sequence
  Synthetic
gcuccccucccuccccuccuccuu

SEQ ID NO: 677041 - RNA, 18 nt, Artificial Sequence
  Synthetic
uaguaaaauccgcuccuu

SEQ ID NO: 677042 - RNA, 19 nt, Artificial Sequence
  Synthetic
guaguaaaauccgcuccuu

SEQ ID NO: 677043 - RNA, 20 nt, Artificial Sequence
  Synthetic
uguaguaaaauccgcuccuu

SEQ ID NO: 677044 - RNA, 21 nt, Artificial Sequence
  Synthetic
guguaguaaaauccgcuccuu

SEQ ID NO: 677045 - RNA, 22 nt, Artificial Sequence
  Synthetic
uguguaguaaaauccgcuccuu

SEQ ID NO: 677046 - RNA, 23 nt, Artificial Sequence
  Synthetic
auguguaguaaaauccgcuccuu

SEQ ID NO: 677047 - RNA, 24 nt, Artificial Sequence
  Synthetic
gauguguaguaaaauccgcuccuu

SEQ ID NO: 677048 - RNA, 18 nt, Artificial Sequence
  Synthetic
ugaaaauauuaucuccuu

SEQ ID NO: 677049 - RNA, 19 nt, Artificial Sequence
  Synthetic
cugaaaauauuaucuccuu

SEQ ID NO: 677050 - RNA, 20 nt, Artificial Sequence
  Synthetic
ucugaaaauauuaucuccuu

SEQ ID NO: 677051 - RNA, 21 nt, Artificial Sequence
  Synthetic
aucugaaaauauuaucuccuu

SEQ ID NO: 677052 - RNA, 22 nt, Artificial Sequence
  Synthetic
aaucugaaaauauuaucuccuu

SEQ ID NO: 677053 - RNA, 23 nt, Artificial Sequence
  Synthetic
uaaucugaaaauauuaucuccuu

SEQ ID NO: 677054 - RNA, 24 nt, Artificial Sequence
  Synthetic
guaaucugaaaauauuaucuccuu

SEQ ID NO: 677055 - RNA, 18 nt, Artificial Sequence
  Synthetic
ucuuuuaaaucucuccuu

SEQ ID NO: 677056 - RNA, 19 nt, Artificial Sequence
  Synthetic
gucuuuuaaaucucuccuu

SEQ ID NO: 677057 - RNA, 20 nt, Artificial Sequence
  Synthetic
ggucuuuuaaaucucuccuu

SEQ ID NO: 677058 - RNA, 21 nt, Artificial Sequence
  Synthetic
cggucuuuuaaaucucuccuu

SEQ ID NO: 677059 - RNA, 22 nt, Artificial Sequence
  Synthetic
ucggucuuuuaaaucucuccuu

SEQ ID NO: 677060 - RNA, 23 nt, Artificial Sequence
  Synthetic
gucggucuuuuaaaucucuccuu

SEQ ID NO: 677061 - RNA, 24 nt, Artificial Sequence
  Synthetic
ugucggucuuuuaaaucucuccuu

SEQ ID NO: 677062 - RNA, 18 nt, Artificial Sequence
  Synthetic
auggaacagauucuccuu

SEQ ID NO: 677063 - RNA, 19 nt, Artificial Sequence
  Synthetic
aauggaacagauucuccuu

SEQ ID NO: 677064 - RNA, 20 nt, Artificial Sequence
  Synthetic
gaauggaacagauucuccuu

SEQ ID NO: 677065 - RNA, 21 nt, Artificial Sequence
  Synthetic
ggaauggaacagauucuccuu

SEQ ID NO: 677066 - RNA, 22 nt, Artificial Sequence
  Synthetic
uggaauggaacagauucuccuu

SEQ ID NO: 677067 - RNA, 23 nt, Artificial Sequence
  Synthetic
auggaauggaacagauucuccuu

SEQ ID NO: 677068 - RNA, 24 nt, Artificial Sequence
  Synthetic
aauggaauggaacagauucuccuu

SEQ ID NO: 677069 - RNA, 18 nt, Artificial Sequence
  Synthetic
augccacaaguucuccuu

SEQ ID NO: 677070 - RNA, 19 nt, Artificial Sequence
  Synthetic
uaugccacaaguucuccuu

SEQ ID NO: 677071 - RNA, 20 nt, Artificial Sequence
  Synthetic
guaugccacaaguucuccuu

SEQ ID NO: 677072 - RNA, 21 nt, Artificial Sequence
  Synthetic
aguaugccacaaguucuccuu

SEQ ID NO: 677073 - RNA, 22 nt, Artificial Sequence
  Synthetic
aaguaugccacaaguucuccuu

SEQ ID NO: 677074 - RNA, 23 nt, Artificial Sequence
  Synthetic
uaaguaugccacaaguucuccuu

SEQ ID NO: 677075 - RNA, 24 nt, Artificial Sequence
  Synthetic
cuaaguaugccacaaguucuccuu

SEQ ID NO: 677076 - RNA, 18 nt, Artificial Sequence
  Synthetic
auagauucuguucuccuu

SEQ ID NO: 677077 - RNA, 19 nt, Artificial Sequence
  Synthetic
uauagauucuguucuccuu

SEQ ID NO: 677078 - RNA, 20 nt, Artificial Sequence
  Synthetic
cuauagauucuguucuccuu

SEQ ID NO: 677079 - RNA, 21 nt, Artificial Sequence
  Synthetic
ucuauagauucuguucuccuu

SEQ ID NO: 677080 - RNA, 22 nt, Artificial Sequence
  Synthetic
uucuauagauucuguucuccuu

SEQ ID NO: 677081 - RNA, 23 nt, Artificial Sequence
  Synthetic
cuucuauagauucuguucuccuu

SEQ ID NO: 677082 - RNA, 24 nt, Artificial Sequence
  Synthetic
ucuucuauagauucuguucuccuu

SEQ ID NO: 677083 - RNA, 18 nt, Artificial Sequence
  Synthetic
aaccucaccuuucuccuu

SEQ ID NO: 677084 - RNA, 19 nt, Artificial Sequence
  Synthetic
caaccucaccuuucuccuu

SEQ ID NO: 677085 - RNA, 20 nt, Artificial Sequence
  Synthetic
ccaaccucaccuuucuccuu

SEQ ID NO: 677086 - RNA, 21 nt, Artificial Sequence
  Synthetic
uccaaccucaccuuucuccuu

SEQ ID NO: 677087 - RNA, 22 nt, Artificial Sequence
  Synthetic
auccaaccucaccuuucuccuu

SEQ ID NO: 677088 - RNA, 23 nt, Artificial Sequence
  Synthetic
aauccaaccucaccuuucuccuu

SEQ ID NO: 677089 - RNA, 24 nt, Artificial Sequence
  Synthetic
aaauccaaccucaccuuucuccuu

SEQ ID NO: 677090 - RNA, 18 nt, Artificial Sequence
  Synthetic
auagcuguuuuucuccuu

SEQ ID NO: 677091 - RNA, 19 nt, Artificial Sequence
  Synthetic
uauagcuguuuuucuccuu

SEQ ID NO: 677092 - RNA, 20 nt, Artificial Sequence
  Synthetic
uuauagcuguuuuucuccuu

SEQ ID NO: 677093 - RNA, 21 nt, Artificial Sequence
  Synthetic
uuuauagcuguuuuucuccuu

SEQ ID NO: 677094 - RNA, 22 nt, Artificial Sequence
  Synthetic
uuuuauagcuguuuuucuccuu

SEQ ID NO: 677095 - RNA, 23 nt, Artificial Sequence
  Synthetic
uuuuuauagcuguuuuucuccuu

SEQ ID NO: 677096 - RNA, 24 nt, Artificial Sequence
  Synthetic
auuuuuauagcuguuuuucuccuu

SEQ ID NO: 677097 - RNA, 18 nt, Artificial Sequence
  Synthetic
aucaauuuugaaguccuu

SEQ ID NO: 677098 - RNA, 19 nt, Artificial Sequence
  Synthetic
aaucaauuuugaaguccuu

SEQ ID NO: 677099 - RNA, 20 nt, Artificial Sequence
  Synthetic
caaucaauuuugaaguccuu

SEQ ID NO: 677100 - RNA, 21 nt, Artificial Sequence
  Synthetic
ccaaucaauuuugaaguccuu

SEQ ID NO: 677101 - RNA, 22 nt, Artificial Sequence
  Synthetic
uccaaucaauuuugaaguccuu

SEQ ID NO: 677102 - RNA, 23 nt, Artificial Sequence
  Synthetic
cuccaaucaauuuugaaguccuu

SEQ ID NO: 677103 - RNA, 24 nt, Artificial Sequence
  Synthetic
ucuccaaucaauuuugaaguccuu

SEQ ID NO: 677104 - RNA, 18 nt, Artificial Sequence
  Synthetic
auuccaccuucaguccuu

SEQ ID NO: 677105 - RNA, 19 nt, Artificial Sequence
  Synthetic
aauuccaccuucaguccuu

SEQ ID NO: 677106 - RNA, 20 nt, Artificial Sequence
  Synthetic
caauuccaccuucaguccuu

SEQ ID NO: 677107 - RNA, 21 nt, Artificial Sequence
  Synthetic
ccaauuccaccuucaguccuu

SEQ ID NO: 677108 - RNA, 22 nt, Artificial Sequence
  Synthetic
uccaauuccaccuucaguccuu

SEQ ID NO: 677109 - RNA, 23 nt, Artificial Sequence
  Synthetic
uuccaauuccaccuucaguccuu

SEQ ID NO: 677110 - RNA, 24 nt, Artificial Sequence
  Synthetic
guuccaauuccaccuucaguccuu

SEQ ID NO: 677111 - RNA, 18 nt, Artificial Sequence
  Synthetic
uccagcuccagaguccuu

SEQ ID NO: 677112 - RNA, 19 nt, Artificial Sequence
  Synthetic
uuccagcuccagaguccuu

SEQ ID NO: 677113 - RNA, 20 nt, Artificial Sequence
  Synthetic
uuuccagcuccagaguccuu

SEQ ID NO: 677114 - RNA, 21 nt, Artificial Sequence
  Synthetic
auuuccagcuccagaguccuu

SEQ ID NO: 677115 - RNA, 22 nt, Artificial Sequence
  Synthetic
aauuuccagcuccagaguccuu

SEQ ID NO: 677116 - RNA, 23 nt, Artificial Sequence
  Synthetic
gaauuuccagcuccagaguccuu

SEQ ID NO: 677117 - RNA, 24 nt, Artificial Sequence
  Synthetic
agaauuuccagcuccagaguccuu

SEQ ID NO: 677118 - RNA, 18 nt, Artificial Sequence
  Synthetic
gaaaccucaacgguccuu

SEQ ID NO: 677119 - RNA, 19 nt, Artificial Sequence
  Synthetic
agaaaccucaacgguccuu

SEQ ID NO: 677120 - RNA, 20 nt, Artificial Sequence
  Synthetic
aagaaaccucaacgguccuu

SEQ ID NO: 677121 - RNA, 21 nt, Artificial Sequence
  Synthetic
caagaaaccucaacgguccuu

SEQ ID NO: 677122 - RNA, 22 nt, Artificial Sequence
  Synthetic
ccaagaaaccucaacgguccuu

SEQ ID NO: 677123 - RNA, 23 nt, Artificial Sequence
  Synthetic
uccaagaaaccucaacgguccuu

SEQ ID NO: 677124 - RNA, 24 nt, Artificial Sequence
  Synthetic
auccaagaaaccucaacgguccuu

SEQ ID NO: 677125 - RNA, 18 nt, Artificial Sequence
  Synthetic
acauuuuggcugguccuu

SEQ ID NO: 677126 - RNA, 19 nt, Artificial Sequence
  Synthetic
aacauuuuggcugguccuu

SEQ ID NO: 677127 - RNA, 20 nt, Artificial Sequence
  Synthetic
uaacauuuuggcugguccuu

SEQ ID NO: 677128 - RNA, 21 nt, Artificial Sequence
  Synthetic
guaacauuuuggcugguccuu

SEQ ID NO: 677129 - RNA, 22 nt, Artificial Sequence
  Synthetic
gguaacauuuuggcugguccuu

SEQ ID NO: 677130 - RNA, 23 nt, Artificial Sequence
  Synthetic
agguaacauuuuggcugguccuu

SEQ ID NO: 677131 - RNA, 24 nt, Artificial Sequence
  Synthetic
uagguaacauuuuggcugguccuu

SEQ ID NO: 677132 - RNA, 18 nt, Artificial Sequence
  Synthetic
gaggcaaauucuguccuu

SEQ ID NO: 677133 - RNA, 19 nt, Artificial Sequence
  Synthetic
cgaggcaaauucuguccuu

SEQ ID NO: 677134 - RNA, 20 nt, Artificial Sequence
  Synthetic
ucgaggcaaauucuguccuu

SEQ ID NO: 677135 - RNA, 21 nt, Artificial Sequence
  Synthetic
uucgaggcaaauucuguccuu

SEQ ID NO: 677136 - RNA, 22 nt, Artificial Sequence
  Synthetic
uuucgaggcaaauucuguccuu

SEQ ID NO: 677137 - RNA, 23 nt, Artificial Sequence
  Synthetic
auuucgaggcaaauucuguccuu

SEQ ID NO: 677138 - RNA, 24 nt, Artificial Sequence
  Synthetic
cauuucgaggcaaauucuguccuu

SEQ ID NO: 677139 - RNA, 18 nt, Artificial Sequence
  Synthetic
gagcaauggaguguccuu

SEQ ID NO: 677140 - RNA, 19 nt, Artificial Sequence
  Synthetic
agagcaauggaguguccuu

SEQ ID NO: 677141 - RNA, 20 nt, Artificial Sequence
  Synthetic
cagagcaauggaguguccuu

SEQ ID NO: 677142 - RNA, 21 nt, Artificial Sequence
  Synthetic
ucagagcaauggaguguccuu

SEQ ID NO: 677143 - RNA, 22 nt, Artificial Sequence
  Synthetic
aucagagcaauggaguguccuu

SEQ ID NO: 677144 - RNA, 23 nt, Artificial Sequence
  Synthetic
uaucagagcaauggaguguccuu

SEQ ID NO: 677145 - RNA, 24 nt, Artificial Sequence
  Synthetic
cuaucagagcaauggaguguccuu

SEQ ID NO: 677146 - RNA, 18 nt, Artificial Sequence
  Synthetic
uggccuaaauaauuccuu

SEQ ID NO: 677147 - RNA, 19 nt, Artificial Sequence
  Synthetic
uuggccuaaauaauuccuu

SEQ ID NO: 677148 - RNA, 20 nt, Artificial Sequence
  Synthetic
uuuggccuaaauaauuccuu

SEQ ID NO: 677149 - RNA, 21 nt, Artificial Sequence
  Synthetic
uuuuggccuaaauaauuccuu

SEQ ID NO: 677150 - RNA, 22 nt, Artificial Sequence
  Synthetic
auuuuggccuaaauaauuccuu

SEQ ID NO: 677151 - RNA, 23 nt, Artificial Sequence
  Synthetic
cauuuuggccuaaauaauuccuu

SEQ ID NO: 677152 - RNA, 24 nt, Artificial Sequence
  Synthetic
acauuuuggccuaaauaauuccuu

SEQ ID NO: 677153 - RNA, 18 nt, Artificial Sequence
  Synthetic
cuuucccuuuaauuccuu

SEQ ID NO: 677154 - RNA, 19 nt, Artificial Sequence
  Synthetic
ucuuucccuuuaauuccuu

SEQ ID NO: 677155 - RNA, 20 nt, Artificial Sequence
  Synthetic
cucuuucccuuuaauuccuu

SEQ ID NO: 677156 - RNA, 21 nt, Artificial Sequence
  Synthetic
ucucuuucccuuuaauuccuu

SEQ ID NO: 677157 - RNA, 22 nt, Artificial Sequence
  Synthetic
gucucuuucccuuuaauuccuu

SEQ ID NO: 677158 - RNA, 23 nt, Artificial Sequence
  Synthetic
ugucucuuucccuuuaauuccuu

SEQ ID NO: 677159 - RNA, 24 nt, Artificial Sequence
  Synthetic
augucucuuucccuuuaauuccuu

SEQ ID NO: 677160 - RNA, 21 nt, Artificial Sequence
  Synthetic
gaggaacugguaccauuccuu

SEQ ID NO: 677161 - RNA, 22 nt, Artificial Sequence
  Synthetic
ggaggaacugguaccauuccuu

SEQ ID NO: 677162 - RNA, 23 nt, Artificial Sequence
  Synthetic
aggaggaacugguaccauuccuu

SEQ ID NO: 677163 - RNA, 24 nt, Artificial Sequence
  Synthetic
aaggaggaacugguaccauuccuu

SEQ ID NO: 677164 - RNA, 18 nt, Artificial Sequence
  Synthetic
cauguuuagugauuccuu

SEQ ID NO: 677165 - RNA, 19 nt, Artificial Sequence
  Synthetic
ccauguuuagugauuccuu

SEQ ID NO: 677166 - RNA, 20 nt, Artificial Sequence
  Synthetic
uccauguuuagugauuccuu

SEQ ID NO: 677167 - RNA, 21 nt, Artificial Sequence
  Synthetic
uuccauguuuagugauuccuu

SEQ ID NO: 677168 - RNA, 22 nt, Artificial Sequence
  Synthetic
uuuccauguuuagugauuccuu

SEQ ID NO: 677169 - RNA, 23 nt, Artificial Sequence
  Synthetic
cuuuccauguuuagugauuccuu

SEQ ID NO: 677170 - RNA, 24 nt, Artificial Sequence
  Synthetic
ccuuuccauguuuagugauuccuu

SEQ ID NO: 677171 - RNA, 18 nt, Artificial Sequence
  Synthetic
aggcagagagccuuccuu

SEQ ID NO: 677172 - RNA, 19 nt, Artificial Sequence
  Synthetic
aaggcagagagccuuccuu

SEQ ID NO: 677173 - RNA, 20 nt, Artificial Sequence
  Synthetic
uaaggcagagagccuuccuu

SEQ ID NO: 677174 - RNA, 21 nt, Artificial Sequence
  Synthetic
cuaaggcagagagccuuccuu

SEQ ID NO: 677175 - RNA, 22 nt, Artificial Sequence
  Synthetic
acuaaggcagagagccuuccuu

SEQ ID NO: 677176 - RNA, 23 nt, Artificial Sequence
  Synthetic
uacuaaggcagagagccuuccuu

SEQ ID NO: 677177 - RNA, 24 nt, Artificial Sequence
  Synthetic
auacuaaggcagagagccuuccuu

SEQ ID NO: 677178 - RNA, 18 nt, Artificial Sequence
  Synthetic
gauaaagacuccuuccuu

SEQ ID NO: 677179 - RNA, 19 nt, Artificial Sequence
  Synthetic
ggauaaagacuccuuccuu

SEQ ID NO: 677180 - RNA, 20 nt, Artificial Sequence
  Synthetic
gggauaaagacuccuuccuu

SEQ ID NO: 677181 - RNA, 21 nt, Artificial Sequence
  Synthetic
ugggauaaagacuccuuccuu

SEQ ID NO: 677182 - RNA, 22 nt, Artificial Sequence
  Synthetic
cugggauaaagacuccuuccuu

SEQ ID NO: 677183 - RNA, 23 nt, Artificial Sequence
  Synthetic
acugggauaaagacuccuuccuu

SEQ ID NO: 677184 - RNA, 24 nt, Artificial Sequence
  Synthetic
uacugggauaaagacuccuuccuu

SEQ ID NO: 677185 - RNA, 18 nt, Artificial Sequence
  Synthetic
cugagguaaggcuuccuu

SEQ ID NO: 677186 - RNA, 19 nt, Artificial Sequence
  Synthetic
gcugagguaaggcuuccuu

SEQ ID NO: 677187 - RNA, 20 nt, Artificial Sequence
  Synthetic
agcugagguaaggcuuccuu

SEQ ID NO: 677188 - RNA, 21 nt, Artificial Sequence
  Synthetic
cagcugagguaaggcuuccuu

SEQ ID NO: 677189 - RNA, 22 nt, Artificial Sequence
  Synthetic
ucagcugagguaaggcuuccuu

SEQ ID NO: 677190 - RNA, 23 nt, Artificial Sequence
  Synthetic
cucagcugagguaaggcuuccuu

SEQ ID NO: 677191 - RNA, 24 nt, Artificial Sequence
  Synthetic
ucucagcugagguaaggcuuccuu

SEQ ID NO: 677192 - RNA, 18 nt, Artificial Sequence
  Synthetic
uagaauaaagucuuccuu

SEQ ID NO: 677193 - RNA, 19 nt, Artificial Sequence
  Synthetic
guagaauaaagucuuccuu

SEQ ID NO: 677194 - RNA, 20 nt, Artificial Sequence
  Synthetic
aguagaauaaagucuuccuu

SEQ ID NO: 677195 - RNA, 21 nt, Artificial Sequence
  Synthetic
aaguagaauaaagucuuccuu

SEQ ID NO: 677196 - RNA, 22 nt, Artificial Sequence
  Synthetic
caaguagaauaaagucuuccuu

SEQ ID NO: 677197 - RNA, 23 nt, Artificial Sequence
  Synthetic
ccaaguagaauaaagucuuccuu

SEQ ID NO: 677198 - RNA, 24 nt, Artificial Sequence
  Synthetic
accaaguagaauaaagucuuccuu

SEQ ID NO: 677199 - RNA, 18 nt, Artificial Sequence
  Synthetic
guagaaaaucaguuccuu

SEQ ID NO: 677200 - RNA, 19 nt, Artificial Sequence
  Synthetic
uguagaaaaucaguuccuu

SEQ ID NO: 677201 - RNA, 20 nt, Artificial Sequence
  Synthetic
auguagaaaaucaguuccuu

SEQ ID NO: 677202 - RNA, 21 nt, Artificial Sequence
  Synthetic
uauguagaaaaucaguuccuu

SEQ ID NO: 677203 - RNA, 22 nt, Artificial Sequence
  Synthetic
auauguagaaaaucaguuccuu

SEQ ID NO: 677204 - RNA, 23 nt, Artificial Sequence
  Synthetic
aauauguagaaaaucaguuccuu

SEQ ID NO: 677205 - RNA, 24 nt, Artificial Sequence
  Synthetic
gaauauguagaaaaucaguuccuu

SEQ ID NO: 677206 - RNA, 18 nt, Artificial Sequence
  Synthetic
auugcaugagaguuccuu

SEQ ID NO: 677207 - RNA, 19 nt, Artificial Sequence
  Synthetic
aauugcaugagaguuccuu

SEQ ID NO: 677208 - RNA, 20 nt, Artificial Sequence
  Synthetic
caauugcaugagaguuccuu

SEQ ID NO: 677209 - RNA, 21 nt, Artificial Sequence
  Synthetic
gcaauugcaugagaguuccuu

SEQ ID NO: 677210 - RNA, 22 nt, Artificial Sequence
  Synthetic
ggcaauugcaugagaguuccuu

SEQ ID NO: 677211 - RNA, 23 nt, Artificial Sequence
  Synthetic
aggcaauugcaugagaguuccuu

SEQ ID NO: 677212 - RNA, 24 nt, Artificial Sequence
  Synthetic
uaggcaauugcaugagaguuccuu

SEQ ID NO: 677213 - RNA, 18 nt, Artificial Sequence
  Synthetic
uuuucuuuuuuguuccuu

SEQ ID NO: 677214 - RNA, 19 nt, Artificial Sequence
  Synthetic
uuuuucuuuuuuguuccuu

SEQ ID NO: 677215 - RNA, 20 nt, Artificial Sequence
  Synthetic
uuuuuucuuuuuuguuccuu

SEQ ID NO: 677216 - RNA, 21 nt, Artificial Sequence
  Synthetic
guuuuuucuuuuuuguuccuu

SEQ ID NO: 677217 - RNA, 22 nt, Artificial Sequence
  Synthetic
gguuuuuucuuuuuuguuccuu

SEQ ID NO: 677218 - RNA, 23 nt, Artificial Sequence
  Synthetic
ugguuuuuucuuuuuuguuccuu

SEQ ID NO: 677219 - RNA, 24 nt, Artificial Sequence
  Synthetic
gugguuuuuucuuuuuuguuccuu

SEQ ID NO: 677220 - RNA, 18 nt, Artificial Sequence
  Synthetic
aacugcuacaauuuccuu

SEQ ID NO: 677221 - RNA, 19 nt, Artificial Sequence
  Synthetic
aaacugcuacaauuuccuu

SEQ ID NO: 677222 - RNA, 20 nt, Artificial Sequence
  Synthetic
aaaacugcuacaauuuccuu

SEQ ID NO: 677223 - RNA, 21 nt, Artificial Sequence
  Synthetic
caaaacugcuacaauuuccuu

SEQ ID NO: 677224 - RNA, 22 nt, Artificial Sequence
  Synthetic
acaaaacugcuacaauuuccuu

SEQ ID NO: 677225 - RNA, 23 nt, Artificial Sequence
  Synthetic
uacaaaacugcuacaauuuccuu

SEQ ID NO: 677226 - RNA, 24 nt, Artificial Sequence
  Synthetic
guacaaaacugcuacaauuuccuu

SEQ ID NO: 677227 - RNA, 18 nt, Artificial Sequence
  Synthetic
aauuuuauuaauuuccuu

SEQ ID NO: 677228 - RNA, 19 nt, Artificial Sequence
  Synthetic
aaauuuuauuaauuuccuu

SEQ ID NO: 677229 - RNA, 20 nt, Artificial Sequence
  Synthetic
caaauuuuauuaauuuccuu

SEQ ID NO: 677230 - RNA, 21 nt, Artificial Sequence
  Synthetic
acaaauuuuauuaauuuccuu

SEQ ID NO: 677231 - RNA, 22 nt, Artificial Sequence
  Synthetic
aacaaauuuuauuaauuuccuu

SEQ ID NO: 677232 - RNA, 23 nt, Artificial Sequence
  Synthetic
gaacaaauuuuauuaauuuccuu

SEQ ID NO: 677233 - RNA, 24 nt, Artificial Sequence
  Synthetic
ugaacaaauuuuauuaauuuccuu

SEQ ID NO: 677234 - RNA, 18 nt, Artificial Sequence
  Synthetic
ccaaguaaucauuuccuu

SEQ ID NO: 677235 - RNA, 19 nt, Artificial Sequence
  Synthetic
uccaaguaaucauuuccuu

SEQ ID NO: 677236 - RNA, 20 nt, Artificial Sequence
  Synthetic
guccaaguaaucauuuccuu

SEQ ID NO: 677237 - RNA, 21 nt, Artificial Sequence
  Synthetic
aguccaaguaaucauuuccuu

SEQ ID NO: 677238 - RNA, 22 nt, Artificial Sequence
  Synthetic
uaguccaaguaaucauuuccuu

SEQ ID NO: 677239 - RNA, 23 nt, Artificial Sequence
  Synthetic
cuaguccaaguaaucauuuccuu

SEQ ID NO: 677240 - RNA, 24 nt, Artificial Sequence
  Synthetic
ucuaguccaaguaaucauuuccuu

SEQ ID NO: 677241 - RNA, 18 nt, Artificial Sequence
  Synthetic
acaacuagucauuuccuu

SEQ ID NO: 677242 - RNA, 19 nt, Artificial Sequence
  Synthetic
gacaacuagucauuuccuu

SEQ ID NO: 677243 - RNA, 20 nt, Artificial Sequence
  Synthetic
ugacaacuagucauuuccuu

SEQ ID NO: 677244 - RNA, 21 nt, Artificial Sequence
  Synthetic
uugacaacuagucauuuccuu

SEQ ID NO: 677245 - RNA, 22 nt, Artificial Sequence
  Synthetic
auugacaacuagucauuuccuu

SEQ ID NO: 677246 - RNA, 23 nt, Artificial Sequence
  Synthetic
uauugacaacuagucauuuccuu

SEQ ID NO: 677247 - RNA, 24 nt, Artificial Sequence
  Synthetic
auauugacaacuagucauuuccuu

SEQ ID NO: 677248 - RNA, 18 nt, Artificial Sequence
  Synthetic
aggacauucuauuuccuu

SEQ ID NO: 677249 - RNA, 19 nt, Artificial Sequence
  Synthetic
aaggacauucuauuuccuu

SEQ ID NO: 677250 - RNA, 20 nt, Artificial Sequence
  Synthetic
gaaggacauucuauuuccuu

SEQ ID NO: 677251 - RNA, 21 nt, Artificial Sequence
  Synthetic
agaaggacauucuauuuccuu

SEQ ID NO: 677252 - RNA, 22 nt, Artificial Sequence
  Synthetic
aagaaggacauucuauuuccuu

SEQ ID NO: 677253 - RNA, 23 nt, Artificial Sequence
  Synthetic
caagaaggacauucuauuuccuu

SEQ ID NO: 677254 - RNA, 24 nt, Artificial Sequence
  Synthetic
acaagaaggacauucuauuuccuu

SEQ ID NO: 677255 - RNA, 18 nt, Artificial Sequence
  Synthetic
gaaaauaaugcuuuccuu

SEQ ID NO: 677256 - RNA, 19 nt, Artificial Sequence
  Synthetic
agaaaauaaugcuuuccuu

SEQ ID NO: 677257 - RNA, 20 nt, Artificial Sequence
  Synthetic
aagaaaauaaugcuuuccuu

SEQ ID NO: 677258 - RNA, 21 nt, Artificial Sequence
  Synthetic
uaagaaaauaaugcuuuccuu

SEQ ID NO: 677259 - RNA, 22 nt, Artificial Sequence
  Synthetic
guaagaaaauaaugcuuuccuu

SEQ ID NO: 677260 - RNA, 23 nt, Artificial Sequence
  Synthetic
uguaagaaaauaaugcuuuccuu

SEQ ID NO: 677261 - RNA, 24 nt, Artificial Sequence
  Synthetic
uuguaagaaaauaaugcuuuccuu

SEQ ID NO: 677262 - RNA, 18 nt, Artificial Sequence
  Synthetic
aauuaaaccucuuuccuu

SEQ ID NO: 677263 - RNA, 19 nt, Artificial Sequence
  Synthetic
caauuaaaccucuuuccuu

SEQ ID NO: 677264 - RNA, 20 nt, Artificial Sequence
  Synthetic
ucaauuaaaccucuuuccuu

SEQ ID NO: 677265 - RNA, 21 nt, Artificial Sequence
  Synthetic
gucaauuaaaccucuuuccuu

SEQ ID NO: 677266 - RNA, 22 nt, Artificial Sequence
  Synthetic
agucaauuaaaccucuuuccuu

SEQ ID NO: 677267 - RNA, 23 nt, Artificial Sequence
  Synthetic
gagucaauuaaaccucuuuccuu

SEQ ID NO: 677268 - RNA, 24 nt, Artificial Sequence
  Synthetic
ugagucaauuaaaccucuuuccuu

SEQ ID NO: 677269 - RNA, 18 nt, Artificial Sequence
  Synthetic
aauauuucuucuuuccuu

SEQ ID NO: 677270 - RNA, 19 nt, Artificial Sequence
  Synthetic
aaauauuucuucuuuccuu

SEQ ID NO: 677271 - RNA, 20 nt, Artificial Sequence
  Synthetic
aaaauauuucuucuuuccuu

SEQ ID NO: 677272 - RNA, 21 nt, Artificial Sequence
  Synthetic
aaaaauauuucuucuuuccuu

SEQ ID NO: 677273 - RNA, 22 nt, Artificial Sequence
  Synthetic
uaaaaauauuucuucuuuccuu

SEQ ID NO: 677274 - RNA, 23 nt, Artificial Sequence
  Synthetic
uuaaaaauauuucuucuuuccuu

SEQ ID NO: 677275 - RNA, 24 nt, Artificial Sequence
  Synthetic
uuuaaaaauauuucuucuuuccuu

SEQ ID NO: 677276 - RNA, 18 nt, Artificial Sequence
  Synthetic
caacacccuauuuuccuu

SEQ ID NO: 677277 - RNA, 19 nt, Artificial Sequence
  Synthetic
ucaacacccuauuuuccuu

SEQ ID NO: 677278 - RNA, 20 nt, Artificial Sequence
  Synthetic
cucaacacccuauuuuccuu

SEQ ID NO: 677279 - RNA, 21 nt, Artificial Sequence
  Synthetic
ucucaacacccuauuuuccuu

SEQ ID NO: 677280 - RNA, 22 nt, Artificial Sequence
  Synthetic
cucucaacacccuauuuuccuu

SEQ ID NO: 677281 - RNA, 23 nt, Artificial Sequence
  Synthetic
acucucaacacccuauuuuccuu

SEQ ID NO: 677282 - RNA, 24 nt, Artificial Sequence
  Synthetic
gacucucaacacccuauuuuccuu

SEQ ID NO: 677283 - RNA, 18 nt, Artificial Sequence
  Synthetic
cacaucagccuuuuccuu

SEQ ID NO: 677284 - RNA, 19 nt, Artificial Sequence
  Synthetic
acacaucagccuuuuccuu

SEQ ID NO: 677285 - RNA, 20 nt, Artificial Sequence
  Synthetic
uacacaucagccuuuuccuu

SEQ ID NO: 677286 - RNA, 21 nt, Artificial Sequence
  Synthetic
auacacaucagccuuuuccuu

SEQ ID NO: 677287 - RNA, 22 nt, Artificial Sequence
  Synthetic
uauacacaucagccuuuuccuu

SEQ ID NO: 677288 - RNA, 23 nt, Artificial Sequence
  Synthetic
uuauacacaucagccuuuuccuu

SEQ ID NO: 677289 - RNA, 24 nt, Artificial Sequence
  Synthetic
auuauacacaucagccuuuuccuu

SEQ ID NO: 677290 - RNA, 18 nt, Artificial Sequence
  Synthetic
cuuuuuuuucuuuuccuu

SEQ ID NO: 677291 - RNA, 19 nt, Artificial Sequence
  Synthetic
ucuuuuuuuucuuuuccuu

SEQ ID NO: 677292 - RNA, 20 nt, Artificial Sequence
  Synthetic
cucuuuuuuuucuuuuccuu

SEQ ID NO: 677293 - RNA, 21 nt, Artificial Sequence
  Synthetic
gcucuuuuuuuucuuuuccuu

SEQ ID NO: 677294 - RNA, 22 nt, Artificial Sequence
  Synthetic
ugcucuuuuuuuucuuuuccuu

SEQ ID NO: 677295 - RNA, 23 nt, Artificial Sequence
  Synthetic
uugcucuuuuuuuucuuuuccuu

SEQ ID NO: 677296 - RNA, 24 nt, Artificial Sequence
  Synthetic
auugcucuuuuuuuucuuuuccuu

SEQ ID NO: 677297 - RNA, 18 nt, Artificial Sequence
  Synthetic
agguaaguaaaaaagcuu

SEQ ID NO: 677298 - RNA, 19 nt, Artificial Sequence
  Synthetic
uagguaaguaaaaaagcuu

SEQ ID NO: 677299 - RNA, 20 nt, Artificial Sequence
  Synthetic
uuagguaaguaaaaaagcuu

SEQ ID NO: 677300 - RNA, 21 nt, Artificial Sequence
  Synthetic
cuuagguaaguaaaaaagcuu

SEQ ID NO: 677301 - RNA, 22 nt, Artificial Sequence
  Synthetic
ccuuagguaaguaaaaaagcuu

SEQ ID NO: 677302 - RNA, 23 nt, Artificial Sequence
  Synthetic
accuuagguaaguaaaaaagcuu

SEQ ID NO: 677303 - RNA, 24 nt, Artificial Sequence
  Synthetic
caccuuagguaaguaaaaaagcuu

SEQ ID NO: 677304 - RNA, 18 nt, Artificial Sequence
  Synthetic
uuaaaaaugagaaagcuu

SEQ ID NO: 677305 - RNA, 19 nt, Artificial Sequence
  Synthetic
uuuaaaaaugagaaagcuu

SEQ ID NO: 677306 - RNA, 20 nt, Artificial Sequence
  Synthetic
uuuuaaaaaugagaaagcuu

SEQ ID NO: 677307 - RNA, 21 nt, Artificial Sequence
  Synthetic
auuuuaaaaaugagaaagcuu

SEQ ID NO: 677308 - RNA, 22 nt, Artificial Sequence
  Synthetic
uauuuuaaaaaugagaaagcuu

SEQ ID NO: 677309 - RNA, 23 nt, Artificial Sequence
  Synthetic
uuauuuuaaaaaugagaaagcuu

SEQ ID NO: 677310 - RNA, 24 nt, Artificial Sequence
  Synthetic
uuuauuuuaaaaaugagaaagcuu

SEQ ID NO: 677311 - RNA, 18 nt, Artificial Sequence
  Synthetic
gaugguaggggaaagcuu

SEQ ID NO: 677312 - RNA, 19 nt, Artificial Sequence
  Synthetic
cgaugguaggggaaagcuu

SEQ ID NO: 677313 - RNA, 20 nt, Artificial Sequence
  Synthetic
ucgaugguaggggaaagcuu

SEQ ID NO: 677314 - RNA, 21 nt, Artificial Sequence
  Synthetic
cucgaugguaggggaaagcuu

SEQ ID NO: 677315 - RNA, 22 nt, Artificial Sequence
  Synthetic
gcucgaugguaggggaaagcuu

SEQ ID NO: 677316 - RNA, 23 nt, Artificial Sequence
  Synthetic
cgcucgaugguaggggaaagcuu

SEQ ID NO: 677317 - RNA, 24 nt, Artificial Sequence
  Synthetic
ccgcucgaugguaggggaaagcuu

SEQ ID NO: 677318 - RNA, 18 nt, Artificial Sequence
  Synthetic
ucccgggccugaaagcuu

SEQ ID NO: 677319 - RNA, 19 nt, Artificial Sequence
  Synthetic
cucccgggccugaaagcuu

SEQ ID NO: 677320 - RNA, 20 nt, Artificial Sequence
  Synthetic
ucucccgggccugaaagcuu

SEQ ID NO: 677321 - RNA, 21 nt, Artificial Sequence
  Synthetic
cucucccgggccugaaagcuu

SEQ ID NO: 677322 - RNA, 22 nt, Artificial Sequence
  Synthetic
ucucucccgggccugaaagcuu

SEQ ID NO: 677323 - RNA, 23 nt, Artificial Sequence
  Synthetic
uucucucccgggccugaaagcuu

SEQ ID NO: 677324 - RNA, 24 nt, Artificial Sequence
  Synthetic
auucucucccgggccugaaagcuu

SEQ ID NO: 677325 - RNA, 18 nt, Artificial Sequence
  Synthetic
cuuugucucuucaagcuu

SEQ ID NO: 677326 - RNA, 19 nt, Artificial Sequence
  Synthetic
ccuuugucucuucaagcuu

SEQ ID NO: 677327 - RNA, 20 nt, Artificial Sequence
  Synthetic
uccuuugucucuucaagcuu

SEQ ID NO: 677328 - RNA, 21 nt, Artificial Sequence
  Synthetic
cuccuuugucucuucaagcuu

SEQ ID NO: 677329 - RNA, 22 nt, Artificial Sequence
  Synthetic
ucuccuuugucucuucaagcuu

SEQ ID NO: 677330 - RNA, 23 nt, Artificial Sequence
  Synthetic
aucuccuuugucucuucaagcuu

SEQ ID NO: 677331 - RNA, 24 nt, Artificial Sequence
  Synthetic
aaucuccuuugucucuucaagcuu

SEQ ID NO: 677332 - RNA, 18 nt, Artificial Sequence
  Synthetic
uaggaggauuucaagcuu

SEQ ID NO: 677333 - RNA, 19 nt, Artificial Sequence
  Synthetic
uuaggaggauuucaagcuu

SEQ ID NO: 677334 - RNA, 20 nt, Artificial Sequence
  Synthetic
uuuaggaggauuucaagcuu

SEQ ID NO: 677335 - RNA, 21 nt, Artificial Sequence
  Synthetic
auuuaggaggauuucaagcuu

SEQ ID NO: 677336 - RNA, 22 nt, Artificial Sequence
  Synthetic
aauuuaggaggauuucaagcuu

SEQ ID NO: 677337 - RNA, 23 nt, Artificial Sequence
  Synthetic
caauuuaggaggauuucaagcuu

SEQ ID NO: 677338 - RNA, 24 nt, Artificial Sequence
  Synthetic
gcaauuuaggaggauuucaagcuu

SEQ ID NO: 677339 - RNA, 18 nt, Artificial Sequence
  Synthetic
ucaguaacauagaagcuu

SEQ ID NO: 677340 - RNA, 19 nt, Artificial Sequence
  Synthetic
uucaguaacauagaagcuu

SEQ ID NO: 677341 - RNA, 20 nt, Artificial Sequence
  Synthetic
uuucaguaacauagaagcuu

SEQ ID NO: 677342 - RNA, 21 nt, Artificial Sequence
  Synthetic
uuuucaguaacauagaagcuu

SEQ ID NO: 677343 - RNA, 22 nt, Artificial Sequence
  Synthetic
cuuuucaguaacauagaagcuu

SEQ ID NO: 677344 - RNA, 23 nt, Artificial Sequence
  Synthetic
ccuuuucaguaacauagaagcuu

SEQ ID NO: 677345 - RNA, 24 nt, Artificial Sequence
  Synthetic
gccuuuucaguaacauagaagcuu

SEQ ID NO: 677346 - RNA, 18 nt, Artificial Sequence
  Synthetic
uuaaucacauagaagcuu

SEQ ID NO: 677347 - RNA, 19 nt, Artificial Sequence
  Synthetic
uuuaaucacauagaagcuu

SEQ ID NO: 677348 - RNA, 20 nt, Artificial Sequence
  Synthetic
cuuuaaucacauagaagcuu

SEQ ID NO: 677349 - RNA, 21 nt, Artificial Sequence
  Synthetic
ucuuuaaucacauagaagcuu

SEQ ID NO: 677350 - RNA, 22 nt, Artificial Sequence
  Synthetic
cucuuuaaucacauagaagcuu

SEQ ID NO: 677351 - RNA, 23 nt, Artificial Sequence
  Synthetic
ucucuuuaaucacauagaagcuu

SEQ ID NO: 677352 - RNA, 24 nt, Artificial Sequence
  Synthetic
uucucuuuaaucacauagaagcuu

SEQ ID NO: 677353 - RNA, 18 nt, Artificial Sequence
  Synthetic
aauaaauaauggaagcuu

SEQ ID NO: 677354 - RNA, 19 nt, Artificial Sequence
  Synthetic
caauaaauaauggaagcuu

SEQ ID NO: 677355 - RNA, 20 nt, Artificial Sequence
  Synthetic
ucaauaaauaauggaagcuu

SEQ ID NO: 677356 - RNA, 21 nt, Artificial Sequence
  Synthetic
aucaauaaauaauggaagcuu

SEQ ID NO: 677357 - RNA, 22 nt, Artificial Sequence
  Synthetic
caucaauaaauaauggaagcuu

SEQ ID NO: 677358 - RNA, 23 nt, Artificial Sequence
  Synthetic
acaucaauaaauaauggaagcuu

SEQ ID NO: 677359 - RNA, 24 nt, Artificial Sequence
  Synthetic
aacaucaauaaauaauggaagcuu

SEQ ID NO: 677360 - RNA, 18 nt, Artificial Sequence
  Synthetic
aucaccuccaauaagcuu

SEQ ID NO: 677361 - RNA, 19 nt, Artificial Sequence
  Synthetic
uaucaccuccaauaagcuu

SEQ ID NO: 677362 - RNA, 20 nt, Artificial Sequence
  Synthetic
auaucaccuccaauaagcuu

SEQ ID NO: 677363 - RNA, 21 nt, Artificial Sequence
  Synthetic
cauaucaccuccaauaagcuu

SEQ ID NO: 677364 - RNA, 22 nt, Artificial Sequence
  Synthetic
ucauaucaccuccaauaagcuu

SEQ ID NO: 677365 - RNA, 23 nt, Artificial Sequence
  Synthetic
uucauaucaccuccaauaagcuu

SEQ ID NO: 677366 - RNA, 24 nt, Artificial Sequence
  Synthetic
cuucauaucaccuccaauaagcuu

SEQ ID NO: 677367 - RNA, 18 nt, Artificial Sequence
  Synthetic
uauaagauuuuuaagcuu

SEQ ID NO: 677368 - RNA, 19 nt, Artificial Sequence
  Synthetic
auauaagauuuuuaagcuu

SEQ ID NO: 677369 - RNA, 20 nt, Artificial Sequence
  Synthetic
aauauaagauuuuuaagcuu

SEQ ID NO: 677370 - RNA, 21 nt, Artificial Sequence
  Synthetic
caauauaagauuuuuaagcuu

SEQ ID NO: 677371 - RNA, 22 nt, Artificial Sequence
  Synthetic
ucaauauaagauuuuuaagcuu

SEQ ID NO: 677372 - RNA, 23 nt, Artificial Sequence
  Synthetic
aucaauauaagauuuuuaagcuu

SEQ ID NO: 677373 - RNA, 24 nt, Artificial Sequence
  Synthetic
aaucaauauaagauuuuuaagcuu

SEQ ID NO: 677374 - RNA, 18 nt, Artificial Sequence
  Synthetic
aaaauuuuuuuuaagcuu

SEQ ID NO: 677375 - RNA, 19 nt, Artificial Sequence
  Synthetic
uaaaauuuuuuuuaagcuu

SEQ ID NO: 677376 - RNA, 20 nt, Artificial Sequence
  Synthetic
guaaaauuuuuuuuaagcuu

SEQ ID NO: 677377 - RNA, 21 nt, Artificial Sequence
  Synthetic
aguaaaauuuuuuuuaagcuu

SEQ ID NO: 677378 - RNA, 22 nt, Artificial Sequence
  Synthetic
caguaaaauuuuuuuuaagcuu

SEQ ID NO: 677379 - RNA, 23 nt, Artificial Sequence
  Synthetic
acaguaaaauuuuuuuuaagcuu

SEQ ID NO: 677380 - RNA, 24 nt, Artificial Sequence
  Synthetic
cacaguaaaauuuuuuuuaagcuu

SEQ ID NO: 677381 - RNA, 18 nt, Artificial Sequence
  Synthetic
cucaaggucacacagcuu

SEQ ID NO: 677382 - RNA, 19 nt, Artificial Sequence
  Synthetic
acucaaggucacacagcuu

SEQ ID NO: 677383 - RNA, 20 nt, Artificial Sequence
  Synthetic
uacucaaggucacacagcuu

SEQ ID NO: 677384 - RNA, 21 nt, Artificial Sequence
  Synthetic
uuacucaaggucacacagcuu

SEQ ID NO: 677385 - RNA, 22 nt, Artificial Sequence
  Synthetic
cuuacucaaggucacacagcuu

SEQ ID NO: 677386 - RNA, 23 nt, Artificial Sequence
  Synthetic
acuuacucaaggucacacagcuu

SEQ ID NO: 677387 - RNA, 24 nt, Artificial Sequence
  Synthetic
aacuuacucaaggucacacagcuu

SEQ ID NO: 677388 - RNA, 18 nt, Artificial Sequence
  Synthetic
guuuaaaucaaccagcuu

SEQ ID NO: 677389 - RNA, 19 nt, Artificial Sequence
  Synthetic
aguuuaaaucaaccagcuu

SEQ ID NO: 677390 - RNA, 20 nt, Artificial Sequence
  Synthetic
aaguuuaaaucaaccagcuu

SEQ ID NO: 677391 - RNA, 21 nt, Artificial Sequence
  Synthetic
aaaguuuaaaucaaccagcuu

SEQ ID NO: 677392 - RNA, 22 nt, Artificial Sequence
  Synthetic
aaaaguuuaaaucaaccagcuu

SEQ ID NO: 677393 - RNA, 23 nt, Artificial Sequence
  Synthetic
gaaaaguuuaaaucaaccagcuu

SEQ ID NO: 677394 - RNA, 24 nt, Artificial Sequence
  Synthetic
agaaaaguuuaaaucaaccagcuu

SEQ ID NO: 677395 - RNA, 18 nt, Artificial Sequence
  Synthetic
augaaaggagcccagcuu

SEQ ID NO: 677396 - RNA, 19 nt, Artificial Sequence
  Synthetic
caugaaaggagcccagcuu

SEQ ID NO: 677397 - RNA, 20 nt, Artificial Sequence
  Synthetic
gcaugaaaggagcccagcuu

SEQ ID NO: 677398 - RNA, 21 nt, Artificial Sequence
  Synthetic
ggcaugaaaggagcccagcuu

SEQ ID NO: 677399 - RNA, 22 nt, Artificial Sequence
  Synthetic
cggcaugaaaggagcccagcuu

SEQ ID NO: 677400 - RNA, 23 nt, Artificial Sequence
  Synthetic
gcggcaugaaaggagcccagcuu

SEQ ID NO: 677401 - RNA, 24 nt, Artificial Sequence
  Synthetic
ugcggcaugaaaggagcccagcuu

SEQ ID NO: 677402 - RNA, 18 nt, Artificial Sequence
  Synthetic
gagaguauuugccagcuu

SEQ ID NO: 677403 - RNA, 19 nt, Artificial Sequence
  Synthetic
agagaguauuugccagcuu

SEQ ID NO: 677404 - RNA, 20 nt, Artificial Sequence
  Synthetic
aagagaguauuugccagcuu

SEQ ID NO: 677405 - RNA, 21 nt, Artificial Sequence
  Synthetic
gaagagaguauuugccagcuu

SEQ ID NO: 677406 - RNA, 22 nt, Artificial Sequence
  Synthetic
ggaagagaguauuugccagcuu

SEQ ID NO: 677407 - RNA, 23 nt, Artificial Sequence
  Synthetic
gggaagagaguauuugccagcuu

SEQ ID NO: 677408 - RNA, 24 nt, Artificial Sequence
  Synthetic
ugggaagagaguauuugccagcuu

SEQ ID NO: 677409 - RNA, 18 nt, Artificial Sequence
  Synthetic
gaagggucauuccagcuu

SEQ ID NO: 677410 - RNA, 19 nt, Artificial Sequence
  Synthetic
ugaagggucauuccagcuu

SEQ ID NO: 677411 - RNA, 20 nt, Artificial Sequence
  Synthetic
cugaagggucauuccagcuu

SEQ ID NO: 677412 - RNA, 21 nt, Artificial Sequence
  Synthetic
ucugaagggucauuccagcuu

SEQ ID NO: 677413 - RNA, 22 nt, Artificial Sequence
  Synthetic
uucugaagggucauuccagcuu

SEQ ID NO: 677414 - RNA, 23 nt, Artificial Sequence
  Synthetic
cuucugaagggucauuccagcuu

SEQ ID NO: 677415 - RNA, 24 nt, Artificial Sequence
  Synthetic
acuucugaagggucauuccagcuu

SEQ ID NO: 677416 - RNA, 18 nt, Artificial Sequence
  Synthetic
caagaugucuuccagcuu

SEQ ID NO: 677417 - RNA, 19 nt, Artificial Sequence
  Synthetic
acaagaugucuuccagcuu

SEQ ID NO: 677418 - RNA, 20 nt, Artificial Sequence
  Synthetic
gacaagaugucuuccagcuu

SEQ ID NO: 677419 - RNA, 21 nt, Artificial Sequence
  Synthetic
agacaagaugucuuccagcuu

SEQ ID NO: 677420 - RNA, 22 nt, Artificial Sequence
  Synthetic
gagacaagaugucuuccagcuu

SEQ ID NO: 677421 - RNA, 23 nt, Artificial Sequence
  Synthetic
ggagacaagaugucuuccagcuu

SEQ ID NO: 677422 - RNA, 24 nt, Artificial Sequence
  Synthetic
uggagacaagaugucuuccagcuu

SEQ ID NO: 677423 - RNA, 18 nt, Artificial Sequence
  Synthetic
accacuugagaucagcuu

SEQ ID NO: 677424 - RNA, 19 nt, Artificial Sequence
  Synthetic
caccacuugagaucagcuu

SEQ ID NO: 677425 - RNA, 20 nt, Artificial Sequence
  Synthetic
acaccacuugagaucagcuu

SEQ ID NO: 677426 - RNA, 21 nt, Artificial Sequence
  Synthetic
uacaccacuugagaucagcuu

SEQ ID NO: 677427 - RNA, 22 nt, Artificial Sequence
  Synthetic
auacaccacuugagaucagcuu

SEQ ID NO: 677428 - RNA, 23 nt, Artificial Sequence
  Synthetic
aauacaccacuugagaucagcuu

SEQ ID NO: 677429 - RNA, 24 nt, Artificial Sequence
  Synthetic
aaauacaccacuugagaucagcuu

SEQ ID NO: 677430 - RNA, 18 nt, Artificial Sequence
  Synthetic
ccaaucagaacucagcuu

SEQ ID NO: 677431 - RNA, 19 nt, Artificial Sequence
  Synthetic
uccaaucagaacucagcuu

SEQ ID NO: 677432 - RNA, 20 nt, Artificial Sequence
  Synthetic
uuccaaucagaacucagcuu

SEQ ID NO: 677433 - RNA, 21 nt, Artificial Sequence
  Synthetic
cuuccaaucagaacucagcuu

SEQ ID NO: 677434 - RNA, 22 nt, Artificial Sequence
  Synthetic
gcuuccaaucagaacucagcuu

SEQ ID NO: 677435 - RNA, 23 nt, Artificial Sequence
  Synthetic
agcuuccaaucagaacucagcuu

SEQ ID NO: 677436 - RNA, 24 nt, Artificial Sequence
  Synthetic
cagcuuccaaucagaacucagcuu

SEQ ID NO: 677437 - RNA, 18 nt, Artificial Sequence
  Synthetic
cucuaaauaguagagcuu

SEQ ID NO: 677438 - RNA, 19 nt, Artificial Sequence
  Synthetic
gcucuaaauaguagagcuu

SEQ ID NO: 677439 - RNA, 20 nt, Artificial Sequence
  Synthetic
agcucuaaauaguagagcuu

SEQ ID NO: 677440 - RNA, 21 nt, Artificial Sequence
  Synthetic
gagcucuaaauaguagagcuu

SEQ ID NO: 677441 - RNA, 22 nt, Artificial Sequence
  Synthetic
ugagcucuaaauaguagagcuu

SEQ ID NO: 677442 - RNA, 23 nt, Artificial Sequence
  Synthetic
augagcucuaaauaguagagcuu

SEQ ID NO: 677443 - RNA, 24 nt, Artificial Sequence
  Synthetic
caugagcucuaaauaguagagcuu

SEQ ID NO: 677444 - RNA, 18 nt, Artificial Sequence
  Synthetic
gacauugaucaggagcuu

SEQ ID NO: 677445 - RNA, 19 nt, Artificial Sequence
  Synthetic
agacauugaucaggagcuu

SEQ ID NO: 677446 - RNA, 20 nt, Artificial Sequence
  Synthetic
uagacauugaucaggagcuu

SEQ ID NO: 677447 - RNA, 21 nt, Artificial Sequence
  Synthetic
uuagacauugaucaggagcuu

SEQ ID NO: 677448 - RNA, 22 nt, Artificial Sequence
  Synthetic
guuagacauugaucaggagcuu

SEQ ID NO: 677449 - RNA, 23 nt, Artificial Sequence
  Synthetic
uguuagacauugaucaggagcuu

SEQ ID NO: 677450 - RNA, 24 nt, Artificial Sequence
  Synthetic
guguuagacauugaucaggagcuu

SEQ ID NO: 677451 - RNA, 18 nt, Artificial Sequence
  Synthetic
auuaaggggugggagcuu

SEQ ID NO: 677452 - RNA, 19 nt, Artificial Sequence
  Synthetic
uauuaaggggugggagcuu

SEQ ID NO: 677453 - RNA, 20 nt, Artificial Sequence
  Synthetic
guauuaaggggugggagcuu

SEQ ID NO: 677454 - RNA, 21 nt, Artificial Sequence
  Synthetic
aguauuaaggggugggagcuu

SEQ ID NO: 677455 - RNA, 22 nt, Artificial Sequence
  Synthetic
caguauuaaggggugggagcuu

SEQ ID NO: 677456 - RNA, 23 nt, Artificial Sequence
  Synthetic
acaguauuaaggggugggagcuu

SEQ ID NO: 677457 - RNA, 24 nt, Artificial Sequence
  Synthetic
gacaguauuaaggggugggagcuu

SEQ ID NO: 677458 - RNA, 18 nt, Artificial Sequence
  Synthetic
gccagcucuuuggagcuu

SEQ ID NO: 677459 - RNA, 19 nt, Artificial Sequence
  Synthetic
agccagcucuuuggagcuu

SEQ ID NO: 677460 - RNA, 20 nt, Artificial Sequence
  Synthetic
aagccagcucuuuggagcuu

SEQ ID NO: 677461 - RNA, 21 nt, Artificial Sequence
  Synthetic
uaagccagcucuuuggagcuu

SEQ ID NO: 677462 - RNA, 22 nt, Artificial Sequence
  Synthetic
guaagccagcucuuuggagcuu

SEQ ID NO: 677463 - RNA, 23 nt, Artificial Sequence
  Synthetic
uguaagccagcucuuuggagcuu

SEQ ID NO: 677464 - RNA, 24 nt, Artificial Sequence
  Synthetic
guguaagccagcucuuuggagcuu

SEQ ID NO: 677465 - RNA, 18 nt, Artificial Sequence
  Synthetic
aagucaagaacugagcuu

SEQ ID NO: 677466 - RNA, 19 nt, Artificial Sequence
  Synthetic
gaagucaagaacugagcuu

SEQ ID NO: 677467 - RNA, 20 nt, Artificial Sequence
  Synthetic
agaagucaagaacugagcuu

SEQ ID NO: 677468 - RNA, 21 nt, Artificial Sequence
  Synthetic
cagaagucaagaacugagcuu

SEQ ID NO: 677469 - RNA, 22 nt, Artificial Sequence
  Synthetic
acagaagucaagaacugagcuu

SEQ ID NO: 677470 - RNA, 23 nt, Artificial Sequence
  Synthetic
cacagaagucaagaacugagcuu

SEQ ID NO: 677471 - RNA, 24 nt, Artificial Sequence
  Synthetic
acacagaagucaagaacugagcuu

SEQ ID NO: 677472 - RNA, 18 nt, Artificial Sequence
  Synthetic
gagagaaacccugagcuu

SEQ ID NO: 677473 - RNA, 19 nt, Artificial Sequence
  Synthetic
ggagagaaacccugagcuu

SEQ ID NO: 677474 - RNA, 20 nt, Artificial Sequence
  Synthetic
aggagagaaacccugagcuu

SEQ ID NO: 677475 - RNA, 21 nt, Artificial Sequence
  Synthetic
caggagagaaacccugagcuu

SEQ ID NO: 677476 - RNA, 22 nt, Artificial Sequence
  Synthetic
acaggagagaaacccugagcuu

SEQ ID NO: 677477 - RNA, 23 nt, Artificial Sequence
  Synthetic
cacaggagagaaacccugagcuu

SEQ ID NO: 677478 - RNA, 24 nt, Artificial Sequence
  Synthetic
ucacaggagagaaacccugagcuu

SEQ ID NO: 677479 - RNA, 18 nt, Artificial Sequence
  Synthetic
uuuauaauacuugagcuu

SEQ ID NO: 677480 - RNA, 19 nt, Artificial Sequence
  Synthetic
guuuauaauacuugagcuu

SEQ ID NO: 677481 - RNA, 20 nt, Artificial Sequence
  Synthetic
uguuuauaauacuugagcuu

SEQ ID NO: 677482 - RNA, 21 nt, Artificial Sequence
  Synthetic
guguuuauaauacuugagcuu

SEQ ID NO: 677483 - RNA, 22 nt, Artificial Sequence
  Synthetic
aguguuuauaauacuugagcuu

SEQ ID NO: 677484 - RNA, 23 nt, Artificial Sequence
  Synthetic
caguguuuauaauacuugagcuu

SEQ ID NO: 677485 - RNA, 24 nt, Artificial Sequence
  Synthetic
acaguguuuauaauacuugagcuu

SEQ ID NO: 677486 - RNA, 18 nt, Artificial Sequence
  Synthetic
aacugguguuuugagcuu

SEQ ID NO: 677487 - RNA, 19 nt, Artificial Sequence
  Synthetic
aaacugguguuuugagcuu

SEQ ID NO: 677488 - RNA, 20 nt, Artificial Sequence
  Synthetic
caaacugguguuuugagcuu

SEQ ID NO: 677489 - RNA, 21 nt, Artificial Sequence
  Synthetic
acaaacugguguuuugagcuu

SEQ ID NO: 677490 - RNA, 22 nt, Artificial Sequence
  Synthetic
cacaaacugguguuuugagcuu

SEQ ID NO: 677491 - RNA, 23 nt, Artificial Sequence
  Synthetic
acacaaacugguguuuugagcuu

SEQ ID NO: 677492 - RNA, 24 nt, Artificial Sequence
  Synthetic
aacacaaacugguguuuugagcuu

SEQ ID NO: 677493 - RNA, 18 nt, Artificial Sequence
  Synthetic
uugauagcagaauagcuu

SEQ ID NO: 677494 - RNA, 19 nt, Artificial Sequence
  Synthetic
cuugauagcagaauagcuu

SEQ ID NO: 677495 - RNA, 20 nt, Artificial Sequence
  Synthetic
ucuugauagcagaauagcuu

SEQ ID NO: 677496 - RNA, 21 nt, Artificial Sequence
  Synthetic
uucuugauagcagaauagcuu

SEQ ID NO: 677497 - RNA, 22 nt, Artificial Sequence
  Synthetic
auucuugauagcagaauagcuu

SEQ ID NO: 677498 - RNA, 23 nt, Artificial Sequence
  Synthetic
uauucuugauagcagaauagcuu

SEQ ID NO: 677499 - RNA, 24 nt, Artificial Sequence
  Synthetic
auauucuugauagcagaauagcuu

SEQ ID NO: 677500 - RNA, 18 nt, Artificial Sequence
  Synthetic
cagucacagagcuagcuu

SEQ ID NO: 677501 - RNA, 19 nt, Artificial Sequence
  Synthetic
ccagucacagagcuagcuu

SEQ ID NO: 677502 - RNA, 20 nt, Artificial Sequence
  Synthetic
cccagucacagagcuagcuu

SEQ ID NO: 677503 - RNA, 21 nt, Artificial Sequence
  Synthetic
gcccagucacagagcuagcuu

SEQ ID NO: 677504 - RNA, 22 nt, Artificial Sequence
  Synthetic
ugcccagucacagagcuagcuu

SEQ ID NO: 677505 - RNA, 23 nt, Artificial Sequence
  Synthetic
cugcccagucacagagcuagcuu

SEQ ID NO: 677506 - RNA, 24 nt, Artificial Sequence
  Synthetic
acugcccagucacagagcuagcuu

SEQ ID NO: 677507 - RNA, 18 nt, Artificial Sequence
  Synthetic
uaaacacuguauuagcuu

SEQ ID NO: 677508 - RNA, 19 nt, Artificial Sequence
  Synthetic
guaaacacuguauuagcuu

SEQ ID NO: 677509 - RNA, 20 nt, Artificial Sequence
  Synthetic
aguaaacacuguauuagcuu

SEQ ID NO: 677510 - RNA, 21 nt, Artificial Sequence
  Synthetic
caguaaacacuguauuagcuu

SEQ ID NO: 677511 - RNA, 22 nt, Artificial Sequence
  Synthetic
ucaguaaacacuguauuagcuu

SEQ ID NO: 677512 - RNA, 23 nt, Artificial Sequence
  Synthetic
aucaguaaacacuguauuagcuu

SEQ ID NO: 677513 - RNA, 24 nt, Artificial Sequence
  Synthetic
aaucaguaaacacuguauuagcuu

SEQ ID NO: 677514 - RNA, 18 nt, Artificial Sequence
  Synthetic
ugagcacauuguuagcuu

SEQ ID NO: 677515 - RNA, 19 nt, Artificial Sequence
  Synthetic
cugagcacauuguuagcuu

SEQ ID NO: 677516 - RNA, 20 nt, Artificial Sequence
  Synthetic
acugagcacauuguuagcuu

SEQ ID NO: 677517 - RNA, 21 nt, Artificial Sequence
  Synthetic
uacugagcacauuguuagcuu

SEQ ID NO: 677518 - RNA, 22 nt, Artificial Sequence
  Synthetic
auacugagcacauuguuagcuu

SEQ ID NO: 677519 - RNA, 23 nt, Artificial Sequence
  Synthetic
aauacugagcacauuguuagcuu

SEQ ID NO: 677520 - RNA, 24 nt, Artificial Sequence
  Synthetic
aaauacugagcacauuguuagcuu

SEQ ID NO: 677521 - RNA, 18 nt, Artificial Sequence
  Synthetic
aaacaacaaauuuagcuu

SEQ ID NO: 677522 - RNA, 19 nt, Artificial Sequence
  Synthetic
caaacaacaaauuuagcuu

SEQ ID NO: 677523 - RNA, 20 nt, Artificial Sequence
  Synthetic
ucaaacaacaaauuuagcuu

SEQ ID NO: 677524 - RNA, 21 nt, Artificial Sequence
  Synthetic
uucaaacaacaaauuuagcuu

SEQ ID NO: 677525 - RNA, 22 nt, Artificial Sequence
  Synthetic
cuucaaacaacaaauuuagcuu

SEQ ID NO: 677526 - RNA, 23 nt, Artificial Sequence
  Synthetic
acuucaaacaacaaauuuagcuu

SEQ ID NO: 677527 - RNA, 24 nt, Artificial Sequence
  Synthetic
cacuucaaacaacaaauuuagcuu

SEQ ID NO: 677528 - RNA, 18 nt, Artificial Sequence
  Synthetic
uuauuuugacuuuagcuu

SEQ ID NO: 677529 - RNA, 19 nt, Artificial Sequence
  Synthetic
uuuauuuugacuuuagcuu

SEQ ID NO: 677530 - RNA, 20 nt, Artificial Sequence
  Synthetic
auuuauuuugacuuuagcuu

SEQ ID NO: 677531 - RNA, 21 nt, Artificial Sequence
  Synthetic
cauuuauuuugacuuuagcuu

SEQ ID NO: 677532 - RNA, 22 nt, Artificial Sequence
  Synthetic
acauuuauuuugacuuuagcuu

SEQ ID NO: 677533 - RNA, 23 nt, Artificial Sequence
  Synthetic
gacauuuauuuugacuuuagcuu

SEQ ID NO: 677534 - RNA, 24 nt, Artificial Sequence
  Synthetic
agacauuuauuuugacuuuagcuu

SEQ ID NO: 677535 - RNA, 18 nt, Artificial Sequence
  Synthetic
gagucaauaugaacgcuu

SEQ ID NO: 677536 - RNA, 19 nt, Artificial Sequence
  Synthetic
cgagucaauaugaacgcuu

SEQ ID NO: 677537 - RNA, 20 nt, Artificial Sequence
  Synthetic
acgagucaauaugaacgcuu

SEQ ID NO: 677538 - RNA, 21 nt, Artificial Sequence
  Synthetic
aacgagucaauaugaacgcuu

SEQ ID NO: 677539 - RNA, 22 nt, Artificial Sequence
  Synthetic
aaacgagucaauaugaacgcuu

SEQ ID NO: 677540 - RNA, 23 nt, Artificial Sequence
  Synthetic
aaaacgagucaauaugaacgcuu

SEQ ID NO: 677541 - RNA, 24 nt, Artificial Sequence
  Synthetic
caaaacgagucaauaugaacgcuu

SEQ ID NO: 677542 - RNA, 18 nt, Artificial Sequence
  Synthetic
ccuguaacccuagcgcuu

SEQ ID NO: 677543 - RNA, 19 nt, Artificial Sequence
  Synthetic
gccuguaacccuagcgcuu

SEQ ID NO: 677544 - RNA, 20 nt, Artificial Sequence
  Synthetic
ugccuguaacccuagcgcuu

SEQ ID NO: 677545 - RNA, 21 nt, Artificial Sequence
  Synthetic
augccuguaacccuagcgcuu

SEQ ID NO: 677546 - RNA, 22 nt, Artificial Sequence
  Synthetic
caugccuguaacccuagcgcuu

SEQ ID NO: 677547 - RNA, 23 nt, Artificial Sequence
  Synthetic
ucaugccuguaacccuagcgcuu

SEQ ID NO: 677548 - RNA, 24 nt, Artificial Sequence
  Synthetic
cucaugccuguaacccuagcgcuu

SEQ ID NO: 677549 - RNA, 18 nt, Artificial Sequence
  Synthetic
aaaaucugaaaaaggcuu

SEQ ID NO: 677550 - RNA, 19 nt, Artificial Sequence
  Synthetic
gaaaaucugaaaaaggcuu

SEQ ID NO: 677551 - RNA, 20 nt, Artificial Sequence
  Synthetic
ugaaaaucugaaaaaggcuu

SEQ ID NO: 677552 - RNA, 21 nt, Artificial Sequence
  Synthetic
cugaaaaucugaaaaaggcuu

SEQ ID NO: 677553 - RNA, 22 nt, Artificial Sequence
  Synthetic
ccugaaaaucugaaaaaggcuu

SEQ ID NO: 677554 - RNA, 23 nt, Artificial Sequence
  Synthetic
uccugaaaaucugaaaaaggcuu

SEQ ID NO: 677555 - RNA, 24 nt, Artificial Sequence
  Synthetic
cuccugaaaaucugaaaaaggcuu

SEQ ID NO: 677556 - RNA, 18 nt, Artificial Sequence
  Synthetic
agugaccuggaaaggcuu

SEQ ID NO: 677557 - RNA, 19 nt, Artificial Sequence
  Synthetic
aagugaccuggaaaggcuu

SEQ ID NO: 677558 - RNA, 20 nt, Artificial Sequence
  Synthetic
aaagugaccuggaaaggcuu

SEQ ID NO: 677559 - RNA, 21 nt, Artificial Sequence
  Synthetic
uaaagugaccuggaaaggcuu

SEQ ID NO: 677560 - RNA, 22 nt, Artificial Sequence
  Synthetic
auaaagugaccuggaaaggcuu

SEQ ID NO: 677561 - RNA, 23 nt, Artificial Sequence
  Synthetic
gauaaagugaccuggaaaggcuu

SEQ ID NO: 677562 - RNA, 24 nt, Artificial Sequence
  Synthetic
agauaaagugaccuggaaaggcuu

SEQ ID NO: 677563 - RNA, 18 nt, Artificial Sequence
  Synthetic
aguugcugaaacaggcuu

SEQ ID NO: 677564 - RNA, 19 nt, Artificial Sequence
  Synthetic
caguugcugaaacaggcuu

SEQ ID NO: 677565 - RNA, 20 nt, Artificial Sequence
  Synthetic
acaguugcugaaacaggcuu

SEQ ID NO: 677566 - RNA, 21 nt, Artificial Sequence
  Synthetic
cacaguugcugaaacaggcuu

SEQ ID NO: 677567 - RNA, 22 nt, Artificial Sequence
  Synthetic
acacaguugcugaaacaggcuu

SEQ ID NO: 677568 - RNA, 23 nt, Artificial Sequence
  Synthetic
uacacaguugcugaaacaggcuu

SEQ ID NO: 677569 - RNA, 24 nt, Artificial Sequence
  Synthetic
cuacacaguugcugaaacaggcuu

SEQ ID NO: 677570 - RNA, 18 nt, Artificial Sequence
  Synthetic
agagaagcaggcaggcuu

SEQ ID NO: 677571 - RNA, 19 nt, Artificial Sequence
  Synthetic
cagagaagcaggcaggcuu

SEQ ID NO: 677572 - RNA, 20 nt, Artificial Sequence
  Synthetic
gcagagaagcaggcaggcuu

SEQ ID NO: 677573 - RNA, 21 nt, Artificial Sequence
  Synthetic
ggcagagaagcaggcaggcuu

SEQ ID NO: 677574 - RNA, 22 nt, Artificial Sequence
  Synthetic
aggcagagaagcaggcaggcuu

SEQ ID NO: 677575 - RNA, 23 nt, Artificial Sequence
  Synthetic
aaggcagagaagcaggcaggcuu

SEQ ID NO: 677576 - RNA, 24 nt, Artificial Sequence
  Synthetic
aaaggcagagaagcaggcaggcuu

SEQ ID NO: 677577 - RNA, 18 nt, Artificial Sequence
  Synthetic
uaaacuuuagucaggcuu

SEQ ID NO: 677578 - RNA, 19 nt, Artificial Sequence
  Synthetic
cuaaacuuuagucaggcuu

SEQ ID NO: 677579 - RNA, 20 nt, Artificial Sequence
  Synthetic
acuaaacuuuagucaggcuu

SEQ ID NO: 677580 - RNA, 21 nt, Artificial Sequence
  Synthetic
gacuaaacuuuagucaggcuu

SEQ ID NO: 677581 - RNA, 22 nt, Artificial Sequence
  Synthetic
ugacuaaacuuuagucaggcuu

SEQ ID NO: 677582 - RNA, 23 nt, Artificial Sequence
  Synthetic
uugacuaaacuuuagucaggcuu

SEQ ID NO: 677583 - RNA, 24 nt, Artificial Sequence
  Synthetic
cuugacuaaacuuuagucaggcuu

SEQ ID NO: 677584 - RNA, 18 nt, Artificial Sequence
  Synthetic
gguuuguucaugaggcuu

SEQ ID NO: 677585 - RNA, 19 nt, Artificial Sequence
  Synthetic
agguuuguucaugaggcuu

SEQ ID NO: 677586 - RNA, 20 nt, Artificial Sequence
  Synthetic
gagguuuguucaugaggcuu

SEQ ID NO: 677587 - RNA, 21 nt, Artificial Sequence
  Synthetic
agagguuuguucaugaggcuu

SEQ ID NO: 677588 - RNA, 22 nt, Artificial Sequence
  Synthetic
cagagguuuguucaugaggcuu

SEQ ID NO: 677589 - RNA, 23 nt, Artificial Sequence
  Synthetic
gcagagguuuguucaugaggcuu

SEQ ID NO: 677590 - RNA, 24 nt, Artificial Sequence
  Synthetic
agcagagguuuguucaugaggcuu

SEQ ID NO: 677591 - RNA, 18 nt, Artificial Sequence
  Synthetic
cgcuuuuaaaauaggcuu

SEQ ID NO: 677592 - RNA, 19 nt, Artificial Sequence
  Synthetic
gcgcuuuuaaaauaggcuu

SEQ ID NO: 677593 - RNA, 20 nt, Artificial Sequence
  Synthetic
ugcgcuuuuaaaauaggcuu

SEQ ID NO: 677594 - RNA, 21 nt, Artificial Sequence
  Synthetic
uugcgcuuuuaaaauaggcuu

SEQ ID NO: 677595 - RNA, 22 nt, Artificial Sequence
  Synthetic
uuugcgcuuuuaaaauaggcuu

SEQ ID NO: 677596 - RNA, 23 nt, Artificial Sequence
  Synthetic
uuuugcgcuuuuaaaauaggcuu

SEQ ID NO: 677597 - RNA, 24 nt, Artificial Sequence
  Synthetic
uuuuugcgcuuuuaaaauaggcuu

SEQ ID NO: 677598 - RNA, 18 nt, Artificial Sequence
  Synthetic
gucagugaacuacggcuu

SEQ ID NO: 677599 - RNA, 19 nt, Artificial Sequence
  Synthetic
ggucagugaacuacggcuu

SEQ ID NO: 677600 - RNA, 20 nt, Artificial Sequence
  Synthetic
gggucagugaacuacggcuu

SEQ ID NO: 677601 - RNA, 21 nt, Artificial Sequence
  Synthetic
ggggucagugaacuacggcuu

SEQ ID NO: 677602 - RNA, 22 nt, Artificial Sequence
  Synthetic
aggggucagugaacuacggcuu

SEQ ID NO: 677603 - RNA, 23 nt, Artificial Sequence
  Synthetic
caggggucagugaacuacggcuu

SEQ ID NO: 677604 - RNA, 24 nt, Artificial Sequence
  Synthetic
acaggggucagugaacuacggcuu

SEQ ID NO: 677605 - RNA, 18 nt, Artificial Sequence
  Synthetic
acuagccgcaugcggcuu

SEQ ID NO: 677606 - RNA, 19 nt, Artificial Sequence
  Synthetic
cacuagccgcaugcggcuu

SEQ ID NO: 677607 - RNA, 20 nt, Artificial Sequence
  Synthetic
ccacuagccgcaugcggcuu

SEQ ID NO: 677608 - RNA, 21 nt, Artificial Sequence
  Synthetic
accacuagccgcaugcggcuu

SEQ ID NO: 677609 - RNA, 22 nt, Artificial Sequence
  Synthetic
aaccacuagccgcaugcggcuu

SEQ ID NO: 677610 - RNA, 23 nt, Artificial Sequence
  Synthetic
caaccacuagccgcaugcggcuu

SEQ ID NO: 677611 - RNA, 24 nt, Artificial Sequence
  Synthetic
acaaccacuagccgcaugcggcuu

SEQ ID NO: 677612 - RNA, 18 nt, Artificial Sequence
  Synthetic
gcugcagacauagggcuu

SEQ ID NO: 677613 - RNA, 19 nt, Artificial Sequence
  Synthetic
ggcugcagacauagggcuu

SEQ ID NO: 677614 - RNA, 20 nt, Artificial Sequence
  Synthetic
gggcugcagacauagggcuu

SEQ ID NO: 677615 - RNA, 21 nt, Artificial Sequence
  Synthetic
ggggcugcagacauagggcuu

SEQ ID NO: 677616 - RNA, 22 nt, Artificial Sequence
  Synthetic
cggggcugcagacauagggcuu

SEQ ID NO: 677617 - RNA, 23 nt, Artificial Sequence
  Synthetic
acggggcugcagacauagggcuu

SEQ ID NO: 677618 - RNA, 24 nt, Artificial Sequence
  Synthetic
cacggggcugcagacauagggcuu

SEQ ID NO: 677619 - RNA, 18 nt, Artificial Sequence
  Synthetic
guugaggcagaggggcuu

SEQ ID NO: 677620 - RNA, 19 nt, Artificial Sequence
  Synthetic
uguugaggcagaggggcuu

SEQ ID NO: 677621 - RNA, 20 nt, Artificial Sequence
  Synthetic
guguugaggcagaggggcuu

SEQ ID NO: 677622 - RNA, 21 nt, Artificial Sequence
  Synthetic
gguguugaggcagaggggcuu

SEQ ID NO: 677623 - RNA, 22 nt, Artificial Sequence
  Synthetic
ugguguugaggcagaggggcuu

SEQ ID NO: 677624 - RNA, 23 nt, Artificial Sequence
  Synthetic
uugguguugaggcagaggggcuu

SEQ ID NO: 677625 - RNA, 24 nt, Artificial Sequence
  Synthetic
guugguguugaggcagaggggcuu

SEQ ID NO: 677626 - RNA, 18 nt, Artificial Sequence
  Synthetic
aaguucauggaggggcuu

SEQ ID NO: 677627 - RNA, 19 nt, Artificial Sequence
  Synthetic
caaguucauggaggggcuu

SEQ ID NO: 677628 - RNA, 20 nt, Artificial Sequence
  Synthetic
ccaaguucauggaggggcuu

SEQ ID NO: 677629 - RNA, 21 nt, Artificial Sequence
  Synthetic
accaaguucauggaggggcuu

SEQ ID NO: 677630 - RNA, 22 nt, Artificial Sequence
  Synthetic
uaccaaguucauggaggggcuu

SEQ ID NO: 677631 - RNA, 23 nt, Artificial Sequence
  Synthetic
uuaccaaguucauggaggggcuu

SEQ ID NO: 677632 - RNA, 24 nt, Artificial Sequence
  Synthetic
guuaccaaguucauggaggggcuu

SEQ ID NO: 677633 - RNA, 18 nt, Artificial Sequence
  Synthetic
auaagauuuuuggggcuu

SEQ ID NO: 677634 - RNA, 19 nt, Artificial Sequence
  Synthetic
aauaagauuuuuggggcuu

SEQ ID NO: 677635 - RNA, 20 nt, Artificial Sequence
  Synthetic
aaauaagauuuuuggggcuu

SEQ ID NO: 677636 - RNA, 21 nt, Artificial Sequence
  Synthetic
gaaauaagauuuuuggggcuu

SEQ ID NO: 677637 - RNA, 22 nt, Artificial Sequence
  Synthetic
ugaaauaagauuuuuggggcuu

SEQ ID NO: 677638 - RNA, 23 nt, Artificial Sequence
  Synthetic
cugaaauaagauuuuuggggcuu

SEQ ID NO: 677639 - RNA, 24 nt, Artificial Sequence
  Synthetic
gcugaaauaagauuuuuggggcuu

SEQ ID NO: 677640 - RNA, 18 nt, Artificial Sequence
  Synthetic
gaaugauacaaugggcuu

SEQ ID NO: 677641 - RNA, 19 nt, Artificial Sequence
  Synthetic
agaaugauacaaugggcuu

SEQ ID NO: 677642 - RNA, 20 nt, Artificial Sequence
  Synthetic
aagaaugauacaaugggcuu

SEQ ID NO: 677643 - RNA, 21 nt, Artificial Sequence
  Synthetic
uaagaaugauacaaugggcuu

SEQ ID NO: 677644 - RNA, 22 nt, Artificial Sequence
  Synthetic
auaagaaugauacaaugggcuu

SEQ ID NO: 677645 - RNA, 23 nt, Artificial Sequence
  Synthetic
cauaagaaugauacaaugggcuu

SEQ ID NO: 677646 - RNA, 24 nt, Artificial Sequence
  Synthetic
gcauaagaaugauacaaugggcuu

SEQ ID NO: 677647 - RNA, 18 nt, Artificial Sequence
  Synthetic
aagugcuuggcugggcuu

SEQ ID NO: 677648 - RNA, 19 nt, Artificial Sequence
  Synthetic
caagugcuuggcugggcuu

SEQ ID NO: 677649 - RNA, 20 nt, Artificial Sequence
  Synthetic
ccaagugcuuggcugggcuu

SEQ ID NO: 677650 - RNA, 21 nt, Artificial Sequence
  Synthetic
accaagugcuuggcugggcuu

SEQ ID NO: 677651 - RNA, 22 nt, Artificial Sequence
  Synthetic
caccaagugcuuggcugggcuu

SEQ ID NO: 677652 - RNA, 23 nt, Artificial Sequence
  Synthetic
acaccaagugcuuggcugggcuu

SEQ ID NO: 677653 - RNA, 24 nt, Artificial Sequence
  Synthetic
cacaccaagugcuuggcugggcuu

SEQ ID NO: 677654 - RNA, 18 nt, Artificial Sequence
  Synthetic
cacaguuccgcauggcuu

SEQ ID NO: 677655 - RNA, 19 nt, Artificial Sequence
  Synthetic
ucacaguuccgcauggcuu

SEQ ID NO: 677656 - RNA, 20 nt, Artificial Sequence
  Synthetic
cucacaguuccgcauggcuu

SEQ ID NO: 677657 - RNA, 21 nt, Artificial Sequence
  Synthetic
acucacaguuccgcauggcuu

SEQ ID NO: 677658 - RNA, 22 nt, Artificial Sequence
  Synthetic
gacucacaguuccgcauggcuu

SEQ ID NO: 677659 - RNA, 23 nt, Artificial Sequence
  Synthetic
agacucacaguuccgcauggcuu

SEQ ID NO: 677660 - RNA, 24 nt, Artificial Sequence
  Synthetic
uagacucacaguuccgcauggcuu

SEQ ID NO: 677661 - RNA, 18 nt, Artificial Sequence
  Synthetic
ccacaauuuuaguggcuu

SEQ ID NO: 677662 - RNA, 19 nt, Artificial Sequence
  Synthetic
cccacaauuuuaguggcuu

SEQ ID NO: 677663 - RNA, 20 nt, Artificial Sequence
  Synthetic
ucccacaauuuuaguggcuu

SEQ ID NO: 677664 - RNA, 21 nt, Artificial Sequence
  Synthetic
aucccacaauuuuaguggcuu

SEQ ID NO: 677665 - RNA, 22 nt, Artificial Sequence
  Synthetic
gaucccacaauuuuaguggcuu

SEQ ID NO: 677666 - RNA, 23 nt, Artificial Sequence
  Synthetic
agaucccacaauuuuaguggcuu

SEQ ID NO: 677667 - RNA, 24 nt, Artificial Sequence
  Synthetic
gagaucccacaauuuuaguggcuu

SEQ ID NO: 677668 - RNA, 18 nt, Artificial Sequence
  Synthetic
cuacaugcugauuggcuu

SEQ ID NO: 677669 - RNA, 19 nt, Artificial Sequence
  Synthetic
acuacaugcugauuggcuu

SEQ ID NO: 677670 - RNA, 20 nt, Artificial Sequence
  Synthetic
gacuacaugcugauuggcuu

SEQ ID NO: 677671 - RNA, 21 nt, Artificial Sequence
  Synthetic
ugacuacaugcugauuggcuu

SEQ ID NO: 677672 - RNA, 22 nt, Artificial Sequence
  Synthetic
cugacuacaugcugauuggcuu

SEQ ID NO: 677673 - RNA, 23 nt, Artificial Sequence
  Synthetic
acugacuacaugcugauuggcuu

SEQ ID NO: 677674 - RNA, 24 nt, Artificial Sequence
  Synthetic
cacugacuacaugcugauuggcuu

SEQ ID NO: 677675 - RNA, 18 nt, Artificial Sequence
  Synthetic
ccucuagacuauuggcuu

SEQ ID NO: 677676 - RNA, 19 nt, Artificial Sequence
  Synthetic
cccucuagacuauuggcuu

SEQ ID NO: 677677 - RNA, 20 nt, Artificial Sequence
  Synthetic
acccucuagacuauuggcuu

SEQ ID NO: 677678 - RNA, 21 nt, Artificial Sequence
  Synthetic
gacccucuagacuauuggcuu

SEQ ID NO: 677679 - RNA, 22 nt, Artificial Sequence
  Synthetic
ugacccucuagacuauuggcuu

SEQ ID NO: 677680 - RNA, 23 nt, Artificial Sequence
  Synthetic
gugacccucuagacuauuggcuu

SEQ ID NO: 677681 - RNA, 24 nt, Artificial Sequence
  Synthetic
ugugacccucuagacuauuggcuu

SEQ ID NO: 677682 - RNA, 18 nt, Artificial Sequence
  Synthetic
auuaaaagguguuggcuu

SEQ ID NO: 677683 - RNA, 19 nt, Artificial Sequence
  Synthetic
aauuaaaagguguuggcuu

SEQ ID NO: 677684 - RNA, 20 nt, Artificial Sequence
  Synthetic
uaauuaaaagguguuggcuu

SEQ ID NO: 677685 - RNA, 21 nt, Artificial Sequence
  Synthetic
uuaauuaaaagguguuggcuu

SEQ ID NO: 677686 - RNA, 22 nt, Artificial Sequence
  Synthetic
guuaauuaaaagguguuggcuu

SEQ ID NO: 677687 - RNA, 23 nt, Artificial Sequence
  Synthetic
uguuaauuaaaagguguuggcuu

SEQ ID NO: 677688 - RNA, 24 nt, Artificial Sequence
  Synthetic
uuguuaauuaaaagguguuggcuu

SEQ ID NO: 677689 - RNA, 18 nt, Artificial Sequence
  Synthetic
agcacucuauuuuggcuu

SEQ ID NO: 677690 - RNA, 19 nt, Artificial Sequence
  Synthetic
aagcacucuauuuuggcuu

SEQ ID NO: 677691 - RNA, 20 nt, Artificial Sequence
  Synthetic
uaagcacucuauuuuggcuu

SEQ ID NO: 677692 - RNA, 21 nt, Artificial Sequence
  Synthetic
uuaagcacucuauuuuggcuu

SEQ ID NO: 677693 - RNA, 22 nt, Artificial Sequence
  Synthetic
auuaagcacucuauuuuggcuu

SEQ ID NO: 677694 - RNA, 23 nt, Artificial Sequence
  Synthetic
aauuaagcacucuauuuuggcuu

SEQ ID NO: 677695 - RNA, 24 nt, Artificial Sequence
  Synthetic
uaauuaagcacucuauuuuggcuu

SEQ ID NO: 677696 - RNA, 18 nt, Artificial Sequence
  Synthetic
ugcucccauaaaaugcuu

SEQ ID NO: 677697 - RNA, 19 nt, Artificial Sequence
  Synthetic
augcucccauaaaaugcuu

SEQ ID NO: 677698 - RNA, 20 nt, Artificial Sequence
  Synthetic
uaugcucccauaaaaugcuu

SEQ ID NO: 677699 - RNA, 21 nt, Artificial Sequence
  Synthetic
uuaugcucccauaaaaugcuu

SEQ ID NO: 677700 - RNA, 22 nt, Artificial Sequence
  Synthetic
uuuaugcucccauaaaaugcuu

SEQ ID NO: 677701 - RNA, 23 nt, Artificial Sequence
  Synthetic
uuuuaugcucccauaaaaugcuu

SEQ ID NO: 677702 - RNA, 24 nt, Artificial Sequence
  Synthetic
uuuuuaugcucccauaaaaugcuu

SEQ ID NO: 677703 - RNA, 18 nt, Artificial Sequence
  Synthetic
cauaaagaauaaaugcuu

SEQ ID NO: 677704 - RNA, 19 nt, Artificial Sequence
  Synthetic
acauaaagaauaaaugcuu

SEQ ID NO: 677705 - RNA, 20 nt, Artificial Sequence
  Synthetic
aacauaaagaauaaaugcuu

SEQ ID NO: 677706 - RNA, 21 nt, Artificial Sequence
  Synthetic
gaacauaaagaauaaaugcuu

SEQ ID NO: 677707 - RNA, 22 nt, Artificial Sequence
  Synthetic
ggaacauaaagaauaaaugcuu

SEQ ID NO: 677708 - RNA, 23 nt, Artificial Sequence
  Synthetic
uggaacauaaagaauaaaugcuu

SEQ ID NO: 677709 - RNA, 24 nt, Artificial Sequence
  Synthetic
uuggaacauaaagaauaaaugcuu

SEQ ID NO: 677710 - RNA, 18 nt, Artificial Sequence
  Synthetic
cugaggcauuaaaugcuu

SEQ ID NO: 677711 - RNA, 19 nt, Artificial Sequence
  Synthetic
acugaggcauuaaaugcuu

SEQ ID NO: 677712 - RNA, 20 nt, Artificial Sequence
  Synthetic
aacugaggcauuaaaugcuu

SEQ ID NO: 677713 - RNA, 21 nt, Artificial Sequence
  Synthetic
aaacugaggcauuaaaugcuu

SEQ ID NO: 677714 - RNA, 22 nt, Artificial Sequence
  Synthetic
aaaacugaggcauuaaaugcuu

SEQ ID NO: 677715 - RNA, 23 nt, Artificial Sequence
  Synthetic
uaaaacugaggcauuaaaugcuu

SEQ ID NO: 677716 - RNA, 24 nt, Artificial Sequence
  Synthetic
uuaaaacugaggcauuaaaugcuu

SEQ ID NO: 677717 - RNA, 18 nt, Artificial Sequence
  Synthetic
guacucauuuaaaugcuu

SEQ ID NO: 677718 - RNA, 19 nt, Artificial Sequence
  Synthetic
uguacucauuuaaaugcuu

SEQ ID NO: 677719 - RNA, 20 nt, Artificial Sequence
  Synthetic
uuguacucauuuaaaugcuu

SEQ ID NO: 677720 - RNA, 21 nt, Artificial Sequence
  Synthetic
cuuguacucauuuaaaugcuu

SEQ ID NO: 677721 - RNA, 22 nt, Artificial Sequence
  Synthetic
acuuguacucauuuaaaugcuu

SEQ ID NO: 677722 - RNA, 23 nt, Artificial Sequence
  Synthetic
aacuuguacucauuuaaaugcuu

SEQ ID NO: 677723 - RNA, 24 nt, Artificial Sequence
  Synthetic
uaacuuguacucauuuaaaugcuu

SEQ ID NO: 677724 - RNA, 18 nt, Artificial Sequence
  Synthetic
ccguuacugacaaugcuu

SEQ ID NO: 677725 - RNA, 19 nt, Artificial Sequence
  Synthetic
accguuacugacaaugcuu

SEQ ID NO: 677726 - RNA, 20 nt, Artificial Sequence
  Synthetic
caccguuacugacaaugcuu

SEQ ID NO: 677727 - RNA, 21 nt, Artificial Sequence
  Synthetic
ccaccguuacugacaaugcuu

SEQ ID NO: 677728 - RNA, 22 nt, Artificial Sequence
  Synthetic
uccaccguuacugacaaugcuu

SEQ ID NO: 677729 - RNA, 23 nt, Artificial Sequence
  Synthetic
cuccaccguuacugacaaugcuu

SEQ ID NO: 677730 - RNA, 24 nt, Artificial Sequence
  Synthetic
ucuccaccguuacugacaaugcuu

SEQ ID NO: 677731 - RNA, 18 nt, Artificial Sequence
  Synthetic
aaaaauuugagaaugcuu

SEQ ID NO: 677732 - RNA, 19 nt, Artificial Sequence
  Synthetic
gaaaaauuugagaaugcuu

SEQ ID NO: 677733 - RNA, 20 nt, Artificial Sequence
  Synthetic
agaaaaauuugagaaugcuu

SEQ ID NO: 677734 - RNA, 21 nt, Artificial Sequence
  Synthetic
cagaaaaauuugagaaugcuu

SEQ ID NO: 677735 - RNA, 22 nt, Artificial Sequence
  Synthetic
ucagaaaaauuugagaaugcuu

SEQ ID NO: 677736 - RNA, 23 nt, Artificial Sequence
  Synthetic
uucagaaaaauuugagaaugcuu

SEQ ID NO: 677737 - RNA, 24 nt, Artificial Sequence
  Synthetic
uuucagaaaaauuugagaaugcuu

SEQ ID NO: 677738 - RNA, 18 nt, Artificial Sequence
  Synthetic
aaauugaaaauaaugcuu

SEQ ID NO: 677739 - RNA, 19 nt, Artificial Sequence
  Synthetic
gaaauugaaaauaaugcuu

SEQ ID NO: 677740 - RNA, 20 nt, Artificial Sequence
  Synthetic
agaaauugaaaauaaugcuu

SEQ ID NO: 677741 - RNA, 21 nt, Artificial Sequence
  Synthetic
aagaaauugaaaauaaugcuu

SEQ ID NO: 677742 - RNA, 22 nt, Artificial Sequence
  Synthetic
gaagaaauugaaaauaaugcuu

SEQ ID NO: 677743 - RNA, 23 nt, Artificial Sequence
  Synthetic
ggaagaaauugaaaauaaugcuu

SEQ ID NO: 677744 - RNA, 24 nt, Artificial Sequence
  Synthetic
uggaagaaauugaaaauaaugcuu

SEQ ID NO: 677745 - RNA, 18 nt, Artificial Sequence
  Synthetic
uuguuuuaaauaaugcuu

SEQ ID NO: 677746 - RNA, 19 nt, Artificial Sequence
  Synthetic
uuuguuuuaaauaaugcuu

SEQ ID NO: 677747 - RNA, 20 nt, Artificial Sequence
  Synthetic
uuuuguuuuaaauaaugcuu

SEQ ID NO: 677748 - RNA, 21 nt, Artificial Sequence
  Synthetic
uuuuuguuuuaaauaaugcuu

SEQ ID NO: 677749 - RNA, 22 nt, Artificial Sequence
  Synthetic
uuuuuuguuuuaaauaaugcuu

SEQ ID NO: 677750 - RNA, 23 nt, Artificial Sequence
  Synthetic
uuuuuuuguuuuaaauaaugcuu

SEQ ID NO: 677751 - RNA, 24 nt, Artificial Sequence
  Synthetic
uuuuuuuuguuuuaaauaaugcuu

SEQ ID NO: 677752 - RNA, 18 nt, Artificial Sequence
  Synthetic
cuacugugaauaaugcuu

SEQ ID NO: 677753 - RNA, 19 nt, Artificial Sequence
  Synthetic
gcuacugugaauaaugcuu

SEQ ID NO: 677754 - RNA, 20 nt, Artificial Sequence
  Synthetic
ggcuacugugaauaaugcuu

SEQ ID NO: 677755 - RNA, 21 nt, Artificial Sequence
  Synthetic
uggcuacugugaauaaugcuu

SEQ ID NO: 677756 - RNA, 22 nt, Artificial Sequence
  Synthetic
uuggcuacugugaauaaugcuu

SEQ ID NO: 677757 - RNA, 23 nt, Artificial Sequence
  Synthetic
cuuggcuacugugaauaaugcuu

SEQ ID NO: 677758 - RNA, 24 nt, Artificial Sequence
  Synthetic
ucuuggcuacugugaauaaugcuu

SEQ ID NO: 677759 - RNA, 18 nt, Artificial Sequence
  Synthetic
acacaccaucuaaugcuu

SEQ ID NO: 677760 - RNA, 19 nt, Artificial Sequence
  Synthetic
cacacaccaucuaaugcuu

SEQ ID NO: 677761 - RNA, 20 nt, Artificial Sequence
  Synthetic
gcacacaccaucuaaugcuu

SEQ ID NO: 677762 - RNA, 21 nt, Artificial Sequence
  Synthetic
ugcacacaccaucuaaugcuu

SEQ ID NO: 677763 - RNA, 22 nt, Artificial Sequence
  Synthetic
gugcacacaccaucuaaugcuu

SEQ ID NO: 677764 - RNA, 23 nt, Artificial Sequence
  Synthetic
ugugcacacaccaucuaaugcuu

SEQ ID NO: 677765 - RNA, 24 nt, Artificial Sequence
  Synthetic
augugcacacaccaucuaaugcuu

SEQ ID NO: 677766 - RNA, 18 nt, Artificial Sequence
  Synthetic
aucaucaagguaaugcuu

SEQ ID NO: 677767 - RNA, 19 nt, Artificial Sequence
  Synthetic
uaucaucaagguaaugcuu

SEQ ID NO: 677768 - RNA, 20 nt, Artificial Sequence
  Synthetic
uuaucaucaagguaaugcuu

SEQ ID NO: 677769 - RNA, 21 nt, Artificial Sequence
  Synthetic
auuaucaucaagguaaugcuu

SEQ ID NO: 677770 - RNA, 22 nt, Artificial Sequence
  Synthetic
uauuaucaucaagguaaugcuu

SEQ ID NO: 677771 - RNA, 23 nt, Artificial Sequence
  Synthetic
guauuaucaucaagguaaugcuu

SEQ ID NO: 677772 - RNA, 24 nt, Artificial Sequence
  Synthetic
uguauuaucaucaagguaaugcuu

SEQ ID NO: 677773 - RNA, 18 nt, Artificial Sequence
  Synthetic
caaggccugguaaugcuu

SEQ ID NO: 677774 - RNA, 19 nt, Artificial Sequence
  Synthetic
gcaaggccugguaaugcuu

SEQ ID NO: 677775 - RNA, 20 nt, Artificial Sequence
  Synthetic
ggcaaggccugguaaugcuu

SEQ ID NO: 677776 - RNA, 21 nt, Artificial Sequence
  Synthetic
aggcaaggccugguaaugcuu

SEQ ID NO: 677777 - RNA, 22 nt, Artificial Sequence
  Synthetic
gaggcaaggccugguaaugcuu

SEQ ID NO: 677778 - RNA, 23 nt, Artificial Sequence
  Synthetic
agaggcaaggccugguaaugcuu

SEQ ID NO: 677779 - RNA, 24 nt, Artificial Sequence
  Synthetic
uagaggcaaggccugguaaugcuu

SEQ ID NO: 677780 - RNA, 18 nt, Artificial Sequence
  Synthetic
ccuacuugcuuaaugcuu

SEQ ID NO: 677781 - RNA, 19 nt, Artificial Sequence
  Synthetic
accuacuugcuuaaugcuu

SEQ ID NO: 677782 - RNA, 20 nt, Artificial Sequence
  Synthetic
uaccuacuugcuuaaugcuu

SEQ ID NO: 677783 - RNA, 21 nt, Artificial Sequence
  Synthetic
uuaccuacuugcuuaaugcuu

SEQ ID NO: 677784 - RNA, 22 nt, Artificial Sequence
  Synthetic
uuuaccuacuugcuuaaugcuu

SEQ ID NO: 677785 - RNA, 23 nt, Artificial Sequence
  Synthetic
guuuaccuacuugcuuaaugcuu

SEQ ID NO: 677786 - RNA, 24 nt, Artificial Sequence
  Synthetic
uguuuaccuacuugcuuaaugcuu

SEQ ID NO: 677787 - RNA, 18 nt, Artificial Sequence
  Synthetic
aaacaaugucacaugcuu

SEQ ID NO: 677788 - RNA, 19 nt, Artificial Sequence
  Synthetic
uaaacaaugucacaugcuu

SEQ ID NO: 677789 - RNA, 20 nt, Artificial Sequence
  Synthetic
auaaacaaugucacaugcuu

SEQ ID NO: 677790 - RNA, 21 nt, Artificial Sequence
  Synthetic
cauaaacaaugucacaugcuu

SEQ ID NO: 677791 - RNA, 22 nt, Artificial Sequence
  Synthetic
acauaaacaaugucacaugcuu

SEQ ID NO: 677792 - RNA, 23 nt, Artificial Sequence
  Synthetic
cacauaaacaaugucacaugcuu

SEQ ID NO: 677793 - RNA, 24 nt, Artificial Sequence
  Synthetic
ucacauaaacaaugucacaugcuu

SEQ ID NO: 677794 - RNA, 18 nt, Artificial Sequence
  Synthetic
aaacgggaggccaugcuu

SEQ ID NO: 677795 - RNA, 19 nt, Artificial Sequence
  Synthetic
aaaacgggaggccaugcuu

SEQ ID NO: 677796 - RNA, 20 nt, Artificial Sequence
  Synthetic
aaaaacgggaggccaugcuu

SEQ ID NO: 677797 - RNA, 21 nt, Artificial Sequence
  Synthetic
aaaaaacgggaggccaugcuu

SEQ ID NO: 677798 - RNA, 22 nt, Artificial Sequence
  Synthetic
caaaaaacgggaggccaugcuu

SEQ ID NO: 677799 - RNA, 23 nt, Artificial Sequence
  Synthetic
acaaaaaacgggaggccaugcuu

SEQ ID NO: 677800 - RNA, 24 nt, Artificial Sequence
  Synthetic
aacaaaaaacgggaggccaugcuu

SEQ ID NO: 677801 - RNA, 18 nt, Artificial Sequence
  Synthetic
gaaaaacauuccaugcuu

SEQ ID NO: 677802 - RNA, 19 nt, Artificial Sequence
  Synthetic
ggaaaaacauuccaugcuu

SEQ ID NO: 677803 - RNA, 20 nt, Artificial Sequence
  Synthetic
uggaaaaacauuccaugcuu

SEQ ID NO: 677804 - RNA, 21 nt, Artificial Sequence
  Synthetic
auggaaaaacauuccaugcuu

SEQ ID NO: 677805 - RNA, 22 nt, Artificial Sequence
  Synthetic
aauggaaaaacauuccaugcuu

SEQ ID NO: 677806 - RNA, 23 nt, Artificial Sequence
  Synthetic
aaauggaaaaacauuccaugcuu

SEQ ID NO: 677807 - RNA, 24 nt, Artificial Sequence
  Synthetic
caaauggaaaaacauuccaugcuu

SEQ ID NO: 677808 - RNA, 18 nt, Artificial Sequence
  Synthetic
aauaucaugagcaugcuu

SEQ ID NO: 677809 - RNA, 19 nt, Artificial Sequence
  Synthetic
caauaucaugagcaugcuu

SEQ ID NO: 677810 - RNA, 20 nt, Artificial Sequence
  Synthetic
acaauaucaugagcaugcuu

SEQ ID NO: 677811 - RNA, 21 nt, Artificial Sequence
  Synthetic
uacaauaucaugagcaugcuu

SEQ ID NO: 677812 - RNA, 22 nt, Artificial Sequence
  Synthetic
uuacaauaucaugagcaugcuu

SEQ ID NO: 677813 - RNA, 23 nt, Artificial Sequence
  Synthetic
uuuacaauaucaugagcaugcuu

SEQ ID NO: 677814 - RNA, 24 nt, Artificial Sequence
  Synthetic
guuuacaauaucaugagcaugcuu

SEQ ID NO: 677815 - RNA, 18 nt, Artificial Sequence
  Synthetic
guuugaaaauucaugcuu

SEQ ID NO: 677816 - RNA, 19 nt, Artificial Sequence
  Synthetic
uguuugaaaauucaugcuu

SEQ ID NO: 677817 - RNA, 20 nt, Artificial Sequence
  Synthetic
guguuugaaaauucaugcuu

SEQ ID NO: 677818 - RNA, 21 nt, Artificial Sequence
  Synthetic
uguguuugaaaauucaugcuu

SEQ ID NO: 677819 - RNA, 22 nt, Artificial Sequence
  Synthetic
guguguuugaaaauucaugcuu

SEQ ID NO: 677820 - RNA, 23 nt, Artificial Sequence
  Synthetic
gguguguuugaaaauucaugcuu

SEQ ID NO: 677821 - RNA, 24 nt, Artificial Sequence
  Synthetic
agguguguuugaaaauucaugcuu

SEQ ID NO: 677822 - RNA, 18 nt, Artificial Sequence
  Synthetic
auucauaaauucaugcuu

SEQ ID NO: 677823 - RNA, 19 nt, Artificial Sequence
  Synthetic
cauucauaaauucaugcuu

SEQ ID NO: 677824 - RNA, 20 nt, Artificial Sequence
  Synthetic
acauucauaaauucaugcuu

SEQ ID NO: 677825 - RNA, 21 nt, Artificial Sequence
  Synthetic
cacauucauaaauucaugcuu

SEQ ID NO: 677826 - RNA, 22 nt, Artificial Sequence
  Synthetic
acacauucauaaauucaugcuu

SEQ ID NO: 677827 - RNA, 23 nt, Artificial Sequence
  Synthetic
aacacauucauaaauucaugcuu

SEQ ID NO: 677828 - RNA, 24 nt, Artificial Sequence
  Synthetic
aaacacauucauaaauucaugcuu

SEQ ID NO: 677829 - RNA, 18 nt, Artificial Sequence
  Synthetic
aucuaaaaucagaugcuu

SEQ ID NO: 677830 - RNA, 19 nt, Artificial Sequence
  Synthetic
uaucuaaaaucagaugcuu

SEQ ID NO: 677831 - RNA, 20 nt, Artificial Sequence
  Synthetic
cuaucuaaaaucagaugcuu

SEQ ID NO: 677832 - RNA, 21 nt, Artificial Sequence
  Synthetic
gcuaucuaaaaucagaugcuu

SEQ ID NO: 677833 - RNA, 22 nt, Artificial Sequence
  Synthetic
cgcuaucuaaaaucagaugcuu

SEQ ID NO: 677834 - RNA, 23 nt, Artificial Sequence
  Synthetic
gcgcuaucuaaaaucagaugcuu

SEQ ID NO: 677835 - RNA, 24 nt, Artificial Sequence
  Synthetic
agcgcuaucuaaaaucagaugcuu

SEQ ID NO: 677836 - RNA, 18 nt, Artificial Sequence
  Synthetic
agucuuuccuggaugcuu

SEQ ID NO: 677837 - RNA, 19 nt, Artificial Sequence
  Synthetic
cagucuuuccuggaugcuu

SEQ ID NO: 677838 - RNA, 20 nt, Artificial Sequence
  Synthetic
gcagucuuuccuggaugcuu

SEQ ID NO: 677839 - RNA, 21 nt, Artificial Sequence
  Synthetic
agcagucuuuccuggaugcuu

SEQ ID NO: 677840 - RNA, 22 nt, Artificial Sequence
  Synthetic
gagcagucuuuccuggaugcuu

SEQ ID NO: 677841 - RNA, 23 nt, Artificial Sequence
  Synthetic
agagcagucuuuccuggaugcuu

SEQ ID NO: 677842 - RNA, 24 nt, Artificial Sequence
  Synthetic
cagagcagucuuuccuggaugcuu

SEQ ID NO: 677843 - RNA, 18 nt, Artificial Sequence
  Synthetic
caaguuuccuugaugcuu

SEQ ID NO: 677844 - RNA, 19 nt, Artificial Sequence
  Synthetic
ccaaguuuccuugaugcuu

SEQ ID NO: 677845 - RNA, 20 nt, Artificial Sequence
  Synthetic
uccaaguuuccuugaugcuu

SEQ ID NO: 677846 - RNA, 21 nt, Artificial Sequence
  Synthetic
cuccaaguuuccuugaugcuu

SEQ ID NO: 677847 - RNA, 22 nt, Artificial Sequence
  Synthetic
acuccaaguuuccuugaugcuu

SEQ ID NO: 677848 - RNA, 23 nt, Artificial Sequence
  Synthetic
cacuccaaguuuccuugaugcuu

SEQ ID NO: 677849 - RNA, 24 nt, Artificial Sequence
  Synthetic
ucacuccaaguuuccuugaugcuu

SEQ ID NO: 677850 - RNA, 18 nt, Artificial Sequence
  Synthetic
caggauccuaauaugcuu

SEQ ID NO: 677851 - RNA, 19 nt, Artificial Sequence
  Synthetic
acaggauccuaauaugcuu

SEQ ID NO: 677852 - RNA, 20 nt, Artificial Sequence
  Synthetic
aacaggauccuaauaugcuu

SEQ ID NO: 677853 - RNA, 21 nt, Artificial Sequence
  Synthetic
aaacaggauccuaauaugcuu

SEQ ID NO: 677854 - RNA, 22 nt, Artificial Sequence
  Synthetic
aaaacaggauccuaauaugcuu

SEQ ID NO: 677855 - RNA, 23 nt, Artificial Sequence
  Synthetic
uaaaacaggauccuaauaugcuu

SEQ ID NO: 677856 - RNA, 24 nt, Artificial Sequence
  Synthetic
guaaaacaggauccuaauaugcuu

SEQ ID NO: 677857 - RNA, 18 nt, Artificial Sequence
  Synthetic
auauuuauauguaugcuu

SEQ ID NO: 677858 - RNA, 19 nt, Artificial Sequence
  Synthetic
aauauuuauauguaugcuu

SEQ ID NO: 677859 - RNA, 20 nt, Artificial Sequence
  Synthetic
aaauauuuauauguaugcuu

SEQ ID NO: 677860 - RNA, 21 nt, Artificial Sequence
  Synthetic
caaauauuuauauguaugcuu

SEQ ID NO: 677861 - RNA, 22 nt, Artificial Sequence
  Synthetic
ccaaauauuuauauguaugcuu

SEQ ID NO: 677862 - RNA, 23 nt, Artificial Sequence
  Synthetic
uccaaauauuuauauguaugcuu

SEQ ID NO: 677863 - RNA, 24 nt, Artificial Sequence
  Synthetic
uuccaaauauuuauauguaugcuu

SEQ ID NO: 677864 - RNA, 18 nt, Artificial Sequence
  Synthetic
auaauugaccuuaugcuu

SEQ ID NO: 677865 - RNA, 19 nt, Artificial Sequence
  Synthetic
aauaauugaccuuaugcuu

SEQ ID NO: 677866 - RNA, 20 nt, Artificial Sequence
  Synthetic
uaauaauugaccuuaugcuu

SEQ ID NO: 677867 - RNA, 21 nt, Artificial Sequence
  Synthetic
guaauaauugaccuuaugcuu

SEQ ID NO: 677868 - RNA, 22 nt, Artificial Sequence
  Synthetic
aguaauaauugaccuuaugcuu

SEQ ID NO: 677869 - RNA, 23 nt, Artificial Sequence
  Synthetic
gaguaauaauugaccuuaugcuu

SEQ ID NO: 677870 - RNA, 24 nt, Artificial Sequence
  Synthetic
agaguaauaauugaccuuaugcuu

SEQ ID NO: 677871 - RNA, 18 nt, Artificial Sequence
  Synthetic
gaacagaucaaacugcuu

SEQ ID NO: 677872 - RNA, 19 nt, Artificial Sequence
  Synthetic
agaacagaucaaacugcuu

SEQ ID NO: 677873 - RNA, 20 nt, Artificial Sequence
  Synthetic
uagaacagaucaaacugcuu

SEQ ID NO: 677874 - RNA, 21 nt, Artificial Sequence
  Synthetic
uuagaacagaucaaacugcuu

SEQ ID NO: 677875 - RNA, 22 nt, Artificial Sequence
  Synthetic
uuuagaacagaucaaacugcuu

SEQ ID NO: 677876 - RNA, 23 nt, Artificial Sequence
  Synthetic
uuuuagaacagaucaaacugcuu

SEQ ID NO: 677877 - RNA, 24 nt, Artificial Sequence
  Synthetic
auuuuagaacagaucaaacugcuu

SEQ ID NO: 677878 - RNA, 18 nt, Artificial Sequence
  Synthetic
cauaauuuccaacugcuu

SEQ ID NO: 677879 - RNA, 19 nt, Artificial Sequence
  Synthetic
gcauaauuuccaacugcuu

SEQ ID NO: 677880 - RNA, 20 nt, Artificial Sequence
  Synthetic
agcauaauuuccaacugcuu

SEQ ID NO: 677881 - RNA, 21 nt, Artificial Sequence
  Synthetic
cagcauaauuuccaacugcuu

SEQ ID NO: 677882 - RNA, 22 nt, Artificial Sequence
  Synthetic
ucagcauaauuuccaacugcuu

SEQ ID NO: 677883 - RNA, 23 nt, Artificial Sequence
  Synthetic
cucagcauaauuuccaacugcuu

SEQ ID NO: 677884 - RNA, 24 nt, Artificial Sequence
  Synthetic
ucucagcauaauuuccaacugcuu

SEQ ID NO: 677885 - RNA, 18 nt, Artificial Sequence
  Synthetic
gagagaguagaacugcuu

SEQ ID NO: 677886 - RNA, 19 nt, Artificial Sequence
  Synthetic
ggagagaguagaacugcuu

SEQ ID NO: 677887 - RNA, 20 nt, Artificial Sequence
  Synthetic
aggagagaguagaacugcuu

SEQ ID NO: 677888 - RNA, 21 nt, Artificial Sequence
  Synthetic
uaggagagaguagaacugcuu

SEQ ID NO: 677889 - RNA, 22 nt, Artificial Sequence
  Synthetic
cuaggagagaguagaacugcuu

SEQ ID NO: 677890 - RNA, 23 nt, Artificial Sequence
  Synthetic
ucuaggagagaguagaacugcuu

SEQ ID NO: 677891 - RNA, 24 nt, Artificial Sequence
  Synthetic
aucuaggagagaguagaacugcuu

SEQ ID NO: 677892 - RNA, 18 nt, Artificial Sequence
  Synthetic
acuauuccugcacugcuu

SEQ ID NO: 677893 - RNA, 19 nt, Artificial Sequence
  Synthetic
uacuauuccugcacugcuu

SEQ ID NO: 677894 - RNA, 20 nt, Artificial Sequence
  Synthetic
guacuauuccugcacugcuu

SEQ ID NO: 677895 - RNA, 21 nt, Artificial Sequence
  Synthetic
uguacuauuccugcacugcuu

SEQ ID NO: 677896 - RNA, 22 nt, Artificial Sequence
  Synthetic
guguacuauuccugcacugcuu

SEQ ID NO: 677897 - RNA, 23 nt, Artificial Sequence
  Synthetic
gguguacuauuccugcacugcuu

SEQ ID NO: 677898 - RNA, 24 nt, Artificial Sequence
  Synthetic
ggguguacuauuccugcacugcuu

SEQ ID NO: 677899 - RNA, 18 nt, Artificial Sequence
  Synthetic
gaugaaaagcaccugcuu

SEQ ID NO: 677900 - RNA, 19 nt, Artificial Sequence
  Synthetic
ggaugaaaagcaccugcuu

SEQ ID NO: 677901 - RNA, 20 nt, Artificial Sequence
  Synthetic
aggaugaaaagcaccugcuu

SEQ ID NO: 677902 - RNA, 21 nt, Artificial Sequence
  Synthetic
gaggaugaaaagcaccugcuu

SEQ ID NO: 677903 - RNA, 22 nt, Artificial Sequence
  Synthetic
agaggaugaaaagcaccugcuu

SEQ ID NO: 677904 - RNA, 23 nt, Artificial Sequence
  Synthetic
aagaggaugaaaagcaccugcuu

SEQ ID NO: 677905 - RNA, 24 nt, Artificial Sequence
  Synthetic
aaagaggaugaaaagcaccugcuu

SEQ ID NO: 677906 - RNA, 18 nt, Artificial Sequence
  Synthetic
ucccuuaagugccugcuu

SEQ ID NO: 677907 - RNA, 19 nt, Artificial Sequence
  Synthetic
uucccuuaagugccugcuu

SEQ ID NO: 677908 - RNA, 20 nt, Artificial Sequence
  Synthetic
cuucccuuaagugccugcuu

SEQ ID NO: 677909 - RNA, 21 nt, Artificial Sequence
  Synthetic
ccuucccuuaagugccugcuu

SEQ ID NO: 677910 - RNA, 22 nt, Artificial Sequence
  Synthetic
gccuucccuuaagugccugcuu

SEQ ID NO: 677911 - RNA, 23 nt, Artificial Sequence
  Synthetic
agccuucccuuaagugccugcuu

SEQ ID NO: 677912 - RNA, 24 nt, Artificial Sequence
  Synthetic
uagccuucccuuaagugccugcuu

SEQ ID NO: 677913 - RNA, 18 nt, Artificial Sequence
  Synthetic
ggcuucugacuccugcuu

SEQ ID NO: 677914 - RNA, 19 nt, Artificial Sequence
  Synthetic
aggcuucugacuccugcuu

SEQ ID NO: 677915 - RNA, 20 nt, Artificial Sequence
  Synthetic
aaggcuucugacuccugcuu

SEQ ID NO: 677916 - RNA, 21 nt, Artificial Sequence
  Synthetic
aaaggcuucugacuccugcuu

SEQ ID NO: 677917 - RNA, 22 nt, Artificial Sequence
  Synthetic
aaaaggcuucugacuccugcuu

SEQ ID NO: 677918 - RNA, 23 nt, Artificial Sequence
  Synthetic
aaaaaggcuucugacuccugcuu

SEQ ID NO: 677919 - RNA, 24 nt, Artificial Sequence
  Synthetic
aaaaaaggcuucugacuccugcuu

SEQ ID NO: 677920 - RNA, 18 nt, Artificial Sequence
  Synthetic
ccaagaauauuccugcuu

SEQ ID NO: 677921 - RNA, 19 nt, Artificial Sequence
  Synthetic
gccaagaauauuccugcuu

SEQ ID NO: 677922 - RNA, 20 nt, Artificial Sequence
  Synthetic
ugccaagaauauuccugcuu

SEQ ID NO: 677923 - RNA, 21 nt, Artificial Sequence
  Synthetic
augccaagaauauuccugcuu

SEQ ID NO: 677924 - RNA, 22 nt, Artificial Sequence
  Synthetic
caugccaagaauauuccugcuu

SEQ ID NO: 677925 - RNA, 23 nt, Artificial Sequence
  Synthetic
acaugccaagaauauuccugcuu

SEQ ID NO: 677926 - RNA, 24 nt, Artificial Sequence
  Synthetic
aacaugccaagaauauuccugcuu

SEQ ID NO: 677927 - RNA, 18 nt, Artificial Sequence
  Synthetic
aggcaccaguuccugcuu

SEQ ID NO: 677928 - RNA, 19 nt, Artificial Sequence
  Synthetic
gaggcaccaguuccugcuu

SEQ ID NO: 677929 - RNA, 20 nt, Artificial Sequence
  Synthetic
ugaggcaccaguuccugcuu

SEQ ID NO: 677930 - RNA, 21 nt, Artificial Sequence
  Synthetic
uugaggcaccaguuccugcuu

SEQ ID NO: 677931 - RNA, 22 nt, Artificial Sequence
  Synthetic
auugaggcaccaguuccugcuu

SEQ ID NO: 677932 - RNA, 23 nt, Artificial Sequence
  Synthetic
aauugaggcaccaguuccugcuu

SEQ ID NO: 677933 - RNA, 24 nt, Artificial Sequence
  Synthetic
uaauugaggcaccaguuccugcuu

SEQ ID NO: 677934 - RNA, 18 nt, Artificial Sequence
  Synthetic
cucuaaucccagcugcuu

SEQ ID NO: 677935 - RNA, 19 nt, Artificial Sequence
  Synthetic
ccucuaaucccagcugcuu

SEQ ID NO: 677936 - RNA, 20 nt, Artificial Sequence
  Synthetic
gccucuaaucccagcugcuu

SEQ ID NO: 677937 - RNA, 21 nt, Artificial Sequence
  Synthetic
cgccucuaaucccagcugcuu

SEQ ID NO: 677938 - RNA, 22 nt, Artificial Sequence
  Synthetic
gcgccucuaaucccagcugcuu

SEQ ID NO: 677939 - RNA, 23 nt, Artificial Sequence
  Synthetic
ggcgccucuaaucccagcugcuu

SEQ ID NO: 677940 - RNA, 24 nt, Artificial Sequence
  Synthetic
gggcgccucuaaucccagcugcuu

SEQ ID NO: 677941 - RNA, 18 nt, Artificial Sequence
  Synthetic
uaaucuaugacgcugcuu

SEQ ID NO: 677942 - RNA, 19 nt, Artificial Sequence
  Synthetic
cuaaucuaugacgcugcuu

SEQ ID NO: 677943 - RNA, 20 nt, Artificial Sequence
  Synthetic
gcuaaucuaugacgcugcuu

SEQ ID NO: 677944 - RNA, 21 nt, Artificial Sequence
  Synthetic
ugcuaaucuaugacgcugcuu

SEQ ID NO: 677945 - RNA, 22 nt, Artificial Sequence
  Synthetic
cugcuaaucuaugacgcugcuu

SEQ ID NO: 677946 - RNA, 23 nt, Artificial Sequence
  Synthetic
ucugcuaaucuaugacgcugcuu

SEQ ID NO: 677947 - RNA, 24 nt, Artificial Sequence
  Synthetic
uucugcuaaucuaugacgcugcuu

SEQ ID NO: 677948 - RNA, 18 nt, Artificial Sequence
  Synthetic
gaagcaggagugcugcuu

SEQ ID NO: 677949 - RNA, 19 nt, Artificial Sequence
  Synthetic
ugaagcaggagugcugcuu

SEQ ID NO: 677950 - RNA, 20 nt, Artificial Sequence
  Synthetic
gugaagcaggagugcugcuu

SEQ ID NO: 677951 - RNA, 21 nt, Artificial Sequence
  Synthetic
ugugaagcaggagugcugcuu

SEQ ID NO: 677952 - RNA, 22 nt, Artificial Sequence
  Synthetic
augugaagcaggagugcugcuu

SEQ ID NO: 677953 - RNA, 23 nt, Artificial Sequence
  Synthetic
aaugugaagcaggagugcugcuu

SEQ ID NO: 677954 - RNA, 24 nt, Artificial Sequence
  Synthetic
aaaugugaagcaggagugcugcuu

SEQ ID NO: 677955 - RNA, 18 nt, Artificial Sequence
  Synthetic
aaacaaucugaucugcuu

SEQ ID NO: 677956 - RNA, 19 nt, Artificial Sequence
  Synthetic
aaaacaaucugaucugcuu

SEQ ID NO: 677957 - RNA, 20 nt, Artificial Sequence
  Synthetic
aaaaacaaucugaucugcuu

SEQ ID NO: 677958 - RNA, 21 nt, Artificial Sequence
  Synthetic
caaaaacaaucugaucugcuu

SEQ ID NO: 677959 - RNA, 22 nt, Artificial Sequence
  Synthetic
ccaaaaacaaucugaucugcuu

SEQ ID NO: 677960 - RNA, 23 nt, Artificial Sequence
  Synthetic
uccaaaaacaaucugaucugcuu

SEQ ID NO: 677961 - RNA, 24 nt, Artificial Sequence
  Synthetic
cuccaaaaacaaucugaucugcuu

SEQ ID NO: 677962 - RNA, 18 nt, Artificial Sequence
  Synthetic
cacaugugaccucugcuu

SEQ ID NO: 677963 - RNA, 19 nt, Artificial Sequence
  Synthetic
ccacaugugaccucugcuu

SEQ ID NO: 677964 - RNA, 20 nt, Artificial Sequence
  Synthetic
uccacaugugaccucugcuu

SEQ ID NO: 677965 - RNA, 21 nt, Artificial Sequence
  Synthetic
cuccacaugugaccucugcuu

SEQ ID NO: 677966 - RNA, 22 nt, Artificial Sequence
  Synthetic
ucuccacaugugaccucugcuu

SEQ ID NO: 677967 - RNA, 23 nt, Artificial Sequence
  Synthetic
uucuccacaugugaccucugcuu

SEQ ID NO: 677968 - RNA, 24 nt, Artificial Sequence
  Synthetic
cuucuccacaugugaccucugcuu

SEQ ID NO: 677969 - RNA, 18 nt, Artificial Sequence
  Synthetic
uauaugauaucucugcuu

SEQ ID NO: 677970 - RNA, 19 nt, Artificial Sequence
  Synthetic
auauaugauaucucugcuu

SEQ ID NO: 677971 - RNA, 20 nt, Artificial Sequence
  Synthetic
aauauaugauaucucugcuu

SEQ ID NO: 677972 - RNA, 21 nt, Artificial Sequence
  Synthetic
gaauauaugauaucucugcuu

SEQ ID NO: 677973 - RNA, 22 nt, Artificial Sequence
  Synthetic
ugaauauaugauaucucugcuu

SEQ ID NO: 677974 - RNA, 23 nt, Artificial Sequence
  Synthetic
uugaauauaugauaucucugcuu

SEQ ID NO: 677975 - RNA, 24 nt, Artificial Sequence
  Synthetic
uuugaauauaugauaucucugcuu

SEQ ID NO: 677976 - RNA, 18 nt, Artificial Sequence
  Synthetic
auguacaucguucugcuu

SEQ ID NO: 677977 - RNA, 19 nt, Artificial Sequence
  Synthetic
uauguacaucguucugcuu

SEQ ID NO: 677978 - RNA, 20 nt, Artificial Sequence
  Synthetic
cuauguacaucguucugcuu

SEQ ID NO: 677979 - RNA, 21 nt, Artificial Sequence
  Synthetic
ccuauguacaucguucugcuu

SEQ ID NO: 677980 - RNA, 22 nt, Artificial Sequence
  Synthetic
cccuauguacaucguucugcuu

SEQ ID NO: 677981 - RNA, 23 nt, Artificial Sequence
  Synthetic
acccuauguacaucguucugcuu

SEQ ID NO: 677982 - RNA, 24 nt, Artificial Sequence
  Synthetic
uacccuauguacaucguucugcuu

SEQ ID NO: 677983 - RNA, 18 nt, Artificial Sequence
  Synthetic
caaaguggaaaagugcuu

SEQ ID NO: 677984 - RNA, 19 nt, Artificial Sequence
  Synthetic
acaaaguggaaaagugcuu

SEQ ID NO: 677985 - RNA, 20 nt, Artificial Sequence
  Synthetic
aacaaaguggaaaagugcuu

SEQ ID NO: 677986 - RNA, 21 nt, Artificial Sequence
  Synthetic
uaacaaaguggaaaagugcuu

SEQ ID NO: 677987 - RNA, 22 nt, Artificial Sequence
  Synthetic
auaacaaaguggaaaagugcuu

SEQ ID NO: 677988 - RNA, 23 nt, Artificial Sequence
  Synthetic
aauaacaaaguggaaaagugcuu

SEQ ID NO: 677989 - RNA, 24 nt, Artificial Sequence
  Synthetic
aaauaacaaaguggaaaagugcuu

SEQ ID NO: 677990 - RNA, 18 nt, Artificial Sequence
  Synthetic
ucuggaauuccagugcuu

SEQ ID NO: 677991 - RNA, 19 nt, Artificial Sequence
  Synthetic
gucuggaauuccagugcuu

SEQ ID NO: 677992 - RNA, 20 nt, Artificial Sequence
  Synthetic
cgucuggaauuccagugcuu

SEQ ID NO: 677993 - RNA, 21 nt, Artificial Sequence
  Synthetic
acgucuggaauuccagugcuu

SEQ ID NO: 677994 - RNA, 22 nt, Artificial Sequence
  Synthetic
cacgucuggaauuccagugcuu

SEQ ID NO: 677995 - RNA, 23 nt, Artificial Sequence
  Synthetic
ucacgucuggaauuccagugcuu

SEQ ID NO: 677996 - RNA, 24 nt, Artificial Sequence
  Synthetic
cucacgucuggaauuccagugcuu

SEQ ID NO: 677997 - RNA, 18 nt, Artificial Sequence
  Synthetic
auuucuggggcagugcuu

SEQ ID NO: 677998 - RNA, 19 nt, Artificial Sequence
  Synthetic
uauuucuggggcagugcuu

SEQ ID NO: 677999 - RNA, 20 nt, Artificial Sequence
  Synthetic
uuauuucuggggcagugcuu

SEQ ID NO: 678000 - RNA, 21 nt, Artificial Sequence
  Synthetic
guuauuucuggggcagugcuu

SEQ ID NO: 678001 - RNA, 22 nt, Artificial Sequence
  Synthetic
aguuauuucuggggcagugcuu

SEQ ID NO: 678002 - RNA, 23 nt, Artificial Sequence
  Synthetic
aaguuauuucuggggcagugcuu

SEQ ID NO: 678003 - RNA, 24 nt, Artificial Sequence
  Synthetic
gaaguuauuucuggggcagugcuu

SEQ ID NO: 678004 - RNA, 18 nt, Artificial Sequence
  Synthetic
ccuguaauccuagugcuu

SEQ ID NO: 678005 - RNA, 19 nt, Artificial Sequence
  Synthetic
gccuguaauccuagugcuu

SEQ ID NO: 678006 - RNA, 20 nt, Artificial Sequence
  Synthetic
ugccuguaauccuagugcuu

SEQ ID NO: 678007 - RNA, 21 nt, Artificial Sequence
  Synthetic
augccuguaauccuagugcuu

SEQ ID NO: 678008 - RNA, 22 nt, Artificial Sequence
  Synthetic
caugccuguaauccuagugcuu

SEQ ID NO: 678009 - RNA, 23 nt, Artificial Sequence
  Synthetic
ucaugccuguaauccuagugcuu

SEQ ID NO: 678010 - RNA, 24 nt, Artificial Sequence
  Synthetic
cucaugccuguaauccuagugcuu

SEQ ID NO: 678011 - RNA, 18 nt, Artificial Sequence
  Synthetic
cuguauagcguagugcuu

SEQ ID NO: 678012 - RNA, 19 nt, Artificial Sequence
  Synthetic
acuguauagcguagugcuu

SEQ ID NO: 678013 - RNA, 20 nt, Artificial Sequence
  Synthetic
aacuguauagcguagugcuu

SEQ ID NO: 678014 - RNA, 21 nt, Artificial Sequence
  Synthetic
aaacuguauagcguagugcuu

SEQ ID NO: 678015 - RNA, 22 nt, Artificial Sequence
  Synthetic
gaaacuguauagcguagugcuu

SEQ ID NO: 678016 - RNA, 23 nt, Artificial Sequence
  Synthetic
agaaacuguauagcguagugcuu

SEQ ID NO: 678017 - RNA, 24 nt, Artificial Sequence
  Synthetic
aagaaacuguauagcguagugcuu

SEQ ID NO: 678018 - RNA, 18 nt, Artificial Sequence
  Synthetic
agagaaauuaaggugcuu

SEQ ID NO: 678019 - RNA, 19 nt, Artificial Sequence
  Synthetic
aagagaaauuaaggugcuu

SEQ ID NO: 678020 - RNA, 20 nt, Artificial Sequence
  Synthetic
aaagagaaauuaaggugcuu

SEQ ID NO: 678021 - RNA, 21 nt, Artificial Sequence
  Synthetic
aaaagagaaauuaaggugcuu

SEQ ID NO: 678022 - RNA, 22 nt, Artificial Sequence
  Synthetic
uaaaagagaaauuaaggugcuu

SEQ ID NO: 678023 - RNA, 23 nt, Artificial Sequence
  Synthetic
guaaaagagaaauuaaggugcuu

SEQ ID NO: 678024 - RNA, 24 nt, Artificial Sequence
  Synthetic
aguaaaagagaaauuaaggugcuu

SEQ ID NO: 678025 - RNA, 18 nt, Artificial Sequence
  Synthetic
ccuguaauccaggugcuu

SEQ ID NO: 678026 - RNA, 19 nt, Artificial Sequence
  Synthetic
gccuguaauccaggugcuu

SEQ ID NO: 678027 - RNA, 20 nt, Artificial Sequence
  Synthetic
ugccuguaauccaggugcuu

SEQ ID NO: 678028 - RNA, 21 nt, Artificial Sequence
  Synthetic
augccuguaauccaggugcuu

SEQ ID NO: 678029 - RNA, 22 nt, Artificial Sequence
  Synthetic
caugccuguaauccaggugcuu

SEQ ID NO: 678030 - RNA, 23 nt, Artificial Sequence
  Synthetic
ucaugccuguaauccaggugcuu

SEQ ID NO: 678031 - RNA, 24 nt, Artificial Sequence
  Synthetic
cucaugccuguaauccaggugcuu

SEQ ID NO: 678032 - RNA, 18 nt, Artificial Sequence
  Synthetic
gguuaccuucaggugcuu

SEQ ID NO: 678033 - RNA, 19 nt, Artificial Sequence
  Synthetic
agguuaccuucaggugcuu

SEQ ID NO: 678034 - RNA, 20 nt, Artificial Sequence
  Synthetic
aagguuaccuucaggugcuu

SEQ ID NO: 678035 - RNA, 21 nt, Artificial Sequence
  Synthetic
aaagguuaccuucaggugcuu

SEQ ID NO: 678036 - RNA, 22 nt, Artificial Sequence
  Synthetic
uaaagguuaccuucaggugcuu

SEQ ID NO: 678037 - RNA, 23 nt, Artificial Sequence
  Synthetic
uuaaagguuaccuucaggugcuu

SEQ ID NO: 678038 - RNA, 24 nt, Artificial Sequence
  Synthetic
cuuaaagguuaccuucaggugcuu

SEQ ID NO: 678039 - RNA, 18 nt, Artificial Sequence
  Synthetic
auggcucccugggugcuu

SEQ ID NO: 678040 - RNA, 19 nt, Artificial Sequence
  Synthetic
gauggcucccugggugcuu

SEQ ID NO: 678041 - RNA, 20 nt, Artificial Sequence
  Synthetic
ggauggcucccugggugcuu

SEQ ID NO: 678042 - RNA, 21 nt, Artificial Sequence
  Synthetic
uggauggcucccugggugcuu

SEQ ID NO: 678043 - RNA, 22 nt, Artificial Sequence
  Synthetic
uuggauggcucccugggugcuu

SEQ ID NO: 678044 - RNA, 23 nt, Artificial Sequence
  Synthetic
cuuggauggcucccugggugcuu

SEQ ID NO: 678045 - RNA, 24 nt, Artificial Sequence
  Synthetic
ucuuggauggcucccugggugcuu

SEQ ID NO: 678046 - RNA, 18 nt, Artificial Sequence
  Synthetic
ccaucuuuucaugugcuu

SEQ ID NO: 678047 - RNA, 19 nt, Artificial Sequence
  Synthetic
accaucuuuucaugugcuu

SEQ ID NO: 678048 - RNA, 20 nt, Artificial Sequence
  Synthetic
aaccaucuuuucaugugcuu

SEQ ID NO: 678049 - RNA, 21 nt, Artificial Sequence
  Synthetic
uaaccaucuuuucaugugcuu

SEQ ID NO: 678050 - RNA, 22 nt, Artificial Sequence
  Synthetic
uuaaccaucuuuucaugugcuu

SEQ ID NO: 678051 - RNA, 23 nt, Artificial Sequence
  Synthetic
guuaaccaucuuuucaugugcuu

SEQ ID NO: 678052 - RNA, 24 nt, Artificial Sequence
  Synthetic
uguuaaccaucuuuucaugugcuu

SEQ ID NO: 678053 - RNA, 18 nt, Artificial Sequence
  Synthetic
gccaauaucucugugcuu

SEQ ID NO: 678054 - RNA, 19 nt, Artificial Sequence
  Synthetic
ugccaauaucucugugcuu

SEQ ID NO: 678055 - RNA, 20 nt, Artificial Sequence
  Synthetic
uugccaauaucucugugcuu

SEQ ID NO: 678056 - RNA, 21 nt, Artificial Sequence
  Synthetic
auugccaauaucucugugcuu

SEQ ID NO: 678057 - RNA, 22 nt, Artificial Sequence
  Synthetic
cauugccaauaucucugugcuu

SEQ ID NO: 678058 - RNA, 23 nt, Artificial Sequence
  Synthetic
acauugccaauaucucugugcuu

SEQ ID NO: 678059 - RNA, 24 nt, Artificial Sequence
  Synthetic
cacauugccaauaucucugugcuu

SEQ ID NO: 678060 - RNA, 18 nt, Artificial Sequence
  Synthetic
cccugaccccuugugcuu

SEQ ID NO: 678061 - RNA, 19 nt, Artificial Sequence
  Synthetic
ucccugaccccuugugcuu

SEQ ID NO: 678062 - RNA, 20 nt, Artificial Sequence
  Synthetic
uucccugaccccuugugcuu

SEQ ID NO: 678063 - RNA, 21 nt, Artificial Sequence
  Synthetic
auucccugaccccuugugcuu

SEQ ID NO: 678064 - RNA, 22 nt, Artificial Sequence
  Synthetic
aauucccugaccccuugugcuu

SEQ ID NO: 678065 - RNA, 23 nt, Artificial Sequence
  Synthetic
gaauucccugaccccuugugcuu

SEQ ID NO: 678066 - RNA, 24 nt, Artificial Sequence
  Synthetic
ggaauucccugaccccuugugcuu

SEQ ID NO: 678067 - RNA, 18 nt, Artificial Sequence
  Synthetic
auuauuaaauuugugcuu

SEQ ID NO: 678068 - RNA, 19 nt, Artificial Sequence
  Synthetic
gauuauuaaauuugugcuu

SEQ ID NO: 678069 - RNA, 20 nt, Artificial Sequence
  Synthetic
ggauuauuaaauuugugcuu

SEQ ID NO: 678070 - RNA, 21 nt, Artificial Sequence
  Synthetic
gggauuauuaaauuugugcuu

SEQ ID NO: 678071 - RNA, 22 nt, Artificial Sequence
  Synthetic
ugggauuauuaaauuugugcuu

SEQ ID NO: 678072 - RNA, 23 nt, Artificial Sequence
  Synthetic
uugggauuauuaaauuugugcuu

SEQ ID NO: 678073 - RNA, 24 nt, Artificial Sequence
  Synthetic
auugggauuauuaaauuugugcuu

SEQ ID NO: 678074 - RNA, 18 nt, Artificial Sequence
  Synthetic
aauaugagggaauugcuu

SEQ ID NO: 678075 - RNA, 19 nt, Artificial Sequence
  Synthetic
caauaugagggaauugcuu

SEQ ID NO: 678076 - RNA, 20 nt, Artificial Sequence
  Synthetic
ucaauaugagggaauugcuu

SEQ ID NO: 678077 - RNA, 21 nt, Artificial Sequence
  Synthetic
uucaauaugagggaauugcuu

SEQ ID NO: 678078 - RNA, 22 nt, Artificial Sequence
  Synthetic
auucaauaugagggaauugcuu

SEQ ID NO: 678079 - RNA, 23 nt, Artificial Sequence
  Synthetic
uauucaauaugagggaauugcuu

SEQ ID NO: 678080 - RNA, 24 nt, Artificial Sequence
  Synthetic
auauucaauaugagggaauugcuu

SEQ ID NO: 678081 - RNA, 18 nt, Artificial Sequence
  Synthetic
aacaaagaauaauugcuu

SEQ ID NO: 678082 - RNA, 19 nt, Artificial Sequence
  Synthetic
aaacaaagaauaauugcuu

SEQ ID NO: 678083 - RNA, 20 nt, Artificial Sequence
  Synthetic
aaaacaaagaauaauugcuu

SEQ ID NO: 678084 - RNA, 21 nt, Artificial Sequence
  Synthetic
uaaaacaaagaauaauugcuu

SEQ ID NO: 678085 - RNA, 22 nt, Artificial Sequence
  Synthetic
guaaaacaaagaauaauugcuu

SEQ ID NO: 678086 - RNA, 23 nt, Artificial Sequence
  Synthetic
uguaaaacaaagaauaauugcuu

SEQ ID NO: 678087 - RNA, 24 nt, Artificial Sequence
  Synthetic
uuguaaaacaaagaauaauugcuu

SEQ ID NO: 678088 - RNA, 18 nt, Artificial Sequence
  Synthetic
ucagcuuaauaauugcuu

SEQ ID NO: 678089 - RNA, 19 nt, Artificial Sequence
  Synthetic
cucagcuuaauaauugcuu

SEQ ID NO: 678090 - RNA, 20 nt, Artificial Sequence
  Synthetic
gcucagcuuaauaauugcuu

SEQ ID NO: 678091 - RNA, 21 nt, Artificial Sequence
  Synthetic
ugcucagcuuaauaauugcuu

SEQ ID NO: 678092 - RNA, 22 nt, Artificial Sequence
  Synthetic
cugcucagcuuaauaauugcuu

SEQ ID NO: 678093 - RNA, 23 nt, Artificial Sequence
  Synthetic
acugcucagcuuaauaauugcuu

SEQ ID NO: 678094 - RNA, 24 nt, Artificial Sequence
  Synthetic
cacugcucagcuuaauaauugcuu

SEQ ID NO: 678095 - RNA, 18 nt, Artificial Sequence
  Synthetic
uaaaacaaaacauugcuu

SEQ ID NO: 678096 - RNA, 19 nt, Artificial Sequence
  Synthetic
cuaaaacaaaacauugcuu

SEQ ID NO: 678097 - RNA, 20 nt, Artificial Sequence
  Synthetic
gcuaaaacaaaacauugcuu

SEQ ID NO: 678098 - RNA, 21 nt, Artificial Sequence
  Synthetic
agcuaaaacaaaacauugcuu

SEQ ID NO: 678099 - RNA, 22 nt, Artificial Sequence
  Synthetic
cagcuaaaacaaaacauugcuu

SEQ ID NO: 678100 - RNA, 23 nt, Artificial Sequence
  Synthetic
ucagcuaaaacaaaacauugcuu

SEQ ID NO: 678101 - RNA, 24 nt, Artificial Sequence
  Synthetic
aucagcuaaaacaaaacauugcuu

SEQ ID NO: 678102 - RNA, 18 nt, Artificial Sequence
  Synthetic
aaggagugaacauugcuu

SEQ ID NO: 678103 - RNA, 19 nt, Artificial Sequence
  Synthetic
gaaggagugaacauugcuu

SEQ ID NO: 678104 - RNA, 20 nt, Artificial Sequence
  Synthetic
ugaaggagugaacauugcuu

SEQ ID NO: 678105 - RNA, 21 nt, Artificial Sequence
  Synthetic
uugaaggagugaacauugcuu

SEQ ID NO: 678106 - RNA, 22 nt, Artificial Sequence
  Synthetic
uuugaaggagugaacauugcuu

SEQ ID NO: 678107 - RNA, 23 nt, Artificial Sequence
  Synthetic
uuuugaaggagugaacauugcuu

SEQ ID NO: 678108 - RNA, 24 nt, Artificial Sequence
  Synthetic
uuuuugaaggagugaacauugcuu

SEQ ID NO: 678109 - RNA, 18 nt, Artificial Sequence
  Synthetic
caguucggaccauugcuu

SEQ ID NO: 678110 - RNA, 19 nt, Artificial Sequence
  Synthetic
acaguucggaccauugcuu

SEQ ID NO: 678111 - RNA, 20 nt, Artificial Sequence
  Synthetic
uacaguucggaccauugcuu

SEQ ID NO: 678112 - RNA, 21 nt, Artificial Sequence
  Synthetic
guacaguucggaccauugcuu

SEQ ID NO: 678113 - RNA, 22 nt, Artificial Sequence
  Synthetic
gguacaguucggaccauugcuu

SEQ ID NO: 678114 - RNA, 23 nt, Artificial Sequence
  Synthetic
agguacaguucggaccauugcuu

SEQ ID NO: 678115 - RNA, 24 nt, Artificial Sequence
  Synthetic
aagguacaguucggaccauugcuu

SEQ ID NO: 678116 - RNA, 18 nt, Artificial Sequence
  Synthetic
cuuuuguugccauugcuu

SEQ ID NO: 678117 - RNA, 19 nt, Artificial Sequence
  Synthetic
gcuuuuguugccauugcuu

SEQ ID NO: 678118 - RNA, 20 nt, Artificial Sequence
  Synthetic
ggcuuuuguugccauugcuu

SEQ ID NO: 678119 - RNA, 21 nt, Artificial Sequence
  Synthetic
uggcuuuuguugccauugcuu

SEQ ID NO: 678120 - RNA, 22 nt, Artificial Sequence
  Synthetic
uuggcuuuuguugccauugcuu

SEQ ID NO: 678121 - RNA, 23 nt, Artificial Sequence
  Synthetic
uuuggcuuuuguugccauugcuu

SEQ ID NO: 678122 - RNA, 24 nt, Artificial Sequence
  Synthetic
uuuuggcuuuuguugccauugcuu

SEQ ID NO: 678123 - RNA, 18 nt, Artificial Sequence
  Synthetic
caaguacaucgauugcuu

SEQ ID NO: 678124 - RNA, 19 nt, Artificial Sequence
  Synthetic
gcaaguacaucgauugcuu

SEQ ID NO: 678125 - RNA, 20 nt, Artificial Sequence
  Synthetic
agcaaguacaucgauugcuu

SEQ ID NO: 678126 - RNA, 21 nt, Artificial Sequence
  Synthetic
cagcaaguacaucgauugcuu

SEQ ID NO: 678127 - RNA, 22 nt, Artificial Sequence
  Synthetic
gcagcaaguacaucgauugcuu

SEQ ID NO: 678128 - RNA, 23 nt, Artificial Sequence
  Synthetic
agcagcaaguacaucgauugcuu

SEQ ID NO: 678129 - RNA, 24 nt, Artificial Sequence
  Synthetic
cagcagcaaguacaucgauugcuu

SEQ ID NO: 678130 - RNA, 18 nt, Artificial Sequence
  Synthetic
guugaguugaacuugcuu

SEQ ID NO: 678131 - RNA, 19 nt, Artificial Sequence
  Synthetic
aguugaguugaacuugcuu

SEQ ID NO: 678132 - RNA, 20 nt, Artificial Sequence
  Synthetic
aaguugaguugaacuugcuu

SEQ ID NO: 678133 - RNA, 21 nt, Artificial Sequence
  Synthetic
aaaguugaguugaacuugcuu

SEQ ID NO: 678134 - RNA, 22 nt, Artificial Sequence
  Synthetic
aaaaguugaguugaacuugcuu

SEQ ID NO: 678135 - RNA, 23 nt, Artificial Sequence
  Synthetic
aaaaaguugaguugaacuugcuu

SEQ ID NO: 678136 - RNA, 24 nt, Artificial Sequence
  Synthetic
uaaaaaguugaguugaacuugcuu

SEQ ID NO: 678137 - RNA, 18 nt, Artificial Sequence
  Synthetic
cauacagucugcuugcuu

SEQ ID NO: 678138 - RNA, 19 nt, Artificial Sequence
  Synthetic
gcauacagucugcuugcuu

SEQ ID NO: 678139 - RNA, 20 nt, Artificial Sequence
  Synthetic
ugcauacagucugcuugcuu

SEQ ID NO: 678140 - RNA, 21 nt, Artificial Sequence
  Synthetic
uugcauacagucugcuugcuu

SEQ ID NO: 678141 - RNA, 22 nt, Artificial Sequence
  Synthetic
guugcauacagucugcuugcuu

SEQ ID NO: 678142 - RNA, 23 nt, Artificial Sequence
  Synthetic
cguugcauacagucugcuugcuu

SEQ ID NO: 678143 - RNA, 24 nt, Artificial Sequence
  Synthetic
ccguugcauacagucugcuugcuu

SEQ ID NO: 678144 - RNA, 18 nt, Artificial Sequence
  Synthetic
ugcuuugugcuguugcuu

SEQ ID NO: 678145 - RNA, 19 nt, Artificial Sequence
  Synthetic
uugcuuugugcuguugcuu

SEQ ID NO: 678146 - RNA, 20 nt, Artificial Sequence
  Synthetic
uuugcuuugugcuguugcuu

SEQ ID NO: 678147 - RNA, 21 nt, Artificial Sequence
  Synthetic
uuuugcuuugugcuguugcuu

SEQ ID NO: 678148 - RNA, 22 nt, Artificial Sequence
  Synthetic
uuuuugcuuugugcuguugcuu

SEQ ID NO: 678149 - RNA, 23 nt, Artificial Sequence
  Synthetic
auuuuugcuuugugcuguugcuu

SEQ ID NO: 678150 - RNA, 24 nt, Artificial Sequence
  Synthetic
aauuuuugcuuugugcuguugcuu

SEQ ID NO: 678151 - RNA, 18 nt, Artificial Sequence
  Synthetic
uuuauuucuacuuugcuu

SEQ ID NO: 678152 - RNA, 19 nt, Artificial Sequence
  Synthetic
uuuuauuucuacuuugcuu

SEQ ID NO: 678153 - RNA, 20 nt, Artificial Sequence
  Synthetic
auuuuauuucuacuuugcuu

SEQ ID NO: 678154 - RNA, 21 nt, Artificial Sequence
  Synthetic
gauuuuauuucuacuuugcuu

SEQ ID NO: 678155 - RNA, 22 nt, Artificial Sequence
  Synthetic
ggauuuuauuucuacuuugcuu

SEQ ID NO: 678156 - RNA, 23 nt, Artificial Sequence
  Synthetic
aggauuuuauuucuacuuugcuu

SEQ ID NO: 678157 - RNA, 24 nt, Artificial Sequence
  Synthetic
aaggauuuuauuucuacuuugcuu

SEQ ID NO: 678158 - RNA, 18 nt, Artificial Sequence
  Synthetic
uuuauuucuccuuugcuu

SEQ ID NO: 678159 - RNA, 19 nt, Artificial Sequence
  Synthetic
uuuuauuucuccuuugcuu

SEQ ID NO: 678160 - RNA, 20 nt, Artificial Sequence
  Synthetic
auuuuauuucuccuuugcuu

SEQ ID NO: 678161 - RNA, 21 nt, Artificial Sequence
  Synthetic
gauuuuauuucuccuuugcuu

SEQ ID NO: 678162 - RNA, 22 nt, Artificial Sequence
  Synthetic
ggauuuuauuucuccuuugcuu

SEQ ID NO: 678163 - RNA, 23 nt, Artificial Sequence
  Synthetic
aggauuuuauuucuccuuugcuu

SEQ ID NO: 678164 - RNA, 24 nt, Artificial Sequence
  Synthetic
aaggauuuuauuucuccuuugcuu

SEQ ID NO: 678165 - RNA, 18 nt, Artificial Sequence
  Synthetic
acagaagacauuuugcuu

SEQ ID NO: 678166 - RNA, 19 nt, Artificial Sequence
  Synthetic
gacagaagacauuuugcuu

SEQ ID NO: 678167 - RNA, 20 nt, Artificial Sequence
  Synthetic
ggacagaagacauuuugcuu

SEQ ID NO: 678168 - RNA, 21 nt, Artificial Sequence
  Synthetic
cggacagaagacauuuugcuu

SEQ ID NO: 678169 - RNA, 22 nt, Artificial Sequence
  Synthetic
acggacagaagacauuuugcuu

SEQ ID NO: 678170 - RNA, 23 nt, Artificial Sequence
  Synthetic
aacggacagaagacauuuugcuu

SEQ ID NO: 678171 - RNA, 24 nt, Artificial Sequence
  Synthetic
aaacggacagaagacauuuugcuu

SEQ ID NO: 678172 - RNA, 18 nt, Artificial Sequence
  Synthetic
auuuccagcauuuugcuu

SEQ ID NO: 678173 - RNA, 19 nt, Artificial Sequence
  Synthetic
gauuuccagcauuuugcuu

SEQ ID NO: 678174 - RNA, 20 nt, Artificial Sequence
  Synthetic
ggauuuccagcauuuugcuu

SEQ ID NO: 678175 - RNA, 21 nt, Artificial Sequence
  Synthetic
gggauuuccagcauuuugcuu

SEQ ID NO: 678176 - RNA, 22 nt, Artificial Sequence
  Synthetic
ggggauuuccagcauuuugcuu

SEQ ID NO: 678177 - RNA, 23 nt, Artificial Sequence
  Synthetic
aggggauuuccagcauuuugcuu

SEQ ID NO: 678178 - RNA, 24 nt, Artificial Sequence
  Synthetic
gaggggauuuccagcauuuugcuu

SEQ ID NO: 678179 - RNA, 18 nt, Artificial Sequence
  Synthetic
gacuccuuacuuuugcuu

SEQ ID NO: 678180 - RNA, 19 nt, Artificial Sequence
  Synthetic
ugacuccuuacuuuugcuu

SEQ ID NO: 678181 - RNA, 20 nt, Artificial Sequence
  Synthetic
gugacuccuuacuuuugcuu

SEQ ID NO: 678182 - RNA, 21 nt, Artificial Sequence
  Synthetic
agugacuccuuacuuuugcuu

SEQ ID NO: 678183 - RNA, 22 nt, Artificial Sequence
  Synthetic
aagugacuccuuacuuuugcuu

SEQ ID NO: 678184 - RNA, 23 nt, Artificial Sequence
  Synthetic
aaagugacuccuuacuuuugcuu

SEQ ID NO: 678185 - RNA, 24 nt, Artificial Sequence
  Synthetic
aaaagugacuccuuacuuuugcuu

SEQ ID NO: 678186 - RNA, 18 nt, Artificial Sequence
  Synthetic
accacaaaacaaaaucuu

SEQ ID NO: 678187 - RNA, 19 nt, Artificial Sequence
  Synthetic
gaccacaaaacaaaaucuu

SEQ ID NO: 678188 - RNA, 20 nt, Artificial Sequence
  Synthetic
ugaccacaaaacaaaaucuu

SEQ ID NO: 678189 - RNA, 21 nt, Artificial Sequence
  Synthetic
gugaccacaaaacaaaaucuu

SEQ ID NO: 678190 - RNA, 22 nt, Artificial Sequence
  Synthetic
ugugaccacaaaacaaaaucuu

SEQ ID NO: 678191 - RNA, 23 nt, Artificial Sequence
  Synthetic
uugugaccacaaaacaaaaucuu

SEQ ID NO: 678192 - RNA, 24 nt, Artificial Sequence
  Synthetic
uuugugaccacaaaacaaaaucuu

SEQ ID NO: 678193 - RNA, 18 nt, Artificial Sequence
  Synthetic
ggguaaacugaaaaucuu

SEQ ID NO: 678194 - RNA, 19 nt, Artificial Sequence
  Synthetic
uggguaaacugaaaaucuu

SEQ ID NO: 678195 - RNA, 20 nt, Artificial Sequence
  Synthetic
cuggguaaacugaaaaucuu

SEQ ID NO: 678196 - RNA, 21 nt, Artificial Sequence
  Synthetic
ucuggguaaacugaaaaucuu

SEQ ID NO: 678197 - RNA, 22 nt, Artificial Sequence
  Synthetic
aucuggguaaacugaaaaucuu

SEQ ID NO: 678198 - RNA, 23 nt, Artificial Sequence
  Synthetic
gaucuggguaaacugaaaaucuu

SEQ ID NO: 678199 - RNA, 24 nt, Artificial Sequence
  Synthetic
ggaucuggguaaacugaaaaucuu

SEQ ID NO: 678200 - RNA, 18 nt, Artificial Sequence
  Synthetic
aggaaaaaguaaaaucuu

SEQ ID NO: 678201 - RNA, 19 nt, Artificial Sequence
  Synthetic
gaggaaaaaguaaaaucuu

SEQ ID NO: 678202 - RNA, 20 nt, Artificial Sequence
  Synthetic
agaggaaaaaguaaaaucuu

SEQ ID NO: 678203 - RNA, 21 nt, Artificial Sequence
  Synthetic
gagaggaaaaaguaaaaucuu

SEQ ID NO: 678204 - RNA, 22 nt, Artificial Sequence
  Synthetic
agagaggaaaaaguaaaaucuu

SEQ ID NO: 678205 - RNA, 23 nt, Artificial Sequence
  Synthetic
uagagaggaaaaaguaaaaucuu

SEQ ID NO: 678206 - RNA, 24 nt, Artificial Sequence
  Synthetic
uuagagaggaaaaaguaaaaucuu

SEQ ID NO: 678207 - RNA, 18 nt, Artificial Sequence
  Synthetic
aaauugaaagcaaaucuu

SEQ ID NO: 678208 - RNA, 19 nt, Artificial Sequence
  Synthetic
gaaauugaaagcaaaucuu

SEQ ID NO: 678209 - RNA, 20 nt, Artificial Sequence
  Synthetic
agaaauugaaagcaaaucuu

SEQ ID NO: 678210 - RNA, 21 nt, Artificial Sequence
  Synthetic
cagaaauugaaagcaaaucuu

SEQ ID NO: 678211 - RNA, 22 nt, Artificial Sequence
  Synthetic
acagaaauugaaagcaaaucuu

SEQ ID NO: 678212 - RNA, 23 nt, Artificial Sequence
  Synthetic
aacagaaauugaaagcaaaucuu

SEQ ID NO: 678213 - RNA, 24 nt, Artificial Sequence
  Synthetic
gaacagaaauugaaagcaaaucuu

SEQ ID NO: 678214 - RNA, 18 nt, Artificial Sequence
  Synthetic
aaacucucaggaaaucuu

SEQ ID NO: 678215 - RNA, 19 nt, Artificial Sequence
  Synthetic
aaaacucucaggaaaucuu

SEQ ID NO: 678216 - RNA, 20 nt, Artificial Sequence
  Synthetic
uaaaacucucaggaaaucuu

SEQ ID NO: 678217 - RNA, 21 nt, Artificial Sequence
  Synthetic
auaaaacucucaggaaaucuu

SEQ ID NO: 678218 - RNA, 22 nt, Artificial Sequence
  Synthetic
aauaaaacucucaggaaaucuu

SEQ ID NO: 678219 - RNA, 23 nt, Artificial Sequence
  Synthetic
aaauaaaacucucaggaaaucuu

SEQ ID NO: 678220 - RNA, 24 nt, Artificial Sequence
  Synthetic
aaaauaaaacucucaggaaaucuu

SEQ ID NO: 678221 - RNA, 18 nt, Artificial Sequence
  Synthetic
aaauugcagguaaaucuu

SEQ ID NO: 678222 - RNA, 19 nt, Artificial Sequence
  Synthetic
uaaauugcagguaaaucuu

SEQ ID NO: 678223 - RNA, 20 nt, Artificial Sequence
  Synthetic
uuaaauugcagguaaaucuu

SEQ ID NO: 678224 - RNA, 21 nt, Artificial Sequence
  Synthetic
cuuaaauugcagguaaaucuu

SEQ ID NO: 678225 - RNA, 22 nt, Artificial Sequence
  Synthetic
gcuuaaauugcagguaaaucuu

SEQ ID NO: 678226 - RNA, 23 nt, Artificial Sequence
  Synthetic
ggcuuaaauugcagguaaaucuu

SEQ ID NO: 678227 - RNA, 24 nt, Artificial Sequence
  Synthetic
aggcuuaaauugcagguaaaucuu

SEQ ID NO: 678228 - RNA, 18 nt, Artificial Sequence
  Synthetic
auaauaugagccaaucuu

SEQ ID NO: 678229 - RNA, 19 nt, Artificial Sequence
  Synthetic
aauaauaugagccaaucuu

SEQ ID NO: 678230 - RNA, 20 nt, Artificial Sequence
  Synthetic
aaauaauaugagccaaucuu

SEQ ID NO: 678231 - RNA, 21 nt, Artificial Sequence
  Synthetic
uaaauaauaugagccaaucuu

SEQ ID NO: 678232 - RNA, 22 nt, Artificial Sequence
  Synthetic
auaaauaauaugagccaaucuu

SEQ ID NO: 678233 - RNA, 23 nt, Artificial Sequence
  Synthetic
aauaaauaauaugagccaaucuu

SEQ ID NO: 678234 - RNA, 24 nt, Artificial Sequence
  Synthetic
caauaaauaauaugagccaaucuu

SEQ ID NO: 678235 - RNA, 18 nt, Artificial Sequence
  Synthetic
cugagguaggagaaucuu

SEQ ID NO: 678236 - RNA, 19 nt, Artificial Sequence
  Synthetic
gcugagguaggagaaucuu

SEQ ID NO: 678237 - RNA, 20 nt, Artificial Sequence
  Synthetic
ggcugagguaggagaaucuu

SEQ ID NO: 678238 - RNA, 21 nt, Artificial Sequence
  Synthetic
aggcugagguaggagaaucuu

SEQ ID NO: 678239 - RNA, 22 nt, Artificial Sequence
  Synthetic
gaggcugagguaggagaaucuu

SEQ ID NO: 678240 - RNA, 23 nt, Artificial Sequence
  Synthetic
ggaggcugagguaggagaaucuu

SEQ ID NO: 678241 - RNA, 24 nt, Artificial Sequence
  Synthetic
gggaggcugagguaggagaaucuu

SEQ ID NO: 678242 - RNA, 18 nt, Artificial Sequence
  Synthetic
uucuaaugugugaaucuu

SEQ ID NO: 678243 - RNA, 19 nt, Artificial Sequence
  Synthetic
uuucuaaugugugaaucuu

SEQ ID NO: 678244 - RNA, 20 nt, Artificial Sequence
  Synthetic
auuucuaaugugugaaucuu

SEQ ID NO: 678245 - RNA, 21 nt, Artificial Sequence
  Synthetic
cauuucuaaugugugaaucuu

SEQ ID NO: 678246 - RNA, 22 nt, Artificial Sequence
  Synthetic
acauuucuaaugugugaaucuu

SEQ ID NO: 678247 - RNA, 23 nt, Artificial Sequence
  Synthetic
uacauuucuaaugugugaaucuu

SEQ ID NO: 678248 - RNA, 24 nt, Artificial Sequence
  Synthetic
auacauuucuaaugugugaaucuu

SEQ ID NO: 678249 - RNA, 18 nt, Artificial Sequence
  Synthetic
aauugugaugauaaucuu

SEQ ID NO: 678250 - RNA, 19 nt, Artificial Sequence
  Synthetic
caauugugaugauaaucuu

SEQ ID NO: 678251 - RNA, 20 nt, Artificial Sequence
  Synthetic
acaauugugaugauaaucuu

SEQ ID NO: 678252 - RNA, 21 nt, Artificial Sequence
  Synthetic
uacaauugugaugauaaucuu

SEQ ID NO: 678253 - RNA, 22 nt, Artificial Sequence
  Synthetic
uuacaauugugaugauaaucuu

SEQ ID NO: 678254 - RNA, 23 nt, Artificial Sequence
  Synthetic
guuacaauugugaugauaaucuu

SEQ ID NO: 678255 - RNA, 24 nt, Artificial Sequence
  Synthetic
uguuacaauugugaugauaaucuu

SEQ ID NO: 678256 - RNA, 18 nt, Artificial Sequence
  Synthetic
auaacagcccuuaaucuu

SEQ ID NO: 678257 - RNA, 19 nt, Artificial Sequence
  Synthetic
cauaacagcccuuaaucuu

SEQ ID NO: 678258 - RNA, 20 nt, Artificial Sequence
  Synthetic
gcauaacagcccuuaaucuu

SEQ ID NO: 678259 - RNA, 21 nt, Artificial Sequence
  Synthetic
agcauaacagcccuuaaucuu

SEQ ID NO: 678260 - RNA, 22 nt, Artificial Sequence
  Synthetic
uagcauaacagcccuuaaucuu

SEQ ID NO: 678261 - RNA, 23 nt, Artificial Sequence
  Synthetic
cuagcauaacagcccuuaaucuu

SEQ ID NO: 678262 - RNA, 24 nt, Artificial Sequence
  Synthetic
ucuagcauaacagcccuuaaucuu

SEQ ID NO: 678263 - RNA, 18 nt, Artificial Sequence
  Synthetic
acccagcuuguuaaucuu

SEQ ID NO: 678264 - RNA, 19 nt, Artificial Sequence
  Synthetic
gacccagcuuguuaaucuu

SEQ ID NO: 678265 - RNA, 20 nt, Artificial Sequence
  Synthetic
ugacccagcuuguuaaucuu

SEQ ID NO: 678266 - RNA, 21 nt, Artificial Sequence
  Synthetic
cugacccagcuuguuaaucuu

SEQ ID NO: 678267 - RNA, 22 nt, Artificial Sequence
  Synthetic
ccugacccagcuuguuaaucuu

SEQ ID NO: 678268 - RNA, 23 nt, Artificial Sequence
  Synthetic
gccugacccagcuuguuaaucuu

SEQ ID NO: 678269 - RNA, 24 nt, Artificial Sequence
  Synthetic
agccugacccagcuuguuaaucuu

SEQ ID NO: 678270 - RNA, 18 nt, Artificial Sequence
  Synthetic
gaaauuugcuuuaaucuu

SEQ ID NO: 678271 - RNA, 19 nt, Artificial Sequence
  Synthetic
ggaaauuugcuuuaaucuu

SEQ ID NO: 678272 - RNA, 20 nt, Artificial Sequence
  Synthetic
uggaaauuugcuuuaaucuu

SEQ ID NO: 678273 - RNA, 21 nt, Artificial Sequence
  Synthetic
uuggaaauuugcuuuaaucuu

SEQ ID NO: 678274 - RNA, 22 nt, Artificial Sequence
  Synthetic
guuggaaauuugcuuuaaucuu

SEQ ID NO: 678275 - RNA, 23 nt, Artificial Sequence
  Synthetic
uguuggaaauuugcuuuaaucuu

SEQ ID NO: 678276 - RNA, 24 nt, Artificial Sequence
  Synthetic
guguuggaaauuugcuuuaaucuu

SEQ ID NO: 678277 - RNA, 18 nt, Artificial Sequence
  Synthetic
aggggauuaacacaucuu

SEQ ID NO: 678278 - RNA, 19 nt, Artificial Sequence
  Synthetic
aaggggauuaacacaucuu

SEQ ID NO: 678279 - RNA, 20 nt, Artificial Sequence
  Synthetic
aaaggggauuaacacaucuu

SEQ ID NO: 678280 - RNA, 21 nt, Artificial Sequence
  Synthetic
caaaggggauuaacacaucuu

SEQ ID NO: 678281 - RNA, 22 nt, Artificial Sequence
  Synthetic
gcaaaggggauuaacacaucuu

SEQ ID NO: 678282 - RNA, 23 nt, Artificial Sequence
  Synthetic
agcaaaggggauuaacacaucuu

SEQ ID NO: 678283 - RNA, 24 nt, Artificial Sequence
  Synthetic
gagcaaaggggauuaacacaucuu

SEQ ID NO: 678284 - RNA, 18 nt, Artificial Sequence
  Synthetic
uaauuuauggcacaucuu

SEQ ID NO: 678285 - RNA, 19 nt, Artificial Sequence
  Synthetic
auaauuuauggcacaucuu

SEQ ID NO: 678286 - RNA, 20 nt, Artificial Sequence
  Synthetic
gauaauuuauggcacaucuu

SEQ ID NO: 678287 - RNA, 21 nt, Artificial Sequence
  Synthetic
ggauaauuuauggcacaucuu

SEQ ID NO: 678288 - RNA, 22 nt, Artificial Sequence
  Synthetic
uggauaauuuauggcacaucuu

SEQ ID NO: 678289 - RNA, 23 nt, Artificial Sequence
  Synthetic
guggauaauuuauggcacaucuu

SEQ ID NO: 678290 - RNA, 24 nt, Artificial Sequence
  Synthetic
uguggauaauuuauggcacaucuu

SEQ ID NO: 678291 - RNA, 18 nt, Artificial Sequence
  Synthetic
aaaggaauuauacaucuu

SEQ ID NO: 678292 - RNA, 19 nt, Artificial Sequence
  Synthetic
gaaaggaauuauacaucuu

SEQ ID NO: 678293 - RNA, 20 nt, Artificial Sequence
  Synthetic
ggaaaggaauuauacaucuu

SEQ ID NO: 678294 - RNA, 21 nt, Artificial Sequence
  Synthetic
aggaaaggaauuauacaucuu

SEQ ID NO: 678295 - RNA, 22 nt, Artificial Sequence
  Synthetic
aaggaaaggaauuauacaucuu

SEQ ID NO: 678296 - RNA, 23 nt, Artificial Sequence
  Synthetic
aaaggaaaggaauuauacaucuu

SEQ ID NO: 678297 - RNA, 24 nt, Artificial Sequence
  Synthetic
gaaaggaaaggaauuauacaucuu

SEQ ID NO: 678298 - RNA, 18 nt, Artificial Sequence
  Synthetic
cacccacacuuacaucuu

SEQ ID NO: 678299 - RNA, 19 nt, Artificial Sequence
  Synthetic
acacccacacuuacaucuu

SEQ ID NO: 678300 - RNA, 20 nt, Artificial Sequence
  Synthetic
aacacccacacuuacaucuu

SEQ ID NO: 678301 - RNA, 21 nt, Artificial Sequence
  Synthetic
aaacacccacacuuacaucuu

SEQ ID NO: 678302 - RNA, 22 nt, Artificial Sequence
  Synthetic
caaacacccacacuuacaucuu

SEQ ID NO: 678303 - RNA, 23 nt, Artificial Sequence
  Synthetic
acaaacacccacacuuacaucuu

SEQ ID NO: 678304 - RNA, 24 nt, Artificial Sequence
  Synthetic
cacaaacacccacacuuacaucuu

SEQ ID NO: 678305 - RNA, 18 nt, Artificial Sequence
  Synthetic
cuucaaaagaaccaucuu

SEQ ID NO: 678306 - RNA, 19 nt, Artificial Sequence
  Synthetic
gcuucaaaagaaccaucuu

SEQ ID NO: 678307 - RNA, 20 nt, Artificial Sequence
  Synthetic
ggcuucaaaagaaccaucuu

SEQ ID NO: 678308 - RNA, 21 nt, Artificial Sequence
  Synthetic
gggcuucaaaagaaccaucuu

SEQ ID NO: 678309 - RNA, 22 nt, Artificial Sequence
  Synthetic
agggcuucaaaagaaccaucuu

SEQ ID NO: 678310 - RNA, 23 nt, Artificial Sequence
  Synthetic
aagggcuucaaaagaaccaucuu

SEQ ID NO: 678311 - RNA, 24 nt, Artificial Sequence
  Synthetic
aaagggcuucaaaagaaccaucuu

SEQ ID NO: 678312 - RNA, 18 nt, Artificial Sequence
  Synthetic
cauaguccaacccaucuu

SEQ ID NO: 678313 - RNA, 19 nt, Artificial Sequence
  Synthetic
ccauaguccaacccaucuu

SEQ ID NO: 678314 - RNA, 20 nt, Artificial Sequence
  Synthetic
uccauaguccaacccaucuu

SEQ ID NO: 678315 - RNA, 21 nt, Artificial Sequence
  Synthetic
auccauaguccaacccaucuu

SEQ ID NO: 678316 - RNA, 22 nt, Artificial Sequence
  Synthetic
uauccauaguccaacccaucuu

SEQ ID NO: 678317 - RNA, 23 nt, Artificial Sequence
  Synthetic
auauccauaguccaacccaucuu

SEQ ID NO: 678318 - RNA, 24 nt, Artificial Sequence
  Synthetic
cauauccauaguccaacccaucuu

SEQ ID NO: 678319 - RNA, 18 nt, Artificial Sequence
  Synthetic
agaugguggugccaucuu

SEQ ID NO: 678320 - RNA, 19 nt, Artificial Sequence
  Synthetic
uagaugguggugccaucuu

SEQ ID NO: 678321 - RNA, 20 nt, Artificial Sequence
  Synthetic
guagaugguggugccaucuu

SEQ ID NO: 678322 - RNA, 21 nt, Artificial Sequence
  Synthetic
gguagaugguggugccaucuu

SEQ ID NO: 678323 - RNA, 22 nt, Artificial Sequence
  Synthetic
ggguagaugguggugccaucuu

SEQ ID NO: 678324 - RNA, 23 nt, Artificial Sequence
  Synthetic
uggguagaugguggugccaucuu

SEQ ID NO: 678325 - RNA, 24 nt, Artificial Sequence
  Synthetic
uuggguagaugguggugccaucuu

SEQ ID NO: 678326 - RNA, 18 nt, Artificial Sequence
  Synthetic
gauuaaguuugccaucuu

SEQ ID NO: 678327 - RNA, 19 nt, Artificial Sequence
  Synthetic
ugauuaaguuugccaucuu

SEQ ID NO: 678328 - RNA, 20 nt, Artificial Sequence
  Synthetic
uugauuaaguuugccaucuu

SEQ ID NO: 678329 - RNA, 21 nt, Artificial Sequence
  Synthetic
auugauuaaguuugccaucuu

SEQ ID NO: 678330 - RNA, 22 nt, Artificial Sequence
  Synthetic
gauugauuaaguuugccaucuu

SEQ ID NO: 678331 - RNA, 23 nt, Artificial Sequence
  Synthetic
ugauugauuaaguuugccaucuu

SEQ ID NO: 678332 - RNA, 24 nt, Artificial Sequence
  Synthetic
uugauugauuaaguuugccaucuu

SEQ ID NO: 678333 - RNA, 18 nt, Artificial Sequence
  Synthetic
gcaaucagaauccaucuu

SEQ ID NO: 678334 - RNA, 19 nt, Artificial Sequence
  Synthetic
agcaaucagaauccaucuu

SEQ ID NO: 678335 - RNA, 20 nt, Artificial Sequence
  Synthetic
uagcaaucagaauccaucuu

SEQ ID NO: 678336 - RNA, 21 nt, Artificial Sequence
  Synthetic
auagcaaucagaauccaucuu

SEQ ID NO: 678337 - RNA, 22 nt, Artificial Sequence
  Synthetic
aauagcaaucagaauccaucuu

SEQ ID NO: 678338 - RNA, 23 nt, Artificial Sequence
  Synthetic
aaauagcaaucagaauccaucuu

SEQ ID NO: 678339 - RNA, 24 nt, Artificial Sequence
  Synthetic
aaaauagcaaucagaauccaucuu

SEQ ID NO: 678340 - RNA, 18 nt, Artificial Sequence
  Synthetic
cacccagauaagcaucuu

SEQ ID NO: 678341 - RNA, 19 nt, Artificial Sequence
  Synthetic
gcacccagauaagcaucuu

SEQ ID NO: 678342 - RNA, 20 nt, Artificial Sequence
  Synthetic
ugcacccagauaagcaucuu

SEQ ID NO: 678343 - RNA, 21 nt, Artificial Sequence
  Synthetic
cugcacccagauaagcaucuu

SEQ ID NO: 678344 - RNA, 22 nt, Artificial Sequence
  Synthetic
ucugcacccagauaagcaucuu

SEQ ID NO: 678345 - RNA, 23 nt, Artificial Sequence
  Synthetic
cucugcacccagauaagcaucuu

SEQ ID NO: 678346 - RNA, 24 nt, Artificial Sequence
  Synthetic
gcucugcacccagauaagcaucuu

SEQ ID NO: 678347 - RNA, 18 nt, Artificial Sequence
  Synthetic
uugggaaauaugcaucuu

SEQ ID NO: 678348 - RNA, 19 nt, Artificial Sequence
  Synthetic
uuugggaaauaugcaucuu

SEQ ID NO: 678349 - RNA, 20 nt, Artificial Sequence
  Synthetic
auuugggaaauaugcaucuu

SEQ ID NO: 678350 - RNA, 21 nt, Artificial Sequence
  Synthetic
gauuugggaaauaugcaucuu

SEQ ID NO: 678351 - RNA, 22 nt, Artificial Sequence
  Synthetic
ugauuugggaaauaugcaucuu

SEQ ID NO: 678352 - RNA, 23 nt, Artificial Sequence
  Synthetic
augauuugggaaauaugcaucuu

SEQ ID NO: 678353 - RNA, 24 nt, Artificial Sequence
  Synthetic
uaugauuugggaaauaugcaucuu

SEQ ID NO: 678354 - RNA, 18 nt, Artificial Sequence
  Synthetic
ggauagguccugcaucuu

SEQ ID NO: 678355 - RNA, 19 nt, Artificial Sequence
  Synthetic
aggauagguccugcaucuu

SEQ ID NO: 678356 - RNA, 20 nt, Artificial Sequence
  Synthetic
gaggauagguccugcaucuu

SEQ ID NO: 678357 - RNA, 21 nt, Artificial Sequence
  Synthetic
ggaggauagguccugcaucuu

SEQ ID NO: 678358 - RNA, 22 nt, Artificial Sequence
  Synthetic
aggaggauagguccugcaucuu

SEQ ID NO: 678359 - RNA, 23 nt, Artificial Sequence
  Synthetic
gaggaggauagguccugcaucuu

SEQ ID NO: 678360 - RNA, 24 nt, Artificial Sequence
  Synthetic
ggaggaggauagguccugcaucuu

SEQ ID NO: 678361 - RNA, 18 nt, Artificial Sequence
  Synthetic
cacaaguuagugcaucuu

SEQ ID NO: 678362 - RNA, 19 nt, Artificial Sequence
  Synthetic
gcacaaguuagugcaucuu

SEQ ID NO: 678363 - RNA, 20 nt, Artificial Sequence
  Synthetic
ggcacaaguuagugcaucuu

SEQ ID NO: 678364 - RNA, 21 nt, Artificial Sequence
  Synthetic
uggcacaaguuagugcaucuu

SEQ ID NO: 678365 - RNA, 22 nt, Artificial Sequence
  Synthetic
guggcacaaguuagugcaucuu

SEQ ID NO: 678366 - RNA, 23 nt, Artificial Sequence
  Synthetic
gguggcacaaguuagugcaucuu

SEQ ID NO: 678367 - RNA, 24 nt, Artificial Sequence
  Synthetic
ugguggcacaaguuagugcaucuu

SEQ ID NO: 678368 - RNA, 18 nt, Artificial Sequence
  Synthetic
aaauugcauuaucaucuu

SEQ ID NO: 678369 - RNA, 19 nt, Artificial Sequence
  Synthetic
gaaauugcauuaucaucuu

SEQ ID NO: 678370 - RNA, 20 nt, Artificial Sequence
  Synthetic
agaaauugcauuaucaucuu

SEQ ID NO: 678371 - RNA, 21 nt, Artificial Sequence
  Synthetic
gagaaauugcauuaucaucuu

SEQ ID NO: 678372 - RNA, 22 nt, Artificial Sequence
  Synthetic
ugagaaauugcauuaucaucuu

SEQ ID NO: 678373 - RNA, 23 nt, Artificial Sequence
  Synthetic
cugagaaauugcauuaucaucuu

SEQ ID NO: 678374 - RNA, 24 nt, Artificial Sequence
  Synthetic
gcugagaaauugcauuaucaucuu

SEQ ID NO: 678375 - RNA, 18 nt, Artificial Sequence
  Synthetic
uagaucaauugucaucuu

SEQ ID NO: 678376 - RNA, 19 nt, Artificial Sequence
  Synthetic
guagaucaauugucaucuu

SEQ ID NO: 678377 - RNA, 20 nt, Artificial Sequence
  Synthetic
cguagaucaauugucaucuu

SEQ ID NO: 678378 - RNA, 21 nt, Artificial Sequence
  Synthetic
ccguagaucaauugucaucuu

SEQ ID NO: 678379 - RNA, 22 nt, Artificial Sequence
  Synthetic
gccguagaucaauugucaucuu

SEQ ID NO: 678380 - RNA, 23 nt, Artificial Sequence
  Synthetic
ugccguagaucaauugucaucuu

SEQ ID NO: 678381 - RNA, 24 nt, Artificial Sequence
  Synthetic
uugccguagaucaauugucaucuu

SEQ ID NO: 678382 - RNA, 18 nt, Artificial Sequence
  Synthetic
agucaaaaaaaagaucuu

SEQ ID NO: 678383 - RNA, 19 nt, Artificial Sequence
  Synthetic
aagucaaaaaaaagaucuu

SEQ ID NO: 678384 - RNA, 20 nt, Artificial Sequence
  Synthetic
aaagucaaaaaaaagaucuu

SEQ ID NO: 678385 - RNA, 21 nt, Artificial Sequence
  Synthetic
uaaagucaaaaaaaagaucuu

SEQ ID NO: 678386 - RNA, 22 nt, Artificial Sequence
  Synthetic
uuaaagucaaaaaaaagaucuu

SEQ ID NO: 678387 - RNA, 23 nt, Artificial Sequence
  Synthetic
guuaaagucaaaaaaaagaucuu

SEQ ID NO: 678388 - RNA, 24 nt, Artificial Sequence
  Synthetic
gguuaaagucaaaaaaaagaucuu

SEQ ID NO: 678389 - RNA, 18 nt, Artificial Sequence
  Synthetic
uuuauagauaaagaucuu

SEQ ID NO: 678390 - RNA, 19 nt, Artificial Sequence
  Synthetic
cuuuauagauaaagaucuu

SEQ ID NO: 678391 - RNA, 20 nt, Artificial Sequence
  Synthetic
acuuuauagauaaagaucuu

SEQ ID NO: 678392 - RNA, 21 nt, Artificial Sequence
  Synthetic
aacuuuauagauaaagaucuu

SEQ ID NO: 678393 - RNA, 22 nt, Artificial Sequence
  Synthetic
aaacuuuauagauaaagaucuu

SEQ ID NO: 678394 - RNA, 23 nt, Artificial Sequence
  Synthetic
caaacuuuauagauaaagaucuu

SEQ ID NO: 678395 - RNA, 24 nt, Artificial Sequence
  Synthetic
gcaaacuuuauagauaaagaucuu

SEQ ID NO: 678396 - RNA, 18 nt, Artificial Sequence
  Synthetic
guaacuugugaagaucuu

SEQ ID NO: 678397 - RNA, 19 nt, Artificial Sequence
  Synthetic
aguaacuugugaagaucuu

SEQ ID NO: 678398 - RNA, 20 nt, Artificial Sequence
  Synthetic
uaguaacuugugaagaucuu

SEQ ID NO: 678399 - RNA, 21 nt, Artificial Sequence
  Synthetic
auaguaacuugugaagaucuu

SEQ ID NO: 678400 - RNA, 22 nt, Artificial Sequence
  Synthetic
uauaguaacuugugaagaucuu

SEQ ID NO: 678401 - RNA, 23 nt, Artificial Sequence
  Synthetic
uuauaguaacuugugaagaucuu

SEQ ID NO: 678402 - RNA, 24 nt, Artificial Sequence
  Synthetic
guuauaguaacuugugaagaucuu

SEQ ID NO: 678403 - RNA, 18 nt, Artificial Sequence
  Synthetic
uguuguacagcagaucuu

SEQ ID NO: 678404 - RNA, 19 nt, Artificial Sequence
  Synthetic
auguuguacagcagaucuu

SEQ ID NO: 678405 - RNA, 20 nt, Artificial Sequence
  Synthetic
uauguuguacagcagaucuu

SEQ ID NO: 678406 - RNA, 21 nt, Artificial Sequence
  Synthetic
cuauguuguacagcagaucuu

SEQ ID NO: 678407 - RNA, 22 nt, Artificial Sequence
  Synthetic
acuauguuguacagcagaucuu

SEQ ID NO: 678408 - RNA, 23 nt, Artificial Sequence
  Synthetic
cacuauguuguacagcagaucuu

SEQ ID NO: 678409 - RNA, 24 nt, Artificial Sequence
  Synthetic
gcacuauguuguacagcagaucuu

SEQ ID NO: 678410 - RNA, 18 nt, Artificial Sequence
  Synthetic
cuugugcaugcagaucuu

SEQ ID NO: 678411 - RNA, 19 nt, Artificial Sequence
  Synthetic
gcuugugcaugcagaucuu

SEQ ID NO: 678412 - RNA, 20 nt, Artificial Sequence
  Synthetic
ggcuugugcaugcagaucuu

SEQ ID NO: 678413 - RNA, 21 nt, Artificial Sequence
  Synthetic
aggcuugugcaugcagaucuu

SEQ ID NO: 678414 - RNA, 22 nt, Artificial Sequence
  Synthetic
aaggcuugugcaugcagaucuu

SEQ ID NO: 678415 - RNA, 23 nt, Artificial Sequence
  Synthetic
caaggcuugugcaugcagaucuu

SEQ ID NO: 678416 - RNA, 24 nt, Artificial Sequence
  Synthetic
ucaaggcuugugcaugcagaucuu

SEQ ID NO: 678417 - RNA, 18 nt, Artificial Sequence
  Synthetic
auaaaacaaucagaucuu

SEQ ID NO: 678418 - RNA, 19 nt, Artificial Sequence
  Synthetic
uauaaaacaaucagaucuu

SEQ ID NO: 678419 - RNA, 20 nt, Artificial Sequence
  Synthetic
uuauaaaacaaucagaucuu

SEQ ID NO: 678420 - RNA, 21 nt, Artificial Sequence
  Synthetic
cuuauaaaacaaucagaucuu

SEQ ID NO: 678421 - RNA, 22 nt, Artificial Sequence
  Synthetic
ccuuauaaaacaaucagaucuu

SEQ ID NO: 678422 - RNA, 23 nt, Artificial Sequence
  Synthetic
cccuuauaaaacaaucagaucuu

SEQ ID NO: 678423 - RNA, 24 nt, Artificial Sequence
  Synthetic
ccccuuauaaaacaaucagaucuu

SEQ ID NO: 678424 - RNA, 18 nt, Artificial Sequence
  Synthetic
auaaaacuaucagaucuu

SEQ ID NO: 678425 - RNA, 19 nt, Artificial Sequence
  Synthetic
uauaaaacuaucagaucuu

SEQ ID NO: 678426 - RNA, 20 nt, Artificial Sequence
  Synthetic
uuauaaaacuaucagaucuu

SEQ ID NO: 678427 - RNA, 21 nt, Artificial Sequence
  Synthetic
uuuauaaaacuaucagaucuu

SEQ ID NO: 678428 - RNA, 22 nt, Artificial Sequence
  Synthetic
auuuauaaaacuaucagaucuu

SEQ ID NO: 678429 - RNA, 23 nt, Artificial Sequence
  Synthetic
cauuuauaaaacuaucagaucuu

SEQ ID NO: 678430 - RNA, 24 nt, Artificial Sequence
  Synthetic
acauuuauaaaacuaucagaucuu

SEQ ID NO: 678431 - RNA, 18 nt, Artificial Sequence
  Synthetic
uuacccuucugagaucuu

SEQ ID NO: 678432 - RNA, 19 nt, Artificial Sequence
  Synthetic
cuuacccuucugagaucuu

SEQ ID NO: 678433 - RNA, 20 nt, Artificial Sequence
  Synthetic
gcuuacccuucugagaucuu

SEQ ID NO: 678434 - RNA, 21 nt, Artificial Sequence
  Synthetic
ugcuuacccuucugagaucuu

SEQ ID NO: 678435 - RNA, 22 nt, Artificial Sequence
  Synthetic
cugcuuacccuucugagaucuu

SEQ ID NO: 678436 - RNA, 23 nt, Artificial Sequence
  Synthetic
ucugcuuacccuucugagaucuu

SEQ ID NO: 678437 - RNA, 24 nt, Artificial Sequence
  Synthetic
uucugcuuacccuucugagaucuu

SEQ ID NO: 678438 - RNA, 18 nt, Artificial Sequence
  Synthetic
cuaauuuuauaggaucuu

SEQ ID NO: 678439 - RNA, 19 nt, Artificial Sequence
  Synthetic
ccuaauuuuauaggaucuu

SEQ ID NO: 678440 - RNA, 20 nt, Artificial Sequence
  Synthetic
cccuaauuuuauaggaucuu

SEQ ID NO: 678441 - RNA, 21 nt, Artificial Sequence
  Synthetic
ccccuaauuuuauaggaucuu

SEQ ID NO: 678442 - RNA, 22 nt, Artificial Sequence
  Synthetic
uccccuaauuuuauaggaucuu

SEQ ID NO: 678443 - RNA, 23 nt, Artificial Sequence
  Synthetic
guccccuaauuuuauaggaucuu

SEQ ID NO: 678444 - RNA, 24 nt, Artificial Sequence
  Synthetic
uguccccuaauuuuauaggaucuu

SEQ ID NO: 678445 - RNA, 18 nt, Artificial Sequence
  Synthetic
acaacuguaagggaucuu

SEQ ID NO: 678446 - RNA, 19 nt, Artificial Sequence
  Synthetic
uacaacuguaagggaucuu

SEQ ID NO: 678447 - RNA, 20 nt, Artificial Sequence
  Synthetic
auacaacuguaagggaucuu

SEQ ID NO: 678448 - RNA, 21 nt, Artificial Sequence
  Synthetic
uauacaacuguaagggaucuu

SEQ ID NO: 678449 - RNA, 22 nt, Artificial Sequence
  Synthetic
uuauacaacuguaagggaucuu

SEQ ID NO: 678450 - RNA, 23 nt, Artificial Sequence
  Synthetic
uuuauacaacuguaagggaucuu

SEQ ID NO: 678451 - RNA, 24 nt, Artificial Sequence
  Synthetic
auuuauacaacuguaagggaucuu

SEQ ID NO: 678452 - RNA, 18 nt, Artificial Sequence
  Synthetic
uuuuggugucuggaucuu

SEQ ID NO: 678453 - RNA, 19 nt, Artificial Sequence
  Synthetic
auuuuggugucuggaucuu

SEQ ID NO: 678454 - RNA, 20 nt, Artificial Sequence
  Synthetic
cauuuuggugucuggaucuu

SEQ ID NO: 678455 - RNA, 21 nt, Artificial Sequence
  Synthetic
ccauuuuggugucuggaucuu

SEQ ID NO: 678456 - RNA, 22 nt, Artificial Sequence
  Synthetic
gccauuuuggugucuggaucuu

SEQ ID NO: 678457 - RNA, 23 nt, Artificial Sequence
  Synthetic
ggccauuuuggugucuggaucuu

SEQ ID NO: 678458 - RNA, 24 nt, Artificial Sequence
  Synthetic
uggccauuuuggugucuggaucuu

SEQ ID NO: 678459 - RNA, 18 nt, Artificial Sequence
  Synthetic
caauuucugaaugaucuu

SEQ ID NO: 678460 - RNA, 19 nt, Artificial Sequence
  Synthetic
acaauuucugaaugaucuu

SEQ ID NO: 678461 - RNA, 20 nt, Artificial Sequence
  Synthetic
aacaauuucugaaugaucuu

SEQ ID NO: 678462 - RNA, 21 nt, Artificial Sequence
  Synthetic
aaacaauuucugaaugaucuu

SEQ ID NO: 678463 - RNA, 22 nt, Artificial Sequence
  Synthetic
uaaacaauuucugaaugaucuu

SEQ ID NO: 678464 - RNA, 23 nt, Artificial Sequence
  Synthetic
auaaacaauuucugaaugaucuu

SEQ ID NO: 678465 - RNA, 24 nt, Artificial Sequence
  Synthetic
aauaaacaauuucugaaugaucuu

SEQ ID NO: 678466 - RNA, 18 nt, Artificial Sequence
  Synthetic
cucauucugcaugaucuu

SEQ ID NO: 678467 - RNA, 19 nt, Artificial Sequence
  Synthetic
ccucauucugcaugaucuu

SEQ ID NO: 678468 - RNA, 20 nt, Artificial Sequence
  Synthetic
cccucauucugcaugaucuu

SEQ ID NO: 678469 - RNA, 21 nt, Artificial Sequence
  Synthetic
ucccucauucugcaugaucuu

SEQ ID NO: 678470 - RNA, 22 nt, Artificial Sequence
  Synthetic
uucccucauucugcaugaucuu

SEQ ID NO: 678471 - RNA, 23 nt, Artificial Sequence
  Synthetic
cuucccucauucugcaugaucuu

SEQ ID NO: 678472 - RNA, 24 nt, Artificial Sequence
  Synthetic
ucuucccucauucugcaugaucuu

SEQ ID NO: 678473 - RNA, 18 nt, Artificial Sequence
  Synthetic
gguggauaaacugaucuu

SEQ ID NO: 678474 - RNA, 19 nt, Artificial Sequence
  Synthetic
agguggauaaacugaucuu

SEQ ID NO: 678475 - RNA, 20 nt, Artificial Sequence
  Synthetic
uagguggauaaacugaucuu

SEQ ID NO: 678476 - RNA, 21 nt, Artificial Sequence
  Synthetic
auagguggauaaacugaucuu

SEQ ID NO: 678477 - RNA, 22 nt, Artificial Sequence
  Synthetic
uauagguggauaaacugaucuu

SEQ ID NO: 678478 - RNA, 23 nt, Artificial Sequence
  Synthetic
auauagguggauaaacugaucuu

SEQ ID NO: 678479 - RNA, 24 nt, Artificial Sequence
  Synthetic
cauauagguggauaaacugaucuu

SEQ ID NO: 678480 - RNA, 18 nt, Artificial Sequence
  Synthetic
ucacuauuuccugaucuu

SEQ ID NO: 678481 - RNA, 19 nt, Artificial Sequence
  Synthetic
uucacuauuuccugaucuu

SEQ ID NO: 678482 - RNA, 20 nt, Artificial Sequence
  Synthetic
cuucacuauuuccugaucuu

SEQ ID NO: 678483 - RNA, 21 nt, Artificial Sequence
  Synthetic
ccuucacuauuuccugaucuu

SEQ ID NO: 678484 - RNA, 22 nt, Artificial Sequence
  Synthetic
uccuucacuauuuccugaucuu

SEQ ID NO: 678485 - RNA, 23 nt, Artificial Sequence
  Synthetic
auccuucacuauuuccugaucuu

SEQ ID NO: 678486 - RNA, 24 nt, Artificial Sequence
  Synthetic
cauccuucacuauuuccugaucuu

SEQ ID NO: 678487 - RNA, 18 nt, Artificial Sequence
  Synthetic
ugaaucugggcugaucuu

SEQ ID NO: 678488 - RNA, 19 nt, Artificial Sequence
  Synthetic
uugaaucugggcugaucuu

SEQ ID NO: 678489 - RNA, 20 nt, Artificial Sequence
  Synthetic
cuugaaucugggcugaucuu

SEQ ID NO: 678490 - RNA, 21 nt, Artificial Sequence
  Synthetic
ucuugaaucugggcugaucuu

SEQ ID NO: 678491 - RNA, 22 nt, Artificial Sequence
  Synthetic
cucuugaaucugggcugaucuu

SEQ ID NO: 678492 - RNA, 23 nt, Artificial Sequence
  Synthetic
ucucuugaaucugggcugaucuu

SEQ ID NO: 678493 - RNA, 24 nt, Artificial Sequence
  Synthetic
aucucuugaaucugggcugaucuu

SEQ ID NO: 678494 - RNA, 18 nt, Artificial Sequence
  Synthetic
guucugcaguuugaucuu

SEQ ID NO: 678495 - RNA, 19 nt, Artificial Sequence
  Synthetic
uguucugcaguuugaucuu

SEQ ID NO: 678496 - RNA, 20 nt, Artificial Sequence
  Synthetic
uuguucugcaguuugaucuu

SEQ ID NO: 678497 - RNA, 21 nt, Artificial Sequence
  Synthetic
auuguucugcaguuugaucuu

SEQ ID NO: 678498 - RNA, 22 nt, Artificial Sequence
  Synthetic
cauuguucugcaguuugaucuu

SEQ ID NO: 678499 - RNA, 23 nt, Artificial Sequence
  Synthetic
ccauuguucugcaguuugaucuu

SEQ ID NO: 678500 - RNA, 24 nt, Artificial Sequence
  Synthetic
uccauuguucugcaguuugaucuu

SEQ ID NO: 678501 - RNA, 18 nt, Artificial Sequence
  Synthetic
ugagagaauaaauaucuu

SEQ ID NO: 678502 - RNA, 19 nt, Artificial Sequence
  Synthetic
cugagagaauaaauaucuu

SEQ ID NO: 678503 - RNA, 20 nt, Artificial Sequence
  Synthetic
gcugagagaauaaauaucuu

SEQ ID NO: 678504 - RNA, 21 nt, Artificial Sequence
  Synthetic
ugcugagagaauaaauaucuu

SEQ ID NO: 678505 - RNA, 22 nt, Artificial Sequence
  Synthetic
uugcugagagaauaaauaucuu

SEQ ID NO: 678506 - RNA, 23 nt, Artificial Sequence
  Synthetic
auugcugagagaauaaauaucuu

SEQ ID NO: 678507 - RNA, 24 nt, Artificial Sequence
  Synthetic
uauugcugagagaauaaauaucuu

SEQ ID NO: 678508 - RNA, 18 nt, Artificial Sequence
  Synthetic
gggcuggcugaauaucuu

SEQ ID NO: 678509 - RNA, 19 nt, Artificial Sequence
  Synthetic
ugggcuggcugaauaucuu

SEQ ID NO: 678510 - RNA, 20 nt, Artificial Sequence
  Synthetic
uugggcuggcugaauaucuu

SEQ ID NO: 678511 - RNA, 21 nt, Artificial Sequence
  Synthetic
uuugggcuggcugaauaucuu

SEQ ID NO: 678512 - RNA, 22 nt, Artificial Sequence
  Synthetic
cuuugggcuggcugaauaucuu

SEQ ID NO: 678513 - RNA, 23 nt, Artificial Sequence
  Synthetic
ccuuugggcuggcugaauaucuu

SEQ ID NO: 678514 - RNA, 24 nt, Artificial Sequence
  Synthetic
cccuuugggcuggcugaauaucuu

SEQ ID NO: 678515 - RNA, 18 nt, Artificial Sequence
  Synthetic
aauaguguagcauaucuu

SEQ ID NO: 678516 - RNA, 19 nt, Artificial Sequence
  Synthetic
gaauaguguagcauaucuu

SEQ ID NO: 678517 - RNA, 20 nt, Artificial Sequence
  Synthetic
agaauaguguagcauaucuu

SEQ ID NO: 678518 - RNA, 21 nt, Artificial Sequence
  Synthetic
uagaauaguguagcauaucuu

SEQ ID NO: 678519 - RNA, 22 nt, Artificial Sequence
  Synthetic
cuagaauaguguagcauaucuu

SEQ ID NO: 678520 - RNA, 23 nt, Artificial Sequence
  Synthetic
acuagaauaguguagcauaucuu

SEQ ID NO: 678521 - RNA, 24 nt, Artificial Sequence
  Synthetic
aacuagaauaguguagcauaucuu

SEQ ID NO: 678522 - RNA, 18 nt, Artificial Sequence
  Synthetic
agguaauuaauauaucuu

SEQ ID NO: 678523 - RNA, 19 nt, Artificial Sequence
  Synthetic
aagguaauuaauauaucuu

SEQ ID NO: 678524 - RNA, 20 nt, Artificial Sequence
  Synthetic
gaagguaauuaauauaucuu

SEQ ID NO: 678525 - RNA, 21 nt, Artificial Sequence
  Synthetic
agaagguaauuaauauaucuu

SEQ ID NO: 678526 - RNA, 22 nt, Artificial Sequence
  Synthetic
cagaagguaauuaauauaucuu

SEQ ID NO: 678527 - RNA, 23 nt, Artificial Sequence
  Synthetic
acagaagguaauuaauauaucuu

SEQ ID NO: 678528 - RNA, 24 nt, Artificial Sequence
  Synthetic
aacagaagguaauuaauauaucuu

SEQ ID NO: 678529 - RNA, 18 nt, Artificial Sequence
  Synthetic
agagucuugugcuaucuu

SEQ ID NO: 678530 - RNA, 19 nt, Artificial Sequence
  Synthetic
uagagucuugugcuaucuu

SEQ ID NO: 678531 - RNA, 20 nt, Artificial Sequence
  Synthetic
cuagagucuugugcuaucuu

SEQ ID NO: 678532 - RNA, 21 nt, Artificial Sequence
  Synthetic
ccuagagucuugugcuaucuu

SEQ ID NO: 678533 - RNA, 22 nt, Artificial Sequence
  Synthetic
uccuagagucuugugcuaucuu

SEQ ID NO: 678534 - RNA, 23 nt, Artificial Sequence
  Synthetic
guccuagagucuugugcuaucuu

SEQ ID NO: 678535 - RNA, 24 nt, Artificial Sequence
  Synthetic
aguccuagagucuugugcuaucuu

SEQ ID NO: 678536 - RNA, 18 nt, Artificial Sequence
  Synthetic
uaucgaugaagguaucuu

SEQ ID NO: 678537 - RNA, 19 nt, Artificial Sequence
  Synthetic
uuaucgaugaagguaucuu

SEQ ID NO: 678538 - RNA, 20 nt, Artificial Sequence
  Synthetic
cuuaucgaugaagguaucuu

SEQ ID NO: 678539 - RNA, 21 nt, Artificial Sequence
  Synthetic
ccuuaucgaugaagguaucuu

SEQ ID NO: 678540 - RNA, 22 nt, Artificial Sequence
  Synthetic
gccuuaucgaugaagguaucuu

SEQ ID NO: 678541 - RNA, 23 nt, Artificial Sequence
  Synthetic
ugccuuaucgaugaagguaucuu

SEQ ID NO: 678542 - RNA, 24 nt, Artificial Sequence
  Synthetic
uugccuuaucgaugaagguaucuu

SEQ ID NO: 678543 - RNA, 18 nt, Artificial Sequence
  Synthetic
ugcccacaacuguaucuu

SEQ ID NO: 678544 - RNA, 19 nt, Artificial Sequence
  Synthetic
augcccacaacuguaucuu

SEQ ID NO: 678545 - RNA, 20 nt, Artificial Sequence
  Synthetic
caugcccacaacuguaucuu

SEQ ID NO: 678546 - RNA, 21 nt, Artificial Sequence
  Synthetic
ucaugcccacaacuguaucuu

SEQ ID NO: 678547 - RNA, 22 nt, Artificial Sequence
  Synthetic
aucaugcccacaacuguaucuu

SEQ ID NO: 678548 - RNA, 23 nt, Artificial Sequence
  Synthetic
aaucaugcccacaacuguaucuu

SEQ ID NO: 678549 - RNA, 24 nt, Artificial Sequence
  Synthetic
gaaucaugcccacaacuguaucuu

SEQ ID NO: 678550 - RNA, 18 nt, Artificial Sequence
  Synthetic
cacccaccucuguaucuu

SEQ ID NO: 678551 - RNA, 19 nt, Artificial Sequence
  Synthetic
ccacccaccucuguaucuu

SEQ ID NO: 678552 - RNA, 20 nt, Artificial Sequence
  Synthetic
uccacccaccucuguaucuu

SEQ ID NO: 678553 - RNA, 21 nt, Artificial Sequence
  Synthetic
uuccacccaccucuguaucuu

SEQ ID NO: 678554 - RNA, 22 nt, Artificial Sequence
  Synthetic
auuccacccaccucuguaucuu

SEQ ID NO: 678555 - RNA, 23 nt, Artificial Sequence
  Synthetic
uauuccacccaccucuguaucuu

SEQ ID NO: 678556 - RNA, 24 nt, Artificial Sequence
  Synthetic
auauuccacccaccucuguaucuu

SEQ ID NO: 678557 - RNA, 18 nt, Artificial Sequence
  Synthetic
gcuauuuuuuuguaucuu

SEQ ID NO: 678558 - RNA, 19 nt, Artificial Sequence
  Synthetic
ggcuauuuuuuuguaucuu

SEQ ID NO: 678559 - RNA, 20 nt, Artificial Sequence
  Synthetic
aggcuauuuuuuuguaucuu

SEQ ID NO: 678560 - RNA, 21 nt, Artificial Sequence
  Synthetic
aaggcuauuuuuuuguaucuu

SEQ ID NO: 678561 - RNA, 22 nt, Artificial Sequence
  Synthetic
caaggcuauuuuuuuguaucuu

SEQ ID NO: 678562 - RNA, 23 nt, Artificial Sequence
  Synthetic
ccaaggcuauuuuuuuguaucuu

SEQ ID NO: 678563 - RNA, 24 nt, Artificial Sequence
  Synthetic
gccaaggcuauuuuuuuguaucuu

SEQ ID NO: 678564 - RNA, 18 nt, Artificial Sequence
  Synthetic
aauauuuaucauuaucuu

SEQ ID NO: 678565 - RNA, 19 nt, Artificial Sequence
  Synthetic
uaauauuuaucauuaucuu

SEQ ID NO: 678566 - RNA, 20 nt, Artificial Sequence
  Synthetic
cuaauauuuaucauuaucuu

SEQ ID NO: 678567 - RNA, 21 nt, Artificial Sequence
  Synthetic
acuaauauuuaucauuaucuu

SEQ ID NO: 678568 - RNA, 22 nt, Artificial Sequence
  Synthetic
cacuaauauuuaucauuaucuu

SEQ ID NO: 678569 - RNA, 23 nt, Artificial Sequence
  Synthetic
ccacuaauauuuaucauuaucuu

SEQ ID NO: 678570 - RNA, 24 nt, Artificial Sequence
  Synthetic
gccacuaauauuuaucauuaucuu

SEQ ID NO: 678571 - RNA, 18 nt, Artificial Sequence
  Synthetic
caaaagagugcuuaucuu

SEQ ID NO: 678572 - RNA, 19 nt, Artificial Sequence
  Synthetic
ucaaaagagugcuuaucuu

SEQ ID NO: 678573 - RNA, 20 nt, Artificial Sequence
  Synthetic
gucaaaagagugcuuaucuu

SEQ ID NO: 678574 - RNA, 21 nt, Artificial Sequence
  Synthetic
agucaaaagagugcuuaucuu

SEQ ID NO: 678575 - RNA, 22 nt, Artificial Sequence
  Synthetic
aagucaaaagagugcuuaucuu

SEQ ID NO: 678576 - RNA, 23 nt, Artificial Sequence
  Synthetic
gaagucaaaagagugcuuaucuu

SEQ ID NO: 678577 - RNA, 24 nt, Artificial Sequence
  Synthetic
agaagucaaaagagugcuuaucuu

SEQ ID NO: 678578 - RNA, 18 nt, Artificial Sequence
  Synthetic
agauaaagcucuuaucuu

SEQ ID NO: 678579 - RNA, 19 nt, Artificial Sequence
  Synthetic
cagauaaagcucuuaucuu

SEQ ID NO: 678580 - RNA, 20 nt, Artificial Sequence
  Synthetic
ucagauaaagcucuuaucuu

SEQ ID NO: 678581 - RNA, 21 nt, Artificial Sequence
  Synthetic
uucagauaaagcucuuaucuu

SEQ ID NO: 678582 - RNA, 22 nt, Artificial Sequence
  Synthetic
uuucagauaaagcucuuaucuu

SEQ ID NO: 678583 - RNA, 23 nt, Artificial Sequence
  Synthetic
auuucagauaaagcucuuaucuu

SEQ ID NO: 678584 - RNA, 24 nt, Artificial Sequence
  Synthetic
aauuucagauaaagcucuuaucuu

SEQ ID NO: 678585 - RNA, 18 nt, Artificial Sequence
  Synthetic
cuaauuuagaaaacucuu

SEQ ID NO: 678586 - RNA, 19 nt, Artificial Sequence
  Synthetic
acuaauuuagaaaacucuu

SEQ ID NO: 678587 - RNA, 20 nt, Artificial Sequence
  Synthetic
uacuaauuuagaaaacucuu

SEQ ID NO: 678588 - RNA, 21 nt, Artificial Sequence
  Synthetic
auacuaauuuagaaaacucuu

SEQ ID NO: 678589 - RNA, 22 nt, Artificial Sequence
  Synthetic
uauacuaauuuagaaaacucuu

SEQ ID NO: 678590 - RNA, 23 nt, Artificial Sequence
  Synthetic
auauacuaauuuagaaaacucuu

SEQ ID NO: 678591 - RNA, 24 nt, Artificial Sequence
  Synthetic
cauauacuaauuuagaaaacucuu

SEQ ID NO: 678592 - RNA, 18 nt, Artificial Sequence
  Synthetic
aaucuuucucaaacucuu

SEQ ID NO: 678593 - RNA, 19 nt, Artificial Sequence
  Synthetic
aaaucuuucucaaacucuu

SEQ ID NO: 678594 - RNA, 20 nt, Artificial Sequence
  Synthetic
caaaucuuucucaaacucuu

SEQ ID NO: 678595 - RNA, 21 nt, Artificial Sequence
  Synthetic
acaaaucuuucucaaacucuu

SEQ ID NO: 678596 - RNA, 22 nt, Artificial Sequence
  Synthetic
cacaaaucuuucucaaacucuu

SEQ ID NO: 678597 - RNA, 23 nt, Artificial Sequence
  Synthetic
acacaaaucuuucucaaacucuu

SEQ ID NO: 678598 - RNA, 24 nt, Artificial Sequence
  Synthetic
aacacaaaucuuucucaaacucuu

SEQ ID NO: 678599 - RNA, 18 nt, Artificial Sequence
  Synthetic
aauauuugugaaacucuu

SEQ ID NO: 678600 - RNA, 19 nt, Artificial Sequence
  Synthetic
uaauauuugugaaacucuu

SEQ ID NO: 678601 - RNA, 20 nt, Artificial Sequence
  Synthetic
uuaauauuugugaaacucuu

SEQ ID NO: 678602 - RNA, 21 nt, Artificial Sequence
  Synthetic
cuuaauauuugugaaacucuu

SEQ ID NO: 678603 - RNA, 22 nt, Artificial Sequence
  Synthetic
acuuaauauuugugaaacucuu

SEQ ID NO: 678604 - RNA, 23 nt, Artificial Sequence
  Synthetic
cacuuaauauuugugaaacucuu

SEQ ID NO: 678605 - RNA, 24 nt, Artificial Sequence
  Synthetic
ccacuuaauauuugugaaacucuu

SEQ ID NO: 678606 - RNA, 18 nt, Artificial Sequence
  Synthetic
uaaaguaguuaaacucuu

SEQ ID NO: 678607 - RNA, 19 nt, Artificial Sequence
  Synthetic
cuaaaguaguuaaacucuu

SEQ ID NO: 678608 - RNA, 20 nt, Artificial Sequence
  Synthetic
ucuaaaguaguuaaacucuu

SEQ ID NO: 678609 - RNA, 21 nt, Artificial Sequence
  Synthetic
aucuaaaguaguuaaacucuu

SEQ ID NO: 678610 - RNA, 22 nt, Artificial Sequence
  Synthetic
uaucuaaaguaguuaaacucuu

SEQ ID NO: 678611 - RNA, 23 nt, Artificial Sequence
  Synthetic
guaucuaaaguaguuaaacucuu

SEQ ID NO: 678612 - RNA, 24 nt, Artificial Sequence
  Synthetic
uguaucuaaaguaguuaaacucuu

SEQ ID NO: 678613 - RNA, 18 nt, Artificial Sequence
  Synthetic
uuucacagucacacucuu

SEQ ID NO: 678614 - RNA, 19 nt, Artificial Sequence
  Synthetic
cuuucacagucacacucuu

SEQ ID NO: 678615 - RNA, 20 nt, Artificial Sequence
  Synthetic
ccuuucacagucacacucuu

SEQ ID NO: 678616 - RNA, 21 nt, Artificial Sequence
  Synthetic
uccuuucacagucacacucuu

SEQ ID NO: 678617 - RNA, 22 nt, Artificial Sequence
  Synthetic
uuccuuucacagucacacucuu

SEQ ID NO: 678618 - RNA, 23 nt, Artificial Sequence
  Synthetic
uuuccuuucacagucacacucuu

SEQ ID NO: 678619 - RNA, 24 nt, Artificial Sequence
  Synthetic
cuuuccuuucacagucacacucuu

SEQ ID NO: 678620 - RNA, 18 nt, Artificial Sequence
  Synthetic
acagcauauaagacucuu

SEQ ID NO: 678621 - RNA, 19 nt, Artificial Sequence
  Synthetic
uacagcauauaagacucuu

SEQ ID NO: 678622 - RNA, 20 nt, Artificial Sequence
  Synthetic
auacagcauauaagacucuu

SEQ ID NO: 678623 - RNA, 21 nt, Artificial Sequence
  Synthetic
gauacagcauauaagacucuu

SEQ ID NO: 678624 - RNA, 22 nt, Artificial Sequence
  Synthetic
agauacagcauauaagacucuu

SEQ ID NO: 678625 - RNA, 23 nt, Artificial Sequence
  Synthetic
uagauacagcauauaagacucuu

SEQ ID NO: 678626 - RNA, 24 nt, Artificial Sequence
  Synthetic
guagauacagcauauaagacucuu

SEQ ID NO: 678627 - RNA, 18 nt, Artificial Sequence
  Synthetic
uuauuacccgagacucuu

SEQ ID NO: 678628 - RNA, 19 nt, Artificial Sequence
  Synthetic
uuuauuacccgagacucuu

SEQ ID NO: 678629 - RNA, 20 nt, Artificial Sequence
  Synthetic
uuuuauuacccgagacucuu

SEQ ID NO: 678630 - RNA, 21 nt, Artificial Sequence
  Synthetic
cuuuuauuacccgagacucuu

SEQ ID NO: 678631 - RNA, 22 nt, Artificial Sequence
  Synthetic
ucuuuuauuacccgagacucuu

SEQ ID NO: 678632 - RNA, 23 nt, Artificial Sequence
  Synthetic
aucuuuuauuacccgagacucuu

SEQ ID NO: 678633 - RNA, 24 nt, Artificial Sequence
  Synthetic
aaucuuuuauuacccgagacucuu

SEQ ID NO: 678634 - RNA, 18 nt, Artificial Sequence
  Synthetic
agaucggugauuacucuu

SEQ ID NO: 678635 - RNA, 19 nt, Artificial Sequence
  Synthetic
cagaucggugauuacucuu

SEQ ID NO: 678636 - RNA, 20 nt, Artificial Sequence
  Synthetic
ucagaucggugauuacucuu

SEQ ID NO: 678637 - RNA, 21 nt, Artificial Sequence
  Synthetic
aucagaucggugauuacucuu

SEQ ID NO: 678638 - RNA, 22 nt, Artificial Sequence
  Synthetic
gaucagaucggugauuacucuu

SEQ ID NO: 678639 - RNA, 23 nt, Artificial Sequence
  Synthetic
agaucagaucggugauuacucuu

SEQ ID NO: 678640 - RNA, 24 nt, Artificial Sequence
  Synthetic
cagaucagaucggugauuacucuu

SEQ ID NO: 678641 - RNA, 18 nt, Artificial Sequence
  Synthetic
uacauuuguguaccucuu

SEQ ID NO: 678642 - RNA, 19 nt, Artificial Sequence
  Synthetic
auacauuuguguaccucuu

SEQ ID NO: 678643 - RNA, 20 nt, Artificial Sequence
  Synthetic
uauacauuuguguaccucuu

SEQ ID NO: 678644 - RNA, 21 nt, Artificial Sequence
  Synthetic
guauacauuuguguaccucuu

SEQ ID NO: 678645 - RNA, 22 nt, Artificial Sequence
  Synthetic
aguauacauuuguguaccucuu

SEQ ID NO: 678646 - RNA, 23 nt, Artificial Sequence
  Synthetic
aaguauacauuuguguaccucuu

SEQ ID NO: 678647 - RNA, 24 nt, Artificial Sequence
  Synthetic
gaaguauacauuuguguaccucuu

SEQ ID NO: 678648 - RNA, 18 nt, Artificial Sequence
  Synthetic
ugacuucuuuuaccucuu

SEQ ID NO: 678649 - RNA, 19 nt, Artificial Sequence
  Synthetic
augacuucuuuuaccucuu

SEQ ID NO: 678650 - RNA, 20 nt, Artificial Sequence
  Synthetic
aaugacuucuuuuaccucuu

SEQ ID NO: 678651 - RNA, 21 nt, Artificial Sequence
  Synthetic
uaaugacuucuuuuaccucuu

SEQ ID NO: 678652 - RNA, 22 nt, Artificial Sequence
  Synthetic
guaaugacuucuuuuaccucuu

SEQ ID NO: 678653 - RNA, 23 nt, Artificial Sequence
  Synthetic
cguaaugacuucuuuuaccucuu

SEQ ID NO: 678654 - RNA, 24 nt, Artificial Sequence
  Synthetic
gcguaaugacuucuuuuaccucuu

SEQ ID NO: 678655 - RNA, 18 nt, Artificial Sequence
  Synthetic
gacauacuugucccucuu

SEQ ID NO: 678656 - RNA, 19 nt, Artificial Sequence
  Synthetic
agacauacuugucccucuu

SEQ ID NO: 678657 - RNA, 20 nt, Artificial Sequence
  Synthetic
uagacauacuugucccucuu

SEQ ID NO: 678658 - RNA, 21 nt, Artificial Sequence
  Synthetic
guagacauacuugucccucuu

SEQ ID NO: 678659 - RNA, 22 nt, Artificial Sequence
  Synthetic
uguagacauacuugucccucuu

SEQ ID NO: 678660 - RNA, 23 nt, Artificial Sequence
  Synthetic
uuguagacauacuugucccucuu

SEQ ID NO: 678661 - RNA, 24 nt, Artificial Sequence
  Synthetic
uuuguagacauacuugucccucuu

SEQ ID NO: 678662 - RNA, 18 nt, Artificial Sequence
  Synthetic
cuguaaucucagccucuu

SEQ ID NO: 678663 - RNA, 19 nt, Artificial Sequence
  Synthetic
acuguaaucucagccucuu

SEQ ID NO: 678664 - RNA, 20 nt, Artificial Sequence
  Synthetic
gacuguaaucucagccucuu

SEQ ID NO: 678665 - RNA, 21 nt, Artificial Sequence
  Synthetic
ugacuguaaucucagccucuu

SEQ ID NO: 678666 - RNA, 22 nt, Artificial Sequence
  Synthetic
gugacuguaaucucagccucuu

SEQ ID NO: 678667 - RNA, 23 nt, Artificial Sequence
  Synthetic
ggugacuguaaucucagccucuu

SEQ ID NO: 678668 - RNA, 24 nt, Artificial Sequence
  Synthetic
gggugacuguaaucucagccucuu

SEQ ID NO: 678669 - RNA, 18 nt, Artificial Sequence
  Synthetic
auauauagagagccucuu

SEQ ID NO: 678670 - RNA, 19 nt, Artificial Sequence
  Synthetic
aauauauagagagccucuu

SEQ ID NO: 678671 - RNA, 20 nt, Artificial Sequence
  Synthetic
gaauauauagagagccucuu

SEQ ID NO: 678672 - RNA, 21 nt, Artificial Sequence
  Synthetic
ggaauauauagagagccucuu

SEQ ID NO: 678673 - RNA, 22 nt, Artificial Sequence
  Synthetic
gggaauauauagagagccucuu

SEQ ID NO: 678674 - RNA, 23 nt, Artificial Sequence
  Synthetic
ggggaauauauagagagccucuu

SEQ ID NO: 678675 - RNA, 24 nt, Artificial Sequence
  Synthetic
aggggaauauauagagagccucuu

SEQ ID NO: 678676 - RNA, 18 nt, Artificial Sequence
  Synthetic
gaacuucaauggccucuu

SEQ ID NO: 678677 - RNA, 19 nt, Artificial Sequence
  Synthetic
ugaacuucaauggccucuu

SEQ ID NO: 678678 - RNA, 20 nt, Artificial Sequence
  Synthetic
augaacuucaauggccucuu

SEQ ID NO: 678679 - RNA, 21 nt, Artificial Sequence
  Synthetic
gaugaacuucaauggccucuu

SEQ ID NO: 678680 - RNA, 22 nt, Artificial Sequence
  Synthetic
agaugaacuucaauggccucuu

SEQ ID NO: 678681 - RNA, 23 nt, Artificial Sequence
  Synthetic
aagaugaacuucaauggccucuu

SEQ ID NO: 678682 - RNA, 24 nt, Artificial Sequence
  Synthetic
aaagaugaacuucaauggccucuu

SEQ ID NO: 678683 - RNA, 18 nt, Artificial Sequence
  Synthetic
ugaguuuccuggccucuu

SEQ ID NO: 678684 - RNA, 19 nt, Artificial Sequence
  Synthetic
gugaguuuccuggccucuu

SEQ ID NO: 678685 - RNA, 20 nt, Artificial Sequence
  Synthetic
ggugaguuuccuggccucuu

SEQ ID NO: 678686 - RNA, 21 nt, Artificial Sequence
  Synthetic
aggugaguuuccuggccucuu

SEQ ID NO: 678687 - RNA, 22 nt, Artificial Sequence
  Synthetic
uaggugaguuuccuggccucuu

SEQ ID NO: 678688 - RNA, 23 nt, Artificial Sequence
  Synthetic
cuaggugaguuuccuggccucuu

SEQ ID NO: 678689 - RNA, 24 nt, Artificial Sequence
  Synthetic
ucuaggugaguuuccuggccucuu

SEQ ID NO: 678690 - RNA, 18 nt, Artificial Sequence
  Synthetic
auacuauuuuugccucuu

SEQ ID NO: 678691 - RNA, 19 nt, Artificial Sequence
  Synthetic
cauacuauuuuugccucuu

SEQ ID NO: 678692 - RNA, 20 nt, Artificial Sequence
  Synthetic
gcauacuauuuuugccucuu

SEQ ID NO: 678693 - RNA, 21 nt, Artificial Sequence
  Synthetic
ggcauacuauuuuugccucuu

SEQ ID NO: 678694 - RNA, 22 nt, Artificial Sequence
  Synthetic
uggcauacuauuuuugccucuu

SEQ ID NO: 678695 - RNA, 23 nt, Artificial Sequence
  Synthetic
auggcauacuauuuuugccucuu

SEQ ID NO: 678696 - RNA, 24 nt, Artificial Sequence
  Synthetic
aauggcauacuauuuuugccucuu

SEQ ID NO: 678697 - RNA, 18 nt, Artificial Sequence
  Synthetic
auaggauuucauccucuu

SEQ ID NO: 678698 - RNA, 19 nt, Artificial Sequence
  Synthetic
aauaggauuucauccucuu

SEQ ID NO: 678699 - RNA, 20 nt, Artificial Sequence
  Synthetic
caauaggauuucauccucuu

SEQ ID NO: 678700 - RNA, 21 nt, Artificial Sequence
  Synthetic
ucaauaggauuucauccucuu

SEQ ID NO: 678701 - RNA, 22 nt, Artificial Sequence
  Synthetic
uucaauaggauuucauccucuu

SEQ ID NO: 678702 - RNA, 23 nt, Artificial Sequence
  Synthetic
uuucaauaggauuucauccucuu

SEQ ID NO: 678703 - RNA, 24 nt, Artificial Sequence
  Synthetic
uuuucaauaggauuucauccucuu

SEQ ID NO: 678704 - RNA, 18 nt, Artificial Sequence
  Synthetic
cuucaucaagauccucuu

SEQ ID NO: 678705 - RNA, 19 nt, Artificial Sequence
  Synthetic
gcuucaucaagauccucuu

SEQ ID NO: 678706 - RNA, 20 nt, Artificial Sequence
  Synthetic
ugcuucaucaagauccucuu

SEQ ID NO: 678707 - RNA, 21 nt, Artificial Sequence
  Synthetic
augcuucaucaagauccucuu

SEQ ID NO: 678708 - RNA, 22 nt, Artificial Sequence
  Synthetic
aaugcuucaucaagauccucuu

SEQ ID NO: 678709 - RNA, 23 nt, Artificial Sequence
  Synthetic
uaaugcuucaucaagauccucuu

SEQ ID NO: 678710 - RNA, 24 nt, Artificial Sequence
  Synthetic
guaaugcuucaucaagauccucuu

SEQ ID NO: 678711 - RNA, 18 nt, Artificial Sequence
  Synthetic
cuaucuggauauccucuu

SEQ ID NO: 678712 - RNA, 19 nt, Artificial Sequence
  Synthetic
gcuaucuggauauccucuu

SEQ ID NO: 678713 - RNA, 20 nt, Artificial Sequence
  Synthetic
agcuaucuggauauccucuu

SEQ ID NO: 678714 - RNA, 21 nt, Artificial Sequence
  Synthetic
cagcuaucuggauauccucuu

SEQ ID NO: 678715 - RNA, 22 nt, Artificial Sequence
  Synthetic
ccagcuaucuggauauccucuu

SEQ ID NO: 678716 - RNA, 23 nt, Artificial Sequence
  Synthetic
uccagcuaucuggauauccucuu

SEQ ID NO: 678717 - RNA, 24 nt, Artificial Sequence
  Synthetic
uuccagcuaucuggauauccucuu

SEQ ID NO: 678718 - RNA, 18 nt, Artificial Sequence
  Synthetic
ccacuauuaauuccucuu

SEQ ID NO: 678719 - RNA, 19 nt, Artificial Sequence
  Synthetic
accacuauuaauuccucuu

SEQ ID NO: 678720 - RNA, 20 nt, Artificial Sequence
  Synthetic
caccacuauuaauuccucuu

SEQ ID NO: 678721 - RNA, 21 nt, Artificial Sequence
  Synthetic
ccaccacuauuaauuccucuu

SEQ ID NO: 678722 - RNA, 22 nt, Artificial Sequence
  Synthetic
cccaccacuauuaauuccucuu

SEQ ID NO: 678723 - RNA, 23 nt, Artificial Sequence
  Synthetic
ccccaccacuauuaauuccucuu

SEQ ID NO: 678724 - RNA, 24 nt, Artificial Sequence
  Synthetic
gccccaccacuauuaauuccucuu

SEQ ID NO: 678725 - RNA, 18 nt, Artificial Sequence
  Synthetic
ucauauugucuuccucuu

SEQ ID NO: 678726 - RNA, 19 nt, Artificial Sequence
  Synthetic
uucauauugucuuccucuu

SEQ ID NO: 678727 - RNA, 20 nt, Artificial Sequence
  Synthetic
auucauauugucuuccucuu

SEQ ID NO: 678728 - RNA, 21 nt, Artificial Sequence
  Synthetic
cauucauauugucuuccucuu

SEQ ID NO: 678729 - RNA, 22 nt, Artificial Sequence
  Synthetic
acauucauauugucuuccucuu

SEQ ID NO: 678730 - RNA, 23 nt, Artificial Sequence
  Synthetic
uacauucauauugucuuccucuu

SEQ ID NO: 678731 - RNA, 24 nt, Artificial Sequence
  Synthetic
auacauucauauugucuuccucuu

SEQ ID NO: 678732 - RNA, 18 nt, Artificial Sequence
  Synthetic
gauugucccaaagcucuu

SEQ ID NO: 678733 - RNA, 19 nt, Artificial Sequence
  Synthetic
agauugucccaaagcucuu

SEQ ID NO: 678734 - RNA, 20 nt, Artificial Sequence
  Synthetic
aagauugucccaaagcucuu

SEQ ID NO: 678735 - RNA, 21 nt, Artificial Sequence
  Synthetic
gaagauugucccaaagcucuu

SEQ ID NO: 678736 - RNA, 22 nt, Artificial Sequence
  Synthetic
ugaagauugucccaaagcucuu

SEQ ID NO: 678737 - RNA, 23 nt, Artificial Sequence
  Synthetic
cugaagauugucccaaagcucuu

SEQ ID NO: 678738 - RNA, 24 nt, Artificial Sequence
  Synthetic
gcugaagauugucccaaagcucuu

SEQ ID NO: 678739 - RNA, 18 nt, Artificial Sequence
  Synthetic
ccuguaaucccagcucuu

SEQ ID NO: 678740 - RNA, 19 nt, Artificial Sequence
  Synthetic
accuguaaucccagcucuu

SEQ ID NO: 678741 - RNA, 20 nt, Artificial Sequence
  Synthetic
caccuguaaucccagcucuu

SEQ ID NO: 678742 - RNA, 21 nt, Artificial Sequence
  Synthetic
acaccuguaaucccagcucuu

SEQ ID NO: 678743 - RNA, 22 nt, Artificial Sequence
  Synthetic
cacaccuguaaucccagcucuu

SEQ ID NO: 678744 - RNA, 23 nt, Artificial Sequence
  Synthetic
ucacaccuguaaucccagcucuu

SEQ ID NO: 678745 - RNA, 24 nt, Artificial Sequence
  Synthetic
cucacaccuguaaucccagcucuu

SEQ ID NO: 678746 - RNA, 18 nt, Artificial Sequence
  Synthetic
gaguguaagccagcucuu

SEQ ID NO: 678747 - RNA, 19 nt, Artificial Sequence
  Synthetic
ggaguguaagccagcucuu

SEQ ID NO: 678748 - RNA, 20 nt, Artificial Sequence
  Synthetic
uggaguguaagccagcucuu

SEQ ID NO: 678749 - RNA, 21 nt, Artificial Sequence
  Synthetic
uuggaguguaagccagcucuu

SEQ ID NO: 678750 - RNA, 22 nt, Artificial Sequence
  Synthetic
guuggaguguaagccagcucuu

SEQ ID NO: 678751 - RNA, 23 nt, Artificial Sequence
  Synthetic
aguuggaguguaagccagcucuu

SEQ ID NO: 678752 - RNA, 24 nt, Artificial Sequence
  Synthetic
aaguuggaguguaagccagcucuu

SEQ ID NO: 678753 - RNA, 18 nt, Artificial Sequence
  Synthetic
guccuaagaucagcucuu

SEQ ID NO: 678754 - RNA, 19 nt, Artificial Sequence
  Synthetic
aguccuaagaucagcucuu

SEQ ID NO: 678755 - RNA, 20 nt, Artificial Sequence
  Synthetic
uaguccuaagaucagcucuu

SEQ ID NO: 678756 - RNA, 21 nt, Artificial Sequence
  Synthetic
cuaguccuaagaucagcucuu

SEQ ID NO: 678757 - RNA, 22 nt, Artificial Sequence
  Synthetic
acuaguccuaagaucagcucuu

SEQ ID NO: 678758 - RNA, 23 nt, Artificial Sequence
  Synthetic
aacuaguccuaagaucagcucuu

SEQ ID NO: 678759 - RNA, 24 nt, Artificial Sequence
  Synthetic
caacuaguccuaagaucagcucuu

SEQ ID NO: 678760 - RNA, 18 nt, Artificial Sequence
  Synthetic
uuuuaaaacacugcucuu

SEQ ID NO: 678761 - RNA, 19 nt, Artificial Sequence
  Synthetic
uuuuuaaaacacugcucuu

SEQ ID NO: 678762 - RNA, 20 nt, Artificial Sequence
  Synthetic
auuuuuaaaacacugcucuu

SEQ ID NO: 678763 - RNA, 21 nt, Artificial Sequence
  Synthetic
uauuuuuaaaacacugcucuu

SEQ ID NO: 678764 - RNA, 22 nt, Artificial Sequence
  Synthetic
uuauuuuuaaaacacugcucuu

SEQ ID NO: 678765 - RNA, 23 nt, Artificial Sequence
  Synthetic
auuauuuuuaaaacacugcucuu

SEQ ID NO: 678766 - RNA, 24 nt, Artificial Sequence
  Synthetic
cauuauuuuuaaaacacugcucuu

SEQ ID NO: 678767 - RNA, 18 nt, Artificial Sequence
  Synthetic
uggugacaagcugcucuu

SEQ ID NO: 678768 - RNA, 19 nt, Artificial Sequence
  Synthetic
uuggugacaagcugcucuu

SEQ ID NO: 678769 - RNA, 20 nt, Artificial Sequence
  Synthetic
uuuggugacaagcugcucuu

SEQ ID NO: 678770 - RNA, 21 nt, Artificial Sequence
  Synthetic
guuuggugacaagcugcucuu

SEQ ID NO: 678771 - RNA, 22 nt, Artificial Sequence
  Synthetic
uguuuggugacaagcugcucuu

SEQ ID NO: 678772 - RNA, 23 nt, Artificial Sequence
  Synthetic
cuguuuggugacaagcugcucuu

SEQ ID NO: 678773 - RNA, 24 nt, Artificial Sequence
  Synthetic
ucuguuuggugacaagcugcucuu

SEQ ID NO: 678774 - RNA, 18 nt, Artificial Sequence
  Synthetic
acagugccaucugcucuu

SEQ ID NO: 678775 - RNA, 19 nt, Artificial Sequence
  Synthetic
cacagugccaucugcucuu

SEQ ID NO: 678776 - RNA, 20 nt, Artificial Sequence
  Synthetic
ccacagugccaucugcucuu

SEQ ID NO: 678777 - RNA, 21 nt, Artificial Sequence
  Synthetic
uccacagugccaucugcucuu

SEQ ID NO: 678778 - RNA, 22 nt, Artificial Sequence
  Synthetic
uuccacagugccaucugcucuu

SEQ ID NO: 678779 - RNA, 23 nt, Artificial Sequence
  Synthetic
cuuccacagugccaucugcucuu

SEQ ID NO: 678780 - RNA, 24 nt, Artificial Sequence
  Synthetic
acuuccacagugccaucugcucuu

SEQ ID NO: 678781 - RNA, 18 nt, Artificial Sequence
  Synthetic
gauuauuggucugcucuu

SEQ ID NO: 678782 - RNA, 19 nt, Artificial Sequence
  Synthetic
ggauuauuggucugcucuu

SEQ ID NO: 678783 - RNA, 20 nt, Artificial Sequence
  Synthetic
uggauuauuggucugcucuu

SEQ ID NO: 678784 - RNA, 21 nt, Artificial Sequence
  Synthetic
uuggauuauuggucugcucuu

SEQ ID NO: 678785 - RNA, 22 nt, Artificial Sequence
  Synthetic
cuuggauuauuggucugcucuu

SEQ ID NO: 678786 - RNA, 23 nt, Artificial Sequence
  Synthetic
ucuuggauuauuggucugcucuu

SEQ ID NO: 678787 - RNA, 24 nt, Artificial Sequence
  Synthetic
uucuuggauuauuggucugcucuu

SEQ ID NO: 678788 - RNA, 18 nt, Artificial Sequence
  Synthetic
cagagucugagugcucuu

SEQ ID NO: 678789 - RNA, 19 nt, Artificial Sequence
  Synthetic
gcagagucugagugcucuu

SEQ ID NO: 678790 - RNA, 20 nt, Artificial Sequence
  Synthetic
agcagagucugagugcucuu

SEQ ID NO: 678791 - RNA, 21 nt, Artificial Sequence
  Synthetic
aagcagagucugagugcucuu

SEQ ID NO: 678792 - RNA, 22 nt, Artificial Sequence
  Synthetic
gaagcagagucugagugcucuu

SEQ ID NO: 678793 - RNA, 23 nt, Artificial Sequence
  Synthetic
agaagcagagucugagugcucuu

SEQ ID NO: 678794 - RNA, 24 nt, Artificial Sequence
  Synthetic
gagaagcagagucugagugcucuu

SEQ ID NO: 678795 - RNA, 18 nt, Artificial Sequence
  Synthetic
aaagccagccaaucucuu

SEQ ID NO: 678796 - RNA, 19 nt, Artificial Sequence
  Synthetic
caaagccagccaaucucuu

SEQ ID NO: 678797 - RNA, 20 nt, Artificial Sequence
  Synthetic
acaaagccagccaaucucuu

SEQ ID NO: 678798 - RNA, 21 nt, Artificial Sequence
  Synthetic
uacaaagccagccaaucucuu

SEQ ID NO: 678799 - RNA, 22 nt, Artificial Sequence
  Synthetic
auacaaagccagccaaucucuu

SEQ ID NO: 678800 - RNA, 23 nt, Artificial Sequence
  Synthetic
aauacaaagccagccaaucucuu

SEQ ID NO: 678801 - RNA, 24 nt, Artificial Sequence
  Synthetic
caauacaaagccagccaaucucuu

SEQ ID NO: 678802 - RNA, 18 nt, Artificial Sequence
  Synthetic
agaggaacaggaucucuu

SEQ ID NO: 678803 - RNA, 19 nt, Artificial Sequence
  Synthetic
cagaggaacaggaucucuu

SEQ ID NO: 678804 - RNA, 20 nt, Artificial Sequence
  Synthetic
acagaggaacaggaucucuu

SEQ ID NO: 678805 - RNA, 21 nt, Artificial Sequence
  Synthetic
aacagaggaacaggaucucuu

SEQ ID NO: 678806 - RNA, 22 nt, Artificial Sequence
  Synthetic
aaacagaggaacaggaucucuu

SEQ ID NO: 678807 - RNA, 23 nt, Artificial Sequence
  Synthetic
caaacagaggaacaggaucucuu

SEQ ID NO: 678808 - RNA, 24 nt, Artificial Sequence
  Synthetic
gcaaacagaggaacaggaucucuu

SEQ ID NO: 678809 - RNA, 18 nt, Artificial Sequence
  Synthetic
agcacaaggauaucucuu

SEQ ID NO: 678810 - RNA, 19 nt, Artificial Sequence
  Synthetic
aagcacaaggauaucucuu

SEQ ID NO: 678811 - RNA, 20 nt, Artificial Sequence
  Synthetic
gaagcacaaggauaucucuu

SEQ ID NO: 678812 - RNA, 21 nt, Artificial Sequence
  Synthetic
ggaagcacaaggauaucucuu

SEQ ID NO: 678813 - RNA, 22 nt, Artificial Sequence
  Synthetic
uggaagcacaaggauaucucuu

SEQ ID NO: 678814 - RNA, 23 nt, Artificial Sequence
  Synthetic
uuggaagcacaaggauaucucuu

SEQ ID NO: 678815 - RNA, 24 nt, Artificial Sequence
  Synthetic
uuuggaagcacaaggauaucucuu

SEQ ID NO: 678816 - RNA, 18 nt, Artificial Sequence
  Synthetic
uucaaugcauuaucucuu

SEQ ID NO: 678817 - RNA, 19 nt, Artificial Sequence
  Synthetic
guucaaugcauuaucucuu

SEQ ID NO: 678818 - RNA, 20 nt, Artificial Sequence
  Synthetic
uguucaaugcauuaucucuu

SEQ ID NO: 678819 - RNA, 21 nt, Artificial Sequence
  Synthetic
guguucaaugcauuaucucuu

SEQ ID NO: 678820 - RNA, 22 nt, Artificial Sequence
  Synthetic
uguguucaaugcauuaucucuu

SEQ ID NO: 678821 - RNA, 23 nt, Artificial Sequence
  Synthetic
cuguguucaaugcauuaucucuu

SEQ ID NO: 678822 - RNA, 24 nt, Artificial Sequence
  Synthetic
ucuguguucaaugcauuaucucuu

SEQ ID NO: 678823 - RNA, 18 nt, Artificial Sequence
  Synthetic
ggacaggcugacucucuu

SEQ ID NO: 678824 - RNA, 19 nt, Artificial Sequence
  Synthetic
aggacaggcugacucucuu

SEQ ID NO: 678825 - RNA, 20 nt, Artificial Sequence
  Synthetic
aaggacaggcugacucucuu

SEQ ID NO: 678826 - RNA, 21 nt, Artificial Sequence
  Synthetic
aaaggacaggcugacucucuu

SEQ ID NO: 678827 - RNA, 22 nt, Artificial Sequence
  Synthetic
caaaggacaggcugacucucuu

SEQ ID NO: 678828 - RNA, 23 nt, Artificial Sequence
  Synthetic
ucaaaggacaggcugacucucuu

SEQ ID NO: 678829 - RNA, 24 nt, Artificial Sequence
  Synthetic
uucaaaggacaggcugacucucuu

SEQ ID NO: 678830 - RNA, 18 nt, Artificial Sequence
  Synthetic
uguaaaauuuacucucuu

SEQ ID NO: 678831 - RNA, 19 nt, Artificial Sequence
  Synthetic
uuguaaaauuuacucucuu

SEQ ID NO: 678832 - RNA, 20 nt, Artificial Sequence
  Synthetic
guuguaaaauuuacucucuu

SEQ ID NO: 678833 - RNA, 21 nt, Artificial Sequence
  Synthetic
aguuguaaaauuuacucucuu

SEQ ID NO: 678834 - RNA, 22 nt, Artificial Sequence
  Synthetic
aaguuguaaaauuuacucucuu

SEQ ID NO: 678835 - RNA, 23 nt, Artificial Sequence
  Synthetic
caaguuguaaaauuuacucucuu

SEQ ID NO: 678836 - RNA, 24 nt, Artificial Sequence
  Synthetic
gcaaguuguaaaauuuacucucuu

SEQ ID NO: 678837 - RNA, 18 nt, Artificial Sequence
  Synthetic
gaagacugcuccucucuu

SEQ ID NO: 678838 - RNA, 19 nt, Artificial Sequence
  Synthetic
agaagacugcuccucucuu

SEQ ID NO: 678839 - RNA, 20 nt, Artificial Sequence
  Synthetic
cagaagacugcuccucucuu

SEQ ID NO: 678840 - RNA, 21 nt, Artificial Sequence
  Synthetic
acagaagacugcuccucucuu

SEQ ID NO: 678841 - RNA, 22 nt, Artificial Sequence
  Synthetic
cacagaagacugcuccucucuu

SEQ ID NO: 678842 - RNA, 23 nt, Artificial Sequence
  Synthetic
gcacagaagacugcuccucucuu

SEQ ID NO: 678843 - RNA, 24 nt, Artificial Sequence
  Synthetic
agcacagaagacugcuccucucuu

SEQ ID NO: 678844 - RNA, 18 nt, Artificial Sequence
  Synthetic
cagugcacaugcucucuu

SEQ ID NO: 678845 - RNA, 19 nt, Artificial Sequence
  Synthetic
ccagugcacaugcucucuu

SEQ ID NO: 678846 - RNA, 20 nt, Artificial Sequence
  Synthetic
accagugcacaugcucucuu

SEQ ID NO: 678847 - RNA, 21 nt, Artificial Sequence
  Synthetic
uaccagugcacaugcucucuu

SEQ ID NO: 678848 - RNA, 22 nt, Artificial Sequence
  Synthetic
cuaccagugcacaugcucucuu

SEQ ID NO: 678849 - RNA, 23 nt, Artificial Sequence
  Synthetic
ucuaccagugcacaugcucucuu

SEQ ID NO: 678850 - RNA, 24 nt, Artificial Sequence
  Synthetic
uucuaccagugcacaugcucucuu

SEQ ID NO: 678851 - RNA, 18 nt, Artificial Sequence
  Synthetic
gagaucugcugcucucuu

SEQ ID NO: 678852 - RNA, 19 nt, Artificial Sequence
  Synthetic
ggagaucugcugcucucuu

SEQ ID NO: 678853 - RNA, 20 nt, Artificial Sequence
  Synthetic
gggagaucugcugcucucuu

SEQ ID NO: 678854 - RNA, 21 nt, Artificial Sequence
  Synthetic
ugggagaucugcugcucucuu

SEQ ID NO: 678855 - RNA, 22 nt, Artificial Sequence
  Synthetic
cugggagaucugcugcucucuu

SEQ ID NO: 678856 - RNA, 23 nt, Artificial Sequence
  Synthetic
gcugggagaucugcugcucucuu

SEQ ID NO: 678857 - RNA, 24 nt, Artificial Sequence
  Synthetic
ugcugggagaucugcugcucucuu

SEQ ID NO: 678858 - RNA, 18 nt, Artificial Sequence
  Synthetic
ucccacaacaucucucuu

SEQ ID NO: 678859 - RNA, 19 nt, Artificial Sequence
  Synthetic
uucccacaacaucucucuu

SEQ ID NO: 678860 - RNA, 20 nt, Artificial Sequence
  Synthetic
auucccacaacaucucucuu

SEQ ID NO: 678861 - RNA, 21 nt, Artificial Sequence
  Synthetic
aauucccacaacaucucucuu

SEQ ID NO: 678862 - RNA, 22 nt, Artificial Sequence
  Synthetic
aaauucccacaacaucucucuu

SEQ ID NO: 678863 - RNA, 23 nt, Artificial Sequence
  Synthetic
uaaauucccacaacaucucucuu

SEQ ID NO: 678864 - RNA, 24 nt, Artificial Sequence
  Synthetic
auaaauucccacaacaucucucuu

SEQ ID NO: 678865 - RNA, 18 nt, Artificial Sequence
  Synthetic
cuuugacuggucucucuu

SEQ ID NO: 678866 - RNA, 19 nt, Artificial Sequence
  Synthetic
acuuugacuggucucucuu

SEQ ID NO: 678867 - RNA, 20 nt, Artificial Sequence
  Synthetic
gacuuugacuggucucucuu

SEQ ID NO: 678868 - RNA, 21 nt, Artificial Sequence
  Synthetic
agacuuugacuggucucucuu

SEQ ID NO: 678869 - RNA, 22 nt, Artificial Sequence
  Synthetic
gagacuuugacuggucucucuu

SEQ ID NO: 678870 - RNA, 23 nt, Artificial Sequence
  Synthetic
ugagacuuugacuggucucucuu

SEQ ID NO: 678871 - RNA, 24 nt, Artificial Sequence
  Synthetic
augagacuuugacuggucucucuu

SEQ ID NO: 678872 - RNA, 18 nt, Artificial Sequence
  Synthetic
aucaccuccuucucucuu

SEQ ID NO: 678873 - RNA, 19 nt, Artificial Sequence
  Synthetic
caucaccuccuucucucuu

SEQ ID NO: 678874 - RNA, 20 nt, Artificial Sequence
  Synthetic
ucaucaccuccuucucucuu

SEQ ID NO: 678875 - RNA, 21 nt, Artificial Sequence
  Synthetic
aucaucaccuccuucucucuu

SEQ ID NO: 678876 - RNA, 22 nt, Artificial Sequence
  Synthetic
uaucaucaccuccuucucucuu

SEQ ID NO: 678877 - RNA, 23 nt, Artificial Sequence
  Synthetic
guaucaucaccuccuucucucuu

SEQ ID NO: 678878 - RNA, 24 nt, Artificial Sequence
  Synthetic
uguaucaucaccuccuucucucuu

SEQ ID NO: 678879 - RNA, 18 nt, Artificial Sequence
  Synthetic
ggcuaggucaagucucuu

SEQ ID NO: 678880 - RNA, 19 nt, Artificial Sequence
  Synthetic
uggcuaggucaagucucuu

SEQ ID NO: 678881 - RNA, 20 nt, Artificial Sequence
  Synthetic
uuggcuaggucaagucucuu

SEQ ID NO: 678882 - RNA, 21 nt, Artificial Sequence
  Synthetic
guuggcuaggucaagucucuu

SEQ ID NO: 678883 - RNA, 22 nt, Artificial Sequence
  Synthetic
uguuggcuaggucaagucucuu

SEQ ID NO: 678884 - RNA, 23 nt, Artificial Sequence
  Synthetic
uuguuggcuaggucaagucucuu

SEQ ID NO: 678885 - RNA, 24 nt, Artificial Sequence
  Synthetic
uuuguuggcuaggucaagucucuu

SEQ ID NO: 678886 - RNA, 18 nt, Artificial Sequence
  Synthetic
agaugacgugagucucuu

SEQ ID NO: 678887 - RNA, 19 nt, Artificial Sequence
  Synthetic
aagaugacgugagucucuu

SEQ ID NO: 678888 - RNA, 20 nt, Artificial Sequence
  Synthetic
aaagaugacgugagucucuu

SEQ ID NO: 678889 - RNA, 21 nt, Artificial Sequence
  Synthetic
aaaagaugacgugagucucuu

SEQ ID NO: 678890 - RNA, 22 nt, Artificial Sequence
  Synthetic
uaaaagaugacgugagucucuu

SEQ ID NO: 678891 - RNA, 23 nt, Artificial Sequence
  Synthetic
cuaaaagaugacgugagucucuu

SEQ ID NO: 678892 - RNA, 24 nt, Artificial Sequence
  Synthetic
ccuaaaagaugacgugagucucuu

SEQ ID NO: 678893 - RNA, 18 nt, Artificial Sequence
  Synthetic
auauauuuaaggucucuu

SEQ ID NO: 678894 - RNA, 19 nt, Artificial Sequence
  Synthetic
aauauauuuaaggucucuu

SEQ ID NO: 678895 - RNA, 20 nt, Artificial Sequence
  Synthetic
uaauauauuuaaggucucuu

SEQ ID NO: 678896 - RNA, 21 nt, Artificial Sequence
  Synthetic
uuaauauauuuaaggucucuu

SEQ ID NO: 678897 - RNA, 22 nt, Artificial Sequence
  Synthetic
cuuaauauauuuaaggucucuu

SEQ ID NO: 678898 - RNA, 23 nt, Artificial Sequence
  Synthetic
acuuaauauauuuaaggucucuu

SEQ ID NO: 678899 - RNA, 24 nt, Artificial Sequence
  Synthetic
cacuuaauauauuuaaggucucuu

SEQ ID NO: 678900 - RNA, 18 nt, Artificial Sequence
  Synthetic
agaauuucauggucucuu

SEQ ID NO: 678901 - RNA, 19 nt, Artificial Sequence
  Synthetic
gagaauuucauggucucuu

SEQ ID NO: 678902 - RNA, 20 nt, Artificial Sequence
  Synthetic
ggagaauuucauggucucuu

SEQ ID NO: 678903 - RNA, 21 nt, Artificial Sequence
  Synthetic
aggagaauuucauggucucuu

SEQ ID NO: 678904 - RNA, 22 nt, Artificial Sequence
  Synthetic
uaggagaauuucauggucucuu

SEQ ID NO: 678905 - RNA, 23 nt, Artificial Sequence
  Synthetic
guaggagaauuucauggucucuu

SEQ ID NO: 678906 - RNA, 24 nt, Artificial Sequence
  Synthetic
aguaggagaauuucauggucucuu

SEQ ID NO: 678907 - RNA, 18 nt, Artificial Sequence
  Synthetic
cucacaauuuugucucuu

SEQ ID NO: 678908 - RNA, 19 nt, Artificial Sequence
  Synthetic
acucacaauuuugucucuu

SEQ ID NO: 678909 - RNA, 20 nt, Artificial Sequence
  Synthetic
gacucacaauuuugucucuu

SEQ ID NO: 678910 - RNA, 21 nt, Artificial Sequence
  Synthetic
ggacucacaauuuugucucuu

SEQ ID NO: 678911 - RNA, 22 nt, Artificial Sequence
  Synthetic
gggacucacaauuuugucucuu

SEQ ID NO: 678912 - RNA, 23 nt, Artificial Sequence
  Synthetic
ugggacucacaauuuugucucuu

SEQ ID NO: 678913 - RNA, 24 nt, Artificial Sequence
  Synthetic
augggacucacaauuuugucucuu

SEQ ID NO: 678914 - RNA, 18 nt, Artificial Sequence
  Synthetic
cuucugaagcauucucuu

SEQ ID NO: 678915 - RNA, 19 nt, Artificial Sequence
  Synthetic
gcuucugaagcauucucuu

SEQ ID NO: 678916 - RNA, 20 nt, Artificial Sequence
  Synthetic
ugcuucugaagcauucucuu

SEQ ID NO: 678917 - RNA, 21 nt, Artificial Sequence
  Synthetic
augcuucugaagcauucucuu

SEQ ID NO: 678918 - RNA, 22 nt, Artificial Sequence
  Synthetic
aaugcuucugaagcauucucuu

SEQ ID NO: 678919 - RNA, 23 nt, Artificial Sequence
  Synthetic
aaaugcuucugaagcauucucuu

SEQ ID NO: 678920 - RNA, 24 nt, Artificial Sequence
  Synthetic
uaaaugcuucugaagcauucucuu

SEQ ID NO: 678921 - RNA, 18 nt, Artificial Sequence
  Synthetic
uguuucuuguauucucuu

SEQ ID NO: 678922 - RNA, 19 nt, Artificial Sequence
  Synthetic
uuguuucuuguauucucuu

SEQ ID NO: 678923 - RNA, 20 nt, Artificial Sequence
  Synthetic
uuuguuucuuguauucucuu

SEQ ID NO: 678924 - RNA, 21 nt, Artificial Sequence
  Synthetic
auuuguuucuuguauucucuu

SEQ ID NO: 678925 - RNA, 22 nt, Artificial Sequence
  Synthetic
cauuuguuucuuguauucucuu

SEQ ID NO: 678926 - RNA, 23 nt, Artificial Sequence
  Synthetic
gcauuuguuucuuguauucucuu

SEQ ID NO: 678927 - RNA, 24 nt, Artificial Sequence
  Synthetic
agcauuuguuucuuguauucucuu

SEQ ID NO: 678928 - RNA, 18 nt, Artificial Sequence
  Synthetic
aacauaaugacuucucuu

SEQ ID NO: 678929 - RNA, 19 nt, Artificial Sequence
  Synthetic
aaacauaaugacuucucuu

SEQ ID NO: 678930 - RNA, 20 nt, Artificial Sequence
  Synthetic
aaaacauaaugacuucucuu

SEQ ID NO: 678931 - RNA, 21 nt, Artificial Sequence
  Synthetic
aaaaacauaaugacuucucuu

SEQ ID NO: 678932 - RNA, 22 nt, Artificial Sequence
  Synthetic
uaaaaacauaaugacuucucuu

SEQ ID NO: 678933 - RNA, 23 nt, Artificial Sequence
  Synthetic
uuaaaaacauaaugacuucucuu

SEQ ID NO: 678934 - RNA, 24 nt, Artificial Sequence
  Synthetic
uuuaaaaacauaaugacuucucuu

SEQ ID NO: 678935 - RNA, 18 nt, Artificial Sequence
  Synthetic
cacucugaggcuucucuu

SEQ ID NO: 678936 - RNA, 19 nt, Artificial Sequence
  Synthetic
ccacucugaggcuucucuu

SEQ ID NO: 678937 - RNA, 20 nt, Artificial Sequence
  Synthetic
gccacucugaggcuucucuu

SEQ ID NO: 678938 - RNA, 21 nt, Artificial Sequence
  Synthetic
ggccacucugaggcuucucuu

SEQ ID NO: 678939 - RNA, 22 nt, Artificial Sequence
  Synthetic
uggccacucugaggcuucucuu

SEQ ID NO: 678940 - RNA, 23 nt, Artificial Sequence
  Synthetic
cuggccacucugaggcuucucuu

SEQ ID NO: 678941 - RNA, 24 nt, Artificial Sequence
  Synthetic
ccuggccacucugaggcuucucuu

SEQ ID NO: 678942 - RNA, 18 nt, Artificial Sequence
  Synthetic
auacauccaucuucucuu

SEQ ID NO: 678943 - RNA, 19 nt, Artificial Sequence
  Synthetic
aauacauccaucuucucuu

SEQ ID NO: 678944 - RNA, 20 nt, Artificial Sequence
  Synthetic
caauacauccaucuucucuu

SEQ ID NO: 678945 - RNA, 21 nt, Artificial Sequence
  Synthetic
ucaauacauccaucuucucuu

SEQ ID NO: 678946 - RNA, 22 nt, Artificial Sequence
  Synthetic
aucaauacauccaucuucucuu

SEQ ID NO: 678947 - RNA, 23 nt, Artificial Sequence
  Synthetic
aaucaauacauccaucuucucuu

SEQ ID NO: 678948 - RNA, 24 nt, Artificial Sequence
  Synthetic
gaaucaauacauccaucuucucuu

SEQ ID NO: 678949 - RNA, 18 nt, Artificial Sequence
  Synthetic
cuuacacaauuuucucuu

SEQ ID NO: 678950 - RNA, 19 nt, Artificial Sequence
  Synthetic
ucuuacacaauuuucucuu

SEQ ID NO: 678951 - RNA, 20 nt, Artificial Sequence
  Synthetic
gucuuacacaauuuucucuu

SEQ ID NO: 678952 - RNA, 21 nt, Artificial Sequence
  Synthetic
ugucuuacacaauuuucucuu

SEQ ID NO: 678953 - RNA, 22 nt, Artificial Sequence
  Synthetic
uugucuuacacaauuuucucuu

SEQ ID NO: 678954 - RNA, 23 nt, Artificial Sequence
  Synthetic
uuugucuuacacaauuuucucuu

SEQ ID NO: 678955 - RNA, 24 nt, Artificial Sequence
  Synthetic
uuuugucuuacacaauuuucucuu

SEQ ID NO: 678956 - RNA, 18 nt, Artificial Sequence
  Synthetic
aaaguaguguuuucucuu

SEQ ID NO: 678957 - RNA, 19 nt, Artificial Sequence
  Synthetic
gaaaguaguguuuucucuu

SEQ ID NO: 678958 - RNA, 20 nt, Artificial Sequence
  Synthetic
agaaaguaguguuuucucuu

SEQ ID NO: 678959 - RNA, 21 nt, Artificial Sequence
  Synthetic
uagaaaguaguguuuucucuu

SEQ ID NO: 678960 - RNA, 22 nt, Artificial Sequence
  Synthetic
uuagaaaguaguguuuucucuu

SEQ ID NO: 678961 - RNA, 23 nt, Artificial Sequence
  Synthetic
uuuagaaaguaguguuuucucuu

SEQ ID NO: 678962 - RNA, 24 nt, Artificial Sequence
  Synthetic
uuuuagaaaguaguguuuucucuu

SEQ ID NO: 678963 - RNA, 18 nt, Artificial Sequence
  Synthetic
uagaacaaaaaaagucuu

SEQ ID NO: 678964 - RNA, 19 nt, Artificial Sequence
  Synthetic
auagaacaaaaaaagucuu

SEQ ID NO: 678965 - RNA, 20 nt, Artificial Sequence
  Synthetic
aauagaacaaaaaaagucuu

SEQ ID NO: 678966 - RNA, 21 nt, Artificial Sequence
  Synthetic
aaauagaacaaaaaaagucuu

SEQ ID NO: 678967 - RNA, 22 nt, Artificial Sequence
  Synthetic
uaaauagaacaaaaaaagucuu

SEQ ID NO: 678968 - RNA, 23 nt, Artificial Sequence
  Synthetic
guaaauagaacaaaaaaagucuu

SEQ ID NO: 678969 - RNA, 24 nt, Artificial Sequence
  Synthetic
gguaaauagaacaaaaaaagucuu

SEQ ID NO: 678970 - RNA, 18 nt, Artificial Sequence
  Synthetic
cuuagccccacaagucuu

SEQ ID NO: 678971 - RNA, 19 nt, Artificial Sequence
  Synthetic
ucuuagccccacaagucuu

SEQ ID NO: 678972 - RNA, 20 nt, Artificial Sequence
  Synthetic
cucuuagccccacaagucuu

SEQ ID NO: 678973 - RNA, 21 nt, Artificial Sequence
  Synthetic
ucucuuagccccacaagucuu

SEQ ID NO: 678974 - RNA, 22 nt, Artificial Sequence
  Synthetic
gucucuuagccccacaagucuu

SEQ ID NO: 678975 - RNA, 23 nt, Artificial Sequence
  Synthetic
ugucucuuagccccacaagucuu

SEQ ID NO: 678976 - RNA, 24 nt, Artificial Sequence
  Synthetic
cugucucuuagccccacaagucuu

SEQ ID NO: 678977 - RNA, 18 nt, Artificial Sequence
  Synthetic
caccuccagagaagucuu

SEQ ID NO: 678978 - RNA, 19 nt, Artificial Sequence
  Synthetic
ccaccuccagagaagucuu

SEQ ID NO: 678979 - RNA, 20 nt, Artificial Sequence
  Synthetic
cccaccuccagagaagucuu

SEQ ID NO: 678980 - RNA, 21 nt, Artificial Sequence
  Synthetic
acccaccuccagagaagucuu

SEQ ID NO: 678981 - RNA, 22 nt, Artificial Sequence
  Synthetic
cacccaccuccagagaagucuu

SEQ ID NO: 678982 - RNA, 23 nt, Artificial Sequence
  Synthetic
ccacccaccuccagagaagucuu

SEQ ID NO: 678983 - RNA, 24 nt, Artificial Sequence
  Synthetic
uccacccaccuccagagaagucuu

SEQ ID NO: 678984 - RNA, 18 nt, Artificial Sequence
  Synthetic
acauguuauauaagucuu

SEQ ID NO: 678985 - RNA, 19 nt, Artificial Sequence
  Synthetic
gacauguuauauaagucuu

SEQ ID NO: 678986 - RNA, 20 nt, Artificial Sequence
  Synthetic
ugacauguuauauaagucuu

SEQ ID NO: 678987 - RNA, 21 nt, Artificial Sequence
  Synthetic
augacauguuauauaagucuu

SEQ ID NO: 678988 - RNA, 22 nt, Artificial Sequence
  Synthetic
uaugacauguuauauaagucuu

SEQ ID NO: 678989 - RNA, 23 nt, Artificial Sequence
  Synthetic
auaugacauguuauauaagucuu

SEQ ID NO: 678990 - RNA, 24 nt, Artificial Sequence
  Synthetic
cauaugacauguuauauaagucuu

SEQ ID NO: 678991 - RNA, 18 nt, Artificial Sequence
  Synthetic
aauagccaaaacagucuu

SEQ ID NO: 678992 - RNA, 19 nt, Artificial Sequence
  Synthetic
aaauagccaaaacagucuu

SEQ ID NO: 678993 - RNA, 20 nt, Artificial Sequence
  Synthetic
caaauagccaaaacagucuu

SEQ ID NO: 678994 - RNA, 21 nt, Artificial Sequence
  Synthetic
ccaaauagccaaaacagucuu

SEQ ID NO: 678995 - RNA, 22 nt, Artificial Sequence
  Synthetic
uccaaauagccaaaacagucuu

SEQ ID NO: 678996 - RNA, 23 nt, Artificial Sequence
  Synthetic
cuccaaauagccaaaacagucuu

SEQ ID NO: 678997 - RNA, 24 nt, Artificial Sequence
  Synthetic
acuccaaauagccaaaacagucuu

SEQ ID NO: 678998 - RNA, 18 nt, Artificial Sequence
  Synthetic
acccugaacuacagucuu

SEQ ID NO: 678999 - RNA, 19 nt, Artificial Sequence
  Synthetic
aacccugaacuacagucuu

SEQ ID NO: 679000 - RNA, 20 nt, Artificial Sequence
  Synthetic
gaacccugaacuacagucuu

SEQ ID NO: 679001 - RNA, 21 nt, Artificial Sequence
  Synthetic
ggaacccugaacuacagucuu

SEQ ID NO: 679002 - RNA, 22 nt, Artificial Sequence
  Synthetic
aggaacccugaacuacagucuu

SEQ ID NO: 679003 - RNA, 23 nt, Artificial Sequence
  Synthetic
uaggaacccugaacuacagucuu

SEQ ID NO: 679004 - RNA, 24 nt, Artificial Sequence
  Synthetic
auaggaacccugaacuacagucuu

SEQ ID NO: 679005 - RNA, 18 nt, Artificial Sequence
  Synthetic
gggaagauaggcagucuu

SEQ ID NO: 679006 - RNA, 19 nt, Artificial Sequence
  Synthetic
ugggaagauaggcagucuu

SEQ ID NO: 679007 - RNA, 20 nt, Artificial Sequence
  Synthetic
augggaagauaggcagucuu

SEQ ID NO: 679008 - RNA, 21 nt, Artificial Sequence
  Synthetic
caugggaagauaggcagucuu

SEQ ID NO: 679009 - RNA, 22 nt, Artificial Sequence
  Synthetic
acaugggaagauaggcagucuu

SEQ ID NO: 679010 - RNA, 23 nt, Artificial Sequence
  Synthetic
aacaugggaagauaggcagucuu

SEQ ID NO: 679011 - RNA, 24 nt, Artificial Sequence
  Synthetic
caacaugggaagauaggcagucuu

SEQ ID NO: 679012 - RNA, 18 nt, Artificial Sequence
  Synthetic
cagaggauuggcagucuu

SEQ ID NO: 679013 - RNA, 19 nt, Artificial Sequence
  Synthetic
acagaggauuggcagucuu

SEQ ID NO: 679014 - RNA, 20 nt, Artificial Sequence
  Synthetic
cacagaggauuggcagucuu

SEQ ID NO: 679015 - RNA, 21 nt, Artificial Sequence
  Synthetic
gcacagaggauuggcagucuu

SEQ ID NO: 679016 - RNA, 22 nt, Artificial Sequence
  Synthetic
agcacagaggauuggcagucuu

SEQ ID NO: 679017 - RNA, 23 nt, Artificial Sequence
  Synthetic
gagcacagaggauuggcagucuu

SEQ ID NO: 679018 - RNA, 24 nt, Artificial Sequence
  Synthetic
agagcacagaggauuggcagucuu

SEQ ID NO: 679019 - RNA, 18 nt, Artificial Sequence
  Synthetic
uacacaggagggagucuu

SEQ ID NO: 679020 - RNA, 19 nt, Artificial Sequence
  Synthetic
cuacacaggagggagucuu

SEQ ID NO: 679021 - RNA, 20 nt, Artificial Sequence
  Synthetic
ccuacacaggagggagucuu

SEQ ID NO: 679022 - RNA, 21 nt, Artificial Sequence
  Synthetic
accuacacaggagggagucuu

SEQ ID NO: 679023 - RNA, 22 nt, Artificial Sequence
  Synthetic
aaccuacacaggagggagucuu

SEQ ID NO: 679024 - RNA, 23 nt, Artificial Sequence
  Synthetic
gaaccuacacaggagggagucuu

SEQ ID NO: 679025 - RNA, 24 nt, Artificial Sequence
  Synthetic
ggaaccuacacaggagggagucuu

SEQ ID NO: 679026 - RNA, 18 nt, Artificial Sequence
  Synthetic
gcaguuaagaugagucuu

SEQ ID NO: 679027 - RNA, 19 nt, Artificial Sequence
  Synthetic
agcaguuaagaugagucuu

SEQ ID NO: 679028 - RNA, 20 nt, Artificial Sequence
  Synthetic
uagcaguuaagaugagucuu

SEQ ID NO: 679029 - RNA, 21 nt, Artificial Sequence
  Synthetic
auagcaguuaagaugagucuu

SEQ ID NO: 679030 - RNA, 22 nt, Artificial Sequence
  Synthetic
aauagcaguuaagaugagucuu

SEQ ID NO: 679031 - RNA, 23 nt, Artificial Sequence
  Synthetic
uaauagcaguuaagaugagucuu

SEQ ID NO: 679032 - RNA, 24 nt, Artificial Sequence
  Synthetic
guaauagcaguuaagaugagucuu

SEQ ID NO: 679033 - RNA, 18 nt, Artificial Sequence
  Synthetic
aacugacgaucuagucuu

SEQ ID NO: 679034 - RNA, 19 nt, Artificial Sequence
  Synthetic
caacugacgaucuagucuu

SEQ ID NO: 679035 - RNA, 20 nt, Artificial Sequence
  Synthetic
ucaacugacgaucuagucuu

SEQ ID NO: 679036 - RNA, 21 nt, Artificial Sequence
  Synthetic
uucaacugacgaucuagucuu

SEQ ID NO: 679037 - RNA, 22 nt, Artificial Sequence
  Synthetic
cuucaacugacgaucuagucuu

SEQ ID NO: 679038 - RNA, 23 nt, Artificial Sequence
  Synthetic
gcuucaacugacgaucuagucuu

SEQ ID NO: 679039 - RNA, 24 nt, Artificial Sequence
  Synthetic
ugcuucaacugacgaucuagucuu

SEQ ID NO: 679040 - RNA, 18 nt, Artificial Sequence
  Synthetic
uuuugugauuguagucuu

SEQ ID NO: 679041 - RNA, 19 nt, Artificial Sequence
  Synthetic
uuuuugugauuguagucuu

SEQ ID NO: 679042 - RNA, 20 nt, Artificial Sequence
  Synthetic
uuuuuugugauuguagucuu

SEQ ID NO: 679043 - RNA, 21 nt, Artificial Sequence
  Synthetic
cuuuuuugugauuguagucuu

SEQ ID NO: 679044 - RNA, 22 nt, Artificial Sequence
  Synthetic
ucuuuuuugugauuguagucuu

SEQ ID NO: 679045 - RNA, 23 nt, Artificial Sequence
  Synthetic
uucuuuuuugugauuguagucuu

SEQ ID NO: 679046 - RNA, 24 nt, Artificial Sequence
  Synthetic
cuucuuuuuugugauuguagucuu

SEQ ID NO: 679047 - RNA, 18 nt, Artificial Sequence
  Synthetic
auuuuauuaauuagucuu

SEQ ID NO: 679048 - RNA, 19 nt, Artificial Sequence
  Synthetic
uauuuuauuaauuagucuu

SEQ ID NO: 679049 - RNA, 20 nt, Artificial Sequence
  Synthetic
uuauuuuauuaauuagucuu

SEQ ID NO: 679050 - RNA, 21 nt, Artificial Sequence
  Synthetic
auuauuuuauuaauuagucuu

SEQ ID NO: 679051 - RNA, 22 nt, Artificial Sequence
  Synthetic
cauuauuuuauuaauuagucuu

SEQ ID NO: 679052 - RNA, 23 nt, Artificial Sequence
  Synthetic
gcauuauuuuauuaauuagucuu

SEQ ID NO: 679053 - RNA, 24 nt, Artificial Sequence
  Synthetic
agcauuauuuuauuaauuagucuu

SEQ ID NO: 679054 - RNA, 18 nt, Artificial Sequence
  Synthetic
uucuacccucuuagucuu

SEQ ID NO: 679055 - RNA, 19 nt, Artificial Sequence
  Synthetic
guucuacccucuuagucuu

SEQ ID NO: 679056 - RNA, 20 nt, Artificial Sequence
  Synthetic
uguucuacccucuuagucuu

SEQ ID NO: 679057 - RNA, 21 nt, Artificial Sequence
  Synthetic
cuguucuacccucuuagucuu

SEQ ID NO: 679058 - RNA, 22 nt, Artificial Sequence
  Synthetic
acuguucuacccucuuagucuu

SEQ ID NO: 679059 - RNA, 23 nt, Artificial Sequence
  Synthetic
aacuguucuacccucuuagucuu

SEQ ID NO: 679060 - RNA, 24 nt, Artificial Sequence
  Synthetic
gaacuguucuacccucuuagucuu

SEQ ID NO: 679061 - RNA, 18 nt, Artificial Sequence
  Synthetic
ucuuccugguuuagucuu

SEQ ID NO: 679062 - RNA, 19 nt, Artificial Sequence
  Synthetic
uucuuccugguuuagucuu

SEQ ID NO: 679063 - RNA, 21 nt, Artificial Sequence
  Synthetic
acuucuuccugguuuagucuu

SEQ ID NO: 679064 - RNA, 22 nt, Artificial Sequence
  Synthetic
aacuucuuccugguuuagucuu

SEQ ID NO: 679065 - RNA, 23 nt, Artificial Sequence
  Synthetic
caacuucuuccugguuuagucuu

SEQ ID NO: 679066 - RNA, 24 nt, Artificial Sequence
  Synthetic
ucaacuucuuccugguuuagucuu

SEQ ID NO: 679067 - RNA, 20 nt, Artificial Sequence
  Synthetic
uuucuuccugguuuagucuu

SEQ ID NO: 679068 - RNA, 21 nt, Artificial Sequence
  Synthetic
auuucuuccugguuuagucuu

SEQ ID NO: 679069 - RNA, 22 nt, Artificial Sequence
  Synthetic
gauuucuuccugguuuagucuu

SEQ ID NO: 679070 - RNA, 23 nt, Artificial Sequence
  Synthetic
cgauuucuuccugguuuagucuu

SEQ ID NO: 679071 - RNA, 24 nt, Artificial Sequence
  Synthetic
ucgauuucuuccugguuuagucuu

SEQ ID NO: 679072 - RNA, 18 nt, Artificial Sequence
  Synthetic
ggcaagaacucaggucuu

SEQ ID NO: 679073 - RNA, 19 nt, Artificial Sequence
  Synthetic
gggcaagaacucaggucuu

SEQ ID NO: 679074 - RNA, 20 nt, Artificial Sequence
  Synthetic
ggggcaagaacucaggucuu

SEQ ID NO: 679075 - RNA, 21 nt, Artificial Sequence
  Synthetic
uggggcaagaacucaggucuu

SEQ ID NO: 679076 - RNA, 22 nt, Artificial Sequence
  Synthetic
cuggggcaagaacucaggucuu

SEQ ID NO: 679077 - RNA, 23 nt, Artificial Sequence
  Synthetic
gcuggggcaagaacucaggucuu

SEQ ID NO: 679078 - RNA, 24 nt, Artificial Sequence
  Synthetic
agcuggggcaagaacucaggucuu

SEQ ID NO: 679079 - RNA, 18 nt, Artificial Sequence
  Synthetic
uuucaucuccuaggucuu

SEQ ID NO: 679080 - RNA, 19 nt, Artificial Sequence
  Synthetic
uuuucaucuccuaggucuu

SEQ ID NO: 679081 - RNA, 20 nt, Artificial Sequence
  Synthetic
uuuuucaucuccuaggucuu

SEQ ID NO: 679082 - RNA, 21 nt, Artificial Sequence
  Synthetic
cuuuuucaucuccuaggucuu

SEQ ID NO: 679083 - RNA, 22 nt, Artificial Sequence
  Synthetic
gcuuuuucaucuccuaggucuu

SEQ ID NO: 679084 - RNA, 23 nt, Artificial Sequence
  Synthetic
ggcuuuuucaucuccuaggucuu

SEQ ID NO: 679085 - RNA, 24 nt, Artificial Sequence
  Synthetic
aggcuuuuucaucuccuaggucuu

SEQ ID NO: 679086 - RNA, 18 nt, Artificial Sequence
  Synthetic
auauuugaucagggucuu

SEQ ID NO: 679087 - RNA, 19 nt, Artificial Sequence
  Synthetic
gauauuugaucagggucuu

SEQ ID NO: 679088 - RNA, 20 nt, Artificial Sequence
  Synthetic
ugauauuugaucagggucuu

SEQ ID NO: 679089 - RNA, 21 nt, Artificial Sequence
  Synthetic
augauauuugaucagggucuu

SEQ ID NO: 679090 - RNA, 22 nt, Artificial Sequence
  Synthetic
gaugauauuugaucagggucuu

SEQ ID NO: 679091 - RNA, 23 nt, Artificial Sequence
  Synthetic
ugaugauauuugaucagggucuu

SEQ ID NO: 679092 - RNA, 24 nt, Artificial Sequence
  Synthetic
gugaugauauuugaucagggucuu

SEQ ID NO: 679093 - RNA, 18 nt, Artificial Sequence
  Synthetic
guuauaaaucugggucuu

SEQ ID NO: 679094 - RNA, 19 nt, Artificial Sequence
  Synthetic
aguuauaaaucugggucuu

SEQ ID NO: 679095 - RNA, 20 nt, Artificial Sequence
  Synthetic
uaguuauaaaucugggucuu

SEQ ID NO: 679096 - RNA, 21 nt, Artificial Sequence
  Synthetic
cuaguuauaaaucugggucuu

SEQ ID NO: 679097 - RNA, 22 nt, Artificial Sequence
  Synthetic
gcuaguuauaaaucugggucuu

SEQ ID NO: 679098 - RNA, 23 nt, Artificial Sequence
  Synthetic
cgcuaguuauaaaucugggucuu

SEQ ID NO: 679099 - RNA, 24 nt, Artificial Sequence
  Synthetic
acgcuaguuauaaaucugggucuu

SEQ ID NO: 679100 - RNA, 18 nt, Artificial Sequence
  Synthetic
aauccaggagcuggucuu

SEQ ID NO: 679101 - RNA, 19 nt, Artificial Sequence
  Synthetic
gaauccaggagcuggucuu

SEQ ID NO: 679102 - RNA, 20 nt, Artificial Sequence
  Synthetic
ugaauccaggagcuggucuu

SEQ ID NO: 679103 - RNA, 21 nt, Artificial Sequence
  Synthetic
augaauccaggagcuggucuu

SEQ ID NO: 679104 - RNA, 22 nt, Artificial Sequence
  Synthetic
aaugaauccaggagcuggucuu

SEQ ID NO: 679105 - RNA, 23 nt, Artificial Sequence
  Synthetic
caaugaauccaggagcuggucuu

SEQ ID NO: 679106 - RNA, 24 nt, Artificial Sequence
  Synthetic
ccaaugaauccaggagcuggucuu

SEQ ID NO: 679107 - RNA, 18 nt, Artificial Sequence
  Synthetic
aagagugccuuuggucuu

SEQ ID NO: 679108 - RNA, 19 nt, Artificial Sequence
  Synthetic
gaagagugccuuuggucuu

SEQ ID NO: 679109 - RNA, 20 nt, Artificial Sequence
  Synthetic
ggaagagugccuuuggucuu

SEQ ID NO: 679110 - RNA, 21 nt, Artificial Sequence
  Synthetic
gggaagagugccuuuggucuu

SEQ ID NO: 679111 - RNA, 22 nt, Artificial Sequence
  Synthetic
ggggaagagugccuuuggucuu

SEQ ID NO: 679112 - RNA, 23 nt, Artificial Sequence
  Synthetic
aggggaagagugccuuuggucuu

SEQ ID NO: 679113 - RNA, 24 nt, Artificial Sequence
  Synthetic
uaggggaagagugccuuuggucuu

SEQ ID NO: 679114 - RNA, 18 nt, Artificial Sequence
  Synthetic
cagagaugcaaaugucuu

SEQ ID NO: 679115 - RNA, 19 nt, Artificial Sequence
  Synthetic
ucagagaugcaaaugucuu

SEQ ID NO: 679116 - RNA, 20 nt, Artificial Sequence
  Synthetic
aucagagaugcaaaugucuu

SEQ ID NO: 679117 - RNA, 21 nt, Artificial Sequence
  Synthetic
gaucagagaugcaaaugucuu

SEQ ID NO: 679118 - RNA, 22 nt, Artificial Sequence
  Synthetic
ugaucagagaugcaaaugucuu

SEQ ID NO: 679119 - RNA, 23 nt, Artificial Sequence
  Synthetic
uugaucagagaugcaaaugucuu

SEQ ID NO: 679120 - RNA, 24 nt, Artificial Sequence
  Synthetic
uuugaucagagaugcaaaugucuu

SEQ ID NO: 679121 - RNA, 18 nt, Artificial Sequence
  Synthetic
ugaaagaagacaugucuu

SEQ ID NO: 679122 - RNA, 19 nt, Artificial Sequence
  Synthetic
cugaaagaagacaugucuu

SEQ ID NO: 679123 - RNA, 20 nt, Artificial Sequence
  Synthetic
acugaaagaagacaugucuu

SEQ ID NO: 679124 - RNA, 21 nt, Artificial Sequence
  Synthetic
aacugaaagaagacaugucuu

SEQ ID NO: 679125 - RNA, 22 nt, Artificial Sequence
  Synthetic
caacugaaagaagacaugucuu

SEQ ID NO: 679126 - RNA, 23 nt, Artificial Sequence
  Synthetic
acaacugaaagaagacaugucuu

SEQ ID NO: 679127 - RNA, 24 nt, Artificial Sequence
  Synthetic
uacaacugaaagaagacaugucuu

SEQ ID NO: 679128 - RNA, 18 nt, Artificial Sequence
  Synthetic
gaagacaagggaugucuu

SEQ ID NO: 679129 - RNA, 19 nt, Artificial Sequence
  Synthetic
cgaagacaagggaugucuu

SEQ ID NO: 679130 - RNA, 20 nt, Artificial Sequence
  Synthetic
ucgaagacaagggaugucuu

SEQ ID NO: 679131 - RNA, 21 nt, Artificial Sequence
  Synthetic
uucgaagacaagggaugucuu

SEQ ID NO: 679132 - RNA, 22 nt, Artificial Sequence
  Synthetic
auucgaagacaagggaugucuu

SEQ ID NO: 679133 - RNA, 23 nt, Artificial Sequence
  Synthetic
gauucgaagacaagggaugucuu

SEQ ID NO: 679134 - RNA, 24 nt, Artificial Sequence
  Synthetic
agauucgaagacaagggaugucuu

SEQ ID NO: 679135 - RNA, 18 nt, Artificial Sequence
  Synthetic
ugauagacucuaugucuu

SEQ ID NO: 679136 - RNA, 19 nt, Artificial Sequence
  Synthetic
gugauagacucuaugucuu

SEQ ID NO: 679137 - RNA, 20 nt, Artificial Sequence
  Synthetic
ugugauagacucuaugucuu

SEQ ID NO: 679138 - RNA, 21 nt, Artificial Sequence
  Synthetic
cugugauagacucuaugucuu

SEQ ID NO: 679139 - RNA, 22 nt, Artificial Sequence
  Synthetic
ucugugauagacucuaugucuu

SEQ ID NO: 679140 - RNA, 23 nt, Artificial Sequence
  Synthetic
cucugugauagacucuaugucuu

SEQ ID NO: 679141 - RNA, 24 nt, Artificial Sequence
  Synthetic
gcucugugauagacucuaugucuu

SEQ ID NO: 679142 - RNA, 18 nt, Artificial Sequence
  Synthetic
aggcuuuuaguaugucuu

SEQ ID NO: 679143 - RNA, 19 nt, Artificial Sequence
  Synthetic
caggcuuuuaguaugucuu

SEQ ID NO: 679144 - RNA, 20 nt, Artificial Sequence
  Synthetic
ucaggcuuuuaguaugucuu

SEQ ID NO: 679145 - RNA, 21 nt, Artificial Sequence
  Synthetic
cucaggcuuuuaguaugucuu

SEQ ID NO: 679146 - RNA, 22 nt, Artificial Sequence
  Synthetic
gcucaggcuuuuaguaugucuu

SEQ ID NO: 679147 - RNA, 23 nt, Artificial Sequence
  Synthetic
ggcucaggcuuuuaguaugucuu

SEQ ID NO: 679148 - RNA, 24 nt, Artificial Sequence
  Synthetic
gggcucaggcuuuuaguaugucuu

SEQ ID NO: 679149 - RNA, 18 nt, Artificial Sequence
  Synthetic
aaggccaaagacugucuu

SEQ ID NO: 679150 - RNA, 19 nt, Artificial Sequence
  Synthetic
aaaggccaaagacugucuu

SEQ ID NO: 679151 - RNA, 20 nt, Artificial Sequence
  Synthetic
uaaaggccaaagacugucuu

SEQ ID NO: 679152 - RNA, 21 nt, Artificial Sequence
  Synthetic
auaaaggccaaagacugucuu

SEQ ID NO: 679153 - RNA, 22 nt, Artificial Sequence
  Synthetic
uauaaaggccaaagacugucuu

SEQ ID NO: 679154 - RNA, 23 nt, Artificial Sequence
  Synthetic
auauaaaggccaaagacugucuu

SEQ ID NO: 679155 - RNA, 24 nt, Artificial Sequence
  Synthetic
aauauaaaggccaaagacugucuu

SEQ ID NO: 679156 - RNA, 18 nt, Artificial Sequence
  Synthetic
auguuucccuacugucuu

SEQ ID NO: 679157 - RNA, 19 nt, Artificial Sequence
  Synthetic
aauguuucccuacugucuu

SEQ ID NO: 679158 - RNA, 20 nt, Artificial Sequence
  Synthetic
caauguuucccuacugucuu

SEQ ID NO: 679159 - RNA, 21 nt, Artificial Sequence
  Synthetic
ucaauguuucccuacugucuu

SEQ ID NO: 679160 - RNA, 22 nt, Artificial Sequence
  Synthetic
uucaauguuucccuacugucuu

SEQ ID NO: 679161 - RNA, 23 nt, Artificial Sequence
  Synthetic
cuucaauguuucccuacugucuu

SEQ ID NO: 679162 - RNA, 24 nt, Artificial Sequence
  Synthetic
ccuucaauguuucccuacugucuu

SEQ ID NO: 679163 - RNA, 18 nt, Artificial Sequence
  Synthetic
gcacuacaaaauugucuu

SEQ ID NO: 679164 - RNA, 19 nt, Artificial Sequence
  Synthetic
agcacuacaaaauugucuu

SEQ ID NO: 679165 - RNA, 20 nt, Artificial Sequence
  Synthetic
cagcacuacaaaauugucuu

SEQ ID NO: 679166 - RNA, 21 nt, Artificial Sequence
  Synthetic
acagcacuacaaaauugucuu

SEQ ID NO: 679167 - RNA, 22 nt, Artificial Sequence
  Synthetic
uacagcacuacaaaauugucuu

SEQ ID NO: 679168 - RNA, 23 nt, Artificial Sequence
  Synthetic
cuacagcacuacaaaauugucuu

SEQ ID NO: 679169 - RNA, 24 nt, Artificial Sequence
  Synthetic
gcuacagcacuacaaaauugucuu

SEQ ID NO: 679170 - RNA, 18 nt, Artificial Sequence
  Synthetic
auaaaacaauguugucuu

SEQ ID NO: 679171 - RNA, 19 nt, Artificial Sequence
  Synthetic
uauaaaacaauguugucuu

SEQ ID NO: 679172 - RNA, 20 nt, Artificial Sequence
  Synthetic
cuauaaaacaauguugucuu

SEQ ID NO: 679173 - RNA, 21 nt, Artificial Sequence
  Synthetic
acuauaaaacaauguugucuu

SEQ ID NO: 679174 - RNA, 22 nt, Artificial Sequence
  Synthetic
uacuauaaaacaauguugucuu

SEQ ID NO: 679175 - RNA, 23 nt, Artificial Sequence
  Synthetic
cuacuauaaaacaauguugucuu

SEQ ID NO: 679176 - RNA, 24 nt, Artificial Sequence
  Synthetic
ccuacuauaaaacaauguugucuu

SEQ ID NO: 679177 - RNA, 18 nt, Artificial Sequence
  Synthetic
uuuuuguuuuguugucuu

SEQ ID NO: 679178 - RNA, 19 nt, Artificial Sequence
  Synthetic
uuuuuuguuuuguugucuu

SEQ ID NO: 679179 - RNA, 20 nt, Artificial Sequence
  Synthetic
auuuuuuguuuuguugucuu

SEQ ID NO: 679180 - RNA, 21 nt, Artificial Sequence
  Synthetic
aauuuuuuguuuuguugucuu

SEQ ID NO: 679181 - RNA, 22 nt, Artificial Sequence
  Synthetic
aaauuuuuuguuuuguugucuu

SEQ ID NO: 679182 - RNA, 23 nt, Artificial Sequence
  Synthetic
aaaauuuuuuguuuuguugucuu

SEQ ID NO: 679183 - RNA, 24 nt, Artificial Sequence
  Synthetic
gaaaauuuuuuguuuuguugucuu

SEQ ID NO: 679184 - RNA, 18 nt, Artificial Sequence
  Synthetic
aauccuucucaaauucuu

SEQ ID NO: 679185 - RNA, 19 nt, Artificial Sequence
  Synthetic
caauccuucucaaauucuu

SEQ ID NO: 679186 - RNA, 20 nt, Artificial Sequence
  Synthetic
ccaauccuucucaaauucuu

SEQ ID NO: 679187 - RNA, 21 nt, Artificial Sequence
  Synthetic
accaauccuucucaaauucuu

SEQ ID NO: 679188 - RNA, 22 nt, Artificial Sequence
  Synthetic
caccaauccuucucaaauucuu

SEQ ID NO: 679189 - RNA, 23 nt, Artificial Sequence
  Synthetic
acaccaauccuucucaaauucuu

SEQ ID NO: 679190 - RNA, 24 nt, Artificial Sequence
  Synthetic
aacaccaauccuucucaaauucuu

SEQ ID NO: 679191 - RNA, 18 nt, Artificial Sequence
  Synthetic
cgacaaaugggaauucuu

SEQ ID NO: 679192 - RNA, 19 nt, Artificial Sequence
  Synthetic
acgacaaaugggaauucuu

SEQ ID NO: 679193 - RNA, 20 nt, Artificial Sequence
  Synthetic
gacgacaaaugggaauucuu

SEQ ID NO: 679194 - RNA, 21 nt, Artificial Sequence
  Synthetic
agacgacaaaugggaauucuu

SEQ ID NO: 679195 - RNA, 22 nt, Artificial Sequence
  Synthetic
cagacgacaaaugggaauucuu

SEQ ID NO: 679196 - RNA, 23 nt, Artificial Sequence
  Synthetic
ccagacgacaaaugggaauucuu

SEQ ID NO: 679197 - RNA, 24 nt, Artificial Sequence
  Synthetic
gccagacgacaaaugggaauucuu

SEQ ID NO: 679198 - RNA, 18 nt, Artificial Sequence
  Synthetic
aauaugaaaauaauucuu

SEQ ID NO: 679199 - RNA, 19 nt, Artificial Sequence
  Synthetic
uaauaugaaaauaauucuu

SEQ ID NO: 679200 - RNA, 20 nt, Artificial Sequence
  Synthetic
cuaauaugaaaauaauucuu

SEQ ID NO: 679201 - RNA, 21 nt, Artificial Sequence
  Synthetic
acuaauaugaaaauaauucuu

SEQ ID NO: 679202 - RNA, 22 nt, Artificial Sequence
  Synthetic
aacuaauaugaaaauaauucuu

SEQ ID NO: 679203 - RNA, 23 nt, Artificial Sequence
  Synthetic
aaacuaauaugaaaauaauucuu

SEQ ID NO: 679204 - RNA, 24 nt, Artificial Sequence
  Synthetic
aaaacuaauaugaaaauaauucuu

SEQ ID NO: 679205 - RNA, 18 nt, Artificial Sequence
  Synthetic
cauccucauauaauucuu

SEQ ID NO: 679206 - RNA, 19 nt, Artificial Sequence
  Synthetic
acauccucauauaauucuu

SEQ ID NO: 679207 - RNA, 20 nt, Artificial Sequence
  Synthetic
uacauccucauauaauucuu

SEQ ID NO: 679208 - RNA, 21 nt, Artificial Sequence
  Synthetic
auacauccucauauaauucuu

SEQ ID NO: 679209 - RNA, 22 nt, Artificial Sequence
  Synthetic
uauacauccucauauaauucuu

SEQ ID NO: 679210 - RNA, 23 nt, Artificial Sequence
  Synthetic
auauacauccucauauaauucuu

SEQ ID NO: 679211 - RNA, 24 nt, Artificial Sequence
  Synthetic
aauauacauccucauauaauucuu

SEQ ID NO: 679212 - RNA, 18 nt, Artificial Sequence
  Synthetic
ucgaauauuuuaauucuu

SEQ ID NO: 679213 - RNA, 19 nt, Artificial Sequence
  Synthetic
aucgaauauuuuaauucuu

SEQ ID NO: 679214 - RNA, 20 nt, Artificial Sequence
  Synthetic
aaucgaauauuuuaauucuu

SEQ ID NO: 679215 - RNA, 21 nt, Artificial Sequence
  Synthetic
uaaucgaauauuuuaauucuu

SEQ ID NO: 679216 - RNA, 22 nt, Artificial Sequence
  Synthetic
uuaaucgaauauuuuaauucuu

SEQ ID NO: 679217 - RNA, 23 nt, Artificial Sequence
  Synthetic
auuaaucgaauauuuuaauucuu

SEQ ID NO: 679218 - RNA, 24 nt, Artificial Sequence
  Synthetic
cauuaaucgaauauuuuaauucuu

SEQ ID NO: 679219 - RNA, 18 nt, Artificial Sequence
  Synthetic
ccucauacuaacauucuu

SEQ ID NO: 679220 - RNA, 19 nt, Artificial Sequence
  Synthetic
accucauacuaacauucuu

SEQ ID NO: 679221 - RNA, 20 nt, Artificial Sequence
  Synthetic
aaccucauacuaacauucuu

SEQ ID NO: 679222 - RNA, 21 nt, Artificial Sequence
  Synthetic
aaaccucauacuaacauucuu

SEQ ID NO: 679223 - RNA, 22 nt, Artificial Sequence
  Synthetic
aaaaccucauacuaacauucuu

SEQ ID NO: 679224 - RNA, 23 nt, Artificial Sequence
  Synthetic
gaaaaccucauacuaacauucuu

SEQ ID NO: 679225 - RNA, 24 nt, Artificial Sequence
  Synthetic
agaaaaccucauacuaacauucuu

SEQ ID NO: 679226 - RNA, 18 nt, Artificial Sequence
  Synthetic
uagauauguaccauucuu

SEQ ID NO: 679227 - RNA, 19 nt, Artificial Sequence
  Synthetic
cuagauauguaccauucuu

SEQ ID NO: 679228 - RNA, 20 nt, Artificial Sequence
  Synthetic
acuagauauguaccauucuu

SEQ ID NO: 679229 - RNA, 21 nt, Artificial Sequence
  Synthetic
gacuagauauguaccauucuu

SEQ ID NO: 679230 - RNA, 22 nt, Artificial Sequence
  Synthetic
agacuagauauguaccauucuu

SEQ ID NO: 679231 - RNA, 23 nt, Artificial Sequence
  Synthetic
uagacuagauauguaccauucuu

SEQ ID NO: 679232 - RNA, 24 nt, Artificial Sequence
  Synthetic
auagacuagauauguaccauucuu

SEQ ID NO: 679233 - RNA, 18 nt, Artificial Sequence
  Synthetic
gaaaauucacucauucuu

SEQ ID NO: 679234 - RNA, 19 nt, Artificial Sequence
  Synthetic
agaaaauucacucauucuu

SEQ ID NO: 679235 - RNA, 20 nt, Artificial Sequence
  Synthetic
cagaaaauucacucauucuu

SEQ ID NO: 679236 - RNA, 21 nt, Artificial Sequence
  Synthetic
gcagaaaauucacucauucuu

SEQ ID NO: 679237 - RNA, 22 nt, Artificial Sequence
  Synthetic
agcagaaaauucacucauucuu

SEQ ID NO: 679238 - RNA, 23 nt, Artificial Sequence
  Synthetic
gagcagaaaauucacucauucuu

SEQ ID NO: 679239 - RNA, 24 nt, Artificial Sequence
  Synthetic
ggagcagaaaauucacucauucuu

SEQ ID NO: 679240 - RNA, 18 nt, Artificial Sequence
  Synthetic
ucuuuaggccucauucuu

SEQ ID NO: 679241 - RNA, 19 nt, Artificial Sequence
  Synthetic
gucuuuaggccucauucuu

SEQ ID NO: 679242 - RNA, 20 nt, Artificial Sequence
  Synthetic
agucuuuaggccucauucuu

SEQ ID NO: 679243 - RNA, 21 nt, Artificial Sequence
  Synthetic
aagucuuuaggccucauucuu

SEQ ID NO: 679244 - RNA, 22 nt, Artificial Sequence
  Synthetic
uaagucuuuaggccucauucuu

SEQ ID NO: 679245 - RNA, 23 nt, Artificial Sequence
  Synthetic
auaagucuuuaggccucauucuu

SEQ ID NO: 679246 - RNA, 24 nt, Artificial Sequence
  Synthetic
aauaagucuuuaggccucauucuu

SEQ ID NO: 679247 - RNA, 18 nt, Artificial Sequence
  Synthetic
uuuauaaucuucauucuu

SEQ ID NO: 679248 - RNA, 19 nt, Artificial Sequence
  Synthetic
auuuauaaucuucauucuu

SEQ ID NO: 679249 - RNA, 20 nt, Artificial Sequence
  Synthetic
aauuuauaaucuucauucuu

SEQ ID NO: 679250 - RNA, 21 nt, Artificial Sequence
  Synthetic
gaauuuauaaucuucauucuu

SEQ ID NO: 679251 - RNA, 22 nt, Artificial Sequence
  Synthetic
ggaauuuauaaucuucauucuu

SEQ ID NO: 679252 - RNA, 23 nt, Artificial Sequence
  Synthetic
gggaauuuauaaucuucauucuu

SEQ ID NO: 679253 - RNA, 24 nt, Artificial Sequence
  Synthetic
cgggaauuuauaaucuucauucuu

SEQ ID NO: 679254 - RNA, 18 nt, Artificial Sequence
  Synthetic
guguuguauaagauucuu

SEQ ID NO: 679255 - RNA, 19 nt, Artificial Sequence
  Synthetic
aguguuguauaagauucuu

SEQ ID NO: 679256 - RNA, 20 nt, Artificial Sequence
  Synthetic
uaguguuguauaagauucuu

SEQ ID NO: 679257 - RNA, 21 nt, Artificial Sequence
  Synthetic
guaguguuguauaagauucuu

SEQ ID NO: 679258 - RNA, 22 nt, Artificial Sequence
  Synthetic
uguaguguuguauaagauucuu

SEQ ID NO: 679259 - RNA, 23 nt, Artificial Sequence
  Synthetic
cuguaguguuguauaagauucuu

SEQ ID NO: 679260 - RNA, 24 nt, Artificial Sequence
  Synthetic
acuguaguguuguauaagauucuu

SEQ ID NO: 679261 - RNA, 18 nt, Artificial Sequence
  Synthetic
aguuaagaacagauucuu

SEQ ID NO: 679262 - RNA, 19 nt, Artificial Sequence
  Synthetic
caguuaagaacagauucuu

SEQ ID NO: 679263 - RNA, 20 nt, Artificial Sequence
  Synthetic
gcaguuaagaacagauucuu

SEQ ID NO: 679264 - RNA, 21 nt, Artificial Sequence
  Synthetic
ggcaguuaagaacagauucuu

SEQ ID NO: 679265 - RNA, 22 nt, Artificial Sequence
  Synthetic
uggcaguuaagaacagauucuu

SEQ ID NO: 679266 - RNA, 23 nt, Artificial Sequence
  Synthetic
auggcaguuaagaacagauucuu

SEQ ID NO: 679267 - RNA, 24 nt, Artificial Sequence
  Synthetic
gauggcaguuaagaacagauucuu

SEQ ID NO: 679268 - RNA, 18 nt, Artificial Sequence
  Synthetic
agucuuuuucagauucuu

SEQ ID NO: 679269 - RNA, 19 nt, Artificial Sequence
  Synthetic
gagucuuuuucagauucuu

SEQ ID NO: 679270 - RNA, 20 nt, Artificial Sequence
  Synthetic
ugagucuuuuucagauucuu

SEQ ID NO: 679271 - RNA, 21 nt, Artificial Sequence
  Synthetic
augagucuuuuucagauucuu

SEQ ID NO: 679272 - RNA, 22 nt, Artificial Sequence
  Synthetic
caugagucuuuuucagauucuu

SEQ ID NO: 679273 - RNA, 23 nt, Artificial Sequence
  Synthetic
acaugagucuuuuucagauucuu

SEQ ID NO: 679274 - RNA, 24 nt, Artificial Sequence
  Synthetic
uacaugagucuuuuucagauucuu

SEQ ID NO: 679275 - RNA, 18 nt, Artificial Sequence
  Synthetic
cugugugaggagauucuu

SEQ ID NO: 679276 - RNA, 19 nt, Artificial Sequence
  Synthetic
gcugugugaggagauucuu

SEQ ID NO: 679277 - RNA, 20 nt, Artificial Sequence
  Synthetic
ggcugugugaggagauucuu

SEQ ID NO: 679278 - RNA, 21 nt, Artificial Sequence
  Synthetic
aggcugugugaggagauucuu

SEQ ID NO: 679279 - RNA, 22 nt, Artificial Sequence
  Synthetic
aaggcugugugaggagauucuu

SEQ ID NO: 679280 - RNA, 23 nt, Artificial Sequence
  Synthetic
caaggcugugugaggagauucuu

SEQ ID NO: 679281 - RNA, 24 nt, Artificial Sequence
  Synthetic
ccaaggcugugugaggagauucuu

SEQ ID NO: 679282 - RNA, 18 nt, Artificial Sequence
  Synthetic
accaguguggagauucuu

SEQ ID NO: 679283 - RNA, 19 nt, Artificial Sequence
  Synthetic
aaccaguguggagauucuu

SEQ ID NO: 679284 - RNA, 20 nt, Artificial Sequence
  Synthetic
aaaccaguguggagauucuu

SEQ ID NO: 679285 - RNA, 21 nt, Artificial Sequence
  Synthetic
aaaaccaguguggagauucuu

SEQ ID NO: 679286 - RNA, 22 nt, Artificial Sequence
  Synthetic
gaaaaccaguguggagauucuu

SEQ ID NO: 679287 - RNA, 23 nt, Artificial Sequence
  Synthetic
ugaaaaccaguguggagauucuu

SEQ ID NO: 679288 - RNA, 24 nt, Artificial Sequence
  Synthetic
gugaaaaccaguguggagauucuu

SEQ ID NO: 679289 - RNA, 18 nt, Artificial Sequence
  Synthetic
cccauuuuacugauucuu

SEQ ID NO: 679290 - RNA, 19 nt, Artificial Sequence
  Synthetic
ucccauuuuacugauucuu

SEQ ID NO: 679291 - RNA, 20 nt, Artificial Sequence
  Synthetic
gucccauuuuacugauucuu

SEQ ID NO: 679292 - RNA, 21 nt, Artificial Sequence
  Synthetic
ugucccauuuuacugauucuu

SEQ ID NO: 679293 - RNA, 22 nt, Artificial Sequence
  Synthetic
gugucccauuuuacugauucuu

SEQ ID NO: 679294 - RNA, 23 nt, Artificial Sequence
  Synthetic
ugugucccauuuuacugauucuu

SEQ ID NO: 679295 - RNA, 24 nt, Artificial Sequence
  Synthetic
gugugucccauuuuacugauucuu

SEQ ID NO: 679296 - RNA, 18 nt, Artificial Sequence
  Synthetic
agaaggaaagugauucuu

SEQ ID NO: 679297 - RNA, 19 nt, Artificial Sequence
  Synthetic
cagaaggaaagugauucuu

SEQ ID NO: 679298 - RNA, 20 nt, Artificial Sequence
  Synthetic
acagaaggaaagugauucuu

SEQ ID NO: 679299 - RNA, 21 nt, Artificial Sequence
  Synthetic
cacagaaggaaagugauucuu

SEQ ID NO: 679300 - RNA, 22 nt, Artificial Sequence
  Synthetic
ccacagaaggaaagugauucuu

SEQ ID NO: 679301 - RNA, 23 nt, Artificial Sequence
  Synthetic
accacagaaggaaagugauucuu

SEQ ID NO: 679302 - RNA, 24 nt, Artificial Sequence
  Synthetic
aaccacagaaggaaagugauucuu

SEQ ID NO: 679303 - RNA, 18 nt, Artificial Sequence
  Synthetic
gauuuaacaaauauucuu

SEQ ID NO: 679304 - RNA, 19 nt, Artificial Sequence
  Synthetic
cgauuuaacaaauauucuu

SEQ ID NO: 679305 - RNA, 20 nt, Artificial Sequence
  Synthetic
ccgauuuaacaaauauucuu

SEQ ID NO: 679306 - RNA, 21 nt, Artificial Sequence
  Synthetic
accgauuuaacaaauauucuu

SEQ ID NO: 679307 - RNA, 22 nt, Artificial Sequence
  Synthetic
uaccgauuuaacaaauauucuu

SEQ ID NO: 679308 - RNA, 23 nt, Artificial Sequence
  Synthetic
auaccgauuuaacaaauauucuu

SEQ ID NO: 679309 - RNA, 24 nt, Artificial Sequence
  Synthetic
uauaccgauuuaacaaauauucuu

SEQ ID NO: 679310 - RNA, 18 nt, Artificial Sequence
  Synthetic
uuucugaacucuauucuu

SEQ ID NO: 679311 - RNA, 19 nt, Artificial Sequence
  Synthetic
uuuucugaacucuauucuu

SEQ ID NO: 679312 - RNA, 20 nt, Artificial Sequence
  Synthetic
cuuuucugaacucuauucuu

SEQ ID NO: 679313 - RNA, 21 nt, Artificial Sequence
  Synthetic
gcuuuucugaacucuauucuu

SEQ ID NO: 679314 - RNA, 22 nt, Artificial Sequence
  Synthetic
agcuuuucugaacucuauucuu

SEQ ID NO: 679315 - RNA, 23 nt, Artificial Sequence
  Synthetic
aagcuuuucugaacucuauucuu

SEQ ID NO: 679316 - RNA, 24 nt, Artificial Sequence
  Synthetic
caagcuuuucugaacucuauucuu

SEQ ID NO: 679317 - RNA, 18 nt, Artificial Sequence
  Synthetic
uaaggaaggucuauucuu

SEQ ID NO: 679318 - RNA, 19 nt, Artificial Sequence
  Synthetic
guaaggaaggucuauucuu

SEQ ID NO: 679319 - RNA, 20 nt, Artificial Sequence
  Synthetic
aguaaggaaggucuauucuu

SEQ ID NO: 679320 - RNA, 21 nt, Artificial Sequence
  Synthetic
gaguaaggaaggucuauucuu

SEQ ID NO: 679321 - RNA, 22 nt, Artificial Sequence
  Synthetic
ugaguaaggaaggucuauucuu

SEQ ID NO: 679322 - RNA, 23 nt, Artificial Sequence
  Synthetic
cugaguaaggaaggucuauucuu

SEQ ID NO: 679323 - RNA, 24 nt, Artificial Sequence
  Synthetic
acugaguaaggaaggucuauucuu

SEQ ID NO: 679324 - RNA, 18 nt, Artificial Sequence
  Synthetic
gaaaaaauaaaacuucuu

SEQ ID NO: 679325 - RNA, 19 nt, Artificial Sequence
  Synthetic
ggaaaaaauaaaacuucuu

SEQ ID NO: 679326 - RNA, 20 nt, Artificial Sequence
  Synthetic
uggaaaaaauaaaacuucuu

SEQ ID NO: 679327 - RNA, 21 nt, Artificial Sequence
  Synthetic
uuggaaaaaauaaaacuucuu

SEQ ID NO: 679328 - RNA, 22 nt, Artificial Sequence
  Synthetic
auuggaaaaaauaaaacuucuu

SEQ ID NO: 679329 - RNA, 23 nt, Artificial Sequence
  Synthetic
uauuggaaaaaauaaaacuucuu

SEQ ID NO: 679330 - RNA, 24 nt, Artificial Sequence
  Synthetic
guauuggaaaaaauaaaacuucuu

SEQ ID NO: 679331 - RNA, 18 nt, Artificial Sequence
  Synthetic
cuagauuaucaacuucuu

SEQ ID NO: 679332 - RNA, 19 nt, Artificial Sequence
  Synthetic
ccuagauuaucaacuucuu

SEQ ID NO: 679333 - RNA, 20 nt, Artificial Sequence
  Synthetic
cccuagauuaucaacuucuu

SEQ ID NO: 679334 - RNA, 21 nt, Artificial Sequence
  Synthetic
ucccuagauuaucaacuucuu

SEQ ID NO: 679335 - RNA, 22 nt, Artificial Sequence
  Synthetic
uucccuagauuaucaacuucuu

SEQ ID NO: 679336 - RNA, 23 nt, Artificial Sequence
  Synthetic
uuucccuagauuaucaacuucuu

SEQ ID NO: 679337 - RNA, 24 nt, Artificial Sequence
  Synthetic
cuuucccuagauuaucaacuucuu

SEQ ID NO: 679338 - RNA, 18 nt, Artificial Sequence
  Synthetic
aauuagaaauuccuucuu

SEQ ID NO: 679339 - RNA, 19 nt, Artificial Sequence
  Synthetic
aaauuagaaauuccuucuu

SEQ ID NO: 679340 - RNA, 20 nt, Artificial Sequence
  Synthetic
uaaauuagaaauuccuucuu

SEQ ID NO: 679341 - RNA, 21 nt, Artificial Sequence
  Synthetic
auaaauuagaaauuccuucuu

SEQ ID NO: 679342 - RNA, 22 nt, Artificial Sequence
  Synthetic
cauaaauuagaaauuccuucuu

SEQ ID NO: 679343 - RNA, 23 nt, Artificial Sequence
  Synthetic
ccauaaauuagaaauuccuucuu

SEQ ID NO: 679344 - RNA, 24 nt, Artificial Sequence
  Synthetic
cccauaaauuagaaauuccuucuu

SEQ ID NO: 679345 - RNA, 18 nt, Artificial Sequence
  Synthetic
gagauaucauuccuucuu

SEQ ID NO: 679346 - RNA, 19 nt, Artificial Sequence
  Synthetic
ggagauaucauuccuucuu

SEQ ID NO: 679347 - RNA, 20 nt, Artificial Sequence
  Synthetic
aggagauaucauuccuucuu

SEQ ID NO: 679348 - RNA, 21 nt, Artificial Sequence
  Synthetic
aaggagauaucauuccuucuu

SEQ ID NO: 679349 - RNA, 22 nt, Artificial Sequence
  Synthetic
aaaggagauaucauuccuucuu

SEQ ID NO: 679350 - RNA, 23 nt, Artificial Sequence
  Synthetic
gaaaggagauaucauuccuucuu

SEQ ID NO: 679351 - RNA, 24 nt, Artificial Sequence
  Synthetic
ugaaaggagauaucauuccuucuu

SEQ ID NO: 679352 - RNA, 18 nt, Artificial Sequence
  Synthetic
cuuaaguuuuuccuucuu

SEQ ID NO: 679353 - RNA, 19 nt, Artificial Sequence
  Synthetic
gcuuaaguuuuuccuucuu

SEQ ID NO: 679354 - RNA, 20 nt, Artificial Sequence
  Synthetic
ggcuuaaguuuuuccuucuu

SEQ ID NO: 679355 - RNA, 21 nt, Artificial Sequence
  Synthetic
uggcuuaaguuuuuccuucuu

SEQ ID NO: 679356 - RNA, 22 nt, Artificial Sequence
  Synthetic
cuggcuuaaguuuuuccuucuu

SEQ ID NO: 679357 - RNA, 23 nt, Artificial Sequence
  Synthetic
ccuggcuuaaguuuuuccuucuu

SEQ ID NO: 679358 - RNA, 24 nt, Artificial Sequence
  Synthetic
gccuggcuuaaguuuuuccuucuu

SEQ ID NO: 679359 - RNA, 18 nt, Artificial Sequence
  Synthetic
ggugagaaaaaucuucuu

SEQ ID NO: 679360 - RNA, 19 nt, Artificial Sequence
  Synthetic
aggugagaaaaaucuucuu

SEQ ID NO: 679361 - RNA, 20 nt, Artificial Sequence
  Synthetic
caggugagaaaaaucuucuu

SEQ ID NO: 679362 - RNA, 21 nt, Artificial Sequence
  Synthetic
acaggugagaaaaaucuucuu

SEQ ID NO: 679363 - RNA, 22 nt, Artificial Sequence
  Synthetic
gacaggugagaaaaaucuucuu

SEQ ID NO: 679364 - RNA, 23 nt, Artificial Sequence
  Synthetic
ggacaggugagaaaaaucuucuu

SEQ ID NO: 679365 - RNA, 24 nt, Artificial Sequence
  Synthetic
aggacaggugagaaaaaucuucuu

SEQ ID NO: 679366 - RNA, 18 nt, Artificial Sequence
  Synthetic
uuugggcaaaaucuucuu

SEQ ID NO: 679367 - RNA, 19 nt, Artificial Sequence
  Synthetic
uuuugggcaaaaucuucuu

SEQ ID NO: 679368 - RNA, 20 nt, Artificial Sequence
  Synthetic
auuuugggcaaaaucuucuu

SEQ ID NO: 679369 - RNA, 21 nt, Artificial Sequence
  Synthetic
uauuuugggcaaaaucuucuu

SEQ ID NO: 679370 - RNA, 22 nt, Artificial Sequence
  Synthetic
auauuuugggcaaaaucuucuu

SEQ ID NO: 679371 - RNA, 23 nt, Artificial Sequence
  Synthetic
aauauuuugggcaaaaucuucuu

SEQ ID NO: 679372 - RNA, 24 nt, Artificial Sequence
  Synthetic
aaauauuuugggcaaaaucuucuu

SEQ ID NO: 679373 - RNA, 18 nt, Artificial Sequence
  Synthetic
cuauuuguacaucuucuu

SEQ ID NO: 679374 - RNA, 19 nt, Artificial Sequence
  Synthetic
gcuauuuguacaucuucuu

SEQ ID NO: 679375 - RNA, 20 nt, Artificial Sequence
  Synthetic
agcuauuuguacaucuucuu

SEQ ID NO: 679376 - RNA, 21 nt, Artificial Sequence
  Synthetic
uagcuauuuguacaucuucuu

SEQ ID NO: 679377 - RNA, 22 nt, Artificial Sequence
  Synthetic
uuagcuauuuguacaucuucuu

SEQ ID NO: 679378 - RNA, 23 nt, Artificial Sequence
  Synthetic
guuagcuauuuguacaucuucuu

SEQ ID NO: 679379 - RNA, 24 nt, Artificial Sequence
  Synthetic
cguuagcuauuuguacaucuucuu

SEQ ID NO: 679380 - RNA, 18 nt, Artificial Sequence
  Synthetic
cugcguguauaucuucuu

SEQ ID NO: 679381 - RNA, 19 nt, Artificial Sequence
  Synthetic
gcugcguguauaucuucuu

SEQ ID NO: 679382 - RNA, 20 nt, Artificial Sequence
  Synthetic
ggcugcguguauaucuucuu

SEQ ID NO: 679383 - RNA, 21 nt, Artificial Sequence
  Synthetic
uggcugcguguauaucuucuu

SEQ ID NO: 679384 - RNA, 22 nt, Artificial Sequence
  Synthetic
uuggcugcguguauaucuucuu

SEQ ID NO: 679385 - RNA, 23 nt, Artificial Sequence
  Synthetic
auuggcugcguguauaucuucuu

SEQ ID NO: 679386 - RNA, 24 nt, Artificial Sequence
  Synthetic
uauuggcugcguguauaucuucuu

SEQ ID NO: 679387 - RNA, 18 nt, Artificial Sequence
  Synthetic
ccacauaaaugucuucuu

SEQ ID NO: 679388 - RNA, 19 nt, Artificial Sequence
  Synthetic
gccacauaaaugucuucuu

SEQ ID NO: 679389 - RNA, 20 nt, Artificial Sequence
  Synthetic
ggccacauaaaugucuucuu

SEQ ID NO: 679390 - RNA, 21 nt, Artificial Sequence
  Synthetic
uggccacauaaaugucuucuu

SEQ ID NO: 679391 - RNA, 22 nt, Artificial Sequence
  Synthetic
uuggccacauaaaugucuucuu

SEQ ID NO: 679392 - RNA, 23 nt, Artificial Sequence
  Synthetic
uuuggccacauaaaugucuucuu

SEQ ID NO: 679393 - RNA, 24 nt, Artificial Sequence
  Synthetic
uuuuggccacauaaaugucuucuu

SEQ ID NO: 679394 - RNA, 21 nt, Artificial Sequence
  Synthetic
uggcugcauaaaugucuucuu

SEQ ID NO: 679395 - RNA, 22 nt, Artificial Sequence
  Synthetic
uuggcugcauaaaugucuucuu

SEQ ID NO: 679396 - RNA, 23 nt, Artificial Sequence
  Synthetic
uuuggcugcauaaaugucuucuu

SEQ ID NO: 679397 - RNA, 24 nt, Artificial Sequence
  Synthetic
uuuuggcugcauaaaugucuucuu

SEQ ID NO: 679398 - RNA, 18 nt, Artificial Sequence
  Synthetic
ccauuucuaugucuucuu

SEQ ID NO: 679399 - RNA, 19 nt, Artificial Sequence
  Synthetic
gccauuucuaugucuucuu

SEQ ID NO: 679400 - RNA, 20 nt, Artificial Sequence
  Synthetic
ggccauuucuaugucuucuu

SEQ ID NO: 679401 - RNA, 21 nt, Artificial Sequence
  Synthetic
uggccauuucuaugucuucuu

SEQ ID NO: 679402 - RNA, 22 nt, Artificial Sequence
  Synthetic
uuggccauuucuaugucuucuu

SEQ ID NO: 679403 - RNA, 23 nt, Artificial Sequence
  Synthetic
guuggccauuucuaugucuucuu

SEQ ID NO: 679404 - RNA, 24 nt, Artificial Sequence
  Synthetic
uguuggccauuucuaugucuucuu

SEQ ID NO: 679405 - RNA, 18 nt, Artificial Sequence
  Synthetic
ccacccguuugucuucuu

SEQ ID NO: 679406 - RNA, 19 nt, Artificial Sequence
  Synthetic
gccacccguuugucuucuu

SEQ ID NO: 679407 - RNA, 20 nt, Artificial Sequence
  Synthetic
agccacccguuugucuucuu

SEQ ID NO: 679408 - RNA, 21 nt, Artificial Sequence
  Synthetic
uagccacccguuugucuucuu

SEQ ID NO: 679409 - RNA, 22 nt, Artificial Sequence
  Synthetic
uuagccacccguuugucuucuu

SEQ ID NO: 679410 - RNA, 23 nt, Artificial Sequence
  Synthetic
guuagccacccguuugucuucuu

SEQ ID NO: 679411 - RNA, 24 nt, Artificial Sequence
  Synthetic
uguuagccacccguuugucuucuu

SEQ ID NO: 679412 - RNA, 18 nt, Artificial Sequence
  Synthetic
agaguaguucaaguucuu

SEQ ID NO: 679413 - RNA, 19 nt, Artificial Sequence
  Synthetic
aagaguaguucaaguucuu

SEQ ID NO: 679414 - RNA, 20 nt, Artificial Sequence
  Synthetic
gaagaguaguucaaguucuu

SEQ ID NO: 679415 - RNA, 21 nt, Artificial Sequence
  Synthetic
agaagaguaguucaaguucuu

SEQ ID NO: 679416 - RNA, 22 nt, Artificial Sequence
  Synthetic
cagaagaguaguucaaguucuu

SEQ ID NO: 679417 - RNA, 23 nt, Artificial Sequence
  Synthetic
ccagaagaguaguucaaguucuu

SEQ ID NO: 679418 - RNA, 24 nt, Artificial Sequence
  Synthetic
gccagaagaguaguucaaguucuu

SEQ ID NO: 679419 - RNA, 18 nt, Artificial Sequence
  Synthetic
uaauagguguaaguucuu

SEQ ID NO: 679420 - RNA, 19 nt, Artificial Sequence
  Synthetic
cuaauagguguaaguucuu

SEQ ID NO: 679421 - RNA, 20 nt, Artificial Sequence
  Synthetic
ucuaauagguguaaguucuu

SEQ ID NO: 679422 - RNA, 21 nt, Artificial Sequence
  Synthetic
gucuaauagguguaaguucuu

SEQ ID NO: 679423 - RNA, 22 nt, Artificial Sequence
  Synthetic
ugucuaauagguguaaguucuu

SEQ ID NO: 679424 - RNA, 23 nt, Artificial Sequence
  Synthetic
uugucuaauagguguaaguucuu

SEQ ID NO: 679425 - RNA, 24 nt, Artificial Sequence
  Synthetic
uuugucuaauagguguaaguucuu

SEQ ID NO: 679426 - RNA, 18 nt, Artificial Sequence
  Synthetic
cagucuugggcaguucuu

SEQ ID NO: 679427 - RNA, 19 nt, Artificial Sequence
  Synthetic
ucagucuugggcaguucuu

SEQ ID NO: 679428 - RNA, 20 nt, Artificial Sequence
  Synthetic
uucagucuugggcaguucuu

SEQ ID NO: 679429 - RNA, 21 nt, Artificial Sequence
  Synthetic
auucagucuugggcaguucuu

SEQ ID NO: 679430 - RNA, 22 nt, Artificial Sequence
  Synthetic
uauucagucuugggcaguucuu

SEQ ID NO: 679431 - RNA, 23 nt, Artificial Sequence
  Synthetic
uuauucagucuugggcaguucuu

SEQ ID NO: 679432 - RNA, 24 nt, Artificial Sequence
  Synthetic
auuauucagucuugggcaguucuu

SEQ ID NO: 679433 - RNA, 18 nt, Artificial Sequence
  Synthetic
uuuuuaaacuugguucuu

SEQ ID NO: 679434 - RNA, 19 nt, Artificial Sequence
  Synthetic
cuuuuuaaacuugguucuu

SEQ ID NO: 679435 - RNA, 20 nt, Artificial Sequence
  Synthetic
acuuuuuaaacuugguucuu

SEQ ID NO: 679436 - RNA, 21 nt, Artificial Sequence
  Synthetic
aacuuuuuaaacuugguucuu

SEQ ID NO: 679437 - RNA, 22 nt, Artificial Sequence
  Synthetic
aaacuuuuuaaacuugguucuu

SEQ ID NO: 679438 - RNA, 23 nt, Artificial Sequence
  Synthetic
aaaacuuuuuaaacuugguucuu

SEQ ID NO: 679439 - RNA, 24 nt, Artificial Sequence
  Synthetic
caaaacuuuuuaaacuugguucuu

SEQ ID NO: 679440 - RNA, 18 nt, Artificial Sequence
  Synthetic
ggccaaaaacauguucuu

SEQ ID NO: 679441 - RNA, 19 nt, Artificial Sequence
  Synthetic
cggccaaaaacauguucuu

SEQ ID NO: 679442 - RNA, 20 nt, Artificial Sequence
  Synthetic
ccggccaaaaacauguucuu

SEQ ID NO: 679443 - RNA, 21 nt, Artificial Sequence
  Synthetic
cccggccaaaaacauguucuu

SEQ ID NO: 679444 - RNA, 22 nt, Artificial Sequence
  Synthetic
gcccggccaaaaacauguucuu

SEQ ID NO: 679445 - RNA, 23 nt, Artificial Sequence
  Synthetic
cgcccggccaaaaacauguucuu

SEQ ID NO: 679446 - RNA, 24 nt, Artificial Sequence
  Synthetic
gcgcccggccaaaaacauguucuu

SEQ ID NO: 679447 - RNA, 18 nt, Artificial Sequence
  Synthetic
gaggccaugaguguucuu

SEQ ID NO: 679448 - RNA, 19 nt, Artificial Sequence
  Synthetic
agaggccaugaguguucuu

SEQ ID NO: 679449 - RNA, 20 nt, Artificial Sequence
  Synthetic
cagaggccaugaguguucuu

SEQ ID NO: 679450 - RNA, 21 nt, Artificial Sequence
  Synthetic
gcagaggccaugaguguucuu

SEQ ID NO: 679451 - RNA, 22 nt, Artificial Sequence
  Synthetic
agcagaggccaugaguguucuu

SEQ ID NO: 679452 - RNA, 23 nt, Artificial Sequence
  Synthetic
gagcagaggccaugaguguucuu

SEQ ID NO: 679453 - RNA, 24 nt, Artificial Sequence
  Synthetic
ggagcagaggccaugaguguucuu

SEQ ID NO: 679454 - RNA, 18 nt, Artificial Sequence
  Synthetic
uaagugcuuauuguucuu

SEQ ID NO: 679455 - RNA, 19 nt, Artificial Sequence
  Synthetic
auaagugcuuauuguucuu

SEQ ID NO: 679456 - RNA, 20 nt, Artificial Sequence
  Synthetic
gauaagugcuuauuguucuu

SEQ ID NO: 679457 - RNA, 21 nt, Artificial Sequence
  Synthetic
ggauaagugcuuauuguucuu

SEQ ID NO: 679458 - RNA, 22 nt, Artificial Sequence
  Synthetic
aggauaagugcuuauuguucuu

SEQ ID NO: 679459 - RNA, 23 nt, Artificial Sequence
  Synthetic
gaggauaagugcuuauuguucuu

SEQ ID NO: 679460 - RNA, 24 nt, Artificial Sequence
  Synthetic
ugaggauaagugcuuauuguucuu

SEQ ID NO: 679461 - RNA, 18 nt, Artificial Sequence
  Synthetic
agauuggugcuuguucuu

SEQ ID NO: 679462 - RNA, 19 nt, Artificial Sequence
  Synthetic
aagauuggugcuuguucuu

SEQ ID NO: 679463 - RNA, 20 nt, Artificial Sequence
  Synthetic
gaagauuggugcuuguucuu

SEQ ID NO: 679464 - RNA, 21 nt, Artificial Sequence
  Synthetic
ugaagauuggugcuuguucuu

SEQ ID NO: 679465 - RNA, 22 nt, Artificial Sequence
  Synthetic
uugaagauuggugcuuguucuu

SEQ ID NO: 679466 - RNA, 23 nt, Artificial Sequence
  Synthetic
uuugaagauuggugcuuguucuu

SEQ ID NO: 679467 - RNA, 24 nt, Artificial Sequence
  Synthetic
cuuugaagauuggugcuuguucuu

SEQ ID NO: 679468 - RNA, 18 nt, Artificial Sequence
  Synthetic
gagugaaaauuuguucuu

SEQ ID NO: 679469 - RNA, 19 nt, Artificial Sequence
  Synthetic
ggagugaaaauuuguucuu

SEQ ID NO: 679470 - RNA, 20 nt, Artificial Sequence
  Synthetic
gggagugaaaauuuguucuu

SEQ ID NO: 679471 - RNA, 21 nt, Artificial Sequence
  Synthetic
agggagugaaaauuuguucuu

SEQ ID NO: 679472 - RNA, 22 nt, Artificial Sequence
  Synthetic
aagggagugaaaauuuguucuu

SEQ ID NO: 679473 - RNA, 23 nt, Artificial Sequence
  Synthetic
caagggagugaaaauuuguucuu

SEQ ID NO: 679474 - RNA, 24 nt, Artificial Sequence
  Synthetic
ccaagggagugaaaauuuguucuu

SEQ ID NO: 679475 - RNA, 18 nt, Artificial Sequence
  Synthetic
uuuuaugcaucauuucuu

SEQ ID NO: 679476 - RNA, 19 nt, Artificial Sequence
  Synthetic
uuuuuaugcaucauuucuu

SEQ ID NO: 679477 - RNA, 20 nt, Artificial Sequence
  Synthetic
guuuuuaugcaucauuucuu

SEQ ID NO: 679478 - RNA, 21 nt, Artificial Sequence
  Synthetic
aguuuuuaugcaucauuucuu

SEQ ID NO: 679479 - RNA, 22 nt, Artificial Sequence
  Synthetic
uaguuuuuaugcaucauuucuu

SEQ ID NO: 679480 - RNA, 23 nt, Artificial Sequence
  Synthetic
uuaguuuuuaugcaucauuucuu

SEQ ID NO: 679481 - RNA, 24 nt, Artificial Sequence
  Synthetic
uuuaguuuuuaugcaucauuucuu

SEQ ID NO: 679482 - RNA, 18 nt, Artificial Sequence
  Synthetic
cacaacauaagauuucuu

SEQ ID NO: 679483 - RNA, 19 nt, Artificial Sequence
  Synthetic
acacaacauaagauuucuu

SEQ ID NO: 679484 - RNA, 20 nt, Artificial Sequence
  Synthetic
aacacaacauaagauuucuu

SEQ ID NO: 679485 - RNA, 21 nt, Artificial Sequence
  Synthetic
gaacacaacauaagauuucuu

SEQ ID NO: 679486 - RNA, 22 nt, Artificial Sequence
  Synthetic
agaacacaacauaagauuucuu

SEQ ID NO: 679487 - RNA, 23 nt, Artificial Sequence
  Synthetic
aagaacacaacauaagauuucuu

SEQ ID NO: 679488 - RNA, 24 nt, Artificial Sequence
  Synthetic
uaagaacacaacauaagauuucuu

SEQ ID NO: 679489 - RNA, 18 nt, Artificial Sequence
  Synthetic
gaauuuaacagauuucuu

SEQ ID NO: 679490 - RNA, 19 nt, Artificial Sequence
  Synthetic
agaauuuaacagauuucuu

SEQ ID NO: 679491 - RNA, 20 nt, Artificial Sequence
  Synthetic
cagaauuuaacagauuucuu

SEQ ID NO: 679492 - RNA, 21 nt, Artificial Sequence
  Synthetic
ucagaauuuaacagauuucuu

SEQ ID NO: 679493 - RNA, 22 nt, Artificial Sequence
  Synthetic
uucagaauuuaacagauuucuu

SEQ ID NO: 679494 - RNA, 23 nt, Artificial Sequence
  Synthetic
auucagaauuuaacagauuucuu

SEQ ID NO: 679495 - RNA, 24 nt, Artificial Sequence
  Synthetic
aauucagaauuuaacagauuucuu

SEQ ID NO: 679496 - RNA, 18 nt, Artificial Sequence
  Synthetic
gaccauuuaguauuucuu

SEQ ID NO: 679497 - RNA, 19 nt, Artificial Sequence
  Synthetic
agaccauuuaguauuucuu

SEQ ID NO: 679498 - RNA, 20 nt, Artificial Sequence
  Synthetic
gagaccauuuaguauuucuu

SEQ ID NO: 679499 - RNA, 21 nt, Artificial Sequence
  Synthetic
agagaccauuuaguauuucuu

SEQ ID NO: 679500 - RNA, 22 nt, Artificial Sequence
  Synthetic
uagagaccauuuaguauuucuu

SEQ ID NO: 679501 - RNA, 23 nt, Artificial Sequence
  Synthetic
uuagagaccauuuaguauuucuu

SEQ ID NO: 679502 - RNA, 24 nt, Artificial Sequence
  Synthetic
uuuagagaccauuuaguauuucuu

SEQ ID NO: 679503 - RNA, 18 nt, Artificial Sequence
  Synthetic
cacaacuuuguauuucuu

SEQ ID NO: 679504 - RNA, 19 nt, Artificial Sequence
  Synthetic
gcacaacuuuguauuucuu

SEQ ID NO: 679505 - RNA, 20 nt, Artificial Sequence
  Synthetic
agcacaacuuuguauuucuu

SEQ ID NO: 679506 - RNA, 21 nt, Artificial Sequence
  Synthetic
cagcacaacuuuguauuucuu

SEQ ID NO: 679507 - RNA, 22 nt, Artificial Sequence
  Synthetic
ucagcacaacuuuguauuucuu

SEQ ID NO: 679508 - RNA, 23 nt, Artificial Sequence
  Synthetic
uucagcacaacuuuguauuucuu

SEQ ID NO: 679509 - RNA, 24 nt, Artificial Sequence
  Synthetic
cuucagcacaacuuuguauuucuu

SEQ ID NO: 679510 - RNA, 18 nt, Artificial Sequence
  Synthetic
uuuucuuuuuuauuucuu

SEQ ID NO: 679511 - RNA, 19 nt, Artificial Sequence
  Synthetic
auuuucuuuuuuauuucuu

SEQ ID NO: 679512 - RNA, 20 nt, Artificial Sequence
  Synthetic
uauuuucuuuuuuauuucuu

SEQ ID NO: 679513 - RNA, 21 nt, Artificial Sequence
  Synthetic
uuauuuucuuuuuuauuucuu

SEQ ID NO: 679514 - RNA, 22 nt, Artificial Sequence
  Synthetic
uuuauuuucuuuuuuauuucuu

SEQ ID NO: 679515 - RNA, 23 nt, Artificial Sequence
  Synthetic
cuuuauuuucuuuuuuauuucuu

SEQ ID NO: 679516 - RNA, 24 nt, Artificial Sequence
  Synthetic
gcuuuauuuucuuuuuuauuucuu

SEQ ID NO: 679517 - RNA, 18 nt, Artificial Sequence
  Synthetic
gauccugugaacuuucuu

SEQ ID NO: 679518 - RNA, 19 nt, Artificial Sequence
  Synthetic
ugauccugugaacuuucuu

SEQ ID NO: 679519 - RNA, 20 nt, Artificial Sequence
  Synthetic
uugauccugugaacuuucuu

SEQ ID NO: 679520 - RNA, 21 nt, Artificial Sequence
  Synthetic
guugauccugugaacuuucuu

SEQ ID NO: 679521 - RNA, 22 nt, Artificial Sequence
  Synthetic
gguugauccugugaacuuucuu

SEQ ID NO: 679522 - RNA, 23 nt, Artificial Sequence
  Synthetic
ggguugauccugugaacuuucuu

SEQ ID NO: 679523 - RNA, 24 nt, Artificial Sequence
  Synthetic
aggguugauccugugaacuuucuu

SEQ ID NO: 679524 - RNA, 18 nt, Artificial Sequence
  Synthetic
acuuuaauagacuuucuu

SEQ ID NO: 679525 - RNA, 19 nt, Artificial Sequence
  Synthetic
uacuuuaauagacuuucuu

SEQ ID NO: 679526 - RNA, 20 nt, Artificial Sequence
  Synthetic
auacuuuaauagacuuucuu

SEQ ID NO: 679527 - RNA, 21 nt, Artificial Sequence
  Synthetic
aauacuuuaauagacuuucuu

SEQ ID NO: 679528 - RNA, 22 nt, Artificial Sequence
  Synthetic
caauacuuuaauagacuuucuu

SEQ ID NO: 679529 - RNA, 23 nt, Artificial Sequence
  Synthetic
ucaauacuuuaauagacuuucuu

SEQ ID NO: 679530 - RNA, 24 nt, Artificial Sequence
  Synthetic
aucaauacuuuaauagacuuucuu

SEQ ID NO: 679531 - RNA, 18 nt, Artificial Sequence
  Synthetic
gagagcuuucccuuucuu

SEQ ID NO: 679532 - RNA, 19 nt, Artificial Sequence
  Synthetic
agagagcuuucccuuucuu

SEQ ID NO: 679533 - RNA, 20 nt, Artificial Sequence
  Synthetic
gagagagcuuucccuuucuu

SEQ ID NO: 679534 - RNA, 21 nt, Artificial Sequence
  Synthetic
agagagagcuuucccuuucuu

SEQ ID NO: 679535 - RNA, 22 nt, Artificial Sequence
  Synthetic
cagagagagcuuucccuuucuu

SEQ ID NO: 679536 - RNA, 23 nt, Artificial Sequence
  Synthetic
gcagagagagcuuucccuuucuu

SEQ ID NO: 679537 - RNA, 24 nt, Artificial Sequence
  Synthetic
agcagagagagcuuucccuuucuu

SEQ ID NO: 679538 - RNA, 18 nt, Artificial Sequence
  Synthetic
uuuagucuuuccuuucuu

SEQ ID NO: 679539 - RNA, 19 nt, Artificial Sequence
  Synthetic
uuuuagucuuuccuuucuu

SEQ ID NO: 679540 - RNA, 20 nt, Artificial Sequence
  Synthetic
auuuuagucuuuccuuucuu

SEQ ID NO: 679541 - RNA, 21 nt, Artificial Sequence
  Synthetic
cauuuuagucuuuccuuucuu

SEQ ID NO: 679542 - RNA, 22 nt, Artificial Sequence
  Synthetic
gcauuuuagucuuuccuuucuu

SEQ ID NO: 679543 - RNA, 23 nt, Artificial Sequence
  Synthetic
ggcauuuuagucuuuccuuucuu

SEQ ID NO: 679544 - RNA, 24 nt, Artificial Sequence
  Synthetic
aggcauuuuagucuuuccuuucuu

SEQ ID NO: 679545 - RNA, 18 nt, Artificial Sequence
  Synthetic
cugagggcuggcuuucuu

SEQ ID NO: 679546 - RNA, 19 nt, Artificial Sequence
  Synthetic
ucugagggcuggcuuucuu

SEQ ID NO: 679547 - RNA, 20 nt, Artificial Sequence
  Synthetic
cucugagggcuggcuuucuu

SEQ ID NO: 679548 - RNA, 21 nt, Artificial Sequence
  Synthetic
gcucugagggcuggcuuucuu

SEQ ID NO: 679549 - RNA, 22 nt, Artificial Sequence
  Synthetic
ugcucugagggcuggcuuucuu

SEQ ID NO: 679550 - RNA, 23 nt, Artificial Sequence
  Synthetic
cugcucugagggcuggcuuucuu

SEQ ID NO: 679551 - RNA, 24 nt, Artificial Sequence
  Synthetic
acugcucugagggcuggcuuucuu

SEQ ID NO: 679552 - RNA, 18 nt, Artificial Sequence
  Synthetic
aacaucaaaugcuuucuu

SEQ ID NO: 679553 - RNA, 19 nt, Artificial Sequence
  Synthetic
aaacaucaaaugcuuucuu

SEQ ID NO: 679554 - RNA, 20 nt, Artificial Sequence
  Synthetic
uaaacaucaaaugcuuucuu

SEQ ID NO: 679555 - RNA, 21 nt, Artificial Sequence
  Synthetic
uuaaacaucaaaugcuuucuu

SEQ ID NO: 679556 - RNA, 22 nt, Artificial Sequence
  Synthetic
cuuaaacaucaaaugcuuucuu

SEQ ID NO: 679557 - RNA, 23 nt, Artificial Sequence
  Synthetic
ccuuaaacaucaaaugcuuucuu

SEQ ID NO: 679558 - RNA, 24 nt, Artificial Sequence
  Synthetic
cccuuaaacaucaaaugcuuucuu

SEQ ID NO: 679559 - RNA, 18 nt, Artificial Sequence
  Synthetic
gcucuugcucucuuucuu

SEQ ID NO: 679560 - RNA, 19 nt, Artificial Sequence
  Synthetic
ugcucuugcucucuuucuu

SEQ ID NO: 679561 - RNA, 20 nt, Artificial Sequence
  Synthetic
uugcucuugcucucuuucuu

SEQ ID NO: 679562 - RNA, 21 nt, Artificial Sequence
  Synthetic
cuugcucuugcucucuuucuu

SEQ ID NO: 679563 - RNA, 22 nt, Artificial Sequence
  Synthetic
ucuugcucuugcucucuuucuu

SEQ ID NO: 679564 - RNA, 23 nt, Artificial Sequence
  Synthetic
uucuugcucuugcucucuuucuu

SEQ ID NO: 679565 - RNA, 24 nt, Artificial Sequence
  Synthetic
uuucuugcucuugcucucuuucuu

SEQ ID NO: 679566 - RNA, 18 nt, Artificial Sequence
  Synthetic
uccaacaaggucuuucuu

SEQ ID NO: 679567 - RNA, 19 nt, Artificial Sequence
  Synthetic
cuccaacaaggucuuucuu

SEQ ID NO: 679568 - RNA, 20 nt, Artificial Sequence
  Synthetic
ucuccaacaaggucuuucuu

SEQ ID NO: 679569 - RNA, 21 nt, Artificial Sequence
  Synthetic
cucuccaacaaggucuuucuu

SEQ ID NO: 679570 - RNA, 22 nt, Artificial Sequence
  Synthetic
acucuccaacaaggucuuucuu

SEQ ID NO: 679571 - RNA, 23 nt, Artificial Sequence
  Synthetic
aacucuccaacaaggucuuucuu

SEQ ID NO: 679572 - RNA, 24 nt, Artificial Sequence
  Synthetic
uaacucuccaacaaggucuuucuu

SEQ ID NO: 679573 - RNA, 18 nt, Artificial Sequence
  Synthetic
uagagcaaauucuuucuu

SEQ ID NO: 679574 - RNA, 19 nt, Artificial Sequence
  Synthetic
guagagcaaauucuuucuu

SEQ ID NO: 679575 - RNA, 20 nt, Artificial Sequence
  Synthetic
aguagagcaaauucuuucuu

SEQ ID NO: 679576 - RNA, 21 nt, Artificial Sequence
  Synthetic
aaguagagcaaauucuuucuu

SEQ ID NO: 679577 - RNA, 22 nt, Artificial Sequence
  Synthetic
caaguagagcaaauucuuucuu

SEQ ID NO: 679578 - RNA, 23 nt, Artificial Sequence
  Synthetic
ccaaguagagcaaauucuuucuu

SEQ ID NO: 679579 - RNA, 24 nt, Artificial Sequence
  Synthetic
accaaguagagcaaauucuuucuu

SEQ ID NO: 679580 - RNA, 18 nt, Artificial Sequence
  Synthetic
uuggucgaauucuuucuu

SEQ ID NO: 679581 - RNA, 19 nt, Artificial Sequence
  Synthetic
cuuggucgaauucuuucuu

SEQ ID NO: 679582 - RNA, 20 nt, Artificial Sequence
  Synthetic
ccuuggucgaauucuuucuu

SEQ ID NO: 679583 - RNA, 21 nt, Artificial Sequence
  Synthetic
uccuuggucgaauucuuucuu

SEQ ID NO: 679584 - RNA, 22 nt, Artificial Sequence
  Synthetic
cuccuuggucgaauucuuucuu

SEQ ID NO: 679585 - RNA, 23 nt, Artificial Sequence
  Synthetic
ccuccuuggucgaauucuuucuu

SEQ ID NO: 679586 - RNA, 24 nt, Artificial Sequence
  Synthetic
gccuccuuggucgaauucuuucuu

SEQ ID NO: 679587 - RNA, 18 nt, Artificial Sequence
  Synthetic
gcaaucaggggguuucuu

SEQ ID NO: 679588 - RNA, 19 nt, Artificial Sequence
  Synthetic
agcaaucaggggguuucuu

SEQ ID NO: 679589 - RNA, 20 nt, Artificial Sequence
  Synthetic
aagcaaucaggggguuucuu

SEQ ID NO: 679590 - RNA, 21 nt, Artificial Sequence
  Synthetic
uaagcaaucaggggguuucuu

SEQ ID NO: 679591 - RNA, 22 nt, Artificial Sequence
  Synthetic
uuaagcaaucaggggguuucuu

SEQ ID NO: 679592 - RNA, 23 nt, Artificial Sequence
  Synthetic
guuaagcaaucaggggguuucuu

SEQ ID NO: 679593 - RNA, 24 nt, Artificial Sequence
  Synthetic
cguuaagcaaucaggggguuucuu

SEQ ID NO: 679594 - RNA, 18 nt, Artificial Sequence
  Synthetic
gcacugcugugguuucuu

SEQ ID NO: 679595 - RNA, 19 nt, Artificial Sequence
  Synthetic
agcacugcugugguuucuu

SEQ ID NO: 679596 - RNA, 20 nt, Artificial Sequence
  Synthetic
gagcacugcugugguuucuu

SEQ ID NO: 679597 - RNA, 21 nt, Artificial Sequence
  Synthetic
ugagcacugcugugguuucuu

SEQ ID NO: 679598 - RNA, 22 nt, Artificial Sequence
  Synthetic
uugagcacugcugugguuucuu

SEQ ID NO: 679599 - RNA, 23 nt, Artificial Sequence
  Synthetic
auugagcacugcugugguuucuu

SEQ ID NO: 679600 - RNA, 24 nt, Artificial Sequence
  Synthetic
aauugagcacugcugugguuucuu

SEQ ID NO: 679601 - RNA, 18 nt, Artificial Sequence
  Synthetic
uuuuguuucauguuucuu

SEQ ID NO: 679602 - RNA, 19 nt, Artificial Sequence
  Synthetic
uuuuuguuucauguuucuu

SEQ ID NO: 679603 - RNA, 20 nt, Artificial Sequence
  Synthetic
uuuuuuguuucauguuucuu

SEQ ID NO: 679604 - RNA, 21 nt, Artificial Sequence
  Synthetic
guuuuuuguuucauguuucuu

SEQ ID NO: 679605 - RNA, 22 nt, Artificial Sequence
  Synthetic
gguuuuuuguuucauguuucuu

SEQ ID NO: 679606 - RNA, 23 nt, Artificial Sequence
  Synthetic
ggguuuuuuguuucauguuucuu

SEQ ID NO: 679607 - RNA, 24 nt, Artificial Sequence
  Synthetic
uggguuuuuuguuucauguuucuu

SEQ ID NO: 679608 - RNA, 18 nt, Artificial Sequence
  Synthetic
aaucuaaauauguuucuu

SEQ ID NO: 679609 - RNA, 19 nt, Artificial Sequence
  Synthetic
aaaucuaaauauguuucuu

SEQ ID NO: 679610 - RNA, 20 nt, Artificial Sequence
  Synthetic
uaaaucuaaauauguuucuu

SEQ ID NO: 679611 - RNA, 21 nt, Artificial Sequence
  Synthetic
cuaaaucuaaauauguuucuu

SEQ ID NO: 679612 - RNA, 22 nt, Artificial Sequence
  Synthetic
gcuaaaucuaaauauguuucuu

SEQ ID NO: 679613 - RNA, 23 nt, Artificial Sequence
  Synthetic
agcuaaaucuaaauauguuucuu

SEQ ID NO: 679614 - RNA, 24 nt, Artificial Sequence
  Synthetic
aagcuaaaucuaaauauguuucuu

SEQ ID NO: 679615 - RNA, 18 nt, Artificial Sequence
  Synthetic
gugugauuccauuuucuu

SEQ ID NO: 679616 - RNA, 19 nt, Artificial Sequence
  Synthetic
ugugugauuccauuuucuu

SEQ ID NO: 679617 - RNA, 20 nt, Artificial Sequence
  Synthetic
cugugugauuccauuuucuu

SEQ ID NO: 679618 - RNA, 21 nt, Artificial Sequence
  Synthetic
gcugugugauuccauuuucuu

SEQ ID NO: 679619 - RNA, 22 nt, Artificial Sequence
  Synthetic
ggcugugugauuccauuuucuu

SEQ ID NO: 679620 - RNA, 23 nt, Artificial Sequence
  Synthetic
uggcugugugauuccauuuucuu

SEQ ID NO: 679621 - RNA, 24 nt, Artificial Sequence
  Synthetic
uuggcugugugauuccauuuucuu

SEQ ID NO: 679622 - RNA, 18 nt, Artificial Sequence
  Synthetic
uauuguucaccuuuucuu

SEQ ID NO: 679623 - RNA, 19 nt, Artificial Sequence
  Synthetic
auauuguucaccuuuucuu

SEQ ID NO: 679624 - RNA, 20 nt, Artificial Sequence
  Synthetic
aauauuguucaccuuuucuu

SEQ ID NO: 679625 - RNA, 21 nt, Artificial Sequence
  Synthetic
aaauauuguucaccuuuucuu

SEQ ID NO: 679626 - RNA, 22 nt, Artificial Sequence
  Synthetic
aaaauauuguucaccuuuucuu

SEQ ID NO: 679627 - RNA, 23 nt, Artificial Sequence
  Synthetic
uaaaauauuguucaccuuuucuu

SEQ ID NO: 679628 - RNA, 24 nt, Artificial Sequence
  Synthetic
uuaaaauauuguucaccuuuucuu

SEQ ID NO: 679629 - RNA, 18 nt, Artificial Sequence
  Synthetic
auuacaauuucuuuucuu

SEQ ID NO: 679630 - RNA, 19 nt, Artificial Sequence
  Synthetic
cauuacaauuucuuuucuu

SEQ ID NO: 679631 - RNA, 20 nt, Artificial Sequence
  Synthetic
gcauuacaauuucuuuucuu

SEQ ID NO: 679632 - RNA, 21 nt, Artificial Sequence
  Synthetic
ggcauuacaauuucuuuucuu

SEQ ID NO: 679633 - RNA, 22 nt, Artificial Sequence
  Synthetic
aggcauuacaauuucuuuucuu

SEQ ID NO: 679634 - RNA, 23 nt, Artificial Sequence
  Synthetic
uaggcauuacaauuucuuuucuu

SEQ ID NO: 679635 - RNA, 24 nt, Artificial Sequence
  Synthetic
cuaggcauuacaauuucuuuucuu

SEQ ID NO: 679636 - RNA, 18 nt, Artificial Sequence
  Synthetic
agaccugauauuuuucuu

SEQ ID NO: 679637 - RNA, 19 nt, Artificial Sequence
  Synthetic
uagaccugauauuuuucuu

SEQ ID NO: 679638 - RNA, 20 nt, Artificial Sequence
  Synthetic
cuagaccugauauuuuucuu

SEQ ID NO: 679639 - RNA, 21 nt, Artificial Sequence
  Synthetic
acuagaccugauauuuuucuu

SEQ ID NO: 679640 - RNA, 22 nt, Artificial Sequence
  Synthetic
cacuagaccugauauuuuucuu

SEQ ID NO: 679641 - RNA, 23 nt, Artificial Sequence
  Synthetic
gcacuagaccugauauuuuucuu

SEQ ID NO: 679642 - RNA, 24 nt, Artificial Sequence
  Synthetic
ugcacuagaccugauauuuuucuu

SEQ ID NO: 679643 - RNA, 18 nt, Artificial Sequence
  Synthetic
uuauuauuccuuuuucuu

SEQ ID NO: 679644 - RNA, 19 nt, Artificial Sequence
  Synthetic
auuauuauuccuuuuucuu

SEQ ID NO: 679645 - RNA, 20 nt, Artificial Sequence
  Synthetic
cauuauuauuccuuuuucuu

SEQ ID NO: 679646 - RNA, 21 nt, Artificial Sequence
  Synthetic
gcauuauuauuccuuuuucuu

SEQ ID NO: 679647 - RNA, 22 nt, Artificial Sequence
  Synthetic
ggcauuauuauuccuuuuucuu

SEQ ID NO: 679648 - RNA, 23 nt, Artificial Sequence
  Synthetic
aggcauuauuauuccuuuuucuu

SEQ ID NO: 679649 - RNA, 24 nt, Artificial Sequence
  Synthetic
aaggcauuauuauuccuuuuucuu

SEQ ID NO: 679650 - RNA, 18 nt, Artificial Sequence
  Synthetic
uuaggcuuauuuuuucuu

SEQ ID NO: 679651 - RNA, 19 nt, Artificial Sequence
  Synthetic
auuaggcuuauuuuuucuu

SEQ ID NO: 679652 - RNA, 20 nt, Artificial Sequence
  Synthetic
uauuaggcuuauuuuuucuu

SEQ ID NO: 679653 - RNA, 21 nt, Artificial Sequence
  Synthetic
uuauuaggcuuauuuuuucuu

SEQ ID NO: 679654 - RNA, 22 nt, Artificial Sequence
  Synthetic
uuuauuaggcuuauuuuuucuu

SEQ ID NO: 679655 - RNA, 23 nt, Artificial Sequence
  Synthetic
uuuuauuaggcuuauuuuuucuu

SEQ ID NO: 679656 - RNA, 24 nt, Artificial Sequence
  Synthetic
auuuuauuaggcuuauuuuuucuu

SEQ ID NO: 679657 - RNA, 18 nt, Artificial Sequence
  Synthetic
acuuuuuucuuuuuucuu

SEQ ID NO: 679658 - RNA, 19 nt, Artificial Sequence
  Synthetic
uacuuuuuucuuuuuucuu

SEQ ID NO: 679659 - RNA, 20 nt, Artificial Sequence
  Synthetic
uuacuuuuuucuuuuuucuu

SEQ ID NO: 679660 - RNA, 21 nt, Artificial Sequence
  Synthetic
uuuacuuuuuucuuuuuucuu

SEQ ID NO: 679661 - RNA, 22 nt, Artificial Sequence
  Synthetic
uuuuacuuuuuucuuuuuucuu

SEQ ID NO: 679662 - RNA, 23 nt, Artificial Sequence
  Synthetic
cuuuuacuuuuuucuuuuuucuu

SEQ ID NO: 679663 - RNA, 24 nt, Artificial Sequence
  Synthetic
ucuuuuacuuuuuucuuuuuucuu

SEQ ID NO: 679664 - RNA, 18 nt, Artificial Sequence
  Synthetic
uuuuuuuuuuuuuuucuu

SEQ ID NO: 679665 - RNA, 19 nt, Artificial Sequence
  Synthetic
uuuuuuuuuuuuuuuucuu

SEQ ID NO: 679666 - RNA, 20 nt, Artificial Sequence
  Synthetic
uuuuuuuuuuuuuuuuucuu

SEQ ID NO: 679667 - RNA, 21 nt, Artificial Sequence
  Synthetic
uuuuuuuuuuuuuuuuuucuu

SEQ ID NO: 679668 - RNA, 22 nt, Artificial Sequence
  Synthetic
uuuuuuuuuuuuuuuuuuucuu

SEQ ID NO: 679669 - RNA, 23 nt, Artificial Sequence
  Synthetic
cuuuuuuuuuuuuuuuuuuucuu

SEQ ID NO: 679670 - RNA, 24 nt, Artificial Sequence
  Synthetic
ucuuuuuuuuuuuuuuuuuuucuu

SEQ ID NO: 679671 - RNA, 18 nt, Artificial Sequence
  Synthetic
uaagcugggaaaaaaguu

SEQ ID NO: 679672 - RNA, 19 nt, Artificial Sequence
  Synthetic
guaagcugggaaaaaaguu

SEQ ID NO: 679673 - RNA, 20 nt, Artificial Sequence
  Synthetic
uguaagcugggaaaaaaguu

SEQ ID NO: 679674 - RNA, 21 nt, Artificial Sequence
  Synthetic
auguaagcugggaaaaaaguu

SEQ ID NO: 679675 - RNA, 22 nt, Artificial Sequence
  Synthetic
aauguaagcugggaaaaaaguu

SEQ ID NO: 679676 - RNA, 23 nt, Artificial Sequence
  Synthetic
gaauguaagcugggaaaaaaguu

SEQ ID NO: 679677 - RNA, 24 nt, Artificial Sequence
  Synthetic
agaauguaagcugggaaaaaaguu

SEQ ID NO: 679678 - RNA, 18 nt, Artificial Sequence
  Synthetic
auauuuuaauaaaaaguu

SEQ ID NO: 679679 - RNA, 19 nt, Artificial Sequence
  Synthetic
cauauuuuaauaaaaaguu

SEQ ID NO: 679680 - RNA, 20 nt, Artificial Sequence
  Synthetic
ucauauuuuaauaaaaaguu

SEQ ID NO: 679681 - RNA, 21 nt, Artificial Sequence
  Synthetic
cucauauuuuaauaaaaaguu

SEQ ID NO: 679682 - RNA, 22 nt, Artificial Sequence
  Synthetic
ccucauauuuuaauaaaaaguu

SEQ ID NO: 679683 - RNA, 23 nt, Artificial Sequence
  Synthetic
accucauauuuuaauaaaaaguu

SEQ ID NO: 679684 - RNA, 24 nt, Artificial Sequence
  Synthetic
caccucauauuuuaauaaaaaguu

SEQ ID NO: 679685 - RNA, 18 nt, Artificial Sequence
  Synthetic
auaggcccugcaaaaguu

SEQ ID NO: 679686 - RNA, 19 nt, Artificial Sequence
  Synthetic
uauaggcccugcaaaaguu

SEQ ID NO: 679687 - RNA, 20 nt, Artificial Sequence
  Synthetic
cuauaggcccugcaaaaguu

SEQ ID NO: 679688 - RNA, 21 nt, Artificial Sequence
  Synthetic
acuauaggcccugcaaaaguu

SEQ ID NO: 679689 - RNA, 22 nt, Artificial Sequence
  Synthetic
uacuauaggcccugcaaaaguu

SEQ ID NO: 679690 - RNA, 23 nt, Artificial Sequence
  Synthetic
uuacuauaggcccugcaaaaguu

SEQ ID NO: 679691 - RNA, 24 nt, Artificial Sequence
  Synthetic
cuuacuauaggcccugcaaaaguu

SEQ ID NO: 679692 - RNA, 18 nt, Artificial Sequence
  Synthetic
uccucuauugcaaaaguu

SEQ ID NO: 679693 - RNA, 19 nt, Artificial Sequence
  Synthetic
cuccucuauugcaaaaguu

SEQ ID NO: 679694 - RNA, 20 nt, Artificial Sequence
  Synthetic
ucuccucuauugcaaaaguu

SEQ ID NO: 679695 - RNA, 21 nt, Artificial Sequence
  Synthetic
gucuccucuauugcaaaaguu

SEQ ID NO: 679696 - RNA, 22 nt, Artificial Sequence
  Synthetic
ugucuccucuauugcaaaaguu

SEQ ID NO: 679697 - RNA, 23 nt, Artificial Sequence
  Synthetic
cugucuccucuauugcaaaaguu

SEQ ID NO: 679698 - RNA, 24 nt, Artificial Sequence
  Synthetic
ucugucuccucuauugcaaaaguu

SEQ ID NO: 679699 - RNA, 18 nt, Artificial Sequence
  Synthetic
ggaaaauguggaaaaguu

SEQ ID NO: 679700 - RNA, 19 nt, Artificial Sequence
  Synthetic
aggaaaauguggaaaaguu

SEQ ID NO: 679701 - RNA, 20 nt, Artificial Sequence
  Synthetic
caggaaaauguggaaaaguu

SEQ ID NO: 679702 - RNA, 21 nt, Artificial Sequence
  Synthetic
acaggaaaauguggaaaaguu

SEQ ID NO: 679703 - RNA, 22 nt, Artificial Sequence
  Synthetic
gacaggaaaauguggaaaaguu

SEQ ID NO: 679704 - RNA, 23 nt, Artificial Sequence
  Synthetic
agacaggaaaauguggaaaaguu

SEQ ID NO: 679705 - RNA, 24 nt, Artificial Sequence
  Synthetic
aagacaggaaaauguggaaaaguu

SEQ ID NO: 679706 - RNA, 18 nt, Artificial Sequence
  Synthetic
gaacuuaaaauaaaaguu

SEQ ID NO: 679707 - RNA, 19 nt, Artificial Sequence
  Synthetic
ugaacuuaaaauaaaaguu

SEQ ID NO: 679708 - RNA, 20 nt, Artificial Sequence
  Synthetic
cugaacuuaaaauaaaaguu

SEQ ID NO: 679709 - RNA, 21 nt, Artificial Sequence
  Synthetic
ccugaacuuaaaauaaaaguu

SEQ ID NO: 679710 - RNA, 22 nt, Artificial Sequence
  Synthetic
uccugaacuuaaaauaaaaguu

SEQ ID NO: 679711 - RNA, 23 nt, Artificial Sequence
  Synthetic
cuccugaacuuaaaauaaaaguu

SEQ ID NO: 679712 - RNA, 24 nt, Artificial Sequence
  Synthetic
gcuccugaacuuaaaauaaaaguu

SEQ ID NO: 679713 - RNA, 18 nt, Artificial Sequence
  Synthetic
ccaccgagaauaaaaguu

SEQ ID NO: 679714 - RNA, 19 nt, Artificial Sequence
  Synthetic
gccaccgagaauaaaaguu

SEQ ID NO: 679715 - RNA, 20 nt, Artificial Sequence
  Synthetic
agccaccgagaauaaaaguu

SEQ ID NO: 679716 - RNA, 21 nt, Artificial Sequence
  Synthetic
aagccaccgagaauaaaaguu

SEQ ID NO: 679717 - RNA, 22 nt, Artificial Sequence
  Synthetic
gaagccaccgagaauaaaaguu

SEQ ID NO: 679718 - RNA, 23 nt, Artificial Sequence
  Synthetic
ggaagccaccgagaauaaaaguu

SEQ ID NO: 679719 - RNA, 24 nt, Artificial Sequence
  Synthetic
aggaagccaccgagaauaaaaguu

SEQ ID NO: 679720 - RNA, 18 nt, Artificial Sequence
  Synthetic
aagcagagcauaaaaguu

SEQ ID NO: 679721 - RNA, 19 nt, Artificial Sequence
  Synthetic
gaagcagagcauaaaaguu

SEQ ID NO: 679722 - RNA, 20 nt, Artificial Sequence
  Synthetic
ggaagcagagcauaaaaguu

SEQ ID NO: 679723 - RNA, 21 nt, Artificial Sequence
  Synthetic
gggaagcagagcauaaaaguu

SEQ ID NO: 679724 - RNA, 22 nt, Artificial Sequence
  Synthetic
agggaagcagagcauaaaaguu

SEQ ID NO: 679725 - RNA, 23 nt, Artificial Sequence
  Synthetic
aagggaagcagagcauaaaaguu

SEQ ID NO: 679726 - RNA, 24 nt, Artificial Sequence
  Synthetic
aaagggaagcagagcauaaaaguu

SEQ ID NO: 679727 - RNA, 18 nt, Artificial Sequence
  Synthetic
ucugaaauguuaaaaguu

SEQ ID NO: 679728 - RNA, 19 nt, Artificial Sequence
  Synthetic
aucugaaauguuaaaaguu

SEQ ID NO: 679729 - RNA, 20 nt, Artificial Sequence
  Synthetic
uaucugaaauguuaaaaguu

SEQ ID NO: 679730 - RNA, 21 nt, Artificial Sequence
  Synthetic
guaucugaaauguuaaaaguu

SEQ ID NO: 679731 - RNA, 22 nt, Artificial Sequence
  Synthetic
aguaucugaaauguuaaaaguu

SEQ ID NO: 679732 - RNA, 23 nt, Artificial Sequence
  Synthetic
aaguaucugaaauguuaaaaguu

SEQ ID NO: 679733 - RNA, 24 nt, Artificial Sequence
  Synthetic
aaaguaucugaaauguuaaaaguu

SEQ ID NO: 679734 - RNA, 18 nt, Artificial Sequence
  Synthetic
acaguaauaaacaaaguu

SEQ ID NO: 679735 - RNA, 19 nt, Artificial Sequence
  Synthetic
uacaguaauaaacaaaguu

SEQ ID NO: 679736 - RNA, 20 nt, Artificial Sequence
  Synthetic
uuacaguaauaaacaaaguu

SEQ ID NO: 679737 - RNA, 21 nt, Artificial Sequence
  Synthetic
auuacaguaauaaacaaaguu

SEQ ID NO: 679738 - RNA, 22 nt, Artificial Sequence
  Synthetic
cauuacaguaauaaacaaaguu

SEQ ID NO: 679739 - RNA, 23 nt, Artificial Sequence
  Synthetic
ucauuacaguaauaaacaaaguu

SEQ ID NO: 679740 - RNA, 24 nt, Artificial Sequence
  Synthetic
aucauuacaguaauaaacaaaguu

SEQ ID NO: 679741 - RNA, 18 nt, Artificial Sequence
  Synthetic
auuucauuacacaaaguu

SEQ ID NO: 679742 - RNA, 19 nt, Artificial Sequence
  Synthetic
gauuucauuacacaaaguu

SEQ ID NO: 679743 - RNA, 20 nt, Artificial Sequence
  Synthetic
ggauuucauuacacaaaguu

SEQ ID NO: 679744 - RNA, 21 nt, Artificial Sequence
  Synthetic
aggauuucauuacacaaaguu

SEQ ID NO: 679745 - RNA, 22 nt, Artificial Sequence
  Synthetic
gaggauuucauuacacaaaguu

SEQ ID NO: 679746 - RNA, 23 nt, Artificial Sequence
  Synthetic
ugaggauuucauuacacaaaguu

SEQ ID NO: 679747 - RNA, 24 nt, Artificial Sequence
  Synthetic
cugaggauuucauuacacaaaguu

SEQ ID NO: 679748 - RNA, 18 nt, Artificial Sequence
  Synthetic
ccuauuagguacaaaguu

SEQ ID NO: 679749 - RNA, 19 nt, Artificial Sequence
  Synthetic
accuauuagguacaaaguu

SEQ ID NO: 679750 - RNA, 20 nt, Artificial Sequence
  Synthetic
aaccuauuagguacaaaguu

SEQ ID NO: 679751 - RNA, 21 nt, Artificial Sequence
  Synthetic
gaaccuauuagguacaaaguu

SEQ ID NO: 679752 - RNA, 22 nt, Artificial Sequence
  Synthetic
ugaaccuauuagguacaaaguu

SEQ ID NO: 679753 - RNA, 23 nt, Artificial Sequence
  Synthetic
uugaaccuauuagguacaaaguu

SEQ ID NO: 679754 - RNA, 24 nt, Artificial Sequence
  Synthetic
uuugaaccuauuagguacaaaguu

SEQ ID NO: 679755 - RNA, 18 nt, Artificial Sequence
  Synthetic
aaggagagaggcaaaguu

SEQ ID NO: 679756 - RNA, 19 nt, Artificial Sequence
  Synthetic
uaaggagagaggcaaaguu

SEQ ID NO: 679757 - RNA, 20 nt, Artificial Sequence
  Synthetic
auaaggagagaggcaaaguu

SEQ ID NO: 679758 - RNA, 21 nt, Artificial Sequence
  Synthetic
aauaaggagagaggcaaaguu

SEQ ID NO: 679759 - RNA, 22 nt, Artificial Sequence
  Synthetic
gaauaaggagagaggcaaaguu

SEQ ID NO: 679760 - RNA, 23 nt, Artificial Sequence
  Synthetic
ggaauaaggagagaggcaaaguu

SEQ ID NO: 679761 - RNA, 24 nt, Artificial Sequence
  Synthetic
aggaauaaggagagaggcaaaguu

SEQ ID NO: 679762 - RNA, 18 nt, Artificial Sequence
  Synthetic
aaggucuuugucaaaguu

SEQ ID NO: 679763 - RNA, 19 nt, Artificial Sequence
  Synthetic
aaaggucuuugucaaaguu

SEQ ID NO: 679764 - RNA, 20 nt, Artificial Sequence
  Synthetic
aaaaggucuuugucaaaguu

SEQ ID NO: 679765 - RNA, 21 nt, Artificial Sequence
  Synthetic
uaaaaggucuuugucaaaguu

SEQ ID NO: 679766 - RNA, 22 nt, Artificial Sequence
  Synthetic
guaaaaggucuuugucaaaguu

SEQ ID NO: 679767 - RNA, 23 nt, Artificial Sequence
  Synthetic
uguaaaaggucuuugucaaaguu

SEQ ID NO: 679768 - RNA, 24 nt, Artificial Sequence
  Synthetic
cuguaaaaggucuuugucaaaguu

SEQ ID NO: 679769 - RNA, 18 nt, Artificial Sequence
  Synthetic
ucccaacuguucaaaguu

SEQ ID NO: 679770 - RNA, 19 nt, Artificial Sequence
  Synthetic
uucccaacuguucaaaguu

SEQ ID NO: 679771 - RNA, 20 nt, Artificial Sequence
  Synthetic
uuucccaacuguucaaaguu

SEQ ID NO: 679772 - RNA, 21 nt, Artificial Sequence
  Synthetic
uuuucccaacuguucaaaguu

SEQ ID NO: 679773 - RNA, 22 nt, Artificial Sequence
  Synthetic
auuuucccaacuguucaaaguu

SEQ ID NO: 679774 - RNA, 23 nt, Artificial Sequence
  Synthetic
gauuuucccaacuguucaaaguu

SEQ ID NO: 679775 - RNA, 24 nt, Artificial Sequence
  Synthetic
agauuuucccaacuguucaaaguu

SEQ ID NO: 679776 - RNA, 18 nt, Artificial Sequence
  Synthetic
ggagucaaaaagaaaguu

SEQ ID NO: 679777 - RNA, 19 nt, Artificial Sequence
  Synthetic
gggagucaaaaagaaaguu

SEQ ID NO: 679778 - RNA, 20 nt, Artificial Sequence
  Synthetic
ggggagucaaaaagaaaguu

SEQ ID NO: 679779 - RNA, 21 nt, Artificial Sequence
  Synthetic
gggggagucaaaaagaaaguu

SEQ ID NO: 679780 - RNA, 22 nt, Artificial Sequence
  Synthetic
ggggggagucaaaaagaaaguu

SEQ ID NO: 679781 - RNA, 23 nt, Artificial Sequence
  Synthetic
gggggggagucaaaaagaaaguu

SEQ ID NO: 679782 - RNA, 24 nt, Artificial Sequence
  Synthetic
ugggggggagucaaaaagaaaguu

SEQ ID NO: 679783 - RNA, 18 nt, Artificial Sequence
  Synthetic
gggagaguguagaaaguu

SEQ ID NO: 679784 - RNA, 19 nt, Artificial Sequence
  Synthetic
ugggagaguguagaaaguu

SEQ ID NO: 679785 - RNA, 20 nt, Artificial Sequence
  Synthetic
uugggagaguguagaaaguu

SEQ ID NO: 679786 - RNA, 21 nt, Artificial Sequence
  Synthetic
cuugggagaguguagaaaguu

SEQ ID NO: 679787 - RNA, 22 nt, Artificial Sequence
  Synthetic
ucuugggagaguguagaaaguu

SEQ ID NO: 679788 - RNA, 23 nt, Artificial Sequence
  Synthetic
cucuugggagaguguagaaaguu

SEQ ID NO: 679789 - RNA, 24 nt, Artificial Sequence
  Synthetic
ucucuugggagaguguagaaaguu

SEQ ID NO: 679790 - RNA, 18 nt, Artificial Sequence
  Synthetic
ggaagaugugggaaaguu

SEQ ID NO: 679791 - RNA, 19 nt, Artificial Sequence
  Synthetic
aggaagaugugggaaaguu

SEQ ID NO: 679792 - RNA, 20 nt, Artificial Sequence
  Synthetic
caggaagaugugggaaaguu

SEQ ID NO: 679793 - RNA, 21 nt, Artificial Sequence
  Synthetic
acaggaagaugugggaaaguu

SEQ ID NO: 679794 - RNA, 22 nt, Artificial Sequence
  Synthetic
gacaggaagaugugggaaaguu

SEQ ID NO: 679795 - RNA, 23 nt, Artificial Sequence
  Synthetic
agacaggaagaugugggaaaguu

SEQ ID NO: 679796 - RNA, 24 nt, Artificial Sequence
  Synthetic
aagacaggaagaugugggaaaguu

SEQ ID NO: 679797 - RNA, 18 nt, Artificial Sequence
  Synthetic
aaaauaacguggaaaguu

SEQ ID NO: 679798 - RNA, 19 nt, Artificial Sequence
  Synthetic
aaaaauaacguggaaaguu

SEQ ID NO: 679799 - RNA, 20 nt, Artificial Sequence
  Synthetic
uaaaaauaacguggaaaguu

SEQ ID NO: 679800 - RNA, 21 nt, Artificial Sequence
  Synthetic
auaaaaauaacguggaaaguu

SEQ ID NO: 679801 - RNA, 22 nt, Artificial Sequence
  Synthetic
aauaaaaauaacguggaaaguu

SEQ ID NO: 679802 - RNA, 23 nt, Artificial Sequence
  Synthetic
gaauaaaaauaacguggaaaguu

SEQ ID NO: 679803 - RNA, 24 nt, Artificial Sequence
  Synthetic
ggaauaaaaauaacguggaaaguu

SEQ ID NO: 679804 - RNA, 18 nt, Artificial Sequence
  Synthetic
uuaagaagaaauaaaguu

SEQ ID NO: 679805 - RNA, 19 nt, Artificial Sequence
  Synthetic
guuaagaagaaauaaaguu

SEQ ID NO: 679806 - RNA, 20 nt, Artificial Sequence
  Synthetic
gguuaagaagaaauaaaguu

SEQ ID NO: 679807 - RNA, 21 nt, Artificial Sequence
  Synthetic
ggguuaagaagaaauaaaguu

SEQ ID NO: 679808 - RNA, 22 nt, Artificial Sequence
  Synthetic
aggguuaagaagaaauaaaguu

SEQ ID NO: 679809 - RNA, 23 nt, Artificial Sequence
  Synthetic
caggguuaagaagaaauaaaguu

SEQ ID NO: 679810 - RNA, 24 nt, Artificial Sequence
  Synthetic
gcaggguuaagaagaaauaaaguu

SEQ ID NO: 679811 - RNA, 18 nt, Artificial Sequence
  Synthetic
uucaguguggcuaaaguu

SEQ ID NO: 679812 - RNA, 19 nt, Artificial Sequence
  Synthetic
auucaguguggcuaaaguu

SEQ ID NO: 679813 - RNA, 20 nt, Artificial Sequence
  Synthetic
aauucaguguggcuaaaguu

SEQ ID NO: 679814 - RNA, 21 nt, Artificial Sequence
  Synthetic
gaauucaguguggcuaaaguu

SEQ ID NO: 679815 - RNA, 22 nt, Artificial Sequence
  Synthetic
ggaauucaguguggcuaaaguu

SEQ ID NO: 679816 - RNA, 23 nt, Artificial Sequence
  Synthetic
aggaauucaguguggcuaaaguu

SEQ ID NO: 679817 - RNA, 24 nt, Artificial Sequence
  Synthetic
uaggaauucaguguggcuaaaguu

SEQ ID NO: 679818 - RNA, 18 nt, Artificial Sequence
  Synthetic
cgcuuugagaaacaaguu

SEQ ID NO: 679819 - RNA, 19 nt, Artificial Sequence
  Synthetic
ccgcuuugagaaacaaguu

SEQ ID NO: 679820 - RNA, 20 nt, Artificial Sequence
  Synthetic
accgcuuugagaaacaaguu

SEQ ID NO: 679821 - RNA, 21 nt, Artificial Sequence
  Synthetic
caccgcuuugagaaacaaguu

SEQ ID NO: 679822 - RNA, 22 nt, Artificial Sequence
  Synthetic
ccaccgcuuugagaaacaaguu

SEQ ID NO: 679823 - RNA, 23 nt, Artificial Sequence
  Synthetic
accaccgcuuugagaaacaaguu

SEQ ID NO: 679824 - RNA, 24 nt, Artificial Sequence
  Synthetic
aaccaccgcuuugagaaacaaguu

SEQ ID NO: 679825 - RNA, 18 nt, Artificial Sequence
  Synthetic
aaaaguguuaaacaaguu

SEQ ID NO: 679826 - RNA, 19 nt, Artificial Sequence
  Synthetic
uaaaaguguuaaacaaguu

SEQ ID NO: 679827 - RNA, 20 nt, Artificial Sequence
  Synthetic
cuaaaaguguuaaacaaguu

SEQ ID NO: 679828 - RNA, 21 nt, Artificial Sequence
  Synthetic
ccuaaaaguguuaaacaaguu

SEQ ID NO: 679829 - RNA, 22 nt, Artificial Sequence
  Synthetic
uccuaaaaguguuaaacaaguu

SEQ ID NO: 679830 - RNA, 23 nt, Artificial Sequence
  Synthetic
auccuaaaaguguuaaacaaguu

SEQ ID NO: 679831 - RNA, 24 nt, Artificial Sequence
  Synthetic
aauccuaaaaguguuaaacaaguu

SEQ ID NO: 679832 - RNA, 18 nt, Artificial Sequence
  Synthetic
aaaucuauagaacaaguu

SEQ ID NO: 679833 - RNA, 19 nt, Artificial Sequence
  Synthetic
uaaaucuauagaacaaguu

SEQ ID NO: 679834 - RNA, 20 nt, Artificial Sequence
  Synthetic
uuaaaucuauagaacaaguu

SEQ ID NO: 679835 - RNA, 21 nt, Artificial Sequence
  Synthetic
auuaaaucuauagaacaaguu

SEQ ID NO: 679836 - RNA, 22 nt, Artificial Sequence
  Synthetic
cauuaaaucuauagaacaaguu

SEQ ID NO: 679837 - RNA, 23 nt, Artificial Sequence
  Synthetic
gcauuaaaucuauagaacaaguu

SEQ ID NO: 679838 - RNA, 24 nt, Artificial Sequence
  Synthetic
ugcauuaaaucuauagaacaaguu

SEQ ID NO: 679839 - RNA, 18 nt, Artificial Sequence
  Synthetic
auagaccaauaacaaguu

SEQ ID NO: 679840 - RNA, 19 nt, Artificial Sequence
  Synthetic
aauagaccaauaacaaguu

SEQ ID NO: 679841 - RNA, 20 nt, Artificial Sequence
  Synthetic
gaauagaccaauaacaaguu

SEQ ID NO: 679842 - RNA, 21 nt, Artificial Sequence
  Synthetic
ugaauagaccaauaacaaguu

SEQ ID NO: 679843 - RNA, 22 nt, Artificial Sequence
  Synthetic
cugaauagaccaauaacaaguu

SEQ ID NO: 679844 - RNA, 23 nt, Artificial Sequence
  Synthetic
ccugaauagaccaauaacaaguu

SEQ ID NO: 679845 - RNA, 24 nt, Artificial Sequence
  Synthetic
cccugaauagaccaauaacaaguu

SEQ ID NO: 679846 - RNA, 18 nt, Artificial Sequence
  Synthetic
ggugcagagauacaaguu

SEQ ID NO: 679847 - RNA, 19 nt, Artificial Sequence
  Synthetic
gggugcagagauacaaguu

SEQ ID NO: 679848 - RNA, 20 nt, Artificial Sequence
  Synthetic
agggugcagagauacaaguu

SEQ ID NO: 679849 - RNA, 21 nt, Artificial Sequence
  Synthetic
aagggugcagagauacaaguu

SEQ ID NO: 679850 - RNA, 22 nt, Artificial Sequence
  Synthetic
gaagggugcagagauacaaguu

SEQ ID NO: 679851 - RNA, 23 nt, Artificial Sequence
  Synthetic
agaagggugcagagauacaaguu

SEQ ID NO: 679852 - RNA, 24 nt, Artificial Sequence
  Synthetic
cagaagggugcagagauacaaguu

SEQ ID NO: 679853 - RNA, 18 nt, Artificial Sequence
  Synthetic
uucuucucuauacaaguu

SEQ ID NO: 679854 - RNA, 19 nt, Artificial Sequence
  Synthetic
auucuucucuauacaaguu

SEQ ID NO: 679855 - RNA, 20 nt, Artificial Sequence
  Synthetic
uauucuucucuauacaaguu

SEQ ID NO: 679856 - RNA, 21 nt, Artificial Sequence
  Synthetic
cuauucuucucuauacaaguu

SEQ ID NO: 679857 - RNA, 22 nt, Artificial Sequence
  Synthetic
ucuauucuucucuauacaaguu

SEQ ID NO: 679858 - RNA, 23 nt, Artificial Sequence
  Synthetic
uucuauucuucucuauacaaguu

SEQ ID NO: 679859 - RNA, 24 nt, Artificial Sequence
  Synthetic
cuucuauucuucucuauacaaguu

SEQ ID NO: 679860 - RNA, 18 nt, Artificial Sequence
  Synthetic
uacacacaucuccaaguu

SEQ ID NO: 679861 - RNA, 19 nt, Artificial Sequence
  Synthetic
auacacacaucuccaaguu

SEQ ID NO: 679862 - RNA, 20 nt, Artificial Sequence
  Synthetic
uauacacacaucuccaaguu

SEQ ID NO: 679863 - RNA, 21 nt, Artificial Sequence
  Synthetic
guauacacacaucuccaaguu

SEQ ID NO: 679864 - RNA, 22 nt, Artificial Sequence
  Synthetic
uguauacacacaucuccaaguu

SEQ ID NO: 679865 - RNA, 23 nt, Artificial Sequence
  Synthetic
cuguauacacacaucuccaaguu

SEQ ID NO: 679866 - RNA, 24 nt, Artificial Sequence
  Synthetic
ucuguauacacacaucuccaaguu

SEQ ID NO: 679867 - RNA, 18 nt, Artificial Sequence
  Synthetic
uuaugauuuaggcaaguu

SEQ ID NO: 679868 - RNA, 19 nt, Artificial Sequence
  Synthetic
uuuaugauuuaggcaaguu

SEQ ID NO: 679869 - RNA, 20 nt, Artificial Sequence
  Synthetic
uuuuaugauuuaggcaaguu

SEQ ID NO: 679870 - RNA, 21 nt, Artificial Sequence
  Synthetic
cuuuuaugauuuaggcaaguu

SEQ ID NO: 679871 - RNA, 22 nt, Artificial Sequence
  Synthetic
acuuuuaugauuuaggcaaguu

SEQ ID NO: 679872 - RNA, 23 nt, Artificial Sequence
  Synthetic
aacuuuuaugauuuaggcaaguu

SEQ ID NO: 679873 - RNA, 24 nt, Artificial Sequence
  Synthetic
uaacuuuuaugauuuaggcaaguu

SEQ ID NO: 679874 - RNA, 18 nt, Artificial Sequence
  Synthetic
auugcucagcaucaaguu

SEQ ID NO: 679875 - RNA, 19 nt, Artificial Sequence
  Synthetic
cauugcucagcaucaaguu

SEQ ID NO: 679876 - RNA, 20 nt, Artificial Sequence
  Synthetic
gcauugcucagcaucaaguu

SEQ ID NO: 679877 - RNA, 21 nt, Artificial Sequence
  Synthetic
agcauugcucagcaucaaguu

SEQ ID NO: 679878 - RNA, 22 nt, Artificial Sequence
  Synthetic
uagcauugcucagcaucaaguu

SEQ ID NO: 679879 - RNA, 23 nt, Artificial Sequence
  Synthetic
guagcauugcucagcaucaaguu

SEQ ID NO: 679880 - RNA, 24 nt, Artificial Sequence
  Synthetic
uguagcauugcucagcaucaaguu

SEQ ID NO: 679881 - RNA, 18 nt, Artificial Sequence
  Synthetic
gauggcugugaucaaguu

SEQ ID NO: 679882 - RNA, 19 nt, Artificial Sequence
  Synthetic
cgauggcugugaucaaguu

SEQ ID NO: 679883 - RNA, 20 nt, Artificial Sequence
  Synthetic
acgauggcugugaucaaguu

SEQ ID NO: 679884 - RNA, 21 nt, Artificial Sequence
  Synthetic
uacgauggcugugaucaaguu

SEQ ID NO: 679885 - RNA, 22 nt, Artificial Sequence
  Synthetic
uuacgauggcugugaucaaguu

SEQ ID NO: 679886 - RNA, 23 nt, Artificial Sequence
  Synthetic
auuacgauggcugugaucaaguu

SEQ ID NO: 679887 - RNA, 24 nt, Artificial Sequence
  Synthetic
aauuacgauggcugugaucaaguu

SEQ ID NO: 679888 - RNA, 18 nt, Artificial Sequence
  Synthetic
aauaauaacccucaaguu

SEQ ID NO: 679889 - RNA, 19 nt, Artificial Sequence
  Synthetic
uaauaauaacccucaaguu

SEQ ID NO: 679890 - RNA, 20 nt, Artificial Sequence
  Synthetic
auaauaauaacccucaaguu

SEQ ID NO: 679891 - RNA, 21 nt, Artificial Sequence
  Synthetic
aauaauaauaacccucaaguu

SEQ ID NO: 679892 - RNA, 22 nt, Artificial Sequence
  Synthetic
aaauaauaauaacccucaaguu

SEQ ID NO: 679893 - RNA, 23 nt, Artificial Sequence
  Synthetic
aaaauaauaauaacccucaaguu

SEQ ID NO: 679894 - RNA, 24 nt, Artificial Sequence
  Synthetic
aaaaauaauaauaacccucaaguu

SEQ ID NO: 679895 - RNA, 18 nt, Artificial Sequence
  Synthetic
uacgauauaucucaaguu

SEQ ID NO: 679896 - RNA, 19 nt, Artificial Sequence
  Synthetic
guacgauauaucucaaguu

SEQ ID NO: 679897 - RNA, 20 nt, Artificial Sequence
  Synthetic
uguacgauauaucucaaguu

SEQ ID NO: 679898 - RNA, 21 nt, Artificial Sequence
  Synthetic
uuguacgauauaucucaaguu

SEQ ID NO: 679899 - RNA, 22 nt, Artificial Sequence
  Synthetic
auuguacgauauaucucaaguu

SEQ ID NO: 679900 - RNA, 23 nt, Artificial Sequence
  Synthetic
uauuguacgauauaucucaaguu

SEQ ID NO: 679901 - RNA, 24 nt, Artificial Sequence
  Synthetic
cuauuguacgauauaucucaaguu

SEQ ID NO: 679902 - RNA, 18 nt, Artificial Sequence
  Synthetic
uaagaaaaaugucaaguu

SEQ ID NO: 679903 - RNA, 19 nt, Artificial Sequence
  Synthetic
auaagaaaaaugucaaguu

SEQ ID NO: 679904 - RNA, 20 nt, Artificial Sequence
  Synthetic
gauaagaaaaaugucaaguu

SEQ ID NO: 679905 - RNA, 21 nt, Artificial Sequence
  Synthetic
ggauaagaaaaaugucaaguu

SEQ ID NO: 679906 - RNA, 22 nt, Artificial Sequence
  Synthetic
gggauaagaaaaaugucaaguu

SEQ ID NO: 679907 - RNA, 23 nt, Artificial Sequence
  Synthetic
ggggauaagaaaaaugucaaguu

SEQ ID NO: 679908 - RNA, 24 nt, Artificial Sequence
  Synthetic
aggggauaagaaaaaugucaaguu

SEQ ID NO: 679909 - RNA, 18 nt, Artificial Sequence
  Synthetic
cauccaacuauucaaguu

SEQ ID NO: 679910 - RNA, 19 nt, Artificial Sequence
  Synthetic
ccauccaacuauucaaguu

SEQ ID NO: 679911 - RNA, 20 nt, Artificial Sequence
  Synthetic
accauccaacuauucaaguu

SEQ ID NO: 679912 - RNA, 21 nt, Artificial Sequence
  Synthetic
caccauccaacuauucaaguu

SEQ ID NO: 679913 - RNA, 22 nt, Artificial Sequence
  Synthetic
ccaccauccaacuauucaaguu

SEQ ID NO: 679914 - RNA, 23 nt, Artificial Sequence
  Synthetic
uccaccauccaacuauucaaguu

SEQ ID NO: 679915 - RNA, 24 nt, Artificial Sequence
  Synthetic
cuccaccauccaacuauucaaguu

SEQ ID NO: 679916 - RNA, 18 nt, Artificial Sequence
  Synthetic
aguaaucccaaagaaguu

SEQ ID NO: 679917 - RNA, 19 nt, Artificial Sequence
  Synthetic
gaguaaucccaaagaaguu

SEQ ID NO: 679918 - RNA, 20 nt, Artificial Sequence
  Synthetic
agaguaaucccaaagaaguu

SEQ ID NO: 679919 - RNA, 21 nt, Artificial Sequence
  Synthetic
cagaguaaucccaaagaaguu

SEQ ID NO: 679920 - RNA, 22 nt, Artificial Sequence
  Synthetic
acagaguaaucccaaagaaguu

SEQ ID NO: 679921 - RNA, 23 nt, Artificial Sequence
  Synthetic
cacagaguaaucccaaagaaguu

SEQ ID NO: 679922 - RNA, 24 nt, Artificial Sequence
  Synthetic
ccacagaguaaucccaaagaaguu

SEQ ID NO: 679923 - RNA, 18 nt, Artificial Sequence
  Synthetic
agaagugaacaagaaguu

SEQ ID NO: 679924 - RNA, 19 nt, Artificial Sequence
  Synthetic
aagaagugaacaagaaguu

SEQ ID NO: 679925 - RNA, 20 nt, Artificial Sequence
  Synthetic
gaagaagugaacaagaaguu

SEQ ID NO: 679926 - RNA, 21 nt, Artificial Sequence
  Synthetic
cgaagaagugaacaagaaguu

SEQ ID NO: 679927 - RNA, 22 nt, Artificial Sequence
  Synthetic
gcgaagaagugaacaagaaguu

SEQ ID NO: 679928 - RNA, 23 nt, Artificial Sequence
  Synthetic
agcgaagaagugaacaagaaguu

SEQ ID NO: 679929 - RNA, 24 nt, Artificial Sequence
  Synthetic
cagcgaagaagugaacaagaaguu

SEQ ID NO: 679930 - RNA, 18 nt, Artificial Sequence
  Synthetic
uuguuuggagaagaaguu

SEQ ID NO: 679931 - RNA, 19 nt, Artificial Sequence
  Synthetic
cuuguuuggagaagaaguu

SEQ ID NO: 679932 - RNA, 20 nt, Artificial Sequence
  Synthetic
ucuuguuuggagaagaaguu

SEQ ID NO: 679933 - RNA, 21 nt, Artificial Sequence
  Synthetic
uucuuguuuggagaagaaguu

SEQ ID NO: 679934 - RNA, 22 nt, Artificial Sequence
  Synthetic
auucuuguuuggagaagaaguu

SEQ ID NO: 679935 - RNA, 23 nt, Artificial Sequence
  Synthetic
aauucuuguuuggagaagaaguu

SEQ ID NO: 679936 - RNA, 24 nt, Artificial Sequence
  Synthetic
caauucuuguuuggagaagaaguu

SEQ ID NO: 679937 - RNA, 18 nt, Artificial Sequence
  Synthetic
ugagauguguaagaaguu

SEQ ID NO: 679938 - RNA, 19 nt, Artificial Sequence
  Synthetic
augagauguguaagaaguu

SEQ ID NO: 679939 - RNA, 20 nt, Artificial Sequence
  Synthetic
aaugagauguguaagaaguu

SEQ ID NO: 679940 - RNA, 21 nt, Artificial Sequence
  Synthetic
aaaugagauguguaagaaguu

SEQ ID NO: 679941 - RNA, 22 nt, Artificial Sequence
  Synthetic
gaaaugagauguguaagaaguu

SEQ ID NO: 679942 - RNA, 23 nt, Artificial Sequence
  Synthetic
agaaaugagauguguaagaaguu

SEQ ID NO: 679943 - RNA, 24 nt, Artificial Sequence
  Synthetic
gagaaaugagauguguaagaaguu

SEQ ID NO: 679944 - RNA, 18 nt, Artificial Sequence
  Synthetic
acugggauuuaagaaguu

SEQ ID NO: 679945 - RNA, 19 nt, Artificial Sequence
  Synthetic
aacugggauuuaagaaguu

SEQ ID NO: 679946 - RNA, 20 nt, Artificial Sequence
  Synthetic
uaacugggauuuaagaaguu

SEQ ID NO: 679947 - RNA, 21 nt, Artificial Sequence
  Synthetic
guaacugggauuuaagaaguu

SEQ ID NO: 679948 - RNA, 22 nt, Artificial Sequence
  Synthetic
gguaacugggauuuaagaaguu

SEQ ID NO: 679949 - RNA, 23 nt, Artificial Sequence
  Synthetic
agguaacugggauuuaagaaguu

SEQ ID NO: 679950 - RNA, 24 nt, Artificial Sequence
  Synthetic
gagguaacugggauuuaagaaguu

SEQ ID NO: 679951 - RNA, 18 nt, Artificial Sequence
  Synthetic
gaaaacaccacagaaguu

SEQ ID NO: 679952 - RNA, 19 nt, Artificial Sequence
  Synthetic
ggaaaacaccacagaaguu

SEQ ID NO: 679953 - RNA, 20 nt, Artificial Sequence
  Synthetic
uggaaaacaccacagaaguu

SEQ ID NO: 679954 - RNA, 21 nt, Artificial Sequence
  Synthetic
auggaaaacaccacagaaguu

SEQ ID NO: 679955 - RNA, 22 nt, Artificial Sequence
  Synthetic
gauggaaaacaccacagaaguu

SEQ ID NO: 679956 - RNA, 23 nt, Artificial Sequence
  Synthetic
ggauggaaaacaccacagaaguu

SEQ ID NO: 679957 - RNA, 24 nt, Artificial Sequence
  Synthetic
aggauggaaaacaccacagaaguu

SEQ ID NO: 679958 - RNA, 18 nt, Artificial Sequence
  Synthetic
gggaaacucacagaaguu

SEQ ID NO: 679959 - RNA, 19 nt, Artificial Sequence
  Synthetic
ggggaaacucacagaaguu

SEQ ID NO: 679960 - RNA, 20 nt, Artificial Sequence
  Synthetic
gggggaaacucacagaaguu

SEQ ID NO: 679961 - RNA, 21 nt, Artificial Sequence
  Synthetic
cgggggaaacucacagaaguu

SEQ ID NO: 679962 - RNA, 22 nt, Artificial Sequence
  Synthetic
ccgggggaaacucacagaaguu

SEQ ID NO: 679963 - RNA, 23 nt, Artificial Sequence
  Synthetic
cccgggggaaacucacagaaguu

SEQ ID NO: 679964 - RNA, 24 nt, Artificial Sequence
  Synthetic
ucccgggggaaacucacagaaguu

SEQ ID NO: 679965 - RNA, 18 nt, Artificial Sequence
  Synthetic
uuucaaaggacagaaguu

SEQ ID NO: 679966 - RNA, 19 nt, Artificial Sequence
  Synthetic
guuucaaaggacagaaguu

SEQ ID NO: 679967 - RNA, 20 nt, Artificial Sequence
  Synthetic
uguuucaaaggacagaaguu

SEQ ID NO: 679968 - RNA, 21 nt, Artificial Sequence
  Synthetic
guguuucaaaggacagaaguu

SEQ ID NO: 679969 - RNA, 22 nt, Artificial Sequence
  Synthetic
aguguuucaaaggacagaaguu

SEQ ID NO: 679970 - RNA, 23 nt, Artificial Sequence
  Synthetic
aaguguuucaaaggacagaaguu

SEQ ID NO: 679971 - RNA, 24 nt, Artificial Sequence
  Synthetic
aaaguguuucaaaggacagaaguu

SEQ ID NO: 679972 - RNA, 18 nt, Artificial Sequence
  Synthetic
gcuaguauuacagaaguu

SEQ ID NO: 679973 - RNA, 19 nt, Artificial Sequence
  Synthetic
agcuaguauuacagaaguu

SEQ ID NO: 679974 - RNA, 20 nt, Artificial Sequence
  Synthetic
cagcuaguauuacagaaguu

SEQ ID NO: 679975 - RNA, 21 nt, Artificial Sequence
  Synthetic
acagcuaguauuacagaaguu

SEQ ID NO: 679976 - RNA, 22 nt, Artificial Sequence
  Synthetic
gacagcuaguauuacagaaguu

SEQ ID NO: 679977 - RNA, 23 nt, Artificial Sequence
  Synthetic
agacagcuaguauuacagaaguu

SEQ ID NO: 679978 - RNA, 24 nt, Artificial Sequence
  Synthetic
gagacagcuaguauuacagaaguu

SEQ ID NO: 679979 - RNA, 18 nt, Artificial Sequence
  Synthetic
uugaugcugagagaaguu

SEQ ID NO: 679980 - RNA, 19 nt, Artificial Sequence
  Synthetic
auugaugcugagagaaguu

SEQ ID NO: 679981 - RNA, 20 nt, Artificial Sequence
  Synthetic
gauugaugcugagagaaguu

SEQ ID NO: 679982 - RNA, 21 nt, Artificial Sequence
  Synthetic
agauugaugcugagagaaguu

SEQ ID NO: 679983 - RNA, 22 nt, Artificial Sequence
  Synthetic
gagauugaugcugagagaaguu

SEQ ID NO: 679984 - RNA, 23 nt, Artificial Sequence
  Synthetic
ggagauugaugcugagagaaguu

SEQ ID NO: 679985 - RNA, 24 nt, Artificial Sequence
  Synthetic
cggagauugaugcugagagaaguu

SEQ ID NO: 679986 - RNA, 18 nt, Artificial Sequence
  Synthetic
gacagcccuagagaaguu

SEQ ID NO: 679987 - RNA, 19 nt, Artificial Sequence
  Synthetic
cgacagcccuagagaaguu

SEQ ID NO: 679988 - RNA, 20 nt, Artificial Sequence
  Synthetic
ucgacagcccuagagaaguu

SEQ ID NO: 679989 - RNA, 21 nt, Artificial Sequence
  Synthetic
aucgacagcccuagagaaguu

SEQ ID NO: 679990 - RNA, 22 nt, Artificial Sequence
  Synthetic
caucgacagcccuagagaaguu

SEQ ID NO: 679991 - RNA, 23 nt, Artificial Sequence
  Synthetic
ucaucgacagcccuagagaaguu

SEQ ID NO: 679992 - RNA, 24 nt, Artificial Sequence
  Synthetic
gucaucgacagcccuagagaaguu

SEQ ID NO: 679993 - RNA, 18 nt, Artificial Sequence
  Synthetic
ugaagugggaaggaaguu

SEQ ID NO: 679994 - RNA, 19 nt, Artificial Sequence
  Synthetic
cugaagugggaaggaaguu

SEQ ID NO: 679995 - RNA, 20 nt, Artificial Sequence
  Synthetic
gcugaagugggaaggaaguu

SEQ ID NO: 679996 - RNA, 21 nt, Artificial Sequence
  Synthetic
agcugaagugggaaggaaguu

SEQ ID NO: 679997 - RNA, 22 nt, Artificial Sequence
  Synthetic
gagcugaagugggaaggaaguu

SEQ ID NO: 679998 - RNA, 23 nt, Artificial Sequence
  Synthetic
ugagcugaagugggaaggaaguu

SEQ ID NO: 679999 - RNA, 24 nt, Artificial Sequence
  Synthetic
uugagcugaagugggaaggaaguu

SEQ ID NO: 680000 - RNA, 18 nt, Artificial Sequence
  Synthetic
gacugcugacaggaaguu

SEQ ID NO: 680001 - RNA, 19 nt, Artificial Sequence
  Synthetic
ggacugcugacaggaaguu

SEQ ID NO: 680002 - RNA, 20 nt, Artificial Sequence
  Synthetic
uggacugcugacaggaaguu

SEQ ID NO: 680003 - RNA, 21 nt, Artificial Sequence
  Synthetic
guggacugcugacaggaaguu

SEQ ID NO: 680004 - RNA, 22 nt, Artificial Sequence
  Synthetic
uguggacugcugacaggaaguu

SEQ ID NO: 680005 - RNA, 23 nt, Artificial Sequence
  Synthetic
cuguggacugcugacaggaaguu

SEQ ID NO: 680006 - RNA, 24 nt, Artificial Sequence
  Synthetic
ccuguggacugcugacaggaaguu

SEQ ID NO: 680007 - RNA, 18 nt, Artificial Sequence
  Synthetic
gaagcgagaagggaaguu

SEQ ID NO: 680008 - RNA, 19 nt, Artificial Sequence
  Synthetic
ugaagcgagaagggaaguu

SEQ ID NO: 680009 - RNA, 20 nt, Artificial Sequence
  Synthetic
augaagcgagaagggaaguu

SEQ ID NO: 680010 - RNA, 21 nt, Artificial Sequence
  Synthetic
aaugaagcgagaagggaaguu

SEQ ID NO: 680011 - RNA, 22 nt, Artificial Sequence
  Synthetic
aaaugaagcgagaagggaaguu

SEQ ID NO: 680012 - RNA, 23 nt, Artificial Sequence
  Synthetic
gaaaugaagcgagaagggaaguu

SEQ ID NO: 680013 - RNA, 24 nt, Artificial Sequence
  Synthetic
ugaaaugaagcgagaagggaaguu

SEQ ID NO: 680014 - RNA, 18 nt, Artificial Sequence
  Synthetic
uacugaagccaugaaguu

SEQ ID NO: 680015 - RNA, 19 nt, Artificial Sequence
  Synthetic
uuacugaagccaugaaguu

SEQ ID NO: 680016 - RNA, 20 nt, Artificial Sequence
  Synthetic
uuuacugaagccaugaaguu

SEQ ID NO: 680017 - RNA, 21 nt, Artificial Sequence
  Synthetic
uuuuacugaagccaugaaguu

SEQ ID NO: 680018 - RNA, 22 nt, Artificial Sequence
  Synthetic
uuuuuacugaagccaugaaguu

SEQ ID NO: 680019 - RNA, 23 nt, Artificial Sequence
  Synthetic
auuuuuacugaagccaugaaguu

SEQ ID NO: 680020 - RNA, 24 nt, Artificial Sequence
  Synthetic
aauuuuuacugaagccaugaaguu

SEQ ID NO: 680021 - RNA, 18 nt, Artificial Sequence
  Synthetic
uuaaaauuauaugaaguu

SEQ ID NO: 680022 - RNA, 19 nt, Artificial Sequence
  Synthetic
uuuaaaauuauaugaaguu

SEQ ID NO: 680023 - RNA, 20 nt, Artificial Sequence
  Synthetic
uuuuaaaauuauaugaaguu

SEQ ID NO: 680024 - RNA, 21 nt, Artificial Sequence
  Synthetic
uuuuuaaaauuauaugaaguu

SEQ ID NO: 680025 - RNA, 22 nt, Artificial Sequence
  Synthetic
guuuuuaaaauuauaugaaguu

SEQ ID NO: 680026 - RNA, 23 nt, Artificial Sequence
  Synthetic
aguuuuuaaaauuauaugaaguu

SEQ ID NO: 680027 - RNA, 24 nt, Artificial Sequence
  Synthetic
caguuuuuaaaauuauaugaaguu

SEQ ID NO: 680028 - RNA, 18 nt, Artificial Sequence
  Synthetic
agaugaaagccugaaguu

SEQ ID NO: 680029 - RNA, 19 nt, Artificial Sequence
  Synthetic
aagaugaaagccugaaguu

SEQ ID NO: 680030 - RNA, 20 nt, Artificial Sequence
  Synthetic
uaagaugaaagccugaaguu

SEQ ID NO: 680031 - RNA, 21 nt, Artificial Sequence
  Synthetic
uuaagaugaaagccugaaguu

SEQ ID NO: 680032 - RNA, 22 nt, Artificial Sequence
  Synthetic
cuuaagaugaaagccugaaguu

SEQ ID NO: 680033 - RNA, 23 nt, Artificial Sequence
  Synthetic
gcuuaagaugaaagccugaaguu

SEQ ID NO: 680034 - RNA, 24 nt, Artificial Sequence
  Synthetic
ugcuuaagaugaaagccugaaguu

SEQ ID NO: 680035 - RNA, 18 nt, Artificial Sequence
  Synthetic
uaaaaaauuccugaaguu

SEQ ID NO: 680036 - RNA, 19 nt, Artificial Sequence
  Synthetic
auaaaaaauuccugaaguu

SEQ ID NO: 680037 - RNA, 20 nt, Artificial Sequence
  Synthetic
gauaaaaaauuccugaaguu

SEQ ID NO: 680038 - RNA, 21 nt, Artificial Sequence
  Synthetic
ggauaaaaaauuccugaaguu

SEQ ID NO: 680039 - RNA, 22 nt, Artificial Sequence
  Synthetic
aggauaaaaaauuccugaaguu

SEQ ID NO: 680040 - RNA, 23 nt, Artificial Sequence
  Synthetic
aaggauaaaaaauuccugaaguu

SEQ ID NO: 680041 - RNA, 24 nt, Artificial Sequence
  Synthetic
uaaggauaaaaaauuccugaaguu

SEQ ID NO: 680042 - RNA, 18 nt, Artificial Sequence
  Synthetic
ugauuuuuuucugaaguu

SEQ ID NO: 680043 - RNA, 19 nt, Artificial Sequence
  Synthetic
cugauuuuuuucugaaguu

SEQ ID NO: 680044 - RNA, 20 nt, Artificial Sequence
  Synthetic
ucugauuuuuuucugaaguu

SEQ ID NO: 680045 - RNA, 21 nt, Artificial Sequence
  Synthetic
uucugauuuuuuucugaaguu

SEQ ID NO: 680046 - RNA, 22 nt, Artificial Sequence
  Synthetic
uuucugauuuuuuucugaaguu

SEQ ID NO: 680047 - RNA, 23 nt, Artificial Sequence
  Synthetic
auuucugauuuuuuucugaaguu

SEQ ID NO: 680048 - RNA, 24 nt, Artificial Sequence
  Synthetic
uauuucugauuuuuuucugaaguu

SEQ ID NO: 680049 - RNA, 18 nt, Artificial Sequence
  Synthetic
acugcauguugugaaguu

SEQ ID NO: 680050 - RNA, 19 nt, Artificial Sequence
  Synthetic
cacugcauguugugaaguu

SEQ ID NO: 680051 - RNA, 20 nt, Artificial Sequence
  Synthetic
acacugcauguugugaaguu

SEQ ID NO: 680052 - RNA, 21 nt, Artificial Sequence
  Synthetic
uacacugcauguugugaaguu

SEQ ID NO: 680053 - RNA, 22 nt, Artificial Sequence
  Synthetic
auacacugcauguugugaaguu

SEQ ID NO: 680054 - RNA, 23 nt, Artificial Sequence
  Synthetic
aauacacugcauguugugaaguu

SEQ ID NO: 680055 - RNA, 24 nt, Artificial Sequence
  Synthetic
gaauacacugcauguugugaaguu

SEQ ID NO: 680056 - RNA, 18 nt, Artificial Sequence
  Synthetic
aauucaagaauugaaguu

SEQ ID NO: 680057 - RNA, 19 nt, Artificial Sequence
  Synthetic
gaauucaagaauugaaguu

SEQ ID NO: 680058 - RNA, 20 nt, Artificial Sequence
  Synthetic
agaauucaagaauugaaguu

SEQ ID NO: 680059 - RNA, 21 nt, Artificial Sequence
  Synthetic
cagaauucaagaauugaaguu

SEQ ID NO: 680060 - RNA, 22 nt, Artificial Sequence
  Synthetic
acagaauucaagaauugaaguu

SEQ ID NO: 680061 - RNA, 23 nt, Artificial Sequence
  Synthetic
cacagaauucaagaauugaaguu

SEQ ID NO: 680062 - RNA, 24 nt, Artificial Sequence
  Synthetic
acacagaauucaagaauugaaguu

SEQ ID NO: 680063 - RNA, 18 nt, Artificial Sequence
  Synthetic
aaaggaauucuugaaguu

SEQ ID NO: 680064 - RNA, 19 nt, Artificial Sequence
  Synthetic
gaaaggaauucuugaaguu

SEQ ID NO: 680065 - RNA, 20 nt, Artificial Sequence
  Synthetic
agaaaggaauucuugaaguu

SEQ ID NO: 680066 - RNA, 21 nt, Artificial Sequence
  Synthetic
aagaaaggaauucuugaaguu

SEQ ID NO: 680067 - RNA, 22 nt, Artificial Sequence
  Synthetic
gaagaaaggaauucuugaaguu

SEQ ID NO: 680068 - RNA, 23 nt, Artificial Sequence
  Synthetic
agaagaaaggaauucuugaaguu

SEQ ID NO: 680069 - RNA, 24 nt, Artificial Sequence
  Synthetic
aagaagaaaggaauucuugaaguu

SEQ ID NO: 680070 - RNA, 18 nt, Artificial Sequence
  Synthetic
ccaagcagauaauaaguu

SEQ ID NO: 680071 - RNA, 19 nt, Artificial Sequence
  Synthetic
accaagcagauaauaaguu

SEQ ID NO: 680072 - RNA, 20 nt, Artificial Sequence
  Synthetic
uaccaagcagauaauaaguu

SEQ ID NO: 680073 - RNA, 21 nt, Artificial Sequence
  Synthetic
cuaccaagcagauaauaaguu

SEQ ID NO: 680074 - RNA, 22 nt, Artificial Sequence
  Synthetic
gcuaccaagcagauaauaaguu

SEQ ID NO: 680075 - RNA, 23 nt, Artificial Sequence
  Synthetic
agcuaccaagcagauaauaaguu

SEQ ID NO: 680076 - RNA, 24 nt, Artificial Sequence
  Synthetic
gagcuaccaagcagauaauaaguu

SEQ ID NO: 680077 - RNA, 18 nt, Artificial Sequence
  Synthetic
ugcuauuaaagauaaguu

SEQ ID NO: 680078 - RNA, 19 nt, Artificial Sequence
  Synthetic
cugcuauuaaagauaaguu

SEQ ID NO: 680079 - RNA, 20 nt, Artificial Sequence
  Synthetic
acugcuauuaaagauaaguu

SEQ ID NO: 680080 - RNA, 21 nt, Artificial Sequence
  Synthetic
aacugcuauuaaagauaaguu

SEQ ID NO: 680081 - RNA, 22 nt, Artificial Sequence
  Synthetic
aaacugcuauuaaagauaaguu

SEQ ID NO: 680082 - RNA, 23 nt, Artificial Sequence
  Synthetic
gaaacugcuauuaaagauaaguu

SEQ ID NO: 680083 - RNA, 24 nt, Artificial Sequence
  Synthetic
agaaacugcuauuaaagauaaguu

SEQ ID NO: 680084 - RNA, 18 nt, Artificial Sequence
  Synthetic
cguaaacacugcuaaguu

SEQ ID NO: 680085 - RNA, 19 nt, Artificial Sequence
  Synthetic
ucguaaacacugcuaaguu

SEQ ID NO: 680086 - RNA, 20 nt, Artificial Sequence
  Synthetic
uucguaaacacugcuaaguu

SEQ ID NO: 680087 - RNA, 21 nt, Artificial Sequence
  Synthetic
auucguaaacacugcuaaguu

SEQ ID NO: 680088 - RNA, 22 nt, Artificial Sequence
  Synthetic
uauucguaaacacugcuaaguu

SEQ ID NO: 680089 - RNA, 23 nt, Artificial Sequence
  Synthetic
auauucguaaacacugcuaaguu

SEQ ID NO: 680090 - RNA, 24 nt, Artificial Sequence
  Synthetic
uauauucguaaacacugcuaaguu

SEQ ID NO: 680091 - RNA, 18 nt, Artificial Sequence
  Synthetic
caguaaaacaaguaaguu

SEQ ID NO: 680092 - RNA, 19 nt, Artificial Sequence
  Synthetic
gcaguaaaacaaguaaguu

SEQ ID NO: 680093 - RNA, 20 nt, Artificial Sequence
  Synthetic
ugcaguaaaacaaguaaguu

SEQ ID NO: 680094 - RNA, 21 nt, Artificial Sequence
  Synthetic
gugcaguaaaacaaguaaguu

SEQ ID NO: 680095 - RNA, 22 nt, Artificial Sequence
  Synthetic
agugcaguaaaacaaguaaguu

SEQ ID NO: 680096 - RNA, 23 nt, Artificial Sequence
  Synthetic
uagugcaguaaaacaaguaaguu

SEQ ID NO: 680097 - RNA, 24 nt, Artificial Sequence
  Synthetic
guagugcaguaaaacaaguaaguu

SEQ ID NO: 680098 - RNA, 18 nt, Artificial Sequence
  Synthetic
auaaaaauauaguaaguu

SEQ ID NO: 680099 - RNA, 19 nt, Artificial Sequence
  Synthetic
uauaaaaauauaguaaguu

SEQ ID NO: 680100 - RNA, 20 nt, Artificial Sequence
  Synthetic
guauaaaaauauaguaaguu

SEQ ID NO: 680101 - RNA, 21 nt, Artificial Sequence
  Synthetic
gguauaaaaauauaguaaguu

SEQ ID NO: 680102 - RNA, 22 nt, Artificial Sequence
  Synthetic
agguauaaaaauauaguaaguu

SEQ ID NO: 680103 - RNA, 23 nt, Artificial Sequence
  Synthetic
uagguauaaaaauauaguaaguu

SEQ ID NO: 680104 - RNA, 24 nt, Artificial Sequence
  Synthetic
cuagguauaaaaauauaguaaguu

SEQ ID NO: 680105 - RNA, 18 nt, Artificial Sequence
  Synthetic
uuauaauuggauuaaguu

SEQ ID NO: 680106 - RNA, 19 nt, Artificial Sequence
  Synthetic
auuauaauuggauuaaguu

SEQ ID NO: 680107 - RNA, 20 nt, Artificial Sequence
  Synthetic
uauuauaauuggauuaaguu

SEQ ID NO: 680108 - RNA, 21 nt, Artificial Sequence
  Synthetic
guauuauaauuggauuaaguu

SEQ ID NO: 680109 - RNA, 22 nt, Artificial Sequence
  Synthetic
aguauuauaauuggauuaaguu

SEQ ID NO: 680110 - RNA, 23 nt, Artificial Sequence
  Synthetic
caguauuauaauuggauuaaguu

SEQ ID NO: 680111 - RNA, 24 nt, Artificial Sequence
  Synthetic
ccaguauuauaauuggauuaaguu

SEQ ID NO: 680112 - RNA, 18 nt, Artificial Sequence
  Synthetic
aucugguaauauuaaguu

SEQ ID NO: 680113 - RNA, 19 nt, Artificial Sequence
  Synthetic
caucugguaauauuaaguu

SEQ ID NO: 680114 - RNA, 20 nt, Artificial Sequence
  Synthetic
acaucugguaauauuaaguu

SEQ ID NO: 680115 - RNA, 21 nt, Artificial Sequence
  Synthetic
uacaucugguaauauuaaguu

SEQ ID NO: 680116 - RNA, 22 nt, Artificial Sequence
  Synthetic
cuacaucugguaauauuaaguu

SEQ ID NO: 680117 - RNA, 23 nt, Artificial Sequence
  Synthetic
gcuacaucugguaauauuaaguu

SEQ ID NO: 680118 - RNA, 24 nt, Artificial Sequence
  Synthetic
ugcuacaucugguaauauuaaguu

SEQ ID NO: 680119 - RNA, 18 nt, Artificial Sequence
  Synthetic
uggaauuucuauuaaguu

SEQ ID NO: 680120 - RNA, 19 nt, Artificial Sequence
  Synthetic
uuggaauuucuauuaaguu

SEQ ID NO: 680121 - RNA, 20 nt, Artificial Sequence
  Synthetic
auuggaauuucuauuaaguu

SEQ ID NO: 680122 - RNA, 21 nt, Artificial Sequence
  Synthetic
uauuggaauuucuauuaaguu

SEQ ID NO: 680123 - RNA, 22 nt, Artificial Sequence
  Synthetic
guauuggaauuucuauuaaguu

SEQ ID NO: 680124 - RNA, 23 nt, Artificial Sequence
  Synthetic
aguauuggaauuucuauuaaguu

SEQ ID NO: 680125 - RNA, 24 nt, Artificial Sequence
  Synthetic
gaguauuggaauuucuauuaaguu

SEQ ID NO: 680126 - RNA, 18 nt, Artificial Sequence
  Synthetic
uuccccaagccuuaaguu

SEQ ID NO: 680127 - RNA, 19 nt, Artificial Sequence
  Synthetic
uuuccccaagccuuaaguu

SEQ ID NO: 680128 - RNA, 20 nt, Artificial Sequence
  Synthetic
uuuuccccaagccuuaaguu

SEQ ID NO: 680129 - RNA, 21 nt, Artificial Sequence
  Synthetic
uuuuuccccaagccuuaaguu

SEQ ID NO: 680130 - RNA, 22 nt, Artificial Sequence
  Synthetic
auuuuuccccaagccuuaaguu

SEQ ID NO: 680131 - RNA, 23 nt, Artificial Sequence
  Synthetic
uauuuuuccccaagccuuaaguu

SEQ ID NO: 680132 - RNA, 24 nt, Artificial Sequence
  Synthetic
uuauuuuuccccaagccuuaaguu

SEQ ID NO: 680133 - RNA, 18 nt, Artificial Sequence
  Synthetic
gaacaacuuucuuaaguu

SEQ ID NO: 680134 - RNA, 19 nt, Artificial Sequence
  Synthetic
ugaacaacuuucuuaaguu

SEQ ID NO: 680135 - RNA, 20 nt, Artificial Sequence
  Synthetic
augaacaacuuucuuaaguu

SEQ ID NO: 680136 - RNA, 21 nt, Artificial Sequence
  Synthetic
uaugaacaacuuucuuaaguu

SEQ ID NO: 680137 - RNA, 22 nt, Artificial Sequence
  Synthetic
auaugaacaacuuucuuaaguu

SEQ ID NO: 680138 - RNA, 23 nt, Artificial Sequence
  Synthetic
gauaugaacaacuuucuuaaguu

SEQ ID NO: 680139 - RNA, 24 nt, Artificial Sequence
  Synthetic
ggauaugaacaacuuucuuaaguu

SEQ ID NO: 680140 - RNA, 18 nt, Artificial Sequence
  Synthetic
aaaaaaaaauguuaaguu

SEQ ID NO: 680141 - RNA, 19 nt, Artificial Sequence
  Synthetic
gaaaaaaaaauguuaaguu

SEQ ID NO: 680142 - RNA, 20 nt, Artificial Sequence
  Synthetic
agaaaaaaaaauguuaaguu

SEQ ID NO: 680143 - RNA, 21 nt, Artificial Sequence
  Synthetic
aagaaaaaaaaauguuaaguu

SEQ ID NO: 680144 - RNA, 22 nt, Artificial Sequence
  Synthetic
uaagaaaaaaaaauguuaaguu

SEQ ID NO: 680145 - RNA, 23 nt, Artificial Sequence
  Synthetic
uuaagaaaaaaaaauguuaaguu

SEQ ID NO: 680146 - RNA, 24 nt, Artificial Sequence
  Synthetic
uuuaagaaaaaaaaauguuaaguu

SEQ ID NO: 680147 - RNA, 18 nt, Artificial Sequence
  Synthetic
guuuugaacuguuaaguu

SEQ ID NO: 680148 - RNA, 19 nt, Artificial Sequence
  Synthetic
cguuuugaacuguuaaguu

SEQ ID NO: 680149 - RNA, 20 nt, Artificial Sequence
  Synthetic
ucguuuugaacuguuaaguu

SEQ ID NO: 680150 - RNA, 21 nt, Artificial Sequence
  Synthetic
cucguuuugaacuguuaaguu

SEQ ID NO: 680151 - RNA, 22 nt, Artificial Sequence
  Synthetic
acucguuuugaacuguuaaguu

SEQ ID NO: 680152 - RNA, 23 nt, Artificial Sequence
  Synthetic
cacucguuuugaacuguuaaguu

SEQ ID NO: 680153 - RNA, 24 nt, Artificial Sequence
  Synthetic
ucacucguuuugaacuguuaaguu

SEQ ID NO: 680154 - RNA, 18 nt, Artificial Sequence
  Synthetic
acauuuucuuguuaaguu

SEQ ID NO: 680155 - RNA, 19 nt, Artificial Sequence
  Synthetic
gacauuuucuuguuaaguu

SEQ ID NO: 680156 - RNA, 20 nt, Artificial Sequence
  Synthetic
agacauuuucuuguuaaguu

SEQ ID NO: 680157 - RNA, 21 nt, Artificial Sequence
  Synthetic
aagacauuuucuuguuaaguu

SEQ ID NO: 680158 - RNA, 22 nt, Artificial Sequence
  Synthetic
caagacauuuucuuguuaaguu

SEQ ID NO: 680159 - RNA, 23 nt, Artificial Sequence
  Synthetic
acaagacauuuucuuguuaaguu

SEQ ID NO: 680160 - RNA, 24 nt, Artificial Sequence
  Synthetic
cacaagacauuuucuuguuaaguu

SEQ ID NO: 680161 - RNA, 18 nt, Artificial Sequence
  Synthetic
caauaauguuguuaaguu

SEQ ID NO: 680162 - RNA, 19 nt, Artificial Sequence
  Synthetic
acaauaauguuguuaaguu

SEQ ID NO: 680163 - RNA, 20 nt, Artificial Sequence
  Synthetic
gacaauaauguuguuaaguu

SEQ ID NO: 680164 - RNA, 21 nt, Artificial Sequence
  Synthetic
ugacaauaauguuguuaaguu

SEQ ID NO: 680165 - RNA, 22 nt, Artificial Sequence
  Synthetic
cugacaauaauguuguuaaguu

SEQ ID NO: 680166 - RNA, 23 nt, Artificial Sequence
  Synthetic
acugacaauaauguuguuaaguu

SEQ ID NO: 680167 - RNA, 24 nt, Artificial Sequence
  Synthetic
uacugacaauaauguuguuaaguu

SEQ ID NO: 680168 - RNA, 18 nt, Artificial Sequence
  Synthetic
uaaauuauacuuuaaguu

SEQ ID NO: 680169 - RNA, 19 nt, Artificial Sequence
  Synthetic
uuaaauuauacuuuaaguu

SEQ ID NO: 680170 - RNA, 20 nt, Artificial Sequence
  Synthetic
uuuaaauuauacuuuaaguu

SEQ ID NO: 680171 - RNA, 21 nt, Artificial Sequence
  Synthetic
uuuuaaauuauacuuuaaguu

SEQ ID NO: 680172 - RNA, 22 nt, Artificial Sequence
  Synthetic
uuuuuaaauuauacuuuaaguu

SEQ ID NO: 680173 - RNA, 23 nt, Artificial Sequence
  Synthetic
uuuuuuaaauuauacuuuaaguu

SEQ ID NO: 680174 - RNA, 24 nt, Artificial Sequence
  Synthetic
auuuuuuaaauuauacuuuaaguu

SEQ ID NO: 680175 - RNA, 21 nt, Artificial Sequence
  Synthetic
auuauuauuauacuuuaaguu

SEQ ID NO: 680176 - RNA, 22 nt, Artificial Sequence
  Synthetic
uauuauuauuauacuuuaaguu

SEQ ID NO: 680177 - RNA, 23 nt, Artificial Sequence
  Synthetic
uuauuauuauuauacuuuaaguu

SEQ ID NO: 680178 - RNA, 24 nt, Artificial Sequence
  Synthetic
uuuauuauuauuauacuuuaaguu

SEQ ID NO: 680179 - RNA, 18 nt, Artificial Sequence
  Synthetic
uuuuuuaaauuuuaaguu

SEQ ID NO: 680180 - RNA, 19 nt, Artificial Sequence
  Synthetic
guuuuuuaaauuuuaaguu

SEQ ID NO: 680181 - RNA, 20 nt, Artificial Sequence
  Synthetic
aguuuuuuaaauuuuaaguu

SEQ ID NO: 680182 - RNA, 21 nt, Artificial Sequence
  Synthetic
aaguuuuuuaaauuuuaaguu

SEQ ID NO: 680183 - RNA, 22 nt, Artificial Sequence
  Synthetic
aaaguuuuuuaaauuuuaaguu

SEQ ID NO: 680184 - RNA, 23 nt, Artificial Sequence
  Synthetic
uaaaguuuuuuaaauuuuaaguu

SEQ ID NO: 680185 - RNA, 24 nt, Artificial Sequence
  Synthetic
uuaaaguuuuuuaaauuuuaaguu

SEQ ID NO: 680186 - RNA, 18 nt, Artificial Sequence
  Synthetic
gacagugcauuuuaaguu

SEQ ID NO: 680187 - RNA, 19 nt, Artificial Sequence
  Synthetic
ugacagugcauuuuaaguu

SEQ ID NO: 680188 - RNA, 20 nt, Artificial Sequence
  Synthetic
augacagugcauuuuaaguu

SEQ ID NO: 680189 - RNA, 21 nt, Artificial Sequence
  Synthetic
aaugacagugcauuuuaaguu

SEQ ID NO: 680190 - RNA, 22 nt, Artificial Sequence
  Synthetic
gaaugacagugcauuuuaaguu

SEQ ID NO: 680191 - RNA, 23 nt, Artificial Sequence
  Synthetic
ugaaugacagugcauuuuaaguu

SEQ ID NO: 680192 - RNA, 24 nt, Artificial Sequence
  Synthetic
uugaaugacagugcauuuuaaguu

SEQ ID NO: 680193 - RNA, 18 nt, Artificial Sequence
  Synthetic
gucagcauucaaacaguu

SEQ ID NO: 680194 - RNA, 19 nt, Artificial Sequence
  Synthetic
ugucagcauucaaacaguu

SEQ ID NO: 680195 - RNA, 20 nt, Artificial Sequence
  Synthetic
augucagcauucaaacaguu

SEQ ID NO: 680196 - RNA, 21 nt, Artificial Sequence
  Synthetic
caugucagcauucaaacaguu

SEQ ID NO: 680197 - RNA, 22 nt, Artificial Sequence
  Synthetic
ucaugucagcauucaaacaguu

SEQ ID NO: 680198 - RNA, 23 nt, Artificial Sequence
  Synthetic
gucaugucagcauucaaacaguu

SEQ ID NO: 680199 - RNA, 24 nt, Artificial Sequence
  Synthetic
ugucaugucagcauucaaacaguu

SEQ ID NO: 680200 - RNA, 18 nt, Artificial Sequence
  Synthetic
gcagagguugaaacaguu

SEQ ID NO: 680201 - RNA, 19 nt, Artificial Sequence
  Synthetic
ggcagagguugaaacaguu

SEQ ID NO: 680202 - RNA, 20 nt, Artificial Sequence
  Synthetic
aggcagagguugaaacaguu

SEQ ID NO: 680203 - RNA, 21 nt, Artificial Sequence
  Synthetic
caggcagagguugaaacaguu

SEQ ID NO: 680204 - RNA, 22 nt, Artificial Sequence
  Synthetic
acaggcagagguugaaacaguu

SEQ ID NO: 680205 - RNA, 23 nt, Artificial Sequence
  Synthetic
aacaggcagagguugaaacaguu

SEQ ID NO: 680206 - RNA, 24 nt, Artificial Sequence
  Synthetic
uaacaggcagagguugaaacaguu

SEQ ID NO: 680207 - RNA, 18 nt, Artificial Sequence
  Synthetic
gauucugauucaacaguu

SEQ ID NO: 680208 - RNA, 19 nt, Artificial Sequence
  Synthetic
agauucugauucaacaguu

SEQ ID NO: 680209 - RNA, 20 nt, Artificial Sequence
  Synthetic
cagauucugauucaacaguu

SEQ ID NO: 680210 - RNA, 21 nt, Artificial Sequence
  Synthetic
gcagauucugauucaacaguu

SEQ ID NO: 680211 - RNA, 22 nt, Artificial Sequence
  Synthetic
ugcagauucugauucaacaguu

SEQ ID NO: 680212 - RNA, 23 nt, Artificial Sequence
  Synthetic
augcagauucugauucaacaguu

SEQ ID NO: 680213 - RNA, 24 nt, Artificial Sequence
  Synthetic
aaugcagauucugauucaacaguu

SEQ ID NO: 680214 - RNA, 19 nt, Artificial Sequence
  Synthetic
ggauucugauucaacaguu

SEQ ID NO: 680215 - RNA, 20 nt, Artificial Sequence
  Synthetic
cggauucugauucaacaguu

SEQ ID NO: 680216 - RNA, 21 nt, Artificial Sequence
  Synthetic
gcggauucugauucaacaguu

SEQ ID NO: 680217 - RNA, 22 nt, Artificial Sequence
  Synthetic
ggcggauucugauucaacaguu

SEQ ID NO: 680218 - RNA, 23 nt, Artificial Sequence
  Synthetic
uggcggauucugauucaacaguu

SEQ ID NO: 680219 - RNA, 24 nt, Artificial Sequence
  Synthetic
auggcggauucugauucaacaguu

SEQ ID NO: 680220 - RNA, 18 nt, Artificial Sequence
  Synthetic
ccacuauagagaacaguu

SEQ ID NO: 680221 - RNA, 19 nt, Artificial Sequence
  Synthetic
accacuauagagaacaguu

SEQ ID NO: 680222 - RNA, 20 nt, Artificial Sequence
  Synthetic
aaccacuauagagaacaguu

SEQ ID NO: 680223 - RNA, 21 nt, Artificial Sequence
  Synthetic
caaccacuauagagaacaguu

SEQ ID NO: 680224 - RNA, 22 nt, Artificial Sequence
  Synthetic
acaaccacuauagagaacaguu

SEQ ID NO: 680225 - RNA, 23 nt, Artificial Sequence
  Synthetic
uacaaccacuauagagaacaguu

SEQ ID NO: 680226 - RNA, 24 nt, Artificial Sequence
  Synthetic
guacaaccacuauagagaacaguu

SEQ ID NO: 680227 - RNA, 18 nt, Artificial Sequence
  Synthetic
gcagggguuggaacaguu

SEQ ID NO: 680228 - RNA, 19 nt, Artificial Sequence
  Synthetic
ggcagggguuggaacaguu

SEQ ID NO: 680229 - RNA, 20 nt, Artificial Sequence
  Synthetic
aggcagggguuggaacaguu

SEQ ID NO: 680230 - RNA, 21 nt, Artificial Sequence
  Synthetic
uaggcagggguuggaacaguu

SEQ ID NO: 680231 - RNA, 22 nt, Artificial Sequence
  Synthetic
auaggcagggguuggaacaguu

SEQ ID NO: 680232 - RNA, 23 nt, Artificial Sequence
  Synthetic
aauaggcagggguuggaacaguu

SEQ ID NO: 680233 - RNA, 24 nt, Artificial Sequence
  Synthetic
uaauaggcagggguuggaacaguu

SEQ ID NO: 680234 - RNA, 18 nt, Artificial Sequence
  Synthetic
gaugagagaaccacaguu

SEQ ID NO: 680235 - RNA, 19 nt, Artificial Sequence
  Synthetic
agaugagagaaccacaguu

SEQ ID NO: 680236 - RNA, 20 nt, Artificial Sequence
  Synthetic
cagaugagagaaccacaguu

SEQ ID NO: 680237 - RNA, 21 nt, Artificial Sequence
  Synthetic
acagaugagagaaccacaguu

SEQ ID NO: 680238 - RNA, 22 nt, Artificial Sequence
  Synthetic
gacagaugagagaaccacaguu

SEQ ID NO: 680239 - RNA, 23 nt, Artificial Sequence
  Synthetic
ugacagaugagagaaccacaguu

SEQ ID NO: 680240 - RNA, 24 nt, Artificial Sequence
  Synthetic
augacagaugagagaaccacaguu

SEQ ID NO: 680241 - RNA, 18 nt, Artificial Sequence
  Synthetic
uuggaauacaccacaguu

SEQ ID NO: 680242 - RNA, 19 nt, Artificial Sequence
  Synthetic
cuuggaauacaccacaguu

SEQ ID NO: 680243 - RNA, 20 nt, Artificial Sequence
  Synthetic
ucuuggaauacaccacaguu

SEQ ID NO: 680244 - RNA, 21 nt, Artificial Sequence
  Synthetic
aucuuggaauacaccacaguu

SEQ ID NO: 680245 - RNA, 22 nt, Artificial Sequence
  Synthetic
uaucuuggaauacaccacaguu

SEQ ID NO: 680246 - RNA, 23 nt, Artificial Sequence
  Synthetic
guaucuuggaauacaccacaguu

SEQ ID NO: 680247 - RNA, 24 nt, Artificial Sequence
  Synthetic
gguaucuuggaauacaccacaguu

SEQ ID NO: 680248 - RNA, 18 nt, Artificial Sequence
  Synthetic
cuuuagccucccacaguu

SEQ ID NO: 680249 - RNA, 19 nt, Artificial Sequence
  Synthetic
gcuuuagccucccacaguu

SEQ ID NO: 680250 - RNA, 20 nt, Artificial Sequence
  Synthetic
ugcuuuagccucccacaguu

SEQ ID NO: 680251 - RNA, 21 nt, Artificial Sequence
  Synthetic
cugcuuuagccucccacaguu

SEQ ID NO: 680252 - RNA, 22 nt, Artificial Sequence
  Synthetic
ccugcuuuagccucccacaguu

SEQ ID NO: 680253 - RNA, 23 nt, Artificial Sequence
  Synthetic
uccugcuuuagccucccacaguu

SEQ ID NO: 680254 - RNA, 24 nt, Artificial Sequence
  Synthetic
cuccugcuuuagccucccacaguu

SEQ ID NO: 680255 - RNA, 18 nt, Artificial Sequence
  Synthetic
guugaugaaugcacaguu

SEQ ID NO: 680256 - RNA, 19 nt, Artificial Sequence
  Synthetic
uguugaugaaugcacaguu

SEQ ID NO: 680257 - RNA, 20 nt, Artificial Sequence
  Synthetic
uuguugaugaaugcacaguu

SEQ ID NO: 680258 - RNA, 21 nt, Artificial Sequence
  Synthetic
auuguugaugaaugcacaguu

SEQ ID NO: 680259 - RNA, 22 nt, Artificial Sequence
  Synthetic
aauuguugaugaaugcacaguu

SEQ ID NO: 680260 - RNA, 23 nt, Artificial Sequence
  Synthetic
aaauuguugaugaaugcacaguu

SEQ ID NO: 680261 - RNA, 24 nt, Artificial Sequence
  Synthetic
aaaauuguugaugaaugcacaguu

SEQ ID NO: 680262 - RNA, 18 nt, Artificial Sequence
  Synthetic
ccccuaacgugcacaguu

SEQ ID NO: 680263 - RNA, 19 nt, Artificial Sequence
  Synthetic
uccccuaacgugcacaguu

SEQ ID NO: 680264 - RNA, 20 nt, Artificial Sequence
  Synthetic
uuccccuaacgugcacaguu

SEQ ID NO: 680265 - RNA, 21 nt, Artificial Sequence
  Synthetic
auuccccuaacgugcacaguu

SEQ ID NO: 680266 - RNA, 22 nt, Artificial Sequence
  Synthetic
aauuccccuaacgugcacaguu

SEQ ID NO: 680267 - RNA, 23 nt, Artificial Sequence
  Synthetic
caauuccccuaacgugcacaguu

SEQ ID NO: 680268 - RNA, 24 nt, Artificial Sequence
  Synthetic
ccaauuccccuaacgugcacaguu

SEQ ID NO: 680269 - RNA, 18 nt, Artificial Sequence
  Synthetic
auguauucacucacaguu

SEQ ID NO: 680270 - RNA, 19 nt, Artificial Sequence
  Synthetic
aauguauucacucacaguu

SEQ ID NO: 680271 - RNA, 20 nt, Artificial Sequence
  Synthetic
caauguauucacucacaguu

SEQ ID NO: 680272 - RNA, 21 nt, Artificial Sequence
  Synthetic
ccaauguauucacucacaguu

SEQ ID NO: 680273 - RNA, 22 nt, Artificial Sequence
  Synthetic
accaauguauucacucacaguu

SEQ ID NO: 680274 - RNA, 23 nt, Artificial Sequence
  Synthetic
uaccaauguauucacucacaguu

SEQ ID NO: 680275 - RNA, 24 nt, Artificial Sequence
  Synthetic
auaccaauguauucacucacaguu

SEQ ID NO: 680276 - RNA, 18 nt, Artificial Sequence
  Synthetic
ccaucuacuaagacaguu

SEQ ID NO: 680277 - RNA, 19 nt, Artificial Sequence
  Synthetic
gccaucuacuaagacaguu

SEQ ID NO: 680278 - RNA, 20 nt, Artificial Sequence
  Synthetic
ggccaucuacuaagacaguu

SEQ ID NO: 680279 - RNA, 21 nt, Artificial Sequence
  Synthetic
uggccaucuacuaagacaguu

SEQ ID NO: 680280 - RNA, 22 nt, Artificial Sequence
  Synthetic
uuggccaucuacuaagacaguu

SEQ ID NO: 680281 - RNA, 23 nt, Artificial Sequence
  Synthetic
auuggccaucuacuaagacaguu

SEQ ID NO: 680282 - RNA, 24 nt, Artificial Sequence
  Synthetic
uauuggccaucuacuaagacaguu

SEQ ID NO: 680283 - RNA, 18 nt, Artificial Sequence
  Synthetic
aaacaaaaagggacaguu

SEQ ID NO: 680284 - RNA, 19 nt, Artificial Sequence
  Synthetic
aaaacaaaaagggacaguu

SEQ ID NO: 680285 - RNA, 20 nt, Artificial Sequence
  Synthetic
aaaaacaaaaagggacaguu

SEQ ID NO: 680286 - RNA, 21 nt, Artificial Sequence
  Synthetic
gaaaaacaaaaagggacaguu

SEQ ID NO: 680287 - RNA, 22 nt, Artificial Sequence
  Synthetic
agaaaaacaaaaagggacaguu

SEQ ID NO: 680288 - RNA, 23 nt, Artificial Sequence
  Synthetic
uagaaaaacaaaaagggacaguu

SEQ ID NO: 680289 - RNA, 24 nt, Artificial Sequence
  Synthetic
cuagaaaaacaaaaagggacaguu

SEQ ID NO: 680290 - RNA, 18 nt, Artificial Sequence
  Synthetic
ggaaaaugugggacaguu

SEQ ID NO: 680291 - RNA, 19 nt, Artificial Sequence
  Synthetic
aggaaaaugugggacaguu

SEQ ID NO: 680292 - RNA, 20 nt, Artificial Sequence
  Synthetic
aaggaaaaugugggacaguu

SEQ ID NO: 680293 - RNA, 21 nt, Artificial Sequence
  Synthetic
aaaggaaaaugugggacaguu

SEQ ID NO: 680294 - RNA, 22 nt, Artificial Sequence
  Synthetic
gaaaggaaaaugugggacaguu

SEQ ID NO: 680295 - RNA, 23 nt, Artificial Sequence
  Synthetic
agaaaggaaaaugugggacaguu

SEQ ID NO: 680296 - RNA, 24 nt, Artificial Sequence
  Synthetic
aagaaaggaaaaugugggacaguu

SEQ ID NO: 680297 - RNA, 18 nt, Artificial Sequence
  Synthetic
gcuucagcacugacaguu

SEQ ID NO: 680298 - RNA, 19 nt, Artificial Sequence
  Synthetic
ugcuucagcacugacaguu

SEQ ID NO: 680299 - RNA, 20 nt, Artificial Sequence
  Synthetic
uugcuucagcacugacaguu

SEQ ID NO: 680300 - RNA, 21 nt, Artificial Sequence
  Synthetic
uuugcuucagcacugacaguu

SEQ ID NO: 680301 - RNA, 22 nt, Artificial Sequence
  Synthetic
auuugcuucagcacugacaguu

SEQ ID NO: 680302 - RNA, 23 nt, Artificial Sequence
  Synthetic
cauuugcuucagcacugacaguu

SEQ ID NO: 680303 - RNA, 24 nt, Artificial Sequence
  Synthetic
acauuugcuucagcacugacaguu

SEQ ID NO: 680304 - RNA, 18 nt, Artificial Sequence
  Synthetic
aauuuugacuugacaguu

SEQ ID NO: 680305 - RNA, 19 nt, Artificial Sequence
  Synthetic
gaauuuugacuugacaguu

SEQ ID NO: 680306 - RNA, 20 nt, Artificial Sequence
  Synthetic
ggaauuuugacuugacaguu

SEQ ID NO: 680307 - RNA, 21 nt, Artificial Sequence
  Synthetic
aggaauuuugacuugacaguu

SEQ ID NO: 680308 - RNA, 22 nt, Artificial Sequence
  Synthetic
gaggaauuuugacuugacaguu

SEQ ID NO: 680309 - RNA, 23 nt, Artificial Sequence
  Synthetic
ggaggaauuuugacuugacaguu

SEQ ID NO: 680310 - RNA, 24 nt, Artificial Sequence
  Synthetic
gggaggaauuuugacuugacaguu

SEQ ID NO: 680311 - RNA, 18 nt, Artificial Sequence
  Synthetic
guggcagaaaguacaguu

SEQ ID NO: 680312 - RNA, 19 nt, Artificial Sequence
  Synthetic
gguggcagaaaguacaguu

SEQ ID NO: 680313 - RNA, 20 nt, Artificial Sequence
  Synthetic
agguggcagaaaguacaguu

SEQ ID NO: 680314 - RNA, 21 nt, Artificial Sequence
  Synthetic
uagguggcagaaaguacaguu

SEQ ID NO: 680315 - RNA, 22 nt, Artificial Sequence
  Synthetic
uuagguggcagaaaguacaguu

SEQ ID NO: 680316 - RNA, 23 nt, Artificial Sequence
  Synthetic
guuagguggcagaaaguacaguu

SEQ ID NO: 680317 - RNA, 24 nt, Artificial Sequence
  Synthetic
gguuagguggcagaaaguacaguu

SEQ ID NO: 680318 - RNA, 18 nt, Artificial Sequence
  Synthetic
gcagagucugguacaguu

SEQ ID NO: 680319 - RNA, 19 nt, Artificial Sequence
  Synthetic
ugcagagucugguacaguu

SEQ ID NO: 680320 - RNA, 20 nt, Artificial Sequence
  Synthetic
augcagagucugguacaguu

SEQ ID NO: 680321 - RNA, 21 nt, Artificial Sequence
  Synthetic
caugcagagucugguacaguu

SEQ ID NO: 680322 - RNA, 22 nt, Artificial Sequence
  Synthetic
acaugcagagucugguacaguu

SEQ ID NO: 680323 - RNA, 23 nt, Artificial Sequence
  Synthetic
aacaugcagagucugguacaguu

SEQ ID NO: 680324 - RNA, 24 nt, Artificial Sequence
  Synthetic
uaacaugcagagucugguacaguu

SEQ ID NO: 680325 - RNA, 18 nt, Artificial Sequence
  Synthetic
agagcugggauuacaguu

SEQ ID NO: 680326 - RNA, 19 nt, Artificial Sequence
  Synthetic
aagagcugggauuacaguu

SEQ ID NO: 680327 - RNA, 20 nt, Artificial Sequence
  Synthetic
aaagagcugggauuacaguu

SEQ ID NO: 680328 - RNA, 21 nt, Artificial Sequence
  Synthetic
caaagagcugggauuacaguu

SEQ ID NO: 680329 - RNA, 22 nt, Artificial Sequence
  Synthetic
acaaagagcugggauuacaguu

SEQ ID NO: 680330 - RNA, 23 nt, Artificial Sequence
  Synthetic
cacaaagagcugggauuacaguu

SEQ ID NO: 680331 - RNA, 24 nt, Artificial Sequence
  Synthetic
ucacaaagagcugggauuacaguu

SEQ ID NO: 680332 - RNA, 18 nt, Artificial Sequence
  Synthetic
uuugcauguuuuacaguu

SEQ ID NO: 680333 - RNA, 19 nt, Artificial Sequence
  Synthetic
uuuugcauguuuuacaguu

SEQ ID NO: 680334 - RNA, 20 nt, Artificial Sequence
  Synthetic
auuuugcauguuuuacaguu

SEQ ID NO: 680335 - RNA, 21 nt, Artificial Sequence
  Synthetic
cauuuugcauguuuuacaguu

SEQ ID NO: 680336 - RNA, 22 nt, Artificial Sequence
  Synthetic
gcauuuugcauguuuuacaguu

SEQ ID NO: 680337 - RNA, 23 nt, Artificial Sequence
  Synthetic
ggcauuuugcauguuuuacaguu

SEQ ID NO: 680338 - RNA, 24 nt, Artificial Sequence
  Synthetic
aggcauuuugcauguuuuacaguu

SEQ ID NO: 680339 - RNA, 18 nt, Artificial Sequence
  Synthetic
cguugguucagcccaguu

SEQ ID NO: 680340 - RNA, 19 nt, Artificial Sequence
  Synthetic
gcguugguucagcccaguu

SEQ ID NO: 680341 - RNA, 20 nt, Artificial Sequence
  Synthetic
ugcguugguucagcccaguu

SEQ ID NO: 680342 - RNA, 21 nt, Artificial Sequence
  Synthetic
gugcguugguucagcccaguu

SEQ ID NO: 680343 - RNA, 22 nt, Artificial Sequence
  Synthetic
ggugcguugguucagcccaguu

SEQ ID NO: 680344 - RNA, 23 nt, Artificial Sequence
  Synthetic
uggugcguugguucagcccaguu

SEQ ID NO: 680345 - RNA, 24 nt, Artificial Sequence
  Synthetic
uuggugcguugguucagcccaguu

SEQ ID NO: 680346 - RNA, 18 nt, Artificial Sequence
  Synthetic
aagccacguauuccaguu

SEQ ID NO: 680347 - RNA, 19 nt, Artificial Sequence
  Synthetic
caagccacguauuccaguu

SEQ ID NO: 680348 - RNA, 20 nt, Artificial Sequence
  Synthetic
ccaagccacguauuccaguu

SEQ ID NO: 680349 - RNA, 21 nt, Artificial Sequence
  Synthetic
uccaagccacguauuccaguu

SEQ ID NO: 680350 - RNA, 22 nt, Artificial Sequence
  Synthetic
uuccaagccacguauuccaguu

SEQ ID NO: 680351 - RNA, 23 nt, Artificial Sequence
  Synthetic
uuuccaagccacguauuccaguu

SEQ ID NO: 680352 - RNA, 24 nt, Artificial Sequence
  Synthetic
uuuuccaagccacguauuccaguu

SEQ ID NO: 680353 - RNA, 18 nt, Artificial Sequence
  Synthetic
aaauuguuucuuccaguu

SEQ ID NO: 680354 - RNA, 19 nt, Artificial Sequence
  Synthetic
caaauuguuucuuccaguu

SEQ ID NO: 680355 - RNA, 20 nt, Artificial Sequence
  Synthetic
ucaaauuguuucuuccaguu

SEQ ID NO: 680356 - RNA, 21 nt, Artificial Sequence
  Synthetic
aucaaauuguuucuuccaguu

SEQ ID NO: 680357 - RNA, 22 nt, Artificial Sequence
  Synthetic
caucaaauuguuucuuccaguu

SEQ ID NO: 680358 - RNA, 23 nt, Artificial Sequence
  Synthetic
ccaucaaauuguuucuuccaguu

SEQ ID NO: 680359 - RNA, 24 nt, Artificial Sequence
  Synthetic
gccaucaaauuguuucuuccaguu

SEQ ID NO: 680360 - RNA, 18 nt, Artificial Sequence
  Synthetic
ccacuguggaaagcaguu

SEQ ID NO: 680361 - RNA, 19 nt, Artificial Sequence
  Synthetic
gccacuguggaaagcaguu

SEQ ID NO: 680362 - RNA, 20 nt, Artificial Sequence
  Synthetic
agccacuguggaaagcaguu

SEQ ID NO: 680363 - RNA, 21 nt, Artificial Sequence
  Synthetic
cagccacuguggaaagcaguu

SEQ ID NO: 680364 - RNA, 22 nt, Artificial Sequence
  Synthetic
ucagccacuguggaaagcaguu

SEQ ID NO: 680365 - RNA, 23 nt, Artificial Sequence
  Synthetic
uucagccacuguggaaagcaguu

SEQ ID NO: 680366 - RNA, 24 nt, Artificial Sequence
  Synthetic
guucagccacuguggaaagcaguu

SEQ ID NO: 680367 - RNA, 18 nt, Artificial Sequence
  Synthetic
uuucuggaaggagcaguu

SEQ ID NO: 680368 - RNA, 19 nt, Artificial Sequence
  Synthetic
auuucuggaaggagcaguu

SEQ ID NO: 680369 - RNA, 20 nt, Artificial Sequence
  Synthetic
aauuucuggaaggagcaguu

SEQ ID NO: 680370 - RNA, 21 nt, Artificial Sequence
  Synthetic
aaauuucuggaaggagcaguu

SEQ ID NO: 680371 - RNA, 22 nt, Artificial Sequence
  Synthetic
caaauuucuggaaggagcaguu

SEQ ID NO: 680372 - RNA, 23 nt, Artificial Sequence
  Synthetic
ucaaauuucuggaaggagcaguu

SEQ ID NO: 680373 - RNA, 24 nt, Artificial Sequence
  Synthetic
uucaaauuucuggaaggagcaguu

SEQ ID NO: 680374 - RNA, 18 nt, Artificial Sequence
  Synthetic
uggggaaaucuagcaguu

SEQ ID NO: 680375 - RNA, 19 nt, Artificial Sequence
  Synthetic
uuggggaaaucuagcaguu

SEQ ID NO: 680376 - RNA, 20 nt, Artificial Sequence
  Synthetic
auuggggaaaucuagcaguu

SEQ ID NO: 680377 - RNA, 21 nt, Artificial Sequence
  Synthetic
aauuggggaaaucuagcaguu

SEQ ID NO: 680378 - RNA, 22 nt, Artificial Sequence
  Synthetic
aaauuggggaaaucuagcaguu

SEQ ID NO: 680379 - RNA, 23 nt, Artificial Sequence
  Synthetic
aaaauuggggaaaucuagcaguu

SEQ ID NO: 680380 - RNA, 24 nt, Artificial Sequence
  Synthetic
uaaaauuggggaaaucuagcaguu

SEQ ID NO: 680381 - RNA, 18 nt, Artificial Sequence
  Synthetic
uauaaauuuggcgcaguu

SEQ ID NO: 680382 - RNA, 19 nt, Artificial Sequence
  Synthetic
uuauaaauuuggcgcaguu

SEQ ID NO: 680383 - RNA, 20 nt, Artificial Sequence
  Synthetic
uuuauaaauuuggcgcaguu

SEQ ID NO: 680384 - RNA, 21 nt, Artificial Sequence
  Synthetic
auuuauaaauuuggcgcaguu

SEQ ID NO: 680385 - RNA, 22 nt, Artificial Sequence
  Synthetic
aauuuauaaauuuggcgcaguu

SEQ ID NO: 680386 - RNA, 23 nt, Artificial Sequence
  Synthetic
uaauuuauaaauuuggcgcaguu

SEQ ID NO: 680387 - RNA, 24 nt, Artificial Sequence
  Synthetic
uuaauuuauaaauuuggcgcaguu

SEQ ID NO: 680388 - RNA, 18 nt, Artificial Sequence
  Synthetic
cauguaguggaggcaguu

SEQ ID NO: 680389 - RNA, 19 nt, Artificial Sequence
  Synthetic
ccauguaguggaggcaguu

SEQ ID NO: 680390 - RNA, 20 nt, Artificial Sequence
  Synthetic
accauguaguggaggcaguu

SEQ ID NO: 680391 - RNA, 21 nt, Artificial Sequence
  Synthetic
aaccauguaguggaggcaguu

SEQ ID NO: 680392 - RNA, 22 nt, Artificial Sequence
  Synthetic
caaccauguaguggaggcaguu

SEQ ID NO: 680393 - RNA, 23 nt, Artificial Sequence
  Synthetic
ucaaccauguaguggaggcaguu

SEQ ID NO: 680394 - RNA, 24 nt, Artificial Sequence
  Synthetic
aucaaccauguaguggaggcaguu

SEQ ID NO: 680395 - RNA, 18 nt, Artificial Sequence
  Synthetic
augaugugaggggcaguu

SEQ ID NO: 680396 - RNA, 19 nt, Artificial Sequence
  Synthetic
aaugaugugaggggcaguu

SEQ ID NO: 680397 - RNA, 20 nt, Artificial Sequence
  Synthetic
caaugaugugaggggcaguu

SEQ ID NO: 680398 - RNA, 21 nt, Artificial Sequence
  Synthetic
acaaugaugugaggggcaguu

SEQ ID NO: 680399 - RNA, 22 nt, Artificial Sequence
  Synthetic
uacaaugaugugaggggcaguu

SEQ ID NO: 680400 - RNA, 23 nt, Artificial Sequence
  Synthetic
cuacaaugaugugaggggcaguu

SEQ ID NO: 680401 - RNA, 24 nt, Artificial Sequence
  Synthetic
gcuacaaugaugugaggggcaguu

SEQ ID NO: 680402 - RNA, 18 nt, Artificial Sequence
  Synthetic
agagaacagauggcaguu

SEQ ID NO: 680403 - RNA, 19 nt, Artificial Sequence
  Synthetic
cagagaacagauggcaguu

SEQ ID NO: 680404 - RNA, 20 nt, Artificial Sequence
  Synthetic
gcagagaacagauggcaguu

SEQ ID NO: 680405 - RNA, 21 nt, Artificial Sequence
  Synthetic
ugcagagaacagauggcaguu

SEQ ID NO: 680406 - RNA, 22 nt, Artificial Sequence
  Synthetic
augcagagaacagauggcaguu

SEQ ID NO: 680407 - RNA, 23 nt, Artificial Sequence
  Synthetic
aaugcagagaacagauggcaguu

SEQ ID NO: 680408 - RNA, 24 nt, Artificial Sequence
  Synthetic
gaaugcagagaacagauggcaguu

SEQ ID NO: 680409 - RNA, 18 nt, Artificial Sequence
  Synthetic
ccuggcuaguuggcaguu

SEQ ID NO: 680410 - RNA, 19 nt, Artificial Sequence
  Synthetic
accuggcuaguuggcaguu

SEQ ID NO: 680411 - RNA, 20 nt, Artificial Sequence
  Synthetic
uaccuggcuaguuggcaguu

SEQ ID NO: 680412 - RNA, 21 nt, Artificial Sequence
  Synthetic
guaccuggcuaguuggcaguu

SEQ ID NO: 680413 - RNA, 22 nt, Artificial Sequence
  Synthetic
uguaccuggcuaguuggcaguu

SEQ ID NO: 680414 - RNA, 23 nt, Artificial Sequence
  Synthetic
uuguaccuggcuaguuggcaguu

SEQ ID NO: 680415 - RNA, 24 nt, Artificial Sequence
  Synthetic
uuuguaccuggcuaguuggcaguu

SEQ ID NO: 680416 - RNA, 18 nt, Artificial Sequence
  Synthetic
ugaacuuucaaugcaguu

SEQ ID NO: 680417 - RNA, 19 nt, Artificial Sequence
  Synthetic
augaacuuucaaugcaguu

SEQ ID NO: 680418 - RNA, 20 nt, Artificial Sequence
  Synthetic
gaugaacuuucaaugcaguu

SEQ ID NO: 680419 - RNA, 21 nt, Artificial Sequence
  Synthetic
ugaugaacuuucaaugcaguu

SEQ ID NO: 680420 - RNA, 22 nt, Artificial Sequence
  Synthetic
gugaugaacuuucaaugcaguu

SEQ ID NO: 680421 - RNA, 23 nt, Artificial Sequence
  Synthetic
ugugaugaacuuucaaugcaguu

SEQ ID NO: 680422 - RNA, 24 nt, Artificial Sequence
  Synthetic
uugugaugaacuuucaaugcaguu

SEQ ID NO: 680423 - RNA, 18 nt, Artificial Sequence
  Synthetic
auaauaaguacugcaguu

SEQ ID NO: 680424 - RNA, 19 nt, Artificial Sequence
  Synthetic
uauaauaaguacugcaguu

SEQ ID NO: 680425 - RNA, 20 nt, Artificial Sequence
  Synthetic
auauaauaaguacugcaguu

SEQ ID NO: 680426 - RNA, 21 nt, Artificial Sequence
  Synthetic
cauauaauaaguacugcaguu

SEQ ID NO: 680427 - RNA, 22 nt, Artificial Sequence
  Synthetic
acauauaauaaguacugcaguu

SEQ ID NO: 680428 - RNA, 23 nt, Artificial Sequence
  Synthetic
cacauauaauaaguacugcaguu

SEQ ID NO: 680429 - RNA, 24 nt, Artificial Sequence
  Synthetic
gcacauauaauaaguacugcaguu

SEQ ID NO: 680430 - RNA, 18 nt, Artificial Sequence
  Synthetic
cuuucuaucugugcaguu

SEQ ID NO: 680431 - RNA, 19 nt, Artificial Sequence
  Synthetic
ucuuucuaucugugcaguu

SEQ ID NO: 680432 - RNA, 20 nt, Artificial Sequence
  Synthetic
cucuuucuaucugugcaguu

SEQ ID NO: 680433 - RNA, 21 nt, Artificial Sequence
  Synthetic
ccucuuucuaucugugcaguu

SEQ ID NO: 680434 - RNA, 22 nt, Artificial Sequence
  Synthetic
cccucuuucuaucugugcaguu

SEQ ID NO: 680435 - RNA, 23 nt, Artificial Sequence
  Synthetic
ucccucuuucuaucugugcaguu

SEQ ID NO: 680436 - RNA, 24 nt, Artificial Sequence
  Synthetic
uucccucuuucuaucugugcaguu

SEQ ID NO: 680437 - RNA, 18 nt, Artificial Sequence
  Synthetic
uuguuuuaccuugcaguu

SEQ ID NO: 680438 - RNA, 19 nt, Artificial Sequence
  Synthetic
cuuguuuuaccuugcaguu

SEQ ID NO: 680439 - RNA, 20 nt, Artificial Sequence
  Synthetic
ucuuguuuuaccuugcaguu

SEQ ID NO: 680440 - RNA, 21 nt, Artificial Sequence
  Synthetic
uucuuguuuuaccuugcaguu

SEQ ID NO: 680441 - RNA, 22 nt, Artificial Sequence
  Synthetic
uuucuuguuuuaccuugcaguu

SEQ ID NO: 680442 - RNA, 23 nt, Artificial Sequence
  Synthetic
guuucuuguuuuaccuugcaguu

SEQ ID NO: 680443 - RNA, 24 nt, Artificial Sequence
  Synthetic
uguuucuuguuuuaccuugcaguu

SEQ ID NO: 680444 - RNA, 18 nt, Artificial Sequence
  Synthetic
ccaagagaaguugcaguu

SEQ ID NO: 680445 - RNA, 19 nt, Artificial Sequence
  Synthetic
accaagagaaguugcaguu

SEQ ID NO: 680446 - RNA, 20 nt, Artificial Sequence
  Synthetic
aaccaagagaaguugcaguu

SEQ ID NO: 680447 - RNA, 21 nt, Artificial Sequence
  Synthetic
aaaccaagagaaguugcaguu

SEQ ID NO: 680448 - RNA, 22 nt, Artificial Sequence
  Synthetic
uaaaccaagagaaguugcaguu

SEQ ID NO: 680449 - RNA, 23 nt, Artificial Sequence
  Synthetic
uuaaaccaagagaaguugcaguu

SEQ ID NO: 680450 - RNA, 24 nt, Artificial Sequence
  Synthetic
guuaaaccaagagaaguugcaguu

SEQ ID NO: 680451 - RNA, 18 nt, Artificial Sequence
  Synthetic
ccgacaaguaaaucaguu

SEQ ID NO: 680452 - RNA, 19 nt, Artificial Sequence
  Synthetic
accgacaaguaaaucaguu

SEQ ID NO: 680453 - RNA, 20 nt, Artificial Sequence
  Synthetic
caccgacaaguaaaucaguu

SEQ ID NO: 680454 - RNA, 21 nt, Artificial Sequence
  Synthetic
acaccgacaaguaaaucaguu

SEQ ID NO: 680455 - RNA, 22 nt, Artificial Sequence
  Synthetic
cacaccgacaaguaaaucaguu

SEQ ID NO: 680456 - RNA, 23 nt, Artificial Sequence
  Synthetic
ucacaccgacaaguaaaucaguu

SEQ ID NO: 680457 - RNA, 24 nt, Artificial Sequence
  Synthetic
aucacaccgacaaguaaaucaguu

SEQ ID NO: 680458 - RNA, 18 nt, Artificial Sequence
  Synthetic
uaugcuucauaaucaguu

SEQ ID NO: 680459 - RNA, 19 nt, Artificial Sequence
  Synthetic
uuaugcuucauaaucaguu

SEQ ID NO: 680460 - RNA, 20 nt, Artificial Sequence
  Synthetic
cuuaugcuucauaaucaguu

SEQ ID NO: 680461 - RNA, 21 nt, Artificial Sequence
  Synthetic
ucuuaugcuucauaaucaguu

SEQ ID NO: 680462 - RNA, 22 nt, Artificial Sequence
  Synthetic
uucuuaugcuucauaaucaguu

SEQ ID NO: 680463 - RNA, 23 nt, Artificial Sequence
  Synthetic
guucuuaugcuucauaaucaguu

SEQ ID NO: 680464 - RNA, 24 nt, Artificial Sequence
  Synthetic
aguucuuaugcuucauaaucaguu

SEQ ID NO: 680465 - RNA, 18 nt, Artificial Sequence
  Synthetic
ucuuucaaaagaucaguu

SEQ ID NO: 680466 - RNA, 19 nt, Artificial Sequence
  Synthetic
aucuuucaaaagaucaguu

SEQ ID NO: 680467 - RNA, 20 nt, Artificial Sequence
  Synthetic
aaucuuucaaaagaucaguu

SEQ ID NO: 680468 - RNA, 21 nt, Artificial Sequence
  Synthetic
aaaucuuucaaaagaucaguu

SEQ ID NO: 680469 - RNA, 22 nt, Artificial Sequence
  Synthetic
aaaaucuuucaaaagaucaguu

SEQ ID NO: 680470 - RNA, 23 nt, Artificial Sequence
  Synthetic
uaaaaucuuucaaaagaucaguu

SEQ ID NO: 680471 - RNA, 24 nt, Artificial Sequence
  Synthetic
auaaaaucuuucaaaagaucaguu

SEQ ID NO: 680472 - RNA, 18 nt, Artificial Sequence
  Synthetic
cggaauccauccucaguu

SEQ ID NO: 680473 - RNA, 19 nt, Artificial Sequence
  Synthetic
acggaauccauccucaguu

SEQ ID NO: 680474 - RNA, 20 nt, Artificial Sequence
  Synthetic
uacggaauccauccucaguu

SEQ ID NO: 680475 - RNA, 21 nt, Artificial Sequence
  Synthetic
cuacggaauccauccucaguu

SEQ ID NO: 680476 - RNA, 22 nt, Artificial Sequence
  Synthetic
ucuacggaauccauccucaguu

SEQ ID NO: 680477 - RNA, 23 nt, Artificial Sequence
  Synthetic
uucuacggaauccauccucaguu

SEQ ID NO: 680478 - RNA, 24 nt, Artificial Sequence
  Synthetic
uuucuacggaauccauccucaguu

SEQ ID NO: 680479 - RNA, 18 nt, Artificial Sequence
  Synthetic
gacccuaagagcucaguu

SEQ ID NO: 680480 - RNA, 19 nt, Artificial Sequence
  Synthetic
ggacccuaagagcucaguu

SEQ ID NO: 680481 - RNA, 20 nt, Artificial Sequence
  Synthetic
uggacccuaagagcucaguu

SEQ ID NO: 680482 - RNA, 21 nt, Artificial Sequence
  Synthetic
auggacccuaagagcucaguu

SEQ ID NO: 680483 - RNA, 22 nt, Artificial Sequence
  Synthetic
gauggacccuaagagcucaguu

SEQ ID NO: 680484 - RNA, 23 nt, Artificial Sequence
  Synthetic
agauggacccuaagagcucaguu

SEQ ID NO: 680485 - RNA, 24 nt, Artificial Sequence
  Synthetic
cagauggacccuaagagcucaguu

SEQ ID NO: 680486 - RNA, 18 nt, Artificial Sequence
  Synthetic
cuucugaauuucucaguu

SEQ ID NO: 680487 - RNA, 19 nt, Artificial Sequence
  Synthetic
acuucugaauuucucaguu

SEQ ID NO: 680488 - RNA, 20 nt, Artificial Sequence
  Synthetic
cacuucugaauuucucaguu

SEQ ID NO: 680489 - RNA, 21 nt, Artificial Sequence
  Synthetic
acacuucugaauuucucaguu

SEQ ID NO: 680490 - RNA, 22 nt, Artificial Sequence
  Synthetic
cacacuucugaauuucucaguu

SEQ ID NO: 680491 - RNA, 23 nt, Artificial Sequence
  Synthetic
ucacacuucugaauuucucaguu

SEQ ID NO: 680492 - RNA, 24 nt, Artificial Sequence
  Synthetic
uucacacuucugaauuucucaguu

SEQ ID NO: 680493 - RNA, 18 nt, Artificial Sequence
  Synthetic
aucugagaaaagucaguu

SEQ ID NO: 680494 - RNA, 19 nt, Artificial Sequence
  Synthetic
caucugagaaaagucaguu

SEQ ID NO: 680495 - RNA, 20 nt, Artificial Sequence
  Synthetic
gcaucugagaaaagucaguu

SEQ ID NO: 680496 - RNA, 21 nt, Artificial Sequence
  Synthetic
ggcaucugagaaaagucaguu

SEQ ID NO: 680497 - RNA, 22 nt, Artificial Sequence
  Synthetic
aggcaucugagaaaagucaguu

SEQ ID NO: 680498 - RNA, 23 nt, Artificial Sequence
  Synthetic
caggcaucugagaaaagucaguu

SEQ ID NO: 680499 - RNA, 24 nt, Artificial Sequence
  Synthetic
ccaggcaucugagaaaagucaguu

SEQ ID NO: 680500 - RNA, 18 nt, Artificial Sequence
  Synthetic
ccagcccuugagucaguu

SEQ ID NO: 680501 - RNA, 19 nt, Artificial Sequence
  Synthetic
gccagcccuugagucaguu

SEQ ID NO: 680502 - RNA, 20 nt, Artificial Sequence
  Synthetic
agccagcccuugagucaguu

SEQ ID NO: 680503 - RNA, 21 nt, Artificial Sequence
  Synthetic
cagccagcccuugagucaguu

SEQ ID NO: 680504 - RNA, 22 nt, Artificial Sequence
  Synthetic
acagccagcccuugagucaguu

SEQ ID NO: 680505 - RNA, 23 nt, Artificial Sequence
  Synthetic
aacagccagcccuugagucaguu

SEQ ID NO: 680506 - RNA, 24 nt, Artificial Sequence
  Synthetic
aaacagccagcccuugagucaguu

SEQ ID NO: 680507 - RNA, 18 nt, Artificial Sequence
  Synthetic
cuuuaagaacggucaguu

SEQ ID NO: 680508 - RNA, 19 nt, Artificial Sequence
  Synthetic
ucuuuaagaacggucaguu

SEQ ID NO: 680509 - RNA, 20 nt, Artificial Sequence
  Synthetic
aucuuuaagaacggucaguu

SEQ ID NO: 680510 - RNA, 21 nt, Artificial Sequence
  Synthetic
uaucuuuaagaacggucaguu

SEQ ID NO: 680511 - RNA, 22 nt, Artificial Sequence
  Synthetic
uuaucuuuaagaacggucaguu

SEQ ID NO: 680512 - RNA, 23 nt, Artificial Sequence
  Synthetic
guuaucuuuaagaacggucaguu

SEQ ID NO: 680513 - RNA, 24 nt, Artificial Sequence
  Synthetic
aguuaucuuuaagaacggucaguu

SEQ ID NO: 680514 - RNA, 18 nt, Artificial Sequence
  Synthetic
aaguguuguuugucaguu

SEQ ID NO: 680515 - RNA, 19 nt, Artificial Sequence
  Synthetic
gaaguguuguuugucaguu

SEQ ID NO: 680516 - RNA, 20 nt, Artificial Sequence
  Synthetic
agaaguguuguuugucaguu

SEQ ID NO: 680517 - RNA, 21 nt, Artificial Sequence
  Synthetic
cagaaguguuguuugucaguu

SEQ ID NO: 680518 - RNA, 22 nt, Artificial Sequence
  Synthetic
gcagaaguguuguuugucaguu

SEQ ID NO: 680519 - RNA, 23 nt, Artificial Sequence
  Synthetic
agcagaaguguuguuugucaguu

SEQ ID NO: 680520 - RNA, 24 nt, Artificial Sequence
  Synthetic
gagcagaaguguuguuugucaguu

SEQ ID NO: 680521 - RNA, 18 nt, Artificial Sequence
  Synthetic
ugucuuuauacuucaguu

SEQ ID NO: 680522 - RNA, 19 nt, Artificial Sequence
  Synthetic
gugucuuuauacuucaguu

SEQ ID NO: 680523 - RNA, 20 nt, Artificial Sequence
  Synthetic
ugugucuuuauacuucaguu

SEQ ID NO: 680524 - RNA, 21 nt, Artificial Sequence
  Synthetic
augugucuuuauacuucaguu

SEQ ID NO: 680525 - RNA, 22 nt, Artificial Sequence
  Synthetic
uaugugucuuuauacuucaguu

SEQ ID NO: 680526 - RNA, 23 nt, Artificial Sequence
  Synthetic
cuaugugucuuuauacuucaguu

SEQ ID NO: 680527 - RNA, 24 nt, Artificial Sequence
  Synthetic
ucuaugugucuuuauacuucaguu

SEQ ID NO: 680528 - RNA, 18 nt, Artificial Sequence
  Synthetic
ucaagaauuccuucaguu

SEQ ID NO: 680529 - RNA, 19 nt, Artificial Sequence
  Synthetic
uucaagaauuccuucaguu

SEQ ID NO: 680530 - RNA, 20 nt, Artificial Sequence
  Synthetic
auucaagaauuccuucaguu

SEQ ID NO: 680531 - RNA, 21 nt, Artificial Sequence
  Synthetic
aauucaagaauuccuucaguu

SEQ ID NO: 680532 - RNA, 22 nt, Artificial Sequence
  Synthetic
uaauucaagaauuccuucaguu

SEQ ID NO: 680533 - RNA, 23 nt, Artificial Sequence
  Synthetic
uuaauucaagaauuccuucaguu

SEQ ID NO: 680534 - RNA, 24 nt, Artificial Sequence
  Synthetic
uuuaauucaagaauuccuucaguu

SEQ ID NO: 680535 - RNA, 18 nt, Artificial Sequence
  Synthetic
agguaugcugcuucaguu

SEQ ID NO: 680536 - RNA, 19 nt, Artificial Sequence
  Synthetic
gagguaugcugcuucaguu

SEQ ID NO: 680537 - RNA, 20 nt, Artificial Sequence
  Synthetic
agagguaugcugcuucaguu

SEQ ID NO: 680538 - RNA, 21 nt, Artificial Sequence
  Synthetic
gagagguaugcugcuucaguu

SEQ ID NO: 680539 - RNA, 22 nt, Artificial Sequence
  Synthetic
ugagagguaugcugcuucaguu

SEQ ID NO: 680540 - RNA, 23 nt, Artificial Sequence
  Synthetic
uugagagguaugcugcuucaguu

SEQ ID NO: 680541 - RNA, 24 nt, Artificial Sequence
  Synthetic
auugagagguaugcugcuucaguu

SEQ ID NO: 680542 - RNA, 18 nt, Artificial Sequence
  Synthetic
uaccaaaaaaguucaguu

SEQ ID NO: 680543 - RNA, 19 nt, Artificial Sequence
  Synthetic
guaccaaaaaaguucaguu

SEQ ID NO: 680544 - RNA, 20 nt, Artificial Sequence
  Synthetic
aguaccaaaaaaguucaguu

SEQ ID NO: 680545 - RNA, 21 nt, Artificial Sequence
  Synthetic
gaguaccaaaaaaguucaguu

SEQ ID NO: 680546 - RNA, 22 nt, Artificial Sequence
  Synthetic
agaguaccaaaaaaguucaguu

SEQ ID NO: 680547 - RNA, 23 nt, Artificial Sequence
  Synthetic
gagaguaccaaaaaaguucaguu

SEQ ID NO: 680548 - RNA, 24 nt, Artificial Sequence
  Synthetic
ugagaguaccaaaaaaguucaguu

SEQ ID NO: 680549 - RNA, 18 nt, Artificial Sequence
  Synthetic
aaagcauucaguucaguu

SEQ ID NO: 680550 - RNA, 19 nt, Artificial Sequence
  Synthetic
caaagcauucaguucaguu

SEQ ID NO: 680551 - RNA, 20 nt, Artificial Sequence
  Synthetic
ccaaagcauucaguucaguu

SEQ ID NO: 680552 - RNA, 21 nt, Artificial Sequence
  Synthetic
cccaaagcauucaguucaguu

SEQ ID NO: 680553 - RNA, 22 nt, Artificial Sequence
  Synthetic
ucccaaagcauucaguucaguu

SEQ ID NO: 680554 - RNA, 23 nt, Artificial Sequence
  Synthetic
uucccaaagcauucaguucaguu

SEQ ID NO: 680555 - RNA, 24 nt, Artificial Sequence
  Synthetic
cuucccaaagcauucaguucaguu

SEQ ID NO: 680556 - RNA, 18 nt, Artificial Sequence
  Synthetic
aagauaaugaguucaguu

SEQ ID NO: 680557 - RNA, 19 nt, Artificial Sequence
  Synthetic
gaagauaaugaguucaguu

SEQ ID NO: 680558 - RNA, 20 nt, Artificial Sequence
  Synthetic
agaagauaaugaguucaguu

SEQ ID NO: 680559 - RNA, 21 nt, Artificial Sequence
  Synthetic
gagaagauaaugaguucaguu

SEQ ID NO: 680560 - RNA, 22 nt, Artificial Sequence
  Synthetic
ggagaagauaaugaguucaguu

SEQ ID NO: 680561 - RNA, 23 nt, Artificial Sequence
  Synthetic
uggagaagauaaugaguucaguu

SEQ ID NO: 680562 - RNA, 24 nt, Artificial Sequence
  Synthetic
auggagaagauaaugaguucaguu

SEQ ID NO: 680563 - RNA, 18 nt, Artificial Sequence
  Synthetic
caguaggggauuucaguu

SEQ ID NO: 680564 - RNA, 19 nt, Artificial Sequence
  Synthetic
gcaguaggggauuucaguu

SEQ ID NO: 680565 - RNA, 20 nt, Artificial Sequence
  Synthetic
ggcaguaggggauuucaguu

SEQ ID NO: 680566 - RNA, 21 nt, Artificial Sequence
  Synthetic
aggcaguaggggauuucaguu

SEQ ID NO: 680567 - RNA, 22 nt, Artificial Sequence
  Synthetic
gaggcaguaggggauuucaguu

SEQ ID NO: 680568 - RNA, 23 nt, Artificial Sequence
  Synthetic
agaggcaguaggggauuucaguu

SEQ ID NO: 680569 - RNA, 24 nt, Artificial Sequence
  Synthetic
uagaggcaguaggggauuucaguu

SEQ ID NO: 680570 - RNA, 18 nt, Artificial Sequence
  Synthetic
gucuuuauuauuucaguu

SEQ ID NO: 680571 - RNA, 19 nt, Artificial Sequence
  Synthetic
agucuuuauuauuucaguu

SEQ ID NO: 680572 - RNA, 20 nt, Artificial Sequence
  Synthetic
uagucuuuauuauuucaguu

SEQ ID NO: 680573 - RNA, 21 nt, Artificial Sequence
  Synthetic
auagucuuuauuauuucaguu

SEQ ID NO: 680574 - RNA, 22 nt, Artificial Sequence
  Synthetic
uauagucuuuauuauuucaguu

SEQ ID NO: 680575 - RNA, 23 nt, Artificial Sequence
  Synthetic
cuauagucuuuauuauuucaguu

SEQ ID NO: 680576 - RNA, 24 nt, Artificial Sequence
  Synthetic
ucuauagucuuuauuauuucaguu

SEQ ID NO: 680577 - RNA, 18 nt, Artificial Sequence
  Synthetic
agcuuaguuauuucaguu

SEQ ID NO: 680578 - RNA, 19 nt, Artificial Sequence
  Synthetic
uagcuuaguuauuucaguu

SEQ ID NO: 680579 - RNA, 20 nt, Artificial Sequence
  Synthetic
uuagcuuaguuauuucaguu

SEQ ID NO: 680580 - RNA, 21 nt, Artificial Sequence
  Synthetic
auuagcuuaguuauuucaguu

SEQ ID NO: 680581 - RNA, 22 nt, Artificial Sequence
  Synthetic
uauuagcuuaguuauuucaguu

SEQ ID NO: 680582 - RNA, 23 nt, Artificial Sequence
  Synthetic
cuauuagcuuaguuauuucaguu

SEQ ID NO: 680583 - RNA, 24 nt, Artificial Sequence
  Synthetic
ucuauuagcuuaguuauuucaguu

SEQ ID NO: 680584 - RNA, 18 nt, Artificial Sequence
  Synthetic
gggauuguaguuucaguu

SEQ ID NO: 680585 - RNA, 19 nt, Artificial Sequence
  Synthetic
agggauuguaguuucaguu

SEQ ID NO: 680586 - RNA, 20 nt, Artificial Sequence
  Synthetic
aagggauuguaguuucaguu

SEQ ID NO: 680587 - RNA, 21 nt, Artificial Sequence
  Synthetic
aaagggauuguaguuucaguu

SEQ ID NO: 680588 - RNA, 22 nt, Artificial Sequence
  Synthetic
aaaagggauuguaguuucaguu

SEQ ID NO: 680589 - RNA, 23 nt, Artificial Sequence
  Synthetic
aaaaagggauuguaguuucaguu

SEQ ID NO: 680590 - RNA, 24 nt, Artificial Sequence
  Synthetic
uaaaaagggauuguaguuucaguu

SEQ ID NO: 680591 - RNA, 18 nt, Artificial Sequence
  Synthetic
uagagaaguguuucaguu

SEQ ID NO: 680592 - RNA, 19 nt, Artificial Sequence
  Synthetic
auagagaaguguuucaguu

SEQ ID NO: 680593 - RNA, 20 nt, Artificial Sequence
  Synthetic
cauagagaaguguuucaguu

SEQ ID NO: 680594 - RNA, 21 nt, Artificial Sequence
  Synthetic
ucauagagaaguguuucaguu

SEQ ID NO: 680595 - RNA, 22 nt, Artificial Sequence
  Synthetic
uucauagagaaguguuucaguu

SEQ ID NO: 680596 - RNA, 23 nt, Artificial Sequence
  Synthetic
uuucauagagaaguguuucaguu

SEQ ID NO: 680597 - RNA, 24 nt, Artificial Sequence
  Synthetic
auuucauagagaaguguuucaguu

SEQ ID NO: 680598 - RNA, 21 nt, Artificial Sequence
  Synthetic
gcuggccucauaaaaagaguu

SEQ ID NO: 680599 - RNA, 22 nt, Artificial Sequence
  Synthetic
ugcuggccucauaaaaagaguu

SEQ ID NO: 680600 - RNA, 23 nt, Artificial Sequence
  Synthetic
augcuggccucauaaaaagaguu

SEQ ID NO: 680601 - RNA, 24 nt, Artificial Sequence
  Synthetic
gaugcuggccucauaaaaagaguu

SEQ ID NO: 680602 - RNA, 18 nt, Artificial Sequence
  Synthetic
acagaauuuaaaagaguu

SEQ ID NO: 680603 - RNA, 19 nt, Artificial Sequence
  Synthetic
gacagaauuuaaaagaguu

SEQ ID NO: 680604 - RNA, 20 nt, Artificial Sequence
  Synthetic
agacagaauuuaaaagaguu

SEQ ID NO: 680605 - RNA, 21 nt, Artificial Sequence
  Synthetic
cagacagaauuuaaaagaguu

SEQ ID NO: 680606 - RNA, 22 nt, Artificial Sequence
  Synthetic
gcagacagaauuuaaaagaguu

SEQ ID NO: 680607 - RNA, 23 nt, Artificial Sequence
  Synthetic
ugcagacagaauuuaaaagaguu

SEQ ID NO: 680608 - RNA, 24 nt, Artificial Sequence
  Synthetic
uugcagacagaauuuaaaagaguu

SEQ ID NO: 680609 - RNA, 18 nt, Artificial Sequence
  Synthetic
auauaaaaucaaagaguu

SEQ ID NO: 680610 - RNA, 19 nt, Artificial Sequence
  Synthetic
uauauaaaaucaaagaguu

SEQ ID NO: 680611 - RNA, 20 nt, Artificial Sequence
  Synthetic
auauauaaaaucaaagaguu

SEQ ID NO: 680612 - RNA, 21 nt, Artificial Sequence
  Synthetic
uauauauaaaaucaaagaguu

SEQ ID NO: 680613 - RNA, 22 nt, Artificial Sequence
  Synthetic
auauauauaaaaucaaagaguu

SEQ ID NO: 680614 - RNA, 23 nt, Artificial Sequence
  Synthetic
uauauauauaaaaucaaagaguu

SEQ ID NO: 680615 - RNA, 24 nt, Artificial Sequence
  Synthetic
auauauauauaaaaucaaagaguu

SEQ ID NO: 680616 - RNA, 18 nt, Artificial Sequence
  Synthetic
acagcuaaggaaagaguu

SEQ ID NO: 680617 - RNA, 19 nt, Artificial Sequence
  Synthetic
aacagcuaaggaaagaguu

SEQ ID NO: 680618 - RNA, 20 nt, Artificial Sequence
  Synthetic
uaacagcuaaggaaagaguu

SEQ ID NO: 680619 - RNA, 21 nt, Artificial Sequence
  Synthetic
guaacagcuaaggaaagaguu

SEQ ID NO: 680620 - RNA, 22 nt, Artificial Sequence
  Synthetic
aguaacagcuaaggaaagaguu

SEQ ID NO: 680621 - RNA, 23 nt, Artificial Sequence
  Synthetic
caguaacagcuaaggaaagaguu

SEQ ID NO: 680622 - RNA, 24 nt, Artificial Sequence
  Synthetic
ccaguaacagcuaaggaaagaguu

SEQ ID NO: 680623 - RNA, 18 nt, Artificial Sequence
  Synthetic
gaaaaauugccaagaguu

SEQ ID NO: 680624 - RNA, 19 nt, Artificial Sequence
  Synthetic
agaaaaauugccaagaguu

SEQ ID NO: 680625 - RNA, 20 nt, Artificial Sequence
  Synthetic
aagaaaaauugccaagaguu

SEQ ID NO: 680626 - RNA, 21 nt, Artificial Sequence
  Synthetic
uaagaaaaauugccaagaguu

SEQ ID NO: 680627 - RNA, 22 nt, Artificial Sequence
  Synthetic
guaagaaaaauugccaagaguu

SEQ ID NO: 680628 - RNA, 23 nt, Artificial Sequence
  Synthetic
uguaagaaaaauugccaagaguu

SEQ ID NO: 680629 - RNA, 24 nt, Artificial Sequence
  Synthetic
auguaagaaaaauugccaagaguu

SEQ ID NO: 680630 - RNA, 18 nt, Artificial Sequence
  Synthetic
uaauuggaugcaagaguu

SEQ ID NO: 680631 - RNA, 19 nt, Artificial Sequence
  Synthetic
uuaauuggaugcaagaguu

SEQ ID NO: 680632 - RNA, 20 nt, Artificial Sequence
  Synthetic
uuuaauuggaugcaagaguu

SEQ ID NO: 680633 - RNA, 21 nt, Artificial Sequence
  Synthetic
guuuaauuggaugcaagaguu

SEQ ID NO: 680634 - RNA, 22 nt, Artificial Sequence
  Synthetic
uguuuaauuggaugcaagaguu

SEQ ID NO: 680635 - RNA, 23 nt, Artificial Sequence
  Synthetic
uuguuuaauuggaugcaagaguu

SEQ ID NO: 680636 - RNA, 24 nt, Artificial Sequence
  Synthetic
auuguuuaauuggaugcaagaguu

SEQ ID NO: 680637 - RNA, 18 nt, Artificial Sequence
  Synthetic
uaauuaaugucaagaguu

SEQ ID NO: 680638 - RNA, 19 nt, Artificial Sequence
  Synthetic
uuaauuaaugucaagaguu

SEQ ID NO: 680639 - RNA, 20 nt, Artificial Sequence
  Synthetic
auuaauuaaugucaagaguu

SEQ ID NO: 680640 - RNA, 21 nt, Artificial Sequence
  Synthetic
aauuaauuaaugucaagaguu

SEQ ID NO: 680641 - RNA, 22 nt, Artificial Sequence
  Synthetic
uaauuaauuaaugucaagaguu

SEQ ID NO: 680642 - RNA, 23 nt, Artificial Sequence
  Synthetic
uuaauuaauuaaugucaagaguu

SEQ ID NO: 680643 - RNA, 24 nt, Artificial Sequence
  Synthetic
auuaauuaauuaaugucaagaguu

SEQ ID NO: 680644 - RNA, 18 nt, Artificial Sequence
  Synthetic
ugcaagaugagaagaguu

SEQ ID NO: 680645 - RNA, 19 nt, Artificial Sequence
  Synthetic
uugcaagaugagaagaguu

SEQ ID NO: 680646 - RNA, 20 nt, Artificial Sequence
  Synthetic
uuugcaagaugagaagaguu

SEQ ID NO: 680647 - RNA, 21 nt, Artificial Sequence
  Synthetic
uuuugcaagaugagaagaguu

SEQ ID NO: 680648 - RNA, 22 nt, Artificial Sequence
  Synthetic
guuuugcaagaugagaagaguu

SEQ ID NO: 680649 - RNA, 23 nt, Artificial Sequence
  Synthetic
aguuuugcaagaugagaagaguu

SEQ ID NO: 680650 - RNA, 24 nt, Artificial Sequence
  Synthetic
caguuuugcaagaugagaagaguu

SEQ ID NO: 680651 - RNA, 18 nt, Artificial Sequence
  Synthetic
uucuuggaacacagaguu

SEQ ID NO: 680652 - RNA, 19 nt, Artificial Sequence
  Synthetic
guucuuggaacacagaguu

SEQ ID NO: 680653 - RNA, 20 nt, Artificial Sequence
  Synthetic
aguucuuggaacacagaguu

SEQ ID NO: 680654 - RNA, 21 nt, Artificial Sequence
  Synthetic
caguucuuggaacacagaguu

SEQ ID NO: 680655 - RNA, 22 nt, Artificial Sequence
  Synthetic
ucaguucuuggaacacagaguu

SEQ ID NO: 680656 - RNA, 23 nt, Artificial Sequence
  Synthetic
gucaguucuuggaacacagaguu

SEQ ID NO: 680657 - RNA, 24 nt, Artificial Sequence
  Synthetic
ugucaguucuuggaacacagaguu

SEQ ID NO: 680658 - RNA, 18 nt, Artificial Sequence
  Synthetic
ucagcaagugacagaguu

SEQ ID NO: 680659 - RNA, 19 nt, Artificial Sequence
  Synthetic
uucagcaagugacagaguu

SEQ ID NO: 680660 - RNA, 20 nt, Artificial Sequence
  Synthetic
uuucagcaagugacagaguu

SEQ ID NO: 680661 - RNA, 21 nt, Artificial Sequence
  Synthetic
guuucagcaagugacagaguu

SEQ ID NO: 680662 - RNA, 22 nt, Artificial Sequence
  Synthetic
aguuucagcaagugacagaguu

SEQ ID NO: 680663 - RNA, 23 nt, Artificial Sequence
  Synthetic
caguuucagcaagugacagaguu

SEQ ID NO: 680664 - RNA, 24 nt, Artificial Sequence
  Synthetic
acaguuucagcaagugacagaguu

SEQ ID NO: 680665 - RNA, 18 nt, Artificial Sequence
  Synthetic
cacugaagaugcagaguu

SEQ ID NO: 680666 - RNA, 19 nt, Artificial Sequence
  Synthetic
acacugaagaugcagaguu

SEQ ID NO: 680667 - RNA, 20 nt, Artificial Sequence
  Synthetic
uacacugaagaugcagaguu

SEQ ID NO: 680668 - RNA, 21 nt, Artificial Sequence
  Synthetic
cuacacugaagaugcagaguu

SEQ ID NO: 680669 - RNA, 22 nt, Artificial Sequence
  Synthetic
gcuacacugaagaugcagaguu

SEQ ID NO: 680670 - RNA, 23 nt, Artificial Sequence
  Synthetic
ugcuacacugaagaugcagaguu

SEQ ID NO: 680671 - RNA, 24 nt, Artificial Sequence
  Synthetic
augcuacacugaagaugcagaguu

SEQ ID NO: 680672 - RNA, 18 nt, Artificial Sequence
  Synthetic
aagcaagaaaucagaguu

SEQ ID NO: 680673 - RNA, 19 nt, Artificial Sequence
  Synthetic
gaagcaagaaaucagaguu

SEQ ID NO: 680674 - RNA, 20 nt, Artificial Sequence
  Synthetic
ggaagcaagaaaucagaguu

SEQ ID NO: 680675 - RNA, 21 nt, Artificial Sequence
  Synthetic
aggaagcaagaaaucagaguu

SEQ ID NO: 680676 - RNA, 22 nt, Artificial Sequence
  Synthetic
uaggaagcaagaaaucagaguu

SEQ ID NO: 680677 - RNA, 23 nt, Artificial Sequence
  Synthetic
uuaggaagcaagaaaucagaguu

SEQ ID NO: 680678 - RNA, 24 nt, Artificial Sequence
  Synthetic
guuaggaagcaagaaaucagaguu

SEQ ID NO: 680679 - RNA, 18 nt, Artificial Sequence
  Synthetic
agcaaaccccucagaguu

SEQ ID NO: 680680 - RNA, 19 nt, Artificial Sequence
  Synthetic
cagcaaaccccucagaguu

SEQ ID NO: 680681 - RNA, 20 nt, Artificial Sequence
  Synthetic
gcagcaaaccccucagaguu

SEQ ID NO: 680682 - RNA, 21 nt, Artificial Sequence
  Synthetic
ggcagcaaaccccucagaguu

SEQ ID NO: 680683 - RNA, 22 nt, Artificial Sequence
  Synthetic
cggcagcaaaccccucagaguu

SEQ ID NO: 680684 - RNA, 23 nt, Artificial Sequence
  Synthetic
acggcagcaaaccccucagaguu

SEQ ID NO: 680685 - RNA, 24 nt, Artificial Sequence
  Synthetic
cacggcagcaaaccccucagaguu

SEQ ID NO: 680686 - RNA, 18 nt, Artificial Sequence
  Synthetic
acaaguuuauucagaguu

SEQ ID NO: 680687 - RNA, 19 nt, Artificial Sequence
  Synthetic
cacaaguuuauucagaguu

SEQ ID NO: 680688 - RNA, 20 nt, Artificial Sequence
  Synthetic
ucacaaguuuauucagaguu

SEQ ID NO: 680689 - RNA, 21 nt, Artificial Sequence
  Synthetic
aucacaaguuuauucagaguu

SEQ ID NO: 680690 - RNA, 22 nt, Artificial Sequence
  Synthetic
uaucacaaguuuauucagaguu

SEQ ID NO: 680691 - RNA, 23 nt, Artificial Sequence
  Synthetic
auaucacaaguuuauucagaguu

SEQ ID NO: 680692 - RNA, 24 nt, Artificial Sequence
  Synthetic
gauaucacaaguuuauucagaguu

SEQ ID NO: 680693 - RNA, 18 nt, Artificial Sequence
  Synthetic
aaacaugugcagagaguu

SEQ ID NO: 680694 - RNA, 19 nt, Artificial Sequence
  Synthetic
caaacaugugcagagaguu

SEQ ID NO: 680695 - RNA, 20 nt, Artificial Sequence
  Synthetic
acaaacaugugcagagaguu

SEQ ID NO: 680696 - RNA, 21 nt, Artificial Sequence
  Synthetic
uacaaacaugugcagagaguu

SEQ ID NO: 680697 - RNA, 22 nt, Artificial Sequence
  Synthetic
uuacaaacaugugcagagaguu

SEQ ID NO: 680698 - RNA, 23 nt, Artificial Sequence
  Synthetic
guuacaaacaugugcagagaguu

SEQ ID NO: 680699 - RNA, 24 nt, Artificial Sequence
  Synthetic
gguuacaaacaugugcagagaguu

SEQ ID NO: 680700 - RNA, 18 nt, Artificial Sequence
  Synthetic
uugguugaugggagaguu

SEQ ID NO: 680701 - RNA, 19 nt, Artificial Sequence
  Synthetic
auugguugaugggagaguu

SEQ ID NO: 680702 - RNA, 20 nt, Artificial Sequence
  Synthetic
uauugguugaugggagaguu

SEQ ID NO: 680703 - RNA, 21 nt, Artificial Sequence
  Synthetic
guauugguugaugggagaguu

SEQ ID NO: 680704 - RNA, 22 nt, Artificial Sequence
  Synthetic
cguauugguugaugggagaguu

SEQ ID NO: 680705 - RNA, 23 nt, Artificial Sequence
  Synthetic
acguauugguugaugggagaguu

SEQ ID NO: 680706 - RNA, 24 nt, Artificial Sequence
  Synthetic
cacguauugguugaugggagaguu

SEQ ID NO: 680707 - RNA, 18 nt, Artificial Sequence
  Synthetic
augaaauuugggagaguu

SEQ ID NO: 680708 - RNA, 19 nt, Artificial Sequence
  Synthetic
aaugaaauuugggagaguu

SEQ ID NO: 680709 - RNA, 20 nt, Artificial Sequence
  Synthetic
aaaugaaauuugggagaguu

SEQ ID NO: 680710 - RNA, 21 nt, Artificial Sequence
  Synthetic
aaaaugaaauuugggagaguu

SEQ ID NO: 680711 - RNA, 22 nt, Artificial Sequence
  Synthetic
uaaaaugaaauuugggagaguu

SEQ ID NO: 680712 - RNA, 23 nt, Artificial Sequence
  Synthetic
auaaaaugaaauuugggagaguu

SEQ ID NO: 680713 - RNA, 24 nt, Artificial Sequence
  Synthetic
aauaaaaugaaauuugggagaguu

SEQ ID NO: 680714 - RNA, 18 nt, Artificial Sequence
  Synthetic
gguggcauguggagaguu

SEQ ID NO: 680715 - RNA, 19 nt, Artificial Sequence
  Synthetic
agguggcauguggagaguu

SEQ ID NO: 680716 - RNA, 20 nt, Artificial Sequence
  Synthetic
gagguggcauguggagaguu

SEQ ID NO: 680717 - RNA, 21 nt, Artificial Sequence
  Synthetic
ggagguggcauguggagaguu

SEQ ID NO: 680718 - RNA, 22 nt, Artificial Sequence
  Synthetic
gggagguggcauguggagaguu

SEQ ID NO: 680719 - RNA, 23 nt, Artificial Sequence
  Synthetic
agggagguggcauguggagaguu

SEQ ID NO: 680720 - RNA, 24 nt, Artificial Sequence
  Synthetic
aagggagguggcauguggagaguu

SEQ ID NO: 680721 - RNA, 18 nt, Artificial Sequence
  Synthetic
gaauggacaaugagaguu

SEQ ID NO: 680722 - RNA, 19 nt, Artificial Sequence
  Synthetic
ggaauggacaaugagaguu

SEQ ID NO: 680723 - RNA, 20 nt, Artificial Sequence
  Synthetic
uggaauggacaaugagaguu

SEQ ID NO: 680724 - RNA, 21 nt, Artificial Sequence
  Synthetic
uuggaauggacaaugagaguu

SEQ ID NO: 680725 - RNA, 22 nt, Artificial Sequence
  Synthetic
auuggaauggacaaugagaguu

SEQ ID NO: 680726 - RNA, 23 nt, Artificial Sequence
  Synthetic
gauuggaauggacaaugagaguu

SEQ ID NO: 680727 - RNA, 24 nt, Artificial Sequence
  Synthetic
ugauuggaauggacaaugagaguu

SEQ ID NO: 680728 - RNA, 18 nt, Artificial Sequence
  Synthetic
aaaagggaagugagaguu

SEQ ID NO: 680729 - RNA, 19 nt, Artificial Sequence
  Synthetic
aaaaagggaagugagaguu

SEQ ID NO: 680730 - RNA, 20 nt, Artificial Sequence
  Synthetic
gaaaaagggaagugagaguu

SEQ ID NO: 680731 - RNA, 21 nt, Artificial Sequence
  Synthetic
cgaaaaagggaagugagaguu

SEQ ID NO: 680732 - RNA, 22 nt, Artificial Sequence
  Synthetic
gcgaaaaagggaagugagaguu

SEQ ID NO: 680733 - RNA, 23 nt, Artificial Sequence
  Synthetic
ggcgaaaaagggaagugagaguu

SEQ ID NO: 680734 - RNA, 24 nt, Artificial Sequence
  Synthetic
uggcgaaaaagggaagugagaguu

SEQ ID NO: 680735 - RNA, 18 nt, Artificial Sequence
  Synthetic
gaauauuuagcuagaguu

SEQ ID NO: 680736 - RNA, 19 nt, Artificial Sequence
  Synthetic
ggaauauuuagcuagaguu

SEQ ID NO: 680737 - RNA, 20 nt, Artificial Sequence
  Synthetic
cggaauauuuagcuagaguu

SEQ ID NO: 680738 - RNA, 21 nt, Artificial Sequence
  Synthetic
ucggaauauuuagcuagaguu

SEQ ID NO: 680739 - RNA, 22 nt, Artificial Sequence
  Synthetic
cucggaauauuuagcuagaguu

SEQ ID NO: 680740 - RNA, 23 nt, Artificial Sequence
  Synthetic
ucucggaauauuuagcuagaguu

SEQ ID NO: 680741 - RNA, 24 nt, Artificial Sequence
  Synthetic
gucucggaauauuuagcuagaguu

SEQ ID NO: 680742 - RNA, 18 nt, Artificial Sequence
  Synthetic
uuacaaugcuagcgaguu

SEQ ID NO: 680743 - RNA, 19 nt, Artificial Sequence
  Synthetic
uuuacaaugcuagcgaguu

SEQ ID NO: 680744 - RNA, 20 nt, Artificial Sequence
  Synthetic
cuuuacaaugcuagcgaguu

SEQ ID NO: 680745 - RNA, 21 nt, Artificial Sequence
  Synthetic
ucuuuacaaugcuagcgaguu

SEQ ID NO: 680746 - RNA, 22 nt, Artificial Sequence
  Synthetic
uucuuuacaaugcuagcgaguu

SEQ ID NO: 680747 - RNA, 23 nt, Artificial Sequence
  Synthetic
cuucuuuacaaugcuagcgaguu

SEQ ID NO: 680748 - RNA, 24 nt, Artificial Sequence
  Synthetic
ucuucuuuacaaugcuagcgaguu

SEQ ID NO: 680749 - RNA, 18 nt, Artificial Sequence
  Synthetic
cacugccccuaaggaguu

SEQ ID NO: 680750 - RNA, 19 nt, Artificial Sequence
  Synthetic
acacugccccuaaggaguu

SEQ ID NO: 680751 - RNA, 20 nt, Artificial Sequence
  Synthetic
aacacugccccuaaggaguu

SEQ ID NO: 680752 - RNA, 21 nt, Artificial Sequence
  Synthetic
caacacugccccuaaggaguu

SEQ ID NO: 680753 - RNA, 22 nt, Artificial Sequence
  Synthetic
acaacacugccccuaaggaguu

SEQ ID NO: 680754 - RNA, 23 nt, Artificial Sequence
  Synthetic
gacaacacugccccuaaggaguu

SEQ ID NO: 680755 - RNA, 24 nt, Artificial Sequence
  Synthetic
agacaacacugccccuaaggaguu

SEQ ID NO: 680756 - RNA, 18 nt, Artificial Sequence
  Synthetic
cacuugaauucaggaguu

SEQ ID NO: 680757 - RNA, 19 nt, Artificial Sequence
  Synthetic
ucacuugaauucaggaguu

SEQ ID NO: 680758 - RNA, 20 nt, Artificial Sequence
  Synthetic
aucacuugaauucaggaguu

SEQ ID NO: 680759 - RNA, 21 nt, Artificial Sequence
  Synthetic
gaucacuugaauucaggaguu

SEQ ID NO: 680760 - RNA, 22 nt, Artificial Sequence
  Synthetic
agaucacuugaauucaggaguu

SEQ ID NO: 680761 - RNA, 23 nt, Artificial Sequence
  Synthetic
cagaucacuugaauucaggaguu

SEQ ID NO: 680762 - RNA, 24 nt, Artificial Sequence
  Synthetic
acagaucacuugaauucaggaguu

SEQ ID NO: 680763 - RNA, 18 nt, Artificial Sequence
  Synthetic
uagucuuacuuaggaguu

SEQ ID NO: 680764 - RNA, 19 nt, Artificial Sequence
  Synthetic
auagucuuacuuaggaguu

SEQ ID NO: 680765 - RNA, 20 nt, Artificial Sequence
  Synthetic
gauagucuuacuuaggaguu

SEQ ID NO: 680766 - RNA, 21 nt, Artificial Sequence
  Synthetic
ugauagucuuacuuaggaguu

SEQ ID NO: 680767 - RNA, 22 nt, Artificial Sequence
  Synthetic
cugauagucuuacuuaggaguu

SEQ ID NO: 680768 - RNA, 23 nt, Artificial Sequence
  Synthetic
ucugauagucuuacuuaggaguu

SEQ ID NO: 680769 - RNA, 24 nt, Artificial Sequence
  Synthetic
aucugauagucuuacuuaggaguu

SEQ ID NO: 680770 - RNA, 18 nt, Artificial Sequence
  Synthetic
agaggagaugacggaguu

SEQ ID NO: 680771 - RNA, 19 nt, Artificial Sequence
  Synthetic
gagaggagaugacggaguu

SEQ ID NO: 680772 - RNA, 20 nt, Artificial Sequence
  Synthetic
ugagaggagaugacggaguu

SEQ ID NO: 680773 - RNA, 21 nt, Artificial Sequence
  Synthetic
cugagaggagaugacggaguu

SEQ ID NO: 680774 - RNA, 22 nt, Artificial Sequence
  Synthetic
ccugagaggagaugacggaguu

SEQ ID NO: 680775 - RNA, 23 nt, Artificial Sequence
  Synthetic
gccugagaggagaugacggaguu

SEQ ID NO: 680776 - RNA, 24 nt, Artificial Sequence
  Synthetic
agccugagaggagaugacggaguu

SEQ ID NO: 680777 - RNA, 18 nt, Artificial Sequence
  Synthetic
aagaggcaaaugggaguu

SEQ ID NO: 680778 - RNA, 19 nt, Artificial Sequence
  Synthetic
aaagaggcaaaugggaguu

SEQ ID NO: 680779 - RNA, 20 nt, Artificial Sequence
  Synthetic
aaaagaggcaaaugggaguu

SEQ ID NO: 680780 - RNA, 21 nt, Artificial Sequence
  Synthetic
uaaaagaggcaaaugggaguu

SEQ ID NO: 680781 - RNA, 22 nt, Artificial Sequence
  Synthetic
auaaaagaggcaaaugggaguu

SEQ ID NO: 680782 - RNA, 23 nt, Artificial Sequence
  Synthetic
gauaaaagaggcaaaugggaguu

SEQ ID NO: 680783 - RNA, 24 nt, Artificial Sequence
  Synthetic
agauaaaagaggcaaaugggaguu

SEQ ID NO: 680784 - RNA, 18 nt, Artificial Sequence
  Synthetic
cuugugauguugggaguu

SEQ ID NO: 680785 - RNA, 19 nt, Artificial Sequence
  Synthetic
ccuugugauguugggaguu

SEQ ID NO: 680786 - RNA, 20 nt, Artificial Sequence
  Synthetic
uccuugugauguugggaguu

SEQ ID NO: 680787 - RNA, 21 nt, Artificial Sequence
  Synthetic
auccuugugauguugggaguu

SEQ ID NO: 680788 - RNA, 22 nt, Artificial Sequence
  Synthetic
uauccuugugauguugggaguu

SEQ ID NO: 680789 - RNA, 23 nt, Artificial Sequence
  Synthetic
uuauccuugugauguugggaguu

SEQ ID NO: 680790 - RNA, 24 nt, Artificial Sequence
  Synthetic
uuuauccuugugauguugggaguu

SEQ ID NO: 680791 - RNA, 18 nt, Artificial Sequence
  Synthetic
gugccaugacauggaguu

SEQ ID NO: 680792 - RNA, 19 nt, Artificial Sequence
  Synthetic
ugugccaugacauggaguu

SEQ ID NO: 680793 - RNA, 20 nt, Artificial Sequence
  Synthetic
gugugccaugacauggaguu

SEQ ID NO: 680794 - RNA, 21 nt, Artificial Sequence
  Synthetic
ugugugccaugacauggaguu

SEQ ID NO: 680795 - RNA, 22 nt, Artificial Sequence
  Synthetic
uugugugccaugacauggaguu

SEQ ID NO: 680796 - RNA, 23 nt, Artificial Sequence
  Synthetic
uuugugugccaugacauggaguu

SEQ ID NO: 680797 - RNA, 24 nt, Artificial Sequence
  Synthetic
uuuugugugccaugacauggaguu

SEQ ID NO: 680798 - RNA, 18 nt, Artificial Sequence
  Synthetic
aacauuccaguuggaguu

SEQ ID NO: 680799 - RNA, 19 nt, Artificial Sequence
  Synthetic
aaacauuccaguuggaguu

SEQ ID NO: 680800 - RNA, 20 nt, Artificial Sequence
  Synthetic
caaacauuccaguuggaguu

SEQ ID NO: 680801 - RNA, 21 nt, Artificial Sequence
  Synthetic
acaaacauuccaguuggaguu

SEQ ID NO: 680802 - RNA, 22 nt, Artificial Sequence
  Synthetic
cacaaacauuccaguuggaguu

SEQ ID NO: 680803 - RNA, 23 nt, Artificial Sequence
  Synthetic
ccacaaacauuccaguuggaguu

SEQ ID NO: 680804 - RNA, 24 nt, Artificial Sequence
  Synthetic
accacaaacauuccaguuggaguu

SEQ ID NO: 680805 - RNA, 21 nt, Artificial Sequence
  Synthetic
gcuggccucauaaaaugaguu

SEQ ID NO: 680806 - RNA, 22 nt, Artificial Sequence
  Synthetic
ugcuggccucauaaaaugaguu

SEQ ID NO: 680807 - RNA, 23 nt, Artificial Sequence
  Synthetic
augcuggccucauaaaaugaguu

SEQ ID NO: 680808 - RNA, 24 nt, Artificial Sequence
  Synthetic
gaugcuggccucauaaaaugaguu

SEQ ID NO: 680809 - RNA, 18 nt, Artificial Sequence
  Synthetic
cucuauagccaaugaguu

SEQ ID NO: 680810 - RNA, 19 nt, Artificial Sequence
  Synthetic
gcucuauagccaaugaguu

SEQ ID NO: 680811 - RNA, 20 nt, Artificial Sequence
  Synthetic
agcucuauagccaaugaguu

SEQ ID NO: 680812 - RNA, 21 nt, Artificial Sequence
  Synthetic
aagcucuauagccaaugaguu

SEQ ID NO: 680813 - RNA, 22 nt, Artificial Sequence
  Synthetic
aaagcucuauagccaaugaguu

SEQ ID NO: 680814 - RNA, 23 nt, Artificial Sequence
  Synthetic
caaagcucuauagccaaugaguu

SEQ ID NO: 680815 - RNA, 24 nt, Artificial Sequence
  Synthetic
gcaaagcucuauagccaaugaguu

SEQ ID NO: 680816 - RNA, 18 nt, Artificial Sequence
  Synthetic
cauagaacuugaugaguu

SEQ ID NO: 680817 - RNA, 19 nt, Artificial Sequence
  Synthetic
gcauagaacuugaugaguu

SEQ ID NO: 680818 - RNA, 20 nt, Artificial Sequence
  Synthetic
ugcauagaacuugaugaguu

SEQ ID NO: 680819 - RNA, 21 nt, Artificial Sequence
  Synthetic
augcauagaacuugaugaguu

SEQ ID NO: 680820 - RNA, 22 nt, Artificial Sequence
  Synthetic
aaugcauagaacuugaugaguu

SEQ ID NO: 680821 - RNA, 23 nt, Artificial Sequence
  Synthetic
uaaugcauagaacuugaugaguu

SEQ ID NO: 680822 - RNA, 24 nt, Artificial Sequence
  Synthetic
uuaaugcauagaacuugaugaguu

SEQ ID NO: 680823 - RNA, 18 nt, Artificial Sequence
  Synthetic
aacacagcuugaugaguu

SEQ ID NO: 680824 - RNA, 19 nt, Artificial Sequence
  Synthetic
gaacacagcuugaugaguu

SEQ ID NO: 680825 - RNA, 20 nt, Artificial Sequence
  Synthetic
ugaacacagcuugaugaguu

SEQ ID NO: 680826 - RNA, 21 nt, Artificial Sequence
  Synthetic
augaacacagcuugaugaguu

SEQ ID NO: 680827 - RNA, 22 nt, Artificial Sequence
  Synthetic
aaugaacacagcuugaugaguu

SEQ ID NO: 680828 - RNA, 23 nt, Artificial Sequence
  Synthetic
uaaugaacacagcuugaugaguu

SEQ ID NO: 680829 - RNA, 24 nt, Artificial Sequence
  Synthetic
uuaaugaacacagcuugaugaguu

SEQ ID NO: 680830 - RNA, 18 nt, Artificial Sequence
  Synthetic
cuggcccauuuaugaguu

SEQ ID NO: 680831 - RNA, 19 nt, Artificial Sequence
  Synthetic
acuggcccauuuaugaguu

SEQ ID NO: 680832 - RNA, 20 nt, Artificial Sequence
  Synthetic
uacuggcccauuuaugaguu

SEQ ID NO: 680833 - RNA, 21 nt, Artificial Sequence
  Synthetic
uuacuggcccauuuaugaguu

SEQ ID NO: 680834 - RNA, 22 nt, Artificial Sequence
  Synthetic
guuacuggcccauuuaugaguu

SEQ ID NO: 680835 - RNA, 23 nt, Artificial Sequence
  Synthetic
gguuacuggcccauuuaugaguu

SEQ ID NO: 680836 - RNA, 24 nt, Artificial Sequence
  Synthetic
agguuacuggcccauuuaugaguu

SEQ ID NO: 680837 - RNA, 18 nt, Artificial Sequence
  Synthetic
caguguaauaacugaguu

SEQ ID NO: 680838 - RNA, 19 nt, Artificial Sequence
  Synthetic
ccaguguaauaacugaguu

SEQ ID NO: 680839 - RNA, 20 nt, Artificial Sequence
  Synthetic
cccaguguaauaacugaguu

SEQ ID NO: 680840 - RNA, 21 nt, Artificial Sequence
  Synthetic
ccccaguguaauaacugaguu

SEQ ID NO: 680841 - RNA, 22 nt, Artificial Sequence
  Synthetic
gccccaguguaauaacugaguu

SEQ ID NO: 680842 - RNA, 23 nt, Artificial Sequence
  Synthetic
agccccaguguaauaacugaguu

SEQ ID NO: 680843 - RNA, 24 nt, Artificial Sequence
  Synthetic
aagccccaguguaauaacugaguu

SEQ ID NO: 680844 - RNA, 18 nt, Artificial Sequence
  Synthetic
ucuuuuucuaacugaguu

SEQ ID NO: 680845 - RNA, 19 nt, Artificial Sequence
  Synthetic
cucuuuuucuaacugaguu

SEQ ID NO: 680846 - RNA, 20 nt, Artificial Sequence
  Synthetic
ucucuuuuucuaacugaguu

SEQ ID NO: 680847 - RNA, 21 nt, Artificial Sequence
  Synthetic
uucucuuuuucuaacugaguu

SEQ ID NO: 680848 - RNA, 22 nt, Artificial Sequence
  Synthetic
uuucucuuuuucuaacugaguu

SEQ ID NO: 680849 - RNA, 23 nt, Artificial Sequence
  Synthetic
uuuucucuuuuucuaacugaguu

SEQ ID NO: 680850 - RNA, 24 nt, Artificial Sequence
  Synthetic
uuuuucucuuuuucuaacugaguu

SEQ ID NO: 680851 - RNA, 18 nt, Artificial Sequence
  Synthetic
cugggucuagacugaguu

SEQ ID NO: 680852 - RNA, 19 nt, Artificial Sequence
  Synthetic
ccugggucuagacugaguu

SEQ ID NO: 680853 - RNA, 20 nt, Artificial Sequence
  Synthetic
accugggucuagacugaguu

SEQ ID NO: 680854 - RNA, 21 nt, Artificial Sequence
  Synthetic
aaccugggucuagacugaguu

SEQ ID NO: 680855 - RNA, 22 nt, Artificial Sequence
  Synthetic
gaaccugggucuagacugaguu

SEQ ID NO: 680856 - RNA, 23 nt, Artificial Sequence
  Synthetic
ugaaccugggucuagacugaguu

SEQ ID NO: 680857 - RNA, 24 nt, Artificial Sequence
  Synthetic
uugaaccugggucuagacugaguu

SEQ ID NO: 680858 - RNA, 18 nt, Artificial Sequence
  Synthetic
guuuuaagcuacugaguu

SEQ ID NO: 680859 - RNA, 19 nt, Artificial Sequence
  Synthetic
uguuuuaagcuacugaguu

SEQ ID NO: 680860 - RNA, 20 nt, Artificial Sequence
  Synthetic
cuguuuuaagcuacugaguu

SEQ ID NO: 680861 - RNA, 21 nt, Artificial Sequence
  Synthetic
acuguuuuaagcuacugaguu

SEQ ID NO: 680862 - RNA, 22 nt, Artificial Sequence
  Synthetic
uacuguuuuaagcuacugaguu

SEQ ID NO: 680863 - RNA, 23 nt, Artificial Sequence
  Synthetic
cuacuguuuuaagcuacugaguu

SEQ ID NO: 680864 - RNA, 24 nt, Artificial Sequence
  Synthetic
ccuacuguuuuaagcuacugaguu

SEQ ID NO: 680865 - RNA, 18 nt, Artificial Sequence
  Synthetic
agagauaaggccugaguu

SEQ ID NO: 680866 - RNA, 19 nt, Artificial Sequence
  Synthetic
aagagauaaggccugaguu

SEQ ID NO: 680867 - RNA, 20 nt, Artificial Sequence
  Synthetic
uaagagauaaggccugaguu

SEQ ID NO: 680868 - RNA, 21 nt, Artificial Sequence
  Synthetic
uuaagagauaaggccugaguu

SEQ ID NO: 680869 - RNA, 22 nt, Artificial Sequence
  Synthetic
auuaagagauaaggccugaguu

SEQ ID NO: 680870 - RNA, 23 nt, Artificial Sequence
  Synthetic
uauuaagagauaaggccugaguu

SEQ ID NO: 680871 - RNA, 24 nt, Artificial Sequence
  Synthetic
guauuaagagauaaggccugaguu

SEQ ID NO: 680872 - RNA, 18 nt, Artificial Sequence
  Synthetic
gugcauuuugccugaguu

SEQ ID NO: 680873 - RNA, 19 nt, Artificial Sequence
  Synthetic
agugcauuuugccugaguu

SEQ ID NO: 680874 - RNA, 20 nt, Artificial Sequence
  Synthetic
gagugcauuuugccugaguu

SEQ ID NO: 680875 - RNA, 21 nt, Artificial Sequence
  Synthetic
agagugcauuuugccugaguu

SEQ ID NO: 680876 - RNA, 22 nt, Artificial Sequence
  Synthetic
cagagugcauuuugccugaguu

SEQ ID NO: 680877 - RNA, 23 nt, Artificial Sequence
  Synthetic
ucagagugcauuuugccugaguu

SEQ ID NO: 680878 - RNA, 24 nt, Artificial Sequence
  Synthetic
gucagagugcauuuugccugaguu

SEQ ID NO: 680879 - RNA, 18 nt, Artificial Sequence
  Synthetic
uggccacuauucugaguu

SEQ ID NO: 680880 - RNA, 19 nt, Artificial Sequence
  Synthetic
cuggccacuauucugaguu

SEQ ID NO: 680881 - RNA, 20 nt, Artificial Sequence
  Synthetic
acuggccacuauucugaguu

SEQ ID NO: 680882 - RNA, 21 nt, Artificial Sequence
  Synthetic
aacuggccacuauucugaguu

SEQ ID NO: 680883 - RNA, 22 nt, Artificial Sequence
  Synthetic
uaacuggccacuauucugaguu

SEQ ID NO: 680884 - RNA, 23 nt, Artificial Sequence
  Synthetic
uuaacuggccacuauucugaguu

SEQ ID NO: 680885 - RNA, 24 nt, Artificial Sequence
  Synthetic
auuaacuggccacuauucugaguu

SEQ ID NO: 680886 - RNA, 18 nt, Artificial Sequence
  Synthetic
aaaauucccuucugaguu

SEQ ID NO: 680887 - RNA, 19 nt, Artificial Sequence
  Synthetic
uaaaauucccuucugaguu

SEQ ID NO: 680888 - RNA, 20 nt, Artificial Sequence
  Synthetic
uuaaaauucccuucugaguu

SEQ ID NO: 680889 - RNA, 21 nt, Artificial Sequence
  Synthetic
uuuaaaauucccuucugaguu

SEQ ID NO: 680890 - RNA, 22 nt, Artificial Sequence
  Synthetic
uuuuaaaauucccuucugaguu

SEQ ID NO: 680891 - RNA, 23 nt, Artificial Sequence
  Synthetic
uuuuuaaaauucccuucugaguu

SEQ ID NO: 680892 - RNA, 24 nt, Artificial Sequence
  Synthetic
cuuuuuaaaauucccuucugaguu

SEQ ID NO: 680893 - RNA, 18 nt, Artificial Sequence
  Synthetic
accaacaacaggugaguu

SEQ ID NO: 680894 - RNA, 19 nt, Artificial Sequence
  Synthetic
uaccaacaacaggugaguu

SEQ ID NO: 680895 - RNA, 20 nt, Artificial Sequence
  Synthetic
uuaccaacaacaggugaguu

SEQ ID NO: 680896 - RNA, 21 nt, Artificial Sequence
  Synthetic
cuuaccaacaacaggugaguu

SEQ ID NO: 680897 - RNA, 22 nt, Artificial Sequence
  Synthetic
acuuaccaacaacaggugaguu

SEQ ID NO: 680898 - RNA, 23 nt, Artificial Sequence
  Synthetic
aacuuaccaacaacaggugaguu

SEQ ID NO: 680899 - RNA, 24 nt, Artificial Sequence
  Synthetic
aaacuuaccaacaacaggugaguu

SEQ ID NO: 680900 - RNA, 18 nt, Artificial Sequence
  Synthetic
agaucccaguaaauaguu

SEQ ID NO: 680901 - RNA, 19 nt, Artificial Sequence
  Synthetic
uagaucccaguaaauaguu

SEQ ID NO: 680902 - RNA, 20 nt, Artificial Sequence
  Synthetic
cuagaucccaguaaauaguu

SEQ ID NO: 680903 - RNA, 21 nt, Artificial Sequence
  Synthetic
ucuagaucccaguaaauaguu

SEQ ID NO: 680904 - RNA, 22 nt, Artificial Sequence
  Synthetic
uucuagaucccaguaaauaguu

SEQ ID NO: 680905 - RNA, 23 nt, Artificial Sequence
  Synthetic
uuucuagaucccaguaaauaguu

SEQ ID NO: 680906 - RNA, 24 nt, Artificial Sequence
  Synthetic
guuucuagaucccaguaaauaguu

SEQ ID NO: 680907 - RNA, 18 nt, Artificial Sequence
  Synthetic
ccaaaauggagaauaguu

SEQ ID NO: 680908 - RNA, 19 nt, Artificial Sequence
  Synthetic
accaaaauggagaauaguu

SEQ ID NO: 680909 - RNA, 20 nt, Artificial Sequence
  Synthetic
aaccaaaauggagaauaguu

SEQ ID NO: 680910 - RNA, 21 nt, Artificial Sequence
  Synthetic
caaccaaaauggagaauaguu

SEQ ID NO: 680911 - RNA, 22 nt, Artificial Sequence
  Synthetic
acaaccaaaauggagaauaguu

SEQ ID NO: 680912 - RNA, 23 nt, Artificial Sequence
  Synthetic
uacaaccaaaauggagaauaguu

SEQ ID NO: 680913 - RNA, 24 nt, Artificial Sequence
  Synthetic
guacaaccaaaauggagaauaguu

SEQ ID NO: 680914 - RNA, 18 nt, Artificial Sequence
  Synthetic
caaaacuccauaauaguu

SEQ ID NO: 680915 - RNA, 19 nt, Artificial Sequence
  Synthetic
acaaaacuccauaauaguu

SEQ ID NO: 680916 - RNA, 20 nt, Artificial Sequence
  Synthetic
aacaaaacuccauaauaguu

SEQ ID NO: 680917 - RNA, 21 nt, Artificial Sequence
  Synthetic
uaacaaaacuccauaauaguu

SEQ ID NO: 680918 - RNA, 22 nt, Artificial Sequence
  Synthetic
auaacaaaacuccauaauaguu

SEQ ID NO: 680919 - RNA, 23 nt, Artificial Sequence
  Synthetic
cauaacaaaacuccauaauaguu

SEQ ID NO: 680920 - RNA, 24 nt, Artificial Sequence
  Synthetic
acauaacaaaacuccauaauaguu

SEQ ID NO: 680921 - RNA, 18 nt, Artificial Sequence
  Synthetic
uggcagaguuuaauaguu

SEQ ID NO: 680922 - RNA, 19 nt, Artificial Sequence
  Synthetic
auggcagaguuuaauaguu

SEQ ID NO: 680923 - RNA, 20 nt, Artificial Sequence
  Synthetic
aauggcagaguuuaauaguu

SEQ ID NO: 680924 - RNA, 21 nt, Artificial Sequence
  Synthetic
aaauggcagaguuuaauaguu

SEQ ID NO: 680925 - RNA, 22 nt, Artificial Sequence
  Synthetic
aaaauggcagaguuuaauaguu

SEQ ID NO: 680926 - RNA, 23 nt, Artificial Sequence
  Synthetic
aaaaauggcagaguuuaauaguu

SEQ ID NO: 680927 - RNA, 24 nt, Artificial Sequence
  Synthetic
aaaaaauggcagaguuuaauaguu

SEQ ID NO: 680928 - RNA, 18 nt, Artificial Sequence
  Synthetic
ucaccaaaucacauaguu

SEQ ID NO: 680929 - RNA, 19 nt, Artificial Sequence
  Synthetic
aucaccaaaucacauaguu

SEQ ID NO: 680930 - RNA, 20 nt, Artificial Sequence
  Synthetic
uaucaccaaaucacauaguu

SEQ ID NO: 680931 - RNA, 21 nt, Artificial Sequence
  Synthetic
cuaucaccaaaucacauaguu

SEQ ID NO: 680932 - RNA, 22 nt, Artificial Sequence
  Synthetic
ccuaucaccaaaucacauaguu

SEQ ID NO: 680933 - RNA, 23 nt, Artificial Sequence
  Synthetic
gccuaucaccaaaucacauaguu

SEQ ID NO: 680934 - RNA, 24 nt, Artificial Sequence
  Synthetic
ugccuaucaccaaaucacauaguu

SEQ ID NO: 680935 - RNA, 18 nt, Artificial Sequence
  Synthetic
uugccuggugccauaguu

SEQ ID NO: 680936 - RNA, 19 nt, Artificial Sequence
  Synthetic
cuugccuggugccauaguu

SEQ ID NO: 680937 - RNA, 20 nt, Artificial Sequence
  Synthetic
ccuugccuggugccauaguu

SEQ ID NO: 680938 - RNA, 21 nt, Artificial Sequence
  Synthetic
uccuugccuggugccauaguu

SEQ ID NO: 680939 - RNA, 22 nt, Artificial Sequence
  Synthetic
cuccuugccuggugccauaguu

SEQ ID NO: 680940 - RNA, 23 nt, Artificial Sequence
  Synthetic
ccuccuugccuggugccauaguu

SEQ ID NO: 680941 - RNA, 24 nt, Artificial Sequence
  Synthetic
uccuccuugccuggugccauaguu

SEQ ID NO: 680942 - RNA, 18 nt, Artificial Sequence
  Synthetic
uuauugugauccauaguu

SEQ ID NO: 680943 - RNA, 19 nt, Artificial Sequence
  Synthetic
uuuauugugauccauaguu

SEQ ID NO: 680944 - RNA, 20 nt, Artificial Sequence
  Synthetic
guuuauugugauccauaguu

SEQ ID NO: 680945 - RNA, 21 nt, Artificial Sequence
  Synthetic
aguuuauugugauccauaguu

SEQ ID NO: 680946 - RNA, 22 nt, Artificial Sequence
  Synthetic
uaguuuauugugauccauaguu

SEQ ID NO: 680947 - RNA, 23 nt, Artificial Sequence
  Synthetic
uuaguuuauugugauccauaguu

SEQ ID NO: 680948 - RNA, 24 nt, Artificial Sequence
  Synthetic
uuuaguuuauugugauccauaguu

SEQ ID NO: 680949 - RNA, 18 nt, Artificial Sequence
  Synthetic
ucuauacagaagauaguu

SEQ ID NO: 680950 - RNA, 19 nt, Artificial Sequence
  Synthetic
aucuauacagaagauaguu

SEQ ID NO: 680951 - RNA, 20 nt, Artificial Sequence
  Synthetic
aaucuauacagaagauaguu

SEQ ID NO: 680952 - RNA, 21 nt, Artificial Sequence
  Synthetic
aaaucuauacagaagauaguu

SEQ ID NO: 680953 - RNA, 22 nt, Artificial Sequence
  Synthetic
uaaaucuauacagaagauaguu

SEQ ID NO: 680954 - RNA, 23 nt, Artificial Sequence
  Synthetic
uuaaaucuauacagaagauaguu

SEQ ID NO: 680955 - RNA, 24 nt, Artificial Sequence
  Synthetic
guuaaaucuauacagaagauaguu

SEQ ID NO: 680956 - RNA, 18 nt, Artificial Sequence
  Synthetic
aucaggauuauuauaguu

SEQ ID NO: 680957 - RNA, 19 nt, Artificial Sequence
  Synthetic
caucaggauuauuauaguu

SEQ ID NO: 680958 - RNA, 20 nt, Artificial Sequence
  Synthetic
ucaucaggauuauuauaguu

SEQ ID NO: 680959 - RNA, 21 nt, Artificial Sequence
  Synthetic
uucaucaggauuauuauaguu

SEQ ID NO: 680960 - RNA, 22 nt, Artificial Sequence
  Synthetic
auucaucaggauuauuauaguu

SEQ ID NO: 680961 - RNA, 23 nt, Artificial Sequence
  Synthetic
aauucaucaggauuauuauaguu

SEQ ID NO: 680962 - RNA, 24 nt, Artificial Sequence
  Synthetic
uaauucaucaggauuauuauaguu

SEQ ID NO: 680963 - RNA, 18 nt, Artificial Sequence
  Synthetic
aauuuauugcuuauaguu

SEQ ID NO: 680964 - RNA, 19 nt, Artificial Sequence
  Synthetic
gaauuuauugcuuauaguu

SEQ ID NO: 680965 - RNA, 20 nt, Artificial Sequence
  Synthetic
agaauuuauugcuuauaguu

SEQ ID NO: 680966 - RNA, 21 nt, Artificial Sequence
  Synthetic
cagaauuuauugcuuauaguu

SEQ ID NO: 680967 - RNA, 22 nt, Artificial Sequence
  Synthetic
acagaauuuauugcuuauaguu

SEQ ID NO: 680968 - RNA, 23 nt, Artificial Sequence
  Synthetic
aacagaauuuauugcuuauaguu

SEQ ID NO: 680969 - RNA, 24 nt, Artificial Sequence
  Synthetic
caacagaauuuauugcuuauaguu

SEQ ID NO: 680970 - RNA, 18 nt, Artificial Sequence
  Synthetic
auugauuaucuuauaguu

SEQ ID NO: 680971 - RNA, 19 nt, Artificial Sequence
  Synthetic
aauugauuaucuuauaguu

SEQ ID NO: 680972 - RNA, 20 nt, Artificial Sequence
  Synthetic
aaauugauuaucuuauaguu

SEQ ID NO: 680973 - RNA, 21 nt, Artificial Sequence
  Synthetic
caaauugauuaucuuauaguu

SEQ ID NO: 680974 - RNA, 22 nt, Artificial Sequence
  Synthetic
acaaauugauuaucuuauaguu

SEQ ID NO: 680975 - RNA, 23 nt, Artificial Sequence
  Synthetic
cacaaauugauuaucuuauaguu

SEQ ID NO: 680976 - RNA, 24 nt, Artificial Sequence
  Synthetic
acacaaauugauuaucuuauaguu

SEQ ID NO: 680977 - RNA, 18 nt, Artificial Sequence
  Synthetic
uguauaacaaaacuaguu

SEQ ID NO: 680978 - RNA, 19 nt, Artificial Sequence
  Synthetic
auguauaacaaaacuaguu

SEQ ID NO: 680979 - RNA, 20 nt, Artificial Sequence
  Synthetic
gauguauaacaaaacuaguu

SEQ ID NO: 680980 - RNA, 21 nt, Artificial Sequence
  Synthetic
agauguauaacaaaacuaguu

SEQ ID NO: 680981 - RNA, 22 nt, Artificial Sequence
  Synthetic
uagauguauaacaaaacuaguu

SEQ ID NO: 680982 - RNA, 23 nt, Artificial Sequence
  Synthetic
guagauguauaacaaaacuaguu

SEQ ID NO: 680983 - RNA, 24 nt, Artificial Sequence
  Synthetic
uguagauguauaacaaaacuaguu

SEQ ID NO: 680984 - RNA, 18 nt, Artificial Sequence
  Synthetic
auuuacacuaaccuaguu

SEQ ID NO: 680985 - RNA, 19 nt, Artificial Sequence
  Synthetic
cauuuacacuaaccuaguu

SEQ ID NO: 680986 - RNA, 20 nt, Artificial Sequence
  Synthetic
ccauuuacacuaaccuaguu

SEQ ID NO: 680987 - RNA, 21 nt, Artificial Sequence
  Synthetic
gccauuuacacuaaccuaguu

SEQ ID NO: 680988 - RNA, 22 nt, Artificial Sequence
  Synthetic
ugccauuuacacuaaccuaguu

SEQ ID NO: 680989 - RNA, 23 nt, Artificial Sequence
  Synthetic
gugccauuuacacuaaccuaguu

SEQ ID NO: 680990 - RNA, 24 nt, Artificial Sequence
  Synthetic
agugccauuuacacuaaccuaguu

SEQ ID NO: 680991 - RNA, 18 nt, Artificial Sequence
  Synthetic
auuagauugagccuaguu

SEQ ID NO: 680992 - RNA, 19 nt, Artificial Sequence
  Synthetic
gauuagauugagccuaguu

SEQ ID NO: 680993 - RNA, 20 nt, Artificial Sequence
  Synthetic
ggauuagauugagccuaguu

SEQ ID NO: 680994 - RNA, 21 nt, Artificial Sequence
  Synthetic
uggauuagauugagccuaguu

SEQ ID NO: 680995 - RNA, 22 nt, Artificial Sequence
  Synthetic
uuggauuagauugagccuaguu

SEQ ID NO: 680996 - RNA, 23 nt, Artificial Sequence
  Synthetic
uuuggauuagauugagccuaguu

SEQ ID NO: 680997 - RNA, 24 nt, Artificial Sequence
  Synthetic
auuuggauuagauugagccuaguu

SEQ ID NO: 680998 - RNA, 18 nt, Artificial Sequence
  Synthetic
uaaaacauacaucuaguu

SEQ ID NO: 680999 - RNA, 19 nt, Artificial Sequence
  Synthetic
guaaaacauacaucuaguu

SEQ ID NO: 681000 - RNA, 20 nt, Artificial Sequence
  Synthetic
aguaaaacauacaucuaguu

SEQ ID NO: 681001 - RNA, 21 nt, Artificial Sequence
  Synthetic
gaguaaaacauacaucuaguu

SEQ ID NO: 681002 - RNA, 22 nt, Artificial Sequence
  Synthetic
ugaguaaaacauacaucuaguu

SEQ ID NO: 681003 - RNA, 23 nt, Artificial Sequence
  Synthetic
augaguaaaacauacaucuaguu

SEQ ID NO: 681004 - RNA, 24 nt, Artificial Sequence
  Synthetic
aaugaguaaaacauacaucuaguu

SEQ ID NO: 681005 - RNA, 18 nt, Artificial Sequence
  Synthetic
cauggaauccaucuaguu

SEQ ID NO: 681006 - RNA, 19 nt, Artificial Sequence
  Synthetic
acauggaauccaucuaguu

SEQ ID NO: 681007 - RNA, 20 nt, Artificial Sequence
  Synthetic
gacauggaauccaucuaguu

SEQ ID NO: 681008 - RNA, 21 nt, Artificial Sequence
  Synthetic
agacauggaauccaucuaguu

SEQ ID NO: 681009 - RNA, 22 nt, Artificial Sequence
  Synthetic
aagacauggaauccaucuaguu

SEQ ID NO: 681010 - RNA, 23 nt, Artificial Sequence
  Synthetic
aaagacauggaauccaucuaguu

SEQ ID NO: 681011 - RNA, 24 nt, Artificial Sequence
  Synthetic
caaagacauggaauccaucuaguu

SEQ ID NO: 681012 - RNA, 18 nt, Artificial Sequence
  Synthetic
uagguuuuuuuucuaguu

SEQ ID NO: 681013 - RNA, 19 nt, Artificial Sequence
  Synthetic
uuagguuuuuuuucuaguu

SEQ ID NO: 681014 - RNA, 20 nt, Artificial Sequence
  Synthetic
auuagguuuuuuuucuaguu

SEQ ID NO: 681015 - RNA, 21 nt, Artificial Sequence
  Synthetic
cauuagguuuuuuuucuaguu

SEQ ID NO: 681016 - RNA, 22 nt, Artificial Sequence
  Synthetic
gcauuagguuuuuuuucuaguu

SEQ ID NO: 681017 - RNA, 23 nt, Artificial Sequence
  Synthetic
ugcauuagguuuuuuuucuaguu

SEQ ID NO: 681018 - RNA, 24 nt, Artificial Sequence
  Synthetic
uugcauuagguuuuuuuucuaguu

SEQ ID NO: 681019 - RNA, 18 nt, Artificial Sequence
  Synthetic
auuugagcucaaguaguu

SEQ ID NO: 681020 - RNA, 19 nt, Artificial Sequence
  Synthetic
aauuugagcucaaguaguu

SEQ ID NO: 681021 - RNA, 20 nt, Artificial Sequence
  Synthetic
aaauuugagcucaaguaguu

SEQ ID NO: 681022 - RNA, 21 nt, Artificial Sequence
  Synthetic
aaaauuugagcucaaguaguu

SEQ ID NO: 681023 - RNA, 22 nt, Artificial Sequence
  Synthetic
aaaaauuugagcucaaguaguu

SEQ ID NO: 681024 - RNA, 23 nt, Artificial Sequence
  Synthetic
uaaaaauuugagcucaaguaguu

SEQ ID NO: 681025 - RNA, 24 nt, Artificial Sequence
  Synthetic
auaaaaauuugagcucaaguaguu

SEQ ID NO: 681026 - RNA, 18 nt, Artificial Sequence
  Synthetic
aauauuguugaaguaguu

SEQ ID NO: 681027 - RNA, 19 nt, Artificial Sequence
  Synthetic
aaauauuguugaaguaguu

SEQ ID NO: 681028 - RNA, 20 nt, Artificial Sequence
  Synthetic
uaaauauuguugaaguaguu

SEQ ID NO: 681029 - RNA, 21 nt, Artificial Sequence
  Synthetic
auaaauauuguugaaguaguu

SEQ ID NO: 681030 - RNA, 22 nt, Artificial Sequence
  Synthetic
aauaaauauuguugaaguaguu

SEQ ID NO: 681031 - RNA, 23 nt, Artificial Sequence
  Synthetic
aaauaaauauuguugaaguaguu

SEQ ID NO: 681032 - RNA, 24 nt, Artificial Sequence
  Synthetic
aaaauaaauauuguugaaguaguu

SEQ ID NO: 681033 - RNA, 18 nt, Artificial Sequence
  Synthetic
uaagauugcagaguaguu

SEQ ID NO: 681034 - RNA, 19 nt, Artificial Sequence
  Synthetic
auaagauugcagaguaguu

SEQ ID NO: 681035 - RNA, 20 nt, Artificial Sequence
  Synthetic
aauaagauugcagaguaguu

SEQ ID NO: 681036 - RNA, 21 nt, Artificial Sequence
  Synthetic
aaauaagauugcagaguaguu

SEQ ID NO: 681037 - RNA, 22 nt, Artificial Sequence
  Synthetic
gaaauaagauugcagaguaguu

SEQ ID NO: 681038 - RNA, 23 nt, Artificial Sequence
  Synthetic
ggaaauaagauugcagaguaguu

SEQ ID NO: 681039 - RNA, 24 nt, Artificial Sequence
  Synthetic
aggaaauaagauugcagaguaguu

SEQ ID NO: 681040 - RNA, 18 nt, Artificial Sequence
  Synthetic
agucagcuuaugguaguu

SEQ ID NO: 681041 - RNA, 19 nt, Artificial Sequence
  Synthetic
uagucagcuuaugguaguu

SEQ ID NO: 681042 - RNA, 20 nt, Artificial Sequence
  Synthetic
auagucagcuuaugguaguu

SEQ ID NO: 681043 - RNA, 21 nt, Artificial Sequence
  Synthetic
gauagucagcuuaugguaguu

SEQ ID NO: 681044 - RNA, 22 nt, Artificial Sequence
  Synthetic
ugauagucagcuuaugguaguu

SEQ ID NO: 681045 - RNA, 23 nt, Artificial Sequence
  Synthetic
gugauagucagcuuaugguaguu

SEQ ID NO: 681046 - RNA, 24 nt, Artificial Sequence
  Synthetic
ugugauagucagcuuaugguaguu

SEQ ID NO: 681047 - RNA, 18 nt, Artificial Sequence
  Synthetic
gcccggaagcugguaguu

SEQ ID NO: 681048 - RNA, 19 nt, Artificial Sequence
  Synthetic
ugcccggaagcugguaguu

SEQ ID NO: 681049 - RNA, 20 nt, Artificial Sequence
  Synthetic
uugcccggaagcugguaguu

SEQ ID NO: 681050 - RNA, 21 nt, Artificial Sequence
  Synthetic
auugcccggaagcugguaguu

SEQ ID NO: 681051 - RNA, 22 nt, Artificial Sequence
  Synthetic
uauugcccggaagcugguaguu

SEQ ID NO: 681052 - RNA, 23 nt, Artificial Sequence
  Synthetic
auauugcccggaagcugguaguu

SEQ ID NO: 681053 - RNA, 24 nt, Artificial Sequence
  Synthetic
gauauugcccggaagcugguaguu

SEQ ID NO: 681054 - RNA, 18 nt, Artificial Sequence
  Synthetic
guauguucacauguaguu

SEQ ID NO: 681055 - RNA, 19 nt, Artificial Sequence
  Synthetic
uguauguucacauguaguu

SEQ ID NO: 681056 - RNA, 20 nt, Artificial Sequence
  Synthetic
uuguauguucacauguaguu

SEQ ID NO: 681057 - RNA, 21 nt, Artificial Sequence
  Synthetic
auuguauguucacauguaguu

SEQ ID NO: 681058 - RNA, 22 nt, Artificial Sequence
  Synthetic
aauuguauguucacauguaguu

SEQ ID NO: 681059 - RNA, 23 nt, Artificial Sequence
  Synthetic
uaauuguauguucacauguaguu

SEQ ID NO: 681060 - RNA, 24 nt, Artificial Sequence
  Synthetic
auaauuguauguucacauguaguu

SEQ ID NO: 681061 - RNA, 18 nt, Artificial Sequence
  Synthetic
agacaaaauauuguaguu

SEQ ID NO: 681062 - RNA, 19 nt, Artificial Sequence
  Synthetic
cagacaaaauauuguaguu

SEQ ID NO: 681063 - RNA, 20 nt, Artificial Sequence
  Synthetic
acagacaaaauauuguaguu

SEQ ID NO: 681064 - RNA, 21 nt, Artificial Sequence
  Synthetic
uacagacaaaauauuguaguu

SEQ ID NO: 681065 - RNA, 22 nt, Artificial Sequence
  Synthetic
auacagacaaaauauuguaguu

SEQ ID NO: 681066 - RNA, 23 nt, Artificial Sequence
  Synthetic
uauacagacaaaauauuguaguu

SEQ ID NO: 681067 - RNA, 24 nt, Artificial Sequence
  Synthetic
uuauacagacaaaauauuguaguu

SEQ ID NO: 681068 - RNA, 18 nt, Artificial Sequence
  Synthetic
auuaacagaaaauuaguu

SEQ ID NO: 681069 - RNA, 19 nt, Artificial Sequence
  Synthetic
cauuaacagaaaauuaguu

SEQ ID NO: 681070 - RNA, 20 nt, Artificial Sequence
  Synthetic
gcauuaacagaaaauuaguu

SEQ ID NO: 681071 - RNA, 21 nt, Artificial Sequence
  Synthetic
ggcauuaacagaaaauuaguu

SEQ ID NO: 681072 - RNA, 22 nt, Artificial Sequence
  Synthetic
uggcauuaacagaaaauuaguu

SEQ ID NO: 681073 - RNA, 23 nt, Artificial Sequence
  Synthetic
guggcauuaacagaaaauuaguu

SEQ ID NO: 681074 - RNA, 24 nt, Artificial Sequence
  Synthetic
aguggcauuaacagaaaauuaguu

SEQ ID NO: 681075 - RNA, 18 nt, Artificial Sequence
  Synthetic
aagagaauagaauuaguu

SEQ ID NO: 681076 - RNA, 19 nt, Artificial Sequence
  Synthetic
uaagagaauagaauuaguu

SEQ ID NO: 681077 - RNA, 20 nt, Artificial Sequence
  Synthetic
auaagagaauagaauuaguu

SEQ ID NO: 681078 - RNA, 21 nt, Artificial Sequence
  Synthetic
gauaagagaauagaauuaguu

SEQ ID NO: 681079 - RNA, 22 nt, Artificial Sequence
  Synthetic
agauaagagaauagaauuaguu

SEQ ID NO: 681080 - RNA, 23 nt, Artificial Sequence
  Synthetic
uagauaagagaauagaauuaguu

SEQ ID NO: 681081 - RNA, 24 nt, Artificial Sequence
  Synthetic
auagauaagagaauagaauuaguu

SEQ ID NO: 681082 - RNA, 18 nt, Artificial Sequence
  Synthetic
auugcuugaacauuaguu

SEQ ID NO: 681083 - RNA, 19 nt, Artificial Sequence
  Synthetic
aauugcuugaacauuaguu

SEQ ID NO: 681084 - RNA, 20 nt, Artificial Sequence
  Synthetic
aaauugcuugaacauuaguu

SEQ ID NO: 681085 - RNA, 21 nt, Artificial Sequence
  Synthetic
uaaauugcuugaacauuaguu

SEQ ID NO: 681086 - RNA, 22 nt, Artificial Sequence
  Synthetic
cuaaauugcuugaacauuaguu

SEQ ID NO: 681087 - RNA, 23 nt, Artificial Sequence
  Synthetic
ccuaaauugcuugaacauuaguu

SEQ ID NO: 681088 - RNA, 24 nt, Artificial Sequence
  Synthetic
accuaaauugcuugaacauuaguu

SEQ ID NO: 681089 - RNA, 18 nt, Artificial Sequence
  Synthetic
uuaauacauugauuaguu

SEQ ID NO: 681090 - RNA, 19 nt, Artificial Sequence
  Synthetic
auuaauacauugauuaguu

SEQ ID NO: 681091 - RNA, 20 nt, Artificial Sequence
  Synthetic
cauuaauacauugauuaguu

SEQ ID NO: 681092 - RNA, 21 nt, Artificial Sequence
  Synthetic
acauuaauacauugauuaguu

SEQ ID NO: 681093 - RNA, 22 nt, Artificial Sequence
  Synthetic
uacauuaauacauugauuaguu

SEQ ID NO: 681094 - RNA, 23 nt, Artificial Sequence
  Synthetic
auacauuaauacauugauuaguu

SEQ ID NO: 681095 - RNA, 24 nt, Artificial Sequence
  Synthetic
gauacauuaauacauugauuaguu

SEQ ID NO: 681096 - RNA, 18 nt, Artificial Sequence
  Synthetic
ugagguuuuuuauuaguu

SEQ ID NO: 681097 - RNA, 19 nt, Artificial Sequence
  Synthetic
gugagguuuuuuauuaguu

SEQ ID NO: 681098 - RNA, 20 nt, Artificial Sequence
  Synthetic
cgugagguuuuuuauuaguu

SEQ ID NO: 681099 - RNA, 21 nt, Artificial Sequence
  Synthetic
acgugagguuuuuuauuaguu

SEQ ID NO: 681100 - RNA, 22 nt, Artificial Sequence
  Synthetic
aacgugagguuuuuuauuaguu

SEQ ID NO: 681101 - RNA, 23 nt, Artificial Sequence
  Synthetic
uaacgugagguuuuuuauuaguu

SEQ ID NO: 681102 - RNA, 24 nt, Artificial Sequence
  Synthetic
auaacgugagguuuuuuauuaguu

SEQ ID NO: 681103 - RNA, 18 nt, Artificial Sequence
  Synthetic
uaacauuuaagguuaguu

SEQ ID NO: 681104 - RNA, 19 nt, Artificial Sequence
  Synthetic
cuaacauuuaagguuaguu

SEQ ID NO: 681105 - RNA, 20 nt, Artificial Sequence
  Synthetic
ccuaacauuuaagguuaguu

SEQ ID NO: 681106 - RNA, 21 nt, Artificial Sequence
  Synthetic
gccuaacauuuaagguuaguu

SEQ ID NO: 681107 - RNA, 22 nt, Artificial Sequence
  Synthetic
agccuaacauuuaagguuaguu

SEQ ID NO: 681108 - RNA, 23 nt, Artificial Sequence
  Synthetic
uagccuaacauuuaagguuaguu

SEQ ID NO: 681109 - RNA, 24 nt, Artificial Sequence
  Synthetic
uuagccuaacauuuaagguuaguu

SEQ ID NO: 681110 - RNA, 18 nt, Artificial Sequence
  Synthetic
aaacuguacaauuuaguu

SEQ ID NO: 681111 - RNA, 19 nt, Artificial Sequence
  Synthetic
uaaacuguacaauuuaguu

SEQ ID NO: 681112 - RNA, 20 nt, Artificial Sequence
  Synthetic
cuaaacuguacaauuuaguu

SEQ ID NO: 681113 - RNA, 21 nt, Artificial Sequence
  Synthetic
ucuaaacuguacaauuuaguu

SEQ ID NO: 681114 - RNA, 22 nt, Artificial Sequence
  Synthetic
uucuaaacuguacaauuuaguu

SEQ ID NO: 681115 - RNA, 23 nt, Artificial Sequence
  Synthetic
uuucuaaacuguacaauuuaguu

SEQ ID NO: 681116 - RNA, 24 nt, Artificial Sequence
  Synthetic
guuucuaaacuguacaauuuaguu

SEQ ID NO: 681117 - RNA, 18 nt, Artificial Sequence
  Synthetic
aggccuuguaauuuaguu

SEQ ID NO: 681118 - RNA, 19 nt, Artificial Sequence
  Synthetic
caggccuuguaauuuaguu

SEQ ID NO: 681119 - RNA, 20 nt, Artificial Sequence
  Synthetic
ccaggccuuguaauuuaguu

SEQ ID NO: 681120 - RNA, 21 nt, Artificial Sequence
  Synthetic
accaggccuuguaauuuaguu

SEQ ID NO: 681121 - RNA, 22 nt, Artificial Sequence
  Synthetic
aaccaggccuuguaauuuaguu

SEQ ID NO: 681122 - RNA, 23 nt, Artificial Sequence
  Synthetic
uaaccaggccuuguaauuuaguu

SEQ ID NO: 681123 - RNA, 24 nt, Artificial Sequence
  Synthetic
auaaccaggccuuguaauuuaguu

SEQ ID NO: 681124 - RNA, 18 nt, Artificial Sequence
  Synthetic
aagaaagucuguuuaguu

SEQ ID NO: 681125 - RNA, 19 nt, Artificial Sequence
  Synthetic
gaagaaagucuguuuaguu

SEQ ID NO: 681126 - RNA, 20 nt, Artificial Sequence
  Synthetic
ggaagaaagucuguuuaguu

SEQ ID NO: 681127 - RNA, 21 nt, Artificial Sequence
  Synthetic
uggaagaaagucuguuuaguu

SEQ ID NO: 681128 - RNA, 22 nt, Artificial Sequence
  Synthetic
auggaagaaagucuguuuaguu

SEQ ID NO: 681129 - RNA, 23 nt, Artificial Sequence
  Synthetic
uauggaagaaagucuguuuaguu

SEQ ID NO: 681130 - RNA, 24 nt, Artificial Sequence
  Synthetic
auauggaagaaagucuguuuaguu

SEQ ID NO: 681131 - RNA, 18 nt, Artificial Sequence
  Synthetic
ugccuuuggauuuuaguu

SEQ ID NO: 681132 - RNA, 19 nt, Artificial Sequence
  Synthetic
gugccuuuggauuuuaguu

SEQ ID NO: 681133 - RNA, 20 nt, Artificial Sequence
  Synthetic
ugugccuuuggauuuuaguu

SEQ ID NO: 681134 - RNA, 21 nt, Artificial Sequence
  Synthetic
augugccuuuggauuuuaguu

SEQ ID NO: 681135 - RNA, 22 nt, Artificial Sequence
  Synthetic
uaugugccuuuggauuuuaguu

SEQ ID NO: 681136 - RNA, 23 nt, Artificial Sequence
  Synthetic
uuaugugccuuuggauuuuaguu

SEQ ID NO: 681137 - RNA, 24 nt, Artificial Sequence
  Synthetic
cuuaugugccuuuggauuuuaguu

SEQ ID NO: 681138 - RNA, 18 nt, Artificial Sequence
  Synthetic
gaaauuacacuuuuaguu

SEQ ID NO: 681139 - RNA, 19 nt, Artificial Sequence
  Synthetic
ugaaauuacacuuuuaguu

SEQ ID NO: 681140 - RNA, 20 nt, Artificial Sequence
  Synthetic
uugaaauuacacuuuuaguu

SEQ ID NO: 681141 - RNA, 21 nt, Artificial Sequence
  Synthetic
uuugaaauuacacuuuuaguu

SEQ ID NO: 681142 - RNA, 22 nt, Artificial Sequence
  Synthetic
uuuugaaauuacacuuuuaguu

SEQ ID NO: 681143 - RNA, 23 nt, Artificial Sequence
  Synthetic
uuuuugaaauuacacuuuuaguu

SEQ ID NO: 681144 - RNA, 24 nt, Artificial Sequence
  Synthetic
uuuuuugaaauuacacuuuuaguu

SEQ ID NO: 681145 - RNA, 18 nt, Artificial Sequence
  Synthetic
ccacggaugcuuuuaguu

SEQ ID NO: 681146 - RNA, 19 nt, Artificial Sequence
  Synthetic
cccacggaugcuuuuaguu

SEQ ID NO: 681147 - RNA, 20 nt, Artificial Sequence
  Synthetic
ccccacggaugcuuuuaguu

SEQ ID NO: 681148 - RNA, 21 nt, Artificial Sequence
  Synthetic
uccccacggaugcuuuuaguu

SEQ ID NO: 681149 - RNA, 22 nt, Artificial Sequence
  Synthetic
guccccacggaugcuuuuaguu

SEQ ID NO: 681150 - RNA, 23 nt, Artificial Sequence
  Synthetic
gguccccacggaugcuuuuaguu

SEQ ID NO: 681151 - RNA, 24 nt, Artificial Sequence
  Synthetic
cgguccccacggaugcuuuuaguu

SEQ ID NO: 681152 - RNA, 18 nt, Artificial Sequence
  Synthetic
acaaagaaauuuuuaguu

SEQ ID NO: 681153 - RNA, 19 nt, Artificial Sequence
  Synthetic
uacaaagaaauuuuuaguu

SEQ ID NO: 681154 - RNA, 20 nt, Artificial Sequence
  Synthetic
auacaaagaaauuuuuaguu

SEQ ID NO: 681155 - RNA, 21 nt, Artificial Sequence
  Synthetic
uauacaaagaaauuuuuaguu

SEQ ID NO: 681156 - RNA, 22 nt, Artificial Sequence
  Synthetic
auauacaaagaaauuuuuaguu

SEQ ID NO: 681157 - RNA, 23 nt, Artificial Sequence
  Synthetic
uauauacaaagaaauuuuuaguu

SEQ ID NO: 681158 - RNA, 24 nt, Artificial Sequence
  Synthetic
auauauacaaagaaauuuuuaguu

SEQ ID NO: 681159 - RNA, 18 nt, Artificial Sequence
  Synthetic
auucugugcaaaaacguu

SEQ ID NO: 681160 - RNA, 19 nt, Artificial Sequence
  Synthetic
uauucugugcaaaaacguu

SEQ ID NO: 681161 - RNA, 20 nt, Artificial Sequence
  Synthetic
uuauucugugcaaaaacguu

SEQ ID NO: 681162 - RNA, 21 nt, Artificial Sequence
  Synthetic
guuauucugugcaaaaacguu

SEQ ID NO: 681163 - RNA, 22 nt, Artificial Sequence
  Synthetic
aguuauucugugcaaaaacguu

SEQ ID NO: 681164 - RNA, 23 nt, Artificial Sequence
  Synthetic
uaguuauucugugcaaaaacguu

SEQ ID NO: 681165 - RNA, 24 nt, Artificial Sequence
  Synthetic
cuaguuauucugugcaaaaacguu

SEQ ID NO: 681166 - RNA, 18 nt, Artificial Sequence
  Synthetic
auuucaggucuacacguu

SEQ ID NO: 681167 - RNA, 19 nt, Artificial Sequence
  Synthetic
uauuucaggucuacacguu

SEQ ID NO: 681168 - RNA, 20 nt, Artificial Sequence
  Synthetic
uuauuucaggucuacacguu

SEQ ID NO: 681169 - RNA, 21 nt, Artificial Sequence
  Synthetic
uuuauuucaggucuacacguu

SEQ ID NO: 681170 - RNA, 22 nt, Artificial Sequence
  Synthetic
cuuuauuucaggucuacacguu

SEQ ID NO: 681171 - RNA, 23 nt, Artificial Sequence
  Synthetic
ucuuuauuucaggucuacacguu

SEQ ID NO: 681172 - RNA, 24 nt, Artificial Sequence
  Synthetic
gucuuuauuucaggucuacacguu

SEQ ID NO: 681173 - RNA, 18 nt, Artificial Sequence
  Synthetic
uggguccccuuccacguu

SEQ ID NO: 681174 - RNA, 19 nt, Artificial Sequence
  Synthetic
uuggguccccuuccacguu

SEQ ID NO: 681175 - RNA, 20 nt, Artificial Sequence
  Synthetic
cuuggguccccuuccacguu

SEQ ID NO: 681176 - RNA, 21 nt, Artificial Sequence
  Synthetic
gcuuggguccccuuccacguu

SEQ ID NO: 681177 - RNA, 22 nt, Artificial Sequence
  Synthetic
ugcuuggguccccuuccacguu

SEQ ID NO: 681178 - RNA, 23 nt, Artificial Sequence
  Synthetic
cugcuuggguccccuuccacguu

SEQ ID NO: 681179 - RNA, 24 nt, Artificial Sequence
  Synthetic
ccugcuuggguccccuuccacguu

SEQ ID NO: 681180 - RNA, 18 nt, Artificial Sequence
  Synthetic
uuuccugaaaagcacguu

SEQ ID NO: 681181 - RNA, 19 nt, Artificial Sequence
  Synthetic
guuuccugaaaagcacguu

SEQ ID NO: 681182 - RNA, 20 nt, Artificial Sequence
  Synthetic
uguuuccugaaaagcacguu

SEQ ID NO: 681183 - RNA, 21 nt, Artificial Sequence
  Synthetic
cuguuuccugaaaagcacguu

SEQ ID NO: 681184 - RNA, 22 nt, Artificial Sequence
  Synthetic
acuguuuccugaaaagcacguu

SEQ ID NO: 681185 - RNA, 23 nt, Artificial Sequence
  Synthetic
cacuguuuccugaaaagcacguu

SEQ ID NO: 681186 - RNA, 24 nt, Artificial Sequence
  Synthetic
ccacuguuuccugaaaagcacguu

SEQ ID NO: 681187 - RNA, 18 nt, Artificial Sequence
  Synthetic
uugaaaaaacaucacguu

SEQ ID NO: 681188 - RNA, 19 nt, Artificial Sequence
  Synthetic
guugaaaaaacaucacguu

SEQ ID NO: 681189 - RNA, 20 nt, Artificial Sequence
  Synthetic
gguugaaaaaacaucacguu

SEQ ID NO: 681190 - RNA, 21 nt, Artificial Sequence
  Synthetic
ugguugaaaaaacaucacguu

SEQ ID NO: 681191 - RNA, 22 nt, Artificial Sequence
  Synthetic
uugguugaaaaaacaucacguu

SEQ ID NO: 681192 - RNA, 23 nt, Artificial Sequence
  Synthetic
uuugguugaaaaaacaucacguu

SEQ ID NO: 681193 - RNA, 24 nt, Artificial Sequence
  Synthetic
auuugguugaaaaaacaucacguu

SEQ ID NO: 681194 - RNA, 18 nt, Artificial Sequence
  Synthetic
gaacaugaucuggacguu

SEQ ID NO: 681195 - RNA, 19 nt, Artificial Sequence
  Synthetic
ggaacaugaucuggacguu

SEQ ID NO: 681196 - RNA, 20 nt, Artificial Sequence
  Synthetic
aggaacaugaucuggacguu

SEQ ID NO: 681197 - RNA, 21 nt, Artificial Sequence
  Synthetic
uaggaacaugaucuggacguu

SEQ ID NO: 681198 - RNA, 22 nt, Artificial Sequence
  Synthetic
auaggaacaugaucuggacguu

SEQ ID NO: 681199 - RNA, 23 nt, Artificial Sequence
  Synthetic
aauaggaacaugaucuggacguu

SEQ ID NO: 681200 - RNA, 24 nt, Artificial Sequence
  Synthetic
aaauaggaacaugaucuggacguu

SEQ ID NO: 681201 - RNA, 18 nt, Artificial Sequence
  Synthetic
gaaagccacugauacguu

SEQ ID NO: 681202 - RNA, 19 nt, Artificial Sequence
  Synthetic
agaaagccacugauacguu

SEQ ID NO: 681203 - RNA, 20 nt, Artificial Sequence
  Synthetic
uagaaagccacugauacguu

SEQ ID NO: 681204 - RNA, 21 nt, Artificial Sequence
  Synthetic
cuagaaagccacugauacguu

SEQ ID NO: 681205 - RNA, 22 nt, Artificial Sequence
  Synthetic
acuagaaagccacugauacguu

SEQ ID NO: 681206 - RNA, 23 nt, Artificial Sequence
  Synthetic
gacuagaaagccacugauacguu

SEQ ID NO: 681207 - RNA, 24 nt, Artificial Sequence
  Synthetic
ggacuagaaagccacugauacguu

SEQ ID NO: 681208 - RNA, 18 nt, Artificial Sequence
  Synthetic
ccuauuaguaguuacguu

SEQ ID NO: 681209 - RNA, 19 nt, Artificial Sequence
  Synthetic
gccuauuaguaguuacguu

SEQ ID NO: 681210 - RNA, 20 nt, Artificial Sequence
  Synthetic
agccuauuaguaguuacguu

SEQ ID NO: 681211 - RNA, 21 nt, Artificial Sequence
  Synthetic
uagccuauuaguaguuacguu

SEQ ID NO: 681212 - RNA, 22 nt, Artificial Sequence
  Synthetic
guagccuauuaguaguuacguu

SEQ ID NO: 681213 - RNA, 23 nt, Artificial Sequence
  Synthetic
aguagccuauuaguaguuacguu

SEQ ID NO: 681214 - RNA, 24 nt, Artificial Sequence
  Synthetic
caguagccuauuaguaguuacguu

SEQ ID NO: 681215 - RNA, 18 nt, Artificial Sequence
  Synthetic
ccacuauggagaaccguu

SEQ ID NO: 681216 - RNA, 19 nt, Artificial Sequence
  Synthetic
accacuauggagaaccguu

SEQ ID NO: 681217 - RNA, 20 nt, Artificial Sequence
  Synthetic
aaccacuauggagaaccguu

SEQ ID NO: 681218 - RNA, 21 nt, Artificial Sequence
  Synthetic
caaccacuauggagaaccguu

SEQ ID NO: 681219 - RNA, 22 nt, Artificial Sequence
  Synthetic
acaaccacuauggagaaccguu

SEQ ID NO: 681220 - RNA, 23 nt, Artificial Sequence
  Synthetic
cacaaccacuauggagaaccguu

SEQ ID NO: 681221 - RNA, 24 nt, Artificial Sequence
  Synthetic
gcacaaccacuauggagaaccguu

SEQ ID NO: 681222 - RNA, 18 nt, Artificial Sequence
  Synthetic
cccucucuucuagccguu

SEQ ID NO: 681223 - RNA, 19 nt, Artificial Sequence
  Synthetic
acccucucuucuagccguu

SEQ ID NO: 681224 - RNA, 20 nt, Artificial Sequence
  Synthetic
aacccucucuucuagccguu

SEQ ID NO: 681225 - RNA, 21 nt, Artificial Sequence
  Synthetic
aaacccucucuucuagccguu

SEQ ID NO: 681226 - RNA, 22 nt, Artificial Sequence
  Synthetic
aaaacccucucuucuagccguu

SEQ ID NO: 681227 - RNA, 23 nt, Artificial Sequence
  Synthetic
caaaacccucucuucuagccguu

SEQ ID NO: 681228 - RNA, 24 nt, Artificial Sequence
  Synthetic
ucaaaacccucucuucuagccguu

SEQ ID NO: 681229 - RNA, 18 nt, Artificial Sequence
  Synthetic
guugugacagcggccguu

SEQ ID NO: 681230 - RNA, 19 nt, Artificial Sequence
  Synthetic
uguugugacagcggccguu

SEQ ID NO: 681231 - RNA, 20 nt, Artificial Sequence
  Synthetic
cuguugugacagcggccguu

SEQ ID NO: 681232 - RNA, 21 nt, Artificial Sequence
  Synthetic
acuguugugacagcggccguu

SEQ ID NO: 681233 - RNA, 22 nt, Artificial Sequence
  Synthetic
aacuguugugacagcggccguu

SEQ ID NO: 681234 - RNA, 23 nt, Artificial Sequence
  Synthetic
uaacuguugugacagcggccguu

SEQ ID NO: 681235 - RNA, 24 nt, Artificial Sequence
  Synthetic
guaacuguugugacagcggccguu

SEQ ID NO: 681236 - RNA, 18 nt, Artificial Sequence
  Synthetic
accuguaaucucagcguu

SEQ ID NO: 681237 - RNA, 19 nt, Artificial Sequence
  Synthetic
caccuguaaucucagcguu

SEQ ID NO: 681238 - RNA, 20 nt, Artificial Sequence
  Synthetic
acaccuguaaucucagcguu

SEQ ID NO: 681239 - RNA, 21 nt, Artificial Sequence
  Synthetic
cacaccuguaaucucagcguu

SEQ ID NO: 681240 - RNA, 22 nt, Artificial Sequence
  Synthetic
ucacaccuguaaucucagcguu

SEQ ID NO: 681241 - RNA, 23 nt, Artificial Sequence
  Synthetic
cucacaccuguaaucucagcguu

SEQ ID NO: 681242 - RNA, 24 nt, Artificial Sequence
  Synthetic
gcucacaccuguaaucucagcguu

SEQ ID NO: 681243 - RNA, 18 nt, Artificial Sequence
  Synthetic
uggccugugaguagcguu

SEQ ID NO: 681244 - RNA, 19 nt, Artificial Sequence
  Synthetic
auggccugugaguagcguu

SEQ ID NO: 681245 - RNA, 20 nt, Artificial Sequence
  Synthetic
gauggccugugaguagcguu

SEQ ID NO: 681246 - RNA, 21 nt, Artificial Sequence
  Synthetic
ugauggccugugaguagcguu

SEQ ID NO: 681247 - RNA, 22 nt, Artificial Sequence
  Synthetic
augauggccugugaguagcguu

SEQ ID NO: 681248 - RNA, 23 nt, Artificial Sequence
  Synthetic
caugauggccugugaguagcguu

SEQ ID NO: 681249 - RNA, 24 nt, Artificial Sequence
  Synthetic
gcaugauggccugugaguagcguu

SEQ ID NO: 681250 - RNA, 18 nt, Artificial Sequence
  Synthetic
uguaugagagcaggcguu

SEQ ID NO: 681251 - RNA, 19 nt, Artificial Sequence
  Synthetic
cuguaugagagcaggcguu

SEQ ID NO: 681252 - RNA, 20 nt, Artificial Sequence
  Synthetic
acuguaugagagcaggcguu

SEQ ID NO: 681253 - RNA, 21 nt, Artificial Sequence
  Synthetic
cacuguaugagagcaggcguu

SEQ ID NO: 681254 - RNA, 22 nt, Artificial Sequence
  Synthetic
ccacuguaugagagcaggcguu

SEQ ID NO: 681255 - RNA, 23 nt, Artificial Sequence
  Synthetic
gccacuguaugagagcaggcguu

SEQ ID NO: 681256 - RNA, 24 nt, Artificial Sequence
  Synthetic
ugccacuguaugagagcaggcguu

SEQ ID NO: 681257 - RNA, 18 nt, Artificial Sequence
  Synthetic
agcaggccauucaucguu

SEQ ID NO: 681258 - RNA, 19 nt, Artificial Sequence
  Synthetic
gagcaggccauucaucguu

SEQ ID NO: 681259 - RNA, 20 nt, Artificial Sequence
  Synthetic
ugagcaggccauucaucguu

SEQ ID NO: 681260 - RNA, 21 nt, Artificial Sequence
  Synthetic
cugagcaggccauucaucguu

SEQ ID NO: 681261 - RNA, 22 nt, Artificial Sequence
  Synthetic
acugagcaggccauucaucguu

SEQ ID NO: 681262 - RNA, 23 nt, Artificial Sequence
  Synthetic
uacugagcaggccauucaucguu

SEQ ID NO: 681263 - RNA, 24 nt, Artificial Sequence
  Synthetic
cuacugagcaggccauucaucguu

SEQ ID NO: 681264 - RNA, 18 nt, Artificial Sequence
  Synthetic
ggccacugaaagaucguu

SEQ ID NO: 681265 - RNA, 19 nt, Artificial Sequence
  Synthetic
cggccacugaaagaucguu

SEQ ID NO: 681266 - RNA, 20 nt, Artificial Sequence
  Synthetic
acggccacugaaagaucguu

SEQ ID NO: 681267 - RNA, 21 nt, Artificial Sequence
  Synthetic
gacggccacugaaagaucguu

SEQ ID NO: 681268 - RNA, 22 nt, Artificial Sequence
  Synthetic
ugacggccacugaaagaucguu

SEQ ID NO: 681269 - RNA, 23 nt, Artificial Sequence
  Synthetic
augacggccacugaaagaucguu

SEQ ID NO: 681270 - RNA, 24 nt, Artificial Sequence
  Synthetic
aaugacggccacugaaagaucguu

SEQ ID NO: 681271 - RNA, 18 nt, Artificial Sequence
  Synthetic
aucaucuguaauaucguu

SEQ ID NO: 681272 - RNA, 19 nt, Artificial Sequence
  Synthetic
gaucaucuguaauaucguu

SEQ ID NO: 681273 - RNA, 20 nt, Artificial Sequence
  Synthetic
agaucaucuguaauaucguu

SEQ ID NO: 681274 - RNA, 21 nt, Artificial Sequence
  Synthetic
gagaucaucuguaauaucguu

SEQ ID NO: 681275 - RNA, 22 nt, Artificial Sequence
  Synthetic
agagaucaucuguaauaucguu

SEQ ID NO: 681276 - RNA, 23 nt, Artificial Sequence
  Synthetic
aagagaucaucuguaauaucguu

SEQ ID NO: 681277 - RNA, 24 nt, Artificial Sequence
  Synthetic
gaagagaucaucuguaauaucguu

SEQ ID NO: 681278 - RNA, 18 nt, Artificial Sequence
  Synthetic
cccauggaggaacucguu

SEQ ID NO: 681279 - RNA, 19 nt, Artificial Sequence
  Synthetic
ucccauggaggaacucguu

SEQ ID NO: 681280 - RNA, 20 nt, Artificial Sequence
  Synthetic
gucccauggaggaacucguu

SEQ ID NO: 681281 - RNA, 21 nt, Artificial Sequence
  Synthetic
agucccauggaggaacucguu

SEQ ID NO: 681282 - RNA, 22 nt, Artificial Sequence
  Synthetic
uagucccauggaggaacucguu

SEQ ID NO: 681283 - RNA, 23 nt, Artificial Sequence
  Synthetic
guagucccauggaggaacucguu

SEQ ID NO: 681284 - RNA, 24 nt, Artificial Sequence
  Synthetic
aguagucccauggaggaacucguu

SEQ ID NO: 681285 - RNA, 18 nt, Artificial Sequence
  Synthetic
agcaauaaaucacucguu

SEQ ID NO: 681286 - RNA, 19 nt, Artificial Sequence
  Synthetic
gagcaauaaaucacucguu

SEQ ID NO: 681287 - RNA, 20 nt, Artificial Sequence
  Synthetic
ugagcaauaaaucacucguu

SEQ ID NO: 681288 - RNA, 21 nt, Artificial Sequence
  Synthetic
augagcaauaaaucacucguu

SEQ ID NO: 681289 - RNA, 22 nt, Artificial Sequence
  Synthetic
uaugagcaauaaaucacucguu

SEQ ID NO: 681290 - RNA, 23 nt, Artificial Sequence
  Synthetic
uuaugagcaauaaaucacucguu

SEQ ID NO: 681291 - RNA, 24 nt, Artificial Sequence
  Synthetic
auuaugagcaauaaaucacucguu

SEQ ID NO: 681292 - RNA, 18 nt, Artificial Sequence
  Synthetic
gaggugagggugcucguu

SEQ ID NO: 681293 - RNA, 19 nt, Artificial Sequence
  Synthetic
ggaggugagggugcucguu

SEQ ID NO: 681294 - RNA, 20 nt, Artificial Sequence
  Synthetic
uggaggugagggugcucguu

SEQ ID NO: 681295 - RNA, 21 nt, Artificial Sequence
  Synthetic
guggaggugagggugcucguu

SEQ ID NO: 681296 - RNA, 22 nt, Artificial Sequence
  Synthetic
uguggaggugagggugcucguu

SEQ ID NO: 681297 - RNA, 23 nt, Artificial Sequence
  Synthetic
cuguggaggugagggugcucguu

SEQ ID NO: 681298 - RNA, 24 nt, Artificial Sequence
  Synthetic
ucuguggaggugagggugcucguu

SEQ ID NO: 681299 - RNA, 18 nt, Artificial Sequence
  Synthetic
gacuccuuacuucucguu

SEQ ID NO: 681300 - RNA, 19 nt, Artificial Sequence
  Synthetic
ugacuccuuacuucucguu

SEQ ID NO: 681301 - RNA, 20 nt, Artificial Sequence
  Synthetic
gugacuccuuacuucucguu

SEQ ID NO: 681302 - RNA, 21 nt, Artificial Sequence
  Synthetic
agugacuccuuacuucucguu

SEQ ID NO: 681303 - RNA, 22 nt, Artificial Sequence
  Synthetic
aagugacuccuuacuucucguu

SEQ ID NO: 681304 - RNA, 23 nt, Artificial Sequence
  Synthetic
gaagugacuccuuacuucucguu

SEQ ID NO: 681305 - RNA, 24 nt, Artificial Sequence
  Synthetic
agaagugacuccuuacuucucguu

SEQ ID NO: 681306 - RNA, 18 nt, Artificial Sequence
  Synthetic
agugguucugaagucguu

SEQ ID NO: 681307 - RNA, 19 nt, Artificial Sequence
  Synthetic
aagugguucugaagucguu

SEQ ID NO: 681308 - RNA, 20 nt, Artificial Sequence
  Synthetic
aaagugguucugaagucguu

SEQ ID NO: 681309 - RNA, 21 nt, Artificial Sequence
  Synthetic
aaaagugguucugaagucguu

SEQ ID NO: 681310 - RNA, 22 nt, Artificial Sequence
  Synthetic
gaaaagugguucugaagucguu

SEQ ID NO: 681311 - RNA, 23 nt, Artificial Sequence
  Synthetic
ugaaaagugguucugaagucguu

SEQ ID NO: 681312 - RNA, 24 nt, Artificial Sequence
  Synthetic
augaaaagugguucugaagucguu

SEQ ID NO: 681313 - RNA, 18 nt, Artificial Sequence
  Synthetic
uuugugggaaaugucguu

SEQ ID NO: 681314 - RNA, 19 nt, Artificial Sequence
  Synthetic
cuuugugggaaaugucguu

SEQ ID NO: 681315 - RNA, 20 nt, Artificial Sequence
  Synthetic
ucuuugugggaaaugucguu

SEQ ID NO: 681316 - RNA, 21 nt, Artificial Sequence
  Synthetic
aucuuugugggaaaugucguu

SEQ ID NO: 681317 - RNA, 22 nt, Artificial Sequence
  Synthetic
aaucuuugugggaaaugucguu

SEQ ID NO: 681318 - RNA, 23 nt, Artificial Sequence
  Synthetic
aaaucuuugugggaaaugucguu

SEQ ID NO: 681319 - RNA, 24 nt, Artificial Sequence
  Synthetic
gaaaucuuugugggaaaugucguu

SEQ ID NO: 681320 - RNA, 18 nt, Artificial Sequence
  Synthetic
auggaaagaaaaaagguu

SEQ ID NO: 681321 - RNA, 19 nt, Artificial Sequence
  Synthetic
aauggaaagaaaaaagguu

SEQ ID NO: 681322 - RNA, 20 nt, Artificial Sequence
  Synthetic
gaauggaaagaaaaaagguu

SEQ ID NO: 681323 - RNA, 21 nt, Artificial Sequence
  Synthetic
agaauggaaagaaaaaagguu

SEQ ID NO: 681324 - RNA, 22 nt, Artificial Sequence
  Synthetic
gagaauggaaagaaaaaagguu

SEQ ID NO: 681325 - RNA, 23 nt, Artificial Sequence
  Synthetic
agagaauggaaagaaaaaagguu

SEQ ID NO: 681326 - RNA, 24 nt, Artificial Sequence
  Synthetic
gagagaauggaaagaaaaaagguu

SEQ ID NO: 681327 - RNA, 18 nt, Artificial Sequence
  Synthetic
uucuggggaaaaaagguu

SEQ ID NO: 681328 - RNA, 19 nt, Artificial Sequence
  Synthetic
uuucuggggaaaaaagguu

SEQ ID NO: 681329 - RNA, 20 nt, Artificial Sequence
  Synthetic
auuucuggggaaaaaagguu

SEQ ID NO: 681330 - RNA, 21 nt, Artificial Sequence
  Synthetic
gauuucuggggaaaaaagguu

SEQ ID NO: 681331 - RNA, 22 nt, Artificial Sequence
  Synthetic
agauuucuggggaaaaaagguu

SEQ ID NO: 681332 - RNA, 23 nt, Artificial Sequence
  Synthetic
uagauuucuggggaaaaaagguu

SEQ ID NO: 681333 - RNA, 24 nt, Artificial Sequence
  Synthetic
auagauuucuggggaaaaaagguu

SEQ ID NO: 681334 - RNA, 18 nt, Artificial Sequence
  Synthetic
uaaaacuaccaaaagguu

SEQ ID NO: 681335 - RNA, 19 nt, Artificial Sequence
  Synthetic
auaaaacuaccaaaagguu

SEQ ID NO: 681336 - RNA, 20 nt, Artificial Sequence
  Synthetic
aauaaaacuaccaaaagguu

SEQ ID NO: 681337 - RNA, 21 nt, Artificial Sequence
  Synthetic
caauaaaacuaccaaaagguu

SEQ ID NO: 681338 - RNA, 22 nt, Artificial Sequence
  Synthetic
gcaauaaaacuaccaaaagguu

SEQ ID NO: 681339 - RNA, 23 nt, Artificial Sequence
  Synthetic
ugcaauaaaacuaccaaaagguu

SEQ ID NO: 681340 - RNA, 24 nt, Artificial Sequence
  Synthetic
augcaauaaaacuaccaaaagguu

SEQ ID NO: 681341 - RNA, 18 nt, Artificial Sequence
  Synthetic
agaaacauuuaaaagguu

SEQ ID NO: 681342 - RNA, 19 nt, Artificial Sequence
  Synthetic
gagaaacauuuaaaagguu

SEQ ID NO: 681343 - RNA, 20 nt, Artificial Sequence
  Synthetic
ggagaaacauuuaaaagguu

SEQ ID NO: 681344 - RNA, 21 nt, Artificial Sequence
  Synthetic
aggagaaacauuuaaaagguu

SEQ ID NO: 681345 - RNA, 22 nt, Artificial Sequence
  Synthetic
uaggagaaacauuuaaaagguu

SEQ ID NO: 681346 - RNA, 23 nt, Artificial Sequence
  Synthetic
cuaggagaaacauuuaaaagguu

SEQ ID NO: 681347 - RNA, 24 nt, Artificial Sequence
  Synthetic
ccuaggagaaacauuuaaaagguu

SEQ ID NO: 681348 - RNA, 18 nt, Artificial Sequence
  Synthetic
aguagaugcagaaagguu

SEQ ID NO: 681349 - RNA, 19 nt, Artificial Sequence
  Synthetic
gaguagaugcagaaagguu

SEQ ID NO: 681350 - RNA, 20 nt, Artificial Sequence
  Synthetic
agaguagaugcagaaagguu

SEQ ID NO: 681351 - RNA, 21 nt, Artificial Sequence
  Synthetic
aagaguagaugcagaaagguu

SEQ ID NO: 681352 - RNA, 22 nt, Artificial Sequence
  Synthetic
caagaguagaugcagaaagguu

SEQ ID NO: 681353 - RNA, 23 nt, Artificial Sequence
  Synthetic
gcaagaguagaugcagaaagguu

SEQ ID NO: 681354 - RNA, 24 nt, Artificial Sequence
  Synthetic
ggcaagaguagaugcagaaagguu

SEQ ID NO: 681355 - RNA, 18 nt, Artificial Sequence
  Synthetic
gugaugcuuagaaagguu

SEQ ID NO: 681356 - RNA, 19 nt, Artificial Sequence
  Synthetic
ggugaugcuuagaaagguu

SEQ ID NO: 681357 - RNA, 20 nt, Artificial Sequence
  Synthetic
uggugaugcuuagaaagguu

SEQ ID NO: 681358 - RNA, 21 nt, Artificial Sequence
  Synthetic
auggugaugcuuagaaagguu

SEQ ID NO: 681359 - RNA, 22 nt, Artificial Sequence
  Synthetic
aauggugaugcuuagaaagguu

SEQ ID NO: 681360 - RNA, 23 nt, Artificial Sequence
  Synthetic
gaauggugaugcuuagaaagguu

SEQ ID NO: 681361 - RNA, 24 nt, Artificial Sequence
  Synthetic
ggaauggugaugcuuagaaagguu

SEQ ID NO: 681362 - RNA, 18 nt, Artificial Sequence
  Synthetic
uaaauuagaugaaagguu

SEQ ID NO: 681363 - RNA, 19 nt, Artificial Sequence
  Synthetic
guaaauuagaugaaagguu

SEQ ID NO: 681364 - RNA, 20 nt, Artificial Sequence
  Synthetic
aguaaauuagaugaaagguu

SEQ ID NO: 681365 - RNA, 21 nt, Artificial Sequence
  Synthetic
uaguaaauuagaugaaagguu

SEQ ID NO: 681366 - RNA, 22 nt, Artificial Sequence
  Synthetic
uuaguaaauuagaugaaagguu

SEQ ID NO: 681367 - RNA, 23 nt, Artificial Sequence
  Synthetic
uuuaguaaauuagaugaaagguu

SEQ ID NO: 681368 - RNA, 24 nt, Artificial Sequence
  Synthetic
auuuaguaaauuagaugaaagguu

SEQ ID NO: 681369 - RNA, 18 nt, Artificial Sequence
  Synthetic
aacuuuagaaccaagguu

SEQ ID NO: 681370 - RNA, 19 nt, Artificial Sequence
  Synthetic
aaacuuuagaaccaagguu

SEQ ID NO: 681371 - RNA, 20 nt, Artificial Sequence
  Synthetic
aaaacuuuagaaccaagguu

SEQ ID NO: 681372 - RNA, 21 nt, Artificial Sequence
  Synthetic
gaaaacuuuagaaccaagguu

SEQ ID NO: 681373 - RNA, 22 nt, Artificial Sequence
  Synthetic
agaaaacuuuagaaccaagguu

SEQ ID NO: 681374 - RNA, 23 nt, Artificial Sequence
  Synthetic
aagaaaacuuuagaaccaagguu

SEQ ID NO: 681375 - RNA, 24 nt, Artificial Sequence
  Synthetic
gaagaaaacuuuagaaccaagguu

SEQ ID NO: 681376 - RNA, 18 nt, Artificial Sequence
  Synthetic
uuucuccucaccaagguu

SEQ ID NO: 681377 - RNA, 19 nt, Artificial Sequence
  Synthetic
auuucuccucaccaagguu

SEQ ID NO: 681378 - RNA, 20 nt, Artificial Sequence
  Synthetic
aauuucuccucaccaagguu

SEQ ID NO: 681379 - RNA, 21 nt, Artificial Sequence
  Synthetic
uaauuucuccucaccaagguu

SEQ ID NO: 681380 - RNA, 22 nt, Artificial Sequence
  Synthetic
cuaauuucuccucaccaagguu

SEQ ID NO: 681381 - RNA, 23 nt, Artificial Sequence
  Synthetic
gcuaauuucuccucaccaagguu

SEQ ID NO: 681382 - RNA, 24 nt, Artificial Sequence
  Synthetic
ugcuaauuucuccucaccaagguu

SEQ ID NO: 681383 - RNA, 18 nt, Artificial Sequence
  Synthetic
uucacaauagccaagguu

SEQ ID NO: 681384 - RNA, 19 nt, Artificial Sequence
  Synthetic
auucacaauagccaagguu

SEQ ID NO: 681385 - RNA, 20 nt, Artificial Sequence
  Synthetic
uauucacaauagccaagguu

SEQ ID NO: 681386 - RNA, 21 nt, Artificial Sequence
  Synthetic
cuauucacaauagccaagguu

SEQ ID NO: 681387 - RNA, 22 nt, Artificial Sequence
  Synthetic
ucuauucacaauagccaagguu

SEQ ID NO: 681388 - RNA, 23 nt, Artificial Sequence
  Synthetic
cucuauucacaauagccaagguu

SEQ ID NO: 681389 - RNA, 24 nt, Artificial Sequence
  Synthetic
gcucuauucacaauagccaagguu

SEQ ID NO: 681390 - RNA, 18 nt, Artificial Sequence
  Synthetic
ccccaaaagagcaagguu

SEQ ID NO: 681391 - RNA, 19 nt, Artificial Sequence
  Synthetic
uccccaaaagagcaagguu

SEQ ID NO: 681392 - RNA, 20 nt, Artificial Sequence
  Synthetic
auccccaaaagagcaagguu

SEQ ID NO: 681393 - RNA, 21 nt, Artificial Sequence
  Synthetic
cauccccaaaagagcaagguu

SEQ ID NO: 681394 - RNA, 22 nt, Artificial Sequence
  Synthetic
ucauccccaaaagagcaagguu

SEQ ID NO: 681395 - RNA, 23 nt, Artificial Sequence
  Synthetic
aucauccccaaaagagcaagguu

SEQ ID NO: 681396 - RNA, 24 nt, Artificial Sequence
  Synthetic
aaucauccccaaaagagcaagguu

SEQ ID NO: 681397 - RNA, 18 nt, Artificial Sequence
  Synthetic
gaggaaguuuucaagguu

SEQ ID NO: 681398 - RNA, 19 nt, Artificial Sequence
  Synthetic
ugaggaaguuuucaagguu

SEQ ID NO: 681399 - RNA, 20 nt, Artificial Sequence
  Synthetic
uugaggaaguuuucaagguu

SEQ ID NO: 681400 - RNA, 21 nt, Artificial Sequence
  Synthetic
uuugaggaaguuuucaagguu

SEQ ID NO: 681401 - RNA, 22 nt, Artificial Sequence
  Synthetic
cuuugaggaaguuuucaagguu

SEQ ID NO: 681402 - RNA, 23 nt, Artificial Sequence
  Synthetic
acuuugaggaaguuuucaagguu

SEQ ID NO: 681403 - RNA, 24 nt, Artificial Sequence
  Synthetic
gacuuugaggaaguuuucaagguu

SEQ ID NO: 681404 - RNA, 18 nt, Artificial Sequence
  Synthetic
aagccuagggaacagguu

SEQ ID NO: 681405 - RNA, 19 nt, Artificial Sequence
  Synthetic
aaagccuagggaacagguu

SEQ ID NO: 681406 - RNA, 20 nt, Artificial Sequence
  Synthetic
aaaagccuagggaacagguu

SEQ ID NO: 681407 - RNA, 21 nt, Artificial Sequence
  Synthetic
uaaaagccuagggaacagguu

SEQ ID NO: 681408 - RNA, 22 nt, Artificial Sequence
  Synthetic
uuaaaagccuagggaacagguu

SEQ ID NO: 681409 - RNA, 23 nt, Artificial Sequence
  Synthetic
cuuaaaagccuagggaacagguu

SEQ ID NO: 681410 - RNA, 24 nt, Artificial Sequence
  Synthetic
ucuuaaaagccuagggaacagguu

SEQ ID NO: 681411 - RNA, 18 nt, Artificial Sequence
  Synthetic
agucaaaaauaacagguu

SEQ ID NO: 681412 - RNA, 19 nt, Artificial Sequence
  Synthetic
uagucaaaaauaacagguu

SEQ ID NO: 681413 - RNA, 20 nt, Artificial Sequence
  Synthetic
auagucaaaaauaacagguu

SEQ ID NO: 681414 - RNA, 21 nt, Artificial Sequence
  Synthetic
aauagucaaaaauaacagguu

SEQ ID NO: 681415 - RNA, 22 nt, Artificial Sequence
  Synthetic
aaauagucaaaaauaacagguu

SEQ ID NO: 681416 - RNA, 23 nt, Artificial Sequence
  Synthetic
uaaauagucaaaaauaacagguu

SEQ ID NO: 681417 - RNA, 24 nt, Artificial Sequence
  Synthetic
cuaaauagucaaaaauaacagguu

SEQ ID NO: 681418 - RNA, 18 nt, Artificial Sequence
  Synthetic
auauccagcacacagguu

SEQ ID NO: 681419 - RNA, 19 nt, Artificial Sequence
  Synthetic
uauauccagcacacagguu

SEQ ID NO: 681420 - RNA, 20 nt, Artificial Sequence
  Synthetic
cuauauccagcacacagguu

SEQ ID NO: 681421 - RNA, 21 nt, Artificial Sequence
  Synthetic
gcuauauccagcacacagguu

SEQ ID NO: 681422 - RNA, 22 nt, Artificial Sequence
  Synthetic
agcuauauccagcacacagguu

SEQ ID NO: 681423 - RNA, 23 nt, Artificial Sequence
  Synthetic
uagcuauauccagcacacagguu

SEQ ID NO: 681424 - RNA, 24 nt, Artificial Sequence
  Synthetic
uuagcuauauccagcacacagguu

SEQ ID NO: 681425 - RNA, 18 nt, Artificial Sequence
  Synthetic
uacacagcagcacagguu

SEQ ID NO: 681426 - RNA, 19 nt, Artificial Sequence
  Synthetic
auacacagcagcacagguu

SEQ ID NO: 681427 - RNA, 20 nt, Artificial Sequence
  Synthetic
aauacacagcagcacagguu

SEQ ID NO: 681428 - RNA, 21 nt, Artificial Sequence
  Synthetic
aaauacacagcagcacagguu

SEQ ID NO: 681429 - RNA, 22 nt, Artificial Sequence
  Synthetic
caaauacacagcagcacagguu

SEQ ID NO: 681430 - RNA, 23 nt, Artificial Sequence
  Synthetic
ccaaauacacagcagcacagguu

SEQ ID NO: 681431 - RNA, 24 nt, Artificial Sequence
  Synthetic
gccaaauacacagcagcacagguu

SEQ ID NO: 681432 - RNA, 18 nt, Artificial Sequence
  Synthetic
acagcauauucacagguu

SEQ ID NO: 681433 - RNA, 19 nt, Artificial Sequence
  Synthetic
cacagcauauucacagguu

SEQ ID NO: 681434 - RNA, 20 nt, Artificial Sequence
  Synthetic
gcacagcauauucacagguu

SEQ ID NO: 681435 - RNA, 21 nt, Artificial Sequence
  Synthetic
agcacagcauauucacagguu

SEQ ID NO: 681436 - RNA, 22 nt, Artificial Sequence
  Synthetic
gagcacagcauauucacagguu

SEQ ID NO: 681437 - RNA, 23 nt, Artificial Sequence
  Synthetic
ggagcacagcauauucacagguu

SEQ ID NO: 681438 - RNA, 24 nt, Artificial Sequence
  Synthetic
gggagcacagcauauucacagguu

SEQ ID NO: 681439 - RNA, 18 nt, Artificial Sequence
  Synthetic
ugaaaaccaauacagguu

SEQ ID NO: 681440 - RNA, 19 nt, Artificial Sequence
  Synthetic
cugaaaaccaauacagguu

SEQ ID NO: 681441 - RNA, 20 nt, Artificial Sequence
  Synthetic
ccugaaaaccaauacagguu

SEQ ID NO: 681442 - RNA, 21 nt, Artificial Sequence
  Synthetic
uccugaaaaccaauacagguu

SEQ ID NO: 681443 - RNA, 22 nt, Artificial Sequence
  Synthetic
uuccugaaaaccaauacagguu

SEQ ID NO: 681444 - RNA, 23 nt, Artificial Sequence
  Synthetic
uuuccugaaaaccaauacagguu

SEQ ID NO: 681445 - RNA, 24 nt, Artificial Sequence
  Synthetic
uuuuccugaaaaccaauacagguu

SEQ ID NO: 681446 - RNA, 18 nt, Artificial Sequence
  Synthetic
aggcuaagaauacagguu

SEQ ID NO: 681447 - RNA, 19 nt, Artificial Sequence
  Synthetic
aaggcuaagaauacagguu

SEQ ID NO: 681448 - RNA, 20 nt, Artificial Sequence
  Synthetic
uaaggcuaagaauacagguu

SEQ ID NO: 681449 - RNA, 21 nt, Artificial Sequence
  Synthetic
guaaggcuaagaauacagguu

SEQ ID NO: 681450 - RNA, 22 nt, Artificial Sequence
  Synthetic
gguaaggcuaagaauacagguu

SEQ ID NO: 681451 - RNA, 23 nt, Artificial Sequence
  Synthetic
ggguaaggcuaagaauacagguu

SEQ ID NO: 681452 - RNA, 24 nt, Artificial Sequence
  Synthetic
gggguaaggcuaagaauacagguu

SEQ ID NO: 681453 - RNA, 18 nt, Artificial Sequence
  Synthetic
uuuaauaugguacagguu

SEQ ID NO: 681454 - RNA, 19 nt, Artificial Sequence
  Synthetic
auuuaauaugguacagguu

SEQ ID NO: 681455 - RNA, 20 nt, Artificial Sequence
  Synthetic
aauuuaauaugguacagguu

SEQ ID NO: 681456 - RNA, 21 nt, Artificial Sequence
  Synthetic
aaauuuaauaugguacagguu

SEQ ID NO: 681457 - RNA, 22 nt, Artificial Sequence
  Synthetic
aaaauuuaauaugguacagguu

SEQ ID NO: 681458 - RNA, 23 nt, Artificial Sequence
  Synthetic
caaaauuuaauaugguacagguu

SEQ ID NO: 681459 - RNA, 24 nt, Artificial Sequence
  Synthetic
ucaaaauuuaauaugguacagguu

SEQ ID NO: 681460 - RNA, 18 nt, Artificial Sequence
  Synthetic
uagaagaaguuacagguu

SEQ ID NO: 681461 - RNA, 19 nt, Artificial Sequence
  Synthetic
uuagaagaaguuacagguu

SEQ ID NO: 681462 - RNA, 20 nt, Artificial Sequence
  Synthetic
auuagaagaaguuacagguu

SEQ ID NO: 681463 - RNA, 21 nt, Artificial Sequence
  Synthetic
uauuagaagaaguuacagguu

SEQ ID NO: 681464 - RNA, 22 nt, Artificial Sequence
  Synthetic
cuauuagaagaaguuacagguu

SEQ ID NO: 681465 - RNA, 23 nt, Artificial Sequence
  Synthetic
ccuauuagaagaaguuacagguu

SEQ ID NO: 681466 - RNA, 24 nt, Artificial Sequence
  Synthetic
cccuauuagaagaaguuacagguu

SEQ ID NO: 681467 - RNA, 18 nt, Artificial Sequence
  Synthetic
uuauucuagcaccagguu

SEQ ID NO: 681468 - RNA, 19 nt, Artificial Sequence
  Synthetic
guuauucuagcaccagguu

SEQ ID NO: 681469 - RNA, 20 nt, Artificial Sequence
  Synthetic
aguuauucuagcaccagguu

SEQ ID NO: 681470 - RNA, 21 nt, Artificial Sequence
  Synthetic
caguuauucuagcaccagguu

SEQ ID NO: 681471 - RNA, 22 nt, Artificial Sequence
  Synthetic
ccaguuauucuagcaccagguu

SEQ ID NO: 681472 - RNA, 23 nt, Artificial Sequence
  Synthetic
uccaguuauucuagcaccagguu

SEQ ID NO: 681473 - RNA, 24 nt, Artificial Sequence
  Synthetic
auccaguuauucuagcaccagguu

SEQ ID NO: 681474 - RNA, 18 nt, Artificial Sequence
  Synthetic
uuuauaugggaccagguu

SEQ ID NO: 681475 - RNA, 19 nt, Artificial Sequence
  Synthetic
uuuuauaugggaccagguu

SEQ ID NO: 681476 - RNA, 20 nt, Artificial Sequence
  Synthetic
auuuuauaugggaccagguu

SEQ ID NO: 681477 - RNA, 21 nt, Artificial Sequence
  Synthetic
gauuuuauaugggaccagguu

SEQ ID NO: 681478 - RNA, 22 nt, Artificial Sequence
  Synthetic
ggauuuuauaugggaccagguu

SEQ ID NO: 681479 - RNA, 23 nt, Artificial Sequence
  Synthetic
gggauuuuauaugggaccagguu

SEQ ID NO: 681480 - RNA, 24 nt, Artificial Sequence
  Synthetic
ugggauuuuauaugggaccagguu

SEQ ID NO: 681481 - RNA, 18 nt, Artificial Sequence
  Synthetic
ccagcaggcagccagguu

SEQ ID NO: 681482 - RNA, 19 nt, Artificial Sequence
  Synthetic
uccagcaggcagccagguu

SEQ ID NO: 681483 - RNA, 20 nt, Artificial Sequence
  Synthetic
cuccagcaggcagccagguu

SEQ ID NO: 681484 - RNA, 21 nt, Artificial Sequence
  Synthetic
acuccagcaggcagccagguu

SEQ ID NO: 681485 - RNA, 22 nt, Artificial Sequence
  Synthetic
aacuccagcaggcagccagguu

SEQ ID NO: 681486 - RNA, 23 nt, Artificial Sequence
  Synthetic
caacuccagcaggcagccagguu

SEQ ID NO: 681487 - RNA, 24 nt, Artificial Sequence
  Synthetic
acaacuccagcaggcagccagguu

SEQ ID NO: 681488 - RNA, 18 nt, Artificial Sequence
  Synthetic
uugucagauaagcagguu

SEQ ID NO: 681489 - RNA, 19 nt, Artificial Sequence
  Synthetic
uuugucagauaagcagguu

SEQ ID NO: 681490 - RNA, 20 nt, Artificial Sequence
  Synthetic
cuuugucagauaagcagguu

SEQ ID NO: 681491 - RNA, 21 nt, Artificial Sequence
  Synthetic
ucuuugucagauaagcagguu

SEQ ID NO: 681492 - RNA, 22 nt, Artificial Sequence
  Synthetic
cucuuugucagauaagcagguu

SEQ ID NO: 681493 - RNA, 23 nt, Artificial Sequence
  Synthetic
gcucuuugucagauaagcagguu

SEQ ID NO: 681494 - RNA, 24 nt, Artificial Sequence
  Synthetic
agcucuuugucagauaagcagguu

SEQ ID NO: 681495 - RNA, 18 nt, Artificial Sequence
  Synthetic
augaaauuauaucagguu

SEQ ID NO: 681496 - RNA, 19 nt, Artificial Sequence
  Synthetic
gaugaaauuauaucagguu

SEQ ID NO: 681497 - RNA, 20 nt, Artificial Sequence
  Synthetic
ggaugaaauuauaucagguu

SEQ ID NO: 681498 - RNA, 21 nt, Artificial Sequence
  Synthetic
gggaugaaauuauaucagguu

SEQ ID NO: 681499 - RNA, 22 nt, Artificial Sequence
  Synthetic
ggggaugaaauuauaucagguu

SEQ ID NO: 681500 - RNA, 23 nt, Artificial Sequence
  Synthetic
uggggaugaaauuauaucagguu

SEQ ID NO: 681501 - RNA, 24 nt, Artificial Sequence
  Synthetic
cuggggaugaaauuauaucagguu

SEQ ID NO: 681502 - RNA, 18 nt, Artificial Sequence
  Synthetic
gcugccuuuuaucagguu

SEQ ID NO: 681503 - RNA, 19 nt, Artificial Sequence
  Synthetic
agcugccuuuuaucagguu

SEQ ID NO: 681504 - RNA, 20 nt, Artificial Sequence
  Synthetic
uagcugccuuuuaucagguu

SEQ ID NO: 681505 - RNA, 21 nt, Artificial Sequence
  Synthetic
guagcugccuuuuaucagguu

SEQ ID NO: 681506 - RNA, 22 nt, Artificial Sequence
  Synthetic
uguagcugccuuuuaucagguu

SEQ ID NO: 681507 - RNA, 23 nt, Artificial Sequence
  Synthetic
uuguagcugccuuuuaucagguu

SEQ ID NO: 681508 - RNA, 24 nt, Artificial Sequence
  Synthetic
uuuguagcugccuuuuaucagguu

SEQ ID NO: 681509 - RNA, 18 nt, Artificial Sequence
  Synthetic
gggaaauauucucagguu

SEQ ID NO: 681510 - RNA, 19 nt, Artificial Sequence
  Synthetic
ggggaaauauucucagguu

SEQ ID NO: 681511 - RNA, 20 nt, Artificial Sequence
  Synthetic
aggggaaauauucucagguu

SEQ ID NO: 681512 - RNA, 21 nt, Artificial Sequence
  Synthetic
aaggggaaauauucucagguu

SEQ ID NO: 681513 - RNA, 22 nt, Artificial Sequence
  Synthetic
aaaggggaaauauucucagguu

SEQ ID NO: 681514 - RNA, 23 nt, Artificial Sequence
  Synthetic
caaaggggaaauauucucagguu

SEQ ID NO: 681515 - RNA, 24 nt, Artificial Sequence
  Synthetic
ccaaaggggaaauauucucagguu

SEQ ID NO: 681516 - RNA, 18 nt, Artificial Sequence
  Synthetic
uauuucaaauuucagguu

SEQ ID NO: 681517 - RNA, 19 nt, Artificial Sequence
  Synthetic
guauuucaaauuucagguu

SEQ ID NO: 681518 - RNA, 20 nt, Artificial Sequence
  Synthetic
aguauuucaaauuucagguu

SEQ ID NO: 681519 - RNA, 21 nt, Artificial Sequence
  Synthetic
aaguauuucaaauuucagguu

SEQ ID NO: 681520 - RNA, 22 nt, Artificial Sequence
  Synthetic
aaaguauuucaaauuucagguu

SEQ ID NO: 681521 - RNA, 23 nt, Artificial Sequence
  Synthetic
gaaaguauuucaaauuucagguu

SEQ ID NO: 681522 - RNA, 24 nt, Artificial Sequence
  Synthetic
ugaaaguauuucaaauuucagguu

SEQ ID NO: 681523 - RNA, 18 nt, Artificial Sequence
  Synthetic
ucuuuaaaguuucagguu

SEQ ID NO: 681524 - RNA, 19 nt, Artificial Sequence
  Synthetic
uucuuuaaaguuucagguu

SEQ ID NO: 681525 - RNA, 20 nt, Artificial Sequence
  Synthetic
uuucuuuaaaguuucagguu

SEQ ID NO: 681526 - RNA, 21 nt, Artificial Sequence
  Synthetic
uuuucuuuaaaguuucagguu

SEQ ID NO: 681527 - RNA, 22 nt, Artificial Sequence
  Synthetic
cuuuucuuuaaaguuucagguu

SEQ ID NO: 681528 - RNA, 23 nt, Artificial Sequence
  Synthetic
ccuuuucuuuaaaguuucagguu

SEQ ID NO: 681529 - RNA, 24 nt, Artificial Sequence
  Synthetic
uccuuuucuuuaaaguuucagguu

SEQ ID NO: 681530 - RNA, 18 nt, Artificial Sequence
  Synthetic
aagucacagaaagagguu

SEQ ID NO: 681531 - RNA, 19 nt, Artificial Sequence
  Synthetic
gaagucacagaaagagguu

SEQ ID NO: 681532 - RNA, 20 nt, Artificial Sequence
  Synthetic
ugaagucacagaaagagguu

SEQ ID NO: 681533 - RNA, 21 nt, Artificial Sequence
  Synthetic
cugaagucacagaaagagguu

SEQ ID NO: 681534 - RNA, 22 nt, Artificial Sequence
  Synthetic
ccugaagucacagaaagagguu

SEQ ID NO: 681535 - RNA, 23 nt, Artificial Sequence
  Synthetic
uccugaagucacagaaagagguu

SEQ ID NO: 681536 - RNA, 24 nt, Artificial Sequence
  Synthetic
cuccugaagucacagaaagagguu

SEQ ID NO: 681537 - RNA, 18 nt, Artificial Sequence
  Synthetic
aggcauuagcaagagguu

SEQ ID NO: 681538 - RNA, 19 nt, Artificial Sequence
  Synthetic
caggcauuagcaagagguu

SEQ ID NO: 681539 - RNA, 20 nt, Artificial Sequence
  Synthetic
acaggcauuagcaagagguu

SEQ ID NO: 681540 - RNA, 21 nt, Artificial Sequence
  Synthetic
gacaggcauuagcaagagguu

SEQ ID NO: 681541 - RNA, 22 nt, Artificial Sequence
  Synthetic
agacaggcauuagcaagagguu

SEQ ID NO: 681542 - RNA, 23 nt, Artificial Sequence
  Synthetic
gagacaggcauuagcaagagguu

SEQ ID NO: 681543 - RNA, 24 nt, Artificial Sequence
  Synthetic
ugagacaggcauuagcaagagguu

SEQ ID NO: 681544 - RNA, 18 nt, Artificial Sequence
  Synthetic
caguaacuaacagagguu

SEQ ID NO: 681545 - RNA, 19 nt, Artificial Sequence
  Synthetic
acaguaacuaacagagguu

SEQ ID NO: 681546 - RNA, 20 nt, Artificial Sequence
  Synthetic
gacaguaacuaacagagguu

SEQ ID NO: 681547 - RNA, 21 nt, Artificial Sequence
  Synthetic
ggacaguaacuaacagagguu

SEQ ID NO: 681548 - RNA, 22 nt, Artificial Sequence
  Synthetic
gggacaguaacuaacagagguu

SEQ ID NO: 681549 - RNA, 23 nt, Artificial Sequence
  Synthetic
agggacaguaacuaacagagguu

SEQ ID NO: 681550 - RNA, 24 nt, Artificial Sequence
  Synthetic
aagggacaguaacuaacagagguu

SEQ ID NO: 681551 - RNA, 18 nt, Artificial Sequence
  Synthetic
ccuauucacugggagguu

SEQ ID NO: 681552 - RNA, 19 nt, Artificial Sequence
  Synthetic
accuauucacugggagguu

SEQ ID NO: 681553 - RNA, 20 nt, Artificial Sequence
  Synthetic
gaccuauucacugggagguu

SEQ ID NO: 681554 - RNA, 21 nt, Artificial Sequence
  Synthetic
ggaccuauucacugggagguu

SEQ ID NO: 681555 - RNA, 22 nt, Artificial Sequence
  Synthetic
uggaccuauucacugggagguu

SEQ ID NO: 681556 - RNA, 23 nt, Artificial Sequence
  Synthetic
uuggaccuauucacugggagguu

SEQ ID NO: 681557 - RNA, 24 nt, Artificial Sequence
  Synthetic
uuuggaccuauucacugggagguu

SEQ ID NO: 681558 - RNA, 18 nt, Artificial Sequence
  Synthetic
guucccuaaauggagguu

SEQ ID NO: 681559 - RNA, 19 nt, Artificial Sequence
  Synthetic
gguucccuaaauggagguu

SEQ ID NO: 681560 - RNA, 20 nt, Artificial Sequence
  Synthetic
ggguucccuaaauggagguu

SEQ ID NO: 681561 - RNA, 21 nt, Artificial Sequence
  Synthetic
uggguucccuaaauggagguu

SEQ ID NO: 681562 - RNA, 22 nt, Artificial Sequence
  Synthetic
uuggguucccuaaauggagguu

SEQ ID NO: 681563 - RNA, 23 nt, Artificial Sequence
  Synthetic
uuuggguucccuaaauggagguu

SEQ ID NO: 681564 - RNA, 24 nt, Artificial Sequence
  Synthetic
guuuggguucccuaaauggagguu

SEQ ID NO: 681565 - RNA, 18 nt, Artificial Sequence
  Synthetic
ggagauaucaaugagguu

SEQ ID NO: 681566 - RNA, 19 nt, Artificial Sequence
  Synthetic
uggagauaucaaugagguu

SEQ ID NO: 681567 - RNA, 20 nt, Artificial Sequence
  Synthetic
cuggagauaucaaugagguu

SEQ ID NO: 681568 - RNA, 21 nt, Artificial Sequence
  Synthetic
acuggagauaucaaugagguu

SEQ ID NO: 681569 - RNA, 22 nt, Artificial Sequence
  Synthetic
uacuggagauaucaaugagguu

SEQ ID NO: 681570 - RNA, 23 nt, Artificial Sequence
  Synthetic
uuacuggagauaucaaugagguu

SEQ ID NO: 681571 - RNA, 24 nt, Artificial Sequence
  Synthetic
uuuacuggagauaucaaugagguu

SEQ ID NO: 681572 - RNA, 18 nt, Artificial Sequence
  Synthetic
cugugaauacaugagguu

SEQ ID NO: 681573 - RNA, 19 nt, Artificial Sequence
  Synthetic
ucugugaauacaugagguu

SEQ ID NO: 681574 - RNA, 20 nt, Artificial Sequence
  Synthetic
uucugugaauacaugagguu

SEQ ID NO: 681575 - RNA, 21 nt, Artificial Sequence
  Synthetic
cuucugugaauacaugagguu

SEQ ID NO: 681576 - RNA, 22 nt, Artificial Sequence
  Synthetic
acuucugugaauacaugagguu

SEQ ID NO: 681577 - RNA, 23 nt, Artificial Sequence
  Synthetic
uacuucugugaauacaugagguu

SEQ ID NO: 681578 - RNA, 24 nt, Artificial Sequence
  Synthetic
uuacuucugugaauacaugagguu

SEQ ID NO: 681579 - RNA, 18 nt, Artificial Sequence
  Synthetic
gguggaucaccugagguu

SEQ ID NO: 681580 - RNA, 19 nt, Artificial Sequence
  Synthetic
ggguggaucaccugagguu

SEQ ID NO: 681581 - RNA, 20 nt, Artificial Sequence
  Synthetic
cggguggaucaccugagguu

SEQ ID NO: 681582 - RNA, 21 nt, Artificial Sequence
  Synthetic
gcggguggaucaccugagguu

SEQ ID NO: 681583 - RNA, 22 nt, Artificial Sequence
  Synthetic
ggcggguggaucaccugagguu

SEQ ID NO: 681584 - RNA, 23 nt, Artificial Sequence
  Synthetic
aggcggguggaucaccugagguu

SEQ ID NO: 681585 - RNA, 24 nt, Artificial Sequence
  Synthetic
gaggcggguggaucaccugagguu

SEQ ID NO: 681586 - RNA, 18 nt, Artificial Sequence
  Synthetic
acuugggaggcugagguu

SEQ ID NO: 681587 - RNA, 19 nt, Artificial Sequence
  Synthetic
uacuugggaggcugagguu

SEQ ID NO: 681588 - RNA, 20 nt, Artificial Sequence
  Synthetic
cuacuugggaggcugagguu

SEQ ID NO: 681589 - RNA, 21 nt, Artificial Sequence
  Synthetic
gcuacuugggaggcugagguu

SEQ ID NO: 681590 - RNA, 22 nt, Artificial Sequence
  Synthetic
ugcuacuugggaggcugagguu

SEQ ID NO: 681591 - RNA, 23 nt, Artificial Sequence
  Synthetic
cugcuacuugggaggcugagguu

SEQ ID NO: 681592 - RNA, 24 nt, Artificial Sequence
  Synthetic
ucugcuacuugggaggcugagguu

SEQ ID NO: 681593 - RNA, 18 nt, Artificial Sequence
  Synthetic
aaugauggcucugagguu

SEQ ID NO: 681594 - RNA, 19 nt, Artificial Sequence
  Synthetic
aaaugauggcucugagguu

SEQ ID NO: 681595 - RNA, 20 nt, Artificial Sequence
  Synthetic
caaaugauggcucugagguu

SEQ ID NO: 681596 - RNA, 21 nt, Artificial Sequence
  Synthetic
ucaaaugauggcucugagguu

SEQ ID NO: 681597 - RNA, 22 nt, Artificial Sequence
  Synthetic
uucaaaugauggcucugagguu

SEQ ID NO: 681598 - RNA, 23 nt, Artificial Sequence
  Synthetic
auucaaaugauggcucugagguu

SEQ ID NO: 681599 - RNA, 24 nt, Artificial Sequence
  Synthetic
aauucaaaugauggcucugagguu

SEQ ID NO: 681600 - RNA, 18 nt, Artificial Sequence
  Synthetic
ccagaugcuggugagguu

SEQ ID NO: 681601 - RNA, 19 nt, Artificial Sequence
  Synthetic
accagaugcuggugagguu

SEQ ID NO: 681602 - RNA, 20 nt, Artificial Sequence
  Synthetic
uaccagaugcuggugagguu

SEQ ID NO: 681603 - RNA, 21 nt, Artificial Sequence
  Synthetic
auaccagaugcuggugagguu

SEQ ID NO: 681604 - RNA, 22 nt, Artificial Sequence
  Synthetic
aauaccagaugcuggugagguu

SEQ ID NO: 681605 - RNA, 23 nt, Artificial Sequence
  Synthetic
aaauaccagaugcuggugagguu

SEQ ID NO: 681606 - RNA, 24 nt, Artificial Sequence
  Synthetic
aaaauaccagaugcuggugagguu

SEQ ID NO: 681607 - RNA, 18 nt, Artificial Sequence
  Synthetic
aaaaacauuaaauagguu

SEQ ID NO: 681608 - RNA, 19 nt, Artificial Sequence
  Synthetic
aaaaaacauuaaauagguu

SEQ ID NO: 681609 - RNA, 20 nt, Artificial Sequence
  Synthetic
aaaaaaacauuaaauagguu

SEQ ID NO: 681610 - RNA, 21 nt, Artificial Sequence
  Synthetic
gaaaaaaacauuaaauagguu

SEQ ID NO: 681611 - RNA, 22 nt, Artificial Sequence
  Synthetic
ugaaaaaaacauuaaauagguu

SEQ ID NO: 681612 - RNA, 23 nt, Artificial Sequence
  Synthetic
uugaaaaaaacauuaaauagguu

SEQ ID NO: 681613 - RNA, 24 nt, Artificial Sequence
  Synthetic
guugaaaaaaacauuaaauagguu

SEQ ID NO: 681614 - RNA, 18 nt, Artificial Sequence
  Synthetic
aauagauuauaauagguu

SEQ ID NO: 681615 - RNA, 19 nt, Artificial Sequence
  Synthetic
gaauagauuauaauagguu

SEQ ID NO: 681616 - RNA, 20 nt, Artificial Sequence
  Synthetic
cgaauagauuauaauagguu

SEQ ID NO: 681617 - RNA, 21 nt, Artificial Sequence
  Synthetic
acgaauagauuauaauagguu

SEQ ID NO: 681618 - RNA, 22 nt, Artificial Sequence
  Synthetic
gacgaauagauuauaauagguu

SEQ ID NO: 681619 - RNA, 23 nt, Artificial Sequence
  Synthetic
agacgaauagauuauaauagguu

SEQ ID NO: 681620 - RNA, 24 nt, Artificial Sequence
  Synthetic
gagacgaauagauuauaauagguu

SEQ ID NO: 681621 - RNA, 18 nt, Artificial Sequence
  Synthetic
uaccauauaacauagguu

SEQ ID NO: 681622 - RNA, 19 nt, Artificial Sequence
  Synthetic
uuaccauauaacauagguu

SEQ ID NO: 681623 - RNA, 20 nt, Artificial Sequence
  Synthetic
uuuaccauauaacauagguu

SEQ ID NO: 681624 - RNA, 21 nt, Artificial Sequence
  Synthetic
auuuaccauauaacauagguu

SEQ ID NO: 681625 - RNA, 22 nt, Artificial Sequence
  Synthetic
cauuuaccauauaacauagguu

SEQ ID NO: 681626 - RNA, 23 nt, Artificial Sequence
  Synthetic
acauuuaccauauaacauagguu

SEQ ID NO: 681627 - RNA, 24 nt, Artificial Sequence
  Synthetic
cacauuuaccauauaacauagguu

SEQ ID NO: 681628 - RNA, 18 nt, Artificial Sequence
  Synthetic
cuccuuucagcauagguu

SEQ ID NO: 681629 - RNA, 19 nt, Artificial Sequence
  Synthetic
ccuccuuucagcauagguu

SEQ ID NO: 681630 - RNA, 20 nt, Artificial Sequence
  Synthetic
gccuccuuucagcauagguu

SEQ ID NO: 681631 - RNA, 21 nt, Artificial Sequence
  Synthetic
agccuccuuucagcauagguu

SEQ ID NO: 681632 - RNA, 22 nt, Artificial Sequence
  Synthetic
uagccuccuuucagcauagguu

SEQ ID NO: 681633 - RNA, 23 nt, Artificial Sequence
  Synthetic
guagccuccuuucagcauagguu

SEQ ID NO: 681634 - RNA, 24 nt, Artificial Sequence
  Synthetic
uguagccuccuuucagcauagguu

SEQ ID NO: 681635 - RNA, 18 nt, Artificial Sequence
  Synthetic
ccuaauccucccuagguu

SEQ ID NO: 681636 - RNA, 19 nt, Artificial Sequence
  Synthetic
cccuaauccucccuagguu

SEQ ID NO: 681637 - RNA, 20 nt, Artificial Sequence
  Synthetic
ucccuaauccucccuagguu

SEQ ID NO: 681638 - RNA, 21 nt, Artificial Sequence
  Synthetic
aucccuaauccucccuagguu

SEQ ID NO: 681639 - RNA, 22 nt, Artificial Sequence
  Synthetic
gaucccuaauccucccuagguu

SEQ ID NO: 681640 - RNA, 23 nt, Artificial Sequence
  Synthetic
ugaucccuaauccucccuagguu

SEQ ID NO: 681641 - RNA, 24 nt, Artificial Sequence
  Synthetic
uugaucccuaauccucccuagguu

SEQ ID NO: 681642 - RNA, 18 nt, Artificial Sequence
  Synthetic
ggccugucuugcuagguu

SEQ ID NO: 681643 - RNA, 19 nt, Artificial Sequence
  Synthetic
uggccugucuugcuagguu

SEQ ID NO: 681644 - RNA, 20 nt, Artificial Sequence
  Synthetic
uuggccugucuugcuagguu

SEQ ID NO: 681645 - RNA, 21 nt, Artificial Sequence
  Synthetic
guuggccugucuugcuagguu

SEQ ID NO: 681646 - RNA, 22 nt, Artificial Sequence
  Synthetic
uguuggccugucuugcuagguu

SEQ ID NO: 681647 - RNA, 23 nt, Artificial Sequence
  Synthetic
auguuggccugucuugcuagguu

SEQ ID NO: 681648 - RNA, 24 nt, Artificial Sequence
  Synthetic
aauguuggccugucuugcuagguu

SEQ ID NO: 681649 - RNA, 18 nt, Artificial Sequence
  Synthetic
caaacacugaucuagguu

SEQ ID NO: 681650 - RNA, 19 nt, Artificial Sequence
  Synthetic
ccaaacacugaucuagguu

SEQ ID NO: 681651 - RNA, 20 nt, Artificial Sequence
  Synthetic
gccaaacacugaucuagguu

SEQ ID NO: 681652 - RNA, 21 nt, Artificial Sequence
  Synthetic
ugccaaacacugaucuagguu

SEQ ID NO: 681653 - RNA, 22 nt, Artificial Sequence
  Synthetic
gugccaaacacugaucuagguu

SEQ ID NO: 681654 - RNA, 23 nt, Artificial Sequence
  Synthetic
ugugccaaacacugaucuagguu

SEQ ID NO: 681655 - RNA, 24 nt, Artificial Sequence
  Synthetic
uugugccaaacacugaucuagguu

SEQ ID NO: 681656 - RNA, 18 nt, Artificial Sequence
  Synthetic
uuaucagaugaguagguu

SEQ ID NO: 681657 - RNA, 19 nt, Artificial Sequence
  Synthetic
uuuaucagaugaguagguu

SEQ ID NO: 681658 - RNA, 20 nt, Artificial Sequence
  Synthetic
cuuuaucagaugaguagguu

SEQ ID NO: 681659 - RNA, 21 nt, Artificial Sequence
  Synthetic
ccuuuaucagaugaguagguu

SEQ ID NO: 681660 - RNA, 22 nt, Artificial Sequence
  Synthetic
cccuuuaucagaugaguagguu

SEQ ID NO: 681661 - RNA, 23 nt, Artificial Sequence
  Synthetic
gcccuuuaucagaugaguagguu

SEQ ID NO: 681662 - RNA, 24 nt, Artificial Sequence
  Synthetic
agcccuuuaucagaugaguagguu

SEQ ID NO: 681663 - RNA, 18 nt, Artificial Sequence
  Synthetic
agacccaaaauguagguu

SEQ ID NO: 681664 - RNA, 19 nt, Artificial Sequence
  Synthetic
gagacccaaaauguagguu

SEQ ID NO: 681665 - RNA, 20 nt, Artificial Sequence
  Synthetic
ggagacccaaaauguagguu

SEQ ID NO: 681666 - RNA, 21 nt, Artificial Sequence
  Synthetic
aggagacccaaaauguagguu

SEQ ID NO: 681667 - RNA, 22 nt, Artificial Sequence
  Synthetic
aaggagacccaaaauguagguu

SEQ ID NO: 681668 - RNA, 23 nt, Artificial Sequence
  Synthetic
aaaggagacccaaaauguagguu

SEQ ID NO: 681669 - RNA, 24 nt, Artificial Sequence
  Synthetic
aaaaggagacccaaaauguagguu

SEQ ID NO: 681670 - RNA, 18 nt, Artificial Sequence
  Synthetic
agucccuuuguguagguu

SEQ ID NO: 681671 - RNA, 19 nt, Artificial Sequence
  Synthetic
aagucccuuuguguagguu

SEQ ID NO: 681672 - RNA, 20 nt, Artificial Sequence
  Synthetic
uaagucccuuuguguagguu

SEQ ID NO: 681673 - RNA, 21 nt, Artificial Sequence
  Synthetic
cuaagucccuuuguguagguu

SEQ ID NO: 681674 - RNA, 22 nt, Artificial Sequence
  Synthetic
ccuaagucccuuuguguagguu

SEQ ID NO: 681675 - RNA, 23 nt, Artificial Sequence
  Synthetic
cccuaagucccuuuguguagguu

SEQ ID NO: 681676 - RNA, 24 nt, Artificial Sequence
  Synthetic
gcccuaagucccuuuguguagguu

SEQ ID NO: 681677 - RNA, 18 nt, Artificial Sequence
  Synthetic
auacaaaaaaauuagguu

SEQ ID NO: 681678 - RNA, 19 nt, Artificial Sequence
  Synthetic
uauacaaaaaaauuagguu

SEQ ID NO: 681679 - RNA, 20 nt, Artificial Sequence
  Synthetic
uuauacaaaaaaauuagguu

SEQ ID NO: 681680 - RNA, 21 nt, Artificial Sequence
  Synthetic
auuauacaaaaaaauuagguu

SEQ ID NO: 681681 - RNA, 22 nt, Artificial Sequence
  Synthetic
aauuauacaaaaaaauuagguu

SEQ ID NO: 681682 - RNA, 23 nt, Artificial Sequence
  Synthetic
uaauuauacaaaaaaauuagguu

SEQ ID NO: 681683 - RNA, 24 nt, Artificial Sequence
  Synthetic
cuaauuauacaaaaaaauuagguu

SEQ ID NO: 681684 - RNA, 18 nt, Artificial Sequence
  Synthetic
uaacuuuuaaauuagguu

SEQ ID NO: 681685 - RNA, 19 nt, Artificial Sequence
  Synthetic
auaacuuuuaaauuagguu

SEQ ID NO: 681686 - RNA, 20 nt, Artificial Sequence
  Synthetic
uauaacuuuuaaauuagguu

SEQ ID NO: 681687 - RNA, 21 nt, Artificial Sequence
  Synthetic
uuauaacuuuuaaauuagguu

SEQ ID NO: 681688 - RNA, 22 nt, Artificial Sequence
  Synthetic
uuuauaacuuuuaaauuagguu

SEQ ID NO: 681689 - RNA, 23 nt, Artificial Sequence
  Synthetic
uuuuauaacuuuuaaauuagguu

SEQ ID NO: 681690 - RNA, 24 nt, Artificial Sequence
  Synthetic
auuuuauaacuuuuaaauuagguu

SEQ ID NO: 681691 - RNA, 18 nt, Artificial Sequence
  Synthetic
uugcaccacuauuagguu

SEQ ID NO: 681692 - RNA, 19 nt, Artificial Sequence
  Synthetic
cuugcaccacuauuagguu

SEQ ID NO: 681693 - RNA, 20 nt, Artificial Sequence
  Synthetic
ucuugcaccacuauuagguu

SEQ ID NO: 681694 - RNA, 21 nt, Artificial Sequence
  Synthetic
aucuugcaccacuauuagguu

SEQ ID NO: 681695 - RNA, 22 nt, Artificial Sequence
  Synthetic
aaucuugcaccacuauuagguu

SEQ ID NO: 681696 - RNA, 23 nt, Artificial Sequence
  Synthetic
aaaucuugcaccacuauuagguu

SEQ ID NO: 681697 - RNA, 24 nt, Artificial Sequence
  Synthetic
aaaaucuugcaccacuauuagguu

SEQ ID NO: 681698 - RNA, 18 nt, Artificial Sequence
  Synthetic
auuacuaacauuuagguu

SEQ ID NO: 681699 - RNA, 19 nt, Artificial Sequence
  Synthetic
cauuacuaacauuuagguu

SEQ ID NO: 681700 - RNA, 20 nt, Artificial Sequence
  Synthetic
gcauuacuaacauuuagguu

SEQ ID NO: 681701 - RNA, 21 nt, Artificial Sequence
  Synthetic
agcauuacuaacauuuagguu

SEQ ID NO: 681702 - RNA, 22 nt, Artificial Sequence
  Synthetic
uagcauuacuaacauuuagguu

SEQ ID NO: 681703 - RNA, 23 nt, Artificial Sequence
  Synthetic
uuagcauuacuaacauuuagguu

SEQ ID NO: 681704 - RNA, 24 nt, Artificial Sequence
  Synthetic
uuuagcauuacuaacauuuagguu

SEQ ID NO: 681705 - RNA, 18 nt, Artificial Sequence
  Synthetic
aaguugggacauacgguu

SEQ ID NO: 681706 - RNA, 19 nt, Artificial Sequence
  Synthetic
aaaguugggacauacgguu

SEQ ID NO: 681707 - RNA, 20 nt, Artificial Sequence
  Synthetic
aaaaguugggacauacgguu

SEQ ID NO: 681708 - RNA, 21 nt, Artificial Sequence
  Synthetic
aaaaaguugggacauacgguu

SEQ ID NO: 681709 - RNA, 22 nt, Artificial Sequence
  Synthetic
gaaaaaguugggacauacgguu

SEQ ID NO: 681710 - RNA, 23 nt, Artificial Sequence
  Synthetic
ggaaaaaguugggacauacgguu

SEQ ID NO: 681711 - RNA, 24 nt, Artificial Sequence
  Synthetic
aggaaaaaguugggacauacgguu

SEQ ID NO: 681712 - RNA, 18 nt, Artificial Sequence
  Synthetic
ccaguaugggaaaggguu

SEQ ID NO: 681713 - RNA, 19 nt, Artificial Sequence
  Synthetic
cccaguaugggaaaggguu

SEQ ID NO: 681714 - RNA, 20 nt, Artificial Sequence
  Synthetic
gcccaguaugggaaaggguu

SEQ ID NO: 681715 - RNA, 21 nt, Artificial Sequence
  Synthetic
ugcccaguaugggaaaggguu

SEQ ID NO: 681716 - RNA, 22 nt, Artificial Sequence
  Synthetic
cugcccaguaugggaaaggguu

SEQ ID NO: 681717 - RNA, 23 nt, Artificial Sequence
  Synthetic
acugcccaguaugggaaaggguu

SEQ ID NO: 681718 - RNA, 24 nt, Artificial Sequence
  Synthetic
cacugcccaguaugggaaaggguu

SEQ ID NO: 681719 - RNA, 18 nt, Artificial Sequence
  Synthetic
ugucguuuugaaaggguu

SEQ ID NO: 681720 - RNA, 19 nt, Artificial Sequence
  Synthetic
augucguuuugaaaggguu

SEQ ID NO: 681721 - RNA, 20 nt, Artificial Sequence
  Synthetic
aaugucguuuugaaaggguu

SEQ ID NO: 681722 - RNA, 21 nt, Artificial Sequence
  Synthetic
aaaugucguuuugaaaggguu

SEQ ID NO: 681723 - RNA, 22 nt, Artificial Sequence
  Synthetic
gaaaugucguuuugaaaggguu

SEQ ID NO: 681724 - RNA, 23 nt, Artificial Sequence
  Synthetic
ggaaaugucguuuugaaaggguu

SEQ ID NO: 681725 - RNA, 24 nt, Artificial Sequence
  Synthetic
gggaaaugucguuuugaaaggguu

SEQ ID NO: 681726 - RNA, 18 nt, Artificial Sequence
  Synthetic
uugaggcggccaaggguu

SEQ ID NO: 681727 - RNA, 19 nt, Artificial Sequence
  Synthetic
auugaggcggccaaggguu

SEQ ID NO: 681728 - RNA, 20 nt, Artificial Sequence
  Synthetic
aauugaggcggccaaggguu

SEQ ID NO: 681729 - RNA, 21 nt, Artificial Sequence
  Synthetic
aaauugaggcggccaaggguu

SEQ ID NO: 681730 - RNA, 22 nt, Artificial Sequence
  Synthetic
aaaauugaggcggccaaggguu

SEQ ID NO: 681731 - RNA, 23 nt, Artificial Sequence
  Synthetic
aaaaauugaggcggccaaggguu

SEQ ID NO: 681732 - RNA, 24 nt, Artificial Sequence
  Synthetic
aaaaaauugaggcggccaaggguu

SEQ ID NO: 681733 - RNA, 18 nt, Artificial Sequence
  Synthetic
aaaaugguuuuaaggguu

SEQ ID NO: 681734 - RNA, 19 nt, Artificial Sequence
  Synthetic
aaaaaugguuuuaaggguu

SEQ ID NO: 681735 - RNA, 20 nt, Artificial Sequence
  Synthetic
caaaaaugguuuuaaggguu

SEQ ID NO: 681736 - RNA, 21 nt, Artificial Sequence
  Synthetic
acaaaaaugguuuuaaggguu

SEQ ID NO: 681737 - RNA, 22 nt, Artificial Sequence
  Synthetic
uacaaaaaugguuuuaaggguu

SEQ ID NO: 681738 - RNA, 23 nt, Artificial Sequence
  Synthetic
cuacaaaaaugguuuuaaggguu

SEQ ID NO: 681739 - RNA, 24 nt, Artificial Sequence
  Synthetic
gcuacaaaaaugguuuuaaggguu

SEQ ID NO: 681740 - RNA, 18 nt, Artificial Sequence
  Synthetic
ugguuaauucccaggguu

SEQ ID NO: 681741 - RNA, 19 nt, Artificial Sequence
  Synthetic
uugguuaauucccaggguu

SEQ ID NO: 681742 - RNA, 20 nt, Artificial Sequence
  Synthetic
uuugguuaauucccaggguu

SEQ ID NO: 681743 - RNA, 21 nt, Artificial Sequence
  Synthetic
cuuugguuaauucccaggguu

SEQ ID NO: 681744 - RNA, 22 nt, Artificial Sequence
  Synthetic
ccuuugguuaauucccaggguu

SEQ ID NO: 681745 - RNA, 23 nt, Artificial Sequence
  Synthetic
gccuuugguuaauucccaggguu

SEQ ID NO: 681746 - RNA, 24 nt, Artificial Sequence
  Synthetic
agccuuugguuaauucccaggguu

SEQ ID NO: 681747 - RNA, 18 nt, Artificial Sequence
  Synthetic
guucagaacugcaggguu

SEQ ID NO: 681748 - RNA, 19 nt, Artificial Sequence
  Synthetic
gguucagaacugcaggguu

SEQ ID NO: 681749 - RNA, 20 nt, Artificial Sequence
  Synthetic
ugguucagaacugcaggguu

SEQ ID NO: 681750 - RNA, 21 nt, Artificial Sequence
  Synthetic
cugguucagaacugcaggguu

SEQ ID NO: 681751 - RNA, 22 nt, Artificial Sequence
  Synthetic
acugguucagaacugcaggguu

SEQ ID NO: 681752 - RNA, 23 nt, Artificial Sequence
  Synthetic
cacugguucagaacugcaggguu

SEQ ID NO: 681753 - RNA, 24 nt, Artificial Sequence
  Synthetic
gcacugguucagaacugcaggguu

SEQ ID NO: 681754 - RNA, 18 nt, Artificial Sequence
  Synthetic
uauauuugacucaggguu

SEQ ID NO: 681755 - RNA, 19 nt, Artificial Sequence
  Synthetic
cuauauuugacucaggguu

SEQ ID NO: 681756 - RNA, 20 nt, Artificial Sequence
  Synthetic
ccuauauuugacucaggguu

SEQ ID NO: 681757 - RNA, 21 nt, Artificial Sequence
  Synthetic
accuauauuugacucaggguu

SEQ ID NO: 681758 - RNA, 22 nt, Artificial Sequence
  Synthetic
aaccuauauuugacucaggguu

SEQ ID NO: 681759 - RNA, 23 nt, Artificial Sequence
  Synthetic
caaccuauauuugacucaggguu

SEQ ID NO: 681760 - RNA, 24 nt, Artificial Sequence
  Synthetic
ccaaccuauauuugacucaggguu

SEQ ID NO: 681761 - RNA, 18 nt, Artificial Sequence
  Synthetic
auccagugugucaggguu

SEQ ID NO: 681762 - RNA, 19 nt, Artificial Sequence
  Synthetic
cauccagugugucaggguu

SEQ ID NO: 681763 - RNA, 20 nt, Artificial Sequence
  Synthetic
acauccagugugucaggguu

SEQ ID NO: 681764 - RNA, 21 nt, Artificial Sequence
  Synthetic
aacauccagugugucaggguu

SEQ ID NO: 681765 - RNA, 22 nt, Artificial Sequence
  Synthetic
aaacauccagugugucaggguu

SEQ ID NO: 681766 - RNA, 23 nt, Artificial Sequence
  Synthetic
aaaacauccagugugucaggguu

SEQ ID NO: 681767 - RNA, 24 nt, Artificial Sequence
  Synthetic
aaaaacauccagugugucaggguu

SEQ ID NO: 681768 - RNA, 18 nt, Artificial Sequence
  Synthetic
ugagaagaagggaggguu

SEQ ID NO: 681769 - RNA, 19 nt, Artificial Sequence
  Synthetic
augagaagaagggaggguu

SEQ ID NO: 681770 - RNA, 20 nt, Artificial Sequence
  Synthetic
aaugagaagaagggaggguu

SEQ ID NO: 681771 - RNA, 21 nt, Artificial Sequence
  Synthetic
gaaugagaagaagggaggguu

SEQ ID NO: 681772 - RNA, 22 nt, Artificial Sequence
  Synthetic
agaaugagaagaagggaggguu

SEQ ID NO: 681773 - RNA, 23 nt, Artificial Sequence
  Synthetic
uagaaugagaagaagggaggguu

SEQ ID NO: 681774 - RNA, 24 nt, Artificial Sequence
  Synthetic
auagaaugagaagaagggaggguu

SEQ ID NO: 681775 - RNA, 18 nt, Artificial Sequence
  Synthetic
caaaggauucuucggguu

SEQ ID NO: 681776 - RNA, 19 nt, Artificial Sequence
  Synthetic
acaaaggauucuucggguu

SEQ ID NO: 681777 - RNA, 20 nt, Artificial Sequence
  Synthetic
uacaaaggauucuucggguu

SEQ ID NO: 681778 - RNA, 21 nt, Artificial Sequence
  Synthetic
cuacaaaggauucuucggguu

SEQ ID NO: 681779 - RNA, 22 nt, Artificial Sequence
  Synthetic
acuacaaaggauucuucggguu

SEQ ID NO: 681780 - RNA, 23 nt, Artificial Sequence
  Synthetic
cacuacaaaggauucuucggguu

SEQ ID NO: 681781 - RNA, 24 nt, Artificial Sequence
  Synthetic
gcacuacaaaggauucuucggguu

SEQ ID NO: 681782 - RNA, 18 nt, Artificial Sequence
  Synthetic
aguugagucauagggguu

SEQ ID NO: 681783 - RNA, 19 nt, Artificial Sequence
  Synthetic
aaguugagucauagggguu

SEQ ID NO: 681784 - RNA, 20 nt, Artificial Sequence
  Synthetic
gaaguugagucauagggguu

SEQ ID NO: 681785 - RNA, 21 nt, Artificial Sequence
  Synthetic
agaaguugagucauagggguu

SEQ ID NO: 681786 - RNA, 22 nt, Artificial Sequence
  Synthetic
gagaaguugagucauagggguu

SEQ ID NO: 681787 - RNA, 23 nt, Artificial Sequence
  Synthetic
ugagaaguugagucauagggguu

SEQ ID NO: 681788 - RNA, 24 nt, Artificial Sequence
  Synthetic
augagaaguugagucauagggguu

SEQ ID NO: 681789 - RNA, 18 nt, Artificial Sequence
  Synthetic
ccccuaagacuagggguu

SEQ ID NO: 681790 - RNA, 19 nt, Artificial Sequence
  Synthetic
accccuaagacuagggguu

SEQ ID NO: 681791 - RNA, 20 nt, Artificial Sequence
  Synthetic
aaccccuaagacuagggguu

SEQ ID NO: 681792 - RNA, 21 nt, Artificial Sequence
  Synthetic
caaccccuaagacuagggguu

SEQ ID NO: 681793 - RNA, 22 nt, Artificial Sequence
  Synthetic
ccaaccccuaagacuagggguu

SEQ ID NO: 681794 - RNA, 23 nt, Artificial Sequence
  Synthetic
gccaaccccuaagacuagggguu

SEQ ID NO: 681795 - RNA, 24 nt, Artificial Sequence
  Synthetic
ggccaaccccuaagacuagggguu

SEQ ID NO: 681796 - RNA, 18 nt, Artificial Sequence
  Synthetic
ggaaagcggguagggguu

SEQ ID NO: 681797 - RNA, 19 nt, Artificial Sequence
  Synthetic
aggaaagcggguagggguu

SEQ ID NO: 681798 - RNA, 20 nt, Artificial Sequence
  Synthetic
aaggaaagcggguagggguu

SEQ ID NO: 681799 - RNA, 21 nt, Artificial Sequence
  Synthetic
aaaggaaagcggguagggguu

SEQ ID NO: 681800 - RNA, 22 nt, Artificial Sequence
  Synthetic
caaaggaaagcggguagggguu

SEQ ID NO: 681801 - RNA, 23 nt, Artificial Sequence
  Synthetic
gcaaaggaaagcggguagggguu

SEQ ID NO: 681802 - RNA, 24 nt, Artificial Sequence
  Synthetic
agcaaaggaaagcggguagggguu

SEQ ID NO: 681803 - RNA, 18 nt, Artificial Sequence
  Synthetic
aaggguaguggggggguu

SEQ ID NO: 681804 - RNA, 19 nt, Artificial Sequence
  Synthetic
gaaggguaguggggggguu

SEQ ID NO: 681805 - RNA, 20 nt, Artificial Sequence
  Synthetic
ugaaggguaguggggggguu

SEQ ID NO: 681806 - RNA, 21 nt, Artificial Sequence
  Synthetic
gugaaggguaguggggggguu

SEQ ID NO: 681807 - RNA, 22 nt, Artificial Sequence
  Synthetic
ugugaaggguaguggggggguu

SEQ ID NO: 681808 - RNA, 23 nt, Artificial Sequence
  Synthetic
cugugaaggguaguggggggguu

SEQ ID NO: 681809 - RNA, 24 nt, Artificial Sequence
  Synthetic
gcugugaaggguaguggggggguu

SEQ ID NO: 681810 - RNA, 18 nt, Artificial Sequence
  Synthetic
cucaggggaugggggguu

SEQ ID NO: 681811 - RNA, 19 nt, Artificial Sequence
  Synthetic
ucucaggggaugggggguu

SEQ ID NO: 681812 - RNA, 20 nt, Artificial Sequence
  Synthetic
cucucaggggaugggggguu

SEQ ID NO: 681813 - RNA, 21 nt, Artificial Sequence
  Synthetic
ccucucaggggaugggggguu

SEQ ID NO: 681814 - RNA, 22 nt, Artificial Sequence
  Synthetic
gccucucaggggaugggggguu

SEQ ID NO: 681815 - RNA, 23 nt, Artificial Sequence
  Synthetic
ggccucucaggggaugggggguu

SEQ ID NO: 681816 - RNA, 24 nt, Artificial Sequence
  Synthetic
gggccucucaggggaugggggguu

SEQ ID NO: 681817 - RNA, 18 nt, Artificial Sequence
  Synthetic
augguagugguggggguu

SEQ ID NO: 681818 - RNA, 19 nt, Artificial Sequence
  Synthetic
aaugguagugguggggguu

SEQ ID NO: 681819 - RNA, 20 nt, Artificial Sequence
  Synthetic
aaaugguagugguggggguu

SEQ ID NO: 681820 - RNA, 21 nt, Artificial Sequence
  Synthetic
gaaaugguagugguggggguu

SEQ ID NO: 681821 - RNA, 22 nt, Artificial Sequence
  Synthetic
cgaaaugguagugguggggguu

SEQ ID NO: 681822 - RNA, 23 nt, Artificial Sequence
  Synthetic
ccgaaaugguagugguggggguu

SEQ ID NO: 681823 - RNA, 24 nt, Artificial Sequence
  Synthetic
cccgaaaugguagugguggggguu

SEQ ID NO: 681824 - RNA, 18 nt, Artificial Sequence
  Synthetic
uggggagcauuggggguu

SEQ ID NO: 681825 - RNA, 19 nt, Artificial Sequence
  Synthetic
auggggagcauuggggguu

SEQ ID NO: 681826 - RNA, 20 nt, Artificial Sequence
  Synthetic
gauggggagcauuggggguu

SEQ ID NO: 681827 - RNA, 21 nt, Artificial Sequence
  Synthetic
ggauggggagcauuggggguu

SEQ ID NO: 681828 - RNA, 22 nt, Artificial Sequence
  Synthetic
gggauggggagcauuggggguu

SEQ ID NO: 681829 - RNA, 23 nt, Artificial Sequence
  Synthetic
ggggauggggagcauuggggguu

SEQ ID NO: 681830 - RNA, 24 nt, Artificial Sequence
  Synthetic
gggggauggggagcauuggggguu

SEQ ID NO: 681831 - RNA, 18 nt, Artificial Sequence
  Synthetic
ucaggggcgggugggguu

SEQ ID NO: 681832 - RNA, 19 nt, Artificial Sequence
  Synthetic
aucaggggcgggugggguu

SEQ ID NO: 681833 - RNA, 20 nt, Artificial Sequence
  Synthetic
gaucaggggcgggugggguu

SEQ ID NO: 681834 - RNA, 21 nt, Artificial Sequence
  Synthetic
ggaucaggggcgggugggguu

SEQ ID NO: 681835 - RNA, 22 nt, Artificial Sequence
  Synthetic
uggaucaggggcgggugggguu

SEQ ID NO: 681836 - RNA, 23 nt, Artificial Sequence
  Synthetic
auggaucaggggcgggugggguu

SEQ ID NO: 681837 - RNA, 24 nt, Artificial Sequence
  Synthetic
cauggaucaggggcgggugggguu

SEQ ID NO: 681838 - RNA, 18 nt, Artificial Sequence
  Synthetic
aaagaaagaauugggguu

SEQ ID NO: 681839 - RNA, 19 nt, Artificial Sequence
  Synthetic
aaaagaaagaauugggguu

SEQ ID NO: 681840 - RNA, 20 nt, Artificial Sequence
  Synthetic
aaaaagaaagaauugggguu

SEQ ID NO: 681841 - RNA, 21 nt, Artificial Sequence
  Synthetic
aaaaaagaaagaauugggguu

SEQ ID NO: 681842 - RNA, 22 nt, Artificial Sequence
  Synthetic
uaaaaaagaaagaauugggguu

SEQ ID NO: 681843 - RNA, 23 nt, Artificial Sequence
  Synthetic
uuaaaaaagaaagaauugggguu

SEQ ID NO: 681844 - RNA, 24 nt, Artificial Sequence
  Synthetic
uuuaaaaaagaaagaauugggguu

SEQ ID NO: 681845 - RNA, 18 nt, Artificial Sequence
  Synthetic
caaaauacuacauggguu

SEQ ID NO: 681846 - RNA, 19 nt, Artificial Sequence
  Synthetic
gcaaaauacuacauggguu

SEQ ID NO: 681847 - RNA, 20 nt, Artificial Sequence
  Synthetic
agcaaaauacuacauggguu

SEQ ID NO: 681848 - RNA, 21 nt, Artificial Sequence
  Synthetic
uagcaaaauacuacauggguu

SEQ ID NO: 681849 - RNA, 22 nt, Artificial Sequence
  Synthetic
auagcaaaauacuacauggguu

SEQ ID NO: 681850 - RNA, 23 nt, Artificial Sequence
  Synthetic
aauagcaaaauacuacauggguu

SEQ ID NO: 681851 - RNA, 24 nt, Artificial Sequence
  Synthetic
caauagcaaaauacuacauggguu

SEQ ID NO: 681852 - RNA, 18 nt, Artificial Sequence
  Synthetic
uauaccuauaccuggguu

SEQ ID NO: 681853 - RNA, 19 nt, Artificial Sequence
  Synthetic
auauaccuauaccuggguu

SEQ ID NO: 681854 - RNA, 20 nt, Artificial Sequence
  Synthetic
cauauaccuauaccuggguu

SEQ ID NO: 681855 - RNA, 21 nt, Artificial Sequence
  Synthetic
acauauaccuauaccuggguu

SEQ ID NO: 681856 - RNA, 22 nt, Artificial Sequence
  Synthetic
cacauauaccuauaccuggguu

SEQ ID NO: 681857 - RNA, 23 nt, Artificial Sequence
  Synthetic
gcacauauaccuauaccuggguu

SEQ ID NO: 681858 - RNA, 24 nt, Artificial Sequence
  Synthetic
ggcacauauaccuauaccuggguu

SEQ ID NO: 681859 - RNA, 18 nt, Artificial Sequence
  Synthetic
accuccgccugcuggguu

SEQ ID NO: 681860 - RNA, 19 nt, Artificial Sequence
  Synthetic
aaccuccgccugcuggguu

SEQ ID NO: 681861 - RNA, 20 nt, Artificial Sequence
  Synthetic
caaccuccgccugcuggguu

SEQ ID NO: 681862 - RNA, 21 nt, Artificial Sequence
  Synthetic
gcaaccuccgccugcuggguu

SEQ ID NO: 681863 - RNA, 22 nt, Artificial Sequence
  Synthetic
ugcaaccuccgccugcuggguu

SEQ ID NO: 681864 - RNA, 23 nt, Artificial Sequence
  Synthetic
cugcaaccuccgccugcuggguu

SEQ ID NO: 681865 - RNA, 24 nt, Artificial Sequence
  Synthetic
acugcaaccuccgccugcuggguu

SEQ ID NO: 681866 - RNA, 18 nt, Artificial Sequence
  Synthetic
aaaguauucaaguggguu

SEQ ID NO: 681867 - RNA, 19 nt, Artificial Sequence
  Synthetic
gaaaguauucaaguggguu

SEQ ID NO: 681868 - RNA, 20 nt, Artificial Sequence
  Synthetic
ugaaaguauucaaguggguu

SEQ ID NO: 681869 - RNA, 21 nt, Artificial Sequence
  Synthetic
augaaaguauucaaguggguu

SEQ ID NO: 681870 - RNA, 22 nt, Artificial Sequence
  Synthetic
gaugaaaguauucaaguggguu

SEQ ID NO: 681871 - RNA, 23 nt, Artificial Sequence
  Synthetic
agaugaaaguauucaaguggguu

SEQ ID NO: 681872 - RNA, 24 nt, Artificial Sequence
  Synthetic
aagaugaaaguauucaaguggguu

SEQ ID NO: 681873 - RNA, 18 nt, Artificial Sequence
  Synthetic
aaauuuacccaguggguu

SEQ ID NO: 681874 - RNA, 19 nt, Artificial Sequence
  Synthetic
uaaauuuacccaguggguu

SEQ ID NO: 681875 - RNA, 20 nt, Artificial Sequence
  Synthetic
auaaauuuacccaguggguu

SEQ ID NO: 681876 - RNA, 21 nt, Artificial Sequence
  Synthetic
cauaaauuuacccaguggguu

SEQ ID NO: 681877 - RNA, 22 nt, Artificial Sequence
  Synthetic
gcauaaauuuacccaguggguu

SEQ ID NO: 681878 - RNA, 23 nt, Artificial Sequence
  Synthetic
agcauaaauuuacccaguggguu

SEQ ID NO: 681879 - RNA, 24 nt, Artificial Sequence
  Synthetic
gagcauaaauuuacccaguggguu

SEQ ID NO: 681880 - RNA, 18 nt, Artificial Sequence
  Synthetic
cagggacaagaguggguu

SEQ ID NO: 681881 - RNA, 19 nt, Artificial Sequence
  Synthetic
ccagggacaagaguggguu

SEQ ID NO: 681882 - RNA, 20 nt, Artificial Sequence
  Synthetic
uccagggacaagaguggguu

SEQ ID NO: 681883 - RNA, 21 nt, Artificial Sequence
  Synthetic
uuccagggacaagaguggguu

SEQ ID NO: 681884 - RNA, 22 nt, Artificial Sequence
  Synthetic
uuuccagggacaagaguggguu

SEQ ID NO: 681885 - RNA, 23 nt, Artificial Sequence
  Synthetic
uuuuccagggacaagaguggguu

SEQ ID NO: 681886 - RNA, 24 nt, Artificial Sequence
  Synthetic
uuuuuccagggacaagaguggguu

SEQ ID NO: 681887 - RNA, 18 nt, Artificial Sequence
  Synthetic
aaggucauaugguggguu

SEQ ID NO: 681888 - RNA, 19 nt, Artificial Sequence
  Synthetic
gaaggucauaugguggguu

SEQ ID NO: 681889 - RNA, 20 nt, Artificial Sequence
  Synthetic
ggaaggucauaugguggguu

SEQ ID NO: 681890 - RNA, 21 nt, Artificial Sequence
  Synthetic
gggaaggucauaugguggguu

SEQ ID NO: 681891 - RNA, 22 nt, Artificial Sequence
  Synthetic
cgggaaggucauaugguggguu

SEQ ID NO: 681892 - RNA, 23 nt, Artificial Sequence
  Synthetic
gcgggaaggucauaugguggguu

SEQ ID NO: 681893 - RNA, 24 nt, Artificial Sequence
  Synthetic
agcgggaaggucauaugguggguu

SEQ ID NO: 681894 - RNA, 18 nt, Artificial Sequence
  Synthetic
aguuugcagauguggguu

SEQ ID NO: 681895 - RNA, 19 nt, Artificial Sequence
  Synthetic
aaguuugcagauguggguu

SEQ ID NO: 681896 - RNA, 20 nt, Artificial Sequence
  Synthetic
uaaguuugcagauguggguu

SEQ ID NO: 681897 - RNA, 21 nt, Artificial Sequence
  Synthetic
guaaguuugcagauguggguu

SEQ ID NO: 681898 - RNA, 22 nt, Artificial Sequence
  Synthetic
aguaaguuugcagauguggguu

SEQ ID NO: 681899 - RNA, 23 nt, Artificial Sequence
  Synthetic
aaguaaguuugcagauguggguu

SEQ ID NO: 681900 - RNA, 24 nt, Artificial Sequence
  Synthetic
aaaguaaguuugcagauguggguu

SEQ ID NO: 681901 - RNA, 18 nt, Artificial Sequence
  Synthetic
gaaaguuauacuuggguu

SEQ ID NO: 681902 - RNA, 19 nt, Artificial Sequence
  Synthetic
ggaaaguuauacuuggguu

SEQ ID NO: 681903 - RNA, 20 nt, Artificial Sequence
  Synthetic
gggaaaguuauacuuggguu

SEQ ID NO: 681904 - RNA, 21 nt, Artificial Sequence
  Synthetic
ugggaaaguuauacuuggguu

SEQ ID NO: 681905 - RNA, 22 nt, Artificial Sequence
  Synthetic
gugggaaaguuauacuuggguu

SEQ ID NO: 681906 - RNA, 23 nt, Artificial Sequence
  Synthetic
ugugggaaaguuauacuuggguu

SEQ ID NO: 681907 - RNA, 24 nt, Artificial Sequence
  Synthetic
cugugggaaaguuauacuuggguu

SEQ ID NO: 681908 - RNA, 18 nt, Artificial Sequence
  Synthetic
cuuauuucauuuuggguu

SEQ ID NO: 681909 - RNA, 19 nt, Artificial Sequence
  Synthetic
ucuuauuucauuuuggguu

SEQ ID NO: 681910 - RNA, 20 nt, Artificial Sequence
  Synthetic
uucuuauuucauuuuggguu

SEQ ID NO: 681911 - RNA, 21 nt, Artificial Sequence
  Synthetic
cuucuuauuucauuuuggguu

SEQ ID NO: 681912 - RNA, 22 nt, Artificial Sequence
  Synthetic
acuucuuauuucauuuuggguu

SEQ ID NO: 681913 - RNA, 23 nt, Artificial Sequence
  Synthetic
gacuucuuauuucauuuuggguu

SEQ ID NO: 681914 - RNA, 24 nt, Artificial Sequence
  Synthetic
agacuucuuauuucauuuuggguu

SEQ ID NO: 681915 - RNA, 18 nt, Artificial Sequence
  Synthetic
uuuacauauuaaaugguu

SEQ ID NO: 681916 - RNA, 19 nt, Artificial Sequence
  Synthetic
auuuacauauuaaaugguu

SEQ ID NO: 681917 - RNA, 20 nt, Artificial Sequence
  Synthetic
gauuuacauauuaaaugguu

SEQ ID NO: 681918 - RNA, 21 nt, Artificial Sequence
  Synthetic
ggauuuacauauuaaaugguu

SEQ ID NO: 681919 - RNA, 22 nt, Artificial Sequence
  Synthetic
gggauuuacauauuaaaugguu

SEQ ID NO: 681920 - RNA, 23 nt, Artificial Sequence
  Synthetic
ugggauuuacauauuaaaugguu

SEQ ID NO: 681921 - RNA, 24 nt, Artificial Sequence
  Synthetic
augggauuuacauauuaaaugguu

SEQ ID NO: 681922 - RNA, 18 nt, Artificial Sequence
  Synthetic
uggcuguacuacaugguu

SEQ ID NO: 681923 - RNA, 19 nt, Artificial Sequence
  Synthetic
guggcuguacuacaugguu

SEQ ID NO: 681924 - RNA, 20 nt, Artificial Sequence
  Synthetic
aguggcuguacuacaugguu

SEQ ID NO: 681925 - RNA, 21 nt, Artificial Sequence
  Synthetic
gaguggcuguacuacaugguu

SEQ ID NO: 681926 - RNA, 22 nt, Artificial Sequence
  Synthetic
agaguggcuguacuacaugguu

SEQ ID NO: 681927 - RNA, 23 nt, Artificial Sequence
  Synthetic
gagaguggcuguacuacaugguu

SEQ ID NO: 681928 - RNA, 24 nt, Artificial Sequence
  Synthetic
ggagaguggcuguacuacaugguu

SEQ ID NO: 681929 - RNA, 18 nt, Artificial Sequence
  Synthetic
cgggaacagcucaugguu

SEQ ID NO: 681930 - RNA, 19 nt, Artificial Sequence
  Synthetic
ucgggaacagcucaugguu

SEQ ID NO: 681931 - RNA, 20 nt, Artificial Sequence
  Synthetic
aucgggaacagcucaugguu

SEQ ID NO: 681932 - RNA, 21 nt, Artificial Sequence
  Synthetic
gaucgggaacagcucaugguu

SEQ ID NO: 681933 - RNA, 22 nt, Artificial Sequence
  Synthetic
ggaucgggaacagcucaugguu

SEQ ID NO: 681934 - RNA, 23 nt, Artificial Sequence
  Synthetic
aggaucgggaacagcucaugguu

SEQ ID NO: 681935 - RNA, 24 nt, Artificial Sequence
  Synthetic
gaggaucgggaacagcucaugguu

SEQ ID NO: 681936 - RNA, 18 nt, Artificial Sequence
  Synthetic
auaauuuuugucaugguu

SEQ ID NO: 681937 - RNA, 19 nt, Artificial Sequence
  Synthetic
aauaauuuuugucaugguu

SEQ ID NO: 681938 - RNA, 20 nt, Artificial Sequence
  Synthetic
caauaauuuuugucaugguu

SEQ ID NO: 681939 - RNA, 21 nt, Artificial Sequence
  Synthetic
ucaauaauuuuugucaugguu

SEQ ID NO: 681940 - RNA, 22 nt, Artificial Sequence
  Synthetic
uucaauaauuuuugucaugguu

SEQ ID NO: 681941 - RNA, 23 nt, Artificial Sequence
  Synthetic
uuucaauaauuuuugucaugguu

SEQ ID NO: 681942 - RNA, 24 nt, Artificial Sequence
  Synthetic
uuuucaauaauuuuugucaugguu

SEQ ID NO: 681943 - RNA, 18 nt, Artificial Sequence
  Synthetic
gcgugggaggcgaugguu

SEQ ID NO: 681944 - RNA, 19 nt, Artificial Sequence
  Synthetic
ugcgugggaggcgaugguu

SEQ ID NO: 681945 - RNA, 20 nt, Artificial Sequence
  Synthetic
gugcgugggaggcgaugguu

SEQ ID NO: 681946 - RNA, 21 nt, Artificial Sequence
  Synthetic
ggugcgugggaggcgaugguu

SEQ ID NO: 681947 - RNA, 22 nt, Artificial Sequence
  Synthetic
aggugcgugggaggcgaugguu

SEQ ID NO: 681948 - RNA, 23 nt, Artificial Sequence
  Synthetic
gaggugcgugggaggcgaugguu

SEQ ID NO: 681949 - RNA, 24 nt, Artificial Sequence
  Synthetic
agaggugcgugggaggcgaugguu

SEQ ID NO: 681950 - RNA, 18 nt, Artificial Sequence
  Synthetic
aggugagauuggaugguu

SEQ ID NO: 681951 - RNA, 19 nt, Artificial Sequence
  Synthetic
uaggugagauuggaugguu

SEQ ID NO: 681952 - RNA, 20 nt, Artificial Sequence
  Synthetic
guaggugagauuggaugguu

SEQ ID NO: 681953 - RNA, 21 nt, Artificial Sequence
  Synthetic
gguaggugagauuggaugguu

SEQ ID NO: 681954 - RNA, 22 nt, Artificial Sequence
  Synthetic
agguaggugagauuggaugguu

SEQ ID NO: 681955 - RNA, 23 nt, Artificial Sequence
  Synthetic
gagguaggugagauuggaugguu

SEQ ID NO: 681956 - RNA, 24 nt, Artificial Sequence
  Synthetic
ugagguaggugagauuggaugguu

SEQ ID NO: 681957 - RNA, 18 nt, Artificial Sequence
  Synthetic
ucaugagaucugaugguu

SEQ ID NO: 681958 - RNA, 19 nt, Artificial Sequence
  Synthetic
cucaugagaucugaugguu

SEQ ID NO: 681959 - RNA, 20 nt, Artificial Sequence
  Synthetic
ucucaugagaucugaugguu

SEQ ID NO: 681960 - RNA, 21 nt, Artificial Sequence
  Synthetic
gucucaugagaucugaugguu

SEQ ID NO: 681961 - RNA, 22 nt, Artificial Sequence
  Synthetic
agucucaugagaucugaugguu

SEQ ID NO: 681962 - RNA, 23 nt, Artificial Sequence
  Synthetic
aagucucaugagaucugaugguu

SEQ ID NO: 681963 - RNA, 24 nt, Artificial Sequence
  Synthetic
uaagucucaugagaucugaugguu

SEQ ID NO: 681964 - RNA, 18 nt, Artificial Sequence
  Synthetic
gugagauucaaacugguu

SEQ ID NO: 681965 - RNA, 19 nt, Artificial Sequence
  Synthetic
ugugagauucaaacugguu

SEQ ID NO: 681966 - RNA, 20 nt, Artificial Sequence
  Synthetic
uugugagauucaaacugguu

SEQ ID NO: 681967 - RNA, 21 nt, Artificial Sequence
  Synthetic
uuugugagauucaaacugguu

SEQ ID NO: 681968 - RNA, 22 nt, Artificial Sequence
  Synthetic
uuuugugagauucaaacugguu

SEQ ID NO: 681969 - RNA, 23 nt, Artificial Sequence
  Synthetic
auuuugugagauucaaacugguu

SEQ ID NO: 681970 - RNA, 24 nt, Artificial Sequence
  Synthetic
uauuuugugagauucaaacugguu

SEQ ID NO: 681971 - RNA, 18 nt, Artificial Sequence
  Synthetic
auuuaucaacaacugguu

SEQ ID NO: 681972 - RNA, 19 nt, Artificial Sequence
  Synthetic
cauuuaucaacaacugguu

SEQ ID NO: 681973 - RNA, 20 nt, Artificial Sequence
  Synthetic
gcauuuaucaacaacugguu

SEQ ID NO: 681974 - RNA, 21 nt, Artificial Sequence
  Synthetic
ugcauuuaucaacaacugguu

SEQ ID NO: 681975 - RNA, 22 nt, Artificial Sequence
  Synthetic
cugcauuuaucaacaacugguu

SEQ ID NO: 681976 - RNA, 23 nt, Artificial Sequence
  Synthetic
acugcauuuaucaacaacugguu

SEQ ID NO: 681977 - RNA, 24 nt, Artificial Sequence
  Synthetic
aacugcauuuaucaacaacugguu

SEQ ID NO: 681978 - RNA, 18 nt, Artificial Sequence
  Synthetic
auugaaugccaacugguu

SEQ ID NO: 681979 - RNA, 19 nt, Artificial Sequence
  Synthetic
cauugaaugccaacugguu

SEQ ID NO: 681980 - RNA, 20 nt, Artificial Sequence
  Synthetic
ucauugaaugccaacugguu

SEQ ID NO: 681981 - RNA, 21 nt, Artificial Sequence
  Synthetic
aucauugaaugccaacugguu

SEQ ID NO: 681982 - RNA, 22 nt, Artificial Sequence
  Synthetic
aaucauugaaugccaacugguu

SEQ ID NO: 681983 - RNA, 23 nt, Artificial Sequence
  Synthetic
uaaucauugaaugccaacugguu

SEQ ID NO: 681984 - RNA, 24 nt, Artificial Sequence
  Synthetic
uuaaucauugaaugccaacugguu

SEQ ID NO: 681985 - RNA, 18 nt, Artificial Sequence
  Synthetic
ugaaggauagcacugguu

SEQ ID NO: 681986 - RNA, 19 nt, Artificial Sequence
  Synthetic
uugaaggauagcacugguu

SEQ ID NO: 681987 - RNA, 20 nt, Artificial Sequence
  Synthetic
uuugaaggauagcacugguu

SEQ ID NO: 681988 - RNA, 21 nt, Artificial Sequence
  Synthetic
cuuugaaggauagcacugguu

SEQ ID NO: 681989 - RNA, 22 nt, Artificial Sequence
  Synthetic
ucuuugaaggauagcacugguu

SEQ ID NO: 681990 - RNA, 23 nt, Artificial Sequence
  Synthetic
uucuuugaaggauagcacugguu

SEQ ID NO: 681991 - RNA, 24 nt, Artificial Sequence
  Synthetic
auucuuugaaggauagcacugguu

SEQ ID NO: 681992 - RNA, 18 nt, Artificial Sequence
  Synthetic
uucuuaugugcacugguu

SEQ ID NO: 681993 - RNA, 19 nt, Artificial Sequence
  Synthetic
guucuuaugugcacugguu

SEQ ID NO: 681994 - RNA, 20 nt, Artificial Sequence
  Synthetic
uguucuuaugugcacugguu

SEQ ID NO: 681995 - RNA, 21 nt, Artificial Sequence
  Synthetic
auguucuuaugugcacugguu

SEQ ID NO: 681996 - RNA, 22 nt, Artificial Sequence
  Synthetic
uauguucuuaugugcacugguu

SEQ ID NO: 681997 - RNA, 23 nt, Artificial Sequence
  Synthetic
auauguucuuaugugcacugguu

SEQ ID NO: 681998 - RNA, 24 nt, Artificial Sequence
  Synthetic
cauauguucuuaugugcacugguu

SEQ ID NO: 681999 - RNA, 18 nt, Artificial Sequence
  Synthetic
cggcaccagagacugguu

SEQ ID NO: 682000 - RNA, 19 nt, Artificial Sequence
  Synthetic
ucggcaccagagacugguu

SEQ ID NO: 682001 - RNA, 20 nt, Artificial Sequence
  Synthetic
uucggcaccagagacugguu

SEQ ID NO: 682002 - RNA, 21 nt, Artificial Sequence
  Synthetic
uuucggcaccagagacugguu

SEQ ID NO: 682003 - RNA, 22 nt, Artificial Sequence
  Synthetic
uuuucggcaccagagacugguu

SEQ ID NO: 682004 - RNA, 23 nt, Artificial Sequence
  Synthetic
cuuuucggcaccagagacugguu

SEQ ID NO: 682005 - RNA, 24 nt, Artificial Sequence
  Synthetic
ccuuuucggcaccagagacugguu

SEQ ID NO: 682006 - RNA, 18 nt, Artificial Sequence
  Synthetic
cuuaauacaguacugguu

SEQ ID NO: 682007 - RNA, 19 nt, Artificial Sequence
  Synthetic
ccuuaauacaguacugguu

SEQ ID NO: 682008 - RNA, 20 nt, Artificial Sequence
  Synthetic
uccuuaauacaguacugguu

SEQ ID NO: 682009 - RNA, 21 nt, Artificial Sequence
  Synthetic
auccuuaauacaguacugguu

SEQ ID NO: 682010 - RNA, 22 nt, Artificial Sequence
  Synthetic
aauccuuaauacaguacugguu

SEQ ID NO: 682011 - RNA, 23 nt, Artificial Sequence
  Synthetic
aaauccuuaauacaguacugguu

SEQ ID NO: 682012 - RNA, 24 nt, Artificial Sequence
  Synthetic
aaaauccuuaauacaguacugguu

SEQ ID NO: 682013 - RNA, 18 nt, Artificial Sequence
  Synthetic
gauuucggcgcccugguu

SEQ ID NO: 682014 - RNA, 19 nt, Artificial Sequence
  Synthetic
ggauuucggcgcccugguu

SEQ ID NO: 682015 - RNA, 20 nt, Artificial Sequence
  Synthetic
uggauuucggcgcccugguu

SEQ ID NO: 682016 - RNA, 21 nt, Artificial Sequence
  Synthetic
auggauuucggcgcccugguu

SEQ ID NO: 682017 - RNA, 22 nt, Artificial Sequence
  Synthetic
aauggauuucggcgcccugguu

SEQ ID NO: 682018 - RNA, 23 nt, Artificial Sequence
  Synthetic
aaauggauuucggcgcccugguu

SEQ ID NO: 682019 - RNA, 24 nt, Artificial Sequence
  Synthetic
uaaauggauuucggcgcccugguu

SEQ ID NO: 682020 - RNA, 18 nt, Artificial Sequence
  Synthetic
acaaaauugucccugguu

SEQ ID NO: 682021 - RNA, 19 nt, Artificial Sequence
  Synthetic
gacaaaauugucccugguu

SEQ ID NO: 682022 - RNA, 20 nt, Artificial Sequence
  Synthetic
ggacaaaauugucccugguu

SEQ ID NO: 682023 - RNA, 21 nt, Artificial Sequence
  Synthetic
gggacaaaauugucccugguu

SEQ ID NO: 682024 - RNA, 22 nt, Artificial Sequence
  Synthetic
ggggacaaaauugucccugguu

SEQ ID NO: 682025 - RNA, 23 nt, Artificial Sequence
  Synthetic
uggggacaaaauugucccugguu

SEQ ID NO: 682026 - RNA, 24 nt, Artificial Sequence
  Synthetic
guggggacaaaauugucccugguu

SEQ ID NO: 682027 - RNA, 18 nt, Artificial Sequence
  Synthetic
uaugcugcccagcugguu

SEQ ID NO: 682028 - RNA, 19 nt, Artificial Sequence
  Synthetic
uuaugcugcccagcugguu

SEQ ID NO: 682029 - RNA, 20 nt, Artificial Sequence
  Synthetic
guuaugcugcccagcugguu

SEQ ID NO: 682030 - RNA, 21 nt, Artificial Sequence
  Synthetic
uguuaugcugcccagcugguu

SEQ ID NO: 682031 - RNA, 22 nt, Artificial Sequence
  Synthetic
uuguuaugcugcccagcugguu

SEQ ID NO: 682032 - RNA, 23 nt, Artificial Sequence
  Synthetic
guuguuaugcugcccagcugguu

SEQ ID NO: 682033 - RNA, 24 nt, Artificial Sequence
  Synthetic
aguuguuaugcugcccagcugguu

SEQ ID NO: 682034 - RNA, 18 nt, Artificial Sequence
  Synthetic
guguugcccaggcugguu

SEQ ID NO: 682035 - RNA, 19 nt, Artificial Sequence
  Synthetic
uguguugcccaggcugguu

SEQ ID NO: 682036 - RNA, 20 nt, Artificial Sequence
  Synthetic
cuguguugcccaggcugguu

SEQ ID NO: 682037 - RNA, 21 nt, Artificial Sequence
  Synthetic
acuguguugcccaggcugguu

SEQ ID NO: 682038 - RNA, 22 nt, Artificial Sequence
  Synthetic
cacuguguugcccaggcugguu

SEQ ID NO: 682039 - RNA, 23 nt, Artificial Sequence
  Synthetic
ucacuguguugcccaggcugguu

SEQ ID NO: 682040 - RNA, 24 nt, Artificial Sequence
  Synthetic
cucacuguguugcccaggcugguu

SEQ ID NO: 682041 - RNA, 18 nt, Artificial Sequence
  Synthetic
auguuagccaggcugguu

SEQ ID NO: 682042 - RNA, 19 nt, Artificial Sequence
  Synthetic
cauguuagccaggcugguu

SEQ ID NO: 682043 - RNA, 20 nt, Artificial Sequence
  Synthetic
ccauguuagccaggcugguu

SEQ ID NO: 682044 - RNA, 21 nt, Artificial Sequence
  Synthetic
accauguuagccaggcugguu

SEQ ID NO: 682045 - RNA, 22 nt, Artificial Sequence
  Synthetic
caccauguuagccaggcugguu

SEQ ID NO: 682046 - RNA, 23 nt, Artificial Sequence
  Synthetic
ucaccauguuagccaggcugguu

SEQ ID NO: 682047 - RNA, 24 nt, Artificial Sequence
  Synthetic
uucaccauguuagccaggcugguu

SEQ ID NO: 682048 - RNA, 18 nt, Artificial Sequence
  Synthetic
auguuggccaggcugguu

SEQ ID NO: 682049 - RNA, 19 nt, Artificial Sequence
  Synthetic
uauguuggccaggcugguu

SEQ ID NO: 682050 - RNA, 20 nt, Artificial Sequence
  Synthetic
cuauguuggccaggcugguu

SEQ ID NO: 682051 - RNA, 21 nt, Artificial Sequence
  Synthetic
acuauguuggccaggcugguu

SEQ ID NO: 682052 - RNA, 22 nt, Artificial Sequence
  Synthetic
cacuauguuggccaggcugguu

SEQ ID NO: 682053 - RNA, 23 nt, Artificial Sequence
  Synthetic
ucacuauguuggccaggcugguu

SEQ ID NO: 682054 - RNA, 24 nt, Artificial Sequence
  Synthetic
uucacuauguuggccaggcugguu

SEQ ID NO: 682055 - RNA, 18 nt, Artificial Sequence
  Synthetic
acuagcugguaucugguu

SEQ ID NO: 682056 - RNA, 19 nt, Artificial Sequence
  Synthetic
uacuagcugguaucugguu

SEQ ID NO: 682057 - RNA, 20 nt, Artificial Sequence
  Synthetic
guacuagcugguaucugguu

SEQ ID NO: 682058 - RNA, 21 nt, Artificial Sequence
  Synthetic
uguacuagcugguaucugguu

SEQ ID NO: 682059 - RNA, 22 nt, Artificial Sequence
  Synthetic
cuguacuagcugguaucugguu

SEQ ID NO: 682060 - RNA, 23 nt, Artificial Sequence
  Synthetic
ucuguacuagcugguaucugguu

SEQ ID NO: 682061 - RNA, 24 nt, Artificial Sequence
  Synthetic
aucuguacuagcugguaucugguu

SEQ ID NO: 682062 - RNA, 18 nt, Artificial Sequence
  Synthetic
ugauaucuuugucugguu

SEQ ID NO: 682063 - RNA, 19 nt, Artificial Sequence
  Synthetic
gugauaucuuugucugguu

SEQ ID NO: 682064 - RNA, 20 nt, Artificial Sequence
  Synthetic
ugugauaucuuugucugguu

SEQ ID NO: 682065 - RNA, 21 nt, Artificial Sequence
  Synthetic
uugugauaucuuugucugguu

SEQ ID NO: 682066 - RNA, 22 nt, Artificial Sequence
  Synthetic
cuugugauaucuuugucugguu

SEQ ID NO: 682067 - RNA, 23 nt, Artificial Sequence
  Synthetic
ucuugugauaucuuugucugguu

SEQ ID NO: 682068 - RNA, 24 nt, Artificial Sequence
  Synthetic
uucuugugauaucuuugucugguu

SEQ ID NO: 682069 - RNA, 18 nt, Artificial Sequence
  Synthetic
uccagccucauucugguu

SEQ ID NO: 682070 - RNA, 19 nt, Artificial Sequence
  Synthetic
cuccagccucauucugguu

SEQ ID NO: 682071 - RNA, 20 nt, Artificial Sequence
  Synthetic
ccuccagccucauucugguu

SEQ ID NO: 682072 - RNA, 21 nt, Artificial Sequence
  Synthetic
uccuccagccucauucugguu

SEQ ID NO: 682073 - RNA, 22 nt, Artificial Sequence
  Synthetic
auccuccagccucauucugguu

SEQ ID NO: 682074 - RNA, 23 nt, Artificial Sequence
  Synthetic
gauccuccagccucauucugguu

SEQ ID NO: 682075 - RNA, 24 nt, Artificial Sequence
  Synthetic
agauccuccagccucauucugguu

SEQ ID NO: 682076 - RNA, 18 nt, Artificial Sequence
  Synthetic
aaaaagcuauuucugguu

SEQ ID NO: 682077 - RNA, 19 nt, Artificial Sequence
  Synthetic
caaaaagcuauuucugguu

SEQ ID NO: 682078 - RNA, 20 nt, Artificial Sequence
  Synthetic
acaaaaagcuauuucugguu

SEQ ID NO: 682079 - RNA, 21 nt, Artificial Sequence
  Synthetic
uacaaaaagcuauuucugguu

SEQ ID NO: 682080 - RNA, 22 nt, Artificial Sequence
  Synthetic
cuacaaaaagcuauuucugguu

SEQ ID NO: 682081 - RNA, 23 nt, Artificial Sequence
  Synthetic
gcuacaaaaagcuauuucugguu

SEQ ID NO: 682082 - RNA, 24 nt, Artificial Sequence
  Synthetic
agcuacaaaaagcuauuucugguu

SEQ ID NO: 682083 - RNA, 18 nt, Artificial Sequence
  Synthetic
aguggaugaaaagugguu

SEQ ID NO: 682084 - RNA, 19 nt, Artificial Sequence
  Synthetic
uaguggaugaaaagugguu

SEQ ID NO: 682085 - RNA, 20 nt, Artificial Sequence
  Synthetic
uuaguggaugaaaagugguu

SEQ ID NO: 682086 - RNA, 21 nt, Artificial Sequence
  Synthetic
cuuaguggaugaaaagugguu

SEQ ID NO: 682087 - RNA, 22 nt, Artificial Sequence
  Synthetic
ucuuaguggaugaaaagugguu

SEQ ID NO: 682088 - RNA, 23 nt, Artificial Sequence
  Synthetic
uucuuaguggaugaaaagugguu

SEQ ID NO: 682089 - RNA, 24 nt, Artificial Sequence
  Synthetic
guucuuaguggaugaaaagugguu

SEQ ID NO: 682090 - RNA, 18 nt, Artificial Sequence
  Synthetic
acuaacagucaagugguu

SEQ ID NO: 682091 - RNA, 19 nt, Artificial Sequence
  Synthetic
aacuaacagucaagugguu

SEQ ID NO: 682092 - RNA, 20 nt, Artificial Sequence
  Synthetic
uaacuaacagucaagugguu

SEQ ID NO: 682093 - RNA, 21 nt, Artificial Sequence
  Synthetic
auaacuaacagucaagugguu

SEQ ID NO: 682094 - RNA, 22 nt, Artificial Sequence
  Synthetic
uauaacuaacagucaagugguu

SEQ ID NO: 682095 - RNA, 23 nt, Artificial Sequence
  Synthetic
auauaacuaacagucaagugguu

SEQ ID NO: 682096 - RNA, 24 nt, Artificial Sequence
  Synthetic
gauauaacuaacagucaagugguu

SEQ ID NO: 682097 - RNA, 18 nt, Artificial Sequence
  Synthetic
gaauacagcagagugguu

SEQ ID NO: 682098 - RNA, 19 nt, Artificial Sequence
  Synthetic
agaauacagcagagugguu

SEQ ID NO: 682099 - RNA, 20 nt, Artificial Sequence
  Synthetic
cagaauacagcagagugguu

SEQ ID NO: 682100 - RNA, 21 nt, Artificial Sequence
  Synthetic
ucagaauacagcagagugguu

SEQ ID NO: 682101 - RNA, 22 nt, Artificial Sequence
  Synthetic
gucagaauacagcagagugguu

SEQ ID NO: 682102 - RNA, 23 nt, Artificial Sequence
  Synthetic
agucagaauacagcagagugguu

SEQ ID NO: 682103 - RNA, 24 nt, Artificial Sequence
  Synthetic
aagucagaauacagcagagugguu

SEQ ID NO: 682104 - RNA, 18 nt, Artificial Sequence
  Synthetic
cuauuauaucacgugguu

SEQ ID NO: 682105 - RNA, 19 nt, Artificial Sequence
  Synthetic
ccuauuauaucacgugguu

SEQ ID NO: 682106 - RNA, 20 nt, Artificial Sequence
  Synthetic
cccuauuauaucacgugguu

SEQ ID NO: 682107 - RNA, 21 nt, Artificial Sequence
  Synthetic
ucccuauuauaucacgugguu

SEQ ID NO: 682108 - RNA, 22 nt, Artificial Sequence
  Synthetic
cucccuauuauaucacgugguu

SEQ ID NO: 682109 - RNA, 23 nt, Artificial Sequence
  Synthetic
gcucccuauuauaucacgugguu

SEQ ID NO: 682110 - RNA, 24 nt, Artificial Sequence
  Synthetic
agcucccuauuauaucacgugguu

SEQ ID NO: 682111 - RNA, 18 nt, Artificial Sequence
  Synthetic
aaauagccuggcgugguu

SEQ ID NO: 682112 - RNA, 19 nt, Artificial Sequence
  Synthetic
caaauagccuggcgugguu

SEQ ID NO: 682113 - RNA, 20 nt, Artificial Sequence
  Synthetic
acaaauagccuggcgugguu

SEQ ID NO: 682114 - RNA, 21 nt, Artificial Sequence
  Synthetic
aacaaauagccuggcgugguu

SEQ ID NO: 682115 - RNA, 22 nt, Artificial Sequence
  Synthetic
aaacaaauagccuggcgugguu

SEQ ID NO: 682116 - RNA, 23 nt, Artificial Sequence
  Synthetic
aaaacaaauagccuggcgugguu

SEQ ID NO: 682117 - RNA, 24 nt, Artificial Sequence
  Synthetic
aaaaacaaauagccuggcgugguu

SEQ ID NO: 682118 - RNA, 18 nt, Artificial Sequence
  Synthetic
gggcucuuccucgugguu

SEQ ID NO: 682119 - RNA, 19 nt, Artificial Sequence
  Synthetic
ggggcucuuccucgugguu

SEQ ID NO: 682120 - RNA, 20 nt, Artificial Sequence
  Synthetic
cggggcucuuccucgugguu

SEQ ID NO: 682121 - RNA, 21 nt, Artificial Sequence
  Synthetic
ccggggcucuuccucgugguu

SEQ ID NO: 682122 - RNA, 22 nt, Artificial Sequence
  Synthetic
uccggggcucuuccucgugguu

SEQ ID NO: 682123 - RNA, 23 nt, Artificial Sequence
  Synthetic
uuccggggcucuuccucgugguu

SEQ ID NO: 682124 - RNA, 24 nt, Artificial Sequence
  Synthetic
auuccggggcucuuccucgugguu

SEQ ID NO: 682125 - RNA, 18 nt, Artificial Sequence
  Synthetic
cauuucaugcucgugguu

SEQ ID NO: 682126 - RNA, 19 nt, Artificial Sequence
  Synthetic
acauuucaugcucgugguu

SEQ ID NO: 682127 - RNA, 20 nt, Artificial Sequence
  Synthetic
aacauuucaugcucgugguu

SEQ ID NO: 682128 - RNA, 21 nt, Artificial Sequence
  Synthetic
aaacauuucaugcucgugguu

SEQ ID NO: 682129 - RNA, 22 nt, Artificial Sequence
  Synthetic
aaaacauuucaugcucgugguu

SEQ ID NO: 682130 - RNA, 23 nt, Artificial Sequence
  Synthetic
aaaaacauuucaugcucgugguu

SEQ ID NO: 682131 - RNA, 24 nt, Artificial Sequence
  Synthetic
aaaaaacauuucaugcucgugguu

SEQ ID NO: 682132 - RNA, 18 nt, Artificial Sequence
  Synthetic
guggggccaugggugguu

SEQ ID NO: 682133 - RNA, 19 nt, Artificial Sequence
  Synthetic
gguggggccaugggugguu

SEQ ID NO: 682134 - RNA, 20 nt, Artificial Sequence
  Synthetic
ggguggggccaugggugguu

SEQ ID NO: 682135 - RNA, 21 nt, Artificial Sequence
  Synthetic
gggguggggccaugggugguu

SEQ ID NO: 682136 - RNA, 22 nt, Artificial Sequence
  Synthetic
ugggguggggccaugggugguu

SEQ ID NO: 682137 - RNA, 23 nt, Artificial Sequence
  Synthetic
gugggguggggccaugggugguu

SEQ ID NO: 682138 - RNA, 24 nt, Artificial Sequence
  Synthetic
ggugggguggggccaugggugguu

SEQ ID NO: 682139 - RNA, 18 nt, Artificial Sequence
  Synthetic
cuguauaugguggugguu

SEQ ID NO: 682140 - RNA, 19 nt, Artificial Sequence
  Synthetic
ucuguauaugguggugguu

SEQ ID NO: 682141 - RNA, 20 nt, Artificial Sequence
  Synthetic
aucuguauaugguggugguu

SEQ ID NO: 682142 - RNA, 21 nt, Artificial Sequence
  Synthetic
uaucuguauaugguggugguu

SEQ ID NO: 682143 - RNA, 22 nt, Artificial Sequence
  Synthetic
auaucuguauaugguggugguu

SEQ ID NO: 682144 - RNA, 23 nt, Artificial Sequence
  Synthetic
uauaucuguauaugguggugguu

SEQ ID NO: 682145 - RNA, 24 nt, Artificial Sequence
  Synthetic
guauaucuguauaugguggugguu

SEQ ID NO: 682146 - RNA, 18 nt, Artificial Sequence
  Synthetic
uucugcuggccugugguu

SEQ ID NO: 682147 - RNA, 19 nt, Artificial Sequence
  Synthetic
cuucugcuggccugugguu

SEQ ID NO: 682148 - RNA, 20 nt, Artificial Sequence
  Synthetic
ucuucugcuggccugugguu

SEQ ID NO: 682149 - RNA, 21 nt, Artificial Sequence
  Synthetic
uucuucugcuggccugugguu

SEQ ID NO: 682150 - RNA, 22 nt, Artificial Sequence
  Synthetic
guucuucugcuggccugugguu

SEQ ID NO: 682151 - RNA, 23 nt, Artificial Sequence
  Synthetic
aguucuucugcuggccugugguu

SEQ ID NO: 682152 - RNA, 24 nt, Artificial Sequence
  Synthetic
uaguucuucugcuggccugugguu

SEQ ID NO: 682153 - RNA, 18 nt, Artificial Sequence
  Synthetic
uacgguugaagugugguu

SEQ ID NO: 682154 - RNA, 19 nt, Artificial Sequence
  Synthetic
uuacgguugaagugugguu

SEQ ID NO: 682155 - RNA, 20 nt, Artificial Sequence
  Synthetic
cuuacgguugaagugugguu

SEQ ID NO: 682156 - RNA, 21 nt, Artificial Sequence
  Synthetic
ucuuacgguugaagugugguu

SEQ ID NO: 682157 - RNA, 22 nt, Artificial Sequence
  Synthetic
gucuuacgguugaagugugguu

SEQ ID NO: 682158 - RNA, 23 nt, Artificial Sequence
  Synthetic
ggucuuacgguugaagugugguu

SEQ ID NO: 682159 - RNA, 24 nt, Artificial Sequence
  Synthetic
uggucuuacgguugaagugugguu

SEQ ID NO: 682160 - RNA, 18 nt, Artificial Sequence
  Synthetic
ugaaaagcaucauugguu

SEQ ID NO: 682161 - RNA, 19 nt, Artificial Sequence
  Synthetic
uugaaaagcaucauugguu

SEQ ID NO: 682162 - RNA, 20 nt, Artificial Sequence
  Synthetic
uuugaaaagcaucauugguu

SEQ ID NO: 682163 - RNA, 21 nt, Artificial Sequence
  Synthetic
guuugaaaagcaucauugguu

SEQ ID NO: 682164 - RNA, 22 nt, Artificial Sequence
  Synthetic
uguuugaaaagcaucauugguu

SEQ ID NO: 682165 - RNA, 23 nt, Artificial Sequence
  Synthetic
uuguuugaaaagcaucauugguu

SEQ ID NO: 682166 - RNA, 24 nt, Artificial Sequence
  Synthetic
uuuguuugaaaagcaucauugguu

SEQ ID NO: 682167 - RNA, 18 nt, Artificial Sequence
  Synthetic
gucaaggcaugauugguu

SEQ ID NO: 682168 - RNA, 19 nt, Artificial Sequence
  Synthetic
ugucaaggcaugauugguu

SEQ ID NO: 682169 - RNA, 20 nt, Artificial Sequence
  Synthetic
uugucaaggcaugauugguu

SEQ ID NO: 682170 - RNA, 21 nt, Artificial Sequence
  Synthetic
guugucaaggcaugauugguu

SEQ ID NO: 682171 - RNA, 22 nt, Artificial Sequence
  Synthetic
uguugucaaggcaugauugguu

SEQ ID NO: 682172 - RNA, 23 nt, Artificial Sequence
  Synthetic
cuguugucaaggcaugauugguu

SEQ ID NO: 682173 - RNA, 24 nt, Artificial Sequence
  Synthetic
acuguugucaaggcaugauugguu

SEQ ID NO: 682174 - RNA, 18 nt, Artificial Sequence
  Synthetic
aaaugauuaagcuugguu

SEQ ID NO: 682175 - RNA, 19 nt, Artificial Sequence
  Synthetic
gaaaugauuaagcuugguu

SEQ ID NO: 682176 - RNA, 20 nt, Artificial Sequence
  Synthetic
agaaaugauuaagcuugguu

SEQ ID NO: 682177 - RNA, 21 nt, Artificial Sequence
  Synthetic
uagaaaugauuaagcuugguu

SEQ ID NO: 682178 - RNA, 22 nt, Artificial Sequence
  Synthetic
cuagaaaugauuaagcuugguu

SEQ ID NO: 682179 - RNA, 23 nt, Artificial Sequence
  Synthetic
gcuagaaaugauuaagcuugguu

SEQ ID NO: 682180 - RNA, 24 nt, Artificial Sequence
  Synthetic
agcuagaaaugauuaagcuugguu

SEQ ID NO: 682181 - RNA, 18 nt, Artificial Sequence
  Synthetic
aaucucauccucuugguu

SEQ ID NO: 682182 - RNA, 19 nt, Artificial Sequence
  Synthetic
uaaucucauccucuugguu

SEQ ID NO: 682183 - RNA, 20 nt, Artificial Sequence
  Synthetic
auaaucucauccucuugguu

SEQ ID NO: 682184 - RNA, 21 nt, Artificial Sequence
  Synthetic
gauaaucucauccucuugguu

SEQ ID NO: 682185 - RNA, 22 nt, Artificial Sequence
  Synthetic
agauaaucucauccucuugguu

SEQ ID NO: 682186 - RNA, 23 nt, Artificial Sequence
  Synthetic
aagauaaucucauccucuugguu

SEQ ID NO: 682187 - RNA, 24 nt, Artificial Sequence
  Synthetic
caagauaaucucauccucuugguu

SEQ ID NO: 682188 - RNA, 18 nt, Artificial Sequence
  Synthetic
uaacaucuagucuugguu

SEQ ID NO: 682189 - RNA, 19 nt, Artificial Sequence
  Synthetic
uuaacaucuagucuugguu

SEQ ID NO: 682190 - RNA, 20 nt, Artificial Sequence
  Synthetic
auuaacaucuagucuugguu

SEQ ID NO: 682191 - RNA, 21 nt, Artificial Sequence
  Synthetic
aauuaacaucuagucuugguu

SEQ ID NO: 682192 - RNA, 22 nt, Artificial Sequence
  Synthetic
caauuaacaucuagucuugguu

SEQ ID NO: 682193 - RNA, 23 nt, Artificial Sequence
  Synthetic
gcaauuaacaucuagucuugguu

SEQ ID NO: 682194 - RNA, 24 nt, Artificial Sequence
  Synthetic
ggcaauuaacaucuagucuugguu

SEQ ID NO: 682195 - RNA, 18 nt, Artificial Sequence
  Synthetic
cauuaagaaaauuugguu

SEQ ID NO: 682196 - RNA, 19 nt, Artificial Sequence
  Synthetic
acauuaagaaaauuugguu

SEQ ID NO: 682197 - RNA, 20 nt, Artificial Sequence
  Synthetic
uacauuaagaaaauuugguu

SEQ ID NO: 682198 - RNA, 21 nt, Artificial Sequence
  Synthetic
auacauuaagaaaauuugguu

SEQ ID NO: 682199 - RNA, 22 nt, Artificial Sequence
  Synthetic
uauacauuaagaaaauuugguu

SEQ ID NO: 682200 - RNA, 23 nt, Artificial Sequence
  Synthetic
auauacauuaagaaaauuugguu

SEQ ID NO: 682201 - RNA, 24 nt, Artificial Sequence
  Synthetic
uauauacauuaagaaaauuugguu

SEQ ID NO: 682202 - RNA, 18 nt, Artificial Sequence
  Synthetic
uucuaacgaauuuugguu

SEQ ID NO: 682203 - RNA, 19 nt, Artificial Sequence
  Synthetic
uuucuaacgaauuuugguu

SEQ ID NO: 682204 - RNA, 20 nt, Artificial Sequence
  Synthetic
uuuucuaacgaauuuugguu

SEQ ID NO: 682205 - RNA, 21 nt, Artificial Sequence
  Synthetic
auuuucuaacgaauuuugguu

SEQ ID NO: 682206 - RNA, 22 nt, Artificial Sequence
  Synthetic
gauuuucuaacgaauuuugguu

SEQ ID NO: 682207 - RNA, 23 nt, Artificial Sequence
  Synthetic
ugauuuucuaacgaauuuugguu

SEQ ID NO: 682208 - RNA, 24 nt, Artificial Sequence
  Synthetic
cugauuuucuaacgaauuuugguu

SEQ ID NO: 682209 - RNA, 18 nt, Artificial Sequence
  Synthetic
acugaaguaguuuugguu

SEQ ID NO: 682210 - RNA, 19 nt, Artificial Sequence
  Synthetic
uacugaaguaguuuugguu

SEQ ID NO: 682211 - RNA, 20 nt, Artificial Sequence
  Synthetic
auacugaaguaguuuugguu

SEQ ID NO: 682212 - RNA, 21 nt, Artificial Sequence
  Synthetic
aauacugaaguaguuuugguu

SEQ ID NO: 682213 - RNA, 22 nt, Artificial Sequence
  Synthetic
aaauacugaaguaguuuugguu

SEQ ID NO: 682214 - RNA, 23 nt, Artificial Sequence
  Synthetic
uaaauacugaaguaguuuugguu

SEQ ID NO: 682215 - RNA, 24 nt, Artificial Sequence
  Synthetic
auaaauacugaaguaguuuugguu

SEQ ID NO: 682216 - RNA, 18 nt, Artificial Sequence
  Synthetic
aaaacuaucuuuuugguu

SEQ ID NO: 682217 - RNA, 19 nt, Artificial Sequence
  Synthetic
caaaacuaucuuuuugguu

SEQ ID NO: 682218 - RNA, 20 nt, Artificial Sequence
  Synthetic
ccaaaacuaucuuuuugguu

SEQ ID NO: 682219 - RNA, 21 nt, Artificial Sequence
  Synthetic
cccaaaacuaucuuuuugguu

SEQ ID NO: 682220 - RNA, 22 nt, Artificial Sequence
  Synthetic
ccccaaaacuaucuuuuugguu

SEQ ID NO: 682221 - RNA, 23 nt, Artificial Sequence
  Synthetic
gccccaaaacuaucuuuuugguu

SEQ ID NO: 682222 - RNA, 24 nt, Artificial Sequence
  Synthetic
ggccccaaaacuaucuuuuugguu

SEQ ID NO: 682223 - RNA, 24 nt, Artificial Sequence
  Synthetic
aguugaaaugaaggaaaaaauguu

SEQ ID NO: 682224 - RNA, 18 nt, Artificial Sequence
  Synthetic
cuuugaaggcaaaauguu

SEQ ID NO: 682225 - RNA, 19 nt, Artificial Sequence
  Synthetic
acuuugaaggcaaaauguu

SEQ ID NO: 682226 - RNA, 20 nt, Artificial Sequence
  Synthetic
uacuuugaaggcaaaauguu

SEQ ID NO: 682227 - RNA, 21 nt, Artificial Sequence
  Synthetic
auacuuugaaggcaaaauguu

SEQ ID NO: 682228 - RNA, 22 nt, Artificial Sequence
  Synthetic
uauacuuugaaggcaaaauguu

SEQ ID NO: 682229 - RNA, 23 nt, Artificial Sequence
  Synthetic
guauacuuugaaggcaaaauguu

SEQ ID NO: 682230 - RNA, 24 nt, Artificial Sequence
  Synthetic
gguauacuuugaaggcaaaauguu

SEQ ID NO: 682231 - RNA, 18 nt, Artificial Sequence
  Synthetic
gacuauuaugaaaauguu

SEQ ID NO: 682232 - RNA, 19 nt, Artificial Sequence
  Synthetic
agacuauuaugaaaauguu

SEQ ID NO: 682233 - RNA, 20 nt, Artificial Sequence
  Synthetic
gagacuauuaugaaaauguu

SEQ ID NO: 682234 - RNA, 21 nt, Artificial Sequence
  Synthetic
ggagacuauuaugaaaauguu

SEQ ID NO: 682235 - RNA, 22 nt, Artificial Sequence
  Synthetic
uggagacuauuaugaaaauguu

SEQ ID NO: 682236 - RNA, 23 nt, Artificial Sequence
  Synthetic
guggagacuauuaugaaaauguu

SEQ ID NO: 682237 - RNA, 24 nt, Artificial Sequence
  Synthetic
gguggagacuauuaugaaaauguu

SEQ ID NO: 682238 - RNA, 18 nt, Artificial Sequence
  Synthetic
gaaaaccaauaaaauguu

SEQ ID NO: 682239 - RNA, 19 nt, Artificial Sequence
  Synthetic
ugaaaaccaauaaaauguu

SEQ ID NO: 682240 - RNA, 20 nt, Artificial Sequence
  Synthetic
gugaaaaccaauaaaauguu

SEQ ID NO: 682241 - RNA, 21 nt, Artificial Sequence
  Synthetic
agugaaaaccaauaaaauguu

SEQ ID NO: 682242 - RNA, 22 nt, Artificial Sequence
  Synthetic
aagugaaaaccaauaaaauguu

SEQ ID NO: 682243 - RNA, 23 nt, Artificial Sequence
  Synthetic
aaagugaaaaccaauaaaauguu

SEQ ID NO: 682244 - RNA, 24 nt, Artificial Sequence
  Synthetic
gaaagugaaaaccaauaaaauguu

SEQ ID NO: 682245 - RNA, 18 nt, Artificial Sequence
  Synthetic
ucaaagauauaaaauguu

SEQ ID NO: 682246 - RNA, 19 nt, Artificial Sequence
  Synthetic
gucaaagauauaaaauguu

SEQ ID NO: 682247 - RNA, 20 nt, Artificial Sequence
  Synthetic
agucaaagauauaaaauguu

SEQ ID NO: 682248 - RNA, 21 nt, Artificial Sequence
  Synthetic
aagucaaagauauaaaauguu

SEQ ID NO: 682249 - RNA, 22 nt, Artificial Sequence
  Synthetic
aaagucaaagauauaaaauguu

SEQ ID NO: 682250 - RNA, 23 nt, Artificial Sequence
  Synthetic
caaagucaaagauauaaaauguu

SEQ ID NO: 682251 - RNA, 24 nt, Artificial Sequence
  Synthetic
ucaaagucaaagauauaaaauguu

SEQ ID NO: 682252 - RNA, 18 nt, Artificial Sequence
  Synthetic
gggcaauuauaaaauguu

SEQ ID NO: 682253 - RNA, 19 nt, Artificial Sequence
  Synthetic
ugggcaauuauaaaauguu

SEQ ID NO: 682254 - RNA, 20 nt, Artificial Sequence
  Synthetic
cugggcaauuauaaaauguu

SEQ ID NO: 682255 - RNA, 21 nt, Artificial Sequence
  Synthetic
acugggcaauuauaaaauguu

SEQ ID NO: 682256 - RNA, 22 nt, Artificial Sequence
  Synthetic
uacugggcaauuauaaaauguu

SEQ ID NO: 682257 - RNA, 23 nt, Artificial Sequence
  Synthetic
guacugggcaauuauaaaauguu

SEQ ID NO: 682258 - RNA, 24 nt, Artificial Sequence
  Synthetic
uguacugggcaauuauaaaauguu

SEQ ID NO: 682259 - RNA, 18 nt, Artificial Sequence
  Synthetic
aacuuaaccuaaaauguu

SEQ ID NO: 682260 - RNA, 19 nt, Artificial Sequence
  Synthetic
aaacuuaaccuaaaauguu

SEQ ID NO: 682261 - RNA, 20 nt, Artificial Sequence
  Synthetic
aaaacuuaaccuaaaauguu

SEQ ID NO: 682262 - RNA, 21 nt, Artificial Sequence
  Synthetic
uaaaacuuaaccuaaaauguu

SEQ ID NO: 682263 - RNA, 22 nt, Artificial Sequence
  Synthetic
uuaaaacuuaaccuaaaauguu

SEQ ID NO: 682264 - RNA, 23 nt, Artificial Sequence
  Synthetic
uuuaaaacuuaaccuaaaauguu

SEQ ID NO: 682265 - RNA, 24 nt, Artificial Sequence
  Synthetic
uuuuaaaacuuaaccuaaaauguu

SEQ ID NO: 682266 - RNA, 18 nt, Artificial Sequence
  Synthetic
aguaugugaucaaauguu

SEQ ID NO: 682267 - RNA, 19 nt, Artificial Sequence
  Synthetic
aaguaugugaucaaauguu

SEQ ID NO: 682268 - RNA, 20 nt, Artificial Sequence
  Synthetic
uaaguaugugaucaaauguu

SEQ ID NO: 682269 - RNA, 21 nt, Artificial Sequence
  Synthetic
uuaaguaugugaucaaauguu

SEQ ID NO: 682270 - RNA, 22 nt, Artificial Sequence
  Synthetic
auuaaguaugugaucaaauguu

SEQ ID NO: 682271 - RNA, 23 nt, Artificial Sequence
  Synthetic
aauuaaguaugugaucaaauguu

SEQ ID NO: 682272 - RNA, 24 nt, Artificial Sequence
  Synthetic
aaauuaaguaugugaucaaauguu

SEQ ID NO: 682273 - RNA, 18 nt, Artificial Sequence
  Synthetic
aucauggacagaaauguu

SEQ ID NO: 682274 - RNA, 19 nt, Artificial Sequence
  Synthetic
caucauggacagaaauguu

SEQ ID NO: 682275 - RNA, 20 nt, Artificial Sequence
  Synthetic
acaucauggacagaaauguu

SEQ ID NO: 682276 - RNA, 21 nt, Artificial Sequence
  Synthetic
cacaucauggacagaaauguu

SEQ ID NO: 682277 - RNA, 22 nt, Artificial Sequence
  Synthetic
acacaucauggacagaaauguu

SEQ ID NO: 682278 - RNA, 23 nt, Artificial Sequence
  Synthetic
uacacaucauggacagaaauguu

SEQ ID NO: 682279 - RNA, 24 nt, Artificial Sequence
  Synthetic
uuacacaucauggacagaaauguu

SEQ ID NO: 682280 - RNA, 18 nt, Artificial Sequence
  Synthetic
gagaauaguagaaauguu

SEQ ID NO: 682281 - RNA, 19 nt, Artificial Sequence
  Synthetic
ugagaauaguagaaauguu

SEQ ID NO: 682282 - RNA, 20 nt, Artificial Sequence
  Synthetic
uugagaauaguagaaauguu

SEQ ID NO: 682283 - RNA, 21 nt, Artificial Sequence
  Synthetic
uuugagaauaguagaaauguu

SEQ ID NO: 682284 - RNA, 22 nt, Artificial Sequence
  Synthetic
cuuugagaauaguagaaauguu

SEQ ID NO: 682285 - RNA, 23 nt, Artificial Sequence
  Synthetic
ucuuugagaauaguagaaauguu

SEQ ID NO: 682286 - RNA, 24 nt, Artificial Sequence
  Synthetic
cucuuugagaauaguagaaauguu

SEQ ID NO: 682287 - RNA, 18 nt, Artificial Sequence
  Synthetic
aaauguugaggaaauguu

SEQ ID NO: 682288 - RNA, 19 nt, Artificial Sequence
  Synthetic
uaaauguugaggaaauguu

SEQ ID NO: 682289 - RNA, 20 nt, Artificial Sequence
  Synthetic
auaaauguugaggaaauguu

SEQ ID NO: 682290 - RNA, 21 nt, Artificial Sequence
  Synthetic
cauaaauguugaggaaauguu

SEQ ID NO: 682291 - RNA, 22 nt, Artificial Sequence
  Synthetic
acauaaauguugaggaaauguu

SEQ ID NO: 682292 - RNA, 23 nt, Artificial Sequence
  Synthetic
cacauaaauguugaggaaauguu

SEQ ID NO: 682293 - RNA, 24 nt, Artificial Sequence
  Synthetic
ccacauaaauguugaggaaauguu

SEQ ID NO: 682294 - RNA, 18 nt, Artificial Sequence
  Synthetic
aauaauaaaauaaauguu

SEQ ID NO: 682295 - RNA, 19 nt, Artificial Sequence
  Synthetic
aaauaauaaaauaaauguu

SEQ ID NO: 682296 - RNA, 20 nt, Artificial Sequence
  Synthetic
aaaauaauaaaauaaauguu

SEQ ID NO: 682297 - RNA, 21 nt, Artificial Sequence
  Synthetic
aaaaauaauaaaauaaauguu

SEQ ID NO: 682298 - RNA, 22 nt, Artificial Sequence
  Synthetic
aaaaaauaauaaaauaaauguu

SEQ ID NO: 682299 - RNA, 23 nt, Artificial Sequence
  Synthetic
caaaaaauaauaaaauaaauguu

SEQ ID NO: 682300 - RNA, 24 nt, Artificial Sequence
  Synthetic
acaaaaaauaauaaaauaaauguu

SEQ ID NO: 682301 - RNA, 18 nt, Artificial Sequence
  Synthetic
ggaagccacauaaauguu

SEQ ID NO: 682302 - RNA, 19 nt, Artificial Sequence
  Synthetic
aggaagccacauaaauguu

SEQ ID NO: 682303 - RNA, 20 nt, Artificial Sequence
  Synthetic
uaggaagccacauaaauguu

SEQ ID NO: 682304 - RNA, 21 nt, Artificial Sequence
  Synthetic
auaggaagccacauaaauguu

SEQ ID NO: 682305 - RNA, 22 nt, Artificial Sequence
  Synthetic
aauaggaagccacauaaauguu

SEQ ID NO: 682306 - RNA, 23 nt, Artificial Sequence
  Synthetic
aaauaggaagccacauaaauguu

SEQ ID NO: 682307 - RNA, 24 nt, Artificial Sequence
  Synthetic
uaaauaggaagccacauaaauguu

SEQ ID NO: 682308 - RNA, 18 nt, Artificial Sequence
  Synthetic
auuaacauugccaauguu

SEQ ID NO: 682309 - RNA, 19 nt, Artificial Sequence
  Synthetic
aauuaacauugccaauguu

SEQ ID NO: 682310 - RNA, 20 nt, Artificial Sequence
  Synthetic
aaauuaacauugccaauguu

SEQ ID NO: 682311 - RNA, 21 nt, Artificial Sequence
  Synthetic
caaauuaacauugccaauguu

SEQ ID NO: 682312 - RNA, 22 nt, Artificial Sequence
  Synthetic
acaaauuaacauugccaauguu

SEQ ID NO: 682313 - RNA, 23 nt, Artificial Sequence
  Synthetic
gacaaauuaacauugccaauguu

SEQ ID NO: 682314 - RNA, 24 nt, Artificial Sequence
  Synthetic
ugacaaauuaacauugccaauguu

SEQ ID NO: 682315 - RNA, 18 nt, Artificial Sequence
  Synthetic
uaauccugcuucaauguu

SEQ ID NO: 682316 - RNA, 19 nt, Artificial Sequence
  Synthetic
uuaauccugcuucaauguu

SEQ ID NO: 682317 - RNA, 20 nt, Artificial Sequence
  Synthetic
auuaauccugcuucaauguu

SEQ ID NO: 682318 - RNA, 21 nt, Artificial Sequence
  Synthetic
uauuaauccugcuucaauguu

SEQ ID NO: 682319 - RNA, 22 nt, Artificial Sequence
  Synthetic
auauuaauccugcuucaauguu

SEQ ID NO: 682320 - RNA, 23 nt, Artificial Sequence
  Synthetic
cauauuaauccugcuucaauguu

SEQ ID NO: 682321 - RNA, 24 nt, Artificial Sequence
  Synthetic
acauauuaauccugcuucaauguu

SEQ ID NO: 682322 - RNA, 18 nt, Artificial Sequence
  Synthetic
agucuuggguggaauguu

SEQ ID NO: 682323 - RNA, 19 nt, Artificial Sequence
  Synthetic
gagucuuggguggaauguu

SEQ ID NO: 682324 - RNA, 20 nt, Artificial Sequence
  Synthetic
ggagucuuggguggaauguu

SEQ ID NO: 682325 - RNA, 21 nt, Artificial Sequence
  Synthetic
uggagucuuggguggaauguu

SEQ ID NO: 682326 - RNA, 22 nt, Artificial Sequence
  Synthetic
cuggagucuuggguggaauguu

SEQ ID NO: 682327 - RNA, 23 nt, Artificial Sequence
  Synthetic
ccuggagucuuggguggaauguu

SEQ ID NO: 682328 - RNA, 24 nt, Artificial Sequence
  Synthetic
gccuggagucuuggguggaauguu

SEQ ID NO: 682329 - RNA, 18 nt, Artificial Sequence
  Synthetic
agaaagaauuauaauguu

SEQ ID NO: 682330 - RNA, 19 nt, Artificial Sequence
  Synthetic
aagaaagaauuauaauguu

SEQ ID NO: 682331 - RNA, 20 nt, Artificial Sequence
  Synthetic
gaagaaagaauuauaauguu

SEQ ID NO: 682332 - RNA, 21 nt, Artificial Sequence
  Synthetic
agaagaaagaauuauaauguu

SEQ ID NO: 682333 - RNA, 22 nt, Artificial Sequence
  Synthetic
aagaagaaagaauuauaauguu

SEQ ID NO: 682334 - RNA, 23 nt, Artificial Sequence
  Synthetic
aaagaagaaagaauuauaauguu

SEQ ID NO: 682335 - RNA, 24 nt, Artificial Sequence
  Synthetic
aaaagaagaaagaauuauaauguu

SEQ ID NO: 682336 - RNA, 18 nt, Artificial Sequence
  Synthetic
cuuuuccuaccuaauguu

SEQ ID NO: 682337 - RNA, 19 nt, Artificial Sequence
  Synthetic
ucuuuuccuaccuaauguu

SEQ ID NO: 682338 - RNA, 20 nt, Artificial Sequence
  Synthetic
aucuuuuccuaccuaauguu

SEQ ID NO: 682339 - RNA, 21 nt, Artificial Sequence
  Synthetic
caucuuuuccuaccuaauguu

SEQ ID NO: 682340 - RNA, 22 nt, Artificial Sequence
  Synthetic
acaucuuuuccuaccuaauguu

SEQ ID NO: 682341 - RNA, 23 nt, Artificial Sequence
  Synthetic
cacaucuuuuccuaccuaauguu

SEQ ID NO: 682342 - RNA, 24 nt, Artificial Sequence
  Synthetic
ccacaucuuuuccuaccuaauguu

SEQ ID NO: 682343 - RNA, 18 nt, Artificial Sequence
  Synthetic
agugucuagccuaauguu

SEQ ID NO: 682344 - RNA, 19 nt, Artificial Sequence
  Synthetic
uagugucuagccuaauguu

SEQ ID NO: 682345 - RNA, 20 nt, Artificial Sequence
  Synthetic
cuagugucuagccuaauguu

SEQ ID NO: 682346 - RNA, 21 nt, Artificial Sequence
  Synthetic
ucuagugucuagccuaauguu

SEQ ID NO: 682347 - RNA, 22 nt, Artificial Sequence
  Synthetic
cucuagugucuagccuaauguu

SEQ ID NO: 682348 - RNA, 23 nt, Artificial Sequence
  Synthetic
ucucuagugucuagccuaauguu

SEQ ID NO: 682349 - RNA, 24 nt, Artificial Sequence
  Synthetic
gucucuagugucuagccuaauguu

SEQ ID NO: 682350 - RNA, 18 nt, Artificial Sequence
  Synthetic
uugacaguucuuaauguu

SEQ ID NO: 682351 - RNA, 19 nt, Artificial Sequence
  Synthetic
uuugacaguucuuaauguu

SEQ ID NO: 682352 - RNA, 20 nt, Artificial Sequence
  Synthetic
cuuugacaguucuuaauguu

SEQ ID NO: 682353 - RNA, 21 nt, Artificial Sequence
  Synthetic
ucuuugacaguucuuaauguu

SEQ ID NO: 682354 - RNA, 22 nt, Artificial Sequence
  Synthetic
aucuuugacaguucuuaauguu

SEQ ID NO: 682355 - RNA, 23 nt, Artificial Sequence
  Synthetic
aaucuuugacaguucuuaauguu

SEQ ID NO: 682356 - RNA, 24 nt, Artificial Sequence
  Synthetic
aaaucuuugacaguucuuaauguu

SEQ ID NO: 682357 - RNA, 18 nt, Artificial Sequence
  Synthetic
uugaagacauuuaauguu

SEQ ID NO: 682358 - RNA, 19 nt, Artificial Sequence
  Synthetic
uuugaagacauuuaauguu

SEQ ID NO: 682359 - RNA, 20 nt, Artificial Sequence
  Synthetic
cuuugaagacauuuaauguu

SEQ ID NO: 682360 - RNA, 21 nt, Artificial Sequence
  Synthetic
gcuuugaagacauuuaauguu

SEQ ID NO: 682361 - RNA, 22 nt, Artificial Sequence
  Synthetic
agcuuugaagacauuuaauguu

SEQ ID NO: 682362 - RNA, 23 nt, Artificial Sequence
  Synthetic
aagcuuugaagacauuuaauguu

SEQ ID NO: 682363 - RNA, 24 nt, Artificial Sequence
  Synthetic
gaagcuuugaagacauuuaauguu

SEQ ID NO: 682364 - RNA, 18 nt, Artificial Sequence
  Synthetic
uauuguguacaacauguu

SEQ ID NO: 682365 - RNA, 19 nt, Artificial Sequence
  Synthetic
uuauuguguacaacauguu

SEQ ID NO: 682366 - RNA, 20 nt, Artificial Sequence
  Synthetic
uuuauuguguacaacauguu

SEQ ID NO: 682367 - RNA, 21 nt, Artificial Sequence
  Synthetic
auuuauuguguacaacauguu

SEQ ID NO: 682368 - RNA, 22 nt, Artificial Sequence
  Synthetic
uauuuauuguguacaacauguu

SEQ ID NO: 682369 - RNA, 23 nt, Artificial Sequence
  Synthetic
guauuuauuguguacaacauguu

SEQ ID NO: 682370 - RNA, 24 nt, Artificial Sequence
  Synthetic
uguauuuauuguguacaacauguu

SEQ ID NO: 682371 - RNA, 18 nt, Artificial Sequence
  Synthetic
cuugaauuccuacauguu

SEQ ID NO: 682372 - RNA, 19 nt, Artificial Sequence
  Synthetic
ucuugaauuccuacauguu

SEQ ID NO: 682373 - RNA, 20 nt, Artificial Sequence
  Synthetic
aucuugaauuccuacauguu

SEQ ID NO: 682374 - RNA, 21 nt, Artificial Sequence
  Synthetic
caucuugaauuccuacauguu

SEQ ID NO: 682375 - RNA, 22 nt, Artificial Sequence
  Synthetic
ucaucuugaauuccuacauguu

SEQ ID NO: 682376 - RNA, 23 nt, Artificial Sequence
  Synthetic
cucaucuugaauuccuacauguu

SEQ ID NO: 682377 - RNA, 24 nt, Artificial Sequence
  Synthetic
ucucaucuugaauuccuacauguu

SEQ ID NO: 682378 - RNA, 18 nt, Artificial Sequence
  Synthetic
aauaacucccaccauguu

SEQ ID NO: 682379 - RNA, 19 nt, Artificial Sequence
  Synthetic
uaauaacucccaccauguu

SEQ ID NO: 682380 - RNA, 20 nt, Artificial Sequence
  Synthetic
uuaauaacucccaccauguu

SEQ ID NO: 682381 - RNA, 21 nt, Artificial Sequence
  Synthetic
auuaauaacucccaccauguu

SEQ ID NO: 682382 - RNA, 22 nt, Artificial Sequence
  Synthetic
uauuaauaacucccaccauguu

SEQ ID NO: 682383 - RNA, 23 nt, Artificial Sequence
  Synthetic
uuauuaauaacucccaccauguu

SEQ ID NO: 682384 - RNA, 24 nt, Artificial Sequence
  Synthetic
uuuauuaauaacucccaccauguu

SEQ ID NO: 682385 - RNA, 18 nt, Artificial Sequence
  Synthetic
uuuccaagugaccauguu

SEQ ID NO: 682386 - RNA, 19 nt, Artificial Sequence
  Synthetic
guuuccaagugaccauguu

SEQ ID NO: 682387 - RNA, 20 nt, Artificial Sequence
  Synthetic
gguuuccaagugaccauguu

SEQ ID NO: 682388 - RNA, 21 nt, Artificial Sequence
  Synthetic
ggguuuccaagugaccauguu

SEQ ID NO: 682389 - RNA, 22 nt, Artificial Sequence
  Synthetic
uggguuuccaagugaccauguu

SEQ ID NO: 682390 - RNA, 23 nt, Artificial Sequence
  Synthetic
cuggguuuccaagugaccauguu

SEQ ID NO: 682391 - RNA, 24 nt, Artificial Sequence
  Synthetic
ucuggguuuccaagugaccauguu

SEQ ID NO: 682392 - RNA, 18 nt, Artificial Sequence
  Synthetic
ccugguugcagccauguu

SEQ ID NO: 682393 - RNA, 19 nt, Artificial Sequence
  Synthetic
cccugguugcagccauguu

SEQ ID NO: 682394 - RNA, 20 nt, Artificial Sequence
  Synthetic
ucccugguugcagccauguu

SEQ ID NO: 682395 - RNA, 21 nt, Artificial Sequence
  Synthetic
uucccugguugcagccauguu

SEQ ID NO: 682396 - RNA, 22 nt, Artificial Sequence
  Synthetic
cuucccugguugcagccauguu

SEQ ID NO: 682397 - RNA, 23 nt, Artificial Sequence
  Synthetic
ccuucccugguugcagccauguu

SEQ ID NO: 682398 - RNA, 24 nt, Artificial Sequence
  Synthetic
uccuucccugguugcagccauguu

SEQ ID NO: 682399 - RNA, 18 nt, Artificial Sequence
  Synthetic
ugaggacgcuggcauguu

SEQ ID NO: 682400 - RNA, 19 nt, Artificial Sequence
  Synthetic
uugaggacgcuggcauguu

SEQ ID NO: 682401 - RNA, 20 nt, Artificial Sequence
  Synthetic
auugaggacgcuggcauguu

SEQ ID NO: 682402 - RNA, 21 nt, Artificial Sequence
  Synthetic
uauugaggacgcuggcauguu

SEQ ID NO: 682403 - RNA, 22 nt, Artificial Sequence
  Synthetic
cuauugaggacgcuggcauguu

SEQ ID NO: 682404 - RNA, 23 nt, Artificial Sequence
  Synthetic
acuauugaggacgcuggcauguu

SEQ ID NO: 682405 - RNA, 24 nt, Artificial Sequence
  Synthetic
aacuauugaggacgcuggcauguu

SEQ ID NO: 682406 - RNA, 18 nt, Artificial Sequence
  Synthetic
uacacccacaugcauguu

SEQ ID NO: 682407 - RNA, 19 nt, Artificial Sequence
  Synthetic
cuacacccacaugcauguu

SEQ ID NO: 682408 - RNA, 20 nt, Artificial Sequence
  Synthetic
ccuacacccacaugcauguu

SEQ ID NO: 682409 - RNA, 21 nt, Artificial Sequence
  Synthetic
uccuacacccacaugcauguu

SEQ ID NO: 682410 - RNA, 22 nt, Artificial Sequence
  Synthetic
cuccuacacccacaugcauguu

SEQ ID NO: 682411 - RNA, 23 nt, Artificial Sequence
  Synthetic
ccuccuacacccacaugcauguu

SEQ ID NO: 682412 - RNA, 24 nt, Artificial Sequence
  Synthetic
gccuccuacacccacaugcauguu

SEQ ID NO: 682413 - RNA, 18 nt, Artificial Sequence
  Synthetic
uagaauacacugcauguu

SEQ ID NO: 682414 - RNA, 19 nt, Artificial Sequence
  Synthetic
uuagaauacacugcauguu

SEQ ID NO: 682415 - RNA, 20 nt, Artificial Sequence
  Synthetic
guuagaauacacugcauguu

SEQ ID NO: 682416 - RNA, 21 nt, Artificial Sequence
  Synthetic
uguuagaauacacugcauguu

SEQ ID NO: 682417 - RNA, 22 nt, Artificial Sequence
  Synthetic
auguuagaauacacugcauguu

SEQ ID NO: 682418 - RNA, 23 nt, Artificial Sequence
  Synthetic
cauguuagaauacacugcauguu

SEQ ID NO: 682419 - RNA, 24 nt, Artificial Sequence
  Synthetic
gcauguuagaauacacugcauguu

SEQ ID NO: 682420 - RNA, 18 nt, Artificial Sequence
  Synthetic
ucuccuggucugcauguu

SEQ ID NO: 682421 - RNA, 19 nt, Artificial Sequence
  Synthetic
aucuccuggucugcauguu

SEQ ID NO: 682422 - RNA, 20 nt, Artificial Sequence
  Synthetic
aaucuccuggucugcauguu

SEQ ID NO: 682423 - RNA, 21 nt, Artificial Sequence
  Synthetic
gaaucuccuggucugcauguu

SEQ ID NO: 682424 - RNA, 22 nt, Artificial Sequence
  Synthetic
ggaaucuccuggucugcauguu

SEQ ID NO: 682425 - RNA, 23 nt, Artificial Sequence
  Synthetic
gggaaucuccuggucugcauguu

SEQ ID NO: 682426 - RNA, 24 nt, Artificial Sequence
  Synthetic
agggaaucuccuggucugcauguu

SEQ ID NO: 682427 - RNA, 18 nt, Artificial Sequence
  Synthetic
uauacugcugugcauguu

SEQ ID NO: 682428 - RNA, 19 nt, Artificial Sequence
  Synthetic
guauacugcugugcauguu

SEQ ID NO: 682429 - RNA, 20 nt, Artificial Sequence
  Synthetic
aguauacugcugugcauguu

SEQ ID NO: 682430 - RNA, 21 nt, Artificial Sequence
  Synthetic
gaguauacugcugugcauguu

SEQ ID NO: 682431 - RNA, 22 nt, Artificial Sequence
  Synthetic
ugaguauacugcugugcauguu

SEQ ID NO: 682432 - RNA, 23 nt, Artificial Sequence
  Synthetic
cugaguauacugcugugcauguu

SEQ ID NO: 682433 - RNA, 24 nt, Artificial Sequence
  Synthetic
ucugaguauacugcugugcauguu

SEQ ID NO: 682434 - RNA, 18 nt, Artificial Sequence
  Synthetic
auuuucacagaucauguu

SEQ ID NO: 682435 - RNA, 19 nt, Artificial Sequence
  Synthetic
uauuuucacagaucauguu

SEQ ID NO: 682436 - RNA, 20 nt, Artificial Sequence
  Synthetic
uuauuuucacagaucauguu

SEQ ID NO: 682437 - RNA, 21 nt, Artificial Sequence
  Synthetic
cuuauuuucacagaucauguu

SEQ ID NO: 682438 - RNA, 22 nt, Artificial Sequence
  Synthetic
ucuuauuuucacagaucauguu

SEQ ID NO: 682439 - RNA, 23 nt, Artificial Sequence
  Synthetic
uucuuauuuucacagaucauguu

SEQ ID NO: 682440 - RNA, 24 nt, Artificial Sequence
  Synthetic
auucuuauuuucacagaucauguu

SEQ ID NO: 682441 - RNA, 18 nt, Artificial Sequence
  Synthetic
ugaugagacccucauguu

SEQ ID NO: 682442 - RNA, 19 nt, Artificial Sequence
  Synthetic
gugaugagacccucauguu

SEQ ID NO: 682443 - RNA, 20 nt, Artificial Sequence
  Synthetic
ggugaugagacccucauguu

SEQ ID NO: 682444 - RNA, 21 nt, Artificial Sequence
  Synthetic
gggugaugagacccucauguu

SEQ ID NO: 682445 - RNA, 22 nt, Artificial Sequence
  Synthetic
ggggugaugagacccucauguu

SEQ ID NO: 682446 - RNA, 23 nt, Artificial Sequence
  Synthetic
gggggugaugagacccucauguu

SEQ ID NO: 682447 - RNA, 24 nt, Artificial Sequence
  Synthetic
ggggggugaugagacccucauguu

SEQ ID NO: 682448 - RNA, 18 nt, Artificial Sequence
  Synthetic
uaaaagaccuuucauguu

SEQ ID NO: 682449 - RNA, 19 nt, Artificial Sequence
  Synthetic
uuaaaagaccuuucauguu

SEQ ID NO: 682450 - RNA, 20 nt, Artificial Sequence
  Synthetic
guuaaaagaccuuucauguu

SEQ ID NO: 682451 - RNA, 21 nt, Artificial Sequence
  Synthetic
aguuaaaagaccuuucauguu

SEQ ID NO: 682452 - RNA, 22 nt, Artificial Sequence
  Synthetic
caguuaaaagaccuuucauguu

SEQ ID NO: 682453 - RNA, 23 nt, Artificial Sequence
  Synthetic
acaguuaaaagaccuuucauguu

SEQ ID NO: 682454 - RNA, 24 nt, Artificial Sequence
  Synthetic
aacaguuaaaagaccuuucauguu

SEQ ID NO: 682455 - RNA, 18 nt, Artificial Sequence
  Synthetic
guguuuccuuuucauguu

SEQ ID NO: 682456 - RNA, 19 nt, Artificial Sequence
  Synthetic
uguguuuccuuuucauguu

SEQ ID NO: 682457 - RNA, 20 nt, Artificial Sequence
  Synthetic
uuguguuuccuuuucauguu

SEQ ID NO: 682458 - RNA, 21 nt, Artificial Sequence
  Synthetic
uuuguguuuccuuuucauguu

SEQ ID NO: 682459 - RNA, 22 nt, Artificial Sequence
  Synthetic
cuuuguguuuccuuuucauguu

SEQ ID NO: 682460 - RNA, 23 nt, Artificial Sequence
  Synthetic
ucuuuguguuuccuuuucauguu

SEQ ID NO: 682461 - RNA, 24 nt, Artificial Sequence
  Synthetic
uucuuuguguuuccuuuucauguu

SEQ ID NO: 682462 - RNA, 18 nt, Artificial Sequence
  Synthetic
gaugugagugaagauguu

SEQ ID NO: 682463 - RNA, 19 nt, Artificial Sequence
  Synthetic
agaugugagugaagauguu

SEQ ID NO: 682464 - RNA, 20 nt, Artificial Sequence
  Synthetic
uagaugugagugaagauguu

SEQ ID NO: 682465 - RNA, 21 nt, Artificial Sequence
  Synthetic
uuagaugugagugaagauguu

SEQ ID NO: 682466 - RNA, 22 nt, Artificial Sequence
  Synthetic
uuuagaugugagugaagauguu

SEQ ID NO: 682467 - RNA, 23 nt, Artificial Sequence
  Synthetic
uuuuagaugugagugaagauguu

SEQ ID NO: 682468 - RNA, 24 nt, Artificial Sequence
  Synthetic
auuuuagaugugagugaagauguu

SEQ ID NO: 682469 - RNA, 18 nt, Artificial Sequence
  Synthetic
ugcaauguuccagauguu

SEQ ID NO: 682470 - RNA, 19 nt, Artificial Sequence
  Synthetic
augcaauguuccagauguu

SEQ ID NO: 682471 - RNA, 20 nt, Artificial Sequence
  Synthetic
aaugcaauguuccagauguu

SEQ ID NO: 682472 - RNA, 21 nt, Artificial Sequence
  Synthetic
gaaugcaauguuccagauguu

SEQ ID NO: 682473 - RNA, 22 nt, Artificial Sequence
  Synthetic
agaaugcaauguuccagauguu

SEQ ID NO: 682474 - RNA, 23 nt, Artificial Sequence
  Synthetic
uagaaugcaauguuccagauguu

SEQ ID NO: 682475 - RNA, 24 nt, Artificial Sequence
  Synthetic
guagaaugcaauguuccagauguu

SEQ ID NO: 682476 - RNA, 18 nt, Artificial Sequence
  Synthetic
uccaaguuuccagauguu

SEQ ID NO: 682477 - RNA, 19 nt, Artificial Sequence
  Synthetic
auccaaguuuccagauguu

SEQ ID NO: 682478 - RNA, 20 nt, Artificial Sequence
  Synthetic
uauccaaguuuccagauguu

SEQ ID NO: 682479 - RNA, 21 nt, Artificial Sequence
  Synthetic
auauccaaguuuccagauguu

SEQ ID NO: 682480 - RNA, 22 nt, Artificial Sequence
  Synthetic
aauauccaaguuuccagauguu

SEQ ID NO: 682481 - RNA, 23 nt, Artificial Sequence
  Synthetic
caauauccaaguuuccagauguu

SEQ ID NO: 682482 - RNA, 24 nt, Artificial Sequence
  Synthetic
acaauauccaaguuuccagauguu

SEQ ID NO: 682483 - RNA, 18 nt, Artificial Sequence
  Synthetic
agagaauacugagauguu

SEQ ID NO: 682484 - RNA, 19 nt, Artificial Sequence
  Synthetic
cagagaauacugagauguu

SEQ ID NO: 682485 - RNA, 20 nt, Artificial Sequence
  Synthetic
acagagaauacugagauguu

SEQ ID NO: 682486 - RNA, 21 nt, Artificial Sequence
  Synthetic
aacagagaauacugagauguu

SEQ ID NO: 682487 - RNA, 22 nt, Artificial Sequence
  Synthetic
gaacagagaauacugagauguu

SEQ ID NO: 682488 - RNA, 23 nt, Artificial Sequence
  Synthetic
agaacagagaauacugagauguu

SEQ ID NO: 682489 - RNA, 24 nt, Artificial Sequence
  Synthetic
aagaacagagaauacugagauguu

SEQ ID NO: 682490 - RNA, 18 nt, Artificial Sequence
  Synthetic
uguguuacucaggauguu

SEQ ID NO: 682491 - RNA, 19 nt, Artificial Sequence
  Synthetic
cuguguuacucaggauguu

SEQ ID NO: 682492 - RNA, 20 nt, Artificial Sequence
  Synthetic
ccuguguuacucaggauguu

SEQ ID NO: 682493 - RNA, 21 nt, Artificial Sequence
  Synthetic
uccuguguuacucaggauguu

SEQ ID NO: 682494 - RNA, 22 nt, Artificial Sequence
  Synthetic
uuccuguguuacucaggauguu

SEQ ID NO: 682495 - RNA, 23 nt, Artificial Sequence
  Synthetic
uuuccuguguuacucaggauguu

SEQ ID NO: 682496 - RNA, 24 nt, Artificial Sequence
  Synthetic
auuuccuguguuacucaggauguu

SEQ ID NO: 682497 - RNA, 18 nt, Artificial Sequence
  Synthetic
aggagcagcacggauguu

SEQ ID NO: 682498 - RNA, 19 nt, Artificial Sequence
  Synthetic
caggagcagcacggauguu

SEQ ID NO: 682499 - RNA, 20 nt, Artificial Sequence
  Synthetic
acaggagcagcacggauguu

SEQ ID NO: 682500 - RNA, 21 nt, Artificial Sequence
  Synthetic
aacaggagcagcacggauguu

SEQ ID NO: 682501 - RNA, 22 nt, Artificial Sequence
  Synthetic
aaacaggagcagcacggauguu

SEQ ID NO: 682502 - RNA, 23 nt, Artificial Sequence
  Synthetic
caaacaggagcagcacggauguu

SEQ ID NO: 682503 - RNA, 24 nt, Artificial Sequence
  Synthetic
acaaacaggagcagcacggauguu

SEQ ID NO: 682504 - RNA, 18 nt, Artificial Sequence
  Synthetic
cugaagugaugggauguu

SEQ ID NO: 682505 - RNA, 19 nt, Artificial Sequence
  Synthetic
ucugaagugaugggauguu

SEQ ID NO: 682506 - RNA, 20 nt, Artificial Sequence
  Synthetic
uucugaagugaugggauguu

SEQ ID NO: 682507 - RNA, 21 nt, Artificial Sequence
  Synthetic
auucugaagugaugggauguu

SEQ ID NO: 682508 - RNA, 22 nt, Artificial Sequence
  Synthetic
gauucugaagugaugggauguu

SEQ ID NO: 682509 - RNA, 23 nt, Artificial Sequence
  Synthetic
agauucugaagugaugggauguu

SEQ ID NO: 682510 - RNA, 24 nt, Artificial Sequence
  Synthetic
gagauucugaagugaugggauguu

SEQ ID NO: 682511 - RNA, 18 nt, Artificial Sequence
  Synthetic
gauccgguuugggauguu

SEQ ID NO: 682512 - RNA, 19 nt, Artificial Sequence
  Synthetic
agauccgguuugggauguu

SEQ ID NO: 682513 - RNA, 20 nt, Artificial Sequence
  Synthetic
gagauccgguuugggauguu

SEQ ID NO: 682514 - RNA, 21 nt, Artificial Sequence
  Synthetic
ggagauccgguuugggauguu

SEQ ID NO: 682515 - RNA, 22 nt, Artificial Sequence
  Synthetic
aggagauccgguuugggauguu

SEQ ID NO: 682516 - RNA, 23 nt, Artificial Sequence
  Synthetic
caggagauccgguuugggauguu

SEQ ID NO: 682517 - RNA, 24 nt, Artificial Sequence
  Synthetic
gcaggagauccgguuugggauguu

SEQ ID NO: 682518 - RNA, 18 nt, Artificial Sequence
  Synthetic
aaaggaaagauggauguu

SEQ ID NO: 682519 - RNA, 19 nt, Artificial Sequence
  Synthetic
uaaaggaaagauggauguu

SEQ ID NO: 682520 - RNA, 20 nt, Artificial Sequence
  Synthetic
guaaaggaaagauggauguu

SEQ ID NO: 682521 - RNA, 21 nt, Artificial Sequence
  Synthetic
uguaaaggaaagauggauguu

SEQ ID NO: 682522 - RNA, 22 nt, Artificial Sequence
  Synthetic
auguaaaggaaagauggauguu

SEQ ID NO: 682523 - RNA, 23 nt, Artificial Sequence
  Synthetic
aauguaaaggaaagauggauguu

SEQ ID NO: 682524 - RNA, 24 nt, Artificial Sequence
  Synthetic
aaauguaaaggaaagauggauguu

SEQ ID NO: 682525 - RNA, 18 nt, Artificial Sequence
  Synthetic
uucugcaguguggauguu

SEQ ID NO: 682526 - RNA, 19 nt, Artificial Sequence
  Synthetic
uuucugcaguguggauguu

SEQ ID NO: 682527 - RNA, 20 nt, Artificial Sequence
  Synthetic
uuuucugcaguguggauguu

SEQ ID NO: 682528 - RNA, 21 nt, Artificial Sequence
  Synthetic
uuuuucugcaguguggauguu

SEQ ID NO: 682529 - RNA, 22 nt, Artificial Sequence
  Synthetic
guuuuucugcaguguggauguu

SEQ ID NO: 682530 - RNA, 23 nt, Artificial Sequence
  Synthetic
gguuuuucugcaguguggauguu

SEQ ID NO: 682531 - RNA, 24 nt, Artificial Sequence
  Synthetic
ugguuuuucugcaguguggauguu

SEQ ID NO: 682532 - RNA, 18 nt, Artificial Sequence
  Synthetic
agaauuuucaaugauguu

SEQ ID NO: 682533 - RNA, 19 nt, Artificial Sequence
  Synthetic
uagaauuuucaaugauguu

SEQ ID NO: 682534 - RNA, 20 nt, Artificial Sequence
  Synthetic
auagaauuuucaaugauguu

SEQ ID NO: 682535 - RNA, 21 nt, Artificial Sequence
  Synthetic
cauagaauuuucaaugauguu

SEQ ID NO: 682536 - RNA, 22 nt, Artificial Sequence
  Synthetic
acauagaauuuucaaugauguu

SEQ ID NO: 682537 - RNA, 23 nt, Artificial Sequence
  Synthetic
uacauagaauuuucaaugauguu

SEQ ID NO: 682538 - RNA, 24 nt, Artificial Sequence
  Synthetic
uuacauagaauuuucaaugauguu

SEQ ID NO: 682539 - RNA, 18 nt, Artificial Sequence
  Synthetic
aucuaauauaaugauguu

SEQ ID NO: 682540 - RNA, 19 nt, Artificial Sequence
  Synthetic
uaucuaauauaaugauguu

SEQ ID NO: 682541 - RNA, 20 nt, Artificial Sequence
  Synthetic
auaucuaauauaaugauguu

SEQ ID NO: 682542 - RNA, 21 nt, Artificial Sequence
  Synthetic
aauaucuaauauaaugauguu

SEQ ID NO: 682543 - RNA, 22 nt, Artificial Sequence
  Synthetic
aaauaucuaauauaaugauguu

SEQ ID NO: 682544 - RNA, 23 nt, Artificial Sequence
  Synthetic
gaaauaucuaauauaaugauguu

SEQ ID NO: 682545 - RNA, 24 nt, Artificial Sequence
  Synthetic
ggaaauaucuaauauaaugauguu

SEQ ID NO: 682546 - RNA, 18 nt, Artificial Sequence
  Synthetic
guaagagaaacugauguu

SEQ ID NO: 682547 - RNA, 19 nt, Artificial Sequence
  Synthetic
cguaagagaaacugauguu

SEQ ID NO: 682548 - RNA, 20 nt, Artificial Sequence
  Synthetic
ccguaagagaaacugauguu

SEQ ID NO: 682549 - RNA, 21 nt, Artificial Sequence
  Synthetic
accguaagagaaacugauguu

SEQ ID NO: 682550 - RNA, 22 nt, Artificial Sequence
  Synthetic
aaccguaagagaaacugauguu

SEQ ID NO: 682551 - RNA, 23 nt, Artificial Sequence
  Synthetic
uaaccguaagagaaacugauguu

SEQ ID NO: 682552 - RNA, 24 nt, Artificial Sequence
  Synthetic
guaaccguaagagaaacugauguu

SEQ ID NO: 682553 - RNA, 18 nt, Artificial Sequence
  Synthetic
acuaauacuucugauguu

SEQ ID NO: 682554 - RNA, 19 nt, Artificial Sequence
  Synthetic
aacuaauacuucugauguu

SEQ ID NO: 682555 - RNA, 20 nt, Artificial Sequence
  Synthetic
uaacuaauacuucugauguu

SEQ ID NO: 682556 - RNA, 21 nt, Artificial Sequence
  Synthetic
auaacuaauacuucugauguu

SEQ ID NO: 682557 - RNA, 22 nt, Artificial Sequence
  Synthetic
uauaacuaauacuucugauguu

SEQ ID NO: 682558 - RNA, 23 nt, Artificial Sequence
  Synthetic
auauaacuaauacuucugauguu

SEQ ID NO: 682559 - RNA, 24 nt, Artificial Sequence
  Synthetic
uauauaacuaauacuucugauguu

SEQ ID NO: 682560 - RNA, 18 nt, Artificial Sequence
  Synthetic
ugaauaaaaggugauguu

SEQ ID NO: 682561 - RNA, 19 nt, Artificial Sequence
  Synthetic
augaauaaaaggugauguu

SEQ ID NO: 682562 - RNA, 20 nt, Artificial Sequence
  Synthetic
caugaauaaaaggugauguu

SEQ ID NO: 682563 - RNA, 21 nt, Artificial Sequence
  Synthetic
ucaugaauaaaaggugauguu

SEQ ID NO: 682564 - RNA, 22 nt, Artificial Sequence
  Synthetic
gucaugaauaaaaggugauguu

SEQ ID NO: 682565 - RNA, 23 nt, Artificial Sequence
  Synthetic
ugucaugaauaaaaggugauguu

SEQ ID NO: 682566 - RNA, 24 nt, Artificial Sequence
  Synthetic
uugucaugaauaaaaggugauguu

SEQ ID NO: 682567 - RNA, 18 nt, Artificial Sequence
  Synthetic
ggcagggguggugauguu

SEQ ID NO: 682568 - RNA, 19 nt, Artificial Sequence
  Synthetic
aggcagggguggugauguu

SEQ ID NO: 682569 - RNA, 20 nt, Artificial Sequence
  Synthetic
uaggcagggguggugauguu

SEQ ID NO: 682570 - RNA, 21 nt, Artificial Sequence
  Synthetic
auaggcagggguggugauguu

SEQ ID NO: 682571 - RNA, 22 nt, Artificial Sequence
  Synthetic
gauaggcagggguggugauguu

SEQ ID NO: 682572 - RNA, 23 nt, Artificial Sequence
  Synthetic
agauaggcagggguggugauguu

SEQ ID NO: 682573 - RNA, 24 nt, Artificial Sequence
  Synthetic
gagauaggcagggguggugauguu

SEQ ID NO: 682574 - RNA, 18 nt, Artificial Sequence
  Synthetic
gguuguauuggugauguu

SEQ ID NO: 682575 - RNA, 19 nt, Artificial Sequence
  Synthetic
agguuguauuggugauguu

SEQ ID NO: 682576 - RNA, 20 nt, Artificial Sequence
  Synthetic
cagguuguauuggugauguu

SEQ ID NO: 682577 - RNA, 21 nt, Artificial Sequence
  Synthetic
acagguuguauuggugauguu

SEQ ID NO: 682578 - RNA, 22 nt, Artificial Sequence
  Synthetic
aacagguuguauuggugauguu

SEQ ID NO: 682579 - RNA, 23 nt, Artificial Sequence
  Synthetic
caacagguuguauuggugauguu

SEQ ID NO: 682580 - RNA, 24 nt, Artificial Sequence
  Synthetic
ucaacagguuguauuggugauguu

SEQ ID NO: 682581 - RNA, 18 nt, Artificial Sequence
  Synthetic
uacucuuuguuugauguu

SEQ ID NO: 682582 - RNA, 19 nt, Artificial Sequence
  Synthetic
cuacucuuuguuugauguu

SEQ ID NO: 682583 - RNA, 20 nt, Artificial Sequence
  Synthetic
ucuacucuuuguuugauguu

SEQ ID NO: 682584 - RNA, 21 nt, Artificial Sequence
  Synthetic
aucuacucuuuguuugauguu

SEQ ID NO: 682585 - RNA, 22 nt, Artificial Sequence
  Synthetic
uaucuacucuuuguuugauguu

SEQ ID NO: 682586 - RNA, 23 nt, Artificial Sequence
  Synthetic
guaucuacucuuuguuugauguu

SEQ ID NO: 682587 - RNA, 24 nt, Artificial Sequence
  Synthetic
uguaucuacucuuuguuugauguu

SEQ ID NO: 682588 - RNA, 18 nt, Artificial Sequence
  Synthetic
gugauuucaaaauauguu

SEQ ID NO: 682589 - RNA, 19 nt, Artificial Sequence
  Synthetic
ggugauuucaaaauauguu

SEQ ID NO: 682590 - RNA, 20 nt, Artificial Sequence
  Synthetic
aggugauuucaaaauauguu

SEQ ID NO: 682591 - RNA, 21 nt, Artificial Sequence
  Synthetic
aaggugauuucaaaauauguu

SEQ ID NO: 682592 - RNA, 22 nt, Artificial Sequence
  Synthetic
aaaggugauuucaaaauauguu

SEQ ID NO: 682593 - RNA, 23 nt, Artificial Sequence
  Synthetic
caaaggugauuucaaaauauguu

SEQ ID NO: 682594 - RNA, 24 nt, Artificial Sequence
  Synthetic
ucaaaggugauuucaaaauauguu

SEQ ID NO: 682595 - RNA, 18 nt, Artificial Sequence
  Synthetic
auuauagagcaauauguu

SEQ ID NO: 682596 - RNA, 19 nt, Artificial Sequence
  Synthetic
aauuauagagcaauauguu

SEQ ID NO: 682597 - RNA, 20 nt, Artificial Sequence
  Synthetic
aaauuauagagcaauauguu

SEQ ID NO: 682598 - RNA, 21 nt, Artificial Sequence
  Synthetic
uaaauuauagagcaauauguu

SEQ ID NO: 682599 - RNA, 22 nt, Artificial Sequence
  Synthetic
auaaauuauagagcaauauguu

SEQ ID NO: 682600 - RNA, 23 nt, Artificial Sequence
  Synthetic
aauaaauuauagagcaauauguu

SEQ ID NO: 682601 - RNA, 24 nt, Artificial Sequence
  Synthetic
aaauaaauuauagagcaauauguu

SEQ ID NO: 682602 - RNA, 18 nt, Artificial Sequence
  Synthetic
auaacaaccuaauauguu

SEQ ID NO: 682603 - RNA, 19 nt, Artificial Sequence
  Synthetic
gauaacaaccuaauauguu

SEQ ID NO: 682604 - RNA, 20 nt, Artificial Sequence
  Synthetic
agauaacaaccuaauauguu

SEQ ID NO: 682605 - RNA, 21 nt, Artificial Sequence
  Synthetic
aagauaacaaccuaauauguu

SEQ ID NO: 682606 - RNA, 22 nt, Artificial Sequence
  Synthetic
uaagauaacaaccuaauauguu

SEQ ID NO: 682607 - RNA, 23 nt, Artificial Sequence
  Synthetic
cuaagauaacaaccuaauauguu

SEQ ID NO: 682608 - RNA, 24 nt, Artificial Sequence
  Synthetic
ucuaagauaacaaccuaauauguu

SEQ ID NO: 682609 - RNA, 18 nt, Artificial Sequence
  Synthetic
gugucauucucauauguu

SEQ ID NO: 682610 - RNA, 19 nt, Artificial Sequence
  Synthetic
ugugucauucucauauguu

SEQ ID NO: 682611 - RNA, 20 nt, Artificial Sequence
  Synthetic
uugugucauucucauauguu

SEQ ID NO: 682612 - RNA, 21 nt, Artificial Sequence
  Synthetic
uuugugucauucucauauguu

SEQ ID NO: 682613 - RNA, 22 nt, Artificial Sequence
  Synthetic
auuugugucauucucauauguu

SEQ ID NO: 682614 - RNA, 23 nt, Artificial Sequence
  Synthetic
cauuugugucauucucauauguu

SEQ ID NO: 682615 - RNA, 24 nt, Artificial Sequence
  Synthetic
ccauuugugucauucucauauguu

SEQ ID NO: 682616 - RNA, 18 nt, Artificial Sequence
  Synthetic
agaaaaaaaagauauguu

SEQ ID NO: 682617 - RNA, 19 nt, Artificial Sequence
  Synthetic
aagaaaaaaaagauauguu

SEQ ID NO: 682618 - RNA, 20 nt, Artificial Sequence
  Synthetic
aaagaaaaaaaagauauguu

SEQ ID NO: 682619 - RNA, 21 nt, Artificial Sequence
  Synthetic
uaaagaaaaaaaagauauguu

SEQ ID NO: 682620 - RNA, 22 nt, Artificial Sequence
  Synthetic
auaaagaaaaaaaagauauguu

SEQ ID NO: 682621 - RNA, 23 nt, Artificial Sequence
  Synthetic
cauaaagaaaaaaaagauauguu

SEQ ID NO: 682622 - RNA, 24 nt, Artificial Sequence
  Synthetic
ucauaaagaaaaaaaagauauguu

SEQ ID NO: 682623 - RNA, 18 nt, Artificial Sequence
  Synthetic
guggcuuuaagauauguu

SEQ ID NO: 682624 - RNA, 19 nt, Artificial Sequence
  Synthetic
uguggcuuuaagauauguu

SEQ ID NO: 682625 - RNA, 20 nt, Artificial Sequence
  Synthetic
uuguggcuuuaagauauguu

SEQ ID NO: 682626 - RNA, 21 nt, Artificial Sequence
  Synthetic
auuguggcuuuaagauauguu

SEQ ID NO: 682627 - RNA, 22 nt, Artificial Sequence
  Synthetic
gauuguggcuuuaagauauguu

SEQ ID NO: 682628 - RNA, 23 nt, Artificial Sequence
  Synthetic
ugauuguggcuuuaagauauguu

SEQ ID NO: 682629 - RNA, 24 nt, Artificial Sequence
  Synthetic
augauuguggcuuuaagauauguu

SEQ ID NO: 682630 - RNA, 18 nt, Artificial Sequence
  Synthetic
augauauuaggauauguu

SEQ ID NO: 682631 - RNA, 19 nt, Artificial Sequence
  Synthetic
uaugauauuaggauauguu

SEQ ID NO: 682632 - RNA, 20 nt, Artificial Sequence
  Synthetic
uuaugauauuaggauauguu

SEQ ID NO: 682633 - RNA, 21 nt, Artificial Sequence
  Synthetic
auuaugauauuaggauauguu

SEQ ID NO: 682634 - RNA, 22 nt, Artificial Sequence
  Synthetic
gauuaugauauuaggauauguu

SEQ ID NO: 682635 - RNA, 23 nt, Artificial Sequence
  Synthetic
ugauuaugauauuaggauauguu

SEQ ID NO: 682636 - RNA, 24 nt, Artificial Sequence
  Synthetic
cugauuaugauauuaggauauguu

SEQ ID NO: 682637 - RNA, 18 nt, Artificial Sequence
  Synthetic
aaugcauguauauauguu

SEQ ID NO: 682638 - RNA, 19 nt, Artificial Sequence
  Synthetic
aaaugcauguauauauguu

SEQ ID NO: 682639 - RNA, 20 nt, Artificial Sequence
  Synthetic
uaaaugcauguauauauguu

SEQ ID NO: 682640 - RNA, 21 nt, Artificial Sequence
  Synthetic
guaaaugcauguauauauguu

SEQ ID NO: 682641 - RNA, 22 nt, Artificial Sequence
  Synthetic
uguaaaugcauguauauauguu

SEQ ID NO: 682642 - RNA, 23 nt, Artificial Sequence
  Synthetic
uuguaaaugcauguauauauguu

SEQ ID NO: 682643 - RNA, 24 nt, Artificial Sequence
  Synthetic
cuuguaaaugcauguauauauguu

SEQ ID NO: 682644 - RNA, 18 nt, Artificial Sequence
  Synthetic
uccuauggaagcuauguu

SEQ ID NO: 682645 - RNA, 19 nt, Artificial Sequence
  Synthetic
uuccuauggaagcuauguu

SEQ ID NO: 682646 - RNA, 20 nt, Artificial Sequence
  Synthetic
uuuccuauggaagcuauguu

SEQ ID NO: 682647 - RNA, 21 nt, Artificial Sequence
  Synthetic
uuuuccuauggaagcuauguu

SEQ ID NO: 682648 - RNA, 22 nt, Artificial Sequence
  Synthetic
uuuuuccuauggaagcuauguu

SEQ ID NO: 682649 - RNA, 23 nt, Artificial Sequence
  Synthetic
uuuuuuccuauggaagcuauguu

SEQ ID NO: 682650 - RNA, 24 nt, Artificial Sequence
  Synthetic
guuuuuuccuauggaagcuauguu

SEQ ID NO: 682651 - RNA, 18 nt, Artificial Sequence
  Synthetic
gcucagagaaucuauguu

SEQ ID NO: 682652 - RNA, 19 nt, Artificial Sequence
  Synthetic
ggcucagagaaucuauguu

SEQ ID NO: 682653 - RNA, 20 nt, Artificial Sequence
  Synthetic
uggcucagagaaucuauguu

SEQ ID NO: 682654 - RNA, 21 nt, Artificial Sequence
  Synthetic
uuggcucagagaaucuauguu

SEQ ID NO: 682655 - RNA, 22 nt, Artificial Sequence
  Synthetic
cuuggcucagagaaucuauguu

SEQ ID NO: 682656 - RNA, 23 nt, Artificial Sequence
  Synthetic
ucuuggcucagagaaucuauguu

SEQ ID NO: 682657 - RNA, 24 nt, Artificial Sequence
  Synthetic
cucuuggcucagagaaucuauguu

SEQ ID NO: 682658 - RNA, 18 nt, Artificial Sequence
  Synthetic
ucuuaaucuagguauguu

SEQ ID NO: 682659 - RNA, 19 nt, Artificial Sequence
  Synthetic
uucuuaaucuagguauguu

SEQ ID NO: 682660 - RNA, 20 nt, Artificial Sequence
  Synthetic
guucuuaaucuagguauguu

SEQ ID NO: 682661 - RNA, 21 nt, Artificial Sequence
  Synthetic
uguucuuaaucuagguauguu

SEQ ID NO: 682662 - RNA, 22 nt, Artificial Sequence
  Synthetic
cuguucuuaaucuagguauguu

SEQ ID NO: 682663 - RNA, 23 nt, Artificial Sequence
  Synthetic
acuguucuuaaucuagguauguu

SEQ ID NO: 682664 - RNA, 24 nt, Artificial Sequence
  Synthetic
uacuguucuuaaucuagguauguu

SEQ ID NO: 682665 - RNA, 18 nt, Artificial Sequence
  Synthetic
ggaaauguacuguauguu

SEQ ID NO: 682666 - RNA, 19 nt, Artificial Sequence
  Synthetic
gggaaauguacuguauguu

SEQ ID NO: 682667 - RNA, 20 nt, Artificial Sequence
  Synthetic
ggggaaauguacuguauguu

SEQ ID NO: 682668 - RNA, 21 nt, Artificial Sequence
  Synthetic
uggggaaauguacuguauguu

SEQ ID NO: 682669 - RNA, 22 nt, Artificial Sequence
  Synthetic
guggggaaauguacuguauguu

SEQ ID NO: 682670 - RNA, 23 nt, Artificial Sequence
  Synthetic
aguggggaaauguacuguauguu

SEQ ID NO: 682671 - RNA, 24 nt, Artificial Sequence
  Synthetic
aaguggggaaauguacuguauguu

SEQ ID NO: 682672 - RNA, 18 nt, Artificial Sequence
  Synthetic
aaaacuuuuguguauguu

SEQ ID NO: 682673 - RNA, 19 nt, Artificial Sequence
  Synthetic
aaaaacuuuuguguauguu

SEQ ID NO: 682674 - RNA, 20 nt, Artificial Sequence
  Synthetic
gaaaaacuuuuguguauguu

SEQ ID NO: 682675 - RNA, 21 nt, Artificial Sequence
  Synthetic
ugaaaaacuuuuguguauguu

SEQ ID NO: 682676 - RNA, 22 nt, Artificial Sequence
  Synthetic
uugaaaaacuuuuguguauguu

SEQ ID NO: 682677 - RNA, 23 nt, Artificial Sequence
  Synthetic
auugaaaaacuuuuguguauguu

SEQ ID NO: 682678 - RNA, 24 nt, Artificial Sequence
  Synthetic
uauugaaaaacuuuuguguauguu

SEQ ID NO: 682679 - RNA, 18 nt, Artificial Sequence
  Synthetic
gcuugguuucauuauguu

SEQ ID NO: 682680 - RNA, 19 nt, Artificial Sequence
  Synthetic
agcuugguuucauuauguu

SEQ ID NO: 682681 - RNA, 20 nt, Artificial Sequence
  Synthetic
uagcuugguuucauuauguu

SEQ ID NO: 682682 - RNA, 21 nt, Artificial Sequence
  Synthetic
cuagcuugguuucauuauguu

SEQ ID NO: 682683 - RNA, 22 nt, Artificial Sequence
  Synthetic
ucuagcuugguuucauuauguu

SEQ ID NO: 682684 - RNA, 23 nt, Artificial Sequence
  Synthetic
uucuagcuugguuucauuauguu

SEQ ID NO: 682685 - RNA, 24 nt, Artificial Sequence
  Synthetic
uuucuagcuugguuucauuauguu

SEQ ID NO: 682686 - RNA, 18 nt, Artificial Sequence
  Synthetic
cagaauauagaaacuguu

SEQ ID NO: 682687 - RNA, 19 nt, Artificial Sequence
  Synthetic
ucagaauauagaaacuguu

SEQ ID NO: 682688 - RNA, 20 nt, Artificial Sequence
  Synthetic
uucagaauauagaaacuguu

SEQ ID NO: 682689 - RNA, 21 nt, Artificial Sequence
  Synthetic
cuucagaauauagaaacuguu

SEQ ID NO: 682690 - RNA, 22 nt, Artificial Sequence
  Synthetic
ucuucagaauauagaaacuguu

SEQ ID NO: 682691 - RNA, 23 nt, Artificial Sequence
  Synthetic
aucuucagaauauagaaacuguu

SEQ ID NO: 682692 - RNA, 24 nt, Artificial Sequence
  Synthetic
caucuucagaauauagaaacuguu

SEQ ID NO: 682693 - RNA, 18 nt, Artificial Sequence
  Synthetic
cacacccugggaacuguu

SEQ ID NO: 682694 - RNA, 19 nt, Artificial Sequence
  Synthetic
ucacacccugggaacuguu

SEQ ID NO: 682695 - RNA, 20 nt, Artificial Sequence
  Synthetic
aucacacccugggaacuguu

SEQ ID NO: 682696 - RNA, 21 nt, Artificial Sequence
  Synthetic
caucacacccugggaacuguu

SEQ ID NO: 682697 - RNA, 22 nt, Artificial Sequence
  Synthetic
acaucacacccugggaacuguu

SEQ ID NO: 682698 - RNA, 23 nt, Artificial Sequence
  Synthetic
aacaucacacccugggaacuguu

SEQ ID NO: 682699 - RNA, 24 nt, Artificial Sequence
  Synthetic
gaacaucacacccugggaacuguu

SEQ ID NO: 682700 - RNA, 18 nt, Artificial Sequence
  Synthetic
uuccaguggauaacuguu

SEQ ID NO: 682701 - RNA, 19 nt, Artificial Sequence
  Synthetic
auuccaguggauaacuguu

SEQ ID NO: 682702 - RNA, 20 nt, Artificial Sequence
  Synthetic
uauuccaguggauaacuguu

SEQ ID NO: 682703 - RNA, 21 nt, Artificial Sequence
  Synthetic
uuauuccaguggauaacuguu

SEQ ID NO: 682704 - RNA, 22 nt, Artificial Sequence
  Synthetic
guuauuccaguggauaacuguu

SEQ ID NO: 682705 - RNA, 23 nt, Artificial Sequence
  Synthetic
uguuauuccaguggauaacuguu

SEQ ID NO: 682706 - RNA, 24 nt, Artificial Sequence
  Synthetic
auguuauuccaguggauaacuguu

SEQ ID NO: 682707 - RNA, 18 nt, Artificial Sequence
  Synthetic
agaaauaccuuaacuguu

SEQ ID NO: 682708 - RNA, 19 nt, Artificial Sequence
  Synthetic
aagaaauaccuuaacuguu

SEQ ID NO: 682709 - RNA, 20 nt, Artificial Sequence
  Synthetic
aaagaaauaccuuaacuguu

SEQ ID NO: 682710 - RNA, 21 nt, Artificial Sequence
  Synthetic
gaaagaaauaccuuaacuguu

SEQ ID NO: 682711 - RNA, 22 nt, Artificial Sequence
  Synthetic
ggaaagaaauaccuuaacuguu

SEQ ID NO: 682712 - RNA, 23 nt, Artificial Sequence
  Synthetic
aggaaagaaauaccuuaacuguu

SEQ ID NO: 682713 - RNA, 24 nt, Artificial Sequence
  Synthetic
caggaaagaaauaccuuaacuguu

SEQ ID NO: 682714 - RNA, 18 nt, Artificial Sequence
  Synthetic
cuaugggacaacacuguu

SEQ ID NO: 682715 - RNA, 19 nt, Artificial Sequence
  Synthetic
ucuaugggacaacacuguu

SEQ ID NO: 682716 - RNA, 20 nt, Artificial Sequence
  Synthetic
uucuaugggacaacacuguu

SEQ ID NO: 682717 - RNA, 21 nt, Artificial Sequence
  Synthetic
uuucuaugggacaacacuguu

SEQ ID NO: 682718 - RNA, 22 nt, Artificial Sequence
  Synthetic
auuucuaugggacaacacuguu

SEQ ID NO: 682719 - RNA, 23 nt, Artificial Sequence
  Synthetic
cauuucuaugggacaacacuguu

SEQ ID NO: 682720 - RNA, 24 nt, Artificial Sequence
  Synthetic
ucauuucuaugggacaacacuguu

SEQ ID NO: 682721 - RNA, 18 nt, Artificial Sequence
  Synthetic
guuuauuaacacacuguu

SEQ ID NO: 682722 - RNA, 19 nt, Artificial Sequence
  Synthetic
uguuuauuaacacacuguu

SEQ ID NO: 682723 - RNA, 20 nt, Artificial Sequence
  Synthetic
guguuuauuaacacacuguu

SEQ ID NO: 682724 - RNA, 21 nt, Artificial Sequence
  Synthetic
gguguuuauuaacacacuguu

SEQ ID NO: 682725 - RNA, 22 nt, Artificial Sequence
  Synthetic
agguguuuauuaacacacuguu

SEQ ID NO: 682726 - RNA, 23 nt, Artificial Sequence
  Synthetic
uagguguuuauuaacacacuguu

SEQ ID NO: 682727 - RNA, 24 nt, Artificial Sequence
  Synthetic
guagguguuuauuaacacacuguu

SEQ ID NO: 682728 - RNA, 18 nt, Artificial Sequence
  Synthetic
uauaguuuuaucacuguu

SEQ ID NO: 682729 - RNA, 19 nt, Artificial Sequence
  Synthetic
uuauaguuuuaucacuguu

SEQ ID NO: 682730 - RNA, 20 nt, Artificial Sequence
  Synthetic
uuuauaguuuuaucacuguu

SEQ ID NO: 682731 - RNA, 21 nt, Artificial Sequence
  Synthetic
cuuuauaguuuuaucacuguu

SEQ ID NO: 682732 - RNA, 22 nt, Artificial Sequence
  Synthetic
gcuuuauaguuuuaucacuguu

SEQ ID NO: 682733 - RNA, 23 nt, Artificial Sequence
  Synthetic
ugcuuuauaguuuuaucacuguu

SEQ ID NO: 682734 - RNA, 24 nt, Artificial Sequence
  Synthetic
cugcuuuauaguuuuaucacuguu

SEQ ID NO: 682735 - RNA, 18 nt, Artificial Sequence
  Synthetic
gucuggugccagacuguu

SEQ ID NO: 682736 - RNA, 19 nt, Artificial Sequence
  Synthetic
ugucuggugccagacuguu

SEQ ID NO: 682737 - RNA, 20 nt, Artificial Sequence
  Synthetic
uugucuggugccagacuguu

SEQ ID NO: 682738 - RNA, 21 nt, Artificial Sequence
  Synthetic
uuugucuggugccagacuguu

SEQ ID NO: 682739 - RNA, 22 nt, Artificial Sequence
  Synthetic
uuuugucuggugccagacuguu

SEQ ID NO: 682740 - RNA, 23 nt, Artificial Sequence
  Synthetic
auuuugucuggugccagacuguu

SEQ ID NO: 682741 - RNA, 24 nt, Artificial Sequence
  Synthetic
uauuuugucuggugccagacuguu

SEQ ID NO: 682742 - RNA, 18 nt, Artificial Sequence
  Synthetic
ucuaccauagggacuguu

SEQ ID NO: 682743 - RNA, 19 nt, Artificial Sequence
  Synthetic
aucuaccauagggacuguu

SEQ ID NO: 682744 - RNA, 20 nt, Artificial Sequence
  Synthetic
uaucuaccauagggacuguu

SEQ ID NO: 682745 - RNA, 21 nt, Artificial Sequence
  Synthetic
auaucuaccauagggacuguu

SEQ ID NO: 682746 - RNA, 22 nt, Artificial Sequence
  Synthetic
aauaucuaccauagggacuguu

SEQ ID NO: 682747 - RNA, 23 nt, Artificial Sequence
  Synthetic
caauaucuaccauagggacuguu

SEQ ID NO: 682748 - RNA, 24 nt, Artificial Sequence
  Synthetic
acaauaucuaccauagggacuguu

SEQ ID NO: 682749 - RNA, 18 nt, Artificial Sequence
  Synthetic
ggagauuaguggacuguu

SEQ ID NO: 682750 - RNA, 19 nt, Artificial Sequence
  Synthetic
gggagauuaguggacuguu

SEQ ID NO: 682751 - RNA, 20 nt, Artificial Sequence
  Synthetic
agggagauuaguggacuguu

SEQ ID NO: 682752 - RNA, 21 nt, Artificial Sequence
  Synthetic
aagggagauuaguggacuguu

SEQ ID NO: 682753 - RNA, 22 nt, Artificial Sequence
  Synthetic
aaagggagauuaguggacuguu

SEQ ID NO: 682754 - RNA, 23 nt, Artificial Sequence
  Synthetic
caaagggagauuaguggacuguu

SEQ ID NO: 682755 - RNA, 24 nt, Artificial Sequence
  Synthetic
acaaagggagauuaguggacuguu

SEQ ID NO: 682756 - RNA, 18 nt, Artificial Sequence
  Synthetic
agugaugcacugacuguu

SEQ ID NO: 682757 - RNA, 19 nt, Artificial Sequence
  Synthetic
cagugaugcacugacuguu

SEQ ID NO: 682758 - RNA, 20 nt, Artificial Sequence
  Synthetic
acagugaugcacugacuguu

SEQ ID NO: 682759 - RNA, 21 nt, Artificial Sequence
  Synthetic
gacagugaugcacugacuguu

SEQ ID NO: 682760 - RNA, 22 nt, Artificial Sequence
  Synthetic
ugacagugaugcacugacuguu

SEQ ID NO: 682761 - RNA, 23 nt, Artificial Sequence
  Synthetic
uugacagugaugcacugacuguu

SEQ ID NO: 682762 - RNA, 24 nt, Artificial Sequence
  Synthetic
guugacagugaugcacugacuguu

SEQ ID NO: 682763 - RNA, 18 nt, Artificial Sequence
  Synthetic
aggaaauaagugacuguu

SEQ ID NO: 682764 - RNA, 19 nt, Artificial Sequence
  Synthetic
gaggaaauaagugacuguu

SEQ ID NO: 682765 - RNA, 20 nt, Artificial Sequence
  Synthetic
agaggaaauaagugacuguu

SEQ ID NO: 682766 - RNA, 21 nt, Artificial Sequence
  Synthetic
aagaggaaauaagugacuguu

SEQ ID NO: 682767 - RNA, 22 nt, Artificial Sequence
  Synthetic
caagaggaaauaagugacuguu

SEQ ID NO: 682768 - RNA, 23 nt, Artificial Sequence
  Synthetic
gcaagaggaaauaagugacuguu

SEQ ID NO: 682769 - RNA, 24 nt, Artificial Sequence
  Synthetic
ugcaagaggaaauaagugacuguu

SEQ ID NO: 682770 - RNA, 18 nt, Artificial Sequence
  Synthetic
agacuuugagugacuguu

SEQ ID NO: 682771 - RNA, 19 nt, Artificial Sequence
  Synthetic
aagacuuugagugacuguu

SEQ ID NO: 682772 - RNA, 20 nt, Artificial Sequence
  Synthetic
uaagacuuugagugacuguu

SEQ ID NO: 682773 - RNA, 21 nt, Artificial Sequence
  Synthetic
uuaagacuuugagugacuguu

SEQ ID NO: 682774 - RNA, 22 nt, Artificial Sequence
  Synthetic
guuaagacuuugagugacuguu

SEQ ID NO: 682775 - RNA, 23 nt, Artificial Sequence
  Synthetic
aguuaagacuuugagugacuguu

SEQ ID NO: 682776 - RNA, 24 nt, Artificial Sequence
  Synthetic
gaguuaagacuuugagugacuguu

SEQ ID NO: 682777 - RNA, 18 nt, Artificial Sequence
  Synthetic
cuacuagcgaauacuguu

SEQ ID NO: 682778 - RNA, 19 nt, Artificial Sequence
  Synthetic
acuacuagcgaauacuguu

SEQ ID NO: 682779 - RNA, 20 nt, Artificial Sequence
  Synthetic
uacuacuagcgaauacuguu

SEQ ID NO: 682780 - RNA, 21 nt, Artificial Sequence
  Synthetic
auacuacuagcgaauacuguu

SEQ ID NO: 682781 - RNA, 22 nt, Artificial Sequence
  Synthetic
aauacuacuagcgaauacuguu

SEQ ID NO: 682782 - RNA, 23 nt, Artificial Sequence
  Synthetic
caauacuacuagcgaauacuguu

SEQ ID NO: 682783 - RNA, 24 nt, Artificial Sequence
  Synthetic
acaauacuacuagcgaauacuguu

SEQ ID NO: 682784 - RNA, 18 nt, Artificial Sequence
  Synthetic
cuauguaucccuacuguu

SEQ ID NO: 682785 - RNA, 19 nt, Artificial Sequence
  Synthetic
acuauguaucccuacuguu

SEQ ID NO: 682786 - RNA, 20 nt, Artificial Sequence
  Synthetic
uacuauguaucccuacuguu

SEQ ID NO: 682787 - RNA, 21 nt, Artificial Sequence
  Synthetic
auacuauguaucccuacuguu

SEQ ID NO: 682788 - RNA, 22 nt, Artificial Sequence
  Synthetic
gauacuauguaucccuacuguu

SEQ ID NO: 682789 - RNA, 23 nt, Artificial Sequence
  Synthetic
ugauacuauguaucccuacuguu

SEQ ID NO: 682790 - RNA, 24 nt, Artificial Sequence
  Synthetic
augauacuauguaucccuacuguu

SEQ ID NO: 682791 - RNA, 18 nt, Artificial Sequence
  Synthetic
guguauucugcuacuguu

SEQ ID NO: 682792 - RNA, 19 nt, Artificial Sequence
  Synthetic
uguguauucugcuacuguu

SEQ ID NO: 682793 - RNA, 20 nt, Artificial Sequence
  Synthetic
auguguauucugcuacuguu

SEQ ID NO: 682794 - RNA, 21 nt, Artificial Sequence
  Synthetic
aauguguauucugcuacuguu

SEQ ID NO: 682795 - RNA, 22 nt, Artificial Sequence
  Synthetic
uaauguguauucugcuacuguu

SEQ ID NO: 682796 - RNA, 23 nt, Artificial Sequence
  Synthetic
guaauguguauucugcuacuguu

SEQ ID NO: 682797 - RNA, 24 nt, Artificial Sequence
  Synthetic
aguaauguguauucugcuacuguu

SEQ ID NO: 682798 - RNA, 18 nt, Artificial Sequence
  Synthetic
uuauuacauuguacuguu

SEQ ID NO: 682799 - RNA, 19 nt, Artificial Sequence
  Synthetic
cuuauuacauuguacuguu

SEQ ID NO: 682800 - RNA, 20 nt, Artificial Sequence
  Synthetic
acuuauuacauuguacuguu

SEQ ID NO: 682801 - RNA, 21 nt, Artificial Sequence
  Synthetic
uacuuauuacauuguacuguu

SEQ ID NO: 682802 - RNA, 22 nt, Artificial Sequence
  Synthetic
auacuuauuacauuguacuguu

SEQ ID NO: 682803 - RNA, 23 nt, Artificial Sequence
  Synthetic
aauacuuauuacauuguacuguu

SEQ ID NO: 682804 - RNA, 24 nt, Artificial Sequence
  Synthetic
aaauacuuauuacauuguacuguu

SEQ ID NO: 682805 - RNA, 18 nt, Artificial Sequence
  Synthetic
uuauuguguuuuacuguu

SEQ ID NO: 682806 - RNA, 19 nt, Artificial Sequence
  Synthetic
cuuauuguguuuuacuguu

SEQ ID NO: 682807 - RNA, 20 nt, Artificial Sequence
  Synthetic
acuuauuguguuuuacuguu

SEQ ID NO: 682808 - RNA, 21 nt, Artificial Sequence
  Synthetic
uacuuauuguguuuuacuguu

SEQ ID NO: 682809 - RNA, 22 nt, Artificial Sequence
  Synthetic
uuacuuauuguguuuuacuguu

SEQ ID NO: 682810 - RNA, 23 nt, Artificial Sequence
  Synthetic
uuuacuuauuguguuuuacuguu

SEQ ID NO: 682811 - RNA, 24 nt, Artificial Sequence
  Synthetic
uuuuacuuauuguguuuuacuguu

SEQ ID NO: 682812 - RNA, 18 nt, Artificial Sequence
  Synthetic
auuguggugccaccuguu

SEQ ID NO: 682813 - RNA, 19 nt, Artificial Sequence
  Synthetic
cauuguggugccaccuguu

SEQ ID NO: 682814 - RNA, 20 nt, Artificial Sequence
  Synthetic
ucauuguggugccaccuguu

SEQ ID NO: 682815 - RNA, 21 nt, Artificial Sequence
  Synthetic
uucauuguggugccaccuguu

SEQ ID NO: 682816 - RNA, 22 nt, Artificial Sequence
  Synthetic
auucauuguggugccaccuguu

SEQ ID NO: 682817 - RNA, 23 nt, Artificial Sequence
  Synthetic
uauucauuguggugccaccuguu

SEQ ID NO: 682818 - RNA, 24 nt, Artificial Sequence
  Synthetic
auauucauuguggugccaccuguu

SEQ ID NO: 682819 - RNA, 21 nt, Artificial Sequence
  Synthetic
caucacacaccggggccuguu

SEQ ID NO: 682820 - RNA, 22 nt, Artificial Sequence
  Synthetic
acaucacacaccggggccuguu

SEQ ID NO: 682821 - RNA, 23 nt, Artificial Sequence
  Synthetic
aacaucacacaccggggccuguu

SEQ ID NO: 682822 - RNA, 24 nt, Artificial Sequence
  Synthetic
gaacaucacacaccggggccuguu

SEQ ID NO: 682823 - RNA, 18 nt, Artificial Sequence
  Synthetic
gauaaaagcaauccuguu

SEQ ID NO: 682824 - RNA, 19 nt, Artificial Sequence
  Synthetic
ggauaaaagcaauccuguu

SEQ ID NO: 682825 - RNA, 20 nt, Artificial Sequence
  Synthetic
aggauaaaagcaauccuguu

SEQ ID NO: 682826 - RNA, 21 nt, Artificial Sequence
  Synthetic
aaggauaaaagcaauccuguu

SEQ ID NO: 682827 - RNA, 22 nt, Artificial Sequence
  Synthetic
aaaggauaaaagcaauccuguu

SEQ ID NO: 682828 - RNA, 23 nt, Artificial Sequence
  Synthetic
caaaggauaaaagcaauccuguu

SEQ ID NO: 682829 - RNA, 24 nt, Artificial Sequence
  Synthetic
gcaaaggauaaaagcaauccuguu

SEQ ID NO: 682830 - RNA, 18 nt, Artificial Sequence
  Synthetic
uuuuuucuuccuccuguu

SEQ ID NO: 682831 - RNA, 19 nt, Artificial Sequence
  Synthetic
uuuuuuucuuccuccuguu

SEQ ID NO: 682832 - RNA, 20 nt, Artificial Sequence
  Synthetic
uuuuuuuucuuccuccuguu

SEQ ID NO: 682833 - RNA, 21 nt, Artificial Sequence
  Synthetic
auuuuuuuucuuccuccuguu

SEQ ID NO: 682834 - RNA, 22 nt, Artificial Sequence
  Synthetic
uauuuuuuuucuuccuccuguu

SEQ ID NO: 682835 - RNA, 23 nt, Artificial Sequence
  Synthetic
guauuuuuuuucuuccuccuguu

SEQ ID NO: 682836 - RNA, 24 nt, Artificial Sequence
  Synthetic
aguauuuuuuuucuuccuccuguu

SEQ ID NO: 682837 - RNA, 18 nt, Artificial Sequence
  Synthetic
aggacaucucuuccuguu

SEQ ID NO: 682838 - RNA, 19 nt, Artificial Sequence
  Synthetic
uaggacaucucuuccuguu

SEQ ID NO: 682839 - RNA, 20 nt, Artificial Sequence
  Synthetic
uuaggacaucucuuccuguu

SEQ ID NO: 682840 - RNA, 21 nt, Artificial Sequence
  Synthetic
uuuaggacaucucuuccuguu

SEQ ID NO: 682841 - RNA, 22 nt, Artificial Sequence
  Synthetic
guuuaggacaucucuuccuguu

SEQ ID NO: 682842 - RNA, 23 nt, Artificial Sequence
  Synthetic
uguuuaggacaucucuuccuguu

SEQ ID NO: 682843 - RNA, 24 nt, Artificial Sequence
  Synthetic
cuguuuaggacaucucuuccuguu

SEQ ID NO: 682844 - RNA, 18 nt, Artificial Sequence
  Synthetic
cucagcaguguggcuguu

SEQ ID NO: 682845 - RNA, 19 nt, Artificial Sequence
  Synthetic
ucucagcaguguggcuguu

SEQ ID NO: 682846 - RNA, 20 nt, Artificial Sequence
  Synthetic
aucucagcaguguggcuguu

SEQ ID NO: 682847 - RNA, 21 nt, Artificial Sequence
  Synthetic
aaucucagcaguguggcuguu

SEQ ID NO: 682848 - RNA, 22 nt, Artificial Sequence
  Synthetic
gaaucucagcaguguggcuguu

SEQ ID NO: 682849 - RNA, 23 nt, Artificial Sequence
  Synthetic
ugaaucucagcaguguggcuguu

SEQ ID NO: 682850 - RNA, 24 nt, Artificial Sequence
  Synthetic
uugaaucucagcaguguggcuguu

SEQ ID NO: 682851 - RNA, 18 nt, Artificial Sequence
  Synthetic
agucuaugaccugcuguu

SEQ ID NO: 682852 - RNA, 19 nt, Artificial Sequence
  Synthetic
aagucuaugaccugcuguu

SEQ ID NO: 682853 - RNA, 20 nt, Artificial Sequence
  Synthetic
aaagucuaugaccugcuguu

SEQ ID NO: 682854 - RNA, 21 nt, Artificial Sequence
  Synthetic
uaaagucuaugaccugcuguu

SEQ ID NO: 682855 - RNA, 22 nt, Artificial Sequence
  Synthetic
guaaagucuaugaccugcuguu

SEQ ID NO: 682856 - RNA, 23 nt, Artificial Sequence
  Synthetic
uguaaagucuaugaccugcuguu

SEQ ID NO: 682857 - RNA, 24 nt, Artificial Sequence
  Synthetic
guguaaagucuaugaccugcuguu

SEQ ID NO: 682858 - RNA, 18 nt, Artificial Sequence
  Synthetic
ucucuuuucuccucuguu

SEQ ID NO: 682859 - RNA, 19 nt, Artificial Sequence
  Synthetic
uucucuuuucuccucuguu

SEQ ID NO: 682860 - RNA, 20 nt, Artificial Sequence
  Synthetic
uuucucuuuucuccucuguu

SEQ ID NO: 682861 - RNA, 21 nt, Artificial Sequence
  Synthetic
guuucucuuuucuccucuguu

SEQ ID NO: 682862 - RNA, 22 nt, Artificial Sequence
  Synthetic
uguuucucuuuucuccucuguu

SEQ ID NO: 682863 - RNA, 23 nt, Artificial Sequence
  Synthetic
auguuucucuuuucuccucuguu

SEQ ID NO: 682864 - RNA, 24 nt, Artificial Sequence
  Synthetic
aauguuucucuuuucuccucuguu

SEQ ID NO: 682865 - RNA, 18 nt, Artificial Sequence
  Synthetic
uuaaguggaagcucuguu

SEQ ID NO: 682866 - RNA, 19 nt, Artificial Sequence
  Synthetic
cuuaaguggaagcucuguu

SEQ ID NO: 682867 - RNA, 20 nt, Artificial Sequence
  Synthetic
ccuuaaguggaagcucuguu

SEQ ID NO: 682868 - RNA, 21 nt, Artificial Sequence
  Synthetic
gccuuaaguggaagcucuguu

SEQ ID NO: 682869 - RNA, 22 nt, Artificial Sequence
  Synthetic
agccuuaaguggaagcucuguu

SEQ ID NO: 682870 - RNA, 23 nt, Artificial Sequence
  Synthetic
uagccuuaaguggaagcucuguu

SEQ ID NO: 682871 - RNA, 24 nt, Artificial Sequence
  Synthetic
auagccuuaaguggaagcucuguu

SEQ ID NO: 682872 - RNA, 18 nt, Artificial Sequence
  Synthetic
uaauauuaaugcucuguu

SEQ ID NO: 682873 - RNA, 19 nt, Artificial Sequence
  Synthetic
auaauauuaaugcucuguu

SEQ ID NO: 682874 - RNA, 20 nt, Artificial Sequence
  Synthetic
aauaauauuaaugcucuguu

SEQ ID NO: 682875 - RNA, 21 nt, Artificial Sequence
  Synthetic
uaauaauauuaaugcucuguu

SEQ ID NO: 682876 - RNA, 22 nt, Artificial Sequence
  Synthetic
auaauaauauuaaugcucuguu

SEQ ID NO: 682877 - RNA, 23 nt, Artificial Sequence
  Synthetic
uauaauaauauuaaugcucuguu

SEQ ID NO: 682878 - RNA, 24 nt, Artificial Sequence
  Synthetic
cuauaauaauauuaaugcucuguu

SEQ ID NO: 682879 - RNA, 18 nt, Artificial Sequence
  Synthetic
gccuguucaaagucuguu

SEQ ID NO: 682880 - RNA, 19 nt, Artificial Sequence
  Synthetic
agccuguucaaagucuguu

SEQ ID NO: 682881 - RNA, 20 nt, Artificial Sequence
  Synthetic
gagccuguucaaagucuguu

SEQ ID NO: 682882 - RNA, 21 nt, Artificial Sequence
  Synthetic
agagccuguucaaagucuguu

SEQ ID NO: 682883 - RNA, 22 nt, Artificial Sequence
  Synthetic
aagagccuguucaaagucuguu

SEQ ID NO: 682884 - RNA, 23 nt, Artificial Sequence
  Synthetic
uaagagccuguucaaagucuguu

SEQ ID NO: 682885 - RNA, 24 nt, Artificial Sequence
  Synthetic
auaagagccuguucaaagucuguu

SEQ ID NO: 682886 - RNA, 18 nt, Artificial Sequence
  Synthetic
uguuucaguaggucuguu

SEQ ID NO: 682887 - RNA, 19 nt, Artificial Sequence
  Synthetic
cuguuucaguaggucuguu

SEQ ID NO: 682888 - RNA, 20 nt, Artificial Sequence
  Synthetic
ucuguuucaguaggucuguu

SEQ ID NO: 682889 - RNA, 21 nt, Artificial Sequence
  Synthetic
uucuguuucaguaggucuguu

SEQ ID NO: 682890 - RNA, 22 nt, Artificial Sequence
  Synthetic
uuucuguuucaguaggucuguu

SEQ ID NO: 682891 - RNA, 23 nt, Artificial Sequence
  Synthetic
auuucuguuucaguaggucuguu

SEQ ID NO: 682892 - RNA, 24 nt, Artificial Sequence
  Synthetic
aauuucuguuucaguaggucuguu

SEQ ID NO: 682893 - RNA, 18 nt, Artificial Sequence
  Synthetic
gggccucaauggucuguu

SEQ ID NO: 682894 - RNA, 19 nt, Artificial Sequence
  Synthetic
agggccucaauggucuguu

SEQ ID NO: 682895 - RNA, 20 nt, Artificial Sequence
  Synthetic
gagggccucaauggucuguu

SEQ ID NO: 682896 - RNA, 21 nt, Artificial Sequence
  Synthetic
ugagggccucaauggucuguu

SEQ ID NO: 682897 - RNA, 22 nt, Artificial Sequence
  Synthetic
augagggccucaauggucuguu

SEQ ID NO: 682898 - RNA, 23 nt, Artificial Sequence
  Synthetic
caugagggccucaauggucuguu

SEQ ID NO: 682899 - RNA, 24 nt, Artificial Sequence
  Synthetic
ccaugagggccucaauggucuguu

SEQ ID NO: 682900 - RNA, 18 nt, Artificial Sequence
  Synthetic
aucugcuagucuucuguu

SEQ ID NO: 682901 - RNA, 19 nt, Artificial Sequence
  Synthetic
aaucugcuagucuucuguu

SEQ ID NO: 682902 - RNA, 20 nt, Artificial Sequence
  Synthetic
caaucugcuagucuucuguu

SEQ ID NO: 682903 - RNA, 21 nt, Artificial Sequence
  Synthetic
ccaaucugcuagucuucuguu

SEQ ID NO: 682904 - RNA, 22 nt, Artificial Sequence
  Synthetic
cccaaucugcuagucuucuguu

SEQ ID NO: 682905 - RNA, 23 nt, Artificial Sequence
  Synthetic
ccccaaucugcuagucuucuguu

SEQ ID NO: 682906 - RNA, 24 nt, Artificial Sequence
  Synthetic
gccccaaucugcuagucuucuguu

SEQ ID NO: 682907 - RNA, 18 nt, Artificial Sequence
  Synthetic
auuagagccauuucuguu

SEQ ID NO: 682908 - RNA, 19 nt, Artificial Sequence
  Synthetic
cauuagagccauuucuguu

SEQ ID NO: 682909 - RNA, 20 nt, Artificial Sequence
  Synthetic
acauuagagccauuucuguu

SEQ ID NO: 682910 - RNA, 21 nt, Artificial Sequence
  Synthetic
cacauuagagccauuucuguu

SEQ ID NO: 682911 - RNA, 22 nt, Artificial Sequence
  Synthetic
ucacauuagagccauuucuguu

SEQ ID NO: 682912 - RNA, 23 nt, Artificial Sequence
  Synthetic
cucacauuagagccauuucuguu

SEQ ID NO: 682913 - RNA, 24 nt, Artificial Sequence
  Synthetic
ucucacauuagagccauuucuguu

SEQ ID NO: 682914 - RNA, 18 nt, Artificial Sequence
  Synthetic
uauaauuuccuuucuguu

SEQ ID NO: 682915 - RNA, 19 nt, Artificial Sequence
  Synthetic
uuauaauuuccuuucuguu

SEQ ID NO: 682916 - RNA, 20 nt, Artificial Sequence
  Synthetic
guuauaauuuccuuucuguu

SEQ ID NO: 682917 - RNA, 21 nt, Artificial Sequence
  Synthetic
cguuauaauuuccuuucuguu

SEQ ID NO: 682918 - RNA, 22 nt, Artificial Sequence
  Synthetic
ucguuauaauuuccuuucuguu

SEQ ID NO: 682919 - RNA, 23 nt, Artificial Sequence
  Synthetic
uucguuauaauuuccuuucuguu

SEQ ID NO: 682920 - RNA, 24 nt, Artificial Sequence
  Synthetic
cuucguuauaauuuccuuucuguu

SEQ ID NO: 682921 - RNA, 18 nt, Artificial Sequence
  Synthetic
uuuaaacuggaaaguguu

SEQ ID NO: 682922 - RNA, 19 nt, Artificial Sequence
  Synthetic
uuuuaaacuggaaaguguu

SEQ ID NO: 682923 - RNA, 20 nt, Artificial Sequence
  Synthetic
uuuuuaaacuggaaaguguu

SEQ ID NO: 682924 - RNA, 21 nt, Artificial Sequence
  Synthetic
auuuuuaaacuggaaaguguu

SEQ ID NO: 682925 - RNA, 22 nt, Artificial Sequence
  Synthetic
gauuuuuaaacuggaaaguguu

SEQ ID NO: 682926 - RNA, 23 nt, Artificial Sequence
  Synthetic
ugauuuuuaaacuggaaaguguu

SEQ ID NO: 682927 - RNA, 24 nt, Artificial Sequence
  Synthetic
uugauuuuuaaacuggaaaguguu

SEQ ID NO: 682928 - RNA, 18 nt, Artificial Sequence
  Synthetic
gcuucauuuccaaguguu

SEQ ID NO: 682929 - RNA, 19 nt, Artificial Sequence
  Synthetic
ugcuucauuuccaaguguu

SEQ ID NO: 682930 - RNA, 20 nt, Artificial Sequence
  Synthetic
cugcuucauuuccaaguguu

SEQ ID NO: 682931 - RNA, 21 nt, Artificial Sequence
  Synthetic
gcugcuucauuuccaaguguu

SEQ ID NO: 682932 - RNA, 22 nt, Artificial Sequence
  Synthetic
ugcugcuucauuuccaaguguu

SEQ ID NO: 682933 - RNA, 23 nt, Artificial Sequence
  Synthetic
gugcugcuucauuuccaaguguu

SEQ ID NO: 682934 - RNA, 24 nt, Artificial Sequence
  Synthetic
ugugcugcuucauuuccaaguguu

SEQ ID NO: 682935 - RNA, 18 nt, Artificial Sequence
  Synthetic
uuuguuuauucaaguguu

SEQ ID NO: 682936 - RNA, 19 nt, Artificial Sequence
  Synthetic
cuuuguuuauucaaguguu

SEQ ID NO: 682937 - RNA, 20 nt, Artificial Sequence
  Synthetic
gcuuuguuuauucaaguguu

SEQ ID NO: 682938 - RNA, 21 nt, Artificial Sequence
  Synthetic
ugcuuuguuuauucaaguguu

SEQ ID NO: 682939 - RNA, 22 nt, Artificial Sequence
  Synthetic
augcuuuguuuauucaaguguu

SEQ ID NO: 682940 - RNA, 23 nt, Artificial Sequence
  Synthetic
aaugcuuuguuuauucaaguguu

SEQ ID NO: 682941 - RNA, 24 nt, Artificial Sequence
  Synthetic
aaaugcuuuguuuauucaaguguu

SEQ ID NO: 682942 - RNA, 18 nt, Artificial Sequence
  Synthetic
agaguagauggaaguguu

SEQ ID NO: 682943 - RNA, 19 nt, Artificial Sequence
  Synthetic
cagaguagauggaaguguu

SEQ ID NO: 682944 - RNA, 20 nt, Artificial Sequence
  Synthetic
acagaguagauggaaguguu

SEQ ID NO: 682945 - RNA, 21 nt, Artificial Sequence
  Synthetic
cacagaguagauggaaguguu

SEQ ID NO: 682946 - RNA, 22 nt, Artificial Sequence
  Synthetic
ccacagaguagauggaaguguu

SEQ ID NO: 682947 - RNA, 23 nt, Artificial Sequence
  Synthetic
accacagaguagauggaaguguu

SEQ ID NO: 682948 - RNA, 24 nt, Artificial Sequence
  Synthetic
aaccacagaguagauggaaguguu

SEQ ID NO: 682949 - RNA, 18 nt, Artificial Sequence
  Synthetic
gagaugauaugaaguguu

SEQ ID NO: 682950 - RNA, 19 nt, Artificial Sequence
  Synthetic
agagaugauaugaaguguu

SEQ ID NO: 682951 - RNA, 20 nt, Artificial Sequence
  Synthetic
uagagaugauaugaaguguu

SEQ ID NO: 682952 - RNA, 21 nt, Artificial Sequence
  Synthetic
cuagagaugauaugaaguguu

SEQ ID NO: 682953 - RNA, 22 nt, Artificial Sequence
  Synthetic
ucuagagaugauaugaaguguu

SEQ ID NO: 682954 - RNA, 23 nt, Artificial Sequence
  Synthetic
aucuagagaugauaugaaguguu

SEQ ID NO: 682955 - RNA, 24 nt, Artificial Sequence
  Synthetic
aaucuagagaugauaugaaguguu

SEQ ID NO: 682956 - RNA, 18 nt, Artificial Sequence
  Synthetic
aaaaugucuuuaaguguu

SEQ ID NO: 682957 - RNA, 19 nt, Artificial Sequence
  Synthetic
gaaaaugucuuuaaguguu

SEQ ID NO: 682958 - RNA, 20 nt, Artificial Sequence
  Synthetic
ugaaaaugucuuuaaguguu

SEQ ID NO: 682959 - RNA, 21 nt, Artificial Sequence
  Synthetic
augaaaaugucuuuaaguguu

SEQ ID NO: 682960 - RNA, 22 nt, Artificial Sequence
  Synthetic
aaugaaaaugucuuuaaguguu

SEQ ID NO: 682961 - RNA, 23 nt, Artificial Sequence
  Synthetic
aaaugaaaaugucuuuaaguguu

SEQ ID NO: 682962 - RNA, 24 nt, Artificial Sequence
  Synthetic
uaaaugaaaaugucuuuaaguguu

SEQ ID NO: 682963 - RNA, 18 nt, Artificial Sequence
  Synthetic
agguuggcaaacaguguu

SEQ ID NO: 682964 - RNA, 19 nt, Artificial Sequence
  Synthetic
gagguuggcaaacaguguu

SEQ ID NO: 682965 - RNA, 20 nt, Artificial Sequence
  Synthetic
ugagguuggcaaacaguguu

SEQ ID NO: 682966 - RNA, 21 nt, Artificial Sequence
  Synthetic
augagguuggcaaacaguguu

SEQ ID NO: 682967 - RNA, 22 nt, Artificial Sequence
  Synthetic
aaugagguuggcaaacaguguu

SEQ ID NO: 682968 - RNA, 23 nt, Artificial Sequence
  Synthetic
uaaugagguuggcaaacaguguu

SEQ ID NO: 682969 - RNA, 24 nt, Artificial Sequence
  Synthetic
guaaugagguuggcaaacaguguu

SEQ ID NO: 682970 - RNA, 18 nt, Artificial Sequence
  Synthetic
agaaauguacacaguguu

SEQ ID NO: 682971 - RNA, 19 nt, Artificial Sequence
  Synthetic
aagaaauguacacaguguu

SEQ ID NO: 682972 - RNA, 20 nt, Artificial Sequence
  Synthetic
aaagaaauguacacaguguu

SEQ ID NO: 682973 - RNA, 21 nt, Artificial Sequence
  Synthetic
uaaagaaauguacacaguguu

SEQ ID NO: 682974 - RNA, 22 nt, Artificial Sequence
  Synthetic
auaaagaaauguacacaguguu

SEQ ID NO: 682975 - RNA, 23 nt, Artificial Sequence
  Synthetic
gauaaagaaauguacacaguguu

SEQ ID NO: 682976 - RNA, 24 nt, Artificial Sequence
  Synthetic
ugauaaagaaauguacacaguguu

SEQ ID NO: 682977 - RNA, 18 nt, Artificial Sequence
  Synthetic
agggcacuggacaguguu

SEQ ID NO: 682978 - RNA, 19 nt, Artificial Sequence
  Synthetic
uagggcacuggacaguguu

SEQ ID NO: 682979 - RNA, 20 nt, Artificial Sequence
  Synthetic
auagggcacuggacaguguu

SEQ ID NO: 682980 - RNA, 21 nt, Artificial Sequence
  Synthetic
gauagggcacuggacaguguu

SEQ ID NO: 682981 - RNA, 22 nt, Artificial Sequence
  Synthetic
ggauagggcacuggacaguguu

SEQ ID NO: 682982 - RNA, 23 nt, Artificial Sequence
  Synthetic
aggauagggcacuggacaguguu

SEQ ID NO: 682983 - RNA, 24 nt, Artificial Sequence
  Synthetic
uaggauagggcacuggacaguguu

SEQ ID NO: 682984 - RNA, 18 nt, Artificial Sequence
  Synthetic
caguagauuaccaguguu

SEQ ID NO: 682985 - RNA, 19 nt, Artificial Sequence
  Synthetic
ccaguagauuaccaguguu

SEQ ID NO: 682986 - RNA, 20 nt, Artificial Sequence
  Synthetic
cccaguagauuaccaguguu

SEQ ID NO: 682987 - RNA, 21 nt, Artificial Sequence
  Synthetic
gcccaguagauuaccaguguu

SEQ ID NO: 682988 - RNA, 22 nt, Artificial Sequence
  Synthetic
agcccaguagauuaccaguguu

SEQ ID NO: 682989 - RNA, 23 nt, Artificial Sequence
  Synthetic
aagcccaguagauuaccaguguu

SEQ ID NO: 682990 - RNA, 24 nt, Artificial Sequence
  Synthetic
aaagcccaguagauuaccaguguu

SEQ ID NO: 682991 - RNA, 18 nt, Artificial Sequence
  Synthetic
uaaacauuuuagaguguu

SEQ ID NO: 682992 - RNA, 19 nt, Artificial Sequence
  Synthetic
auaaacauuuuagaguguu

SEQ ID NO: 682993 - RNA, 20 nt, Artificial Sequence
  Synthetic
aauaaacauuuuagaguguu

SEQ ID NO: 682994 - RNA, 21 nt, Artificial Sequence
  Synthetic
caauaaacauuuuagaguguu

SEQ ID NO: 682995 - RNA, 22 nt, Artificial Sequence
  Synthetic
acaauaaacauuuuagaguguu

SEQ ID NO: 682996 - RNA, 23 nt, Artificial Sequence
  Synthetic
aacaauaaacauuuuagaguguu

SEQ ID NO: 682997 - RNA, 24 nt, Artificial Sequence
  Synthetic
gaacaauaaacauuuuagaguguu

SEQ ID NO: 682998 - RNA, 18 nt, Artificial Sequence
  Synthetic
aacaaugaugugaguguu

SEQ ID NO: 682999 - RNA, 19 nt, Artificial Sequence
  Synthetic
gaacaaugaugugaguguu

SEQ ID NO: 683000 - RNA, 20 nt, Artificial Sequence
  Synthetic
ugaacaaugaugugaguguu

SEQ ID NO: 683001 - RNA, 21 nt, Artificial Sequence
  Synthetic
cugaacaaugaugugaguguu

SEQ ID NO: 683002 - RNA, 22 nt, Artificial Sequence
  Synthetic
acugaacaaugaugugaguguu

SEQ ID NO: 683003 - RNA, 23 nt, Artificial Sequence
  Synthetic
cacugaacaaugaugugaguguu

SEQ ID NO: 683004 - RNA, 24 nt, Artificial Sequence
  Synthetic
gcacugaacaaugaugugaguguu

SEQ ID NO: 683005 - RNA, 18 nt, Artificial Sequence
  Synthetic
uaggcaagagauaguguu

SEQ ID NO: 683006 - RNA, 19 nt, Artificial Sequence
  Synthetic
cuaggcaagagauaguguu

SEQ ID NO: 683007 - RNA, 20 nt, Artificial Sequence
  Synthetic
ucuaggcaagagauaguguu

SEQ ID NO: 683008 - RNA, 21 nt, Artificial Sequence
  Synthetic
gucuaggcaagagauaguguu

SEQ ID NO: 683009 - RNA, 22 nt, Artificial Sequence
  Synthetic
agucuaggcaagagauaguguu

SEQ ID NO: 683010 - RNA, 23 nt, Artificial Sequence
  Synthetic
gagucuaggcaagagauaguguu

SEQ ID NO: 683011 - RNA, 24 nt, Artificial Sequence
  Synthetic
agagucuaggcaagagauaguguu

SEQ ID NO: 683012 - RNA, 18 nt, Artificial Sequence
  Synthetic
agugacauagcuaguguu

SEQ ID NO: 683013 - RNA, 19 nt, Artificial Sequence
  Synthetic
aagugacauagcuaguguu

SEQ ID NO: 683014 - RNA, 20 nt, Artificial Sequence
  Synthetic
aaagugacauagcuaguguu

SEQ ID NO: 683015 - RNA, 21 nt, Artificial Sequence
  Synthetic
gaaagugacauagcuaguguu

SEQ ID NO: 683016 - RNA, 22 nt, Artificial Sequence
  Synthetic
ugaaagugacauagcuaguguu

SEQ ID NO: 683017 - RNA, 23 nt, Artificial Sequence
  Synthetic
uugaaagugacauagcuaguguu

SEQ ID NO: 683018 - RNA, 24 nt, Artificial Sequence
  Synthetic
uuugaaagugacauagcuaguguu

SEQ ID NO: 683019 - RNA, 18 nt, Artificial Sequence
  Synthetic
auuacagaggcuaguguu

SEQ ID NO: 683020 - RNA, 19 nt, Artificial Sequence
  Synthetic
gauuacagaggcuaguguu

SEQ ID NO: 683021 - RNA, 20 nt, Artificial Sequence
  Synthetic
ggauuacagaggcuaguguu

SEQ ID NO: 683022 - RNA, 21 nt, Artificial Sequence
  Synthetic
aggauuacagaggcuaguguu

SEQ ID NO: 683023 - RNA, 22 nt, Artificial Sequence
  Synthetic
caggauuacagaggcuaguguu

SEQ ID NO: 683024 - RNA, 23 nt, Artificial Sequence
  Synthetic
ccaggauuacagaggcuaguguu

SEQ ID NO: 683025 - RNA, 24 nt, Artificial Sequence
  Synthetic
cccaggauuacagaggcuaguguu

SEQ ID NO: 683026 - RNA, 18 nt, Artificial Sequence
  Synthetic
caauaauccccacguguu

SEQ ID NO: 683027 - RNA, 19 nt, Artificial Sequence
  Synthetic
ccaauaauccccacguguu

SEQ ID NO: 683028 - RNA, 20 nt, Artificial Sequence
  Synthetic
uccaauaauccccacguguu

SEQ ID NO: 683029 - RNA, 21 nt, Artificial Sequence
  Synthetic
cuccaauaauccccacguguu

SEQ ID NO: 683030 - RNA, 22 nt, Artificial Sequence
  Synthetic
acuccaauaauccccacguguu

SEQ ID NO: 683031 - RNA, 23 nt, Artificial Sequence
  Synthetic
aacuccaauaauccccacguguu

SEQ ID NO: 683032 - RNA, 24 nt, Artificial Sequence
  Synthetic
uaacuccaauaauccccacguguu

SEQ ID NO: 683033 - RNA, 18 nt, Artificial Sequence
  Synthetic
ucaacauuacaagguguu

SEQ ID NO: 683034 - RNA, 19 nt, Artificial Sequence
  Synthetic
aucaacauuacaagguguu

SEQ ID NO: 683035 - RNA, 20 nt, Artificial Sequence
  Synthetic
uaucaacauuacaagguguu

SEQ ID NO: 683036 - RNA, 21 nt, Artificial Sequence
  Synthetic
auaucaacauuacaagguguu

SEQ ID NO: 683037 - RNA, 22 nt, Artificial Sequence
  Synthetic
aauaucaacauuacaagguguu

SEQ ID NO: 683038 - RNA, 23 nt, Artificial Sequence
  Synthetic
aaauaucaacauuacaagguguu

SEQ ID NO: 683039 - RNA, 24 nt, Artificial Sequence
  Synthetic
uaaauaucaacauuacaagguguu

SEQ ID NO: 683040 - RNA, 18 nt, Artificial Sequence
  Synthetic
aggcuacaucaagguguu

SEQ ID NO: 683041 - RNA, 19 nt, Artificial Sequence
  Synthetic
aaggcuacaucaagguguu

SEQ ID NO: 683042 - RNA, 20 nt, Artificial Sequence
  Synthetic
uaaggcuacaucaagguguu

SEQ ID NO: 683043 - RNA, 21 nt, Artificial Sequence
  Synthetic
uuaaggcuacaucaagguguu

SEQ ID NO: 683044 - RNA, 22 nt, Artificial Sequence
  Synthetic
cuuaaggcuacaucaagguguu

SEQ ID NO: 683045 - RNA, 23 nt, Artificial Sequence
  Synthetic
gcuuaaggcuacaucaagguguu

SEQ ID NO: 683046 - RNA, 24 nt, Artificial Sequence
  Synthetic
ugcuuaaggcuacaucaagguguu

SEQ ID NO: 683047 - RNA, 18 nt, Artificial Sequence
  Synthetic
auuaaucaauaagguguu

SEQ ID NO: 683048 - RNA, 19 nt, Artificial Sequence
  Synthetic
aauuaaucaauaagguguu

SEQ ID NO: 683049 - RNA, 20 nt, Artificial Sequence
  Synthetic
aaauuaaucaauaagguguu

SEQ ID NO: 683050 - RNA, 21 nt, Artificial Sequence
  Synthetic
uaaauuaaucaauaagguguu

SEQ ID NO: 683051 - RNA, 22 nt, Artificial Sequence
  Synthetic
uuaaauuaaucaauaagguguu

SEQ ID NO: 683052 - RNA, 23 nt, Artificial Sequence
  Synthetic
uuuaaauuaaucaauaagguguu

SEQ ID NO: 683053 - RNA, 24 nt, Artificial Sequence
  Synthetic
auuuaaauuaaucaauaagguguu

SEQ ID NO: 683054 - RNA, 18 nt, Artificial Sequence
  Synthetic
uaauauuuguaagguguu

SEQ ID NO: 683055 - RNA, 19 nt, Artificial Sequence
  Synthetic
uuaauauuuguaagguguu

SEQ ID NO: 683056 - RNA, 20 nt, Artificial Sequence
  Synthetic
guuaauauuuguaagguguu

SEQ ID NO: 683057 - RNA, 21 nt, Artificial Sequence
  Synthetic
aguuaauauuuguaagguguu

SEQ ID NO: 683058 - RNA, 22 nt, Artificial Sequence
  Synthetic
gaguuaauauuuguaagguguu

SEQ ID NO: 683059 - RNA, 23 nt, Artificial Sequence
  Synthetic
agaguuaauauuuguaagguguu

SEQ ID NO: 683060 - RNA, 24 nt, Artificial Sequence
  Synthetic
uagaguuaauauuuguaagguguu

SEQ ID NO: 683061 - RNA, 18 nt, Artificial Sequence
  Synthetic
ugcuacugaagagguguu

SEQ ID NO: 683062 - RNA, 19 nt, Artificial Sequence
  Synthetic
gugcuacugaagagguguu

SEQ ID NO: 683063 - RNA, 20 nt, Artificial Sequence
  Synthetic
ugugcuacugaagagguguu

SEQ ID NO: 683064 - RNA, 21 nt, Artificial Sequence
  Synthetic
augugcuacugaagagguguu

SEQ ID NO: 683065 - RNA, 22 nt, Artificial Sequence
  Synthetic
caugugcuacugaagagguguu

SEQ ID NO: 683066 - RNA, 23 nt, Artificial Sequence
  Synthetic
acaugugcuacugaagagguguu

SEQ ID NO: 683067 - RNA, 24 nt, Artificial Sequence
  Synthetic
uacaugugcuacugaagagguguu

SEQ ID NO: 683068 - RNA, 18 nt, Artificial Sequence
  Synthetic
uagguuaacauagguguu

SEQ ID NO: 683069 - RNA, 19 nt, Artificial Sequence
  Synthetic
guagguuaacauagguguu

SEQ ID NO: 683070 - RNA, 20 nt, Artificial Sequence
  Synthetic
uguagguuaacauagguguu

SEQ ID NO: 683071 - RNA, 21 nt, Artificial Sequence
  Synthetic
cuguagguuaacauagguguu

SEQ ID NO: 683072 - RNA, 22 nt, Artificial Sequence
  Synthetic
acuguagguuaacauagguguu

SEQ ID NO: 683073 - RNA, 23 nt, Artificial Sequence
  Synthetic
aacuguagguuaacauagguguu

SEQ ID NO: 683074 - RNA, 24 nt, Artificial Sequence
  Synthetic
caacuguagguuaacauagguguu

SEQ ID NO: 683075 - RNA, 18 nt, Artificial Sequence
  Synthetic
gaaagcaacacggguguu

SEQ ID NO: 683076 - RNA, 19 nt, Artificial Sequence
  Synthetic
agaaagcaacacggguguu

SEQ ID NO: 683077 - RNA, 20 nt, Artificial Sequence
  Synthetic
uagaaagcaacacggguguu

SEQ ID NO: 683078 - RNA, 21 nt, Artificial Sequence
  Synthetic
auagaaagcaacacggguguu

SEQ ID NO: 683079 - RNA, 22 nt, Artificial Sequence
  Synthetic
cauagaaagcaacacggguguu

SEQ ID NO: 683080 - RNA, 23 nt, Artificial Sequence
  Synthetic
ccauagaaagcaacacggguguu

SEQ ID NO: 683081 - RNA, 24 nt, Artificial Sequence
  Synthetic
gccauagaaagcaacacggguguu

SEQ ID NO: 683082 - RNA, 18 nt, Artificial Sequence
  Synthetic
gucacuguuuuggguguu

SEQ ID NO: 683083 - RNA, 19 nt, Artificial Sequence
  Synthetic
agucacuguuuuggguguu

SEQ ID NO: 683084 - RNA, 20 nt, Artificial Sequence
  Synthetic
uagucacuguuuuggguguu

SEQ ID NO: 683085 - RNA, 21 nt, Artificial Sequence
  Synthetic
cuagucacuguuuuggguguu

SEQ ID NO: 683086 - RNA, 22 nt, Artificial Sequence
  Synthetic
ccuagucacuguuuuggguguu

SEQ ID NO: 683087 - RNA, 23 nt, Artificial Sequence
  Synthetic
accuagucacuguuuuggguguu

SEQ ID NO: 683088 - RNA, 24 nt, Artificial Sequence
  Synthetic
uaccuagucacuguuuuggguguu

SEQ ID NO: 683089 - RNA, 18 nt, Artificial Sequence
  Synthetic
uauuuaauaaaugguguu

SEQ ID NO: 683090 - RNA, 19 nt, Artificial Sequence
  Synthetic
cuauuuaauaaaugguguu

SEQ ID NO: 683091 - RNA, 20 nt, Artificial Sequence
  Synthetic
ccuauuuaauaaaugguguu

SEQ ID NO: 683092 - RNA, 21 nt, Artificial Sequence
  Synthetic
cccuauuuaauaaaugguguu

SEQ ID NO: 683093 - RNA, 22 nt, Artificial Sequence
  Synthetic
ucccuauuuaauaaaugguguu

SEQ ID NO: 683094 - RNA, 23 nt, Artificial Sequence
  Synthetic
uucccuauuuaauaaaugguguu

SEQ ID NO: 683095 - RNA, 24 nt, Artificial Sequence
  Synthetic
auucccuauuuaauaaaugguguu

SEQ ID NO: 683096 - RNA, 18 nt, Artificial Sequence
  Synthetic
uuaacacaaacugguguu

SEQ ID NO: 683097 - RNA, 19 nt, Artificial Sequence
  Synthetic
auuaacacaaacugguguu

SEQ ID NO: 683098 - RNA, 20 nt, Artificial Sequence
  Synthetic
aauuaacacaaacugguguu

SEQ ID NO: 683099 - RNA, 21 nt, Artificial Sequence
  Synthetic
gaauuaacacaaacugguguu

SEQ ID NO: 683100 - RNA, 22 nt, Artificial Sequence
  Synthetic
agaauuaacacaaacugguguu

SEQ ID NO: 683101 - RNA, 23 nt, Artificial Sequence
  Synthetic
cagaauuaacacaaacugguguu

SEQ ID NO: 683102 - RNA, 24 nt, Artificial Sequence
  Synthetic
ucagaauuaacacaaacugguguu

SEQ ID NO: 683103 - RNA, 21 nt, Artificial Sequence
  Synthetic
guugccauugcuuuugguguu

SEQ ID NO: 683104 - RNA, 22 nt, Artificial Sequence
  Synthetic
uguugccauugcuuuugguguu

SEQ ID NO: 683105 - RNA, 23 nt, Artificial Sequence
  Synthetic
uuguugccauugcuuuugguguu

SEQ ID NO: 683106 - RNA, 24 nt, Artificial Sequence
  Synthetic
uuuguugccauugcuuuugguguu

SEQ ID NO: 683107 - RNA, 18 nt, Artificial Sequence
  Synthetic
auugucauaaaauguguu

SEQ ID NO: 683108 - RNA, 19 nt, Artificial Sequence
  Synthetic
uauugucauaaaauguguu

SEQ ID NO: 683109 - RNA, 20 nt, Artificial Sequence
  Synthetic
guauugucauaaaauguguu

SEQ ID NO: 683110 - RNA, 21 nt, Artificial Sequence
  Synthetic
aguauugucauaaaauguguu

SEQ ID NO: 683111 - RNA, 22 nt, Artificial Sequence
  Synthetic
aaguauugucauaaaauguguu

SEQ ID NO: 683112 - RNA, 23 nt, Artificial Sequence
  Synthetic
gaaguauugucauaaaauguguu

SEQ ID NO: 683113 - RNA, 24 nt, Artificial Sequence
  Synthetic
agaaguauugucauaaaauguguu

SEQ ID NO: 683114 - RNA, 18 nt, Artificial Sequence
  Synthetic
guugaauucccauguguu

SEQ ID NO: 683115 - RNA, 19 nt, Artificial Sequence
  Synthetic
uguugaauucccauguguu

SEQ ID NO: 683116 - RNA, 20 nt, Artificial Sequence
  Synthetic
auguugaauucccauguguu

SEQ ID NO: 683117 - RNA, 21 nt, Artificial Sequence
  Synthetic
cauguugaauucccauguguu

SEQ ID NO: 683118 - RNA, 22 nt, Artificial Sequence
  Synthetic
ucauguugaauucccauguguu

SEQ ID NO: 683119 - RNA, 23 nt, Artificial Sequence
  Synthetic
cucauguugaauucccauguguu

SEQ ID NO: 683120 - RNA, 24 nt, Artificial Sequence
  Synthetic
ucucauguugaauucccauguguu

SEQ ID NO: 683121 - RNA, 18 nt, Artificial Sequence
  Synthetic
aauaauuagugauguguu

SEQ ID NO: 683122 - RNA, 19 nt, Artificial Sequence
  Synthetic
aaauaauuagugauguguu

SEQ ID NO: 683123 - RNA, 20 nt, Artificial Sequence
  Synthetic
aaaauaauuagugauguguu

SEQ ID NO: 683124 - RNA, 21 nt, Artificial Sequence
  Synthetic
aaaaauaauuagugauguguu

SEQ ID NO: 683125 - RNA, 22 nt, Artificial Sequence
  Synthetic
gaaaaauaauuagugauguguu

SEQ ID NO: 683126 - RNA, 23 nt, Artificial Sequence
  Synthetic
agaaaaauaauuagugauguguu

SEQ ID NO: 683127 - RNA, 24 nt, Artificial Sequence
  Synthetic
cagaaaaauaauuagugauguguu

SEQ ID NO: 683128 - RNA, 18 nt, Artificial Sequence
  Synthetic
ggaagaaagauauguguu

SEQ ID NO: 683129 - RNA, 19 nt, Artificial Sequence
  Synthetic
gggaagaaagauauguguu

SEQ ID NO: 683130 - RNA, 20 nt, Artificial Sequence
  Synthetic
ggggaagaaagauauguguu

SEQ ID NO: 683131 - RNA, 21 nt, Artificial Sequence
  Synthetic
uggggaagaaagauauguguu

SEQ ID NO: 683132 - RNA, 22 nt, Artificial Sequence
  Synthetic
guggggaagaaagauauguguu

SEQ ID NO: 683133 - RNA, 23 nt, Artificial Sequence
  Synthetic
uguggggaagaaagauauguguu

SEQ ID NO: 683134 - RNA, 24 nt, Artificial Sequence
  Synthetic
guguggggaagaaagauauguguu

SEQ ID NO: 683135 - RNA, 18 nt, Artificial Sequence
  Synthetic
auuuguuacaucuguguu

SEQ ID NO: 683136 - RNA, 19 nt, Artificial Sequence
  Synthetic
aauuuguuacaucuguguu

SEQ ID NO: 683137 - RNA, 20 nt, Artificial Sequence
  Synthetic
uaauuuguuacaucuguguu

SEQ ID NO: 683138 - RNA, 21 nt, Artificial Sequence
  Synthetic
guaauuuguuacaucuguguu

SEQ ID NO: 683139 - RNA, 22 nt, Artificial Sequence
  Synthetic
gguaauuuguuacaucuguguu

SEQ ID NO: 683140 - RNA, 23 nt, Artificial Sequence
  Synthetic
ugguaauuuguuacaucuguguu

SEQ ID NO: 683141 - RNA, 24 nt, Artificial Sequence
  Synthetic
gugguaauuuguuacaucuguguu

SEQ ID NO: 683142 - RNA, 18 nt, Artificial Sequence
  Synthetic
aaagaaaacuucuguguu

SEQ ID NO: 683143 - RNA, 19 nt, Artificial Sequence
  Synthetic
aaaagaaaacuucuguguu

SEQ ID NO: 683144 - RNA, 20 nt, Artificial Sequence
  Synthetic
aaaaagaaaacuucuguguu

SEQ ID NO: 683145 - RNA, 21 nt, Artificial Sequence
  Synthetic
aaaaaagaaaacuucuguguu

SEQ ID NO: 683146 - RNA, 22 nt, Artificial Sequence
  Synthetic
aaaaaaagaaaacuucuguguu

SEQ ID NO: 683147 - RNA, 23 nt, Artificial Sequence
  Synthetic
aaaaaaaagaaaacuucuguguu

SEQ ID NO: 683148 - RNA, 24 nt, Artificial Sequence
  Synthetic
uaaaaaaaagaaaacuucuguguu

SEQ ID NO: 683149 - RNA, 18 nt, Artificial Sequence
  Synthetic
acucuagauuucuguguu

SEQ ID NO: 683150 - RNA, 19 nt, Artificial Sequence
  Synthetic
aacucuagauuucuguguu

SEQ ID NO: 683151 - RNA, 20 nt, Artificial Sequence
  Synthetic
caacucuagauuucuguguu

SEQ ID NO: 683152 - RNA, 21 nt, Artificial Sequence
  Synthetic
ucaacucuagauuucuguguu

SEQ ID NO: 683153 - RNA, 22 nt, Artificial Sequence
  Synthetic
gucaacucuagauuucuguguu

SEQ ID NO: 683154 - RNA, 23 nt, Artificial Sequence
  Synthetic
ugucaacucuagauuucuguguu

SEQ ID NO: 683155 - RNA, 24 nt, Artificial Sequence
  Synthetic
augucaacucuagauuucuguguu

SEQ ID NO: 683156 - RNA, 18 nt, Artificial Sequence
  Synthetic
guuagggcgaaguguguu

SEQ ID NO: 683157 - RNA, 19 nt, Artificial Sequence
  Synthetic
gguuagggcgaaguguguu

SEQ ID NO: 683158 - RNA, 20 nt, Artificial Sequence
  Synthetic
agguuagggcgaaguguguu

SEQ ID NO: 683159 - RNA, 21 nt, Artificial Sequence
  Synthetic
aagguuagggcgaaguguguu

SEQ ID NO: 683160 - RNA, 22 nt, Artificial Sequence
  Synthetic
aaagguuagggcgaaguguguu

SEQ ID NO: 683161 - RNA, 23 nt, Artificial Sequence
  Synthetic
caaagguuagggcgaaguguguu

SEQ ID NO: 683162 - RNA, 24 nt, Artificial Sequence
  Synthetic
gcaaagguuagggcgaaguguguu

SEQ ID NO: 683163 - RNA, 18 nt, Artificial Sequence
  Synthetic
ucuaaaaauaaguguguu

SEQ ID NO: 683164 - RNA, 19 nt, Artificial Sequence
  Synthetic
uucuaaaaauaaguguguu

SEQ ID NO: 683165 - RNA, 20 nt, Artificial Sequence
  Synthetic
cuucuaaaaauaaguguguu

SEQ ID NO: 683166 - RNA, 21 nt, Artificial Sequence
  Synthetic
acuucuaaaaauaaguguguu

SEQ ID NO: 683167 - RNA, 22 nt, Artificial Sequence
  Synthetic
aacuucuaaaaauaaguguguu

SEQ ID NO: 683168 - RNA, 23 nt, Artificial Sequence
  Synthetic
aaacuucuaaaaauaaguguguu

SEQ ID NO: 683169 - RNA, 24 nt, Artificial Sequence
  Synthetic
caaacuucuaaaaauaaguguguu

SEQ ID NO: 683170 - RNA, 18 nt, Artificial Sequence
  Synthetic
ugugccuguguguguguu

SEQ ID NO: 683171 - RNA, 19 nt, Artificial Sequence
  Synthetic
augugccuguguguguguu

SEQ ID NO: 683172 - RNA, 20 nt, Artificial Sequence
  Synthetic
uaugugccuguguguguguu

SEQ ID NO: 683173 - RNA, 21 nt, Artificial Sequence
  Synthetic
guaugugccuguguguguguu

SEQ ID NO: 683174 - RNA, 22 nt, Artificial Sequence
  Synthetic
uguaugugccuguguguguguu

SEQ ID NO: 683175 - RNA, 23 nt, Artificial Sequence
  Synthetic
guguaugugccuguguguguguu

SEQ ID NO: 683176 - RNA, 24 nt, Artificial Sequence
  Synthetic
uguguaugugccuguguguguguu

SEQ ID NO: 683177 - RNA, 18 nt, Artificial Sequence
  Synthetic
cgugauguaaaaauuguu

SEQ ID NO: 683178 - RNA, 19 nt, Artificial Sequence
  Synthetic
ucgugauguaaaaauuguu

SEQ ID NO: 683179 - RNA, 20 nt, Artificial Sequence
  Synthetic
aucgugauguaaaaauuguu

SEQ ID NO: 683180 - RNA, 21 nt, Artificial Sequence
  Synthetic
caucgugauguaaaaauuguu

SEQ ID NO: 683181 - RNA, 22 nt, Artificial Sequence
  Synthetic
ccaucgugauguaaaaauuguu

SEQ ID NO: 683182 - RNA, 23 nt, Artificial Sequence
  Synthetic
gccaucgugauguaaaaauuguu

SEQ ID NO: 683183 - RNA, 24 nt, Artificial Sequence
  Synthetic
ugccaucgugauguaaaaauuguu

SEQ ID NO: 683184 - RNA, 18 nt, Artificial Sequence
  Synthetic
aaauuaagagaaauuguu

SEQ ID NO: 683185 - RNA, 19 nt, Artificial Sequence
  Synthetic
gaaauuaagagaaauuguu

SEQ ID NO: 683186 - RNA, 20 nt, Artificial Sequence
  Synthetic
agaaauuaagagaaauuguu

SEQ ID NO: 683187 - RNA, 21 nt, Artificial Sequence
  Synthetic
uagaaauuaagagaaauuguu

SEQ ID NO: 683188 - RNA, 22 nt, Artificial Sequence
  Synthetic
guagaaauuaagagaaauuguu

SEQ ID NO: 683189 - RNA, 23 nt, Artificial Sequence
  Synthetic
aguagaaauuaagagaaauuguu

SEQ ID NO: 683190 - RNA, 24 nt, Artificial Sequence
  Synthetic
aaguagaaauuaagagaaauuguu

SEQ ID NO: 683191 - RNA, 18 nt, Artificial Sequence
  Synthetic
uguccaagaaacauuguu

SEQ ID NO: 683192 - RNA, 19 nt, Artificial Sequence
  Synthetic
auguccaagaaacauuguu

SEQ ID NO: 683193 - RNA, 20 nt, Artificial Sequence
  Synthetic
aauguccaagaaacauuguu

SEQ ID NO: 683194 - RNA, 21 nt, Artificial Sequence
  Synthetic
aaauguccaagaaacauuguu

SEQ ID NO: 683195 - RNA, 22 nt, Artificial Sequence
  Synthetic
aaaauguccaagaaacauuguu

SEQ ID NO: 683196 - RNA, 23 nt, Artificial Sequence
  Synthetic
gaaaauguccaagaaacauuguu

SEQ ID NO: 683197 - RNA, 24 nt, Artificial Sequence
  Synthetic
ggaaaauguccaagaaacauuguu

SEQ ID NO: 683198 - RNA, 18 nt, Artificial Sequence
  Synthetic
augagaaucaccauuguu

SEQ ID NO: 683199 - RNA, 19 nt, Artificial Sequence
  Synthetic
caugagaaucaccauuguu

SEQ ID NO: 683200 - RNA, 20 nt, Artificial Sequence
  Synthetic
acaugagaaucaccauuguu

SEQ ID NO: 683201 - RNA, 21 nt, Artificial Sequence
  Synthetic
uacaugagaaucaccauuguu

SEQ ID NO: 683202 - RNA, 22 nt, Artificial Sequence
  Synthetic
uuacaugagaaucaccauuguu

SEQ ID NO: 683203 - RNA, 23 nt, Artificial Sequence
  Synthetic
auuacaugagaaucaccauuguu

SEQ ID NO: 683204 - RNA, 24 nt, Artificial Sequence
  Synthetic
uauuacaugagaaucaccauuguu

SEQ ID NO: 683205 - RNA, 18 nt, Artificial Sequence
  Synthetic
ugauuugaaaucauuguu

SEQ ID NO: 683206 - RNA, 19 nt, Artificial Sequence
  Synthetic
augauuugaaaucauuguu

SEQ ID NO: 683207 - RNA, 20 nt, Artificial Sequence
  Synthetic
aaugauuugaaaucauuguu

SEQ ID NO: 683208 - RNA, 21 nt, Artificial Sequence
  Synthetic
uaaugauuugaaaucauuguu

SEQ ID NO: 683209 - RNA, 22 nt, Artificial Sequence
  Synthetic
uuaaugauuugaaaucauuguu

SEQ ID NO: 683210 - RNA, 23 nt, Artificial Sequence
  Synthetic
guuaaugauuugaaaucauuguu

SEQ ID NO: 683211 - RNA, 24 nt, Artificial Sequence
  Synthetic
aguuaaugauuugaaaucauuguu

SEQ ID NO: 683212 - RNA, 18 nt, Artificial Sequence
  Synthetic
auauauuuugucauuguu

SEQ ID NO: 683213 - RNA, 19 nt, Artificial Sequence
  Synthetic
aauauauuuugucauuguu

SEQ ID NO: 683214 - RNA, 20 nt, Artificial Sequence
  Synthetic
aaauauauuuugucauuguu

SEQ ID NO: 683215 - RNA, 21 nt, Artificial Sequence
  Synthetic
aaaauauauuuugucauuguu

SEQ ID NO: 683216 - RNA, 22 nt, Artificial Sequence
  Synthetic
uaaaauauauuuugucauuguu

SEQ ID NO: 683217 - RNA, 23 nt, Artificial Sequence
  Synthetic
guaaaauauauuuugucauuguu

SEQ ID NO: 683218 - RNA, 24 nt, Artificial Sequence
  Synthetic
gguaaaauauauuuugucauuguu

SEQ ID NO: 683219 - RNA, 18 nt, Artificial Sequence
  Synthetic
uuaucaggaaagauuguu

SEQ ID NO: 683220 - RNA, 19 nt, Artificial Sequence
  Synthetic
uuuaucaggaaagauuguu

SEQ ID NO: 683221 - RNA, 20 nt, Artificial Sequence
  Synthetic
auuuaucaggaaagauuguu

SEQ ID NO: 683222 - RNA, 21 nt, Artificial Sequence
  Synthetic
cauuuaucaggaaagauuguu

SEQ ID NO: 683223 - RNA, 22 nt, Artificial Sequence
  Synthetic
ccauuuaucaggaaagauuguu

SEQ ID NO: 683224 - RNA, 23 nt, Artificial Sequence
  Synthetic
uccauuuaucaggaaagauuguu

SEQ ID NO: 683225 - RNA, 24 nt, Artificial Sequence
  Synthetic
cuccauuuaucaggaaagauuguu

SEQ ID NO: 683226 - RNA, 18 nt, Artificial Sequence
  Synthetic
aaaaaaauuaagauuguu

SEQ ID NO: 683227 - RNA, 19 nt, Artificial Sequence
  Synthetic
gaaaaaaauuaagauuguu

SEQ ID NO: 683228 - RNA, 20 nt, Artificial Sequence
  Synthetic
agaaaaaaauuaagauuguu

SEQ ID NO: 683229 - RNA, 21 nt, Artificial Sequence
  Synthetic
uagaaaaaaauuaagauuguu

SEQ ID NO: 683230 - RNA, 22 nt, Artificial Sequence
  Synthetic
auagaaaaaaauuaagauuguu

SEQ ID NO: 683231 - RNA, 23 nt, Artificial Sequence
  Synthetic
uauagaaaaaaauuaagauuguu

SEQ ID NO: 683232 - RNA, 24 nt, Artificial Sequence
  Synthetic
auauagaaaaaaauuaagauuguu

SEQ ID NO: 683233 - RNA, 18 nt, Artificial Sequence
  Synthetic
gaguauaauuggauuguu

SEQ ID NO: 683234 - RNA, 19 nt, Artificial Sequence
  Synthetic
agaguauaauuggauuguu

SEQ ID NO: 683235 - RNA, 20 nt, Artificial Sequence
  Synthetic
aagaguauaauuggauuguu

SEQ ID NO: 683236 - RNA, 21 nt, Artificial Sequence
  Synthetic
aaagaguauaauuggauuguu

SEQ ID NO: 683237 - RNA, 22 nt, Artificial Sequence
  Synthetic
aaaagaguauaauuggauuguu

SEQ ID NO: 683238 - RNA, 23 nt, Artificial Sequence
  Synthetic
uaaaagaguauaauuggauuguu

SEQ ID NO: 683239 - RNA, 24 nt, Artificial Sequence
  Synthetic
uuaaaagaguauaauuggauuguu

SEQ ID NO: 683240 - RNA, 18 nt, Artificial Sequence
  Synthetic
ugaggauaguugauuguu

SEQ ID NO: 683241 - RNA, 19 nt, Artificial Sequence
  Synthetic
augaggauaguugauuguu

SEQ ID NO: 683242 - RNA, 20 nt, Artificial Sequence
  Synthetic
aaugaggauaguugauuguu

SEQ ID NO: 683243 - RNA, 21 nt, Artificial Sequence
  Synthetic
uaaugaggauaguugauuguu

SEQ ID NO: 683244 - RNA, 22 nt, Artificial Sequence
  Synthetic
auaaugaggauaguugauuguu

SEQ ID NO: 683245 - RNA, 23 nt, Artificial Sequence
  Synthetic
aauaaugaggauaguugauuguu

SEQ ID NO: 683246 - RNA, 24 nt, Artificial Sequence
  Synthetic
caauaaugaggauaguugauuguu

SEQ ID NO: 683247 - RNA, 18 nt, Artificial Sequence
  Synthetic
uuugcaaucaauauuguu

SEQ ID NO: 683248 - RNA, 19 nt, Artificial Sequence
  Synthetic
auuugcaaucaauauuguu

SEQ ID NO: 683249 - RNA, 20 nt, Artificial Sequence
  Synthetic
uauuugcaaucaauauuguu

SEQ ID NO: 683250 - RNA, 21 nt, Artificial Sequence
  Synthetic
auauuugcaaucaauauuguu

SEQ ID NO: 683251 - RNA, 22 nt, Artificial Sequence
  Synthetic
aauauuugcaaucaauauuguu

SEQ ID NO: 683252 - RNA, 23 nt, Artificial Sequence
  Synthetic
gaauauuugcaaucaauauuguu

SEQ ID NO: 683253 - RNA, 24 nt, Artificial Sequence
  Synthetic
agaauauuugcaaucaauauuguu

SEQ ID NO: 683254 - RNA, 18 nt, Artificial Sequence
  Synthetic
auucaagauaauauuguu

SEQ ID NO: 683255 - RNA, 19 nt, Artificial Sequence
  Synthetic
uauucaagauaauauuguu

SEQ ID NO: 683256 - RNA, 20 nt, Artificial Sequence
  Synthetic
auauucaagauaauauuguu

SEQ ID NO: 683257 - RNA, 21 nt, Artificial Sequence
  Synthetic
gauauucaagauaauauuguu

SEQ ID NO: 683258 - RNA, 22 nt, Artificial Sequence
  Synthetic
agauauucaagauaauauuguu

SEQ ID NO: 683259 - RNA, 23 nt, Artificial Sequence
  Synthetic
gagauauucaagauaauauuguu

SEQ ID NO: 683260 - RNA, 24 nt, Artificial Sequence
  Synthetic
ugagauauucaagauaauauuguu

SEQ ID NO: 683261 - RNA, 18 nt, Artificial Sequence
  Synthetic
ucucacaaacauauuguu

SEQ ID NO: 683262 - RNA, 19 nt, Artificial Sequence
  Synthetic
aucucacaaacauauuguu

SEQ ID NO: 683263 - RNA, 20 nt, Artificial Sequence
  Synthetic
aaucucacaaacauauuguu

SEQ ID NO: 683264 - RNA, 21 nt, Artificial Sequence
  Synthetic
gaaucucacaaacauauuguu

SEQ ID NO: 683265 - RNA, 22 nt, Artificial Sequence
  Synthetic
ugaaucucacaaacauauuguu

SEQ ID NO: 683266 - RNA, 23 nt, Artificial Sequence
  Synthetic
augaaucucacaaacauauuguu

SEQ ID NO: 683267 - RNA, 24 nt, Artificial Sequence
  Synthetic
gaugaaucucacaaacauauuguu

SEQ ID NO: 683268 - RNA, 18 nt, Artificial Sequence
  Synthetic
uguuaccaucauauuguu

SEQ ID NO: 683269 - RNA, 19 nt, Artificial Sequence
  Synthetic
cuguuaccaucauauuguu

SEQ ID NO: 683270 - RNA, 20 nt, Artificial Sequence
  Synthetic
acuguuaccaucauauuguu

SEQ ID NO: 683271 - RNA, 21 nt, Artificial Sequence
  Synthetic
cacuguuaccaucauauuguu

SEQ ID NO: 683272 - RNA, 22 nt, Artificial Sequence
  Synthetic
ccacuguuaccaucauauuguu

SEQ ID NO: 683273 - RNA, 23 nt, Artificial Sequence
  Synthetic
uccacuguuaccaucauauuguu

SEQ ID NO: 683274 - RNA, 24 nt, Artificial Sequence
  Synthetic
auccacuguuaccaucauauuguu

SEQ ID NO: 683275 - RNA, 18 nt, Artificial Sequence
  Synthetic
uguugaugucauauuguu

SEQ ID NO: 683276 - RNA, 19 nt, Artificial Sequence
  Synthetic
guguugaugucauauuguu

SEQ ID NO: 683277 - RNA, 20 nt, Artificial Sequence
  Synthetic
aguguugaugucauauuguu

SEQ ID NO: 683278 - RNA, 21 nt, Artificial Sequence
  Synthetic
caguguugaugucauauuguu

SEQ ID NO: 683279 - RNA, 22 nt, Artificial Sequence
  Synthetic
ucaguguugaugucauauuguu

SEQ ID NO: 683280 - RNA, 23 nt, Artificial Sequence
  Synthetic
uucaguguugaugucauauuguu

SEQ ID NO: 683281 - RNA, 24 nt, Artificial Sequence
  Synthetic
guucaguguugaugucauauuguu

SEQ ID NO: 683282 - RNA, 18 nt, Artificial Sequence
  Synthetic
auuuuggacucccuuguu

SEQ ID NO: 683283 - RNA, 19 nt, Artificial Sequence
  Synthetic
cauuuuggacucccuuguu

SEQ ID NO: 683284 - RNA, 20 nt, Artificial Sequence
  Synthetic
ccauuuuggacucccuuguu

SEQ ID NO: 683285 - RNA, 21 nt, Artificial Sequence
  Synthetic
cccauuuuggacucccuuguu

SEQ ID NO: 683286 - RNA, 22 nt, Artificial Sequence
  Synthetic
acccauuuuggacucccuuguu

SEQ ID NO: 683287 - RNA, 23 nt, Artificial Sequence
  Synthetic
cacccauuuuggacucccuuguu

SEQ ID NO: 683288 - RNA, 24 nt, Artificial Sequence
  Synthetic
ccacccauuuuggacucccuuguu

SEQ ID NO: 683289 - RNA, 18 nt, Artificial Sequence
  Synthetic
gccaagauggaucuuguu

SEQ ID NO: 683290 - RNA, 19 nt, Artificial Sequence
  Synthetic
ggccaagauggaucuuguu

SEQ ID NO: 683291 - RNA, 20 nt, Artificial Sequence
  Synthetic
aggccaagauggaucuuguu

SEQ ID NO: 683292 - RNA, 21 nt, Artificial Sequence
  Synthetic
gaggccaagauggaucuuguu

SEQ ID NO: 683293 - RNA, 22 nt, Artificial Sequence
  Synthetic
ggaggccaagauggaucuuguu

SEQ ID NO: 683294 - RNA, 23 nt, Artificial Sequence
  Synthetic
aggaggccaagauggaucuuguu

SEQ ID NO: 683295 - RNA, 24 nt, Artificial Sequence
  Synthetic
caggaggccaagauggaucuuguu

SEQ ID NO: 683296 - RNA, 18 nt, Artificial Sequence
  Synthetic
cacuggcacucucuuguu

SEQ ID NO: 683297 - RNA, 19 nt, Artificial Sequence
  Synthetic
ucacuggcacucucuuguu

SEQ ID NO: 683298 - RNA, 20 nt, Artificial Sequence
  Synthetic
cucacuggcacucucuuguu

SEQ ID NO: 683299 - RNA, 21 nt, Artificial Sequence
  Synthetic
acucacuggcacucucuuguu

SEQ ID NO: 683300 - RNA, 22 nt, Artificial Sequence
  Synthetic
cacucacuggcacucucuuguu

SEQ ID NO: 683301 - RNA, 23 nt, Artificial Sequence
  Synthetic
acacucacuggcacucucuuguu

SEQ ID NO: 683302 - RNA, 24 nt, Artificial Sequence
  Synthetic
aacacucacuggcacucucuuguu

SEQ ID NO: 683303 - RNA, 18 nt, Artificial Sequence
  Synthetic
cucuguaccucucuuguu

SEQ ID NO: 683304 - RNA, 19 nt, Artificial Sequence
  Synthetic
gcucuguaccucucuuguu

SEQ ID NO: 683305 - RNA, 20 nt, Artificial Sequence
  Synthetic
ugcucuguaccucucuuguu

SEQ ID NO: 683306 - RNA, 21 nt, Artificial Sequence
  Synthetic
cugcucuguaccucucuuguu

SEQ ID NO: 683307 - RNA, 22 nt, Artificial Sequence
  Synthetic
ucugcucuguaccucucuuguu

SEQ ID NO: 683308 - RNA, 23 nt, Artificial Sequence
  Synthetic
uucugcucuguaccucucuuguu

SEQ ID NO: 683309 - RNA, 24 nt, Artificial Sequence
  Synthetic
cuucugcucuguaccucucuuguu

SEQ ID NO: 683310 - RNA, 18 nt, Artificial Sequence
  Synthetic
ugaguuuugugucuuguu

SEQ ID NO: 683311 - RNA, 19 nt, Artificial Sequence
  Synthetic
uugaguuuugugucuuguu

SEQ ID NO: 683312 - RNA, 20 nt, Artificial Sequence
  Synthetic
uuugaguuuugugucuuguu

SEQ ID NO: 683313 - RNA, 21 nt, Artificial Sequence
  Synthetic
uuuugaguuuugugucuuguu

SEQ ID NO: 683314 - RNA, 22 nt, Artificial Sequence
  Synthetic
cuuuugaguuuugugucuuguu

SEQ ID NO: 683315 - RNA, 23 nt, Artificial Sequence
  Synthetic
gcuuuugaguuuugugucuuguu

SEQ ID NO: 683316 - RNA, 24 nt, Artificial Sequence
  Synthetic
agcuuuugaguuuugugucuuguu

SEQ ID NO: 683317 - RNA, 18 nt, Artificial Sequence
  Synthetic
accuuuucaauucuuguu

SEQ ID NO: 683318 - RNA, 19 nt, Artificial Sequence
  Synthetic
gaccuuuucaauucuuguu

SEQ ID NO: 683319 - RNA, 20 nt, Artificial Sequence
  Synthetic
ugaccuuuucaauucuuguu

SEQ ID NO: 683320 - RNA, 21 nt, Artificial Sequence
  Synthetic
cugaccuuuucaauucuuguu

SEQ ID NO: 683321 - RNA, 22 nt, Artificial Sequence
  Synthetic
ccugaccuuuucaauucuuguu

SEQ ID NO: 683322 - RNA, 23 nt, Artificial Sequence
  Synthetic
uccugaccuuuucaauucuuguu

SEQ ID NO: 683323 - RNA, 24 nt, Artificial Sequence
  Synthetic
uuccugaccuuuucaauucuuguu

SEQ ID NO: 683324 - RNA, 18 nt, Artificial Sequence
  Synthetic
aucaccauuuuucuuguu

SEQ ID NO: 683325 - RNA, 19 nt, Artificial Sequence
  Synthetic
uaucaccauuuuucuuguu

SEQ ID NO: 683326 - RNA, 20 nt, Artificial Sequence
  Synthetic
auaucaccauuuuucuuguu

SEQ ID NO: 683327 - RNA, 21 nt, Artificial Sequence
  Synthetic
gauaucaccauuuuucuuguu

SEQ ID NO: 683328 - RNA, 22 nt, Artificial Sequence
  Synthetic
agauaucaccauuuuucuuguu

SEQ ID NO: 683329 - RNA, 23 nt, Artificial Sequence
  Synthetic
cagauaucaccauuuuucuuguu

SEQ ID NO: 683330 - RNA, 24 nt, Artificial Sequence
  Synthetic
acagauaucaccauuuuucuuguu

SEQ ID NO: 683331 - RNA, 18 nt, Artificial Sequence
  Synthetic
uuauuugauacaguuguu

SEQ ID NO: 683332 - RNA, 19 nt, Artificial Sequence
  Synthetic
guuauuugauacaguuguu

SEQ ID NO: 683333 - RNA, 20 nt, Artificial Sequence
  Synthetic
uguuauuugauacaguuguu

SEQ ID NO: 683334 - RNA, 21 nt, Artificial Sequence
  Synthetic
cuguuauuugauacaguuguu

SEQ ID NO: 683335 - RNA, 22 nt, Artificial Sequence
  Synthetic
acuguuauuugauacaguuguu

SEQ ID NO: 683336 - RNA, 23 nt, Artificial Sequence
  Synthetic
gacuguuauuugauacaguuguu

SEQ ID NO: 683337 - RNA, 24 nt, Artificial Sequence
  Synthetic
ugacuguuauuugauacaguuguu

SEQ ID NO: 683338 - RNA, 18 nt, Artificial Sequence
  Synthetic
uauuuuuaaccaguuguu

SEQ ID NO: 683339 - RNA, 19 nt, Artificial Sequence
  Synthetic
uuauuuuuaaccaguuguu

SEQ ID NO: 683340 - RNA, 20 nt, Artificial Sequence
  Synthetic
auuauuuuuaaccaguuguu

SEQ ID NO: 683341 - RNA, 21 nt, Artificial Sequence
  Synthetic
aauuauuuuuaaccaguuguu

SEQ ID NO: 683342 - RNA, 22 nt, Artificial Sequence
  Synthetic
uaauuauuuuuaaccaguuguu

SEQ ID NO: 683343 - RNA, 23 nt, Artificial Sequence
  Synthetic
uuaauuauuuuuaaccaguuguu

SEQ ID NO: 683344 - RNA, 24 nt, Artificial Sequence
  Synthetic
uuuaauuauuuuuaaccaguuguu

SEQ ID NO: 683345 - RNA, 18 nt, Artificial Sequence
  Synthetic
cuaccacaaaauguuguu

SEQ ID NO: 683346 - RNA, 19 nt, Artificial Sequence
  Synthetic
ccuaccacaaaauguuguu

SEQ ID NO: 683347 - RNA, 20 nt, Artificial Sequence
  Synthetic
uccuaccacaaaauguuguu

SEQ ID NO: 683348 - RNA, 21 nt, Artificial Sequence
  Synthetic
uuccuaccacaaaauguuguu

SEQ ID NO: 683349 - RNA, 22 nt, Artificial Sequence
  Synthetic
cuuccuaccacaaaauguuguu

SEQ ID NO: 683350 - RNA, 23 nt, Artificial Sequence
  Synthetic
ucuuccuaccacaaaauguuguu

SEQ ID NO: 683351 - RNA, 24 nt, Artificial Sequence
  Synthetic
aucuuccuaccacaaaauguuguu

SEQ ID NO: 683352 - RNA, 18 nt, Artificial Sequence
  Synthetic
auucuugccauuguuguu

SEQ ID NO: 683353 - RNA, 19 nt, Artificial Sequence
  Synthetic
cauucuugccauuguuguu

SEQ ID NO: 683354 - RNA, 20 nt, Artificial Sequence
  Synthetic
ucauucuugccauuguuguu

SEQ ID NO: 683355 - RNA, 21 nt, Artificial Sequence
  Synthetic
aucauucuugccauuguuguu

SEQ ID NO: 683356 - RNA, 22 nt, Artificial Sequence
  Synthetic
caucauucuugccauuguuguu

SEQ ID NO: 683357 - RNA, 23 nt, Artificial Sequence
  Synthetic
acaucauucuugccauuguuguu

SEQ ID NO: 683358 - RNA, 24 nt, Artificial Sequence
  Synthetic
aacaucauucuugccauuguuguu

SEQ ID NO: 683359 - RNA, 18 nt, Artificial Sequence
  Synthetic
guccucgcacuuguuguu

SEQ ID NO: 683360 - RNA, 19 nt, Artificial Sequence
  Synthetic
uguccucgcacuuguuguu

SEQ ID NO: 683361 - RNA, 20 nt, Artificial Sequence
  Synthetic
auguccucgcacuuguuguu

SEQ ID NO: 683362 - RNA, 21 nt, Artificial Sequence
  Synthetic
aauguccucgcacuuguuguu

SEQ ID NO: 683363 - RNA, 22 nt, Artificial Sequence
  Synthetic
uaauguccucgcacuuguuguu

SEQ ID NO: 683364 - RNA, 23 nt, Artificial Sequence
  Synthetic
uuaauguccucgcacuuguuguu

SEQ ID NO: 683365 - RNA, 24 nt, Artificial Sequence
  Synthetic
cuuaauguccucgcacuuguuguu

SEQ ID NO: 683366 - RNA, 18 nt, Artificial Sequence
  Synthetic
gaacauaucucauuuguu

SEQ ID NO: 683367 - RNA, 19 nt, Artificial Sequence
  Synthetic
agaacauaucucauuuguu

SEQ ID NO: 683368 - RNA, 20 nt, Artificial Sequence
  Synthetic
cagaacauaucucauuuguu

SEQ ID NO: 683369 - RNA, 21 nt, Artificial Sequence
  Synthetic
ucagaacauaucucauuuguu

SEQ ID NO: 683370 - RNA, 22 nt, Artificial Sequence
  Synthetic
uucagaacauaucucauuuguu

SEQ ID NO: 683371 - RNA, 23 nt, Artificial Sequence
  Synthetic
uuucagaacauaucucauuuguu

SEQ ID NO: 683372 - RNA, 24 nt, Artificial Sequence
  Synthetic
uuuucagaacauaucucauuuguu

SEQ ID NO: 683373 - RNA, 18 nt, Artificial Sequence
  Synthetic
gaaaagaaaagauuuguu

SEQ ID NO: 683374 - RNA, 19 nt, Artificial Sequence
  Synthetic
agaaaagaaaagauuuguu

SEQ ID NO: 683375 - RNA, 20 nt, Artificial Sequence
  Synthetic
cagaaaagaaaagauuuguu

SEQ ID NO: 683376 - RNA, 21 nt, Artificial Sequence
  Synthetic
ccagaaaagaaaagauuuguu

SEQ ID NO: 683377 - RNA, 22 nt, Artificial Sequence
  Synthetic
gccagaaaagaaaagauuuguu

SEQ ID NO: 683378 - RNA, 23 nt, Artificial Sequence
  Synthetic
agccagaaaagaaaagauuuguu

SEQ ID NO: 683379 - RNA, 24 nt, Artificial Sequence
  Synthetic
cagccagaaaagaaaagauuuguu

SEQ ID NO: 683380 - RNA, 18 nt, Artificial Sequence
  Synthetic
accugcuggagauuuguu

SEQ ID NO: 683381 - RNA, 19 nt, Artificial Sequence
  Synthetic
caccugcuggagauuuguu

SEQ ID NO: 683382 - RNA, 20 nt, Artificial Sequence
  Synthetic
ucaccugcuggagauuuguu

SEQ ID NO: 683383 - RNA, 21 nt, Artificial Sequence
  Synthetic
uucaccugcuggagauuuguu

SEQ ID NO: 683384 - RNA, 22 nt, Artificial Sequence
  Synthetic
auucaccugcuggagauuuguu

SEQ ID NO: 683385 - RNA, 23 nt, Artificial Sequence
  Synthetic
cauucaccugcuggagauuuguu

SEQ ID NO: 683386 - RNA, 24 nt, Artificial Sequence
  Synthetic
ccauucaccugcuggagauuuguu

SEQ ID NO: 683387 - RNA, 18 nt, Artificial Sequence
  Synthetic
guuguacaaauauuuguu

SEQ ID NO: 683388 - RNA, 19 nt, Artificial Sequence
  Synthetic
cguuguacaaauauuuguu

SEQ ID NO: 683389 - RNA, 20 nt, Artificial Sequence
  Synthetic
acguuguacaaauauuuguu

SEQ ID NO: 683390 - RNA, 21 nt, Artificial Sequence
  Synthetic
uacguuguacaaauauuuguu

SEQ ID NO: 683391 - RNA, 22 nt, Artificial Sequence
  Synthetic
uuacguuguacaaauauuuguu

SEQ ID NO: 683392 - RNA, 23 nt, Artificial Sequence
  Synthetic
auuacguuguacaaauauuuguu

SEQ ID NO: 683393 - RNA, 24 nt, Artificial Sequence
  Synthetic
uauuacguuguacaaauauuuguu

SEQ ID NO: 683394 - RNA, 18 nt, Artificial Sequence
  Synthetic
cuaaaucucuuauuuguu

SEQ ID NO: 683395 - RNA, 19 nt, Artificial Sequence
  Synthetic
ucuaaaucucuuauuuguu

SEQ ID NO: 683396 - RNA, 20 nt, Artificial Sequence
  Synthetic
gucuaaaucucuuauuuguu

SEQ ID NO: 683397 - RNA, 21 nt, Artificial Sequence
  Synthetic
agucuaaaucucuuauuuguu

SEQ ID NO: 683398 - RNA, 22 nt, Artificial Sequence
  Synthetic
cagucuaaaucucuuauuuguu

SEQ ID NO: 683399 - RNA, 23 nt, Artificial Sequence
  Synthetic
ucagucuaaaucucuuauuuguu

SEQ ID NO: 683400 - RNA, 24 nt, Artificial Sequence
  Synthetic
uucagucuaaaucucuuauuuguu

SEQ ID NO: 683401 - RNA, 18 nt, Artificial Sequence
  Synthetic
uuuauuuauuuauuuguu

SEQ ID NO: 683402 - RNA, 19 nt, Artificial Sequence
  Synthetic
auuuauuuauuuauuuguu

SEQ ID NO: 683403 - RNA, 20 nt, Artificial Sequence
  Synthetic
uauuuauuuauuuauuuguu

SEQ ID NO: 683404 - RNA, 21 nt, Artificial Sequence
  Synthetic
uuauuuauuuauuuauuuguu

SEQ ID NO: 683405 - RNA, 22 nt, Artificial Sequence
  Synthetic
uuuauuuauuuauuuauuuguu

SEQ ID NO: 683406 - RNA, 23 nt, Artificial Sequence
  Synthetic
uuuuauuuauuuauuuauuuguu

SEQ ID NO: 683407 - RNA, 24 nt, Artificial Sequence
  Synthetic
uuuuuauuuauuuauuuauuuguu

SEQ ID NO: 683408 - RNA, 18 nt, Artificial Sequence
  Synthetic
guuuucuaucccuuuguu

SEQ ID NO: 683409 - RNA, 19 nt, Artificial Sequence
  Synthetic
gguuuucuaucccuuuguu

SEQ ID NO: 683410 - RNA, 20 nt, Artificial Sequence
  Synthetic
ugguuuucuaucccuuuguu

SEQ ID NO: 683411 - RNA, 21 nt, Artificial Sequence
  Synthetic
cugguuuucuaucccuuuguu

SEQ ID NO: 683412 - RNA, 22 nt, Artificial Sequence
  Synthetic
gcugguuuucuaucccuuuguu

SEQ ID NO: 683413 - RNA, 23 nt, Artificial Sequence
  Synthetic
agcugguuuucuaucccuuuguu

SEQ ID NO: 683414 - RNA, 24 nt, Artificial Sequence
  Synthetic
gagcugguuuucuaucccuuuguu

SEQ ID NO: 683415 - RNA, 18 nt, Artificial Sequence
  Synthetic
gcuuaaagcugcuuuguu

SEQ ID NO: 683416 - RNA, 19 nt, Artificial Sequence
  Synthetic
ugcuuaaagcugcuuuguu

SEQ ID NO: 683417 - RNA, 20 nt, Artificial Sequence
  Synthetic
uugcuuaaagcugcuuuguu

SEQ ID NO: 683418 - RNA, 21 nt, Artificial Sequence
  Synthetic
uuugcuuaaagcugcuuuguu

SEQ ID NO: 683419 - RNA, 22 nt, Artificial Sequence
  Synthetic
uuuugcuuaaagcugcuuuguu

SEQ ID NO: 683420 - RNA, 23 nt, Artificial Sequence
  Synthetic
auuuugcuuaaagcugcuuuguu

SEQ ID NO: 683421 - RNA, 24 nt, Artificial Sequence
  Synthetic
cauuuugcuuaaagcugcuuuguu

SEQ ID NO: 683422 - RNA, 18 nt, Artificial Sequence
  Synthetic
accaaauaauucuuuguu

SEQ ID NO: 683423 - RNA, 19 nt, Artificial Sequence
  Synthetic
gaccaaauaauucuuuguu

SEQ ID NO: 683424 - RNA, 20 nt, Artificial Sequence
  Synthetic
ggaccaaauaauucuuuguu

SEQ ID NO: 683425 - RNA, 21 nt, Artificial Sequence
  Synthetic
uggaccaaauaauucuuuguu

SEQ ID NO: 683426 - RNA, 22 nt, Artificial Sequence
  Synthetic
uuggaccaaauaauucuuuguu

SEQ ID NO: 683427 - RNA, 23 nt, Artificial Sequence
  Synthetic
auuggaccaaauaauucuuuguu

SEQ ID NO: 683428 - RNA, 24 nt, Artificial Sequence
  Synthetic
uauuggaccaaauaauucuuuguu

SEQ ID NO: 683429 - RNA, 18 nt, Artificial Sequence
  Synthetic
acaucaaaauaguuuguu

SEQ ID NO: 683430 - RNA, 19 nt, Artificial Sequence
  Synthetic
uacaucaaaauaguuuguu

SEQ ID NO: 683431 - RNA, 20 nt, Artificial Sequence
  Synthetic
uuacaucaaaauaguuuguu

SEQ ID NO: 683432 - RNA, 21 nt, Artificial Sequence
  Synthetic
auuacaucaaaauaguuuguu

SEQ ID NO: 683433 - RNA, 22 nt, Artificial Sequence
  Synthetic
aauuacaucaaaauaguuuguu

SEQ ID NO: 683434 - RNA, 23 nt, Artificial Sequence
  Synthetic
aaauuacaucaaaauaguuuguu

SEQ ID NO: 683435 - RNA, 24 nt, Artificial Sequence
  Synthetic
caaauuacaucaaaauaguuuguu

SEQ ID NO: 683436 - RNA, 18 nt, Artificial Sequence
  Synthetic
uuaaccaauagguuuguu

SEQ ID NO: 683437 - RNA, 19 nt, Artificial Sequence
  Synthetic
uuuaaccaauagguuuguu

SEQ ID NO: 683438 - RNA, 20 nt, Artificial Sequence
  Synthetic
auuuaaccaauagguuuguu

SEQ ID NO: 683439 - RNA, 21 nt, Artificial Sequence
  Synthetic
uauuuaaccaauagguuuguu

SEQ ID NO: 683440 - RNA, 22 nt, Artificial Sequence
  Synthetic
auauuuaaccaauagguuuguu

SEQ ID NO: 683441 - RNA, 23 nt, Artificial Sequence
  Synthetic
aauauuuaaccaauagguuuguu

SEQ ID NO: 683442 - RNA, 24 nt, Artificial Sequence
  Synthetic
aaauauuuaaccaauagguuuguu

SEQ ID NO: 683443 - RNA, 18 nt, Artificial Sequence
  Synthetic
uuggauauaaauuuuguu

SEQ ID NO: 683444 - RNA, 19 nt, Artificial Sequence
  Synthetic
auuggauauaaauuuuguu

SEQ ID NO: 683445 - RNA, 20 nt, Artificial Sequence
  Synthetic
uauuggauauaaauuuuguu

SEQ ID NO: 683446 - RNA, 21 nt, Artificial Sequence
  Synthetic
guauuggauauaaauuuuguu

SEQ ID NO: 683447 - RNA, 22 nt, Artificial Sequence
  Synthetic
aguauuggauauaaauuuuguu

SEQ ID NO: 683448 - RNA, 23 nt, Artificial Sequence
  Synthetic
uaguauuggauauaaauuuuguu

SEQ ID NO: 683449 - RNA, 24 nt, Artificial Sequence
  Synthetic
uuaguauuggauauaaauuuuguu

SEQ ID NO: 683450 - RNA, 18 nt, Artificial Sequence
  Synthetic
cuguaauucaauuuuguu

SEQ ID NO: 683451 - RNA, 19 nt, Artificial Sequence
  Synthetic
acuguaauucaauuuuguu

SEQ ID NO: 683452 - RNA, 20 nt, Artificial Sequence
  Synthetic
cacuguaauucaauuuuguu

SEQ ID NO: 683453 - RNA, 21 nt, Artificial Sequence
  Synthetic
ucacuguaauucaauuuuguu

SEQ ID NO: 683454 - RNA, 22 nt, Artificial Sequence
  Synthetic
cucacuguaauucaauuuuguu

SEQ ID NO: 683455 - RNA, 23 nt, Artificial Sequence
  Synthetic
acucacuguaauucaauuuuguu

SEQ ID NO: 683456 - RNA, 24 nt, Artificial Sequence
  Synthetic
uacucacuguaauucaauuuuguu

SEQ ID NO: 683457 - RNA, 18 nt, Artificial Sequence
  Synthetic
agucugugguauuuuguu

SEQ ID NO: 683458 - RNA, 19 nt, Artificial Sequence
  Synthetic
cagucugugguauuuuguu

SEQ ID NO: 683459 - RNA, 20 nt, Artificial Sequence
  Synthetic
ccagucugugguauuuuguu

SEQ ID NO: 683460 - RNA, 21 nt, Artificial Sequence
  Synthetic
cccagucugugguauuuuguu

SEQ ID NO: 683461 - RNA, 22 nt, Artificial Sequence
  Synthetic
acccagucugugguauuuuguu

SEQ ID NO: 683462 - RNA, 23 nt, Artificial Sequence
  Synthetic
uacccagucugugguauuuuguu

SEQ ID NO: 683463 - RNA, 24 nt, Artificial Sequence
  Synthetic
uuacccagucugugguauuuuguu

SEQ ID NO: 683464 - RNA, 18 nt, Artificial Sequence
  Synthetic
uuuuaguuguauuuuguu

SEQ ID NO: 683465 - RNA, 19 nt, Artificial Sequence
  Synthetic
auuuuaguuguauuuuguu

SEQ ID NO: 683466 - RNA, 20 nt, Artificial Sequence
  Synthetic
uauuuuaguuguauuuuguu

SEQ ID NO: 683467 - RNA, 21 nt, Artificial Sequence
  Synthetic
cuauuuuaguuguauuuuguu

SEQ ID NO: 683468 - RNA, 22 nt, Artificial Sequence
  Synthetic
gcuauuuuaguuguauuuuguu

SEQ ID NO: 683469 - RNA, 23 nt, Artificial Sequence
  Synthetic
ugcuauuuuaguuguauuuuguu

SEQ ID NO: 683470 - RNA, 24 nt, Artificial Sequence
  Synthetic
gugcuauuuuaguuguauuuuguu

SEQ ID NO: 683471 - RNA, 18 nt, Artificial Sequence
  Synthetic
acucagcagauuuuuguu

SEQ ID NO: 683472 - RNA, 19 nt, Artificial Sequence
  Synthetic
aacucagcagauuuuuguu

SEQ ID NO: 683473 - RNA, 20 nt, Artificial Sequence
  Synthetic
aaacucagcagauuuuuguu

SEQ ID NO: 683474 - RNA, 21 nt, Artificial Sequence
  Synthetic
aaaacucagcagauuuuuguu

SEQ ID NO: 683475 - RNA, 22 nt, Artificial Sequence
  Synthetic
aaaaacucagcagauuuuuguu

SEQ ID NO: 683476 - RNA, 23 nt, Artificial Sequence
  Synthetic
aaaaaacucagcagauuuuuguu

SEQ ID NO: 683477 - RNA, 24 nt, Artificial Sequence
  Synthetic
uaaaaaacucagcagauuuuuguu

SEQ ID NO: 683478 - RNA, 18 nt, Artificial Sequence
  Synthetic
uuuuaaaugcuuuuuguu

SEQ ID NO: 683479 - RNA, 19 nt, Artificial Sequence
  Synthetic
uuuuuaaaugcuuuuuguu

SEQ ID NO: 683480 - RNA, 20 nt, Artificial Sequence
  Synthetic
cuuuuuaaaugcuuuuuguu

SEQ ID NO: 683481 - RNA, 21 nt, Artificial Sequence
  Synthetic
acuuuuuaaaugcuuuuuguu

SEQ ID NO: 683482 - RNA, 22 nt, Artificial Sequence
  Synthetic
uacuuuuuaaaugcuuuuuguu

SEQ ID NO: 683483 - RNA, 23 nt, Artificial Sequence
  Synthetic
uuacuuuuuaaaugcuuuuuguu

SEQ ID NO: 683484 - RNA, 24 nt, Artificial Sequence
  Synthetic
uuuacuuuuuaaaugcuuuuuguu

SEQ ID NO: 683485 - RNA, 18 nt, Artificial Sequence
  Synthetic
guuggauguguuuuuguu

SEQ ID NO: 683486 - RNA, 19 nt, Artificial Sequence
  Synthetic
uguuggauguguuuuuguu

SEQ ID NO: 683487 - RNA, 20 nt, Artificial Sequence
  Synthetic
auguuggauguguuuuuguu

SEQ ID NO: 683488 - RNA, 21 nt, Artificial Sequence
  Synthetic
uauguuggauguguuuuuguu

SEQ ID NO: 683489 - RNA, 22 nt, Artificial Sequence
  Synthetic
guauguuggauguguuuuuguu

SEQ ID NO: 683490 - RNA, 23 nt, Artificial Sequence
  Synthetic
gguauguuggauguguuuuuguu

SEQ ID NO: 683491 - RNA, 24 nt, Artificial Sequence
  Synthetic
agguauguuggauguguuuuuguu

SEQ ID NO: 683492 - RNA, 18 nt, Artificial Sequence
  Synthetic
uggaguaauaaaaaauuu

SEQ ID NO: 683493 - RNA, 19 nt, Artificial Sequence
  Synthetic
uuggaguaauaaaaaauuu

SEQ ID NO: 683494 - RNA, 20 nt, Artificial Sequence
  Synthetic
guuggaguaauaaaaaauuu

SEQ ID NO: 683495 - RNA, 21 nt, Artificial Sequence
  Synthetic
gguuggaguaauaaaaaauuu

SEQ ID NO: 683496 - RNA, 22 nt, Artificial Sequence
  Synthetic
ugguuggaguaauaaaaaauuu

SEQ ID NO: 683497 - RNA, 23 nt, Artificial Sequence
  Synthetic
cugguuggaguaauaaaaaauuu

SEQ ID NO: 683498 - RNA, 24 nt, Artificial Sequence
  Synthetic
ucugguuggaguaauaaaaaauuu

SEQ ID NO: 683499 - RNA, 18 nt, Artificial Sequence
  Synthetic
ccaaacaaacaaaaauuu

SEQ ID NO: 683500 - RNA, 19 nt, Artificial Sequence
  Synthetic
cccaaacaaacaaaaauuu

SEQ ID NO: 683501 - RNA, 20 nt, Artificial Sequence
  Synthetic
ccccaaacaaacaaaaauuu

SEQ ID NO: 683502 - RNA, 21 nt, Artificial Sequence
  Synthetic
cccccaaacaaacaaaaauuu

SEQ ID NO: 683503 - RNA, 22 nt, Artificial Sequence
  Synthetic
ccccccaaacaaacaaaaauuu

SEQ ID NO: 683504 - RNA, 23 nt, Artificial Sequence
  Synthetic
accccccaaacaaacaaaaauuu

SEQ ID NO: 683505 - RNA, 24 nt, Artificial Sequence
  Synthetic
aaccccccaaacaaacaaaaauuu

SEQ ID NO: 683506 - RNA, 18 nt, Artificial Sequence
  Synthetic
cagagacguuaaaaauuu

SEQ ID NO: 683507 - RNA, 19 nt, Artificial Sequence
  Synthetic
acagagacguuaaaaauuu

SEQ ID NO: 683508 - RNA, 20 nt, Artificial Sequence
  Synthetic
cacagagacguuaaaaauuu

SEQ ID NO: 683509 - RNA, 21 nt, Artificial Sequence
  Synthetic
ccacagagacguuaaaaauuu

SEQ ID NO: 683510 - RNA, 22 nt, Artificial Sequence
  Synthetic
gccacagagacguuaaaaauuu

SEQ ID NO: 683511 - RNA, 23 nt, Artificial Sequence
  Synthetic
ggccacagagacguuaaaaauuu

SEQ ID NO: 683512 - RNA, 24 nt, Artificial Sequence
  Synthetic
gggccacagagacguuaaaaauuu

SEQ ID NO: 683513 - RNA, 18 nt, Artificial Sequence
  Synthetic
acauuccuuccaaaauuu

SEQ ID NO: 683514 - RNA, 19 nt, Artificial Sequence
  Synthetic
uacauuccuuccaaaauuu

SEQ ID NO: 683515 - RNA, 20 nt, Artificial Sequence
  Synthetic
guacauuccuuccaaaauuu

SEQ ID NO: 683516 - RNA, 21 nt, Artificial Sequence
  Synthetic
aguacauuccuuccaaaauuu

SEQ ID NO: 683517 - RNA, 22 nt, Artificial Sequence
  Synthetic
caguacauuccuuccaaaauuu

SEQ ID NO: 683518 - RNA, 23 nt, Artificial Sequence
  Synthetic
gcaguacauuccuuccaaaauuu

SEQ ID NO: 683519 - RNA, 24 nt, Artificial Sequence
  Synthetic
ggcaguacauuccuuccaaaauuu

SEQ ID NO: 683520 - RNA, 18 nt, Artificial Sequence
  Synthetic
aaaauugauucaaaauuu

SEQ ID NO: 683521 - RNA, 19 nt, Artificial Sequence
  Synthetic
aaaaauugauucaaaauuu

SEQ ID NO: 683522 - RNA, 20 nt, Artificial Sequence
  Synthetic
aaaaaauugauucaaaauuu

SEQ ID NO: 683523 - RNA, 21 nt, Artificial Sequence
  Synthetic
uaaaaaauugauucaaaauuu

SEQ ID NO: 683524 - RNA, 22 nt, Artificial Sequence
  Synthetic
auaaaaaauugauucaaaauuu

SEQ ID NO: 683525 - RNA, 23 nt, Artificial Sequence
  Synthetic
aauaaaaaauugauucaaaauuu

SEQ ID NO: 683526 - RNA, 24 nt, Artificial Sequence
  Synthetic
aaauaaaaaauugauucaaaauuu

SEQ ID NO: 683527 - RNA, 18 nt, Artificial Sequence
  Synthetic
ucuaaaagcugaaaauuu

SEQ ID NO: 683528 - RNA, 19 nt, Artificial Sequence
  Synthetic
cucuaaaagcugaaaauuu

SEQ ID NO: 683529 - RNA, 20 nt, Artificial Sequence
  Synthetic
acucuaaaagcugaaaauuu

SEQ ID NO: 683530 - RNA, 21 nt, Artificial Sequence
  Synthetic
aacucuaaaagcugaaaauuu

SEQ ID NO: 683531 - RNA, 22 nt, Artificial Sequence
  Synthetic
aaacucuaaaagcugaaaauuu

SEQ ID NO: 683532 - RNA, 23 nt, Artificial Sequence
  Synthetic
aaaacucuaaaagcugaaaauuu

SEQ ID NO: 683533 - RNA, 24 nt, Artificial Sequence
  Synthetic
aaaaacucuaaaagcugaaaauuu

SEQ ID NO: 683534 - RNA, 18 nt, Artificial Sequence
  Synthetic
gcuuaagaacuaaaauuu

SEQ ID NO: 683535 - RNA, 19 nt, Artificial Sequence
  Synthetic
cgcuuaagaacuaaaauuu

SEQ ID NO: 683536 - RNA, 20 nt, Artificial Sequence
  Synthetic
acgcuuaagaacuaaaauuu

SEQ ID NO: 683537 - RNA, 21 nt, Artificial Sequence
  Synthetic
aacgcuuaagaacuaaaauuu

SEQ ID NO: 683538 - RNA, 22 nt, Artificial Sequence
  Synthetic
gaacgcuuaagaacuaaaauuu

SEQ ID NO: 683539 - RNA, 23 nt, Artificial Sequence
  Synthetic
ugaacgcuuaagaacuaaaauuu

SEQ ID NO: 683540 - RNA, 24 nt, Artificial Sequence
  Synthetic
augaacgcuuaagaacuaaaauuu

SEQ ID NO: 683541 - RNA, 18 nt, Artificial Sequence
  Synthetic
uagaaagaucuaaaauuu

SEQ ID NO: 683542 - RNA, 19 nt, Artificial Sequence
  Synthetic
uuagaaagaucuaaaauuu

SEQ ID NO: 683543 - RNA, 20 nt, Artificial Sequence
  Synthetic
auuagaaagaucuaaaauuu

SEQ ID NO: 683544 - RNA, 21 nt, Artificial Sequence
  Synthetic
aauuagaaagaucuaaaauuu

SEQ ID NO: 683545 - RNA, 22 nt, Artificial Sequence
  Synthetic
aaauuagaaagaucuaaaauuu

SEQ ID NO: 683546 - RNA, 23 nt, Artificial Sequence
  Synthetic
aaaauuagaaagaucuaaaauuu

SEQ ID NO: 683547 - RNA, 24 nt, Artificial Sequence
  Synthetic
uaaaauuagaaagaucuaaaauuu

SEQ ID NO: 683548 - RNA, 18 nt, Artificial Sequence
  Synthetic
ccaacuuuaguaaaauuu

SEQ ID NO: 683549 - RNA, 19 nt, Artificial Sequence
  Synthetic
uccaacuuuaguaaaauuu

SEQ ID NO: 683550 - RNA, 20 nt, Artificial Sequence
  Synthetic
auccaacuuuaguaaaauuu

SEQ ID NO: 683551 - RNA, 21 nt, Artificial Sequence
  Synthetic
gauccaacuuuaguaaaauuu

SEQ ID NO: 683552 - RNA, 22 nt, Artificial Sequence
  Synthetic
ggauccaacuuuaguaaaauuu

SEQ ID NO: 683553 - RNA, 23 nt, Artificial Sequence
  Synthetic
aggauccaacuuuaguaaaauuu

SEQ ID NO: 683554 - RNA, 24 nt, Artificial Sequence
  Synthetic
uaggauccaacuuuaguaaaauuu

SEQ ID NO: 683555 - RNA, 18 nt, Artificial Sequence
  Synthetic
ucuaauaucuuaaaauuu

SEQ ID NO: 683556 - RNA, 19 nt, Artificial Sequence
  Synthetic
uucuaauaucuuaaaauuu

SEQ ID NO: 683557 - RNA, 20 nt, Artificial Sequence
  Synthetic
uuucuaauaucuuaaaauuu

SEQ ID NO: 683558 - RNA, 21 nt, Artificial Sequence
  Synthetic
auuucuaauaucuuaaaauuu

SEQ ID NO: 683559 - RNA, 22 nt, Artificial Sequence
  Synthetic
uauuucuaauaucuuaaaauuu

SEQ ID NO: 683560 - RNA, 23 nt, Artificial Sequence
  Synthetic
cuauuucuaauaucuuaaaauuu

SEQ ID NO: 683561 - RNA, 24 nt, Artificial Sequence
  Synthetic
ccuauuucuaauaucuuaaaauuu

SEQ ID NO: 683562 - RNA, 18 nt, Artificial Sequence
  Synthetic
acaagucucaacaaauuu

SEQ ID NO: 683563 - RNA, 19 nt, Artificial Sequence
  Synthetic
gacaagucucaacaaauuu

SEQ ID NO: 683564 - RNA, 20 nt, Artificial Sequence
  Synthetic
agacaagucucaacaaauuu

SEQ ID NO: 683565 - RNA, 21 nt, Artificial Sequence
  Synthetic
cagacaagucucaacaaauuu

SEQ ID NO: 683566 - RNA, 22 nt, Artificial Sequence
  Synthetic
acagacaagucucaacaaauuu

SEQ ID NO: 683567 - RNA, 23 nt, Artificial Sequence
  Synthetic
cacagacaagucucaacaaauuu

SEQ ID NO: 683568 - RNA, 24 nt, Artificial Sequence
  Synthetic
ccacagacaagucucaacaaauuu

SEQ ID NO: 683569 - RNA, 18 nt, Artificial Sequence
  Synthetic
auggaccaaaccaaauuu

SEQ ID NO: 683570 - RNA, 19 nt, Artificial Sequence
  Synthetic
uauggaccaaaccaaauuu

SEQ ID NO: 683571 - RNA, 20 nt, Artificial Sequence
  Synthetic
auauggaccaaaccaaauuu

SEQ ID NO: 683572 - RNA, 21 nt, Artificial Sequence
  Synthetic
gauauggaccaaaccaaauuu

SEQ ID NO: 683573 - RNA, 22 nt, Artificial Sequence
  Synthetic
agauauggaccaaaccaaauuu

SEQ ID NO: 683574 - RNA, 23 nt, Artificial Sequence
  Synthetic
cagauauggaccaaaccaaauuu

SEQ ID NO: 683575 - RNA, 24 nt, Artificial Sequence
  Synthetic
acagauauggaccaaaccaaauuu

SEQ ID NO: 683576 - RNA, 18 nt, Artificial Sequence
  Synthetic
ucaucuauaagcaaauuu

SEQ ID NO: 683577 - RNA, 19 nt, Artificial Sequence
  Synthetic
aucaucuauaagcaaauuu

SEQ ID NO: 683578 - RNA, 20 nt, Artificial Sequence
  Synthetic
aaucaucuauaagcaaauuu

SEQ ID NO: 683579 - RNA, 21 nt, Artificial Sequence
  Synthetic
uaaucaucuauaagcaaauuu

SEQ ID NO: 683580 - RNA, 22 nt, Artificial Sequence
  Synthetic
uuaaucaucuauaagcaaauuu

SEQ ID NO: 683581 - RNA, 23 nt, Artificial Sequence
  Synthetic
guuaaucaucuauaagcaaauuu

SEQ ID NO: 683582 - RNA, 24 nt, Artificial Sequence
  Synthetic
uguuaaucaucuauaagcaaauuu

SEQ ID NO: 683583 - RNA, 18 nt, Artificial Sequence
  Synthetic
gaaguucaaugcaaauuu

SEQ ID NO: 683584 - RNA, 19 nt, Artificial Sequence
  Synthetic
ugaaguucaaugcaaauuu

SEQ ID NO: 683585 - RNA, 20 nt, Artificial Sequence
  Synthetic
augaaguucaaugcaaauuu

SEQ ID NO: 683586 - RNA, 21 nt, Artificial Sequence
  Synthetic
uaugaaguucaaugcaaauuu

SEQ ID NO: 683587 - RNA, 22 nt, Artificial Sequence
  Synthetic
cuaugaaguucaaugcaaauuu

SEQ ID NO: 683588 - RNA, 23 nt, Artificial Sequence
  Synthetic
gcuaugaaguucaaugcaaauuu

SEQ ID NO: 683589 - RNA, 24 nt, Artificial Sequence
  Synthetic
cgcuaugaaguucaaugcaaauuu

SEQ ID NO: 683590 - RNA, 18 nt, Artificial Sequence
  Synthetic
uuuuccccuugcaaauuu

SEQ ID NO: 683591 - RNA, 19 nt, Artificial Sequence
  Synthetic
uuuuuccccuugcaaauuu

SEQ ID NO: 683592 - RNA, 20 nt, Artificial Sequence
  Synthetic
auuuuuccccuugcaaauuu

SEQ ID NO: 683593 - RNA, 21 nt, Artificial Sequence
  Synthetic
cauuuuuccccuugcaaauuu

SEQ ID NO: 683594 - RNA, 22 nt, Artificial Sequence
  Synthetic
acauuuuuccccuugcaaauuu

SEQ ID NO: 683595 - RNA, 23 nt, Artificial Sequence
  Synthetic
cacauuuuuccccuugcaaauuu

SEQ ID NO: 683596 - RNA, 24 nt, Artificial Sequence
  Synthetic
acacauuuuuccccuugcaaauuu

SEQ ID NO: 683597 - RNA, 18 nt, Artificial Sequence
  Synthetic
agucauuuacucaaauuu

SEQ ID NO: 683598 - RNA, 19 nt, Artificial Sequence
  Synthetic
cagucauuuacucaaauuu

SEQ ID NO: 683599 - RNA, 20 nt, Artificial Sequence
  Synthetic
ucagucauuuacucaaauuu

SEQ ID NO: 683600 - RNA, 21 nt, Artificial Sequence
  Synthetic
cucagucauuuacucaaauuu

SEQ ID NO: 683601 - RNA, 22 nt, Artificial Sequence
  Synthetic
ccucagucauuuacucaaauuu

SEQ ID NO: 683602 - RNA, 23 nt, Artificial Sequence
  Synthetic
uccucagucauuuacucaaauuu

SEQ ID NO: 683603 - RNA, 24 nt, Artificial Sequence
  Synthetic
cuccucagucauuuacucaaauuu

SEQ ID NO: 683604 - RNA, 18 nt, Artificial Sequence
  Synthetic
ugugugcuauucaaauuu

SEQ ID NO: 683605 - RNA, 19 nt, Artificial Sequence
  Synthetic
cugugugcuauucaaauuu

SEQ ID NO: 683606 - RNA, 20 nt, Artificial Sequence
  Synthetic
acugugugcuauucaaauuu

SEQ ID NO: 683607 - RNA, 21 nt, Artificial Sequence
  Synthetic
uacugugugcuauucaaauuu

SEQ ID NO: 683608 - RNA, 22 nt, Artificial Sequence
  Synthetic
auacugugugcuauucaaauuu

SEQ ID NO: 683609 - RNA, 23 nt, Artificial Sequence
  Synthetic
aauacugugugcuauucaaauuu

SEQ ID NO: 683610 - RNA, 24 nt, Artificial Sequence
  Synthetic
aaauacugugugcuauucaaauuu

SEQ ID NO: 683611 - RNA, 18 nt, Artificial Sequence
  Synthetic
agaaugcguuucaaauuu

SEQ ID NO: 683612 - RNA, 19 nt, Artificial Sequence
  Synthetic
gagaaugcguuucaaauuu

SEQ ID NO: 683613 - RNA, 20 nt, Artificial Sequence
  Synthetic
ugagaaugcguuucaaauuu

SEQ ID NO: 683614 - RNA, 21 nt, Artificial Sequence
  Synthetic
cugagaaugcguuucaaauuu

SEQ ID NO: 683615 - RNA, 22 nt, Artificial Sequence
  Synthetic
ccugagaaugcguuucaaauuu

SEQ ID NO: 683616 - RNA, 23 nt, Artificial Sequence
  Synthetic
uccugagaaugcguuucaaauuu

SEQ ID NO: 683617 - RNA, 24 nt, Artificial Sequence
  Synthetic
uuccugagaaugcguuucaaauuu

SEQ ID NO: 683618 - RNA, 18 nt, Artificial Sequence
  Synthetic
uuuuuuuuuuucaaauuu

SEQ ID NO: 683619 - RNA, 19 nt, Artificial Sequence
  Synthetic
uuuuuuuuuuuucaaauuu

SEQ ID NO: 683620 - RNA, 20 nt, Artificial Sequence
  Synthetic
uuuuuuuuuuuuucaaauuu

SEQ ID NO: 683621 - RNA, 21 nt, Artificial Sequence
  Synthetic
auuuuuuuuuuuuucaaauuu

SEQ ID NO: 683622 - RNA, 22 nt, Artificial Sequence
  Synthetic
cauuuuuuuuuuuuucaaauuu

SEQ ID NO: 683623 - RNA, 23 nt, Artificial Sequence
  Synthetic
ucauuuuuuuuuuuuucaaauuu

SEQ ID NO: 683624 - RNA, 24 nt, Artificial Sequence
  Synthetic
aucauuuuuuuuuuuuucaaauuu

SEQ ID NO: 683625 - RNA, 18 nt, Artificial Sequence
  Synthetic
auccauauaaagaaauuu

SEQ ID NO: 683626 - RNA, 19 nt, Artificial Sequence
  Synthetic
cauccauauaaagaaauuu

SEQ ID NO: 683627 - RNA, 20 nt, Artificial Sequence
  Synthetic
gcauccauauaaagaaauuu

SEQ ID NO: 683628 - RNA, 21 nt, Artificial Sequence
  Synthetic
ugcauccauauaaagaaauuu

SEQ ID NO: 683629 - RNA, 22 nt, Artificial Sequence
  Synthetic
augcauccauauaaagaaauuu

SEQ ID NO: 683630 - RNA, 23 nt, Artificial Sequence
  Synthetic
uaugcauccauauaaagaaauuu

SEQ ID NO: 683631 - RNA, 24 nt, Artificial Sequence
  Synthetic
uuaugcauccauauaaagaaauuu

SEQ ID NO: 683632 - RNA, 18 nt, Artificial Sequence
  Synthetic
guauuuaugaagaaauuu

SEQ ID NO: 683633 - RNA, 19 nt, Artificial Sequence
  Synthetic
gguauuuaugaagaaauuu

SEQ ID NO: 683634 - RNA, 20 nt, Artificial Sequence
  Synthetic
agguauuuaugaagaaauuu

SEQ ID NO: 683635 - RNA, 21 nt, Artificial Sequence
  Synthetic
gagguauuuaugaagaaauuu

SEQ ID NO: 683636 - RNA, 22 nt, Artificial Sequence
  Synthetic
agagguauuuaugaagaaauuu

SEQ ID NO: 683637 - RNA, 23 nt, Artificial Sequence
  Synthetic
cagagguauuuaugaagaaauuu

SEQ ID NO: 683638 - RNA, 24 nt, Artificial Sequence
  Synthetic
ucagagguauuuaugaagaaauuu

SEQ ID NO: 683639 - RNA, 18 nt, Artificial Sequence
  Synthetic
augccaagagagaaauuu

SEQ ID NO: 683640 - RNA, 19 nt, Artificial Sequence
  Synthetic
uaugccaagagagaaauuu

SEQ ID NO: 683641 - RNA, 20 nt, Artificial Sequence
  Synthetic
auaugccaagagagaaauuu

SEQ ID NO: 683642 - RNA, 21 nt, Artificial Sequence
  Synthetic
gauaugccaagagagaaauuu

SEQ ID NO: 683643 - RNA, 22 nt, Artificial Sequence
  Synthetic
ugauaugccaagagagaaauuu

SEQ ID NO: 683644 - RNA, 23 nt, Artificial Sequence
  Synthetic
gugauaugccaagagagaaauuu

SEQ ID NO: 683645 - RNA, 24 nt, Artificial Sequence
  Synthetic
ugugauaugccaagagagaaauuu

SEQ ID NO: 683646 - RNA, 18 nt, Artificial Sequence
  Synthetic
ggaucagaaacgaaauuu

SEQ ID NO: 683647 - RNA, 19 nt, Artificial Sequence
  Synthetic
aggaucagaaacgaaauuu

SEQ ID NO: 683648 - RNA, 20 nt, Artificial Sequence
  Synthetic
aaggaucagaaacgaaauuu

SEQ ID NO: 683649 - RNA, 21 nt, Artificial Sequence
  Synthetic
uaaggaucagaaacgaaauuu

SEQ ID NO: 683650 - RNA, 22 nt, Artificial Sequence
  Synthetic
auaaggaucagaaacgaaauuu

SEQ ID NO: 683651 - RNA, 23 nt, Artificial Sequence
  Synthetic
gauaaggaucagaaacgaaauuu

SEQ ID NO: 683652 - RNA, 24 nt, Artificial Sequence
  Synthetic
agauaaggaucagaaacgaaauuu

SEQ ID NO: 683653 - RNA, 18 nt, Artificial Sequence
  Synthetic
uuuacagccaggaaauuu

SEQ ID NO: 683654 - RNA, 19 nt, Artificial Sequence
  Synthetic
uuuuacagccaggaaauuu

SEQ ID NO: 683655 - RNA, 20 nt, Artificial Sequence
  Synthetic
cuuuuacagccaggaaauuu

SEQ ID NO: 683656 - RNA, 21 nt, Artificial Sequence
  Synthetic
acuuuuacagccaggaaauuu

SEQ ID NO: 683657 - RNA, 22 nt, Artificial Sequence
  Synthetic
cacuuuuacagccaggaaauuu

SEQ ID NO: 683658 - RNA, 23 nt, Artificial Sequence
  Synthetic
ccacuuuuacagccaggaaauuu

SEQ ID NO: 683659 - RNA, 24 nt, Artificial Sequence
  Synthetic
accacuuuuacagccaggaaauuu

SEQ ID NO: 683660 - RNA, 18 nt, Artificial Sequence
  Synthetic
uauacacagaggaaauuu

SEQ ID NO: 683661 - RNA, 19 nt, Artificial Sequence
  Synthetic
auauacacagaggaaauuu

SEQ ID NO: 683662 - RNA, 20 nt, Artificial Sequence
  Synthetic
uauauacacagaggaaauuu

SEQ ID NO: 683663 - RNA, 21 nt, Artificial Sequence
  Synthetic
auauauacacagaggaaauuu

SEQ ID NO: 683664 - RNA, 22 nt, Artificial Sequence
  Synthetic
gauauauacacagaggaaauuu

SEQ ID NO: 683665 - RNA, 23 nt, Artificial Sequence
  Synthetic
ugauauauacacagaggaaauuu

SEQ ID NO: 683666 - RNA, 24 nt, Artificial Sequence
  Synthetic
gugauauauacacagaggaaauuu

SEQ ID NO: 683667 - RNA, 18 nt, Artificial Sequence
  Synthetic
agauauuugaggaaauuu

SEQ ID NO: 683668 - RNA, 19 nt, Artificial Sequence
  Synthetic
cagauauuugaggaaauuu

SEQ ID NO: 683669 - RNA, 20 nt, Artificial Sequence
  Synthetic
acagauauuugaggaaauuu

SEQ ID NO: 683670 - RNA, 21 nt, Artificial Sequence
  Synthetic
gacagauauuugaggaaauuu

SEQ ID NO: 683671 - RNA, 22 nt, Artificial Sequence
  Synthetic
agacagauauuugaggaaauuu

SEQ ID NO: 683672 - RNA, 23 nt, Artificial Sequence
  Synthetic
cagacagauauuugaggaaauuu

SEQ ID NO: 683673 - RNA, 24 nt, Artificial Sequence
  Synthetic
gcagacagauauuugaggaaauuu

SEQ ID NO: 683674 - RNA, 18 nt, Artificial Sequence
  Synthetic
uuuagagaagggaaauuu

SEQ ID NO: 683675 - RNA, 19 nt, Artificial Sequence
  Synthetic
auuuagagaagggaaauuu

SEQ ID NO: 683676 - RNA, 20 nt, Artificial Sequence
  Synthetic
uauuuagagaagggaaauuu

SEQ ID NO: 683677 - RNA, 21 nt, Artificial Sequence
  Synthetic
auauuuagagaagggaaauuu

SEQ ID NO: 683678 - RNA, 22 nt, Artificial Sequence
  Synthetic
cauauuuagagaagggaaauuu

SEQ ID NO: 683679 - RNA, 23 nt, Artificial Sequence
  Synthetic
gcauauuuagagaagggaaauuu

SEQ ID NO: 683680 - RNA, 24 nt, Artificial Sequence
  Synthetic
ugcauauuuagagaagggaaauuu

SEQ ID NO: 683681 - RNA, 18 nt, Artificial Sequence
  Synthetic
aaaaucaacuggaaauuu

SEQ ID NO: 683682 - RNA, 19 nt, Artificial Sequence
  Synthetic
caaaaucaacuggaaauuu

SEQ ID NO: 683683 - RNA, 20 nt, Artificial Sequence
  Synthetic
ucaaaaucaacuggaaauuu

SEQ ID NO: 683684 - RNA, 21 nt, Artificial Sequence
  Synthetic
aucaaaaucaacuggaaauuu

SEQ ID NO: 683685 - RNA, 22 nt, Artificial Sequence
  Synthetic
caucaaaaucaacuggaaauuu

SEQ ID NO: 683686 - RNA, 23 nt, Artificial Sequence
  Synthetic
ccaucaaaaucaacuggaaauuu

SEQ ID NO: 683687 - RNA, 24 nt, Artificial Sequence
  Synthetic
gccaucaaaaucaacuggaaauuu

SEQ ID NO: 683688 - RNA, 18 nt, Artificial Sequence
  Synthetic
uguaauaaaaugaaauuu

SEQ ID NO: 683689 - RNA, 19 nt, Artificial Sequence
  Synthetic
auguaauaaaaugaaauuu

SEQ ID NO: 683690 - RNA, 20 nt, Artificial Sequence
  Synthetic
gauguaauaaaaugaaauuu

SEQ ID NO: 683691 - RNA, 21 nt, Artificial Sequence
  Synthetic
agauguaauaaaaugaaauuu

SEQ ID NO: 683692 - RNA, 22 nt, Artificial Sequence
  Synthetic
aagauguaauaaaaugaaauuu

SEQ ID NO: 683693 - RNA, 23 nt, Artificial Sequence
  Synthetic
aaagauguaauaaaaugaaauuu

SEQ ID NO: 683694 - RNA, 24 nt, Artificial Sequence
  Synthetic
aaaagauguaauaaaaugaaauuu

SEQ ID NO: 683695 - RNA, 18 nt, Artificial Sequence
  Synthetic
ugugaaagaaugaaauuu

SEQ ID NO: 683696 - RNA, 19 nt, Artificial Sequence
  Synthetic
augugaaagaaugaaauuu

SEQ ID NO: 683697 - RNA, 20 nt, Artificial Sequence
  Synthetic
aaugugaaagaaugaaauuu

SEQ ID NO: 683698 - RNA, 21 nt, Artificial Sequence
  Synthetic
aaaugugaaagaaugaaauuu

SEQ ID NO: 683699 - RNA, 22 nt, Artificial Sequence
  Synthetic
aaaaugugaaagaaugaaauuu

SEQ ID NO: 683700 - RNA, 23 nt, Artificial Sequence
  Synthetic
aaaaaugugaaagaaugaaauuu

SEQ ID NO: 683701 - RNA, 24 nt, Artificial Sequence
  Synthetic
uaaaaaugugaaagaaugaaauuu

SEQ ID NO: 683702 - RNA, 18 nt, Artificial Sequence
  Synthetic
uacgauuaccugaaauuu

SEQ ID NO: 683703 - RNA, 19 nt, Artificial Sequence
  Synthetic
uuacgauuaccugaaauuu

SEQ ID NO: 683704 - RNA, 20 nt, Artificial Sequence
  Synthetic
uuuacgauuaccugaaauuu

SEQ ID NO: 683705 - RNA, 21 nt, Artificial Sequence
  Synthetic
auuuacgauuaccugaaauuu

SEQ ID NO: 683706 - RNA, 22 nt, Artificial Sequence
  Synthetic
gauuuacgauuaccugaaauuu

SEQ ID NO: 683707 - RNA, 23 nt, Artificial Sequence
  Synthetic
ugauuuacgauuaccugaaauuu

SEQ ID NO: 683708 - RNA, 24 nt, Artificial Sequence
  Synthetic
cugauuuacgauuaccugaaauuu

SEQ ID NO: 683709 - RNA, 18 nt, Artificial Sequence
  Synthetic
caaauucaaaauaaauuu

SEQ ID NO: 683710 - RNA, 19 nt, Artificial Sequence
  Synthetic
gcaaauucaaaauaaauuu

SEQ ID NO: 683711 - RNA, 20 nt, Artificial Sequence
  Synthetic
ggcaaauucaaaauaaauuu

SEQ ID NO: 683712 - RNA, 21 nt, Artificial Sequence
  Synthetic
aggcaaauucaaaauaaauuu

SEQ ID NO: 683713 - RNA, 22 nt, Artificial Sequence
  Synthetic
aaggcaaauucaaaauaaauuu

SEQ ID NO: 683714 - RNA, 23 nt, Artificial Sequence
  Synthetic
gaaggcaaauucaaaauaaauuu

SEQ ID NO: 683715 - RNA, 24 nt, Artificial Sequence
  Synthetic
agaaggcaaauucaaaauaaauuu

SEQ ID NO: 683716 - RNA, 18 nt, Artificial Sequence
  Synthetic
caaagucuuaauaaauuu

SEQ ID NO: 683717 - RNA, 19 nt, Artificial Sequence
  Synthetic
acaaagucuuaauaaauuu

SEQ ID NO: 683718 - RNA, 20 nt, Artificial Sequence
  Synthetic
cacaaagucuuaauaaauuu

SEQ ID NO: 683719 - RNA, 21 nt, Artificial Sequence
  Synthetic
ccacaaagucuuaauaaauuu

SEQ ID NO: 683720 - RNA, 22 nt, Artificial Sequence
  Synthetic
accacaaagucuuaauaaauuu

SEQ ID NO: 683721 - RNA, 23 nt, Artificial Sequence
  Synthetic
gaccacaaagucuuaauaaauuu

SEQ ID NO: 683722 - RNA, 24 nt, Artificial Sequence
  Synthetic
agaccacaaagucuuaauaaauuu

SEQ ID NO: 683723 - RNA, 18 nt, Artificial Sequence
  Synthetic
uaaccugcugcuaaauuu

SEQ ID NO: 683724 - RNA, 19 nt, Artificial Sequence
  Synthetic
uuaaccugcugcuaaauuu

SEQ ID NO: 683725 - RNA, 20 nt, Artificial Sequence
  Synthetic
auuaaccugcugcuaaauuu

SEQ ID NO: 683726 - RNA, 21 nt, Artificial Sequence
  Synthetic
gauuaaccugcugcuaaauuu

SEQ ID NO: 683727 - RNA, 22 nt, Artificial Sequence
  Synthetic
ugauuaaccugcugcuaaauuu

SEQ ID NO: 683728 - RNA, 23 nt, Artificial Sequence
  Synthetic
gugauuaaccugcugcuaaauuu

SEQ ID NO: 683729 - RNA, 24 nt, Artificial Sequence
  Synthetic
agugauuaaccugcugcuaaauuu

SEQ ID NO: 683730 - RNA, 18 nt, Artificial Sequence
  Synthetic
uauugacuugguaaauuu

SEQ ID NO: 683731 - RNA, 19 nt, Artificial Sequence
  Synthetic
cuauugacuugguaaauuu

SEQ ID NO: 683732 - RNA, 20 nt, Artificial Sequence
  Synthetic
gcuauugacuugguaaauuu

SEQ ID NO: 683733 - RNA, 21 nt, Artificial Sequence
  Synthetic
ugcuauugacuugguaaauuu

SEQ ID NO: 683734 - RNA, 22 nt, Artificial Sequence
  Synthetic
gugcuauugacuugguaaauuu

SEQ ID NO: 683735 - RNA, 23 nt, Artificial Sequence
  Synthetic
ggugcuauugacuugguaaauuu

SEQ ID NO: 683736 - RNA, 24 nt, Artificial Sequence
  Synthetic
uggugcuauugacuugguaaauuu

SEQ ID NO: 683737 - RNA, 18 nt, Artificial Sequence
  Synthetic
uacuguaauauuaaauuu

SEQ ID NO: 683738 - RNA, 19 nt, Artificial Sequence
  Synthetic
auacuguaauauuaaauuu

SEQ ID NO: 683739 - RNA, 20 nt, Artificial Sequence
  Synthetic
gauacuguaauauuaaauuu

SEQ ID NO: 683740 - RNA, 21 nt, Artificial Sequence
  Synthetic
ugauacuguaauauuaaauuu

SEQ ID NO: 683741 - RNA, 22 nt, Artificial Sequence
  Synthetic
uugauacuguaauauuaaauuu

SEQ ID NO: 683742 - RNA, 23 nt, Artificial Sequence
  Synthetic
uuugauacuguaauauuaaauuu

SEQ ID NO: 683743 - RNA, 24 nt, Artificial Sequence
  Synthetic
auuugauacuguaauauuaaauuu

SEQ ID NO: 683744 - RNA, 18 nt, Artificial Sequence
  Synthetic
auaacuguuauuaaauuu

SEQ ID NO: 683745 - RNA, 19 nt, Artificial Sequence
  Synthetic
aauaacuguuauuaaauuu

SEQ ID NO: 683746 - RNA, 20 nt, Artificial Sequence
  Synthetic
gaauaacuguuauuaaauuu

SEQ ID NO: 683747 - RNA, 21 nt, Artificial Sequence
  Synthetic
agaauaacuguuauuaaauuu

SEQ ID NO: 683748 - RNA, 22 nt, Artificial Sequence
  Synthetic
aagaauaacuguuauuaaauuu

SEQ ID NO: 683749 - RNA, 23 nt, Artificial Sequence
  Synthetic
gaagaauaacuguuauuaaauuu

SEQ ID NO: 683750 - RNA, 24 nt, Artificial Sequence
  Synthetic
ggaagaauaacuguuauuaaauuu

SEQ ID NO: 683751 - RNA, 18 nt, Artificial Sequence
  Synthetic
acaucucugcuuaaauuu

SEQ ID NO: 683752 - RNA, 19 nt, Artificial Sequence
  Synthetic
uacaucucugcuuaaauuu

SEQ ID NO: 683753 - RNA, 20 nt, Artificial Sequence
  Synthetic
guacaucucugcuuaaauuu

SEQ ID NO: 683754 - RNA, 21 nt, Artificial Sequence
  Synthetic
uguacaucucugcuuaaauuu

SEQ ID NO: 683755 - RNA, 22 nt, Artificial Sequence
  Synthetic
uuguacaucucugcuuaaauuu

SEQ ID NO: 683756 - RNA, 23 nt, Artificial Sequence
  Synthetic
cuuguacaucucugcuuaaauuu

SEQ ID NO: 683757 - RNA, 24 nt, Artificial Sequence
  Synthetic
ucuuguacaucucugcuuaaauuu

SEQ ID NO: 683758 - RNA, 18 nt, Artificial Sequence
  Synthetic
aaggucaaaguuaaauuu

SEQ ID NO: 683759 - RNA, 19 nt, Artificial Sequence
  Synthetic
aaaggucaaaguuaaauuu

SEQ ID NO: 683760 - RNA, 20 nt, Artificial Sequence
  Synthetic
uaaaggucaaaguuaaauuu

SEQ ID NO: 683761 - RNA, 21 nt, Artificial Sequence
  Synthetic
auaaaggucaaaguuaaauuu

SEQ ID NO: 683762 - RNA, 22 nt, Artificial Sequence
  Synthetic
aauaaaggucaaaguuaaauuu

SEQ ID NO: 683763 - RNA, 23 nt, Artificial Sequence
  Synthetic
aaauaaaggucaaaguuaaauuu

SEQ ID NO: 683764 - RNA, 24 nt, Artificial Sequence
  Synthetic
aaaauaaaggucaaaguuaaauuu

SEQ ID NO: 683765 - RNA, 18 nt, Artificial Sequence
  Synthetic
aaccagauaguuaaauuu

SEQ ID NO: 683766 - RNA, 19 nt, Artificial Sequence
  Synthetic
caaccagauaguuaaauuu

SEQ ID NO: 683767 - RNA, 20 nt, Artificial Sequence
  Synthetic
ucaaccagauaguuaaauuu

SEQ ID NO: 683768 - RNA, 21 nt, Artificial Sequence
  Synthetic
cucaaccagauaguuaaauuu

SEQ ID NO: 683769 - RNA, 22 nt, Artificial Sequence
  Synthetic
ccucaaccagauaguuaaauuu

SEQ ID NO: 683770 - RNA, 23 nt, Artificial Sequence
  Synthetic
uccucaaccagauaguuaaauuu

SEQ ID NO: 683771 - RNA, 24 nt, Artificial Sequence
  Synthetic
auccucaaccagauaguuaaauuu

SEQ ID NO: 683772 - RNA, 18 nt, Artificial Sequence
  Synthetic
gcuuaggccuuuaaauuu

SEQ ID NO: 683773 - RNA, 19 nt, Artificial Sequence
  Synthetic
ggcuuaggccuuuaaauuu

SEQ ID NO: 683774 - RNA, 20 nt, Artificial Sequence
  Synthetic
gggcuuaggccuuuaaauuu

SEQ ID NO: 683775 - RNA, 21 nt, Artificial Sequence
  Synthetic
agggcuuaggccuuuaaauuu

SEQ ID NO: 683776 - RNA, 22 nt, Artificial Sequence
  Synthetic
gagggcuuaggccuuuaaauuu

SEQ ID NO: 683777 - RNA, 23 nt, Artificial Sequence
  Synthetic
ugagggcuuaggccuuuaaauuu

SEQ ID NO: 683778 - RNA, 24 nt, Artificial Sequence
  Synthetic
uugagggcuuaggccuuuaaauuu

SEQ ID NO: 683779 - RNA, 18 nt, Artificial Sequence
  Synthetic
ucuuuauccuuuaaauuu

SEQ ID NO: 683780 - RNA, 19 nt, Artificial Sequence
  Synthetic
aucuuuauccuuuaaauuu

SEQ ID NO: 683781 - RNA, 20 nt, Artificial Sequence
  Synthetic
aaucuuuauccuuuaaauuu

SEQ ID NO: 683782 - RNA, 21 nt, Artificial Sequence
  Synthetic
aaaucuuuauccuuuaaauuu

SEQ ID NO: 683783 - RNA, 22 nt, Artificial Sequence
  Synthetic
caaaucuuuauccuuuaaauuu

SEQ ID NO: 683784 - RNA, 23 nt, Artificial Sequence
  Synthetic
gcaaaucuuuauccuuuaaauuu

SEQ ID NO: 683785 - RNA, 24 nt, Artificial Sequence
  Synthetic
agcaaaucuuuauccuuuaaauuu

SEQ ID NO: 683786 - RNA, 18 nt, Artificial Sequence
  Synthetic
guaaucuuugaacaauuu

SEQ ID NO: 683787 - RNA, 19 nt, Artificial Sequence
  Synthetic
cguaaucuuugaacaauuu

SEQ ID NO: 683788 - RNA, 20 nt, Artificial Sequence
  Synthetic
gcguaaucuuugaacaauuu

SEQ ID NO: 683789 - RNA, 21 nt, Artificial Sequence
  Synthetic
agcguaaucuuugaacaauuu

SEQ ID NO: 683790 - RNA, 22 nt, Artificial Sequence
  Synthetic
uagcguaaucuuugaacaauuu

SEQ ID NO: 683791 - RNA, 23 nt, Artificial Sequence
  Synthetic
uuagcguaaucuuugaacaauuu

SEQ ID NO: 683792 - RNA, 24 nt, Artificial Sequence
  Synthetic
cuuagcguaaucuuugaacaauuu

SEQ ID NO: 683793 - RNA, 18 nt, Artificial Sequence
  Synthetic
auauacaaaagacaauuu

SEQ ID NO: 683794 - RNA, 19 nt, Artificial Sequence
  Synthetic
uauauacaaaagacaauuu

SEQ ID NO: 683795 - RNA, 20 nt, Artificial Sequence
  Synthetic
auauauacaaaagacaauuu

SEQ ID NO: 683796 - RNA, 21 nt, Artificial Sequence
  Synthetic
aauauauacaaaagacaauuu

SEQ ID NO: 683797 - RNA, 22 nt, Artificial Sequence
  Synthetic
aaauauauacaaaagacaauuu

SEQ ID NO: 683798 - RNA, 23 nt, Artificial Sequence
  Synthetic
gaaauauauacaaaagacaauuu

SEQ ID NO: 683799 - RNA, 24 nt, Artificial Sequence
  Synthetic
agaaauauauacaaaagacaauuu

SEQ ID NO: 683800 - RNA, 18 nt, Artificial Sequence
  Synthetic
uagaaaaguagacaauuu

SEQ ID NO: 683801 - RNA, 19 nt, Artificial Sequence
  Synthetic
auagaaaaguagacaauuu

SEQ ID NO: 683802 - RNA, 20 nt, Artificial Sequence
  Synthetic
uauagaaaaguagacaauuu

SEQ ID NO: 683803 - RNA, 21 nt, Artificial Sequence
  Synthetic
uuauagaaaaguagacaauuu

SEQ ID NO: 683804 - RNA, 22 nt, Artificial Sequence
  Synthetic
guuauagaaaaguagacaauuu

SEQ ID NO: 683805 - RNA, 23 nt, Artificial Sequence
  Synthetic
uguuauagaaaaguagacaauuu

SEQ ID NO: 683806 - RNA, 24 nt, Artificial Sequence
  Synthetic
auguuauagaaaaguagacaauuu

SEQ ID NO: 683807 - RNA, 18 nt, Artificial Sequence
  Synthetic
uuuucuguaggacaauuu

SEQ ID NO: 683808 - RNA, 19 nt, Artificial Sequence
  Synthetic
guuuucuguaggacaauuu

SEQ ID NO: 683809 - RNA, 20 nt, Artificial Sequence
  Synthetic
gguuuucuguaggacaauuu

SEQ ID NO: 683810 - RNA, 21 nt, Artificial Sequence
  Synthetic
ugguuuucuguaggacaauuu

SEQ ID NO: 683811 - RNA, 22 nt, Artificial Sequence
  Synthetic
cugguuuucuguaggacaauuu

SEQ ID NO: 683812 - RNA, 23 nt, Artificial Sequence
  Synthetic
ccugguuuucuguaggacaauuu

SEQ ID NO: 683813 - RNA, 24 nt, Artificial Sequence
  Synthetic
accugguuuucuguaggacaauuu

SEQ ID NO: 683814 - RNA, 18 nt, Artificial Sequence
  Synthetic
ugaguaaugguacaauuu

SEQ ID NO: 683815 - RNA, 19 nt, Artificial Sequence
  Synthetic
gugaguaaugguacaauuu

SEQ ID NO: 683816 - RNA, 20 nt, Artificial Sequence
  Synthetic
agugaguaaugguacaauuu

SEQ ID NO: 683817 - RNA, 21 nt, Artificial Sequence
  Synthetic
cagugaguaaugguacaauuu

SEQ ID NO: 683818 - RNA, 22 nt, Artificial Sequence
  Synthetic
gcagugaguaaugguacaauuu

SEQ ID NO: 683819 - RNA, 23 nt, Artificial Sequence
  Synthetic
cgcagugaguaaugguacaauuu

SEQ ID NO: 683820 - RNA, 24 nt, Artificial Sequence
  Synthetic
acgcagugaguaaugguacaauuu

SEQ ID NO: 683821 - RNA, 18 nt, Artificial Sequence
  Synthetic
gucuacccauuacaauuu

SEQ ID NO: 683822 - RNA, 19 nt, Artificial Sequence
  Synthetic
agucuacccauuacaauuu

SEQ ID NO: 683823 - RNA, 20 nt, Artificial Sequence
  Synthetic
aagucuacccauuacaauuu

SEQ ID NO: 683824 - RNA, 21 nt, Artificial Sequence
  Synthetic
gaagucuacccauuacaauuu

SEQ ID NO: 683825 - RNA, 22 nt, Artificial Sequence
  Synthetic
ugaagucuacccauuacaauuu

SEQ ID NO: 683826 - RNA, 23 nt, Artificial Sequence
  Synthetic
uugaagucuacccauuacaauuu

SEQ ID NO: 683827 - RNA, 24 nt, Artificial Sequence
  Synthetic
uuugaagucuacccauuacaauuu

SEQ ID NO: 683828 - RNA, 18 nt, Artificial Sequence
  Synthetic
uuuauuaucuuacaauuu

SEQ ID NO: 683829 - RNA, 19 nt, Artificial Sequence
  Synthetic
auuuauuaucuuacaauuu

SEQ ID NO: 683830 - RNA, 20 nt, Artificial Sequence
  Synthetic
aauuuauuaucuuacaauuu

SEQ ID NO: 683831 - RNA, 21 nt, Artificial Sequence
  Synthetic
aaauuuauuaucuuacaauuu

SEQ ID NO: 683832 - RNA, 22 nt, Artificial Sequence
  Synthetic
caaauuuauuaucuuacaauuu

SEQ ID NO: 683833 - RNA, 23 nt, Artificial Sequence
  Synthetic
ccaaauuuauuaucuuacaauuu

SEQ ID NO: 683834 - RNA, 24 nt, Artificial Sequence
  Synthetic
cccaaauuuauuaucuuacaauuu

SEQ ID NO: 683835 - RNA, 18 nt, Artificial Sequence
  Synthetic
auaaauccaugccaauuu

SEQ ID NO: 683836 - RNA, 19 nt, Artificial Sequence
  Synthetic
aauaaauccaugccaauuu

SEQ ID NO: 683837 - RNA, 20 nt, Artificial Sequence
  Synthetic
caauaaauccaugccaauuu

SEQ ID NO: 683838 - RNA, 21 nt, Artificial Sequence
  Synthetic
acaauaaauccaugccaauuu

SEQ ID NO: 683839 - RNA, 22 nt, Artificial Sequence
  Synthetic
aacaauaaauccaugccaauuu

SEQ ID NO: 683840 - RNA, 23 nt, Artificial Sequence
  Synthetic
uaacaauaaauccaugccaauuu

SEQ ID NO: 683841 - RNA, 24 nt, Artificial Sequence
  Synthetic
auaacaauaaauccaugccaauuu

SEQ ID NO: 683842 - RNA, 18 nt, Artificial Sequence
  Synthetic
ggcaauauacagcaauuu

SEQ ID NO: 683843 - RNA, 19 nt, Artificial Sequence
  Synthetic
aggcaauauacagcaauuu

SEQ ID NO: 683844 - RNA, 20 nt, Artificial Sequence
  Synthetic
gaggcaauauacagcaauuu

SEQ ID NO: 683845 - RNA, 21 nt, Artificial Sequence
  Synthetic
ugaggcaauauacagcaauuu

SEQ ID NO: 683846 - RNA, 22 nt, Artificial Sequence
  Synthetic
cugaggcaauauacagcaauuu

SEQ ID NO: 683847 - RNA, 23 nt, Artificial Sequence
  Synthetic
acugaggcaauauacagcaauuu

SEQ ID NO: 683848 - RNA, 24 nt, Artificial Sequence
  Synthetic
uacugaggcaauauacagcaauuu

SEQ ID NO: 683849 - RNA, 18 nt, Artificial Sequence
  Synthetic
cuguaauaucagcaauuu

SEQ ID NO: 683850 - RNA, 19 nt, Artificial Sequence
  Synthetic
ccuguaauaucagcaauuu

SEQ ID NO: 683851 - RNA, 20 nt, Artificial Sequence
  Synthetic
gccuguaauaucagcaauuu

SEQ ID NO: 683852 - RNA, 21 nt, Artificial Sequence
  Synthetic
cgccuguaauaucagcaauuu

SEQ ID NO: 683853 - RNA, 22 nt, Artificial Sequence
  Synthetic
acgccuguaauaucagcaauuu

SEQ ID NO: 683854 - RNA, 23 nt, Artificial Sequence
  Synthetic
cacgccuguaauaucagcaauuu

SEQ ID NO: 683855 - RNA, 24 nt, Artificial Sequence
  Synthetic
ucacgccuguaauaucagcaauuu

SEQ ID NO: 683856 - RNA, 18 nt, Artificial Sequence
  Synthetic
uuguuucuagagcaauuu

SEQ ID NO: 683857 - RNA, 19 nt, Artificial Sequence
  Synthetic
auuguuucuagagcaauuu

SEQ ID NO: 683858 - RNA, 20 nt, Artificial Sequence
  Synthetic
aauuguuucuagagcaauuu

SEQ ID NO: 683859 - RNA, 21 nt, Artificial Sequence
  Synthetic
gaauuguuucuagagcaauuu

SEQ ID NO: 683860 - RNA, 22 nt, Artificial Sequence
  Synthetic
ggaauuguuucuagagcaauuu

SEQ ID NO: 683861 - RNA, 23 nt, Artificial Sequence
  Synthetic
gggaauuguuucuagagcaauuu

SEQ ID NO: 683862 - RNA, 24 nt, Artificial Sequence
  Synthetic
agggaauuguuucuagagcaauuu

SEQ ID NO: 683863 - RNA, 18 nt, Artificial Sequence
  Synthetic
uuuaaauuauagcaauuu

SEQ ID NO: 683864 - RNA, 19 nt, Artificial Sequence
  Synthetic
uuuuaaauuauagcaauuu

SEQ ID NO: 683865 - RNA, 20 nt, Artificial Sequence
  Synthetic
auuuuaaauuauagcaauuu

SEQ ID NO: 683866 - RNA, 21 nt, Artificial Sequence
  Synthetic
uauuuuaaauuauagcaauuu

SEQ ID NO: 683867 - RNA, 22 nt, Artificial Sequence
  Synthetic
uuauuuuaaauuauagcaauuu

SEQ ID NO: 683868 - RNA, 23 nt, Artificial Sequence
  Synthetic
uuuauuuuaaauuauagcaauuu

SEQ ID NO: 683869 - RNA, 24 nt, Artificial Sequence
  Synthetic
auuuauuuuaaauuauagcaauuu

SEQ ID NO: 683870 - RNA, 18 nt, Artificial Sequence
  Synthetic
agucagcucgggcaauuu

SEQ ID NO: 683871 - RNA, 19 nt, Artificial Sequence
  Synthetic
aagucagcucgggcaauuu

SEQ ID NO: 683872 - RNA, 20 nt, Artificial Sequence
  Synthetic
aaagucagcucgggcaauuu

SEQ ID NO: 683873 - RNA, 21 nt, Artificial Sequence
  Synthetic
aaaagucagcucgggcaauuu

SEQ ID NO: 683874 - RNA, 22 nt, Artificial Sequence
  Synthetic
gaaaagucagcucgggcaauuu

SEQ ID NO: 683875 - RNA, 23 nt, Artificial Sequence
  Synthetic
ggaaaagucagcucgggcaauuu

SEQ ID NO: 683876 - RNA, 24 nt, Artificial Sequence
  Synthetic
gggaaaagucagcucgggcaauuu

SEQ ID NO: 683877 - RNA, 18 nt, Artificial Sequence
  Synthetic
gccuccccagugcaauuu

SEQ ID NO: 683878 - RNA, 19 nt, Artificial Sequence
  Synthetic
ugccuccccagugcaauuu

SEQ ID NO: 683879 - RNA, 20 nt, Artificial Sequence
  Synthetic
cugccuccccagugcaauuu

SEQ ID NO: 683880 - RNA, 21 nt, Artificial Sequence
  Synthetic
ccugccuccccagugcaauuu

SEQ ID NO: 683881 - RNA, 22 nt, Artificial Sequence
  Synthetic
accugccuccccagugcaauuu

SEQ ID NO: 683882 - RNA, 23 nt, Artificial Sequence
  Synthetic
gaccugccuccccagugcaauuu

SEQ ID NO: 683883 - RNA, 24 nt, Artificial Sequence
  Synthetic
ugaccugccuccccagugcaauuu

SEQ ID NO: 683884 - RNA, 18 nt, Artificial Sequence
  Synthetic
accuuaaaaaaucaauuu

SEQ ID NO: 683885 - RNA, 19 nt, Artificial Sequence
  Synthetic
aaccuuaaaaaaucaauuu

SEQ ID NO: 683886 - RNA, 20 nt, Artificial Sequence
  Synthetic
gaaccuuaaaaaaucaauuu

SEQ ID NO: 683887 - RNA, 21 nt, Artificial Sequence
  Synthetic
ugaaccuuaaaaaaucaauuu

SEQ ID NO: 683888 - RNA, 22 nt, Artificial Sequence
  Synthetic
augaaccuuaaaaaaucaauuu

SEQ ID NO: 683889 - RNA, 23 nt, Artificial Sequence
  Synthetic
caugaaccuuaaaaaaucaauuu

SEQ ID NO: 683890 - RNA, 24 nt, Artificial Sequence
  Synthetic
ucaugaaccuuaaaaaaucaauuu

SEQ ID NO: 683891 - RNA, 18 nt, Artificial Sequence
  Synthetic
gaacuucccaaucaauuu

SEQ ID NO: 683892 - RNA, 19 nt, Artificial Sequence
  Synthetic
agaacuucccaaucaauuu

SEQ ID NO: 683893 - RNA, 20 nt, Artificial Sequence
  Synthetic
gagaacuucccaaucaauuu

SEQ ID NO: 683894 - RNA, 21 nt, Artificial Sequence
  Synthetic
ggagaacuucccaaucaauuu

SEQ ID NO: 683895 - RNA, 22 nt, Artificial Sequence
  Synthetic
aggagaacuucccaaucaauuu

SEQ ID NO: 683896 - RNA, 23 nt, Artificial Sequence
  Synthetic
aaggagaacuucccaaucaauuu

SEQ ID NO: 683897 - RNA, 24 nt, Artificial Sequence
  Synthetic
uaaggagaacuucccaaucaauuu

SEQ ID NO: 683898 - RNA, 18 nt, Artificial Sequence
  Synthetic
cgauuauuagaucaauuu

SEQ ID NO: 683899 - RNA, 19 nt, Artificial Sequence
  Synthetic
acgauuauuagaucaauuu

SEQ ID NO: 683900 - RNA, 20 nt, Artificial Sequence
  Synthetic
gacgauuauuagaucaauuu

SEQ ID NO: 683901 - RNA, 21 nt, Artificial Sequence
  Synthetic
agacgauuauuagaucaauuu

SEQ ID NO: 683902 - RNA, 22 nt, Artificial Sequence
  Synthetic
gagacgauuauuagaucaauuu

SEQ ID NO: 683903 - RNA, 23 nt, Artificial Sequence
  Synthetic
agagacgauuauuagaucaauuu

SEQ ID NO: 683904 - RNA, 24 nt, Artificial Sequence
  Synthetic
gagagacgauuauuagaucaauuu

SEQ ID NO: 683905 - RNA, 18 nt, Artificial Sequence
  Synthetic
gugagaaauacucaauuu

SEQ ID NO: 683906 - RNA, 19 nt, Artificial Sequence
  Synthetic
ggugagaaauacucaauuu

SEQ ID NO: 683907 - RNA, 20 nt, Artificial Sequence
  Synthetic
aggugagaaauacucaauuu

SEQ ID NO: 683908 - RNA, 21 nt, Artificial Sequence
  Synthetic
uaggugagaaauacucaauuu

SEQ ID NO: 683909 - RNA, 22 nt, Artificial Sequence
  Synthetic
uuaggugagaaauacucaauuu

SEQ ID NO: 683910 - RNA, 23 nt, Artificial Sequence
  Synthetic
auuaggugagaaauacucaauuu

SEQ ID NO: 683911 - RNA, 24 nt, Artificial Sequence
  Synthetic
uauuaggugagaaauacucaauuu

SEQ ID NO: 683912 - RNA, 18 nt, Artificial Sequence
  Synthetic
uaauuacugccucaauuu

SEQ ID NO: 683913 - RNA, 19 nt, Artificial Sequence
  Synthetic
uuaauuacugccucaauuu

SEQ ID NO: 683914 - RNA, 20 nt, Artificial Sequence
  Synthetic
auuaauuacugccucaauuu

SEQ ID NO: 683915 - RNA, 21 nt, Artificial Sequence
  Synthetic
uauuaauuacugccucaauuu

SEQ ID NO: 683916 - RNA, 22 nt, Artificial Sequence
  Synthetic
cuauuaauuacugccucaauuu

SEQ ID NO: 683917 - RNA, 23 nt, Artificial Sequence
  Synthetic
gcuauuaauuacugccucaauuu

SEQ ID NO: 683918 - RNA, 24 nt, Artificial Sequence
  Synthetic
ggcuauuaauuacugccucaauuu

SEQ ID NO: 683919 - RNA, 18 nt, Artificial Sequence
  Synthetic
acguuuaaaagucaauuu

SEQ ID NO: 683920 - RNA, 19 nt, Artificial Sequence
  Synthetic
uacguuuaaaagucaauuu

SEQ ID NO: 683921 - RNA, 20 nt, Artificial Sequence
  Synthetic
guacguuuaaaagucaauuu

SEQ ID NO: 683922 - RNA, 21 nt, Artificial Sequence
  Synthetic
uguacguuuaaaagucaauuu

SEQ ID NO: 683923 - RNA, 22 nt, Artificial Sequence
  Synthetic
cuguacguuuaaaagucaauuu

SEQ ID NO: 683924 - RNA, 23 nt, Artificial Sequence
  Synthetic
ucuguacguuuaaaagucaauuu

SEQ ID NO: 683925 - RNA, 24 nt, Artificial Sequence
  Synthetic
uucuguacguuuaaaagucaauuu

SEQ ID NO: 683926 - RNA, 18 nt, Artificial Sequence
  Synthetic
ggauccacuugucaauuu

SEQ ID NO: 683927 - RNA, 19 nt, Artificial Sequence
  Synthetic
aggauccacuugucaauuu

SEQ ID NO: 683928 - RNA, 20 nt, Artificial Sequence
  Synthetic
uaggauccacuugucaauuu

SEQ ID NO: 683929 - RNA, 21 nt, Artificial Sequence
  Synthetic
guaggauccacuugucaauuu

SEQ ID NO: 683930 - RNA, 22 nt, Artificial Sequence
  Synthetic
gguaggauccacuugucaauuu

SEQ ID NO: 683931 - RNA, 23 nt, Artificial Sequence
  Synthetic
ugguaggauccacuugucaauuu

SEQ ID NO: 683932 - RNA, 24 nt, Artificial Sequence
  Synthetic
augguaggauccacuugucaauuu

SEQ ID NO: 683933 - RNA, 18 nt, Artificial Sequence
  Synthetic
gaggacuuaauucaauuu

SEQ ID NO: 683934 - RNA, 19 nt, Artificial Sequence
  Synthetic
agaggacuuaauucaauuu

SEQ ID NO: 683935 - RNA, 20 nt, Artificial Sequence
  Synthetic
aagaggacuuaauucaauuu

SEQ ID NO: 683936 - RNA, 21 nt, Artificial Sequence
  Synthetic
caagaggacuuaauucaauuu

SEQ ID NO: 683937 - RNA, 22 nt, Artificial Sequence
  Synthetic
gcaagaggacuuaauucaauuu

SEQ ID NO: 683938 - RNA, 23 nt, Artificial Sequence
  Synthetic
agcaagaggacuuaauucaauuu

SEQ ID NO: 683939 - RNA, 24 nt, Artificial Sequence
  Synthetic
cagcaagaggacuuaauucaauuu

SEQ ID NO: 683940 - RNA, 18 nt, Artificial Sequence
  Synthetic
cuucccuugcuucaauuu

SEQ ID NO: 683941 - RNA, 19 nt, Artificial Sequence
  Synthetic
acuucccuugcuucaauuu

SEQ ID NO: 683942 - RNA, 20 nt, Artificial Sequence
  Synthetic
aacuucccuugcuucaauuu

SEQ ID NO: 683943 - RNA, 21 nt, Artificial Sequence
  Synthetic
uaacuucccuugcuucaauuu

SEQ ID NO: 683944 - RNA, 22 nt, Artificial Sequence
  Synthetic
uuaacuucccuugcuucaauuu

SEQ ID NO: 683945 - RNA, 23 nt, Artificial Sequence
  Synthetic
uuuaacuucccuugcuucaauuu

SEQ ID NO: 683946 - RNA, 24 nt, Artificial Sequence
  Synthetic
auuuaacuucccuugcuucaauuu

SEQ ID NO: 683947 - RNA, 18 nt, Artificial Sequence
  Synthetic
gcaaaaaugguucaauuu

SEQ ID NO: 683948 - RNA, 19 nt, Artificial Sequence
  Synthetic
ugcaaaaaugguucaauuu

SEQ ID NO: 683949 - RNA, 20 nt, Artificial Sequence
  Synthetic
augcaaaaaugguucaauuu

SEQ ID NO: 683950 - RNA, 21 nt, Artificial Sequence
  Synthetic
aaugcaaaaaugguucaauuu

SEQ ID NO: 683951 - RNA, 22 nt, Artificial Sequence
  Synthetic
gaaugcaaaaaugguucaauuu

SEQ ID NO: 683952 - RNA, 23 nt, Artificial Sequence
  Synthetic
ggaaugcaaaaaugguucaauuu

SEQ ID NO: 683953 - RNA, 24 nt, Artificial Sequence
  Synthetic
uggaaugcaaaaaugguucaauuu

SEQ ID NO: 683954 - RNA, 18 nt, Artificial Sequence
  Synthetic
ugagaagaacaagaauuu

SEQ ID NO: 683955 - RNA, 19 nt, Artificial Sequence
  Synthetic
uugagaagaacaagaauuu

SEQ ID NO: 683956 - RNA, 20 nt, Artificial Sequence
  Synthetic
uuugagaagaacaagaauuu

SEQ ID NO: 683957 - RNA, 21 nt, Artificial Sequence
  Synthetic
cuuugagaagaacaagaauuu

SEQ ID NO: 683958 - RNA, 22 nt, Artificial Sequence
  Synthetic
ucuuugagaagaacaagaauuu

SEQ ID NO: 683959 - RNA, 23 nt, Artificial Sequence
  Synthetic
gucuuugagaagaacaagaauuu

SEQ ID NO: 683960 - RNA, 24 nt, Artificial Sequence
  Synthetic
ugucuuugagaagaacaagaauuu

SEQ ID NO: 683961 - RNA, 18 nt, Artificial Sequence
  Synthetic
uguugacucuaagaauuu

SEQ ID NO: 683962 - RNA, 19 nt, Artificial Sequence
  Synthetic
uuguugacucuaagaauuu

SEQ ID NO: 683963 - RNA, 20 nt, Artificial Sequence
  Synthetic
auuguugacucuaagaauuu

SEQ ID NO: 683964 - RNA, 21 nt, Artificial Sequence
  Synthetic
aauuguugacucuaagaauuu

SEQ ID NO: 683965 - RNA, 22 nt, Artificial Sequence
  Synthetic
caauuguugacucuaagaauuu

SEQ ID NO: 683966 - RNA, 23 nt, Artificial Sequence
  Synthetic
acaauuguugacucuaagaauuu

SEQ ID NO: 683967 - RNA, 24 nt, Artificial Sequence
  Synthetic
aacaauuguugacucuaagaauuu

SEQ ID NO: 683968 - RNA, 18 nt, Artificial Sequence
  Synthetic
aagagcaucacagaauuu

SEQ ID NO: 683969 - RNA, 19 nt, Artificial Sequence
  Synthetic
gaagagcaucacagaauuu

SEQ ID NO: 683970 - RNA, 20 nt, Artificial Sequence
  Synthetic
agaagagcaucacagaauuu

SEQ ID NO: 683971 - RNA, 21 nt, Artificial Sequence
  Synthetic
uagaagagcaucacagaauuu

SEQ ID NO: 683972 - RNA, 22 nt, Artificial Sequence
  Synthetic
auagaagagcaucacagaauuu

SEQ ID NO: 683973 - RNA, 23 nt, Artificial Sequence
  Synthetic
aauagaagagcaucacagaauuu

SEQ ID NO: 683974 - RNA, 24 nt, Artificial Sequence
  Synthetic
gaauagaagagcaucacagaauuu

SEQ ID NO: 683975 - RNA, 18 nt, Artificial Sequence
  Synthetic
ucuacugaaucagaauuu

SEQ ID NO: 683976 - RNA, 19 nt, Artificial Sequence
  Synthetic
gucuacugaaucagaauuu

SEQ ID NO: 683977 - RNA, 20 nt, Artificial Sequence
  Synthetic
agucuacugaaucagaauuu

SEQ ID NO: 683978 - RNA, 21 nt, Artificial Sequence
  Synthetic
aagucuacugaaucagaauuu

SEQ ID NO: 683979 - RNA, 22 nt, Artificial Sequence
  Synthetic
uaagucuacugaaucagaauuu

SEQ ID NO: 683980 - RNA, 23 nt, Artificial Sequence
  Synthetic
cuaagucuacugaaucagaauuu

SEQ ID NO: 683981 - RNA, 24 nt, Artificial Sequence
  Synthetic
ucuaagucuacugaaucagaauuu

SEQ ID NO: 683982 - RNA, 18 nt, Artificial Sequence
  Synthetic
ggaaggaucagagaauuu

SEQ ID NO: 683983 - RNA, 19 nt, Artificial Sequence
  Synthetic
uggaaggaucagagaauuu

SEQ ID NO: 683984 - RNA, 20 nt, Artificial Sequence
  Synthetic
guggaaggaucagagaauuu

SEQ ID NO: 683985 - RNA, 21 nt, Artificial Sequence
  Synthetic
uguggaaggaucagagaauuu

SEQ ID NO: 683986 - RNA, 22 nt, Artificial Sequence
  Synthetic
cuguggaaggaucagagaauuu

SEQ ID NO: 683987 - RNA, 23 nt, Artificial Sequence
  Synthetic
gcuguggaaggaucagagaauuu

SEQ ID NO: 683988 - RNA, 24 nt, Artificial Sequence
  Synthetic
ugcuguggaaggaucagagaauuu

SEQ ID NO: 683989 - RNA, 18 nt, Artificial Sequence
  Synthetic
cuggggguuugagaauuu

SEQ ID NO: 683990 - RNA, 19 nt, Artificial Sequence
  Synthetic
gcuggggguuugagaauuu

SEQ ID NO: 683991 - RNA, 20 nt, Artificial Sequence
  Synthetic
agcuggggguuugagaauuu

SEQ ID NO: 683992 - RNA, 21 nt, Artificial Sequence
  Synthetic
aagcuggggguuugagaauuu

SEQ ID NO: 683993 - RNA, 22 nt, Artificial Sequence
  Synthetic
uaagcuggggguuugagaauuu

SEQ ID NO: 683994 - RNA, 23 nt, Artificial Sequence
  Synthetic
auaagcuggggguuugagaauuu

SEQ ID NO: 683995 - RNA, 24 nt, Artificial Sequence
  Synthetic
uauaagcuggggguuugagaauuu

SEQ ID NO: 683996 - RNA, 18 nt, Artificial Sequence
  Synthetic
ugcuaaaaguuagaauuu

SEQ ID NO: 683997 - RNA, 19 nt, Artificial Sequence
  Synthetic
augcuaaaaguuagaauuu

SEQ ID NO: 683998 - RNA, 20 nt, Artificial Sequence
  Synthetic
aaugcuaaaaguuagaauuu

SEQ ID NO: 683999 - RNA, 21 nt, Artificial Sequence
  Synthetic
aaaugcuaaaaguuagaauuu

SEQ ID NO: 684000 - RNA, 22 nt, Artificial Sequence
  Synthetic
aaaaugcuaaaaguuagaauuu

SEQ ID NO: 684001 - RNA, 23 nt, Artificial Sequence
  Synthetic
aaaaaugcuaaaaguuagaauuu

SEQ ID NO: 684002 - RNA, 24 nt, Artificial Sequence
  Synthetic
aaaaaaugcuaaaaguuagaauuu

SEQ ID NO: 684003 - RNA, 18 nt, Artificial Sequence
  Synthetic
ucucucuguuuagaauuu

SEQ ID NO: 684004 - RNA, 19 nt, Artificial Sequence
  Synthetic
uucucucuguuuagaauuu

SEQ ID NO: 684005 - RNA, 20 nt, Artificial Sequence
  Synthetic
uuucucucuguuuagaauuu

SEQ ID NO: 684006 - RNA, 21 nt, Artificial Sequence
  Synthetic
auuucucucuguuuagaauuu

SEQ ID NO: 684007 - RNA, 22 nt, Artificial Sequence
  Synthetic
uauuucucucuguuuagaauuu

SEQ ID NO: 684008 - RNA, 23 nt, Artificial Sequence
  Synthetic
guauuucucucuguuuagaauuu

SEQ ID NO: 684009 - RNA, 24 nt, Artificial Sequence
  Synthetic
cguauuucucucuguuuagaauuu

SEQ ID NO: 684010 - RNA, 18 nt, Artificial Sequence
  Synthetic
uaaugggagaaggaauuu

SEQ ID NO: 684011 - RNA, 19 nt, Artificial Sequence
  Synthetic
cuaaugggagaaggaauuu

SEQ ID NO: 684012 - RNA, 20 nt, Artificial Sequence
  Synthetic
ccuaaugggagaaggaauuu

SEQ ID NO: 684013 - RNA, 21 nt, Artificial Sequence
  Synthetic
accuaaugggagaaggaauuu

SEQ ID NO: 684014 - RNA, 22 nt, Artificial Sequence
  Synthetic
gaccuaaugggagaaggaauuu

SEQ ID NO: 684015 - RNA, 23 nt, Artificial Sequence
  Synthetic
ugaccuaaugggagaaggaauuu

SEQ ID NO: 684016 - RNA, 24 nt, Artificial Sequence
  Synthetic
augaccuaaugggagaaggaauuu

SEQ ID NO: 684017 - RNA, 18 nt, Artificial Sequence
  Synthetic
acagcuaguaaggaauuu

SEQ ID NO: 684018 - RNA, 19 nt, Artificial Sequence
  Synthetic
cacagcuaguaaggaauuu

SEQ ID NO: 684019 - RNA, 20 nt, Artificial Sequence
  Synthetic
acacagcuaguaaggaauuu

SEQ ID NO: 684020 - RNA, 21 nt, Artificial Sequence
  Synthetic
gacacagcuaguaaggaauuu

SEQ ID NO: 684021 - RNA, 22 nt, Artificial Sequence
  Synthetic
ugacacagcuaguaaggaauuu

SEQ ID NO: 684022 - RNA, 23 nt, Artificial Sequence
  Synthetic
augacacagcuaguaaggaauuu

SEQ ID NO: 684023 - RNA, 24 nt, Artificial Sequence
  Synthetic
gaugacacagcuaguaaggaauuu

SEQ ID NO: 684024 - RNA, 18 nt, Artificial Sequence
  Synthetic
aucaacaaugaggaauuu

SEQ ID NO: 684025 - RNA, 19 nt, Artificial Sequence
  Synthetic
aaucaacaaugaggaauuu

SEQ ID NO: 684026 - RNA, 20 nt, Artificial Sequence
  Synthetic
aaaucaacaaugaggaauuu

SEQ ID NO: 684027 - RNA, 21 nt, Artificial Sequence
  Synthetic
gaaaucaacaaugaggaauuu

SEQ ID NO: 684028 - RNA, 22 nt, Artificial Sequence
  Synthetic
agaaaucaacaaugaggaauuu

SEQ ID NO: 684029 - RNA, 23 nt, Artificial Sequence
  Synthetic
uagaaaucaacaaugaggaauuu

SEQ ID NO: 684030 - RNA, 24 nt, Artificial Sequence
  Synthetic
cuagaaaucaacaaugaggaauuu

SEQ ID NO: 684031 - RNA, 18 nt, Artificial Sequence
  Synthetic
uauagccacauggaauuu

SEQ ID NO: 684032 - RNA, 19 nt, Artificial Sequence
  Synthetic
uuauagccacauggaauuu

SEQ ID NO: 684033 - RNA, 20 nt, Artificial Sequence
  Synthetic
cuuauagccacauggaauuu

SEQ ID NO: 684034 - RNA, 21 nt, Artificial Sequence
  Synthetic
acuuauagccacauggaauuu

SEQ ID NO: 684035 - RNA, 22 nt, Artificial Sequence
  Synthetic
uacuuauagccacauggaauuu

SEQ ID NO: 684036 - RNA, 23 nt, Artificial Sequence
  Synthetic
uuacuuauagccacauggaauuu

SEQ ID NO: 684037 - RNA, 24 nt, Artificial Sequence
  Synthetic
guuacuuauagccacauggaauuu

SEQ ID NO: 684038 - RNA, 18 nt, Artificial Sequence
  Synthetic
ugagcucucauggaauuu

SEQ ID NO: 684039 - RNA, 19 nt, Artificial Sequence
  Synthetic
gugagcucucauggaauuu

SEQ ID NO: 684040 - RNA, 20 nt, Artificial Sequence
  Synthetic
agugagcucucauggaauuu

SEQ ID NO: 684041 - RNA, 21 nt, Artificial Sequence
  Synthetic
cagugagcucucauggaauuu

SEQ ID NO: 684042 - RNA, 22 nt, Artificial Sequence
  Synthetic
gcagugagcucucauggaauuu

SEQ ID NO: 684043 - RNA, 23 nt, Artificial Sequence
  Synthetic
ggcagugagcucucauggaauuu

SEQ ID NO: 684044 - RNA, 24 nt, Artificial Sequence
  Synthetic
cggcagugagcucucauggaauuu

SEQ ID NO: 684045 - RNA, 18 nt, Artificial Sequence
  Synthetic
ggcccucgacuggaauuu

SEQ ID NO: 684046 - RNA, 19 nt, Artificial Sequence
  Synthetic
aggcccucgacuggaauuu

SEQ ID NO: 684047 - RNA, 20 nt, Artificial Sequence
  Synthetic
aaggcccucgacuggaauuu

SEQ ID NO: 684048 - RNA, 21 nt, Artificial Sequence
  Synthetic
caaggcccucgacuggaauuu

SEQ ID NO: 684049 - RNA, 22 nt, Artificial Sequence
  Synthetic
ucaaggcccucgacuggaauuu

SEQ ID NO: 684050 - RNA, 23 nt, Artificial Sequence
  Synthetic
uucaaggcccucgacuggaauuu

SEQ ID NO: 684051 - RNA, 24 nt, Artificial Sequence
  Synthetic
uuucaaggcccucgacuggaauuu

SEQ ID NO: 684052 - RNA, 18 nt, Artificial Sequence
  Synthetic
ucccauucauuggaauuu

SEQ ID NO: 684053 - RNA, 19 nt, Artificial Sequence
  Synthetic
uucccauucauuggaauuu

SEQ ID NO: 684054 - RNA, 20 nt, Artificial Sequence
  Synthetic
auucccauucauuggaauuu

SEQ ID NO: 684055 - RNA, 21 nt, Artificial Sequence
  Synthetic
cauucccauucauuggaauuu

SEQ ID NO: 684056 - RNA, 22 nt, Artificial Sequence
  Synthetic
ucauucccauucauuggaauuu

SEQ ID NO: 684057 - RNA, 23 nt, Artificial Sequence
  Synthetic
gucauucccauucauuggaauuu

SEQ ID NO: 684058 - RNA, 24 nt, Artificial Sequence
  Synthetic
cgucauucccauucauuggaauuu

SEQ ID NO: 684059 - RNA, 18 nt, Artificial Sequence
  Synthetic
caugauacuuuggaauuu

SEQ ID NO: 684060 - RNA, 19 nt, Artificial Sequence
  Synthetic
ucaugauacuuuggaauuu

SEQ ID NO: 684061 - RNA, 20 nt, Artificial Sequence
  Synthetic
aucaugauacuuuggaauuu

SEQ ID NO: 684062 - RNA, 21 nt, Artificial Sequence
  Synthetic
uaucaugauacuuuggaauuu

SEQ ID NO: 684063 - RNA, 22 nt, Artificial Sequence
  Synthetic
guaucaugauacuuuggaauuu

SEQ ID NO: 684064 - RNA, 23 nt, Artificial Sequence
  Synthetic
aguaucaugauacuuuggaauuu

SEQ ID NO: 684065 - RNA, 24 nt, Artificial Sequence
  Synthetic
caguaucaugauacuuuggaauuu

SEQ ID NO: 684066 - RNA, 18 nt, Artificial Sequence
  Synthetic
cuauuuagaaaugaauuu

SEQ ID NO: 684067 - RNA, 19 nt, Artificial Sequence
  Synthetic
gcuauuuagaaaugaauuu

SEQ ID NO: 684068 - RNA, 20 nt, Artificial Sequence
  Synthetic
agcuauuuagaaaugaauuu

SEQ ID NO: 684069 - RNA, 21 nt, Artificial Sequence
  Synthetic
cagcuauuuagaaaugaauuu

SEQ ID NO: 684070 - RNA, 22 nt, Artificial Sequence
  Synthetic
acagcuauuuagaaaugaauuu

SEQ ID NO: 684071 - RNA, 23 nt, Artificial Sequence
  Synthetic
uacagcuauuuagaaaugaauuu

SEQ ID NO: 684072 - RNA, 24 nt, Artificial Sequence
  Synthetic
guacagcuauuuagaaaugaauuu

SEQ ID NO: 684073 - RNA, 18 nt, Artificial Sequence
  Synthetic
uguugacagaaugaauuu

SEQ ID NO: 684074 - RNA, 19 nt, Artificial Sequence
  Synthetic
cuguugacagaaugaauuu

SEQ ID NO: 684075 - RNA, 20 nt, Artificial Sequence
  Synthetic
ucuguugacagaaugaauuu

SEQ ID NO: 684076 - RNA, 21 nt, Artificial Sequence
  Synthetic
uucuguugacagaaugaauuu

SEQ ID NO: 684077 - RNA, 22 nt, Artificial Sequence
  Synthetic
auucuguugacagaaugaauuu

SEQ ID NO: 684078 - RNA, 23 nt, Artificial Sequence
  Synthetic
cauucuguugacagaaugaauuu

SEQ ID NO: 684079 - RNA, 24 nt, Artificial Sequence
  Synthetic
acauucuguugacagaaugaauuu

SEQ ID NO: 684080 - RNA, 18 nt, Artificial Sequence
  Synthetic
ugaaugaagacugaauuu

SEQ ID NO: 684081 - RNA, 19 nt, Artificial Sequence
  Synthetic
gugaaugaagacugaauuu

SEQ ID NO: 684082 - RNA, 20 nt, Artificial Sequence
  Synthetic
ugugaaugaagacugaauuu

SEQ ID NO: 684083 - RNA, 21 nt, Artificial Sequence
  Synthetic
augugaaugaagacugaauuu

SEQ ID NO: 684084 - RNA, 22 nt, Artificial Sequence
  Synthetic
caugugaaugaagacugaauuu

SEQ ID NO: 684085 - RNA, 23 nt, Artificial Sequence
  Synthetic
ccaugugaaugaagacugaauuu

SEQ ID NO: 684086 - RNA, 24 nt, Artificial Sequence
  Synthetic
accaugugaaugaagacugaauuu

SEQ ID NO: 684087 - RNA, 18 nt, Artificial Sequence
  Synthetic
ggugaugugagugaauuu

SEQ ID NO: 684088 - RNA, 19 nt, Artificial Sequence
  Synthetic
gggugaugugagugaauuu

SEQ ID NO: 684089 - RNA, 20 nt, Artificial Sequence
  Synthetic
ugggugaugugagugaauuu

SEQ ID NO: 684090 - RNA, 21 nt, Artificial Sequence
  Synthetic
augggugaugugagugaauuu

SEQ ID NO: 684091 - RNA, 22 nt, Artificial Sequence
  Synthetic
uaugggugaugugagugaauuu

SEQ ID NO: 684092 - RNA, 23 nt, Artificial Sequence
  Synthetic
uuaugggugaugugagugaauuu

SEQ ID NO: 684093 - RNA, 24 nt, Artificial Sequence
  Synthetic
guuaugggugaugugagugaauuu

SEQ ID NO: 684094 - RNA, 18 nt, Artificial Sequence
  Synthetic
guuaaccauacauaauuu

SEQ ID NO: 684095 - RNA, 19 nt, Artificial Sequence
  Synthetic
uguuaaccauacauaauuu

SEQ ID NO: 684096 - RNA, 20 nt, Artificial Sequence
  Synthetic
auguuaaccauacauaauuu

SEQ ID NO: 684097 - RNA, 21 nt, Artificial Sequence
  Synthetic
gauguuaaccauacauaauuu

SEQ ID NO: 684098 - RNA, 22 nt, Artificial Sequence
  Synthetic
agauguuaaccauacauaauuu

SEQ ID NO: 684099 - RNA, 23 nt, Artificial Sequence
  Synthetic
aagauguuaaccauacauaauuu

SEQ ID NO: 684100 - RNA, 24 nt, Artificial Sequence
  Synthetic
aaagauguuaaccauacauaauuu

SEQ ID NO: 684101 - RNA, 18 nt, Artificial Sequence
  Synthetic
cuuuucucaucauaauuu

SEQ ID NO: 684102 - RNA, 19 nt, Artificial Sequence
  Synthetic
acuuuucucaucauaauuu

SEQ ID NO: 684103 - RNA, 20 nt, Artificial Sequence
  Synthetic
cacuuuucucaucauaauuu

SEQ ID NO: 684104 - RNA, 21 nt, Artificial Sequence
  Synthetic
acacuuuucucaucauaauuu

SEQ ID NO: 684105 - RNA, 22 nt, Artificial Sequence
  Synthetic
uacacuuuucucaucauaauuu

SEQ ID NO: 684106 - RNA, 23 nt, Artificial Sequence
  Synthetic
auacacuuuucucaucauaauuu

SEQ ID NO: 684107 - RNA, 24 nt, Artificial Sequence
  Synthetic
gauacacuuuucucaucauaauuu

SEQ ID NO: 684108 - RNA, 18 nt, Artificial Sequence
  Synthetic
aagauaauaagauaauuu

SEQ ID NO: 684109 - RNA, 19 nt, Artificial Sequence
  Synthetic
uaagauaauaagauaauuu

SEQ ID NO: 684110 - RNA, 20 nt, Artificial Sequence
  Synthetic
auaagauaauaagauaauuu

SEQ ID NO: 684111 - RNA, 21 nt, Artificial Sequence
  Synthetic
gauaagauaauaagauaauuu

SEQ ID NO: 684112 - RNA, 22 nt, Artificial Sequence
  Synthetic
ggauaagauaauaagauaauuu

SEQ ID NO: 684113 - RNA, 23 nt, Artificial Sequence
  Synthetic
uggauaagauaauaagauaauuu

SEQ ID NO: 684114 - RNA, 24 nt, Artificial Sequence
  Synthetic
auggauaagauaauaagauaauuu

SEQ ID NO: 684115 - RNA, 18 nt, Artificial Sequence
  Synthetic
augaauggaugauaauuu

SEQ ID NO: 684116 - RNA, 19 nt, Artificial Sequence
  Synthetic
caugaauggaugauaauuu

SEQ ID NO: 684117 - RNA, 20 nt, Artificial Sequence
  Synthetic
acaugaauggaugauaauuu

SEQ ID NO: 684118 - RNA, 21 nt, Artificial Sequence
  Synthetic
gacaugaauggaugauaauuu

SEQ ID NO: 684119 - RNA, 22 nt, Artificial Sequence
  Synthetic
ggacaugaauggaugauaauuu

SEQ ID NO: 684120 - RNA, 23 nt, Artificial Sequence
  Synthetic
aggacaugaauggaugauaauuu

SEQ ID NO: 684121 - RNA, 24 nt, Artificial Sequence
  Synthetic
uaggacaugaauggaugauaauuu

SEQ ID NO: 684122 - RNA, 18 nt, Artificial Sequence
  Synthetic
cugaaaauaauauaauuu

SEQ ID NO: 684123 - RNA, 19 nt, Artificial Sequence
  Synthetic
acugaaaauaauauaauuu

SEQ ID NO: 684124 - RNA, 20 nt, Artificial Sequence
  Synthetic
gacugaaaauaauauaauuu

SEQ ID NO: 684125 - RNA, 21 nt, Artificial Sequence
  Synthetic
ugacugaaaauaauauaauuu

SEQ ID NO: 684126 - RNA, 22 nt, Artificial Sequence
  Synthetic
augacugaaaauaauauaauuu

SEQ ID NO: 684127 - RNA, 23 nt, Artificial Sequence
  Synthetic
aaugacugaaaauaauauaauuu

SEQ ID NO: 684128 - RNA, 24 nt, Artificial Sequence
  Synthetic
aaaugacugaaaauaauauaauuu

SEQ ID NO: 684129 - RNA, 18 nt, Artificial Sequence
  Synthetic
gcuccucuaauauaauuu

SEQ ID NO: 684130 - RNA, 19 nt, Artificial Sequence
  Synthetic
agcuccucuaauauaauuu

SEQ ID NO: 684131 - RNA, 20 nt, Artificial Sequence
  Synthetic
cagcuccucuaauauaauuu

SEQ ID NO: 684132 - RNA, 21 nt, Artificial Sequence
  Synthetic
ucagcuccucuaauauaauuu

SEQ ID NO: 684133 - RNA, 22 nt, Artificial Sequence
  Synthetic
uucagcuccucuaauauaauuu

SEQ ID NO: 684134 - RNA, 23 nt, Artificial Sequence
  Synthetic
auucagcuccucuaauauaauuu

SEQ ID NO: 684135 - RNA, 24 nt, Artificial Sequence
  Synthetic
uauucagcuccucuaauauaauuu

SEQ ID NO: 684136 - RNA, 18 nt, Artificial Sequence
  Synthetic
ucccugccucccuaauuu

SEQ ID NO: 684137 - RNA, 19 nt, Artificial Sequence
  Synthetic
cucccugccucccuaauuu

SEQ ID NO: 684138 - RNA, 20 nt, Artificial Sequence
  Synthetic
ucucccugccucccuaauuu

SEQ ID NO: 684139 - RNA, 21 nt, Artificial Sequence
  Synthetic
cucucccugccucccuaauuu

SEQ ID NO: 684140 - RNA, 22 nt, Artificial Sequence
  Synthetic
ucucucccugccucccuaauuu

SEQ ID NO: 684141 - RNA, 23 nt, Artificial Sequence
  Synthetic
cucucucccugccucccuaauuu

SEQ ID NO: 684142 - RNA, 24 nt, Artificial Sequence
  Synthetic
ucucucucccugccucccuaauuu

SEQ ID NO: 684143 - RNA, 18 nt, Artificial Sequence
  Synthetic
uggagcauuugcuaauuu

SEQ ID NO: 684144 - RNA, 19 nt, Artificial Sequence
  Synthetic
uuggagcauuugcuaauuu

SEQ ID NO: 684145 - RNA, 20 nt, Artificial Sequence
  Synthetic
auuggagcauuugcuaauuu

SEQ ID NO: 684146 - RNA, 21 nt, Artificial Sequence
  Synthetic
uauuggagcauuugcuaauuu

SEQ ID NO: 684147 - RNA, 22 nt, Artificial Sequence
  Synthetic
auauuggagcauuugcuaauuu

SEQ ID NO: 684148 - RNA, 23 nt, Artificial Sequence
  Synthetic
uauauuggagcauuugcuaauuu

SEQ ID NO: 684149 - RNA, 24 nt, Artificial Sequence
  Synthetic
uuauauuggagcauuugcuaauuu

SEQ ID NO: 684150 - RNA, 18 nt, Artificial Sequence
  Synthetic
auuauuaugaucuaauuu

SEQ ID NO: 684151 - RNA, 19 nt, Artificial Sequence
  Synthetic
cauuauuaugaucuaauuu

SEQ ID NO: 684152 - RNA, 20 nt, Artificial Sequence
  Synthetic
ccauuauuaugaucuaauuu

SEQ ID NO: 684153 - RNA, 21 nt, Artificial Sequence
  Synthetic
accauuauuaugaucuaauuu

SEQ ID NO: 684154 - RNA, 22 nt, Artificial Sequence
  Synthetic
aaccauuauuaugaucuaauuu

SEQ ID NO: 684155 - RNA, 23 nt, Artificial Sequence
  Synthetic
caaccauuauuaugaucuaauuu

SEQ ID NO: 684156 - RNA, 24 nt, Artificial Sequence
  Synthetic
gcaaccauuauuaugaucuaauuu

SEQ ID NO: 684157 - RNA, 18 nt, Artificial Sequence
  Synthetic
uacuuuuugaaguaauuu

SEQ ID NO: 684158 - RNA, 19 nt, Artificial Sequence
  Synthetic
uuacuuuuugaaguaauuu

SEQ ID NO: 684159 - RNA, 20 nt, Artificial Sequence
  Synthetic
uuuacuuuuugaaguaauuu

SEQ ID NO: 684160 - RNA, 21 nt, Artificial Sequence
  Synthetic
guuuacuuuuugaaguaauuu

SEQ ID NO: 684161 - RNA, 22 nt, Artificial Sequence
  Synthetic
aguuuacuuuuugaaguaauuu

SEQ ID NO: 684162 - RNA, 23 nt, Artificial Sequence
  Synthetic
aaguuuacuuuuugaaguaauuu

SEQ ID NO: 684163 - RNA, 24 nt, Artificial Sequence
  Synthetic
uaaguuuacuuuuugaaguaauuu

SEQ ID NO: 684164 - RNA, 18 nt, Artificial Sequence
  Synthetic
gucagucuucaguaauuu

SEQ ID NO: 684165 - RNA, 19 nt, Artificial Sequence
  Synthetic
agucagucuucaguaauuu

SEQ ID NO: 684166 - RNA, 20 nt, Artificial Sequence
  Synthetic
uagucagucuucaguaauuu

SEQ ID NO: 684167 - RNA, 21 nt, Artificial Sequence
  Synthetic
auagucagucuucaguaauuu

SEQ ID NO: 684168 - RNA, 22 nt, Artificial Sequence
  Synthetic
uauagucagucuucaguaauuu

SEQ ID NO: 684169 - RNA, 23 nt, Artificial Sequence
  Synthetic
auauagucagucuucaguaauuu

SEQ ID NO: 684170 - RNA, 24 nt, Artificial Sequence
  Synthetic
cauauagucagucuucaguaauuu

SEQ ID NO: 684171 - RNA, 18 nt, Artificial Sequence
  Synthetic
cgacucucuuaguaauuu

SEQ ID NO: 684172 - RNA, 19 nt, Artificial Sequence
  Synthetic
ucgacucucuuaguaauuu

SEQ ID NO: 684173 - RNA, 20 nt, Artificial Sequence
  Synthetic
aucgacucucuuaguaauuu

SEQ ID NO: 684174 - RNA, 21 nt, Artificial Sequence
  Synthetic
aaucgacucucuuaguaauuu

SEQ ID NO: 684175 - RNA, 22 nt, Artificial Sequence
  Synthetic
aaaucgacucucuuaguaauuu

SEQ ID NO: 684176 - RNA, 23 nt, Artificial Sequence
  Synthetic
aaaaucgacucucuuaguaauuu

SEQ ID NO: 684177 - RNA, 24 nt, Artificial Sequence
  Synthetic
uaaaaucgacucucuuaguaauuu

SEQ ID NO: 684178 - RNA, 18 nt, Artificial Sequence
  Synthetic
aagaacaguagguaauuu

SEQ ID NO: 684179 - RNA, 19 nt, Artificial Sequence
  Synthetic
aaagaacaguagguaauuu

SEQ ID NO: 684180 - RNA, 20 nt, Artificial Sequence
  Synthetic
aaaagaacaguagguaauuu

SEQ ID NO: 684181 - RNA, 21 nt, Artificial Sequence
  Synthetic
gaaaagaacaguagguaauuu

SEQ ID NO: 684182 - RNA, 22 nt, Artificial Sequence
  Synthetic
ggaaaagaacaguagguaauuu

SEQ ID NO: 684183 - RNA, 23 nt, Artificial Sequence
  Synthetic
gggaaaagaacaguagguaauuu

SEQ ID NO: 684184 - RNA, 24 nt, Artificial Sequence
  Synthetic
agggaaaagaacaguagguaauuu

SEQ ID NO: 684185 - RNA, 18 nt, Artificial Sequence
  Synthetic
cccgagacuggguaauuu

SEQ ID NO: 684186 - RNA, 19 nt, Artificial Sequence
  Synthetic
acccgagacuggguaauuu

SEQ ID NO: 684187 - RNA, 20 nt, Artificial Sequence
  Synthetic
uacccgagacuggguaauuu

SEQ ID NO: 684188 - RNA, 21 nt, Artificial Sequence
  Synthetic
auacccgagacuggguaauuu

SEQ ID NO: 684189 - RNA, 22 nt, Artificial Sequence
  Synthetic
aauacccgagacuggguaauuu

SEQ ID NO: 684190 - RNA, 23 nt, Artificial Sequence
  Synthetic
aaauacccgagacuggguaauuu

SEQ ID NO: 684191 - RNA, 24 nt, Artificial Sequence
  Synthetic
gaaauacccgagacuggguaauuu

SEQ ID NO: 684192 - RNA, 18 nt, Artificial Sequence
  Synthetic
ucuaacgcaugguaauuu

SEQ ID NO: 684193 - RNA, 19 nt, Artificial Sequence
  Synthetic
uucuaacgcaugguaauuu

SEQ ID NO: 684194 - RNA, 20 nt, Artificial Sequence
  Synthetic
guucuaacgcaugguaauuu

SEQ ID NO: 684195 - RNA, 21 nt, Artificial Sequence
  Synthetic
gguucuaacgcaugguaauuu

SEQ ID NO: 684196 - RNA, 22 nt, Artificial Sequence
  Synthetic
ugguucuaacgcaugguaauuu

SEQ ID NO: 684197 - RNA, 23 nt, Artificial Sequence
  Synthetic
gugguucuaacgcaugguaauuu

SEQ ID NO: 684198 - RNA, 24 nt, Artificial Sequence
  Synthetic
ggugguucuaacgcaugguaauuu

SEQ ID NO: 684199 - RNA, 18 nt, Artificial Sequence
  Synthetic
aggucuaacuuguaauuu

SEQ ID NO: 684200 - RNA, 19 nt, Artificial Sequence
  Synthetic
aaggucuaacuuguaauuu

SEQ ID NO: 684201 - RNA, 20 nt, Artificial Sequence
  Synthetic
uaaggucuaacuuguaauuu

SEQ ID NO: 684202 - RNA, 21 nt, Artificial Sequence
  Synthetic
cuaaggucuaacuuguaauuu

SEQ ID NO: 684203 - RNA, 22 nt, Artificial Sequence
  Synthetic
acuaaggucuaacuuguaauuu

SEQ ID NO: 684204 - RNA, 23 nt, Artificial Sequence
  Synthetic
uacuaaggucuaacuuguaauuu

SEQ ID NO: 684205 - RNA, 24 nt, Artificial Sequence
  Synthetic
uuacuaaggucuaacuuguaauuu

SEQ ID NO: 684206 - RNA, 18 nt, Artificial Sequence
  Synthetic
augaccaucuuguaauuu

SEQ ID NO: 684207 - RNA, 19 nt, Artificial Sequence
  Synthetic
aaugaccaucuuguaauuu

SEQ ID NO: 684208 - RNA, 20 nt, Artificial Sequence
  Synthetic
aaaugaccaucuuguaauuu

SEQ ID NO: 684209 - RNA, 21 nt, Artificial Sequence
  Synthetic
uaaaugaccaucuuguaauuu

SEQ ID NO: 684210 - RNA, 22 nt, Artificial Sequence
  Synthetic
auaaaugaccaucuuguaauuu

SEQ ID NO: 684211 - RNA, 23 nt, Artificial Sequence
  Synthetic
aauaaaugaccaucuuguaauuu

SEQ ID NO: 684212 - RNA, 24 nt, Artificial Sequence
  Synthetic
aaauaaaugaccaucuuguaauuu

SEQ ID NO: 684213 - RNA, 18 nt, Artificial Sequence
  Synthetic
uguuuugagccuuaauuu

SEQ ID NO: 684214 - RNA, 19 nt, Artificial Sequence
  Synthetic
guguuuugagccuuaauuu

SEQ ID NO: 684215 - RNA, 20 nt, Artificial Sequence
  Synthetic
aguguuuugagccuuaauuu

SEQ ID NO: 684216 - RNA, 21 nt, Artificial Sequence
  Synthetic
caguguuuugagccuuaauuu

SEQ ID NO: 684217 - RNA, 22 nt, Artificial Sequence
  Synthetic
ccaguguuuugagccuuaauuu

SEQ ID NO: 684218 - RNA, 23 nt, Artificial Sequence
  Synthetic
accaguguuuugagccuuaauuu

SEQ ID NO: 684219 - RNA, 24 nt, Artificial Sequence
  Synthetic
uaccaguguuuugagccuuaauuu

SEQ ID NO: 684220 - RNA, 18 nt, Artificial Sequence
  Synthetic
auaucaauaaguuaauuu

SEQ ID NO: 684221 - RNA, 19 nt, Artificial Sequence
  Synthetic
uauaucaauaaguuaauuu

SEQ ID NO: 684222 - RNA, 20 nt, Artificial Sequence
  Synthetic
uuauaucaauaaguuaauuu

SEQ ID NO: 684223 - RNA, 21 nt, Artificial Sequence
  Synthetic
auuauaucaauaaguuaauuu

SEQ ID NO: 684224 - RNA, 22 nt, Artificial Sequence
  Synthetic
cauuauaucaauaaguuaauuu

SEQ ID NO: 684225 - RNA, 23 nt, Artificial Sequence
  Synthetic
gcauuauaucaauaaguuaauuu

SEQ ID NO: 684226 - RNA, 24 nt, Artificial Sequence
  Synthetic
ugcauuauaucaauaaguuaauuu

SEQ ID NO: 684227 - RNA, 18 nt, Artificial Sequence
  Synthetic
agaaacaagaguuaauuu

SEQ ID NO: 684228 - RNA, 19 nt, Artificial Sequence
  Synthetic
gagaaacaagaguuaauuu

SEQ ID NO: 684229 - RNA, 20 nt, Artificial Sequence
  Synthetic
agagaaacaagaguuaauuu

SEQ ID NO: 684230 - RNA, 21 nt, Artificial Sequence
  Synthetic
aagagaaacaagaguuaauuu

SEQ ID NO: 684231 - RNA, 22 nt, Artificial Sequence
  Synthetic
caagagaaacaagaguuaauuu

SEQ ID NO: 684232 - RNA, 23 nt, Artificial Sequence
  Synthetic
ccaagagaaacaagaguuaauuu

SEQ ID NO: 684233 - RNA, 24 nt, Artificial Sequence
  Synthetic
cccaagagaaacaagaguuaauuu

SEQ ID NO: 684234 - RNA, 18 nt, Artificial Sequence
  Synthetic
aauuaccuucuuuaauuu

SEQ ID NO: 684235 - RNA, 19 nt, Artificial Sequence
  Synthetic
aaauuaccuucuuuaauuu

SEQ ID NO: 684236 - RNA, 20 nt, Artificial Sequence
  Synthetic
gaaauuaccuucuuuaauuu

SEQ ID NO: 684237 - RNA, 21 nt, Artificial Sequence
  Synthetic
agaaauuaccuucuuuaauuu

SEQ ID NO: 684238 - RNA, 22 nt, Artificial Sequence
  Synthetic
gagaaauuaccuucuuuaauuu

SEQ ID NO: 684239 - RNA, 23 nt, Artificial Sequence
  Synthetic
ugagaaauuaccuucuuuaauuu

SEQ ID NO: 684240 - RNA, 24 nt, Artificial Sequence
  Synthetic
uugagaaauuaccuucuuuaauuu

SEQ ID NO: 684241 - RNA, 18 nt, Artificial Sequence
  Synthetic
caaauggaauuuuaauuu

SEQ ID NO: 684242 - RNA, 19 nt, Artificial Sequence
  Synthetic
acaaauggaauuuuaauuu

SEQ ID NO: 684243 - RNA, 20 nt, Artificial Sequence
  Synthetic
uacaaauggaauuuuaauuu

SEQ ID NO: 684244 - RNA, 21 nt, Artificial Sequence
  Synthetic
auacaaauggaauuuuaauuu

SEQ ID NO: 684245 - RNA, 22 nt, Artificial Sequence
  Synthetic
cauacaaauggaauuuuaauuu

SEQ ID NO: 684246 - RNA, 23 nt, Artificial Sequence
  Synthetic
acauacaaauggaauuuuaauuu

SEQ ID NO: 684247 - RNA, 24 nt, Artificial Sequence
  Synthetic
uacauacaaauggaauuuuaauuu

SEQ ID NO: 684248 - RNA, 18 nt, Artificial Sequence
  Synthetic
uaauauccauuuuaauuu

SEQ ID NO: 684249 - RNA, 19 nt, Artificial Sequence
  Synthetic
cuaauauccauuuuaauuu

SEQ ID NO: 684250 - RNA, 20 nt, Artificial Sequence
  Synthetic
ucuaauauccauuuuaauuu

SEQ ID NO: 684251 - RNA, 21 nt, Artificial Sequence
  Synthetic
aucuaauauccauuuuaauuu

SEQ ID NO: 684252 - RNA, 22 nt, Artificial Sequence
  Synthetic
uaucuaauauccauuuuaauuu

SEQ ID NO: 684253 - RNA, 23 nt, Artificial Sequence
  Synthetic
auaucuaauauccauuuuaauuu

SEQ ID NO: 684254 - RNA, 24 nt, Artificial Sequence
  Synthetic
uauaucuaauauccauuuuaauuu

SEQ ID NO: 684255 - RNA, 18 nt, Artificial Sequence
  Synthetic
ucauaacacaaaacauuu

SEQ ID NO: 684256 - RNA, 19 nt, Artificial Sequence
  Synthetic
uucauaacacaaaacauuu

SEQ ID NO: 684257 - RNA, 20 nt, Artificial Sequence
  Synthetic
uuucauaacacaaaacauuu

SEQ ID NO: 684258 - RNA, 21 nt, Artificial Sequence
  Synthetic
auuucauaacacaaaacauuu

SEQ ID NO: 684259 - RNA, 22 nt, Artificial Sequence
  Synthetic
gauuucauaacacaaaacauuu

SEQ ID NO: 684260 - RNA, 23 nt, Artificial Sequence
  Synthetic
ggauuucauaacacaaaacauuu

SEQ ID NO: 684261 - RNA, 24 nt, Artificial Sequence
  Synthetic
uggauuucauaacacaaaacauuu

SEQ ID NO: 684262 - RNA, 18 nt, Artificial Sequence
  Synthetic
gacaaauagaaaacauuu

SEQ ID NO: 684263 - RNA, 19 nt, Artificial Sequence
  Synthetic
ggacaaauagaaaacauuu

SEQ ID NO: 684264 - RNA, 20 nt, Artificial Sequence
  Synthetic
aggacaaauagaaaacauuu

SEQ ID NO: 684265 - RNA, 21 nt, Artificial Sequence
  Synthetic
caggacaaauagaaaacauuu

SEQ ID NO: 684266 - RNA, 22 nt, Artificial Sequence
  Synthetic
ucaggacaaauagaaaacauuu

SEQ ID NO: 684267 - RNA, 23 nt, Artificial Sequence
  Synthetic
uucaggacaaauagaaaacauuu

SEQ ID NO: 684268 - RNA, 24 nt, Artificial Sequence
  Synthetic
cuucaggacaaauagaaaacauuu

SEQ ID NO: 684269 - RNA, 18 nt, Artificial Sequence
  Synthetic
auaauaaauaaaacauuu

SEQ ID NO: 684270 - RNA, 19 nt, Artificial Sequence
  Synthetic
aauaauaaauaaaacauuu

SEQ ID NO: 684271 - RNA, 20 nt, Artificial Sequence
  Synthetic
caauaauaaauaaaacauuu

SEQ ID NO: 684272 - RNA, 21 nt, Artificial Sequence
  Synthetic
gcaauaauaaauaaaacauuu

SEQ ID NO: 684273 - RNA, 22 nt, Artificial Sequence
  Synthetic
ggcaauaauaaauaaaacauuu

SEQ ID NO: 684274 - RNA, 23 nt, Artificial Sequence
  Synthetic
uggcaauaauaaauaaaacauuu

SEQ ID NO: 684275 - RNA, 24 nt, Artificial Sequence
  Synthetic
guggcaauaauaaauaaaacauuu

SEQ ID NO: 684276 - RNA, 18 nt, Artificial Sequence
  Synthetic
auaugaaaaucaacauuu

SEQ ID NO: 684277 - RNA, 19 nt, Artificial Sequence
  Synthetic
aauaugaaaaucaacauuu

SEQ ID NO: 684278 - RNA, 20 nt, Artificial Sequence
  Synthetic
aaauaugaaaaucaacauuu

SEQ ID NO: 684279 - RNA, 21 nt, Artificial Sequence
  Synthetic
aaaauaugaaaaucaacauuu

SEQ ID NO: 684280 - RNA, 22 nt, Artificial Sequence
  Synthetic
uaaaauaugaaaaucaacauuu

SEQ ID NO: 684281 - RNA, 23 nt, Artificial Sequence
  Synthetic
uuaaaauaugaaaaucaacauuu

SEQ ID NO: 684282 - RNA, 24 nt, Artificial Sequence
  Synthetic
cuuaaaauaugaaaaucaacauuu

SEQ ID NO: 684283 - RNA, 18 nt, Artificial Sequence
  Synthetic
augugacaaagaacauuu

SEQ ID NO: 684284 - RNA, 19 nt, Artificial Sequence
  Synthetic
gaugugacaaagaacauuu

SEQ ID NO: 684285 - RNA, 20 nt, Artificial Sequence
  Synthetic
ugaugugacaaagaacauuu

SEQ ID NO: 684286 - RNA, 21 nt, Artificial Sequence
  Synthetic
uugaugugacaaagaacauuu

SEQ ID NO: 684287 - RNA, 22 nt, Artificial Sequence
  Synthetic
auugaugugacaaagaacauuu

SEQ ID NO: 684288 - RNA, 23 nt, Artificial Sequence
  Synthetic
cauugaugugacaaagaacauuu

SEQ ID NO: 684289 - RNA, 24 nt, Artificial Sequence
  Synthetic
acauugaugugacaaagaacauuu

SEQ ID NO: 684290 - RNA, 18 nt, Artificial Sequence
  Synthetic
uuugaaagcguaacauuu

SEQ ID NO: 684291 - RNA, 19 nt, Artificial Sequence
  Synthetic
uuuugaaagcguaacauuu

SEQ ID NO: 684292 - RNA, 20 nt, Artificial Sequence
  Synthetic
uuuuugaaagcguaacauuu

SEQ ID NO: 684293 - RNA, 21 nt, Artificial Sequence
  Synthetic
uuuuuugaaagcguaacauuu

SEQ ID NO: 684294 - RNA, 22 nt, Artificial Sequence
  Synthetic
auuuuuugaaagcguaacauuu

SEQ ID NO: 684295 - RNA, 23 nt, Artificial Sequence
  Synthetic
gauuuuuugaaagcguaacauuu

SEQ ID NO: 684296 - RNA, 24 nt, Artificial Sequence
  Synthetic
ugauuuuuugaaagcguaacauuu

SEQ ID NO: 684297 - RNA, 18 nt, Artificial Sequence
  Synthetic
aaccauuguuuaacauuu

SEQ ID NO: 684298 - RNA, 19 nt, Artificial Sequence
  Synthetic
uaaccauuguuuaacauuu

SEQ ID NO: 684299 - RNA, 20 nt, Artificial Sequence
  Synthetic
uuaaccauuguuuaacauuu

SEQ ID NO: 684300 - RNA, 21 nt, Artificial Sequence
  Synthetic
cuuaaccauuguuuaacauuu

SEQ ID NO: 684301 - RNA, 22 nt, Artificial Sequence
  Synthetic
gcuuaaccauuguuuaacauuu

SEQ ID NO: 684302 - RNA, 23 nt, Artificial Sequence
  Synthetic
agcuuaaccauuguuuaacauuu

SEQ ID NO: 684303 - RNA, 24 nt, Artificial Sequence
  Synthetic
aagcuuaaccauuguuuaacauuu

SEQ ID NO: 684304 - RNA, 18 nt, Artificial Sequence
  Synthetic
uuucuccuacacacauuu

SEQ ID NO: 684305 - RNA, 19 nt, Artificial Sequence
  Synthetic
uuuucuccuacacacauuu

SEQ ID NO: 684306 - RNA, 20 nt, Artificial Sequence
  Synthetic
uuuuucuccuacacacauuu

SEQ ID NO: 684307 - RNA, 21 nt, Artificial Sequence
  Synthetic
uuuuuucuccuacacacauuu

SEQ ID NO: 684308 - RNA, 22 nt, Artificial Sequence
  Synthetic
auuuuuucuccuacacacauuu

SEQ ID NO: 684309 - RNA, 23 nt, Artificial Sequence
  Synthetic
aauuuuuucuccuacacacauuu

SEQ ID NO: 684310 - RNA, 24 nt, Artificial Sequence
  Synthetic
uaauuuuuucuccuacacacauuu

SEQ ID NO: 684311 - RNA, 18 nt, Artificial Sequence
  Synthetic
guuucaacauacacauuu

SEQ ID NO: 684312 - RNA, 19 nt, Artificial Sequence
  Synthetic
gguuucaacauacacauuu

SEQ ID NO: 684313 - RNA, 20 nt, Artificial Sequence
  Synthetic
agguuucaacauacacauuu

SEQ ID NO: 684314 - RNA, 21 nt, Artificial Sequence
  Synthetic
uagguuucaacauacacauuu

SEQ ID NO: 684315 - RNA, 22 nt, Artificial Sequence
  Synthetic
uuagguuucaacauacacauuu

SEQ ID NO: 684316 - RNA, 23 nt, Artificial Sequence
  Synthetic
guuagguuucaacauacacauuu

SEQ ID NO: 684317 - RNA, 24 nt, Artificial Sequence
  Synthetic
uguuagguuucaacauacacauuu

SEQ ID NO: 684318 - RNA, 18 nt, Artificial Sequence
  Synthetic
cuuuuccuuggcacauuu

SEQ ID NO: 684319 - RNA, 19 nt, Artificial Sequence
  Synthetic
acuuuuccuuggcacauuu

SEQ ID NO: 684320 - RNA, 20 nt, Artificial Sequence
  Synthetic
uacuuuuccuuggcacauuu

SEQ ID NO: 684321 - RNA, 21 nt, Artificial Sequence
  Synthetic
cuacuuuuccuuggcacauuu

SEQ ID NO: 684322 - RNA, 22 nt, Artificial Sequence
  Synthetic
gcuacuuuuccuuggcacauuu

SEQ ID NO: 684323 - RNA, 23 nt, Artificial Sequence
  Synthetic
ggcuacuuuuccuuggcacauuu

SEQ ID NO: 684324 - RNA, 24 nt, Artificial Sequence
  Synthetic
uggcuacuuuuccuuggcacauuu

SEQ ID NO: 684325 - RNA, 18 nt, Artificial Sequence
  Synthetic
auaugaggaugcacauuu

SEQ ID NO: 684326 - RNA, 19 nt, Artificial Sequence
  Synthetic
aauaugaggaugcacauuu

SEQ ID NO: 684327 - RNA, 20 nt, Artificial Sequence
  Synthetic
aaauaugaggaugcacauuu

SEQ ID NO: 684328 - RNA, 21 nt, Artificial Sequence
  Synthetic
uaaauaugaggaugcacauuu

SEQ ID NO: 684329 - RNA, 22 nt, Artificial Sequence
  Synthetic
uuaaauaugaggaugcacauuu

SEQ ID NO: 684330 - RNA, 23 nt, Artificial Sequence
  Synthetic
uuuaaauaugaggaugcacauuu

SEQ ID NO: 684331 - RNA, 24 nt, Artificial Sequence
  Synthetic
auuuaaauaugaggaugcacauuu

SEQ ID NO: 684332 - RNA, 18 nt, Artificial Sequence
  Synthetic
uauaugccacucacauuu

SEQ ID NO: 684333 - RNA, 19 nt, Artificial Sequence
  Synthetic
cuauaugccacucacauuu

SEQ ID NO: 684334 - RNA, 20 nt, Artificial Sequence
  Synthetic
gcuauaugccacucacauuu

SEQ ID NO: 684335 - RNA, 21 nt, Artificial Sequence
  Synthetic
ugcuauaugccacucacauuu

SEQ ID NO: 684336 - RNA, 22 nt, Artificial Sequence
  Synthetic
uugcuauaugccacucacauuu

SEQ ID NO: 684337 - RNA, 23 nt, Artificial Sequence
  Synthetic
auugcuauaugccacucacauuu

SEQ ID NO: 684338 - RNA, 24 nt, Artificial Sequence
  Synthetic
uauugcuauaugccacucacauuu

SEQ ID NO: 684339 - RNA, 18 nt, Artificial Sequence
  Synthetic
ggguuaaauuucacauuu

SEQ ID NO: 684340 - RNA, 19 nt, Artificial Sequence
  Synthetic
gggguuaaauuucacauuu

SEQ ID NO: 684341 - RNA, 20 nt, Artificial Sequence
  Synthetic
ugggguuaaauuucacauuu

SEQ ID NO: 684342 - RNA, 21 nt, Artificial Sequence
  Synthetic
augggguuaaauuucacauuu

SEQ ID NO: 684343 - RNA, 22 nt, Artificial Sequence
  Synthetic
caugggguuaaauuucacauuu

SEQ ID NO: 684344 - RNA, 23 nt, Artificial Sequence
  Synthetic
gcaugggguuaaauuucacauuu

SEQ ID NO: 684345 - RNA, 24 nt, Artificial Sequence
  Synthetic
ugcaugggguuaaauuucacauuu

SEQ ID NO: 684346 - RNA, 18 nt, Artificial Sequence
  Synthetic
ucuggacauuucacauuu

SEQ ID NO: 684347 - RNA, 19 nt, Artificial Sequence
  Synthetic
cucuggacauuucacauuu

SEQ ID NO: 684348 - RNA, 20 nt, Artificial Sequence
  Synthetic
ucucuggacauuucacauuu

SEQ ID NO: 684349 - RNA, 21 nt, Artificial Sequence
  Synthetic
cucucuggacauuucacauuu

SEQ ID NO: 684350 - RNA, 22 nt, Artificial Sequence
  Synthetic
ucucucuggacauuucacauuu

SEQ ID NO: 684351 - RNA, 23 nt, Artificial Sequence
  Synthetic
uucucucuggacauuucacauuu

SEQ ID NO: 684352 - RNA, 24 nt, Artificial Sequence
  Synthetic
auucucucuggacauuucacauuu

SEQ ID NO: 684353 - RNA, 18 nt, Artificial Sequence
  Synthetic
ucuacuucuuucacauuu

SEQ ID NO: 684354 - RNA, 19 nt, Artificial Sequence
  Synthetic
aucuacuucuuucacauuu

SEQ ID NO: 684355 - RNA, 20 nt, Artificial Sequence
  Synthetic
aaucuacuucuuucacauuu

SEQ ID NO: 684356 - RNA, 21 nt, Artificial Sequence
  Synthetic
caaucuacuucuuucacauuu

SEQ ID NO: 684357 - RNA, 22 nt, Artificial Sequence
  Synthetic
acaaucuacuucuuucacauuu

SEQ ID NO: 684358 - RNA, 23 nt, Artificial Sequence
  Synthetic
uacaaucuacuucuuucacauuu

SEQ ID NO: 684359 - RNA, 24 nt, Artificial Sequence
  Synthetic
cuacaaucuacuucuuucacauuu

SEQ ID NO: 684360 - RNA, 18 nt, Artificial Sequence
  Synthetic
ucagaaaguuucacauuu

SEQ ID NO: 684361 - RNA, 19 nt, Artificial Sequence
  Synthetic
uucagaaaguuucacauuu

SEQ ID NO: 684362 - RNA, 20 nt, Artificial Sequence
  Synthetic
cuucagaaaguuucacauuu

SEQ ID NO: 684363 - RNA, 21 nt, Artificial Sequence
  Synthetic
ccuucagaaaguuucacauuu

SEQ ID NO: 684364 - RNA, 22 nt, Artificial Sequence
  Synthetic
accuucagaaaguuucacauuu

SEQ ID NO: 684365 - RNA, 23 nt, Artificial Sequence
  Synthetic
aaccuucagaaaguuucacauuu

SEQ ID NO: 684366 - RNA, 24 nt, Artificial Sequence
  Synthetic
caaccuucagaaaguuucacauuu

SEQ ID NO: 684367 - RNA, 18 nt, Artificial Sequence
  Synthetic
aaaauauaaaagacauuu

SEQ ID NO: 684368 - RNA, 19 nt, Artificial Sequence
  Synthetic
caaaauauaaaagacauuu

SEQ ID NO: 684369 - RNA, 20 nt, Artificial Sequence
  Synthetic
gcaaaauauaaaagacauuu

SEQ ID NO: 684370 - RNA, 21 nt, Artificial Sequence
  Synthetic
ugcaaaauauaaaagacauuu

SEQ ID NO: 684371 - RNA, 22 nt, Artificial Sequence
  Synthetic
cugcaaaauauaaaagacauuu

SEQ ID NO: 684372 - RNA, 23 nt, Artificial Sequence
  Synthetic
ccugcaaaauauaaaagacauuu

SEQ ID NO: 684373 - RNA, 24 nt, Artificial Sequence
  Synthetic
cccugcaaaauauaaaagacauuu

SEQ ID NO: 684374 - RNA, 18 nt, Artificial Sequence
  Synthetic
gugaaggguaagacauuu

SEQ ID NO: 684375 - RNA, 19 nt, Artificial Sequence
  Synthetic
ugugaaggguaagacauuu

SEQ ID NO: 684376 - RNA, 20 nt, Artificial Sequence
  Synthetic
augugaaggguaagacauuu

SEQ ID NO: 684377 - RNA, 21 nt, Artificial Sequence
  Synthetic
uaugugaaggguaagacauuu

SEQ ID NO: 684378 - RNA, 22 nt, Artificial Sequence
  Synthetic
guaugugaaggguaagacauuu

SEQ ID NO: 684379 - RNA, 23 nt, Artificial Sequence
  Synthetic
uguaugugaaggguaagacauuu

SEQ ID NO: 684380 - RNA, 24 nt, Artificial Sequence
  Synthetic
guguaugugaaggguaagacauuu

SEQ ID NO: 684381 - RNA, 18 nt, Artificial Sequence
  Synthetic
aauuucauuaugacauuu

SEQ ID NO: 684382 - RNA, 19 nt, Artificial Sequence
  Synthetic
uaauuucauuaugacauuu

SEQ ID NO: 684383 - RNA, 20 nt, Artificial Sequence
  Synthetic
uuaauuucauuaugacauuu

SEQ ID NO: 684384 - RNA, 21 nt, Artificial Sequence
  Synthetic
cuuaauuucauuaugacauuu

SEQ ID NO: 684385 - RNA, 22 nt, Artificial Sequence
  Synthetic
ccuuaauuucauuaugacauuu

SEQ ID NO: 684386 - RNA, 23 nt, Artificial Sequence
  Synthetic
accuuaauuucauuaugacauuu

SEQ ID NO: 684387 - RNA, 24 nt, Artificial Sequence
  Synthetic
uaccuuaauuucauuaugacauuu

SEQ ID NO: 684388 - RNA, 18 nt, Artificial Sequence
  Synthetic
agaguaugauugacauuu

SEQ ID NO: 684389 - RNA, 19 nt, Artificial Sequence
  Synthetic
aagaguaugauugacauuu

SEQ ID NO: 684390 - RNA, 20 nt, Artificial Sequence
  Synthetic
aaagaguaugauugacauuu

SEQ ID NO: 684391 - RNA, 21 nt, Artificial Sequence
  Synthetic
caaagaguaugauugacauuu

SEQ ID NO: 684392 - RNA, 22 nt, Artificial Sequence
  Synthetic
gcaaagaguaugauugacauuu

SEQ ID NO: 684393 - RNA, 23 nt, Artificial Sequence
  Synthetic
ggcaaagaguaugauugacauuu

SEQ ID NO: 684394 - RNA, 24 nt, Artificial Sequence
  Synthetic
gggcaaagaguaugauugacauuu

SEQ ID NO: 684395 - RNA, 18 nt, Artificial Sequence
  Synthetic
uaaaaaugaaauacauuu

SEQ ID NO: 684396 - RNA, 19 nt, Artificial Sequence
  Synthetic
uuaaaaaugaaauacauuu

SEQ ID NO: 684397 - RNA, 20 nt, Artificial Sequence
  Synthetic
uuuaaaaaugaaauacauuu

SEQ ID NO: 684398 - RNA, 21 nt, Artificial Sequence
  Synthetic
auuuaaaaaugaaauacauuu

SEQ ID NO: 684399 - RNA, 22 nt, Artificial Sequence
  Synthetic
aauuuaaaaaugaaauacauuu

SEQ ID NO: 684400 - RNA, 23 nt, Artificial Sequence
  Synthetic
uaauuuaaaaaugaaauacauuu

SEQ ID NO: 684401 - RNA, 24 nt, Artificial Sequence
  Synthetic
uuaauuuaaaaaugaaauacauuu

SEQ ID NO: 684402 - RNA, 18 nt, Artificial Sequence
  Synthetic
augacacucaauacauuu

SEQ ID NO: 684403 - RNA, 19 nt, Artificial Sequence
  Synthetic
uaugacacucaauacauuu

SEQ ID NO: 684404 - RNA, 20 nt, Artificial Sequence
  Synthetic
auaugacacucaauacauuu

SEQ ID NO: 684405 - RNA, 21 nt, Artificial Sequence
  Synthetic
uauaugacacucaauacauuu

SEQ ID NO: 684406 - RNA, 22 nt, Artificial Sequence
  Synthetic
auauaugacacucaauacauuu

SEQ ID NO: 684407 - RNA, 23 nt, Artificial Sequence
  Synthetic
uauauaugacacucaauacauuu

SEQ ID NO: 684408 - RNA, 24 nt, Artificial Sequence
  Synthetic
cuauauaugacacucaauacauuu

SEQ ID NO: 684409 - RNA, 18 nt, Artificial Sequence
  Synthetic
aaauaauuauauacauuu

SEQ ID NO: 684410 - RNA, 19 nt, Artificial Sequence
  Synthetic
caaauaauuauauacauuu

SEQ ID NO: 684411 - RNA, 20 nt, Artificial Sequence
  Synthetic
acaaauaauuauauacauuu

SEQ ID NO: 684412 - RNA, 21 nt, Artificial Sequence
  Synthetic
gacaaauaauuauauacauuu

SEQ ID NO: 684413 - RNA, 22 nt, Artificial Sequence
  Synthetic
ugacaaauaauuauauacauuu

SEQ ID NO: 684414 - RNA, 23 nt, Artificial Sequence
  Synthetic
uugacaaauaauuauauacauuu

SEQ ID NO: 684415 - RNA, 24 nt, Artificial Sequence
  Synthetic
uuugacaaauaauuauauacauuu

SEQ ID NO: 684416 - RNA, 18 nt, Artificial Sequence
  Synthetic
agcuuauuauauacauuu

SEQ ID NO: 684417 - RNA, 19 nt, Artificial Sequence
  Synthetic
aagcuuauuauauacauuu

SEQ ID NO: 684418 - RNA, 20 nt, Artificial Sequence
  Synthetic
gaagcuuauuauauacauuu

SEQ ID NO: 684419 - RNA, 21 nt, Artificial Sequence
  Synthetic
agaagcuuauuauauacauuu

SEQ ID NO: 684420 - RNA, 22 nt, Artificial Sequence
  Synthetic
gagaagcuuauuauauacauuu

SEQ ID NO: 684421 - RNA, 23 nt, Artificial Sequence
  Synthetic
ugagaagcuuauuauauacauuu

SEQ ID NO: 684422 - RNA, 24 nt, Artificial Sequence
  Synthetic
gugagaagcuuauuauauacauuu

SEQ ID NO: 684423 - RNA, 18 nt, Artificial Sequence
  Synthetic
ggcgaaaccacuacauuu

SEQ ID NO: 684424 - RNA, 19 nt, Artificial Sequence
  Synthetic
cggcgaaaccacuacauuu

SEQ ID NO: 684425 - RNA, 20 nt, Artificial Sequence
  Synthetic
ccggcgaaaccacuacauuu

SEQ ID NO: 684426 - RNA, 21 nt, Artificial Sequence
  Synthetic
cccggcgaaaccacuacauuu

SEQ ID NO: 684427 - RNA, 22 nt, Artificial Sequence
  Synthetic
ucccggcgaaaccacuacauuu

SEQ ID NO: 684428 - RNA, 23 nt, Artificial Sequence
  Synthetic
aucccggcgaaaccacuacauuu

SEQ ID NO: 684429 - RNA, 24 nt, Artificial Sequence
  Synthetic
aaucccggcgaaaccacuacauuu

SEQ ID NO: 684430 - RNA, 18 nt, Artificial Sequence
  Synthetic
ugugcaucuaguacauuu

SEQ ID NO: 684431 - RNA, 19 nt, Artificial Sequence
  Synthetic
uugugcaucuaguacauuu

SEQ ID NO: 684432 - RNA, 20 nt, Artificial Sequence
  Synthetic
uuugugcaucuaguacauuu

SEQ ID NO: 684433 - RNA, 21 nt, Artificial Sequence
  Synthetic
uuuugugcaucuaguacauuu

SEQ ID NO: 684434 - RNA, 22 nt, Artificial Sequence
  Synthetic
cuuuugugcaucuaguacauuu

SEQ ID NO: 684435 - RNA, 23 nt, Artificial Sequence
  Synthetic
acuuuugugcaucuaguacauuu

SEQ ID NO: 684436 - RNA, 24 nt, Artificial Sequence
  Synthetic
gacuuuugugcaucuaguacauuu

SEQ ID NO: 684437 - RNA, 18 nt, Artificial Sequence
  Synthetic
caagcauaaauuacauuu

SEQ ID NO: 684438 - RNA, 19 nt, Artificial Sequence
  Synthetic
ucaagcauaaauuacauuu

SEQ ID NO: 684439 - RNA, 20 nt, Artificial Sequence
  Synthetic
cucaagcauaaauuacauuu

SEQ ID NO: 684440 - RNA, 21 nt, Artificial Sequence
  Synthetic
ucucaagcauaaauuacauuu

SEQ ID NO: 684441 - RNA, 22 nt, Artificial Sequence
  Synthetic
uucucaagcauaaauuacauuu

SEQ ID NO: 684442 - RNA, 23 nt, Artificial Sequence
  Synthetic
auucucaagcauaaauuacauuu

SEQ ID NO: 684443 - RNA, 24 nt, Artificial Sequence
  Synthetic
uauucucaagcauaaauuacauuu

SEQ ID NO: 684444 - RNA, 18 nt, Artificial Sequence
  Synthetic
uggcuauaaauuacauuu

SEQ ID NO: 684445 - RNA, 19 nt, Artificial Sequence
  Synthetic
auggcuauaaauuacauuu

SEQ ID NO: 684446 - RNA, 20 nt, Artificial Sequence
  Synthetic
cauggcuauaaauuacauuu

SEQ ID NO: 684447 - RNA, 21 nt, Artificial Sequence
  Synthetic
ucauggcuauaaauuacauuu

SEQ ID NO: 684448 - RNA, 22 nt, Artificial Sequence
  Synthetic
uucauggcuauaaauuacauuu

SEQ ID NO: 684449 - RNA, 23 nt, Artificial Sequence
  Synthetic
uuucauggcuauaaauuacauuu

SEQ ID NO: 684450 - RNA, 24 nt, Artificial Sequence
  Synthetic
uuuucauggcuauaaauuacauuu

SEQ ID NO: 684451 - RNA, 18 nt, Artificial Sequence
  Synthetic
aacggcacaguuacauuu

SEQ ID NO: 684452 - RNA, 19 nt, Artificial Sequence
  Synthetic
uaacggcacaguuacauuu

SEQ ID NO: 684453 - RNA, 20 nt, Artificial Sequence
  Synthetic
guaacggcacaguuacauuu

SEQ ID NO: 684454 - RNA, 21 nt, Artificial Sequence
  Synthetic
uguaacggcacaguuacauuu

SEQ ID NO: 684455 - RNA, 22 nt, Artificial Sequence
  Synthetic
uuguaacggcacaguuacauuu

SEQ ID NO: 684456 - RNA, 23 nt, Artificial Sequence
  Synthetic
auuguaacggcacaguuacauuu

SEQ ID NO: 684457 - RNA, 24 nt, Artificial Sequence
  Synthetic
aauuguaacggcacaguuacauuu

SEQ ID NO: 684458 - RNA, 18 nt, Artificial Sequence
  Synthetic
uccuuauuauuuacauuu

SEQ ID NO: 684459 - RNA, 19 nt, Artificial Sequence
  Synthetic
cuccuuauuauuuacauuu

SEQ ID NO: 684460 - RNA, 20 nt, Artificial Sequence
  Synthetic
ccuccuuauuauuuacauuu

SEQ ID NO: 684461 - RNA, 21 nt, Artificial Sequence
  Synthetic
accuccuuauuauuuacauuu

SEQ ID NO: 684462 - RNA, 22 nt, Artificial Sequence
  Synthetic
uaccuccuuauuauuuacauuu

SEQ ID NO: 684463 - RNA, 23 nt, Artificial Sequence
  Synthetic
auaccuccuuauuauuuacauuu

SEQ ID NO: 684464 - RNA, 24 nt, Artificial Sequence
  Synthetic
aauaccuccuuauuauuuacauuu

SEQ ID NO: 684465 - RNA, 18 nt, Artificial Sequence
  Synthetic
cagaaaaccaaaccauuu

SEQ ID NO: 684466 - RNA, 19 nt, Artificial Sequence
  Synthetic
acagaaaaccaaaccauuu

SEQ ID NO: 684467 - RNA, 20 nt, Artificial Sequence
  Synthetic
cacagaaaaccaaaccauuu

SEQ ID NO: 684468 - RNA, 21 nt, Artificial Sequence
  Synthetic
gcacagaaaaccaaaccauuu

SEQ ID NO: 684469 - RNA, 22 nt, Artificial Sequence
  Synthetic
ugcacagaaaaccaaaccauuu

SEQ ID NO: 684470 - RNA, 23 nt, Artificial Sequence
  Synthetic
uugcacagaaaaccaaaccauuu

SEQ ID NO: 684471 - RNA, 24 nt, Artificial Sequence
  Synthetic
uuugcacagaaaaccaaaccauuu

SEQ ID NO: 684472 - RNA, 18 nt, Artificial Sequence
  Synthetic
uuguuuuuugcaccauuu

SEQ ID NO: 684473 - RNA, 19 nt, Artificial Sequence
  Synthetic
auuguuuuuugcaccauuu

SEQ ID NO: 684474 - RNA, 20 nt, Artificial Sequence
  Synthetic
cauuguuuuuugcaccauuu

SEQ ID NO: 684475 - RNA, 21 nt, Artificial Sequence
  Synthetic
acauuguuuuuugcaccauuu

SEQ ID NO: 684476 - RNA, 22 nt, Artificial Sequence
  Synthetic
uacauuguuuuuugcaccauuu

SEQ ID NO: 684477 - RNA, 23 nt, Artificial Sequence
  Synthetic
auacauuguuuuuugcaccauuu

SEQ ID NO: 684478 - RNA, 24 nt, Artificial Sequence
  Synthetic
aauacauuguuuuuugcaccauuu

SEQ ID NO: 684479 - RNA, 18 nt, Artificial Sequence
  Synthetic
augaggaauagaccauuu

SEQ ID NO: 684480 - RNA, 19 nt, Artificial Sequence
  Synthetic
aaugaggaauagaccauuu

SEQ ID NO: 684481 - RNA, 20 nt, Artificial Sequence
  Synthetic
uaaugaggaauagaccauuu

SEQ ID NO: 684482 - RNA, 21 nt, Artificial Sequence
  Synthetic
auaaugaggaauagaccauuu

SEQ ID NO: 684483 - RNA, 22 nt, Artificial Sequence
  Synthetic
gauaaugaggaauagaccauuu

SEQ ID NO: 684484 - RNA, 23 nt, Artificial Sequence
  Synthetic
ggauaaugaggaauagaccauuu

SEQ ID NO: 684485 - RNA, 24 nt, Artificial Sequence
  Synthetic
aggauaaugaggaauagaccauuu

SEQ ID NO: 684486 - RNA, 18 nt, Artificial Sequence
  Synthetic
ucuaccucccuaccauuu

SEQ ID NO: 684487 - RNA, 19 nt, Artificial Sequence
  Synthetic
cucuaccucccuaccauuu

SEQ ID NO: 684488 - RNA, 20 nt, Artificial Sequence
  Synthetic
ucucuaccucccuaccauuu

SEQ ID NO: 684489 - RNA, 21 nt, Artificial Sequence
  Synthetic
cucucuaccucccuaccauuu

SEQ ID NO: 684490 - RNA, 22 nt, Artificial Sequence
  Synthetic
acucucuaccucccuaccauuu

SEQ ID NO: 684491 - RNA, 23 nt, Artificial Sequence
  Synthetic
cacucucuaccucccuaccauuu

SEQ ID NO: 684492 - RNA, 24 nt, Artificial Sequence
  Synthetic
ccacucucuaccucccuaccauuu

SEQ ID NO: 684493 - RNA, 18 nt, Artificial Sequence
  Synthetic
agaucuauaguaccauuu

SEQ ID NO: 684494 - RNA, 19 nt, Artificial Sequence
  Synthetic
aagaucuauaguaccauuu

SEQ ID NO: 684495 - RNA, 20 nt, Artificial Sequence
  Synthetic
aaagaucuauaguaccauuu

SEQ ID NO: 684496 - RNA, 21 nt, Artificial Sequence
  Synthetic
uaaagaucuauaguaccauuu

SEQ ID NO: 684497 - RNA, 22 nt, Artificial Sequence
  Synthetic
auaaagaucuauaguaccauuu

SEQ ID NO: 684498 - RNA, 23 nt, Artificial Sequence
  Synthetic
aauaaagaucuauaguaccauuu

SEQ ID NO: 684499 - RNA, 24 nt, Artificial Sequence
  Synthetic
aaauaaagaucuauaguaccauuu

SEQ ID NO: 684500 - RNA, 18 nt, Artificial Sequence
  Synthetic
accauacauguaccauuu

SEQ ID NO: 684501 - RNA, 19 nt, Artificial Sequence
  Synthetic
uaccauacauguaccauuu

SEQ ID NO: 684502 - RNA, 20 nt, Artificial Sequence
  Synthetic
cuaccauacauguaccauuu

SEQ ID NO: 684503 - RNA, 21 nt, Artificial Sequence
  Synthetic
acuaccauacauguaccauuu

SEQ ID NO: 684504 - RNA, 22 nt, Artificial Sequence
  Synthetic
uacuaccauacauguaccauuu

SEQ ID NO: 684505 - RNA, 23 nt, Artificial Sequence
  Synthetic
auacuaccauacauguaccauuu

SEQ ID NO: 684506 - RNA, 24 nt, Artificial Sequence
  Synthetic
aauacuaccauacauguaccauuu

SEQ ID NO: 684507 - RNA, 18 nt, Artificial Sequence
  Synthetic
auaacccucuacccauuu

SEQ ID NO: 684508 - RNA, 19 nt, Artificial Sequence
  Synthetic
aauaacccucuacccauuu

SEQ ID NO: 684509 - RNA, 20 nt, Artificial Sequence
  Synthetic
aaauaacccucuacccauuu

SEQ ID NO: 684510 - RNA, 21 nt, Artificial Sequence
  Synthetic
aaaauaacccucuacccauuu

SEQ ID NO: 684511 - RNA, 22 nt, Artificial Sequence
  Synthetic
aaaaauaacccucuacccauuu

SEQ ID NO: 684512 - RNA, 23 nt, Artificial Sequence
  Synthetic
aaaaaauaacccucuacccauuu

SEQ ID NO: 684513 - RNA, 24 nt, Artificial Sequence
  Synthetic
aaaaaaauaacccucuacccauuu

SEQ ID NO: 684514 - RNA, 18 nt, Artificial Sequence
  Synthetic
acucuacauaucccauuu

SEQ ID NO: 684515 - RNA, 19 nt, Artificial Sequence
  Synthetic
gacucuacauaucccauuu

SEQ ID NO: 684516 - RNA, 20 nt, Artificial Sequence
  Synthetic
agacucuacauaucccauuu

SEQ ID NO: 684517 - RNA, 21 nt, Artificial Sequence
  Synthetic
aagacucuacauaucccauuu

SEQ ID NO: 684518 - RNA, 22 nt, Artificial Sequence
  Synthetic
uaagacucuacauaucccauuu

SEQ ID NO: 684519 - RNA, 23 nt, Artificial Sequence
  Synthetic
auaagacucuacauaucccauuu

SEQ ID NO: 684520 - RNA, 24 nt, Artificial Sequence
  Synthetic
uauaagacucuacauaucccauuu

SEQ ID NO: 684521 - RNA, 18 nt, Artificial Sequence
  Synthetic
uaguucccguggccauuu

SEQ ID NO: 684522 - RNA, 19 nt, Artificial Sequence
  Synthetic
cuaguucccguggccauuu

SEQ ID NO: 684523 - RNA, 20 nt, Artificial Sequence
  Synthetic
ucuaguucccguggccauuu

SEQ ID NO: 684524 - RNA, 21 nt, Artificial Sequence
  Synthetic
aucuaguucccguggccauuu

SEQ ID NO: 684525 - RNA, 22 nt, Artificial Sequence
  Synthetic
aaucuaguucccguggccauuu

SEQ ID NO: 684526 - RNA, 23 nt, Artificial Sequence
  Synthetic
caaucuaguucccguggccauuu

SEQ ID NO: 684527 - RNA, 24 nt, Artificial Sequence
  Synthetic
ucaaucuaguucccguggccauuu

SEQ ID NO: 684528 - RNA, 18 nt, Artificial Sequence
  Synthetic
ucaacccagcugccauuu

SEQ ID NO: 684529 - RNA, 19 nt, Artificial Sequence
  Synthetic
gucaacccagcugccauuu

SEQ ID NO: 684530 - RNA, 20 nt, Artificial Sequence
  Synthetic
ugucaacccagcugccauuu

SEQ ID NO: 684531 - RNA, 21 nt, Artificial Sequence
  Synthetic
cugucaacccagcugccauuu

SEQ ID NO: 684532 - RNA, 22 nt, Artificial Sequence
  Synthetic
ucugucaacccagcugccauuu

SEQ ID NO: 684533 - RNA, 23 nt, Artificial Sequence
  Synthetic
aucugucaacccagcugccauuu

SEQ ID NO: 684534 - RNA, 24 nt, Artificial Sequence
  Synthetic
caucugucaacccagcugccauuu

SEQ ID NO: 684535 - RNA, 18 nt, Artificial Sequence
  Synthetic
ugugaagacgugccauuu

SEQ ID NO: 684536 - RNA, 19 nt, Artificial Sequence
  Synthetic
augugaagacgugccauuu

SEQ ID NO: 684537 - RNA, 20 nt, Artificial Sequence
  Synthetic
aaugugaagacgugccauuu

SEQ ID NO: 684538 - RNA, 21 nt, Artificial Sequence
  Synthetic
aaaugugaagacgugccauuu

SEQ ID NO: 684539 - RNA, 22 nt, Artificial Sequence
  Synthetic
gaaaugugaagacgugccauuu

SEQ ID NO: 684540 - RNA, 23 nt, Artificial Sequence
  Synthetic
ugaaaugugaagacgugccauuu

SEQ ID NO: 684541 - RNA, 24 nt, Artificial Sequence
  Synthetic
uugaaaugugaagacgugccauuu

SEQ ID NO: 684542 - RNA, 18 nt, Artificial Sequence
  Synthetic
uggacaaaguguccauuu

SEQ ID NO: 684543 - RNA, 19 nt, Artificial Sequence
  Synthetic
uuggacaaaguguccauuu

SEQ ID NO: 684544 - RNA, 20 nt, Artificial Sequence
  Synthetic
auuggacaaaguguccauuu

SEQ ID NO: 684545 - RNA, 21 nt, Artificial Sequence
  Synthetic
gauuggacaaaguguccauuu

SEQ ID NO: 684546 - RNA, 22 nt, Artificial Sequence
  Synthetic
ugauuggacaaaguguccauuu

SEQ ID NO: 684547 - RNA, 23 nt, Artificial Sequence
  Synthetic
uugauuggacaaaguguccauuu

SEQ ID NO: 684548 - RNA, 24 nt, Artificial Sequence
  Synthetic
auugauuggacaaaguguccauuu

SEQ ID NO: 684549 - RNA, 18 nt, Artificial Sequence
  Synthetic
uuucuuaccauuccauuu

SEQ ID NO: 684550 - RNA, 19 nt, Artificial Sequence
  Synthetic
cuuucuuaccauuccauuu

SEQ ID NO: 684551 - RNA, 20 nt, Artificial Sequence
  Synthetic
ucuuucuuaccauuccauuu

SEQ ID NO: 684552 - RNA, 21 nt, Artificial Sequence
  Synthetic
uucuuucuuaccauuccauuu

SEQ ID NO: 684553 - RNA, 22 nt, Artificial Sequence
  Synthetic
cuucuuucuuaccauuccauuu

SEQ ID NO: 684554 - RNA, 23 nt, Artificial Sequence
  Synthetic
ucuucuuucuuaccauuccauuu

SEQ ID NO: 684555 - RNA, 24 nt, Artificial Sequence
  Synthetic
uucuucuuucuuaccauuccauuu

SEQ ID NO: 684556 - RNA, 18 nt, Artificial Sequence
  Synthetic
ugaauucccauuccauuu

SEQ ID NO: 684557 - RNA, 19 nt, Artificial Sequence
  Synthetic
uugaauucccauuccauuu

SEQ ID NO: 684558 - RNA, 20 nt, Artificial Sequence
  Synthetic
uuugaauucccauuccauuu

SEQ ID NO: 684559 - RNA, 21 nt, Artificial Sequence
  Synthetic
guuugaauucccauuccauuu

SEQ ID NO: 684560 - RNA, 22 nt, Artificial Sequence
  Synthetic
uguuugaauucccauuccauuu

SEQ ID NO: 684561 - RNA, 23 nt, Artificial Sequence
  Synthetic
uuguuugaauucccauuccauuu

SEQ ID NO: 684562 - RNA, 24 nt, Artificial Sequence
  Synthetic
uuuguuugaauucccauuccauuu

SEQ ID NO: 684563 - RNA, 18 nt, Artificial Sequence
  Synthetic
cccuuauaucuuccauuu

SEQ ID NO: 684564 - RNA, 19 nt, Artificial Sequence
  Synthetic
ccccuuauaucuuccauuu

SEQ ID NO: 684565 - RNA, 20 nt, Artificial Sequence
  Synthetic
accccuuauaucuuccauuu

SEQ ID NO: 684566 - RNA, 21 nt, Artificial Sequence
  Synthetic
aaccccuuauaucuuccauuu

SEQ ID NO: 684567 - RNA, 22 nt, Artificial Sequence
  Synthetic
aaaccccuuauaucuuccauuu

SEQ ID NO: 684568 - RNA, 23 nt, Artificial Sequence
  Synthetic
caaaccccuuauaucuuccauuu

SEQ ID NO: 684569 - RNA, 24 nt, Artificial Sequence
  Synthetic
acaaaccccuuauaucuuccauuu

SEQ ID NO: 684570 - RNA, 18 nt, Artificial Sequence
  Synthetic
ucauuuauauuuccauuu

SEQ ID NO: 684571 - RNA, 19 nt, Artificial Sequence
  Synthetic
cucauuuauauuuccauuu

SEQ ID NO: 684572 - RNA, 20 nt, Artificial Sequence
  Synthetic
ucucauuuauauuuccauuu

SEQ ID NO: 684573 - RNA, 21 nt, Artificial Sequence
  Synthetic
aucucauuuauauuuccauuu

SEQ ID NO: 684574 - RNA, 22 nt, Artificial Sequence
  Synthetic
caucucauuuauauuuccauuu

SEQ ID NO: 684575 - RNA, 23 nt, Artificial Sequence
  Synthetic
acaucucauuuauauuuccauuu

SEQ ID NO: 684576 - RNA, 24 nt, Artificial Sequence
  Synthetic
cacaucucauuuauauuuccauuu

SEQ ID NO: 684577 - RNA, 18 nt, Artificial Sequence
  Synthetic
cugcccaagcaagcauuu

SEQ ID NO: 684578 - RNA, 19 nt, Artificial Sequence
  Synthetic
ccugcccaagcaagcauuu

SEQ ID NO: 684579 - RNA, 20 nt, Artificial Sequence
  Synthetic
gccugcccaagcaagcauuu

SEQ ID NO: 684580 - RNA, 21 nt, Artificial Sequence
  Synthetic
ggccugcccaagcaagcauuu

SEQ ID NO: 684581 - RNA, 22 nt, Artificial Sequence
  Synthetic
gggccugcccaagcaagcauuu

SEQ ID NO: 684582 - RNA, 23 nt, Artificial Sequence
  Synthetic
ggggccugcccaagcaagcauuu

SEQ ID NO: 684583 - RNA, 24 nt, Artificial Sequence
  Synthetic
uggggccugcccaagcaagcauuu

SEQ ID NO: 684584 - RNA, 18 nt, Artificial Sequence
  Synthetic
aucuuccuuuaagcauuu

SEQ ID NO: 684585 - RNA, 19 nt, Artificial Sequence
  Synthetic
caucuuccuuuaagcauuu

SEQ ID NO: 684586 - RNA, 20 nt, Artificial Sequence
  Synthetic
ucaucuuccuuuaagcauuu

SEQ ID NO: 684587 - RNA, 21 nt, Artificial Sequence
  Synthetic
cucaucuuccuuuaagcauuu

SEQ ID NO: 684588 - RNA, 22 nt, Artificial Sequence
  Synthetic
ucucaucuuccuuuaagcauuu

SEQ ID NO: 684589 - RNA, 23 nt, Artificial Sequence
  Synthetic
cucucaucuuccuuuaagcauuu

SEQ ID NO: 684590 - RNA, 24 nt, Artificial Sequence
  Synthetic
ccucucaucuuccuuuaagcauuu

SEQ ID NO: 684591 - RNA, 18 nt, Artificial Sequence
  Synthetic
aagaguuguucagcauuu

SEQ ID NO: 684592 - RNA, 19 nt, Artificial Sequence
  Synthetic
caagaguuguucagcauuu

SEQ ID NO: 684593 - RNA, 20 nt, Artificial Sequence
  Synthetic
ccaagaguuguucagcauuu

SEQ ID NO: 684594 - RNA, 21 nt, Artificial Sequence
  Synthetic
gccaagaguuguucagcauuu

SEQ ID NO: 684595 - RNA, 22 nt, Artificial Sequence
  Synthetic
ugccaagaguuguucagcauuu

SEQ ID NO: 684596 - RNA, 23 nt, Artificial Sequence
  Synthetic
uugccaagaguuguucagcauuu

SEQ ID NO: 684597 - RNA, 24 nt, Artificial Sequence
  Synthetic
uuugccaagaguuguucagcauuu

SEQ ID NO: 684598 - RNA, 18 nt, Artificial Sequence
  Synthetic
ggcuaccacguagcauuu

SEQ ID NO: 684599 - RNA, 19 nt, Artificial Sequence
  Synthetic
aggcuaccacguagcauuu

SEQ ID NO: 684600 - RNA, 20 nt, Artificial Sequence
  Synthetic
uaggcuaccacguagcauuu

SEQ ID NO: 684601 - RNA, 21 nt, Artificial Sequence
  Synthetic
uuaggcuaccacguagcauuu

SEQ ID NO: 684602 - RNA, 22 nt, Artificial Sequence
  Synthetic
cuuaggcuaccacguagcauuu

SEQ ID NO: 684603 - RNA, 23 nt, Artificial Sequence
  Synthetic
ucuuaggcuaccacguagcauuu

SEQ ID NO: 684604 - RNA, 24 nt, Artificial Sequence
  Synthetic
uucuuaggcuaccacguagcauuu

SEQ ID NO: 684605 - RNA, 18 nt, Artificial Sequence
  Synthetic
gauaguucauuagcauuu

SEQ ID NO: 684606 - RNA, 19 nt, Artificial Sequence
  Synthetic
ugauaguucauuagcauuu

SEQ ID NO: 684607 - RNA, 20 nt, Artificial Sequence
  Synthetic
uugauaguucauuagcauuu

SEQ ID NO: 684608 - RNA, 21 nt, Artificial Sequence
  Synthetic
auugauaguucauuagcauuu

SEQ ID NO: 684609 - RNA, 22 nt, Artificial Sequence
  Synthetic
aauugauaguucauuagcauuu

SEQ ID NO: 684610 - RNA, 23 nt, Artificial Sequence
  Synthetic
aaauugauaguucauuagcauuu

SEQ ID NO: 684611 - RNA, 24 nt, Artificial Sequence
  Synthetic
uaaauugauaguucauuagcauuu

SEQ ID NO: 684612 - RNA, 18 nt, Artificial Sequence
  Synthetic
cuaacucaacacgcauuu

SEQ ID NO: 684613 - RNA, 19 nt, Artificial Sequence
  Synthetic
acuaacucaacacgcauuu

SEQ ID NO: 684614 - RNA, 20 nt, Artificial Sequence
  Synthetic
aacuaacucaacacgcauuu

SEQ ID NO: 684615 - RNA, 21 nt, Artificial Sequence
  Synthetic
aaacuaacucaacacgcauuu

SEQ ID NO: 684616 - RNA, 22 nt, Artificial Sequence
  Synthetic
caaacuaacucaacacgcauuu

SEQ ID NO: 684617 - RNA, 23 nt, Artificial Sequence
  Synthetic
ucaaacuaacucaacacgcauuu

SEQ ID NO: 684618 - RNA, 24 nt, Artificial Sequence
  Synthetic
aucaaacuaacucaacacgcauuu

SEQ ID NO: 684619 - RNA, 18 nt, Artificial Sequence
  Synthetic
auuuuaaaguacgcauuu

SEQ ID NO: 684620 - RNA, 19 nt, Artificial Sequence
  Synthetic
gauuuuaaaguacgcauuu

SEQ ID NO: 684621 - RNA, 20 nt, Artificial Sequence
  Synthetic
ggauuuuaaaguacgcauuu

SEQ ID NO: 684622 - RNA, 21 nt, Artificial Sequence
  Synthetic
aggauuuuaaaguacgcauuu

SEQ ID NO: 684623 - RNA, 22 nt, Artificial Sequence
  Synthetic
gaggauuuuaaaguacgcauuu

SEQ ID NO: 684624 - RNA, 23 nt, Artificial Sequence
  Synthetic
ugaggauuuuaaaguacgcauuu

SEQ ID NO: 684625 - RNA, 24 nt, Artificial Sequence
  Synthetic
augaggauuuuaaaguacgcauuu

SEQ ID NO: 684626 - RNA, 18 nt, Artificial Sequence
  Synthetic
uaauaaaguaaggcauuu

SEQ ID NO: 684627 - RNA, 19 nt, Artificial Sequence
  Synthetic
auaauaaaguaaggcauuu

SEQ ID NO: 684628 - RNA, 20 nt, Artificial Sequence
  Synthetic
uauaauaaaguaaggcauuu

SEQ ID NO: 684629 - RNA, 21 nt, Artificial Sequence
  Synthetic
guauaauaaaguaaggcauuu

SEQ ID NO: 684630 - RNA, 22 nt, Artificial Sequence
  Synthetic
uguauaauaaaguaaggcauuu

SEQ ID NO: 684631 - RNA, 23 nt, Artificial Sequence
  Synthetic
auguauaauaaaguaaggcauuu

SEQ ID NO: 684632 - RNA, 24 nt, Artificial Sequence
  Synthetic
uauguauaauaaaguaaggcauuu

SEQ ID NO: 684633 - RNA, 18 nt, Artificial Sequence
  Synthetic
aaaaacacuuaggcauuu

SEQ ID NO: 684634 - RNA, 19 nt, Artificial Sequence
  Synthetic
caaaaacacuuaggcauuu

SEQ ID NO: 684635 - RNA, 20 nt, Artificial Sequence
  Synthetic
acaaaaacacuuaggcauuu

SEQ ID NO: 684636 - RNA, 21 nt, Artificial Sequence
  Synthetic
aacaaaaacacuuaggcauuu

SEQ ID NO: 684637 - RNA, 22 nt, Artificial Sequence
  Synthetic
aaacaaaaacacuuaggcauuu

SEQ ID NO: 684638 - RNA, 23 nt, Artificial Sequence
  Synthetic
aaaacaaaaacacuuaggcauuu

SEQ ID NO: 684639 - RNA, 24 nt, Artificial Sequence
  Synthetic
caaaacaaaaacacuuaggcauuu

SEQ ID NO: 684640 - RNA, 18 nt, Artificial Sequence
  Synthetic
ccuguaaucucggcauuu

SEQ ID NO: 684641 - RNA, 19 nt, Artificial Sequence
  Synthetic
gccuguaaucucggcauuu

SEQ ID NO: 684642 - RNA, 20 nt, Artificial Sequence
  Synthetic
cgccuguaaucucggcauuu

SEQ ID NO: 684643 - RNA, 21 nt, Artificial Sequence
  Synthetic
acgccuguaaucucggcauuu

SEQ ID NO: 684644 - RNA, 22 nt, Artificial Sequence
  Synthetic
cacgccuguaaucucggcauuu

SEQ ID NO: 684645 - RNA, 23 nt, Artificial Sequence
  Synthetic
ucacgccuguaaucucggcauuu

SEQ ID NO: 684646 - RNA, 24 nt, Artificial Sequence
  Synthetic
aucacgccuguaaucucggcauuu

SEQ ID NO: 684647 - RNA, 18 nt, Artificial Sequence
  Synthetic
agggagaggauggcauuu

SEQ ID NO: 684648 - RNA, 19 nt, Artificial Sequence
  Synthetic
uagggagaggauggcauuu

SEQ ID NO: 684649 - RNA, 20 nt, Artificial Sequence
  Synthetic
cuagggagaggauggcauuu

SEQ ID NO: 684650 - RNA, 21 nt, Artificial Sequence
  Synthetic
ccuagggagaggauggcauuu

SEQ ID NO: 684651 - RNA, 22 nt, Artificial Sequence
  Synthetic
cccuagggagaggauggcauuu

SEQ ID NO: 684652 - RNA, 23 nt, Artificial Sequence
  Synthetic
gcccuagggagaggauggcauuu

SEQ ID NO: 684653 - RNA, 24 nt, Artificial Sequence
  Synthetic
ggcccuagggagaggauggcauuu

SEQ ID NO: 684654 - RNA, 18 nt, Artificial Sequence
  Synthetic
ccagaugcucuggcauuu

SEQ ID NO: 684655 - RNA, 19 nt, Artificial Sequence
  Synthetic
uccagaugcucuggcauuu

SEQ ID NO: 684656 - RNA, 20 nt, Artificial Sequence
  Synthetic
uuccagaugcucuggcauuu

SEQ ID NO: 684657 - RNA, 21 nt, Artificial Sequence
  Synthetic
auuccagaugcucuggcauuu

SEQ ID NO: 684658 - RNA, 22 nt, Artificial Sequence
  Synthetic
aauuccagaugcucuggcauuu

SEQ ID NO: 684659 - RNA, 23 nt, Artificial Sequence
  Synthetic
caauuccagaugcucuggcauuu

SEQ ID NO: 684660 - RNA, 24 nt, Artificial Sequence
  Synthetic
acaauuccagaugcucuggcauuu

SEQ ID NO: 684661 - RNA, 18 nt, Artificial Sequence
  Synthetic
aauuuucaauaugcauuu

SEQ ID NO: 684662 - RNA, 19 nt, Artificial Sequence
  Synthetic
uaauuuucaauaugcauuu

SEQ ID NO: 684663 - RNA, 20 nt, Artificial Sequence
  Synthetic
uuaauuuucaauaugcauuu

SEQ ID NO: 684664 - RNA, 21 nt, Artificial Sequence
  Synthetic
auuaauuuucaauaugcauuu

SEQ ID NO: 684665 - RNA, 22 nt, Artificial Sequence
  Synthetic
uauuaauuuucaauaugcauuu

SEQ ID NO: 684666 - RNA, 23 nt, Artificial Sequence
  Synthetic
uuauuaauuuucaauaugcauuu

SEQ ID NO: 684667 - RNA, 24 nt, Artificial Sequence
  Synthetic
auuauuaauuuucaauaugcauuu

SEQ ID NO: 684668 - RNA, 18 nt, Artificial Sequence
  Synthetic
ggugcuuccacugcauuu

SEQ ID NO: 684669 - RNA, 19 nt, Artificial Sequence
  Synthetic
cggugcuuccacugcauuu

SEQ ID NO: 684670 - RNA, 20 nt, Artificial Sequence
  Synthetic
acggugcuuccacugcauuu

SEQ ID NO: 684671 - RNA, 21 nt, Artificial Sequence
  Synthetic
aacggugcuuccacugcauuu

SEQ ID NO: 684672 - RNA, 22 nt, Artificial Sequence
  Synthetic
gaacggugcuuccacugcauuu

SEQ ID NO: 684673 - RNA, 23 nt, Artificial Sequence
  Synthetic
agaacggugcuuccacugcauuu

SEQ ID NO: 684674 - RNA, 24 nt, Artificial Sequence
  Synthetic
aagaacggugcuuccacugcauuu

SEQ ID NO: 684675 - RNA, 18 nt, Artificial Sequence
  Synthetic
cacagaucaucugcauuu

SEQ ID NO: 684676 - RNA, 19 nt, Artificial Sequence
  Synthetic
ucacagaucaucugcauuu

SEQ ID NO: 684677 - RNA, 20 nt, Artificial Sequence
  Synthetic
uucacagaucaucugcauuu

SEQ ID NO: 684678 - RNA, 21 nt, Artificial Sequence
  Synthetic
cuucacagaucaucugcauuu

SEQ ID NO: 684679 - RNA, 22 nt, Artificial Sequence
  Synthetic
ucuucacagaucaucugcauuu

SEQ ID NO: 684680 - RNA, 23 nt, Artificial Sequence
  Synthetic
uucuucacagaucaucugcauuu

SEQ ID NO: 684681 - RNA, 24 nt, Artificial Sequence
  Synthetic
cuucuucacagaucaucugcauuu

SEQ ID NO: 684682 - RNA, 18 nt, Artificial Sequence
  Synthetic
ucaauaaaaggugcauuu

SEQ ID NO: 684683 - RNA, 19 nt, Artificial Sequence
  Synthetic
aucaauaaaaggugcauuu

SEQ ID NO: 684684 - RNA, 20 nt, Artificial Sequence
  Synthetic
caucaauaaaaggugcauuu

SEQ ID NO: 684685 - RNA, 21 nt, Artificial Sequence
  Synthetic
ucaucaauaaaaggugcauuu

SEQ ID NO: 684686 - RNA, 22 nt, Artificial Sequence
  Synthetic
uucaucaauaaaaggugcauuu

SEQ ID NO: 684687 - RNA, 23 nt, Artificial Sequence
  Synthetic
auucaucaauaaaaggugcauuu

SEQ ID NO: 684688 - RNA, 24 nt, Artificial Sequence
  Synthetic
uauucaucaauaaaaggugcauuu

SEQ ID NO: 684689 - RNA, 18 nt, Artificial Sequence
  Synthetic
auaauugaauuugcauuu

SEQ ID NO: 684690 - RNA, 19 nt, Artificial Sequence
  Synthetic
cauaauugaauuugcauuu

SEQ ID NO: 684691 - RNA, 20 nt, Artificial Sequence
  Synthetic
acauaauugaauuugcauuu

SEQ ID NO: 684692 - RNA, 21 nt, Artificial Sequence
  Synthetic
gacauaauugaauuugcauuu

SEQ ID NO: 684693 - RNA, 22 nt, Artificial Sequence
  Synthetic
ugacauaauugaauuugcauuu

SEQ ID NO: 684694 - RNA, 23 nt, Artificial Sequence
  Synthetic
gugacauaauugaauuugcauuu

SEQ ID NO: 684695 - RNA, 24 nt, Artificial Sequence
  Synthetic
agugacauaauugaauuugcauuu

SEQ ID NO: 684696 - RNA, 18 nt, Artificial Sequence
  Synthetic
aauugacucaaaucauuu

SEQ ID NO: 684697 - RNA, 19 nt, Artificial Sequence
  Synthetic
aaauugacucaaaucauuu

SEQ ID NO: 684698 - RNA, 20 nt, Artificial Sequence
  Synthetic
gaaauugacucaaaucauuu

SEQ ID NO: 684699 - RNA, 21 nt, Artificial Sequence
  Synthetic
agaaauugacucaaaucauuu

SEQ ID NO: 684700 - RNA, 22 nt, Artificial Sequence
  Synthetic
aagaaauugacucaaaucauuu

SEQ ID NO: 684701 - RNA, 23 nt, Artificial Sequence
  Synthetic
uaagaaauugacucaaaucauuu

SEQ ID NO: 684702 - RNA, 24 nt, Artificial Sequence
  Synthetic
auaagaaauugacucaaaucauuu

SEQ ID NO: 684703 - RNA, 18 nt, Artificial Sequence
  Synthetic
uuuagcuguaaaucauuu

SEQ ID NO: 684704 - RNA, 19 nt, Artificial Sequence
  Synthetic
guuuagcuguaaaucauuu

SEQ ID NO: 684705 - RNA, 20 nt, Artificial Sequence
  Synthetic
gguuuagcuguaaaucauuu

SEQ ID NO: 684706 - RNA, 21 nt, Artificial Sequence
  Synthetic
ugguuuagcuguaaaucauuu

SEQ ID NO: 684707 - RNA, 22 nt, Artificial Sequence
  Synthetic
cugguuuagcuguaaaucauuu

SEQ ID NO: 684708 - RNA, 23 nt, Artificial Sequence
  Synthetic
ucugguuuagcuguaaaucauuu

SEQ ID NO: 684709 - RNA, 24 nt, Artificial Sequence
  Synthetic
cucugguuuagcuguaaaucauuu

SEQ ID NO: 684710 - RNA, 18 nt, Artificial Sequence
  Synthetic
agcauucaauuaucauuu

SEQ ID NO: 684711 - RNA, 19 nt, Artificial Sequence
  Synthetic
uagcauucaauuaucauuu

SEQ ID NO: 684712 - RNA, 20 nt, Artificial Sequence
  Synthetic
uuagcauucaauuaucauuu

SEQ ID NO: 684713 - RNA, 21 nt, Artificial Sequence
  Synthetic
cuuagcauucaauuaucauuu

SEQ ID NO: 684714 - RNA, 22 nt, Artificial Sequence
  Synthetic
ucuuagcauucaauuaucauuu

SEQ ID NO: 684715 - RNA, 23 nt, Artificial Sequence
  Synthetic
aucuuagcauucaauuaucauuu

SEQ ID NO: 684716 - RNA, 24 nt, Artificial Sequence
  Synthetic
gaucuuagcauucaauuaucauuu

SEQ ID NO: 684717 - RNA, 18 nt, Artificial Sequence
  Synthetic
cugacuuggaccucauuu

SEQ ID NO: 684718 - RNA, 19 nt, Artificial Sequence
  Synthetic
gcugacuuggaccucauuu

SEQ ID NO: 684719 - RNA, 20 nt, Artificial Sequence
  Synthetic
agcugacuuggaccucauuu

SEQ ID NO: 684720 - RNA, 21 nt, Artificial Sequence
  Synthetic
gagcugacuuggaccucauuu

SEQ ID NO: 684721 - RNA, 22 nt, Artificial Sequence
  Synthetic
agagcugacuuggaccucauuu

SEQ ID NO: 684722 - RNA, 23 nt, Artificial Sequence
  Synthetic
cagagcugacuuggaccucauuu

SEQ ID NO: 684723 - RNA, 24 nt, Artificial Sequence
  Synthetic
gcagagcugacuuggaccucauuu

SEQ ID NO: 684724 - RNA, 18 nt, Artificial Sequence
  Synthetic
agagccuugaccucauuu

SEQ ID NO: 684725 - RNA, 19 nt, Artificial Sequence
  Synthetic
gagagccuugaccucauuu

SEQ ID NO: 684726 - RNA, 20 nt, Artificial Sequence
  Synthetic
ugagagccuugaccucauuu

SEQ ID NO: 684727 - RNA, 21 nt, Artificial Sequence
  Synthetic
augagagccuugaccucauuu

SEQ ID NO: 684728 - RNA, 22 nt, Artificial Sequence
  Synthetic
uaugagagccuugaccucauuu

SEQ ID NO: 684729 - RNA, 23 nt, Artificial Sequence
  Synthetic
guaugagagccuugaccucauuu

SEQ ID NO: 684730 - RNA, 24 nt, Artificial Sequence
  Synthetic
gguaugagagccuugaccucauuu

SEQ ID NO: 684731 - RNA, 18 nt, Artificial Sequence
  Synthetic
uagcugaaugucucauuu

SEQ ID NO: 684732 - RNA, 19 nt, Artificial Sequence
  Synthetic
auagcugaaugucucauuu

SEQ ID NO: 684733 - RNA, 20 nt, Artificial Sequence
  Synthetic
uauagcugaaugucucauuu

SEQ ID NO: 684734 - RNA, 21 nt, Artificial Sequence
  Synthetic
cuauagcugaaugucucauuu

SEQ ID NO: 684735 - RNA, 22 nt, Artificial Sequence
  Synthetic
gcuauagcugaaugucucauuu

SEQ ID NO: 684736 - RNA, 23 nt, Artificial Sequence
  Synthetic
ugcuauagcugaaugucucauuu

SEQ ID NO: 684737 - RNA, 24 nt, Artificial Sequence
  Synthetic
cugcuauagcugaaugucucauuu

SEQ ID NO: 684738 - RNA, 18 nt, Artificial Sequence
  Synthetic
caucaauaauucucauuu

SEQ ID NO: 684739 - RNA, 19 nt, Artificial Sequence
  Synthetic
acaucaauaauucucauuu

SEQ ID NO: 684740 - RNA, 20 nt, Artificial Sequence
  Synthetic
aacaucaauaauucucauuu

SEQ ID NO: 684741 - RNA, 21 nt, Artificial Sequence
  Synthetic
uaacaucaauaauucucauuu

SEQ ID NO: 684742 - RNA, 22 nt, Artificial Sequence
  Synthetic
cuaacaucaauaauucucauuu

SEQ ID NO: 684743 - RNA, 23 nt, Artificial Sequence
  Synthetic
ccuaacaucaauaauucucauuu

SEQ ID NO: 684744 - RNA, 24 nt, Artificial Sequence
  Synthetic
accuaacaucaauaauucucauuu

SEQ ID NO: 684745 - RNA, 18 nt, Artificial Sequence
  Synthetic
auuucagaguucucauuu

SEQ ID NO: 684746 - RNA, 19 nt, Artificial Sequence
  Synthetic
gauuucagaguucucauuu

SEQ ID NO: 684747 - RNA, 20 nt, Artificial Sequence
  Synthetic
ugauuucagaguucucauuu

SEQ ID NO: 684748 - RNA, 21 nt, Artificial Sequence
  Synthetic
cugauuucagaguucucauuu

SEQ ID NO: 684749 - RNA, 22 nt, Artificial Sequence
  Synthetic
ccugauuucagaguucucauuu

SEQ ID NO: 684750 - RNA, 23 nt, Artificial Sequence
  Synthetic
uccugauuucagaguucucauuu

SEQ ID NO: 684751 - RNA, 24 nt, Artificial Sequence
  Synthetic
uuccugauuucagaguucucauuu

SEQ ID NO: 684752 - RNA, 18 nt, Artificial Sequence
  Synthetic
cuaacuuauuucucauuu

SEQ ID NO: 684753 - RNA, 19 nt, Artificial Sequence
  Synthetic
ccuaacuuauuucucauuu

SEQ ID NO: 684754 - RNA, 20 nt, Artificial Sequence
  Synthetic
uccuaacuuauuucucauuu

SEQ ID NO: 684755 - RNA, 21 nt, Artificial Sequence
  Synthetic
uuccuaacuuauuucucauuu

SEQ ID NO: 684756 - RNA, 22 nt, Artificial Sequence
  Synthetic
uuuccuaacuuauuucucauuu

SEQ ID NO: 684757 - RNA, 23 nt, Artificial Sequence
  Synthetic
uuuuccuaacuuauuucucauuu

SEQ ID NO: 684758 - RNA, 24 nt, Artificial Sequence
  Synthetic
auuuuccuaacuuauuucucauuu

SEQ ID NO: 684759 - RNA, 18 nt, Artificial Sequence
  Synthetic
gucccacugaagucauuu

SEQ ID NO: 684760 - RNA, 19 nt, Artificial Sequence
  Synthetic
ggucccacugaagucauuu

SEQ ID NO: 684761 - RNA, 20 nt, Artificial Sequence
  Synthetic
aggucccacugaagucauuu

SEQ ID NO: 684762 - RNA, 21 nt, Artificial Sequence
  Synthetic
caggucccacugaagucauuu

SEQ ID NO: 684763 - RNA, 22 nt, Artificial Sequence
  Synthetic
ucaggucccacugaagucauuu

SEQ ID NO: 684764 - RNA, 23 nt, Artificial Sequence
  Synthetic
cucaggucccacugaagucauuu

SEQ ID NO: 684765 - RNA, 24 nt, Artificial Sequence
  Synthetic
ccucaggucccacugaagucauuu

SEQ ID NO: 684766 - RNA, 18 nt, Artificial Sequence
  Synthetic
ugauucuuugggucauuu

SEQ ID NO: 684767 - RNA, 19 nt, Artificial Sequence
  Synthetic
cugauucuuugggucauuu

SEQ ID NO: 684768 - RNA, 20 nt, Artificial Sequence
  Synthetic
ccugauucuuugggucauuu

SEQ ID NO: 684769 - RNA, 21 nt, Artificial Sequence
  Synthetic
cccugauucuuugggucauuu

SEQ ID NO: 684770 - RNA, 22 nt, Artificial Sequence
  Synthetic
ucccugauucuuugggucauuu

SEQ ID NO: 684771 - RNA, 23 nt, Artificial Sequence
  Synthetic
uucccugauucuuugggucauuu

SEQ ID NO: 684772 - RNA, 24 nt, Artificial Sequence
  Synthetic
uuucccugauucuuugggucauuu

SEQ ID NO: 684773 - RNA, 18 nt, Artificial Sequence
  Synthetic
acugaauuuaugucauuu

SEQ ID NO: 684774 - RNA, 19 nt, Artificial Sequence
  Synthetic
uacugaauuuaugucauuu

SEQ ID NO: 684775 - RNA, 20 nt, Artificial Sequence
  Synthetic
auacugaauuuaugucauuu

SEQ ID NO: 684776 - RNA, 21 nt, Artificial Sequence
  Synthetic
cauacugaauuuaugucauuu

SEQ ID NO: 684777 - RNA, 22 nt, Artificial Sequence
  Synthetic
ucauacugaauuuaugucauuu

SEQ ID NO: 684778 - RNA, 23 nt, Artificial Sequence
  Synthetic
gucauacugaauuuaugucauuu

SEQ ID NO: 684779 - RNA, 24 nt, Artificial Sequence
  Synthetic
ggucauacugaauuuaugucauuu

SEQ ID NO: 684780 - RNA, 18 nt, Artificial Sequence
  Synthetic
uuacugaucaauucauuu

SEQ ID NO: 684781 - RNA, 19 nt, Artificial Sequence
  Synthetic
auuacugaucaauucauuu

SEQ ID NO: 684782 - RNA, 20 nt, Artificial Sequence
  Synthetic
aauuacugaucaauucauuu

SEQ ID NO: 684783 - RNA, 21 nt, Artificial Sequence
  Synthetic
aaauuacugaucaauucauuu

SEQ ID NO: 684784 - RNA, 22 nt, Artificial Sequence
  Synthetic
gaaauuacugaucaauucauuu

SEQ ID NO: 684785 - RNA, 23 nt, Artificial Sequence
  Synthetic
ggaaauuacugaucaauucauuu

SEQ ID NO: 684786 - RNA, 24 nt, Artificial Sequence
  Synthetic
uggaaauuacugaucaauucauuu

SEQ ID NO: 684787 - RNA, 18 nt, Artificial Sequence
  Synthetic
agucuuauguauucauuu

SEQ ID NO: 684788 - RNA, 19 nt, Artificial Sequence
  Synthetic
aagucuuauguauucauuu

SEQ ID NO: 684789 - RNA, 20 nt, Artificial Sequence
  Synthetic
aaagucuuauguauucauuu

SEQ ID NO: 684790 - RNA, 21 nt, Artificial Sequence
  Synthetic
gaaagucuuauguauucauuu

SEQ ID NO: 684791 - RNA, 22 nt, Artificial Sequence
  Synthetic
agaaagucuuauguauucauuu

SEQ ID NO: 684792 - RNA, 23 nt, Artificial Sequence
  Synthetic
aagaaagucuuauguauucauuu

SEQ ID NO: 684793 - RNA, 24 nt, Artificial Sequence
  Synthetic
aaagaaagucuuauguauucauuu

SEQ ID NO: 684794 - RNA, 18 nt, Artificial Sequence
  Synthetic
auauguacuuauucauuu

SEQ ID NO: 684795 - RNA, 19 nt, Artificial Sequence
  Synthetic
aauauguacuuauucauuu

SEQ ID NO: 684796 - RNA, 20 nt, Artificial Sequence
  Synthetic
aaauauguacuuauucauuu

SEQ ID NO: 684797 - RNA, 21 nt, Artificial Sequence
  Synthetic
caaauauguacuuauucauuu

SEQ ID NO: 684798 - RNA, 22 nt, Artificial Sequence
  Synthetic
ucaaauauguacuuauucauuu

SEQ ID NO: 684799 - RNA, 23 nt, Artificial Sequence
  Synthetic
aucaaauauguacuuauucauuu

SEQ ID NO: 684800 - RNA, 24 nt, Artificial Sequence
  Synthetic
uaucaaauauguacuuauucauuu

SEQ ID NO: 684801 - RNA, 18 nt, Artificial Sequence
  Synthetic
gaacauaaaacuucauuu

SEQ ID NO: 684802 - RNA, 19 nt, Artificial Sequence
  Synthetic
ggaacauaaaacuucauuu

SEQ ID NO: 684803 - RNA, 20 nt, Artificial Sequence
  Synthetic
uggaacauaaaacuucauuu

SEQ ID NO: 684804 - RNA, 21 nt, Artificial Sequence
  Synthetic
uuggaacauaaaacuucauuu

SEQ ID NO: 684805 - RNA, 22 nt, Artificial Sequence
  Synthetic
uuuggaacauaaaacuucauuu

SEQ ID NO: 684806 - RNA, 23 nt, Artificial Sequence
  Synthetic
uuuuggaacauaaaacuucauuu

SEQ ID NO: 684807 - RNA, 24 nt, Artificial Sequence
  Synthetic
auuuuggaacauaaaacuucauuu

SEQ ID NO: 684808 - RNA, 18 nt, Artificial Sequence
  Synthetic
gaauccuggucuucauuu

SEQ ID NO: 684809 - RNA, 19 nt, Artificial Sequence
  Synthetic
ugaauccuggucuucauuu

SEQ ID NO: 684810 - RNA, 20 nt, Artificial Sequence
  Synthetic
cugaauccuggucuucauuu

SEQ ID NO: 684811 - RNA, 21 nt, Artificial Sequence
  Synthetic
acugaauccuggucuucauuu

SEQ ID NO: 684812 - RNA, 22 nt, Artificial Sequence
  Synthetic
cacugaauccuggucuucauuu

SEQ ID NO: 684813 - RNA, 23 nt, Artificial Sequence
  Synthetic
ucacugaauccuggucuucauuu

SEQ ID NO: 684814 - RNA, 24 nt, Artificial Sequence
  Synthetic
gucacugaauccuggucuucauuu

SEQ ID NO: 684815 - RNA, 18 nt, Artificial Sequence
  Synthetic
ugcuuucauucuucauuu

SEQ ID NO: 684816 - RNA, 19 nt, Artificial Sequence
  Synthetic
cugcuuucauucuucauuu

SEQ ID NO: 684817 - RNA, 20 nt, Artificial Sequence
  Synthetic
ccugcuuucauucuucauuu

SEQ ID NO: 684818 - RNA, 21 nt, Artificial Sequence
  Synthetic
cccugcuuucauucuucauuu

SEQ ID NO: 684819 - RNA, 22 nt, Artificial Sequence
  Synthetic
ucccugcuuucauucuucauuu

SEQ ID NO: 684820 - RNA, 23 nt, Artificial Sequence
  Synthetic
uucccugcuuucauucuucauuu

SEQ ID NO: 684821 - RNA, 24 nt, Artificial Sequence
  Synthetic
cuucccugcuuucauucuucauuu

SEQ ID NO: 684822 - RNA, 18 nt, Artificial Sequence
  Synthetic
agauuucaaaguucauuu

SEQ ID NO: 684823 - RNA, 19 nt, Artificial Sequence
  Synthetic
aagauuucaaaguucauuu

SEQ ID NO: 684824 - RNA, 20 nt, Artificial Sequence
  Synthetic
uaagauuucaaaguucauuu

SEQ ID NO: 684825 - RNA, 21 nt, Artificial Sequence
  Synthetic
uuaagauuucaaaguucauuu

SEQ ID NO: 684826 - RNA, 22 nt, Artificial Sequence
  Synthetic
uuuaagauuucaaaguucauuu

SEQ ID NO: 684827 - RNA, 23 nt, Artificial Sequence
  Synthetic
uuuuaagauuucaaaguucauuu

SEQ ID NO: 684828 - RNA, 24 nt, Artificial Sequence
  Synthetic
cuuuuaagauuucaaaguucauuu

SEQ ID NO: 684829 - RNA, 18 nt, Artificial Sequence
  Synthetic
acacagggcaguucauuu

SEQ ID NO: 684830 - RNA, 19 nt, Artificial Sequence
  Synthetic
gacacagggcaguucauuu

SEQ ID NO: 684831 - RNA, 20 nt, Artificial Sequence
  Synthetic
ggacacagggcaguucauuu

SEQ ID NO: 684832 - RNA, 21 nt, Artificial Sequence
  Synthetic
aggacacagggcaguucauuu

SEQ ID NO: 684833 - RNA, 22 nt, Artificial Sequence
  Synthetic
uaggacacagggcaguucauuu

SEQ ID NO: 684834 - RNA, 23 nt, Artificial Sequence
  Synthetic
auaggacacagggcaguucauuu

SEQ ID NO: 684835 - RNA, 24 nt, Artificial Sequence
  Synthetic
gauaggacacagggcaguucauuu

SEQ ID NO: 684836 - RNA, 18 nt, Artificial Sequence
  Synthetic
aaauagacuuguucauuu

SEQ ID NO: 684837 - RNA, 19 nt, Artificial Sequence
  Synthetic
aaaauagacuuguucauuu

SEQ ID NO: 684838 - RNA, 20 nt, Artificial Sequence
  Synthetic
caaaauagacuuguucauuu

SEQ ID NO: 684839 - RNA, 21 nt, Artificial Sequence
  Synthetic
ucaaaauagacuuguucauuu

SEQ ID NO: 684840 - RNA, 22 nt, Artificial Sequence
  Synthetic
gucaaaauagacuuguucauuu

SEQ ID NO: 684841 - RNA, 23 nt, Artificial Sequence
  Synthetic
agucaaaauagacuuguucauuu

SEQ ID NO: 684842 - RNA, 24 nt, Artificial Sequence
  Synthetic
cagucaaaauagacuuguucauuu

SEQ ID NO: 684843 - RNA, 18 nt, Artificial Sequence
  Synthetic
aauucagaaguuucauuu

SEQ ID NO: 684844 - RNA, 19 nt, Artificial Sequence
  Synthetic
aaauucagaaguuucauuu

SEQ ID NO: 684845 - RNA, 20 nt, Artificial Sequence
  Synthetic
caaauucagaaguuucauuu

SEQ ID NO: 684846 - RNA, 21 nt, Artificial Sequence
  Synthetic
ucaaauucagaaguuucauuu

SEQ ID NO: 684847 - RNA, 22 nt, Artificial Sequence
  Synthetic
cucaaauucagaaguuucauuu

SEQ ID NO: 684848 - RNA, 23 nt, Artificial Sequence
  Synthetic
ccucaaauucagaaguuucauuu

SEQ ID NO: 684849 - RNA, 24 nt, Artificial Sequence
  Synthetic
uccucaaauucagaaguuucauuu

SEQ ID NO: 684850 - RNA, 18 nt, Artificial Sequence
  Synthetic
aucauaacaguuucauuu

SEQ ID NO: 684851 - RNA, 19 nt, Artificial Sequence
  Synthetic
caucauaacaguuucauuu

SEQ ID NO: 684852 - RNA, 20 nt, Artificial Sequence
  Synthetic
acaucauaacaguuucauuu

SEQ ID NO: 684853 - RNA, 21 nt, Artificial Sequence
  Synthetic
cacaucauaacaguuucauuu

SEQ ID NO: 684854 - RNA, 22 nt, Artificial Sequence
  Synthetic
ccacaucauaacaguuucauuu

SEQ ID NO: 684855 - RNA, 23 nt, Artificial Sequence
  Synthetic
accacaucauaacaguuucauuu

SEQ ID NO: 684856 - RNA, 24 nt, Artificial Sequence
  Synthetic
aaccacaucauaacaguuucauuu

SEQ ID NO: 684857 - RNA, 18 nt, Artificial Sequence
  Synthetic
cuuuugcugguuucauuu

SEQ ID NO: 684858 - RNA, 19 nt, Artificial Sequence
  Synthetic
gcuuuugcugguuucauuu

SEQ ID NO: 684859 - RNA, 20 nt, Artificial Sequence
  Synthetic
ggcuuuugcugguuucauuu

SEQ ID NO: 684860 - RNA, 21 nt, Artificial Sequence
  Synthetic
aggcuuuugcugguuucauuu

SEQ ID NO: 684861 - RNA, 22 nt, Artificial Sequence
  Synthetic
caggcuuuugcugguuucauuu

SEQ ID NO: 684862 - RNA, 23 nt, Artificial Sequence
  Synthetic
acaggcuuuugcugguuucauuu

SEQ ID NO: 684863 - RNA, 24 nt, Artificial Sequence
  Synthetic
uacaggcuuuugcugguuucauuu

SEQ ID NO: 684864 - RNA, 18 nt, Artificial Sequence
  Synthetic
acauacacauuuucauuu

SEQ ID NO: 684865 - RNA, 19 nt, Artificial Sequence
  Synthetic
cacauacacauuuucauuu

SEQ ID NO: 684866 - RNA, 20 nt, Artificial Sequence
  Synthetic
ucacauacacauuuucauuu

SEQ ID NO: 684867 - RNA, 21 nt, Artificial Sequence
  Synthetic
cucacauacacauuuucauuu

SEQ ID NO: 684868 - RNA, 22 nt, Artificial Sequence
  Synthetic
ccucacauacacauuuucauuu

SEQ ID NO: 684869 - RNA, 23 nt, Artificial Sequence
  Synthetic
uccucacauacacauuuucauuu

SEQ ID NO: 684870 - RNA, 24 nt, Artificial Sequence
  Synthetic
auccucacauacacauuuucauuu

SEQ ID NO: 684871 - RNA, 18 nt, Artificial Sequence
  Synthetic
gccuaaaagcaaagauuu

SEQ ID NO: 684872 - RNA, 19 nt, Artificial Sequence
  Synthetic
ugccuaaaagcaaagauuu

SEQ ID NO: 684873 - RNA, 20 nt, Artificial Sequence
  Synthetic
cugccuaaaagcaaagauuu

SEQ ID NO: 684874 - RNA, 21 nt, Artificial Sequence
  Synthetic
ucugccuaaaagcaaagauuu

SEQ ID NO: 684875 - RNA, 22 nt, Artificial Sequence
  Synthetic
aucugccuaaaagcaaagauuu

SEQ ID NO: 684876 - RNA, 23 nt, Artificial Sequence
  Synthetic
uaucugccuaaaagcaaagauuu

SEQ ID NO: 684877 - RNA, 24 nt, Artificial Sequence
  Synthetic
cuaucugccuaaaagcaaagauuu

SEQ ID NO: 684878 - RNA, 18 nt, Artificial Sequence
  Synthetic
aguaagccuccaagauuu

SEQ ID NO: 684879 - RNA, 19 nt, Artificial Sequence
  Synthetic
uaguaagccuccaagauuu

SEQ ID NO: 684880 - RNA, 20 nt, Artificial Sequence
  Synthetic
guaguaagccuccaagauuu

SEQ ID NO: 684881 - RNA, 21 nt, Artificial Sequence
  Synthetic
uguaguaagccuccaagauuu

SEQ ID NO: 684882 - RNA, 22 nt, Artificial Sequence
  Synthetic
cuguaguaagccuccaagauuu

SEQ ID NO: 684883 - RNA, 23 nt, Artificial Sequence
  Synthetic
gcuguaguaagccuccaagauuu

SEQ ID NO: 684884 - RNA, 24 nt, Artificial Sequence
  Synthetic
ugcuguaguaagccuccaagauuu

SEQ ID NO: 684885 - RNA, 18 nt, Artificial Sequence
  Synthetic
guauggagcagaagauuu

SEQ ID NO: 684886 - RNA, 19 nt, Artificial Sequence
  Synthetic
uguauggagcagaagauuu

SEQ ID NO: 684887 - RNA, 20 nt, Artificial Sequence
  Synthetic
auguauggagcagaagauuu

SEQ ID NO: 684888 - RNA, 21 nt, Artificial Sequence
  Synthetic
aauguauggagcagaagauuu

SEQ ID NO: 684889 - RNA, 22 nt, Artificial Sequence
  Synthetic
aaauguauggagcagaagauuu

SEQ ID NO: 684890 - RNA, 23 nt, Artificial Sequence
  Synthetic
gaaauguauggagcagaagauuu

SEQ ID NO: 684891 - RNA, 24 nt, Artificial Sequence
  Synthetic
agaaauguauggagcagaagauuu

SEQ ID NO: 684892 - RNA, 18 nt, Artificial Sequence
  Synthetic
ggaaauggcagaagauuu

SEQ ID NO: 684893 - RNA, 19 nt, Artificial Sequence
  Synthetic
uggaaauggcagaagauuu

SEQ ID NO: 684894 - RNA, 20 nt, Artificial Sequence
  Synthetic
uuggaaauggcagaagauuu

SEQ ID NO: 684895 - RNA, 21 nt, Artificial Sequence
  Synthetic
auuggaaauggcagaagauuu

SEQ ID NO: 684896 - RNA, 22 nt, Artificial Sequence
  Synthetic
cauuggaaauggcagaagauuu

SEQ ID NO: 684897 - RNA, 23 nt, Artificial Sequence
  Synthetic
acauuggaaauggcagaagauuu

SEQ ID NO: 684898 - RNA, 24 nt, Artificial Sequence
  Synthetic
aacauuggaaauggcagaagauuu

SEQ ID NO: 684899 - RNA, 18 nt, Artificial Sequence
  Synthetic
uaugcugaaauaagauuu

SEQ ID NO: 684900 - RNA, 19 nt, Artificial Sequence
  Synthetic
uuaugcugaaauaagauuu

SEQ ID NO: 684901 - RNA, 20 nt, Artificial Sequence
  Synthetic
uuuaugcugaaauaagauuu

SEQ ID NO: 684902 - RNA, 21 nt, Artificial Sequence
  Synthetic
guuuaugcugaaauaagauuu

SEQ ID NO: 684903 - RNA, 22 nt, Artificial Sequence
  Synthetic
aguuuaugcugaaauaagauuu

SEQ ID NO: 684904 - RNA, 23 nt, Artificial Sequence
  Synthetic
gaguuuaugcugaaauaagauuu

SEQ ID NO: 684905 - RNA, 24 nt, Artificial Sequence
  Synthetic
ugaguuuaugcugaaauaagauuu

SEQ ID NO: 684906 - RNA, 18 nt, Artificial Sequence
  Synthetic
auagaggcaauaagauuu

SEQ ID NO: 684907 - RNA, 19 nt, Artificial Sequence
  Synthetic
aauagaggcaauaagauuu

SEQ ID NO: 684908 - RNA, 20 nt, Artificial Sequence
  Synthetic
aaauagaggcaauaagauuu

SEQ ID NO: 684909 - RNA, 21 nt, Artificial Sequence
  Synthetic
uaaauagaggcaauaagauuu

SEQ ID NO: 684910 - RNA, 22 nt, Artificial Sequence
  Synthetic
auaaauagaggcaauaagauuu

SEQ ID NO: 684911 - RNA, 23 nt, Artificial Sequence
  Synthetic
uauaaauagaggcaauaagauuu

SEQ ID NO: 684912 - RNA, 24 nt, Artificial Sequence
  Synthetic
uuauaaauagaggcaauaagauuu

SEQ ID NO: 684913 - RNA, 18 nt, Artificial Sequence
  Synthetic
aagggauguguaagauuu

SEQ ID NO: 684914 - RNA, 19 nt, Artificial Sequence
  Synthetic
uaagggauguguaagauuu

SEQ ID NO: 684915 - RNA, 20 nt, Artificial Sequence
  Synthetic
uuaagggauguguaagauuu

SEQ ID NO: 684916 - RNA, 21 nt, Artificial Sequence
  Synthetic
cuuaagggauguguaagauuu

SEQ ID NO: 684917 - RNA, 22 nt, Artificial Sequence
  Synthetic
ucuuaagggauguguaagauuu

SEQ ID NO: 684918 - RNA, 23 nt, Artificial Sequence
  Synthetic
gucuuaagggauguguaagauuu

SEQ ID NO: 684919 - RNA, 24 nt, Artificial Sequence
  Synthetic
agucuuaagggauguguaagauuu

SEQ ID NO: 684920 - RNA, 18 nt, Artificial Sequence
  Synthetic
uugccaggaaccagauuu

SEQ ID NO: 684921 - RNA, 19 nt, Artificial Sequence
  Synthetic
guugccaggaaccagauuu

SEQ ID NO: 684922 - RNA, 20 nt, Artificial Sequence
  Synthetic
aguugccaggaaccagauuu

SEQ ID NO: 684923 - RNA, 21 nt, Artificial Sequence
  Synthetic
caguugccaggaaccagauuu

SEQ ID NO: 684924 - RNA, 22 nt, Artificial Sequence
  Synthetic
acaguugccaggaaccagauuu

SEQ ID NO: 684925 - RNA, 23 nt, Artificial Sequence
  Synthetic
cacaguugccaggaaccagauuu

SEQ ID NO: 684926 - RNA, 24 nt, Artificial Sequence
  Synthetic
ucacaguugccaggaaccagauuu

SEQ ID NO: 684927 - RNA, 18 nt, Artificial Sequence
  Synthetic
acaaaaugaaccagauuu

SEQ ID NO: 684928 - RNA, 19 nt, Artificial Sequence
  Synthetic
uacaaaaugaaccagauuu

SEQ ID NO: 684929 - RNA, 20 nt, Artificial Sequence
  Synthetic
auacaaaaugaaccagauuu

SEQ ID NO: 684930 - RNA, 21 nt, Artificial Sequence
  Synthetic
aauacaaaaugaaccagauuu

SEQ ID NO: 684931 - RNA, 22 nt, Artificial Sequence
  Synthetic
uaauacaaaaugaaccagauuu

SEQ ID NO: 684932 - RNA, 23 nt, Artificial Sequence
  Synthetic
uuaauacaaaaugaaccagauuu

SEQ ID NO: 684933 - RNA, 24 nt, Artificial Sequence
  Synthetic
auuaauacaaaaugaaccagauuu

SEQ ID NO: 684934 - RNA, 18 nt, Artificial Sequence
  Synthetic
cauauuuaacccagauuu

SEQ ID NO: 684935 - RNA, 19 nt, Artificial Sequence
  Synthetic
ucauauuuaacccagauuu

SEQ ID NO: 684936 - RNA, 20 nt, Artificial Sequence
  Synthetic
uucauauuuaacccagauuu

SEQ ID NO: 684937 - RNA, 21 nt, Artificial Sequence
  Synthetic
cuucauauuuaacccagauuu

SEQ ID NO: 684938 - RNA, 22 nt, Artificial Sequence
  Synthetic
gcuucauauuuaacccagauuu

SEQ ID NO: 684939 - RNA, 23 nt, Artificial Sequence
  Synthetic
agcuucauauuuaacccagauuu

SEQ ID NO: 684940 - RNA, 24 nt, Artificial Sequence
  Synthetic
uagcuucauauuuaacccagauuu

SEQ ID NO: 684941 - RNA, 18 nt, Artificial Sequence
  Synthetic
caccuagcuuccagauuu

SEQ ID NO: 684942 - RNA, 19 nt, Artificial Sequence
  Synthetic
acaccuagcuuccagauuu

SEQ ID NO: 684943 - RNA, 20 nt, Artificial Sequence
  Synthetic
gacaccuagcuuccagauuu

SEQ ID NO: 684944 - RNA, 21 nt, Artificial Sequence
  Synthetic
ggacaccuagcuuccagauuu

SEQ ID NO: 684945 - RNA, 22 nt, Artificial Sequence
  Synthetic
uggacaccuagcuuccagauuu

SEQ ID NO: 684946 - RNA, 23 nt, Artificial Sequence
  Synthetic
uuggacaccuagcuuccagauuu

SEQ ID NO: 684947 - RNA, 24 nt, Artificial Sequence
  Synthetic
uuuggacaccuagcuuccagauuu

SEQ ID NO: 684948 - RNA, 18 nt, Artificial Sequence
  Synthetic
aaauuagaacagagauuu

SEQ ID NO: 684949 - RNA, 19 nt, Artificial Sequence
  Synthetic
uaaauuagaacagagauuu

SEQ ID NO: 684950 - RNA, 20 nt, Artificial Sequence
  Synthetic
guaaauuagaacagagauuu

SEQ ID NO: 684951 - RNA, 21 nt, Artificial Sequence
  Synthetic
aguaaauuagaacagagauuu

SEQ ID NO: 684952 - RNA, 22 nt, Artificial Sequence
  Synthetic
aaguaaauuagaacagagauuu

SEQ ID NO: 684953 - RNA, 23 nt, Artificial Sequence
  Synthetic
uaaguaaauuagaacagagauuu

SEQ ID NO: 684954 - RNA, 24 nt, Artificial Sequence
  Synthetic
guaaguaaauuagaacagagauuu

SEQ ID NO: 684955 - RNA, 18 nt, Artificial Sequence
  Synthetic
gaaagggacaugagauuu

SEQ ID NO: 684956 - RNA, 19 nt, Artificial Sequence
  Synthetic
ugaaagggacaugagauuu

SEQ ID NO: 684957 - RNA, 20 nt, Artificial Sequence
  Synthetic
gugaaagggacaugagauuu

SEQ ID NO: 684958 - RNA, 21 nt, Artificial Sequence
  Synthetic
ugugaaagggacaugagauuu

SEQ ID NO: 684959 - RNA, 22 nt, Artificial Sequence
  Synthetic
augugaaagggacaugagauuu

SEQ ID NO: 684960 - RNA, 23 nt, Artificial Sequence
  Synthetic
aaugugaaagggacaugagauuu

SEQ ID NO: 684961 - RNA, 24 nt, Artificial Sequence
  Synthetic
aaaugugaaagggacaugagauuu

SEQ ID NO: 684962 - RNA, 18 nt, Artificial Sequence
  Synthetic
auuuuugaaaauagauuu

SEQ ID NO: 684963 - RNA, 19 nt, Artificial Sequence
  Synthetic
uauuuuugaaaauagauuu

SEQ ID NO: 684964 - RNA, 20 nt, Artificial Sequence
  Synthetic
auauuuuugaaaauagauuu

SEQ ID NO: 684965 - RNA, 21 nt, Artificial Sequence
  Synthetic
uauauuuuugaaaauagauuu

SEQ ID NO: 684966 - RNA, 22 nt, Artificial Sequence
  Synthetic
guauauuuuugaaaauagauuu

SEQ ID NO: 684967 - RNA, 23 nt, Artificial Sequence
  Synthetic
aguauauuuuugaaaauagauuu

SEQ ID NO: 684968 - RNA, 24 nt, Artificial Sequence
  Synthetic
gaguauauuuuugaaaauagauuu

SEQ ID NO: 684969 - RNA, 18 nt, Artificial Sequence
  Synthetic
ucuaauagcaauagauuu

SEQ ID NO: 684970 - RNA, 19 nt, Artificial Sequence
  Synthetic
uucuaauagcaauagauuu

SEQ ID NO: 684971 - RNA, 20 nt, Artificial Sequence
  Synthetic
auucuaauagcaauagauuu

SEQ ID NO: 684972 - RNA, 21 nt, Artificial Sequence
  Synthetic
uauucuaauagcaauagauuu

SEQ ID NO: 684973 - RNA, 22 nt, Artificial Sequence
  Synthetic
auauucuaauagcaauagauuu

SEQ ID NO: 684974 - RNA, 23 nt, Artificial Sequence
  Synthetic
aauauucuaauagcaauagauuu

SEQ ID NO: 684975 - RNA, 24 nt, Artificial Sequence
  Synthetic
aaauauucuaauagcaauagauuu

SEQ ID NO: 684976 - RNA, 18 nt, Artificial Sequence
  Synthetic
aaaauauacacuagauuu

SEQ ID NO: 684977 - RNA, 19 nt, Artificial Sequence
  Synthetic
uaaaauauacacuagauuu

SEQ ID NO: 684978 - RNA, 20 nt, Artificial Sequence
  Synthetic
guaaaauauacacuagauuu

SEQ ID NO: 684979 - RNA, 21 nt, Artificial Sequence
  Synthetic
uguaaaauauacacuagauuu

SEQ ID NO: 684980 - RNA, 22 nt, Artificial Sequence
  Synthetic
auguaaaauauacacuagauuu

SEQ ID NO: 684981 - RNA, 23 nt, Artificial Sequence
  Synthetic
aauguaaaauauacacuagauuu

SEQ ID NO: 684982 - RNA, 24 nt, Artificial Sequence
  Synthetic
aaauguaaaauauacacuagauuu

SEQ ID NO: 684983 - RNA, 18 nt, Artificial Sequence
  Synthetic
gaacuucuaccuagauuu

SEQ ID NO: 684984 - RNA, 19 nt, Artificial Sequence
  Synthetic
ggaacuucuaccuagauuu

SEQ ID NO: 684985 - RNA, 20 nt, Artificial Sequence
  Synthetic
gggaacuucuaccuagauuu

SEQ ID NO: 684986 - RNA, 21 nt, Artificial Sequence
  Synthetic
ugggaacuucuaccuagauuu

SEQ ID NO: 684987 - RNA, 22 nt, Artificial Sequence
  Synthetic
uugggaacuucuaccuagauuu

SEQ ID NO: 684988 - RNA, 23 nt, Artificial Sequence
  Synthetic
uuugggaacuucuaccuagauuu

SEQ ID NO: 684989 - RNA, 24 nt, Artificial Sequence
  Synthetic
cuuugggaacuucuaccuagauuu

SEQ ID NO: 684990 - RNA, 18 nt, Artificial Sequence
  Synthetic
ucuuucuacccuagauuu

SEQ ID NO: 684991 - RNA, 19 nt, Artificial Sequence
  Synthetic
gucuuucuacccuagauuu

SEQ ID NO: 684992 - RNA, 20 nt, Artificial Sequence
  Synthetic
ugucuuucuacccuagauuu

SEQ ID NO: 684993 - RNA, 21 nt, Artificial Sequence
  Synthetic
augucuuucuacccuagauuu

SEQ ID NO: 684994 - RNA, 22 nt, Artificial Sequence
  Synthetic
uaugucuuucuacccuagauuu

SEQ ID NO: 684995 - RNA, 23 nt, Artificial Sequence
  Synthetic
uuaugucuuucuacccuagauuu

SEQ ID NO: 684996 - RNA, 24 nt, Artificial Sequence
  Synthetic
cuuaugucuuucuacccuagauuu

SEQ ID NO: 684997 - RNA, 18 nt, Artificial Sequence
  Synthetic
aguuucaagccuagauuu

SEQ ID NO: 684998 - RNA, 19 nt, Artificial Sequence
  Synthetic
uaguuucaagccuagauuu

SEQ ID NO: 684999 - RNA, 20 nt, Artificial Sequence
  Synthetic
auaguuucaagccuagauuu

SEQ ID NO: 685000 - RNA, 21 nt, Artificial Sequence
  Synthetic
cauaguuucaagccuagauuu

SEQ ID NO: 685001 - RNA, 22 nt, Artificial Sequence
  Synthetic
ccauaguuucaagccuagauuu

SEQ ID NO: 685002 - RNA, 23 nt, Artificial Sequence
  Synthetic
uccauaguuucaagccuagauuu

SEQ ID NO: 685003 - RNA, 24 nt, Artificial Sequence
  Synthetic
auccauaguuucaagccuagauuu

SEQ ID NO: 685004 - RNA, 18 nt, Artificial Sequence
  Synthetic
gaaccucugccuagauuu

SEQ ID NO: 685005 - RNA, 19 nt, Artificial Sequence
  Synthetic
ggaaccucugccuagauuu

SEQ ID NO: 685006 - RNA, 20 nt, Artificial Sequence
  Synthetic
gggaaccucugccuagauuu

SEQ ID NO: 685007 - RNA, 21 nt, Artificial Sequence
  Synthetic
ugggaaccucugccuagauuu

SEQ ID NO: 685008 - RNA, 22 nt, Artificial Sequence
  Synthetic
uugggaaccucugccuagauuu

SEQ ID NO: 685009 - RNA, 23 nt, Artificial Sequence
  Synthetic
uuugggaaccucugccuagauuu

SEQ ID NO: 685010 - RNA, 24 nt, Artificial Sequence
  Synthetic
guuugggaaccucugccuagauuu

SEQ ID NO: 685011 - RNA, 18 nt, Artificial Sequence
  Synthetic
caacuuacugcuagauuu

SEQ ID NO: 685012 - RNA, 19 nt, Artificial Sequence
  Synthetic
ucaacuuacugcuagauuu

SEQ ID NO: 685013 - RNA, 20 nt, Artificial Sequence
  Synthetic
uucaacuuacugcuagauuu

SEQ ID NO: 685014 - RNA, 21 nt, Artificial Sequence
  Synthetic
cuucaacuuacugcuagauuu

SEQ ID NO: 685015 - RNA, 22 nt, Artificial Sequence
  Synthetic
ucuucaacuuacugcuagauuu

SEQ ID NO: 685016 - RNA, 23 nt, Artificial Sequence
  Synthetic
uucuucaacuuacugcuagauuu

SEQ ID NO: 685017 - RNA, 24 nt, Artificial Sequence
  Synthetic
uuucuucaacuuacugcuagauuu

SEQ ID NO: 685018 - RNA, 18 nt, Artificial Sequence
  Synthetic
cuuagucucucuagauuu

SEQ ID NO: 685019 - RNA, 19 nt, Artificial Sequence
  Synthetic
ucuuagucucucuagauuu

SEQ ID NO: 685020 - RNA, 20 nt, Artificial Sequence
  Synthetic
aucuuagucucucuagauuu

SEQ ID NO: 685021 - RNA, 21 nt, Artificial Sequence
  Synthetic
caucuuagucucucuagauuu

SEQ ID NO: 685022 - RNA, 22 nt, Artificial Sequence
  Synthetic
ucaucuuagucucucuagauuu

SEQ ID NO: 685023 - RNA, 23 nt, Artificial Sequence
  Synthetic
gucaucuuagucucucuagauuu

SEQ ID NO: 685024 - RNA, 24 nt, Artificial Sequence
  Synthetic
ugucaucuuagucucucuagauuu

SEQ ID NO: 685025 - RNA, 18 nt, Artificial Sequence
  Synthetic
aacuacuuuucuagauuu

SEQ ID NO: 685026 - RNA, 19 nt, Artificial Sequence
  Synthetic
aaacuacuuuucuagauuu

SEQ ID NO: 685027 - RNA, 20 nt, Artificial Sequence
  Synthetic
caaacuacuuuucuagauuu

SEQ ID NO: 685028 - RNA, 21 nt, Artificial Sequence
  Synthetic
acaaacuacuuuucuagauuu

SEQ ID NO: 685029 - RNA, 22 nt, Artificial Sequence
  Synthetic
uacaaacuacuuuucuagauuu

SEQ ID NO: 685030 - RNA, 23 nt, Artificial Sequence
  Synthetic
auacaaacuacuuuucuagauuu

SEQ ID NO: 685031 - RNA, 24 nt, Artificial Sequence
  Synthetic
gauacaaacuacuuuucuagauuu

SEQ ID NO: 685032 - RNA, 18 nt, Artificial Sequence
  Synthetic
aucacccacaguagauuu

SEQ ID NO: 685033 - RNA, 19 nt, Artificial Sequence
  Synthetic
uaucacccacaguagauuu

SEQ ID NO: 685034 - RNA, 20 nt, Artificial Sequence
  Synthetic
auaucacccacaguagauuu

SEQ ID NO: 685035 - RNA, 21 nt, Artificial Sequence
  Synthetic
gauaucacccacaguagauuu

SEQ ID NO: 685036 - RNA, 22 nt, Artificial Sequence
  Synthetic
ugauaucacccacaguagauuu

SEQ ID NO: 685037 - RNA, 23 nt, Artificial Sequence
  Synthetic
gugauaucacccacaguagauuu

SEQ ID NO: 685038 - RNA, 24 nt, Artificial Sequence
  Synthetic
agugauaucacccacaguagauuu

SEQ ID NO: 685039 - RNA, 18 nt, Artificial Sequence
  Synthetic
agugcaguuaguagauuu

SEQ ID NO: 685040 - RNA, 19 nt, Artificial Sequence
  Synthetic
gagugcaguuaguagauuu

SEQ ID NO: 685041 - RNA, 20 nt, Artificial Sequence
  Synthetic
ggagugcaguuaguagauuu

SEQ ID NO: 685042 - RNA, 21 nt, Artificial Sequence
  Synthetic
aggagugcaguuaguagauuu

SEQ ID NO: 685043 - RNA, 22 nt, Artificial Sequence
  Synthetic
uaggagugcaguuaguagauuu

SEQ ID NO: 685044 - RNA, 23 nt, Artificial Sequence
  Synthetic
uuaggagugcaguuaguagauuu

SEQ ID NO: 685045 - RNA, 24 nt, Artificial Sequence
  Synthetic
auuaggagugcaguuaguagauuu

SEQ ID NO: 685046 - RNA, 18 nt, Artificial Sequence
  Synthetic
aacuauuguuuuagauuu

SEQ ID NO: 685047 - RNA, 19 nt, Artificial Sequence
  Synthetic
caacuauuguuuuagauuu

SEQ ID NO: 685048 - RNA, 20 nt, Artificial Sequence
  Synthetic
ucaacuauuguuuuagauuu

SEQ ID NO: 685049 - RNA, 21 nt, Artificial Sequence
  Synthetic
uucaacuauuguuuuagauuu

SEQ ID NO: 685050 - RNA, 22 nt, Artificial Sequence
  Synthetic
uuucaacuauuguuuuagauuu

SEQ ID NO: 685051 - RNA, 23 nt, Artificial Sequence
  Synthetic
auuucaacuauuguuuuagauuu

SEQ ID NO: 685052 - RNA, 24 nt, Artificial Sequence
  Synthetic
aauuucaacuauuguuuuagauuu

SEQ ID NO: 685053 - RNA, 18 nt, Artificial Sequence
  Synthetic
aaagcacagaaccgauuu

SEQ ID NO: 685054 - RNA, 19 nt, Artificial Sequence
  Synthetic
aaaagcacagaaccgauuu

SEQ ID NO: 685055 - RNA, 20 nt, Artificial Sequence
  Synthetic
aaaaagcacagaaccgauuu

SEQ ID NO: 685056 - RNA, 21 nt, Artificial Sequence
  Synthetic
gaaaaagcacagaaccgauuu

SEQ ID NO: 685057 - RNA, 22 nt, Artificial Sequence
  Synthetic
agaaaaagcacagaaccgauuu

SEQ ID NO: 685058 - RNA, 23 nt, Artificial Sequence
  Synthetic
cagaaaaagcacagaaccgauuu

SEQ ID NO: 685059 - RNA, 24 nt, Artificial Sequence
  Synthetic
acagaaaaagcacagaaccgauuu

SEQ ID NO: 685060 - RNA, 18 nt, Artificial Sequence
  Synthetic
uacaaaaugacccgauuu

SEQ ID NO: 685061 - RNA, 19 nt, Artificial Sequence
  Synthetic
guacaaaaugacccgauuu

SEQ ID NO: 685062 - RNA, 20 nt, Artificial Sequence
  Synthetic
cguacaaaaugacccgauuu

SEQ ID NO: 685063 - RNA, 21 nt, Artificial Sequence
  Synthetic
acguacaaaaugacccgauuu

SEQ ID NO: 685064 - RNA, 22 nt, Artificial Sequence
  Synthetic
uacguacaaaaugacccgauuu

SEQ ID NO: 685065 - RNA, 23 nt, Artificial Sequence
  Synthetic
cuacguacaaaaugacccgauuu

SEQ ID NO: 685066 - RNA, 24 nt, Artificial Sequence
  Synthetic
ccuacguacaaaaugacccgauuu

SEQ ID NO: 685067 - RNA, 18 nt, Artificial Sequence
  Synthetic
uuugaggaauaucgauuu

SEQ ID NO: 685068 - RNA, 19 nt, Artificial Sequence
  Synthetic
cuuugaggaauaucgauuu

SEQ ID NO: 685069 - RNA, 20 nt, Artificial Sequence
  Synthetic
gcuuugaggaauaucgauuu

SEQ ID NO: 685070 - RNA, 21 nt, Artificial Sequence
  Synthetic
agcuuugaggaauaucgauuu

SEQ ID NO: 685071 - RNA, 22 nt, Artificial Sequence
  Synthetic
aagcuuugaggaauaucgauuu

SEQ ID NO: 685072 - RNA, 23 nt, Artificial Sequence
  Synthetic
caagcuuugaggaauaucgauuu

SEQ ID NO: 685073 - RNA, 24 nt, Artificial Sequence
  Synthetic
ucaagcuuugaggaauaucgauuu

SEQ ID NO: 685074 - RNA, 18 nt, Artificial Sequence
  Synthetic
aaaaacuaaaaaggauuu

SEQ ID NO: 685075 - RNA, 19 nt, Artificial Sequence
  Synthetic
caaaaacuaaaaaggauuu

SEQ ID NO: 685076 - RNA, 20 nt, Artificial Sequence
  Synthetic
gcaaaaacuaaaaaggauuu

SEQ ID NO: 685077 - RNA, 21 nt, Artificial Sequence
  Synthetic
ugcaaaaacuaaaaaggauuu

SEQ ID NO: 685078 - RNA, 22 nt, Artificial Sequence
  Synthetic
cugcaaaaacuaaaaaggauuu

SEQ ID NO: 685079 - RNA, 23 nt, Artificial Sequence
  Synthetic
acugcaaaaacuaaaaaggauuu

SEQ ID NO: 685080 - RNA, 24 nt, Artificial Sequence
  Synthetic
uacugcaaaaacuaaaaaggauuu

SEQ ID NO: 685081 - RNA, 18 nt, Artificial Sequence
  Synthetic
uggacaaagucaggauuu

SEQ ID NO: 685082 - RNA, 19 nt, Artificial Sequence
  Synthetic
uuggacaaagucaggauuu

SEQ ID NO: 685083 - RNA, 20 nt, Artificial Sequence
  Synthetic
auuggacaaagucaggauuu

SEQ ID NO: 685084 - RNA, 21 nt, Artificial Sequence
  Synthetic
cauuggacaaagucaggauuu

SEQ ID NO: 685085 - RNA, 22 nt, Artificial Sequence
  Synthetic
ccauuggacaaagucaggauuu

SEQ ID NO: 685086 - RNA, 23 nt, Artificial Sequence
  Synthetic
accauuggacaaagucaggauuu

SEQ ID NO: 685087 - RNA, 24 nt, Artificial Sequence
  Synthetic
uaccauuggacaaagucaggauuu

SEQ ID NO: 685088 - RNA, 18 nt, Artificial Sequence
  Synthetic
ugaagggcccuaggauuu

SEQ ID NO: 685089 - RNA, 19 nt, Artificial Sequence
  Synthetic
cugaagggcccuaggauuu

SEQ ID NO: 685090 - RNA, 20 nt, Artificial Sequence
  Synthetic
ccugaagggcccuaggauuu

SEQ ID NO: 685091 - RNA, 21 nt, Artificial Sequence
  Synthetic
accugaagggcccuaggauuu

SEQ ID NO: 685092 - RNA, 22 nt, Artificial Sequence
  Synthetic
aaccugaagggcccuaggauuu

SEQ ID NO: 685093 - RNA, 23 nt, Artificial Sequence
  Synthetic
uaaccugaagggcccuaggauuu

SEQ ID NO: 685094 - RNA, 24 nt, Artificial Sequence
  Synthetic
auaaccugaagggcccuaggauuu

SEQ ID NO: 685095 - RNA, 18 nt, Artificial Sequence
  Synthetic
guuuggaguuucggauuu

SEQ ID NO: 685096 - RNA, 19 nt, Artificial Sequence
  Synthetic
gguuuggaguuucggauuu

SEQ ID NO: 685097 - RNA, 20 nt, Artificial Sequence
  Synthetic
ggguuuggaguuucggauuu

SEQ ID NO: 685098 - RNA, 21 nt, Artificial Sequence
  Synthetic
uggguuuggaguuucggauuu

SEQ ID NO: 685099 - RNA, 22 nt, Artificial Sequence
  Synthetic
guggguuuggaguuucggauuu

SEQ ID NO: 685100 - RNA, 23 nt, Artificial Sequence
  Synthetic
aguggguuuggaguuucggauuu

SEQ ID NO: 685101 - RNA, 24 nt, Artificial Sequence
  Synthetic
caguggguuuggaguuucggauuu

SEQ ID NO: 685102 - RNA, 18 nt, Artificial Sequence
  Synthetic
gcaggcccugggggauuu

SEQ ID NO: 685103 - RNA, 19 nt, Artificial Sequence
  Synthetic
agcaggcccugggggauuu

SEQ ID NO: 685104 - RNA, 20 nt, Artificial Sequence
  Synthetic
aagcaggcccugggggauuu

SEQ ID NO: 685105 - RNA, 21 nt, Artificial Sequence
  Synthetic
caagcaggcccugggggauuu

SEQ ID NO: 685106 - RNA, 22 nt, Artificial Sequence
  Synthetic
gcaagcaggcccugggggauuu

SEQ ID NO: 685107 - RNA, 23 nt, Artificial Sequence
  Synthetic
ugcaagcaggcccugggggauuu

SEQ ID NO: 685108 - RNA, 24 nt, Artificial Sequence
  Synthetic
augcaagcaggcccugggggauuu

SEQ ID NO: 685109 - RNA, 18 nt, Artificial Sequence
  Synthetic
caugacaccuggggauuu

SEQ ID NO: 685110 - RNA, 19 nt, Artificial Sequence
  Synthetic
ccaugacaccuggggauuu

SEQ ID NO: 685111 - RNA, 20 nt, Artificial Sequence
  Synthetic
cccaugacaccuggggauuu

SEQ ID NO: 685112 - RNA, 21 nt, Artificial Sequence
  Synthetic
ucccaugacaccuggggauuu

SEQ ID NO: 685113 - RNA, 22 nt, Artificial Sequence
  Synthetic
cucccaugacaccuggggauuu

SEQ ID NO: 685114 - RNA, 23 nt, Artificial Sequence
  Synthetic
ccucccaugacaccuggggauuu

SEQ ID NO: 685115 - RNA, 24 nt, Artificial Sequence
  Synthetic
cccucccaugacaccuggggauuu

SEQ ID NO: 685116 - RNA, 18 nt, Artificial Sequence
  Synthetic
gugagguaacugggauuu

SEQ ID NO: 685117 - RNA, 19 nt, Artificial Sequence
  Synthetic
ggugagguaacugggauuu

SEQ ID NO: 685118 - RNA, 20 nt, Artificial Sequence
  Synthetic
aggugagguaacugggauuu

SEQ ID NO: 685119 - RNA, 21 nt, Artificial Sequence
  Synthetic
caggugagguaacugggauuu

SEQ ID NO: 685120 - RNA, 22 nt, Artificial Sequence
  Synthetic
ucaggugagguaacugggauuu

SEQ ID NO: 685121 - RNA, 23 nt, Artificial Sequence
  Synthetic
uucaggugagguaacugggauuu

SEQ ID NO: 685122 - RNA, 24 nt, Artificial Sequence
  Synthetic
uuucaggugagguaacugggauuu

SEQ ID NO: 685123 - RNA, 18 nt, Artificial Sequence
  Synthetic
ucaugagcuuugggauuu

SEQ ID NO: 685124 - RNA, 19 nt, Artificial Sequence
  Synthetic
uucaugagcuuugggauuu

SEQ ID NO: 685125 - RNA, 20 nt, Artificial Sequence
  Synthetic
uuucaugagcuuugggauuu

SEQ ID NO: 685126 - RNA, 21 nt, Artificial Sequence
  Synthetic
uuuucaugagcuuugggauuu

SEQ ID NO: 685127 - RNA, 22 nt, Artificial Sequence
  Synthetic
guuuucaugagcuuugggauuu

SEQ ID NO: 685128 - RNA, 23 nt, Artificial Sequence
  Synthetic
uguuuucaugagcuuugggauuu

SEQ ID NO: 685129 - RNA, 24 nt, Artificial Sequence
  Synthetic
auguuuucaugagcuuugggauuu

SEQ ID NO: 685130 - RNA, 18 nt, Artificial Sequence
  Synthetic
acuucagaauauggauuu

SEQ ID NO: 685131 - RNA, 19 nt, Artificial Sequence
  Synthetic
uacuucagaauauggauuu

SEQ ID NO: 685132 - RNA, 20 nt, Artificial Sequence
  Synthetic
guacuucagaauauggauuu

SEQ ID NO: 685133 - RNA, 21 nt, Artificial Sequence
  Synthetic
uguacuucagaauauggauuu

SEQ ID NO: 685134 - RNA, 22 nt, Artificial Sequence
  Synthetic
cuguacuucagaauauggauuu

SEQ ID NO: 685135 - RNA, 23 nt, Artificial Sequence
  Synthetic
acuguacuucagaauauggauuu

SEQ ID NO: 685136 - RNA, 24 nt, Artificial Sequence
  Synthetic
cacuguacuucagaauauggauuu

SEQ ID NO: 685137 - RNA, 18 nt, Artificial Sequence
  Synthetic
auuuguauuucuggauuu

SEQ ID NO: 685138 - RNA, 19 nt, Artificial Sequence
  Synthetic
cauuuguauuucuggauuu

SEQ ID NO: 685139 - RNA, 20 nt, Artificial Sequence
  Synthetic
ccauuuguauuucuggauuu

SEQ ID NO: 685140 - RNA, 21 nt, Artificial Sequence
  Synthetic
accauuuguauuucuggauuu

SEQ ID NO: 685141 - RNA, 22 nt, Artificial Sequence
  Synthetic
aaccauuuguauuucuggauuu

SEQ ID NO: 685142 - RNA, 23 nt, Artificial Sequence
  Synthetic
uaaccauuuguauuucuggauuu

SEQ ID NO: 685143 - RNA, 24 nt, Artificial Sequence
  Synthetic
auaaccauuuguauuucuggauuu

SEQ ID NO: 685144 - RNA, 18 nt, Artificial Sequence
  Synthetic
gcaagguaaaaaugauuu

SEQ ID NO: 685145 - RNA, 19 nt, Artificial Sequence
  Synthetic
agcaagguaaaaaugauuu

SEQ ID NO: 685146 - RNA, 20 nt, Artificial Sequence
  Synthetic
cagcaagguaaaaaugauuu

SEQ ID NO: 685147 - RNA, 21 nt, Artificial Sequence
  Synthetic
ucagcaagguaaaaaugauuu

SEQ ID NO: 685148 - RNA, 22 nt, Artificial Sequence
  Synthetic
uucagcaagguaaaaaugauuu

SEQ ID NO: 685149 - RNA, 23 nt, Artificial Sequence
  Synthetic
cuucagcaagguaaaaaugauuu

SEQ ID NO: 685150 - RNA, 24 nt, Artificial Sequence
  Synthetic
ucuucagcaagguaaaaaugauuu

SEQ ID NO: 685151 - RNA, 18 nt, Artificial Sequence
  Synthetic
ugacuucugaaaugauuu

SEQ ID NO: 685152 - RNA, 19 nt, Artificial Sequence
  Synthetic
uugacuucugaaaugauuu

SEQ ID NO: 685153 - RNA, 20 nt, Artificial Sequence
  Synthetic
auugacuucugaaaugauuu

SEQ ID NO: 685154 - RNA, 21 nt, Artificial Sequence
  Synthetic
gauugacuucugaaaugauuu

SEQ ID NO: 685155 - RNA, 22 nt, Artificial Sequence
  Synthetic
ggauugacuucugaaaugauuu

SEQ ID NO: 685156 - RNA, 23 nt, Artificial Sequence
  Synthetic
uggauugacuucugaaaugauuu

SEQ ID NO: 685157 - RNA, 24 nt, Artificial Sequence
  Synthetic
auggauugacuucugaaaugauuu

SEQ ID NO: 685158 - RNA, 18 nt, Artificial Sequence
  Synthetic
acgcauggcagaugauuu

SEQ ID NO: 685159 - RNA, 19 nt, Artificial Sequence
  Synthetic
uacgcauggcagaugauuu

SEQ ID NO: 685160 - RNA, 20 nt, Artificial Sequence
  Synthetic
guacgcauggcagaugauuu

SEQ ID NO: 685161 - RNA, 21 nt, Artificial Sequence
  Synthetic
uguacgcauggcagaugauuu

SEQ ID NO: 685162 - RNA, 22 nt, Artificial Sequence
  Synthetic
uuguacgcauggcagaugauuu

SEQ ID NO: 685163 - RNA, 23 nt, Artificial Sequence
  Synthetic
auuguacgcauggcagaugauuu

SEQ ID NO: 685164 - RNA, 24 nt, Artificial Sequence
  Synthetic
gauuguacgcauggcagaugauuu

SEQ ID NO: 685165 - RNA, 18 nt, Artificial Sequence
  Synthetic
cuuuggguuauaugauuu

SEQ ID NO: 685166 - RNA, 19 nt, Artificial Sequence
  Synthetic
acuuuggguuauaugauuu

SEQ ID NO: 685167 - RNA, 20 nt, Artificial Sequence
  Synthetic
gacuuuggguuauaugauuu

SEQ ID NO: 685168 - RNA, 21 nt, Artificial Sequence
  Synthetic
ugacuuuggguuauaugauuu

SEQ ID NO: 685169 - RNA, 22 nt, Artificial Sequence
  Synthetic
augacuuuggguuauaugauuu

SEQ ID NO: 685170 - RNA, 23 nt, Artificial Sequence
  Synthetic
caugacuuuggguuauaugauuu

SEQ ID NO: 685171 - RNA, 24 nt, Artificial Sequence
  Synthetic
gcaugacuuuggguuauaugauuu

SEQ ID NO: 685172 - RNA, 18 nt, Artificial Sequence
  Synthetic
cagcauguguccugauuu

SEQ ID NO: 685173 - RNA, 19 nt, Artificial Sequence
  Synthetic
ccagcauguguccugauuu

SEQ ID NO: 685174 - RNA, 20 nt, Artificial Sequence
  Synthetic
cccagcauguguccugauuu

SEQ ID NO: 685175 - RNA, 21 nt, Artificial Sequence
  Synthetic
acccagcauguguccugauuu

SEQ ID NO: 685176 - RNA, 22 nt, Artificial Sequence
  Synthetic
gacccagcauguguccugauuu

SEQ ID NO: 685177 - RNA, 23 nt, Artificial Sequence
  Synthetic
agacccagcauguguccugauuu

SEQ ID NO: 685178 - RNA, 24 nt, Artificial Sequence
  Synthetic
gagacccagcauguguccugauuu

SEQ ID NO: 685179 - RNA, 18 nt, Artificial Sequence
  Synthetic
ccacugaaaaagugauuu

SEQ ID NO: 685180 - RNA, 19 nt, Artificial Sequence
  Synthetic
accacugaaaaagugauuu

SEQ ID NO: 685181 - RNA, 20 nt, Artificial Sequence
  Synthetic
aaccacugaaaaagugauuu

SEQ ID NO: 685182 - RNA, 21 nt, Artificial Sequence
  Synthetic
uaaccacugaaaaagugauuu

SEQ ID NO: 685183 - RNA, 22 nt, Artificial Sequence
  Synthetic
guaaccacugaaaaagugauuu

SEQ ID NO: 685184 - RNA, 23 nt, Artificial Sequence
  Synthetic
gguaaccacugaaaaagugauuu

SEQ ID NO: 685185 - RNA, 24 nt, Artificial Sequence
  Synthetic
ggguaaccacugaaaaagugauuu

SEQ ID NO: 685186 - RNA, 18 nt, Artificial Sequence
  Synthetic
aaaugucgaaggugauuu

SEQ ID NO: 685187 - RNA, 19 nt, Artificial Sequence
  Synthetic
aaaaugucgaaggugauuu

SEQ ID NO: 685188 - RNA, 20 nt, Artificial Sequence
  Synthetic
aaaaaugucgaaggugauuu

SEQ ID NO: 685189 - RNA, 21 nt, Artificial Sequence
  Synthetic
gaaaaaugucgaaggugauuu

SEQ ID NO: 685190 - RNA, 22 nt, Artificial Sequence
  Synthetic
agaaaaaugucgaaggugauuu

SEQ ID NO: 685191 - RNA, 23 nt, Artificial Sequence
  Synthetic
cagaaaaaugucgaaggugauuu

SEQ ID NO: 685192 - RNA, 24 nt, Artificial Sequence
  Synthetic
ccagaaaaaugucgaaggugauuu

SEQ ID NO: 685193 - RNA, 18 nt, Artificial Sequence
  Synthetic
ccuuuagggaggugauuu

SEQ ID NO: 685194 - RNA, 19 nt, Artificial Sequence
  Synthetic
gccuuuagggaggugauuu

SEQ ID NO: 685195 - RNA, 20 nt, Artificial Sequence
  Synthetic
ggccuuuagggaggugauuu

SEQ ID NO: 685196 - RNA, 21 nt, Artificial Sequence
  Synthetic
gggccuuuagggaggugauuu

SEQ ID NO: 685197 - RNA, 22 nt, Artificial Sequence
  Synthetic
ggggccuuuagggaggugauuu

SEQ ID NO: 685198 - RNA, 23 nt, Artificial Sequence
  Synthetic
uggggccuuuagggaggugauuu

SEQ ID NO: 685199 - RNA, 24 nt, Artificial Sequence
  Synthetic
auggggccuuuagggaggugauuu

SEQ ID NO: 685200 - RNA, 18 nt, Artificial Sequence
  Synthetic
cuggggguggggugauuu

SEQ ID NO: 685201 - RNA, 19 nt, Artificial Sequence
  Synthetic
ccuggggguggggugauuu

SEQ ID NO: 685202 - RNA, 20 nt, Artificial Sequence
  Synthetic
uccuggggguggggugauuu

SEQ ID NO: 685203 - RNA, 21 nt, Artificial Sequence
  Synthetic
auccuggggguggggugauuu

SEQ ID NO: 685204 - RNA, 22 nt, Artificial Sequence
  Synthetic
gauccuggggguggggugauuu

SEQ ID NO: 685205 - RNA, 23 nt, Artificial Sequence
  Synthetic
agauccuggggguggggugauuu

SEQ ID NO: 685206 - RNA, 24 nt, Artificial Sequence
  Synthetic
uagauccuggggguggggugauuu

SEQ ID NO: 685207 - RNA, 18 nt, Artificial Sequence
  Synthetic
acaaacaauaugugauuu

SEQ ID NO: 685208 - RNA, 19 nt, Artificial Sequence
  Synthetic
aacaaacaauaugugauuu

SEQ ID NO: 685209 - RNA, 20 nt, Artificial Sequence
  Synthetic
aaacaaacaauaugugauuu

SEQ ID NO: 685210 - RNA, 21 nt, Artificial Sequence
  Synthetic
caaacaaacaauaugugauuu

SEQ ID NO: 685211 - RNA, 22 nt, Artificial Sequence
  Synthetic
acaaacaaacaauaugugauuu

SEQ ID NO: 685212 - RNA, 23 nt, Artificial Sequence
  Synthetic
aacaaacaaacaauaugugauuu

SEQ ID NO: 685213 - RNA, 24 nt, Artificial Sequence
  Synthetic
aaacaaacaaacaauaugugauuu

SEQ ID NO: 685214 - RNA, 18 nt, Artificial Sequence
  Synthetic
ggcagugguaugugauuu

SEQ ID NO: 685215 - RNA, 19 nt, Artificial Sequence
  Synthetic
uggcagugguaugugauuu

SEQ ID NO: 685216 - RNA, 20 nt, Artificial Sequence
  Synthetic
guggcagugguaugugauuu

SEQ ID NO: 685217 - RNA, 21 nt, Artificial Sequence
  Synthetic
gguggcagugguaugugauuu

SEQ ID NO: 685218 - RNA, 22 nt, Artificial Sequence
  Synthetic
ugguggcagugguaugugauuu

SEQ ID NO: 685219 - RNA, 23 nt, Artificial Sequence
  Synthetic
cugguggcagugguaugugauuu

SEQ ID NO: 685220 - RNA, 24 nt, Artificial Sequence
  Synthetic
gcugguggcagugguaugugauuu

SEQ ID NO: 685221 - RNA, 18 nt, Artificial Sequence
  Synthetic
guuggagaccauugauuu

SEQ ID NO: 685222 - RNA, 19 nt, Artificial Sequence
  Synthetic
uguuggagaccauugauuu

SEQ ID NO: 685223 - RNA, 20 nt, Artificial Sequence
  Synthetic
cuguuggagaccauugauuu

SEQ ID NO: 685224 - RNA, 21 nt, Artificial Sequence
  Synthetic
ucuguuggagaccauugauuu

SEQ ID NO: 685225 - RNA, 22 nt, Artificial Sequence
  Synthetic
aucuguuggagaccauugauuu

SEQ ID NO: 685226 - RNA, 23 nt, Artificial Sequence
  Synthetic
gaucuguuggagaccauugauuu

SEQ ID NO: 685227 - RNA, 24 nt, Artificial Sequence
  Synthetic
ugaucuguuggagaccauugauuu

SEQ ID NO: 685228 - RNA, 18 nt, Artificial Sequence
  Synthetic
aaaccuuuagauugauuu

SEQ ID NO: 685229 - RNA, 19 nt, Artificial Sequence
  Synthetic
uaaaccuuuagauugauuu

SEQ ID NO: 685230 - RNA, 20 nt, Artificial Sequence
  Synthetic
uuaaaccuuuagauugauuu

SEQ ID NO: 685231 - RNA, 21 nt, Artificial Sequence
  Synthetic
auuaaaccuuuagauugauuu

SEQ ID NO: 685232 - RNA, 22 nt, Artificial Sequence
  Synthetic
aauuaaaccuuuagauugauuu

SEQ ID NO: 685233 - RNA, 23 nt, Artificial Sequence
  Synthetic
aaauuaaaccuuuagauugauuu

SEQ ID NO: 685234 - RNA, 24 nt, Artificial Sequence
  Synthetic
uaaauuaaaccuuuagauugauuu

SEQ ID NO: 685235 - RNA, 18 nt, Artificial Sequence
  Synthetic
gcaggugccuauugauuu

SEQ ID NO: 685236 - RNA, 19 nt, Artificial Sequence
  Synthetic
agcaggugccuauugauuu

SEQ ID NO: 685237 - RNA, 20 nt, Artificial Sequence
  Synthetic
cagcaggugccuauugauuu

SEQ ID NO: 685238 - RNA, 21 nt, Artificial Sequence
  Synthetic
ucagcaggugccuauugauuu

SEQ ID NO: 685239 - RNA, 22 nt, Artificial Sequence
  Synthetic
aucagcaggugccuauugauuu

SEQ ID NO: 685240 - RNA, 23 nt, Artificial Sequence
  Synthetic
aaucagcaggugccuauugauuu

SEQ ID NO: 685241 - RNA, 24 nt, Artificial Sequence
  Synthetic
aaaucagcaggugccuauugauuu

SEQ ID NO: 685242 - RNA, 18 nt, Artificial Sequence
  Synthetic
acuauauuuccuugauuu

SEQ ID NO: 685243 - RNA, 19 nt, Artificial Sequence
  Synthetic
uacuauauuuccuugauuu

SEQ ID NO: 685244 - RNA, 20 nt, Artificial Sequence
  Synthetic
auacuauauuuccuugauuu

SEQ ID NO: 685245 - RNA, 21 nt, Artificial Sequence
  Synthetic
aauacuauauuuccuugauuu

SEQ ID NO: 685246 - RNA, 22 nt, Artificial Sequence
  Synthetic
aaauacuauauuuccuugauuu

SEQ ID NO: 685247 - RNA, 23 nt, Artificial Sequence
  Synthetic
caaauacuauauuuccuugauuu

SEQ ID NO: 685248 - RNA, 24 nt, Artificial Sequence
  Synthetic
ucaaauacuauauuuccuugauuu

SEQ ID NO: 685249 - RNA, 18 nt, Artificial Sequence
  Synthetic
auuuuauuuccuugauuu

SEQ ID NO: 685250 - RNA, 19 nt, Artificial Sequence
  Synthetic
cauuuuauuuccuugauuu

SEQ ID NO: 685251 - RNA, 20 nt, Artificial Sequence
  Synthetic
ccauuuuauuuccuugauuu

SEQ ID NO: 685252 - RNA, 21 nt, Artificial Sequence
  Synthetic
uccauuuuauuuccuugauuu

SEQ ID NO: 685253 - RNA, 22 nt, Artificial Sequence
  Synthetic
cuccauuuuauuuccuugauuu

SEQ ID NO: 685254 - RNA, 23 nt, Artificial Sequence
  Synthetic
ucuccauuuuauuuccuugauuu

SEQ ID NO: 685255 - RNA, 24 nt, Artificial Sequence
  Synthetic
uucuccauuuuauuuccuugauuu

SEQ ID NO: 685256 - RNA, 18 nt, Artificial Sequence
  Synthetic
aaauagggaauuugauuu

SEQ ID NO: 685257 - RNA, 19 nt, Artificial Sequence
  Synthetic
uaaauagggaauuugauuu

SEQ ID NO: 685258 - RNA, 20 nt, Artificial Sequence
  Synthetic
uuaaauagggaauuugauuu

SEQ ID NO: 685259 - RNA, 21 nt, Artificial Sequence
  Synthetic
auuaaauagggaauuugauuu

SEQ ID NO: 685260 - RNA, 22 nt, Artificial Sequence
  Synthetic
uauuaaauagggaauuugauuu

SEQ ID NO: 685261 - RNA, 23 nt, Artificial Sequence
  Synthetic
uuauuaaauagggaauuugauuu

SEQ ID NO: 685262 - RNA, 24 nt, Artificial Sequence
  Synthetic
uuuauuaaauagggaauuugauuu

SEQ ID NO: 685263 - RNA, 18 nt, Artificial Sequence
  Synthetic
ugaaacuuguuuugauuu

SEQ ID NO: 685264 - RNA, 19 nt, Artificial Sequence
  Synthetic
uugaaacuuguuuugauuu

SEQ ID NO: 685265 - RNA, 20 nt, Artificial Sequence
  Synthetic
auugaaacuuguuuugauuu

SEQ ID NO: 685266 - RNA, 21 nt, Artificial Sequence
  Synthetic
aauugaaacuuguuuugauuu

SEQ ID NO: 685267 - RNA, 22 nt, Artificial Sequence
  Synthetic
uaauugaaacuuguuuugauuu

SEQ ID NO: 685268 - RNA, 23 nt, Artificial Sequence
  Synthetic
uuaauugaaacuuguuuugauuu

SEQ ID NO: 685269 - RNA, 24 nt, Artificial Sequence
  Synthetic
guuaauugaaacuuguuuugauuu

SEQ ID NO: 685270 - RNA, 18 nt, Artificial Sequence
  Synthetic
gcuuugguuaaaauauuu

SEQ ID NO: 685271 - RNA, 19 nt, Artificial Sequence
  Synthetic
ugcuuugguuaaaauauuu

SEQ ID NO: 685272 - RNA, 20 nt, Artificial Sequence
  Synthetic
augcuuugguuaaaauauuu

SEQ ID NO: 685273 - RNA, 21 nt, Artificial Sequence
  Synthetic
caugcuuugguuaaaauauuu

SEQ ID NO: 685274 - RNA, 22 nt, Artificial Sequence
  Synthetic
acaugcuuugguuaaaauauuu

SEQ ID NO: 685275 - RNA, 23 nt, Artificial Sequence
  Synthetic
uacaugcuuugguuaaaauauuu

SEQ ID NO: 685276 - RNA, 24 nt, Artificial Sequence
  Synthetic
auacaugcuuugguuaaaauauuu

SEQ ID NO: 685277 - RNA, 18 nt, Artificial Sequence
  Synthetic
cugaaccaagaaauauuu

SEQ ID NO: 685278 - RNA, 19 nt, Artificial Sequence
  Synthetic
gcugaaccaagaaauauuu

SEQ ID NO: 685279 - RNA, 20 nt, Artificial Sequence
  Synthetic
agcugaaccaagaaauauuu

SEQ ID NO: 685280 - RNA, 21 nt, Artificial Sequence
  Synthetic
aagcugaaccaagaaauauuu

SEQ ID NO: 685281 - RNA, 22 nt, Artificial Sequence
  Synthetic
aaagcugaaccaagaaauauuu

SEQ ID NO: 685282 - RNA, 23 nt, Artificial Sequence
  Synthetic
gaaagcugaaccaagaaauauuu

SEQ ID NO: 685283 - RNA, 24 nt, Artificial Sequence
  Synthetic
ugaaagcugaaccaagaaauauuu

SEQ ID NO: 685284 - RNA, 18 nt, Artificial Sequence
  Synthetic
augcuuugagaaauauuu

SEQ ID NO: 685285 - RNA, 19 nt, Artificial Sequence
  Synthetic
aaugcuuugagaaauauuu

SEQ ID NO: 685286 - RNA, 20 nt, Artificial Sequence
  Synthetic
aaaugcuuugagaaauauuu

SEQ ID NO: 685287 - RNA, 21 nt, Artificial Sequence
  Synthetic
uaaaugcuuugagaaauauuu

SEQ ID NO: 685288 - RNA, 22 nt, Artificial Sequence
  Synthetic
auaaaugcuuugagaaauauuu

SEQ ID NO: 685289 - RNA, 23 nt, Artificial Sequence
  Synthetic
uauaaaugcuuugagaaauauuu

SEQ ID NO: 685290 - RNA, 24 nt, Artificial Sequence
  Synthetic
uuauaaaugcuuugagaaauauuu

SEQ ID NO: 685291 - RNA, 18 nt, Artificial Sequence
  Synthetic
gaugcucaauaaauauuu

SEQ ID NO: 685292 - RNA, 19 nt, Artificial Sequence
  Synthetic
agaugcucaauaaauauuu

SEQ ID NO: 685293 - RNA, 20 nt, Artificial Sequence
  Synthetic
uagaugcucaauaaauauuu

SEQ ID NO: 685294 - RNA, 21 nt, Artificial Sequence
  Synthetic
uuagaugcucaauaaauauuu

SEQ ID NO: 685295 - RNA, 22 nt, Artificial Sequence
  Synthetic
auuagaugcucaauaaauauuu

SEQ ID NO: 685296 - RNA, 23 nt, Artificial Sequence
  Synthetic
uauuagaugcucaauaaauauuu

SEQ ID NO: 685297 - RNA, 24 nt, Artificial Sequence
  Synthetic
auauuagaugcucaauaaauauuu

SEQ ID NO: 685298 - RNA, 18 nt, Artificial Sequence
  Synthetic
uaagaacuuuaaauauuu

SEQ ID NO: 685299 - RNA, 19 nt, Artificial Sequence
  Synthetic
uuaagaacuuuaaauauuu

SEQ ID NO: 685300 - RNA, 20 nt, Artificial Sequence
  Synthetic
uuuaagaacuuuaaauauuu

SEQ ID NO: 685301 - RNA, 21 nt, Artificial Sequence
  Synthetic
uuuuaagaacuuuaaauauuu

SEQ ID NO: 685302 - RNA, 22 nt, Artificial Sequence
  Synthetic
cuuuuaagaacuuuaaauauuu

SEQ ID NO: 685303 - RNA, 23 nt, Artificial Sequence
  Synthetic
acuuuuaagaacuuuaaauauuu

SEQ ID NO: 685304 - RNA, 24 nt, Artificial Sequence
  Synthetic
gacuuuuaagaacuuuaaauauuu

SEQ ID NO: 685305 - RNA, 18 nt, Artificial Sequence
  Synthetic
uauuuauauccaauauuu

SEQ ID NO: 685306 - RNA, 19 nt, Artificial Sequence
  Synthetic
guauuuauauccaauauuu

SEQ ID NO: 685307 - RNA, 20 nt, Artificial Sequence
  Synthetic
uguauuuauauccaauauuu

SEQ ID NO: 685308 - RNA, 21 nt, Artificial Sequence
  Synthetic
uuguauuuauauccaauauuu

SEQ ID NO: 685309 - RNA, 22 nt, Artificial Sequence
  Synthetic
uuuguauuuauauccaauauuu

SEQ ID NO: 685310 - RNA, 23 nt, Artificial Sequence
  Synthetic
uuuuguauuuauauccaauauuu

SEQ ID NO: 685311 - RNA, 24 nt, Artificial Sequence
  Synthetic
auuuuguauuuauauccaauauuu

SEQ ID NO: 685312 - RNA, 18 nt, Artificial Sequence
  Synthetic
acaaugugugcaauauuu

SEQ ID NO: 685313 - RNA, 19 nt, Artificial Sequence
  Synthetic
cacaaugugugcaauauuu

SEQ ID NO: 685314 - RNA, 20 nt, Artificial Sequence
  Synthetic
ccacaaugugugcaauauuu

SEQ ID NO: 685315 - RNA, 21 nt, Artificial Sequence
  Synthetic
cccacaaugugugcaauauuu

SEQ ID NO: 685316 - RNA, 22 nt, Artificial Sequence
  Synthetic
ccccacaaugugugcaauauuu

SEQ ID NO: 685317 - RNA, 23 nt, Artificial Sequence
  Synthetic
uccccacaaugugugcaauauuu

SEQ ID NO: 685318 - RNA, 24 nt, Artificial Sequence
  Synthetic
auccccacaaugugugcaauauuu

SEQ ID NO: 685319 - RNA, 18 nt, Artificial Sequence
  Synthetic
auccucauugcaauauuu

SEQ ID NO: 685320 - RNA, 19 nt, Artificial Sequence
  Synthetic
cauccucauugcaauauuu

SEQ ID NO: 685321 - RNA, 20 nt, Artificial Sequence
  Synthetic
gcauccucauugcaauauuu

SEQ ID NO: 685322 - RNA, 21 nt, Artificial Sequence
  Synthetic
ugcauccucauugcaauauuu

SEQ ID NO: 685323 - RNA, 22 nt, Artificial Sequence
  Synthetic
uugcauccucauugcaauauuu

SEQ ID NO: 685324 - RNA, 23 nt, Artificial Sequence
  Synthetic
cuugcauccucauugcaauauuu

SEQ ID NO: 685325 - RNA, 24 nt, Artificial Sequence
  Synthetic
acuugcauccucauugcaauauuu

SEQ ID NO: 685326 - RNA, 18 nt, Artificial Sequence
  Synthetic
uccugaauaggaauauuu

SEQ ID NO: 685327 - RNA, 19 nt, Artificial Sequence
  Synthetic
uuccugaauaggaauauuu

SEQ ID NO: 685328 - RNA, 20 nt, Artificial Sequence
  Synthetic
uuuccugaauaggaauauuu

SEQ ID NO: 685329 - RNA, 21 nt, Artificial Sequence
  Synthetic
auuuccugaauaggaauauuu

SEQ ID NO: 685330 - RNA, 22 nt, Artificial Sequence
  Synthetic
gauuuccugaauaggaauauuu

SEQ ID NO: 685331 - RNA, 23 nt, Artificial Sequence
  Synthetic
ggauuuccugaauaggaauauuu

SEQ ID NO: 685332 - RNA, 24 nt, Artificial Sequence
  Synthetic
aggauuuccugaauaggaauauuu

SEQ ID NO: 685333 - RNA, 18 nt, Artificial Sequence
  Synthetic
caguagucacuaauauuu

SEQ ID NO: 685334 - RNA, 19 nt, Artificial Sequence
  Synthetic
acaguagucacuaauauuu

SEQ ID NO: 685335 - RNA, 20 nt, Artificial Sequence
  Synthetic
cacaguagucacuaauauuu

SEQ ID NO: 685336 - RNA, 21 nt, Artificial Sequence
  Synthetic
ucacaguagucacuaauauuu

SEQ ID NO: 685337 - RNA, 22 nt, Artificial Sequence
  Synthetic
aucacaguagucacuaauauuu

SEQ ID NO: 685338 - RNA, 23 nt, Artificial Sequence
  Synthetic
caucacaguagucacuaauauuu

SEQ ID NO: 685339 - RNA, 24 nt, Artificial Sequence
  Synthetic
acaucacaguagucacuaauauuu

SEQ ID NO: 685340 - RNA, 18 nt, Artificial Sequence
  Synthetic
ggggguuuauuaauauuu

SEQ ID NO: 685341 - RNA, 19 nt, Artificial Sequence
  Synthetic
uggggguuuauuaauauuu

SEQ ID NO: 685342 - RNA, 20 nt, Artificial Sequence
  Synthetic
uuggggguuuauuaauauuu

SEQ ID NO: 685343 - RNA, 21 nt, Artificial Sequence
  Synthetic
cuuggggguuuauuaauauuu

SEQ ID NO: 685344 - RNA, 22 nt, Artificial Sequence
  Synthetic
gcuuggggguuuauuaauauuu

SEQ ID NO: 685345 - RNA, 23 nt, Artificial Sequence
  Synthetic
ggcuuggggguuuauuaauauuu

SEQ ID NO: 685346 - RNA, 24 nt, Artificial Sequence
  Synthetic
gggcuuggggguuuauuaauauuu

SEQ ID NO: 685347 - RNA, 18 nt, Artificial Sequence
  Synthetic
gagaaccacuuaauauuu

SEQ ID NO: 685348 - RNA, 19 nt, Artificial Sequence
  Synthetic
agagaaccacuuaauauuu

SEQ ID NO: 685349 - RNA, 20 nt, Artificial Sequence
  Synthetic
uagagaaccacuuaauauuu

SEQ ID NO: 685350 - RNA, 21 nt, Artificial Sequence
  Synthetic
uuagagaaccacuuaauauuu

SEQ ID NO: 685351 - RNA, 22 nt, Artificial Sequence
  Synthetic
cuuagagaaccacuuaauauuu

SEQ ID NO: 685352 - RNA, 23 nt, Artificial Sequence
  Synthetic
acuuagagaaccacuuaauauuu

SEQ ID NO: 685353 - RNA, 24 nt, Artificial Sequence
  Synthetic
uacuuagagaaccacuuaauauuu

SEQ ID NO: 685354 - RNA, 18 nt, Artificial Sequence
  Synthetic
cauaauccaaacauauuu

SEQ ID NO: 685355 - RNA, 19 nt, Artificial Sequence
  Synthetic
ucauaauccaaacauauuu

SEQ ID NO: 685356 - RNA, 20 nt, Artificial Sequence
  Synthetic
aucauaauccaaacauauuu

SEQ ID NO: 685357 - RNA, 21 nt, Artificial Sequence
  Synthetic
aaucauaauccaaacauauuu

SEQ ID NO: 685358 - RNA, 22 nt, Artificial Sequence
  Synthetic
caaucauaauccaaacauauuu

SEQ ID NO: 685359 - RNA, 23 nt, Artificial Sequence
  Synthetic
gcaaucauaauccaaacauauuu

SEQ ID NO: 685360 - RNA, 24 nt, Artificial Sequence
  Synthetic
agcaaucauaauccaaacauauuu

SEQ ID NO: 685361 - RNA, 18 nt, Artificial Sequence
  Synthetic
auguauguauacauauuu

SEQ ID NO: 685362 - RNA, 19 nt, Artificial Sequence
  Synthetic
cauguauguauacauauuu

SEQ ID NO: 685363 - RNA, 20 nt, Artificial Sequence
  Synthetic
ucauguauguauacauauuu

SEQ ID NO: 685364 - RNA, 21 nt, Artificial Sequence
  Synthetic
gucauguauguauacauauuu

SEQ ID NO: 685365 - RNA, 22 nt, Artificial Sequence
  Synthetic
ggucauguauguauacauauuu

SEQ ID NO: 685366 - RNA, 23 nt, Artificial Sequence
  Synthetic
aggucauguauguauacauauuu

SEQ ID NO: 685367 - RNA, 24 nt, Artificial Sequence
  Synthetic
aaggucauguauguauacauauuu

SEQ ID NO: 685368 - RNA, 18 nt, Artificial Sequence
  Synthetic
cuuaugagcuacauauuu

SEQ ID NO: 685369 - RNA, 19 nt, Artificial Sequence
  Synthetic
ucuuaugagcuacauauuu

SEQ ID NO: 685370 - RNA, 20 nt, Artificial Sequence
  Synthetic
cucuuaugagcuacauauuu

SEQ ID NO: 685371 - RNA, 21 nt, Artificial Sequence
  Synthetic
ucucuuaugagcuacauauuu

SEQ ID NO: 685372 - RNA, 22 nt, Artificial Sequence
  Synthetic
aucucuuaugagcuacauauuu

SEQ ID NO: 685373 - RNA, 23 nt, Artificial Sequence
  Synthetic
uaucucuuaugagcuacauauuu

SEQ ID NO: 685374 - RNA, 24 nt, Artificial Sequence
  Synthetic
uuaucucuuaugagcuacauauuu

SEQ ID NO: 685375 - RNA, 18 nt, Artificial Sequence
  Synthetic
uacacaauaaccauauuu

SEQ ID NO: 685376 - RNA, 19 nt, Artificial Sequence
  Synthetic
cuacacaauaaccauauuu

SEQ ID NO: 685377 - RNA, 20 nt, Artificial Sequence
  Synthetic
ucuacacaauaaccauauuu

SEQ ID NO: 685378 - RNA, 21 nt, Artificial Sequence
  Synthetic
aucuacacaauaaccauauuu

SEQ ID NO: 685379 - RNA, 22 nt, Artificial Sequence
  Synthetic
caucuacacaauaaccauauuu

SEQ ID NO: 685380 - RNA, 23 nt, Artificial Sequence
  Synthetic
acaucuacacaauaaccauauuu

SEQ ID NO: 685381 - RNA, 24 nt, Artificial Sequence
  Synthetic
gacaucuacacaauaaccauauuu

SEQ ID NO: 685382 - RNA, 18 nt, Artificial Sequence
  Synthetic
cauaucgguagcauauuu

SEQ ID NO: 685383 - RNA, 19 nt, Artificial Sequence
  Synthetic
gcauaucgguagcauauuu

SEQ ID NO: 685384 - RNA, 20 nt, Artificial Sequence
  Synthetic
ugcauaucgguagcauauuu

SEQ ID NO: 685385 - RNA, 21 nt, Artificial Sequence
  Synthetic
uugcauaucgguagcauauuu

SEQ ID NO: 685386 - RNA, 22 nt, Artificial Sequence
  Synthetic
uuugcauaucgguagcauauuu

SEQ ID NO: 685387 - RNA, 23 nt, Artificial Sequence
  Synthetic
auuugcauaucgguagcauauuu

SEQ ID NO: 685388 - RNA, 24 nt, Artificial Sequence
  Synthetic
aauuugcauaucgguagcauauuu

SEQ ID NO: 685389 - RNA, 18 nt, Artificial Sequence
  Synthetic
ccaucacuuagcauauuu

SEQ ID NO: 685390 - RNA, 19 nt, Artificial Sequence
  Synthetic
uccaucacuuagcauauuu

SEQ ID NO: 685391 - RNA, 20 nt, Artificial Sequence
  Synthetic
uuccaucacuuagcauauuu

SEQ ID NO: 685392 - RNA, 21 nt, Artificial Sequence
  Synthetic
auuccaucacuuagcauauuu

SEQ ID NO: 685393 - RNA, 22 nt, Artificial Sequence
  Synthetic
gauuccaucacuuagcauauuu

SEQ ID NO: 685394 - RNA, 23 nt, Artificial Sequence
  Synthetic
ggauuccaucacuuagcauauuu

SEQ ID NO: 685395 - RNA, 24 nt, Artificial Sequence
  Synthetic
uggauuccaucacuuagcauauuu

SEQ ID NO: 685396 - RNA, 18 nt, Artificial Sequence
  Synthetic
uauaauuuucucauauuu

SEQ ID NO: 685397 - RNA, 19 nt, Artificial Sequence
  Synthetic
guauaauuuucucauauuu

SEQ ID NO: 685398 - RNA, 20 nt, Artificial Sequence
  Synthetic
uguauaauuuucucauauuu

SEQ ID NO: 685399 - RNA, 21 nt, Artificial Sequence
  Synthetic
uuguauaauuuucucauauuu

SEQ ID NO: 685400 - RNA, 22 nt, Artificial Sequence
  Synthetic
guuguauaauuuucucauauuu

SEQ ID NO: 685401 - RNA, 23 nt, Artificial Sequence
  Synthetic
uguuguauaauuuucucauauuu

SEQ ID NO: 685402 - RNA, 24 nt, Artificial Sequence
  Synthetic
guguuguauaauuuucucauauuu

SEQ ID NO: 685403 - RNA, 18 nt, Artificial Sequence
  Synthetic
acuauugucgucauauuu

SEQ ID NO: 685404 - RNA, 19 nt, Artificial Sequence
  Synthetic
cacuauugucgucauauuu

SEQ ID NO: 685405 - RNA, 20 nt, Artificial Sequence
  Synthetic
gcacuauugucgucauauuu

SEQ ID NO: 685406 - RNA, 21 nt, Artificial Sequence
  Synthetic
ggcacuauugucgucauauuu

SEQ ID NO: 685407 - RNA, 22 nt, Artificial Sequence
  Synthetic
aggcacuauugucgucauauuu

SEQ ID NO: 685408 - RNA, 23 nt, Artificial Sequence
  Synthetic
uaggcacuauugucgucauauuu

SEQ ID NO: 685409 - RNA, 24 nt, Artificial Sequence
  Synthetic
cuaggcacuauugucgucauauuu

SEQ ID NO: 685410 - RNA, 18 nt, Artificial Sequence
  Synthetic
guaauugaugucauauuu

SEQ ID NO: 685411 - RNA, 19 nt, Artificial Sequence
  Synthetic
aguaauugaugucauauuu

SEQ ID NO: 685412 - RNA, 20 nt, Artificial Sequence
  Synthetic
caguaauugaugucauauuu

SEQ ID NO: 685413 - RNA, 21 nt, Artificial Sequence
  Synthetic
ucaguaauugaugucauauuu

SEQ ID NO: 685414 - RNA, 22 nt, Artificial Sequence
  Synthetic
uucaguaauugaugucauauuu

SEQ ID NO: 685415 - RNA, 23 nt, Artificial Sequence
  Synthetic
uuucaguaauugaugucauauuu

SEQ ID NO: 685416 - RNA, 24 nt, Artificial Sequence
  Synthetic
uuuucaguaauugaugucauauuu

SEQ ID NO: 685417 - RNA, 18 nt, Artificial Sequence
  Synthetic
cuaagcagacagauauuu

SEQ ID NO: 685418 - RNA, 19 nt, Artificial Sequence
  Synthetic
acuaagcagacagauauuu

SEQ ID NO: 685419 - RNA, 20 nt, Artificial Sequence
  Synthetic
uacuaagcagacagauauuu

SEQ ID NO: 685420 - RNA, 21 nt, Artificial Sequence
  Synthetic
cuacuaagcagacagauauuu

SEQ ID NO: 685421 - RNA, 22 nt, Artificial Sequence
  Synthetic
acuacuaagcagacagauauuu

SEQ ID NO: 685422 - RNA, 23 nt, Artificial Sequence
  Synthetic
gacuacuaagcagacagauauuu

SEQ ID NO: 685423 - RNA, 24 nt, Artificial Sequence
  Synthetic
agacuacuaagcagacagauauuu

SEQ ID NO: 685424 - RNA, 18 nt, Artificial Sequence
  Synthetic
uaaugauaucagauauuu

SEQ ID NO: 685425 - RNA, 19 nt, Artificial Sequence
  Synthetic
uuaaugauaucagauauuu

SEQ ID NO: 685426 - RNA, 20 nt, Artificial Sequence
  Synthetic
uuuaaugauaucagauauuu

SEQ ID NO: 685427 - RNA, 21 nt, Artificial Sequence
  Synthetic
uuuuaaugauaucagauauuu

SEQ ID NO: 685428 - RNA, 22 nt, Artificial Sequence
  Synthetic
cuuuuaaugauaucagauauuu

SEQ ID NO: 685429 - RNA, 23 nt, Artificial Sequence
  Synthetic
acuuuuaaugauaucagauauuu

SEQ ID NO: 685430 - RNA, 24 nt, Artificial Sequence
  Synthetic
gacuuuuaaugauaucagauauuu

SEQ ID NO: 685431 - RNA, 18 nt, Artificial Sequence
  Synthetic
agaaaaagggagauauuu

SEQ ID NO: 685432 - RNA, 19 nt, Artificial Sequence
  Synthetic
gagaaaaagggagauauuu

SEQ ID NO: 685433 - RNA, 20 nt, Artificial Sequence
  Synthetic
ugagaaaaagggagauauuu

SEQ ID NO: 685434 - RNA, 21 nt, Artificial Sequence
  Synthetic
augagaaaaagggagauauuu

SEQ ID NO: 685435 - RNA, 22 nt, Artificial Sequence
  Synthetic
gaugagaaaaagggagauauuu

SEQ ID NO: 685436 - RNA, 23 nt, Artificial Sequence
  Synthetic
ggaugagaaaaagggagauauuu

SEQ ID NO: 685437 - RNA, 24 nt, Artificial Sequence
  Synthetic
aggaugagaaaaagggagauauuu

SEQ ID NO: 685438 - RNA, 18 nt, Artificial Sequence
  Synthetic
ucuuuuuacacgauauuu

SEQ ID NO: 685439 - RNA, 19 nt, Artificial Sequence
  Synthetic
uucuuuuuacacgauauuu

SEQ ID NO: 685440 - RNA, 20 nt, Artificial Sequence
  Synthetic
uuucuuuuuacacgauauuu

SEQ ID NO: 685441 - RNA, 21 nt, Artificial Sequence
  Synthetic
cuuucuuuuuacacgauauuu

SEQ ID NO: 685442 - RNA, 22 nt, Artificial Sequence
  Synthetic
ucuuucuuuuuacacgauauuu

SEQ ID NO: 685443 - RNA, 23 nt, Artificial Sequence
  Synthetic
gucuuucuuuuuacacgauauuu

SEQ ID NO: 685444 - RNA, 24 nt, Artificial Sequence
  Synthetic
ugucuuucuuuuuacacgauauuu

SEQ ID NO: 685445 - RNA, 18 nt, Artificial Sequence
  Synthetic
auccaaacaaggauauuu

SEQ ID NO: 685446 - RNA, 19 nt, Artificial Sequence
  Synthetic
uauccaaacaaggauauuu

SEQ ID NO: 685447 - RNA, 20 nt, Artificial Sequence
  Synthetic
uuauccaaacaaggauauuu

SEQ ID NO: 685448 - RNA, 21 nt, Artificial Sequence
  Synthetic
auuauccaaacaaggauauuu

SEQ ID NO: 685449 - RNA, 22 nt, Artificial Sequence
  Synthetic
uauuauccaaacaaggauauuu

SEQ ID NO: 685450 - RNA, 23 nt, Artificial Sequence
  Synthetic
cuauuauccaaacaaggauauuu

SEQ ID NO: 685451 - RNA, 24 nt, Artificial Sequence
  Synthetic
ucuauuauccaaacaaggauauuu

SEQ ID NO: 685452 - RNA, 18 nt, Artificial Sequence
  Synthetic
gagagugcauggauauuu

SEQ ID NO: 685453 - RNA, 19 nt, Artificial Sequence
  Synthetic
agagagugcauggauauuu

SEQ ID NO: 685454 - RNA, 20 nt, Artificial Sequence
  Synthetic
aagagagugcauggauauuu

SEQ ID NO: 685455 - RNA, 21 nt, Artificial Sequence
  Synthetic
aaagagagugcauggauauuu

SEQ ID NO: 685456 - RNA, 22 nt, Artificial Sequence
  Synthetic
gaaagagagugcauggauauuu

SEQ ID NO: 685457 - RNA, 23 nt, Artificial Sequence
  Synthetic
agaaagagagugcauggauauuu

SEQ ID NO: 685458 - RNA, 24 nt, Artificial Sequence
  Synthetic
aagaaagagagugcauggauauuu

SEQ ID NO: 685459 - RNA, 18 nt, Artificial Sequence
  Synthetic
uugucuucaaugauauuu

SEQ ID NO: 685460 - RNA, 19 nt, Artificial Sequence
  Synthetic
cuugucuucaaugauauuu

SEQ ID NO: 685461 - RNA, 20 nt, Artificial Sequence
  Synthetic
ccuugucuucaaugauauuu

SEQ ID NO: 685462 - RNA, 21 nt, Artificial Sequence
  Synthetic
accuugucuucaaugauauuu

SEQ ID NO: 685463 - RNA, 22 nt, Artificial Sequence
  Synthetic
aaccuugucuucaaugauauuu

SEQ ID NO: 685464 - RNA, 23 nt, Artificial Sequence
  Synthetic
caaccuugucuucaaugauauuu

SEQ ID NO: 685465 - RNA, 24 nt, Artificial Sequence
  Synthetic
acaaccuugucuucaaugauauuu

SEQ ID NO: 685466 - RNA, 18 nt, Artificial Sequence
  Synthetic
ucauuuccuaugauauuu

SEQ ID NO: 685467 - RNA, 19 nt, Artificial Sequence
  Synthetic
aucauuuccuaugauauuu

SEQ ID NO: 685468 - RNA, 20 nt, Artificial Sequence
  Synthetic
uaucauuuccuaugauauuu

SEQ ID NO: 685469 - RNA, 21 nt, Artificial Sequence
  Synthetic
cuaucauuuccuaugauauuu

SEQ ID NO: 685470 - RNA, 22 nt, Artificial Sequence
  Synthetic
acuaucauuuccuaugauauuu

SEQ ID NO: 685471 - RNA, 23 nt, Artificial Sequence
  Synthetic
cacuaucauuuccuaugauauuu

SEQ ID NO: 685472 - RNA, 24 nt, Artificial Sequence
  Synthetic
ccacuaucauuuccuaugauauuu

SEQ ID NO: 685473 - RNA, 18 nt, Artificial Sequence
  Synthetic
cacuguaguaugauauuu

SEQ ID NO: 685474 - RNA, 19 nt, Artificial Sequence
  Synthetic
gcacuguaguaugauauuu

SEQ ID NO: 685475 - RNA, 20 nt, Artificial Sequence
  Synthetic
ggcacuguaguaugauauuu

SEQ ID NO: 685476 - RNA, 21 nt, Artificial Sequence
  Synthetic
aggcacuguaguaugauauuu

SEQ ID NO: 685477 - RNA, 22 nt, Artificial Sequence
  Synthetic
aaggcacuguaguaugauauuu

SEQ ID NO: 685478 - RNA, 23 nt, Artificial Sequence
  Synthetic
caaggcacuguaguaugauauuu

SEQ ID NO: 685479 - RNA, 24 nt, Artificial Sequence
  Synthetic
ucaaggcacuguaguaugauauuu

SEQ ID NO: 685480 - RNA, 18 nt, Artificial Sequence
  Synthetic
ugaaaaguucugauauuu

SEQ ID NO: 685481 - RNA, 19 nt, Artificial Sequence
  Synthetic
augaaaaguucugauauuu

SEQ ID NO: 685482 - RNA, 20 nt, Artificial Sequence
  Synthetic
aaugaaaaguucugauauuu

SEQ ID NO: 685483 - RNA, 21 nt, Artificial Sequence
  Synthetic
uaaugaaaaguucugauauuu

SEQ ID NO: 685484 - RNA, 22 nt, Artificial Sequence
  Synthetic
cuaaugaaaaguucugauauuu

SEQ ID NO: 685485 - RNA, 23 nt, Artificial Sequence
  Synthetic
ccuaaugaaaaguucugauauuu

SEQ ID NO: 685486 - RNA, 24 nt, Artificial Sequence
  Synthetic
uccuaaugaaaaguucugauauuu

SEQ ID NO: 685487 - RNA, 18 nt, Artificial Sequence
  Synthetic
uucaauuuguugauauuu

SEQ ID NO: 685488 - RNA, 19 nt, Artificial Sequence
  Synthetic
uuucaauuuguugauauuu

SEQ ID NO: 685489 - RNA, 20 nt, Artificial Sequence
  Synthetic
guuucaauuuguugauauuu

SEQ ID NO: 685490 - RNA, 21 nt, Artificial Sequence
  Synthetic
uguuucaauuuguugauauuu

SEQ ID NO: 685491 - RNA, 22 nt, Artificial Sequence
  Synthetic
auguuucaauuuguugauauuu

SEQ ID NO: 685492 - RNA, 23 nt, Artificial Sequence
  Synthetic
aauguuucaauuuguugauauuu

SEQ ID NO: 685493 - RNA, 24 nt, Artificial Sequence
  Synthetic
uaauguuucaauuuguugauauuu

SEQ ID NO: 685494 - RNA, 18 nt, Artificial Sequence
  Synthetic
uaguaggugcauauauuu

SEQ ID NO: 685495 - RNA, 19 nt, Artificial Sequence
  Synthetic
auaguaggugcauauauuu

SEQ ID NO: 685496 - RNA, 20 nt, Artificial Sequence
  Synthetic
cauaguaggugcauauauuu

SEQ ID NO: 685497 - RNA, 21 nt, Artificial Sequence
  Synthetic
acauaguaggugcauauauuu

SEQ ID NO: 685498 - RNA, 22 nt, Artificial Sequence
  Synthetic
uacauaguaggugcauauauuu

SEQ ID NO: 685499 - RNA, 23 nt, Artificial Sequence
  Synthetic
guacauaguaggugcauauauuu

SEQ ID NO: 685500 - RNA, 24 nt, Artificial Sequence
  Synthetic
gguacauaguaggugcauauauuu

SEQ ID NO: 685501 - RNA, 18 nt, Artificial Sequence
  Synthetic
uuguugucucauauauuu

SEQ ID NO: 685502 - RNA, 19 nt, Artificial Sequence
  Synthetic
uuuguugucucauauauuu

SEQ ID NO: 685503 - RNA, 20 nt, Artificial Sequence
  Synthetic
uuuuguugucucauauauuu

SEQ ID NO: 685504 - RNA, 21 nt, Artificial Sequence
  Synthetic
auuuuguugucucauauauuu

SEQ ID NO: 685505 - RNA, 22 nt, Artificial Sequence
  Synthetic
uauuuuguugucucauauauuu

SEQ ID NO: 685506 - RNA, 23 nt, Artificial Sequence
  Synthetic
auauuuuguugucucauauauuu

SEQ ID NO: 685507 - RNA, 24 nt, Artificial Sequence
  Synthetic
uauauuuuguugucucauauauuu

SEQ ID NO: 685508 - RNA, 18 nt, Artificial Sequence
  Synthetic
auuuuauuguauauauuu

SEQ ID NO: 685509 - RNA, 19 nt, Artificial Sequence
  Synthetic
aauuuuauuguauauauuu

SEQ ID NO: 685510 - RNA, 20 nt, Artificial Sequence
  Synthetic
aaauuuuauuguauauauuu

SEQ ID NO: 685511 - RNA, 21 nt, Artificial Sequence
  Synthetic
uaaauuuuauuguauauauuu

SEQ ID NO: 685512 - RNA, 22 nt, Artificial Sequence
  Synthetic
auaaauuuuauuguauauauuu

SEQ ID NO: 685513 - RNA, 23 nt, Artificial Sequence
  Synthetic
aauaaauuuuauuguauauauuu

SEQ ID NO: 685514 - RNA, 24 nt, Artificial Sequence
  Synthetic
aaauaaauuuuauuguauauauuu

SEQ ID NO: 685515 - RNA, 18 nt, Artificial Sequence
  Synthetic
uuuauuuuaccuauauuu

SEQ ID NO: 685516 - RNA, 19 nt, Artificial Sequence
  Synthetic
auuuauuuuaccuauauuu

SEQ ID NO: 685517 - RNA, 20 nt, Artificial Sequence
  Synthetic
uauuuauuuuaccuauauuu

SEQ ID NO: 685518 - RNA, 21 nt, Artificial Sequence
  Synthetic
auauuuauuuuaccuauauuu

SEQ ID NO: 685519 - RNA, 22 nt, Artificial Sequence
  Synthetic
uauauuuauuuuaccuauauuu

SEQ ID NO: 685520 - RNA, 23 nt, Artificial Sequence
  Synthetic
auauauuuauuuuaccuauauuu

SEQ ID NO: 685521 - RNA, 24 nt, Artificial Sequence
  Synthetic
aauauauuuauuuuaccuauauuu

SEQ ID NO: 685522 - RNA, 18 nt, Artificial Sequence
  Synthetic
uacuucucuccuauauuu

SEQ ID NO: 685523 - RNA, 19 nt, Artificial Sequence
  Synthetic
uuacuucucuccuauauuu

SEQ ID NO: 685524 - RNA, 20 nt, Artificial Sequence
  Synthetic
auuacuucucuccuauauuu

SEQ ID NO: 685525 - RNA, 21 nt, Artificial Sequence
  Synthetic
aauuacuucucuccuauauuu

SEQ ID NO: 685526 - RNA, 22 nt, Artificial Sequence
  Synthetic
aaauuacuucucuccuauauuu

SEQ ID NO: 685527 - RNA, 23 nt, Artificial Sequence
  Synthetic
uaaauuacuucucuccuauauuu

SEQ ID NO: 685528 - RNA, 24 nt, Artificial Sequence
  Synthetic
guaaauuacuucucuccuauauuu

SEQ ID NO: 685529 - RNA, 18 nt, Artificial Sequence
  Synthetic
uaaagcuucucuauauuu

SEQ ID NO: 685530 - RNA, 19 nt, Artificial Sequence
  Synthetic
uuaaagcuucucuauauuu

SEQ ID NO: 685531 - RNA, 20 nt, Artificial Sequence
  Synthetic
cuuaaagcuucucuauauuu

SEQ ID NO: 685532 - RNA, 21 nt, Artificial Sequence
  Synthetic
ucuuaaagcuucucuauauuu

SEQ ID NO: 685533 - RNA, 22 nt, Artificial Sequence
  Synthetic
gucuuaaagcuucucuauauuu

SEQ ID NO: 685534 - RNA, 23 nt, Artificial Sequence
  Synthetic
agucuuaaagcuucucuauauuu

SEQ ID NO: 685535 - RNA, 24 nt, Artificial Sequence
  Synthetic
uagucuuaaagcuucucuauauuu

SEQ ID NO: 685536 - RNA, 18 nt, Artificial Sequence
  Synthetic
acuugguagaguauauuu

SEQ ID NO: 685537 - RNA, 19 nt, Artificial Sequence
  Synthetic
cacuugguagaguauauuu

SEQ ID NO: 685538 - RNA, 20 nt, Artificial Sequence
  Synthetic
ucacuugguagaguauauuu

SEQ ID NO: 685539 - RNA, 21 nt, Artificial Sequence
  Synthetic
uucacuugguagaguauauuu

SEQ ID NO: 685540 - RNA, 22 nt, Artificial Sequence
  Synthetic
cuucacuugguagaguauauuu

SEQ ID NO: 685541 - RNA, 23 nt, Artificial Sequence
  Synthetic
ucuucacuugguagaguauauuu

SEQ ID NO: 685542 - RNA, 24 nt, Artificial Sequence
  Synthetic
uucuucacuugguagaguauauuu

SEQ ID NO: 685543 - RNA, 18 nt, Artificial Sequence
  Synthetic
ccaagagcauguauauuu

SEQ ID NO: 685544 - RNA, 19 nt, Artificial Sequence
  Synthetic
uccaagagcauguauauuu

SEQ ID NO: 685545 - RNA, 20 nt, Artificial Sequence
  Synthetic
uuccaagagcauguauauuu

SEQ ID NO: 685546 - RNA, 21 nt, Artificial Sequence
  Synthetic
cuuccaagagcauguauauuu

SEQ ID NO: 685547 - RNA, 22 nt, Artificial Sequence
  Synthetic
ccuuccaagagcauguauauuu

SEQ ID NO: 685548 - RNA, 23 nt, Artificial Sequence
  Synthetic
gccuuccaagagcauguauauuu

SEQ ID NO: 685549 - RNA, 24 nt, Artificial Sequence
  Synthetic
agccuuccaagagcauguauauuu

SEQ ID NO: 685550 - RNA, 18 nt, Artificial Sequence
  Synthetic
aacacaguaauuauauuu

SEQ ID NO: 685551 - RNA, 19 nt, Artificial Sequence
  Synthetic
uaacacaguaauuauauuu

SEQ ID NO: 685552 - RNA, 20 nt, Artificial Sequence
  Synthetic
uuaacacaguaauuauauuu

SEQ ID NO: 685553 - RNA, 21 nt, Artificial Sequence
  Synthetic
uuuaacacaguaauuauauuu

SEQ ID NO: 685554 - RNA, 22 nt, Artificial Sequence
  Synthetic
guuuaacacaguaauuauauuu

SEQ ID NO: 685555 - RNA, 23 nt, Artificial Sequence
  Synthetic
gguuuaacacaguaauuauauuu

SEQ ID NO: 685556 - RNA, 24 nt, Artificial Sequence
  Synthetic
cgguuuaacacaguaauuauauuu

SEQ ID NO: 685557 - RNA, 18 nt, Artificial Sequence
  Synthetic
agcccagacauuauauuu

SEQ ID NO: 685558 - RNA, 19 nt, Artificial Sequence
  Synthetic
gagcccagacauuauauuu

SEQ ID NO: 685559 - RNA, 20 nt, Artificial Sequence
  Synthetic
agagcccagacauuauauuu

SEQ ID NO: 685560 - RNA, 21 nt, Artificial Sequence
  Synthetic
aagagcccagacauuauauuu

SEQ ID NO: 685561 - RNA, 22 nt, Artificial Sequence
  Synthetic
aaagagcccagacauuauauuu

SEQ ID NO: 685562 - RNA, 23 nt, Artificial Sequence
  Synthetic
aaaagagcccagacauuauauuu

SEQ ID NO: 685563 - RNA, 24 nt, Artificial Sequence
  Synthetic
caaaagagcccagacauuauauuu

SEQ ID NO: 685564 - RNA, 18 nt, Artificial Sequence
  Synthetic
auauuacaugaacuauuu

SEQ ID NO: 685565 - RNA, 19 nt, Artificial Sequence
  Synthetic
aauauuacaugaacuauuu

SEQ ID NO: 685566 - RNA, 20 nt, Artificial Sequence
  Synthetic
aaauauuacaugaacuauuu

SEQ ID NO: 685567 - RNA, 21 nt, Artificial Sequence
  Synthetic
caaauauuacaugaacuauuu

SEQ ID NO: 685568 - RNA, 22 nt, Artificial Sequence
  Synthetic
ucaaauauuacaugaacuauuu

SEQ ID NO: 685569 - RNA, 23 nt, Artificial Sequence
  Synthetic
uucaaauauuacaugaacuauuu

SEQ ID NO: 685570 - RNA, 24 nt, Artificial Sequence
  Synthetic
uuucaaauauuacaugaacuauuu

SEQ ID NO: 685571 - RNA, 18 nt, Artificial Sequence
  Synthetic
agagcuuaauaacuauuu

SEQ ID NO: 685572 - RNA, 19 nt, Artificial Sequence
  Synthetic
aagagcuuaauaacuauuu

SEQ ID NO: 685573 - RNA, 20 nt, Artificial Sequence
  Synthetic
uaagagcuuaauaacuauuu

SEQ ID NO: 685574 - RNA, 21 nt, Artificial Sequence
  Synthetic
cuaagagcuuaauaacuauuu

SEQ ID NO: 685575 - RNA, 22 nt, Artificial Sequence
  Synthetic
acuaagagcuuaauaacuauuu

SEQ ID NO: 685576 - RNA, 23 nt, Artificial Sequence
  Synthetic
uacuaagagcuuaauaacuauuu

SEQ ID NO: 685577 - RNA, 24 nt, Artificial Sequence
  Synthetic
auacuaagagcuuaauaacuauuu

SEQ ID NO: 685578 - RNA, 18 nt, Artificial Sequence
  Synthetic
agugaaauguaacuauuu

SEQ ID NO: 685579 - RNA, 19 nt, Artificial Sequence
  Synthetic
uagugaaauguaacuauuu

SEQ ID NO: 685580 - RNA, 20 nt, Artificial Sequence
  Synthetic
auagugaaauguaacuauuu

SEQ ID NO: 685581 - RNA, 21 nt, Artificial Sequence
  Synthetic
aauagugaaauguaacuauuu

SEQ ID NO: 685582 - RNA, 22 nt, Artificial Sequence
  Synthetic
gaauagugaaauguaacuauuu

SEQ ID NO: 685583 - RNA, 23 nt, Artificial Sequence
  Synthetic
ugaauagugaaauguaacuauuu

SEQ ID NO: 685584 - RNA, 24 nt, Artificial Sequence
  Synthetic
augaauagugaaauguaacuauuu

SEQ ID NO: 685585 - RNA, 18 nt, Artificial Sequence
  Synthetic
uuggccucuggacuauuu

SEQ ID NO: 685586 - RNA, 19 nt, Artificial Sequence
  Synthetic
uuuggccucuggacuauuu

SEQ ID NO: 685587 - RNA, 20 nt, Artificial Sequence
  Synthetic
uuuuggccucuggacuauuu

SEQ ID NO: 685588 - RNA, 21 nt, Artificial Sequence
  Synthetic
guuuuggccucuggacuauuu

SEQ ID NO: 685589 - RNA, 22 nt, Artificial Sequence
  Synthetic
uguuuuggccucuggacuauuu

SEQ ID NO: 685590 - RNA, 23 nt, Artificial Sequence
  Synthetic
uuguuuuggccucuggacuauuu

SEQ ID NO: 685591 - RNA, 24 nt, Artificial Sequence
  Synthetic
auuguuuuggccucuggacuauuu

SEQ ID NO: 685592 - RNA, 18 nt, Artificial Sequence
  Synthetic
auacagggcauacuauuu

SEQ ID NO: 685593 - RNA, 19 nt, Artificial Sequence
  Synthetic
uauacagggcauacuauuu

SEQ ID NO: 685594 - RNA, 20 nt, Artificial Sequence
  Synthetic
cuauacagggcauacuauuu

SEQ ID NO: 685595 - RNA, 21 nt, Artificial Sequence
  Synthetic
ucuauacagggcauacuauuu

SEQ ID NO: 685596 - RNA, 22 nt, Artificial Sequence
  Synthetic
cucuauacagggcauacuauuu

SEQ ID NO: 685597 - RNA, 23 nt, Artificial Sequence
  Synthetic
acucuauacagggcauacuauuu

SEQ ID NO: 685598 - RNA, 24 nt, Artificial Sequence
  Synthetic
cacucuauacagggcauacuauuu

SEQ ID NO: 685599 - RNA, 18 nt, Artificial Sequence
  Synthetic
uauauuauuuuacuauuu

SEQ ID NO: 685600 - RNA, 19 nt, Artificial Sequence
  Synthetic
auauauuauuuuacuauuu

SEQ ID NO: 685601 - RNA, 20 nt, Artificial Sequence
  Synthetic
aauauauuauuuuacuauuu

SEQ ID NO: 685602 - RNA, 21 nt, Artificial Sequence
  Synthetic
gaauauauuauuuuacuauuu

SEQ ID NO: 685603 - RNA, 22 nt, Artificial Sequence
  Synthetic
agaauauauuauuuuacuauuu

SEQ ID NO: 685604 - RNA, 23 nt, Artificial Sequence
  Synthetic
aagaauauauuauuuuacuauuu

SEQ ID NO: 685605 - RNA, 24 nt, Artificial Sequence
  Synthetic
aaagaauauauuauuuuacuauuu

SEQ ID NO: 685606 - RNA, 18 nt, Artificial Sequence
  Synthetic
cugaaugucagccuauuu

SEQ ID NO: 685607 - RNA, 19 nt, Artificial Sequence
  Synthetic
gcugaaugucagccuauuu

SEQ ID NO: 685608 - RNA, 20 nt, Artificial Sequence
  Synthetic
agcugaaugucagccuauuu

SEQ ID NO: 685609 - RNA, 21 nt, Artificial Sequence
  Synthetic
aagcugaaugucagccuauuu

SEQ ID NO: 685610 - RNA, 22 nt, Artificial Sequence
  Synthetic
gaagcugaaugucagccuauuu

SEQ ID NO: 685611 - RNA, 23 nt, Artificial Sequence
  Synthetic
agaagcugaaugucagccuauuu

SEQ ID NO: 685612 - RNA, 24 nt, Artificial Sequence
  Synthetic
uagaagcugaaugucagccuauuu

SEQ ID NO: 685613 - RNA, 18 nt, Artificial Sequence
  Synthetic
uuuauucuacagcuauuu

SEQ ID NO: 685614 - RNA, 19 nt, Artificial Sequence
  Synthetic
guuuauucuacagcuauuu

SEQ ID NO: 685615 - RNA, 20 nt, Artificial Sequence
  Synthetic
aguuuauucuacagcuauuu

SEQ ID NO: 685616 - RNA, 21 nt, Artificial Sequence
  Synthetic
aaguuuauucuacagcuauuu

SEQ ID NO: 685617 - RNA, 22 nt, Artificial Sequence
  Synthetic
aaaguuuauucuacagcuauuu

SEQ ID NO: 685618 - RNA, 23 nt, Artificial Sequence
  Synthetic
gaaaguuuauucuacagcuauuu

SEQ ID NO: 685619 - RNA, 24 nt, Artificial Sequence
  Synthetic
ugaaaguuuauucuacagcuauuu

SEQ ID NO: 685620 - RNA, 18 nt, Artificial Sequence
  Synthetic
cuguagucccagcuauuu

SEQ ID NO: 685621 - RNA, 19 nt, Artificial Sequence
  Synthetic
ccuguagucccagcuauuu

SEQ ID NO: 685622 - RNA, 20 nt, Artificial Sequence
  Synthetic
gccuguagucccagcuauuu

SEQ ID NO: 685623 - RNA, 21 nt, Artificial Sequence
  Synthetic
cgccuguagucccagcuauuu

SEQ ID NO: 685624 - RNA, 22 nt, Artificial Sequence
  Synthetic
gcgccuguagucccagcuauuu

SEQ ID NO: 685625 - RNA, 23 nt, Artificial Sequence
  Synthetic
ggcgccuguagucccagcuauuu

SEQ ID NO: 685626 - RNA, 24 nt, Artificial Sequence
  Synthetic
gggcgccuguagucccagcuauuu

SEQ ID NO: 685627 - RNA, 18 nt, Artificial Sequence
  Synthetic
uaggaccauaggcuauuu

SEQ ID NO: 685628 - RNA, 19 nt, Artificial Sequence
  Synthetic
auaggaccauaggcuauuu

SEQ ID NO: 685629 - RNA, 20 nt, Artificial Sequence
  Synthetic
aauaggaccauaggcuauuu

SEQ ID NO: 685630 - RNA, 21 nt, Artificial Sequence
  Synthetic
aaauaggaccauaggcuauuu

SEQ ID NO: 685631 - RNA, 22 nt, Artificial Sequence
  Synthetic
uaaauaggaccauaggcuauuu

SEQ ID NO: 685632 - RNA, 23 nt, Artificial Sequence
  Synthetic
auaaauaggaccauaggcuauuu

SEQ ID NO: 685633 - RNA, 24 nt, Artificial Sequence
  Synthetic
aauaaauaggaccauaggcuauuu

SEQ ID NO: 685634 - RNA, 18 nt, Artificial Sequence
  Synthetic
auguucaggaaucuauuu

SEQ ID NO: 685635 - RNA, 19 nt, Artificial Sequence
  Synthetic
gauguucaggaaucuauuu

SEQ ID NO: 685636 - RNA, 20 nt, Artificial Sequence
  Synthetic
ggauguucaggaaucuauuu

SEQ ID NO: 685637 - RNA, 21 nt, Artificial Sequence
  Synthetic
gggauguucaggaaucuauuu

SEQ ID NO: 685638 - RNA, 22 nt, Artificial Sequence
  Synthetic
ugggauguucaggaaucuauuu

SEQ ID NO: 685639 - RNA, 23 nt, Artificial Sequence
  Synthetic
uugggauguucaggaaucuauuu

SEQ ID NO: 685640 - RNA, 24 nt, Artificial Sequence
  Synthetic
uuugggauguucaggaaucuauuu

SEQ ID NO: 685641 - RNA, 18 nt, Artificial Sequence
  Synthetic
acaaaaucaccucuauuu

SEQ ID NO: 685642 - RNA, 19 nt, Artificial Sequence
  Synthetic
gacaaaaucaccucuauuu

SEQ ID NO: 685643 - RNA, 20 nt, Artificial Sequence
  Synthetic
ggacaaaaucaccucuauuu

SEQ ID NO: 685644 - RNA, 21 nt, Artificial Sequence
  Synthetic
aggacaaaaucaccucuauuu

SEQ ID NO: 685645 - RNA, 22 nt, Artificial Sequence
  Synthetic
caggacaaaaucaccucuauuu

SEQ ID NO: 685646 - RNA, 23 nt, Artificial Sequence
  Synthetic
gcaggacaaaaucaccucuauuu

SEQ ID NO: 685647 - RNA, 24 nt, Artificial Sequence
  Synthetic
ugcaggacaaaaucaccucuauuu

SEQ ID NO: 685648 - RNA, 18 nt, Artificial Sequence
  Synthetic
agggaaacuauucuauuu

SEQ ID NO: 685649 - RNA, 19 nt, Artificial Sequence
  Synthetic
cagggaaacuauucuauuu

SEQ ID NO: 685650 - RNA, 20 nt, Artificial Sequence
  Synthetic
acagggaaacuauucuauuu

SEQ ID NO: 685651 - RNA, 21 nt, Artificial Sequence
  Synthetic
uacagggaaacuauucuauuu

SEQ ID NO: 685652 - RNA, 22 nt, Artificial Sequence
  Synthetic
auacagggaaacuauucuauuu

SEQ ID NO: 685653 - RNA, 23 nt, Artificial Sequence
  Synthetic
gauacagggaaacuauucuauuu

SEQ ID NO: 685654 - RNA, 24 nt, Artificial Sequence
  Synthetic
agauacagggaaacuauucuauuu

SEQ ID NO: 685655 - RNA, 18 nt, Artificial Sequence
  Synthetic
aaauaauaucuucuauuu

SEQ ID NO: 685656 - RNA, 19 nt, Artificial Sequence
  Synthetic
aaaauaauaucuucuauuu

SEQ ID NO: 685657 - RNA, 20 nt, Artificial Sequence
  Synthetic
aaaaauaauaucuucuauuu

SEQ ID NO: 685658 - RNA, 21 nt, Artificial Sequence
  Synthetic
caaaaauaauaucuucuauuu

SEQ ID NO: 685659 - RNA, 22 nt, Artificial Sequence
  Synthetic
ucaaaaauaauaucuucuauuu

SEQ ID NO: 685660 - RNA, 23 nt, Artificial Sequence
  Synthetic
uucaaaaauaauaucuucuauuu

SEQ ID NO: 685661 - RNA, 24 nt, Artificial Sequence
  Synthetic
uuucaaaaauaauaucuucuauuu

SEQ ID NO: 685662 - RNA, 18 nt, Artificial Sequence
  Synthetic
ucaauaaaguuucuauuu

SEQ ID NO: 685663 - RNA, 19 nt, Artificial Sequence
  Synthetic
aucaauaaaguuucuauuu

SEQ ID NO: 685664 - RNA, 20 nt, Artificial Sequence
  Synthetic
uaucaauaaaguuucuauuu

SEQ ID NO: 685665 - RNA, 21 nt, Artificial Sequence
  Synthetic
uuaucaauaaaguuucuauuu

SEQ ID NO: 685666 - RNA, 22 nt, Artificial Sequence
  Synthetic
uuuaucaauaaaguuucuauuu

SEQ ID NO: 685667 - RNA, 23 nt, Artificial Sequence
  Synthetic
cuuuaucaauaaaguuucuauuu

SEQ ID NO: 685668 - RNA, 24 nt, Artificial Sequence
  Synthetic
acuuuaucaauaaaguuucuauuu

SEQ ID NO: 685669 - RNA, 18 nt, Artificial Sequence
  Synthetic
uacauaugccaaguauuu

SEQ ID NO: 685670 - RNA, 19 nt, Artificial Sequence
  Synthetic
auacauaugccaaguauuu

SEQ ID NO: 685671 - RNA, 20 nt, Artificial Sequence
  Synthetic
uauacauaugccaaguauuu

SEQ ID NO: 685672 - RNA, 21 nt, Artificial Sequence
  Synthetic
guauacauaugccaaguauuu

SEQ ID NO: 685673 - RNA, 22 nt, Artificial Sequence
  Synthetic
uguauacauaugccaaguauuu

SEQ ID NO: 685674 - RNA, 23 nt, Artificial Sequence
  Synthetic
cuguauacauaugccaaguauuu

SEQ ID NO: 685675 - RNA, 24 nt, Artificial Sequence
  Synthetic
acuguauacauaugccaaguauuu

SEQ ID NO: 685676 - RNA, 18 nt, Artificial Sequence
  Synthetic
cuauuuacugaaguauuu

SEQ ID NO: 685677 - RNA, 19 nt, Artificial Sequence
  Synthetic
ccuauuuacugaaguauuu

SEQ ID NO: 685678 - RNA, 20 nt, Artificial Sequence
  Synthetic
gccuauuuacugaaguauuu

SEQ ID NO: 685679 - RNA, 21 nt, Artificial Sequence
  Synthetic
ugccuauuuacugaaguauuu

SEQ ID NO: 685680 - RNA, 22 nt, Artificial Sequence
  Synthetic
augccuauuuacugaaguauuu

SEQ ID NO: 685681 - RNA, 23 nt, Artificial Sequence
  Synthetic
uaugccuauuuacugaaguauuu

SEQ ID NO: 685682 - RNA, 24 nt, Artificial Sequence
  Synthetic
uuaugccuauuuacugaaguauuu

SEQ ID NO: 685683 - RNA, 18 nt, Artificial Sequence
  Synthetic
uugggcacaacaguauuu

SEQ ID NO: 685684 - RNA, 19 nt, Artificial Sequence
  Synthetic
cuugggcacaacaguauuu

SEQ ID NO: 685685 - RNA, 20 nt, Artificial Sequence
  Synthetic
acuugggcacaacaguauuu

SEQ ID NO: 685686 - RNA, 21 nt, Artificial Sequence
  Synthetic
aacuugggcacaacaguauuu

SEQ ID NO: 685687 - RNA, 22 nt, Artificial Sequence
  Synthetic
aaacuugggcacaacaguauuu

SEQ ID NO: 685688 - RNA, 23 nt, Artificial Sequence
  Synthetic
gaaacuugggcacaacaguauuu

SEQ ID NO: 685689 - RNA, 24 nt, Artificial Sequence
  Synthetic
agaaacuugggcacaacaguauuu

SEQ ID NO: 685690 - RNA, 18 nt, Artificial Sequence
  Synthetic
ccaacuuaaucaguauuu

SEQ ID NO: 685691 - RNA, 19 nt, Artificial Sequence
  Synthetic
accaacuuaaucaguauuu

SEQ ID NO: 685692 - RNA, 20 nt, Artificial Sequence
  Synthetic
gaccaacuuaaucaguauuu

SEQ ID NO: 685693 - RNA, 21 nt, Artificial Sequence
  Synthetic
agaccaacuuaaucaguauuu

SEQ ID NO: 685694 - RNA, 22 nt, Artificial Sequence
  Synthetic
cagaccaacuuaaucaguauuu

SEQ ID NO: 685695 - RNA, 23 nt, Artificial Sequence
  Synthetic
ccagaccaacuuaaucaguauuu

SEQ ID NO: 685696 - RNA, 24 nt, Artificial Sequence
  Synthetic
uccagaccaacuuaaucaguauuu

SEQ ID NO: 685697 - RNA, 18 nt, Artificial Sequence
  Synthetic
aaggcuaaaagaguauuu

SEQ ID NO: 685698 - RNA, 19 nt, Artificial Sequence
  Synthetic
aaaggcuaaaagaguauuu

SEQ ID NO: 685699 - RNA, 20 nt, Artificial Sequence
  Synthetic
aaaaggcuaaaagaguauuu

SEQ ID NO: 685700 - RNA, 21 nt, Artificial Sequence
  Synthetic
aaaaaggcuaaaagaguauuu

SEQ ID NO: 685701 - RNA, 22 nt, Artificial Sequence
  Synthetic
gaaaaaggcuaaaagaguauuu

SEQ ID NO: 685702 - RNA, 23 nt, Artificial Sequence
  Synthetic
agaaaaaggcuaaaagaguauuu

SEQ ID NO: 685703 - RNA, 24 nt, Artificial Sequence
  Synthetic
aagaaaaaggcuaaaagaguauuu

SEQ ID NO: 685704 - RNA, 18 nt, Artificial Sequence
  Synthetic
uugagcuuaaccguauuu

SEQ ID NO: 685705 - RNA, 19 nt, Artificial Sequence
  Synthetic
guugagcuuaaccguauuu

SEQ ID NO: 685706 - RNA, 20 nt, Artificial Sequence
  Synthetic
uguugagcuuaaccguauuu

SEQ ID NO: 685707 - RNA, 21 nt, Artificial Sequence
  Synthetic
uuguugagcuuaaccguauuu

SEQ ID NO: 685708 - RNA, 22 nt, Artificial Sequence
  Synthetic
uuuguugagcuuaaccguauuu

SEQ ID NO: 685709 - RNA, 23 nt, Artificial Sequence
  Synthetic
guuuguugagcuuaaccguauuu

SEQ ID NO: 685710 - RNA, 24 nt, Artificial Sequence
  Synthetic
gguuuguugagcuuaaccguauuu

SEQ ID NO: 685711 - RNA, 18 nt, Artificial Sequence
  Synthetic
acaaucucagagguauuu

SEQ ID NO: 685712 - RNA, 19 nt, Artificial Sequence
  Synthetic
cacaaucucagagguauuu

SEQ ID NO: 685713 - RNA, 20 nt, Artificial Sequence
  Synthetic
ccacaaucucagagguauuu

SEQ ID NO: 685714 - RNA, 21 nt, Artificial Sequence
  Synthetic
accacaaucucagagguauuu

SEQ ID NO: 685715 - RNA, 22 nt, Artificial Sequence
  Synthetic
gaccacaaucucagagguauuu

SEQ ID NO: 685716 - RNA, 23 nt, Artificial Sequence
  Synthetic
ggaccacaaucucagagguauuu

SEQ ID NO: 685717 - RNA, 24 nt, Artificial Sequence
  Synthetic
aggaccacaaucucagagguauuu

SEQ ID NO: 685718 - RNA, 18 nt, Artificial Sequence
  Synthetic
aggaaaccaaggguauuu

SEQ ID NO: 685719 - RNA, 19 nt, Artificial Sequence
  Synthetic
caggaaaccaaggguauuu

SEQ ID NO: 685720 - RNA, 20 nt, Artificial Sequence
  Synthetic
ccaggaaaccaaggguauuu

SEQ ID NO: 685721 - RNA, 21 nt, Artificial Sequence
  Synthetic
cccaggaaaccaaggguauuu

SEQ ID NO: 685722 - RNA, 22 nt, Artificial Sequence
  Synthetic
acccaggaaaccaaggguauuu

SEQ ID NO: 685723 - RNA, 23 nt, Artificial Sequence
  Synthetic
gacccaggaaaccaaggguauuu

SEQ ID NO: 685724 - RNA, 24 nt, Artificial Sequence
  Synthetic
agacccaggaaaccaaggguauuu

SEQ ID NO: 685725 - RNA, 18 nt, Artificial Sequence
  Synthetic
uauggaauaaggguauuu

SEQ ID NO: 685726 - RNA, 19 nt, Artificial Sequence
  Synthetic
guauggaauaaggguauuu

SEQ ID NO: 685727 - RNA, 20 nt, Artificial Sequence
  Synthetic
aguauggaauaaggguauuu

SEQ ID NO: 685728 - RNA, 21 nt, Artificial Sequence
  Synthetic
aaguauggaauaaggguauuu

SEQ ID NO: 685729 - RNA, 22 nt, Artificial Sequence
  Synthetic
gaaguauggaauaaggguauuu

SEQ ID NO: 685730 - RNA, 23 nt, Artificial Sequence
  Synthetic
agaaguauggaauaaggguauuu

SEQ ID NO: 685731 - RNA, 24 nt, Artificial Sequence
  Synthetic
aagaaguauggaauaaggguauuu

SEQ ID NO: 685732 - RNA, 18 nt, Artificial Sequence
  Synthetic
uauggcagcuugguauuu

SEQ ID NO: 685733 - RNA, 19 nt, Artificial Sequence
  Synthetic
auauggcagcuugguauuu

SEQ ID NO: 685734 - RNA, 20 nt, Artificial Sequence
  Synthetic
aauauggcagcuugguauuu

SEQ ID NO: 685735 - RNA, 21 nt, Artificial Sequence
  Synthetic
caauauggcagcuugguauuu

SEQ ID NO: 685736 - RNA, 22 nt, Artificial Sequence
  Synthetic
acaauauggcagcuugguauuu

SEQ ID NO: 685737 - RNA, 23 nt, Artificial Sequence
  Synthetic
cacaauauggcagcuugguauuu

SEQ ID NO: 685738 - RNA, 24 nt, Artificial Sequence
  Synthetic
ccacaauauggcagcuugguauuu

SEQ ID NO: 685739 - RNA, 18 nt, Artificial Sequence
  Synthetic
aagcuaaaaaauguauuu

SEQ ID NO: 685740 - RNA, 19 nt, Artificial Sequence
  Synthetic
gaagcuaaaaaauguauuu

SEQ ID NO: 685741 - RNA, 20 nt, Artificial Sequence
  Synthetic
ugaagcuaaaaaauguauuu

SEQ ID NO: 685742 - RNA, 21 nt, Artificial Sequence
  Synthetic
augaagcuaaaaaauguauuu

SEQ ID NO: 685743 - RNA, 22 nt, Artificial Sequence
  Synthetic
uaugaagcuaaaaaauguauuu

SEQ ID NO: 685744 - RNA, 23 nt, Artificial Sequence
  Synthetic
uuaugaagcuaaaaaauguauuu

SEQ ID NO: 685745 - RNA, 24 nt, Artificial Sequence
  Synthetic
guuaugaagcuaaaaaauguauuu

SEQ ID NO: 685746 - RNA, 18 nt, Artificial Sequence
  Synthetic
uuuaugcauaauguauuu

SEQ ID NO: 685747 - RNA, 19 nt, Artificial Sequence
  Synthetic
guuuaugcauaauguauuu

SEQ ID NO: 685748 - RNA, 20 nt, Artificial Sequence
  Synthetic
aguuuaugcauaauguauuu

SEQ ID NO: 685749 - RNA, 21 nt, Artificial Sequence
  Synthetic
aaguuuaugcauaauguauuu

SEQ ID NO: 685750 - RNA, 22 nt, Artificial Sequence
  Synthetic
caaguuuaugcauaauguauuu

SEQ ID NO: 685751 - RNA, 23 nt, Artificial Sequence
  Synthetic
ucaaguuuaugcauaauguauuu

SEQ ID NO: 685752 - RNA, 24 nt, Artificial Sequence
  Synthetic
aucaaguuuaugcauaauguauuu

SEQ ID NO: 685753 - RNA, 18 nt, Artificial Sequence
  Synthetic
uauauuuuugauguauuu

SEQ ID NO: 685754 - RNA, 19 nt, Artificial Sequence
  Synthetic
auauauuuuugauguauuu

SEQ ID NO: 685755 - RNA, 20 nt, Artificial Sequence
  Synthetic
aauauauuuuugauguauuu

SEQ ID NO: 685756 - RNA, 21 nt, Artificial Sequence
  Synthetic
aaauauauuuuugauguauuu

SEQ ID NO: 685757 - RNA, 22 nt, Artificial Sequence
  Synthetic
aaaauauauuuuugauguauuu

SEQ ID NO: 685758 - RNA, 23 nt, Artificial Sequence
  Synthetic
gaaaauauauuuuugauguauuu

SEQ ID NO: 685759 - RNA, 24 nt, Artificial Sequence
  Synthetic
ggaaaauauauuuuugauguauuu

SEQ ID NO: 685760 - RNA, 18 nt, Artificial Sequence
  Synthetic
aauacagaguauguauuu

SEQ ID NO: 685761 - RNA, 19 nt, Artificial Sequence
  Synthetic
aaauacagaguauguauuu

SEQ ID NO: 685762 - RNA, 20 nt, Artificial Sequence
  Synthetic
uaaauacagaguauguauuu

SEQ ID NO: 685763 - RNA, 21 nt, Artificial Sequence
  Synthetic
auaaauacagaguauguauuu

SEQ ID NO: 685764 - RNA, 22 nt, Artificial Sequence
  Synthetic
uauaaauacagaguauguauuu

SEQ ID NO: 685765 - RNA, 23 nt, Artificial Sequence
  Synthetic
auauaaauacagaguauguauuu

SEQ ID NO: 685766 - RNA, 24 nt, Artificial Sequence
  Synthetic
gauauaaauacagaguauguauuu

SEQ ID NO: 685767 - RNA, 18 nt, Artificial Sequence
  Synthetic
cuccuuauuuauguauuu

SEQ ID NO: 685768 - RNA, 19 nt, Artificial Sequence
  Synthetic
ucuccuuauuuauguauuu

SEQ ID NO: 685769 - RNA, 20 nt, Artificial Sequence
  Synthetic
uucuccuuauuuauguauuu

SEQ ID NO: 685770 - RNA, 21 nt, Artificial Sequence
  Synthetic
auucuccuuauuuauguauuu

SEQ ID NO: 685771 - RNA, 22 nt, Artificial Sequence
  Synthetic
uauucuccuuauuuauguauuu

SEQ ID NO: 685772 - RNA, 23 nt, Artificial Sequence
  Synthetic
uuauucuccuuauuuauguauuu

SEQ ID NO: 685773 - RNA, 24 nt, Artificial Sequence
  Synthetic
uuuauucuccuuauuuauguauuu

SEQ ID NO: 685774 - RNA, 18 nt, Artificial Sequence
  Synthetic
uugguccugccuguauuu

SEQ ID NO: 685775 - RNA, 19 nt, Artificial Sequence
  Synthetic
cuugguccugccuguauuu

SEQ ID NO: 685776 - RNA, 20 nt, Artificial Sequence
  Synthetic
ucuugguccugccuguauuu

SEQ ID NO: 685777 - RNA, 21 nt, Artificial Sequence
  Synthetic
gucuugguccugccuguauuu

SEQ ID NO: 685778 - RNA, 22 nt, Artificial Sequence
  Synthetic
agucuugguccugccuguauuu

SEQ ID NO: 685779 - RNA, 23 nt, Artificial Sequence
  Synthetic
aagucuugguccugccuguauuu

SEQ ID NO: 685780 - RNA, 24 nt, Artificial Sequence
  Synthetic
uaagucuugguccugccuguauuu

SEQ ID NO: 685781 - RNA, 18 nt, Artificial Sequence
  Synthetic
uuuuucauugcuguauuu

SEQ ID NO: 685782 - RNA, 19 nt, Artificial Sequence
  Synthetic
uuuuuucauugcuguauuu

SEQ ID NO: 685783 - RNA, 20 nt, Artificial Sequence
  Synthetic
auuuuuucauugcuguauuu

SEQ ID NO: 685784 - RNA, 21 nt, Artificial Sequence
  Synthetic
uauuuuuucauugcuguauuu

SEQ ID NO: 685785 - RNA, 22 nt, Artificial Sequence
  Synthetic
cuauuuuuucauugcuguauuu

SEQ ID NO: 685786 - RNA, 23 nt, Artificial Sequence
  Synthetic
ucuauuuuuucauugcuguauuu

SEQ ID NO: 685787 - RNA, 24 nt, Artificial Sequence
  Synthetic
uucuauuuuuucauugcuguauuu

SEQ ID NO: 685788 - RNA, 18 nt, Artificial Sequence
  Synthetic
uaugaaucaucuguauuu

SEQ ID NO: 685789 - RNA, 19 nt, Artificial Sequence
  Synthetic
auaugaaucaucuguauuu

SEQ ID NO: 685790 - RNA, 20 nt, Artificial Sequence
  Synthetic
cauaugaaucaucuguauuu

SEQ ID NO: 685791 - RNA, 21 nt, Artificial Sequence
  Synthetic
acauaugaaucaucuguauuu

SEQ ID NO: 685792 - RNA, 22 nt, Artificial Sequence
  Synthetic
uacauaugaaucaucuguauuu

SEQ ID NO: 685793 - RNA, 23 nt, Artificial Sequence
  Synthetic
auacauaugaaucaucuguauuu

SEQ ID NO: 685794 - RNA, 24 nt, Artificial Sequence
  Synthetic
aauacauaugaaucaucuguauuu

SEQ ID NO: 685795 - RNA, 18 nt, Artificial Sequence
  Synthetic
uagcauagcuguguauuu

SEQ ID NO: 685796 - RNA, 19 nt, Artificial Sequence
  Synthetic
auagcauagcuguguauuu

SEQ ID NO: 685797 - RNA, 20 nt, Artificial Sequence
  Synthetic
uauagcauagcuguguauuu

SEQ ID NO: 685798 - RNA, 21 nt, Artificial Sequence
  Synthetic
cuauagcauagcuguguauuu

SEQ ID NO: 685799 - RNA, 22 nt, Artificial Sequence
  Synthetic
ucuauagcauagcuguguauuu

SEQ ID NO: 685800 - RNA, 23 nt, Artificial Sequence
  Synthetic
aucuauagcauagcuguguauuu

SEQ ID NO: 685801 - RNA, 24 nt, Artificial Sequence
  Synthetic
gaucuauagcauagcuguguauuu

SEQ ID NO: 685802 - RNA, 18 nt, Artificial Sequence
  Synthetic
ucuccucuguguguauuu

SEQ ID NO: 685803 - RNA, 19 nt, Artificial Sequence
  Synthetic
gucuccucuguguguauuu

SEQ ID NO: 685804 - RNA, 20 nt, Artificial Sequence
  Synthetic
ugucuccucuguguguauuu

SEQ ID NO: 685805 - RNA, 21 nt, Artificial Sequence
  Synthetic
gugucuccucuguguguauuu

SEQ ID NO: 685806 - RNA, 22 nt, Artificial Sequence
  Synthetic
ugugucuccucuguguguauuu

SEQ ID NO: 685807 - RNA, 23 nt, Artificial Sequence
  Synthetic
augugucuccucuguguguauuu

SEQ ID NO: 685808 - RNA, 24 nt, Artificial Sequence
  Synthetic
gaugugucuccucuguguguauuu

SEQ ID NO: 685809 - RNA, 18 nt, Artificial Sequence
  Synthetic
uauauccaaauuguauuu

SEQ ID NO: 685810 - RNA, 19 nt, Artificial Sequence
  Synthetic
uuauauccaaauuguauuu

SEQ ID NO: 685811 - RNA, 20 nt, Artificial Sequence
  Synthetic
uuuauauccaaauuguauuu

SEQ ID NO: 685812 - RNA, 21 nt, Artificial Sequence
  Synthetic
auuuauauccaaauuguauuu

SEQ ID NO: 685813 - RNA, 22 nt, Artificial Sequence
  Synthetic
gauuuauauccaaauuguauuu

SEQ ID NO: 685814 - RNA, 23 nt, Artificial Sequence
  Synthetic
ugauuuauauccaaauuguauuu

SEQ ID NO: 685815 - RNA, 24 nt, Artificial Sequence
  Synthetic
augauuuauauccaaauuguauuu

SEQ ID NO: 685816 - RNA, 18 nt, Artificial Sequence
  Synthetic
ggcuuuuuaaaauuauuu

SEQ ID NO: 685817 - RNA, 19 nt, Artificial Sequence
  Synthetic
uggcuuuuuaaaauuauuu

SEQ ID NO: 685818 - RNA, 20 nt, Artificial Sequence
  Synthetic
cuggcuuuuuaaaauuauuu

SEQ ID NO: 685819 - RNA, 21 nt, Artificial Sequence
  Synthetic
ucuggcuuuuuaaaauuauuu

SEQ ID NO: 685820 - RNA, 22 nt, Artificial Sequence
  Synthetic
uucuggcuuuuuaaaauuauuu

SEQ ID NO: 685821 - RNA, 23 nt, Artificial Sequence
  Synthetic
auucuggcuuuuuaaaauuauuu

SEQ ID NO: 685822 - RNA, 24 nt, Artificial Sequence
  Synthetic
aauucuggcuuuuuaaaauuauuu

SEQ ID NO: 685823 - RNA, 18 nt, Artificial Sequence
  Synthetic
acuuacuguaaauuauuu

SEQ ID NO: 685824 - RNA, 19 nt, Artificial Sequence
  Synthetic
aacuuacuguaaauuauuu

SEQ ID NO: 685825 - RNA, 20 nt, Artificial Sequence
  Synthetic
caacuuacuguaaauuauuu

SEQ ID NO: 685826 - RNA, 21 nt, Artificial Sequence
  Synthetic
acaacuuacuguaaauuauuu

SEQ ID NO: 685827 - RNA, 22 nt, Artificial Sequence
  Synthetic
cacaacuuacuguaaauuauuu

SEQ ID NO: 685828 - RNA, 23 nt, Artificial Sequence
  Synthetic
ccacaacuuacuguaaauuauuu

SEQ ID NO: 685829 - RNA, 24 nt, Artificial Sequence
  Synthetic
accacaacuuacuguaaauuauuu

SEQ ID NO: 685830 - RNA, 18 nt, Artificial Sequence
  Synthetic
auaaauguucaauuauuu

SEQ ID NO: 685831 - RNA, 19 nt, Artificial Sequence
  Synthetic
aauaaauguucaauuauuu

SEQ ID NO: 685832 - RNA, 20 nt, Artificial Sequence
  Synthetic
uaauaaauguucaauuauuu

SEQ ID NO: 685833 - RNA, 21 nt, Artificial Sequence
  Synthetic
auaauaaauguucaauuauuu

SEQ ID NO: 685834 - RNA, 22 nt, Artificial Sequence
  Synthetic
cauaauaaauguucaauuauuu

SEQ ID NO: 685835 - RNA, 23 nt, Artificial Sequence
  Synthetic
acauaauaaauguucaauuauuu

SEQ ID NO: 685836 - RNA, 24 nt, Artificial Sequence
  Synthetic
cacauaauaaauguucaauuauuu

SEQ ID NO: 685837 - RNA, 18 nt, Artificial Sequence
  Synthetic
aaccugaagccauuauuu

SEQ ID NO: 685838 - RNA, 19 nt, Artificial Sequence
  Synthetic
aaaccugaagccauuauuu

SEQ ID NO: 685839 - RNA, 20 nt, Artificial Sequence
  Synthetic
aaaaccugaagccauuauuu

SEQ ID NO: 685840 - RNA, 21 nt, Artificial Sequence
  Synthetic
gaaaaccugaagccauuauuu

SEQ ID NO: 685841 - RNA, 22 nt, Artificial Sequence
  Synthetic
ugaaaaccugaagccauuauuu

SEQ ID NO: 685842 - RNA, 23 nt, Artificial Sequence
  Synthetic
gugaaaaccugaagccauuauuu

SEQ ID NO: 685843 - RNA, 24 nt, Artificial Sequence
  Synthetic
ugugaaaaccugaagccauuauuu

SEQ ID NO: 685844 - RNA, 21 nt, Artificial Sequence
  Synthetic
uguagauaugcggcauuauuu

SEQ ID NO: 685845 - RNA, 22 nt, Artificial Sequence
  Synthetic
uuguagauaugcggcauuauuu

SEQ ID NO: 685846 - RNA, 23 nt, Artificial Sequence
  Synthetic
guuguagauaugcggcauuauuu

SEQ ID NO: 685847 - RNA, 24 nt, Artificial Sequence
  Synthetic
aguuguagauaugcggcauuauuu

SEQ ID NO: 685848 - RNA, 18 nt, Artificial Sequence
  Synthetic
agauguguggcauuauuu

SEQ ID NO: 685849 - RNA, 19 nt, Artificial Sequence
  Synthetic
uagauguguggcauuauuu

SEQ ID NO: 685850 - RNA, 20 nt, Artificial Sequence
  Synthetic
guagauguguggcauuauuu

SEQ ID NO: 685851 - RNA, 21 nt, Artificial Sequence
  Synthetic
uguagauguguggcauuauuu

SEQ ID NO: 685852 - RNA, 22 nt, Artificial Sequence
  Synthetic
uuguagauguguggcauuauuu

SEQ ID NO: 685853 - RNA, 23 nt, Artificial Sequence
  Synthetic
guuguagauguguggcauuauuu

SEQ ID NO: 685854 - RNA, 24 nt, Artificial Sequence
  Synthetic
gguuguagauguguggcauuauuu

SEQ ID NO: 685855 - RNA, 18 nt, Artificial Sequence
  Synthetic
ugggcuugcucauuauuu

SEQ ID NO: 685856 - RNA, 19 nt, Artificial Sequence
  Synthetic
augggcuugcucauuauuu

SEQ ID NO: 685857 - RNA, 20 nt, Artificial Sequence
  Synthetic
caugggcuugcucauuauuu

SEQ ID NO: 685858 - RNA, 21 nt, Artificial Sequence
  Synthetic
ccaugggcuugcucauuauuu

SEQ ID NO: 685859 - RNA, 22 nt, Artificial Sequence
  Synthetic
accaugggcuugcucauuauuu

SEQ ID NO: 685860 - RNA, 23 nt, Artificial Sequence
  Synthetic
uaccaugggcuugcucauuauuu

SEQ ID NO: 685861 - RNA, 24 nt, Artificial Sequence
  Synthetic
uuaccaugggcuugcucauuauuu

SEQ ID NO: 685862 - RNA, 18 nt, Artificial Sequence
  Synthetic
accugauggagauuauuu

SEQ ID NO: 685863 - RNA, 19 nt, Artificial Sequence
  Synthetic
uaccugauggagauuauuu

SEQ ID NO: 685864 - RNA, 20 nt, Artificial Sequence
  Synthetic
uuaccugauggagauuauuu

SEQ ID NO: 685865 - RNA, 21 nt, Artificial Sequence
  Synthetic
auuaccugauggagauuauuu

SEQ ID NO: 685866 - RNA, 22 nt, Artificial Sequence
  Synthetic
cauuaccugauggagauuauuu

SEQ ID NO: 685867 - RNA, 23 nt, Artificial Sequence
  Synthetic
gcauuaccugauggagauuauuu

SEQ ID NO: 685868 - RNA, 24 nt, Artificial Sequence
  Synthetic
ugcauuaccugauggagauuauuu

SEQ ID NO: 685869 - RNA, 18 nt, Artificial Sequence
  Synthetic
aagaucaugagauuauuu

SEQ ID NO: 685870 - RNA, 19 nt, Artificial Sequence
  Synthetic
aaagaucaugagauuauuu

SEQ ID NO: 685871 - RNA, 20 nt, Artificial Sequence
  Synthetic
aaaagaucaugagauuauuu

SEQ ID NO: 685872 - RNA, 21 nt, Artificial Sequence
  Synthetic
uaaaagaucaugagauuauuu

SEQ ID NO: 685873 - RNA, 22 nt, Artificial Sequence
  Synthetic
guaaaagaucaugagauuauuu

SEQ ID NO: 685874 - RNA, 23 nt, Artificial Sequence
  Synthetic
aguaaaagaucaugagauuauuu

SEQ ID NO: 685875 - RNA, 24 nt, Artificial Sequence
  Synthetic
caguaaaagaucaugagauuauuu

SEQ ID NO: 685876 - RNA, 18 nt, Artificial Sequence
  Synthetic
ugaaagcagguauuauuu

SEQ ID NO: 685877 - RNA, 19 nt, Artificial Sequence
  Synthetic
augaaagcagguauuauuu

SEQ ID NO: 685878 - RNA, 20 nt, Artificial Sequence
  Synthetic
aaugaaagcagguauuauuu

SEQ ID NO: 685879 - RNA, 21 nt, Artificial Sequence
  Synthetic
aaaugaaagcagguauuauuu

SEQ ID NO: 685880 - RNA, 22 nt, Artificial Sequence
  Synthetic
gaaaugaaagcagguauuauuu

SEQ ID NO: 685881 - RNA, 23 nt, Artificial Sequence
  Synthetic
cgaaaugaaagcagguauuauuu

SEQ ID NO: 685882 - RNA, 24 nt, Artificial Sequence
  Synthetic
ucgaaaugaaagcagguauuauuu

SEQ ID NO: 685883 - RNA, 18 nt, Artificial Sequence
  Synthetic
ucauuacuauuauuauuu

SEQ ID NO: 685884 - RNA, 19 nt, Artificial Sequence
  Synthetic
aucauuacuauuauuauuu

SEQ ID NO: 685885 - RNA, 20 nt, Artificial Sequence
  Synthetic
uaucauuacuauuauuauuu

SEQ ID NO: 685886 - RNA, 21 nt, Artificial Sequence
  Synthetic
uuaucauuacuauuauuauuu

SEQ ID NO: 685887 - RNA, 22 nt, Artificial Sequence
  Synthetic
guuaucauuacuauuauuauuu

SEQ ID NO: 685888 - RNA, 23 nt, Artificial Sequence
  Synthetic
gguuaucauuacuauuauuauuu

SEQ ID NO: 685889 - RNA, 24 nt, Artificial Sequence
  Synthetic
agguuaucauuacuauuauuauuu

SEQ ID NO: 685890 - RNA, 18 nt, Artificial Sequence
  Synthetic
gcauguucucacuuauuu

SEQ ID NO: 685891 - RNA, 19 nt, Artificial Sequence
  Synthetic
ugcauguucucacuuauuu

SEQ ID NO: 685892 - RNA, 20 nt, Artificial Sequence
  Synthetic
cugcauguucucacuuauuu

SEQ ID NO: 685893 - RNA, 21 nt, Artificial Sequence
  Synthetic
acugcauguucucacuuauuu

SEQ ID NO: 685894 - RNA, 22 nt, Artificial Sequence
  Synthetic
cacugcauguucucacuuauuu

SEQ ID NO: 685895 - RNA, 23 nt, Artificial Sequence
  Synthetic
ucacugcauguucucacuuauuu

SEQ ID NO: 685896 - RNA, 24 nt, Artificial Sequence
  Synthetic
aucacugcauguucucacuuauuu

SEQ ID NO: 685897 - RNA, 20 nt, Artificial Sequence
  Synthetic
uugcauguucucacuuauuu

SEQ ID NO: 685898 - RNA, 21 nt, Artificial Sequence
  Synthetic
auugcauguucucacuuauuu

SEQ ID NO: 685899 - RNA, 22 nt, Artificial Sequence
  Synthetic
cauugcauguucucacuuauuu

SEQ ID NO: 685900 - RNA, 23 nt, Artificial Sequence
  Synthetic
acauugcauguucucacuuauuu

SEQ ID NO: 685901 - RNA, 24 nt, Artificial Sequence
  Synthetic
aacauugcauguucucacuuauuu

SEQ ID NO: 685902 - RNA, 18 nt, Artificial Sequence
  Synthetic
caaggucaugacuuauuu

SEQ ID NO: 685903 - RNA, 19 nt, Artificial Sequence
  Synthetic
acaaggucaugacuuauuu

SEQ ID NO: 685904 - RNA, 20 nt, Artificial Sequence
  Synthetic
cacaaggucaugacuuauuu

SEQ ID NO: 685905 - RNA, 21 nt, Artificial Sequence
  Synthetic
gcacaaggucaugacuuauuu

SEQ ID NO: 685906 - RNA, 22 nt, Artificial Sequence
  Synthetic
ugcacaaggucaugacuuauuu

SEQ ID NO: 685907 - RNA, 23 nt, Artificial Sequence
  Synthetic
uugcacaaggucaugacuuauuu

SEQ ID NO: 685908 - RNA, 24 nt, Artificial Sequence
  Synthetic
cuugcacaaggucaugacuuauuu

SEQ ID NO: 685909 - RNA, 18 nt, Artificial Sequence
  Synthetic
auuuuaauauacuuauuu

SEQ ID NO: 685910 - RNA, 19 nt, Artificial Sequence
  Synthetic
uauuuuaauauacuuauuu

SEQ ID NO: 685911 - RNA, 20 nt, Artificial Sequence
  Synthetic
uuauuuuaauauacuuauuu

SEQ ID NO: 685912 - RNA, 21 nt, Artificial Sequence
  Synthetic
auuauuuuaauauacuuauuu

SEQ ID NO: 685913 - RNA, 22 nt, Artificial Sequence
  Synthetic
aauuauuuuaauauacuuauuu

SEQ ID NO: 685914 - RNA, 23 nt, Artificial Sequence
  Synthetic
caauuauuuuaauauacuuauuu

SEQ ID NO: 685915 - RNA, 24 nt, Artificial Sequence
  Synthetic
ccaauuauuuuaauauacuuauuu

SEQ ID NO: 685916 - RNA, 18 nt, Artificial Sequence
  Synthetic
ugacucacaaccuuauuu

SEQ ID NO: 685917 - RNA, 19 nt, Artificial Sequence
  Synthetic
augacucacaaccuuauuu

SEQ ID NO: 685918 - RNA, 20 nt, Artificial Sequence
  Synthetic
uaugacucacaaccuuauuu

SEQ ID NO: 685919 - RNA, 21 nt, Artificial Sequence
  Synthetic
uuaugacucacaaccuuauuu

SEQ ID NO: 685920 - RNA, 22 nt, Artificial Sequence
  Synthetic
auuaugacucacaaccuuauuu

SEQ ID NO: 685921 - RNA, 23 nt, Artificial Sequence
  Synthetic
aauuaugacucacaaccuuauuu

SEQ ID NO: 685922 - RNA, 24 nt, Artificial Sequence
  Synthetic
gaauuaugacucacaaccuuauuu

SEQ ID NO: 685923 - RNA, 18 nt, Artificial Sequence
  Synthetic
gccaccaacagcuuauuu

SEQ ID NO: 685924 - RNA, 19 nt, Artificial Sequence
  Synthetic
ugccaccaacagcuuauuu

SEQ ID NO: 685925 - RNA, 20 nt, Artificial Sequence
  Synthetic
cugccaccaacagcuuauuu

SEQ ID NO: 685926 - RNA, 21 nt, Artificial Sequence
  Synthetic
ccugccaccaacagcuuauuu

SEQ ID NO: 685927 - RNA, 22 nt, Artificial Sequence
  Synthetic
uccugccaccaacagcuuauuu

SEQ ID NO: 685928 - RNA, 23 nt, Artificial Sequence
  Synthetic
cuccugccaccaacagcuuauuu

SEQ ID NO: 685929 - RNA, 24 nt, Artificial Sequence
  Synthetic
ccuccugccaccaacagcuuauuu

SEQ ID NO: 685930 - RNA, 18 nt, Artificial Sequence
  Synthetic
aacaagggaaucuuauuu

SEQ ID NO: 685931 - RNA, 19 nt, Artificial Sequence
  Synthetic
uaacaagggaaucuuauuu

SEQ ID NO: 685932 - RNA, 20 nt, Artificial Sequence
  Synthetic
uuaacaagggaaucuuauuu

SEQ ID NO: 685933 - RNA, 21 nt, Artificial Sequence
  Synthetic
auuaacaagggaaucuuauuu

SEQ ID NO: 685934 - RNA, 22 nt, Artificial Sequence
  Synthetic
uauuaacaagggaaucuuauuu

SEQ ID NO: 685935 - RNA, 23 nt, Artificial Sequence
  Synthetic
cuauuaacaagggaaucuuauuu

SEQ ID NO: 685936 - RNA, 24 nt, Artificial Sequence
  Synthetic
ucuauuaacaagggaaucuuauuu

SEQ ID NO: 685937 - RNA, 18 nt, Artificial Sequence
  Synthetic
cucgaaaagcucuuauuu

SEQ ID NO: 685938 - RNA, 19 nt, Artificial Sequence
  Synthetic
gcucgaaaagcucuuauuu

SEQ ID NO: 685939 - RNA, 20 nt, Artificial Sequence
  Synthetic
agcucgaaaagcucuuauuu

SEQ ID NO: 685940 - RNA, 21 nt, Artificial Sequence
  Synthetic
aagcucgaaaagcucuuauuu

SEQ ID NO: 685941 - RNA, 22 nt, Artificial Sequence
  Synthetic
aaagcucgaaaagcucuuauuu

SEQ ID NO: 685942 - RNA, 23 nt, Artificial Sequence
  Synthetic
aaaagcucgaaaagcucuuauuu

SEQ ID NO: 685943 - RNA, 24 nt, Artificial Sequence
  Synthetic
uaaaagcucgaaaagcucuuauuu

SEQ ID NO: 685944 - RNA, 18 nt, Artificial Sequence
  Synthetic
guugaauuauucuuauuu

SEQ ID NO: 685945 - RNA, 19 nt, Artificial Sequence
  Synthetic
aguugaauuauucuuauuu

SEQ ID NO: 685946 - RNA, 20 nt, Artificial Sequence
  Synthetic
gaguugaauuauucuuauuu

SEQ ID NO: 685947 - RNA, 21 nt, Artificial Sequence
  Synthetic
ugaguugaauuauucuuauuu

SEQ ID NO: 685948 - RNA, 22 nt, Artificial Sequence
  Synthetic
gugaguugaauuauucuuauuu

SEQ ID NO: 685949 - RNA, 23 nt, Artificial Sequence
  Synthetic
ugugaguugaauuauucuuauuu

SEQ ID NO: 685950 - RNA, 24 nt, Artificial Sequence
  Synthetic
augugaguugaauuauucuuauuu

SEQ ID NO: 685951 - RNA, 18 nt, Artificial Sequence
  Synthetic
uaggaggagaaguuauuu

SEQ ID NO: 685952 - RNA, 19 nt, Artificial Sequence
  Synthetic
auaggaggagaaguuauuu

SEQ ID NO: 685953 - RNA, 20 nt, Artificial Sequence
  Synthetic
uauaggaggagaaguuauuu

SEQ ID NO: 685954 - RNA, 21 nt, Artificial Sequence
  Synthetic
uuauaggaggagaaguuauuu

SEQ ID NO: 685955 - RNA, 22 nt, Artificial Sequence
  Synthetic
auuauaggaggagaaguuauuu

SEQ ID NO: 685956 - RNA, 23 nt, Artificial Sequence
  Synthetic
uauuauaggaggagaaguuauuu

SEQ ID NO: 685957 - RNA, 24 nt, Artificial Sequence
  Synthetic
guauuauaggaggagaaguuauuu

SEQ ID NO: 685958 - RNA, 18 nt, Artificial Sequence
  Synthetic
gaaaaauugaaguuauuu

SEQ ID NO: 685959 - RNA, 19 nt, Artificial Sequence
  Synthetic
agaaaaauugaaguuauuu

SEQ ID NO: 685960 - RNA, 20 nt, Artificial Sequence
  Synthetic
aagaaaaauugaaguuauuu

SEQ ID NO: 685961 - RNA, 21 nt, Artificial Sequence
  Synthetic
aaagaaaaauugaaguuauuu

SEQ ID NO: 685962 - RNA, 22 nt, Artificial Sequence
  Synthetic
aaaagaaaaauugaaguuauuu

SEQ ID NO: 685963 - RNA, 23 nt, Artificial Sequence
  Synthetic
aaaaagaaaaauugaaguuauuu

SEQ ID NO: 685964 - RNA, 24 nt, Artificial Sequence
  Synthetic
aaaaaagaaaaauugaaguuauuu

SEQ ID NO: 685965 - RNA, 18 nt, Artificial Sequence
  Synthetic
uucuuuuguaaguuauuu

SEQ ID NO: 685966 - RNA, 19 nt, Artificial Sequence
  Synthetic
auucuuuuguaaguuauuu

SEQ ID NO: 685967 - RNA, 20 nt, Artificial Sequence
  Synthetic
aauucuuuuguaaguuauuu

SEQ ID NO: 685968 - RNA, 21 nt, Artificial Sequence
  Synthetic
uaauucuuuuguaaguuauuu

SEQ ID NO: 685969 - RNA, 22 nt, Artificial Sequence
  Synthetic
guaauucuuuuguaaguuauuu

SEQ ID NO: 685970 - RNA, 23 nt, Artificial Sequence
  Synthetic
gguaauucuuuuguaaguuauuu

SEQ ID NO: 685971 - RNA, 24 nt, Artificial Sequence
  Synthetic
ugguaauucuuuuguaaguuauuu

SEQ ID NO: 685972 - RNA, 18 nt, Artificial Sequence
  Synthetic
cucuagucccaguuauuu

SEQ ID NO: 685973 - RNA, 19 nt, Artificial Sequence
  Synthetic
ccucuagucccaguuauuu

SEQ ID NO: 685974 - RNA, 20 nt, Artificial Sequence
  Synthetic
gccucuagucccaguuauuu

SEQ ID NO: 685975 - RNA, 21 nt, Artificial Sequence
  Synthetic
ugccucuagucccaguuauuu

SEQ ID NO: 685976 - RNA, 22 nt, Artificial Sequence
  Synthetic
augccucuagucccaguuauuu

SEQ ID NO: 685977 - RNA, 23 nt, Artificial Sequence
  Synthetic
caugccucuagucccaguuauuu

SEQ ID NO: 685978 - RNA, 24 nt, Artificial Sequence
  Synthetic
gcaugccucuagucccaguuauuu

SEQ ID NO: 685979 - RNA, 18 nt, Artificial Sequence
  Synthetic
cuggcuuuggaguuauuu

SEQ ID NO: 685980 - RNA, 19 nt, Artificial Sequence
  Synthetic
acuggcuuuggaguuauuu

SEQ ID NO: 685981 - RNA, 20 nt, Artificial Sequence
  Synthetic
gacuggcuuuggaguuauuu

SEQ ID NO: 685982 - RNA, 21 nt, Artificial Sequence
  Synthetic
ggacuggcuuuggaguuauuu

SEQ ID NO: 685983 - RNA, 22 nt, Artificial Sequence
  Synthetic
aggacuggcuuuggaguuauuu

SEQ ID NO: 685984 - RNA, 23 nt, Artificial Sequence
  Synthetic
caggacuggcuuuggaguuauuu

SEQ ID NO: 685985 - RNA, 24 nt, Artificial Sequence
  Synthetic
acaggacuggcuuuggaguuauuu

SEQ ID NO: 685986 - RNA, 18 nt, Artificial Sequence
  Synthetic
uaaacucuuuaguuauuu

SEQ ID NO: 685987 - RNA, 19 nt, Artificial Sequence
  Synthetic
uuaaacucuuuaguuauuu

SEQ ID NO: 685988 - RNA, 20 nt, Artificial Sequence
  Synthetic
uuuaaacucuuuaguuauuu

SEQ ID NO: 685989 - RNA, 21 nt, Artificial Sequence
  Synthetic
guuuaaacucuuuaguuauuu

SEQ ID NO: 685990 - RNA, 22 nt, Artificial Sequence
  Synthetic
uguuuaaacucuuuaguuauuu

SEQ ID NO: 685991 - RNA, 23 nt, Artificial Sequence
  Synthetic
uuguuuaaacucuuuaguuauuu

SEQ ID NO: 685992 - RNA, 24 nt, Artificial Sequence
  Synthetic
uuuguuuaaacucuuuaguuauuu

SEQ ID NO: 685993 - RNA, 18 nt, Artificial Sequence
  Synthetic
agguauguggcguuauuu

SEQ ID NO: 685994 - RNA, 19 nt, Artificial Sequence
  Synthetic
uagguauguggcguuauuu

SEQ ID NO: 685995 - RNA, 20 nt, Artificial Sequence
  Synthetic
guagguauguggcguuauuu

SEQ ID NO: 685996 - RNA, 21 nt, Artificial Sequence
  Synthetic
uguagguauguggcguuauuu

SEQ ID NO: 685997 - RNA, 22 nt, Artificial Sequence
  Synthetic
uuguagguauguggcguuauuu

SEQ ID NO: 685998 - RNA, 23 nt, Artificial Sequence
  Synthetic
guuguagguauguggcguuauuu

SEQ ID NO: 685999 - RNA, 24 nt, Artificial Sequence
  Synthetic
aguuguagguauguggcguuauuu

SEQ ID NO: 686000 - RNA, 18 nt, Artificial Sequence
  Synthetic
agcucgaugugguuauuu

SEQ ID NO: 686001 - RNA, 19 nt, Artificial Sequence
  Synthetic
aagcucgaugugguuauuu

SEQ ID NO: 686002 - RNA, 20 nt, Artificial Sequence
  Synthetic
aaagcucgaugugguuauuu

SEQ ID NO: 686003 - RNA, 21 nt, Artificial Sequence
  Synthetic
aaaagcucgaugugguuauuu

SEQ ID NO: 686004 - RNA, 22 nt, Artificial Sequence
  Synthetic
uaaaagcucgaugugguuauuu

SEQ ID NO: 686005 - RNA, 23 nt, Artificial Sequence
  Synthetic
auaaaagcucgaugugguuauuu

SEQ ID NO: 686006 - RNA, 24 nt, Artificial Sequence
  Synthetic
cauaaaagcucgaugugguuauuu

SEQ ID NO: 686007 - RNA, 18 nt, Artificial Sequence
  Synthetic
uuuaaauuguuguuauuu

SEQ ID NO: 686008 - RNA, 19 nt, Artificial Sequence
  Synthetic
uuuuaaauuguuguuauuu

SEQ ID NO: 686009 - RNA, 20 nt, Artificial Sequence
  Synthetic
uuuuuaaauuguuguuauuu

SEQ ID NO: 686010 - RNA, 21 nt, Artificial Sequence
  Synthetic
guuuuuaaauuguuguuauuu

SEQ ID NO: 686011 - RNA, 22 nt, Artificial Sequence
  Synthetic
aguuuuuaaauuguuguuauuu

SEQ ID NO: 686012 - RNA, 23 nt, Artificial Sequence
  Synthetic
uaguuuuuaaauuguuguuauuu

SEQ ID NO: 686013 - RNA, 24 nt, Artificial Sequence
  Synthetic
guaguuuuuaaauuguuguuauuu

SEQ ID NO: 686014 - RNA, 18 nt, Artificial Sequence
  Synthetic
uguuuuguuuuguuauuu

SEQ ID NO: 686015 - RNA, 19 nt, Artificial Sequence
  Synthetic
uuguuuuguuuuguuauuu

SEQ ID NO: 686016 - RNA, 20 nt, Artificial Sequence
  Synthetic
uuuguuuuguuuuguuauuu

SEQ ID NO: 686017 - RNA, 21 nt, Artificial Sequence
  Synthetic
uuuuguuuuguuuuguuauuu

SEQ ID NO: 686018 - RNA, 22 nt, Artificial Sequence
  Synthetic
guuuuguuuuguuuuguuauuu

SEQ ID NO: 686019 - RNA, 23 nt, Artificial Sequence
  Synthetic
uguuuuguuuuguuuuguuauuu

SEQ ID NO: 686020 - RNA, 24 nt, Artificial Sequence
  Synthetic
uuguuuuguuuuguuuuguuauuu

SEQ ID NO: 686021 - RNA, 18 nt, Artificial Sequence
  Synthetic
gaaggugaaaauuuauuu

SEQ ID NO: 686022 - RNA, 19 nt, Artificial Sequence
  Synthetic
ugaaggugaaaauuuauuu

SEQ ID NO: 686023 - RNA, 20 nt, Artificial Sequence
  Synthetic
uugaaggugaaaauuuauuu

SEQ ID NO: 686024 - RNA, 21 nt, Artificial Sequence
  Synthetic
cuugaaggugaaaauuuauuu

SEQ ID NO: 686025 - RNA, 22 nt, Artificial Sequence
  Synthetic
gcuugaaggugaaaauuuauuu

SEQ ID NO: 686026 - RNA, 23 nt, Artificial Sequence
  Synthetic
agcuugaaggugaaaauuuauuu

SEQ ID NO: 686027 - RNA, 24 nt, Artificial Sequence
  Synthetic
aagcuugaaggugaaaauuuauuu

SEQ ID NO: 686028 - RNA, 18 nt, Artificial Sequence
  Synthetic
auuuuuguuaauuuauuu

SEQ ID NO: 686029 - RNA, 19 nt, Artificial Sequence
  Synthetic
uauuuuuguuaauuuauuu

SEQ ID NO: 686030 - RNA, 20 nt, Artificial Sequence
  Synthetic
auauuuuuguuaauuuauuu

SEQ ID NO: 686031 - RNA, 21 nt, Artificial Sequence
  Synthetic
aauauuuuuguuaauuuauuu

SEQ ID NO: 686032 - RNA, 22 nt, Artificial Sequence
  Synthetic
aaauauuuuuguuaauuuauuu

SEQ ID NO: 686033 - RNA, 23 nt, Artificial Sequence
  Synthetic
caaauauuuuuguuaauuuauuu

SEQ ID NO: 686034 - RNA, 24 nt, Artificial Sequence
  Synthetic
ucaaauauuuuuguuaauuuauuu

SEQ ID NO: 686035 - RNA, 18 nt, Artificial Sequence
  Synthetic
ggccuucuacauuuauuu

SEQ ID NO: 686036 - RNA, 19 nt, Artificial Sequence
  Synthetic
uggccuucuacauuuauuu

SEQ ID NO: 686037 - RNA, 20 nt, Artificial Sequence
  Synthetic
guggccuucuacauuuauuu

SEQ ID NO: 686038 - RNA, 21 nt, Artificial Sequence
  Synthetic
uguggccuucuacauuuauuu

SEQ ID NO: 686039 - RNA, 22 nt, Artificial Sequence
  Synthetic
auguggccuucuacauuuauuu

SEQ ID NO: 686040 - RNA, 23 nt, Artificial Sequence
  Synthetic
cauguggccuucuacauuuauuu

SEQ ID NO: 686041 - RNA, 24 nt, Artificial Sequence
  Synthetic
ucauguggccuucuacauuuauuu

SEQ ID NO: 686042 - RNA, 18 nt, Artificial Sequence
  Synthetic
uuugcacaccauuuauuu

SEQ ID NO: 686043 - RNA, 19 nt, Artificial Sequence
  Synthetic
uuuugcacaccauuuauuu

SEQ ID NO: 686044 - RNA, 20 nt, Artificial Sequence
  Synthetic
auuuugcacaccauuuauuu

SEQ ID NO: 686045 - RNA, 21 nt, Artificial Sequence
  Synthetic
gauuuugcacaccauuuauuu

SEQ ID NO: 686046 - RNA, 22 nt, Artificial Sequence
  Synthetic
ugauuuugcacaccauuuauuu

SEQ ID NO: 686047 - RNA, 23 nt, Artificial Sequence
  Synthetic
augauuuugcacaccauuuauuu

SEQ ID NO: 686048 - RNA, 24 nt, Artificial Sequence
  Synthetic
aaugauuuugcacaccauuuauuu

SEQ ID NO: 686049 - RNA, 18 nt, Artificial Sequence
  Synthetic
auuguauuguauuuauuu

SEQ ID NO: 686050 - RNA, 19 nt, Artificial Sequence
  Synthetic
uauuguauuguauuuauuu

SEQ ID NO: 686051 - RNA, 20 nt, Artificial Sequence
  Synthetic
guauuguauuguauuuauuu

SEQ ID NO: 686052 - RNA, 21 nt, Artificial Sequence
  Synthetic
uguauuguauuguauuuauuu

SEQ ID NO: 686053 - RNA, 22 nt, Artificial Sequence
  Synthetic
uuguauuguauuguauuuauuu

SEQ ID NO: 686054 - RNA, 23 nt, Artificial Sequence
  Synthetic
auuguauuguauuguauuuauuu

SEQ ID NO: 686055 - RNA, 24 nt, Artificial Sequence
  Synthetic
uauuguauuguauuguauuuauuu

SEQ ID NO: 686056 - RNA, 18 nt, Artificial Sequence
  Synthetic
guauuuauuuauuuauuu

SEQ ID NO: 686057 - RNA, 19 nt, Artificial Sequence
  Synthetic
uguauuuauuuauuuauuu

SEQ ID NO: 686058 - RNA, 20 nt, Artificial Sequence
  Synthetic
uuguauuuauuuauuuauuu

SEQ ID NO: 686059 - RNA, 21 nt, Artificial Sequence
  Synthetic
cuuguauuuauuuauuuauuu

SEQ ID NO: 686060 - RNA, 22 nt, Artificial Sequence
  Synthetic
acuuguauuuauuuauuuauuu

SEQ ID NO: 686061 - RNA, 23 nt, Artificial Sequence
  Synthetic
aacuuguauuuauuuauuuauuu

SEQ ID NO: 686062 - RNA, 24 nt, Artificial Sequence
  Synthetic
aaacuuguauuuauuuauuuauuu

SEQ ID NO: 686063 - RNA, 18 nt, Artificial Sequence
  Synthetic
uuauuuauuuauuuauuu

SEQ ID NO: 686064 - RNA, 19 nt, Artificial Sequence
  Synthetic
auuauuuauuuauuuauuu

SEQ ID NO: 686065 - RNA, 20 nt, Artificial Sequence
  Synthetic
uauuauuuauuuauuuauuu

SEQ ID NO: 686066 - RNA, 21 nt, Artificial Sequence
  Synthetic
uuauuauuuauuuauuuauuu

SEQ ID NO: 686067 - RNA, 22 nt, Artificial Sequence
  Synthetic
uuuauuauuuauuuauuuauuu

SEQ ID NO: 686068 - RNA, 23 nt, Artificial Sequence
  Synthetic
auuuauuauuuauuuauuuauuu

SEQ ID NO: 686069 - RNA, 24 nt, Artificial Sequence
  Synthetic
uauuuauuauuuauuuauuuauuu

SEQ ID NO: 686070 - RNA, 19 nt, Artificial Sequence
  Synthetic
uuuauuuauuuauuuauuu

SEQ ID NO: 686071 - RNA, 20 nt, Artificial Sequence
  Synthetic
auuuauuuauuuauuuauuu

SEQ ID NO: 686072 - RNA, 21 nt, Artificial Sequence
  Synthetic
uauuuauuuauuuauuuauuu

SEQ ID NO: 686073 - RNA, 22 nt, Artificial Sequence
  Synthetic
uuauuuauuuauuuauuuauuu

SEQ ID NO: 686074 - RNA, 23 nt, Artificial Sequence
  Synthetic
uuuauuuauuuauuuauuuauuu

SEQ ID NO: 686075 - RNA, 24 nt, Artificial Sequence
  Synthetic
uuuuauuuauuuauuuauuuauuu

SEQ ID NO: 686076 - RNA, 18 nt, Artificial Sequence
  Synthetic
uccaauaacucuuuauuu

SEQ ID NO: 686077 - RNA, 19 nt, Artificial Sequence
  Synthetic
uuccaauaacucuuuauuu

SEQ ID NO: 686078 - RNA, 20 nt, Artificial Sequence
  Synthetic
guuccaauaacucuuuauuu

SEQ ID NO: 686079 - RNA, 21 nt, Artificial Sequence
  Synthetic
uguuccaauaacucuuuauuu

SEQ ID NO: 686080 - RNA, 22 nt, Artificial Sequence
  Synthetic
guguuccaauaacucuuuauuu

SEQ ID NO: 686081 - RNA, 23 nt, Artificial Sequence
  Synthetic
uguguuccaauaacucuuuauuu

SEQ ID NO: 686082 - RNA, 24 nt, Artificial Sequence
  Synthetic
cuguguuccaauaacucuuuauuu

SEQ ID NO: 686083 - RNA, 18 nt, Artificial Sequence
  Synthetic
uuaugauugucuuuauuu

SEQ ID NO: 686084 - RNA, 19 nt, Artificial Sequence
  Synthetic
uuuaugauugucuuuauuu

SEQ ID NO: 686085 - RNA, 20 nt, Artificial Sequence
  Synthetic
auuuaugauugucuuuauuu

SEQ ID NO: 686086 - RNA, 21 nt, Artificial Sequence
  Synthetic
aauuuaugauugucuuuauuu

SEQ ID NO: 686087 - RNA, 22 nt, Artificial Sequence
  Synthetic
aaauuuaugauugucuuuauuu

SEQ ID NO: 686088 - RNA, 23 nt, Artificial Sequence
  Synthetic
aaaauuuaugauugucuuuauuu

SEQ ID NO: 686089 - RNA, 24 nt, Artificial Sequence
  Synthetic
gaaaauuuaugauugucuuuauuu

SEQ ID NO: 686090 - RNA, 18 nt, Artificial Sequence
  Synthetic
aaaauacauaguuuauuu

SEQ ID NO: 686091 - RNA, 19 nt, Artificial Sequence
  Synthetic
aaaaauacauaguuuauuu

SEQ ID NO: 686092 - RNA, 20 nt, Artificial Sequence
  Synthetic
gaaaaauacauaguuuauuu

SEQ ID NO: 686093 - RNA, 21 nt, Artificial Sequence
  Synthetic
agaaaaauacauaguuuauuu

SEQ ID NO: 686094 - RNA, 22 nt, Artificial Sequence
  Synthetic
cagaaaaauacauaguuuauuu

SEQ ID NO: 686095 - RNA, 23 nt, Artificial Sequence
  Synthetic
gcagaaaaauacauaguuuauuu

SEQ ID NO: 686096 - RNA, 24 nt, Artificial Sequence
  Synthetic
agcagaaaaauacauaguuuauuu

SEQ ID NO: 686097 - RNA, 18 nt, Artificial Sequence
  Synthetic
uucugcuauaguuuauuu

SEQ ID NO: 686098 - RNA, 19 nt, Artificial Sequence
  Synthetic
cuucugcuauaguuuauuu

SEQ ID NO: 686099 - RNA, 20 nt, Artificial Sequence
  Synthetic
gcuucugcuauaguuuauuu

SEQ ID NO: 686100 - RNA, 21 nt, Artificial Sequence
  Synthetic
ugcuucugcuauaguuuauuu

SEQ ID NO: 686101 - RNA, 22 nt, Artificial Sequence
  Synthetic
uugcuucugcuauaguuuauuu

SEQ ID NO: 686102 - RNA, 23 nt, Artificial Sequence
  Synthetic
uuugcuucugcuauaguuuauuu

SEQ ID NO: 686103 - RNA, 24 nt, Artificial Sequence
  Synthetic
uuuugcuucugcuauaguuuauuu

SEQ ID NO: 686104 - RNA, 18 nt, Artificial Sequence
  Synthetic
uauaauaaaauuuuauuu

SEQ ID NO: 686105 - RNA, 19 nt, Artificial Sequence
  Synthetic
uuauaauaaaauuuuauuu

SEQ ID NO: 686106 - RNA, 20 nt, Artificial Sequence
  Synthetic
uuuauaauaaaauuuuauuu

SEQ ID NO: 686107 - RNA, 21 nt, Artificial Sequence
  Synthetic
uuuuauaauaaaauuuuauuu

SEQ ID NO: 686108 - RNA, 22 nt, Artificial Sequence
  Synthetic
auuuuauaauaaaauuuuauuu

SEQ ID NO: 686109 - RNA, 23 nt, Artificial Sequence
  Synthetic
uauuuuauaauaaaauuuuauuu

SEQ ID NO: 686110 - RNA, 24 nt, Artificial Sequence
  Synthetic
auauuuuauaauaaaauuuuauuu

SEQ ID NO: 686111 - RNA, 18 nt, Artificial Sequence
  Synthetic
cacaaaggaauuuuauuu

SEQ ID NO: 686112 - RNA, 19 nt, Artificial Sequence
  Synthetic
acacaaaggaauuuuauuu

SEQ ID NO: 686113 - RNA, 20 nt, Artificial Sequence
  Synthetic
gacacaaaggaauuuuauuu

SEQ ID NO: 686114 - RNA, 21 nt, Artificial Sequence
  Synthetic
ugacacaaaggaauuuuauuu

SEQ ID NO: 686115 - RNA, 22 nt, Artificial Sequence
  Synthetic
uugacacaaaggaauuuuauuu

SEQ ID NO: 686116 - RNA, 23 nt, Artificial Sequence
  Synthetic
uuugacacaaaggaauuuuauuu

SEQ ID NO: 686117 - RNA, 24 nt, Artificial Sequence
  Synthetic
cuuugacacaaaggaauuuuauuu

SEQ ID NO: 686118 - RNA, 18 nt, Artificial Sequence
  Synthetic
uccauuuaauuuuuauuu

SEQ ID NO: 686119 - RNA, 19 nt, Artificial Sequence
  Synthetic
auccauuuaauuuuuauuu

SEQ ID NO: 686120 - RNA, 20 nt, Artificial Sequence
  Synthetic
aauccauuuaauuuuuauuu

SEQ ID NO: 686121 - RNA, 21 nt, Artificial Sequence
  Synthetic
aaauccauuuaauuuuuauuu

SEQ ID NO: 686122 - RNA, 22 nt, Artificial Sequence
  Synthetic
aaaauccauuuaauuuuuauuu

SEQ ID NO: 686123 - RNA, 23 nt, Artificial Sequence
  Synthetic
aaaaauccauuuaauuuuuauuu

SEQ ID NO: 686124 - RNA, 24 nt, Artificial Sequence
  Synthetic
aaaaaauccauuuaauuuuuauuu

SEQ ID NO: 686125 - RNA, 18 nt, Artificial Sequence
  Synthetic
ucuaugaccuuuuuauuu

SEQ ID NO: 686126 - RNA, 19 nt, Artificial Sequence
  Synthetic
cucuaugaccuuuuuauuu

SEQ ID NO: 686127 - RNA, 20 nt, Artificial Sequence
  Synthetic
acucuaugaccuuuuuauuu

SEQ ID NO: 686128 - RNA, 21 nt, Artificial Sequence
  Synthetic
aacucuaugaccuuuuuauuu

SEQ ID NO: 686129 - RNA, 22 nt, Artificial Sequence
  Synthetic
caacucuaugaccuuuuuauuu

SEQ ID NO: 686130 - RNA, 23 nt, Artificial Sequence
  Synthetic
gcaacucuaugaccuuuuuauuu

SEQ ID NO: 686131 - RNA, 24 nt, Artificial Sequence
  Synthetic
ugcaacucuaugaccuuuuuauuu

SEQ ID NO: 686132 - RNA, 18 nt, Artificial Sequence
  Synthetic
ccccaugucuuuuuauuu

SEQ ID NO: 686133 - RNA, 19 nt, Artificial Sequence
  Synthetic
gccccaugucuuuuuauuu

SEQ ID NO: 686134 - RNA, 20 nt, Artificial Sequence
  Synthetic
agccccaugucuuuuuauuu

SEQ ID NO: 686135 - RNA, 21 nt, Artificial Sequence
  Synthetic
aagccccaugucuuuuuauuu

SEQ ID NO: 686136 - RNA, 22 nt, Artificial Sequence
  Synthetic
gaagccccaugucuuuuuauuu

SEQ ID NO: 686137 - RNA, 23 nt, Artificial Sequence
  Synthetic
ugaagccccaugucuuuuuauuu

SEQ ID NO: 686138 - RNA, 24 nt, Artificial Sequence
  Synthetic
augaagccccaugucuuuuuauuu

SEQ ID NO: 686139 - RNA, 18 nt, Artificial Sequence
  Synthetic
gguucuuucuuuuuauuu

SEQ ID NO: 686140 - RNA, 19 nt, Artificial Sequence
  Synthetic
ugguucuuucuuuuuauuu

SEQ ID NO: 686141 - RNA, 20 nt, Artificial Sequence
  Synthetic
cugguucuuucuuuuuauuu

SEQ ID NO: 686142 - RNA, 21 nt, Artificial Sequence
  Synthetic
ccugguucuuucuuuuuauuu

SEQ ID NO: 686143 - RNA, 22 nt, Artificial Sequence
  Synthetic
uccugguucuuucuuuuuauuu

SEQ ID NO: 686144 - RNA, 23 nt, Artificial Sequence
  Synthetic
cuccugguucuuucuuuuuauuu

SEQ ID NO: 686145 - RNA, 24 nt, Artificial Sequence
  Synthetic
gcuccugguucuuucuuuuuauuu

SEQ ID NO: 686146 - RNA, 18 nt, Artificial Sequence
  Synthetic
uaagaaacagaaaacuuu

SEQ ID NO: 686147 - RNA, 19 nt, Artificial Sequence
  Synthetic
cuaagaaacagaaaacuuu

SEQ ID NO: 686148 - RNA, 20 nt, Artificial Sequence
  Synthetic
ccuaagaaacagaaaacuuu

SEQ ID NO: 686149 - RNA, 21 nt, Artificial Sequence
  Synthetic
cccuaagaaacagaaaacuuu

SEQ ID NO: 686150 - RNA, 22 nt, Artificial Sequence
  Synthetic
acccuaagaaacagaaaacuuu

SEQ ID NO: 686151 - RNA, 23 nt, Artificial Sequence
  Synthetic
cacccuaagaaacagaaaacuuu

SEQ ID NO: 686152 - RNA, 24 nt, Artificial Sequence
  Synthetic
ucacccuaagaaacagaaaacuuu

SEQ ID NO: 686153 - RNA, 18 nt, Artificial Sequence
  Synthetic
uaaauuguuccaaacuuu

SEQ ID NO: 686154 - RNA, 19 nt, Artificial Sequence
  Synthetic
uuaaauuguuccaaacuuu

SEQ ID NO: 686155 - RNA, 20 nt, Artificial Sequence
  Synthetic
auuaaauuguuccaaacuuu

SEQ ID NO: 686156 - RNA, 21 nt, Artificial Sequence
  Synthetic
aauuaaauuguuccaaacuuu

SEQ ID NO: 686157 - RNA, 22 nt, Artificial Sequence
  Synthetic
aaauuaaauuguuccaaacuuu

SEQ ID NO: 686158 - RNA, 23 nt, Artificial Sequence
  Synthetic
gaaauuaaauuguuccaaacuuu

SEQ ID NO: 686159 - RNA, 24 nt, Artificial Sequence
  Synthetic
ugaaauuaaauuguuccaaacuuu

SEQ ID NO: 686160 - RNA, 18 nt, Artificial Sequence
  Synthetic
uuuucauggucaaacuuu

SEQ ID NO: 686161 - RNA, 19 nt, Artificial Sequence
  Synthetic
guuuucauggucaaacuuu

SEQ ID NO: 686162 - RNA, 20 nt, Artificial Sequence
  Synthetic
uguuuucauggucaaacuuu

SEQ ID NO: 686163 - RNA, 21 nt, Artificial Sequence
  Synthetic
uuguuuucauggucaaacuuu

SEQ ID NO: 686164 - RNA, 22 nt, Artificial Sequence
  Synthetic
auuguuuucauggucaaacuuu

SEQ ID NO: 686165 - RNA, 23 nt, Artificial Sequence
  Synthetic
aauuguuuucauggucaaacuuu

SEQ ID NO: 686166 - RNA, 24 nt, Artificial Sequence
  Synthetic
aaauuguuuucauggucaaacuuu

SEQ ID NO: 686167 - RNA, 18 nt, Artificial Sequence
  Synthetic
auguacaauucaaacuuu

SEQ ID NO: 686168 - RNA, 19 nt, Artificial Sequence
  Synthetic
gauguacaauucaaacuuu

SEQ ID NO: 686169 - RNA, 20 nt, Artificial Sequence
  Synthetic
agauguacaauucaaacuuu

SEQ ID NO: 686170 - RNA, 21 nt, Artificial Sequence
  Synthetic
cagauguacaauucaaacuuu

SEQ ID NO: 686171 - RNA, 22 nt, Artificial Sequence
  Synthetic
ucagauguacaauucaaacuuu

SEQ ID NO: 686172 - RNA, 23 nt, Artificial Sequence
  Synthetic
cucagauguacaauucaaacuuu

SEQ ID NO: 686173 - RNA, 24 nt, Artificial Sequence
  Synthetic
acucagauguacaauucaaacuuu

SEQ ID NO: 686174 - RNA, 18 nt, Artificial Sequence
  Synthetic
ggaguacaaggaaacuuu

SEQ ID NO: 686175 - RNA, 19 nt, Artificial Sequence
  Synthetic
gggaguacaaggaaacuuu

SEQ ID NO: 686176 - RNA, 20 nt, Artificial Sequence
  Synthetic
cgggaguacaaggaaacuuu

SEQ ID NO: 686177 - RNA, 21 nt, Artificial Sequence
  Synthetic
acgggaguacaaggaaacuuu

SEQ ID NO: 686178 - RNA, 22 nt, Artificial Sequence
  Synthetic
aacgggaguacaaggaaacuuu

SEQ ID NO: 686179 - RNA, 23 nt, Artificial Sequence
  Synthetic
caacgggaguacaaggaaacuuu

SEQ ID NO: 686180 - RNA, 24 nt, Artificial Sequence
  Synthetic
gcaacgggaguacaaggaaacuuu

SEQ ID NO: 686181 - RNA, 18 nt, Artificial Sequence
  Synthetic
guauugagaauaaacuuu

SEQ ID NO: 686182 - RNA, 19 nt, Artificial Sequence
  Synthetic
gguauugagaauaaacuuu

SEQ ID NO: 686183 - RNA, 20 nt, Artificial Sequence
  Synthetic
agguauugagaauaaacuuu

SEQ ID NO: 686184 - RNA, 21 nt, Artificial Sequence
  Synthetic
cagguauugagaauaaacuuu

SEQ ID NO: 686185 - RNA, 22 nt, Artificial Sequence
  Synthetic
ucagguauugagaauaaacuuu

SEQ ID NO: 686186 - RNA, 23 nt, Artificial Sequence
  Synthetic
aucagguauugagaauaaacuuu

SEQ ID NO: 686187 - RNA, 24 nt, Artificial Sequence
  Synthetic
uaucagguauugagaauaaacuuu

SEQ ID NO: 686188 - RNA, 18 nt, Artificial Sequence
  Synthetic
aggcagguccuaaacuuu

SEQ ID NO: 686189 - RNA, 19 nt, Artificial Sequence
  Synthetic
aaggcagguccuaaacuuu

SEQ ID NO: 686190 - RNA, 20 nt, Artificial Sequence
  Synthetic
aaaggcagguccuaaacuuu

SEQ ID NO: 686191 - RNA, 21 nt, Artificial Sequence
  Synthetic
aaaaggcagguccuaaacuuu

SEQ ID NO: 686192 - RNA, 22 nt, Artificial Sequence
  Synthetic
uaaaaggcagguccuaaacuuu

SEQ ID NO: 686193 - RNA, 23 nt, Artificial Sequence
  Synthetic
cuaaaaggcagguccuaaacuuu

SEQ ID NO: 686194 - RNA, 24 nt, Artificial Sequence
  Synthetic
ccuaaaaggcagguccuaaacuuu

SEQ ID NO: 686195 - RNA, 18 nt, Artificial Sequence
  Synthetic
auaaagcguuuaaacuuu

SEQ ID NO: 686196 - RNA, 19 nt, Artificial Sequence
  Synthetic
gauaaagcguuuaaacuuu

SEQ ID NO: 686197 - RNA, 20 nt, Artificial Sequence
  Synthetic
ggauaaagcguuuaaacuuu

SEQ ID NO: 686198 - RNA, 21 nt, Artificial Sequence
  Synthetic
gggauaaagcguuuaaacuuu

SEQ ID NO: 686199 - RNA, 22 nt, Artificial Sequence
  Synthetic
ugggauaaagcguuuaaacuuu

SEQ ID NO: 686200 - RNA, 23 nt, Artificial Sequence
  Synthetic
uugggauaaagcguuuaaacuuu

SEQ ID NO: 686201 - RNA, 24 nt, Artificial Sequence
  Synthetic
uuugggauaaagcguuuaaacuuu

SEQ ID NO: 686202 - RNA, 18 nt, Artificial Sequence
  Synthetic
uuaaaaaaacacaacuuu

SEQ ID NO: 686203 - RNA, 19 nt, Artificial Sequence
  Synthetic
guuaaaaaaacacaacuuu

SEQ ID NO: 686204 - RNA, 20 nt, Artificial Sequence
  Synthetic
aguuaaaaaaacacaacuuu

SEQ ID NO: 686205 - RNA, 21 nt, Artificial Sequence
  Synthetic
caguuaaaaaaacacaacuuu

SEQ ID NO: 686206 - RNA, 22 nt, Artificial Sequence
  Synthetic
gcaguuaaaaaaacacaacuuu

SEQ ID NO: 686207 - RNA, 23 nt, Artificial Sequence
  Synthetic
ggcaguuaaaaaaacacaacuuu

SEQ ID NO: 686208 - RNA, 24 nt, Artificial Sequence
  Synthetic
aggcaguuaaaaaaacacaacuuu

SEQ ID NO: 686209 - RNA, 18 nt, Artificial Sequence
  Synthetic
caggaaaaauccaacuuu

SEQ ID NO: 686210 - RNA, 19 nt, Artificial Sequence
  Synthetic
ccaggaaaaauccaacuuu

SEQ ID NO: 686211 - RNA, 20 nt, Artificial Sequence
  Synthetic
uccaggaaaaauccaacuuu

SEQ ID NO: 686212 - RNA, 21 nt, Artificial Sequence
  Synthetic
guccaggaaaaauccaacuuu

SEQ ID NO: 686213 - RNA, 22 nt, Artificial Sequence
  Synthetic
aguccaggaaaaauccaacuuu

SEQ ID NO: 686214 - RNA, 23 nt, Artificial Sequence
  Synthetic
aaguccaggaaaaauccaacuuu

SEQ ID NO: 686215 - RNA, 24 nt, Artificial Sequence
  Synthetic
aaaguccaggaaaaauccaacuuu

SEQ ID NO: 686216 - RNA, 18 nt, Artificial Sequence
  Synthetic
ucaaguugcuccaacuuu

SEQ ID NO: 686217 - RNA, 19 nt, Artificial Sequence
  Synthetic
uucaaguugcuccaacuuu

SEQ ID NO: 686218 - RNA, 20 nt, Artificial Sequence
  Synthetic
cuucaaguugcuccaacuuu

SEQ ID NO: 686219 - RNA, 21 nt, Artificial Sequence
  Synthetic
gcuucaaguugcuccaacuuu

SEQ ID NO: 686220 - RNA, 22 nt, Artificial Sequence
  Synthetic
ggcuucaaguugcuccaacuuu

SEQ ID NO: 686221 - RNA, 23 nt, Artificial Sequence
  Synthetic
uggcuucaaguugcuccaacuuu

SEQ ID NO: 686222 - RNA, 24 nt, Artificial Sequence
  Synthetic
guggcuucaaguugcuccaacuuu

SEQ ID NO: 686223 - RNA, 18 nt, Artificial Sequence
  Synthetic
aaguaugggagcaacuuu

SEQ ID NO: 686224 - RNA, 19 nt, Artificial Sequence
  Synthetic
aaaguaugggagcaacuuu

SEQ ID NO: 686225 - RNA, 20 nt, Artificial Sequence
  Synthetic
gaaaguaugggagcaacuuu

SEQ ID NO: 686226 - RNA, 21 nt, Artificial Sequence
  Synthetic
ggaaaguaugggagcaacuuu

SEQ ID NO: 686227 - RNA, 22 nt, Artificial Sequence
  Synthetic
aggaaaguaugggagcaacuuu

SEQ ID NO: 686228 - RNA, 23 nt, Artificial Sequence
  Synthetic
caggaaaguaugggagcaacuuu

SEQ ID NO: 686229 - RNA, 24 nt, Artificial Sequence
  Synthetic
acaggaaaguaugggagcaacuuu

SEQ ID NO: 686230 - RNA, 18 nt, Artificial Sequence
  Synthetic
caaguagucugcaacuuu

SEQ ID NO: 686231 - RNA, 19 nt, Artificial Sequence
  Synthetic
acaaguagucugcaacuuu

SEQ ID NO: 686232 - RNA, 20 nt, Artificial Sequence
  Synthetic
uacaaguagucugcaacuuu

SEQ ID NO: 686233 - RNA, 21 nt, Artificial Sequence
  Synthetic
guacaaguagucugcaacuuu

SEQ ID NO: 686234 - RNA, 22 nt, Artificial Sequence
  Synthetic
uguacaaguagucugcaacuuu

SEQ ID NO: 686235 - RNA, 23 nt, Artificial Sequence
  Synthetic
auguacaaguagucugcaacuuu

SEQ ID NO: 686236 - RNA, 24 nt, Artificial Sequence
  Synthetic
cauguacaaguagucugcaacuuu

SEQ ID NO: 686237 - RNA, 18 nt, Artificial Sequence
  Synthetic
auuauauuaaucaacuuu

SEQ ID NO: 686238 - RNA, 19 nt, Artificial Sequence
  Synthetic
cauuauauuaaucaacuuu

SEQ ID NO: 686239 - RNA, 20 nt, Artificial Sequence
  Synthetic
ucauuauauuaaucaacuuu

SEQ ID NO: 686240 - RNA, 21 nt, Artificial Sequence
  Synthetic
aucauuauauuaaucaacuuu

SEQ ID NO: 686241 - RNA, 22 nt, Artificial Sequence
  Synthetic
aaucauuauauuaaucaacuuu

SEQ ID NO: 686242 - RNA, 23 nt, Artificial Sequence
  Synthetic
uaaucauuauauuaaucaacuuu

SEQ ID NO: 686243 - RNA, 24 nt, Artificial Sequence
  Synthetic
auaaucauuauauuaaucaacuuu

SEQ ID NO: 686244 - RNA, 18 nt, Artificial Sequence
  Synthetic
cugccugaugagaacuuu

SEQ ID NO: 686245 - RNA, 19 nt, Artificial Sequence
  Synthetic
gcugccugaugagaacuuu

SEQ ID NO: 686246 - RNA, 20 nt, Artificial Sequence
  Synthetic
agcugccugaugagaacuuu

SEQ ID NO: 686247 - RNA, 21 nt, Artificial Sequence
  Synthetic
aagcugccugaugagaacuuu

SEQ ID NO: 686248 - RNA, 22 nt, Artificial Sequence
  Synthetic
aaagcugccugaugagaacuuu

SEQ ID NO: 686249 - RNA, 23 nt, Artificial Sequence
  Synthetic
aaaagcugccugaugagaacuuu

SEQ ID NO: 686250 - RNA, 24 nt, Artificial Sequence
  Synthetic
uaaaagcugccugaugagaacuuu

SEQ ID NO: 686251 - RNA, 18 nt, Artificial Sequence
  Synthetic
uuaugcauauggaacuuu

SEQ ID NO: 686252 - RNA, 19 nt, Artificial Sequence
  Synthetic
uuuaugcauauggaacuuu

SEQ ID NO: 686253 - RNA, 20 nt, Artificial Sequence
  Synthetic
guuuaugcauauggaacuuu

SEQ ID NO: 686254 - RNA, 21 nt, Artificial Sequence
  Synthetic
uguuuaugcauauggaacuuu

SEQ ID NO: 686255 - RNA, 22 nt, Artificial Sequence
  Synthetic
cuguuuaugcauauggaacuuu

SEQ ID NO: 686256 - RNA, 23 nt, Artificial Sequence
  Synthetic
acuguuuaugcauauggaacuuu

SEQ ID NO: 686257 - RNA, 24 nt, Artificial Sequence
  Synthetic
cacuguuuaugcauauggaacuuu

SEQ ID NO: 686258 - RNA, 18 nt, Artificial Sequence
  Synthetic
auuuauucaaauaacuuu

SEQ ID NO: 686259 - RNA, 19 nt, Artificial Sequence
  Synthetic
aauuuauucaaauaacuuu

SEQ ID NO: 686260 - RNA, 20 nt, Artificial Sequence
  Synthetic
uaauuuauucaaauaacuuu

SEQ ID NO: 686261 - RNA, 21 nt, Artificial Sequence
  Synthetic
uuaauuuauucaaauaacuuu

SEQ ID NO: 686262 - RNA, 22 nt, Artificial Sequence
  Synthetic
auuaauuuauucaaauaacuuu

SEQ ID NO: 686263 - RNA, 23 nt, Artificial Sequence
  Synthetic
uauuaauuuauucaaauaacuuu

SEQ ID NO: 686264 - RNA, 24 nt, Artificial Sequence
  Synthetic
auauuaauuuauucaaauaacuuu

SEQ ID NO: 686265 - RNA, 18 nt, Artificial Sequence
  Synthetic
aauuauccagauaacuuu

SEQ ID NO: 686266 - RNA, 19 nt, Artificial Sequence
  Synthetic
aaauuauccagauaacuuu

SEQ ID NO: 686267 - RNA, 20 nt, Artificial Sequence
  Synthetic
aaaauuauccagauaacuuu

SEQ ID NO: 686268 - RNA, 21 nt, Artificial Sequence
  Synthetic
uaaaauuauccagauaacuuu

SEQ ID NO: 686269 - RNA, 22 nt, Artificial Sequence
  Synthetic
cuaaaauuauccagauaacuuu

SEQ ID NO: 686270 - RNA, 23 nt, Artificial Sequence
  Synthetic
acuaaaauuauccagauaacuuu

SEQ ID NO: 686271 - RNA, 24 nt, Artificial Sequence
  Synthetic
uacuaaaauuauccagauaacuuu

SEQ ID NO: 686272 - RNA, 18 nt, Artificial Sequence
  Synthetic
auaacauuauauaacuuu

SEQ ID NO: 686273 - RNA, 19 nt, Artificial Sequence
  Synthetic
aauaacauuauauaacuuu

SEQ ID NO: 686274 - RNA, 20 nt, Artificial Sequence
  Synthetic
caauaacauuauauaacuuu

SEQ ID NO: 686275 - RNA, 21 nt, Artificial Sequence
  Synthetic
acaauaacauuauauaacuuu

SEQ ID NO: 686276 - RNA, 22 nt, Artificial Sequence
  Synthetic
aacaauaacauuauauaacuuu

SEQ ID NO: 686277 - RNA, 23 nt, Artificial Sequence
  Synthetic
gaacaauaacauuauauaacuuu

SEQ ID NO: 686278 - RNA, 24 nt, Artificial Sequence
  Synthetic
ggaacaauaacauuauauaacuuu

SEQ ID NO: 686279 - RNA, 18 nt, Artificial Sequence
  Synthetic
agggucaaaaguaacuuu

SEQ ID NO: 686280 - RNA, 19 nt, Artificial Sequence
  Synthetic
aagggucaaaaguaacuuu

SEQ ID NO: 686281 - RNA, 20 nt, Artificial Sequence
  Synthetic
aaagggucaaaaguaacuuu

SEQ ID NO: 686282 - RNA, 21 nt, Artificial Sequence
  Synthetic
gaaagggucaaaaguaacuuu

SEQ ID NO: 686283 - RNA, 22 nt, Artificial Sequence
  Synthetic
ggaaagggucaaaaguaacuuu

SEQ ID NO: 686284 - RNA, 23 nt, Artificial Sequence
  Synthetic
uggaaagggucaaaaguaacuuu

SEQ ID NO: 686285 - RNA, 24 nt, Artificial Sequence
  Synthetic
cuggaaagggucaaaaguaacuuu

SEQ ID NO: 686286 - RNA, 18 nt, Artificial Sequence
  Synthetic
gaugaggaacuuaacuuu

SEQ ID NO: 686287 - RNA, 19 nt, Artificial Sequence
  Synthetic
agaugaggaacuuaacuuu

SEQ ID NO: 686288 - RNA, 20 nt, Artificial Sequence
  Synthetic
uagaugaggaacuuaacuuu

SEQ ID NO: 686289 - RNA, 21 nt, Artificial Sequence
  Synthetic
auagaugaggaacuuaacuuu

SEQ ID NO: 686290 - RNA, 22 nt, Artificial Sequence
  Synthetic
uauagaugaggaacuuaacuuu

SEQ ID NO: 686291 - RNA, 23 nt, Artificial Sequence
  Synthetic
uuauagaugaggaacuuaacuuu

SEQ ID NO: 686292 - RNA, 24 nt, Artificial Sequence
  Synthetic
uuuauagaugaggaacuuaacuuu

SEQ ID NO: 686293 - RNA, 18 nt, Artificial Sequence
  Synthetic
uggcagguucuuaacuuu

SEQ ID NO: 686294 - RNA, 19 nt, Artificial Sequence
  Synthetic
cuggcagguucuuaacuuu

SEQ ID NO: 686295 - RNA, 20 nt, Artificial Sequence
  Synthetic
acuggcagguucuuaacuuu

SEQ ID NO: 686296 - RNA, 21 nt, Artificial Sequence
  Synthetic
gacuggcagguucuuaacuuu

SEQ ID NO: 686297 - RNA, 22 nt, Artificial Sequence
  Synthetic
ggacuggcagguucuuaacuuu

SEQ ID NO: 686298 - RNA, 23 nt, Artificial Sequence
  Synthetic
aggacuggcagguucuuaacuuu

SEQ ID NO: 686299 - RNA, 24 nt, Artificial Sequence
  Synthetic
caggacuggcagguucuuaacuuu

SEQ ID NO: 686300 - RNA, 18 nt, Artificial Sequence
  Synthetic
uucucuagcuuuaacuuu

SEQ ID NO: 686301 - RNA, 19 nt, Artificial Sequence
  Synthetic
uuucucuagcuuuaacuuu

SEQ ID NO: 686302 - RNA, 20 nt, Artificial Sequence
  Synthetic
auuucucuagcuuuaacuuu

SEQ ID NO: 686303 - RNA, 21 nt, Artificial Sequence
  Synthetic
gauuucucuagcuuuaacuuu

SEQ ID NO: 686304 - RNA, 22 nt, Artificial Sequence
  Synthetic
ugauuucucuagcuuuaacuuu

SEQ ID NO: 686305 - RNA, 23 nt, Artificial Sequence
  Synthetic
cugauuucucuagcuuuaacuuu

SEQ ID NO: 686306 - RNA, 24 nt, Artificial Sequence
  Synthetic
acugauuucucuagcuuuaacuuu

SEQ ID NO: 686307 - RNA, 18 nt, Artificial Sequence
  Synthetic
gaccagccaaaacacuuu

SEQ ID NO: 686308 - RNA, 19 nt, Artificial Sequence
  Synthetic
agaccagccaaaacacuuu

SEQ ID NO: 686309 - RNA, 20 nt, Artificial Sequence
  Synthetic
gagaccagccaaaacacuuu

SEQ ID NO: 686310 - RNA, 21 nt, Artificial Sequence
  Synthetic
ugagaccagccaaaacacuuu

SEQ ID NO: 686311 - RNA, 22 nt, Artificial Sequence
  Synthetic
gugagaccagccaaaacacuuu

SEQ ID NO: 686312 - RNA, 23 nt, Artificial Sequence
  Synthetic
ugugagaccagccaaaacacuuu

SEQ ID NO: 686313 - RNA, 24 nt, Artificial Sequence
  Synthetic
uugugagaccagccaaaacacuuu

SEQ ID NO: 686314 - RNA, 18 nt, Artificial Sequence
  Synthetic
cuucaaagaaaacacuuu

SEQ ID NO: 686315 - RNA, 19 nt, Artificial Sequence
  Synthetic
ccuucaaagaaaacacuuu

SEQ ID NO: 686316 - RNA, 20 nt, Artificial Sequence
  Synthetic
cccuucaaagaaaacacuuu

SEQ ID NO: 686317 - RNA, 21 nt, Artificial Sequence
  Synthetic
gcccuucaaagaaaacacuuu

SEQ ID NO: 686318 - RNA, 22 nt, Artificial Sequence
  Synthetic
ugcccuucaaagaaaacacuuu

SEQ ID NO: 686319 - RNA, 23 nt, Artificial Sequence
  Synthetic
augcccuucaaagaaaacacuuu

SEQ ID NO: 686320 - RNA, 24 nt, Artificial Sequence
  Synthetic
aaugcccuucaaagaaaacacuuu

SEQ ID NO: 686321 - RNA, 18 nt, Artificial Sequence
  Synthetic
uuacuacacaaacacuuu

SEQ ID NO: 686322 - RNA, 19 nt, Artificial Sequence
  Synthetic
auuacuacacaaacacuuu

SEQ ID NO: 686323 - RNA, 20 nt, Artificial Sequence
  Synthetic
uauuacuacacaaacacuuu

SEQ ID NO: 686324 - RNA, 21 nt, Artificial Sequence
  Synthetic
cuauuacuacacaaacacuuu

SEQ ID NO: 686325 - RNA, 22 nt, Artificial Sequence
  Synthetic
ucuauuacuacacaaacacuuu

SEQ ID NO: 686326 - RNA, 23 nt, Artificial Sequence
  Synthetic
uucuauuacuacacaaacacuuu

SEQ ID NO: 686327 - RNA, 24 nt, Artificial Sequence
  Synthetic
cuucuauuacuacacaaacacuuu

SEQ ID NO: 686328 - RNA, 18 nt, Artificial Sequence
  Synthetic
cuauaaucccaacacuuu

SEQ ID NO: 686329 - RNA, 19 nt, Artificial Sequence
  Synthetic
ccuauaaucccaacacuuu

SEQ ID NO: 686330 - RNA, 20 nt, Artificial Sequence
  Synthetic
accuauaaucccaacacuuu

SEQ ID NO: 686331 - RNA, 21 nt, Artificial Sequence
  Synthetic
caccuauaaucccaacacuuu

SEQ ID NO: 686332 - RNA, 22 nt, Artificial Sequence
  Synthetic
acaccuauaaucccaacacuuu

SEQ ID NO: 686333 - RNA, 23 nt, Artificial Sequence
  Synthetic
cacaccuauaaucccaacacuuu

SEQ ID NO: 686334 - RNA, 24 nt, Artificial Sequence
  Synthetic
ucacaccuauaaucccaacacuuu

SEQ ID NO: 686335 - RNA, 18 nt, Artificial Sequence
  Synthetic
acuaaaugauuacacuuu

SEQ ID NO: 686336 - RNA, 19 nt, Artificial Sequence
  Synthetic
aacuaaaugauuacacuuu

SEQ ID NO: 686337 - RNA, 20 nt, Artificial Sequence
  Synthetic
uaacuaaaugauuacacuuu

SEQ ID NO: 686338 - RNA, 21 nt, Artificial Sequence
  Synthetic
auaacuaaaugauuacacuuu

SEQ ID NO: 686339 - RNA, 22 nt, Artificial Sequence
  Synthetic
cauaacuaaaugauuacacuuu

SEQ ID NO: 686340 - RNA, 23 nt, Artificial Sequence
  Synthetic
ucauaacuaaaugauuacacuuu

SEQ ID NO: 686341 - RNA, 24 nt, Artificial Sequence
  Synthetic
cucauaacuaaaugauuacacuuu

SEQ ID NO: 686342 - RNA, 18 nt, Artificial Sequence
  Synthetic
cuguaaucccaccacuuu

SEQ ID NO: 686343 - RNA, 19 nt, Artificial Sequence
  Synthetic
ccuguaaucccaccacuuu

SEQ ID NO: 686344 - RNA, 20 nt, Artificial Sequence
  Synthetic
gccuguaaucccaccacuuu

SEQ ID NO: 686345 - RNA, 21 nt, Artificial Sequence
  Synthetic
cgccuguaaucccaccacuuu

SEQ ID NO: 686346 - RNA, 22 nt, Artificial Sequence
  Synthetic
acgccuguaaucccaccacuuu

SEQ ID NO: 686347 - RNA, 23 nt, Artificial Sequence
  Synthetic
cacgccuguaaucccaccacuuu

SEQ ID NO: 686348 - RNA, 24 nt, Artificial Sequence
  Synthetic
ucacgccuguaaucccaccacuuu

SEQ ID NO: 686349 - RNA, 18 nt, Artificial Sequence
  Synthetic
agcaggaagccccacuuu

SEQ ID NO: 686350 - RNA, 19 nt, Artificial Sequence
  Synthetic
aagcaggaagccccacuuu

SEQ ID NO: 686351 - RNA, 20 nt, Artificial Sequence
  Synthetic
aaagcaggaagccccacuuu

SEQ ID NO: 686352 - RNA, 21 nt, Artificial Sequence
  Synthetic
aaaagcaggaagccccacuuu

SEQ ID NO: 686353 - RNA, 22 nt, Artificial Sequence
  Synthetic
gaaaagcaggaagccccacuuu

SEQ ID NO: 686354 - RNA, 23 nt, Artificial Sequence
  Synthetic
ugaaaagcaggaagccccacuuu

SEQ ID NO: 686355 - RNA, 24 nt, Artificial Sequence
  Synthetic
cugaaaagcaggaagccccacuuu

SEQ ID NO: 686356 - RNA, 18 nt, Artificial Sequence
  Synthetic
agugcuguaauccacuuu

SEQ ID NO: 686357 - RNA, 19 nt, Artificial Sequence
  Synthetic
cagugcuguaauccacuuu

SEQ ID NO: 686358 - RNA, 20 nt, Artificial Sequence
  Synthetic
ucagugcuguaauccacuuu

SEQ ID NO: 686359 - RNA, 21 nt, Artificial Sequence
  Synthetic
aucagugcuguaauccacuuu

SEQ ID NO: 686360 - RNA, 22 nt, Artificial Sequence
  Synthetic
uaucagugcuguaauccacuuu

SEQ ID NO: 686361 - RNA, 23 nt, Artificial Sequence
  Synthetic
uuaucagugcuguaauccacuuu

SEQ ID NO: 686362 - RNA, 24 nt, Artificial Sequence
  Synthetic
guuaucagugcuguaauccacuuu

SEQ ID NO: 686363 - RNA, 18 nt, Artificial Sequence
  Synthetic
aagagcuuaaagcacuuu

SEQ ID NO: 686364 - RNA, 19 nt, Artificial Sequence
  Synthetic
aaagagcuuaaagcacuuu

SEQ ID NO: 686365 - RNA, 20 nt, Artificial Sequence
  Synthetic
caaagagcuuaaagcacuuu

SEQ ID NO: 686366 - RNA, 21 nt, Artificial Sequence
  Synthetic
ccaaagagcuuaaagcacuuu

SEQ ID NO: 686367 - RNA, 22 nt, Artificial Sequence
  Synthetic
uccaaagagcuuaaagcacuuu

SEQ ID NO: 686368 - RNA, 23 nt, Artificial Sequence
  Synthetic
cuccaaagagcuuaaagcacuuu

SEQ ID NO: 686369 - RNA, 24 nt, Artificial Sequence
  Synthetic
ucuccaaagagcuuaaagcacuuu

SEQ ID NO: 686370 - RNA, 21 nt, Artificial Sequence
  Synthetic
ugccuguaauaccagcacuuu

SEQ ID NO: 686371 - RNA, 22 nt, Artificial Sequence
  Synthetic
augccuguaauaccagcacuuu

SEQ ID NO: 686372 - RNA, 23 nt, Artificial Sequence
  Synthetic
caugccuguaauaccagcacuuu

SEQ ID NO: 686373 - RNA, 24 nt, Artificial Sequence
  Synthetic
ucaugccuguaauaccagcacuuu

SEQ ID NO: 686374 - RNA, 18 nt, Artificial Sequence
  Synthetic
cuguaaacccagcacuuu

SEQ ID NO: 686375 - RNA, 19 nt, Artificial Sequence
  Synthetic
ccuguaaacccagcacuuu

SEQ ID NO: 686376 - RNA, 20 nt, Artificial Sequence
  Synthetic
gccuguaaacccagcacuuu

SEQ ID NO: 686377 - RNA, 21 nt, Artificial Sequence
  Synthetic
cgccuguaaacccagcacuuu

SEQ ID NO: 686378 - RNA, 22 nt, Artificial Sequence
  Synthetic
acgccuguaaacccagcacuuu

SEQ ID NO: 686379 - RNA, 23 nt, Artificial Sequence
  Synthetic
cacgccuguaaacccagcacuuu

SEQ ID NO: 686380 - RNA, 24 nt, Artificial Sequence
  Synthetic
ucacgccuguaaacccagcacuuu

SEQ ID NO: 686381 - RNA, 18 nt, Artificial Sequence
  Synthetic
cugaaaucccagcacuuu

SEQ ID NO: 686382 - RNA, 19 nt, Artificial Sequence
  Synthetic
acugaaaucccagcacuuu

SEQ ID NO: 686383 - RNA, 20 nt, Artificial Sequence
  Synthetic
aacugaaaucccagcacuuu

SEQ ID NO: 686384 - RNA, 21 nt, Artificial Sequence
  Synthetic
caacugaaaucccagcacuuu

SEQ ID NO: 686385 - RNA, 22 nt, Artificial Sequence
  Synthetic
acaacugaaaucccagcacuuu

SEQ ID NO: 686386 - RNA, 23 nt, Artificial Sequence
  Synthetic
cacaacugaaaucccagcacuuu

SEQ ID NO: 686387 - RNA, 24 nt, Artificial Sequence
  Synthetic
ucacaacugaaaucccagcacuuu

SEQ ID NO: 686388 - RNA, 18 nt, Artificial Sequence
  Synthetic
uguaaaucccagcacuuu

SEQ ID NO: 686389 - RNA, 19 nt, Artificial Sequence
  Synthetic
cuguaaaucccagcacuuu

SEQ ID NO: 686390 - RNA, 20 nt, Artificial Sequence
  Synthetic
ccuguaaaucccagcacuuu

SEQ ID NO: 686391 - RNA, 21 nt, Artificial Sequence
  Synthetic
gccuguaaaucccagcacuuu

SEQ ID NO: 686392 - RNA, 22 nt, Artificial Sequence
  Synthetic
cgccuguaaaucccagcacuuu

SEQ ID NO: 686393 - RNA, 23 nt, Artificial Sequence
  Synthetic
acgccuguaaaucccagcacuuu

SEQ ID NO: 686394 - RNA, 24 nt, Artificial Sequence
  Synthetic
cacgccuguaaaucccagcacuuu

SEQ ID NO: 686395 - RNA, 18 nt, Artificial Sequence
  Synthetic
cugcaaucccagcacuuu

SEQ ID NO: 686396 - RNA, 19 nt, Artificial Sequence
  Synthetic
ucugcaaucccagcacuuu

SEQ ID NO: 686397 - RNA, 20 nt, Artificial Sequence
  Synthetic
gucugcaaucccagcacuuu

SEQ ID NO: 686398 - RNA, 21 nt, Artificial Sequence
  Synthetic
cgucugcaaucccagcacuuu

SEQ ID NO: 686399 - RNA, 22 nt, Artificial Sequence
  Synthetic
acgucugcaaucccagcacuuu

SEQ ID NO: 686400 - RNA, 23 nt, Artificial Sequence
  Synthetic
cacgucugcaaucccagcacuuu

SEQ ID NO: 686401 - RNA, 24 nt, Artificial Sequence
  Synthetic
ucacgucugcaaucccagcacuuu

SEQ ID NO: 686402 - RNA, 18 nt, Artificial Sequence
  Synthetic
caguaaucccagcacuuu

SEQ ID NO: 686403 - RNA, 19 nt, Artificial Sequence
  Synthetic
ccaguaaucccagcacuuu

SEQ ID NO: 686404 - RNA, 20 nt, Artificial Sequence
  Synthetic
accaguaaucccagcacuuu

SEQ ID NO: 686405 - RNA, 21 nt, Artificial Sequence
  Synthetic
caccaguaaucccagcacuuu

SEQ ID NO: 686406 - RNA, 22 nt, Artificial Sequence
  Synthetic
acaccaguaaucccagcacuuu

SEQ ID NO: 686407 - RNA, 23 nt, Artificial Sequence
  Synthetic
cacaccaguaaucccagcacuuu

SEQ ID NO: 686408 - RNA, 24 nt, Artificial Sequence
  Synthetic
ucacaccaguaaucccagcacuuu

SEQ ID NO: 686409 - RNA, 18 nt, Artificial Sequence
  Synthetic
ccguaaucccagcacuuu

SEQ ID NO: 686410 - RNA, 19 nt, Artificial Sequence
  Synthetic
cccguaaucccagcacuuu

SEQ ID NO: 686411 - RNA, 20 nt, Artificial Sequence
  Synthetic
gcccguaaucccagcacuuu

SEQ ID NO: 686412 - RNA, 21 nt, Artificial Sequence
  Synthetic
ugcccguaaucccagcacuuu

SEQ ID NO: 686413 - RNA, 22 nt, Artificial Sequence
  Synthetic
augcccguaaucccagcacuuu

SEQ ID NO: 686414 - RNA, 23 nt, Artificial Sequence
  Synthetic
caugcccguaaucccagcacuuu

SEQ ID NO: 686415 - RNA, 24 nt, Artificial Sequence
  Synthetic
ucaugcccguaaucccagcacuuu

SEQ ID NO: 686416 - RNA, 18 nt, Artificial Sequence
  Synthetic
cuguaaucccagcacuuu

SEQ ID NO: 686417 - RNA, 19 nt, Artificial Sequence
  Synthetic
acuguaaucccagcacuuu

SEQ ID NO: 686418 - RNA, 20 nt, Artificial Sequence
  Synthetic
gacuguaaucccagcacuuu

SEQ ID NO: 686419 - RNA, 21 nt, Artificial Sequence
  Synthetic
agacuguaaucccagcacuuu

SEQ ID NO: 686420 - RNA, 22 nt, Artificial Sequence
  Synthetic
aagacuguaaucccagcacuuu

SEQ ID NO: 686421 - RNA, 23 nt, Artificial Sequence
  Synthetic
caagacuguaaucccagcacuuu

SEQ ID NO: 686422 - RNA, 24 nt, Artificial Sequence
  Synthetic
ucaagacuguaaucccagcacuuu

SEQ ID NO: 686423 - RNA, 21 nt, Artificial Sequence
  Synthetic
caccuguaaucccagcacuuu

SEQ ID NO: 686424 - RNA, 22 nt, Artificial Sequence
  Synthetic
acaccuguaaucccagcacuuu

SEQ ID NO: 686425 - RNA, 23 nt, Artificial Sequence
  Synthetic
cacaccuguaaucccagcacuuu

SEQ ID NO: 686426 - RNA, 24 nt, Artificial Sequence
  Synthetic
ucacaccuguaaucccagcacuuu

SEQ ID NO: 686427 - RNA, 23 nt, Artificial Sequence
  Synthetic
uacgccuguaaucccagcacuuu

SEQ ID NO: 686428 - RNA, 24 nt, Artificial Sequence
  Synthetic
uuacgccuguaaucccagcacuuu

SEQ ID NO: 686429 - RNA, 21 nt, Artificial Sequence
  Synthetic
ugccuguaaucccagcacuuu

SEQ ID NO: 686430 - RNA, 22 nt, Artificial Sequence
  Synthetic
uugccuguaaucccagcacuuu

SEQ ID NO: 686431 - RNA, 23 nt, Artificial Sequence
  Synthetic
cuugccuguaaucccagcacuuu

SEQ ID NO: 686432 - RNA, 24 nt, Artificial Sequence
  Synthetic
ucuugccuguaaucccagcacuuu

SEQ ID NO: 686433 - RNA, 21 nt, Artificial Sequence
  Synthetic
ggucuguaaucccagcacuuu

SEQ ID NO: 686434 - RNA, 22 nt, Artificial Sequence
  Synthetic
aggucuguaaucccagcacuuu

SEQ ID NO: 686435 - RNA, 23 nt, Artificial Sequence
  Synthetic
caggucuguaaucccagcacuuu

SEQ ID NO: 686436 - RNA, 24 nt, Artificial Sequence
  Synthetic
ucaggucuguaaucccagcacuuu

SEQ ID NO: 686437 - RNA, 18 nt, Artificial Sequence
  Synthetic
ccuguaucccagcacuuu

SEQ ID NO: 686438 - RNA, 19 nt, Artificial Sequence
  Synthetic
gccuguaucccagcacuuu

SEQ ID NO: 686439 - RNA, 20 nt, Artificial Sequence
  Synthetic
cgccuguaucccagcacuuu

SEQ ID NO: 686440 - RNA, 21 nt, Artificial Sequence
  Synthetic
acgccuguaucccagcacuuu

SEQ ID NO: 686441 - RNA, 22 nt, Artificial Sequence
  Synthetic
cacgccuguaucccagcacuuu

SEQ ID NO: 686442 - RNA, 23 nt, Artificial Sequence
  Synthetic
ucacgccuguaucccagcacuuu

SEQ ID NO: 686443 - RNA, 24 nt, Artificial Sequence
  Synthetic
cucacgccuguaucccagcacuuu

SEQ ID NO: 686444 - RNA, 18 nt, Artificial Sequence
  Synthetic
gcgguggcucagcacuuu

SEQ ID NO: 686445 - RNA, 19 nt, Artificial Sequence
  Synthetic
ugcgguggcucagcacuuu

SEQ ID NO: 686446 - RNA, 20 nt, Artificial Sequence
  Synthetic
gugcgguggcucagcacuuu

SEQ ID NO: 686447 - RNA, 21 nt, Artificial Sequence
  Synthetic
ggugcgguggcucagcacuuu

SEQ ID NO: 686448 - RNA, 22 nt, Artificial Sequence
  Synthetic
gggugcgguggcucagcacuuu

SEQ ID NO: 686449 - RNA, 23 nt, Artificial Sequence
  Synthetic
ugggugcgguggcucagcacuuu

SEQ ID NO: 686450 - RNA, 24 nt, Artificial Sequence
  Synthetic
cugggugcgguggcucagcacuuu

SEQ ID NO: 686451 - RNA, 18 nt, Artificial Sequence
  Synthetic
cuguaaucucagcacuuu

SEQ ID NO: 686452 - RNA, 19 nt, Artificial Sequence
  Synthetic
ccuguaaucucagcacuuu

SEQ ID NO: 686453 - RNA, 20 nt, Artificial Sequence
  Synthetic
gccuguaaucucagcacuuu

SEQ ID NO: 686454 - RNA, 21 nt, Artificial Sequence
  Synthetic
cgccuguaaucucagcacuuu

SEQ ID NO: 686455 - RNA, 22 nt, Artificial Sequence
  Synthetic
acgccuguaaucucagcacuuu

SEQ ID NO: 686456 - RNA, 23 nt, Artificial Sequence
  Synthetic
gacgccuguaaucucagcacuuu

SEQ ID NO: 686457 - RNA, 24 nt, Artificial Sequence
  Synthetic
ugacgccuguaaucucagcacuuu

SEQ ID NO: 686458 - RNA, 18 nt, Artificial Sequence
  Synthetic
cuauaauccuagcacuuu

SEQ ID NO: 686459 - RNA, 19 nt, Artificial Sequence
  Synthetic
ccuauaauccuagcacuuu

SEQ ID NO: 686460 - RNA, 20 nt, Artificial Sequence
  Synthetic
gccuauaauccuagcacuuu

SEQ ID NO: 686461 - RNA, 21 nt, Artificial Sequence
  Synthetic
ugccuauaauccuagcacuuu

SEQ ID NO: 686462 - RNA, 22 nt, Artificial Sequence
  Synthetic
cugccuauaauccuagcacuuu

SEQ ID NO: 686463 - RNA, 23 nt, Artificial Sequence
  Synthetic
ccugccuauaauccuagcacuuu

SEQ ID NO: 686464 - RNA, 24 nt, Artificial Sequence
  Synthetic
gccugccuauaauccuagcacuuu

SEQ ID NO: 686465 - RNA, 18 nt, Artificial Sequence
  Synthetic
cuguaauccuagcacuuu

SEQ ID NO: 686466 - RNA, 19 nt, Artificial Sequence
  Synthetic
ccuguaauccuagcacuuu

SEQ ID NO: 686467 - RNA, 20 nt, Artificial Sequence
  Synthetic
gccuguaauccuagcacuuu

SEQ ID NO: 686468 - RNA, 21 nt, Artificial Sequence
  Synthetic
cgccuguaauccuagcacuuu

SEQ ID NO: 686469 - RNA, 22 nt, Artificial Sequence
  Synthetic
acgccuguaauccuagcacuuu

SEQ ID NO: 686470 - RNA, 23 nt, Artificial Sequence
  Synthetic
cacgccuguaauccuagcacuuu

SEQ ID NO: 686471 - RNA, 24 nt, Artificial Sequence
  Synthetic
ucacgccuguaauccuagcacuuu

SEQ ID NO: 686472 - RNA, 18 nt, Artificial Sequence
  Synthetic
cugugauuuuagcacuuu

SEQ ID NO: 686473 - RNA, 19 nt, Artificial Sequence
  Synthetic
ucugugauuuuagcacuuu

SEQ ID NO: 686474 - RNA, 20 nt, Artificial Sequence
  Synthetic
gucugugauuuuagcacuuu

SEQ ID NO: 686475 - RNA, 21 nt, Artificial Sequence
  Synthetic
cgucugugauuuuagcacuuu

SEQ ID NO: 686476 - RNA, 22 nt, Artificial Sequence
  Synthetic
acgucugugauuuuagcacuuu

SEQ ID NO: 686477 - RNA, 23 nt, Artificial Sequence
  Synthetic
cacgucugugauuuuagcacuuu

SEQ ID NO: 686478 - RNA, 24 nt, Artificial Sequence
  Synthetic
ucacgucugugauuuuagcacuuu

SEQ ID NO: 686479 - RNA, 18 nt, Artificial Sequence
  Synthetic
gucuaguuuuagcacuuu

SEQ ID NO: 686480 - RNA, 19 nt, Artificial Sequence
  Synthetic
ugucuaguuuuagcacuuu

SEQ ID NO: 686481 - RNA, 20 nt, Artificial Sequence
  Synthetic
uugucuaguuuuagcacuuu

SEQ ID NO: 686482 - RNA, 21 nt, Artificial Sequence
  Synthetic
auugucuaguuuuagcacuuu

SEQ ID NO: 686483 - RNA, 22 nt, Artificial Sequence
  Synthetic
uauugucuaguuuuagcacuuu

SEQ ID NO: 686484 - RNA, 23 nt, Artificial Sequence
  Synthetic
uuauugucuaguuuuagcacuuu

SEQ ID NO: 686485 - RNA, 24 nt, Artificial Sequence
  Synthetic
uuuauugucuaguuuuagcacuuu

SEQ ID NO: 686486 - RNA, 18 nt, Artificial Sequence
  Synthetic
cuguaauccccgcacuuu

SEQ ID NO: 686487 - RNA, 19 nt, Artificial Sequence
  Synthetic
ccuguaauccccgcacuuu

SEQ ID NO: 686488 - RNA, 20 nt, Artificial Sequence
  Synthetic
accuguaauccccgcacuuu

SEQ ID NO: 686489 - RNA, 21 nt, Artificial Sequence
  Synthetic
caccuguaauccccgcacuuu

SEQ ID NO: 686490 - RNA, 22 nt, Artificial Sequence
  Synthetic
acaccuguaauccccgcacuuu

SEQ ID NO: 686491 - RNA, 23 nt, Artificial Sequence
  Synthetic
cacaccuguaauccccgcacuuu

SEQ ID NO: 686492 - RNA, 24 nt, Artificial Sequence
  Synthetic
ucacaccuguaauccccgcacuuu

SEQ ID NO: 686493 - RNA, 20 nt, Artificial Sequence
  Synthetic
gccuguaauccccgcacuuu

SEQ ID NO: 686494 - RNA, 21 nt, Artificial Sequence
  Synthetic
cgccuguaauccccgcacuuu

SEQ ID NO: 686495 - RNA, 22 nt, Artificial Sequence
  Synthetic
acgccuguaauccccgcacuuu

SEQ ID NO: 686496 - RNA, 23 nt, Artificial Sequence
  Synthetic
cacgccuguaauccccgcacuuu

SEQ ID NO: 686497 - RNA, 24 nt, Artificial Sequence
  Synthetic
ucacgccuguaauccccgcacuuu

SEQ ID NO: 686498 - RNA, 21 nt, Artificial Sequence
  Synthetic
ugccuguaauccccgcacuuu

SEQ ID NO: 686499 - RNA, 22 nt, Artificial Sequence
  Synthetic
augccuguaauccccgcacuuu

SEQ ID NO: 686500 - RNA, 23 nt, Artificial Sequence
  Synthetic
caugccuguaauccccgcacuuu

SEQ ID NO: 686501 - RNA, 24 nt, Artificial Sequence
  Synthetic
ucaugccuguaauccccgcacuuu

SEQ ID NO: 686502 - RNA, 18 nt, Artificial Sequence
  Synthetic
ugaguaguggggcacuuu

SEQ ID NO: 686503 - RNA, 19 nt, Artificial Sequence
  Synthetic
gugaguaguggggcacuuu

SEQ ID NO: 686504 - RNA, 20 nt, Artificial Sequence
  Synthetic
agugaguaguggggcacuuu

SEQ ID NO: 686505 - RNA, 21 nt, Artificial Sequence
  Synthetic
cagugaguaguggggcacuuu

SEQ ID NO: 686506 - RNA, 22 nt, Artificial Sequence
  Synthetic
ucagugaguaguggggcacuuu

SEQ ID NO: 686507 - RNA, 23 nt, Artificial Sequence
  Synthetic
aucagugaguaguggggcacuuu

SEQ ID NO: 686508 - RNA, 24 nt, Artificial Sequence
  Synthetic
caucagugaguaguggggcacuuu

SEQ ID NO: 686509 - RNA, 18 nt, Artificial Sequence
  Synthetic
agggaaucuuugcacuuu

SEQ ID NO: 686510 - RNA, 19 nt, Artificial Sequence
  Synthetic
gagggaaucuuugcacuuu

SEQ ID NO: 686511 - RNA, 20 nt, Artificial Sequence
  Synthetic
agagggaaucuuugcacuuu

SEQ ID NO: 686512 - RNA, 21 nt, Artificial Sequence
  Synthetic
gagagggaaucuuugcacuuu

SEQ ID NO: 686513 - RNA, 22 nt, Artificial Sequence
  Synthetic
agagagggaaucuuugcacuuu

SEQ ID NO: 686514 - RNA, 23 nt, Artificial Sequence
  Synthetic
cagagagggaaucuuugcacuuu

SEQ ID NO: 686515 - RNA, 24 nt, Artificial Sequence
  Synthetic
gcagagagggaaucuuugcacuuu

SEQ ID NO: 686516 - RNA, 18 nt, Artificial Sequence
  Synthetic
ggggcaaagguucacuuu

SEQ ID NO: 686517 - RNA, 19 nt, Artificial Sequence
  Synthetic
gggggcaaagguucacuuu

SEQ ID NO: 686518 - RNA, 20 nt, Artificial Sequence
  Synthetic
ugggggcaaagguucacuuu

SEQ ID NO: 686519 - RNA, 21 nt, Artificial Sequence
  Synthetic
cugggggcaaagguucacuuu

SEQ ID NO: 686520 - RNA, 22 nt, Artificial Sequence
  Synthetic
acugggggcaaagguucacuuu

SEQ ID NO: 686521 - RNA, 23 nt, Artificial Sequence
  Synthetic
aacugggggcaaagguucacuuu

SEQ ID NO: 686522 - RNA, 24 nt, Artificial Sequence
  Synthetic
uaacugggggcaaagguucacuuu

SEQ ID NO: 686523 - RNA, 18 nt, Artificial Sequence
  Synthetic
uuuacaaacuuucacuuu

SEQ ID NO: 686524 - RNA, 19 nt, Artificial Sequence
  Synthetic
uuuuacaaacuuucacuuu

SEQ ID NO: 686525 - RNA, 20 nt, Artificial Sequence
  Synthetic
uuuuuacaaacuuucacuuu

SEQ ID NO: 686526 - RNA, 21 nt, Artificial Sequence
  Synthetic
uuuuuuacaaacuuucacuuu

SEQ ID NO: 686527 - RNA, 22 nt, Artificial Sequence
  Synthetic
cuuuuuuacaaacuuucacuuu

SEQ ID NO: 686528 - RNA, 23 nt, Artificial Sequence
  Synthetic
ccuuuuuuacaaacuuucacuuu

SEQ ID NO: 686529 - RNA, 24 nt, Artificial Sequence
  Synthetic
uccuuuuuuacaaacuuucacuuu

SEQ ID NO: 686530 - RNA, 18 nt, Artificial Sequence
  Synthetic
aauguaccuuuucacuuu

SEQ ID NO: 686531 - RNA, 19 nt, Artificial Sequence
  Synthetic
aaauguaccuuuucacuuu

SEQ ID NO: 686532 - RNA, 20 nt, Artificial Sequence
  Synthetic
aaaauguaccuuuucacuuu

SEQ ID NO: 686533 - RNA, 21 nt, Artificial Sequence
  Synthetic
uaaaauguaccuuuucacuuu

SEQ ID NO: 686534 - RNA, 22 nt, Artificial Sequence
  Synthetic
uuaaaauguaccuuuucacuuu

SEQ ID NO: 686535 - RNA, 23 nt, Artificial Sequence
  Synthetic
guuaaaauguaccuuuucacuuu

SEQ ID NO: 686536 - RNA, 24 nt, Artificial Sequence
  Synthetic
aguuaaaauguaccuuuucacuuu

SEQ ID NO: 686537 - RNA, 18 nt, Artificial Sequence
  Synthetic
uucuugaugaaagacuuu

SEQ ID NO: 686538 - RNA, 19 nt, Artificial Sequence
  Synthetic
uuucuugaugaaagacuuu

SEQ ID NO: 686539 - RNA, 20 nt, Artificial Sequence
  Synthetic
cuuucuugaugaaagacuuu

SEQ ID NO: 686540 - RNA, 21 nt, Artificial Sequence
  Synthetic
ucuuucuugaugaaagacuuu

SEQ ID NO: 686541 - RNA, 22 nt, Artificial Sequence
  Synthetic
cucuuucuugaugaaagacuuu

SEQ ID NO: 686542 - RNA, 23 nt, Artificial Sequence
  Synthetic
ccucuuucuugaugaaagacuuu

SEQ ID NO: 686543 - RNA, 24 nt, Artificial Sequence
  Synthetic
gccucuuucuugaugaaagacuuu

SEQ ID NO: 686544 - RNA, 18 nt, Artificial Sequence
  Synthetic
acuucaauuacagacuuu

SEQ ID NO: 686545 - RNA, 19 nt, Artificial Sequence
  Synthetic
aacuucaauuacagacuuu

SEQ ID NO: 686546 - RNA, 20 nt, Artificial Sequence
  Synthetic
uaacuucaauuacagacuuu

SEQ ID NO: 686547 - RNA, 21 nt, Artificial Sequence
  Synthetic
guaacuucaauuacagacuuu

SEQ ID NO: 686548 - RNA, 22 nt, Artificial Sequence
  Synthetic
uguaacuucaauuacagacuuu

SEQ ID NO: 686549 - RNA, 23 nt, Artificial Sequence
  Synthetic
cuguaacuucaauuacagacuuu

SEQ ID NO: 686550 - RNA, 24 nt, Artificial Sequence
  Synthetic
acuguaacuucaauuacagacuuu

SEQ ID NO: 686551 - RNA, 18 nt, Artificial Sequence
  Synthetic
cuugaaaauucagacuuu

SEQ ID NO: 686552 - RNA, 19 nt, Artificial Sequence
  Synthetic
ccuugaaaauucagacuuu

SEQ ID NO: 686553 - RNA, 20 nt, Artificial Sequence
  Synthetic
cccuugaaaauucagacuuu

SEQ ID NO: 686554 - RNA, 21 nt, Artificial Sequence
  Synthetic
gcccuugaaaauucagacuuu

SEQ ID NO: 686555 - RNA, 22 nt, Artificial Sequence
  Synthetic
agcccuugaaaauucagacuuu

SEQ ID NO: 686556 - RNA, 23 nt, Artificial Sequence
  Synthetic
aagcccuugaaaauucagacuuu

SEQ ID NO: 686557 - RNA, 24 nt, Artificial Sequence
  Synthetic
gaagcccuugaaaauucagacuuu

SEQ ID NO: 686558 - RNA, 18 nt, Artificial Sequence
  Synthetic
uuaagaaggugagacuuu

SEQ ID NO: 686559 - RNA, 19 nt, Artificial Sequence
  Synthetic
auuaagaaggugagacuuu

SEQ ID NO: 686560 - RNA, 20 nt, Artificial Sequence
  Synthetic
gauuaagaaggugagacuuu

SEQ ID NO: 686561 - RNA, 21 nt, Artificial Sequence
  Synthetic
ugauuaagaaggugagacuuu

SEQ ID NO: 686562 - RNA, 22 nt, Artificial Sequence
  Synthetic
uugauuaagaaggugagacuuu

SEQ ID NO: 686563 - RNA, 23 nt, Artificial Sequence
  Synthetic
uuugauuaagaaggugagacuuu

SEQ ID NO: 686564 - RNA, 24 nt, Artificial Sequence
  Synthetic
cuuugauuaagaaggugagacuuu

SEQ ID NO: 686565 - RNA, 18 nt, Artificial Sequence
  Synthetic
cccuaauuuugagacuuu

SEQ ID NO: 686566 - RNA, 19 nt, Artificial Sequence
  Synthetic
ucccuaauuuugagacuuu

SEQ ID NO: 686567 - RNA, 20 nt, Artificial Sequence
  Synthetic
uucccuaauuuugagacuuu

SEQ ID NO: 686568 - RNA, 21 nt, Artificial Sequence
  Synthetic
uuucccuaauuuugagacuuu

SEQ ID NO: 686569 - RNA, 22 nt, Artificial Sequence
  Synthetic
cuuucccuaauuuugagacuuu

SEQ ID NO: 686570 - RNA, 23 nt, Artificial Sequence
  Synthetic
ccuuucccuaauuuugagacuuu

SEQ ID NO: 686571 - RNA, 24 nt, Artificial Sequence
  Synthetic
gccuuucccuaauuuugagacuuu

SEQ ID NO: 686572 - RNA, 18 nt, Artificial Sequence
  Synthetic
ccugacguauuagacuuu

SEQ ID NO: 686573 - RNA, 19 nt, Artificial Sequence
  Synthetic
uccugacguauuagacuuu

SEQ ID NO: 686574 - RNA, 20 nt, Artificial Sequence
  Synthetic
cuccugacguauuagacuuu

SEQ ID NO: 686575 - RNA, 21 nt, Artificial Sequence
  Synthetic
gcuccugacguauuagacuuu

SEQ ID NO: 686576 - RNA, 22 nt, Artificial Sequence
  Synthetic
ugcuccugacguauuagacuuu

SEQ ID NO: 686577 - RNA, 23 nt, Artificial Sequence
  Synthetic
uugcuccugacguauuagacuuu

SEQ ID NO: 686578 - RNA, 24 nt, Artificial Sequence
  Synthetic
cuugcuccugacguauuagacuuu

SEQ ID NO: 686579 - RNA, 18 nt, Artificial Sequence
  Synthetic
guaaauauuuuagacuuu

SEQ ID NO: 686580 - RNA, 19 nt, Artificial Sequence
  Synthetic
aguaaauauuuuagacuuu

SEQ ID NO: 686581 - RNA, 20 nt, Artificial Sequence
  Synthetic
uaguaaauauuuuagacuuu

SEQ ID NO: 686582 - RNA, 21 nt, Artificial Sequence
  Synthetic
auaguaaauauuuuagacuuu

SEQ ID NO: 686583 - RNA, 22 nt, Artificial Sequence
  Synthetic
uauaguaaauauuuuagacuuu

SEQ ID NO: 686584 - RNA, 23 nt, Artificial Sequence
  Synthetic
auauaguaaauauuuuagacuuu

SEQ ID NO: 686585 - RNA, 24 nt, Artificial Sequence
  Synthetic
cauauaguaaauauuuuagacuuu

SEQ ID NO: 686586 - RNA, 18 nt, Artificial Sequence
  Synthetic
uuuggauggaaggacuuu

SEQ ID NO: 686587 - RNA, 19 nt, Artificial Sequence
  Synthetic
guuuggauggaaggacuuu

SEQ ID NO: 686588 - RNA, 20 nt, Artificial Sequence
  Synthetic
uguuuggauggaaggacuuu

SEQ ID NO: 686589 - RNA, 21 nt, Artificial Sequence
  Synthetic
uuguuuggauggaaggacuuu

SEQ ID NO: 686590 - RNA, 22 nt, Artificial Sequence
  Synthetic
auuguuuggauggaaggacuuu

SEQ ID NO: 686591 - RNA, 23 nt, Artificial Sequence
  Synthetic
cauuguuuggauggaaggacuuu

SEQ ID NO: 686592 - RNA, 24 nt, Artificial Sequence
  Synthetic
gcauuguuuggauggaaggacuuu

SEQ ID NO: 686593 - RNA, 18 nt, Artificial Sequence
  Synthetic
cuguaaucccaggacuuu

SEQ ID NO: 686594 - RNA, 19 nt, Artificial Sequence
  Synthetic
ccuguaaucccaggacuuu

SEQ ID NO: 686595 - RNA, 20 nt, Artificial Sequence
  Synthetic
gccuguaaucccaggacuuu

SEQ ID NO: 686596 - RNA, 21 nt, Artificial Sequence
  Synthetic
cgccuguaaucccaggacuuu

SEQ ID NO: 686597 - RNA, 22 nt, Artificial Sequence
  Synthetic
acgccuguaaucccaggacuuu

SEQ ID NO: 686598 - RNA, 23 nt, Artificial Sequence
  Synthetic
cacgccuguaaucccaggacuuu

SEQ ID NO: 686599 - RNA, 24 nt, Artificial Sequence
  Synthetic
ucacgccuguaaucccaggacuuu

SEQ ID NO: 686600 - RNA, 21 nt, Artificial Sequence
  Synthetic
ugccuguaaucccaggacuuu

SEQ ID NO: 686601 - RNA, 22 nt, Artificial Sequence
  Synthetic
augccuguaaucccaggacuuu

SEQ ID NO: 686602 - RNA, 23 nt, Artificial Sequence
  Synthetic
caugccuguaaucccaggacuuu

SEQ ID NO: 686603 - RNA, 24 nt, Artificial Sequence
  Synthetic
ucaugccuguaaucccaggacuuu

SEQ ID NO: 686604 - RNA, 18 nt, Artificial Sequence
  Synthetic
ugagcuguauaggacuuu

SEQ ID NO: 686605 - RNA, 19 nt, Artificial Sequence
  Synthetic
augagcuguauaggacuuu

SEQ ID NO: 686606 - RNA, 20 nt, Artificial Sequence
  Synthetic
aaugagcuguauaggacuuu

SEQ ID NO: 686607 - RNA, 21 nt, Artificial Sequence
  Synthetic
aaaugagcuguauaggacuuu

SEQ ID NO: 686608 - RNA, 22 nt, Artificial Sequence
  Synthetic
caaaugagcuguauaggacuuu

SEQ ID NO: 686609 - RNA, 23 nt, Artificial Sequence
  Synthetic
ccaaaugagcuguauaggacuuu

SEQ ID NO: 686610 - RNA, 24 nt, Artificial Sequence
  Synthetic
accaaaugagcuguauaggacuuu

SEQ ID NO: 686611 - RNA, 18 nt, Artificial Sequence
  Synthetic
aaaucaagcugggacuuu

SEQ ID NO: 686612 - RNA, 19 nt, Artificial Sequence
  Synthetic
aaaaucaagcugggacuuu

SEQ ID NO: 686613 - RNA, 20 nt, Artificial Sequence
  Synthetic
uaaaaucaagcugggacuuu

SEQ ID NO: 686614 - RNA, 21 nt, Artificial Sequence
  Synthetic
auaaaaucaagcugggacuuu

SEQ ID NO: 686615 - RNA, 22 nt, Artificial Sequence
  Synthetic
uauaaaaucaagcugggacuuu

SEQ ID NO: 686616 - RNA, 23 nt, Artificial Sequence
  Synthetic
auauaaaaucaagcugggacuuu

SEQ ID NO: 686617 - RNA, 24 nt, Artificial Sequence
  Synthetic
cauauaaaaucaagcugggacuuu

SEQ ID NO: 686618 - RNA, 18 nt, Artificial Sequence
  Synthetic
agugauacaauggacuuu

SEQ ID NO: 686619 - RNA, 19 nt, Artificial Sequence
  Synthetic
gagugauacaauggacuuu

SEQ ID NO: 686620 - RNA, 20 nt, Artificial Sequence
  Synthetic
ggagugauacaauggacuuu

SEQ ID NO: 686621 - RNA, 21 nt, Artificial Sequence
  Synthetic
cggagugauacaauggacuuu

SEQ ID NO: 686622 - RNA, 22 nt, Artificial Sequence
  Synthetic
acggagugauacaauggacuuu

SEQ ID NO: 686623 - RNA, 23 nt, Artificial Sequence
  Synthetic
uacggagugauacaauggacuuu

SEQ ID NO: 686624 - RNA, 24 nt, Artificial Sequence
  Synthetic
auacggagugauacaauggacuuu

SEQ ID NO: 686625 - RNA, 18 nt, Artificial Sequence
  Synthetic
cuuuagcuauaugacuuu

SEQ ID NO: 686626 - RNA, 19 nt, Artificial Sequence
  Synthetic
ccuuuagcuauaugacuuu

SEQ ID NO: 686627 - RNA, 20 nt, Artificial Sequence
  Synthetic
cccuuuagcuauaugacuuu

SEQ ID NO: 686628 - RNA, 21 nt, Artificial Sequence
  Synthetic
ucccuuuagcuauaugacuuu

SEQ ID NO: 686629 - RNA, 22 nt, Artificial Sequence
  Synthetic
uucccuuuagcuauaugacuuu

SEQ ID NO: 686630 - RNA, 23 nt, Artificial Sequence
  Synthetic
auucccuuuagcuauaugacuuu

SEQ ID NO: 686631 - RNA, 24 nt, Artificial Sequence
  Synthetic
cauucccuuuagcuauaugacuuu

SEQ ID NO: 686632 - RNA, 18 nt, Artificial Sequence
  Synthetic
gucagaaccauugacuuu

SEQ ID NO: 686633 - RNA, 19 nt, Artificial Sequence
  Synthetic
ugucagaaccauugacuuu

SEQ ID NO: 686634 - RNA, 20 nt, Artificial Sequence
  Synthetic
cugucagaaccauugacuuu

SEQ ID NO: 686635 - RNA, 21 nt, Artificial Sequence
  Synthetic
gcugucagaaccauugacuuu

SEQ ID NO: 686636 - RNA, 22 nt, Artificial Sequence
  Synthetic
agcugucagaaccauugacuuu

SEQ ID NO: 686637 - RNA, 23 nt, Artificial Sequence
  Synthetic
uagcugucagaaccauugacuuu

SEQ ID NO: 686638 - RNA, 24 nt, Artificial Sequence
  Synthetic
cuagcugucagaaccauugacuuu

SEQ ID NO: 686639 - RNA, 18 nt, Artificial Sequence
  Synthetic
auguuuuggcuugacuuu

SEQ ID NO: 686640 - RNA, 19 nt, Artificial Sequence
  Synthetic
aauguuuuggcuugacuuu

SEQ ID NO: 686641 - RNA, 20 nt, Artificial Sequence
  Synthetic
aaauguuuuggcuugacuuu

SEQ ID NO: 686642 - RNA, 21 nt, Artificial Sequence
  Synthetic
caaauguuuuggcuugacuuu

SEQ ID NO: 686643 - RNA, 22 nt, Artificial Sequence
  Synthetic
gcaaauguuuuggcuugacuuu

SEQ ID NO: 686644 - RNA, 23 nt, Artificial Sequence
  Synthetic
ggcaaauguuuuggcuugacuuu

SEQ ID NO: 686645 - RNA, 24 nt, Artificial Sequence
  Synthetic
gggcaaauguuuuggcuugacuuu

SEQ ID NO: 686646 - RNA, 18 nt, Artificial Sequence
  Synthetic
uucaucagcuuugacuuu

SEQ ID NO: 686647 - RNA, 19 nt, Artificial Sequence
  Synthetic
uuucaucagcuuugacuuu

SEQ ID NO: 686648 - RNA, 20 nt, Artificial Sequence
  Synthetic
uuuucaucagcuuugacuuu

SEQ ID NO: 686649 - RNA, 21 nt, Artificial Sequence
  Synthetic
uuuuucaucagcuuugacuuu

SEQ ID NO: 686650 - RNA, 22 nt, Artificial Sequence
  Synthetic
guuuuucaucagcuuugacuuu

SEQ ID NO: 686651 - RNA, 23 nt, Artificial Sequence
  Synthetic
uguuuuucaucagcuuugacuuu

SEQ ID NO: 686652 - RNA, 24 nt, Artificial Sequence
  Synthetic
cuguuuuucaucagcuuugacuuu

SEQ ID NO: 686653 - RNA, 18 nt, Artificial Sequence
  Synthetic
auggucucaaaauacuuu

SEQ ID NO: 686654 - RNA, 19 nt, Artificial Sequence
  Synthetic
uauggucucaaaauacuuu

SEQ ID NO: 686655 - RNA, 20 nt, Artificial Sequence
  Synthetic
auauggucucaaaauacuuu

SEQ ID NO: 686656 - RNA, 21 nt, Artificial Sequence
  Synthetic
gauauggucucaaaauacuuu

SEQ ID NO: 686657 - RNA, 22 nt, Artificial Sequence
  Synthetic
ugauauggucucaaaauacuuu

SEQ ID NO: 686658 - RNA, 23 nt, Artificial Sequence
  Synthetic
gugauauggucucaaaauacuuu

SEQ ID NO: 686659 - RNA, 24 nt, Artificial Sequence
  Synthetic
ggugauauggucucaaaauacuuu

SEQ ID NO: 686660 - RNA, 18 nt, Artificial Sequence
  Synthetic
aacacuagaaaauacuuu

SEQ ID NO: 686661 - RNA, 19 nt, Artificial Sequence
  Synthetic
aaacacuagaaaauacuuu

SEQ ID NO: 686662 - RNA, 20 nt, Artificial Sequence
  Synthetic
aaaacacuagaaaauacuuu

SEQ ID NO: 686663 - RNA, 21 nt, Artificial Sequence
  Synthetic
gaaaacacuagaaaauacuuu

SEQ ID NO: 686664 - RNA, 22 nt, Artificial Sequence
  Synthetic
agaaaacacuagaaaauacuuu

SEQ ID NO: 686665 - RNA, 23 nt, Artificial Sequence
  Synthetic
aagaaaacacuagaaaauacuuu

SEQ ID NO: 686666 - RNA, 24 nt, Artificial Sequence
  Synthetic
aaagaaaacacuagaaaauacuuu

SEQ ID NO: 686667 - RNA, 18 nt, Artificial Sequence
  Synthetic
uuguuaaaucaauacuuu

SEQ ID NO: 686668 - RNA, 19 nt, Artificial Sequence
  Synthetic
uuuguuaaaucaauacuuu

SEQ ID NO: 686669 - RNA, 20 nt, Artificial Sequence
  Synthetic
uuuuguuaaaucaauacuuu

SEQ ID NO: 686670 - RNA, 21 nt, Artificial Sequence
  Synthetic
guuuuguuaaaucaauacuuu

SEQ ID NO: 686671 - RNA, 22 nt, Artificial Sequence
  Synthetic
aguuuuguuaaaucaauacuuu

SEQ ID NO: 686672 - RNA, 23 nt, Artificial Sequence
  Synthetic
aaguuuuguuaaaucaauacuuu

SEQ ID NO: 686673 - RNA, 24 nt, Artificial Sequence
  Synthetic
aaaguuuuguuaaaucaauacuuu

SEQ ID NO: 686674 - RNA, 18 nt, Artificial Sequence
  Synthetic
guaaauuaaggauacuuu

SEQ ID NO: 686675 - RNA, 19 nt, Artificial Sequence
  Synthetic
aguaaauuaaggauacuuu

SEQ ID NO: 686676 - RNA, 20 nt, Artificial Sequence
  Synthetic
gaguaaauuaaggauacuuu

SEQ ID NO: 686677 - RNA, 21 nt, Artificial Sequence
  Synthetic
ugaguaaauuaaggauacuuu

SEQ ID NO: 686678 - RNA, 22 nt, Artificial Sequence
  Synthetic
cugaguaaauuaaggauacuuu

SEQ ID NO: 686679 - RNA, 23 nt, Artificial Sequence
  Synthetic
ccugaguaaauuaaggauacuuu

SEQ ID NO: 686680 - RNA, 24 nt, Artificial Sequence
  Synthetic
accugaguaaauuaaggauacuuu

SEQ ID NO: 686681 - RNA, 18 nt, Artificial Sequence
  Synthetic
ccagagaccugauacuuu

SEQ ID NO: 686682 - RNA, 19 nt, Artificial Sequence
  Synthetic
accagagaccugauacuuu

SEQ ID NO: 686683 - RNA, 20 nt, Artificial Sequence
  Synthetic
aaccagagaccugauacuuu

SEQ ID NO: 686684 - RNA, 21 nt, Artificial Sequence
  Synthetic
aaaccagagaccugauacuuu

SEQ ID NO: 686685 - RNA, 22 nt, Artificial Sequence
  Synthetic
caaaccagagaccugauacuuu

SEQ ID NO: 686686 - RNA, 23 nt, Artificial Sequence
  Synthetic
acaaaccagagaccugauacuuu

SEQ ID NO: 686687 - RNA, 24 nt, Artificial Sequence
  Synthetic
aacaaaccagagaccugauacuuu

SEQ ID NO: 686688 - RNA, 18 nt, Artificial Sequence
  Synthetic
aaagauucuugauacuuu

SEQ ID NO: 686689 - RNA, 19 nt, Artificial Sequence
  Synthetic
uaaagauucuugauacuuu

SEQ ID NO: 686690 - RNA, 20 nt, Artificial Sequence
  Synthetic
auaaagauucuugauacuuu

SEQ ID NO: 686691 - RNA, 21 nt, Artificial Sequence
  Synthetic
aauaaagauucuugauacuuu

SEQ ID NO: 686692 - RNA, 22 nt, Artificial Sequence
  Synthetic
aaauaaagauucuugauacuuu

SEQ ID NO: 686693 - RNA, 23 nt, Artificial Sequence
  Synthetic
caaauaaagauucuugauacuuu

SEQ ID NO: 686694 - RNA, 24 nt, Artificial Sequence
  Synthetic
ccaaauaaagauucuugauacuuu

SEQ ID NO: 686695 - RNA, 18 nt, Artificial Sequence
  Synthetic
cccaguaaucuauacuuu

SEQ ID NO: 686696 - RNA, 19 nt, Artificial Sequence
  Synthetic
gcccaguaaucuauacuuu

SEQ ID NO: 686697 - RNA, 20 nt, Artificial Sequence
  Synthetic
agcccaguaaucuauacuuu

SEQ ID NO: 686698 - RNA, 21 nt, Artificial Sequence
  Synthetic
aagcccaguaaucuauacuuu

SEQ ID NO: 686699 - RNA, 22 nt, Artificial Sequence
  Synthetic
gaagcccaguaaucuauacuuu

SEQ ID NO: 686700 - RNA, 23 nt, Artificial Sequence
  Synthetic
ugaagcccaguaaucuauacuuu

SEQ ID NO: 686701 - RNA, 24 nt, Artificial Sequence
  Synthetic
uugaagcccaguaaucuauacuuu

SEQ ID NO: 686702 - RNA, 18 nt, Artificial Sequence
  Synthetic
caagggaacaucuacuuu

SEQ ID NO: 686703 - RNA, 19 nt, Artificial Sequence
  Synthetic
acaagggaacaucuacuuu

SEQ ID NO: 686704 - RNA, 20 nt, Artificial Sequence
  Synthetic
gacaagggaacaucuacuuu

SEQ ID NO: 686705 - RNA, 21 nt, Artificial Sequence
  Synthetic
agacaagggaacaucuacuuu

SEQ ID NO: 686706 - RNA, 22 nt, Artificial Sequence
  Synthetic
uagacaagggaacaucuacuuu

SEQ ID NO: 686707 - RNA, 23 nt, Artificial Sequence
  Synthetic
cuagacaagggaacaucuacuuu

SEQ ID NO: 686708 - RNA, 24 nt, Artificial Sequence
  Synthetic
acuagacaagggaacaucuacuuu

SEQ ID NO: 686709 - RNA, 18 nt, Artificial Sequence
  Synthetic
acgcugucauucuacuuu

SEQ ID NO: 686710 - RNA, 19 nt, Artificial Sequence
  Synthetic
gacgcugucauucuacuuu

SEQ ID NO: 686711 - RNA, 20 nt, Artificial Sequence
  Synthetic
ugacgcugucauucuacuuu

SEQ ID NO: 686712 - RNA, 21 nt, Artificial Sequence
  Synthetic
cugacgcugucauucuacuuu

SEQ ID NO: 686713 - RNA, 22 nt, Artificial Sequence
  Synthetic
ccugacgcugucauucuacuuu

SEQ ID NO: 686714 - RNA, 23 nt, Artificial Sequence
  Synthetic
uccugacgcugucauucuacuuu

SEQ ID NO: 686715 - RNA, 24 nt, Artificial Sequence
  Synthetic
uuccugacgcugucauucuacuuu

SEQ ID NO: 686716 - RNA, 18 nt, Artificial Sequence
  Synthetic
ggccagauccaguacuuu

SEQ ID NO: 686717 - RNA, 19 nt, Artificial Sequence
  Synthetic
aggccagauccaguacuuu

SEQ ID NO: 686718 - RNA, 20 nt, Artificial Sequence
  Synthetic
uaggccagauccaguacuuu

SEQ ID NO: 686719 - RNA, 21 nt, Artificial Sequence
  Synthetic
cuaggccagauccaguacuuu

SEQ ID NO: 686720 - RNA, 22 nt, Artificial Sequence
  Synthetic
ccuaggccagauccaguacuuu

SEQ ID NO: 686721 - RNA, 23 nt, Artificial Sequence
  Synthetic
uccuaggccagauccaguacuuu

SEQ ID NO: 686722 - RNA, 24 nt, Artificial Sequence
  Synthetic
guccuaggccagauccaguacuuu

SEQ ID NO: 686723 - RNA, 18 nt, Artificial Sequence
  Synthetic
cccaaccccauguacuuu

SEQ ID NO: 686724 - RNA, 19 nt, Artificial Sequence
  Synthetic
ccccaaccccauguacuuu

SEQ ID NO: 686725 - RNA, 20 nt, Artificial Sequence
  Synthetic
cccccaaccccauguacuuu

SEQ ID NO: 686726 - RNA, 21 nt, Artificial Sequence
  Synthetic
ucccccaaccccauguacuuu

SEQ ID NO: 686727 - RNA, 22 nt, Artificial Sequence
  Synthetic
gucccccaaccccauguacuuu

SEQ ID NO: 686728 - RNA, 23 nt, Artificial Sequence
  Synthetic
ugucccccaaccccauguacuuu

SEQ ID NO: 686729 - RNA, 24 nt, Artificial Sequence
  Synthetic
cugucccccaaccccauguacuuu

SEQ ID NO: 686730 - RNA, 18 nt, Artificial Sequence
  Synthetic
gguguaagaaauuacuuu

SEQ ID NO: 686731 - RNA, 19 nt, Artificial Sequence
  Synthetic
ggguguaagaaauuacuuu

SEQ ID NO: 686732 - RNA, 20 nt, Artificial Sequence
  Synthetic
gggguguaagaaauuacuuu

SEQ ID NO: 686733 - RNA, 21 nt, Artificial Sequence
  Synthetic
agggguguaagaaauuacuuu

SEQ ID NO: 686734 - RNA, 22 nt, Artificial Sequence
  Synthetic
gagggguguaagaaauuacuuu

SEQ ID NO: 686735 - RNA, 23 nt, Artificial Sequence
  Synthetic
ugagggguguaagaaauuacuuu

SEQ ID NO: 686736 - RNA, 24 nt, Artificial Sequence
  Synthetic
uugagggguguaagaaauuacuuu

SEQ ID NO: 686737 - RNA, 18 nt, Artificial Sequence
  Synthetic
aaaauguucaauuacuuu

SEQ ID NO: 686738 - RNA, 19 nt, Artificial Sequence
  Synthetic
aaaaauguucaauuacuuu

SEQ ID NO: 686739 - RNA, 20 nt, Artificial Sequence
  Synthetic
caaaaauguucaauuacuuu

SEQ ID NO: 686740 - RNA, 21 nt, Artificial Sequence
  Synthetic
acaaaaauguucaauuacuuu

SEQ ID NO: 686741 - RNA, 22 nt, Artificial Sequence
  Synthetic
aacaaaaauguucaauuacuuu

SEQ ID NO: 686742 - RNA, 23 nt, Artificial Sequence
  Synthetic
aaacaaaaauguucaauuacuuu

SEQ ID NO: 686743 - RNA, 24 nt, Artificial Sequence
  Synthetic
gaaacaaaaauguucaauuacuuu

SEQ ID NO: 686744 - RNA, 18 nt, Artificial Sequence
  Synthetic
gcauaaaugucuuacuuu

SEQ ID NO: 686745 - RNA, 19 nt, Artificial Sequence
  Synthetic
cgcauaaaugucuuacuuu

SEQ ID NO: 686746 - RNA, 20 nt, Artificial Sequence
  Synthetic
ccgcauaaaugucuuacuuu

SEQ ID NO: 686747 - RNA, 21 nt, Artificial Sequence
  Synthetic
gccgcauaaaugucuuacuuu

SEQ ID NO: 686748 - RNA, 22 nt, Artificial Sequence
  Synthetic
ggccgcauaaaugucuuacuuu

SEQ ID NO: 686749 - RNA, 23 nt, Artificial Sequence
  Synthetic
uggccgcauaaaugucuuacuuu

SEQ ID NO: 686750 - RNA, 24 nt, Artificial Sequence
  Synthetic
uuggccgcauaaaugucuuacuuu

SEQ ID NO: 686751 - RNA, 18 nt, Artificial Sequence
  Synthetic
auaaccuaaguuuacuuu

SEQ ID NO: 686752 - RNA, 19 nt, Artificial Sequence
  Synthetic
aauaaccuaaguuuacuuu

SEQ ID NO: 686753 - RNA, 20 nt, Artificial Sequence
  Synthetic
aaauaaccuaaguuuacuuu

SEQ ID NO: 686754 - RNA, 21 nt, Artificial Sequence
  Synthetic
gaaauaaccuaaguuuacuuu

SEQ ID NO: 686755 - RNA, 22 nt, Artificial Sequence
  Synthetic
ugaaauaaccuaaguuuacuuu

SEQ ID NO: 686756 - RNA, 23 nt, Artificial Sequence
  Synthetic
augaaauaaccuaaguuuacuuu

SEQ ID NO: 686757 - RNA, 24 nt, Artificial Sequence
  Synthetic
caugaaauaaccuaaguuuacuuu

SEQ ID NO: 686758 - RNA, 18 nt, Artificial Sequence
  Synthetic
gacuucccuguuuacuuu

SEQ ID NO: 686759 - RNA, 19 nt, Artificial Sequence
  Synthetic
ggacuucccuguuuacuuu

SEQ ID NO: 686760 - RNA, 20 nt, Artificial Sequence
  Synthetic
aggacuucccuguuuacuuu

SEQ ID NO: 686761 - RNA, 21 nt, Artificial Sequence
  Synthetic
aaggacuucccuguuuacuuu

SEQ ID NO: 686762 - RNA, 22 nt, Artificial Sequence
  Synthetic
uaaggacuucccuguuuacuuu

SEQ ID NO: 686763 - RNA, 23 nt, Artificial Sequence
  Synthetic
auaaggacuucccuguuuacuuu

SEQ ID NO: 686764 - RNA, 24 nt, Artificial Sequence
  Synthetic
cauaaggacuucccuguuuacuuu

SEQ ID NO: 686765 - RNA, 18 nt, Artificial Sequence
  Synthetic
ugcuaaauauuuuacuuu

SEQ ID NO: 686766 - RNA, 19 nt, Artificial Sequence
  Synthetic
gugcuaaauauuuuacuuu

SEQ ID NO: 686767 - RNA, 20 nt, Artificial Sequence
  Synthetic
agugcuaaauauuuuacuuu

SEQ ID NO: 686768 - RNA, 21 nt, Artificial Sequence
  Synthetic
aagugcuaaauauuuuacuuu

SEQ ID NO: 686769 - RNA, 22 nt, Artificial Sequence
  Synthetic
uaagugcuaaauauuuuacuuu

SEQ ID NO: 686770 - RNA, 23 nt, Artificial Sequence
  Synthetic
auaagugcuaaauauuuuacuuu

SEQ ID NO: 686771 - RNA, 24 nt, Artificial Sequence
  Synthetic
aauaagugcuaaauauuuuacuuu

SEQ ID NO: 686772 - RNA, 18 nt, Artificial Sequence
  Synthetic
uucauuuguuuuuacuuu

SEQ ID NO: 686773 - RNA, 19 nt, Artificial Sequence
  Synthetic
uuucauuuguuuuuacuuu

SEQ ID NO: 686774 - RNA, 20 nt, Artificial Sequence
  Synthetic
uuuucauuuguuuuuacuuu

SEQ ID NO: 686775 - RNA, 21 nt, Artificial Sequence
  Synthetic
uuuuucauuuguuuuuacuuu

SEQ ID NO: 686776 - RNA, 22 nt, Artificial Sequence
  Synthetic
cuuuuucauuuguuuuuacuuu

SEQ ID NO: 686777 - RNA, 23 nt, Artificial Sequence
  Synthetic
acuuuuucauuuguuuuuacuuu

SEQ ID NO: 686778 - RNA, 24 nt, Artificial Sequence
  Synthetic
uacuuuuucauuuguuuuuacuuu

SEQ ID NO: 686779 - RNA, 18 nt, Artificial Sequence
  Synthetic
gaaagaaaaagaaccuuu

SEQ ID NO: 686780 - RNA, 19 nt, Artificial Sequence
  Synthetic
ggaaagaaaaagaaccuuu

SEQ ID NO: 686781 - RNA, 20 nt, Artificial Sequence
  Synthetic
uggaaagaaaaagaaccuuu

SEQ ID NO: 686782 - RNA, 21 nt, Artificial Sequence
  Synthetic
auggaaagaaaaagaaccuuu

SEQ ID NO: 686783 - RNA, 22 nt, Artificial Sequence
  Synthetic
cauggaaagaaaaagaaccuuu

SEQ ID NO: 686784 - RNA, 23 nt, Artificial Sequence
  Synthetic
acauggaaagaaaaagaaccuuu

SEQ ID NO: 686785 - RNA, 24 nt, Artificial Sequence
  Synthetic
aacauggaaagaaaaagaaccuuu

SEQ ID NO: 686786 - RNA, 18 nt, Artificial Sequence
  Synthetic
ugauauuggauaaccuuu

SEQ ID NO: 686787 - RNA, 19 nt, Artificial Sequence
  Synthetic
cugauauuggauaaccuuu

SEQ ID NO: 686788 - RNA, 20 nt, Artificial Sequence
  Synthetic
ccugauauuggauaaccuuu

SEQ ID NO: 686789 - RNA, 21 nt, Artificial Sequence
  Synthetic
cccugauauuggauaaccuuu

SEQ ID NO: 686790 - RNA, 22 nt, Artificial Sequence
  Synthetic
acccugauauuggauaaccuuu

SEQ ID NO: 686791 - RNA, 23 nt, Artificial Sequence
  Synthetic
cacccugauauuggauaaccuuu

SEQ ID NO: 686792 - RNA, 24 nt, Artificial Sequence
  Synthetic
ucacccugauauuggauaaccuuu

SEQ ID NO: 686793 - RNA, 18 nt, Artificial Sequence
  Synthetic
aauuugacaguaaccuuu

SEQ ID NO: 686794 - RNA, 19 nt, Artificial Sequence
  Synthetic
gaauuugacaguaaccuuu

SEQ ID NO: 686795 - RNA, 20 nt, Artificial Sequence
  Synthetic
ugaauuugacaguaaccuuu

SEQ ID NO: 686796 - RNA, 21 nt, Artificial Sequence
  Synthetic
uugaauuugacaguaaccuuu

SEQ ID NO: 686797 - RNA, 22 nt, Artificial Sequence
  Synthetic
auugaauuugacaguaaccuuu

SEQ ID NO: 686798 - RNA, 23 nt, Artificial Sequence
  Synthetic
gauugaauuugacaguaaccuuu

SEQ ID NO: 686799 - RNA, 24 nt, Artificial Sequence
  Synthetic
ugauugaauuugacaguaaccuuu

SEQ ID NO: 686800 - RNA, 18 nt, Artificial Sequence
  Synthetic
guuaauuacaccaccuuu

SEQ ID NO: 686801 - RNA, 19 nt, Artificial Sequence
  Synthetic
uguuaauuacaccaccuuu

SEQ ID NO: 686802 - RNA, 20 nt, Artificial Sequence
  Synthetic
auguuaauuacaccaccuuu

SEQ ID NO: 686803 - RNA, 21 nt, Artificial Sequence
  Synthetic
uauguuaauuacaccaccuuu

SEQ ID NO: 686804 - RNA, 22 nt, Artificial Sequence
  Synthetic
auauguuaauuacaccaccuuu

SEQ ID NO: 686805 - RNA, 23 nt, Artificial Sequence
  Synthetic
aauauguuaauuacaccaccuuu

SEQ ID NO: 686806 - RNA, 24 nt, Artificial Sequence
  Synthetic
aaauauguuaauuacaccaccuuu

SEQ ID NO: 686807 - RNA, 18 nt, Artificial Sequence
  Synthetic
auaagguaacccaccuuu

SEQ ID NO: 686808 - RNA, 19 nt, Artificial Sequence
  Synthetic
uauaagguaacccaccuuu

SEQ ID NO: 686809 - RNA, 20 nt, Artificial Sequence
  Synthetic
guauaagguaacccaccuuu

SEQ ID NO: 686810 - RNA, 21 nt, Artificial Sequence
  Synthetic
aguauaagguaacccaccuuu

SEQ ID NO: 686811 - RNA, 22 nt, Artificial Sequence
  Synthetic
caguauaagguaacccaccuuu

SEQ ID NO: 686812 - RNA, 23 nt, Artificial Sequence
  Synthetic
acaguauaagguaacccaccuuu

SEQ ID NO: 686813 - RNA, 24 nt, Artificial Sequence
  Synthetic
gacaguauaagguaacccaccuuu

SEQ ID NO: 686814 - RNA, 18 nt, Artificial Sequence
  Synthetic
uggguucgugccaccuuu

SEQ ID NO: 686815 - RNA, 19 nt, Artificial Sequence
  Synthetic
uuggguucgugccaccuuu

SEQ ID NO: 686816 - RNA, 20 nt, Artificial Sequence
  Synthetic
uuuggguucgugccaccuuu

SEQ ID NO: 686817 - RNA, 21 nt, Artificial Sequence
  Synthetic
guuuggguucgugccaccuuu

SEQ ID NO: 686818 - RNA, 22 nt, Artificial Sequence
  Synthetic
uguuuggguucgugccaccuuu

SEQ ID NO: 686819 - RNA, 23 nt, Artificial Sequence
  Synthetic
cuguuuggguucgugccaccuuu

SEQ ID NO: 686820 - RNA, 24 nt, Artificial Sequence
  Synthetic
gcuguuuggguucgugccaccuuu

SEQ ID NO: 686821 - RNA, 18 nt, Artificial Sequence
  Synthetic
cugguuuauuccaccuuu

SEQ ID NO: 686822 - RNA, 19 nt, Artificial Sequence
  Synthetic
gcugguuuauuccaccuuu

SEQ ID NO: 686823 - RNA, 20 nt, Artificial Sequence
  Synthetic
cgcugguuuauuccaccuuu

SEQ ID NO: 686824 - RNA, 21 nt, Artificial Sequence
  Synthetic
ccgcugguuuauuccaccuuu

SEQ ID NO: 686825 - RNA, 22 nt, Artificial Sequence
  Synthetic
uccgcugguuuauuccaccuuu

SEQ ID NO: 686826 - RNA, 23 nt, Artificial Sequence
  Synthetic
auccgcugguuuauuccaccuuu

SEQ ID NO: 686827 - RNA, 24 nt, Artificial Sequence
  Synthetic
aauccgcugguuuauuccaccuuu

SEQ ID NO: 686828 - RNA, 18 nt, Artificial Sequence
  Synthetic
uuuaauaccaagaccuuu

SEQ ID NO: 686829 - RNA, 19 nt, Artificial Sequence
  Synthetic
uuuuaauaccaagaccuuu

SEQ ID NO: 686830 - RNA, 20 nt, Artificial Sequence
  Synthetic
cuuuuaauaccaagaccuuu

SEQ ID NO: 686831 - RNA, 21 nt, Artificial Sequence
  Synthetic
acuuuuaauaccaagaccuuu

SEQ ID NO: 686832 - RNA, 22 nt, Artificial Sequence
  Synthetic
uacuuuuaauaccaagaccuuu

SEQ ID NO: 686833 - RNA, 23 nt, Artificial Sequence
  Synthetic
cuacuuuuaauaccaagaccuuu

SEQ ID NO: 686834 - RNA, 24 nt, Artificial Sequence
  Synthetic
gcuacuuuuaauaccaagaccuuu

SEQ ID NO: 686835 - RNA, 18 nt, Artificial Sequence
  Synthetic
aaagaaacuaauaccuuu

SEQ ID NO: 686836 - RNA, 19 nt, Artificial Sequence
  Synthetic
uaaagaaacuaauaccuuu

SEQ ID NO: 686837 - RNA, 20 nt, Artificial Sequence
  Synthetic
uuaaagaaacuaauaccuuu

SEQ ID NO: 686838 - RNA, 21 nt, Artificial Sequence
  Synthetic
uuuaaagaaacuaauaccuuu

SEQ ID NO: 686839 - RNA, 22 nt, Artificial Sequence
  Synthetic
cuuuaaagaaacuaauaccuuu

SEQ ID NO: 686840 - RNA, 23 nt, Artificial Sequence
  Synthetic
gcuuuaaagaaacuaauaccuuu

SEQ ID NO: 686841 - RNA, 24 nt, Artificial Sequence
  Synthetic
ugcuuuaaagaaacuaauaccuuu

SEQ ID NO: 686842 - RNA, 18 nt, Artificial Sequence
  Synthetic
uauagcagcuauaccuuu

SEQ ID NO: 686843 - RNA, 19 nt, Artificial Sequence
  Synthetic
auauagcagcuauaccuuu

SEQ ID NO: 686844 - RNA, 20 nt, Artificial Sequence
  Synthetic
aauauagcagcuauaccuuu

SEQ ID NO: 686845 - RNA, 21 nt, Artificial Sequence
  Synthetic
caauauagcagcuauaccuuu

SEQ ID NO: 686846 - RNA, 22 nt, Artificial Sequence
  Synthetic
acaauauagcagcuauaccuuu

SEQ ID NO: 686847 - RNA, 23 nt, Artificial Sequence
  Synthetic
cacaauauagcagcuauaccuuu

SEQ ID NO: 686848 - RNA, 24 nt, Artificial Sequence
  Synthetic
ccacaauauagcagcuauaccuuu

SEQ ID NO: 686849 - RNA, 18 nt, Artificial Sequence
  Synthetic
uauuugcucccuaccuuu

SEQ ID NO: 686850 - RNA, 19 nt, Artificial Sequence
  Synthetic
uuauuugcucccuaccuuu

SEQ ID NO: 686851 - RNA, 20 nt, Artificial Sequence
  Synthetic
uuuauuugcucccuaccuuu

SEQ ID NO: 686852 - RNA, 21 nt, Artificial Sequence
  Synthetic
uuuuauuugcucccuaccuuu

SEQ ID NO: 686853 - RNA, 22 nt, Artificial Sequence
  Synthetic
auuuuauuugcucccuaccuuu

SEQ ID NO: 686854 - RNA, 23 nt, Artificial Sequence
  Synthetic
cauuuuauuugcucccuaccuuu

SEQ ID NO: 686855 - RNA, 24 nt, Artificial Sequence
  Synthetic
ccauuuuauuugcucccuaccuuu

SEQ ID NO: 686856 - RNA, 18 nt, Artificial Sequence
  Synthetic
ugccggguagcuaccuuu

SEQ ID NO: 686857 - RNA, 19 nt, Artificial Sequence
  Synthetic
uugccggguagcuaccuuu

SEQ ID NO: 686858 - RNA, 20 nt, Artificial Sequence
  Synthetic
uuugccggguagcuaccuuu

SEQ ID NO: 686859 - RNA, 21 nt, Artificial Sequence
  Synthetic
cuuugccggguagcuaccuuu

SEQ ID NO: 686860 - RNA, 22 nt, Artificial Sequence
  Synthetic
ccuuugccggguagcuaccuuu

SEQ ID NO: 686861 - RNA, 23 nt, Artificial Sequence
  Synthetic
uccuuugccggguagcuaccuuu

SEQ ID NO: 686862 - RNA, 24 nt, Artificial Sequence
  Synthetic
auccuuugccggguagcuaccuuu

SEQ ID NO: 686863 - RNA, 18 nt, Artificial Sequence
  Synthetic
uacucaauguuuaccuuu

SEQ ID NO: 686864 - RNA, 19 nt, Artificial Sequence
  Synthetic
cuacucaauguuuaccuuu

SEQ ID NO: 686865 - RNA, 20 nt, Artificial Sequence
  Synthetic
ucuacucaauguuuaccuuu

SEQ ID NO: 686866 - RNA, 21 nt, Artificial Sequence
  Synthetic
cucuacucaauguuuaccuuu

SEQ ID NO: 686867 - RNA, 22 nt, Artificial Sequence
  Synthetic
acucuacucaauguuuaccuuu

SEQ ID NO: 686868 - RNA, 23 nt, Artificial Sequence
  Synthetic
cacucuacucaauguuuaccuuu

SEQ ID NO: 686869 - RNA, 24 nt, Artificial Sequence
  Synthetic
acacucuacucaauguuuaccuuu

SEQ ID NO: 686870 - RNA, 18 nt, Artificial Sequence
  Synthetic
ugguuuuagggacccuuu

SEQ ID NO: 686871 - RNA, 19 nt, Artificial Sequence
  Synthetic
gugguuuuagggacccuuu

SEQ ID NO: 686872 - RNA, 20 nt, Artificial Sequence
  Synthetic
ugugguuuuagggacccuuu

SEQ ID NO: 686873 - RNA, 21 nt, Artificial Sequence
  Synthetic
uugugguuuuagggacccuuu

SEQ ID NO: 686874 - RNA, 22 nt, Artificial Sequence
  Synthetic
guugugguuuuagggacccuuu

SEQ ID NO: 686875 - RNA, 23 nt, Artificial Sequence
  Synthetic
aguugugguuuuagggacccuuu

SEQ ID NO: 686876 - RNA, 24 nt, Artificial Sequence
  Synthetic
aaguugugguuuuagggacccuuu

SEQ ID NO: 686877 - RNA, 18 nt, Artificial Sequence
  Synthetic
uauuucccugaccccuuu

SEQ ID NO: 686878 - RNA, 19 nt, Artificial Sequence
  Synthetic
auauuucccugaccccuuu

SEQ ID NO: 686879 - RNA, 20 nt, Artificial Sequence
  Synthetic
gauauuucccugaccccuuu

SEQ ID NO: 686880 - RNA, 21 nt, Artificial Sequence
  Synthetic
ggauauuucccugaccccuuu

SEQ ID NO: 686881 - RNA, 22 nt, Artificial Sequence
  Synthetic
aggauauuucccugaccccuuu

SEQ ID NO: 686882 - RNA, 23 nt, Artificial Sequence
  Synthetic
caggauauuucccugaccccuuu

SEQ ID NO: 686883 - RNA, 24 nt, Artificial Sequence
  Synthetic
gcaggauauuucccugaccccuuu

SEQ ID NO: 686884 - RNA, 18 nt, Artificial Sequence
  Synthetic
gcuaauauaagccccuuu

SEQ ID NO: 686885 - RNA, 19 nt, Artificial Sequence
  Synthetic
agcuaauauaagccccuuu

SEQ ID NO: 686886 - RNA, 20 nt, Artificial Sequence
  Synthetic
gagcuaauauaagccccuuu

SEQ ID NO: 686887 - RNA, 21 nt, Artificial Sequence
  Synthetic
ggagcuaauauaagccccuuu

SEQ ID NO: 686888 - RNA, 22 nt, Artificial Sequence
  Synthetic
uggagcuaauauaagccccuuu

SEQ ID NO: 686889 - RNA, 23 nt, Artificial Sequence
  Synthetic
auggagcuaauauaagccccuuu

SEQ ID NO: 686890 - RNA, 24 nt, Artificial Sequence
  Synthetic
uauggagcuaauauaagccccuuu

SEQ ID NO: 686891 - RNA, 18 nt, Artificial Sequence
  Synthetic
aacuuuugguugcccuuu

SEQ ID NO: 686892 - RNA, 19 nt, Artificial Sequence
  Synthetic
gaacuuuugguugcccuuu

SEQ ID NO: 686893 - RNA, 20 nt, Artificial Sequence
  Synthetic
ugaacuuuugguugcccuuu

SEQ ID NO: 686894 - RNA, 21 nt, Artificial Sequence
  Synthetic
cugaacuuuugguugcccuuu

SEQ ID NO: 686895 - RNA, 22 nt, Artificial Sequence
  Synthetic
acugaacuuuugguugcccuuu

SEQ ID NO: 686896 - RNA, 23 nt, Artificial Sequence
  Synthetic
uacugaacuuuugguugcccuuu

SEQ ID NO: 686897 - RNA, 24 nt, Artificial Sequence
  Synthetic
cuacugaacuuuugguugcccuuu

SEQ ID NO: 686898 - RNA, 18 nt, Artificial Sequence
  Synthetic
aucccgggaccucccuuu

SEQ ID NO: 686899 - RNA, 19 nt, Artificial Sequence
  Synthetic
gaucccgggaccucccuuu

SEQ ID NO: 686900 - RNA, 20 nt, Artificial Sequence
  Synthetic
ugaucccgggaccucccuuu

SEQ ID NO: 686901 - RNA, 21 nt, Artificial Sequence
  Synthetic
cugaucccgggaccucccuuu

SEQ ID NO: 686902 - RNA, 22 nt, Artificial Sequence
  Synthetic
gcugaucccgggaccucccuuu

SEQ ID NO: 686903 - RNA, 23 nt, Artificial Sequence
  Synthetic
ugcugaucccgggaccucccuuu

SEQ ID NO: 686904 - RNA, 24 nt, Artificial Sequence
  Synthetic
cugcugaucccgggaccucccuuu

SEQ ID NO: 686905 - RNA, 18 nt, Artificial Sequence
  Synthetic
uguuuuauugcucccuuu

SEQ ID NO: 686906 - RNA, 19 nt, Artificial Sequence
  Synthetic
uuguuuuauugcucccuuu

SEQ ID NO: 686907 - RNA, 20 nt, Artificial Sequence
  Synthetic
uuuguuuuauugcucccuuu

SEQ ID NO: 686908 - RNA, 21 nt, Artificial Sequence
  Synthetic
auuuguuuuauugcucccuuu

SEQ ID NO: 686909 - RNA, 22 nt, Artificial Sequence
  Synthetic
cauuuguuuuauugcucccuuu

SEQ ID NO: 686910 - RNA, 23 nt, Artificial Sequence
  Synthetic
ucauuuguuuuauugcucccuuu

SEQ ID NO: 686911 - RNA, 24 nt, Artificial Sequence
  Synthetic
cucauuuguuuuauugcucccuuu

SEQ ID NO: 686912 - RNA, 18 nt, Artificial Sequence
  Synthetic
ugaacauugauucccuuu

SEQ ID NO: 686913 - RNA, 19 nt, Artificial Sequence
  Synthetic
uugaacauugauucccuuu

SEQ ID NO: 686914 - RNA, 20 nt, Artificial Sequence
  Synthetic
uuugaacauugauucccuuu

SEQ ID NO: 686915 - RNA, 21 nt, Artificial Sequence
  Synthetic
auuugaacauugauucccuuu

SEQ ID NO: 686916 - RNA, 22 nt, Artificial Sequence
  Synthetic
aauuugaacauugauucccuuu

SEQ ID NO: 686917 - RNA, 23 nt, Artificial Sequence
  Synthetic
uaauuugaacauugauucccuuu

SEQ ID NO: 686918 - RNA, 24 nt, Artificial Sequence
  Synthetic
auaauuugaacauugauucccuuu

SEQ ID NO: 686919 - RNA, 18 nt, Artificial Sequence
  Synthetic
aaaaucuaauuucccuuu

SEQ ID NO: 686920 - RNA, 19 nt, Artificial Sequence
  Synthetic
aaaaaucuaauuucccuuu

SEQ ID NO: 686921 - RNA, 20 nt, Artificial Sequence
  Synthetic
gaaaaaucuaauuucccuuu

SEQ ID NO: 686922 - RNA, 21 nt, Artificial Sequence
  Synthetic
ugaaaaaucuaauuucccuuu

SEQ ID NO: 686923 - RNA, 22 nt, Artificial Sequence
  Synthetic
augaaaaaucuaauuucccuuu

SEQ ID NO: 686924 - RNA, 23 nt, Artificial Sequence
  Synthetic
aaugaaaaaucuaauuucccuuu

SEQ ID NO: 686925 - RNA, 24 nt, Artificial Sequence
  Synthetic
aaaugaaaaaucuaauuucccuuu

SEQ ID NO: 686926 - RNA, 18 nt, Artificial Sequence
  Synthetic
cuggucuuuuuucccuuu

SEQ ID NO: 686927 - RNA, 19 nt, Artificial Sequence
  Synthetic
acuggucuuuuuucccuuu

SEQ ID NO: 686928 - RNA, 20 nt, Artificial Sequence
  Synthetic
aacuggucuuuuuucccuuu

SEQ ID NO: 686929 - RNA, 21 nt, Artificial Sequence
  Synthetic
aaacuggucuuuuuucccuuu

SEQ ID NO: 686930 - RNA, 22 nt, Artificial Sequence
  Synthetic
uaaacuggucuuuuuucccuuu

SEQ ID NO: 686931 - RNA, 23 nt, Artificial Sequence
  Synthetic
auaaacuggucuuuuuucccuuu

SEQ ID NO: 686932 - RNA, 24 nt, Artificial Sequence
  Synthetic
cauaaacuggucuuuuuucccuuu

SEQ ID NO: 686933 - RNA, 18 nt, Artificial Sequence
  Synthetic
uggcguggggaagccuuu

SEQ ID NO: 686934 - RNA, 19 nt, Artificial Sequence
  Synthetic
uuggcguggggaagccuuu

SEQ ID NO: 686935 - RNA, 20 nt, Artificial Sequence
  Synthetic
auuggcguggggaagccuuu

SEQ ID NO: 686936 - RNA, 21 nt, Artificial Sequence
  Synthetic
uauuggcguggggaagccuuu

SEQ ID NO: 686937 - RNA, 22 nt, Artificial Sequence
  Synthetic
auauuggcguggggaagccuuu

SEQ ID NO: 686938 - RNA, 23 nt, Artificial Sequence
  Synthetic
aauauuggcguggggaagccuuu

SEQ ID NO: 686939 - RNA, 24 nt, Artificial Sequence
  Synthetic
aaauauuggcguggggaagccuuu

SEQ ID NO: 686940 - RNA, 18 nt, Artificial Sequence
  Synthetic
accuagugugcagccuuu

SEQ ID NO: 686941 - RNA, 19 nt, Artificial Sequence
  Synthetic
caccuagugugcagccuuu

SEQ ID NO: 686942 - RNA, 20 nt, Artificial Sequence
  Synthetic
acaccuagugugcagccuuu

SEQ ID NO: 686943 - RNA, 21 nt, Artificial Sequence
  Synthetic
aacaccuagugugcagccuuu

SEQ ID NO: 686944 - RNA, 22 nt, Artificial Sequence
  Synthetic
caacaccuagugugcagccuuu

SEQ ID NO: 686945 - RNA, 23 nt, Artificial Sequence
  Synthetic
ccaacaccuagugugcagccuuu

SEQ ID NO: 686946 - RNA, 24 nt, Artificial Sequence
  Synthetic
gccaacaccuagugugcagccuuu

SEQ ID NO: 686947 - RNA, 18 nt, Artificial Sequence
  Synthetic
cuacuucacuuagccuuu

SEQ ID NO: 686948 - RNA, 19 nt, Artificial Sequence
  Synthetic
acuacuucacuuagccuuu

SEQ ID NO: 686949 - RNA, 20 nt, Artificial Sequence
  Synthetic
uacuacuucacuuagccuuu

SEQ ID NO: 686950 - RNA, 21 nt, Artificial Sequence
  Synthetic
uuacuacuucacuuagccuuu

SEQ ID NO: 686951 - RNA, 22 nt, Artificial Sequence
  Synthetic
cuuacuacuucacuuagccuuu

SEQ ID NO: 686952 - RNA, 23 nt, Artificial Sequence
  Synthetic
acuuacuacuucacuuagccuuu

SEQ ID NO: 686953 - RNA, 24 nt, Artificial Sequence
  Synthetic
uacuuacuacuucacuuagccuuu

SEQ ID NO: 686954 - RNA, 18 nt, Artificial Sequence
  Synthetic
uguucaaagcccgccuuu

SEQ ID NO: 686955 - RNA, 19 nt, Artificial Sequence
  Synthetic
uuguucaaagcccgccuuu

SEQ ID NO: 686956 - RNA, 20 nt, Artificial Sequence
  Synthetic
uuuguucaaagcccgccuuu

SEQ ID NO: 686957 - RNA, 21 nt, Artificial Sequence
  Synthetic
guuuguucaaagcccgccuuu

SEQ ID NO: 686958 - RNA, 22 nt, Artificial Sequence
  Synthetic
uguuuguucaaagcccgccuuu

SEQ ID NO: 686959 - RNA, 23 nt, Artificial Sequence
  Synthetic
uuguuuguucaaagcccgccuuu

SEQ ID NO: 686960 - RNA, 24 nt, Artificial Sequence
  Synthetic
uuuguuuguucaaagcccgccuuu

SEQ ID NO: 686961 - RNA, 18 nt, Artificial Sequence
  Synthetic
uuaggagauggggccuuu

SEQ ID NO: 686962 - RNA, 19 nt, Artificial Sequence
  Synthetic
auuaggagauggggccuuu

SEQ ID NO: 686963 - RNA, 20 nt, Artificial Sequence
  Synthetic
uauuaggagauggggccuuu

SEQ ID NO: 686964 - RNA, 21 nt, Artificial Sequence
  Synthetic
guauuaggagauggggccuuu

SEQ ID NO: 686965 - RNA, 22 nt, Artificial Sequence
  Synthetic
gguauuaggagauggggccuuu

SEQ ID NO: 686966 - RNA, 23 nt, Artificial Sequence
  Synthetic
ugguauuaggagauggggccuuu

SEQ ID NO: 686967 - RNA, 24 nt, Artificial Sequence
  Synthetic
augguauuaggagauggggccuuu

SEQ ID NO: 686968 - RNA, 18 nt, Artificial Sequence
  Synthetic
uuuggagguggggccuuu

SEQ ID NO: 686969 - RNA, 19 nt, Artificial Sequence
  Synthetic
auuuggagguggggccuuu

SEQ ID NO: 686970 - RNA, 20 nt, Artificial Sequence
  Synthetic
uauuuggagguggggccuuu

SEQ ID NO: 686971 - RNA, 21 nt, Artificial Sequence
  Synthetic
auauuuggagguggggccuuu

SEQ ID NO: 686972 - RNA, 22 nt, Artificial Sequence
  Synthetic
gauauuuggagguggggccuuu

SEQ ID NO: 686973 - RNA, 23 nt, Artificial Sequence
  Synthetic
ggauauuuggagguggggccuuu

SEQ ID NO: 686974 - RNA, 24 nt, Artificial Sequence
  Synthetic
uggauauuuggagguggggccuuu

SEQ ID NO: 686975 - RNA, 18 nt, Artificial Sequence
  Synthetic
ggaauaaaauuggccuuu

SEQ ID NO: 686976 - RNA, 19 nt, Artificial Sequence
  Synthetic
uggaauaaaauuggccuuu

SEQ ID NO: 686977 - RNA, 20 nt, Artificial Sequence
  Synthetic
uuggaauaaaauuggccuuu

SEQ ID NO: 686978 - RNA, 21 nt, Artificial Sequence
  Synthetic
cuuggaauaaaauuggccuuu

SEQ ID NO: 686979 - RNA, 22 nt, Artificial Sequence
  Synthetic
ucuuggaauaaaauuggccuuu

SEQ ID NO: 686980 - RNA, 23 nt, Artificial Sequence
  Synthetic
uucuuggaauaaaauuggccuuu

SEQ ID NO: 686981 - RNA, 24 nt, Artificial Sequence
  Synthetic
guucuuggaauaaaauuggccuuu

SEQ ID NO: 686982 - RNA, 18 nt, Artificial Sequence
  Synthetic
uccugguguagugccuuu

SEQ ID NO: 686983 - RNA, 19 nt, Artificial Sequence
  Synthetic
uuccugguguagugccuuu

SEQ ID NO: 686984 - RNA, 20 nt, Artificial Sequence
  Synthetic
cuuccugguguagugccuuu

SEQ ID NO: 686985 - RNA, 21 nt, Artificial Sequence
  Synthetic
acuuccugguguagugccuuu

SEQ ID NO: 686986 - RNA, 22 nt, Artificial Sequence
  Synthetic
aacuuccugguguagugccuuu

SEQ ID NO: 686987 - RNA, 23 nt, Artificial Sequence
  Synthetic
caacuuccugguguagugccuuu

SEQ ID NO: 686988 - RNA, 24 nt, Artificial Sequence
  Synthetic
acaacuuccugguguagugccuuu

SEQ ID NO: 686989 - RNA, 18 nt, Artificial Sequence
  Synthetic
ccgggagauugugccuuu

SEQ ID NO: 686990 - RNA, 19 nt, Artificial Sequence
  Synthetic
accgggagauugugccuuu

SEQ ID NO: 686991 - RNA, 20 nt, Artificial Sequence
  Synthetic
caccgggagauugugccuuu

SEQ ID NO: 686992 - RNA, 21 nt, Artificial Sequence
  Synthetic
gcaccgggagauugugccuuu

SEQ ID NO: 686993 - RNA, 22 nt, Artificial Sequence
  Synthetic
agcaccgggagauugugccuuu

SEQ ID NO: 686994 - RNA, 23 nt, Artificial Sequence
  Synthetic
cagcaccgggagauugugccuuu

SEQ ID NO: 686995 - RNA, 24 nt, Artificial Sequence
  Synthetic
gcagcaccgggagauugugccuuu

SEQ ID NO: 686996 - RNA, 18 nt, Artificial Sequence
  Synthetic
acaguuuaguuugccuuu

SEQ ID NO: 686997 - RNA, 19 nt, Artificial Sequence
  Synthetic
cacaguuuaguuugccuuu

SEQ ID NO: 686998 - RNA, 20 nt, Artificial Sequence
  Synthetic
acacaguuuaguuugccuuu

SEQ ID NO: 686999 - RNA, 21 nt, Artificial Sequence
  Synthetic
aacacaguuuaguuugccuuu

SEQ ID NO: 687000 - RNA, 22 nt, Artificial Sequence
  Synthetic
aaacacaguuuaguuugccuuu

SEQ ID NO: 687001 - RNA, 23 nt, Artificial Sequence
  Synthetic
gaaacacaguuuaguuugccuuu

SEQ ID NO: 687002 - RNA, 24 nt, Artificial Sequence
  Synthetic
ugaaacacaguuuaguuugccuuu

SEQ ID NO: 687003 - RNA, 18 nt, Artificial Sequence
  Synthetic
ggggaaaauaaauccuuu

SEQ ID NO: 687004 - RNA, 19 nt, Artificial Sequence
  Synthetic
gggggaaaauaaauccuuu

SEQ ID NO: 687005 - RNA, 20 nt, Artificial Sequence
  Synthetic
ugggggaaaauaaauccuuu

SEQ ID NO: 687006 - RNA, 21 nt, Artificial Sequence
  Synthetic
uugggggaaaauaaauccuuu

SEQ ID NO: 687007 - RNA, 22 nt, Artificial Sequence
  Synthetic
auugggggaaaauaaauccuuu

SEQ ID NO: 687008 - RNA, 23 nt, Artificial Sequence
  Synthetic
cauugggggaaaauaaauccuuu

SEQ ID NO: 687009 - RNA, 24 nt, Artificial Sequence
  Synthetic
ccauugggggaaaauaaauccuuu

SEQ ID NO: 687010 - RNA, 18 nt, Artificial Sequence
  Synthetic
aguauaccagcauccuuu

SEQ ID NO: 687011 - RNA, 19 nt, Artificial Sequence
  Synthetic
caguauaccagcauccuuu

SEQ ID NO: 687012 - RNA, 20 nt, Artificial Sequence
  Synthetic
acaguauaccagcauccuuu

SEQ ID NO: 687013 - RNA, 21 nt, Artificial Sequence
  Synthetic
aacaguauaccagcauccuuu

SEQ ID NO: 687014 - RNA, 22 nt, Artificial Sequence
  Synthetic
aaacaguauaccagcauccuuu

SEQ ID NO: 687015 - RNA, 23 nt, Artificial Sequence
  Synthetic
uaaacaguauaccagcauccuuu

SEQ ID NO: 687016 - RNA, 24 nt, Artificial Sequence
  Synthetic
cuaaacaguauaccagcauccuuu

SEQ ID NO: 687017 - RNA, 18 nt, Artificial Sequence
  Synthetic
gcucuauucauauccuuu

SEQ ID NO: 687018 - RNA, 19 nt, Artificial Sequence
  Synthetic
ugcucuauucauauccuuu

SEQ ID NO: 687019 - RNA, 20 nt, Artificial Sequence
  Synthetic
uugcucuauucauauccuuu

SEQ ID NO: 687020 - RNA, 21 nt, Artificial Sequence
  Synthetic
auugcucuauucauauccuuu

SEQ ID NO: 687021 - RNA, 22 nt, Artificial Sequence
  Synthetic
uauugcucuauucauauccuuu

SEQ ID NO: 687022 - RNA, 23 nt, Artificial Sequence
  Synthetic
uuauugcucuauucauauccuuu

SEQ ID NO: 687023 - RNA, 24 nt, Artificial Sequence
  Synthetic
cuuauugcucuauucauauccuuu

SEQ ID NO: 687024 - RNA, 18 nt, Artificial Sequence
  Synthetic
gucuuucguauauccuuu

SEQ ID NO: 687025 - RNA, 19 nt, Artificial Sequence
  Synthetic
ugucuuucguauauccuuu

SEQ ID NO: 687026 - RNA, 20 nt, Artificial Sequence
  Synthetic
augucuuucguauauccuuu

SEQ ID NO: 687027 - RNA, 21 nt, Artificial Sequence
  Synthetic
aaugucuuucguauauccuuu

SEQ ID NO: 687028 - RNA, 22 nt, Artificial Sequence
  Synthetic
gaaugucuuucguauauccuuu

SEQ ID NO: 687029 - RNA, 23 nt, Artificial Sequence
  Synthetic
ugaaugucuuucguauauccuuu

SEQ ID NO: 687030 - RNA, 24 nt, Artificial Sequence
  Synthetic
augaaugucuuucguauauccuuu

SEQ ID NO: 687031 - RNA, 18 nt, Artificial Sequence
  Synthetic
ccauuuguauuauccuuu

SEQ ID NO: 687032 - RNA, 19 nt, Artificial Sequence
  Synthetic
gccauuuguauuauccuuu

SEQ ID NO: 687033 - RNA, 20 nt, Artificial Sequence
  Synthetic
ugccauuuguauuauccuuu

SEQ ID NO: 687034 - RNA, 21 nt, Artificial Sequence
  Synthetic
augccauuuguauuauccuuu

SEQ ID NO: 687035 - RNA, 22 nt, Artificial Sequence
  Synthetic
caugccauuuguauuauccuuu

SEQ ID NO: 687036 - RNA, 23 nt, Artificial Sequence
  Synthetic
ucaugccauuuguauuauccuuu

SEQ ID NO: 687037 - RNA, 24 nt, Artificial Sequence
  Synthetic
cucaugccauuuguauuauccuuu

SEQ ID NO: 687038 - RNA, 18 nt, Artificial Sequence
  Synthetic
uaaaaguuagacuccuuu

SEQ ID NO: 687039 - RNA, 19 nt, Artificial Sequence
  Synthetic
auaaaaguuagacuccuuu

SEQ ID NO: 687040 - RNA, 20 nt, Artificial Sequence
  Synthetic
uauaaaaguuagacuccuuu

SEQ ID NO: 687041 - RNA, 21 nt, Artificial Sequence
  Synthetic
uuauaaaaguuagacuccuuu

SEQ ID NO: 687042 - RNA, 22 nt, Artificial Sequence
  Synthetic
auuauaaaaguuagacuccuuu

SEQ ID NO: 687043 - RNA, 23 nt, Artificial Sequence
  Synthetic
uauuauaaaaguuagacuccuuu

SEQ ID NO: 687044 - RNA, 24 nt, Artificial Sequence
  Synthetic
cuauuauaaaaguuagacuccuuu

SEQ ID NO: 687045 - RNA, 18 nt, Artificial Sequence
  Synthetic
uguuuuaaauccuccuuu

SEQ ID NO: 687046 - RNA, 19 nt, Artificial Sequence
  Synthetic
cuguuuuaaauccuccuuu

SEQ ID NO: 687047 - RNA, 20 nt, Artificial Sequence
  Synthetic
acuguuuuaaauccuccuuu

SEQ ID NO: 687048 - RNA, 21 nt, Artificial Sequence
  Synthetic
aacuguuuuaaauccuccuuu

SEQ ID NO: 687049 - RNA, 22 nt, Artificial Sequence
  Synthetic
caacuguuuuaaauccuccuuu

SEQ ID NO: 687050 - RNA, 23 nt, Artificial Sequence
  Synthetic
ucaacuguuuuaaauccuccuuu

SEQ ID NO: 687051 - RNA, 24 nt, Artificial Sequence
  Synthetic
uucaacuguuuuaaauccuccuuu

SEQ ID NO: 687052 - RNA, 18 nt, Artificial Sequence
  Synthetic
ccuaugucuuccuccuuu

SEQ ID NO: 687053 - RNA, 19 nt, Artificial Sequence
  Synthetic
cccuaugucuuccuccuuu

SEQ ID NO: 687054 - RNA, 20 nt, Artificial Sequence
  Synthetic
acccuaugucuuccuccuuu

SEQ ID NO: 687055 - RNA, 21 nt, Artificial Sequence
  Synthetic
aacccuaugucuuccuccuuu

SEQ ID NO: 687056 - RNA, 22 nt, Artificial Sequence
  Synthetic
aaacccuaugucuuccuccuuu

SEQ ID NO: 687057 - RNA, 23 nt, Artificial Sequence
  Synthetic
gaaacccuaugucuuccuccuuu

SEQ ID NO: 687058 - RNA, 24 nt, Artificial Sequence
  Synthetic
ggaaacccuaugucuuccuccuuu

SEQ ID NO: 687059 - RNA, 18 nt, Artificial Sequence
  Synthetic
aaaaauuaucucuccuuu

SEQ ID NO: 687060 - RNA, 19 nt, Artificial Sequence
  Synthetic
uaaaaauuaucucuccuuu

SEQ ID NO: 687061 - RNA, 20 nt, Artificial Sequence
  Synthetic
uuaaaaauuaucucuccuuu

SEQ ID NO: 687062 - RNA, 21 nt, Artificial Sequence
  Synthetic
auuaaaaauuaucucuccuuu

SEQ ID NO: 687063 - RNA, 22 nt, Artificial Sequence
  Synthetic
uauuaaaaauuaucucuccuuu

SEQ ID NO: 687064 - RNA, 23 nt, Artificial Sequence
  Synthetic
auauuaaaaauuaucucuccuuu

SEQ ID NO: 687065 - RNA, 24 nt, Artificial Sequence
  Synthetic
uauauuaaaaauuaucucuccuuu

SEQ ID NO: 687066 - RNA, 18 nt, Artificial Sequence
  Synthetic
ucaaaucaguaguccuuu

SEQ ID NO: 687067 - RNA, 19 nt, Artificial Sequence
  Synthetic
aucaaaucaguaguccuuu

SEQ ID NO: 687068 - RNA, 20 nt, Artificial Sequence
  Synthetic
caucaaaucaguaguccuuu

SEQ ID NO: 687069 - RNA, 21 nt, Artificial Sequence
  Synthetic
gcaucaaaucaguaguccuuu

SEQ ID NO: 687070 - RNA, 22 nt, Artificial Sequence
  Synthetic
ggcaucaaaucaguaguccuuu

SEQ ID NO: 687071 - RNA, 23 nt, Artificial Sequence
  Synthetic
gggcaucaaaucaguaguccuuu

SEQ ID NO: 687072 - RNA, 24 nt, Artificial Sequence
  Synthetic
ggggcaucaaaucaguaguccuuu

SEQ ID NO: 687073 - RNA, 18 nt, Artificial Sequence
  Synthetic
uaacuaagcauguccuuu

SEQ ID NO: 687074 - RNA, 19 nt, Artificial Sequence
  Synthetic
guaacuaagcauguccuuu

SEQ ID NO: 687075 - RNA, 20 nt, Artificial Sequence
  Synthetic
uguaacuaagcauguccuuu

SEQ ID NO: 687076 - RNA, 21 nt, Artificial Sequence
  Synthetic
uuguaacuaagcauguccuuu

SEQ ID NO: 687077 - RNA, 22 nt, Artificial Sequence
  Synthetic
cuuguaacuaagcauguccuuu

SEQ ID NO: 687078 - RNA, 23 nt, Artificial Sequence
  Synthetic
ucuuguaacuaagcauguccuuu

SEQ ID NO: 687079 - RNA, 24 nt, Artificial Sequence
  Synthetic
uucuuguaacuaagcauguccuuu

SEQ ID NO: 687080 - RNA, 18 nt, Artificial Sequence
  Synthetic
aaugaaaucauguccuuu

SEQ ID NO: 687081 - RNA, 19 nt, Artificial Sequence
  Synthetic
gaaugaaaucauguccuuu

SEQ ID NO: 687082 - RNA, 20 nt, Artificial Sequence
  Synthetic
agaaugaaaucauguccuuu

SEQ ID NO: 687083 - RNA, 21 nt, Artificial Sequence
  Synthetic
aagaaugaaaucauguccuuu

SEQ ID NO: 687084 - RNA, 22 nt, Artificial Sequence
  Synthetic
aaagaaugaaaucauguccuuu

SEQ ID NO: 687085 - RNA, 23 nt, Artificial Sequence
  Synthetic
aaaagaaugaaaucauguccuuu

SEQ ID NO: 687086 - RNA, 24 nt, Artificial Sequence
  Synthetic
aaaaagaaugaaaucauguccuuu

SEQ ID NO: 687087 - RNA, 18 nt, Artificial Sequence
  Synthetic
gagccaaggccuuccuuu

SEQ ID NO: 687088 - RNA, 19 nt, Artificial Sequence
  Synthetic
agagccaaggccuuccuuu

SEQ ID NO: 687089 - RNA, 20 nt, Artificial Sequence
  Synthetic
cagagccaaggccuuccuuu

SEQ ID NO: 687090 - RNA, 21 nt, Artificial Sequence
  Synthetic
gcagagccaaggccuuccuuu

SEQ ID NO: 687091 - RNA, 22 nt, Artificial Sequence
  Synthetic
ggcagagccaaggccuuccuuu

SEQ ID NO: 687092 - RNA, 23 nt, Artificial Sequence
  Synthetic
aggcagagccaaggccuuccuuu

SEQ ID NO: 687093 - RNA, 24 nt, Artificial Sequence
  Synthetic
aaggcagagccaaggccuuccuuu

SEQ ID NO: 687094 - RNA, 18 nt, Artificial Sequence
  Synthetic
agaauaaagucuuccuuu

SEQ ID NO: 687095 - RNA, 19 nt, Artificial Sequence
  Synthetic
uagaauaaagucuuccuuu

SEQ ID NO: 687096 - RNA, 20 nt, Artificial Sequence
  Synthetic
guagaauaaagucuuccuuu

SEQ ID NO: 687097 - RNA, 21 nt, Artificial Sequence
  Synthetic
aguagaauaaagucuuccuuu

SEQ ID NO: 687098 - RNA, 22 nt, Artificial Sequence
  Synthetic
aaguagaauaaagucuuccuuu

SEQ ID NO: 687099 - RNA, 23 nt, Artificial Sequence
  Synthetic
caaguagaauaaagucuuccuuu

SEQ ID NO: 687100 - RNA, 24 nt, Artificial Sequence
  Synthetic
ccaaguagaauaaagucuuccuuu

SEQ ID NO: 687101 - RNA, 18 nt, Artificial Sequence
  Synthetic
aaggccaagucuuccuuu

SEQ ID NO: 687102 - RNA, 19 nt, Artificial Sequence
  Synthetic
aaaggccaagucuuccuuu

SEQ ID NO: 687103 - RNA, 20 nt, Artificial Sequence
  Synthetic
uaaaggccaagucuuccuuu

SEQ ID NO: 687104 - RNA, 21 nt, Artificial Sequence
  Synthetic
auaaaggccaagucuuccuuu

SEQ ID NO: 687105 - RNA, 22 nt, Artificial Sequence
  Synthetic
aauaaaggccaagucuuccuuu

SEQ ID NO: 687106 - RNA, 23 nt, Artificial Sequence
  Synthetic
aaauaaaggccaagucuuccuuu

SEQ ID NO: 687107 - RNA, 24 nt, Artificial Sequence
  Synthetic
uaaauaaaggccaagucuuccuuu

SEQ ID NO: 687108 - RNA, 18 nt, Artificial Sequence
  Synthetic
uugauaucuucuuccuuu

SEQ ID NO: 687109 - RNA, 19 nt, Artificial Sequence
  Synthetic
uuugauaucuucuuccuuu

SEQ ID NO: 687110 - RNA, 20 nt, Artificial Sequence
  Synthetic
uuuugauaucuucuuccuuu

SEQ ID NO: 687111 - RNA, 21 nt, Artificial Sequence
  Synthetic
cuuuugauaucuucuuccuuu

SEQ ID NO: 687112 - RNA, 22 nt, Artificial Sequence
  Synthetic
ucuuuugauaucuucuuccuuu

SEQ ID NO: 687113 - RNA, 23 nt, Artificial Sequence
  Synthetic
aucuuuugauaucuucuuccuuu

SEQ ID NO: 687114 - RNA, 24 nt, Artificial Sequence
  Synthetic
caucuuuugauaucuucuuccuuu

SEQ ID NO: 687115 - RNA, 18 nt, Artificial Sequence
  Synthetic
ucacccuuacguuccuuu

SEQ ID NO: 687116 - RNA, 19 nt, Artificial Sequence
  Synthetic
uucacccuuacguuccuuu

SEQ ID NO: 687117 - RNA, 20 nt, Artificial Sequence
  Synthetic
uuucacccuuacguuccuuu

SEQ ID NO: 687118 - RNA, 21 nt, Artificial Sequence
  Synthetic
cuuucacccuuacguuccuuu

SEQ ID NO: 687119 - RNA, 22 nt, Artificial Sequence
  Synthetic
ucuuucacccuuacguuccuuu

SEQ ID NO: 687120 - RNA, 23 nt, Artificial Sequence
  Synthetic
aucuuucacccuuacguuccuuu

SEQ ID NO: 687121 - RNA, 24 nt, Artificial Sequence
  Synthetic
caucuuucacccuuacguuccuuu

SEQ ID NO: 687122 - RNA, 18 nt, Artificial Sequence
  Synthetic
uaaggcauauguuccuuu

SEQ ID NO: 687123 - RNA, 19 nt, Artificial Sequence
  Synthetic
uuaaggcauauguuccuuu

SEQ ID NO: 687124 - RNA, 20 nt, Artificial Sequence
  Synthetic
auuaaggcauauguuccuuu

SEQ ID NO: 687125 - RNA, 21 nt, Artificial Sequence
  Synthetic
cauuaaggcauauguuccuuu

SEQ ID NO: 687126 - RNA, 22 nt, Artificial Sequence
  Synthetic
ucauuaaggcauauguuccuuu

SEQ ID NO: 687127 - RNA, 23 nt, Artificial Sequence
  Synthetic
uucauuaaggcauauguuccuuu

SEQ ID NO: 687128 - RNA, 24 nt, Artificial Sequence
  Synthetic
uuucauuaaggcauauguuccuuu

SEQ ID NO: 687129 - RNA, 18 nt, Artificial Sequence
  Synthetic
uauccuuuuauuuccuuu

SEQ ID NO: 687130 - RNA, 19 nt, Artificial Sequence
  Synthetic
auauccuuuuauuuccuuu

SEQ ID NO: 687131 - RNA, 20 nt, Artificial Sequence
  Synthetic
uauauccuuuuauuuccuuu

SEQ ID NO: 687132 - RNA, 21 nt, Artificial Sequence
  Synthetic
guauauccuuuuauuuccuuu

SEQ ID NO: 687133 - RNA, 22 nt, Artificial Sequence
  Synthetic
cguauauccuuuuauuuccuuu

SEQ ID NO: 687134 - RNA, 23 nt, Artificial Sequence
  Synthetic
acguauauccuuuuauuuccuuu

SEQ ID NO: 687135 - RNA, 24 nt, Artificial Sequence
  Synthetic
uacguauauccuuuuauuuccuuu

SEQ ID NO: 687136 - RNA, 18 nt, Artificial Sequence
  Synthetic
uacuuuaaauuuuccuuu

SEQ ID NO: 687137 - RNA, 19 nt, Artificial Sequence
  Synthetic
uuacuuuaaauuuuccuuu

SEQ ID NO: 687138 - RNA, 20 nt, Artificial Sequence
  Synthetic
uuuacuuuaaauuuuccuuu

SEQ ID NO: 687139 - RNA, 21 nt, Artificial Sequence
  Synthetic
auuuacuuuaaauuuuccuuu

SEQ ID NO: 687140 - RNA, 22 nt, Artificial Sequence
  Synthetic
aauuuacuuuaaauuuuccuuu

SEQ ID NO: 687141 - RNA, 23 nt, Artificial Sequence
  Synthetic
aaauuuacuuuaaauuuuccuuu

SEQ ID NO: 687142 - RNA, 24 nt, Artificial Sequence
  Synthetic
gaaauuuacuuuaaauuuuccuuu

SEQ ID NO: 687143 - RNA, 18 nt, Artificial Sequence
  Synthetic
guagcaugaaaaagcuuu

SEQ ID NO: 687144 - RNA, 19 nt, Artificial Sequence
  Synthetic
gguagcaugaaaaagcuuu

SEQ ID NO: 687145 - RNA, 20 nt, Artificial Sequence
  Synthetic
agguagcaugaaaaagcuuu

SEQ ID NO: 687146 - RNA, 21 nt, Artificial Sequence
  Synthetic
aagguagcaugaaaaagcuuu

SEQ ID NO: 687147 - RNA, 22 nt, Artificial Sequence
  Synthetic
gaagguagcaugaaaaagcuuu

SEQ ID NO: 687148 - RNA, 23 nt, Artificial Sequence
  Synthetic
ggaagguagcaugaaaaagcuuu

SEQ ID NO: 687149 - RNA, 24 nt, Artificial Sequence
  Synthetic
uggaagguagcaugaaaaagcuuu

SEQ ID NO: 687150 - RNA, 18 nt, Artificial Sequence
  Synthetic
caccacaaacaaagcuuu

SEQ ID NO: 687151 - RNA, 19 nt, Artificial Sequence
  Synthetic
ccaccacaaacaaagcuuu

SEQ ID NO: 687152 - RNA, 20 nt, Artificial Sequence
  Synthetic
cccaccacaaacaaagcuuu

SEQ ID NO: 687153 - RNA, 21 nt, Artificial Sequence
  Synthetic
acccaccacaaacaaagcuuu

SEQ ID NO: 687154 - RNA, 22 nt, Artificial Sequence
  Synthetic
uacccaccacaaacaaagcuuu

SEQ ID NO: 687155 - RNA, 23 nt, Artificial Sequence
  Synthetic
uuacccaccacaaacaaagcuuu

SEQ ID NO: 687156 - RNA, 24 nt, Artificial Sequence
  Synthetic
auuacccaccacaaacaaagcuuu

SEQ ID NO: 687157 - RNA, 18 nt, Artificial Sequence
  Synthetic
uugucaaaugaaagcuuu

SEQ ID NO: 687158 - RNA, 19 nt, Artificial Sequence
  Synthetic
cuugucaaaugaaagcuuu

SEQ ID NO: 687159 - RNA, 20 nt, Artificial Sequence
  Synthetic
acuugucaaaugaaagcuuu

SEQ ID NO: 687160 - RNA, 21 nt, Artificial Sequence
  Synthetic
uacuugucaaaugaaagcuuu

SEQ ID NO: 687161 - RNA, 22 nt, Artificial Sequence
  Synthetic
uuacuugucaaaugaaagcuuu

SEQ ID NO: 687162 - RNA, 23 nt, Artificial Sequence
  Synthetic
guuacuugucaaaugaaagcuuu

SEQ ID NO: 687163 - RNA, 24 nt, Artificial Sequence
  Synthetic
aguuacuugucaaaugaaagcuuu

SEQ ID NO: 687164 - RNA, 18 nt, Artificial Sequence
  Synthetic
uuuaauuucuaaagcuuu

SEQ ID NO: 687165 - RNA, 19 nt, Artificial Sequence
  Synthetic
uuuuaauuucuaaagcuuu

SEQ ID NO: 687166 - RNA, 20 nt, Artificial Sequence
  Synthetic
uuuuuaauuucuaaagcuuu

SEQ ID NO: 687167 - RNA, 21 nt, Artificial Sequence
  Synthetic
uuuuuuaauuucuaaagcuuu

SEQ ID NO: 687168 - RNA, 22 nt, Artificial Sequence
  Synthetic
auuuuuuaauuucuaaagcuuu

SEQ ID NO: 687169 - RNA, 23 nt, Artificial Sequence
  Synthetic
gauuuuuuaauuucuaaagcuuu

SEQ ID NO: 687170 - RNA, 24 nt, Artificial Sequence
  Synthetic
cgauuuuuuaauuucuaaagcuuu

SEQ ID NO: 687171 - RNA, 18 nt, Artificial Sequence
  Synthetic
uaaauacugucaagcuuu

SEQ ID NO: 687172 - RNA, 19 nt, Artificial Sequence
  Synthetic
auaaauacugucaagcuuu

SEQ ID NO: 687173 - RNA, 20 nt, Artificial Sequence
  Synthetic
cauaaauacugucaagcuuu

SEQ ID NO: 687174 - RNA, 21 nt, Artificial Sequence
  Synthetic
gcauaaauacugucaagcuuu

SEQ ID NO: 687175 - RNA, 22 nt, Artificial Sequence
  Synthetic
ugcauaaauacugucaagcuuu

SEQ ID NO: 687176 - RNA, 23 nt, Artificial Sequence
  Synthetic
gugcauaaauacugucaagcuuu

SEQ ID NO: 687177 - RNA, 24 nt, Artificial Sequence
  Synthetic
cgugcauaaauacugucaagcuuu

SEQ ID NO: 687178 - RNA, 18 nt, Artificial Sequence
  Synthetic
uaaucacauagaagcuuu

SEQ ID NO: 687179 - RNA, 19 nt, Artificial Sequence
  Synthetic
uuaaucacauagaagcuuu

SEQ ID NO: 687180 - RNA, 20 nt, Artificial Sequence
  Synthetic
uuuaaucacauagaagcuuu

SEQ ID NO: 687181 - RNA, 21 nt, Artificial Sequence
  Synthetic
cuuuaaucacauagaagcuuu

SEQ ID NO: 687182 - RNA, 22 nt, Artificial Sequence
  Synthetic
ucuuuaaucacauagaagcuuu

SEQ ID NO: 687183 - RNA, 23 nt, Artificial Sequence
  Synthetic
cucuuuaaucacauagaagcuuu

SEQ ID NO: 687184 - RNA, 24 nt, Artificial Sequence
  Synthetic
ucucuuuaaucacauagaagcuuu

SEQ ID NO: 687185 - RNA, 18 nt, Artificial Sequence
  Synthetic
ggagggcaaggaagcuuu

SEQ ID NO: 687186 - RNA, 19 nt, Artificial Sequence
  Synthetic
gggagggcaaggaagcuuu

SEQ ID NO: 687187 - RNA, 20 nt, Artificial Sequence
  Synthetic
ugggagggcaaggaagcuuu

SEQ ID NO: 687188 - RNA, 21 nt, Artificial Sequence
  Synthetic
gugggagggcaaggaagcuuu

SEQ ID NO: 687189 - RNA, 22 nt, Artificial Sequence
  Synthetic
ggugggagggcaaggaagcuuu

SEQ ID NO: 687190 - RNA, 23 nt, Artificial Sequence
  Synthetic
uggugggagggcaaggaagcuuu

SEQ ID NO: 687191 - RNA, 24 nt, Artificial Sequence
  Synthetic
auggugggagggcaaggaagcuuu

SEQ ID NO: 687192 - RNA, 18 nt, Artificial Sequence
  Synthetic
uccaagaauauaagcuuu

SEQ ID NO: 687193 - RNA, 19 nt, Artificial Sequence
  Synthetic
uuccaagaauauaagcuuu

SEQ ID NO: 687194 - RNA, 20 nt, Artificial Sequence
  Synthetic
cuuccaagaauauaagcuuu

SEQ ID NO: 687195 - RNA, 21 nt, Artificial Sequence
  Synthetic
gcuuccaagaauauaagcuuu

SEQ ID NO: 687196 - RNA, 22 nt, Artificial Sequence
  Synthetic
ugcuuccaagaauauaagcuuu

SEQ ID NO: 687197 - RNA, 23 nt, Artificial Sequence
  Synthetic
cugcuuccaagaauauaagcuuu

SEQ ID NO: 687198 - RNA, 24 nt, Artificial Sequence
  Synthetic
ucugcuuccaagaauauaagcuuu

SEQ ID NO: 687199 - RNA, 18 nt, Artificial Sequence
  Synthetic
acaagcuuccacagcuuu

SEQ ID NO: 687200 - RNA, 19 nt, Artificial Sequence
  Synthetic
gacaagcuuccacagcuuu

SEQ ID NO: 687201 - RNA, 20 nt, Artificial Sequence
  Synthetic
agacaagcuuccacagcuuu

SEQ ID NO: 687202 - RNA, 21 nt, Artificial Sequence
  Synthetic
aagacaagcuuccacagcuuu

SEQ ID NO: 687203 - RNA, 22 nt, Artificial Sequence
  Synthetic
uaagacaagcuuccacagcuuu

SEQ ID NO: 687204 - RNA, 23 nt, Artificial Sequence
  Synthetic
auaagacaagcuuccacagcuuu

SEQ ID NO: 687205 - RNA, 24 nt, Artificial Sequence
  Synthetic
cauaagacaagcuuccacagcuuu

SEQ ID NO: 687206 - RNA, 18 nt, Artificial Sequence
  Synthetic
uauuuuagacccagcuuu

SEQ ID NO: 687207 - RNA, 19 nt, Artificial Sequence
  Synthetic
cuauuuuagacccagcuuu

SEQ ID NO: 687208 - RNA, 20 nt, Artificial Sequence
  Synthetic
ccuauuuuagacccagcuuu

SEQ ID NO: 687209 - RNA, 21 nt, Artificial Sequence
  Synthetic
gccuauuuuagacccagcuuu

SEQ ID NO: 687210 - RNA, 22 nt, Artificial Sequence
  Synthetic
ugccuauuuuagacccagcuuu

SEQ ID NO: 687211 - RNA, 23 nt, Artificial Sequence
  Synthetic
uugccuauuuuagacccagcuuu

SEQ ID NO: 687212 - RNA, 24 nt, Artificial Sequence
  Synthetic
cuugccuauuuuagacccagcuuu

SEQ ID NO: 687213 - RNA, 18 nt, Artificial Sequence
  Synthetic
caugccuuuuccagcuuu

SEQ ID NO: 687214 - RNA, 19 nt, Artificial Sequence
  Synthetic
ccaugccuuuuccagcuuu

SEQ ID NO: 687215 - RNA, 20 nt, Artificial Sequence
  Synthetic
uccaugccuuuuccagcuuu

SEQ ID NO: 687216 - RNA, 21 nt, Artificial Sequence
  Synthetic
uuccaugccuuuuccagcuuu

SEQ ID NO: 687217 - RNA, 22 nt, Artificial Sequence
  Synthetic
uuuccaugccuuuuccagcuuu

SEQ ID NO: 687218 - RNA, 23 nt, Artificial Sequence
  Synthetic
uuuuccaugccuuuuccagcuuu

SEQ ID NO: 687219 - RNA, 24 nt, Artificial Sequence
  Synthetic
cuuuuccaugccuuuuccagcuuu

SEQ ID NO: 687220 - RNA, 18 nt, Artificial Sequence
  Synthetic
ucaugaaaucucagcuuu

SEQ ID NO: 687221 - RNA, 19 nt, Artificial Sequence
  Synthetic
uucaugaaaucucagcuuu

SEQ ID NO: 687222 - RNA, 20 nt, Artificial Sequence
  Synthetic
guucaugaaaucucagcuuu

SEQ ID NO: 687223 - RNA, 21 nt, Artificial Sequence
  Synthetic
gguucaugaaaucucagcuuu

SEQ ID NO: 687224 - RNA, 22 nt, Artificial Sequence
  Synthetic
ugguucaugaaaucucagcuuu

SEQ ID NO: 687225 - RNA, 23 nt, Artificial Sequence
  Synthetic
augguucaugaaaucucagcuuu

SEQ ID NO: 687226 - RNA, 24 nt, Artificial Sequence
  Synthetic
aaugguucaugaaaucucagcuuu

SEQ ID NO: 687227 - RNA, 18 nt, Artificial Sequence
  Synthetic
ucuaaauaguagagcuuu

SEQ ID NO: 687228 - RNA, 19 nt, Artificial Sequence
  Synthetic
cucuaaauaguagagcuuu

SEQ ID NO: 687229 - RNA, 20 nt, Artificial Sequence
  Synthetic
gcucuaaauaguagagcuuu

SEQ ID NO: 687230 - RNA, 21 nt, Artificial Sequence
  Synthetic
agcucuaaauaguagagcuuu

SEQ ID NO: 687231 - RNA, 22 nt, Artificial Sequence
  Synthetic
gagcucuaaauaguagagcuuu

SEQ ID NO: 687232 - RNA, 23 nt, Artificial Sequence
  Synthetic
ugagcucuaaauaguagagcuuu

SEQ ID NO: 687233 - RNA, 24 nt, Artificial Sequence
  Synthetic
augagcucuaaauaguagagcuuu

SEQ ID NO: 687234 - RNA, 18 nt, Artificial Sequence
  Synthetic
uuaaggggugggagcuuu

SEQ ID NO: 687235 - RNA, 19 nt, Artificial Sequence
  Synthetic
auuaaggggugggagcuuu

SEQ ID NO: 687236 - RNA, 20 nt, Artificial Sequence
  Synthetic
uauuaaggggugggagcuuu

SEQ ID NO: 687237 - RNA, 21 nt, Artificial Sequence
  Synthetic
guauuaaggggugggagcuuu

SEQ ID NO: 687238 - RNA, 22 nt, Artificial Sequence
  Synthetic
aguauuaaggggugggagcuuu

SEQ ID NO: 687239 - RNA, 23 nt, Artificial Sequence
  Synthetic
caguauuaaggggugggagcuuu

SEQ ID NO: 687240 - RNA, 24 nt, Artificial Sequence
  Synthetic
acaguauuaaggggugggagcuuu

SEQ ID NO: 687241 - RNA, 18 nt, Artificial Sequence
  Synthetic
cuugcuggguggagcuuu

SEQ ID NO: 687242 - RNA, 19 nt, Artificial Sequence
  Synthetic
ccuugcuggguggagcuuu

SEQ ID NO: 687243 - RNA, 20 nt, Artificial Sequence
  Synthetic
accuugcuggguggagcuuu

SEQ ID NO: 687244 - RNA, 21 nt, Artificial Sequence
  Synthetic
caccuugcuggguggagcuuu

SEQ ID NO: 687245 - RNA, 22 nt, Artificial Sequence
  Synthetic
ccaccuugcuggguggagcuuu

SEQ ID NO: 687246 - RNA, 23 nt, Artificial Sequence
  Synthetic
cccaccuugcuggguggagcuuu

SEQ ID NO: 687247 - RNA, 24 nt, Artificial Sequence
  Synthetic
gcccaccuugcuggguggagcuuu

SEQ ID NO: 687248 - RNA, 18 nt, Artificial Sequence
  Synthetic
agucaagaacugagcuuu

SEQ ID NO: 687249 - RNA, 19 nt, Artificial Sequence
  Synthetic
aagucaagaacugagcuuu

SEQ ID NO: 687250 - RNA, 20 nt, Artificial Sequence
  Synthetic
gaagucaagaacugagcuuu

SEQ ID NO: 687251 - RNA, 21 nt, Artificial Sequence
  Synthetic
agaagucaagaacugagcuuu

SEQ ID NO: 687252 - RNA, 22 nt, Artificial Sequence
  Synthetic
cagaagucaagaacugagcuuu

SEQ ID NO: 687253 - RNA, 23 nt, Artificial Sequence
  Synthetic
acagaagucaagaacugagcuuu

SEQ ID NO: 687254 - RNA, 24 nt, Artificial Sequence
  Synthetic
cacagaagucaagaacugagcuuu

SEQ ID NO: 687255 - RNA, 18 nt, Artificial Sequence
  Synthetic
ugauagcagaauagcuuu

SEQ ID NO: 687256 - RNA, 19 nt, Artificial Sequence
  Synthetic
uugauagcagaauagcuuu

SEQ ID NO: 687257 - RNA, 20 nt, Artificial Sequence
  Synthetic
cuugauagcagaauagcuuu

SEQ ID NO: 687258 - RNA, 21 nt, Artificial Sequence
  Synthetic
ucuugauagcagaauagcuuu

SEQ ID NO: 687259 - RNA, 22 nt, Artificial Sequence
  Synthetic
uucuugauagcagaauagcuuu

SEQ ID NO: 687260 - RNA, 23 nt, Artificial Sequence
  Synthetic
auucuugauagcagaauagcuuu

SEQ ID NO: 687261 - RNA, 24 nt, Artificial Sequence
  Synthetic
uauucuugauagcagaauagcuuu

SEQ ID NO: 687262 - RNA, 18 nt, Artificial Sequence
  Synthetic
uccuuagcugauagcuuu

SEQ ID NO: 687263 - RNA, 19 nt, Artificial Sequence
  Synthetic
uuccuuagcugauagcuuu

SEQ ID NO: 687264 - RNA, 20 nt, Artificial Sequence
  Synthetic
auuccuuagcugauagcuuu

SEQ ID NO: 687265 - RNA, 21 nt, Artificial Sequence
  Synthetic
cauuccuuagcugauagcuuu

SEQ ID NO: 687266 - RNA, 22 nt, Artificial Sequence
  Synthetic
gcauuccuuagcugauagcuuu

SEQ ID NO: 687267 - RNA, 23 nt, Artificial Sequence
  Synthetic
ugcauuccuuagcugauagcuuu

SEQ ID NO: 687268 - RNA, 24 nt, Artificial Sequence
  Synthetic
augcauuccuuagcugauagcuuu

SEQ ID NO: 687269 - RNA, 18 nt, Artificial Sequence
  Synthetic
cuucaugaauauagcuuu

SEQ ID NO: 687270 - RNA, 19 nt, Artificial Sequence
  Synthetic
gcuucaugaauauagcuuu

SEQ ID NO: 687271 - RNA, 20 nt, Artificial Sequence
  Synthetic
agcuucaugaauauagcuuu

SEQ ID NO: 687272 - RNA, 21 nt, Artificial Sequence
  Synthetic
cagcuucaugaauauagcuuu

SEQ ID NO: 687273 - RNA, 22 nt, Artificial Sequence
  Synthetic
acagcuucaugaauauagcuuu

SEQ ID NO: 687274 - RNA, 23 nt, Artificial Sequence
  Synthetic
aacagcuucaugaauauagcuuu

SEQ ID NO: 687275 - RNA, 24 nt, Artificial Sequence
  Synthetic
aaacagcuucaugaauauagcuuu

SEQ ID NO: 687276 - RNA, 18 nt, Artificial Sequence
  Synthetic
augaugacauauagcuuu

SEQ ID NO: 687277 - RNA, 19 nt, Artificial Sequence
  Synthetic
caugaugacauauagcuuu

SEQ ID NO: 687278 - RNA, 20 nt, Artificial Sequence
  Synthetic
ccaugaugacauauagcuuu

SEQ ID NO: 687279 - RNA, 21 nt, Artificial Sequence
  Synthetic
uccaugaugacauauagcuuu

SEQ ID NO: 687280 - RNA, 22 nt, Artificial Sequence
  Synthetic
auccaugaugacauauagcuuu

SEQ ID NO: 687281 - RNA, 23 nt, Artificial Sequence
  Synthetic
cauccaugaugacauauagcuuu

SEQ ID NO: 687282 - RNA, 24 nt, Artificial Sequence
  Synthetic
ccauccaugaugacauauagcuuu

SEQ ID NO: 687283 - RNA, 18 nt, Artificial Sequence
  Synthetic
caccugggcuuuagcuuu

SEQ ID NO: 687284 - RNA, 19 nt, Artificial Sequence
  Synthetic
acaccugggcuuuagcuuu

SEQ ID NO: 687285 - RNA, 20 nt, Artificial Sequence
  Synthetic
cacaccugggcuuuagcuuu

SEQ ID NO: 687286 - RNA, 21 nt, Artificial Sequence
  Synthetic
ucacaccugggcuuuagcuuu

SEQ ID NO: 687287 - RNA, 22 nt, Artificial Sequence
  Synthetic
aucacaccugggcuuuagcuuu

SEQ ID NO: 687288 - RNA, 23 nt, Artificial Sequence
  Synthetic
gaucacaccugggcuuuagcuuu

SEQ ID NO: 687289 - RNA, 24 nt, Artificial Sequence
  Synthetic
ugaucacaccugggcuuuagcuuu

SEQ ID NO: 687290 - RNA, 18 nt, Artificial Sequence
  Synthetic
cuugggaaccaccgcuuu

SEQ ID NO: 687291 - RNA, 19 nt, Artificial Sequence
  Synthetic
ccuugggaaccaccgcuuu

SEQ ID NO: 687292 - RNA, 20 nt, Artificial Sequence
  Synthetic
gccuugggaaccaccgcuuu

SEQ ID NO: 687293 - RNA, 21 nt, Artificial Sequence
  Synthetic
ggccuugggaaccaccgcuuu

SEQ ID NO: 687294 - RNA, 22 nt, Artificial Sequence
  Synthetic
aggccuugggaaccaccgcuuu

SEQ ID NO: 687295 - RNA, 23 nt, Artificial Sequence
  Synthetic
caggccuugggaaccaccgcuuu

SEQ ID NO: 687296 - RNA, 24 nt, Artificial Sequence
  Synthetic
ucaggccuugggaaccaccgcuuu

SEQ ID NO: 687297 - RNA, 18 nt, Artificial Sequence
  Synthetic
acaaauauuucaggcuuu

SEQ ID NO: 687298 - RNA, 19 nt, Artificial Sequence
  Synthetic
aacaaauauuucaggcuuu

SEQ ID NO: 687299 - RNA, 20 nt, Artificial Sequence
  Synthetic
gaacaaauauuucaggcuuu

SEQ ID NO: 687300 - RNA, 21 nt, Artificial Sequence
  Synthetic
agaacaaauauuucaggcuuu

SEQ ID NO: 687301 - RNA, 22 nt, Artificial Sequence
  Synthetic
gagaacaaauauuucaggcuuu

SEQ ID NO: 687302 - RNA, 23 nt, Artificial Sequence
  Synthetic
ugagaacaaauauuucaggcuuu

SEQ ID NO: 687303 - RNA, 24 nt, Artificial Sequence
  Synthetic
uugagaacaaauauuucaggcuuu

SEQ ID NO: 687304 - RNA, 18 nt, Artificial Sequence
  Synthetic
auacauggacuaggcuuu

SEQ ID NO: 687305 - RNA, 19 nt, Artificial Sequence
  Synthetic
gauacauggacuaggcuuu

SEQ ID NO: 687306 - RNA, 20 nt, Artificial Sequence
  Synthetic
ggauacauggacuaggcuuu

SEQ ID NO: 687307 - RNA, 21 nt, Artificial Sequence
  Synthetic
uggauacauggacuaggcuuu

SEQ ID NO: 687308 - RNA, 22 nt, Artificial Sequence
  Synthetic
uuggauacauggacuaggcuuu

SEQ ID NO: 687309 - RNA, 23 nt, Artificial Sequence
  Synthetic
uuuggauacauggacuaggcuuu

SEQ ID NO: 687310 - RNA, 24 nt, Artificial Sequence
  Synthetic
auuuggauacauggacuaggcuuu

SEQ ID NO: 687311 - RNA, 18 nt, Artificial Sequence
  Synthetic
cuguuagauaagggcuuu

SEQ ID NO: 687312 - RNA, 19 nt, Artificial Sequence
  Synthetic
ccuguuagauaagggcuuu

SEQ ID NO: 687313 - RNA, 20 nt, Artificial Sequence
  Synthetic
accuguuagauaagggcuuu

SEQ ID NO: 687314 - RNA, 21 nt, Artificial Sequence
  Synthetic
uaccuguuagauaagggcuuu

SEQ ID NO: 687315 - RNA, 22 nt, Artificial Sequence
  Synthetic
guaccuguuagauaagggcuuu

SEQ ID NO: 687316 - RNA, 23 nt, Artificial Sequence
  Synthetic
aguaccuguuagauaagggcuuu

SEQ ID NO: 687317 - RNA, 24 nt, Artificial Sequence
  Synthetic
caguaccuguuagauaagggcuuu

SEQ ID NO: 687318 - RNA, 18 nt, Artificial Sequence
  Synthetic
cugcagacauagggcuuu

SEQ ID NO: 687319 - RNA, 19 nt, Artificial Sequence
  Synthetic
gcugcagacauagggcuuu

SEQ ID NO: 687320 - RNA, 20 nt, Artificial Sequence
  Synthetic
ggcugcagacauagggcuuu

SEQ ID NO: 687321 - RNA, 21 nt, Artificial Sequence
  Synthetic
gggcugcagacauagggcuuu

SEQ ID NO: 687322 - RNA, 22 nt, Artificial Sequence
  Synthetic
ggggcugcagacauagggcuuu

SEQ ID NO: 687323 - RNA, 23 nt, Artificial Sequence
  Synthetic
cggggcugcagacauagggcuuu

SEQ ID NO: 687324 - RNA, 24 nt, Artificial Sequence
  Synthetic
acggggcugcagacauagggcuuu

SEQ ID NO: 687325 - RNA, 18 nt, Artificial Sequence
  Synthetic
guuuaaaaaaauggcuuu

SEQ ID NO: 687326 - RNA, 19 nt, Artificial Sequence
  Synthetic
uguuuaaaaaaauggcuuu

SEQ ID NO: 687327 - RNA, 20 nt, Artificial Sequence
  Synthetic
auguuuaaaaaaauggcuuu

SEQ ID NO: 687328 - RNA, 21 nt, Artificial Sequence
  Synthetic
uauguuuaaaaaaauggcuuu

SEQ ID NO: 687329 - RNA, 22 nt, Artificial Sequence
  Synthetic
uuauguuuaaaaaaauggcuuu

SEQ ID NO: 687330 - RNA, 23 nt, Artificial Sequence
  Synthetic
uuuauguuuaaaaaaauggcuuu

SEQ ID NO: 687331 - RNA, 24 nt, Artificial Sequence
  Synthetic
uuuuauguuuaaaaaaauggcuuu

SEQ ID NO: 687332 - RNA, 18 nt, Artificial Sequence
  Synthetic
aagaacagaaauggcuuu

SEQ ID NO: 687333 - RNA, 19 nt, Artificial Sequence
  Synthetic
aaagaacagaaauggcuuu

SEQ ID NO: 687334 - RNA, 20 nt, Artificial Sequence
  Synthetic
caaagaacagaaauggcuuu

SEQ ID NO: 687335 - RNA, 21 nt, Artificial Sequence
  Synthetic
acaaagaacagaaauggcuuu

SEQ ID NO: 687336 - RNA, 22 nt, Artificial Sequence
  Synthetic
aacaaagaacagaaauggcuuu

SEQ ID NO: 687337 - RNA, 23 nt, Artificial Sequence
  Synthetic
aaacaaagaacagaaauggcuuu

SEQ ID NO: 687338 - RNA, 24 nt, Artificial Sequence
  Synthetic
aaaacaaagaacagaaauggcuuu

SEQ ID NO: 687339 - RNA, 18 nt, Artificial Sequence
  Synthetic
uuaaaagguguuggcuuu

SEQ ID NO: 687340 - RNA, 19 nt, Artificial Sequence
  Synthetic
auuaaaagguguuggcuuu

SEQ ID NO: 687341 - RNA, 20 nt, Artificial Sequence
  Synthetic
aauuaaaagguguuggcuuu

SEQ ID NO: 687342 - RNA, 21 nt, Artificial Sequence
  Synthetic
uaauuaaaagguguuggcuuu

SEQ ID NO: 687343 - RNA, 22 nt, Artificial Sequence
  Synthetic
uuaauuaaaagguguuggcuuu

SEQ ID NO: 687344 - RNA, 23 nt, Artificial Sequence
  Synthetic
guuaauuaaaagguguuggcuuu

SEQ ID NO: 687345 - RNA, 24 nt, Artificial Sequence
  Synthetic
uguuaauuaaaagguguuggcuuu

SEQ ID NO: 687346 - RNA, 18 nt, Artificial Sequence
  Synthetic
ccagauuauaaaugcuuu

SEQ ID NO: 687347 - RNA, 19 nt, Artificial Sequence
  Synthetic
gccagauuauaaaugcuuu

SEQ ID NO: 687348 - RNA, 20 nt, Artificial Sequence
  Synthetic
agccagauuauaaaugcuuu

SEQ ID NO: 687349 - RNA, 21 nt, Artificial Sequence
  Synthetic
gagccagauuauaaaugcuuu

SEQ ID NO: 687350 - RNA, 22 nt, Artificial Sequence
  Synthetic
agagccagauuauaaaugcuuu

SEQ ID NO: 687351 - RNA, 23 nt, Artificial Sequence
  Synthetic
gagagccagauuauaaaugcuuu

SEQ ID NO: 687352 - RNA, 24 nt, Artificial Sequence
  Synthetic
ugagagccagauuauaaaugcuuu

SEQ ID NO: 687353 - RNA, 18 nt, Artificial Sequence
  Synthetic
ugaggcauuaaaugcuuu

SEQ ID NO: 687354 - RNA, 19 nt, Artificial Sequence
  Synthetic
cugaggcauuaaaugcuuu

SEQ ID NO: 687355 - RNA, 20 nt, Artificial Sequence
  Synthetic
acugaggcauuaaaugcuuu

SEQ ID NO: 687356 - RNA, 21 nt, Artificial Sequence
  Synthetic
aacugaggcauuaaaugcuuu

SEQ ID NO: 687357 - RNA, 22 nt, Artificial Sequence
  Synthetic
aaacugaggcauuaaaugcuuu

SEQ ID NO: 687358 - RNA, 23 nt, Artificial Sequence
  Synthetic
aaaacugaggcauuaaaugcuuu

SEQ ID NO: 687359 - RNA, 24 nt, Artificial Sequence
  Synthetic
uaaaacugaggcauuaaaugcuuu

SEQ ID NO: 687360 - RNA, 18 nt, Artificial Sequence
  Synthetic
aaaauuugagaaugcuuu

SEQ ID NO: 687361 - RNA, 19 nt, Artificial Sequence
  Synthetic
aaaaauuugagaaugcuuu

SEQ ID NO: 687362 - RNA, 20 nt, Artificial Sequence
  Synthetic
gaaaaauuugagaaugcuuu

SEQ ID NO: 687363 - RNA, 21 nt, Artificial Sequence
  Synthetic
agaaaaauuugagaaugcuuu

SEQ ID NO: 687364 - RNA, 22 nt, Artificial Sequence
  Synthetic
cagaaaaauuugagaaugcuuu

SEQ ID NO: 687365 - RNA, 23 nt, Artificial Sequence
  Synthetic
ucagaaaaauuugagaaugcuuu

SEQ ID NO: 687366 - RNA, 24 nt, Artificial Sequence
  Synthetic
uucagaaaaauuugagaaugcuuu

SEQ ID NO: 687367 - RNA, 18 nt, Artificial Sequence
  Synthetic
ucuaaaaucagaugcuuu

SEQ ID NO: 687368 - RNA, 19 nt, Artificial Sequence
  Synthetic
aucuaaaaucagaugcuuu

SEQ ID NO: 687369 - RNA, 20 nt, Artificial Sequence
  Synthetic
uaucuaaaaucagaugcuuu

SEQ ID NO: 687370 - RNA, 21 nt, Artificial Sequence
  Synthetic
cuaucuaaaaucagaugcuuu

SEQ ID NO: 687371 - RNA, 22 nt, Artificial Sequence
  Synthetic
gcuaucuaaaaucagaugcuuu

SEQ ID NO: 687372 - RNA, 23 nt, Artificial Sequence
  Synthetic
cgcuaucuaaaaucagaugcuuu

SEQ ID NO: 687373 - RNA, 24 nt, Artificial Sequence
  Synthetic
gcgcuaucuaaaaucagaugcuuu

SEQ ID NO: 687374 - RNA, 18 nt, Artificial Sequence
  Synthetic
gucuuuccuggaugcuuu

SEQ ID NO: 687375 - RNA, 19 nt, Artificial Sequence
  Synthetic
agucuuuccuggaugcuuu

SEQ ID NO: 687376 - RNA, 20 nt, Artificial Sequence
  Synthetic
cagucuuuccuggaugcuuu

SEQ ID NO: 687377 - RNA, 21 nt, Artificial Sequence
  Synthetic
gcagucuuuccuggaugcuuu

SEQ ID NO: 687378 - RNA, 22 nt, Artificial Sequence
  Synthetic
agcagucuuuccuggaugcuuu

SEQ ID NO: 687379 - RNA, 23 nt, Artificial Sequence
  Synthetic
gagcagucuuuccuggaugcuuu

SEQ ID NO: 687380 - RNA, 24 nt, Artificial Sequence
  Synthetic
agagcagucuuuccuggaugcuuu

SEQ ID NO: 687381 - RNA, 18 nt, Artificial Sequence
  Synthetic
uauuuauauguaugcuuu

SEQ ID NO: 687382 - RNA, 19 nt, Artificial Sequence
  Synthetic
auauuuauauguaugcuuu

SEQ ID NO: 687383 - RNA, 20 nt, Artificial Sequence
  Synthetic
aauauuuauauguaugcuuu

SEQ ID NO: 687384 - RNA, 21 nt, Artificial Sequence
  Synthetic
aaauauuuauauguaugcuuu

SEQ ID NO: 687385 - RNA, 22 nt, Artificial Sequence
  Synthetic
caaauauuuauauguaugcuuu

SEQ ID NO: 687386 - RNA, 23 nt, Artificial Sequence
  Synthetic
ccaaauauuuauauguaugcuuu

SEQ ID NO: 687387 - RNA, 24 nt, Artificial Sequence
  Synthetic
uccaaauauuuauauguaugcuuu

SEQ ID NO: 687388 - RNA, 18 nt, Artificial Sequence
  Synthetic
acucuguuuguaugcuuu

SEQ ID NO: 687389 - RNA, 19 nt, Artificial Sequence
  Synthetic
cacucuguuuguaugcuuu

SEQ ID NO: 687390 - RNA, 20 nt, Artificial Sequence
  Synthetic
gcacucuguuuguaugcuuu

SEQ ID NO: 687391 - RNA, 21 nt, Artificial Sequence
  Synthetic
agcacucuguuuguaugcuuu

SEQ ID NO: 687392 - RNA, 22 nt, Artificial Sequence
  Synthetic
gagcacucuguuuguaugcuuu

SEQ ID NO: 687393 - RNA, 23 nt, Artificial Sequence
  Synthetic
agagcacucuguuuguaugcuuu

SEQ ID NO: 687394 - RNA, 24 nt, Artificial Sequence
  Synthetic
gagagcacucuguuuguaugcuuu

SEQ ID NO: 687395 - RNA, 18 nt, Artificial Sequence
  Synthetic
uauagaaaauuaugcuuu

SEQ ID NO: 687396 - RNA, 19 nt, Artificial Sequence
  Synthetic
cuauagaaaauuaugcuuu

SEQ ID NO: 687397 - RNA, 20 nt, Artificial Sequence
  Synthetic
ucuauagaaaauuaugcuuu

SEQ ID NO: 687398 - RNA, 21 nt, Artificial Sequence
  Synthetic
gucuauagaaaauuaugcuuu

SEQ ID NO: 687399 - RNA, 22 nt, Artificial Sequence
  Synthetic
agucuauagaaaauuaugcuuu

SEQ ID NO: 687400 - RNA, 23 nt, Artificial Sequence
  Synthetic
aagucuauagaaaauuaugcuuu

SEQ ID NO: 687401 - RNA, 24 nt, Artificial Sequence
  Synthetic
uaagucuauagaaaauuaugcuuu

SEQ ID NO: 687402 - RNA, 18 nt, Artificial Sequence
  Synthetic
caagagcccuuaugcuuu

SEQ ID NO: 687403 - RNA, 19 nt, Artificial Sequence
  Synthetic
ccaagagcccuuaugcuuu

SEQ ID NO: 687404 - RNA, 20 nt, Artificial Sequence
  Synthetic
uccaagagcccuuaugcuuu

SEQ ID NO: 687405 - RNA, 21 nt, Artificial Sequence
  Synthetic
auccaagagcccuuaugcuuu

SEQ ID NO: 687406 - RNA, 22 nt, Artificial Sequence
  Synthetic
aauccaagagcccuuaugcuuu

SEQ ID NO: 687407 - RNA, 23 nt, Artificial Sequence
  Synthetic
uaauccaagagcccuuaugcuuu

SEQ ID NO: 687408 - RNA, 24 nt, Artificial Sequence
  Synthetic
cuaauccaagagcccuuaugcuuu

SEQ ID NO: 687409 - RNA, 18 nt, Artificial Sequence
  Synthetic
agagaguagaacugcuuu

SEQ ID NO: 687410 - RNA, 19 nt, Artificial Sequence
  Synthetic
gagagaguagaacugcuuu

SEQ ID NO: 687411 - RNA, 20 nt, Artificial Sequence
  Synthetic
ggagagaguagaacugcuuu

SEQ ID NO: 687412 - RNA, 21 nt, Artificial Sequence
  Synthetic
aggagagaguagaacugcuuu

SEQ ID NO: 687413 - RNA, 22 nt, Artificial Sequence
  Synthetic
uaggagagaguagaacugcuuu

SEQ ID NO: 687414 - RNA, 23 nt, Artificial Sequence
  Synthetic
cuaggagagaguagaacugcuuu

SEQ ID NO: 687415 - RNA, 24 nt, Artificial Sequence
  Synthetic
ucuaggagagaguagaacugcuuu

SEQ ID NO: 687416 - RNA, 18 nt, Artificial Sequence
  Synthetic
ggcuauuuauacugcuuu

SEQ ID NO: 687417 - RNA, 19 nt, Artificial Sequence
  Synthetic
uggcuauuuauacugcuuu

SEQ ID NO: 687418 - RNA, 20 nt, Artificial Sequence
  Synthetic
uuggcuauuuauacugcuuu

SEQ ID NO: 687419 - RNA, 21 nt, Artificial Sequence
  Synthetic
uuuggcuauuuauacugcuuu

SEQ ID NO: 687420 - RNA, 22 nt, Artificial Sequence
  Synthetic
uuuuggcuauuuauacugcuuu

SEQ ID NO: 687421 - RNA, 23 nt, Artificial Sequence
  Synthetic
cuuuuggcuauuuauacugcuuu

SEQ ID NO: 687422 - RNA, 24 nt, Artificial Sequence
  Synthetic
gcuuuuggcuauuuauacugcuuu

SEQ ID NO: 687423 - RNA, 18 nt, Artificial Sequence
  Synthetic
gcuucugacuccugcuuu

SEQ ID NO: 687424 - RNA, 19 nt, Artificial Sequence
  Synthetic
ggcuucugacuccugcuuu

SEQ ID NO: 687425 - RNA, 20 nt, Artificial Sequence
  Synthetic
aggcuucugacuccugcuuu

SEQ ID NO: 687426 - RNA, 21 nt, Artificial Sequence
  Synthetic
aaggcuucugacuccugcuuu

SEQ ID NO: 687427 - RNA, 22 nt, Artificial Sequence
  Synthetic
aaaggcuucugacuccugcuuu

SEQ ID NO: 687428 - RNA, 23 nt, Artificial Sequence
  Synthetic
aaaaggcuucugacuccugcuuu

SEQ ID NO: 687429 - RNA, 24 nt, Artificial Sequence
  Synthetic
aaaaaggcuucugacuccugcuuu

SEQ ID NO: 687430 - RNA, 18 nt, Artificial Sequence
  Synthetic
aaucuaugacgcugcuuu

SEQ ID NO: 687431 - RNA, 19 nt, Artificial Sequence
  Synthetic
uaaucuaugacgcugcuuu

SEQ ID NO: 687432 - RNA, 20 nt, Artificial Sequence
  Synthetic
cuaaucuaugacgcugcuuu

SEQ ID NO: 687433 - RNA, 21 nt, Artificial Sequence
  Synthetic
gcuaaucuaugacgcugcuuu

SEQ ID NO: 687434 - RNA, 22 nt, Artificial Sequence
  Synthetic
ugcuaaucuaugacgcugcuuu

SEQ ID NO: 687435 - RNA, 23 nt, Artificial Sequence
  Synthetic
cugcuaaucuaugacgcugcuuu

SEQ ID NO: 687436 - RNA, 24 nt, Artificial Sequence
  Synthetic
ucugcuaaucuaugacgcugcuuu

SEQ ID NO: 687437 - RNA, 18 nt, Artificial Sequence
  Synthetic
aacugagaaggcugcuuu

SEQ ID NO: 687438 - RNA, 19 nt, Artificial Sequence
  Synthetic
aaacugagaaggcugcuuu

SEQ ID NO: 687439 - RNA, 20 nt, Artificial Sequence
  Synthetic
uaaacugagaaggcugcuuu

SEQ ID NO: 687440 - RNA, 21 nt, Artificial Sequence
  Synthetic
auaaacugagaaggcugcuuu

SEQ ID NO: 687441 - RNA, 22 nt, Artificial Sequence
  Synthetic
uauaaacugagaaggcugcuuu

SEQ ID NO: 687442 - RNA, 23 nt, Artificial Sequence
  Synthetic
auauaaacugagaaggcugcuuu

SEQ ID NO: 687443 - RNA, 24 nt, Artificial Sequence
  Synthetic
uauauaaacugagaaggcugcuuu

SEQ ID NO: 687444 - RNA, 18 nt, Artificial Sequence
  Synthetic
cuguccacuggcugcuuu

SEQ ID NO: 687445 - RNA, 19 nt, Artificial Sequence
  Synthetic
acuguccacuggcugcuuu

SEQ ID NO: 687446 - RNA, 20 nt, Artificial Sequence
  Synthetic
uacuguccacuggcugcuuu

SEQ ID NO: 687447 - RNA, 21 nt, Artificial Sequence
  Synthetic
uuacuguccacuggcugcuuu

SEQ ID NO: 687448 - RNA, 22 nt, Artificial Sequence
  Synthetic
auuacuguccacuggcugcuuu

SEQ ID NO: 687449 - RNA, 23 nt, Artificial Sequence
  Synthetic
cauuacuguccacuggcugcuuu

SEQ ID NO: 687450 - RNA, 24 nt, Artificial Sequence
  Synthetic
ccauuacuguccacuggcugcuuu

SEQ ID NO: 687451 - RNA, 18 nt, Artificial Sequence
  Synthetic
ucugaaauuugcugcuuu

SEQ ID NO: 687452 - RNA, 19 nt, Artificial Sequence
  Synthetic
cucugaaauuugcugcuuu

SEQ ID NO: 687453 - RNA, 20 nt, Artificial Sequence
  Synthetic
acucugaaauuugcugcuuu

SEQ ID NO: 687454 - RNA, 21 nt, Artificial Sequence
  Synthetic
aacucugaaauuugcugcuuu

SEQ ID NO: 687455 - RNA, 22 nt, Artificial Sequence
  Synthetic
aaacucugaaauuugcugcuuu

SEQ ID NO: 687456 - RNA, 23 nt, Artificial Sequence
  Synthetic
gaaacucugaaauuugcugcuuu

SEQ ID NO: 687457 - RNA, 24 nt, Artificial Sequence
  Synthetic
ggaaacucugaaauuugcugcuuu

SEQ ID NO: 687458 - RNA, 18 nt, Artificial Sequence
  Synthetic
uuucucagaaucugcuuu

SEQ ID NO: 687459 - RNA, 19 nt, Artificial Sequence
  Synthetic
cuuucucagaaucugcuuu

SEQ ID NO: 687460 - RNA, 20 nt, Artificial Sequence
  Synthetic
acuuucucagaaucugcuuu

SEQ ID NO: 687461 - RNA, 21 nt, Artificial Sequence
  Synthetic
cacuuucucagaaucugcuuu

SEQ ID NO: 687462 - RNA, 22 nt, Artificial Sequence
  Synthetic
ucacuuucucagaaucugcuuu

SEQ ID NO: 687463 - RNA, 23 nt, Artificial Sequence
  Synthetic
aucacuuucucagaaucugcuuu

SEQ ID NO: 687464 - RNA, 24 nt, Artificial Sequence
  Synthetic
aaucacuuucucagaaucugcuuu

SEQ ID NO: 687465 - RNA, 18 nt, Artificial Sequence
  Synthetic
guucggaacuucugcuuu

SEQ ID NO: 687466 - RNA, 19 nt, Artificial Sequence
  Synthetic
gguucggaacuucugcuuu

SEQ ID NO: 687467 - RNA, 20 nt, Artificial Sequence
  Synthetic
agguucggaacuucugcuuu

SEQ ID NO: 687468 - RNA, 21 nt, Artificial Sequence
  Synthetic
gagguucggaacuucugcuuu

SEQ ID NO: 687469 - RNA, 22 nt, Artificial Sequence
  Synthetic
agagguucggaacuucugcuuu

SEQ ID NO: 687470 - RNA, 23 nt, Artificial Sequence
  Synthetic
aagagguucggaacuucugcuuu

SEQ ID NO: 687471 - RNA, 24 nt, Artificial Sequence
  Synthetic
aaagagguucggaacuucugcuuu

SEQ ID NO: 687472 - RNA, 18 nt, Artificial Sequence
  Synthetic
cuaugaaauuucugcuuu

SEQ ID NO: 687473 - RNA, 19 nt, Artificial Sequence
  Synthetic
acuaugaaauuucugcuuu

SEQ ID NO: 687474 - RNA, 20 nt, Artificial Sequence
  Synthetic
aacuaugaaauuucugcuuu

SEQ ID NO: 687475 - RNA, 21 nt, Artificial Sequence
  Synthetic
aaacuaugaaauuucugcuuu

SEQ ID NO: 687476 - RNA, 22 nt, Artificial Sequence
  Synthetic
caaacuaugaaauuucugcuuu

SEQ ID NO: 687477 - RNA, 23 nt, Artificial Sequence
  Synthetic
ucaaacuaugaaauuucugcuuu

SEQ ID NO: 687478 - RNA, 24 nt, Artificial Sequence
  Synthetic
aucaaacuaugaaauuucugcuuu

SEQ ID NO: 687479 - RNA, 18 nt, Artificial Sequence
  Synthetic
cuggaauuccagugcuuu

SEQ ID NO: 687480 - RNA, 19 nt, Artificial Sequence
  Synthetic
ucuggaauuccagugcuuu

SEQ ID NO: 687481 - RNA, 20 nt, Artificial Sequence
  Synthetic
gucuggaauuccagugcuuu

SEQ ID NO: 687482 - RNA, 21 nt, Artificial Sequence
  Synthetic
cgucuggaauuccagugcuuu

SEQ ID NO: 687483 - RNA, 22 nt, Artificial Sequence
  Synthetic
acgucuggaauuccagugcuuu

SEQ ID NO: 687484 - RNA, 23 nt, Artificial Sequence
  Synthetic
cacgucuggaauuccagugcuuu

SEQ ID NO: 687485 - RNA, 24 nt, Artificial Sequence
  Synthetic
ucacgucuggaauuccagugcuuu

SEQ ID NO: 687486 - RNA, 18 nt, Artificial Sequence
  Synthetic
cuguaauccuagugcuuu

SEQ ID NO: 687487 - RNA, 19 nt, Artificial Sequence
  Synthetic
ccuguaauccuagugcuuu

SEQ ID NO: 687488 - RNA, 20 nt, Artificial Sequence
  Synthetic
gccuguaauccuagugcuuu

SEQ ID NO: 687489 - RNA, 21 nt, Artificial Sequence
  Synthetic
ugccuguaauccuagugcuuu

SEQ ID NO: 687490 - RNA, 22 nt, Artificial Sequence
  Synthetic
augccuguaauccuagugcuuu

SEQ ID NO: 687491 - RNA, 23 nt, Artificial Sequence
  Synthetic
caugccuguaauccuagugcuuu

SEQ ID NO: 687492 - RNA, 24 nt, Artificial Sequence
  Synthetic
ucaugccuguaauccuagugcuuu

SEQ ID NO: 687493 - RNA, 18 nt, Artificial Sequence
  Synthetic
cuguaauccaggugcuuu

SEQ ID NO: 687494 - RNA, 19 nt, Artificial Sequence
  Synthetic
ccuguaauccaggugcuuu

SEQ ID NO: 687495 - RNA, 20 nt, Artificial Sequence
  Synthetic
gccuguaauccaggugcuuu

SEQ ID NO: 687496 - RNA, 21 nt, Artificial Sequence
  Synthetic
ugccuguaauccaggugcuuu

SEQ ID NO: 687497 - RNA, 22 nt, Artificial Sequence
  Synthetic
augccuguaauccaggugcuuu

SEQ ID NO: 687498 - RNA, 23 nt, Artificial Sequence
  Synthetic
caugccuguaauccaggugcuuu

SEQ ID NO: 687499 - RNA, 24 nt, Artificial Sequence
  Synthetic
ucaugccuguaauccaggugcuuu

SEQ ID NO: 687500 - RNA, 18 nt, Artificial Sequence
  Synthetic
gagaaaguguugugcuuu

SEQ ID NO: 687501 - RNA, 19 nt, Artificial Sequence
  Synthetic
ugagaaaguguugugcuuu

SEQ ID NO: 687502 - RNA, 20 nt, Artificial Sequence
  Synthetic
uugagaaaguguugugcuuu

SEQ ID NO: 687503 - RNA, 21 nt, Artificial Sequence
  Synthetic
uuugagaaaguguugugcuuu

SEQ ID NO: 687504 - RNA, 22 nt, Artificial Sequence
  Synthetic
uuuugagaaaguguugugcuuu

SEQ ID NO: 687505 - RNA, 23 nt, Artificial Sequence
  Synthetic
guuuugagaaaguguugugcuuu

SEQ ID NO: 687506 - RNA, 24 nt, Artificial Sequence
  Synthetic
uguuuugagaaaguguugugcuuu

SEQ ID NO: 687507 - RNA, 18 nt, Artificial Sequence
  Synthetic
gggugugaaaauugcuuu

SEQ ID NO: 687508 - RNA, 19 nt, Artificial Sequence
  Synthetic
ugggugugaaaauugcuuu

SEQ ID NO: 687509 - RNA, 20 nt, Artificial Sequence
  Synthetic
augggugugaaaauugcuuu

SEQ ID NO: 687510 - RNA, 21 nt, Artificial Sequence
  Synthetic
caugggugugaaaauugcuuu

SEQ ID NO: 687511 - RNA, 22 nt, Artificial Sequence
  Synthetic
ccaugggugugaaaauugcuuu

SEQ ID NO: 687512 - RNA, 23 nt, Artificial Sequence
  Synthetic
cccaugggugugaaaauugcuuu

SEQ ID NO: 687513 - RNA, 24 nt, Artificial Sequence
  Synthetic
ucccaugggugugaaaauugcuuu

SEQ ID NO: 687514 - RNA, 18 nt, Artificial Sequence
  Synthetic
cugagaauuaauugcuuu

SEQ ID NO: 687515 - RNA, 19 nt, Artificial Sequence
  Synthetic
acugagaauuaauugcuuu

SEQ ID NO: 687516 - RNA, 20 nt, Artificial Sequence
  Synthetic
aacugagaauuaauugcuuu

SEQ ID NO: 687517 - RNA, 21 nt, Artificial Sequence
  Synthetic
aaacugagaauuaauugcuuu

SEQ ID NO: 687518 - RNA, 22 nt, Artificial Sequence
  Synthetic
aaaacugagaauuaauugcuuu

SEQ ID NO: 687519 - RNA, 23 nt, Artificial Sequence
  Synthetic
aaaaacugagaauuaauugcuuu

SEQ ID NO: 687520 - RNA, 24 nt, Artificial Sequence
  Synthetic
aaaaaacugagaauuaauugcuuu

SEQ ID NO: 687521 - RNA, 18 nt, Artificial Sequence
  Synthetic
cccuaugaacauugcuuu

SEQ ID NO: 687522 - RNA, 19 nt, Artificial Sequence
  Synthetic
gcccuaugaacauugcuuu

SEQ ID NO: 687523 - RNA, 20 nt, Artificial Sequence
  Synthetic
ugcccuaugaacauugcuuu

SEQ ID NO: 687524 - RNA, 21 nt, Artificial Sequence
  Synthetic
gugcccuaugaacauugcuuu

SEQ ID NO: 687525 - RNA, 22 nt, Artificial Sequence
  Synthetic
ugugcccuaugaacauugcuuu

SEQ ID NO: 687526 - RNA, 23 nt, Artificial Sequence
  Synthetic
gugugcccuaugaacauugcuuu

SEQ ID NO: 687527 - RNA, 24 nt, Artificial Sequence
  Synthetic
agugugcccuaugaacauugcuuu

SEQ ID NO: 687528 - RNA, 18 nt, Artificial Sequence
  Synthetic
aacuauggcgauugcuuu

SEQ ID NO: 687529 - RNA, 19 nt, Artificial Sequence
  Synthetic
uaacuauggcgauugcuuu

SEQ ID NO: 687530 - RNA, 20 nt, Artificial Sequence
  Synthetic
auaacuauggcgauugcuuu

SEQ ID NO: 687531 - RNA, 21 nt, Artificial Sequence
  Synthetic
uauaacuauggcgauugcuuu

SEQ ID NO: 687532 - RNA, 22 nt, Artificial Sequence
  Synthetic
auauaacuauggcgauugcuuu

SEQ ID NO: 687533 - RNA, 23 nt, Artificial Sequence
  Synthetic
aauauaacuauggcgauugcuuu

SEQ ID NO: 687534 - RNA, 24 nt, Artificial Sequence
  Synthetic
caauauaacuauggcgauugcuuu

SEQ ID NO: 687535 - RNA, 18 nt, Artificial Sequence
  Synthetic
aaguacaucgauugcuuu

SEQ ID NO: 687536 - RNA, 19 nt, Artificial Sequence
  Synthetic
caaguacaucgauugcuuu

SEQ ID NO: 687537 - RNA, 20 nt, Artificial Sequence
  Synthetic
gcaaguacaucgauugcuuu

SEQ ID NO: 687538 - RNA, 21 nt, Artificial Sequence
  Synthetic
agcaaguacaucgauugcuuu

SEQ ID NO: 687539 - RNA, 22 nt, Artificial Sequence
  Synthetic
cagcaaguacaucgauugcuuu

SEQ ID NO: 687540 - RNA, 23 nt, Artificial Sequence
  Synthetic
gcagcaaguacaucgauugcuuu

SEQ ID NO: 687541 - RNA, 24 nt, Artificial Sequence
  Synthetic
agcagcaaguacaucgauugcuuu

SEQ ID NO: 687542 - RNA, 18 nt, Artificial Sequence
  Synthetic
aucuguuaagcuugcuuu

SEQ ID NO: 687543 - RNA, 19 nt, Artificial Sequence
  Synthetic
aaucuguuaagcuugcuuu

SEQ ID NO: 687544 - RNA, 20 nt, Artificial Sequence
  Synthetic
gaaucuguuaagcuugcuuu

SEQ ID NO: 687545 - RNA, 21 nt, Artificial Sequence
  Synthetic
agaaucuguuaagcuugcuuu

SEQ ID NO: 687546 - RNA, 22 nt, Artificial Sequence
  Synthetic
aagaaucuguuaagcuugcuuu

SEQ ID NO: 687547 - RNA, 23 nt, Artificial Sequence
  Synthetic
uaagaaucuguuaagcuugcuuu

SEQ ID NO: 687548 - RNA, 24 nt, Artificial Sequence
  Synthetic
cuaagaaucuguuaagcuugcuuu

SEQ ID NO: 687549 - RNA, 18 nt, Artificial Sequence
  Synthetic
caaaaccauucuugcuuu

SEQ ID NO: 687550 - RNA, 19 nt, Artificial Sequence
  Synthetic
gcaaaaccauucuugcuuu

SEQ ID NO: 687551 - RNA, 20 nt, Artificial Sequence
  Synthetic
agcaaaaccauucuugcuuu

SEQ ID NO: 687552 - RNA, 21 nt, Artificial Sequence
  Synthetic
aagcaaaaccauucuugcuuu

SEQ ID NO: 687553 - RNA, 22 nt, Artificial Sequence
  Synthetic
gaagcaaaaccauucuugcuuu

SEQ ID NO: 687554 - RNA, 23 nt, Artificial Sequence
  Synthetic
agaagcaaaaccauucuugcuuu

SEQ ID NO: 687555 - RNA, 24 nt, Artificial Sequence
  Synthetic
gagaagcaaaaccauucuugcuuu

SEQ ID NO: 687556 - RNA, 18 nt, Artificial Sequence
  Synthetic
agggaaacuuguugcuuu

SEQ ID NO: 687557 - RNA, 19 nt, Artificial Sequence
  Synthetic
aagggaaacuuguugcuuu

SEQ ID NO: 687558 - RNA, 20 nt, Artificial Sequence
  Synthetic
gaagggaaacuuguugcuuu

SEQ ID NO: 687559 - RNA, 21 nt, Artificial Sequence
  Synthetic
ggaagggaaacuuguugcuuu

SEQ ID NO: 687560 - RNA, 22 nt, Artificial Sequence
  Synthetic
aggaagggaaacuuguugcuuu

SEQ ID NO: 687561 - RNA, 23 nt, Artificial Sequence
  Synthetic
aaggaagggaaacuuguugcuuu

SEQ ID NO: 687562 - RNA, 24 nt, Artificial Sequence
  Synthetic
aaaggaagggaaacuuguugcuuu

SEQ ID NO: 687563 - RNA, 18 nt, Artificial Sequence
  Synthetic
auuaaaaaacuuugcuuu

SEQ ID NO: 687564 - RNA, 19 nt, Artificial Sequence
  Synthetic
cauuaaaaaacuuugcuuu

SEQ ID NO: 687565 - RNA, 20 nt, Artificial Sequence
  Synthetic
gcauuaaaaaacuuugcuuu

SEQ ID NO: 687566 - RNA, 21 nt, Artificial Sequence
  Synthetic
ugcauuaaaaaacuuugcuuu

SEQ ID NO: 687567 - RNA, 22 nt, Artificial Sequence
  Synthetic
uugcauuaaaaaacuuugcuuu

SEQ ID NO: 687568 - RNA, 23 nt, Artificial Sequence
  Synthetic
cuugcauuaaaaaacuuugcuuu

SEQ ID NO: 687569 - RNA, 24 nt, Artificial Sequence
  Synthetic
ucuugcauuaaaaaacuuugcuuu

SEQ ID NO: 687570 - RNA, 18 nt, Artificial Sequence
  Synthetic
guaauacuagaaaucuuu

SEQ ID NO: 687571 - RNA, 19 nt, Artificial Sequence
  Synthetic
aguaauacuagaaaucuuu

SEQ ID NO: 687572 - RNA, 20 nt, Artificial Sequence
  Synthetic
caguaauacuagaaaucuuu

SEQ ID NO: 687573 - RNA, 21 nt, Artificial Sequence
  Synthetic
ccaguaauacuagaaaucuuu

SEQ ID NO: 687574 - RNA, 22 nt, Artificial Sequence
  Synthetic
gccaguaauacuagaaaucuuu

SEQ ID NO: 687575 - RNA, 23 nt, Artificial Sequence
  Synthetic
ggccaguaauacuagaaaucuuu

SEQ ID NO: 687576 - RNA, 24 nt, Artificial Sequence
  Synthetic
uggccaguaauacuagaaaucuuu

SEQ ID NO: 687577 - RNA, 18 nt, Artificial Sequence
  Synthetic
auugugaugauaaucuuu

SEQ ID NO: 687578 - RNA, 19 nt, Artificial Sequence
  Synthetic
aauugugaugauaaucuuu

SEQ ID NO: 687579 - RNA, 20 nt, Artificial Sequence
  Synthetic
caauugugaugauaaucuuu

SEQ ID NO: 687580 - RNA, 21 nt, Artificial Sequence
  Synthetic
acaauugugaugauaaucuuu

SEQ ID NO: 687581 - RNA, 22 nt, Artificial Sequence
  Synthetic
uacaauugugaugauaaucuuu

SEQ ID NO: 687582 - RNA, 23 nt, Artificial Sequence
  Synthetic
uuacaauugugaugauaaucuuu

SEQ ID NO: 687583 - RNA, 24 nt, Artificial Sequence
  Synthetic
guuacaauugugaugauaaucuuu

SEQ ID NO: 687584 - RNA, 18 nt, Artificial Sequence
  Synthetic
acaaguuagugcaucuuu

SEQ ID NO: 687585 - RNA, 19 nt, Artificial Sequence
  Synthetic
cacaaguuagugcaucuuu

SEQ ID NO: 687586 - RNA, 20 nt, Artificial Sequence
  Synthetic
gcacaaguuagugcaucuuu

SEQ ID NO: 687587 - RNA, 21 nt, Artificial Sequence
  Synthetic
ggcacaaguuagugcaucuuu

SEQ ID NO: 687588 - RNA, 22 nt, Artificial Sequence
  Synthetic
uggcacaaguuagugcaucuuu

SEQ ID NO: 687589 - RNA, 23 nt, Artificial Sequence
  Synthetic
guggcacaaguuagugcaucuuu

SEQ ID NO: 687590 - RNA, 24 nt, Artificial Sequence
  Synthetic
gguggcacaaguuagugcaucuuu

SEQ ID NO: 687591 - RNA, 18 nt, Artificial Sequence
  Synthetic
agucagucugucaucuuu

SEQ ID NO: 687592 - RNA, 19 nt, Artificial Sequence
  Synthetic
aagucagucugucaucuuu

SEQ ID NO: 687593 - RNA, 20 nt, Artificial Sequence
  Synthetic
uaagucagucugucaucuuu

SEQ ID NO: 687594 - RNA, 21 nt, Artificial Sequence
  Synthetic
uuaagucagucugucaucuuu

SEQ ID NO: 687595 - RNA, 22 nt, Artificial Sequence
  Synthetic
auuaagucagucugucaucuuu

SEQ ID NO: 687596 - RNA, 23 nt, Artificial Sequence
  Synthetic
aauuaagucagucugucaucuuu

SEQ ID NO: 687597 - RNA, 24 nt, Artificial Sequence
  Synthetic
gaauuaagucagucugucaucuuu

SEQ ID NO: 687598 - RNA, 18 nt, Artificial Sequence
  Synthetic
ucauaauucuucaucuuu

SEQ ID NO: 687599 - RNA, 19 nt, Artificial Sequence
  Synthetic
aucauaauucuucaucuuu

SEQ ID NO: 687600 - RNA, 20 nt, Artificial Sequence
  Synthetic
gaucauaauucuucaucuuu

SEQ ID NO: 687601 - RNA, 21 nt, Artificial Sequence
  Synthetic
ugaucauaauucuucaucuuu

SEQ ID NO: 687602 - RNA, 22 nt, Artificial Sequence
  Synthetic
cugaucauaauucuucaucuuu

SEQ ID NO: 687603 - RNA, 23 nt, Artificial Sequence
  Synthetic
acugaucauaauucuucaucuuu

SEQ ID NO: 687604 - RNA, 24 nt, Artificial Sequence
  Synthetic
cacugaucauaauucuucaucuuu

SEQ ID NO: 687605 - RNA, 18 nt, Artificial Sequence
  Synthetic
uugugcaugcagaucuuu

SEQ ID NO: 687606 - RNA, 19 nt, Artificial Sequence
  Synthetic
cuugugcaugcagaucuuu

SEQ ID NO: 687607 - RNA, 20 nt, Artificial Sequence
  Synthetic
gcuugugcaugcagaucuuu

SEQ ID NO: 687608 - RNA, 21 nt, Artificial Sequence
  Synthetic
ggcuugugcaugcagaucuuu

SEQ ID NO: 687609 - RNA, 22 nt, Artificial Sequence
  Synthetic
aggcuugugcaugcagaucuuu

SEQ ID NO: 687610 - RNA, 23 nt, Artificial Sequence
  Synthetic
aaggcuugugcaugcagaucuuu

SEQ ID NO: 687611 - RNA, 24 nt, Artificial Sequence
  Synthetic
caaggcuugugcaugcagaucuuu

SEQ ID NO: 687612 - RNA, 18 nt, Artificial Sequence
  Synthetic
acacugaugaggaucuuu

SEQ ID NO: 687613 - RNA, 19 nt, Artificial Sequence
  Synthetic
uacacugaugaggaucuuu

SEQ ID NO: 687614 - RNA, 20 nt, Artificial Sequence
  Synthetic
guacacugaugaggaucuuu

SEQ ID NO: 687615 - RNA, 21 nt, Artificial Sequence
  Synthetic
aguacacugaugaggaucuuu

SEQ ID NO: 687616 - RNA, 22 nt, Artificial Sequence
  Synthetic
gaguacacugaugaggaucuuu

SEQ ID NO: 687617 - RNA, 23 nt, Artificial Sequence
  Synthetic
agaguacacugaugaggaucuuu

SEQ ID NO: 687618 - RNA, 24 nt, Artificial Sequence
  Synthetic
aagaguacacugaugaggaucuuu

SEQ ID NO: 687619 - RNA, 18 nt, Artificial Sequence
  Synthetic
cuucagaaccugaucuuu

SEQ ID NO: 687620 - RNA, 19 nt, Artificial Sequence
  Synthetic
ccuucagaaccugaucuuu

SEQ ID NO: 687621 - RNA, 20 nt, Artificial Sequence
  Synthetic
cccuucagaaccugaucuuu

SEQ ID NO: 687622 - RNA, 21 nt, Artificial Sequence
  Synthetic
acccuucagaaccugaucuuu

SEQ ID NO: 687623 - RNA, 22 nt, Artificial Sequence
  Synthetic
cacccuucagaaccugaucuuu

SEQ ID NO: 687624 - RNA, 23 nt, Artificial Sequence
  Synthetic
ucacccuucagaaccugaucuuu

SEQ ID NO: 687625 - RNA, 24 nt, Artificial Sequence
  Synthetic
aucacccuucagaaccugaucuuu

SEQ ID NO: 687626 - RNA, 18 nt, Artificial Sequence
  Synthetic
gagagugcagauaucuuu

SEQ ID NO: 687627 - RNA, 19 nt, Artificial Sequence
  Synthetic
ugagagugcagauaucuuu

SEQ ID NO: 687628 - RNA, 20 nt, Artificial Sequence
  Synthetic
augagagugcagauaucuuu

SEQ ID NO: 687629 - RNA, 21 nt, Artificial Sequence
  Synthetic
gaugagagugcagauaucuuu

SEQ ID NO: 687630 - RNA, 22 nt, Artificial Sequence
  Synthetic
agaugagagugcagauaucuuu

SEQ ID NO: 687631 - RNA, 23 nt, Artificial Sequence
  Synthetic
aagaugagagugcagauaucuuu

SEQ ID NO: 687632 - RNA, 24 nt, Artificial Sequence
  Synthetic
gaagaugagagugcagauaucuuu

SEQ ID NO: 687633 - RNA, 18 nt, Artificial Sequence
  Synthetic
cuggaaagggguaucuuu

SEQ ID NO: 687634 - RNA, 19 nt, Artificial Sequence
  Synthetic
gcuggaaagggguaucuuu

SEQ ID NO: 687635 - RNA, 20 nt, Artificial Sequence
  Synthetic
agcuggaaagggguaucuuu

SEQ ID NO: 687636 - RNA, 21 nt, Artificial Sequence
  Synthetic
aagcuggaaagggguaucuuu

SEQ ID NO: 687637 - RNA, 22 nt, Artificial Sequence
  Synthetic
gaagcuggaaagggguaucuuu

SEQ ID NO: 687638 - RNA, 23 nt, Artificial Sequence
  Synthetic
agaagcuggaaagggguaucuuu

SEQ ID NO: 687639 - RNA, 24 nt, Artificial Sequence
  Synthetic
gagaagcuggaaagggguaucuuu

SEQ ID NO: 687640 - RNA, 18 nt, Artificial Sequence
  Synthetic
acccaccucuguaucuuu

SEQ ID NO: 687641 - RNA, 19 nt, Artificial Sequence
  Synthetic
cacccaccucuguaucuuu

SEQ ID NO: 687642 - RNA, 20 nt, Artificial Sequence
  Synthetic
ccacccaccucuguaucuuu

SEQ ID NO: 687643 - RNA, 21 nt, Artificial Sequence
  Synthetic
uccacccaccucuguaucuuu

SEQ ID NO: 687644 - RNA, 22 nt, Artificial Sequence
  Synthetic
uuccacccaccucuguaucuuu

SEQ ID NO: 687645 - RNA, 23 nt, Artificial Sequence
  Synthetic
auuccacccaccucuguaucuuu

SEQ ID NO: 687646 - RNA, 24 nt, Artificial Sequence
  Synthetic
uauuccacccaccucuguaucuuu

SEQ ID NO: 687647 - RNA, 18 nt, Artificial Sequence
  Synthetic
aaaagagugcuuaucuuu

SEQ ID NO: 687648 - RNA, 19 nt, Artificial Sequence
  Synthetic
caaaagagugcuuaucuuu

SEQ ID NO: 687649 - RNA, 20 nt, Artificial Sequence
  Synthetic
ucaaaagagugcuuaucuuu

SEQ ID NO: 687650 - RNA, 21 nt, Artificial Sequence
  Synthetic
gucaaaagagugcuuaucuuu

SEQ ID NO: 687651 - RNA, 22 nt, Artificial Sequence
  Synthetic
agucaaaagagugcuuaucuuu

SEQ ID NO: 687652 - RNA, 23 nt, Artificial Sequence
  Synthetic
aagucaaaagagugcuuaucuuu

SEQ ID NO: 687653 - RNA, 24 nt, Artificial Sequence
  Synthetic
gaagucaaaagagugcuuaucuuu

SEQ ID NO: 687654 - RNA, 18 nt, Artificial Sequence
  Synthetic
gauaaagcucuuaucuuu

SEQ ID NO: 687655 - RNA, 19 nt, Artificial Sequence
  Synthetic
agauaaagcucuuaucuuu

SEQ ID NO: 687656 - RNA, 20 nt, Artificial Sequence
  Synthetic
cagauaaagcucuuaucuuu

SEQ ID NO: 687657 - RNA, 21 nt, Artificial Sequence
  Synthetic
ucagauaaagcucuuaucuuu

SEQ ID NO: 687658 - RNA, 22 nt, Artificial Sequence
  Synthetic
uucagauaaagcucuuaucuuu

SEQ ID NO: 687659 - RNA, 23 nt, Artificial Sequence
  Synthetic
uuucagauaaagcucuuaucuuu

SEQ ID NO: 687660 - RNA, 24 nt, Artificial Sequence
  Synthetic
auuucagauaaagcucuuaucuuu

SEQ ID NO: 687661 - RNA, 18 nt, Artificial Sequence
  Synthetic
ugagcaacaguuaucuuu

SEQ ID NO: 687662 - RNA, 19 nt, Artificial Sequence
  Synthetic
uugagcaacaguuaucuuu

SEQ ID NO: 687663 - RNA, 20 nt, Artificial Sequence
  Synthetic
auugagcaacaguuaucuuu

SEQ ID NO: 687664 - RNA, 21 nt, Artificial Sequence
  Synthetic
aauugagcaacaguuaucuuu

SEQ ID NO: 687665 - RNA, 22 nt, Artificial Sequence
  Synthetic
aaauugagcaacaguuaucuuu

SEQ ID NO: 687666 - RNA, 23 nt, Artificial Sequence
  Synthetic
gaaauugagcaacaguuaucuuu

SEQ ID NO: 687667 - RNA, 24 nt, Artificial Sequence
  Synthetic
ugaaauugagcaacaguuaucuuu

SEQ ID NO: 687668 - RNA, 18 nt, Artificial Sequence
  Synthetic
gauucucuuguuaucuuu

SEQ ID NO: 687669 - RNA, 19 nt, Artificial Sequence
  Synthetic
agauucucuuguuaucuuu

SEQ ID NO: 687670 - RNA, 20 nt, Artificial Sequence
  Synthetic
cagauucucuuguuaucuuu

SEQ ID NO: 687671 - RNA, 21 nt, Artificial Sequence
  Synthetic
acagauucucuuguuaucuuu

SEQ ID NO: 687672 - RNA, 22 nt, Artificial Sequence
  Synthetic
cacagauucucuuguuaucuuu

SEQ ID NO: 687673 - RNA, 23 nt, Artificial Sequence
  Synthetic
ucacagauucucuuguuaucuuu

SEQ ID NO: 687674 - RNA, 24 nt, Artificial Sequence
  Synthetic
uucacagauucucuuguuaucuuu

SEQ ID NO: 687675 - RNA, 18 nt, Artificial Sequence
  Synthetic
aucuuucucaaacucuuu

SEQ ID NO: 687676 - RNA, 19 nt, Artificial Sequence
  Synthetic
aaucuuucucaaacucuuu

SEQ ID NO: 687677 - RNA, 20 nt, Artificial Sequence
  Synthetic
aaaucuuucucaaacucuuu

SEQ ID NO: 687678 - RNA, 21 nt, Artificial Sequence
  Synthetic
caaaucuuucucaaacucuuu

SEQ ID NO: 687679 - RNA, 22 nt, Artificial Sequence
  Synthetic
acaaaucuuucucaaacucuuu

SEQ ID NO: 687680 - RNA, 23 nt, Artificial Sequence
  Synthetic
cacaaaucuuucucaaacucuuu

SEQ ID NO: 687681 - RNA, 24 nt, Artificial Sequence
  Synthetic
acacaaaucuuucucaaacucuuu

SEQ ID NO: 687682 - RNA, 18 nt, Artificial Sequence
  Synthetic
uuaggaacuaaacucuuu

SEQ ID NO: 687683 - RNA, 19 nt, Artificial Sequence
  Synthetic
uuuaggaacuaaacucuuu

SEQ ID NO: 687684 - RNA, 20 nt, Artificial Sequence
  Synthetic
auuuaggaacuaaacucuuu

SEQ ID NO: 687685 - RNA, 21 nt, Artificial Sequence
  Synthetic
aauuuaggaacuaaacucuuu

SEQ ID NO: 687686 - RNA, 22 nt, Artificial Sequence
  Synthetic
caauuuaggaacuaaacucuuu

SEQ ID NO: 687687 - RNA, 23 nt, Artificial Sequence
  Synthetic
acaauuuaggaacuaaacucuuu

SEQ ID NO: 687688 - RNA, 24 nt, Artificial Sequence
  Synthetic
uacaauuuaggaacuaaacucuuu

SEQ ID NO: 687689 - RNA, 18 nt, Artificial Sequence
  Synthetic
gaagaacaguaacucuuu

SEQ ID NO: 687690 - RNA, 19 nt, Artificial Sequence
  Synthetic
ggaagaacaguaacucuuu

SEQ ID NO: 687691 - RNA, 20 nt, Artificial Sequence
  Synthetic
gggaagaacaguaacucuuu

SEQ ID NO: 687692 - RNA, 21 nt, Artificial Sequence
  Synthetic
agggaagaacaguaacucuuu

SEQ ID NO: 687693 - RNA, 22 nt, Artificial Sequence
  Synthetic
uagggaagaacaguaacucuuu

SEQ ID NO: 687694 - RNA, 23 nt, Artificial Sequence
  Synthetic
uuagggaagaacaguaacucuuu

SEQ ID NO: 687695 - RNA, 24 nt, Artificial Sequence
  Synthetic
cuuagggaagaacaguaacucuuu

SEQ ID NO: 687696 - RNA, 18 nt, Artificial Sequence
  Synthetic
cuguaaucccagcucuuu

SEQ ID NO: 687697 - RNA, 19 nt, Artificial Sequence
  Synthetic
ccuguaaucccagcucuuu

SEQ ID NO: 687698 - RNA, 20 nt, Artificial Sequence
  Synthetic
accuguaaucccagcucuuu

SEQ ID NO: 687699 - RNA, 21 nt, Artificial Sequence
  Synthetic
caccuguaaucccagcucuuu

SEQ ID NO: 687700 - RNA, 22 nt, Artificial Sequence
  Synthetic
acaccuguaaucccagcucuuu

SEQ ID NO: 687701 - RNA, 23 nt, Artificial Sequence
  Synthetic
cacaccuguaaucccagcucuuu

SEQ ID NO: 687702 - RNA, 24 nt, Artificial Sequence
  Synthetic
ucacaccuguaaucccagcucuuu

SEQ ID NO: 687703 - RNA, 18 nt, Artificial Sequence
  Synthetic
uuguaaugauagcucuuu

SEQ ID NO: 687704 - RNA, 19 nt, Artificial Sequence
  Synthetic
cuuguaaugauagcucuuu

SEQ ID NO: 687705 - RNA, 20 nt, Artificial Sequence
  Synthetic
acuuguaaugauagcucuuu

SEQ ID NO: 687706 - RNA, 21 nt, Artificial Sequence
  Synthetic
aacuuguaaugauagcucuuu

SEQ ID NO: 687707 - RNA, 22 nt, Artificial Sequence
  Synthetic
aaacuuguaaugauagcucuuu

SEQ ID NO: 687708 - RNA, 23 nt, Artificial Sequence
  Synthetic
uaaacuuguaaugauagcucuuu

SEQ ID NO: 687709 - RNA, 24 nt, Artificial Sequence
  Synthetic
uuaaacuuguaaugauagcucuuu

SEQ ID NO: 687710 - RNA, 18 nt, Artificial Sequence
  Synthetic
augauguucuggcucuuu

SEQ ID NO: 687711 - RNA, 19 nt, Artificial Sequence
  Synthetic
gaugauguucuggcucuuu

SEQ ID NO: 687712 - RNA, 20 nt, Artificial Sequence
  Synthetic
agaugauguucuggcucuuu

SEQ ID NO: 687713 - RNA, 21 nt, Artificial Sequence
  Synthetic
aagaugauguucuggcucuuu

SEQ ID NO: 687714 - RNA, 22 nt, Artificial Sequence
  Synthetic
caagaugauguucuggcucuuu

SEQ ID NO: 687715 - RNA, 23 nt, Artificial Sequence
  Synthetic
ucaagaugauguucuggcucuuu

SEQ ID NO: 687716 - RNA, 24 nt, Artificial Sequence
  Synthetic
uucaagaugauguucuggcucuuu

SEQ ID NO: 687717 - RNA, 18 nt, Artificial Sequence
  Synthetic
uucaaagaaaaucucuuu

SEQ ID NO: 687718 - RNA, 19 nt, Artificial Sequence
  Synthetic
uuucaaagaaaaucucuuu

SEQ ID NO: 687719 - RNA, 20 nt, Artificial Sequence
  Synthetic
cuuucaaagaaaaucucuuu

SEQ ID NO: 687720 - RNA, 21 nt, Artificial Sequence
  Synthetic
ucuuucaaagaaaaucucuuu

SEQ ID NO: 687721 - RNA, 22 nt, Artificial Sequence
  Synthetic
aucuuucaaagaaaaucucuuu

SEQ ID NO: 687722 - RNA, 23 nt, Artificial Sequence
  Synthetic
uaucuuucaaagaaaaucucuuu

SEQ ID NO: 687723 - RNA, 24 nt, Artificial Sequence
  Synthetic
cuaucuuucaaagaaaaucucuuu

SEQ ID NO: 687724 - RNA, 18 nt, Artificial Sequence
  Synthetic
cauguagaguaucucuuu

SEQ ID NO: 687725 - RNA, 19 nt, Artificial Sequence
  Synthetic
acauguagaguaucucuuu

SEQ ID NO: 687726 - RNA, 20 nt, Artificial Sequence
  Synthetic
aacauguagaguaucucuuu

SEQ ID NO: 687727 - RNA, 21 nt, Artificial Sequence
  Synthetic
aaacauguagaguaucucuuu

SEQ ID NO: 687728 - RNA, 22 nt, Artificial Sequence
  Synthetic
uaaacauguagaguaucucuuu

SEQ ID NO: 687729 - RNA, 23 nt, Artificial Sequence
  Synthetic
auaaacauguagaguaucucuuu

SEQ ID NO: 687730 - RNA, 24 nt, Artificial Sequence
  Synthetic
uauaaacauguagaguaucucuuu

SEQ ID NO: 687731 - RNA, 18 nt, Artificial Sequence
  Synthetic
aaagucuucauucucuuu

SEQ ID NO: 687732 - RNA, 19 nt, Artificial Sequence
  Synthetic
caaagucuucauucucuuu

SEQ ID NO: 687733 - RNA, 20 nt, Artificial Sequence
  Synthetic
ccaaagucuucauucucuuu

SEQ ID NO: 687734 - RNA, 21 nt, Artificial Sequence
  Synthetic
gccaaagucuucauucucuuu

SEQ ID NO: 687735 - RNA, 22 nt, Artificial Sequence
  Synthetic
agccaaagucuucauucucuuu

SEQ ID NO: 687736 - RNA, 23 nt, Artificial Sequence
  Synthetic
uagccaaagucuucauucucuuu

SEQ ID NO: 687737 - RNA, 24 nt, Artificial Sequence
  Synthetic
uuagccaaagucuucauucucuuu

SEQ ID NO: 687738 - RNA, 18 nt, Artificial Sequence
  Synthetic
cccaaaagacuucucuuu

SEQ ID NO: 687739 - RNA, 19 nt, Artificial Sequence
  Synthetic
ccccaaaagacuucucuuu

SEQ ID NO: 687740 - RNA, 20 nt, Artificial Sequence
  Synthetic
uccccaaaagacuucucuuu

SEQ ID NO: 687741 - RNA, 21 nt, Artificial Sequence
  Synthetic
uuccccaaaagacuucucuuu

SEQ ID NO: 687742 - RNA, 22 nt, Artificial Sequence
  Synthetic
uuuccccaaaagacuucucuuu

SEQ ID NO: 687743 - RNA, 23 nt, Artificial Sequence
  Synthetic
cuuuccccaaaagacuucucuuu

SEQ ID NO: 687744 - RNA, 24 nt, Artificial Sequence
  Synthetic
gcuuuccccaaaagacuucucuuu

SEQ ID NO: 687745 - RNA, 18 nt, Artificial Sequence
  Synthetic
acauaaugacuucucuuu

SEQ ID NO: 687746 - RNA, 19 nt, Artificial Sequence
  Synthetic
aacauaaugacuucucuuu

SEQ ID NO: 687747 - RNA, 20 nt, Artificial Sequence
  Synthetic
aaacauaaugacuucucuuu

SEQ ID NO: 687748 - RNA, 21 nt, Artificial Sequence
  Synthetic
aaaacauaaugacuucucuuu

SEQ ID NO: 687749 - RNA, 22 nt, Artificial Sequence
  Synthetic
aaaaacauaaugacuucucuuu

SEQ ID NO: 687750 - RNA, 23 nt, Artificial Sequence
  Synthetic
uaaaaacauaaugacuucucuuu

SEQ ID NO: 687751 - RNA, 24 nt, Artificial Sequence
  Synthetic
uuaaaaacauaaugacuucucuuu

SEQ ID NO: 687752 - RNA, 18 nt, Artificial Sequence
  Synthetic
guggcucacguucucuuu

SEQ ID NO: 687753 - RNA, 19 nt, Artificial Sequence
  Synthetic
cguggcucacguucucuuu

SEQ ID NO: 687754 - RNA, 20 nt, Artificial Sequence
  Synthetic
acguggcucacguucucuuu

SEQ ID NO: 687755 - RNA, 18 nt, Artificial Sequence
  Synthetic
gaaccuggauuucucuuu

SEQ ID NO: 687756 - RNA, 19 nt, Artificial Sequence
  Synthetic
ugaaccuggauuucucuuu

SEQ ID NO: 687757 - RNA, 20 nt, Artificial Sequence
  Synthetic
cugaaccuggauuucucuuu

SEQ ID NO: 687758 - RNA, 21 nt, Artificial Sequence
  Synthetic
gcugaaccuggauuucucuuu

SEQ ID NO: 687759 - RNA, 22 nt, Artificial Sequence
  Synthetic
cgcugaaccuggauuucucuuu

SEQ ID NO: 687760 - RNA, 23 nt, Artificial Sequence
  Synthetic
ucgcugaaccuggauuucucuuu

SEQ ID NO: 687761 - RNA, 24 nt, Artificial Sequence
  Synthetic
cucgcugaaccuggauuucucuuu

SEQ ID NO: 687762 - RNA, 18 nt, Artificial Sequence
  Synthetic
uguuuuaaagaagucuuu

SEQ ID NO: 687763 - RNA, 19 nt, Artificial Sequence
  Synthetic
auguuuuaaagaagucuuu

SEQ ID NO: 687764 - RNA, 20 nt, Artificial Sequence
  Synthetic
aauguuuuaaagaagucuuu

SEQ ID NO: 687765 - RNA, 21 nt, Artificial Sequence
  Synthetic
gaauguuuuaaagaagucuuu

SEQ ID NO: 687766 - RNA, 22 nt, Artificial Sequence
  Synthetic
ugaauguuuuaaagaagucuuu

SEQ ID NO: 687767 - RNA, 23 nt, Artificial Sequence
  Synthetic
uugaauguuuuaaagaagucuuu

SEQ ID NO: 687768 - RNA, 24 nt, Artificial Sequence
  Synthetic
auugaauguuuuaaagaagucuuu

SEQ ID NO: 687769 - RNA, 18 nt, Artificial Sequence
  Synthetic
agacaggugagagucuuu

SEQ ID NO: 687770 - RNA, 19 nt, Artificial Sequence
  Synthetic
aagacaggugagagucuuu

SEQ ID NO: 687771 - RNA, 20 nt, Artificial Sequence
  Synthetic
gaagacaggugagagucuuu

SEQ ID NO: 687772 - RNA, 21 nt, Artificial Sequence
  Synthetic
agaagacaggugagagucuuu

SEQ ID NO: 687773 - RNA, 22 nt, Artificial Sequence
  Synthetic
cagaagacaggugagagucuuu

SEQ ID NO: 687774 - RNA, 23 nt, Artificial Sequence
  Synthetic
ccagaagacaggugagagucuuu

SEQ ID NO: 687775 - RNA, 24 nt, Artificial Sequence
  Synthetic
gccagaagacaggugagagucuuu

SEQ ID NO: 687776 - RNA, 18 nt, Artificial Sequence
  Synthetic
auuugaacccuagucuuu

SEQ ID NO: 687777 - RNA, 19 nt, Artificial Sequence
  Synthetic
gauuugaacccuagucuuu

SEQ ID NO: 687778 - RNA, 20 nt, Artificial Sequence
  Synthetic
agauuugaacccuagucuuu

SEQ ID NO: 687779 - RNA, 21 nt, Artificial Sequence
  Synthetic
gagauuugaacccuagucuuu

SEQ ID NO: 687780 - RNA, 22 nt, Artificial Sequence
  Synthetic
ugagauuugaacccuagucuuu

SEQ ID NO: 687781 - RNA, 23 nt, Artificial Sequence
  Synthetic
cugagauuugaacccuagucuuu

SEQ ID NO: 687782 - RNA, 24 nt, Artificial Sequence
  Synthetic
ucugagauuugaacccuagucuuu

SEQ ID NO: 687783 - RNA, 18 nt, Artificial Sequence
  Synthetic
uuugugauuguagucuuu

SEQ ID NO: 687784 - RNA, 19 nt, Artificial Sequence
  Synthetic
uuuugugauuguagucuuu

SEQ ID NO: 687785 - RNA, 20 nt, Artificial Sequence
  Synthetic
uuuuugugauuguagucuuu

SEQ ID NO: 687786 - RNA, 21 nt, Artificial Sequence
  Synthetic
uuuuuugugauuguagucuuu

SEQ ID NO: 687787 - RNA, 22 nt, Artificial Sequence
  Synthetic
cuuuuuugugauuguagucuuu

SEQ ID NO: 687788 - RNA, 23 nt, Artificial Sequence
  Synthetic
ucuuuuuugugauuguagucuuu

SEQ ID NO: 687789 - RNA, 24 nt, Artificial Sequence
  Synthetic
uucuuuuuugugauuguagucuuu

SEQ ID NO: 687790 - RNA, 18 nt, Artificial Sequence
  Synthetic
ucuacccucuuagucuuu

SEQ ID NO: 687791 - RNA, 19 nt, Artificial Sequence
  Synthetic
uucuacccucuuagucuuu

SEQ ID NO: 687792 - RNA, 20 nt, Artificial Sequence
  Synthetic
guucuacccucuuagucuuu

SEQ ID NO: 687793 - RNA, 21 nt, Artificial Sequence
  Synthetic
uguucuacccucuuagucuuu

SEQ ID NO: 687794 - RNA, 22 nt, Artificial Sequence
  Synthetic
cuguucuacccucuuagucuuu

SEQ ID NO: 687795 - RNA, 23 nt, Artificial Sequence
  Synthetic
acuguucuacccucuuagucuuu

SEQ ID NO: 687796 - RNA, 24 nt, Artificial Sequence
  Synthetic
aacuguucuacccucuuagucuuu

SEQ ID NO: 687797 - RNA, 18 nt, Artificial Sequence
  Synthetic
uauauuguccaggucuuu

SEQ ID NO: 687798 - RNA, 19 nt, Artificial Sequence
  Synthetic
auauauuguccaggucuuu

SEQ ID NO: 687799 - RNA, 20 nt, Artificial Sequence
  Synthetic
aauauauuguccaggucuuu

SEQ ID NO: 687800 - RNA, 21 nt, Artificial Sequence
  Synthetic
aaauauauuguccaggucuuu

SEQ ID NO: 687801 - RNA, 22 nt, Artificial Sequence
  Synthetic
uaaauauauuguccaggucuuu

SEQ ID NO: 687802 - RNA, 23 nt, Artificial Sequence
  Synthetic
uuaaauauauuguccaggucuuu

SEQ ID NO: 687803 - RNA, 24 nt, Artificial Sequence
  Synthetic
auuaaauauauuguccaggucuuu

SEQ ID NO: 687804 - RNA, 18 nt, Artificial Sequence
  Synthetic
ccacugucaguggucuuu

SEQ ID NO: 687805 - RNA, 19 nt, Artificial Sequence
  Synthetic
cccacugucaguggucuuu

SEQ ID NO: 687806 - RNA, 20 nt, Artificial Sequence
  Synthetic
ccccacugucaguggucuuu

SEQ ID NO: 687807 - RNA, 21 nt, Artificial Sequence
  Synthetic
accccacugucaguggucuuu

SEQ ID NO: 687808 - RNA, 22 nt, Artificial Sequence
  Synthetic
uaccccacugucaguggucuuu

SEQ ID NO: 687809 - RNA, 23 nt, Artificial Sequence
  Synthetic
cuaccccacugucaguggucuuu

SEQ ID NO: 687810 - RNA, 24 nt, Artificial Sequence
  Synthetic
ccuaccccacugucaguggucuuu

SEQ ID NO: 687811 - RNA, 18 nt, Artificial Sequence
  Synthetic
guauauugcuuggucuuu

SEQ ID NO: 687812 - RNA, 19 nt, Artificial Sequence
  Synthetic
aguauauugcuuggucuuu

SEQ ID NO: 687813 - RNA, 20 nt, Artificial Sequence
  Synthetic
gaguauauugcuuggucuuu

SEQ ID NO: 687814 - RNA, 21 nt, Artificial Sequence
  Synthetic
ggaguauauugcuuggucuuu

SEQ ID NO: 687815 - RNA, 22 nt, Artificial Sequence
  Synthetic
uggaguauauugcuuggucuuu

SEQ ID NO: 687816 - RNA, 23 nt, Artificial Sequence
  Synthetic
cuggaguauauugcuuggucuuu

SEQ ID NO: 687817 - RNA, 24 nt, Artificial Sequence
  Synthetic
gcuggaguauauugcuuggucuuu

SEQ ID NO: 687818 - RNA, 18 nt, Artificial Sequence
  Synthetic
auuguacuuuuggucuuu

SEQ ID NO: 687819 - RNA, 19 nt, Artificial Sequence
  Synthetic
aauuguacuuuuggucuuu

SEQ ID NO: 687820 - RNA, 20 nt, Artificial Sequence
  Synthetic
gaauuguacuuuuggucuuu

SEQ ID NO: 687821 - RNA, 21 nt, Artificial Sequence
  Synthetic
agaauuguacuuuuggucuuu

SEQ ID NO: 687822 - RNA, 22 nt, Artificial Sequence
  Synthetic
aagaauuguacuuuuggucuuu

SEQ ID NO: 687823 - RNA, 23 nt, Artificial Sequence
  Synthetic
caagaauuguacuuuuggucuuu

SEQ ID NO: 687824 - RNA, 24 nt, Artificial Sequence
  Synthetic
ucaagaauuguacuuuuggucuuu

SEQ ID NO: 687825 - RNA, 18 nt, Artificial Sequence
  Synthetic
ggaaauucuaaugucuuu

SEQ ID NO: 687826 - RNA, 19 nt, Artificial Sequence
  Synthetic
aggaaauucuaaugucuuu

SEQ ID NO: 687827 - RNA, 20 nt, Artificial Sequence
  Synthetic
gaggaaauucuaaugucuuu

SEQ ID NO: 687828 - RNA, 21 nt, Artificial Sequence
  Synthetic
ggaggaaauucuaaugucuuu

SEQ ID NO: 687829 - RNA, 22 nt, Artificial Sequence
  Synthetic
gggaggaaauucuaaugucuuu

SEQ ID NO: 687830 - RNA, 23 nt, Artificial Sequence
  Synthetic
cgggaggaaauucuaaugucuuu

SEQ ID NO: 687831 - RNA, 24 nt, Artificial Sequence
  Synthetic
acgggaggaaauucuaaugucuuu

SEQ ID NO: 687832 - RNA, 18 nt, Artificial Sequence
  Synthetic
gaaagaagacaugucuuu

SEQ ID NO: 687833 - RNA, 19 nt, Artificial Sequence
  Synthetic
ugaaagaagacaugucuuu

SEQ ID NO: 687834 - RNA, 20 nt, Artificial Sequence
  Synthetic
cugaaagaagacaugucuuu

SEQ ID NO: 687835 - RNA, 21 nt, Artificial Sequence
  Synthetic
acugaaagaagacaugucuuu

SEQ ID NO: 687836 - RNA, 22 nt, Artificial Sequence
  Synthetic
aacugaaagaagacaugucuuu

SEQ ID NO: 687837 - RNA, 23 nt, Artificial Sequence
  Synthetic
caacugaaagaagacaugucuuu

SEQ ID NO: 687838 - RNA, 24 nt, Artificial Sequence
  Synthetic
acaacugaaagaagacaugucuuu

SEQ ID NO: 687839 - RNA, 18 nt, Artificial Sequence
  Synthetic
cugacuagccaugucuuu

SEQ ID NO: 687840 - RNA, 19 nt, Artificial Sequence
  Synthetic
acugacuagccaugucuuu

SEQ ID NO: 687841 - RNA, 20 nt, Artificial Sequence
  Synthetic
gacugacuagccaugucuuu

SEQ ID NO: 687842 - RNA, 21 nt, Artificial Sequence
  Synthetic
ugacugacuagccaugucuuu

SEQ ID NO: 687843 - RNA, 22 nt, Artificial Sequence
  Synthetic
cugacugacuagccaugucuuu

SEQ ID NO: 687844 - RNA, 23 nt, Artificial Sequence
  Synthetic
gcugacugacuagccaugucuuu

SEQ ID NO: 687845 - RNA, 24 nt, Artificial Sequence
  Synthetic
agcugacugacuagccaugucuuu

SEQ ID NO: 687846 - RNA, 18 nt, Artificial Sequence
  Synthetic
ggcuuuuaguaugucuuu

SEQ ID NO: 687847 - RNA, 19 nt, Artificial Sequence
  Synthetic
aggcuuuuaguaugucuuu

SEQ ID NO: 687848 - RNA, 20 nt, Artificial Sequence
  Synthetic
caggcuuuuaguaugucuuu

SEQ ID NO: 687849 - RNA, 21 nt, Artificial Sequence
  Synthetic
ucaggcuuuuaguaugucuuu

SEQ ID NO: 687850 - RNA, 22 nt, Artificial Sequence
  Synthetic
cucaggcuuuuaguaugucuuu

SEQ ID NO: 687851 - RNA, 23 nt, Artificial Sequence
  Synthetic
gcucaggcuuuuaguaugucuuu

SEQ ID NO: 687852 - RNA, 24 nt, Artificial Sequence
  Synthetic
ggcucaggcuuuuaguaugucuuu

SEQ ID NO: 687853 - RNA, 18 nt, Artificial Sequence
  Synthetic
caaguggcaucugucuuu

SEQ ID NO: 687854 - RNA, 19 nt, Artificial Sequence
  Synthetic
ucaaguggcaucugucuuu

SEQ ID NO: 687855 - RNA, 20 nt, Artificial Sequence
  Synthetic
gucaaguggcaucugucuuu

SEQ ID NO: 687856 - RNA, 21 nt, Artificial Sequence
  Synthetic
agucaaguggcaucugucuuu

SEQ ID NO: 687857 - RNA, 22 nt, Artificial Sequence
  Synthetic
gagucaaguggcaucugucuuu

SEQ ID NO: 687858 - RNA, 23 nt, Artificial Sequence
  Synthetic
cgagucaaguggcaucugucuuu

SEQ ID NO: 687859 - RNA, 24 nt, Artificial Sequence
  Synthetic
acgagucaaguggcaucugucuuu

SEQ ID NO: 687860 - RNA, 18 nt, Artificial Sequence
  Synthetic
cacuacaaaauugucuuu

SEQ ID NO: 687861 - RNA, 19 nt, Artificial Sequence
  Synthetic
gcacuacaaaauugucuuu

SEQ ID NO: 687862 - RNA, 20 nt, Artificial Sequence
  Synthetic
agcacuacaaaauugucuuu

SEQ ID NO: 687863 - RNA, 21 nt, Artificial Sequence
  Synthetic
cagcacuacaaaauugucuuu

SEQ ID NO: 687864 - RNA, 22 nt, Artificial Sequence
  Synthetic
acagcacuacaaaauugucuuu

SEQ ID NO: 687865 - RNA, 23 nt, Artificial Sequence
  Synthetic
uacagcacuacaaaauugucuuu

SEQ ID NO: 687866 - RNA, 24 nt, Artificial Sequence
  Synthetic
cuacagcacuacaaaauugucuuu

SEQ ID NO: 687867 - RNA, 18 nt, Artificial Sequence
  Synthetic
uuuuguuuuguugucuuu

SEQ ID NO: 687868 - RNA, 19 nt, Artificial Sequence
  Synthetic
uuuuuguuuuguugucuuu

SEQ ID NO: 687869 - RNA, 20 nt, Artificial Sequence
  Synthetic
uuuuuuguuuuguugucuuu

SEQ ID NO: 687870 - RNA, 21 nt, Artificial Sequence
  Synthetic
auuuuuuguuuuguugucuuu

SEQ ID NO: 687871 - RNA, 22 nt, Artificial Sequence
  Synthetic
aauuuuuuguuuuguugucuuu

SEQ ID NO: 687872 - RNA, 23 nt, Artificial Sequence
  Synthetic
aaauuuuuuguuuuguugucuuu

SEQ ID NO: 687873 - RNA, 24 nt, Artificial Sequence
  Synthetic
aaaauuuuuuguuuuguugucuuu

SEQ ID NO: 687874 - RNA, 18 nt, Artificial Sequence
  Synthetic
ugaauguauuuugucuuu

SEQ ID NO: 687875 - RNA, 19 nt, Artificial Sequence
  Synthetic
augaauguauuuugucuuu

SEQ ID NO: 687876 - RNA, 20 nt, Artificial Sequence
  Synthetic
aaugaauguauuuugucuuu

SEQ ID NO: 687877 - RNA, 21 nt, Artificial Sequence
  Synthetic
aaaugaauguauuuugucuuu

SEQ ID NO: 687878 - RNA, 22 nt, Artificial Sequence
  Synthetic
gaaaugaauguauuuugucuuu

SEQ ID NO: 687879 - RNA, 23 nt, Artificial Sequence
  Synthetic
ugaaaugaauguauuuugucuuu

SEQ ID NO: 687880 - RNA, 24 nt, Artificial Sequence
  Synthetic
augaaaugaauguauuuugucuuu

SEQ ID NO: 687881 - RNA, 18 nt, Artificial Sequence
  Synthetic
aaccaucucaaauucuuu

SEQ ID NO: 687882 - RNA, 19 nt, Artificial Sequence
  Synthetic
aaaccaucucaaauucuuu

SEQ ID NO: 687883 - RNA, 20 nt, Artificial Sequence
  Synthetic
caaaccaucucaaauucuuu

SEQ ID NO: 687884 - RNA, 21 nt, Artificial Sequence
  Synthetic
ccaaaccaucucaaauucuuu

SEQ ID NO: 687885 - RNA, 22 nt, Artificial Sequence
  Synthetic
gccaaaccaucucaaauucuuu

SEQ ID NO: 687886 - RNA, 23 nt, Artificial Sequence
  Synthetic
ugccaaaccaucucaaauucuuu

SEQ ID NO: 687887 - RNA, 24 nt, Artificial Sequence
  Synthetic
cugccaaaccaucucaaauucuuu

SEQ ID NO: 687888 - RNA, 18 nt, Artificial Sequence
  Synthetic
cuuagucaugaauucuuu

SEQ ID NO: 687889 - RNA, 19 nt, Artificial Sequence
  Synthetic
acuuagucaugaauucuuu

SEQ ID NO: 687890 - RNA, 20 nt, Artificial Sequence
  Synthetic
gacuuagucaugaauucuuu

SEQ ID NO: 687891 - RNA, 21 nt, Artificial Sequence
  Synthetic
ggacuuagucaugaauucuuu

SEQ ID NO: 687892 - RNA, 22 nt, Artificial Sequence
  Synthetic
aggacuuagucaugaauucuuu

SEQ ID NO: 687893 - RNA, 23 nt, Artificial Sequence
  Synthetic
aaggacuuagucaugaauucuuu

SEQ ID NO: 687894 - RNA, 24 nt, Artificial Sequence
  Synthetic
uaaggacuuagucaugaauucuuu

SEQ ID NO: 687895 - RNA, 18 nt, Artificial Sequence
  Synthetic
auaucaucaccauucuuu

SEQ ID NO: 687896 - RNA, 19 nt, Artificial Sequence
  Synthetic
gauaucaucaccauucuuu

SEQ ID NO: 687897 - RNA, 20 nt, Artificial Sequence
  Synthetic
agauaucaucaccauucuuu

SEQ ID NO: 687898 - RNA, 21 nt, Artificial Sequence
  Synthetic
aagauaucaucaccauucuuu

SEQ ID NO: 687899 - RNA, 22 nt, Artificial Sequence
  Synthetic
aaagauaucaucaccauucuuu

SEQ ID NO: 687900 - RNA, 23 nt, Artificial Sequence
  Synthetic
gaaagauaucaucaccauucuuu

SEQ ID NO: 687901 - RNA, 24 nt, Artificial Sequence
  Synthetic
ugaaagauaucaucaccauucuuu

SEQ ID NO: 687902 - RNA, 18 nt, Artificial Sequence
  Synthetic
cuuuaggccucauucuuu

SEQ ID NO: 687903 - RNA, 19 nt, Artificial Sequence
  Synthetic
ucuuuaggccucauucuuu

SEQ ID NO: 687904 - RNA, 20 nt, Artificial Sequence
  Synthetic
gucuuuaggccucauucuuu

SEQ ID NO: 687905 - RNA, 21 nt, Artificial Sequence
  Synthetic
agucuuuaggccucauucuuu

SEQ ID NO: 687906 - RNA, 22 nt, Artificial Sequence
  Synthetic
aagucuuuaggccucauucuuu

SEQ ID NO: 687907 - RNA, 23 nt, Artificial Sequence
  Synthetic
uaagucuuuaggccucauucuuu

SEQ ID NO: 687908 - RNA, 24 nt, Artificial Sequence
  Synthetic
auaagucuuuaggccucauucuuu

SEQ ID NO: 687909 - RNA, 18 nt, Artificial Sequence
  Synthetic
gucuuuuugucauucuuu

SEQ ID NO: 687910 - RNA, 19 nt, Artificial Sequence
  Synthetic
ugucuuuuugucauucuuu

SEQ ID NO: 687911 - RNA, 20 nt, Artificial Sequence
  Synthetic
augucuuuuugucauucuuu

SEQ ID NO: 687912 - RNA, 21 nt, Artificial Sequence
  Synthetic
aaugucuuuuugucauucuuu

SEQ ID NO: 687913 - RNA, 22 nt, Artificial Sequence
  Synthetic
gaaugucuuuuugucauucuuu

SEQ ID NO: 687914 - RNA, 23 nt, Artificial Sequence
  Synthetic
agaaugucuuuuugucauucuuu

SEQ ID NO: 687915 - RNA, 24 nt, Artificial Sequence
  Synthetic
gagaaugucuuuuugucauucuuu

SEQ ID NO: 687916 - RNA, 18 nt, Artificial Sequence
  Synthetic
cacugaucuagauucuuu

SEQ ID NO: 687917 - RNA, 19 nt, Artificial Sequence
  Synthetic
gcacugaucuagauucuuu

SEQ ID NO: 687918 - RNA, 20 nt, Artificial Sequence
  Synthetic
agcacugaucuagauucuuu

SEQ ID NO: 687919 - RNA, 21 nt, Artificial Sequence
  Synthetic
aagcacugaucuagauucuuu

SEQ ID NO: 687920 - RNA, 22 nt, Artificial Sequence
  Synthetic
aaagcacugaucuagauucuuu

SEQ ID NO: 687921 - RNA, 23 nt, Artificial Sequence
  Synthetic
gaaagcacugaucuagauucuuu

SEQ ID NO: 687922 - RNA, 24 nt, Artificial Sequence
  Synthetic
ugaaagcacugaucuagauucuuu

SEQ ID NO: 687923 - RNA, 18 nt, Artificial Sequence
  Synthetic
agagcuaugggcuucuuu

SEQ ID NO: 687924 - RNA, 19 nt, Artificial Sequence
  Synthetic
uagagcuaugggcuucuuu

SEQ ID NO: 687925 - RNA, 20 nt, Artificial Sequence
  Synthetic
auagagcuaugggcuucuuu

SEQ ID NO: 687926 - RNA, 21 nt, Artificial Sequence
  Synthetic
uauagagcuaugggcuucuuu

SEQ ID NO: 687927 - RNA, 22 nt, Artificial Sequence
  Synthetic
auauagagcuaugggcuucuuu

SEQ ID NO: 687928 - RNA, 23 nt, Artificial Sequence
  Synthetic
cauauagagcuaugggcuucuuu

SEQ ID NO: 687929 - RNA, 24 nt, Artificial Sequence
  Synthetic
gcauauagagcuaugggcuucuuu

SEQ ID NO: 687930 - RNA, 18 nt, Artificial Sequence
  Synthetic
cacaguuauaaguucuuu

SEQ ID NO: 687931 - RNA, 19 nt, Artificial Sequence
  Synthetic
ccacaguuauaaguucuuu

SEQ ID NO: 687932 - RNA, 20 nt, Artificial Sequence
  Synthetic
uccacaguuauaaguucuuu

SEQ ID NO: 687933 - RNA, 21 nt, Artificial Sequence
  Synthetic
auccacaguuauaaguucuuu

SEQ ID NO: 687934 - RNA, 22 nt, Artificial Sequence
  Synthetic
uauccacaguuauaaguucuuu

SEQ ID NO: 687935 - RNA, 23 nt, Artificial Sequence
  Synthetic
uuauccacaguuauaaguucuuu

SEQ ID NO: 687936 - RNA, 24 nt, Artificial Sequence
  Synthetic
uuuauccacaguuauaaguucuuu

SEQ ID NO: 687937 - RNA, 18 nt, Artificial Sequence
  Synthetic
uucuauuuuaaguucuuu

SEQ ID NO: 687938 - RNA, 19 nt, Artificial Sequence
  Synthetic
guucuauuuuaaguucuuu

SEQ ID NO: 687939 - RNA, 20 nt, Artificial Sequence
  Synthetic
aguucuauuuuaaguucuuu

SEQ ID NO: 687940 - RNA, 21 nt, Artificial Sequence
  Synthetic
uaguucuauuuuaaguucuuu

SEQ ID NO: 687941 - RNA, 22 nt, Artificial Sequence
  Synthetic
auaguucuauuuuaaguucuuu

SEQ ID NO: 687942 - RNA, 23 nt, Artificial Sequence
  Synthetic
gauaguucuauuuuaaguucuuu

SEQ ID NO: 687943 - RNA, 24 nt, Artificial Sequence
  Synthetic
ugauaguucuauuuuaaguucuuu

SEQ ID NO: 687944 - RNA, 18 nt, Artificial Sequence
  Synthetic
cucucuuuuaaguucuuu

SEQ ID NO: 687945 - RNA, 19 nt, Artificial Sequence
  Synthetic
gcucucuuuuaaguucuuu

SEQ ID NO: 687946 - RNA, 20 nt, Artificial Sequence
  Synthetic
agcucucuuuuaaguucuuu

SEQ ID NO: 687947 - RNA, 21 nt, Artificial Sequence
  Synthetic
cagcucucuuuuaaguucuuu

SEQ ID NO: 687948 - RNA, 22 nt, Artificial Sequence
  Synthetic
gcagcucucuuuuaaguucuuu

SEQ ID NO: 687949 - RNA, 23 nt, Artificial Sequence
  Synthetic
ggcagcucucuuuuaaguucuuu

SEQ ID NO: 687950 - RNA, 24 nt, Artificial Sequence
  Synthetic
uggcagcucucuuuuaaguucuuu

SEQ ID NO: 687951 - RNA, 18 nt, Artificial Sequence
  Synthetic
aucuacuuuuaguucuuu

SEQ ID NO: 687952 - RNA, 19 nt, Artificial Sequence
  Synthetic
gaucuacuuuuaguucuuu

SEQ ID NO: 687953 - RNA, 20 nt, Artificial Sequence
  Synthetic
agaucuacuuuuaguucuuu

SEQ ID NO: 687954 - RNA, 21 nt, Artificial Sequence
  Synthetic
uagaucuacuuuuaguucuuu

SEQ ID NO: 687955 - RNA, 22 nt, Artificial Sequence
  Synthetic
uuagaucuacuuuuaguucuuu

SEQ ID NO: 687956 - RNA, 23 nt, Artificial Sequence
  Synthetic
guuagaucuacuuuuaguucuuu

SEQ ID NO: 687957 - RNA, 24 nt, Artificial Sequence
  Synthetic
uguuagaucuacuuuuaguucuuu

SEQ ID NO: 687958 - RNA, 18 nt, Artificial Sequence
  Synthetic
uuccacuuaggguucuuu

SEQ ID NO: 687959 - RNA, 19 nt, Artificial Sequence
  Synthetic
auuccacuuaggguucuuu

SEQ ID NO: 687960 - RNA, 20 nt, Artificial Sequence
  Synthetic
aauuccacuuaggguucuuu

SEQ ID NO: 687961 - RNA, 21 nt, Artificial Sequence
  Synthetic
gaauuccacuuaggguucuuu

SEQ ID NO: 687962 - RNA, 22 nt, Artificial Sequence
  Synthetic
ugaauuccacuuaggguucuuu

SEQ ID NO: 687963 - RNA, 23 nt, Artificial Sequence
  Synthetic
cugaauuccacuuaggguucuuu

SEQ ID NO: 687964 - RNA, 24 nt, Artificial Sequence
  Synthetic
ccugaauuccacuuaggguucuuu

SEQ ID NO: 687965 - RNA, 18 nt, Artificial Sequence
  Synthetic
auaccacccguguucuuu

SEQ ID NO: 687966 - RNA, 19 nt, Artificial Sequence
  Synthetic
uauaccacccguguucuuu

SEQ ID NO: 687967 - RNA, 20 nt, Artificial Sequence
  Synthetic
auauaccacccguguucuuu

SEQ ID NO: 687968 - RNA, 21 nt, Artificial Sequence
  Synthetic
aauauaccacccguguucuuu

SEQ ID NO: 687969 - RNA, 22 nt, Artificial Sequence
  Synthetic
caauauaccacccguguucuuu

SEQ ID NO: 687970 - RNA, 23 nt, Artificial Sequence
  Synthetic
ucaauauaccacccguguucuuu

SEQ ID NO: 687971 - RNA, 24 nt, Artificial Sequence
  Synthetic
cucaauauaccacccguguucuuu

SEQ ID NO: 687972 - RNA, 18 nt, Artificial Sequence
  Synthetic
gauuggugcuuguucuuu

SEQ ID NO: 687973 - RNA, 19 nt, Artificial Sequence
  Synthetic
agauuggugcuuguucuuu

SEQ ID NO: 687974 - RNA, 20 nt, Artificial Sequence
  Synthetic
aagauuggugcuuguucuuu

SEQ ID NO: 687975 - RNA, 21 nt, Artificial Sequence
  Synthetic
gaagauuggugcuuguucuuu

SEQ ID NO: 687976 - RNA, 22 nt, Artificial Sequence
  Synthetic
ugaagauuggugcuuguucuuu

SEQ ID NO: 687977 - RNA, 23 nt, Artificial Sequence
  Synthetic
uugaagauuggugcuuguucuuu

SEQ ID NO: 687978 - RNA, 24 nt, Artificial Sequence
  Synthetic
uuugaagauuggugcuuguucuuu

SEQ ID NO: 687979 - RNA, 18 nt, Artificial Sequence
  Synthetic
uauuuagcugauuucuuu

SEQ ID NO: 687980 - RNA, 19 nt, Artificial Sequence
  Synthetic
uuauuuagcugauuucuuu

SEQ ID NO: 687981 - RNA, 20 nt, Artificial Sequence
  Synthetic
uuuauuuagcugauuucuuu

SEQ ID NO: 687982 - RNA, 21 nt, Artificial Sequence
  Synthetic
cuuuauuuagcugauuucuuu

SEQ ID NO: 687983 - RNA, 22 nt, Artificial Sequence
  Synthetic
ucuuuauuuagcugauuucuuu

SEQ ID NO: 687984 - RNA, 23 nt, Artificial Sequence
  Synthetic
uucuuuauuuagcugauuucuuu

SEQ ID NO: 687985 - RNA, 24 nt, Artificial Sequence
  Synthetic
uuucuuuauuuagcugauuucuuu

SEQ ID NO: 687986 - RNA, 18 nt, Artificial Sequence
  Synthetic
accauuuaguauuucuuu

SEQ ID NO: 687987 - RNA, 19 nt, Artificial Sequence
  Synthetic
gaccauuuaguauuucuuu

SEQ ID NO: 687988 - RNA, 20 nt, Artificial Sequence
  Synthetic
agaccauuuaguauuucuuu

SEQ ID NO: 687989 - RNA, 21 nt, Artificial Sequence
  Synthetic
gagaccauuuaguauuucuuu

SEQ ID NO: 687990 - RNA, 22 nt, Artificial Sequence
  Synthetic
agagaccauuuaguauuucuuu

SEQ ID NO: 687991 - RNA, 23 nt, Artificial Sequence
  Synthetic
uagagaccauuuaguauuucuuu

SEQ ID NO: 687992 - RNA, 24 nt, Artificial Sequence
  Synthetic
uuagagaccauuuaguauuucuuu

SEQ ID NO: 687993 - RNA, 18 nt, Artificial Sequence
  Synthetic
gcugggaaaacuuucuuu

SEQ ID NO: 687994 - RNA, 19 nt, Artificial Sequence
  Synthetic
agcugggaaaacuuucuuu

SEQ ID NO: 687995 - RNA, 20 nt, Artificial Sequence
  Synthetic
cagcugggaaaacuuucuuu

SEQ ID NO: 687996 - RNA, 21 nt, Artificial Sequence
  Synthetic
acagcugggaaaacuuucuuu

SEQ ID NO: 687997 - RNA, 22 nt, Artificial Sequence
  Synthetic
cacagcugggaaaacuuucuuu

SEQ ID NO: 687998 - RNA, 23 nt, Artificial Sequence
  Synthetic
acacagcugggaaaacuuucuuu

SEQ ID NO: 687999 - RNA, 24 nt, Artificial Sequence
  Synthetic
gacacagcugggaaaacuuucuuu

SEQ ID NO: 688000 - RNA, 18 nt, Artificial Sequence
  Synthetic
gaaaauuuaacuuucuuu

SEQ ID NO: 688001 - RNA, 19 nt, Artificial Sequence
  Synthetic
agaaaauuuaacuuucuuu

SEQ ID NO: 688002 - RNA, 20 nt, Artificial Sequence
  Synthetic
cagaaaauuuaacuuucuuu

SEQ ID NO: 688003 - RNA, 21 nt, Artificial Sequence
  Synthetic
acagaaaauuuaacuuucuuu

SEQ ID NO: 688004 - RNA, 22 nt, Artificial Sequence
  Synthetic
cacagaaaauuuaacuuucuuu

SEQ ID NO: 688005 - RNA, 23 nt, Artificial Sequence
  Synthetic
acacagaaaauuuaacuuucuuu

SEQ ID NO: 688006 - RNA, 24 nt, Artificial Sequence
  Synthetic
aacacagaaaauuuaacuuucuuu

SEQ ID NO: 688007 - RNA, 18 nt, Artificial Sequence
  Synthetic
gggcugcugccuuucuuu

SEQ ID NO: 688008 - RNA, 19 nt, Artificial Sequence
  Synthetic
ggggcugcugccuuucuuu

SEQ ID NO: 688009 - RNA, 20 nt, Artificial Sequence
  Synthetic
uggggcugcugccuuucuuu

SEQ ID NO: 688010 - RNA, 21 nt, Artificial Sequence
  Synthetic
cuggggcugcugccuuucuuu

SEQ ID NO: 688011 - RNA, 22 nt, Artificial Sequence
  Synthetic
acuggggcugcugccuuucuuu

SEQ ID NO: 688012 - RNA, 23 nt, Artificial Sequence
  Synthetic
gacuggggcugcugccuuucuuu

SEQ ID NO: 688013 - RNA, 24 nt, Artificial Sequence
  Synthetic
ugacuggggcugcugccuuucuuu

SEQ ID NO: 688014 - RNA, 18 nt, Artificial Sequence
  Synthetic
caacaggcaucuuucuuu

SEQ ID NO: 688015 - RNA, 19 nt, Artificial Sequence
  Synthetic
ccaacaggcaucuuucuuu

SEQ ID NO: 688016 - RNA, 20 nt, Artificial Sequence
  Synthetic
cccaacaggcaucuuucuuu

SEQ ID NO: 688017 - RNA, 21 nt, Artificial Sequence
  Synthetic
ccccaacaggcaucuuucuuu

SEQ ID NO: 688018 - RNA, 22 nt, Artificial Sequence
  Synthetic
cccccaacaggcaucuuucuuu

SEQ ID NO: 688019 - RNA, 23 nt, Artificial Sequence
  Synthetic
ucccccaacaggcaucuuucuuu

SEQ ID NO: 688020 - RNA, 24 nt, Artificial Sequence
  Synthetic
gucccccaacaggcaucuuucuuu

SEQ ID NO: 688021 - RNA, 18 nt, Artificial Sequence
  Synthetic
aguuuauguaguuucuuu

SEQ ID NO: 688022 - RNA, 19 nt, Artificial Sequence
  Synthetic
aaguuuauguaguuucuuu

SEQ ID NO: 688023 - RNA, 20 nt, Artificial Sequence
  Synthetic
uaaguuuauguaguuucuuu

SEQ ID NO: 688024 - RNA, 21 nt, Artificial Sequence
  Synthetic
auaaguuuauguaguuucuuu

SEQ ID NO: 688025 - RNA, 22 nt, Artificial Sequence
  Synthetic
uauaaguuuauguaguuucuuu

SEQ ID NO: 688026 - RNA, 23 nt, Artificial Sequence
  Synthetic
uuauaaguuuauguaguuucuuu

SEQ ID NO: 688027 - RNA, 24 nt, Artificial Sequence
  Synthetic
uuuauaaguuuauguaguuucuuu

SEQ ID NO: 688028 - RNA, 18 nt, Artificial Sequence
  Synthetic
gguaucagaauuuucuuu

SEQ ID NO: 688029 - RNA, 19 nt, Artificial Sequence
  Synthetic
agguaucagaauuuucuuu

SEQ ID NO: 688030 - RNA, 20 nt, Artificial Sequence
  Synthetic
uagguaucagaauuuucuuu

SEQ ID NO: 688031 - RNA, 21 nt, Artificial Sequence
  Synthetic
cuagguaucagaauuuucuuu

SEQ ID NO: 688032 - RNA, 22 nt, Artificial Sequence
  Synthetic
ccuagguaucagaauuuucuuu

SEQ ID NO: 688033 - RNA, 23 nt, Artificial Sequence
  Synthetic
uccuagguaucagaauuuucuuu

SEQ ID NO: 688034 - RNA, 24 nt, Artificial Sequence
  Synthetic
uuccuagguaucagaauuuucuuu

SEQ ID NO: 688035 - RNA, 18 nt, Artificial Sequence
  Synthetic
agaccauccauuuucuuu

SEQ ID NO: 688036 - RNA, 19 nt, Artificial Sequence
  Synthetic
aagaccauccauuuucuuu

SEQ ID NO: 688037 - RNA, 20 nt, Artificial Sequence
  Synthetic
aaagaccauccauuuucuuu

SEQ ID NO: 688038 - RNA, 21 nt, Artificial Sequence
  Synthetic
caaagaccauccauuuucuuu

SEQ ID NO: 688039 - RNA, 22 nt, Artificial Sequence
  Synthetic
acaaagaccauccauuuucuuu

SEQ ID NO: 688040 - RNA, 23 nt, Artificial Sequence
  Synthetic
aacaaagaccauccauuuucuuu

SEQ ID NO: 688041 - RNA, 24 nt, Artificial Sequence
  Synthetic
aaacaaagaccauccauuuucuuu

SEQ ID NO: 688042 - RNA, 18 nt, Artificial Sequence
  Synthetic
cauucuacuauuuucuuu

SEQ ID NO: 688043 - RNA, 19 nt, Artificial Sequence
  Synthetic
ccauucuacuauuuucuuu

SEQ ID NO: 688044 - RNA, 20 nt, Artificial Sequence
  Synthetic
cccauucuacuauuuucuuu

SEQ ID NO: 688045 - RNA, 21 nt, Artificial Sequence
  Synthetic
acccauucuacuauuuucuuu

SEQ ID NO: 688046 - RNA, 22 nt, Artificial Sequence
  Synthetic
uacccauucuacuauuuucuuu

SEQ ID NO: 688047 - RNA, 23 nt, Artificial Sequence
  Synthetic
uuacccauucuacuauuuucuuu

SEQ ID NO: 688048 - RNA, 24 nt, Artificial Sequence
  Synthetic
uuuacccauucuacuauuuucuuu

SEQ ID NO: 688049 - RNA, 18 nt, Artificial Sequence
  Synthetic
gaccugauauuuuucuuu

SEQ ID NO: 688050 - RNA, 19 nt, Artificial Sequence
  Synthetic
agaccugauauuuuucuuu

SEQ ID NO: 688051 - RNA, 20 nt, Artificial Sequence
  Synthetic
uagaccugauauuuuucuuu

SEQ ID NO: 688052 - RNA, 21 nt, Artificial Sequence
  Synthetic
cuagaccugauauuuuucuuu

SEQ ID NO: 688053 - RNA, 22 nt, Artificial Sequence
  Synthetic
acuagaccugauauuuuucuuu

SEQ ID NO: 688054 - RNA, 23 nt, Artificial Sequence
  Synthetic
cacuagaccugauauuuuucuuu

SEQ ID NO: 688055 - RNA, 24 nt, Artificial Sequence
  Synthetic
gcacuagaccugauauuuuucuuu

SEQ ID NO: 688056 - RNA, 18 nt, Artificial Sequence
  Synthetic
uuuuuuuuuuuuuucuuu

SEQ ID NO: 688057 - RNA, 19 nt, Artificial Sequence
  Synthetic
auuuuuuuuuuuuuucuuu

SEQ ID NO: 688058 - RNA, 20 nt, Artificial Sequence
  Synthetic
cauuuuuuuuuuuuuucuuu

SEQ ID NO: 688059 - RNA, 21 nt, Artificial Sequence
  Synthetic
acauuuuuuuuuuuuuucuuu

SEQ ID NO: 688060 - RNA, 22 nt, Artificial Sequence
  Synthetic
uacauuuuuuuuuuuuuucuuu

SEQ ID NO: 688061 - RNA, 23 nt, Artificial Sequence
  Synthetic
auacauuuuuuuuuuuuuucuuu

SEQ ID NO: 688062 - RNA, 24 nt, Artificial Sequence
  Synthetic
aauacauuuuuuuuuuuuuucuuu

SEQ ID NO: 688063 - RNA, 18 nt, Artificial Sequence
  Synthetic
cugaaauguuaaaaguuu

SEQ ID NO: 688064 - RNA, 19 nt, Artificial Sequence
  Synthetic
ucugaaauguuaaaaguuu

SEQ ID NO: 688065 - RNA, 20 nt, Artificial Sequence
  Synthetic
aucugaaauguuaaaaguuu

SEQ ID NO: 688066 - RNA, 21 nt, Artificial Sequence
  Synthetic
uaucugaaauguuaaaaguuu

SEQ ID NO: 688067 - RNA, 22 nt, Artificial Sequence
  Synthetic
guaucugaaauguuaaaaguuu

SEQ ID NO: 688068 - RNA, 23 nt, Artificial Sequence
  Synthetic
aguaucugaaauguuaaaaguuu

SEQ ID NO: 688069 - RNA, 24 nt, Artificial Sequence
  Synthetic
aaguaucugaaauguuaaaaguuu

SEQ ID NO: 688070 - RNA, 18 nt, Artificial Sequence
  Synthetic
auaucugaaacaaaguuu

SEQ ID NO: 688071 - RNA, 19 nt, Artificial Sequence
  Synthetic
aauaucugaaacaaaguuu

SEQ ID NO: 688072 - RNA, 20 nt, Artificial Sequence
  Synthetic
aaauaucugaaacaaaguuu

SEQ ID NO: 688073 - RNA, 21 nt, Artificial Sequence
  Synthetic
gaaauaucugaaacaaaguuu

SEQ ID NO: 688074 - RNA, 22 nt, Artificial Sequence
  Synthetic
ugaaauaucugaaacaaaguuu

SEQ ID NO: 688075 - RNA, 23 nt, Artificial Sequence
  Synthetic
uugaaauaucugaaacaaaguuu

SEQ ID NO: 688076 - RNA, 24 nt, Artificial Sequence
  Synthetic
auugaaauaucugaaacaaaguuu

SEQ ID NO: 688077 - RNA, 18 nt, Artificial Sequence
  Synthetic
ugaugcacaucaaaguuu

SEQ ID NO: 688078 - RNA, 19 nt, Artificial Sequence
  Synthetic
cugaugcacaucaaaguuu

SEQ ID NO: 688079 - RNA, 20 nt, Artificial Sequence
  Synthetic
ucugaugcacaucaaaguuu

SEQ ID NO: 688080 - RNA, 21 nt, Artificial Sequence
  Synthetic
uucugaugcacaucaaaguuu

SEQ ID NO: 688081 - RNA, 22 nt, Artificial Sequence
  Synthetic
auucugaugcacaucaaaguuu

SEQ ID NO: 688082 - RNA, 23 nt, Artificial Sequence
  Synthetic
gauucugaugcacaucaaaguuu

SEQ ID NO: 688083 - RNA, 24 nt, Artificial Sequence
  Synthetic
ugauucugaugcacaucaaaguuu

SEQ ID NO: 688084 - RNA, 18 nt, Artificial Sequence
  Synthetic
ggagaguguagaaaguuu

SEQ ID NO: 688085 - RNA, 19 nt, Artificial Sequence
  Synthetic
gggagaguguagaaaguuu

SEQ ID NO: 688086 - RNA, 20 nt, Artificial Sequence
  Synthetic
ugggagaguguagaaaguuu

SEQ ID NO: 688087 - RNA, 21 nt, Artificial Sequence
  Synthetic
uugggagaguguagaaaguuu

SEQ ID NO: 688088 - RNA, 22 nt, Artificial Sequence
  Synthetic
cuugggagaguguagaaaguuu

SEQ ID NO: 688089 - RNA, 23 nt, Artificial Sequence
  Synthetic
ucuugggagaguguagaaaguuu

SEQ ID NO: 688090 - RNA, 24 nt, Artificial Sequence
  Synthetic
cucuugggagaguguagaaaguuu

SEQ ID NO: 688091 - RNA, 18 nt, Artificial Sequence
  Synthetic
uuuucaacuauaaaguuu

SEQ ID NO: 688092 - RNA, 19 nt, Artificial Sequence
  Synthetic
uuuuucaacuauaaaguuu

SEQ ID NO: 688093 - RNA, 20 nt, Artificial Sequence
  Synthetic
uuuuuucaacuauaaaguuu

SEQ ID NO: 688094 - RNA, 21 nt, Artificial Sequence
  Synthetic
cuuuuuucaacuauaaaguuu

SEQ ID NO: 688095 - RNA, 22 nt, Artificial Sequence
  Synthetic
ucuuuuuucaacuauaaaguuu

SEQ ID NO: 688096 - RNA, 23 nt, Artificial Sequence
  Synthetic
uucuuuuuucaacuauaaaguuu

SEQ ID NO: 688097 - RNA, 24 nt, Artificial Sequence
  Synthetic
cuucuuuuuucaacuauaaaguuu

SEQ ID NO: 688098 - RNA, 18 nt, Artificial Sequence
  Synthetic
ccaguggagcuaaaguuu

SEQ ID NO: 688099 - RNA, 19 nt, Artificial Sequence
  Synthetic
uccaguggagcuaaaguuu

SEQ ID NO: 688100 - RNA, 20 nt, Artificial Sequence
  Synthetic
uuccaguggagcuaaaguuu

SEQ ID NO: 688101 - RNA, 21 nt, Artificial Sequence
  Synthetic
auuccaguggagcuaaaguuu

SEQ ID NO: 688102 - RNA, 22 nt, Artificial Sequence
  Synthetic
gauuccaguggagcuaaaguuu

SEQ ID NO: 688103 - RNA, 23 nt, Artificial Sequence
  Synthetic
agauuccaguggagcuaaaguuu

SEQ ID NO: 688104 - RNA, 24 nt, Artificial Sequence
  Synthetic
gagauuccaguggagcuaaaguuu

SEQ ID NO: 688105 - RNA, 18 nt, Artificial Sequence
  Synthetic
ugccguacauuaaaguuu

SEQ ID NO: 688106 - RNA, 19 nt, Artificial Sequence
  Synthetic
cugccguacauuaaaguuu

SEQ ID NO: 688107 - RNA, 20 nt, Artificial Sequence
  Synthetic
ccugccguacauuaaaguuu

SEQ ID NO: 688108 - RNA, 21 nt, Artificial Sequence
  Synthetic
accugccguacauuaaaguuu

SEQ ID NO: 688109 - RNA, 22 nt, Artificial Sequence
  Synthetic
gaccugccguacauuaaaguuu

SEQ ID NO: 688110 - RNA, 23 nt, Artificial Sequence
  Synthetic
ggaccugccguacauuaaaguuu

SEQ ID NO: 688111 - RNA, 24 nt, Artificial Sequence
  Synthetic
aggaccugccguacauuaaaguuu

SEQ ID NO: 688112 - RNA, 18 nt, Artificial Sequence
  Synthetic
uuuacauuuaacaaguuu

SEQ ID NO: 688113 - RNA, 19 nt, Artificial Sequence
  Synthetic
uuuuacauuuaacaaguuu

SEQ ID NO: 688114 - RNA, 20 nt, Artificial Sequence
  Synthetic
guuuuacauuuaacaaguuu

SEQ ID NO: 688115 - RNA, 21 nt, Artificial Sequence
  Synthetic
aguuuuacauuuaacaaguuu

SEQ ID NO: 688116 - RNA, 22 nt, Artificial Sequence
  Synthetic
aaguuuuacauuuaacaaguuu

SEQ ID NO: 688117 - RNA, 23 nt, Artificial Sequence
  Synthetic
gaaguuuuacauuuaacaaguuu

SEQ ID NO: 688118 - RNA, 24 nt, Artificial Sequence
  Synthetic
ugaaguuuuacauuuaacaaguuu

SEQ ID NO: 688119 - RNA, 18 nt, Artificial Sequence
  Synthetic
agaaugugcuucaaguuu

SEQ ID NO: 688120 - RNA, 19 nt, Artificial Sequence
  Synthetic
uagaaugugcuucaaguuu

SEQ ID NO: 688121 - RNA, 20 nt, Artificial Sequence
  Synthetic
uuagaaugugcuucaaguuu

SEQ ID NO: 688122 - RNA, 21 nt, Artificial Sequence
  Synthetic
auuagaaugugcuucaaguuu

SEQ ID NO: 688123 - RNA, 22 nt, Artificial Sequence
  Synthetic
aauuagaaugugcuucaaguuu

SEQ ID NO: 688124 - RNA, 23 nt, Artificial Sequence
  Synthetic
aaauuagaaugugcuucaaguuu

SEQ ID NO: 688125 - RNA, 24 nt, Artificial Sequence
  Synthetic
caaauuagaaugugcuucaaguuu

SEQ ID NO: 688126 - RNA, 18 nt, Artificial Sequence
  Synthetic
ggaaacucacagaaguuu

SEQ ID NO: 688127 - RNA, 19 nt, Artificial Sequence
  Synthetic
gggaaacucacagaaguuu

SEQ ID NO: 688128 - RNA, 20 nt, Artificial Sequence
  Synthetic
ggggaaacucacagaaguuu

SEQ ID NO: 688129 - RNA, 21 nt, Artificial Sequence
  Synthetic
gggggaaacucacagaaguuu

SEQ ID NO: 688130 - RNA, 22 nt, Artificial Sequence
  Synthetic
cgggggaaacucacagaaguuu

SEQ ID NO: 688131 - RNA, 23 nt, Artificial Sequence
  Synthetic
ccgggggaaacucacagaaguuu

SEQ ID NO: 688132 - RNA, 24 nt, Artificial Sequence
  Synthetic
cccgggggaaacucacagaaguuu

SEQ ID NO: 688133 - RNA, 18 nt, Artificial Sequence
  Synthetic
uuguucauuuagaaguuu

SEQ ID NO: 688134 - RNA, 19 nt, Artificial Sequence
  Synthetic
uuuguucauuuagaaguuu

SEQ ID NO: 688135 - RNA, 20 nt, Artificial Sequence
  Synthetic
uuuuguucauuuagaaguuu

SEQ ID NO: 688136 - RNA, 21 nt, Artificial Sequence
  Synthetic
uuuuuguucauuuagaaguuu

SEQ ID NO: 688137 - RNA, 22 nt, Artificial Sequence
  Synthetic
auuuuuguucauuuagaaguuu

SEQ ID NO: 688138 - RNA, 23 nt, Artificial Sequence
  Synthetic
cauuuuuguucauuuagaaguuu

SEQ ID NO: 688139 - RNA, 24 nt, Artificial Sequence
  Synthetic
gcauuuuuguucauuuagaaguuu

SEQ ID NO: 688140 - RNA, 18 nt, Artificial Sequence
  Synthetic
gaagugggaaggaaguuu

SEQ ID NO: 688141 - RNA, 19 nt, Artificial Sequence
  Synthetic
ugaagugggaaggaaguuu

SEQ ID NO: 688142 - RNA, 20 nt, Artificial Sequence
  Synthetic
cugaagugggaaggaaguuu

SEQ ID NO: 688143 - RNA, 21 nt, Artificial Sequence
  Synthetic
gcugaagugggaaggaaguuu

SEQ ID NO: 688144 - RNA, 22 nt, Artificial Sequence
  Synthetic
agcugaagugggaaggaaguuu

SEQ ID NO: 688145 - RNA, 23 nt, Artificial Sequence
  Synthetic
gagcugaagugggaaggaaguuu

SEQ ID NO: 688146 - RNA, 24 nt, Artificial Sequence
  Synthetic
ugagcugaagugggaaggaaguuu

SEQ ID NO: 688147 - RNA, 18 nt, Artificial Sequence
  Synthetic
aacuauucagugaaguuu

SEQ ID NO: 688148 - RNA, 19 nt, Artificial Sequence
  Synthetic
aaacuauucagugaaguuu

SEQ ID NO: 688149 - RNA, 20 nt, Artificial Sequence
  Synthetic
aaaacuauucagugaaguuu

SEQ ID NO: 688150 - RNA, 21 nt, Artificial Sequence
  Synthetic
uaaaacuauucagugaaguuu

SEQ ID NO: 688151 - RNA, 22 nt, Artificial Sequence
  Synthetic
uuaaaacuauucagugaaguuu

SEQ ID NO: 688152 - RNA, 23 nt, Artificial Sequence
  Synthetic
uuuaaaacuauucagugaaguuu

SEQ ID NO: 688153 - RNA, 24 nt, Artificial Sequence
  Synthetic
uuuuaaaacuauucagugaaguuu

SEQ ID NO: 688154 - RNA, 18 nt, Artificial Sequence
  Synthetic
auucaagaauugaaguuu

SEQ ID NO: 688155 - RNA, 19 nt, Artificial Sequence
  Synthetic
aauucaagaauugaaguuu

SEQ ID NO: 688156 - RNA, 20 nt, Artificial Sequence
  Synthetic
gaauucaagaauugaaguuu

SEQ ID NO: 688157 - RNA, 21 nt, Artificial Sequence
  Synthetic
agaauucaagaauugaaguuu

SEQ ID NO: 688158 - RNA, 22 nt, Artificial Sequence
  Synthetic
cagaauucaagaauugaaguuu

SEQ ID NO: 688159 - RNA, 23 nt, Artificial Sequence
  Synthetic
acagaauucaagaauugaaguuu

SEQ ID NO: 688160 - RNA, 24 nt, Artificial Sequence
  Synthetic
cacagaauucaagaauugaaguuu

SEQ ID NO: 688161 - RNA, 18 nt, Artificial Sequence
  Synthetic
aauuuaucaacuaaguuu

SEQ ID NO: 688162 - RNA, 19 nt, Artificial Sequence
  Synthetic
uaauuuaucaacuaaguuu

SEQ ID NO: 688163 - RNA, 20 nt, Artificial Sequence
  Synthetic
cuaauuuaucaacuaaguuu

SEQ ID NO: 688164 - RNA, 21 nt, Artificial Sequence
  Synthetic
gcuaauuuaucaacuaaguuu

SEQ ID NO: 688165 - RNA, 22 nt, Artificial Sequence
  Synthetic
ugcuaauuuaucaacuaaguuu

SEQ ID NO: 688166 - RNA, 23 nt, Artificial Sequence
  Synthetic
augcuaauuuaucaacuaaguuu

SEQ ID NO: 688167 - RNA, 24 nt, Artificial Sequence
  Synthetic
gaugcuaauuuaucaacuaaguuu

SEQ ID NO: 688168 - RNA, 18 nt, Artificial Sequence
  Synthetic
uuuuacaccuguaaguuu

SEQ ID NO: 688169 - RNA, 19 nt, Artificial Sequence
  Synthetic
auuuuacaccuguaaguuu

SEQ ID NO: 688170 - RNA, 20 nt, Artificial Sequence
  Synthetic
cauuuuacaccuguaaguuu

SEQ ID NO: 688171 - RNA, 21 nt, Artificial Sequence
  Synthetic
acauuuuacaccuguaaguuu

SEQ ID NO: 688172 - RNA, 22 nt, Artificial Sequence
  Synthetic
uacauuuuacaccuguaaguuu

SEQ ID NO: 688173 - RNA, 23 nt, Artificial Sequence
  Synthetic
auacauuuuacaccuguaaguuu

SEQ ID NO: 688174 - RNA, 24 nt, Artificial Sequence
  Synthetic
gauacauuuuacaccuguaaguuu

SEQ ID NO: 688175 - RNA, 18 nt, Artificial Sequence
  Synthetic
aaaaaaaauguuaaguuu

SEQ ID NO: 688176 - RNA, 19 nt, Artificial Sequence
  Synthetic
aaaaaaaaauguuaaguuu

SEQ ID NO: 688177 - RNA, 20 nt, Artificial Sequence
  Synthetic
gaaaaaaaaauguuaaguuu

SEQ ID NO: 688178 - RNA, 21 nt, Artificial Sequence
  Synthetic
agaaaaaaaaauguuaaguuu

SEQ ID NO: 688179 - RNA, 22 nt, Artificial Sequence
  Synthetic
aagaaaaaaaaauguuaaguuu

SEQ ID NO: 688180 - RNA, 23 nt, Artificial Sequence
  Synthetic
uaagaaaaaaaaauguuaaguuu

SEQ ID NO: 688181 - RNA, 24 nt, Artificial Sequence
  Synthetic
uuaagaaaaaaaaauguuaaguuu

SEQ ID NO: 688182 - RNA, 18 nt, Artificial Sequence
  Synthetic
uuucagcucuaacaguuu

SEQ ID NO: 688183 - RNA, 19 nt, Artificial Sequence
  Synthetic
uuuucagcucuaacaguuu

SEQ ID NO: 688184 - RNA, 20 nt, Artificial Sequence
  Synthetic
guuuucagcucuaacaguuu

SEQ ID NO: 688185 - RNA, 21 nt, Artificial Sequence
  Synthetic
uguuuucagcucuaacaguuu

SEQ ID NO: 688186 - RNA, 22 nt, Artificial Sequence
  Synthetic
auguuuucagcucuaacaguuu

SEQ ID NO: 688187 - RNA, 23 nt, Artificial Sequence
  Synthetic
gauguuuucagcucuaacaguuu

SEQ ID NO: 688188 - RNA, 24 nt, Artificial Sequence
  Synthetic
agauguuuucagcucuaacaguuu

SEQ ID NO: 688189 - RNA, 18 nt, Artificial Sequence
  Synthetic
augagagaaccacaguuu

SEQ ID NO: 688190 - RNA, 19 nt, Artificial Sequence
  Synthetic
gaugagagaaccacaguuu

SEQ ID NO: 688191 - RNA, 20 nt, Artificial Sequence
  Synthetic
agaugagagaaccacaguuu

SEQ ID NO: 688192 - RNA, 21 nt, Artificial Sequence
  Synthetic
cagaugagagaaccacaguuu

SEQ ID NO: 688193 - RNA, 22 nt, Artificial Sequence
  Synthetic
acagaugagagaaccacaguuu

SEQ ID NO: 688194 - RNA, 23 nt, Artificial Sequence
  Synthetic
gacagaugagagaaccacaguuu

SEQ ID NO: 688195 - RNA, 24 nt, Artificial Sequence
  Synthetic
ugacagaugagagaaccacaguuu

SEQ ID NO: 688196 - RNA, 18 nt, Artificial Sequence
  Synthetic
uugcgaugaauacaguuu

SEQ ID NO: 688197 - RNA, 19 nt, Artificial Sequence
  Synthetic
guugcgaugaauacaguuu

SEQ ID NO: 688198 - RNA, 20 nt, Artificial Sequence
  Synthetic
cguugcgaugaauacaguuu

SEQ ID NO: 688199 - RNA, 21 nt, Artificial Sequence
  Synthetic
ucguugcgaugaauacaguuu

SEQ ID NO: 688200 - RNA, 22 nt, Artificial Sequence
  Synthetic
uucguugcgaugaauacaguuu

SEQ ID NO: 688201 - RNA, 23 nt, Artificial Sequence
  Synthetic
guucguugcgaugaauacaguuu

SEQ ID NO: 688202 - RNA, 24 nt, Artificial Sequence
  Synthetic
aguucguugcgaugaauacaguuu

SEQ ID NO: 688203 - RNA, 18 nt, Artificial Sequence
  Synthetic
uaugucuuuguacaguuu

SEQ ID NO: 688204 - RNA, 19 nt, Artificial Sequence
  Synthetic
auaugucuuuguacaguuu

SEQ ID NO: 688205 - RNA, 20 nt, Artificial Sequence
  Synthetic
cauaugucuuuguacaguuu

SEQ ID NO: 688206 - RNA, 21 nt, Artificial Sequence
  Synthetic
ccauaugucuuuguacaguuu

SEQ ID NO: 688207 - RNA, 22 nt, Artificial Sequence
  Synthetic
accauaugucuuuguacaguuu

SEQ ID NO: 688208 - RNA, 23 nt, Artificial Sequence
  Synthetic
caccauaugucuuuguacaguuu

SEQ ID NO: 688209 - RNA, 24 nt, Artificial Sequence
  Synthetic
ccaccauaugucuuuguacaguuu

SEQ ID NO: 688210 - RNA, 18 nt, Artificial Sequence
  Synthetic
cacucagguauccaguuu

SEQ ID NO: 688211 - RNA, 19 nt, Artificial Sequence
  Synthetic
acacucagguauccaguuu

SEQ ID NO: 688212 - RNA, 20 nt, Artificial Sequence
  Synthetic
cacacucagguauccaguuu

SEQ ID NO: 688213 - RNA, 21 nt, Artificial Sequence
  Synthetic
acacacucagguauccaguuu

SEQ ID NO: 688214 - RNA, 22 nt, Artificial Sequence
  Synthetic
cacacacucagguauccaguuu

SEQ ID NO: 688215 - RNA, 23 nt, Artificial Sequence
  Synthetic
ucacacacucagguauccaguuu

SEQ ID NO: 688216 - RNA, 24 nt, Artificial Sequence
  Synthetic
cucacacacucagguauccaguuu

SEQ ID NO: 688217 - RNA, 18 nt, Artificial Sequence
  Synthetic
uucuuagguuuccaguuu

SEQ ID NO: 688218 - RNA, 19 nt, Artificial Sequence
  Synthetic
auucuuagguuuccaguuu

SEQ ID NO: 688219 - RNA, 20 nt, Artificial Sequence
  Synthetic
aauucuuagguuuccaguuu

SEQ ID NO: 688220 - RNA, 21 nt, Artificial Sequence
  Synthetic
uaauucuuagguuuccaguuu

SEQ ID NO: 688221 - RNA, 22 nt, Artificial Sequence
  Synthetic
guaauucuuagguuuccaguuu

SEQ ID NO: 688222 - RNA, 23 nt, Artificial Sequence
  Synthetic
gguaauucuuagguuuccaguuu

SEQ ID NO: 688223 - RNA, 24 nt, Artificial Sequence
  Synthetic
agguaauucuuagguuuccaguuu

SEQ ID NO: 688224 - RNA, 18 nt, Artificial Sequence
  Synthetic
uucacaguauagcaguuu

SEQ ID NO: 688225 - RNA, 19 nt, Artificial Sequence
  Synthetic
guucacaguauagcaguuu

SEQ ID NO: 688226 - RNA, 20 nt, Artificial Sequence
  Synthetic
uguucacaguauagcaguuu

SEQ ID NO: 688227 - RNA, 21 nt, Artificial Sequence
  Synthetic
auguucacaguauagcaguuu

SEQ ID NO: 688228 - RNA, 22 nt, Artificial Sequence
  Synthetic
uauguucacaguauagcaguuu

SEQ ID NO: 688229 - RNA, 23 nt, Artificial Sequence
  Synthetic
auauguucacaguauagcaguuu

SEQ ID NO: 688230 - RNA, 24 nt, Artificial Sequence
  Synthetic
aauauguucacaguauagcaguuu

SEQ ID NO: 688231 - RNA, 18 nt, Artificial Sequence
  Synthetic
cagucagauaggcaguuu

SEQ ID NO: 688232 - RNA, 19 nt, Artificial Sequence
  Synthetic
acagucagauaggcaguuu

SEQ ID NO: 688233 - RNA, 20 nt, Artificial Sequence
  Synthetic
cacagucagauaggcaguuu

SEQ ID NO: 688234 - RNA, 21 nt, Artificial Sequence
  Synthetic
acacagucagauaggcaguuu

SEQ ID NO: 688235 - RNA, 22 nt, Artificial Sequence
  Synthetic
aacacagucagauaggcaguuu

SEQ ID NO: 688236 - RNA, 23 nt, Artificial Sequence
  Synthetic
aaacacagucagauaggcaguuu

SEQ ID NO: 688237 - RNA, 24 nt, Artificial Sequence
  Synthetic
aaaacacagucagauaggcaguuu

SEQ ID NO: 688238 - RNA, 18 nt, Artificial Sequence
  Synthetic
ugaugugaggggcaguuu

SEQ ID NO: 688239 - RNA, 19 nt, Artificial Sequence
  Synthetic
augaugugaggggcaguuu

SEQ ID NO: 688240 - RNA, 20 nt, Artificial Sequence
  Synthetic
aaugaugugaggggcaguuu

SEQ ID NO: 688241 - RNA, 21 nt, Artificial Sequence
  Synthetic
caaugaugugaggggcaguuu

SEQ ID NO: 688242 - RNA, 22 nt, Artificial Sequence
  Synthetic
acaaugaugugaggggcaguuu

SEQ ID NO: 688243 - RNA, 23 nt, Artificial Sequence
  Synthetic
uacaaugaugugaggggcaguuu

SEQ ID NO: 688244 - RNA, 24 nt, Artificial Sequence
  Synthetic
cuacaaugaugugaggggcaguuu

SEQ ID NO: 688245 - RNA, 18 nt, Artificial Sequence
  Synthetic
uuuauuauuuggcaguuu

SEQ ID NO: 688246 - RNA, 19 nt, Artificial Sequence
  Synthetic
guuuauuauuuggcaguuu

SEQ ID NO: 688247 - RNA, 20 nt, Artificial Sequence
  Synthetic
uguuuauuauuuggcaguuu

SEQ ID NO: 688248 - RNA, 21 nt, Artificial Sequence
  Synthetic
auguuuauuauuuggcaguuu

SEQ ID NO: 688249 - RNA, 22 nt, Artificial Sequence
  Synthetic
aauguuuauuauuuggcaguuu

SEQ ID NO: 688250 - RNA, 23 nt, Artificial Sequence
  Synthetic
aaauguuuauuauuuggcaguuu

SEQ ID NO: 688251 - RNA, 24 nt, Artificial Sequence
  Synthetic
aaaauguuuauuauuuggcaguuu

SEQ ID NO: 688252 - RNA, 18 nt, Artificial Sequence
  Synthetic
ugucuuaaaaugcaguuu

SEQ ID NO: 688253 - RNA, 19 nt, Artificial Sequence
  Synthetic
augucuuaaaaugcaguuu

SEQ ID NO: 688254 - RNA, 20 nt, Artificial Sequence
  Synthetic
caugucuuaaaaugcaguuu

SEQ ID NO: 688255 - RNA, 21 nt, Artificial Sequence
  Synthetic
acaugucuuaaaaugcaguuu

SEQ ID NO: 688256 - RNA, 22 nt, Artificial Sequence
  Synthetic
aacaugucuuaaaaugcaguuu

SEQ ID NO: 688257 - RNA, 23 nt, Artificial Sequence
  Synthetic
uaacaugucuuaaaaugcaguuu

SEQ ID NO: 688258 - RNA, 24 nt, Artificial Sequence
  Synthetic
cuaacaugucuuaaaaugcaguuu

SEQ ID NO: 688259 - RNA, 18 nt, Artificial Sequence
  Synthetic
cuuauuuaaccucaguuu

SEQ ID NO: 688260 - RNA, 19 nt, Artificial Sequence
  Synthetic
ccuuauuuaaccucaguuu

SEQ ID NO: 688261 - RNA, 20 nt, Artificial Sequence
  Synthetic
uccuuauuuaaccucaguuu

SEQ ID NO: 688262 - RNA, 21 nt, Artificial Sequence
  Synthetic
uuccuuauuuaaccucaguuu

SEQ ID NO: 688263 - RNA, 22 nt, Artificial Sequence
  Synthetic
guuccuuauuuaaccucaguuu

SEQ ID NO: 688264 - RNA, 23 nt, Artificial Sequence
  Synthetic
uguuccuuauuuaaccucaguuu

SEQ ID NO: 688265 - RNA, 24 nt, Artificial Sequence
  Synthetic
uuguuccuuauuuaaccucaguuu

SEQ ID NO: 688266 - RNA, 18 nt, Artificial Sequence
  Synthetic
guuucuucugcucaguuu

SEQ ID NO: 688267 - RNA, 19 nt, Artificial Sequence
  Synthetic
uguuucuucugcucaguuu

SEQ ID NO: 688268 - RNA, 20 nt, Artificial Sequence
  Synthetic
guguuucuucugcucaguuu

SEQ ID NO: 688269 - RNA, 21 nt, Artificial Sequence
  Synthetic
uguguuucuucugcucaguuu

SEQ ID NO: 688270 - RNA, 22 nt, Artificial Sequence
  Synthetic
cuguguuucuucugcucaguuu

SEQ ID NO: 688271 - RNA, 23 nt, Artificial Sequence
  Synthetic
acuguguuucuucugcucaguuu

SEQ ID NO: 688272 - RNA, 24 nt, Artificial Sequence
  Synthetic
gacuguguuucuucugcucaguuu

SEQ ID NO: 688273 - RNA, 18 nt, Artificial Sequence
  Synthetic
gccuucagcucucaguuu

SEQ ID NO: 688274 - RNA, 19 nt, Artificial Sequence
  Synthetic
agccuucagcucucaguuu

SEQ ID NO: 688275 - RNA, 20 nt, Artificial Sequence
  Synthetic
cagccuucagcucucaguuu

SEQ ID NO: 688276 - RNA, 21 nt, Artificial Sequence
  Synthetic
acagccuucagcucucaguuu

SEQ ID NO: 688277 - RNA, 22 nt, Artificial Sequence
  Synthetic
gacagccuucagcucucaguuu

SEQ ID NO: 688278 - RNA, 23 nt, Artificial Sequence
  Synthetic
agacagccuucagcucucaguuu

SEQ ID NO: 688279 - RNA, 24 nt, Artificial Sequence
  Synthetic
cagacagccuucagcucucaguuu

SEQ ID NO: 688280 - RNA, 18 nt, Artificial Sequence
  Synthetic
auucaggccagucaguuu

SEQ ID NO: 688281 - RNA, 19 nt, Artificial Sequence
  Synthetic
aauucaggccagucaguuu

SEQ ID NO: 688282 - RNA, 20 nt, Artificial Sequence
  Synthetic
uaauucaggccagucaguuu

SEQ ID NO: 688283 - RNA, 21 nt, Artificial Sequence
  Synthetic
cuaauucaggccagucaguuu

SEQ ID NO: 688284 - RNA, 22 nt, Artificial Sequence
  Synthetic
ccuaauucaggccagucaguuu

SEQ ID NO: 688285 - RNA, 23 nt, Artificial Sequence
  Synthetic
accuaauucaggccagucaguuu

SEQ ID NO: 688286 - RNA, 24 nt, Artificial Sequence
  Synthetic
gaccuaauucaggccagucaguuu

SEQ ID NO: 688287 - RNA, 18 nt, Artificial Sequence
  Synthetic
aaaauagaacgucaguuu

SEQ ID NO: 688288 - RNA, 19 nt, Artificial Sequence
  Synthetic
gaaaauagaacgucaguuu

SEQ ID NO: 688289 - RNA, 20 nt, Artificial Sequence
  Synthetic
ugaaaauagaacgucaguuu

SEQ ID NO: 688290 - RNA, 21 nt, Artificial Sequence
  Synthetic
uugaaaauagaacgucaguuu

SEQ ID NO: 688291 - RNA, 22 nt, Artificial Sequence
  Synthetic
uuugaaaauagaacgucaguuu

SEQ ID NO: 688292 - RNA, 23 nt, Artificial Sequence
  Synthetic
uuuugaaaauagaacgucaguuu

SEQ ID NO: 688293 - RNA, 24 nt, Artificial Sequence
  Synthetic
guuuugaaaauagaacgucaguuu

SEQ ID NO: 688294 - RNA, 18 nt, Artificial Sequence
  Synthetic
uuuaagaacggucaguuu

SEQ ID NO: 688295 - RNA, 19 nt, Artificial Sequence
  Synthetic
cuuuaagaacggucaguuu

SEQ ID NO: 688296 - RNA, 20 nt, Artificial Sequence
  Synthetic
ucuuuaagaacggucaguuu

SEQ ID NO: 688297 - RNA, 21 nt, Artificial Sequence
  Synthetic
aucuuuaagaacggucaguuu

SEQ ID NO: 688298 - RNA, 22 nt, Artificial Sequence
  Synthetic
uaucuuuaagaacggucaguuu

SEQ ID NO: 688299 - RNA, 23 nt, Artificial Sequence
  Synthetic
uuaucuuuaagaacggucaguuu

SEQ ID NO: 688300 - RNA, 24 nt, Artificial Sequence
  Synthetic
guuaucuuuaagaacggucaguuu

SEQ ID NO: 688301 - RNA, 18 nt, Artificial Sequence
  Synthetic
ggccagagcugucaguuu

SEQ ID NO: 688302 - RNA, 19 nt, Artificial Sequence
  Synthetic
aggccagagcugucaguuu

SEQ ID NO: 688303 - RNA, 20 nt, Artificial Sequence
  Synthetic
gaggccagagcugucaguuu

SEQ ID NO: 688304 - RNA, 21 nt, Artificial Sequence
  Synthetic
agaggccagagcugucaguuu

SEQ ID NO: 688305 - RNA, 22 nt, Artificial Sequence
  Synthetic
gagaggccagagcugucaguuu

SEQ ID NO: 688306 - RNA, 23 nt, Artificial Sequence
  Synthetic
ugagaggccagagcugucaguuu

SEQ ID NO: 688307 - RNA, 24 nt, Artificial Sequence
  Synthetic
gugagaggccagagcugucaguuu

SEQ ID NO: 688308 - RNA, 18 nt, Artificial Sequence
  Synthetic
ggcuaaaacauucaguuu

SEQ ID NO: 688309 - RNA, 19 nt, Artificial Sequence
  Synthetic
aggcuaaaacauucaguuu

SEQ ID NO: 688310 - RNA, 20 nt, Artificial Sequence
  Synthetic
gaggcuaaaacauucaguuu

SEQ ID NO: 688311 - RNA, 21 nt, Artificial Sequence
  Synthetic
ugaggcuaaaacauucaguuu

SEQ ID NO: 688312 - RNA, 22 nt, Artificial Sequence
  Synthetic
augaggcuaaaacauucaguuu

SEQ ID NO: 688313 - RNA, 23 nt, Artificial Sequence
  Synthetic
gaugaggcuaaaacauucaguuu

SEQ ID NO: 688314 - RNA, 24 nt, Artificial Sequence
  Synthetic
ggaugaggcuaaaacauucaguuu

SEQ ID NO: 688315 - RNA, 18 nt, Artificial Sequence
  Synthetic
ugacacuuguuucaguuu

SEQ ID NO: 688316 - RNA, 19 nt, Artificial Sequence
  Synthetic
cugacacuuguuucaguuu

SEQ ID NO: 688317 - RNA, 20 nt, Artificial Sequence
  Synthetic
ucugacacuuguuucaguuu

SEQ ID NO: 688318 - RNA, 21 nt, Artificial Sequence
  Synthetic
uucugacacuuguuucaguuu

SEQ ID NO: 688319 - RNA, 22 nt, Artificial Sequence
  Synthetic
cuucugacacuuguuucaguuu

SEQ ID NO: 688320 - RNA, 23 nt, Artificial Sequence
  Synthetic
ccuucugacacuuguuucaguuu

SEQ ID NO: 688321 - RNA, 24 nt, Artificial Sequence
  Synthetic
uccuucugacacuuguuucaguuu

SEQ ID NO: 688322 - RNA, 18 nt, Artificial Sequence
  Synthetic
cagaagguaaaagaguuu

SEQ ID NO: 688323 - RNA, 19 nt, Artificial Sequence
  Synthetic
ucagaagguaaaagaguuu

SEQ ID NO: 688324 - RNA, 20 nt, Artificial Sequence
  Synthetic
uucagaagguaaaagaguuu

SEQ ID NO: 688325 - RNA, 21 nt, Artificial Sequence
  Synthetic
auucagaagguaaaagaguuu

SEQ ID NO: 688326 - RNA, 22 nt, Artificial Sequence
  Synthetic
aauucagaagguaaaagaguuu

SEQ ID NO: 688327 - RNA, 23 nt, Artificial Sequence
  Synthetic
gaauucagaagguaaaagaguuu

SEQ ID NO: 688328 - RNA, 24 nt, Artificial Sequence
  Synthetic
agaauucagaagguaaaagaguuu

SEQ ID NO: 688329 - RNA, 18 nt, Artificial Sequence
  Synthetic
auaaaauaaagagaguuu

SEQ ID NO: 688330 - RNA, 19 nt, Artificial Sequence
  Synthetic
gauaaaauaaagagaguuu

SEQ ID NO: 688331 - RNA, 20 nt, Artificial Sequence
  Synthetic
ugauaaaauaaagagaguuu

SEQ ID NO: 688332 - RNA, 21 nt, Artificial Sequence
  Synthetic
uugauaaaauaaagagaguuu

SEQ ID NO: 688333 - RNA, 22 nt, Artificial Sequence
  Synthetic
auugauaaaauaaagagaguuu

SEQ ID NO: 688334 - RNA, 23 nt, Artificial Sequence
  Synthetic
aauugauaaaauaaagagaguuu

SEQ ID NO: 688335 - RNA, 24 nt, Artificial Sequence
  Synthetic
uaauugauaaaauaaagagaguuu

SEQ ID NO: 688336 - RNA, 18 nt, Artificial Sequence
  Synthetic
cuuauuugaggagaguuu

SEQ ID NO: 688337 - RNA, 19 nt, Artificial Sequence
  Synthetic
gcuuauuugaggagaguuu

SEQ ID NO: 688338 - RNA, 20 nt, Artificial Sequence
  Synthetic
agcuuauuugaggagaguuu

SEQ ID NO: 688339 - RNA, 21 nt, Artificial Sequence
  Synthetic
cagcuuauuugaggagaguuu

SEQ ID NO: 688340 - RNA, 22 nt, Artificial Sequence
  Synthetic
acagcuuauuugaggagaguuu

SEQ ID NO: 688341 - RNA, 23 nt, Artificial Sequence
  Synthetic
aacagcuuauuugaggagaguuu

SEQ ID NO: 688342 - RNA, 24 nt, Artificial Sequence
  Synthetic
caacagcuuauuugaggagaguuu

SEQ ID NO: 688343 - RNA, 18 nt, Artificial Sequence
  Synthetic
gcauucaaaugagaguuu

SEQ ID NO: 688344 - RNA, 19 nt, Artificial Sequence
  Synthetic
agcauucaaaugagaguuu

SEQ ID NO: 688345 - RNA, 20 nt, Artificial Sequence
  Synthetic
uagcauucaaaugagaguuu

SEQ ID NO: 688346 - RNA, 21 nt, Artificial Sequence
  Synthetic
cuagcauucaaaugagaguuu

SEQ ID NO: 688347 - RNA, 22 nt, Artificial Sequence
  Synthetic
acuagcauucaaaugagaguuu

SEQ ID NO: 688348 - RNA, 23 nt, Artificial Sequence
  Synthetic
gacuagcauucaaaugagaguuu

SEQ ID NO: 688349 - RNA, 24 nt, Artificial Sequence
  Synthetic
agacuagcauucaaaugagaguuu

SEQ ID NO: 688350 - RNA, 18 nt, Artificial Sequence
  Synthetic
aaacauaggcuagaguuu

SEQ ID NO: 688351 - RNA, 19 nt, Artificial Sequence
  Synthetic
aaaacauaggcuagaguuu

SEQ ID NO: 688352 - RNA, 20 nt, Artificial Sequence
  Synthetic
aaaaacauaggcuagaguuu

SEQ ID NO: 688353 - RNA, 21 nt, Artificial Sequence
  Synthetic
aaaaaacauaggcuagaguuu

SEQ ID NO: 688354 - RNA, 22 nt, Artificial Sequence
  Synthetic
aaaaaaacauaggcuagaguuu

SEQ ID NO: 688355 - RNA, 23 nt, Artificial Sequence
  Synthetic
aaaaaaaacauaggcuagaguuu

SEQ ID NO: 688356 - RNA, 24 nt, Artificial Sequence
  Synthetic
gaaaaaaaacauaggcuagaguuu

SEQ ID NO: 688357 - RNA, 18 nt, Artificial Sequence
  Synthetic
uuaauuucuguagaguuu

SEQ ID NO: 688358 - RNA, 19 nt, Artificial Sequence
  Synthetic
guuaauuucuguagaguuu

SEQ ID NO: 688359 - RNA, 20 nt, Artificial Sequence
  Synthetic
uguuaauuucuguagaguuu

SEQ ID NO: 688360 - RNA, 21 nt, Artificial Sequence
  Synthetic
uuguuaauuucuguagaguuu

SEQ ID NO: 688361 - RNA, 22 nt, Artificial Sequence
  Synthetic
uuuguuaauuucuguagaguuu

SEQ ID NO: 688362 - RNA, 23 nt, Artificial Sequence
  Synthetic
cuuuguuaauuucuguagaguuu

SEQ ID NO: 688363 - RNA, 24 nt, Artificial Sequence
  Synthetic
ucuuuguuaauuucuguagaguuu

SEQ ID NO: 688364 - RNA, 18 nt, Artificial Sequence
  Synthetic
acagcaacuuuagaguuu

SEQ ID NO: 688365 - RNA, 19 nt, Artificial Sequence
  Synthetic
gacagcaacuuuagaguuu

SEQ ID NO: 688366 - RNA, 20 nt, Artificial Sequence
  Synthetic
agacagcaacuuuagaguuu

SEQ ID NO: 688367 - RNA, 21 nt, Artificial Sequence
  Synthetic
cagacagcaacuuuagaguuu

SEQ ID NO: 688368 - RNA, 22 nt, Artificial Sequence
  Synthetic
acagacagcaacuuuagaguuu

SEQ ID NO: 688369 - RNA, 23 nt, Artificial Sequence
  Synthetic
gacagacagcaacuuuagaguuu

SEQ ID NO: 688370 - RNA, 24 nt, Artificial Sequence
  Synthetic
ggacagacagcaacuuuagaguuu

SEQ ID NO: 688371 - RNA, 18 nt, Artificial Sequence
  Synthetic
cgaggaaaccacgaguuu

SEQ ID NO: 688372 - RNA, 19 nt, Artificial Sequence
  Synthetic
ucgaggaaaccacgaguuu

SEQ ID NO: 688373 - RNA, 20 nt, Artificial Sequence
  Synthetic
aucgaggaaaccacgaguuu

SEQ ID NO: 688374 - RNA, 21 nt, Artificial Sequence
  Synthetic
uaucgaggaaaccacgaguuu

SEQ ID NO: 688375 - RNA, 22 nt, Artificial Sequence
  Synthetic
cuaucgaggaaaccacgaguuu

SEQ ID NO: 688376 - RNA, 23 nt, Artificial Sequence
  Synthetic
ccuaucgaggaaaccacgaguuu

SEQ ID NO: 688377 - RNA, 24 nt, Artificial Sequence
  Synthetic
cccuaucgaggaaaccacgaguuu

SEQ ID NO: 688378 - RNA, 18 nt, Artificial Sequence
  Synthetic
aaacaguuaaaggaguuu

SEQ ID NO: 688379 - RNA, 19 nt, Artificial Sequence
  Synthetic
aaaacaguuaaaggaguuu

SEQ ID NO: 688380 - RNA, 20 nt, Artificial Sequence
  Synthetic
aaaaacaguuaaaggaguuu

SEQ ID NO: 688381 - RNA, 21 nt, Artificial Sequence
  Synthetic
aaaaaacaguuaaaggaguuu

SEQ ID NO: 688382 - RNA, 22 nt, Artificial Sequence
  Synthetic
aaaaaaacaguuaaaggaguuu

SEQ ID NO: 688383 - RNA, 23 nt, Artificial Sequence
  Synthetic
uaaaaaaacaguuaaaggaguuu

SEQ ID NO: 688384 - RNA, 24 nt, Artificial Sequence
  Synthetic
auaaaaaaacaguuaaaggaguuu

SEQ ID NO: 688385 - RNA, 18 nt, Artificial Sequence
  Synthetic
acugccccuaaggaguuu

SEQ ID NO: 688386 - RNA, 19 nt, Artificial Sequence
  Synthetic
cacugccccuaaggaguuu

SEQ ID NO: 688387 - RNA, 20 nt, Artificial Sequence
  Synthetic
acacugccccuaaggaguuu

SEQ ID NO: 688388 - RNA, 21 nt, Artificial Sequence
  Synthetic
aacacugccccuaaggaguuu

SEQ ID NO: 688389 - RNA, 22 nt, Artificial Sequence
  Synthetic
caacacugccccuaaggaguuu

SEQ ID NO: 688390 - RNA, 23 nt, Artificial Sequence
  Synthetic
acaacacugccccuaaggaguuu

SEQ ID NO: 688391 - RNA, 24 nt, Artificial Sequence
  Synthetic
gacaacacugccccuaaggaguuu

SEQ ID NO: 688392 - RNA, 18 nt, Artificial Sequence
  Synthetic
acccaucuuagggaguuu

SEQ ID NO: 688393 - RNA, 19 nt, Artificial Sequence
  Synthetic
aacccaucuuagggaguuu

SEQ ID NO: 688394 - RNA, 20 nt, Artificial Sequence
  Synthetic
caacccaucuuagggaguuu

SEQ ID NO: 688395 - RNA, 21 nt, Artificial Sequence
  Synthetic
ccaacccaucuuagggaguuu

SEQ ID NO: 688396 - RNA, 22 nt, Artificial Sequence
  Synthetic
uccaacccaucuuagggaguuu

SEQ ID NO: 688397 - RNA, 23 nt, Artificial Sequence
  Synthetic
guccaacccaucuuagggaguuu

SEQ ID NO: 688398 - RNA, 24 nt, Artificial Sequence
  Synthetic
aguccaacccaucuuagggaguuu

SEQ ID NO: 688399 - RNA, 18 nt, Artificial Sequence
  Synthetic
aucuuccuaaaauaguuu

SEQ ID NO: 688400 - RNA, 19 nt, Artificial Sequence
  Synthetic
uaucuuccuaaaauaguuu

SEQ ID NO: 688401 - RNA, 20 nt, Artificial Sequence
  Synthetic
uuaucuuccuaaaauaguuu

SEQ ID NO: 688402 - RNA, 21 nt, Artificial Sequence
  Synthetic
uuuaucuuccuaaaauaguuu

SEQ ID NO: 688403 - RNA, 22 nt, Artificial Sequence
  Synthetic
auuuaucuuccuaaaauaguuu

SEQ ID NO: 688404 - RNA, 23 nt, Artificial Sequence
  Synthetic
gauuuaucuuccuaaaauaguuu

SEQ ID NO: 688405 - RNA, 24 nt, Artificial Sequence
  Synthetic
agauuuaucuuccuaaaauaguuu

SEQ ID NO: 688406 - RNA, 18 nt, Artificial Sequence
  Synthetic
uuaaaaccagaauaguuu

SEQ ID NO: 688407 - RNA, 19 nt, Artificial Sequence
  Synthetic
guuaaaaccagaauaguuu

SEQ ID NO: 688408 - RNA, 20 nt, Artificial Sequence
  Synthetic
uguuaaaaccagaauaguuu

SEQ ID NO: 688409 - RNA, 21 nt, Artificial Sequence
  Synthetic
auguuaaaaccagaauaguuu

SEQ ID NO: 688410 - RNA, 22 nt, Artificial Sequence
  Synthetic
gauguuaaaaccagaauaguuu

SEQ ID NO: 688411 - RNA, 23 nt, Artificial Sequence
  Synthetic
cgauguuaaaaccagaauaguuu

SEQ ID NO: 688412 - RNA, 24 nt, Artificial Sequence
  Synthetic
ucgauguuaaaaccagaauaguuu

SEQ ID NO: 688413 - RNA, 18 nt, Artificial Sequence
  Synthetic
uauuguuuagaauaguuu

SEQ ID NO: 688414 - RNA, 19 nt, Artificial Sequence
  Synthetic
cuauuguuuagaauaguuu

SEQ ID NO: 688415 - RNA, 20 nt, Artificial Sequence
  Synthetic
ccuauuguuuagaauaguuu

SEQ ID NO: 688416 - RNA, 21 nt, Artificial Sequence
  Synthetic
uccuauuguuuagaauaguuu

SEQ ID NO: 688417 - RNA, 22 nt, Artificial Sequence
  Synthetic
uuccuauuguuuagaauaguuu

SEQ ID NO: 688418 - RNA, 23 nt, Artificial Sequence
  Synthetic
uuuccuauuguuuagaauaguuu

SEQ ID NO: 688419 - RNA, 24 nt, Artificial Sequence
  Synthetic
uuuuccuauuguuuagaauaguuu

SEQ ID NO: 688420 - RNA, 21 nt, Artificial Sequence
  Synthetic
uucuauugauuggaauaguuu

SEQ ID NO: 688421 - RNA, 22 nt, Artificial Sequence
  Synthetic
uuucuauugauuggaauaguuu

SEQ ID NO: 688422 - RNA, 23 nt, Artificial Sequence
  Synthetic
uuuucuauugauuggaauaguuu

SEQ ID NO: 688423 - RNA, 24 nt, Artificial Sequence
  Synthetic
uuuuucuauugauuggaauaguuu

SEQ ID NO: 688424 - RNA, 18 nt, Artificial Sequence
  Synthetic
ugaaaggggacauaguuu

SEQ ID NO: 688425 - RNA, 19 nt, Artificial Sequence
  Synthetic
gugaaaggggacauaguuu

SEQ ID NO: 688426 - RNA, 20 nt, Artificial Sequence
  Synthetic
ugugaaaggggacauaguuu

SEQ ID NO: 688427 - RNA, 21 nt, Artificial Sequence
  Synthetic
cugugaaaggggacauaguuu

SEQ ID NO: 688428 - RNA, 22 nt, Artificial Sequence
  Synthetic
acugugaaaggggacauaguuu

SEQ ID NO: 688429 - RNA, 23 nt, Artificial Sequence
  Synthetic
uacugugaaaggggacauaguuu

SEQ ID NO: 688430 - RNA, 24 nt, Artificial Sequence
  Synthetic
uuacugugaaaggggacauaguuu

SEQ ID NO: 688431 - RNA, 18 nt, Artificial Sequence
  Synthetic
uauuauuaaauauaguuu

SEQ ID NO: 688432 - RNA, 19 nt, Artificial Sequence
  Synthetic
uuauuauuaaauauaguuu

SEQ ID NO: 688433 - RNA, 20 nt, Artificial Sequence
  Synthetic
cuuauuauuaaauauaguuu

SEQ ID NO: 688434 - RNA, 21 nt, Artificial Sequence
  Synthetic
gcuuauuauuaaauauaguuu

SEQ ID NO: 688435 - RNA, 22 nt, Artificial Sequence
  Synthetic
ggcuuauuauuaaauauaguuu

SEQ ID NO: 688436 - RNA, 23 nt, Artificial Sequence
  Synthetic
uggcuuauuauuaaauauaguuu

SEQ ID NO: 688437 - RNA, 24 nt, Artificial Sequence
  Synthetic
cuggcuuauuauuaaauauaguuu

SEQ ID NO: 688438 - RNA, 18 nt, Artificial Sequence
  Synthetic
aucaguucuauauaguuu

SEQ ID NO: 688439 - RNA, 19 nt, Artificial Sequence
  Synthetic
gaucaguucuauauaguuu

SEQ ID NO: 688440 - RNA, 20 nt, Artificial Sequence
  Synthetic
ggaucaguucuauauaguuu

SEQ ID NO: 688441 - RNA, 21 nt, Artificial Sequence
  Synthetic
uggaucaguucuauauaguuu

SEQ ID NO: 688442 - RNA, 22 nt, Artificial Sequence
  Synthetic
uuggaucaguucuauauaguuu

SEQ ID NO: 688443 - RNA, 23 nt, Artificial Sequence
  Synthetic
auuggaucaguucuauauaguuu

SEQ ID NO: 688444 - RNA, 24 nt, Artificial Sequence
  Synthetic
uauuggaucaguucuauauaguuu

SEQ ID NO: 688445 - RNA, 18 nt, Artificial Sequence
  Synthetic
uugauuaucuuauaguuu

SEQ ID NO: 688446 - RNA, 19 nt, Artificial Sequence
  Synthetic
auugauuaucuuauaguuu

SEQ ID NO: 688447 - RNA, 20 nt, Artificial Sequence
  Synthetic
aauugauuaucuuauaguuu

SEQ ID NO: 688448 - RNA, 21 nt, Artificial Sequence
  Synthetic
aaauugauuaucuuauaguuu

SEQ ID NO: 688449 - RNA, 22 nt, Artificial Sequence
  Synthetic
caaauugauuaucuuauaguuu

SEQ ID NO: 688450 - RNA, 23 nt, Artificial Sequence
  Synthetic
acaaauugauuaucuuauaguuu

SEQ ID NO: 688451 - RNA, 24 nt, Artificial Sequence
  Synthetic
cacaaauugauuaucuuauaguuu

SEQ ID NO: 688452 - RNA, 18 nt, Artificial Sequence
  Synthetic
uuuacacuaaccuaguuu

SEQ ID NO: 688453 - RNA, 19 nt, Artificial Sequence
  Synthetic
auuuacacuaaccuaguuu

SEQ ID NO: 688454 - RNA, 20 nt, Artificial Sequence
  Synthetic
cauuuacacuaaccuaguuu

SEQ ID NO: 688455 - RNA, 21 nt, Artificial Sequence
  Synthetic
ccauuuacacuaaccuaguuu

SEQ ID NO: 688456 - RNA, 22 nt, Artificial Sequence
  Synthetic
gccauuuacacuaaccuaguuu

SEQ ID NO: 688457 - RNA, 23 nt, Artificial Sequence
  Synthetic
ugccauuuacacuaaccuaguuu

SEQ ID NO: 688458 - RNA, 24 nt, Artificial Sequence
  Synthetic
gugccauuuacacuaaccuaguuu

SEQ ID NO: 688459 - RNA, 18 nt, Artificial Sequence
  Synthetic
cuuuccaugugcuaguuu

SEQ ID NO: 688460 - RNA, 19 nt, Artificial Sequence
  Synthetic
ucuuuccaugugcuaguuu

SEQ ID NO: 688461 - RNA, 20 nt, Artificial Sequence
  Synthetic
uucuuuccaugugcuaguuu

SEQ ID NO: 688462 - RNA, 21 nt, Artificial Sequence
  Synthetic
cuucuuuccaugugcuaguuu

SEQ ID NO: 688463 - RNA, 22 nt, Artificial Sequence
  Synthetic
ucuucuuuccaugugcuaguuu

SEQ ID NO: 688464 - RNA, 23 nt, Artificial Sequence
  Synthetic
uucuucuuuccaugugcuaguuu

SEQ ID NO: 688465 - RNA, 24 nt, Artificial Sequence
  Synthetic
auucuucuuuccaugugcuaguuu

SEQ ID NO: 688466 - RNA, 18 nt, Artificial Sequence
  Synthetic
acugcaaucaucuaguuu

SEQ ID NO: 688467 - RNA, 19 nt, Artificial Sequence
  Synthetic
uacugcaaucaucuaguuu

SEQ ID NO: 688468 - RNA, 20 nt, Artificial Sequence
  Synthetic
uuacugcaaucaucuaguuu

SEQ ID NO: 688469 - RNA, 21 nt, Artificial Sequence
  Synthetic
auuacugcaaucaucuaguuu

SEQ ID NO: 688470 - RNA, 22 nt, Artificial Sequence
  Synthetic
cauuacugcaaucaucuaguuu

SEQ ID NO: 688471 - RNA, 23 nt, Artificial Sequence
  Synthetic
acauuacugcaaucaucuaguuu

SEQ ID NO: 688472 - RNA, 24 nt, Artificial Sequence
  Synthetic
cacauuacugcaaucaucuaguuu

SEQ ID NO: 688473 - RNA, 18 nt, Artificial Sequence
  Synthetic
uacagccaacaguaguuu

SEQ ID NO: 688474 - RNA, 19 nt, Artificial Sequence
  Synthetic
uuacagccaacaguaguuu

SEQ ID NO: 688475 - RNA, 20 nt, Artificial Sequence
  Synthetic
auuacagccaacaguaguuu

SEQ ID NO: 688476 - RNA, 21 nt, Artificial Sequence
  Synthetic
uauuacagccaacaguaguuu

SEQ ID NO: 688477 - RNA, 22 nt, Artificial Sequence
  Synthetic
uuauuacagccaacaguaguuu

SEQ ID NO: 688478 - RNA, 23 nt, Artificial Sequence
  Synthetic
auuauuacagccaacaguaguuu

SEQ ID NO: 688479 - RNA, 24 nt, Artificial Sequence
  Synthetic
cauuauuacagccaacaguaguuu

SEQ ID NO: 688480 - RNA, 18 nt, Artificial Sequence
  Synthetic
guagcuuuguaguaguuu

SEQ ID NO: 688481 - RNA, 19 nt, Artificial Sequence
  Synthetic
uguagcuuuguaguaguuu

SEQ ID NO: 688482 - RNA, 20 nt, Artificial Sequence
  Synthetic
uuguagcuuuguaguaguuu

SEQ ID NO: 688483 - RNA, 21 nt, Artificial Sequence
  Synthetic
auuguagcuuuguaguaguuu

SEQ ID NO: 688484 - RNA, 22 nt, Artificial Sequence
  Synthetic
aauuguagcuuuguaguaguuu

SEQ ID NO: 688485 - RNA, 23 nt, Artificial Sequence
  Synthetic
uaauuguagcuuuguaguaguuu

SEQ ID NO: 688486 - RNA, 24 nt, Artificial Sequence
  Synthetic
auaauuguagcuuuguaguaguuu

SEQ ID NO: 688487 - RNA, 18 nt, Artificial Sequence
  Synthetic
cugucauaguuguaguuu

SEQ ID NO: 688488 - RNA, 19 nt, Artificial Sequence
  Synthetic
ccugucauaguuguaguuu

SEQ ID NO: 688489 - RNA, 20 nt, Artificial Sequence
  Synthetic
uccugucauaguuguaguuu

SEQ ID NO: 688490 - RNA, 21 nt, Artificial Sequence
  Synthetic
auccugucauaguuguaguuu

SEQ ID NO: 688491 - RNA, 22 nt, Artificial Sequence
  Synthetic
cauccugucauaguuguaguuu

SEQ ID NO: 688492 - RNA, 23 nt, Artificial Sequence
  Synthetic
ccauccugucauaguuguaguuu

SEQ ID NO: 688493 - RNA, 24 nt, Artificial Sequence
  Synthetic
gccauccugucauaguuguaguuu

SEQ ID NO: 688494 - RNA, 18 nt, Artificial Sequence
  Synthetic
ggauacaaggcuuaguuu

SEQ ID NO: 688495 - RNA, 19 nt, Artificial Sequence
  Synthetic
aggauacaaggcuuaguuu

SEQ ID NO: 688496 - RNA, 20 nt, Artificial Sequence
  Synthetic
aaggauacaaggcuuaguuu

SEQ ID NO: 688497 - RNA, 21 nt, Artificial Sequence
  Synthetic
uaaggauacaaggcuuaguuu

SEQ ID NO: 688498 - RNA, 22 nt, Artificial Sequence
  Synthetic
auaaggauacaaggcuuaguuu

SEQ ID NO: 688499 - RNA, 23 nt, Artificial Sequence
  Synthetic
aauaaggauacaaggcuuaguuu

SEQ ID NO: 688500 - RNA, 24 nt, Artificial Sequence
  Synthetic
uaauaaggauacaaggcuuaguuu

SEQ ID NO: 688501 - RNA, 18 nt, Artificial Sequence
  Synthetic
cugugagauauuuaguuu

SEQ ID NO: 688502 - RNA, 19 nt, Artificial Sequence
  Synthetic
ucugugagauauuuaguuu

SEQ ID NO: 688503 - RNA, 20 nt, Artificial Sequence
  Synthetic
aucugugagauauuuaguuu

SEQ ID NO: 688504 - RNA, 21 nt, Artificial Sequence
  Synthetic
caucugugagauauuuaguuu

SEQ ID NO: 688505 - RNA, 22 nt, Artificial Sequence
  Synthetic
gcaucugugagauauuuaguuu

SEQ ID NO: 688506 - RNA, 23 nt, Artificial Sequence
  Synthetic
ggcaucugugagauauuuaguuu

SEQ ID NO: 688507 - RNA, 24 nt, Artificial Sequence
  Synthetic
aggcaucugugagauauuuaguuu

SEQ ID NO: 688508 - RNA, 18 nt, Artificial Sequence
  Synthetic
gccuuuggauuuuaguuu

SEQ ID NO: 688509 - RNA, 19 nt, Artificial Sequence
  Synthetic
ugccuuuggauuuuaguuu

SEQ ID NO: 688510 - RNA, 20 nt, Artificial Sequence
  Synthetic
gugccuuuggauuuuaguuu

SEQ ID NO: 688511 - RNA, 21 nt, Artificial Sequence
  Synthetic
ugugccuuuggauuuuaguuu

SEQ ID NO: 688512 - RNA, 22 nt, Artificial Sequence
  Synthetic
augugccuuuggauuuuaguuu

SEQ ID NO: 688513 - RNA, 23 nt, Artificial Sequence
  Synthetic
uaugugccuuuggauuuuaguuu

SEQ ID NO: 688514 - RNA, 24 nt, Artificial Sequence
  Synthetic
uuaugugccuuuggauuuuaguuu

SEQ ID NO: 688515 - RNA, 18 nt, Artificial Sequence
  Synthetic
cuagaagcagacacguuu

SEQ ID NO: 688516 - RNA, 19 nt, Artificial Sequence
  Synthetic
ucuagaagcagacacguuu

SEQ ID NO: 688517 - RNA, 20 nt, Artificial Sequence
  Synthetic
aucuagaagcagacacguuu

SEQ ID NO: 688518 - RNA, 21 nt, Artificial Sequence
  Synthetic
caucuagaagcagacacguuu

SEQ ID NO: 688519 - RNA, 22 nt, Artificial Sequence
  Synthetic
ucaucuagaagcagacacguuu

SEQ ID NO: 688520 - RNA, 23 nt, Artificial Sequence
  Synthetic
uucaucuagaagcagacacguuu

SEQ ID NO: 688521 - RNA, 24 nt, Artificial Sequence
  Synthetic
uuucaucuagaagcagacacguuu

SEQ ID NO: 688522 - RNA, 18 nt, Artificial Sequence
  Synthetic
caccugcaucauacguuu

SEQ ID NO: 688523 - RNA, 19 nt, Artificial Sequence
  Synthetic
ucaccugcaucauacguuu

SEQ ID NO: 688524 - RNA, 20 nt, Artificial Sequence
  Synthetic
cucaccugcaucauacguuu

SEQ ID NO: 688525 - RNA, 21 nt, Artificial Sequence
  Synthetic
ucucaccugcaucauacguuu

SEQ ID NO: 688526 - RNA, 22 nt, Artificial Sequence
  Synthetic
cucucaccugcaucauacguuu

SEQ ID NO: 688527 - RNA, 23 nt, Artificial Sequence
  Synthetic
acucucaccugcaucauacguuu

SEQ ID NO: 688528 - RNA, 24 nt, Artificial Sequence
  Synthetic
uacucucaccugcaucauacguuu

SEQ ID NO: 688529 - RNA, 18 nt, Artificial Sequence
  Synthetic
gaugaugaugcuacguuu

SEQ ID NO: 688530 - RNA, 19 nt, Artificial Sequence
  Synthetic
agaugaugaugcuacguuu

SEQ ID NO: 688531 - RNA, 20 nt, Artificial Sequence
  Synthetic
uagaugaugaugcuacguuu

SEQ ID NO: 688532 - RNA, 21 nt, Artificial Sequence
  Synthetic
cuagaugaugaugcuacguuu

SEQ ID NO: 688533 - RNA, 22 nt, Artificial Sequence
  Synthetic
acuagaugaugaugcuacguuu

SEQ ID NO: 688534 - RNA, 23 nt, Artificial Sequence
  Synthetic
cacuagaugaugaugcuacguuu

SEQ ID NO: 688535 - RNA, 24 nt, Artificial Sequence
  Synthetic
gcacuagaugaugaugcuacguuu

SEQ ID NO: 688536 - RNA, 18 nt, Artificial Sequence
  Synthetic
cuauuaguaguuacguuu

SEQ ID NO: 688537 - RNA, 19 nt, Artificial Sequence
  Synthetic
ccuauuaguaguuacguuu

SEQ ID NO: 688538 - RNA, 20 nt, Artificial Sequence
  Synthetic
gccuauuaguaguuacguuu

SEQ ID NO: 688539 - RNA, 21 nt, Artificial Sequence
  Synthetic
agccuauuaguaguuacguuu

SEQ ID NO: 688540 - RNA, 22 nt, Artificial Sequence
  Synthetic
uagccuauuaguaguuacguuu

SEQ ID NO: 688541 - RNA, 23 nt, Artificial Sequence
  Synthetic
guagccuauuaguaguuacguuu

SEQ ID NO: 688542 - RNA, 24 nt, Artificial Sequence
  Synthetic
aguagccuauuaguaguuacguuu

SEQ ID NO: 688543 - RNA, 18 nt, Artificial Sequence
  Synthetic
ccuguaaucucagcguuu

SEQ ID NO: 688544 - RNA, 19 nt, Artificial Sequence
  Synthetic
accuguaaucucagcguuu

SEQ ID NO: 688545 - RNA, 20 nt, Artificial Sequence
  Synthetic
caccuguaaucucagcguuu

SEQ ID NO: 688546 - RNA, 21 nt, Artificial Sequence
  Synthetic
acaccuguaaucucagcguuu

SEQ ID NO: 688547 - RNA, 22 nt, Artificial Sequence
  Synthetic
cacaccuguaaucucagcguuu

SEQ ID NO: 688548 - RNA, 23 nt, Artificial Sequence
  Synthetic
ucacaccuguaaucucagcguuu

SEQ ID NO: 688549 - RNA, 24 nt, Artificial Sequence
  Synthetic
cucacaccuguaaucucagcguuu

SEQ ID NO: 688550 - RNA, 18 nt, Artificial Sequence
  Synthetic
uaagagaauuuggcguuu

SEQ ID NO: 688551 - RNA, 19 nt, Artificial Sequence
  Synthetic
uuaagagaauuuggcguuu

SEQ ID NO: 688552 - RNA, 20 nt, Artificial Sequence
  Synthetic
guuaagagaauuuggcguuu

SEQ ID NO: 688553 - RNA, 21 nt, Artificial Sequence
  Synthetic
gguuaagagaauuuggcguuu

SEQ ID NO: 688554 - RNA, 22 nt, Artificial Sequence
  Synthetic
ugguuaagagaauuuggcguuu

SEQ ID NO: 688555 - RNA, 23 nt, Artificial Sequence
  Synthetic
cugguuaagagaauuuggcguuu

SEQ ID NO: 688556 - RNA, 24 nt, Artificial Sequence
  Synthetic
ucugguuaagagaauuuggcguuu

SEQ ID NO: 688557 - RNA, 18 nt, Artificial Sequence
  Synthetic
cuuaagaauaaaucguuu

SEQ ID NO: 688558 - RNA, 19 nt, Artificial Sequence
  Synthetic
acuuaagaauaaaucguuu

SEQ ID NO: 688559 - RNA, 20 nt, Artificial Sequence
  Synthetic
aacuuaagaauaaaucguuu

SEQ ID NO: 688560 - RNA, 21 nt, Artificial Sequence
  Synthetic
aaacuuaagaauaaaucguuu

SEQ ID NO: 688561 - RNA, 22 nt, Artificial Sequence
  Synthetic
aaaacuuaagaauaaaucguuu

SEQ ID NO: 688562 - RNA, 23 nt, Artificial Sequence
  Synthetic
uaaaacuuaagaauaaaucguuu

SEQ ID NO: 688563 - RNA, 24 nt, Artificial Sequence
  Synthetic
auaaaacuuaagaauaaaucguuu

SEQ ID NO: 688564 - RNA, 18 nt, Artificial Sequence
  Synthetic
ucuggggaaaaaagguuu

SEQ ID NO: 688565 - RNA, 19 nt, Artificial Sequence
  Synthetic
uucuggggaaaaaagguuu

SEQ ID NO: 688566 - RNA, 20 nt, Artificial Sequence
  Synthetic
uuucuggggaaaaaagguuu

SEQ ID NO: 688567 - RNA, 21 nt, Artificial Sequence
  Synthetic
auuucuggggaaaaaagguuu

SEQ ID NO: 688568 - RNA, 22 nt, Artificial Sequence
  Synthetic
gauuucuggggaaaaaagguuu

SEQ ID NO: 688569 - RNA, 23 nt, Artificial Sequence
  Synthetic
agauuucuggggaaaaaagguuu

SEQ ID NO: 688570 - RNA, 24 nt, Artificial Sequence
  Synthetic
uagauuucuggggaaaaaagguuu

SEQ ID NO: 688571 - RNA, 18 nt, Artificial Sequence
  Synthetic
uuuccuuuuuaaagguuu

SEQ ID NO: 688572 - RNA, 19 nt, Artificial Sequence
  Synthetic
auuuccuuuuuaaagguuu

SEQ ID NO: 688573 - RNA, 20 nt, Artificial Sequence
  Synthetic
uauuuccuuuuuaaagguuu

SEQ ID NO: 688574 - RNA, 21 nt, Artificial Sequence
  Synthetic
uuauuuccuuuuuaaagguuu

SEQ ID NO: 688575 - RNA, 22 nt, Artificial Sequence
  Synthetic
uuuauuuccuuuuuaaagguuu

SEQ ID NO: 688576 - RNA, 23 nt, Artificial Sequence
  Synthetic
auuuauuuccuuuuuaaagguuu

SEQ ID NO: 688577 - RNA, 24 nt, Artificial Sequence
  Synthetic
uauuuauuuccuuuuuaaagguuu

SEQ ID NO: 688578 - RNA, 18 nt, Artificial Sequence
  Synthetic
cccaaaagagcaagguuu

SEQ ID NO: 688579 - RNA, 19 nt, Artificial Sequence
  Synthetic
ccccaaaagagcaagguuu

SEQ ID NO: 688580 - RNA, 20 nt, Artificial Sequence
  Synthetic
uccccaaaagagcaagguuu

SEQ ID NO: 688581 - RNA, 21 nt, Artificial Sequence
  Synthetic
auccccaaaagagcaagguuu

SEQ ID NO: 688582 - RNA, 22 nt, Artificial Sequence
  Synthetic
cauccccaaaagagcaagguuu

SEQ ID NO: 688583 - RNA, 23 nt, Artificial Sequence
  Synthetic
ucauccccaaaagagcaagguuu

SEQ ID NO: 688584 - RNA, 24 nt, Artificial Sequence
  Synthetic
aucauccccaaaagagcaagguuu

SEQ ID NO: 688585 - RNA, 18 nt, Artificial Sequence
  Synthetic
acacagcagcacagguuu

SEQ ID NO: 688586 - RNA, 19 nt, Artificial Sequence
  Synthetic
uacacagcagcacagguuu

SEQ ID NO: 688587 - RNA, 20 nt, Artificial Sequence
  Synthetic
auacacagcagcacagguuu

SEQ ID NO: 688588 - RNA, 21 nt, Artificial Sequence
  Synthetic
aauacacagcagcacagguuu

SEQ ID NO: 688589 - RNA, 22 nt, Artificial Sequence
  Synthetic
aaauacacagcagcacagguuu

SEQ ID NO: 688590 - RNA, 23 nt, Artificial Sequence
  Synthetic
caaauacacagcagcacagguuu

SEQ ID NO: 688591 - RNA, 24 nt, Artificial Sequence
  Synthetic
ccaaauacacagcagcacagguuu

SEQ ID NO: 688592 - RNA, 18 nt, Artificial Sequence
  Synthetic
agaagaaguuacagguuu

SEQ ID NO: 688593 - RNA, 19 nt, Artificial Sequence
  Synthetic
uagaagaaguuacagguuu

SEQ ID NO: 688594 - RNA, 20 nt, Artificial Sequence
  Synthetic
uuagaagaaguuacagguuu

SEQ ID NO: 688595 - RNA, 21 nt, Artificial Sequence
  Synthetic
auuagaagaaguuacagguuu

SEQ ID NO: 688596 - RNA, 22 nt, Artificial Sequence
  Synthetic
uauuagaagaaguuacagguuu

SEQ ID NO: 688597 - RNA, 23 nt, Artificial Sequence
  Synthetic
cuauuagaagaaguuacagguuu

SEQ ID NO: 688598 - RNA, 24 nt, Artificial Sequence
  Synthetic
ccuauuagaagaaguuacagguuu

SEQ ID NO: 688599 - RNA, 18 nt, Artificial Sequence
  Synthetic
cugccuucagccagguuu

SEQ ID NO: 688600 - RNA, 19 nt, Artificial Sequence
  Synthetic
acugccuucagccagguuu

SEQ ID NO: 688601 - RNA, 20 nt, Artificial Sequence
  Synthetic
uacugccuucagccagguuu

SEQ ID NO: 688602 - RNA, 21 nt, Artificial Sequence
  Synthetic
cuacugccuucagccagguuu

SEQ ID NO: 688603 - RNA, 22 nt, Artificial Sequence
  Synthetic
ccuacugccuucagccagguuu

SEQ ID NO: 688604 - RNA, 23 nt, Artificial Sequence
  Synthetic
accuacugccuucagccagguuu

SEQ ID NO: 688605 - RNA, 24 nt, Artificial Sequence
  Synthetic
uaccuacugccuucagccagguuu

SEQ ID NO: 688606 - RNA, 18 nt, Artificial Sequence
  Synthetic
ucauaaaaaugcagguuu

SEQ ID NO: 688607 - RNA, 19 nt, Artificial Sequence
  Synthetic
aucauaaaaaugcagguuu

SEQ ID NO: 688608 - RNA, 20 nt, Artificial Sequence
  Synthetic
caucauaaaaaugcagguuu

SEQ ID NO: 688609 - RNA, 21 nt, Artificial Sequence
  Synthetic
ucaucauaaaaaugcagguuu

SEQ ID NO: 688610 - RNA, 22 nt, Artificial Sequence
  Synthetic
gucaucauaaaaaugcagguuu

SEQ ID NO: 688611 - RNA, 23 nt, Artificial Sequence
  Synthetic
agucaucauaaaaaugcagguuu

SEQ ID NO: 688612 - RNA, 24 nt, Artificial Sequence
  Synthetic
gagucaucauaaaaaugcagguuu

SEQ ID NO: 688613 - RNA, 18 nt, Artificial Sequence
  Synthetic
ggaaauauucucagguuu

SEQ ID NO: 688614 - RNA, 19 nt, Artificial Sequence
  Synthetic
gggaaauauucucagguuu

SEQ ID NO: 688615 - RNA, 20 nt, Artificial Sequence
  Synthetic
ggggaaauauucucagguuu

SEQ ID NO: 688616 - RNA, 21 nt, Artificial Sequence
  Synthetic
aggggaaauauucucagguuu

SEQ ID NO: 688617 - RNA, 22 nt, Artificial Sequence
  Synthetic
aaggggaaauauucucagguuu

SEQ ID NO: 688618 - RNA, 23 nt, Artificial Sequence
  Synthetic
aaaggggaaauauucucagguuu

SEQ ID NO: 688619 - RNA, 24 nt, Artificial Sequence
  Synthetic
caaaggggaaauauucucagguuu

SEQ ID NO: 688620 - RNA, 18 nt, Artificial Sequence
  Synthetic
guuuuugauuucagguuu

SEQ ID NO: 688621 - RNA, 19 nt, Artificial Sequence
  Synthetic
aguuuuugauuucagguuu

SEQ ID NO: 688622 - RNA, 20 nt, Artificial Sequence
  Synthetic
aaguuuuugauuucagguuu

SEQ ID NO: 688623 - RNA, 21 nt, Artificial Sequence
  Synthetic
aaaguuuuugauuucagguuu

SEQ ID NO: 688624 - RNA, 22 nt, Artificial Sequence
  Synthetic
caaaguuuuugauuucagguuu

SEQ ID NO: 688625 - RNA, 23 nt, Artificial Sequence
  Synthetic
gcaaaguuuuugauuucagguuu

SEQ ID NO: 688626 - RNA, 24 nt, Artificial Sequence
  Synthetic
agcaaaguuuuugauuucagguuu

SEQ ID NO: 688627 - RNA, 18 nt, Artificial Sequence
  Synthetic
ccuguuugaaagagguuu

SEQ ID NO: 688628 - RNA, 19 nt, Artificial Sequence
  Synthetic
gccuguuugaaagagguuu

SEQ ID NO: 688629 - RNA, 20 nt, Artificial Sequence
  Synthetic
ggccuguuugaaagagguuu

SEQ ID NO: 688630 - RNA, 21 nt, Artificial Sequence
  Synthetic
aggccuguuugaaagagguuu

SEQ ID NO: 688631 - RNA, 22 nt, Artificial Sequence
  Synthetic
aaggccuguuugaaagagguuu

SEQ ID NO: 688632 - RNA, 23 nt, Artificial Sequence
  Synthetic
aaaggccuguuugaaagagguuu

SEQ ID NO: 688633 - RNA, 24 nt, Artificial Sequence
  Synthetic
aaaaggccuguuugaaagagguuu

SEQ ID NO: 688634 - RNA, 18 nt, Artificial Sequence
  Synthetic
ggaaaucaucagagguuu

SEQ ID NO: 688635 - RNA, 19 nt, Artificial Sequence
  Synthetic
gggaaaucaucagagguuu

SEQ ID NO: 688636 - RNA, 20 nt, Artificial Sequence
  Synthetic
ugggaaaucaucagagguuu

SEQ ID NO: 688637 - RNA, 21 nt, Artificial Sequence
  Synthetic
augggaaaucaucagagguuu

SEQ ID NO: 688638 - RNA, 22 nt, Artificial Sequence
  Synthetic
caugggaaaucaucagagguuu

SEQ ID NO: 688639 - RNA, 23 nt, Artificial Sequence
  Synthetic
ccaugggaaaucaucagagguuu

SEQ ID NO: 688640 - RNA, 24 nt, Artificial Sequence
  Synthetic
gccaugggaaaucaucagagguuu

SEQ ID NO: 688641 - RNA, 18 nt, Artificial Sequence
  Synthetic
uugaaaacuaugagguuu

SEQ ID NO: 688642 - RNA, 19 nt, Artificial Sequence
  Synthetic
guugaaaacuaugagguuu

SEQ ID NO: 688643 - RNA, 20 nt, Artificial Sequence
  Synthetic
aguugaaaacuaugagguuu

SEQ ID NO: 688644 - RNA, 21 nt, Artificial Sequence
  Synthetic
aaguugaaaacuaugagguuu

SEQ ID NO: 688645 - RNA, 22 nt, Artificial Sequence
  Synthetic
gaaguugaaaacuaugagguuu

SEQ ID NO: 688646 - RNA, 23 nt, Artificial Sequence
  Synthetic
agaaguugaaaacuaugagguuu

SEQ ID NO: 688647 - RNA, 24 nt, Artificial Sequence
  Synthetic
gagaaguugaaaacuaugagguuu

SEQ ID NO: 688648 - RNA, 18 nt, Artificial Sequence
  Synthetic
uaauaaauucugagguuu

SEQ ID NO: 688649 - RNA, 19 nt, Artificial Sequence
  Synthetic
auaauaaauucugagguuu

SEQ ID NO: 688650 - RNA, 20 nt, Artificial Sequence
  Synthetic
aauaauaaauucugagguuu

SEQ ID NO: 688651 - RNA, 21 nt, Artificial Sequence
  Synthetic
aaauaauaaauucugagguuu

SEQ ID NO: 688652 - RNA, 22 nt, Artificial Sequence
  Synthetic
gaaauaauaaauucugagguuu

SEQ ID NO: 688653 - RNA, 23 nt, Artificial Sequence
  Synthetic
ggaaauaauaaauucugagguuu

SEQ ID NO: 688654 - RNA, 24 nt, Artificial Sequence
  Synthetic
aggaaauaauaaauucugagguuu

SEQ ID NO: 688655 - RNA, 18 nt, Artificial Sequence
  Synthetic
ggaggguagaauagguuu

SEQ ID NO: 688656 - RNA, 19 nt, Artificial Sequence
  Synthetic
uggaggguagaauagguuu

SEQ ID NO: 688657 - RNA, 20 nt, Artificial Sequence
  Synthetic
guggaggguagaauagguuu

SEQ ID NO: 688658 - RNA, 21 nt, Artificial Sequence
  Synthetic
gguggaggguagaauagguuu

SEQ ID NO: 688659 - RNA, 22 nt, Artificial Sequence
  Synthetic
ugguggaggguagaauagguuu

SEQ ID NO: 688660 - RNA, 23 nt, Artificial Sequence
  Synthetic
cugguggaggguagaauagguuu

SEQ ID NO: 688661 - RNA, 24 nt, Artificial Sequence
  Synthetic
acugguggaggguagaauagguuu

SEQ ID NO: 688662 - RNA, 18 nt, Artificial Sequence
  Synthetic
uccuuucagcauagguuu

SEQ ID NO: 688663 - RNA, 19 nt, Artificial Sequence
  Synthetic
cuccuuucagcauagguuu

SEQ ID NO: 688664 - RNA, 20 nt, Artificial Sequence
  Synthetic
ccuccuuucagcauagguuu

SEQ ID NO: 688665 - RNA, 21 nt, Artificial Sequence
  Synthetic
gccuccuuucagcauagguuu

SEQ ID NO: 688666 - RNA, 22 nt, Artificial Sequence
  Synthetic
agccuccuuucagcauagguuu

SEQ ID NO: 688667 - RNA, 23 nt, Artificial Sequence
  Synthetic
uagccuccuuucagcauagguuu

SEQ ID NO: 688668 - RNA, 24 nt, Artificial Sequence
  Synthetic
guagccuccuuucagcauagguuu

SEQ ID NO: 688669 - RNA, 18 nt, Artificial Sequence
  Synthetic
uccagcccugauagguuu

SEQ ID NO: 688670 - RNA, 19 nt, Artificial Sequence
  Synthetic
auccagcccugauagguuu

SEQ ID NO: 688671 - RNA, 20 nt, Artificial Sequence
  Synthetic
aauccagcccugauagguuu

SEQ ID NO: 688672 - RNA, 21 nt, Artificial Sequence
  Synthetic
aaauccagcccugauagguuu

SEQ ID NO: 688673 - RNA, 22 nt, Artificial Sequence
  Synthetic
gaaauccagcccugauagguuu

SEQ ID NO: 688674 - RNA, 23 nt, Artificial Sequence
  Synthetic
ugaaauccagcccugauagguuu

SEQ ID NO: 688675 - RNA, 24 nt, Artificial Sequence
  Synthetic
cugaaauccagcccugauagguuu

SEQ ID NO: 688676 - RNA, 18 nt, Artificial Sequence
  Synthetic
uuagaugcuuguagguuu

SEQ ID NO: 688677 - RNA, 19 nt, Artificial Sequence
  Synthetic
auuagaugcuuguagguuu

SEQ ID NO: 688678 - RNA, 20 nt, Artificial Sequence
  Synthetic
aauuagaugcuuguagguuu

SEQ ID NO: 688679 - RNA, 21 nt, Artificial Sequence
  Synthetic
aaauuagaugcuuguagguuu

SEQ ID NO: 688680 - RNA, 22 nt, Artificial Sequence
  Synthetic
aaaauuagaugcuuguagguuu

SEQ ID NO: 688681 - RNA, 23 nt, Artificial Sequence
  Synthetic
gaaaauuagaugcuuguagguuu

SEQ ID NO: 688682 - RNA, 24 nt, Artificial Sequence
  Synthetic
agaaaauuagaugcuuguagguuu

SEQ ID NO: 688683 - RNA, 18 nt, Artificial Sequence
  Synthetic
ugcaccacuauuagguuu

SEQ ID NO: 688684 - RNA, 19 nt, Artificial Sequence
  Synthetic
uugcaccacuauuagguuu

SEQ ID NO: 688685 - RNA, 20 nt, Artificial Sequence
  Synthetic
cuugcaccacuauuagguuu

SEQ ID NO: 688686 - RNA, 21 nt, Artificial Sequence
  Synthetic
ucuugcaccacuauuagguuu

SEQ ID NO: 688687 - RNA, 22 nt, Artificial Sequence
  Synthetic
aucuugcaccacuauuagguuu

SEQ ID NO: 688688 - RNA, 23 nt, Artificial Sequence
  Synthetic
aaucuugcaccacuauuagguuu

SEQ ID NO: 688689 - RNA, 24 nt, Artificial Sequence
  Synthetic
aaaucuugcaccacuauuagguuu

SEQ ID NO: 688690 - RNA, 18 nt, Artificial Sequence
  Synthetic
cugcaacuaguuagguuu

SEQ ID NO: 688691 - RNA, 19 nt, Artificial Sequence
  Synthetic
ucugcaacuaguuagguuu

SEQ ID NO: 688692 - RNA, 20 nt, Artificial Sequence
  Synthetic
aucugcaacuaguuagguuu

SEQ ID NO: 688693 - RNA, 21 nt, Artificial Sequence
  Synthetic
uaucugcaacuaguuagguuu

SEQ ID NO: 688694 - RNA, 22 nt, Artificial Sequence
  Synthetic
auaucugcaacuaguuagguuu

SEQ ID NO: 688695 - RNA, 23 nt, Artificial Sequence
  Synthetic
aauaucugcaacuaguuagguuu

SEQ ID NO: 688696 - RNA, 24 nt, Artificial Sequence
  Synthetic
aaauaucugcaacuaguuagguuu

SEQ ID NO: 688697 - RNA, 18 nt, Artificial Sequence
  Synthetic
uuacuauguguuagguuu

SEQ ID NO: 688698 - RNA, 19 nt, Artificial Sequence
  Synthetic
auuacuauguguuagguuu

SEQ ID NO: 688699 - RNA, 20 nt, Artificial Sequence
  Synthetic
gauuacuauguguuagguuu

SEQ ID NO: 688700 - RNA, 21 nt, Artificial Sequence
  Synthetic
ugauuacuauguguuagguuu

SEQ ID NO: 688701 - RNA, 22 nt, Artificial Sequence
  Synthetic
uugauuacuauguguuagguuu

SEQ ID NO: 688702 - RNA, 23 nt, Artificial Sequence
  Synthetic
auugauuacuauguguuagguuu

SEQ ID NO: 688703 - RNA, 24 nt, Artificial Sequence
  Synthetic
aauugauuacuauguguuagguuu

SEQ ID NO: 688704 - RNA, 18 nt, Artificial Sequence
  Synthetic
aguugggacauacgguuu

SEQ ID NO: 688705 - RNA, 19 nt, Artificial Sequence
  Synthetic
aaguugggacauacgguuu

SEQ ID NO: 688706 - RNA, 20 nt, Artificial Sequence
  Synthetic
aaaguugggacauacgguuu

SEQ ID NO: 688707 - RNA, 21 nt, Artificial Sequence
  Synthetic
aaaaguugggacauacgguuu

SEQ ID NO: 688708 - RNA, 22 nt, Artificial Sequence
  Synthetic
aaaaaguugggacauacgguuu

SEQ ID NO: 688709 - RNA, 23 nt, Artificial Sequence
  Synthetic
gaaaaaguugggacauacgguuu

SEQ ID NO: 688710 - RNA, 24 nt, Artificial Sequence
  Synthetic
ggaaaaaguugggacauacgguuu

SEQ ID NO: 688711 - RNA, 18 nt, Artificial Sequence
  Synthetic
gaagaggcguuccgguuu

SEQ ID NO: 688712 - RNA, 19 nt, Artificial Sequence
  Synthetic
agaagaggcguuccgguuu

SEQ ID NO: 688713 - RNA, 20 nt, Artificial Sequence
  Synthetic
gagaagaggcguuccgguuu

SEQ ID NO: 688714 - RNA, 21 nt, Artificial Sequence
  Synthetic
ggagaagaggcguuccgguuu

SEQ ID NO: 688715 - RNA, 22 nt, Artificial Sequence
  Synthetic
aggagaagaggcguuccgguuu

SEQ ID NO: 688716 - RNA, 23 nt, Artificial Sequence
  Synthetic
gaggagaagaggcguuccgguuu

SEQ ID NO: 688717 - RNA, 24 nt, Artificial Sequence
  Synthetic
ggaggagaagaggcguuccgguuu

SEQ ID NO: 688718 - RNA, 18 nt, Artificial Sequence
  Synthetic
uaaguggauaggcgguuu

SEQ ID NO: 688719 - RNA, 19 nt, Artificial Sequence
  Synthetic
guaaguggauaggcgguuu

SEQ ID NO: 688720 - RNA, 20 nt, Artificial Sequence
  Synthetic
gguaaguggauaggcgguuu

SEQ ID NO: 688721 - RNA, 21 nt, Artificial Sequence
  Synthetic
ggguaaguggauaggcgguuu

SEQ ID NO: 688722 - RNA, 22 nt, Artificial Sequence
  Synthetic
aggguaaguggauaggcgguuu

SEQ ID NO: 688723 - RNA, 23 nt, Artificial Sequence
  Synthetic
uaggguaaguggauaggcgguuu

SEQ ID NO: 688724 - RNA, 24 nt, Artificial Sequence
  Synthetic
uuaggguaaguggauaggcgguuu

SEQ ID NO: 688725 - RNA, 18 nt, Artificial Sequence
  Synthetic
gucguuuugaaaggguuu

SEQ ID NO: 688726 - RNA, 19 nt, Artificial Sequence
  Synthetic
ugucguuuugaaaggguuu

SEQ ID NO: 688727 - RNA, 20 nt, Artificial Sequence
  Synthetic
augucguuuugaaaggguuu

SEQ ID NO: 688728 - RNA, 21 nt, Artificial Sequence
  Synthetic
aaugucguuuugaaaggguuu

SEQ ID NO: 688729 - RNA, 22 nt, Artificial Sequence
  Synthetic
aaaugucguuuugaaaggguuu

SEQ ID NO: 688730 - RNA, 23 nt, Artificial Sequence
  Synthetic
gaaaugucguuuugaaaggguuu

SEQ ID NO: 688731 - RNA, 24 nt, Artificial Sequence
  Synthetic
ggaaaugucguuuugaaaggguuu

SEQ ID NO: 688732 - RNA, 18 nt, Artificial Sequence
  Synthetic
ugaggcggccaaggguuu

SEQ ID NO: 688733 - RNA, 19 nt, Artificial Sequence
  Synthetic
uugaggcggccaaggguuu

SEQ ID NO: 688734 - RNA, 20 nt, Artificial Sequence
  Synthetic
auugaggcggccaaggguuu

SEQ ID NO: 688735 - RNA, 21 nt, Artificial Sequence
  Synthetic
aauugaggcggccaaggguuu

SEQ ID NO: 688736 - RNA, 22 nt, Artificial Sequence
  Synthetic
aaauugaggcggccaaggguuu

SEQ ID NO: 688737 - RNA, 23 nt, Artificial Sequence
  Synthetic
aaaauugaggcggccaaggguuu

SEQ ID NO: 688738 - RNA, 24 nt, Artificial Sequence
  Synthetic
aaaaauugaggcggccaaggguuu

SEQ ID NO: 688739 - RNA, 18 nt, Artificial Sequence
  Synthetic
agucaagaaugaggguuu

SEQ ID NO: 688740 - RNA, 19 nt, Artificial Sequence
  Synthetic
cagucaagaaugaggguuu

SEQ ID NO: 688741 - RNA, 20 nt, Artificial Sequence
  Synthetic
acagucaagaaugaggguuu

SEQ ID NO: 688742 - RNA, 21 nt, Artificial Sequence
  Synthetic
cacagucaagaaugaggguuu

SEQ ID NO: 688743 - RNA, 22 nt, Artificial Sequence
  Synthetic
acacagucaagaaugaggguuu

SEQ ID NO: 688744 - RNA, 23 nt, Artificial Sequence
  Synthetic
gacacagucaagaaugaggguuu

SEQ ID NO: 688745 - RNA, 24 nt, Artificial Sequence
  Synthetic
agacacagucaagaaugaggguuu

SEQ ID NO: 688746 - RNA, 18 nt, Artificial Sequence
  Synthetic
gcagcugaacagggguuu

SEQ ID NO: 688747 - RNA, 19 nt, Artificial Sequence
  Synthetic
agcagcugaacagggguuu

SEQ ID NO: 688748 - RNA, 20 nt, Artificial Sequence
  Synthetic
cagcagcugaacagggguuu

SEQ ID NO: 688749 - RNA, 21 nt, Artificial Sequence
  Synthetic
gcagcagcugaacagggguuu

SEQ ID NO: 688750 - RNA, 22 nt, Artificial Sequence
  Synthetic
ggcagcagcugaacagggguuu

SEQ ID NO: 688751 - RNA, 23 nt, Artificial Sequence
  Synthetic
gggcagcagcugaacagggguuu

SEQ ID NO: 688752 - RNA, 24 nt, Artificial Sequence
  Synthetic
agggcagcagcugaacagggguuu

SEQ ID NO: 688753 - RNA, 18 nt, Artificial Sequence
  Synthetic
auucaagauaauggguuu

SEQ ID NO: 688754 - RNA, 19 nt, Artificial Sequence
  Synthetic
cauucaagauaauggguuu

SEQ ID NO: 688755 - RNA, 20 nt, Artificial Sequence
  Synthetic
acauucaagauaauggguuu

SEQ ID NO: 688756 - RNA, 21 nt, Artificial Sequence
  Synthetic
aacauucaagauaauggguuu

SEQ ID NO: 688757 - RNA, 22 nt, Artificial Sequence
  Synthetic
aaacauucaagauaauggguuu

SEQ ID NO: 688758 - RNA, 23 nt, Artificial Sequence
  Synthetic
aaaacauucaagauaauggguuu

SEQ ID NO: 688759 - RNA, 24 nt, Artificial Sequence
  Synthetic
gaaaacauucaagauaauggguuu

SEQ ID NO: 688760 - RNA, 18 nt, Artificial Sequence
  Synthetic
aaaauacuacauggguuu

SEQ ID NO: 688761 - RNA, 19 nt, Artificial Sequence
  Synthetic
caaaauacuacauggguuu

SEQ ID NO: 688762 - RNA, 20 nt, Artificial Sequence
  Synthetic
gcaaaauacuacauggguuu

SEQ ID NO: 688763 - RNA, 21 nt, Artificial Sequence
  Synthetic
agcaaaauacuacauggguuu

SEQ ID NO: 688764 - RNA, 22 nt, Artificial Sequence
  Synthetic
uagcaaaauacuacauggguuu

SEQ ID NO: 688765 - RNA, 23 nt, Artificial Sequence
  Synthetic
auagcaaaauacuacauggguuu

SEQ ID NO: 688766 - RNA, 24 nt, Artificial Sequence
  Synthetic
aauagcaaaauacuacauggguuu

SEQ ID NO: 688767 - RNA, 18 nt, Artificial Sequence
  Synthetic
cagcaaauauauggguuu

SEQ ID NO: 688768 - RNA, 19 nt, Artificial Sequence
  Synthetic
acagcaaauauauggguuu

SEQ ID NO: 688769 - RNA, 20 nt, Artificial Sequence
  Synthetic
aacagcaaauauauggguuu

SEQ ID NO: 688770 - RNA, 21 nt, Artificial Sequence
  Synthetic
aaacagcaaauauauggguuu

SEQ ID NO: 688771 - RNA, 22 nt, Artificial Sequence
  Synthetic
gaaacagcaaauauauggguuu

SEQ ID NO: 688772 - RNA, 23 nt, Artificial Sequence
  Synthetic
ggaaacagcaaauauauggguuu

SEQ ID NO: 688773 - RNA, 24 nt, Artificial Sequence
  Synthetic
aggaaacagcaaauauauggguuu

SEQ ID NO: 688774 - RNA, 18 nt, Artificial Sequence
  Synthetic
uuuuugcaugcuggguuu

SEQ ID NO: 688775 - RNA, 19 nt, Artificial Sequence
  Synthetic
auuuuugcaugcuggguuu

SEQ ID NO: 688776 - RNA, 20 nt, Artificial Sequence
  Synthetic
aauuuuugcaugcuggguuu

SEQ ID NO: 688777 - RNA, 21 nt, Artificial Sequence
  Synthetic
gaauuuuugcaugcuggguuu

SEQ ID NO: 688778 - RNA, 22 nt, Artificial Sequence
  Synthetic
agaauuuuugcaugcuggguuu

SEQ ID NO: 688779 - RNA, 23 nt, Artificial Sequence
  Synthetic
cagaauuuuugcaugcuggguuu

SEQ ID NO: 688780 - RNA, 24 nt, Artificial Sequence
  Synthetic
ccagaauuuuugcaugcuggguuu

SEQ ID NO: 688781 - RNA, 18 nt, Artificial Sequence
  Synthetic
agggacaagaguggguuu

SEQ ID NO: 688782 - RNA, 19 nt, Artificial Sequence
  Synthetic
cagggacaagaguggguuu

SEQ ID NO: 688783 - RNA, 20 nt, Artificial Sequence
  Synthetic
ccagggacaagaguggguuu

SEQ ID NO: 688784 - RNA, 21 nt, Artificial Sequence
  Synthetic
uccagggacaagaguggguuu

SEQ ID NO: 688785 - RNA, 22 nt, Artificial Sequence
  Synthetic
uuccagggacaagaguggguuu

SEQ ID NO: 688786 - RNA, 23 nt, Artificial Sequence
  Synthetic
uuuccagggacaagaguggguuu

SEQ ID NO: 688787 - RNA, 24 nt, Artificial Sequence
  Synthetic
uuuuccagggacaagaguggguuu

SEQ ID NO: 688788 - RNA, 18 nt, Artificial Sequence
  Synthetic
uucuaguauauuggguuu

SEQ ID NO: 688789 - RNA, 19 nt, Artificial Sequence
  Synthetic
auucuaguauauuggguuu

SEQ ID NO: 688790 - RNA, 20 nt, Artificial Sequence
  Synthetic
gauucuaguauauuggguuu

SEQ ID NO: 688791 - RNA, 21 nt, Artificial Sequence
  Synthetic
agauucuaguauauuggguuu

SEQ ID NO: 688792 - RNA, 22 nt, Artificial Sequence
  Synthetic
gagauucuaguauauuggguuu

SEQ ID NO: 688793 - RNA, 23 nt, Artificial Sequence
  Synthetic
ggagauucuaguauauuggguuu

SEQ ID NO: 688794 - RNA, 24 nt, Artificial Sequence
  Synthetic
uggagauucuaguauauuggguuu

SEQ ID NO: 688795 - RNA, 18 nt, Artificial Sequence
  Synthetic
aaugcaaugcuuggguuu

SEQ ID NO: 688796 - RNA, 19 nt, Artificial Sequence
  Synthetic
aaaugcaaugcuuggguuu

SEQ ID NO: 688797 - RNA, 20 nt, Artificial Sequence
  Synthetic
uaaaugcaaugcuuggguuu

SEQ ID NO: 688798 - RNA, 21 nt, Artificial Sequence
  Synthetic
uuaaaugcaaugcuuggguuu

SEQ ID NO: 688799 - RNA, 22 nt, Artificial Sequence
  Synthetic
cuuaaaugcaaugcuuggguuu

SEQ ID NO: 688800 - RNA, 23 nt, Artificial Sequence
  Synthetic
ccuuaaaugcaaugcuuggguuu

SEQ ID NO: 688801 - RNA, 24 nt, Artificial Sequence
  Synthetic
uccuuaaaugcaaugcuuggguuu

SEQ ID NO: 688802 - RNA, 18 nt, Artificial Sequence
  Synthetic
ccauugcuaaaaugguuu

SEQ ID NO: 688803 - RNA, 19 nt, Artificial Sequence
  Synthetic
accauugcuaaaaugguuu

SEQ ID NO: 688804 - RNA, 20 nt, Artificial Sequence
  Synthetic
uaccauugcuaaaaugguuu

SEQ ID NO: 688805 - RNA, 21 nt, Artificial Sequence
  Synthetic
uuaccauugcuaaaaugguuu

SEQ ID NO: 688806 - RNA, 22 nt, Artificial Sequence
  Synthetic
uuuaccauugcuaaaaugguuu

SEQ ID NO: 688807 - RNA, 23 nt, Artificial Sequence
  Synthetic
uuuuaccauugcuaaaaugguuu

SEQ ID NO: 688808 - RNA, 24 nt, Artificial Sequence
  Synthetic
auuuuaccauugcuaaaaugguuu

SEQ ID NO: 688809 - RNA, 18 nt, Artificial Sequence
  Synthetic
gcccacaguaaaugguuu

SEQ ID NO: 688810 - RNA, 19 nt, Artificial Sequence
  Synthetic
agcccacaguaaaugguuu

SEQ ID NO: 688811 - RNA, 20 nt, Artificial Sequence
  Synthetic
gagcccacaguaaaugguuu

SEQ ID NO: 688812 - RNA, 21 nt, Artificial Sequence
  Synthetic
ugagcccacaguaaaugguuu

SEQ ID NO: 688813 - RNA, 22 nt, Artificial Sequence
  Synthetic
gugagcccacaguaaaugguuu

SEQ ID NO: 688814 - RNA, 23 nt, Artificial Sequence
  Synthetic
ugugagcccacaguaaaugguuu

SEQ ID NO: 688815 - RNA, 24 nt, Artificial Sequence
  Synthetic
cugugagcccacaguaaaugguuu

SEQ ID NO: 688816 - RNA, 18 nt, Artificial Sequence
  Synthetic
ucaacucagcaaugguuu

SEQ ID NO: 688817 - RNA, 19 nt, Artificial Sequence
  Synthetic
uucaacucagcaaugguuu

SEQ ID NO: 688818 - RNA, 20 nt, Artificial Sequence
  Synthetic
cuucaacucagcaaugguuu

SEQ ID NO: 688819 - RNA, 21 nt, Artificial Sequence
  Synthetic
acuucaacucagcaaugguuu

SEQ ID NO: 688820 - RNA, 22 nt, Artificial Sequence
  Synthetic
uacuucaacucagcaaugguuu

SEQ ID NO: 688821 - RNA, 23 nt, Artificial Sequence
  Synthetic
cuacuucaacucagcaaugguuu

SEQ ID NO: 688822 - RNA, 24 nt, Artificial Sequence
  Synthetic
ucuacuucaacucagcaaugguuu

SEQ ID NO: 688823 - RNA, 18 nt, Artificial Sequence
  Synthetic
uauuggcaauaaugguuu

SEQ ID NO: 688824 - RNA, 19 nt, Artificial Sequence
  Synthetic
uuauuggcaauaaugguuu

SEQ ID NO: 688825 - RNA, 20 nt, Artificial Sequence
  Synthetic
guuauuggcaauaaugguuu

SEQ ID NO: 688826 - RNA, 21 nt, Artificial Sequence
  Synthetic
uguuauuggcaauaaugguuu

SEQ ID NO: 688827 - RNA, 22 nt, Artificial Sequence
  Synthetic
uuguuauuggcaauaaugguuu

SEQ ID NO: 688828 - RNA, 23 nt, Artificial Sequence
  Synthetic
guuguuauuggcaauaaugguuu

SEQ ID NO: 688829 - RNA, 24 nt, Artificial Sequence
  Synthetic
uguuguuauuggcaauaaugguuu

SEQ ID NO: 688830 - RNA, 18 nt, Artificial Sequence
  Synthetic
uucaggaaaugaugguuu

SEQ ID NO: 688831 - RNA, 19 nt, Artificial Sequence
  Synthetic
uuucaggaaaugaugguuu

SEQ ID NO: 688832 - RNA, 20 nt, Artificial Sequence
  Synthetic
cuuucaggaaaugaugguuu

SEQ ID NO: 688833 - RNA, 21 nt, Artificial Sequence
  Synthetic
acuuucaggaaaugaugguuu

SEQ ID NO: 688834 - RNA, 22 nt, Artificial Sequence
  Synthetic
gacuuucaggaaaugaugguuu

SEQ ID NO: 688835 - RNA, 23 nt, Artificial Sequence
  Synthetic
ggacuuucaggaaaugaugguuu

SEQ ID NO: 688836 - RNA, 24 nt, Artificial Sequence
  Synthetic
aggacuuucaggaaaugaugguuu

SEQ ID NO: 688837 - RNA, 18 nt, Artificial Sequence
  Synthetic
aaaugggcaauaugguuu

SEQ ID NO: 688838 - RNA, 19 nt, Artificial Sequence
  Synthetic
uaaaugggcaauaugguuu

SEQ ID NO: 688839 - RNA, 20 nt, Artificial Sequence
  Synthetic
uuaaaugggcaauaugguuu

SEQ ID NO: 688840 - RNA, 21 nt, Artificial Sequence
  Synthetic
uuuaaaugggcaauaugguuu

SEQ ID NO: 688841 - RNA, 22 nt, Artificial Sequence
  Synthetic
auuuaaaugggcaauaugguuu

SEQ ID NO: 688842 - RNA, 23 nt, Artificial Sequence
  Synthetic
uauuuaaaugggcaauaugguuu

SEQ ID NO: 688843 - RNA, 24 nt, Artificial Sequence
  Synthetic
uuauuuaaaugggcaauaugguuu

SEQ ID NO: 688844 - RNA, 18 nt, Artificial Sequence
  Synthetic
cagggaauuguaugguuu

SEQ ID NO: 688845 - RNA, 19 nt, Artificial Sequence
  Synthetic
ucagggaauuguaugguuu

SEQ ID NO: 688846 - RNA, 20 nt, Artificial Sequence
  Synthetic
uucagggaauuguaugguuu

SEQ ID NO: 688847 - RNA, 21 nt, Artificial Sequence
  Synthetic
uuucagggaauuguaugguuu

SEQ ID NO: 688848 - RNA, 22 nt, Artificial Sequence
  Synthetic
auuucagggaauuguaugguuu

SEQ ID NO: 688849 - RNA, 23 nt, Artificial Sequence
  Synthetic
cauuucagggaauuguaugguuu

SEQ ID NO: 688850 - RNA, 24 nt, Artificial Sequence
  Synthetic
ucauuucagggaauuguaugguuu

SEQ ID NO: 688851 - RNA, 18 nt, Artificial Sequence
  Synthetic
auuucggcgcccugguuu

SEQ ID NO: 688852 - RNA, 19 nt, Artificial Sequence
  Synthetic
gauuucggcgcccugguuu

SEQ ID NO: 688853 - RNA, 20 nt, Artificial Sequence
  Synthetic
ggauuucggcgcccugguuu

SEQ ID NO: 688854 - RNA, 21 nt, Artificial Sequence
  Synthetic
uggauuucggcgcccugguuu

SEQ ID NO: 688855 - RNA, 22 nt, Artificial Sequence
  Synthetic
auggauuucggcgcccugguuu

SEQ ID NO: 688856 - RNA, 23 nt, Artificial Sequence
  Synthetic
aauggauuucggcgcccugguuu

SEQ ID NO: 688857 - RNA, 24 nt, Artificial Sequence
  Synthetic
aaauggauuucggcgcccugguuu

SEQ ID NO: 688858 - RNA, 18 nt, Artificial Sequence
  Synthetic
augcugcccagcugguuu

SEQ ID NO: 688859 - RNA, 19 nt, Artificial Sequence
  Synthetic
uaugcugcccagcugguuu

SEQ ID NO: 688860 - RNA, 20 nt, Artificial Sequence
  Synthetic
uuaugcugcccagcugguuu

SEQ ID NO: 688861 - RNA, 21 nt, Artificial Sequence
  Synthetic
guuaugcugcccagcugguuu

SEQ ID NO: 688862 - RNA, 22 nt, Artificial Sequence
  Synthetic
uguuaugcugcccagcugguuu

SEQ ID NO: 688863 - RNA, 23 nt, Artificial Sequence
  Synthetic
uuguuaugcugcccagcugguuu

SEQ ID NO: 688864 - RNA, 24 nt, Artificial Sequence
  Synthetic
guuguuaugcugcccagcugguuu

SEQ ID NO: 688865 - RNA, 18 nt, Artificial Sequence
  Synthetic
acccgaugguucugguuu

SEQ ID NO: 688866 - RNA, 19 nt, Artificial Sequence
  Synthetic
cacccgaugguucugguuu

SEQ ID NO: 688867 - RNA, 20 nt, Artificial Sequence
  Synthetic
gcacccgaugguucugguuu

SEQ ID NO: 688868 - RNA, 21 nt, Artificial Sequence
  Synthetic
agcacccgaugguucugguuu

SEQ ID NO: 688869 - RNA, 22 nt, Artificial Sequence
  Synthetic
uagcacccgaugguucugguuu

SEQ ID NO: 688870 - RNA, 23 nt, Artificial Sequence
  Synthetic
uuagcacccgaugguucugguuu

SEQ ID NO: 688871 - RNA, 24 nt, Artificial Sequence
  Synthetic
auuagcacccgaugguucugguuu

SEQ ID NO: 688872 - RNA, 18 nt, Artificial Sequence
  Synthetic
agagauaagaagugguuu

SEQ ID NO: 688873 - RNA, 19 nt, Artificial Sequence
  Synthetic
uagagauaagaagugguuu

SEQ ID NO: 688874 - RNA, 20 nt, Artificial Sequence
  Synthetic
guagagauaagaagugguuu

SEQ ID NO: 688875 - RNA, 21 nt, Artificial Sequence
  Synthetic
gguagagauaagaagugguuu

SEQ ID NO: 688876 - RNA, 22 nt, Artificial Sequence
  Synthetic
ugguagagauaagaagugguuu

SEQ ID NO: 688877 - RNA, 23 nt, Artificial Sequence
  Synthetic
gugguagagauaagaagugguuu

SEQ ID NO: 688878 - RNA, 24 nt, Artificial Sequence
  Synthetic
ugugguagagauaagaagugguuu

SEQ ID NO: 688879 - RNA, 18 nt, Artificial Sequence
  Synthetic
auuuuaaguaagugguuu

SEQ ID NO: 688880 - RNA, 19 nt, Artificial Sequence
  Synthetic
cauuuuaaguaagugguuu

SEQ ID NO: 688881 - RNA, 20 nt, Artificial Sequence
  Synthetic
gcauuuuaaguaagugguuu

SEQ ID NO: 688882 - RNA, 21 nt, Artificial Sequence
  Synthetic
ggcauuuuaaguaagugguuu

SEQ ID NO: 688883 - RNA, 22 nt, Artificial Sequence
  Synthetic
uggcauuuuaaguaagugguuu

SEQ ID NO: 688884 - RNA, 23 nt, Artificial Sequence
  Synthetic
auggcauuuuaaguaagugguuu

SEQ ID NO: 688885 - RNA, 24 nt, Artificial Sequence
  Synthetic
aauggcauuuuaaguaagugguuu

SEQ ID NO: 688886 - RNA, 18 nt, Artificial Sequence
  Synthetic
uaucuaaguuggugguuu

SEQ ID NO: 688887 - RNA, 19 nt, Artificial Sequence
  Synthetic
uuaucuaaguuggugguuu

SEQ ID NO: 688888 - RNA, 20 nt, Artificial Sequence
  Synthetic
uuuaucuaaguuggugguuu

SEQ ID NO: 688889 - RNA, 21 nt, Artificial Sequence
  Synthetic
auuuaucuaaguuggugguuu

SEQ ID NO: 688890 - RNA, 22 nt, Artificial Sequence
  Synthetic
aauuuaucuaaguuggugguuu

SEQ ID NO: 688891 - RNA, 23 nt, Artificial Sequence
  Synthetic
aaauuuaucuaaguuggugguuu

SEQ ID NO: 688892 - RNA, 24 nt, Artificial Sequence
  Synthetic
uaaauuuaucuaaguuggugguuu

SEQ ID NO: 688893 - RNA, 18 nt, Artificial Sequence
  Synthetic
aaagauaaguugugguuu

SEQ ID NO: 688894 - RNA, 19 nt, Artificial Sequence
  Synthetic
caaagauaaguugugguuu

SEQ ID NO: 688895 - RNA, 20 nt, Artificial Sequence
  Synthetic
acaaagauaaguugugguuu

SEQ ID NO: 688896 - RNA, 21 nt, Artificial Sequence
  Synthetic
cacaaagauaaguugugguuu

SEQ ID NO: 688897 - RNA, 22 nt, Artificial Sequence
  Synthetic
gcacaaagauaaguugugguuu

SEQ ID NO: 688898 - RNA, 23 nt, Artificial Sequence
  Synthetic
agcacaaagauaaguugugguuu

SEQ ID NO: 688899 - RNA, 24 nt, Artificial Sequence
  Synthetic
gagcacaaagauaaguugugguuu

SEQ ID NO: 688900 - RNA, 18 nt, Artificial Sequence
  Synthetic
ugaaaauuuaauugguuu

SEQ ID NO: 688901 - RNA, 19 nt, Artificial Sequence
  Synthetic
cugaaaauuuaauugguuu

SEQ ID NO: 688902 - RNA, 20 nt, Artificial Sequence
  Synthetic
ucugaaaauuuaauugguuu

SEQ ID NO: 688903 - RNA, 21 nt, Artificial Sequence
  Synthetic
gucugaaaauuuaauugguuu

SEQ ID NO: 688904 - RNA, 22 nt, Artificial Sequence
  Synthetic
agucugaaaauuuaauugguuu

SEQ ID NO: 688905 - RNA, 23 nt, Artificial Sequence
  Synthetic
uagucugaaaauuuaauugguuu

SEQ ID NO: 688906 - RNA, 24 nt, Artificial Sequence
  Synthetic
cuagucugaaaauuuaauugguuu

SEQ ID NO: 688907 - RNA, 18 nt, Artificial Sequence
  Synthetic
gugaaaugaauuugguuu

SEQ ID NO: 688908 - RNA, 19 nt, Artificial Sequence
  Synthetic
ggugaaaugaauuugguuu

SEQ ID NO: 688909 - RNA, 20 nt, Artificial Sequence
  Synthetic
aggugaaaugaauuugguuu

SEQ ID NO: 688910 - RNA, 21 nt, Artificial Sequence
  Synthetic
aaggugaaaugaauuugguuu

SEQ ID NO: 688911 - RNA, 22 nt, Artificial Sequence
  Synthetic
aaaggugaaaugaauuugguuu

SEQ ID NO: 688912 - RNA, 23 nt, Artificial Sequence
  Synthetic
uaaaggugaaaugaauuugguuu

SEQ ID NO: 688913 - RNA, 24 nt, Artificial Sequence
  Synthetic
guaaaggugaaaugaauuugguuu

SEQ ID NO: 688914 - RNA, 18 nt, Artificial Sequence
  Synthetic
auucauuuucuuugguuu

SEQ ID NO: 688915 - RNA, 19 nt, Artificial Sequence
  Synthetic
gauucauuuucuuugguuu

SEQ ID NO: 688916 - RNA, 20 nt, Artificial Sequence
  Synthetic
ugauucauuuucuuugguuu

SEQ ID NO: 688917 - RNA, 21 nt, Artificial Sequence
  Synthetic
gugauucauuuucuuugguuu

SEQ ID NO: 688918 - RNA, 22 nt, Artificial Sequence
  Synthetic
agugauucauuuucuuugguuu

SEQ ID NO: 688919 - RNA, 23 nt, Artificial Sequence
  Synthetic
cagugauucauuuucuuugguuu

SEQ ID NO: 688920 - RNA, 24 nt, Artificial Sequence
  Synthetic
ccagugauucauuuucuuugguuu

SEQ ID NO: 688921 - RNA, 18 nt, Artificial Sequence
  Synthetic
ucuaacgaauuuugguuu

SEQ ID NO: 688922 - RNA, 19 nt, Artificial Sequence
  Synthetic
uucuaacgaauuuugguuu

SEQ ID NO: 688923 - RNA, 20 nt, Artificial Sequence
  Synthetic
uuucuaacgaauuuugguuu

SEQ ID NO: 688924 - RNA, 21 nt, Artificial Sequence
  Synthetic
uuuucuaacgaauuuugguuu

SEQ ID NO: 688925 - RNA, 22 nt, Artificial Sequence
  Synthetic
auuuucuaacgaauuuugguuu

SEQ ID NO: 688926 - RNA, 23 nt, Artificial Sequence
  Synthetic
gauuuucuaacgaauuuugguuu

SEQ ID NO: 688927 - RNA, 24 nt, Artificial Sequence
  Synthetic
ugauuuucuaacgaauuuugguuu

SEQ ID NO: 688928 - RNA, 18 nt, Artificial Sequence
  Synthetic
aauccugcuucaauguuu

SEQ ID NO: 688929 - RNA, 19 nt, Artificial Sequence
  Synthetic
uaauccugcuucaauguuu

SEQ ID NO: 688930 - RNA, 20 nt, Artificial Sequence
  Synthetic
uuaauccugcuucaauguuu

SEQ ID NO: 688931 - RNA, 21 nt, Artificial Sequence
  Synthetic
auuaauccugcuucaauguuu

SEQ ID NO: 688932 - RNA, 22 nt, Artificial Sequence
  Synthetic
uauuaauccugcuucaauguuu

SEQ ID NO: 688933 - RNA, 23 nt, Artificial Sequence
  Synthetic
auauuaauccugcuucaauguuu

SEQ ID NO: 688934 - RNA, 24 nt, Artificial Sequence
  Synthetic
cauauuaauccugcuucaauguuu

SEQ ID NO: 688935 - RNA, 18 nt, Artificial Sequence
  Synthetic
ggaaaaaaaugaauguuu

SEQ ID NO: 688936 - RNA, 19 nt, Artificial Sequence
  Synthetic
uggaaaaaaaugaauguuu

SEQ ID NO: 688937 - RNA, 20 nt, Artificial Sequence
  Synthetic
auggaaaaaaaugaauguuu

SEQ ID NO: 688938 - RNA, 21 nt, Artificial Sequence
  Synthetic
cauggaaaaaaaugaauguuu

SEQ ID NO: 688939 - RNA, 22 nt, Artificial Sequence
  Synthetic
ucauggaaaaaaaugaauguuu

SEQ ID NO: 688940 - RNA, 23 nt, Artificial Sequence
  Synthetic
uucauggaaaaaaaugaauguuu

SEQ ID NO: 688941 - RNA, 24 nt, Artificial Sequence
  Synthetic
uuucauggaaaaaaaugaauguuu

SEQ ID NO: 688942 - RNA, 18 nt, Artificial Sequence
  Synthetic
uuuccuaaaauaauguuu

SEQ ID NO: 688943 - RNA, 19 nt, Artificial Sequence
  Synthetic
uuuuccuaaaauaauguuu

SEQ ID NO: 688944 - RNA, 20 nt, Artificial Sequence
  Synthetic
uuuuuccuaaaauaauguuu

SEQ ID NO: 688945 - RNA, 21 nt, Artificial Sequence
  Synthetic
auuuuuccuaaaauaauguuu

SEQ ID NO: 688946 - RNA, 22 nt, Artificial Sequence
  Synthetic
aauuuuuccuaaaauaauguuu

SEQ ID NO: 688947 - RNA, 23 nt, Artificial Sequence
  Synthetic
uaauuuuuccuaaaauaauguuu

SEQ ID NO: 688948 - RNA, 24 nt, Artificial Sequence
  Synthetic
auaauuuuuccuaaaauaauguuu

SEQ ID NO: 688949 - RNA, 18 nt, Artificial Sequence
  Synthetic
cgaaggccuuuaauguuu

SEQ ID NO: 688950 - RNA, 19 nt, Artificial Sequence
  Synthetic
acgaaggccuuuaauguuu

SEQ ID NO: 688951 - RNA, 20 nt, Artificial Sequence
  Synthetic
cacgaaggccuuuaauguuu

SEQ ID NO: 688952 - RNA, 21 nt, Artificial Sequence
  Synthetic
gcacgaaggccuuuaauguuu

SEQ ID NO: 688953 - RNA, 22 nt, Artificial Sequence
  Synthetic
ggcacgaaggccuuuaauguuu

SEQ ID NO: 688954 - RNA, 23 nt, Artificial Sequence
  Synthetic
aggcacgaaggccuuuaauguuu

SEQ ID NO: 688955 - RNA, 24 nt, Artificial Sequence
  Synthetic
caggcacgaaggccuuuaauguuu

SEQ ID NO: 688956 - RNA, 18 nt, Artificial Sequence
  Synthetic
auaacucccaccauguuu

SEQ ID NO: 688957 - RNA, 19 nt, Artificial Sequence
  Synthetic
aauaacucccaccauguuu

SEQ ID NO: 688958 - RNA, 20 nt, Artificial Sequence
  Synthetic
uaauaacucccaccauguuu

SEQ ID NO: 688959 - RNA, 21 nt, Artificial Sequence
  Synthetic
uuaauaacucccaccauguuu

SEQ ID NO: 688960 - RNA, 22 nt, Artificial Sequence
  Synthetic
auuaauaacucccaccauguuu

SEQ ID NO: 688961 - RNA, 23 nt, Artificial Sequence
  Synthetic
uauuaauaacucccaccauguuu

SEQ ID NO: 688962 - RNA, 24 nt, Artificial Sequence
  Synthetic
uuauuaauaacucccaccauguuu

SEQ ID NO: 688963 - RNA, 18 nt, Artificial Sequence
  Synthetic
aaaaguguuuccauguuu

SEQ ID NO: 688964 - RNA, 19 nt, Artificial Sequence
  Synthetic
aaaaaguguuuccauguuu

SEQ ID NO: 688965 - RNA, 20 nt, Artificial Sequence
  Synthetic
gaaaaaguguuuccauguuu

SEQ ID NO: 688966 - RNA, 21 nt, Artificial Sequence
  Synthetic
ggaaaaaguguuuccauguuu

SEQ ID NO: 688967 - RNA, 22 nt, Artificial Sequence
  Synthetic
aggaaaaaguguuuccauguuu

SEQ ID NO: 688968 - RNA, 23 nt, Artificial Sequence
  Synthetic
aaggaaaaaguguuuccauguuu

SEQ ID NO: 688969 - RNA, 24 nt, Artificial Sequence
  Synthetic
gaaggaaaaaguguuuccauguuu

SEQ ID NO: 688970 - RNA, 18 nt, Artificial Sequence
  Synthetic
caacaugggaucauguuu

SEQ ID NO: 688971 - RNA, 19 nt, Artificial Sequence
  Synthetic
gcaacaugggaucauguuu

SEQ ID NO: 688972 - RNA, 20 nt, Artificial Sequence
  Synthetic
agcaacaugggaucauguuu

SEQ ID NO: 688973 - RNA, 21 nt, Artificial Sequence
  Synthetic
aagcaacaugggaucauguuu

SEQ ID NO: 688974 - RNA, 22 nt, Artificial Sequence
  Synthetic
aaagcaacaugggaucauguuu

SEQ ID NO: 688975 - RNA, 23 nt, Artificial Sequence
  Synthetic
caaagcaacaugggaucauguuu

SEQ ID NO: 688976 - RNA, 24 nt, Artificial Sequence
  Synthetic
ucaaagcaacaugggaucauguuu

SEQ ID NO: 688977 - RNA, 18 nt, Artificial Sequence
  Synthetic
uauuucacgcagauguuu

SEQ ID NO: 688978 - RNA, 19 nt, Artificial Sequence
  Synthetic
uuauuucacgcagauguuu

SEQ ID NO: 688979 - RNA, 20 nt, Artificial Sequence
  Synthetic
cuuauuucacgcagauguuu

SEQ ID NO: 688980 - RNA, 21 nt, Artificial Sequence
  Synthetic
acuuauuucacgcagauguuu

SEQ ID NO: 688981 - RNA, 22 nt, Artificial Sequence
  Synthetic
aacuuauuucacgcagauguuu

SEQ ID NO: 688982 - RNA, 23 nt, Artificial Sequence
  Synthetic
aaacuuauuucacgcagauguuu

SEQ ID NO: 688983 - RNA, 24 nt, Artificial Sequence
  Synthetic
gaaacuuauuucacgcagauguuu

SEQ ID NO: 688984 - RNA, 18 nt, Artificial Sequence
  Synthetic
aaaggcccugagauguuu

SEQ ID NO: 688985 - RNA, 19 nt, Artificial Sequence
  Synthetic
caaaggcccugagauguuu

SEQ ID NO: 688986 - RNA, 20 nt, Artificial Sequence
  Synthetic
gcaaaggcccugagauguuu

SEQ ID NO: 688987 - RNA, 21 nt, Artificial Sequence
  Synthetic
ugcaaaggcccugagauguuu

SEQ ID NO: 688988 - RNA, 22 nt, Artificial Sequence
  Synthetic
gugcaaaggcccugagauguuu

SEQ ID NO: 688989 - RNA, 23 nt, Artificial Sequence
  Synthetic
cgugcaaaggcccugagauguuu

SEQ ID NO: 688990 - RNA, 24 nt, Artificial Sequence
  Synthetic
acgugcaaaggcccugagauguuu

SEQ ID NO: 688991 - RNA, 18 nt, Artificial Sequence
  Synthetic
guguuacucaggauguuu

SEQ ID NO: 688992 - RNA, 19 nt, Artificial Sequence
  Synthetic
uguguuacucaggauguuu

SEQ ID NO: 688993 - RNA, 20 nt, Artificial Sequence
  Synthetic
cuguguuacucaggauguuu

SEQ ID NO: 688994 - RNA, 21 nt, Artificial Sequence
  Synthetic
ccuguguuacucaggauguuu

SEQ ID NO: 688995 - RNA, 22 nt, Artificial Sequence
  Synthetic
uccuguguuacucaggauguuu

SEQ ID NO: 688996 - RNA, 23 nt, Artificial Sequence
  Synthetic
uuccuguguuacucaggauguuu

SEQ ID NO: 688997 - RNA, 24 nt, Artificial Sequence
  Synthetic
uuuccuguguuacucaggauguuu

SEQ ID NO: 688998 - RNA, 18 nt, Artificial Sequence
  Synthetic
aaggaaagauggauguuu

SEQ ID NO: 688999 - RNA, 19 nt, Artificial Sequence
  Synthetic
aaaggaaagauggauguuu

SEQ ID NO: 689000 - RNA, 20 nt, Artificial Sequence
  Synthetic
uaaaggaaagauggauguuu

SEQ ID NO: 689001 - RNA, 21 nt, Artificial Sequence
  Synthetic
guaaaggaaagauggauguuu

SEQ ID NO: 689002 - RNA, 22 nt, Artificial Sequence
  Synthetic
uguaaaggaaagauggauguuu

SEQ ID NO: 689003 - RNA, 23 nt, Artificial Sequence
  Synthetic
auguaaaggaaagauggauguuu

SEQ ID NO: 689004 - RNA, 24 nt, Artificial Sequence
  Synthetic
aauguaaaggaaagauggauguuu

SEQ ID NO: 689005 - RNA, 18 nt, Artificial Sequence
  Synthetic
guuguauuggugauguuu

SEQ ID NO: 689006 - RNA, 19 nt, Artificial Sequence
  Synthetic
gguuguauuggugauguuu

SEQ ID NO: 689007 - RNA, 20 nt, Artificial Sequence
  Synthetic
agguuguauuggugauguuu

SEQ ID NO: 689008 - RNA, 21 nt, Artificial Sequence
  Synthetic
cagguuguauuggugauguuu

SEQ ID NO: 689009 - RNA, 22 nt, Artificial Sequence
  Synthetic
acagguuguauuggugauguuu

SEQ ID NO: 689010 - RNA, 23 nt, Artificial Sequence
  Synthetic
aacagguuguauuggugauguuu

SEQ ID NO: 689011 - RNA, 24 nt, Artificial Sequence
  Synthetic
caacagguuguauuggugauguuu

SEQ ID NO: 689012 - RNA, 18 nt, Artificial Sequence
  Synthetic
cauaaggaaaauauguuu

SEQ ID NO: 689013 - RNA, 19 nt, Artificial Sequence
  Synthetic
acauaaggaaaauauguuu

SEQ ID NO: 689014 - RNA, 20 nt, Artificial Sequence
  Synthetic
cacauaaggaaaauauguuu

SEQ ID NO: 689015 - RNA, 21 nt, Artificial Sequence
  Synthetic
ucacauaaggaaaauauguuu

SEQ ID NO: 689016 - RNA, 22 nt, Artificial Sequence
  Synthetic
aucacauaaggaaaauauguuu

SEQ ID NO: 689017 - RNA, 23 nt, Artificial Sequence
  Synthetic
uaucacauaaggaaaauauguuu

SEQ ID NO: 689018 - RNA, 24 nt, Artificial Sequence
  Synthetic
uuaucacauaaggaaaauauguuu

SEQ ID NO: 689019 - RNA, 18 nt, Artificial Sequence
  Synthetic
uuauagagcaauauguuu

SEQ ID NO: 689020 - RNA, 19 nt, Artificial Sequence
  Synthetic
auuauagagcaauauguuu

SEQ ID NO: 689021 - RNA, 20 nt, Artificial Sequence
  Synthetic
aauuauagagcaauauguuu

SEQ ID NO: 689022 - RNA, 21 nt, Artificial Sequence
  Synthetic
aaauuauagagcaauauguuu

SEQ ID NO: 689023 - RNA, 22 nt, Artificial Sequence
  Synthetic
uaaauuauagagcaauauguuu

SEQ ID NO: 689024 - RNA, 23 nt, Artificial Sequence
  Synthetic
auaaauuauagagcaauauguuu

SEQ ID NO: 689025 - RNA, 24 nt, Artificial Sequence
  Synthetic
aauaaauuauagagcaauauguuu

SEQ ID NO: 689026 - RNA, 18 nt, Artificial Sequence
  Synthetic
aaaaucuguuauauguuu

SEQ ID NO: 689027 - RNA, 19 nt, Artificial Sequence
  Synthetic
uaaaaucuguuauauguuu

SEQ ID NO: 689028 - RNA, 20 nt, Artificial Sequence
  Synthetic
uuaaaaucuguuauauguuu

SEQ ID NO: 689029 - RNA, 21 nt, Artificial Sequence
  Synthetic
uuuaaaaucuguuauauguuu

SEQ ID NO: 689030 - RNA, 22 nt, Artificial Sequence
  Synthetic
uuuuaaaaucuguuauauguuu

SEQ ID NO: 689031 - RNA, 23 nt, Artificial Sequence
  Synthetic
cuuuuaaaaucuguuauauguuu

SEQ ID NO: 689032 - RNA, 24 nt, Artificial Sequence
  Synthetic
gcuuuuaaaaucuguuauauguuu

SEQ ID NO: 689033 - RNA, 18 nt, Artificial Sequence
  Synthetic
acaaccuaagcuauguuu

SEQ ID NO: 689034 - RNA, 19 nt, Artificial Sequence
  Synthetic
uacaaccuaagcuauguuu

SEQ ID NO: 689035 - RNA, 20 nt, Artificial Sequence
  Synthetic
uuacaaccuaagcuauguuu

SEQ ID NO: 689036 - RNA, 21 nt, Artificial Sequence
  Synthetic
guuacaaccuaagcuauguuu

SEQ ID NO: 689037 - RNA, 22 nt, Artificial Sequence
  Synthetic
aguuacaaccuaagcuauguuu

SEQ ID NO: 689038 - RNA, 23 nt, Artificial Sequence
  Synthetic
uaguuacaaccuaagcuauguuu

SEQ ID NO: 689039 - RNA, 24 nt, Artificial Sequence
  Synthetic
guaguuacaaccuaagcuauguuu

SEQ ID NO: 689040 - RNA, 18 nt, Artificial Sequence
  Synthetic
aaauuucucuguauguuu

SEQ ID NO: 689041 - RNA, 19 nt, Artificial Sequence
  Synthetic
aaaauuucucuguauguuu

SEQ ID NO: 689042 - RNA, 20 nt, Artificial Sequence
  Synthetic
gaaaauuucucuguauguuu

SEQ ID NO: 689043 - RNA, 21 nt, Artificial Sequence
  Synthetic
agaaaauuucucuguauguuu

SEQ ID NO: 689044 - RNA, 22 nt, Artificial Sequence
  Synthetic
gagaaaauuucucuguauguuu

SEQ ID NO: 689045 - RNA, 23 nt, Artificial Sequence
  Synthetic
ggagaaaauuucucuguauguuu

SEQ ID NO: 689046 - RNA, 24 nt, Artificial Sequence
  Synthetic
aggagaaaauuucucuguauguuu

SEQ ID NO: 689047 - RNA, 18 nt, Artificial Sequence
  Synthetic
aauaaacugcuuauguuu

SEQ ID NO: 689048 - RNA, 19 nt, Artificial Sequence
  Synthetic
gaauaaacugcuuauguuu

SEQ ID NO: 689049 - RNA, 20 nt, Artificial Sequence
  Synthetic
agaauaaacugcuuauguuu

SEQ ID NO: 689050 - RNA, 21 nt, Artificial Sequence
  Synthetic
gagaauaaacugcuuauguuu

SEQ ID NO: 689051 - RNA, 22 nt, Artificial Sequence
  Synthetic
agagaauaaacugcuuauguuu

SEQ ID NO: 689052 - RNA, 23 nt, Artificial Sequence
  Synthetic
aagagaauaaacugcuuauguuu

SEQ ID NO: 689053 - RNA, 24 nt, Artificial Sequence
  Synthetic
uaagagaauaaacugcuuauguuu

SEQ ID NO: 689054 - RNA, 18 nt, Artificial Sequence
  Synthetic
acaauuagguuuauguuu

SEQ ID NO: 689055 - RNA, 19 nt, Artificial Sequence
  Synthetic
aacaauuagguuuauguuu

SEQ ID NO: 689056 - RNA, 20 nt, Artificial Sequence
  Synthetic
gaacaauuagguuuauguuu

SEQ ID NO: 689057 - RNA, 21 nt, Artificial Sequence
  Synthetic
agaacaauuagguuuauguuu

SEQ ID NO: 689058 - RNA, 22 nt, Artificial Sequence
  Synthetic
cagaacaauuagguuuauguuu

SEQ ID NO: 689059 - RNA, 23 nt, Artificial Sequence
  Synthetic
gcagaacaauuagguuuauguuu

SEQ ID NO: 689060 - RNA, 24 nt, Artificial Sequence
  Synthetic
ugcagaacaauuagguuuauguuu

SEQ ID NO: 689061 - RNA, 18 nt, Artificial Sequence
  Synthetic
acuuuuacugaacuguuu

SEQ ID NO: 689062 - RNA, 19 nt, Artificial Sequence
  Synthetic
uacuuuuacugaacuguuu

SEQ ID NO: 689063 - RNA, 20 nt, Artificial Sequence
  Synthetic
guacuuuuacugaacuguuu

SEQ ID NO: 689064 - RNA, 21 nt, Artificial Sequence
  Synthetic
aguacuuuuacugaacuguuu

SEQ ID NO: 689065 - RNA, 22 nt, Artificial Sequence
  Synthetic
caguacuuuuacugaacuguuu

SEQ ID NO: 689066 - RNA, 23 nt, Artificial Sequence
  Synthetic
ccaguacuuuuacugaacuguuu

SEQ ID NO: 689067 - RNA, 24 nt, Artificial Sequence
  Synthetic
cccaguacuuuuacugaacuguuu

SEQ ID NO: 689068 - RNA, 18 nt, Artificial Sequence
  Synthetic
gaaauaccuuaacuguuu

SEQ ID NO: 689069 - RNA, 19 nt, Artificial Sequence
  Synthetic
agaaauaccuuaacuguuu

SEQ ID NO: 689070 - RNA, 20 nt, Artificial Sequence
  Synthetic
aagaaauaccuuaacuguuu

SEQ ID NO: 689071 - RNA, 21 nt, Artificial Sequence
  Synthetic
aaagaaauaccuuaacuguuu

SEQ ID NO: 689072 - RNA, 22 nt, Artificial Sequence
  Synthetic
gaaagaaauaccuuaacuguuu

SEQ ID NO: 689073 - RNA, 23 nt, Artificial Sequence
  Synthetic
ggaaagaaauaccuuaacuguuu

SEQ ID NO: 689074 - RNA, 24 nt, Artificial Sequence
  Synthetic
aggaaagaaauaccuuaacuguuu

SEQ ID NO: 689075 - RNA, 18 nt, Artificial Sequence
  Synthetic
gaauguuugcgacuguuu

SEQ ID NO: 689076 - RNA, 19 nt, Artificial Sequence
  Synthetic
agaauguuugcgacuguuu

SEQ ID NO: 689077 - RNA, 20 nt, Artificial Sequence
  Synthetic
gagaauguuugcgacuguuu

SEQ ID NO: 689078 - RNA, 21 nt, Artificial Sequence
  Synthetic
agagaauguuugcgacuguuu

SEQ ID NO: 689079 - RNA, 22 nt, Artificial Sequence
  Synthetic
gagagaauguuugcgacuguuu

SEQ ID NO: 689080 - RNA, 23 nt, Artificial Sequence
  Synthetic
agagagaauguuugcgacuguuu

SEQ ID NO: 689081 - RNA, 24 nt, Artificial Sequence
  Synthetic
aagagagaauguuugcgacuguuu

SEQ ID NO: 689082 - RNA, 18 nt, Artificial Sequence
  Synthetic
uauuacauuguacuguuu

SEQ ID NO: 689083 - RNA, 19 nt, Artificial Sequence
  Synthetic
uuauuacauuguacuguuu

SEQ ID NO: 689084 - RNA, 20 nt, Artificial Sequence
  Synthetic
cuuauuacauuguacuguuu

SEQ ID NO: 689085 - RNA, 21 nt, Artificial Sequence
  Synthetic
acuuauuacauuguacuguuu

SEQ ID NO: 689086 - RNA, 22 nt, Artificial Sequence
  Synthetic
uacuuauuacauuguacuguuu

SEQ ID NO: 689087 - RNA, 23 nt, Artificial Sequence
  Synthetic
auacuuauuacauuguacuguuu

SEQ ID NO: 689088 - RNA, 24 nt, Artificial Sequence
  Synthetic
aauacuuauuacauuguacuguuu

SEQ ID NO: 689089 - RNA, 18 nt, Artificial Sequence
  Synthetic
agggcacugauccuguuu

SEQ ID NO: 689090 - RNA, 19 nt, Artificial Sequence
  Synthetic
aagggcacugauccuguuu

SEQ ID NO: 689091 - RNA, 20 nt, Artificial Sequence
  Synthetic
uaagggcacugauccuguuu

SEQ ID NO: 689092 - RNA, 21 nt, Artificial Sequence
  Synthetic
auaagggcacugauccuguuu

SEQ ID NO: 689093 - RNA, 22 nt, Artificial Sequence
  Synthetic
uauaagggcacugauccuguuu

SEQ ID NO: 689094 - RNA, 23 nt, Artificial Sequence
  Synthetic
uuauaagggcacugauccuguuu

SEQ ID NO: 689095 - RNA, 24 nt, Artificial Sequence
  Synthetic
uuuauaagggcacugauccuguuu

SEQ ID NO: 689096 - RNA, 18 nt, Artificial Sequence
  Synthetic
aaaauaugauagcuguuu

SEQ ID NO: 689097 - RNA, 19 nt, Artificial Sequence
  Synthetic
aaaaauaugauagcuguuu

SEQ ID NO: 689098 - RNA, 20 nt, Artificial Sequence
  Synthetic
aaaaaauaugauagcuguuu

SEQ ID NO: 689099 - RNA, 21 nt, Artificial Sequence
  Synthetic
uaaaaaauaugauagcuguuu

SEQ ID NO: 689100 - RNA, 22 nt, Artificial Sequence
  Synthetic
auaaaaaauaugauagcuguuu

SEQ ID NO: 689101 - RNA, 23 nt, Artificial Sequence
  Synthetic
aauaaaaaauaugauagcuguuu

SEQ ID NO: 689102 - RNA, 24 nt, Artificial Sequence
  Synthetic
aaauaaaaaauaugauagcuguuu

SEQ ID NO: 689103 - RNA, 18 nt, Artificial Sequence
  Synthetic
auauuggcuaggcuguuu

SEQ ID NO: 689104 - RNA, 19 nt, Artificial Sequence
  Synthetic
cauauuggcuaggcuguuu

SEQ ID NO: 689105 - RNA, 20 nt, Artificial Sequence
  Synthetic
ccauauuggcuaggcuguuu

SEQ ID NO: 689106 - RNA, 21 nt, Artificial Sequence
  Synthetic
accauauuggcuaggcuguuu

SEQ ID NO: 689107 - RNA, 22 nt, Artificial Sequence
  Synthetic
caccauauuggcuaggcuguuu

SEQ ID NO: 689108 - RNA, 23 nt, Artificial Sequence
  Synthetic
ucaccauauuggcuaggcuguuu

SEQ ID NO: 689109 - RNA, 24 nt, Artificial Sequence
  Synthetic
uucaccauauuggcuaggcuguuu

SEQ ID NO: 689110 - RNA, 18 nt, Artificial Sequence
  Synthetic
auucaguaaaaucuguuu

SEQ ID NO: 689111 - RNA, 19 nt, Artificial Sequence
  Synthetic
cauucaguaaaaucuguuu

SEQ ID NO: 689112 - RNA, 20 nt, Artificial Sequence
  Synthetic
acauucaguaaaaucuguuu

SEQ ID NO: 689113 - RNA, 21 nt, Artificial Sequence
  Synthetic
uacauucaguaaaaucuguuu

SEQ ID NO: 689114 - RNA, 22 nt, Artificial Sequence
  Synthetic
uuacauucaguaaaaucuguuu

SEQ ID NO: 689115 - RNA, 23 nt, Artificial Sequence
  Synthetic
uuuacauucaguaaaaucuguuu

SEQ ID NO: 689116 - RNA, 24 nt, Artificial Sequence
  Synthetic
auuuacauucaguaaaaucuguuu

SEQ ID NO: 689117 - RNA, 18 nt, Artificial Sequence
  Synthetic
cugugguuuuaucuguuu

SEQ ID NO: 689118 - RNA, 19 nt, Artificial Sequence
  Synthetic
ucugugguuuuaucuguuu

SEQ ID NO: 689119 - RNA, 20 nt, Artificial Sequence
  Synthetic
cucugugguuuuaucuguuu

SEQ ID NO: 689120 - RNA, 21 nt, Artificial Sequence
  Synthetic
acucugugguuuuaucuguuu

SEQ ID NO: 689121 - RNA, 22 nt, Artificial Sequence
  Synthetic
aacucugugguuuuaucuguuu

SEQ ID NO: 689122 - RNA, 23 nt, Artificial Sequence
  Synthetic
caacucugugguuuuaucuguuu

SEQ ID NO: 689123 - RNA, 24 nt, Artificial Sequence
  Synthetic
ccaacucugugguuuuaucuguuu

SEQ ID NO: 689124 - RNA, 18 nt, Artificial Sequence
  Synthetic
uaccaaacaacucuguuu

SEQ ID NO: 689125 - RNA, 19 nt, Artificial Sequence
  Synthetic
uuaccaaacaacucuguuu

SEQ ID NO: 689126 - RNA, 20 nt, Artificial Sequence
  Synthetic
auuaccaaacaacucuguuu

SEQ ID NO: 689127 - RNA, 21 nt, Artificial Sequence
  Synthetic
cauuaccaaacaacucuguuu

SEQ ID NO: 689128 - RNA, 22 nt, Artificial Sequence
  Synthetic
acauuaccaaacaacucuguuu

SEQ ID NO: 689129 - RNA, 23 nt, Artificial Sequence
  Synthetic
gacauuaccaaacaacucuguuu

SEQ ID NO: 689130 - RNA, 24 nt, Artificial Sequence
  Synthetic
ugacauuaccaaacaacucuguuu

SEQ ID NO: 689131 - RNA, 18 nt, Artificial Sequence
  Synthetic
gaaaaaggugcucuguuu

SEQ ID NO: 689132 - RNA, 19 nt, Artificial Sequence
  Synthetic
ggaaaaaggugcucuguuu

SEQ ID NO: 689133 - RNA, 20 nt, Artificial Sequence
  Synthetic
aggaaaaaggugcucuguuu

SEQ ID NO: 689134 - RNA, 21 nt, Artificial Sequence
  Synthetic
caggaaaaaggugcucuguuu

SEQ ID NO: 689135 - RNA, 22 nt, Artificial Sequence
  Synthetic
ucaggaaaaaggugcucuguuu

SEQ ID NO: 689136 - RNA, 23 nt, Artificial Sequence
  Synthetic
gucaggaaaaaggugcucuguuu

SEQ ID NO: 689137 - RNA, 24 nt, Artificial Sequence
  Synthetic
ugucaggaaaaaggugcucuguuu

SEQ ID NO: 689138 - RNA, 18 nt, Artificial Sequence
  Synthetic
ugguaucuuucucuguuu

SEQ ID NO: 689139 - RNA, 19 nt, Artificial Sequence
  Synthetic
uugguaucuuucucuguuu

SEQ ID NO: 689140 - RNA, 20 nt, Artificial Sequence
  Synthetic
guugguaucuuucucuguuu

SEQ ID NO: 689141 - RNA, 21 nt, Artificial Sequence
  Synthetic
uguugguaucuuucucuguuu

SEQ ID NO: 689142 - RNA, 22 nt, Artificial Sequence
  Synthetic
auguugguaucuuucucuguuu

SEQ ID NO: 689143 - RNA, 23 nt, Artificial Sequence
  Synthetic
aauguugguaucuuucucuguuu

SEQ ID NO: 689144 - RNA, 24 nt, Artificial Sequence
  Synthetic
gaauguugguaucuuucucuguuu

SEQ ID NO: 689145 - RNA, 18 nt, Artificial Sequence
  Synthetic
uuguuuaaaggucuguuu

SEQ ID NO: 689146 - RNA, 19 nt, Artificial Sequence
  Synthetic
auuguuuaaaggucuguuu

SEQ ID NO: 689147 - RNA, 20 nt, Artificial Sequence
  Synthetic
cauuguuuaaaggucuguuu

SEQ ID NO: 689148 - RNA, 21 nt, Artificial Sequence
  Synthetic
ucauuguuuaaaggucuguuu

SEQ ID NO: 689149 - RNA, 22 nt, Artificial Sequence
  Synthetic
aucauuguuuaaaggucuguuu

SEQ ID NO: 689150 - RNA, 23 nt, Artificial Sequence
  Synthetic
aaucauuguuuaaaggucuguuu

SEQ ID NO: 689151 - RNA, 24 nt, Artificial Sequence
  Synthetic
uaaucauuguuuaaaggucuguuu

SEQ ID NO: 689152 - RNA, 18 nt, Artificial Sequence
  Synthetic
gacccuccuggucuguuu

SEQ ID NO: 689153 - RNA, 19 nt, Artificial Sequence
  Synthetic
cgacccuccuggucuguuu

SEQ ID NO: 689154 - RNA, 20 nt, Artificial Sequence
  Synthetic
acgacccuccuggucuguuu

SEQ ID NO: 689155 - RNA, 21 nt, Artificial Sequence
  Synthetic
cacgacccuccuggucuguuu

SEQ ID NO: 689156 - RNA, 22 nt, Artificial Sequence
  Synthetic
ccacgacccuccuggucuguuu

SEQ ID NO: 689157 - RNA, 23 nt, Artificial Sequence
  Synthetic
uccacgacccuccuggucuguuu

SEQ ID NO: 689158 - RNA, 24 nt, Artificial Sequence
  Synthetic
auccacgacccuccuggucuguuu

SEQ ID NO: 689159 - RNA, 18 nt, Artificial Sequence
  Synthetic
aagcaaaagugucuguuu

SEQ ID NO: 689160 - RNA, 19 nt, Artificial Sequence
  Synthetic
uaagcaaaagugucuguuu

SEQ ID NO: 689161 - RNA, 20 nt, Artificial Sequence
  Synthetic
auaagcaaaagugucuguuu

SEQ ID NO: 689162 - RNA, 21 nt, Artificial Sequence
  Synthetic
gauaagcaaaagugucuguuu

SEQ ID NO: 689163 - RNA, 22 nt, Artificial Sequence
  Synthetic
agauaagcaaaagugucuguuu

SEQ ID NO: 689164 - RNA, 23 nt, Artificial Sequence
  Synthetic
aagauaagcaaaagugucuguuu

SEQ ID NO: 689165 - RNA, 24 nt, Artificial Sequence
  Synthetic
uaagauaagcaaaagugucuguuu

SEQ ID NO: 689166 - RNA, 18 nt, Artificial Sequence
  Synthetic
aaacuuggaauucuguuu

SEQ ID NO: 689167 - RNA, 19 nt, Artificial Sequence
  Synthetic
aaaacuuggaauucuguuu

SEQ ID NO: 689168 - RNA, 20 nt, Artificial Sequence
  Synthetic
uaaaacuuggaauucuguuu

SEQ ID NO: 689169 - RNA, 21 nt, Artificial Sequence
  Synthetic
uuaaaacuuggaauucuguuu

SEQ ID NO: 689170 - RNA, 22 nt, Artificial Sequence
  Synthetic
cuuaaaacuuggaauucuguuu

SEQ ID NO: 689171 - RNA, 23 nt, Artificial Sequence
  Synthetic
ucuuaaaacuuggaauucuguuu

SEQ ID NO: 689172 - RNA, 24 nt, Artificial Sequence
  Synthetic
cucuuaaaacuuggaauucuguuu

SEQ ID NO: 689173 - RNA, 18 nt, Artificial Sequence
  Synthetic
gaaagaccccuucuguuu

SEQ ID NO: 689174 - RNA, 19 nt, Artificial Sequence
  Synthetic
ugaaagaccccuucuguuu

SEQ ID NO: 689175 - RNA, 20 nt, Artificial Sequence
  Synthetic
gugaaagaccccuucuguuu

SEQ ID NO: 689176 - RNA, 21 nt, Artificial Sequence
  Synthetic
ggugaaagaccccuucuguuu

SEQ ID NO: 689177 - RNA, 22 nt, Artificial Sequence
  Synthetic
uggugaaagaccccuucuguuu

SEQ ID NO: 689178 - RNA, 23 nt, Artificial Sequence
  Synthetic
auggugaaagaccccuucuguuu

SEQ ID NO: 689179 - RNA, 24 nt, Artificial Sequence
  Synthetic
uauggugaaagaccccuucuguuu

SEQ ID NO: 689180 - RNA, 18 nt, Artificial Sequence
  Synthetic
acuuuucaaagaguguuu

SEQ ID NO: 689181 - RNA, 19 nt, Artificial Sequence
  Synthetic
uacuuuucaaagaguguuu

SEQ ID NO: 689182 - RNA, 20 nt, Artificial Sequence
  Synthetic
guacuuuucaaagaguguuu

SEQ ID NO: 689183 - RNA, 21 nt, Artificial Sequence
  Synthetic
aguacuuuucaaagaguguuu

SEQ ID NO: 689184 - RNA, 22 nt, Artificial Sequence
  Synthetic
gaguacuuuucaaagaguguuu

SEQ ID NO: 689185 - RNA, 23 nt, Artificial Sequence
  Synthetic
agaguacuuuucaaagaguguuu

SEQ ID NO: 689186 - RNA, 24 nt, Artificial Sequence
  Synthetic
aagaguacuuuucaaagaguguuu

SEQ ID NO: 689187 - RNA, 18 nt, Artificial Sequence
  Synthetic
uuacagaggcuaguguuu

SEQ ID NO: 689188 - RNA, 19 nt, Artificial Sequence
  Synthetic
auuacagaggcuaguguuu

SEQ ID NO: 689189 - RNA, 20 nt, Artificial Sequence
  Synthetic
gauuacagaggcuaguguuu

SEQ ID NO: 689190 - RNA, 21 nt, Artificial Sequence
  Synthetic
ggauuacagaggcuaguguuu

SEQ ID NO: 689191 - RNA, 22 nt, Artificial Sequence
  Synthetic
aggauuacagaggcuaguguuu

SEQ ID NO: 689192 - RNA, 23 nt, Artificial Sequence
  Synthetic
caggauuacagaggcuaguguuu

SEQ ID NO: 689193 - RNA, 24 nt, Artificial Sequence
  Synthetic
ccaggauuacagaggcuaguguuu

SEQ ID NO: 689194 - RNA, 18 nt, Artificial Sequence
  Synthetic
aacaagcagguaguguuu

SEQ ID NO: 689195 - RNA, 19 nt, Artificial Sequence
  Synthetic
uaacaagcagguaguguuu

SEQ ID NO: 689196 - RNA, 20 nt, Artificial Sequence
  Synthetic
uuaacaagcagguaguguuu

SEQ ID NO: 689197 - RNA, 21 nt, Artificial Sequence
  Synthetic
uuuaacaagcagguaguguuu

SEQ ID NO: 689198 - RNA, 22 nt, Artificial Sequence
  Synthetic
auuuaacaagcagguaguguuu

SEQ ID NO: 689199 - RNA, 23 nt, Artificial Sequence
  Synthetic
uauuuaacaagcagguaguguuu

SEQ ID NO: 689200 - RNA, 24 nt, Artificial Sequence
  Synthetic
auauuuaacaagcagguaguguuu

SEQ ID NO: 689201 - RNA, 18 nt, Artificial Sequence
  Synthetic
ggcuacaucaagguguuu

SEQ ID NO: 689202 - RNA, 19 nt, Artificial Sequence
  Synthetic
aggcuacaucaagguguuu

SEQ ID NO: 689203 - RNA, 20 nt, Artificial Sequence
  Synthetic
aaggcuacaucaagguguuu

SEQ ID NO: 689204 - RNA, 21 nt, Artificial Sequence
  Synthetic
uaaggcuacaucaagguguuu

SEQ ID NO: 689205 - RNA, 22 nt, Artificial Sequence
  Synthetic
uuaaggcuacaucaagguguuu

SEQ ID NO: 689206 - RNA, 23 nt, Artificial Sequence
  Synthetic
cuuaaggcuacaucaagguguuu

SEQ ID NO: 689207 - RNA, 24 nt, Artificial Sequence
  Synthetic
gcuuaaggcuacaucaagguguuu

SEQ ID NO: 689208 - RNA, 18 nt, Artificial Sequence
  Synthetic
uuaaguagcucuguguuu

SEQ ID NO: 689209 - RNA, 19 nt, Artificial Sequence
  Synthetic
guuaaguagcucuguguuu

SEQ ID NO: 689210 - RNA, 20 nt, Artificial Sequence
  Synthetic
aguuaaguagcucuguguuu

SEQ ID NO: 689211 - RNA, 21 nt, Artificial Sequence
  Synthetic
aaguuaaguagcucuguguuu

SEQ ID NO: 689212 - RNA, 22 nt, Artificial Sequence
  Synthetic
caaguuaaguagcucuguguuu

SEQ ID NO: 689213 - RNA, 23 nt, Artificial Sequence
  Synthetic
acaaguuaaguagcucuguguuu

SEQ ID NO: 689214 - RNA, 24 nt, Artificial Sequence
  Synthetic
aacaaguuaaguagcucuguguuu

SEQ ID NO: 689215 - RNA, 18 nt, Artificial Sequence
  Synthetic
cucuagauuucuguguuu

SEQ ID NO: 689216 - RNA, 19 nt, Artificial Sequence
  Synthetic
acucuagauuucuguguuu

SEQ ID NO: 689217 - RNA, 20 nt, Artificial Sequence
  Synthetic
aacucuagauuucuguguuu

SEQ ID NO: 689218 - RNA, 21 nt, Artificial Sequence
  Synthetic
caacucuagauuucuguguuu

SEQ ID NO: 689219 - RNA, 22 nt, Artificial Sequence
  Synthetic
ucaacucuagauuucuguguuu

SEQ ID NO: 689220 - RNA, 23 nt, Artificial Sequence
  Synthetic
gucaacucuagauuucuguguuu

SEQ ID NO: 689221 - RNA, 24 nt, Artificial Sequence
  Synthetic
ugucaacucuagauuucuguguuu

SEQ ID NO: 689222 - RNA, 18 nt, Artificial Sequence
  Synthetic
gauguucuuucauuguuu

SEQ ID NO: 689223 - RNA, 19 nt, Artificial Sequence
  Synthetic
ggauguucuuucauuguuu

SEQ ID NO: 689224 - RNA, 20 nt, Artificial Sequence
  Synthetic
uggauguucuuucauuguuu

SEQ ID NO: 689225 - RNA, 21 nt, Artificial Sequence
  Synthetic
guggauguucuuucauuguuu

SEQ ID NO: 689226 - RNA, 22 nt, Artificial Sequence
  Synthetic
cguggauguucuuucauuguuu

SEQ ID NO: 689227 - RNA, 23 nt, Artificial Sequence
  Synthetic
acguggauguucuuucauuguuu

SEQ ID NO: 689228 - RNA, 24 nt, Artificial Sequence
  Synthetic
uacguggauguucuuucauuguuu

SEQ ID NO: 689229 - RNA, 18 nt, Artificial Sequence
  Synthetic
uggauagaaauauuguuu

SEQ ID NO: 689230 - RNA, 19 nt, Artificial Sequence
  Synthetic
auggauagaaauauuguuu

SEQ ID NO: 689231 - RNA, 20 nt, Artificial Sequence
  Synthetic
gauggauagaaauauuguuu

SEQ ID NO: 689232 - RNA, 21 nt, Artificial Sequence
  Synthetic
ggauggauagaaauauuguuu

SEQ ID NO: 689233 - RNA, 22 nt, Artificial Sequence
  Synthetic
uggauggauagaaauauuguuu

SEQ ID NO: 689234 - RNA, 23 nt, Artificial Sequence
  Synthetic
auggauggauagaaauauuguuu

SEQ ID NO: 689235 - RNA, 24 nt, Artificial Sequence
  Synthetic
gauggauggauagaaauauuguuu

SEQ ID NO: 689236 - RNA, 18 nt, Artificial Sequence
  Synthetic
cauucaccaauauuguuu

SEQ ID NO: 689237 - RNA, 19 nt, Artificial Sequence
  Synthetic
acauucaccaauauuguuu

SEQ ID NO: 689238 - RNA, 20 nt, Artificial Sequence
  Synthetic
gacauucaccaauauuguuu

SEQ ID NO: 689239 - RNA, 21 nt, Artificial Sequence
  Synthetic
cgacauucaccaauauuguuu

SEQ ID NO: 689240 - RNA, 22 nt, Artificial Sequence
  Synthetic
acgacauucaccaauauuguuu

SEQ ID NO: 689241 - RNA, 23 nt, Artificial Sequence
  Synthetic
aacgacauucaccaauauuguuu

SEQ ID NO: 689242 - RNA, 24 nt, Artificial Sequence
  Synthetic
gaacgacauucaccaauauuguuu

SEQ ID NO: 689243 - RNA, 18 nt, Artificial Sequence
  Synthetic
uacuuuaacauauuguuu

SEQ ID NO: 689244 - RNA, 19 nt, Artificial Sequence
  Synthetic
auacuuuaacauauuguuu

SEQ ID NO: 689245 - RNA, 20 nt, Artificial Sequence
  Synthetic
aauacuuuaacauauuguuu

SEQ ID NO: 689246 - RNA, 21 nt, Artificial Sequence
  Synthetic
uaauacuuuaacauauuguuu

SEQ ID NO: 689247 - RNA, 22 nt, Artificial Sequence
  Synthetic
cuaauacuuuaacauauuguuu

SEQ ID NO: 689248 - RNA, 23 nt, Artificial Sequence
  Synthetic
acuaauacuuuaacauauuguuu

SEQ ID NO: 689249 - RNA, 24 nt, Artificial Sequence
  Synthetic
aacuaauacuuuaacauauuguuu

SEQ ID NO: 689250 - RNA, 18 nt, Artificial Sequence
  Synthetic
uuggcauauuuauuguuu

SEQ ID NO: 689251 - RNA, 19 nt, Artificial Sequence
  Synthetic
guuggcauauuuauuguuu

SEQ ID NO: 689252 - RNA, 20 nt, Artificial Sequence
  Synthetic
uguuggcauauuuauuguuu

SEQ ID NO: 689253 - RNA, 21 nt, Artificial Sequence
  Synthetic
uuguuggcauauuuauuguuu

SEQ ID NO: 689254 - RNA, 22 nt, Artificial Sequence
  Synthetic
auuguuggcauauuuauuguuu

SEQ ID NO: 689255 - RNA, 23 nt, Artificial Sequence
  Synthetic
gauuguuggcauauuuauuguuu

SEQ ID NO: 689256 - RNA, 24 nt, Artificial Sequence
  Synthetic
ggauuguuggcauauuuauuguuu

SEQ ID NO: 689257 - RNA, 18 nt, Artificial Sequence
  Synthetic
ggugcucagaacuuguuu

SEQ ID NO: 689258 - RNA, 19 nt, Artificial Sequence
  Synthetic
gggugcucagaacuuguuu

SEQ ID NO: 689259 - RNA, 20 nt, Artificial Sequence
  Synthetic
ugggugcucagaacuuguuu

SEQ ID NO: 689260 - RNA, 21 nt, Artificial Sequence
  Synthetic
cugggugcucagaacuuguuu

SEQ ID NO: 689261 - RNA, 22 nt, Artificial Sequence
  Synthetic
ccugggugcucagaacuuguuu

SEQ ID NO: 689262 - RNA, 23 nt, Artificial Sequence
  Synthetic
uccugggugcucagaacuuguuu

SEQ ID NO: 689263 - RNA, 24 nt, Artificial Sequence
  Synthetic
auccugggugcucagaacuuguuu

SEQ ID NO: 689264 - RNA, 18 nt, Artificial Sequence
  Synthetic
ucugcuuuuaacuuguuu

SEQ ID NO: 689265 - RNA, 19 nt, Artificial Sequence
  Synthetic
uucugcuuuuaacuuguuu

SEQ ID NO: 689266 - RNA, 20 nt, Artificial Sequence
  Synthetic
auucugcuuuuaacuuguuu

SEQ ID NO: 689267 - RNA, 21 nt, Artificial Sequence
  Synthetic
gauucugcuuuuaacuuguuu

SEQ ID NO: 689268 - RNA, 22 nt, Artificial Sequence
  Synthetic
ugauucugcuuuuaacuuguuu

SEQ ID NO: 689269 - RNA, 23 nt, Artificial Sequence
  Synthetic
uugauucugcuuuuaacuuguuu

SEQ ID NO: 689270 - RNA, 24 nt, Artificial Sequence
  Synthetic
uuugauucugcuuuuaacuuguuu

SEQ ID NO: 689271 - RNA, 18 nt, Artificial Sequence
  Synthetic
cacuuacauaaguuguuu

SEQ ID NO: 689272 - RNA, 19 nt, Artificial Sequence
  Synthetic
acacuuacauaaguuguuu

SEQ ID NO: 689273 - RNA, 20 nt, Artificial Sequence
  Synthetic
uacacuuacauaaguuguuu

SEQ ID NO: 689274 - RNA, 21 nt, Artificial Sequence
  Synthetic
cuacacuuacauaaguuguuu

SEQ ID NO: 689275 - RNA, 22 nt, Artificial Sequence
  Synthetic
acuacacuuacauaaguuguuu

SEQ ID NO: 689276 - RNA, 23 nt, Artificial Sequence
  Synthetic
uacuacacuuacauaaguuguuu

SEQ ID NO: 689277 - RNA, 24 nt, Artificial Sequence
  Synthetic
auacuacacuuacauaaguuguuu

SEQ ID NO: 689278 - RNA, 18 nt, Artificial Sequence
  Synthetic
ggagcgaugauguuguuu

SEQ ID NO: 689279 - RNA, 19 nt, Artificial Sequence
  Synthetic
aggagcgaugauguuguuu

SEQ ID NO: 689280 - RNA, 20 nt, Artificial Sequence
  Synthetic
caggagcgaugauguuguuu

SEQ ID NO: 689281 - RNA, 21 nt, Artificial Sequence
  Synthetic
ucaggagcgaugauguuguuu

SEQ ID NO: 689282 - RNA, 22 nt, Artificial Sequence
  Synthetic
cucaggagcgaugauguuguuu

SEQ ID NO: 689283 - RNA, 23 nt, Artificial Sequence
  Synthetic
acucaggagcgaugauguuguuu

SEQ ID NO: 689284 - RNA, 24 nt, Artificial Sequence
  Synthetic
cacucaggagcgaugauguuguuu

SEQ ID NO: 689285 - RNA, 18 nt, Artificial Sequence
  Synthetic
aauaugaaauuguuguuu

SEQ ID NO: 689286 - RNA, 19 nt, Artificial Sequence
  Synthetic
uaauaugaaauuguuguuu

SEQ ID NO: 689287 - RNA, 20 nt, Artificial Sequence
  Synthetic
auaauaugaaauuguuguuu

SEQ ID NO: 689288 - RNA, 21 nt, Artificial Sequence
  Synthetic
gauaauaugaaauuguuguuu

SEQ ID NO: 689289 - RNA, 22 nt, Artificial Sequence
  Synthetic
agauaauaugaaauuguuguuu

SEQ ID NO: 689290 - RNA, 23 nt, Artificial Sequence
  Synthetic
aagauaauaugaaauuguuguuu

SEQ ID NO: 689291 - RNA, 24 nt, Artificial Sequence
  Synthetic
uaagauaauaugaaauuguuguuu

SEQ ID NO: 689292 - RNA, 18 nt, Artificial Sequence
  Synthetic
ugucaaauauuguuguuu

SEQ ID NO: 689293 - RNA, 19 nt, Artificial Sequence
  Synthetic
uugucaaauauuguuguuu

SEQ ID NO: 689294 - RNA, 20 nt, Artificial Sequence
  Synthetic
cuugucaaauauuguuguuu

SEQ ID NO: 689295 - RNA, 21 nt, Artificial Sequence
  Synthetic
ucuugucaaauauuguuguuu

SEQ ID NO: 689296 - RNA, 22 nt, Artificial Sequence
  Synthetic
uucuugucaaauauuguuguuu

SEQ ID NO: 689297 - RNA, 23 nt, Artificial Sequence
  Synthetic
auucuugucaaauauuguuguuu

SEQ ID NO: 689298 - RNA, 24 nt, Artificial Sequence
  Synthetic
aauucuugucaaauauuguuguuu

SEQ ID NO: 689299 - RNA, 18 nt, Artificial Sequence
  Synthetic
acaacuaauaauuuguuu

SEQ ID NO: 689300 - RNA, 19 nt, Artificial Sequence
  Synthetic
aacaacuaauaauuuguuu

SEQ ID NO: 689301 - RNA, 20 nt, Artificial Sequence
  Synthetic
aaacaacuaauaauuuguuu

SEQ ID NO: 689302 - RNA, 21 nt, Artificial Sequence
  Synthetic
gaaacaacuaauaauuuguuu

SEQ ID NO: 689303 - RNA, 22 nt, Artificial Sequence
  Synthetic
agaaacaacuaauaauuuguuu

SEQ ID NO: 689304 - RNA, 23 nt, Artificial Sequence
  Synthetic
aagaaacaacuaauaauuuguuu

SEQ ID NO: 689305 - RNA, 24 nt, Artificial Sequence
  Synthetic
uaagaaacaacuaauaauuuguuu

SEQ ID NO: 689306 - RNA, 18 nt, Artificial Sequence
  Synthetic
gguuaauggcauuuguuu

SEQ ID NO: 689307 - RNA, 19 nt, Artificial Sequence
  Synthetic
ggguuaauggcauuuguuu

SEQ ID NO: 689308 - RNA, 20 nt, Artificial Sequence
  Synthetic
aggguuaauggcauuuguuu

SEQ ID NO: 689309 - RNA, 21 nt, Artificial Sequence
  Synthetic
gaggguuaauggcauuuguuu

SEQ ID NO: 689310 - RNA, 22 nt, Artificial Sequence
  Synthetic
ggaggguuaauggcauuuguuu

SEQ ID NO: 689311 - RNA, 23 nt, Artificial Sequence
  Synthetic
aggaggguuaauggcauuuguuu

SEQ ID NO: 689312 - RNA, 24 nt, Artificial Sequence
  Synthetic
aaggaggguuaauggcauuuguuu

SEQ ID NO: 689313 - RNA, 18 nt, Artificial Sequence
  Synthetic
uaaaucucuuauuuguuu

SEQ ID NO: 689314 - RNA, 19 nt, Artificial Sequence
  Synthetic
cuaaaucucuuauuuguuu

SEQ ID NO: 689315 - RNA, 20 nt, Artificial Sequence
  Synthetic
ucuaaaucucuuauuuguuu

SEQ ID NO: 689316 - RNA, 21 nt, Artificial Sequence
  Synthetic
gucuaaaucucuuauuuguuu

SEQ ID NO: 689317 - RNA, 22 nt, Artificial Sequence
  Synthetic
agucuaaaucucuuauuuguuu

SEQ ID NO: 689318 - RNA, 23 nt, Artificial Sequence
  Synthetic
cagucuaaaucucuuauuuguuu

SEQ ID NO: 689319 - RNA, 24 nt, Artificial Sequence
  Synthetic
ucagucuaaaucucuuauuuguuu

SEQ ID NO: 689320 - RNA, 18 nt, Artificial Sequence
  Synthetic
gccucagacccuuuguuu

SEQ ID NO: 689321 - RNA, 19 nt, Artificial Sequence
  Synthetic
ggccucagacccuuuguuu

SEQ ID NO: 689322 - RNA, 20 nt, Artificial Sequence
  Synthetic
aggccucagacccuuuguuu

SEQ ID NO: 689323 - RNA, 21 nt, Artificial Sequence
  Synthetic
aaggccucagacccuuuguuu

SEQ ID NO: 689324 - RNA, 22 nt, Artificial Sequence
  Synthetic
caaggccucagacccuuuguuu

SEQ ID NO: 689325 - RNA, 23 nt, Artificial Sequence
  Synthetic
gcaaggccucagacccuuuguuu

SEQ ID NO: 689326 - RNA, 24 nt, Artificial Sequence
  Synthetic
ggcaaggccucagacccuuuguuu

SEQ ID NO: 689327 - RNA, 18 nt, Artificial Sequence
  Synthetic
uaugucuuuucuuuguuu

SEQ ID NO: 689328 - RNA, 19 nt, Artificial Sequence
  Synthetic
cuaugucuuuucuuuguuu

SEQ ID NO: 689329 - RNA, 20 nt, Artificial Sequence
  Synthetic
ccuaugucuuuucuuuguuu

SEQ ID NO: 689330 - RNA, 21 nt, Artificial Sequence
  Synthetic
gccuaugucuuuucuuuguuu

SEQ ID NO: 689331 - RNA, 22 nt, Artificial Sequence
  Synthetic
agccuaugucuuuucuuuguuu

SEQ ID NO: 689332 - RNA, 23 nt, Artificial Sequence
  Synthetic
gagccuaugucuuuucuuuguuu

SEQ ID NO: 689333 - RNA, 24 nt, Artificial Sequence
  Synthetic
ugagccuaugucuuuucuuuguuu

SEQ ID NO: 689334 - RNA, 18 nt, Artificial Sequence
  Synthetic
uaaccaauagguuuguuu

SEQ ID NO: 689335 - RNA, 19 nt, Artificial Sequence
  Synthetic
uuaaccaauagguuuguuu

SEQ ID NO: 689336 - RNA, 20 nt, Artificial Sequence
  Synthetic
uuuaaccaauagguuuguuu

SEQ ID NO: 689337 - RNA, 21 nt, Artificial Sequence
  Synthetic
auuuaaccaauagguuuguuu

SEQ ID NO: 689338 - RNA, 22 nt, Artificial Sequence
  Synthetic
uauuuaaccaauagguuuguuu

SEQ ID NO: 689339 - RNA, 23 nt, Artificial Sequence
  Synthetic
auauuuaaccaauagguuuguuu

SEQ ID NO: 689340 - RNA, 24 nt, Artificial Sequence
  Synthetic
aauauuuaaccaauagguuuguuu

SEQ ID NO: 689341 - RNA, 18 nt, Artificial Sequence
  Synthetic
uuuauucuuuguuuguuu

SEQ ID NO: 689342 - RNA, 19 nt, Artificial Sequence
  Synthetic
auuuauucuuuguuuguuu

SEQ ID NO: 689343 - RNA, 20 nt, Artificial Sequence
  Synthetic
uauuuauucuuuguuuguuu

SEQ ID NO: 689344 - RNA, 21 nt, Artificial Sequence
  Synthetic
uuauuuauucuuuguuuguuu

SEQ ID NO: 689345 - RNA, 22 nt, Artificial Sequence
  Synthetic
cuuauuuauucuuuguuuguuu

SEQ ID NO: 689346 - RNA, 23 nt, Artificial Sequence
  Synthetic
gcuuauuuauucuuuguuuguuu

SEQ ID NO: 689347 - RNA, 24 nt, Artificial Sequence
  Synthetic
agcuuauuuauucuuuguuuguuu

SEQ ID NO: 689348 - RNA, 18 nt, Artificial Sequence
  Synthetic
ugauuugauauuuuguuu

SEQ ID NO: 689349 - RNA, 19 nt, Artificial Sequence
  Synthetic
augauuugauauuuuguuu

SEQ ID NO: 689350 - RNA, 20 nt, Artificial Sequence
  Synthetic
aaugauuugauauuuuguuu

SEQ ID NO: 689351 - RNA, 21 nt, Artificial Sequence
  Synthetic
uaaugauuugauauuuuguuu

SEQ ID NO: 689352 - RNA, 22 nt, Artificial Sequence
  Synthetic
uuaaugauuugauauuuuguuu

SEQ ID NO: 689353 - RNA, 23 nt, Artificial Sequence
  Synthetic
cuuaaugauuugauauuuuguuu

SEQ ID NO: 689354 - RNA, 24 nt, Artificial Sequence
  Synthetic
ccuuaaugauuugauauuuuguuu

SEQ ID NO: 689355 - RNA, 18 nt, Artificial Sequence
  Synthetic
aaaguaugccuuuuguuu

SEQ ID NO: 689356 - RNA, 19 nt, Artificial Sequence
  Synthetic
aaaaguaugccuuuuguuu

SEQ ID NO: 689357 - RNA, 20 nt, Artificial Sequence
  Synthetic
aaaaaguaugccuuuuguuu

SEQ ID NO: 689358 - RNA, 21 nt, Artificial Sequence
  Synthetic
uaaaaaguaugccuuuuguuu

SEQ ID NO: 689359 - RNA, 22 nt, Artificial Sequence
  Synthetic
cuaaaaaguaugccuuuuguuu

SEQ ID NO: 689360 - RNA, 23 nt, Artificial Sequence
  Synthetic
ucuaaaaaguaugccuuuuguuu

SEQ ID NO: 689361 - RNA, 24 nt, Artificial Sequence
  Synthetic
aucuaaaaaguaugccuuuuguuu

SEQ ID NO: 689362 - RNA, 18 nt, Artificial Sequence
  Synthetic
ucaauauaauuuuuguuu

SEQ ID NO: 689363 - RNA, 19 nt, Artificial Sequence
  Synthetic
cucaauauaauuuuuguuu

SEQ ID NO: 689364 - RNA, 20 nt, Artificial Sequence
  Synthetic
ucucaauauaauuuuuguuu

SEQ ID NO: 689365 - RNA, 21 nt, Artificial Sequence
  Synthetic
cucucaauauaauuuuuguuu

SEQ ID NO: 689366 - RNA, 22 nt, Artificial Sequence
  Synthetic
acucucaauauaauuuuuguuu

SEQ ID NO: 689367 - RNA, 23 nt, Artificial Sequence
  Synthetic
aacucucaauauaauuuuuguuu

SEQ ID NO: 689368 - RNA, 24 nt, Artificial Sequence
  Synthetic
caacucucaauauaauuuuuguuu

SEQ ID NO: 689369 - RNA, 18 nt, Artificial Sequence
  Synthetic
aacuucauguuuuuguuu

SEQ ID NO: 689370 - RNA, 19 nt, Artificial Sequence
  Synthetic
uaacuucauguuuuuguuu

SEQ ID NO: 689371 - RNA, 20 nt, Artificial Sequence
  Synthetic
cuaacuucauguuuuuguuu

SEQ ID NO: 689372 - RNA, 21 nt, Artificial Sequence
  Synthetic
ucuaacuucauguuuuuguuu

SEQ ID NO: 689373 - RNA, 22 nt, Artificial Sequence
  Synthetic
uucuaacuucauguuuuuguuu

SEQ ID NO: 689374 - RNA, 23 nt, Artificial Sequence
  Synthetic
uuucuaacuucauguuuuuguuu

SEQ ID NO: 689375 - RNA, 24 nt, Artificial Sequence
  Synthetic
cuuucuaacuucauguuuuuguuu

SEQ ID NO: 689376 - RNA, 18 nt, Artificial Sequence
  Synthetic
gaugauuucgaaaauuuu

SEQ ID NO: 689377 - RNA, 19 nt, Artificial Sequence
  Synthetic
agaugauuucgaaaauuuu

SEQ ID NO: 689378 - RNA, 20 nt, Artificial Sequence
  Synthetic
aagaugauuucgaaaauuuu

SEQ ID NO: 689379 - RNA, 21 nt, Artificial Sequence
  Synthetic
aaagaugauuucgaaaauuuu

SEQ ID NO: 689380 - RNA, 22 nt, Artificial Sequence
  Synthetic
aaaagaugauuucgaaaauuuu

SEQ ID NO: 689381 - RNA, 23 nt, Artificial Sequence
  Synthetic
gaaaagaugauuucgaaaauuuu

SEQ ID NO: 689382 - RNA, 24 nt, Artificial Sequence
  Synthetic
agaaaagaugauuucgaaaauuuu

SEQ ID NO: 689383 - RNA, 18 nt, Artificial Sequence
  Synthetic
uuuccccuugcaaauuuu

SEQ ID NO: 689384 - RNA, 19 nt, Artificial Sequence
  Synthetic
uuuuccccuugcaaauuuu

SEQ ID NO: 689385 - RNA, 20 nt, Artificial Sequence
  Synthetic
uuuuuccccuugcaaauuuu

SEQ ID NO: 689386 - RNA, 21 nt, Artificial Sequence
  Synthetic
auuuuuccccuugcaaauuuu

SEQ ID NO: 689387 - RNA, 22 nt, Artificial Sequence
  Synthetic
cauuuuuccccuugcaaauuuu

SEQ ID NO: 689388 - RNA, 23 nt, Artificial Sequence
  Synthetic
acauuuuuccccuugcaaauuuu

SEQ ID NO: 689389 - RNA, 24 nt, Artificial Sequence
  Synthetic
cacauuuuuccccuugcaaauuuu

SEQ ID NO: 689390 - RNA, 18 nt, Artificial Sequence
  Synthetic
cguuuguggucaaauuuu

SEQ ID NO: 689391 - RNA, 19 nt, Artificial Sequence
  Synthetic
ucguuuguggucaaauuuu

SEQ ID NO: 689392 - RNA, 20 nt, Artificial Sequence
  Synthetic
gucguuuguggucaaauuuu

SEQ ID NO: 689393 - RNA, 21 nt, Artificial Sequence
  Synthetic
ugucguuuguggucaaauuuu

SEQ ID NO: 689394 - RNA, 22 nt, Artificial Sequence
  Synthetic
gugucguuuguggucaaauuuu

SEQ ID NO: 689395 - RNA, 23 nt, Artificial Sequence
  Synthetic
ugugucguuuguggucaaauuuu

SEQ ID NO: 689396 - RNA, 24 nt, Artificial Sequence
  Synthetic
uugugucguuuguggucaaauuuu

SEQ ID NO: 689397 - RNA, 18 nt, Artificial Sequence
  Synthetic
ccccaucugugaaauuuu

SEQ ID NO: 689398 - RNA, 19 nt, Artificial Sequence
  Synthetic
accccaucugugaaauuuu

SEQ ID NO: 689399 - RNA, 20 nt, Artificial Sequence
  Synthetic
caccccaucugugaaauuuu

SEQ ID NO: 689400 - RNA, 21 nt, Artificial Sequence
  Synthetic
ccaccccaucugugaaauuuu

SEQ ID NO: 689401 - RNA, 22 nt, Artificial Sequence
  Synthetic
cccaccccaucugugaaauuuu

SEQ ID NO: 689402 - RNA, 23 nt, Artificial Sequence
  Synthetic
gcccaccccaucugugaaauuuu

SEQ ID NO: 689403 - RNA, 24 nt, Artificial Sequence
  Synthetic
ugcccaccccaucugugaaauuuu

SEQ ID NO: 689404 - RNA, 18 nt, Artificial Sequence
  Synthetic
aaauucaaaauaaauuuu

SEQ ID NO: 689405 - RNA, 19 nt, Artificial Sequence
  Synthetic
caaauucaaaauaaauuuu

SEQ ID NO: 689406 - RNA, 20 nt, Artificial Sequence
  Synthetic
gcaaauucaaaauaaauuuu

SEQ ID NO: 689407 - RNA, 21 nt, Artificial Sequence
  Synthetic
ggcaaauucaaaauaaauuuu

SEQ ID NO: 689408 - RNA, 22 nt, Artificial Sequence
  Synthetic
aggcaaauucaaaauaaauuuu

SEQ ID NO: 689409 - RNA, 23 nt, Artificial Sequence
  Synthetic
aaggcaaauucaaaauaaauuuu

SEQ ID NO: 689410 - RNA, 24 nt, Artificial Sequence
  Synthetic
gaaggcaaauucaaaauaaauuuu

SEQ ID NO: 689411 - RNA, 18 nt, Artificial Sequence
  Synthetic
cagggaacaguaaauuuu

SEQ ID NO: 689412 - RNA, 19 nt, Artificial Sequence
  Synthetic
ucagggaacaguaaauuuu

SEQ ID NO: 689413 - RNA, 20 nt, Artificial Sequence
  Synthetic
uucagggaacaguaaauuuu

SEQ ID NO: 689414 - RNA, 21 nt, Artificial Sequence
  Synthetic
auucagggaacaguaaauuuu

SEQ ID NO: 689415 - RNA, 22 nt, Artificial Sequence
  Synthetic
uauucagggaacaguaaauuuu

SEQ ID NO: 689416 - RNA, 23 nt, Artificial Sequence
  Synthetic
auauucagggaacaguaaauuuu

SEQ ID NO: 689417 - RNA, 24 nt, Artificial Sequence
  Synthetic
gauauucagggaacaguaaauuuu

SEQ ID NO: 689418 - RNA, 18 nt, Artificial Sequence
  Synthetic
aguuucacauuaaauuuu

SEQ ID NO: 689419 - RNA, 19 nt, Artificial Sequence
  Synthetic
caguuucacauuaaauuuu

SEQ ID NO: 689420 - RNA, 20 nt, Artificial Sequence
  Synthetic
acaguuucacauuaaauuuu

SEQ ID NO: 689421 - RNA, 21 nt, Artificial Sequence
  Synthetic
aacaguuucacauuaaauuuu

SEQ ID NO: 689422 - RNA, 22 nt, Artificial Sequence
  Synthetic
uaacaguuucacauuaaauuuu

SEQ ID NO: 689423 - RNA, 23 nt, Artificial Sequence
  Synthetic
auaacaguuucacauuaaauuuu

SEQ ID NO: 689424 - RNA, 24 nt, Artificial Sequence
  Synthetic
aauaacaguuucacauuaaauuuu

SEQ ID NO: 689425 - RNA, 18 nt, Artificial Sequence
  Synthetic
aaucagacauuaaauuuu

SEQ ID NO: 689426 - RNA, 19 nt, Artificial Sequence
  Synthetic
gaaucagacauuaaauuuu

SEQ ID NO: 689427 - RNA, 20 nt, Artificial Sequence
  Synthetic
agaaucagacauuaaauuuu

SEQ ID NO: 689428 - RNA, 21 nt, Artificial Sequence
  Synthetic
gagaaucagacauuaaauuuu

SEQ ID NO: 689429 - RNA, 22 nt, Artificial Sequence
  Synthetic
cgagaaucagacauuaaauuuu

SEQ ID NO: 689430 - RNA, 23 nt, Artificial Sequence
  Synthetic
acgagaaucagacauuaaauuuu

SEQ ID NO: 689431 - RNA, 24 nt, Artificial Sequence
  Synthetic
aacgagaaucagacauuaaauuuu

SEQ ID NO: 689432 - RNA, 18 nt, Artificial Sequence
  Synthetic
cuuuauccuuuaaauuuu

SEQ ID NO: 689433 - RNA, 19 nt, Artificial Sequence
  Synthetic
ucuuuauccuuuaaauuuu

SEQ ID NO: 689434 - RNA, 20 nt, Artificial Sequence
  Synthetic
aucuuuauccuuuaaauuuu

SEQ ID NO: 689435 - RNA, 21 nt, Artificial Sequence
  Synthetic
aaucuuuauccuuuaaauuuu

SEQ ID NO: 689436 - RNA, 22 nt, Artificial Sequence
  Synthetic
aaaucuuuauccuuuaaauuuu

SEQ ID NO: 689437 - RNA, 23 nt, Artificial Sequence
  Synthetic
caaaucuuuauccuuuaaauuuu

SEQ ID NO: 689438 - RNA, 24 nt, Artificial Sequence
  Synthetic
gcaaaucuuuauccuuuaaauuuu

SEQ ID NO: 689439 - RNA, 18 nt, Artificial Sequence
  Synthetic
cauauaguuuuaaauuuu

SEQ ID NO: 689440 - RNA, 19 nt, Artificial Sequence
  Synthetic
ucauauaguuuuaaauuuu

SEQ ID NO: 689441 - RNA, 20 nt, Artificial Sequence
  Synthetic
aucauauaguuuuaaauuuu

SEQ ID NO: 689442 - RNA, 21 nt, Artificial Sequence
  Synthetic
uaucauauaguuuuaaauuuu

SEQ ID NO: 689443 - RNA, 22 nt, Artificial Sequence
  Synthetic
guaucauauaguuuuaaauuuu

SEQ ID NO: 689444 - RNA, 23 nt, Artificial Sequence
  Synthetic
uguaucauauaguuuuaaauuuu

SEQ ID NO: 689445 - RNA, 24 nt, Artificial Sequence
  Synthetic
auguaucauauaguuuuaaauuuu

SEQ ID NO: 689446 - RNA, 18 nt, Artificial Sequence
  Synthetic
augagaaaauacaauuuu

SEQ ID NO: 689447 - RNA, 19 nt, Artificial Sequence
  Synthetic
aaugagaaaauacaauuuu

SEQ ID NO: 689448 - RNA, 20 nt, Artificial Sequence
  Synthetic
aaaugagaaaauacaauuuu

SEQ ID NO: 689449 - RNA, 21 nt, Artificial Sequence
  Synthetic
caaaugagaaaauacaauuuu

SEQ ID NO: 689450 - RNA, 22 nt, Artificial Sequence
  Synthetic
ucaaaugagaaaauacaauuuu

SEQ ID NO: 689451 - RNA, 23 nt, Artificial Sequence
  Synthetic
aucaaaugagaaaauacaauuuu

SEQ ID NO: 689452 - RNA, 24 nt, Artificial Sequence
  Synthetic
caucaaaugagaaaauacaauuuu

SEQ ID NO: 689453 - RNA, 18 nt, Artificial Sequence
  Synthetic
uaguuugauggcaauuuu

SEQ ID NO: 689454 - RNA, 19 nt, Artificial Sequence
  Synthetic
auaguuugauggcaauuuu

SEQ ID NO: 689455 - RNA, 20 nt, Artificial Sequence
  Synthetic
gauaguuugauggcaauuuu

SEQ ID NO: 689456 - RNA, 21 nt, Artificial Sequence
  Synthetic
ggauaguuugauggcaauuuu

SEQ ID NO: 689457 - RNA, 22 nt, Artificial Sequence
  Synthetic
aggauaguuugauggcaauuuu

SEQ ID NO: 689458 - RNA, 23 nt, Artificial Sequence
  Synthetic
gaggauaguuugauggcaauuuu

SEQ ID NO: 689459 - RNA, 24 nt, Artificial Sequence
  Synthetic
agaggauaguuugauggcaauuuu

SEQ ID NO: 689460 - RNA, 18 nt, Artificial Sequence
  Synthetic
ccucaauuugucaauuuu

SEQ ID NO: 689461 - RNA, 19 nt, Artificial Sequence
  Synthetic
uccucaauuugucaauuuu

SEQ ID NO: 689462 - RNA, 20 nt, Artificial Sequence
  Synthetic
auccucaauuugucaauuuu

SEQ ID NO: 689463 - RNA, 21 nt, Artificial Sequence
  Synthetic
aauccucaauuugucaauuuu

SEQ ID NO: 689464 - RNA, 22 nt, Artificial Sequence
  Synthetic
gaauccucaauuugucaauuuu

SEQ ID NO: 689465 - RNA, 23 nt, Artificial Sequence
  Synthetic
ugaauccucaauuugucaauuuu

SEQ ID NO: 689466 - RNA, 24 nt, Artificial Sequence
  Synthetic
augaauccucaauuugucaauuuu

SEQ ID NO: 689467 - RNA, 18 nt, Artificial Sequence
  Synthetic
gagaagaacaagaauuuu

SEQ ID NO: 689468 - RNA, 19 nt, Artificial Sequence
  Synthetic
ugagaagaacaagaauuuu

SEQ ID NO: 689469 - RNA, 20 nt, Artificial Sequence
  Synthetic
uugagaagaacaagaauuuu

SEQ ID NO: 689470 - RNA, 21 nt, Artificial Sequence
  Synthetic
uuugagaagaacaagaauuuu

SEQ ID NO: 689471 - RNA, 22 nt, Artificial Sequence
  Synthetic
cuuugagaagaacaagaauuuu

SEQ ID NO: 689472 - RNA, 23 nt, Artificial Sequence
  Synthetic
ucuuugagaagaacaagaauuuu

SEQ ID NO: 689473 - RNA, 24 nt, Artificial Sequence
  Synthetic
gucuuugagaagaacaagaauuuu

SEQ ID NO: 689474 - RNA, 18 nt, Artificial Sequence
  Synthetic
ggagagagugagaauuuu

SEQ ID NO: 689475 - RNA, 19 nt, Artificial Sequence
  Synthetic
aggagagagugagaauuuu

SEQ ID NO: 689476 - RNA, 20 nt, Artificial Sequence
  Synthetic
aaggagagagugagaauuuu

SEQ ID NO: 689477 - RNA, 21 nt, Artificial Sequence
  Synthetic
caaggagagagugagaauuuu

SEQ ID NO: 689478 - RNA, 22 nt, Artificial Sequence
  Synthetic
ucaaggagagagugagaauuuu

SEQ ID NO: 689479 - RNA, 23 nt, Artificial Sequence
  Synthetic
uucaaggagagagugagaauuuu

SEQ ID NO: 689480 - RNA, 24 nt, Artificial Sequence
  Synthetic
uuucaaggagagagugagaauuuu

SEQ ID NO: 689481 - RNA, 18 nt, Artificial Sequence
  Synthetic
uggggguuugagaauuuu

SEQ ID NO: 689482 - RNA, 19 nt, Artificial Sequence
  Synthetic
cuggggguuugagaauuuu

SEQ ID NO: 689483 - RNA, 20 nt, Artificial Sequence
  Synthetic
gcuggggguuugagaauuuu

SEQ ID NO: 689484 - RNA, 21 nt, Artificial Sequence
  Synthetic
agcuggggguuugagaauuuu

SEQ ID NO: 689485 - RNA, 22 nt, Artificial Sequence
  Synthetic
aagcuggggguuugagaauuuu

SEQ ID NO: 689486 - RNA, 23 nt, Artificial Sequence
  Synthetic
uaagcuggggguuugagaauuuu

SEQ ID NO: 689487 - RNA, 24 nt, Artificial Sequence
  Synthetic
auaagcuggggguuugagaauuuu

SEQ ID NO: 689488 - RNA, 18 nt, Artificial Sequence
  Synthetic
ucacauaauuagaauuuu

SEQ ID NO: 689489 - RNA, 19 nt, Artificial Sequence
  Synthetic
uucacauaauuagaauuuu

SEQ ID NO: 689490 - RNA, 20 nt, Artificial Sequence
  Synthetic
auucacauaauuagaauuuu

SEQ ID NO: 689491 - RNA, 21 nt, Artificial Sequence
  Synthetic
aauucacauaauuagaauuuu

SEQ ID NO: 689492 - RNA, 22 nt, Artificial Sequence
  Synthetic
aaauucacauaauuagaauuuu

SEQ ID NO: 689493 - RNA, 23 nt, Artificial Sequence
  Synthetic
uaaauucacauaauuagaauuuu

SEQ ID NO: 689494 - RNA, 24 nt, Artificial Sequence
  Synthetic
uuaaauucacauaauuagaauuuu

SEQ ID NO: 689495 - RNA, 18 nt, Artificial Sequence
  Synthetic
auucuagucacgaauuuu

SEQ ID NO: 689496 - RNA, 19 nt, Artificial Sequence
  Synthetic
uauucuagucacgaauuuu

SEQ ID NO: 689497 - RNA, 20 nt, Artificial Sequence
  Synthetic
uuauucuagucacgaauuuu

SEQ ID NO: 689498 - RNA, 21 nt, Artificial Sequence
  Synthetic
guuauucuagucacgaauuuu

SEQ ID NO: 689499 - RNA, 22 nt, Artificial Sequence
  Synthetic
uguuauucuagucacgaauuuu

SEQ ID NO: 689500 - RNA, 23 nt, Artificial Sequence
  Synthetic
cuguuauucuagucacgaauuuu

SEQ ID NO: 689501 - RNA, 24 nt, Artificial Sequence
  Synthetic
acuguuauucuagucacgaauuuu

SEQ ID NO: 689502 - RNA, 18 nt, Artificial Sequence
  Synthetic
auaaaccuuaugaauuuu

SEQ ID NO: 689503 - RNA, 19 nt, Artificial Sequence
  Synthetic
aauaaaccuuaugaauuuu

SEQ ID NO: 689504 - RNA, 20 nt, Artificial Sequence
  Synthetic
gaauaaaccuuaugaauuuu

SEQ ID NO: 689505 - RNA, 21 nt, Artificial Sequence
  Synthetic
ggaauaaaccuuaugaauuuu

SEQ ID NO: 689506 - RNA, 22 nt, Artificial Sequence
  Synthetic
aggaauaaaccuuaugaauuuu

SEQ ID NO: 689507 - RNA, 23 nt, Artificial Sequence
  Synthetic
aaggaauaaaccuuaugaauuuu

SEQ ID NO: 689508 - RNA, 24 nt, Artificial Sequence
  Synthetic
gaaggaauaaaccuuaugaauuuu

SEQ ID NO: 689509 - RNA, 18 nt, Artificial Sequence
  Synthetic
cuaguggaugugaauuuu

SEQ ID NO: 689510 - RNA, 19 nt, Artificial Sequence
  Synthetic
ccuaguggaugugaauuuu

SEQ ID NO: 689511 - RNA, 20 nt, Artificial Sequence
  Synthetic
uccuaguggaugugaauuuu

SEQ ID NO: 689512 - RNA, 21 nt, Artificial Sequence
  Synthetic
auccuaguggaugugaauuuu

SEQ ID NO: 689513 - RNA, 22 nt, Artificial Sequence
  Synthetic
cauccuaguggaugugaauuuu

SEQ ID NO: 689514 - RNA, 23 nt, Artificial Sequence
  Synthetic
gcauccuaguggaugugaauuuu

SEQ ID NO: 689515 - RNA, 24 nt, Artificial Sequence
  Synthetic
ggcauccuaguggaugugaauuuu

SEQ ID NO: 689516 - RNA, 18 nt, Artificial Sequence
  Synthetic
auucauucuaauaauuuu

SEQ ID NO: 689517 - RNA, 19 nt, Artificial Sequence
  Synthetic
aauucauucuaauaauuuu

SEQ ID NO: 689518 - RNA, 20 nt, Artificial Sequence
  Synthetic
gaauucauucuaauaauuuu

SEQ ID NO: 689519 - RNA, 21 nt, Artificial Sequence
  Synthetic
cgaauucauucuaauaauuuu

SEQ ID NO: 689520 - RNA, 22 nt, Artificial Sequence
  Synthetic
ucgaauucauucuaauaauuuu

SEQ ID NO: 689521 - RNA, 23 nt, Artificial Sequence
  Synthetic
cucgaauucauucuaauaauuuu

SEQ ID NO: 689522 - RNA, 24 nt, Artificial Sequence
  Synthetic
ccucgaauucauucuaauaauuuu

SEQ ID NO: 689523 - RNA, 18 nt, Artificial Sequence
  Synthetic
auuagguuugauaauuuu

SEQ ID NO: 689524 - RNA, 19 nt, Artificial Sequence
  Synthetic
uauuagguuugauaauuuu

SEQ ID NO: 689525 - RNA, 20 nt, Artificial Sequence
  Synthetic
guauuagguuugauaauuuu

SEQ ID NO: 689526 - RNA, 21 nt, Artificial Sequence
  Synthetic
uguauuagguuugauaauuuu

SEQ ID NO: 689527 - RNA, 22 nt, Artificial Sequence
  Synthetic
uuguauuagguuugauaauuuu

SEQ ID NO: 689528 - RNA, 23 nt, Artificial Sequence
  Synthetic
guuguauuagguuugauaauuuu

SEQ ID NO: 689529 - RNA, 24 nt, Artificial Sequence
  Synthetic
uguuguauuagguuugauaauuuu

SEQ ID NO: 689530 - RNA, 18 nt, Artificial Sequence
  Synthetic
gguuauaaauauaauuuu

SEQ ID NO: 689531 - RNA, 19 nt, Artificial Sequence
  Synthetic
ggguuauaaauauaauuuu

SEQ ID NO: 689532 - RNA, 20 nt, Artificial Sequence
  Synthetic
uggguuauaaauauaauuuu

SEQ ID NO: 689533 - RNA, 21 nt, Artificial Sequence
  Synthetic
cuggguuauaaauauaauuuu

SEQ ID NO: 689534 - RNA, 22 nt, Artificial Sequence
  Synthetic
gcuggguuauaaauauaauuuu

SEQ ID NO: 689535 - RNA, 23 nt, Artificial Sequence
  Synthetic
ugcuggguuauaaauauaauuuu

SEQ ID NO: 689536 - RNA, 24 nt, Artificial Sequence
  Synthetic
gugcuggguuauaaauauaauuuu

SEQ ID NO: 689537 - RNA, 18 nt, Artificial Sequence
  Synthetic
aaugucagguauaauuuu

SEQ ID NO: 689538 - RNA, 19 nt, Artificial Sequence
  Synthetic
caaugucagguauaauuuu

SEQ ID NO: 689539 - RNA, 20 nt, Artificial Sequence
  Synthetic
acaaugucagguauaauuuu

SEQ ID NO: 689540 - RNA, 21 nt, Artificial Sequence
  Synthetic
uacaaugucagguauaauuuu

SEQ ID NO: 689541 - RNA, 22 nt, Artificial Sequence
  Synthetic
cuacaaugucagguauaauuuu

SEQ ID NO: 689542 - RNA, 23 nt, Artificial Sequence
  Synthetic
acuacaaugucagguauaauuuu

SEQ ID NO: 689543 - RNA, 24 nt, Artificial Sequence
  Synthetic
cacuacaaugucagguauaauuuu

SEQ ID NO: 689544 - RNA, 18 nt, Artificial Sequence
  Synthetic
uugccauuuguuaauuuu

SEQ ID NO: 689545 - RNA, 19 nt, Artificial Sequence
  Synthetic
uuugccauuuguuaauuuu

SEQ ID NO: 689546 - RNA, 20 nt, Artificial Sequence
  Synthetic
guuugccauuuguuaauuuu

SEQ ID NO: 689547 - RNA, 21 nt, Artificial Sequence
  Synthetic
uguuugccauuuguuaauuuu

SEQ ID NO: 689548 - RNA, 22 nt, Artificial Sequence
  Synthetic
cuguuugccauuuguuaauuuu

SEQ ID NO: 689549 - RNA, 23 nt, Artificial Sequence
  Synthetic
acuguuugccauuuguuaauuuu

SEQ ID NO: 689550 - RNA, 24 nt, Artificial Sequence
  Synthetic
uacuguuugccauuuguuaauuuu

SEQ ID NO: 689551 - RNA, 18 nt, Artificial Sequence
  Synthetic
uaaauuuaauuuaauuuu

SEQ ID NO: 689552 - RNA, 19 nt, Artificial Sequence
  Synthetic
uuaaauuuaauuuaauuuu

SEQ ID NO: 689553 - RNA, 20 nt, Artificial Sequence
  Synthetic
uuuaaauuuaauuuaauuuu

SEQ ID NO: 689554 - RNA, 21 nt, Artificial Sequence
  Synthetic
cuuuaaauuuaauuuaauuuu

SEQ ID NO: 689555 - RNA, 22 nt, Artificial Sequence
  Synthetic
gcuuuaaauuuaauuuaauuuu

SEQ ID NO: 689556 - RNA, 23 nt, Artificial Sequence
  Synthetic
agcuuuaaauuuaauuuaauuuu

SEQ ID NO: 689557 - RNA, 24 nt, Artificial Sequence
  Synthetic
uagcuuuaaauuuaauuuaauuuu

SEQ ID NO: 689558 - RNA, 18 nt, Artificial Sequence
  Synthetic
ucagguuuuuuuaauuuu

SEQ ID NO: 689559 - RNA, 19 nt, Artificial Sequence
  Synthetic
uucagguuuuuuuaauuuu

SEQ ID NO: 689560 - RNA, 20 nt, Artificial Sequence
  Synthetic
uuucagguuuuuuuaauuuu

SEQ ID NO: 689561 - RNA, 21 nt, Artificial Sequence
  Synthetic
cuuucagguuuuuuuaauuuu

SEQ ID NO: 689562 - RNA, 22 nt, Artificial Sequence
  Synthetic
gcuuucagguuuuuuuaauuuu

SEQ ID NO: 689563 - RNA, 23 nt, Artificial Sequence
  Synthetic
ggcuuucagguuuuuuuaauuuu

SEQ ID NO: 689564 - RNA, 24 nt, Artificial Sequence
  Synthetic
gggcuuucagguuuuuuuaauuuu

SEQ ID NO: 689565 - RNA, 18 nt, Artificial Sequence
  Synthetic
uuuuuaaucuaacauuuu

SEQ ID NO: 689566 - RNA, 19 nt, Artificial Sequence
  Synthetic
guuuuuaaucuaacauuuu

SEQ ID NO: 689567 - RNA, 20 nt, Artificial Sequence
  Synthetic
uguuuuuaaucuaacauuuu

SEQ ID NO: 689568 - RNA, 21 nt, Artificial Sequence
  Synthetic
cuguuuuuaaucuaacauuuu

SEQ ID NO: 689569 - RNA, 22 nt, Artificial Sequence
  Synthetic
acuguuuuuaaucuaacauuuu

SEQ ID NO: 689570 - RNA, 23 nt, Artificial Sequence
  Synthetic
uacuguuuuuaaucuaacauuuu

SEQ ID NO: 689571 - RNA, 24 nt, Artificial Sequence
  Synthetic
cuacuguuuuuaaucuaacauuuu

SEQ ID NO: 689572 - RNA, 18 nt, Artificial Sequence
  Synthetic
uagagaaaaacacauuuu

SEQ ID NO: 689573 - RNA, 19 nt, Artificial Sequence
  Synthetic
uuagagaaaaacacauuuu

SEQ ID NO: 689574 - RNA, 20 nt, Artificial Sequence
  Synthetic
cuuagagaaaaacacauuuu

SEQ ID NO: 689575 - RNA, 21 nt, Artificial Sequence
  Synthetic
ucuuagagaaaaacacauuuu

SEQ ID NO: 689576 - RNA, 22 nt, Artificial Sequence
  Synthetic
gucuuagagaaaaacacauuuu

SEQ ID NO: 689577 - RNA, 23 nt, Artificial Sequence
  Synthetic
agucuuagagaaaaacacauuuu

SEQ ID NO: 689578 - RNA, 24 nt, Artificial Sequence
  Synthetic
cagucuuagagaaaaacacauuuu

SEQ ID NO: 689579 - RNA, 18 nt, Artificial Sequence
  Synthetic
uuuuccuuggcacauuuu

SEQ ID NO: 689580 - RNA, 19 nt, Artificial Sequence
  Synthetic
cuuuuccuuggcacauuuu

SEQ ID NO: 689581 - RNA, 20 nt, Artificial Sequence
  Synthetic
acuuuuccuuggcacauuuu

SEQ ID NO: 689582 - RNA, 21 nt, Artificial Sequence
  Synthetic
uacuuuuccuuggcacauuuu

SEQ ID NO: 689583 - RNA, 22 nt, Artificial Sequence
  Synthetic
cuacuuuuccuuggcacauuuu

SEQ ID NO: 689584 - RNA, 23 nt, Artificial Sequence
  Synthetic
gcuacuuuuccuuggcacauuuu

SEQ ID NO: 689585 - RNA, 24 nt, Artificial Sequence
  Synthetic
ggcuacuuuuccuuggcacauuuu

SEQ ID NO: 689586 - RNA, 18 nt, Artificial Sequence
  Synthetic
ugaaagaugagacauuuu

SEQ ID NO: 689587 - RNA, 19 nt, Artificial Sequence
  Synthetic
cugaaagaugagacauuuu

SEQ ID NO: 689588 - RNA, 20 nt, Artificial Sequence
  Synthetic
ccugaaagaugagacauuuu

SEQ ID NO: 689589 - RNA, 21 nt, Artificial Sequence
  Synthetic
uccugaaagaugagacauuuu

SEQ ID NO: 689590 - RNA, 22 nt, Artificial Sequence
  Synthetic
auccugaaagaugagacauuuu

SEQ ID NO: 689591 - RNA, 23 nt, Artificial Sequence
  Synthetic
aauccugaaagaugagacauuuu

SEQ ID NO: 689592 - RNA, 24 nt, Artificial Sequence
  Synthetic
aaauccugaaagaugagacauuuu

SEQ ID NO: 689593 - RNA, 18 nt, Artificial Sequence
  Synthetic
uuaucuagcugacauuuu

SEQ ID NO: 689594 - RNA, 19 nt, Artificial Sequence
  Synthetic
uuuaucuagcugacauuuu

SEQ ID NO: 689595 - RNA, 20 nt, Artificial Sequence
  Synthetic
cuuuaucuagcugacauuuu

SEQ ID NO: 689596 - RNA, 21 nt, Artificial Sequence
  Synthetic
ccuuuaucuagcugacauuuu

SEQ ID NO: 689597 - RNA, 22 nt, Artificial Sequence
  Synthetic
gccuuuaucuagcugacauuuu

SEQ ID NO: 689598 - RNA, 23 nt, Artificial Sequence
  Synthetic
ugccuuuaucuagcugacauuuu

SEQ ID NO: 689599 - RNA, 24 nt, Artificial Sequence
  Synthetic
augccuuuaucuagcugacauuuu

SEQ ID NO: 689600 - RNA, 18 nt, Artificial Sequence
  Synthetic
caaauaaauguacauuuu

SEQ ID NO: 689601 - RNA, 19 nt, Artificial Sequence
  Synthetic
acaaauaaauguacauuuu

SEQ ID NO: 689602 - RNA, 20 nt, Artificial Sequence
  Synthetic
uacaaauaaauguacauuuu

SEQ ID NO: 689603 - RNA, 21 nt, Artificial Sequence
  Synthetic
uuacaaauaaauguacauuuu

SEQ ID NO: 689604 - RNA, 22 nt, Artificial Sequence
  Synthetic
uuuacaaauaaauguacauuuu

SEQ ID NO: 689605 - RNA, 23 nt, Artificial Sequence
  Synthetic
auuuacaaauaaauguacauuuu

SEQ ID NO: 689606 - RNA, 24 nt, Artificial Sequence
  Synthetic
gauuuacaaauaaauguacauuuu

SEQ ID NO: 689607 - RNA, 18 nt, Artificial Sequence
  Synthetic
uucaggugauuacauuuu

SEQ ID NO: 689608 - RNA, 19 nt, Artificial Sequence
  Synthetic
uuucaggugauuacauuuu

SEQ ID NO: 689609 - RNA, 20 nt, Artificial Sequence
  Synthetic
uuuucaggugauuacauuuu

SEQ ID NO: 689610 - RNA, 21 nt, Artificial Sequence
  Synthetic
uuuuucaggugauuacauuuu

SEQ ID NO: 689611 - RNA, 22 nt, Artificial Sequence
  Synthetic
auuuuucaggugauuacauuuu

SEQ ID NO: 689612 - RNA, 23 nt, Artificial Sequence
  Synthetic
gauuuuucaggugauuacauuuu

SEQ ID NO: 689613 - RNA, 24 nt, Artificial Sequence
  Synthetic
agauuuuucaggugauuacauuuu

SEQ ID NO: 689614 - RNA, 18 nt, Artificial Sequence
  Synthetic
cuguaaucccaccauuuu

SEQ ID NO: 689615 - RNA, 19 nt, Artificial Sequence
  Synthetic
ucuguaaucccaccauuuu

SEQ ID NO: 689616 - RNA, 20 nt, Artificial Sequence
  Synthetic
aucuguaaucccaccauuuu

SEQ ID NO: 689617 - RNA, 21 nt, Artificial Sequence
  Synthetic
uaucuguaaucccaccauuuu

SEQ ID NO: 689618 - RNA, 22 nt, Artificial Sequence
  Synthetic
auaucuguaaucccaccauuuu

SEQ ID NO: 689619 - RNA, 23 nt, Artificial Sequence
  Synthetic
cauaucuguaaucccaccauuuu

SEQ ID NO: 689620 - RNA, 24 nt, Artificial Sequence
  Synthetic
ucauaucuguaaucccaccauuuu

SEQ ID NO: 689621 - RNA, 18 nt, Artificial Sequence
  Synthetic
uguuuuuugcaccauuuu

SEQ ID NO: 689622 - RNA, 19 nt, Artificial Sequence
  Synthetic
uuguuuuuugcaccauuuu

SEQ ID NO: 689623 - RNA, 20 nt, Artificial Sequence
  Synthetic
auuguuuuuugcaccauuuu

SEQ ID NO: 689624 - RNA, 21 nt, Artificial Sequence
  Synthetic
cauuguuuuuugcaccauuuu

SEQ ID NO: 689625 - RNA, 22 nt, Artificial Sequence
  Synthetic
acauuguuuuuugcaccauuuu

SEQ ID NO: 689626 - RNA, 23 nt, Artificial Sequence
  Synthetic
uacauuguuuuuugcaccauuuu

SEQ ID NO: 689627 - RNA, 24 nt, Artificial Sequence
  Synthetic
auacauuguuuuuugcaccauuuu

SEQ ID NO: 689628 - RNA, 21 nt, Artificial Sequence
  Synthetic
uagaaaagaaaaacccauuuu

SEQ ID NO: 689629 - RNA, 22 nt, Artificial Sequence
  Synthetic
guagaaaagaaaaacccauuuu

SEQ ID NO: 689630 - RNA, 23 nt, Artificial Sequence
  Synthetic
aguagaaaagaaaaacccauuuu

SEQ ID NO: 689631 - RNA, 24 nt, Artificial Sequence
  Synthetic
caguagaaaagaaaaacccauuuu

SEQ ID NO: 689632 - RNA, 18 nt, Artificial Sequence
  Synthetic
ucccccgccccccauuuu

SEQ ID NO: 689633 - RNA, 19 nt, Artificial Sequence
  Synthetic
aucccccgccccccauuuu

SEQ ID NO: 689634 - RNA, 20 nt, Artificial Sequence
  Synthetic
uaucccccgccccccauuuu

SEQ ID NO: 689635 - RNA, 21 nt, Artificial Sequence
  Synthetic
auaucccccgccccccauuuu

SEQ ID NO: 689636 - RNA, 22 nt, Artificial Sequence
  Synthetic
aauaucccccgccccccauuuu

SEQ ID NO: 689637 - RNA, 23 nt, Artificial Sequence
  Synthetic
aaauaucccccgccccccauuuu

SEQ ID NO: 689638 - RNA, 24 nt, Artificial Sequence
  Synthetic
aaaauaucccccgccccccauuuu

SEQ ID NO: 689639 - RNA, 18 nt, Artificial Sequence
  Synthetic
gcaaaauaccuccauuuu

SEQ ID NO: 689640 - RNA, 19 nt, Artificial Sequence
  Synthetic
ugcaaaauaccuccauuuu

SEQ ID NO: 689641 - RNA, 20 nt, Artificial Sequence
  Synthetic
augcaaaauaccuccauuuu

SEQ ID NO: 689642 - RNA, 21 nt, Artificial Sequence
  Synthetic
aaugcaaaauaccuccauuuu

SEQ ID NO: 689643 - RNA, 22 nt, Artificial Sequence
  Synthetic
caaugcaaaauaccuccauuuu

SEQ ID NO: 689644 - RNA, 23 nt, Artificial Sequence
  Synthetic
ucaaugcaaaauaccuccauuuu

SEQ ID NO: 689645 - RNA, 24 nt, Artificial Sequence
  Synthetic
cucaaugcaaaauaccuccauuuu

SEQ ID NO: 689646 - RNA, 18 nt, Artificial Sequence
  Synthetic
uuuuaaaguacgcauuuu

SEQ ID NO: 689647 - RNA, 19 nt, Artificial Sequence
  Synthetic
auuuuaaaguacgcauuuu

SEQ ID NO: 689648 - RNA, 20 nt, Artificial Sequence
  Synthetic
gauuuuaaaguacgcauuuu

SEQ ID NO: 689649 - RNA, 21 nt, Artificial Sequence
  Synthetic
ggauuuuaaaguacgcauuuu

SEQ ID NO: 689650 - RNA, 22 nt, Artificial Sequence
  Synthetic
aggauuuuaaaguacgcauuuu

SEQ ID NO: 689651 - RNA, 23 nt, Artificial Sequence
  Synthetic
gaggauuuuaaaguacgcauuuu

SEQ ID NO: 689652 - RNA, 24 nt, Artificial Sequence
  Synthetic
ugaggauuuuaaaguacgcauuuu

SEQ ID NO: 689653 - RNA, 18 nt, Artificial Sequence
  Synthetic
uaguacuagccgcauuuu

SEQ ID NO: 689654 - RNA, 19 nt, Artificial Sequence
  Synthetic
uuaguacuagccgcauuuu

SEQ ID NO: 689655 - RNA, 20 nt, Artificial Sequence
  Synthetic
auuaguacuagccgcauuuu

SEQ ID NO: 689656 - RNA, 21 nt, Artificial Sequence
  Synthetic
aauuaguacuagccgcauuuu

SEQ ID NO: 689657 - RNA, 22 nt, Artificial Sequence
  Synthetic
caauuaguacuagccgcauuuu

SEQ ID NO: 689658 - RNA, 23 nt, Artificial Sequence
  Synthetic
ucaauuaguacuagccgcauuuu

SEQ ID NO: 689659 - RNA, 24 nt, Artificial Sequence
  Synthetic
cucaauuaguacuagccgcauuuu

SEQ ID NO: 689660 - RNA, 18 nt, Artificial Sequence
  Synthetic
cuguaaucucggcauuuu

SEQ ID NO: 689661 - RNA, 19 nt, Artificial Sequence
  Synthetic
ccuguaaucucggcauuuu

SEQ ID NO: 689662 - RNA, 20 nt, Artificial Sequence
  Synthetic
gccuguaaucucggcauuuu

SEQ ID NO: 689663 - RNA, 21 nt, Artificial Sequence
  Synthetic
cgccuguaaucucggcauuuu

SEQ ID NO: 689664 - RNA, 22 nt, Artificial Sequence
  Synthetic
acgccuguaaucucggcauuuu

SEQ ID NO: 689665 - RNA, 23 nt, Artificial Sequence
  Synthetic
cacgccuguaaucucggcauuuu

SEQ ID NO: 689666 - RNA, 24 nt, Artificial Sequence
  Synthetic
ucacgccuguaaucucggcauuuu

SEQ ID NO: 689667 - RNA, 18 nt, Artificial Sequence
  Synthetic
acaggugaacugcauuuu

SEQ ID NO: 689668 - RNA, 19 nt, Artificial Sequence
  Synthetic
uacaggugaacugcauuuu

SEQ ID NO: 689669 - RNA, 20 nt, Artificial Sequence
  Synthetic
auacaggugaacugcauuuu

SEQ ID NO: 689670 - RNA, 21 nt, Artificial Sequence
  Synthetic
uauacaggugaacugcauuuu

SEQ ID NO: 689671 - RNA, 22 nt, Artificial Sequence
  Synthetic
cuauacaggugaacugcauuuu

SEQ ID NO: 689672 - RNA, 23 nt, Artificial Sequence
  Synthetic
gcuauacaggugaacugcauuuu

SEQ ID NO: 689673 - RNA, 24 nt, Artificial Sequence
  Synthetic
ugcuauacaggugaacugcauuuu

SEQ ID NO: 689674 - RNA, 18 nt, Artificial Sequence
  Synthetic
aauuaacuaaaucauuuu

SEQ ID NO: 689675 - RNA, 19 nt, Artificial Sequence
  Synthetic
aaauuaacuaaaucauuuu

SEQ ID NO: 689676 - RNA, 20 nt, Artificial Sequence
  Synthetic
uaaauuaacuaaaucauuuu

SEQ ID NO: 689677 - RNA, 21 nt, Artificial Sequence
  Synthetic
uuaaauuaacuaaaucauuuu

SEQ ID NO: 689678 - RNA, 22 nt, Artificial Sequence
  Synthetic
uuuaaauuaacuaaaucauuuu

SEQ ID NO: 689679 - RNA, 23 nt, Artificial Sequence
  Synthetic
uuuuaaauuaacuaaaucauuuu

SEQ ID NO: 689680 - RNA, 24 nt, Artificial Sequence
  Synthetic
uuuuuaaauuaacuaaaucauuuu

SEQ ID NO: 689681 - RNA, 18 nt, Artificial Sequence
  Synthetic
aaaagaaaaacucauuuu

SEQ ID NO: 689682 - RNA, 19 nt, Artificial Sequence
  Synthetic
gaaaagaaaaacucauuuu

SEQ ID NO: 689683 - RNA, 20 nt, Artificial Sequence
  Synthetic
agaaaagaaaaacucauuuu

SEQ ID NO: 689684 - RNA, 21 nt, Artificial Sequence
  Synthetic
uagaaaagaaaaacucauuuu

SEQ ID NO: 689685 - RNA, 22 nt, Artificial Sequence
  Synthetic
auagaaaagaaaaacucauuuu

SEQ ID NO: 689686 - RNA, 23 nt, Artificial Sequence
  Synthetic
aauagaaaagaaaaacucauuuu

SEQ ID NO: 689687 - RNA, 24 nt, Artificial Sequence
  Synthetic
caauagaaaagaaaaacucauuuu

SEQ ID NO: 689688 - RNA, 21 nt, Artificial Sequence
  Synthetic
gaauccucccuaacucauuuu

SEQ ID NO: 689689 - RNA, 22 nt, Artificial Sequence
  Synthetic
ggaauccucccuaacucauuuu

SEQ ID NO: 689690 - RNA, 23 nt, Artificial Sequence
  Synthetic
gggaauccucccuaacucauuuu

SEQ ID NO: 689691 - RNA, 24 nt, Artificial Sequence
  Synthetic
agggaauccucccuaacucauuuu

SEQ ID NO: 689692 - RNA, 18 nt, Artificial Sequence
  Synthetic
uaacuuauuucucauuuu

SEQ ID NO: 689693 - RNA, 19 nt, Artificial Sequence
  Synthetic
cuaacuuauuucucauuuu

SEQ ID NO: 689694 - RNA, 20 nt, Artificial Sequence
  Synthetic
ccuaacuuauuucucauuuu

SEQ ID NO: 689695 - RNA, 21 nt, Artificial Sequence
  Synthetic
uccuaacuuauuucucauuuu

SEQ ID NO: 689696 - RNA, 22 nt, Artificial Sequence
  Synthetic
uuccuaacuuauuucucauuuu

SEQ ID NO: 689697 - RNA, 23 nt, Artificial Sequence
  Synthetic
uuuccuaacuuauuucucauuuu

SEQ ID NO: 689698 - RNA, 24 nt, Artificial Sequence
  Synthetic
uuuuccuaacuuauuucucauuuu

SEQ ID NO: 689699 - RNA, 18 nt, Artificial Sequence
  Synthetic
aaacugugaggucauuuu

SEQ ID NO: 689700 - RNA, 19 nt, Artificial Sequence
  Synthetic
aaaacugugaggucauuuu

SEQ ID NO: 689701 - RNA, 20 nt, Artificial Sequence
  Synthetic
caaaacugugaggucauuuu

SEQ ID NO: 689702 - RNA, 21 nt, Artificial Sequence
  Synthetic
ucaaaacugugaggucauuuu

SEQ ID NO: 689703 - RNA, 22 nt, Artificial Sequence
  Synthetic
uucaaaacugugaggucauuuu

SEQ ID NO: 689704 - RNA, 23 nt, Artificial Sequence
  Synthetic
guucaaaacugugaggucauuuu

SEQ ID NO: 689705 - RNA, 24 nt, Artificial Sequence
  Synthetic
uguucaaaacugugaggucauuuu

SEQ ID NO: 689706 - RNA, 18 nt, Artificial Sequence
  Synthetic
gauguauagaaagauuuu

SEQ ID NO: 689707 - RNA, 19 nt, Artificial Sequence
  Synthetic
cgauguauagaaagauuuu

SEQ ID NO: 689708 - RNA, 20 nt, Artificial Sequence
  Synthetic
gcgauguauagaaagauuuu

SEQ ID NO: 689709 - RNA, 21 nt, Artificial Sequence
  Synthetic
ugcgauguauagaaagauuuu

SEQ ID NO: 689710 - RNA, 22 nt, Artificial Sequence
  Synthetic
augcgauguauagaaagauuuu

SEQ ID NO: 689711 - RNA, 23 nt, Artificial Sequence
  Synthetic
uaugcgauguauagaaagauuuu

SEQ ID NO: 689712 - RNA, 24 nt, Artificial Sequence
  Synthetic
uuaugcgauguauagaaagauuuu

SEQ ID NO: 689713 - RNA, 18 nt, Artificial Sequence
  Synthetic
augcugaaauaagauuuu

SEQ ID NO: 689714 - RNA, 19 nt, Artificial Sequence
  Synthetic
uaugcugaaauaagauuuu

SEQ ID NO: 689715 - RNA, 20 nt, Artificial Sequence
  Synthetic
uuaugcugaaauaagauuuu

SEQ ID NO: 689716 - RNA, 21 nt, Artificial Sequence
  Synthetic
uuuaugcugaaauaagauuuu

SEQ ID NO: 689717 - RNA, 22 nt, Artificial Sequence
  Synthetic
guuuaugcugaaauaagauuuu

SEQ ID NO: 689718 - RNA, 23 nt, Artificial Sequence
  Synthetic
aguuuaugcugaaauaagauuuu

SEQ ID NO: 689719 - RNA, 24 nt, Artificial Sequence
  Synthetic
gaguuuaugcugaaauaagauuuu

SEQ ID NO: 689720 - RNA, 18 nt, Artificial Sequence
  Synthetic
agggauguguaagauuuu

SEQ ID NO: 689721 - RNA, 19 nt, Artificial Sequence
  Synthetic
aagggauguguaagauuuu

SEQ ID NO: 689722 - RNA, 20 nt, Artificial Sequence
  Synthetic
uaagggauguguaagauuuu

SEQ ID NO: 689723 - RNA, 21 nt, Artificial Sequence
  Synthetic
uuaagggauguguaagauuuu

SEQ ID NO: 689724 - RNA, 22 nt, Artificial Sequence
  Synthetic
cuuaagggauguguaagauuuu

SEQ ID NO: 689725 - RNA, 23 nt, Artificial Sequence
  Synthetic
ucuuaagggauguguaagauuuu

SEQ ID NO: 689726 - RNA, 24 nt, Artificial Sequence
  Synthetic
gucuuaagggauguguaagauuuu

SEQ ID NO: 689727 - RNA, 18 nt, Artificial Sequence
  Synthetic
caguugaaaucagauuuu

SEQ ID NO: 689728 - RNA, 19 nt, Artificial Sequence
  Synthetic
gcaguugaaaucagauuuu

SEQ ID NO: 689729 - RNA, 20 nt, Artificial Sequence
  Synthetic
ggcaguugaaaucagauuuu

SEQ ID NO: 689730 - RNA, 21 nt, Artificial Sequence
  Synthetic
aggcaguugaaaucagauuuu

SEQ ID NO: 689731 - RNA, 22 nt, Artificial Sequence
  Synthetic
gaggcaguugaaaucagauuuu

SEQ ID NO: 689732 - RNA, 23 nt, Artificial Sequence
  Synthetic
agaggcaguugaaaucagauuuu

SEQ ID NO: 689733 - RNA, 24 nt, Artificial Sequence
  Synthetic
cagaggcaguugaaaucagauuuu

SEQ ID NO: 689734 - RNA, 18 nt, Artificial Sequence
  Synthetic
aauuagaacagagauuuu

SEQ ID NO: 689735 - RNA, 19 nt, Artificial Sequence
  Synthetic
aaauuagaacagagauuuu

SEQ ID NO: 689736 - RNA, 20 nt, Artificial Sequence
  Synthetic
uaaauuagaacagagauuuu

SEQ ID NO: 689737 - RNA, 21 nt, Artificial Sequence
  Synthetic
guaaauuagaacagagauuuu

SEQ ID NO: 689738 - RNA, 22 nt, Artificial Sequence
  Synthetic
aguaaauuagaacagagauuuu

SEQ ID NO: 689739 - RNA, 23 nt, Artificial Sequence
  Synthetic
aaguaaauuagaacagagauuuu

SEQ ID NO: 689740 - RNA, 24 nt, Artificial Sequence
  Synthetic
uaaguaaauuagaacagagauuuu

SEQ ID NO: 689741 - RNA, 18 nt, Artificial Sequence
  Synthetic
acaucaggcagagauuuu

SEQ ID NO: 689742 - RNA, 19 nt, Artificial Sequence
  Synthetic
uacaucaggcagagauuuu

SEQ ID NO: 689743 - RNA, 20 nt, Artificial Sequence
  Synthetic
cuacaucaggcagagauuuu

SEQ ID NO: 689744 - RNA, 21 nt, Artificial Sequence
  Synthetic
gcuacaucaggcagagauuuu

SEQ ID NO: 689745 - RNA, 22 nt, Artificial Sequence
  Synthetic
ggcuacaucaggcagagauuuu

SEQ ID NO: 689746 - RNA, 23 nt, Artificial Sequence
  Synthetic
uggcuacaucaggcagagauuuu

SEQ ID NO: 689747 - RNA, 24 nt, Artificial Sequence
  Synthetic
uuggcuacaucaggcagagauuuu

SEQ ID NO: 689748 - RNA, 18 nt, Artificial Sequence
  Synthetic
aagacucucagagauuuu

SEQ ID NO: 689749 - RNA, 19 nt, Artificial Sequence
  Synthetic
aaagacucucagagauuuu

SEQ ID NO: 689750 - RNA, 20 nt, Artificial Sequence
  Synthetic
caaagacucucagagauuuu

SEQ ID NO: 689751 - RNA, 21 nt, Artificial Sequence
  Synthetic
ucaaagacucucagagauuuu

SEQ ID NO: 689752 - RNA, 22 nt, Artificial Sequence
  Synthetic
aucaaagacucucagagauuuu

SEQ ID NO: 689753 - RNA, 23 nt, Artificial Sequence
  Synthetic
uaucaaagacucucagagauuuu

SEQ ID NO: 689754 - RNA, 24 nt, Artificial Sequence
  Synthetic
guaucaaagacucucagagauuuu

SEQ ID NO: 689755 - RNA, 18 nt, Artificial Sequence
  Synthetic
guaagaggaauagauuuu

SEQ ID NO: 689756 - RNA, 19 nt, Artificial Sequence
  Synthetic
aguaagaggaauagauuuu

SEQ ID NO: 689757 - RNA, 20 nt, Artificial Sequence
  Synthetic
uaguaagaggaauagauuuu

SEQ ID NO: 689758 - RNA, 21 nt, Artificial Sequence
  Synthetic
auaguaagaggaauagauuuu

SEQ ID NO: 689759 - RNA, 22 nt, Artificial Sequence
  Synthetic
uauaguaagaggaauagauuuu

SEQ ID NO: 689760 - RNA, 23 nt, Artificial Sequence
  Synthetic
auauaguaagaggaauagauuuu

SEQ ID NO: 689761 - RNA, 24 nt, Artificial Sequence
  Synthetic
aauauaguaagaggaauagauuuu

SEQ ID NO: 689762 - RNA, 18 nt, Artificial Sequence
  Synthetic
ucacccacaguagauuuu

SEQ ID NO: 689763 - RNA, 19 nt, Artificial Sequence
  Synthetic
aucacccacaguagauuuu

SEQ ID NO: 689764 - RNA, 20 nt, Artificial Sequence
  Synthetic
uaucacccacaguagauuuu

SEQ ID NO: 689765 - RNA, 21 nt, Artificial Sequence
  Synthetic
auaucacccacaguagauuuu

SEQ ID NO: 689766 - RNA, 22 nt, Artificial Sequence
  Synthetic
gauaucacccacaguagauuuu

SEQ ID NO: 689767 - RNA, 23 nt, Artificial Sequence
  Synthetic
ugauaucacccacaguagauuuu

SEQ ID NO: 689768 - RNA, 24 nt, Artificial Sequence
  Synthetic
gugauaucacccacaguagauuuu

SEQ ID NO: 689769 - RNA, 18 nt, Artificial Sequence
  Synthetic
uaguagcagguagauuuu

SEQ ID NO: 689770 - RNA, 19 nt, Artificial Sequence
  Synthetic
auaguagcagguagauuuu

SEQ ID NO: 689771 - RNA, 20 nt, Artificial Sequence
  Synthetic
uauaguagcagguagauuuu

SEQ ID NO: 689772 - RNA, 21 nt, Artificial Sequence
  Synthetic
auauaguagcagguagauuuu

SEQ ID NO: 689773 - RNA, 22 nt, Artificial Sequence
  Synthetic
cauauaguagcagguagauuuu

SEQ ID NO: 689774 - RNA, 23 nt, Artificial Sequence
  Synthetic
ccauauaguagcagguagauuuu

SEQ ID NO: 689775 - RNA, 24 nt, Artificial Sequence
  Synthetic
accauauaguagcagguagauuuu

SEQ ID NO: 689776 - RNA, 18 nt, Artificial Sequence
  Synthetic
aggguuucauuagauuuu

SEQ ID NO: 689777 - RNA, 19 nt, Artificial Sequence
  Synthetic
aaggguuucauuagauuuu

SEQ ID NO: 689778 - RNA, 20 nt, Artificial Sequence
  Synthetic
caaggguuucauuagauuuu

SEQ ID NO: 689779 - RNA, 21 nt, Artificial Sequence
  Synthetic
ucaaggguuucauuagauuuu

SEQ ID NO: 689780 - RNA, 22 nt, Artificial Sequence
  Synthetic
cucaaggguuucauuagauuuu

SEQ ID NO: 689781 - RNA, 23 nt, Artificial Sequence
  Synthetic
gcucaaggguuucauuagauuuu

SEQ ID NO: 689782 - RNA, 24 nt, Artificial Sequence
  Synthetic
ugcucaaggguuucauuagauuuu

SEQ ID NO: 689783 - RNA, 18 nt, Artificial Sequence
  Synthetic
aagcuacugaaggauuuu

SEQ ID NO: 689784 - RNA, 19 nt, Artificial Sequence
  Synthetic
gaagcuacugaaggauuuu

SEQ ID NO: 689785 - RNA, 20 nt, Artificial Sequence
  Synthetic
ggaagcuacugaaggauuuu

SEQ ID NO: 689786 - RNA, 21 nt, Artificial Sequence
  Synthetic
gggaagcuacugaaggauuuu

SEQ ID NO: 689787 - RNA, 22 nt, Artificial Sequence
  Synthetic
cgggaagcuacugaaggauuuu

SEQ ID NO: 689788 - RNA, 23 nt, Artificial Sequence
  Synthetic
acgggaagcuacugaaggauuuu

SEQ ID NO: 689789 - RNA, 24 nt, Artificial Sequence
  Synthetic
uacgggaagcuacugaaggauuuu

SEQ ID NO: 689790 - RNA, 18 nt, Artificial Sequence
  Synthetic
cauucccuuaaggauuuu

SEQ ID NO: 689791 - RNA, 19 nt, Artificial Sequence
  Synthetic
acauucccuuaaggauuuu

SEQ ID NO: 689792 - RNA, 20 nt, Artificial Sequence
  Synthetic
aacauucccuuaaggauuuu

SEQ ID NO: 689793 - RNA, 21 nt, Artificial Sequence
  Synthetic
aaacauucccuuaaggauuuu

SEQ ID NO: 689794 - RNA, 22 nt, Artificial Sequence
  Synthetic
uaaacauucccuuaaggauuuu

SEQ ID NO: 689795 - RNA, 23 nt, Artificial Sequence
  Synthetic
cuaaacauucccuuaaggauuuu

SEQ ID NO: 689796 - RNA, 24 nt, Artificial Sequence
  Synthetic
acuaaacauucccuuaaggauuuu

SEQ ID NO: 689797 - RNA, 18 nt, Artificial Sequence
  Synthetic
uuguaaagccaggauuuu

SEQ ID NO: 689798 - RNA, 19 nt, Artificial Sequence
  Synthetic
guuguaaagccaggauuuu

SEQ ID NO: 689799 - RNA, 20 nt, Artificial Sequence
  Synthetic
aguuguaaagccaggauuuu

SEQ ID NO: 689800 - RNA, 21 nt, Artificial Sequence
  Synthetic
gaguuguaaagccaggauuuu

SEQ ID NO: 689801 - RNA, 22 nt, Artificial Sequence
  Synthetic
ugaguuguaaagccaggauuuu

SEQ ID NO: 689802 - RNA, 23 nt, Artificial Sequence
  Synthetic
augaguuguaaagccaggauuuu

SEQ ID NO: 689803 - RNA, 24 nt, Artificial Sequence
  Synthetic
uaugaguuguaaagccaggauuuu

SEQ ID NO: 689804 - RNA, 18 nt, Artificial Sequence
  Synthetic
uucucaauggaggauuuu

SEQ ID NO: 689805 - RNA, 19 nt, Artificial Sequence
  Synthetic
cuucucaauggaggauuuu

SEQ ID NO: 689806 - RNA, 20 nt, Artificial Sequence
  Synthetic
ucuucucaauggaggauuuu

SEQ ID NO: 689807 - RNA, 21 nt, Artificial Sequence
  Synthetic
aucuucucaauggaggauuuu

SEQ ID NO: 689808 - RNA, 22 nt, Artificial Sequence
  Synthetic
aaucuucucaauggaggauuuu

SEQ ID NO: 689809 - RNA, 23 nt, Artificial Sequence
  Synthetic
gaaucuucucaauggaggauuuu

SEQ ID NO: 689810 - RNA, 24 nt, Artificial Sequence
  Synthetic
agaaucuucucaauggaggauuuu

SEQ ID NO: 689811 - RNA, 18 nt, Artificial Sequence
  Synthetic
uuaagacaagcggauuuu

SEQ ID NO: 689812 - RNA, 19 nt, Artificial Sequence
  Synthetic
auuaagacaagcggauuuu

SEQ ID NO: 689813 - RNA, 20 nt, Artificial Sequence
  Synthetic
cauuaagacaagcggauuuu

SEQ ID NO: 689814 - RNA, 21 nt, Artificial Sequence
  Synthetic
ucauuaagacaagcggauuuu

SEQ ID NO: 689815 - RNA, 22 nt, Artificial Sequence
  Synthetic
aucauuaagacaagcggauuuu

SEQ ID NO: 689816 - RNA, 23 nt, Artificial Sequence
  Synthetic
caucauuaagacaagcggauuuu

SEQ ID NO: 689817 - RNA, 24 nt, Artificial Sequence
  Synthetic
ccaucauuaagacaagcggauuuu

SEQ ID NO: 689818 - RNA, 18 nt, Artificial Sequence
  Synthetic
gccaaucuucaugauuuu

SEQ ID NO: 689819 - RNA, 19 nt, Artificial Sequence
  Synthetic
ugccaaucuucaugauuuu

SEQ ID NO: 689820 - RNA, 20 nt, Artificial Sequence
  Synthetic
uugccaaucuucaugauuuu

SEQ ID NO: 689821 - RNA, 21 nt, Artificial Sequence
  Synthetic
cuugccaaucuucaugauuuu

SEQ ID NO: 689822 - RNA, 22 nt, Artificial Sequence
  Synthetic
acuugccaaucuucaugauuuu

SEQ ID NO: 689823 - RNA, 23 nt, Artificial Sequence
  Synthetic
aacuugccaaucuucaugauuuu

SEQ ID NO: 689824 - RNA, 24 nt, Artificial Sequence
  Synthetic
aaacuugccaaucuucaugauuuu

SEQ ID NO: 689825 - RNA, 18 nt, Artificial Sequence
  Synthetic
gcaccaggaacugauuuu

SEQ ID NO: 689826 - RNA, 19 nt, Artificial Sequence
  Synthetic
ggcaccaggaacugauuuu

SEQ ID NO: 689827 - RNA, 20 nt, Artificial Sequence
  Synthetic
uggcaccaggaacugauuuu

SEQ ID NO: 689828 - RNA, 21 nt, Artificial Sequence
  Synthetic
uuggcaccaggaacugauuuu

SEQ ID NO: 689829 - RNA, 22 nt, Artificial Sequence
  Synthetic
uuuggcaccaggaacugauuuu

SEQ ID NO: 689830 - RNA, 23 nt, Artificial Sequence
  Synthetic
uuuuggcaccaggaacugauuuu

SEQ ID NO: 689831 - RNA, 24 nt, Artificial Sequence
  Synthetic
cuuuuggcaccaggaacugauuuu

SEQ ID NO: 689832 - RNA, 18 nt, Artificial Sequence
  Synthetic
gucuguguaacugauuuu

SEQ ID NO: 689833 - RNA, 19 nt, Artificial Sequence
  Synthetic
agucuguguaacugauuuu

SEQ ID NO: 689834 - RNA, 20 nt, Artificial Sequence
  Synthetic
aagucuguguaacugauuuu

SEQ ID NO: 689835 - RNA, 21 nt, Artificial Sequence
  Synthetic
gaagucuguguaacugauuuu

SEQ ID NO: 689836 - RNA, 22 nt, Artificial Sequence
  Synthetic
agaagucuguguaacugauuuu

SEQ ID NO: 689837 - RNA, 23 nt, Artificial Sequence
  Synthetic
uagaagucuguguaacugauuuu

SEQ ID NO: 689838 - RNA, 24 nt, Artificial Sequence
  Synthetic
uuagaagucuguguaacugauuuu

SEQ ID NO: 689839 - RNA, 18 nt, Artificial Sequence
  Synthetic
acaaaaugagcugauuuu

SEQ ID NO: 689840 - RNA, 19 nt, Artificial Sequence
  Synthetic
aacaaaaugagcugauuuu

SEQ ID NO: 689841 - RNA, 20 nt, Artificial Sequence
  Synthetic
aaacaaaaugagcugauuuu

SEQ ID NO: 689842 - RNA, 21 nt, Artificial Sequence
  Synthetic
aaaacaaaaugagcugauuuu

SEQ ID NO: 689843 - RNA, 22 nt, Artificial Sequence
  Synthetic
gaaaacaaaaugagcugauuuu

SEQ ID NO: 689844 - RNA, 23 nt, Artificial Sequence
  Synthetic
agaaaacaaaaugagcugauuuu

SEQ ID NO: 689845 - RNA, 24 nt, Artificial Sequence
  Synthetic
cagaaaacaaaaugagcugauuuu

SEQ ID NO: 689846 - RNA, 18 nt, Artificial Sequence
  Synthetic
agcuuaauaucugauuuu

SEQ ID NO: 689847 - RNA, 19 nt, Artificial Sequence
  Synthetic
gagcuuaauaucugauuuu

SEQ ID NO: 689848 - RNA, 20 nt, Artificial Sequence
  Synthetic
agagcuuaauaucugauuuu

SEQ ID NO: 689849 - RNA, 21 nt, Artificial Sequence
  Synthetic
aagagcuuaauaucugauuuu

SEQ ID NO: 689850 - RNA, 22 nt, Artificial Sequence
  Synthetic
caagagcuuaauaucugauuuu

SEQ ID NO: 689851 - RNA, 23 nt, Artificial Sequence
  Synthetic
gcaagagcuuaauaucugauuuu

SEQ ID NO: 689852 - RNA, 24 nt, Artificial Sequence
  Synthetic
agcaagagcuuaauaucugauuuu

SEQ ID NO: 689853 - RNA, 18 nt, Artificial Sequence
  Synthetic
cuuggccugagugauuuu

SEQ ID NO: 689854 - RNA, 19 nt, Artificial Sequence
  Synthetic
acuuggccugagugauuuu

SEQ ID NO: 689855 - RNA, 20 nt, Artificial Sequence
  Synthetic
aacuuggccugagugauuuu

SEQ ID NO: 689856 - RNA, 21 nt, Artificial Sequence
  Synthetic
aaacuuggccugagugauuuu

SEQ ID NO: 689857 - RNA, 22 nt, Artificial Sequence
  Synthetic
gaaacuuggccugagugauuuu

SEQ ID NO: 689858 - RNA, 23 nt, Artificial Sequence
  Synthetic
agaaacuuggccugagugauuuu

SEQ ID NO: 689859 - RNA, 24 nt, Artificial Sequence
  Synthetic
cagaaacuuggccugagugauuuu

SEQ ID NO: 689860 - RNA, 18 nt, Artificial Sequence
  Synthetic
aaugucgaaggugauuuu

SEQ ID NO: 689861 - RNA, 19 nt, Artificial Sequence
  Synthetic
aaaugucgaaggugauuuu

SEQ ID NO: 689862 - RNA, 20 nt, Artificial Sequence
  Synthetic
aaaaugucgaaggugauuuu

SEQ ID NO: 689863 - RNA, 21 nt, Artificial Sequence
  Synthetic
aaaaaugucgaaggugauuuu

SEQ ID NO: 689864 - RNA, 22 nt, Artificial Sequence
  Synthetic
gaaaaaugucgaaggugauuuu

SEQ ID NO: 689865 - RNA, 23 nt, Artificial Sequence
  Synthetic
agaaaaaugucgaaggugauuuu

SEQ ID NO: 689866 - RNA, 24 nt, Artificial Sequence
  Synthetic
cagaaaaaugucgaaggugauuuu

SEQ ID NO: 689867 - RNA, 18 nt, Artificial Sequence
  Synthetic
uuuuuauuuggugauuuu

SEQ ID NO: 689868 - RNA, 19 nt, Artificial Sequence
  Synthetic
auuuuuauuuggugauuuu

SEQ ID NO: 689869 - RNA, 20 nt, Artificial Sequence
  Synthetic
aauuuuuauuuggugauuuu

SEQ ID NO: 689870 - RNA, 21 nt, Artificial Sequence
  Synthetic
uaauuuuuauuuggugauuuu

SEQ ID NO: 689871 - RNA, 22 nt, Artificial Sequence
  Synthetic
auaauuuuuauuuggugauuuu

SEQ ID NO: 689872 - RNA, 23 nt, Artificial Sequence
  Synthetic
cauaauuuuuauuuggugauuuu

SEQ ID NO: 689873 - RNA, 24 nt, Artificial Sequence
  Synthetic
ucauaauuuuuauuuggugauuuu

SEQ ID NO: 689874 - RNA, 18 nt, Artificial Sequence
  Synthetic
ccuggcuucauugauuuu

SEQ ID NO: 689875 - RNA, 19 nt, Artificial Sequence
  Synthetic
cccuggcuucauugauuuu

SEQ ID NO: 689876 - RNA, 20 nt, Artificial Sequence
  Synthetic
ccccuggcuucauugauuuu

SEQ ID NO: 689877 - RNA, 21 nt, Artificial Sequence
  Synthetic
gccccuggcuucauugauuuu

SEQ ID NO: 689878 - RNA, 22 nt, Artificial Sequence
  Synthetic
agccccuggcuucauugauuuu

SEQ ID NO: 689879 - RNA, 23 nt, Artificial Sequence
  Synthetic
cagccccuggcuucauugauuuu

SEQ ID NO: 689880 - RNA, 24 nt, Artificial Sequence
  Synthetic
ccagccccuggcuucauugauuuu

SEQ ID NO: 689881 - RNA, 18 nt, Artificial Sequence
  Synthetic
caggugccuauugauuuu

SEQ ID NO: 689882 - RNA, 19 nt, Artificial Sequence
  Synthetic
gcaggugccuauugauuuu

SEQ ID NO: 689883 - RNA, 20 nt, Artificial Sequence
  Synthetic
agcaggugccuauugauuuu

SEQ ID NO: 689884 - RNA, 21 nt, Artificial Sequence
  Synthetic
cagcaggugccuauugauuuu

SEQ ID NO: 689885 - RNA, 22 nt, Artificial Sequence
  Synthetic
ucagcaggugccuauugauuuu

SEQ ID NO: 689886 - RNA, 23 nt, Artificial Sequence
  Synthetic
aucagcaggugccuauugauuuu

SEQ ID NO: 689887 - RNA, 24 nt, Artificial Sequence
  Synthetic
aaucagcaggugccuauugauuuu

SEQ ID NO: 689888 - RNA, 18 nt, Artificial Sequence
  Synthetic
uggaaauuaaaauauuuu

SEQ ID NO: 689889 - RNA, 19 nt, Artificial Sequence
  Synthetic
auggaaauuaaaauauuuu

SEQ ID NO: 689890 - RNA, 20 nt, Artificial Sequence
  Synthetic
gauggaaauuaaaauauuuu

SEQ ID NO: 689891 - RNA, 21 nt, Artificial Sequence
  Synthetic
agauggaaauuaaaauauuuu

SEQ ID NO: 689892 - RNA, 22 nt, Artificial Sequence
  Synthetic
gagauggaaauuaaaauauuuu

SEQ ID NO: 689893 - RNA, 23 nt, Artificial Sequence
  Synthetic
ugagauggaaauuaaaauauuuu

SEQ ID NO: 689894 - RNA, 24 nt, Artificial Sequence
  Synthetic
uugagauggaaauuaaaauauuuu

SEQ ID NO: 689895 - RNA, 18 nt, Artificial Sequence
  Synthetic
uuaugagcuacauauuuu

SEQ ID NO: 689896 - RNA, 19 nt, Artificial Sequence
  Synthetic
cuuaugagcuacauauuuu

SEQ ID NO: 689897 - RNA, 20 nt, Artificial Sequence
  Synthetic
ucuuaugagcuacauauuuu

SEQ ID NO: 689898 - RNA, 21 nt, Artificial Sequence
  Synthetic
cucuuaugagcuacauauuuu

SEQ ID NO: 689899 - RNA, 22 nt, Artificial Sequence
  Synthetic
ucucuuaugagcuacauauuuu

SEQ ID NO: 689900 - RNA, 23 nt, Artificial Sequence
  Synthetic
aucucuuaugagcuacauauuuu

SEQ ID NO: 689901 - RNA, 24 nt, Artificial Sequence
  Synthetic
uaucucuuaugagcuacauauuuu

SEQ ID NO: 689902 - RNA, 18 nt, Artificial Sequence
  Synthetic
acacaauaaccauauuuu

SEQ ID NO: 689903 - RNA, 19 nt, Artificial Sequence
  Synthetic
uacacaauaaccauauuuu

SEQ ID NO: 689904 - RNA, 20 nt, Artificial Sequence
  Synthetic
cuacacaauaaccauauuuu

SEQ ID NO: 689905 - RNA, 21 nt, Artificial Sequence
  Synthetic
ucuacacaauaaccauauuuu

SEQ ID NO: 689906 - RNA, 22 nt, Artificial Sequence
  Synthetic
aucuacacaauaaccauauuuu

SEQ ID NO: 689907 - RNA, 23 nt, Artificial Sequence
  Synthetic
caucuacacaauaaccauauuuu

SEQ ID NO: 689908 - RNA, 24 nt, Artificial Sequence
  Synthetic
acaucuacacaauaaccauauuuu

SEQ ID NO: 689909 - RNA, 18 nt, Artificial Sequence
  Synthetic
cuauugucgucauauuuu

SEQ ID NO: 689910 - RNA, 19 nt, Artificial Sequence
  Synthetic
acuauugucgucauauuuu

SEQ ID NO: 689911 - RNA, 20 nt, Artificial Sequence
  Synthetic
cacuauugucgucauauuuu

SEQ ID NO: 689912 - RNA, 21 nt, Artificial Sequence
  Synthetic
gcacuauugucgucauauuuu

SEQ ID NO: 689913 - RNA, 22 nt, Artificial Sequence
  Synthetic
ggcacuauugucgucauauuuu

SEQ ID NO: 689914 - RNA, 23 nt, Artificial Sequence
  Synthetic
aggcacuauugucgucauauuuu

SEQ ID NO: 689915 - RNA, 24 nt, Artificial Sequence
  Synthetic
uaggcacuauugucgucauauuuu

SEQ ID NO: 689916 - RNA, 18 nt, Artificial Sequence
  Synthetic
aaaaaaaugggauauuuu

SEQ ID NO: 689917 - RNA, 19 nt, Artificial Sequence
  Synthetic
uaaaaaaaugggauauuuu

SEQ ID NO: 689918 - RNA, 20 nt, Artificial Sequence
  Synthetic
guaaaaaaaugggauauuuu

SEQ ID NO: 689919 - RNA, 21 nt, Artificial Sequence
  Synthetic
gguaaaaaaaugggauauuuu

SEQ ID NO: 689920 - RNA, 22 nt, Artificial Sequence
  Synthetic
agguaaaaaaaugggauauuuu

SEQ ID NO: 689921 - RNA, 23 nt, Artificial Sequence
  Synthetic
cagguaaaaaaaugggauauuuu

SEQ ID NO: 689922 - RNA, 24 nt, Artificial Sequence
  Synthetic
ucagguaaaaaaaugggauauuuu

SEQ ID NO: 689923 - RNA, 18 nt, Artificial Sequence
  Synthetic
cauuuccuaugauauuuu

SEQ ID NO: 689924 - RNA, 19 nt, Artificial Sequence
  Synthetic
ucauuuccuaugauauuuu

SEQ ID NO: 689925 - RNA, 20 nt, Artificial Sequence
  Synthetic
aucauuuccuaugauauuuu

SEQ ID NO: 689926 - RNA, 21 nt, Artificial Sequence
  Synthetic
uaucauuuccuaugauauuuu

SEQ ID NO: 689927 - RNA, 22 nt, Artificial Sequence
  Synthetic
cuaucauuuccuaugauauuuu

SEQ ID NO: 689928 - RNA, 23 nt, Artificial Sequence
  Synthetic
acuaucauuuccuaugauauuuu

SEQ ID NO: 689929 - RNA, 24 nt, Artificial Sequence
  Synthetic
cacuaucauuuccuaugauauuuu

SEQ ID NO: 689930 - RNA, 18 nt, Artificial Sequence
  Synthetic
ucaauuuguugauauuuu

SEQ ID NO: 689931 - RNA, 19 nt, Artificial Sequence
  Synthetic
uucaauuuguugauauuuu

SEQ ID NO: 689932 - RNA, 20 nt, Artificial Sequence
  Synthetic
uuucaauuuguugauauuuu

SEQ ID NO: 689933 - RNA, 21 nt, Artificial Sequence
  Synthetic
guuucaauuuguugauauuuu

SEQ ID NO: 689934 - RNA, 22 nt, Artificial Sequence
  Synthetic
uguuucaauuuguugauauuuu

SEQ ID NO: 689935 - RNA, 23 nt, Artificial Sequence
  Synthetic
auguuucaauuuguugauauuuu

SEQ ID NO: 689936 - RNA, 24 nt, Artificial Sequence
  Synthetic
aauguuucaauuuguugauauuuu

SEQ ID NO: 689937 - RNA, 18 nt, Artificial Sequence
  Synthetic
uguugucucauauauuuu

SEQ ID NO: 689938 - RNA, 19 nt, Artificial Sequence
  Synthetic
uuguugucucauauauuuu

SEQ ID NO: 689939 - RNA, 20 nt, Artificial Sequence
  Synthetic
uuuguugucucauauauuuu

SEQ ID NO: 689940 - RNA, 21 nt, Artificial Sequence
  Synthetic
uuuuguugucucauauauuuu

SEQ ID NO: 689941 - RNA, 22 nt, Artificial Sequence
  Synthetic
auuuuguugucucauauauuuu

SEQ ID NO: 689942 - RNA, 23 nt, Artificial Sequence
  Synthetic
uauuuuguugucucauauauuuu

SEQ ID NO: 689943 - RNA, 24 nt, Artificial Sequence
  Synthetic
auauuuuguugucucauauauuuu

SEQ ID NO: 689944 - RNA, 18 nt, Artificial Sequence
  Synthetic
gcccagacauuauauuuu

SEQ ID NO: 689945 - RNA, 19 nt, Artificial Sequence
  Synthetic
agcccagacauuauauuuu

SEQ ID NO: 689946 - RNA, 20 nt, Artificial Sequence
  Synthetic
gagcccagacauuauauuuu

SEQ ID NO: 689947 - RNA, 21 nt, Artificial Sequence
  Synthetic
agagcccagacauuauauuuu

SEQ ID NO: 689948 - RNA, 22 nt, Artificial Sequence
  Synthetic
aagagcccagacauuauauuuu

SEQ ID NO: 689949 - RNA, 23 nt, Artificial Sequence
  Synthetic
aaagagcccagacauuauauuuu

SEQ ID NO: 689950 - RNA, 24 nt, Artificial Sequence
  Synthetic
aaaagagcccagacauuauauuuu

SEQ ID NO: 689951 - RNA, 18 nt, Artificial Sequence
  Synthetic
uucuuaggaaacuauuuu

SEQ ID NO: 689952 - RNA, 19 nt, Artificial Sequence
  Synthetic
uuucuuaggaaacuauuuu

SEQ ID NO: 689953 - RNA, 20 nt, Artificial Sequence
  Synthetic
cuuucuuaggaaacuauuuu

SEQ ID NO: 689954 - RNA, 21 nt, Artificial Sequence
  Synthetic
acuuucuuaggaaacuauuuu

SEQ ID NO: 689955 - RNA, 22 nt, Artificial Sequence
  Synthetic
gacuuucuuaggaaacuauuuu

SEQ ID NO: 689956 - RNA, 23 nt, Artificial Sequence
  Synthetic
agacuuucuuaggaaacuauuuu

SEQ ID NO: 689957 - RNA, 24 nt, Artificial Sequence
  Synthetic
uagacuuucuuaggaaacuauuuu

SEQ ID NO: 689958 - RNA, 18 nt, Artificial Sequence
  Synthetic
gaaaauaagaacuauuuu

SEQ ID NO: 689959 - RNA, 19 nt, Artificial Sequence
  Synthetic
agaaaauaagaacuauuuu

SEQ ID NO: 689960 - RNA, 20 nt, Artificial Sequence
  Synthetic
aagaaaauaagaacuauuuu

SEQ ID NO: 689961 - RNA, 21 nt, Artificial Sequence
  Synthetic
aaagaaaauaagaacuauuuu

SEQ ID NO: 689962 - RNA, 22 nt, Artificial Sequence
  Synthetic
uaaagaaaauaagaacuauuuu

SEQ ID NO: 689963 - RNA, 23 nt, Artificial Sequence
  Synthetic
guaaagaaaauaagaacuauuuu

SEQ ID NO: 689964 - RNA, 24 nt, Artificial Sequence
  Synthetic
aguaaagaaaauaagaacuauuuu

SEQ ID NO: 689965 - RNA, 18 nt, Artificial Sequence
  Synthetic
ucaggaugcuacuauuuu

SEQ ID NO: 689966 - RNA, 19 nt, Artificial Sequence
  Synthetic
aucaggaugcuacuauuuu

SEQ ID NO: 689967 - RNA, 20 nt, Artificial Sequence
  Synthetic
uaucaggaugcuacuauuuu

SEQ ID NO: 689968 - RNA, 21 nt, Artificial Sequence
  Synthetic
uuaucaggaugcuacuauuuu

SEQ ID NO: 689969 - RNA, 22 nt, Artificial Sequence
  Synthetic
cuuaucaggaugcuacuauuuu

SEQ ID NO: 689970 - RNA, 23 nt, Artificial Sequence
  Synthetic
ccuuaucaggaugcuacuauuuu

SEQ ID NO: 689971 - RNA, 24 nt, Artificial Sequence
  Synthetic
uccuuaucaggaugcuacuauuuu

SEQ ID NO: 689972 - RNA, 18 nt, Artificial Sequence
  Synthetic
ugaaguguuuacuauuuu

SEQ ID NO: 689973 - RNA, 19 nt, Artificial Sequence
  Synthetic
cugaaguguuuacuauuuu

SEQ ID NO: 689974 - RNA, 20 nt, Artificial Sequence
  Synthetic
gcugaaguguuuacuauuuu

SEQ ID NO: 689975 - RNA, 21 nt, Artificial Sequence
  Synthetic
agcugaaguguuuacuauuuu

SEQ ID NO: 689976 - RNA, 22 nt, Artificial Sequence
  Synthetic
cagcugaaguguuuacuauuuu

SEQ ID NO: 689977 - RNA, 23 nt, Artificial Sequence
  Synthetic
acagcugaaguguuuacuauuuu

SEQ ID NO: 689978 - RNA, 24 nt, Artificial Sequence
  Synthetic
aacagcugaaguguuuacuauuuu

SEQ ID NO: 689979 - RNA, 18 nt, Artificial Sequence
  Synthetic
ccauugauuagcuauuuu

SEQ ID NO: 689980 - RNA, 19 nt, Artificial Sequence
  Synthetic
gccauugauuagcuauuuu

SEQ ID NO: 689981 - RNA, 20 nt, Artificial Sequence
  Synthetic
agccauugauuagcuauuuu

SEQ ID NO: 689982 - RNA, 21 nt, Artificial Sequence
  Synthetic
aagccauugauuagcuauuuu

SEQ ID NO: 689983 - RNA, 22 nt, Artificial Sequence
  Synthetic
gaagccauugauuagcuauuuu

SEQ ID NO: 689984 - RNA, 23 nt, Artificial Sequence
  Synthetic
ggaagccauugauuagcuauuuu

SEQ ID NO: 689985 - RNA, 24 nt, Artificial Sequence
  Synthetic
uggaagccauugauuagcuauuuu

SEQ ID NO: 689986 - RNA, 18 nt, Artificial Sequence
  Synthetic
cacuuugaaaucuauuuu

SEQ ID NO: 689987 - RNA, 19 nt, Artificial Sequence
  Synthetic
acacuuugaaaucuauuuu

SEQ ID NO: 689988 - RNA, 20 nt, Artificial Sequence
  Synthetic
cacacuuugaaaucuauuuu

SEQ ID NO: 689989 - RNA, 21 nt, Artificial Sequence
  Synthetic
ucacacuuugaaaucuauuuu

SEQ ID NO: 689990 - RNA, 22 nt, Artificial Sequence
  Synthetic
uucacacuuugaaaucuauuuu

SEQ ID NO: 689991 - RNA, 23 nt, Artificial Sequence
  Synthetic
auucacacuuugaaaucuauuuu

SEQ ID NO: 689992 - RNA, 24 nt, Artificial Sequence
  Synthetic
aauucacacuuugaaaucuauuuu

SEQ ID NO: 689993 - RNA, 18 nt, Artificial Sequence
  Synthetic
uccuuucucuucuauuuu

SEQ ID NO: 689994 - RNA, 19 nt, Artificial Sequence
  Synthetic
uuccuuucucuucuauuuu

SEQ ID NO: 689995 - RNA, 20 nt, Artificial Sequence
  Synthetic
guuccuuucucuucuauuuu

SEQ ID NO: 689996 - RNA, 21 nt, Artificial Sequence
  Synthetic
uguuccuuucucuucuauuuu

SEQ ID NO: 689997 - RNA, 22 nt, Artificial Sequence
  Synthetic
guguuccuuucucuucuauuuu

SEQ ID NO: 689998 - RNA, 23 nt, Artificial Sequence
  Synthetic
aguguuccuuucucuucuauuuu

SEQ ID NO: 689999 - RNA, 24 nt, Artificial Sequence
  Synthetic
aaguguuccuuucucuucuauuuu

SEQ ID NO: 690000 - RNA, 18 nt, Artificial Sequence
  Synthetic
auuuuuucuuucuauuuu

SEQ ID NO: 690001 - RNA, 19 nt, Artificial Sequence
  Synthetic
uauuuuuucuuucuauuuu

SEQ ID NO: 690002 - RNA, 20 nt, Artificial Sequence
  Synthetic
uuauuuuuucuuucuauuuu

SEQ ID NO: 690003 - RNA, 21 nt, Artificial Sequence
  Synthetic
uuuauuuuuucuuucuauuuu

SEQ ID NO: 690004 - RNA, 22 nt, Artificial Sequence
  Synthetic
uuuuauuuuuucuuucuauuuu

SEQ ID NO: 690005 - RNA, 23 nt, Artificial Sequence
  Synthetic
uuuuuauuuuuucuuucuauuuu

SEQ ID NO: 690006 - RNA, 24 nt, Artificial Sequence
  Synthetic
auuuuuauuuuuucuuucuauuuu

SEQ ID NO: 690007 - RNA, 18 nt, Artificial Sequence
  Synthetic
uuaguugcacaguauuuu

SEQ ID NO: 690008 - RNA, 19 nt, Artificial Sequence
  Synthetic
uuuaguugcacaguauuuu

SEQ ID NO: 690009 - RNA, 20 nt, Artificial Sequence
  Synthetic
guuuaguugcacaguauuuu

SEQ ID NO: 690010 - RNA, 21 nt, Artificial Sequence
  Synthetic
aguuuaguugcacaguauuuu

SEQ ID NO: 690011 - RNA, 22 nt, Artificial Sequence
  Synthetic
caguuuaguugcacaguauuuu

SEQ ID NO: 690012 - RNA, 23 nt, Artificial Sequence
  Synthetic
acaguuuaguugcacaguauuuu

SEQ ID NO: 690013 - RNA, 24 nt, Artificial Sequence
  Synthetic
gacaguuuaguugcacaguauuuu

SEQ ID NO: 690014 - RNA, 18 nt, Artificial Sequence
  Synthetic
aaacauauugaguauuuu

SEQ ID NO: 690015 - RNA, 19 nt, Artificial Sequence
  Synthetic
gaaacauauugaguauuuu

SEQ ID NO: 690016 - RNA, 20 nt, Artificial Sequence
  Synthetic
agaaacauauugaguauuuu

SEQ ID NO: 690017 - RNA, 21 nt, Artificial Sequence
  Synthetic
cagaaacauauugaguauuuu

SEQ ID NO: 690018 - RNA, 22 nt, Artificial Sequence
  Synthetic
acagaaacauauugaguauuuu

SEQ ID NO: 690019 - RNA, 23 nt, Artificial Sequence
  Synthetic
uacagaaacauauugaguauuuu

SEQ ID NO: 690020 - RNA, 24 nt, Artificial Sequence
  Synthetic
uuacagaaacauauugaguauuuu

SEQ ID NO: 690021 - RNA, 18 nt, Artificial Sequence
  Synthetic
guaagaucacgguauuuu

SEQ ID NO: 690022 - RNA, 19 nt, Artificial Sequence
  Synthetic
uguaagaucacgguauuuu

SEQ ID NO: 690023 - RNA, 20 nt, Artificial Sequence
  Synthetic
auguaagaucacgguauuuu

SEQ ID NO: 690024 - RNA, 21 nt, Artificial Sequence
  Synthetic
aauguaagaucacgguauuuu

SEQ ID NO: 690025 - RNA, 22 nt, Artificial Sequence
  Synthetic
caauguaagaucacgguauuuu

SEQ ID NO: 690026 - RNA, 23 nt, Artificial Sequence
  Synthetic
acaauguaagaucacgguauuuu

SEQ ID NO: 690027 - RNA, 24 nt, Artificial Sequence
  Synthetic
gacaauguaagaucacgguauuuu

SEQ ID NO: 690028 - RNA, 18 nt, Artificial Sequence
  Synthetic
ggaaaccaaggguauuuu

SEQ ID NO: 690029 - RNA, 19 nt, Artificial Sequence
  Synthetic
aggaaaccaaggguauuuu

SEQ ID NO: 690030 - RNA, 20 nt, Artificial Sequence
  Synthetic
caggaaaccaaggguauuuu

SEQ ID NO: 690031 - RNA, 21 nt, Artificial Sequence
  Synthetic
ccaggaaaccaaggguauuuu

SEQ ID NO: 690032 - RNA, 22 nt, Artificial Sequence
  Synthetic
cccaggaaaccaaggguauuuu

SEQ ID NO: 690033 - RNA, 23 nt, Artificial Sequence
  Synthetic
acccaggaaaccaaggguauuuu

SEQ ID NO: 690034 - RNA, 24 nt, Artificial Sequence
  Synthetic
gacccaggaaaccaaggguauuuu

SEQ ID NO: 690035 - RNA, 18 nt, Artificial Sequence
  Synthetic
gaaucccacugguauuuu

SEQ ID NO: 690036 - RNA, 19 nt, Artificial Sequence
  Synthetic
agaaucccacugguauuuu

SEQ ID NO: 690037 - RNA, 20 nt, Artificial Sequence
  Synthetic
cagaaucccacugguauuuu

SEQ ID NO: 690038 - RNA, 21 nt, Artificial Sequence
  Synthetic
ucagaaucccacugguauuuu

SEQ ID NO: 690039 - RNA, 22 nt, Artificial Sequence
  Synthetic
aucagaaucccacugguauuuu

SEQ ID NO: 690040 - RNA, 23 nt, Artificial Sequence
  Synthetic
uaucagaaucccacugguauuuu

SEQ ID NO: 690041 - RNA, 24 nt, Artificial Sequence
  Synthetic
uuaucagaaucccacugguauuuu

SEQ ID NO: 690042 - RNA, 18 nt, Artificial Sequence
  Synthetic
agcuaaaaaauguauuuu

SEQ ID NO: 690043 - RNA, 19 nt, Artificial Sequence
  Synthetic
aagcuaaaaaauguauuuu

SEQ ID NO: 690044 - RNA, 20 nt, Artificial Sequence
  Synthetic
gaagcuaaaaaauguauuuu

SEQ ID NO: 690045 - RNA, 21 nt, Artificial Sequence
  Synthetic
ugaagcuaaaaaauguauuuu

SEQ ID NO: 690046 - RNA, 22 nt, Artificial Sequence
  Synthetic
augaagcuaaaaaauguauuuu

SEQ ID NO: 690047 - RNA, 23 nt, Artificial Sequence
  Synthetic
uaugaagcuaaaaaauguauuuu

SEQ ID NO: 690048 - RNA, 24 nt, Artificial Sequence
  Synthetic
uuaugaagcuaaaaaauguauuuu

SEQ ID NO: 690049 - RNA, 18 nt, Artificial Sequence
  Synthetic
uuuucauugcuguauuuu

SEQ ID NO: 690050 - RNA, 19 nt, Artificial Sequence
  Synthetic
uuuuucauugcuguauuuu

SEQ ID NO: 690051 - RNA, 20 nt, Artificial Sequence
  Synthetic
uuuuuucauugcuguauuuu

SEQ ID NO: 690052 - RNA, 21 nt, Artificial Sequence
  Synthetic
auuuuuucauugcuguauuuu

SEQ ID NO: 690053 - RNA, 22 nt, Artificial Sequence
  Synthetic
uauuuuuucauugcuguauuuu

SEQ ID NO: 690054 - RNA, 23 nt, Artificial Sequence
  Synthetic
cuauuuuuucauugcuguauuuu

SEQ ID NO: 690055 - RNA, 24 nt, Artificial Sequence
  Synthetic
ucuauuuuuucauugcuguauuuu

SEQ ID NO: 690056 - RNA, 18 nt, Artificial Sequence
  Synthetic
cugagaaaucuguauuuu

SEQ ID NO: 690057 - RNA, 19 nt, Artificial Sequence
  Synthetic
ucugagaaaucuguauuuu

SEQ ID NO: 690058 - RNA, 20 nt, Artificial Sequence
  Synthetic
uucugagaaaucuguauuuu

SEQ ID NO: 690059 - RNA, 21 nt, Artificial Sequence
  Synthetic
guucugagaaaucuguauuuu

SEQ ID NO: 690060 - RNA, 22 nt, Artificial Sequence
  Synthetic
gguucugagaaaucuguauuuu

SEQ ID NO: 690061 - RNA, 23 nt, Artificial Sequence
  Synthetic
agguucugagaaaucuguauuuu

SEQ ID NO: 690062 - RNA, 24 nt, Artificial Sequence
  Synthetic
aagguucugagaaaucuguauuuu

SEQ ID NO: 690063 - RNA, 18 nt, Artificial Sequence
  Synthetic
auauaagaucuguauuuu

SEQ ID NO: 690064 - RNA, 19 nt, Artificial Sequence
  Synthetic
cauauaagaucuguauuuu

SEQ ID NO: 690065 - RNA, 20 nt, Artificial Sequence
  Synthetic
acauauaagaucuguauuuu

SEQ ID NO: 690066 - RNA, 21 nt, Artificial Sequence
  Synthetic
cacauauaagaucuguauuuu

SEQ ID NO: 690067 - RNA, 22 nt, Artificial Sequence
  Synthetic
acacauauaagaucuguauuuu

SEQ ID NO: 690068 - RNA, 23 nt, Artificial Sequence
  Synthetic
aacacauauaagaucuguauuuu

SEQ ID NO: 690069 - RNA, 24 nt, Artificial Sequence
  Synthetic
gaacacauauaagaucuguauuuu

SEQ ID NO: 690070 - RNA, 18 nt, Artificial Sequence
  Synthetic
agcauagcuguguauuuu

SEQ ID NO: 690071 - RNA, 19 nt, Artificial Sequence
  Synthetic
uagcauagcuguguauuuu

SEQ ID NO: 690072 - RNA, 20 nt, Artificial Sequence
  Synthetic
auagcauagcuguguauuuu

SEQ ID NO: 690073 - RNA, 21 nt, Artificial Sequence
  Synthetic
uauagcauagcuguguauuuu

SEQ ID NO: 690074 - RNA, 22 nt, Artificial Sequence
  Synthetic
cuauagcauagcuguguauuuu

SEQ ID NO: 690075 - RNA, 23 nt, Artificial Sequence
  Synthetic
ucuauagcauagcuguguauuuu

SEQ ID NO: 690076 - RNA, 24 nt, Artificial Sequence
  Synthetic
aucuauagcauagcuguguauuuu

SEQ ID NO: 690077 - RNA, 18 nt, Artificial Sequence
  Synthetic
uggcuaauuuuguauuuu

SEQ ID NO: 690078 - RNA, 19 nt, Artificial Sequence
  Synthetic
cuggcuaauuuuguauuuu

SEQ ID NO: 690079 - RNA, 20 nt, Artificial Sequence
  Synthetic
ccuggcuaauuuuguauuuu

SEQ ID NO: 690080 - RNA, 21 nt, Artificial Sequence
  Synthetic
gccuggcuaauuuuguauuuu

SEQ ID NO: 690081 - RNA, 22 nt, Artificial Sequence
  Synthetic
cgccuggcuaauuuuguauuuu

SEQ ID NO: 690082 - RNA, 23 nt, Artificial Sequence
  Synthetic
acgccuggcuaauuuuguauuuu

SEQ ID NO: 690083 - RNA, 24 nt, Artificial Sequence
  Synthetic
cacgccuggcuaauuuuguauuuu

SEQ ID NO: 690084 - RNA, 18 nt, Artificial Sequence
  Synthetic
cauugauaaaauuauuuu

SEQ ID NO: 690085 - RNA, 19 nt, Artificial Sequence
  Synthetic
ucauugauaaaauuauuuu

SEQ ID NO: 690086 - RNA, 20 nt, Artificial Sequence
  Synthetic
uucauugauaaaauuauuuu

SEQ ID NO: 690087 - RNA, 21 nt, Artificial Sequence
  Synthetic
uuucauugauaaaauuauuuu

SEQ ID NO: 690088 - RNA, 22 nt, Artificial Sequence
  Synthetic
uuuucauugauaaaauuauuuu

SEQ ID NO: 690089 - RNA, 23 nt, Artificial Sequence
  Synthetic
guuuucauugauaaaauuauuuu

SEQ ID NO: 690090 - RNA, 24 nt, Artificial Sequence
  Synthetic
aguuuucauugauaaaauuauuuu

SEQ ID NO: 690091 - RNA, 18 nt, Artificial Sequence
  Synthetic
guuacggagaauuauuuu

SEQ ID NO: 690092 - RNA, 19 nt, Artificial Sequence
  Synthetic
gguuacggagaauuauuuu

SEQ ID NO: 690093 - RNA, 20 nt, Artificial Sequence
  Synthetic
agguuacggagaauuauuuu

SEQ ID NO: 690094 - RNA, 21 nt, Artificial Sequence
  Synthetic
gagguuacggagaauuauuuu

SEQ ID NO: 690095 - RNA, 22 nt, Artificial Sequence
  Synthetic
ugagguuacggagaauuauuuu

SEQ ID NO: 690096 - RNA, 23 nt, Artificial Sequence
  Synthetic
augagguuacggagaauuauuuu

SEQ ID NO: 690097 - RNA, 24 nt, Artificial Sequence
  Synthetic
aaugagguuacggagaauuauuuu

SEQ ID NO: 690098 - RNA, 18 nt, Artificial Sequence
  Synthetic
guaaaaacacauuauuuu

SEQ ID NO: 690099 - RNA, 19 nt, Artificial Sequence
  Synthetic
uguaaaaacacauuauuuu

SEQ ID NO: 690100 - RNA, 20 nt, Artificial Sequence
  Synthetic
auguaaaaacacauuauuuu

SEQ ID NO: 690101 - RNA, 21 nt, Artificial Sequence
  Synthetic
uauguaaaaacacauuauuuu

SEQ ID NO: 690102 - RNA, 22 nt, Artificial Sequence
  Synthetic
cuauguaaaaacacauuauuuu

SEQ ID NO: 690103 - RNA, 23 nt, Artificial Sequence
  Synthetic
ucuauguaaaaacacauuauuuu

SEQ ID NO: 690104 - RNA, 24 nt, Artificial Sequence
  Synthetic
aucuauguaaaaacacauuauuuu

SEQ ID NO: 690105 - RNA, 18 nt, Artificial Sequence
  Synthetic
aaacagggucauuauuuu

SEQ ID NO: 690106 - RNA, 19 nt, Artificial Sequence
  Synthetic
aaaacagggucauuauuuu

SEQ ID NO: 690107 - RNA, 20 nt, Artificial Sequence
  Synthetic
aaaaacagggucauuauuuu

SEQ ID NO: 690108 - RNA, 21 nt, Artificial Sequence
  Synthetic
aaaaaacagggucauuauuuu

SEQ ID NO: 690109 - RNA, 22 nt, Artificial Sequence
  Synthetic
caaaaaacagggucauuauuuu

SEQ ID NO: 690110 - RNA, 23 nt, Artificial Sequence
  Synthetic
ucaaaaaacagggucauuauuuu

SEQ ID NO: 690111 - RNA, 24 nt, Artificial Sequence
  Synthetic
uucaaaaaacagggucauuauuuu

SEQ ID NO: 690112 - RNA, 18 nt, Artificial Sequence
  Synthetic
uucaaacaugauuauuuu

SEQ ID NO: 690113 - RNA, 19 nt, Artificial Sequence
  Synthetic
auucaaacaugauuauuuu

SEQ ID NO: 690114 - RNA, 20 nt, Artificial Sequence
  Synthetic
uauucaaacaugauuauuuu

SEQ ID NO: 690115 - RNA, 21 nt, Artificial Sequence
  Synthetic
auauucaaacaugauuauuuu

SEQ ID NO: 690116 - RNA, 22 nt, Artificial Sequence
  Synthetic
uauauucaaacaugauuauuuu

SEQ ID NO: 690117 - RNA, 23 nt, Artificial Sequence
  Synthetic
cuauauucaaacaugauuauuuu

SEQ ID NO: 690118 - RNA, 24 nt, Artificial Sequence
  Synthetic
ccuauauucaaacaugauuauuuu

SEQ ID NO: 690119 - RNA, 18 nt, Artificial Sequence
  Synthetic
acuccuuucuauuauuuu

SEQ ID NO: 690120 - RNA, 19 nt, Artificial Sequence
  Synthetic
aacuccuuucuauuauuuu

SEQ ID NO: 690121 - RNA, 20 nt, Artificial Sequence
  Synthetic
uaacuccuuucuauuauuuu

SEQ ID NO: 690122 - RNA, 21 nt, Artificial Sequence
  Synthetic
auaacuccuuucuauuauuuu

SEQ ID NO: 690123 - RNA, 22 nt, Artificial Sequence
  Synthetic
cauaacuccuuucuauuauuuu

SEQ ID NO: 690124 - RNA, 23 nt, Artificial Sequence
  Synthetic
gcauaacuccuuucuauuauuuu

SEQ ID NO: 690125 - RNA, 24 nt, Artificial Sequence
  Synthetic
ugcauaacuccuuucuauuauuuu

SEQ ID NO: 690126 - RNA, 18 nt, Artificial Sequence
  Synthetic
gacaaaauguauuauuuu

SEQ ID NO: 690127 - RNA, 19 nt, Artificial Sequence
  Synthetic
ggacaaaauguauuauuuu

SEQ ID NO: 690128 - RNA, 20 nt, Artificial Sequence
  Synthetic
uggacaaaauguauuauuuu

SEQ ID NO: 690129 - RNA, 21 nt, Artificial Sequence
  Synthetic
auggacaaaauguauuauuuu

SEQ ID NO: 690130 - RNA, 22 nt, Artificial Sequence
  Synthetic
uauggacaaaauguauuauuuu

SEQ ID NO: 690131 - RNA, 23 nt, Artificial Sequence
  Synthetic
cuauggacaaaauguauuauuuu

SEQ ID NO: 690132 - RNA, 24 nt, Artificial Sequence
  Synthetic
ucuauggacaaaauguauuauuuu

SEQ ID NO: 690133 - RNA, 18 nt, Artificial Sequence
  Synthetic
acuggcauagcuuauuuu

SEQ ID NO: 690134 - RNA, 19 nt, Artificial Sequence
  Synthetic
gacuggcauagcuuauuuu

SEQ ID NO: 690135 - RNA, 20 nt, Artificial Sequence
  Synthetic
ggacuggcauagcuuauuuu

SEQ ID NO: 690136 - RNA, 21 nt, Artificial Sequence
  Synthetic
gggacuggcauagcuuauuuu

SEQ ID NO: 690137 - RNA, 22 nt, Artificial Sequence
  Synthetic
ugggacuggcauagcuuauuuu

SEQ ID NO: 690138 - RNA, 23 nt, Artificial Sequence
  Synthetic
gugggacuggcauagcuuauuuu

SEQ ID NO: 690139 - RNA, 24 nt, Artificial Sequence
  Synthetic
ggugggacuggcauagcuuauuuu

SEQ ID NO: 690140 - RNA, 18 nt, Artificial Sequence
  Synthetic
uggcauucccguuauuuu

SEQ ID NO: 690141 - RNA, 19 nt, Artificial Sequence
  Synthetic
auggcauucccguuauuuu

SEQ ID NO: 690142 - RNA, 20 nt, Artificial Sequence
  Synthetic
uauggcauucccguuauuuu

SEQ ID NO: 690143 - RNA, 21 nt, Artificial Sequence
  Synthetic
uuauggcauucccguuauuuu

SEQ ID NO: 690144 - RNA, 22 nt, Artificial Sequence
  Synthetic
uuuauggcauucccguuauuuu

SEQ ID NO: 690145 - RNA, 23 nt, Artificial Sequence
  Synthetic
auuuauggcauucccguuauuuu

SEQ ID NO: 690146 - RNA, 24 nt, Artificial Sequence
  Synthetic
uauuuauggcauucccguuauuuu

SEQ ID NO: 690147 - RNA, 18 nt, Artificial Sequence
  Synthetic
cagccauuuuguuauuuu

SEQ ID NO: 690148 - RNA, 19 nt, Artificial Sequence
  Synthetic
gcagccauuuuguuauuuu

SEQ ID NO: 690149 - RNA, 20 nt, Artificial Sequence
  Synthetic
agcagccauuuuguuauuuu

SEQ ID NO: 690150 - RNA, 21 nt, Artificial Sequence
  Synthetic
aagcagccauuuuguuauuuu

SEQ ID NO: 690151 - RNA, 22 nt, Artificial Sequence
  Synthetic
aaagcagccauuuuguuauuuu

SEQ ID NO: 690152 - RNA, 23 nt, Artificial Sequence
  Synthetic
caaagcagccauuuuguuauuuu

SEQ ID NO: 690153 - RNA, 24 nt, Artificial Sequence
  Synthetic
ccaaagcagccauuuuguuauuuu

SEQ ID NO: 690154 - RNA, 18 nt, Artificial Sequence
  Synthetic
uauuuauuuauuuauuuu

SEQ ID NO: 690155 - RNA, 19 nt, Artificial Sequence
  Synthetic
uuauuuauuuauuuauuuu

SEQ ID NO: 690156 - RNA, 20 nt, Artificial Sequence
  Synthetic
uuuauuuauuuauuuauuuu

SEQ ID NO: 690157 - RNA, 21 nt, Artificial Sequence
  Synthetic
auuuauuuauuuauuuauuuu

SEQ ID NO: 690158 - RNA, 22 nt, Artificial Sequence
  Synthetic
uauuuauuuauuuauuuauuuu

SEQ ID NO: 690159 - RNA, 23 nt, Artificial Sequence
  Synthetic
uuauuuauuuauuuauuuauuuu

SEQ ID NO: 690160 - RNA, 24 nt, Artificial Sequence
  Synthetic
uuuauuuauuuauuuauuuauuuu

SEQ ID NO: 690161 - RNA, 18 nt, Artificial Sequence
  Synthetic
caacauuuccuuuauuuu

SEQ ID NO: 690162 - RNA, 19 nt, Artificial Sequence
  Synthetic
ucaacauuuccuuuauuuu

SEQ ID NO: 690163 - RNA, 20 nt, Artificial Sequence
  Synthetic
uucaacauuuccuuuauuuu

SEQ ID NO: 690164 - RNA, 21 nt, Artificial Sequence
  Synthetic
uuucaacauuuccuuuauuuu

SEQ ID NO: 690165 - RNA, 22 nt, Artificial Sequence
  Synthetic
uuuucaacauuuccuuuauuuu

SEQ ID NO: 690166 - RNA, 23 nt, Artificial Sequence
  Synthetic
uuuuucaacauuuccuuuauuuu

SEQ ID NO: 690167 - RNA, 24 nt, Artificial Sequence
  Synthetic
auuuuucaacauuuccuuuauuuu

SEQ ID NO: 690168 - RNA, 18 nt, Artificial Sequence
  Synthetic
aacagcuggcuuuauuuu

SEQ ID NO: 690169 - RNA, 19 nt, Artificial Sequence
  Synthetic
uaacagcuggcuuuauuuu

SEQ ID NO: 690170 - RNA, 20 nt, Artificial Sequence
  Synthetic
cuaacagcuggcuuuauuuu

SEQ ID NO: 690171 - RNA, 21 nt, Artificial Sequence
  Synthetic
ucuaacagcuggcuuuauuuu

SEQ ID NO: 690172 - RNA, 22 nt, Artificial Sequence
  Synthetic
uucuaacagcuggcuuuauuuu

SEQ ID NO: 690173 - RNA, 23 nt, Artificial Sequence
  Synthetic
auucuaacagcuggcuuuauuuu

SEQ ID NO: 690174 - RNA, 24 nt, Artificial Sequence
  Synthetic
uauucuaacagcuggcuuuauuuu

SEQ ID NO: 690175 - RNA, 18 nt, Artificial Sequence
  Synthetic
uacaaccauguuuauuuu

SEQ ID NO: 690176 - RNA, 19 nt, Artificial Sequence
  Synthetic
cuacaaccauguuuauuuu

SEQ ID NO: 690177 - RNA, 20 nt, Artificial Sequence
  Synthetic
ucuacaaccauguuuauuuu

SEQ ID NO: 690178 - RNA, 21 nt, Artificial Sequence
  Synthetic
gucuacaaccauguuuauuuu

SEQ ID NO: 690179 - RNA, 22 nt, Artificial Sequence
  Synthetic
cgucuacaaccauguuuauuuu

SEQ ID NO: 690180 - RNA, 23 nt, Artificial Sequence
  Synthetic
ccgucuacaaccauguuuauuuu

SEQ ID NO: 690181 - RNA, 24 nt, Artificial Sequence
  Synthetic
uccgucuacaaccauguuuauuuu

SEQ ID NO: 690182 - RNA, 18 nt, Artificial Sequence
  Synthetic
uuuguuaaauuuuauuuu

SEQ ID NO: 690183 - RNA, 19 nt, Artificial Sequence
  Synthetic
cuuuguuaaauuuuauuuu

SEQ ID NO: 690184 - RNA, 20 nt, Artificial Sequence
  Synthetic
ucuuuguuaaauuuuauuuu

SEQ ID NO: 690185 - RNA, 21 nt, Artificial Sequence
  Synthetic
uucuuuguuaaauuuuauuuu

SEQ ID NO: 690186 - RNA, 22 nt, Artificial Sequence
  Synthetic
guucuuuguuaaauuuuauuuu

SEQ ID NO: 690187 - RNA, 23 nt, Artificial Sequence
  Synthetic
aguucuuuguuaaauuuuauuuu

SEQ ID NO: 690188 - RNA, 24 nt, Artificial Sequence
  Synthetic
uaguucuuuguuaaauuuuauuuu

SEQ ID NO: 690189 - RNA, 18 nt, Artificial Sequence
  Synthetic
uaaauucaauuuuauuuu

SEQ ID NO: 690190 - RNA, 19 nt, Artificial Sequence
  Synthetic
auaaauucaauuuuauuuu

SEQ ID NO: 690191 - RNA, 20 nt, Artificial Sequence
  Synthetic
aauaaauucaauuuuauuuu

SEQ ID NO: 690192 - RNA, 21 nt, Artificial Sequence
  Synthetic
uaauaaauucaauuuuauuuu

SEQ ID NO: 690193 - RNA, 22 nt, Artificial Sequence
  Synthetic
auaauaaauucaauuuuauuuu

SEQ ID NO: 690194 - RNA, 23 nt, Artificial Sequence
  Synthetic
uauaauaaauucaauuuuauuuu

SEQ ID NO: 690195 - RNA, 24 nt, Artificial Sequence
  Synthetic
guauaauaaauucaauuuuauuuu

SEQ ID NO: 690196 - RNA, 18 nt, Artificial Sequence
  Synthetic
uuauaauccuuuuauuuu

SEQ ID NO: 690197 - RNA, 19 nt, Artificial Sequence
  Synthetic
auuauaauccuuuuauuuu

SEQ ID NO: 690198 - RNA, 20 nt, Artificial Sequence
  Synthetic
uauuauaauccuuuuauuuu

SEQ ID NO: 690199 - RNA, 21 nt, Artificial Sequence
  Synthetic
auauuauaauccuuuuauuuu

SEQ ID NO: 690200 - RNA, 22 nt, Artificial Sequence
  Synthetic
aauauuauaauccuuuuauuuu

SEQ ID NO: 690201 - RNA, 23 nt, Artificial Sequence
  Synthetic
aaauauuauaauccuuuuauuuu

SEQ ID NO: 690202 - RNA, 24 nt, Artificial Sequence
  Synthetic
aaaauauuauaauccuuuuauuuu

SEQ ID NO: 690203 - RNA, 18 nt, Artificial Sequence
  Synthetic
ucucuuucuuuuuauuuu

SEQ ID NO: 690204 - RNA, 19 nt, Artificial Sequence
  Synthetic
cucucuuucuuuuuauuuu

SEQ ID NO: 690205 - RNA, 20 nt, Artificial Sequence
  Synthetic
ucucucuuucuuuuuauuuu

SEQ ID NO: 690206 - RNA, 21 nt, Artificial Sequence
  Synthetic
cucucucuuucuuuuuauuuu

SEQ ID NO: 690207 - RNA, 22 nt, Artificial Sequence
  Synthetic
ucucucucuuucuuuuuauuuu

SEQ ID NO: 690208 - RNA, 23 nt, Artificial Sequence
  Synthetic
cucucucucuuucuuuuuauuuu

SEQ ID NO: 690209 - RNA, 24 nt, Artificial Sequence
  Synthetic
ucucucucucuuucuuuuuauuuu

SEQ ID NO: 690210 - RNA, 18 nt, Artificial Sequence
  Synthetic
uuuuauuguuuuuauuuu

SEQ ID NO: 690211 - RNA, 19 nt, Artificial Sequence
  Synthetic
uuuuuauuguuuuuauuuu

SEQ ID NO: 690212 - RNA, 20 nt, Artificial Sequence
  Synthetic
uuuuuuauuguuuuuauuuu

SEQ ID NO: 690213 - RNA, 21 nt, Artificial Sequence
  Synthetic
uuuuuuuauuguuuuuauuuu

SEQ ID NO: 690214 - RNA, 22 nt, Artificial Sequence
  Synthetic
uuuuuuuuauuguuuuuauuuu

SEQ ID NO: 690215 - RNA, 23 nt, Artificial Sequence
  Synthetic
cuuuuuuuuauuguuuuuauuuu

SEQ ID NO: 690216 - RNA, 24 nt, Artificial Sequence
  Synthetic
ccuuuuuuuuauuguuuuuauuuu

SEQ ID NO: 690217 - RNA, 18 nt, Artificial Sequence
  Synthetic
uuuuuuauuuuuuauuuu

SEQ ID NO: 690218 - RNA, 19 nt, Artificial Sequence
  Synthetic
uuuuuuuauuuuuuauuuu

SEQ ID NO: 690219 - RNA, 20 nt, Artificial Sequence
  Synthetic
uuuuuuuuauuuuuuauuuu

SEQ ID NO: 690220 - RNA, 21 nt, Artificial Sequence
  Synthetic
uuuuuuuuuauuuuuuauuuu

SEQ ID NO: 690221 - RNA, 22 nt, Artificial Sequence
  Synthetic
cuuuuuuuuuauuuuuuauuuu

SEQ ID NO: 690222 - RNA, 23 nt, Artificial Sequence
  Synthetic
ucuuuuuuuuuauuuuuuauuuu

SEQ ID NO: 690223 - RNA, 24 nt, Artificial Sequence
  Synthetic
aucuuuuuuuuuauuuuuuauuuu

SEQ ID NO: 690224 - RNA, 18 nt, Artificial Sequence
  Synthetic
aguaauaaaaaaacuuuu

SEQ ID NO: 690225 - RNA, 19 nt, Artificial Sequence
  Synthetic
caguaauaaaaaaacuuuu

SEQ ID NO: 690226 - RNA, 20 nt, Artificial Sequence
  Synthetic
gcaguaauaaaaaaacuuuu

SEQ ID NO: 690227 - RNA, 21 nt, Artificial Sequence
  Synthetic
agcaguaauaaaaaaacuuuu

SEQ ID NO: 690228 - RNA, 22 nt, Artificial Sequence
  Synthetic
cagcaguaauaaaaaaacuuuu

SEQ ID NO: 690229 - RNA, 23 nt, Artificial Sequence
  Synthetic
acagcaguaauaaaaaaacuuuu

SEQ ID NO: 690230 - RNA, 24 nt, Artificial Sequence
  Synthetic
uacagcaguaauaaaaaaacuuuu

SEQ ID NO: 690231 - RNA, 18 nt, Artificial Sequence
  Synthetic
caaguugcuccaacuuuu

SEQ ID NO: 690232 - RNA, 19 nt, Artificial Sequence
  Synthetic
ucaaguugcuccaacuuuu

SEQ ID NO: 690233 - RNA, 20 nt, Artificial Sequence
  Synthetic
uucaaguugcuccaacuuuu

SEQ ID NO: 690234 - RNA, 21 nt, Artificial Sequence
  Synthetic
cuucaaguugcuccaacuuuu

SEQ ID NO: 690235 - RNA, 22 nt, Artificial Sequence
  Synthetic
gcuucaaguugcuccaacuuuu

SEQ ID NO: 690236 - RNA, 23 nt, Artificial Sequence
  Synthetic
ggcuucaaguugcuccaacuuuu

SEQ ID NO: 690237 - RNA, 24 nt, Artificial Sequence
  Synthetic
uggcuucaaguugcuccaacuuuu

SEQ ID NO: 690238 - RNA, 18 nt, Artificial Sequence
  Synthetic
cauuacaggucaacuuuu

SEQ ID NO: 690239 - RNA, 19 nt, Artificial Sequence
  Synthetic
ccauuacaggucaacuuuu

SEQ ID NO: 690240 - RNA, 20 nt, Artificial Sequence
  Synthetic
uccauuacaggucaacuuuu

SEQ ID NO: 690241 - RNA, 21 nt, Artificial Sequence
  Synthetic
uuccauuacaggucaacuuuu

SEQ ID NO: 690242 - RNA, 22 nt, Artificial Sequence
  Synthetic
auuccauuacaggucaacuuuu

SEQ ID NO: 690243 - RNA, 23 nt, Artificial Sequence
  Synthetic
gauuccauuacaggucaacuuuu

SEQ ID NO: 690244 - RNA, 24 nt, Artificial Sequence
  Synthetic
agauuccauuacaggucaacuuuu

SEQ ID NO: 690245 - RNA, 18 nt, Artificial Sequence
  Synthetic
cauaaccuaggaacuuuu

SEQ ID NO: 690246 - RNA, 19 nt, Artificial Sequence
  Synthetic
gcauaaccuaggaacuuuu

SEQ ID NO: 690247 - RNA, 20 nt, Artificial Sequence
  Synthetic
agcauaaccuaggaacuuuu

SEQ ID NO: 690248 - RNA, 21 nt, Artificial Sequence
  Synthetic
cagcauaaccuaggaacuuuu

SEQ ID NO: 690249 - RNA, 22 nt, Artificial Sequence
  Synthetic
ucagcauaaccuaggaacuuuu

SEQ ID NO: 690250 - RNA, 23 nt, Artificial Sequence
  Synthetic
aucagcauaaccuaggaacuuuu

SEQ ID NO: 690251 - RNA, 24 nt, Artificial Sequence
  Synthetic
caucagcauaaccuaggaacuuuu

SEQ ID NO: 690252 - RNA, 18 nt, Artificial Sequence
  Synthetic
uuagcuuguaccacuuuu

SEQ ID NO: 690253 - RNA, 19 nt, Artificial Sequence
  Synthetic
guuagcuuguaccacuuuu

SEQ ID NO: 690254 - RNA, 20 nt, Artificial Sequence
  Synthetic
aguuagcuuguaccacuuuu

SEQ ID NO: 690255 - RNA, 21 nt, Artificial Sequence
  Synthetic
caguuagcuuguaccacuuuu

SEQ ID NO: 690256 - RNA, 22 nt, Artificial Sequence
  Synthetic
ccaguuagcuuguaccacuuuu

SEQ ID NO: 690257 - RNA, 23 nt, Artificial Sequence
  Synthetic
gccaguuagcuuguaccacuuuu

SEQ ID NO: 690258 - RNA, 24 nt, Artificial Sequence
  Synthetic
cgccaguuagcuuguaccacuuuu

SEQ ID NO: 690259 - RNA, 18 nt, Artificial Sequence
  Synthetic
ucuuucuagaggacuuuu

SEQ ID NO: 690260 - RNA, 19 nt, Artificial Sequence
  Synthetic
cucuuucuagaggacuuuu

SEQ ID NO: 690261 - RNA, 20 nt, Artificial Sequence
  Synthetic
ccucuuucuagaggacuuuu

SEQ ID NO: 690262 - RNA, 21 nt, Artificial Sequence
  Synthetic
cccucuuucuagaggacuuuu

SEQ ID NO: 690263 - RNA, 22 nt, Artificial Sequence
  Synthetic
acccucuuucuagaggacuuuu

SEQ ID NO: 690264 - RNA, 23 nt, Artificial Sequence
  Synthetic
uacccucuuucuagaggacuuuu

SEQ ID NO: 690265 - RNA, 24 nt, Artificial Sequence
  Synthetic
guacccucuuucuagaggacuuuu

SEQ ID NO: 690266 - RNA, 18 nt, Artificial Sequence
  Synthetic
uaacacuguuggacuuuu

SEQ ID NO: 690267 - RNA, 19 nt, Artificial Sequence
  Synthetic
guaacacuguuggacuuuu

SEQ ID NO: 690268 - RNA, 20 nt, Artificial Sequence
  Synthetic
gguaacacuguuggacuuuu

SEQ ID NO: 690269 - RNA, 21 nt, Artificial Sequence
  Synthetic
ugguaacacuguuggacuuuu

SEQ ID NO: 690270 - RNA, 22 nt, Artificial Sequence
  Synthetic
uugguaacacuguuggacuuuu

SEQ ID NO: 690271 - RNA, 23 nt, Artificial Sequence
  Synthetic
uuugguaacacuguuggacuuuu

SEQ ID NO: 690272 - RNA, 24 nt, Artificial Sequence
  Synthetic
cuuugguaacacuguuggacuuuu

SEQ ID NO: 690273 - RNA, 18 nt, Artificial Sequence
  Synthetic
cugaaauaucugacuuuu

SEQ ID NO: 690274 - RNA, 19 nt, Artificial Sequence
  Synthetic
acugaaauaucugacuuuu

SEQ ID NO: 690275 - RNA, 20 nt, Artificial Sequence
  Synthetic
aacugaaauaucugacuuuu

SEQ ID NO: 690276 - RNA, 21 nt, Artificial Sequence
  Synthetic
uaacugaaauaucugacuuuu

SEQ ID NO: 690277 - RNA, 22 nt, Artificial Sequence
  Synthetic
uuaacugaaauaucugacuuuu

SEQ ID NO: 690278 - RNA, 23 nt, Artificial Sequence
  Synthetic
auuaacugaaauaucugacuuuu

SEQ ID NO: 690279 - RNA, 24 nt, Artificial Sequence
  Synthetic
uauuaacugaaauaucugacuuuu

SEQ ID NO: 690280 - RNA, 18 nt, Artificial Sequence
  Synthetic
caaacacaggugacuuuu

SEQ ID NO: 690281 - RNA, 19 nt, Artificial Sequence
  Synthetic
gcaaacacaggugacuuuu

SEQ ID NO: 690282 - RNA, 20 nt, Artificial Sequence
  Synthetic
agcaaacacaggugacuuuu

SEQ ID NO: 690283 - RNA, 21 nt, Artificial Sequence
  Synthetic
cagcaaacacaggugacuuuu

SEQ ID NO: 690284 - RNA, 22 nt, Artificial Sequence
  Synthetic
acagcaaacacaggugacuuuu

SEQ ID NO: 690285 - RNA, 23 nt, Artificial Sequence
  Synthetic
uacagcaaacacaggugacuuuu

SEQ ID NO: 690286 - RNA, 24 nt, Artificial Sequence
  Synthetic
auacagcaaacacaggugacuuuu

SEQ ID NO: 690287 - RNA, 18 nt, Artificial Sequence
  Synthetic
uuugauccauugacuuuu

SEQ ID NO: 690288 - RNA, 19 nt, Artificial Sequence
  Synthetic
cuuugauccauugacuuuu

SEQ ID NO: 690289 - RNA, 20 nt, Artificial Sequence
  Synthetic
acuuugauccauugacuuuu

SEQ ID NO: 690290 - RNA, 21 nt, Artificial Sequence
  Synthetic
aacuuugauccauugacuuuu

SEQ ID NO: 690291 - RNA, 22 nt, Artificial Sequence
  Synthetic
uaacuuugauccauugacuuuu

SEQ ID NO: 690292 - RNA, 23 nt, Artificial Sequence
  Synthetic
auaacuuugauccauugacuuuu

SEQ ID NO: 690293 - RNA, 24 nt, Artificial Sequence
  Synthetic
uauaacuuugauccauugacuuuu

SEQ ID NO: 690294 - RNA, 18 nt, Artificial Sequence
  Synthetic
ucaucagcuuugacuuuu

SEQ ID NO: 690295 - RNA, 19 nt, Artificial Sequence
  Synthetic
uucaucagcuuugacuuuu

SEQ ID NO: 690296 - RNA, 20 nt, Artificial Sequence
  Synthetic
uuucaucagcuuugacuuuu

SEQ ID NO: 690297 - RNA, 21 nt, Artificial Sequence
  Synthetic
uuuucaucagcuuugacuuuu

SEQ ID NO: 690298 - RNA, 22 nt, Artificial Sequence
  Synthetic
uuuuucaucagcuuugacuuuu

SEQ ID NO: 690299 - RNA, 23 nt, Artificial Sequence
  Synthetic
guuuuucaucagcuuugacuuuu

SEQ ID NO: 690300 - RNA, 24 nt, Artificial Sequence
  Synthetic
uguuuuucaucagcuuugacuuuu

SEQ ID NO: 690301 - RNA, 18 nt, Artificial Sequence
  Synthetic
aagggaacaucuacuuuu

SEQ ID NO: 690302 - RNA, 19 nt, Artificial Sequence
  Synthetic
caagggaacaucuacuuuu

SEQ ID NO: 690303 - RNA, 20 nt, Artificial Sequence
  Synthetic
acaagggaacaucuacuuuu

SEQ ID NO: 690304 - RNA, 21 nt, Artificial Sequence
  Synthetic
gacaagggaacaucuacuuuu

SEQ ID NO: 690305 - RNA, 22 nt, Artificial Sequence
  Synthetic
agacaagggaacaucuacuuuu

SEQ ID NO: 690306 - RNA, 23 nt, Artificial Sequence
  Synthetic
uagacaagggaacaucuacuuuu

SEQ ID NO: 690307 - RNA, 24 nt, Artificial Sequence
  Synthetic
cuagacaagggaacaucuacuuuu

SEQ ID NO: 690308 - RNA, 18 nt, Artificial Sequence
  Synthetic
uauuauuucucuacuuuu

SEQ ID NO: 690309 - RNA, 19 nt, Artificial Sequence
  Synthetic
auauuauuucucuacuuuu

SEQ ID NO: 690310 - RNA, 20 nt, Artificial Sequence
  Synthetic
uauauuauuucucuacuuuu

SEQ ID NO: 690311 - RNA, 21 nt, Artificial Sequence
  Synthetic
auauauuauuucucuacuuuu

SEQ ID NO: 690312 - RNA, 22 nt, Artificial Sequence
  Synthetic
uauauauuauuucucuacuuuu

SEQ ID NO: 690313 - RNA, 23 nt, Artificial Sequence
  Synthetic
uuauauauuauuucucuacuuuu

SEQ ID NO: 690314 - RNA, 24 nt, Artificial Sequence
  Synthetic
uuuauauauuauuucucuacuuuu

SEQ ID NO: 690315 - RNA, 18 nt, Artificial Sequence
  Synthetic
ugucugccugguacuuuu

SEQ ID NO: 690316 - RNA, 19 nt, Artificial Sequence
  Synthetic
augucugccugguacuuuu

SEQ ID NO: 690317 - RNA, 20 nt, Artificial Sequence
  Synthetic
uaugucugccugguacuuuu

SEQ ID NO: 690318 - RNA, 21 nt, Artificial Sequence
  Synthetic
auaugucugccugguacuuuu

SEQ ID NO: 690319 - RNA, 22 nt, Artificial Sequence
  Synthetic
aauaugucugccugguacuuuu

SEQ ID NO: 690320 - RNA, 23 nt, Artificial Sequence
  Synthetic
aaauaugucugccugguacuuuu

SEQ ID NO: 690321 - RNA, 24 nt, Artificial Sequence
  Synthetic
gaaauaugucugccugguacuuuu

SEQ ID NO: 690322 - RNA, 18 nt, Artificial Sequence
  Synthetic
aucuggcuacuuacuuuu

SEQ ID NO: 690323 - RNA, 19 nt, Artificial Sequence
  Synthetic
aaucuggcuacuuacuuuu

SEQ ID NO: 690324 - RNA, 20 nt, Artificial Sequence
  Synthetic
aaaucuggcuacuuacuuuu

SEQ ID NO: 690325 - RNA, 21 nt, Artificial Sequence
  Synthetic
aaaaucuggcuacuuacuuuu

SEQ ID NO: 690326 - RNA, 22 nt, Artificial Sequence
  Synthetic
aaaaaucuggcuacuuacuuuu

SEQ ID NO: 690327 - RNA, 23 nt, Artificial Sequence
  Synthetic
uaaaaaucuggcuacuuacuuuu

SEQ ID NO: 690328 - RNA, 24 nt, Artificial Sequence
  Synthetic
auaaaaaucuggcuacuuacuuuu

SEQ ID NO: 690329 - RNA, 18 nt, Artificial Sequence
  Synthetic
uugauuaacuuuacuuuu

SEQ ID NO: 690330 - RNA, 19 nt, Artificial Sequence
  Synthetic
cuugauuaacuuuacuuuu

SEQ ID NO: 690331 - RNA, 20 nt, Artificial Sequence
  Synthetic
ucuugauuaacuuuacuuuu

SEQ ID NO: 690332 - RNA, 21 nt, Artificial Sequence
  Synthetic
cucuugauuaacuuuacuuuu

SEQ ID NO: 690333 - RNA, 22 nt, Artificial Sequence
  Synthetic
ucucuugauuaacuuuacuuuu

SEQ ID NO: 690334 - RNA, 23 nt, Artificial Sequence
  Synthetic
uucucuugauuaacuuuacuuuu

SEQ ID NO: 690335 - RNA, 24 nt, Artificial Sequence
  Synthetic
cuucucuugauuaacuuuacuuuu

SEQ ID NO: 690336 - RNA, 18 nt, Artificial Sequence
  Synthetic
auugaaaauggaccuuuu

SEQ ID NO: 690337 - RNA, 19 nt, Artificial Sequence
  Synthetic
gauugaaaauggaccuuuu

SEQ ID NO: 690338 - RNA, 20 nt, Artificial Sequence
  Synthetic
cgauugaaaauggaccuuuu

SEQ ID NO: 690339 - RNA, 21 nt, Artificial Sequence
  Synthetic
gcgauugaaaauggaccuuuu

SEQ ID NO: 690340 - RNA, 22 nt, Artificial Sequence
  Synthetic
agcgauugaaaauggaccuuuu

SEQ ID NO: 690341 - RNA, 23 nt, Artificial Sequence
  Synthetic
uagcgauugaaaauggaccuuuu

SEQ ID NO: 690342 - RNA, 24 nt, Artificial Sequence
  Synthetic
auagcgauugaaaauggaccuuuu

SEQ ID NO: 690343 - RNA, 18 nt, Artificial Sequence
  Synthetic
gccggguagcuaccuuuu

SEQ ID NO: 690344 - RNA, 19 nt, Artificial Sequence
  Synthetic
ugccggguagcuaccuuuu

SEQ ID NO: 690345 - RNA, 20 nt, Artificial Sequence
  Synthetic
uugccggguagcuaccuuuu

SEQ ID NO: 690346 - RNA, 21 nt, Artificial Sequence
  Synthetic
uuugccggguagcuaccuuuu

SEQ ID NO: 690347 - RNA, 22 nt, Artificial Sequence
  Synthetic
cuuugccggguagcuaccuuuu

SEQ ID NO: 690348 - RNA, 23 nt, Artificial Sequence
  Synthetic
ccuuugccggguagcuaccuuuu

SEQ ID NO: 690349 - RNA, 24 nt, Artificial Sequence
  Synthetic
uccuuugccggguagcuaccuuuu

SEQ ID NO: 690350 - RNA, 18 nt, Artificial Sequence
  Synthetic
acucaauguuuaccuuuu

SEQ ID NO: 690351 - RNA, 19 nt, Artificial Sequence
  Synthetic
uacucaauguuuaccuuuu

SEQ ID NO: 690352 - RNA, 20 nt, Artificial Sequence
  Synthetic
cuacucaauguuuaccuuuu

SEQ ID NO: 690353 - RNA, 21 nt, Artificial Sequence
  Synthetic
ucuacucaauguuuaccuuuu

SEQ ID NO: 690354 - RNA, 22 nt, Artificial Sequence
  Synthetic
cucuacucaauguuuaccuuuu

SEQ ID NO: 690355 - RNA, 23 nt, Artificial Sequence
  Synthetic
acucuacucaauguuuaccuuuu

SEQ ID NO: 690356 - RNA, 24 nt, Artificial Sequence
  Synthetic
cacucuacucaauguuuaccuuuu

SEQ ID NO: 690357 - RNA, 18 nt, Artificial Sequence
  Synthetic
gcugcccggaccccuuuu

SEQ ID NO: 690358 - RNA, 19 nt, Artificial Sequence
  Synthetic
ggcugcccggaccccuuuu

SEQ ID NO: 690359 - RNA, 20 nt, Artificial Sequence
  Synthetic
gggcugcccggaccccuuuu

SEQ ID NO: 690360 - RNA, 21 nt, Artificial Sequence
  Synthetic
ugggcugcccggaccccuuuu

SEQ ID NO: 690361 - RNA, 22 nt, Artificial Sequence
  Synthetic
cugggcugcccggaccccuuuu

SEQ ID NO: 690362 - RNA, 23 nt, Artificial Sequence
  Synthetic
gcugggcugcccggaccccuuuu

SEQ ID NO: 690363 - RNA, 24 nt, Artificial Sequence
  Synthetic
agcugggcugcccggaccccuuuu

SEQ ID NO: 690364 - RNA, 18 nt, Artificial Sequence
  Synthetic
cuaauauaagccccuuuu

SEQ ID NO: 690365 - RNA, 19 nt, Artificial Sequence
  Synthetic
gcuaauauaagccccuuuu

SEQ ID NO: 690366 - RNA, 20 nt, Artificial Sequence
  Synthetic
agcuaauauaagccccuuuu

SEQ ID NO: 690367 - RNA, 21 nt, Artificial Sequence
  Synthetic
gagcuaauauaagccccuuuu

SEQ ID NO: 690368 - RNA, 22 nt, Artificial Sequence
  Synthetic
ggagcuaauauaagccccuuuu

SEQ ID NO: 690369 - RNA, 23 nt, Artificial Sequence
  Synthetic
uggagcuaauauaagccccuuuu

SEQ ID NO: 690370 - RNA, 24 nt, Artificial Sequence
  Synthetic
auggagcuaauauaagccccuuuu

SEQ ID NO: 690371 - RNA, 18 nt, Artificial Sequence
  Synthetic
aauguaauugccccuuuu

SEQ ID NO: 690372 - RNA, 19 nt, Artificial Sequence
  Synthetic
aaauguaauugccccuuuu

SEQ ID NO: 690373 - RNA, 20 nt, Artificial Sequence
  Synthetic
gaaauguaauugccccuuuu

SEQ ID NO: 690374 - RNA, 21 nt, Artificial Sequence
  Synthetic
ugaaauguaauugccccuuuu

SEQ ID NO: 690375 - RNA, 22 nt, Artificial Sequence
  Synthetic
augaaauguaauugccccuuuu

SEQ ID NO: 690376 - RNA, 23 nt, Artificial Sequence
  Synthetic
caugaaauguaauugccccuuuu

SEQ ID NO: 690377 - RNA, 24 nt, Artificial Sequence
  Synthetic
acaugaaauguaauugccccuuuu

SEQ ID NO: 690378 - RNA, 18 nt, Artificial Sequence
  Synthetic
uuaaaugacaucccuuuu

SEQ ID NO: 690379 - RNA, 19 nt, Artificial Sequence
  Synthetic
auuaaaugacaucccuuuu

SEQ ID NO: 690380 - RNA, 20 nt, Artificial Sequence
  Synthetic
gauuaaaugacaucccuuuu

SEQ ID NO: 690381 - RNA, 21 nt, Artificial Sequence
  Synthetic
ugauuaaaugacaucccuuuu

SEQ ID NO: 690382 - RNA, 22 nt, Artificial Sequence
  Synthetic
cugauuaaaugacaucccuuuu

SEQ ID NO: 690383 - RNA, 23 nt, Artificial Sequence
  Synthetic
acugauuaaaugacaucccuuuu

SEQ ID NO: 690384 - RNA, 24 nt, Artificial Sequence
  Synthetic
aacugauuaaaugacaucccuuuu

SEQ ID NO: 690385 - RNA, 18 nt, Artificial Sequence
  Synthetic
gaccaucuacucccuuuu

SEQ ID NO: 690386 - RNA, 19 nt, Artificial Sequence
  Synthetic
ugaccaucuacucccuuuu

SEQ ID NO: 690387 - RNA, 20 nt, Artificial Sequence
  Synthetic
augaccaucuacucccuuuu

SEQ ID NO: 690388 - RNA, 21 nt, Artificial Sequence
  Synthetic
caugaccaucuacucccuuuu

SEQ ID NO: 690389 - RNA, 22 nt, Artificial Sequence
  Synthetic
ucaugaccaucuacucccuuuu

SEQ ID NO: 690390 - RNA, 23 nt, Artificial Sequence
  Synthetic
cucaugaccaucuacucccuuuu

SEQ ID NO: 690391 - RNA, 24 nt, Artificial Sequence
  Synthetic
ucucaugaccaucuacucccuuuu

SEQ ID NO: 690392 - RNA, 18 nt, Artificial Sequence
  Synthetic
acccaaugucucccuuuu

SEQ ID NO: 690393 - RNA, 19 nt, Artificial Sequence
  Synthetic
uacccaaugucucccuuuu

SEQ ID NO: 690394 - RNA, 20 nt, Artificial Sequence
  Synthetic
auacccaaugucucccuuuu

SEQ ID NO: 690395 - RNA, 21 nt, Artificial Sequence
  Synthetic
aauacccaaugucucccuuuu

SEQ ID NO: 690396 - RNA, 22 nt, Artificial Sequence
  Synthetic
uaauacccaaugucucccuuuu

SEQ ID NO: 690397 - RNA, 23 nt, Artificial Sequence
  Synthetic
guaauacccaaugucucccuuuu

SEQ ID NO: 690398 - RNA, 24 nt, Artificial Sequence
  Synthetic
uguaauacccaaugucucccuuuu

SEQ ID NO: 690399 - RNA, 18 nt, Artificial Sequence
  Synthetic
aaaucuaauuucccuuuu

SEQ ID NO: 690400 - RNA, 19 nt, Artificial Sequence
  Synthetic
aaaaucuaauuucccuuuu

SEQ ID NO: 690401 - RNA, 20 nt, Artificial Sequence
  Synthetic
aaaaaucuaauuucccuuuu

SEQ ID NO: 690402 - RNA, 21 nt, Artificial Sequence
  Synthetic
gaaaaaucuaauuucccuuuu

SEQ ID NO: 690403 - RNA, 22 nt, Artificial Sequence
  Synthetic
ugaaaaaucuaauuucccuuuu

SEQ ID NO: 690404 - RNA, 23 nt, Artificial Sequence
  Synthetic
augaaaaaucuaauuucccuuuu

SEQ ID NO: 690405 - RNA, 24 nt, Artificial Sequence
  Synthetic
aaugaaaaaucuaauuucccuuuu

SEQ ID NO: 690406 - RNA, 18 nt, Artificial Sequence
  Synthetic
guucaaagcccgccuuuu

SEQ ID NO: 690407 - RNA, 19 nt, Artificial Sequence
  Synthetic
uguucaaagcccgccuuuu

SEQ ID NO: 690408 - RNA, 20 nt, Artificial Sequence
  Synthetic
uuguucaaagcccgccuuuu

SEQ ID NO: 690409 - RNA, 21 nt, Artificial Sequence
  Synthetic
uuuguucaaagcccgccuuuu

SEQ ID NO: 690410 - RNA, 22 nt, Artificial Sequence
  Synthetic
guuuguucaaagcccgccuuuu

SEQ ID NO: 690411 - RNA, 23 nt, Artificial Sequence
  Synthetic
uguuuguucaaagcccgccuuuu

SEQ ID NO: 690412 - RNA, 24 nt, Artificial Sequence
  Synthetic
uuguuuguucaaagcccgccuuuu

SEQ ID NO: 690413 - RNA, 18 nt, Artificial Sequence
  Synthetic
ugggccuuggggccuuuu

SEQ ID NO: 690414 - RNA, 19 nt, Artificial Sequence
  Synthetic
augggccuuggggccuuuu

SEQ ID NO: 690415 - RNA, 20 nt, Artificial Sequence
  Synthetic
gaugggccuuggggccuuuu

SEQ ID NO: 690416 - RNA, 21 nt, Artificial Sequence
  Synthetic
ugaugggccuuggggccuuuu

SEQ ID NO: 690417 - RNA, 22 nt, Artificial Sequence
  Synthetic
augaugggccuuggggccuuuu

SEQ ID NO: 690418 - RNA, 23 nt, Artificial Sequence
  Synthetic
aaugaugggccuuggggccuuuu

SEQ ID NO: 690419 - RNA, 24 nt, Artificial Sequence
  Synthetic
aaaugaugggccuuggggccuuuu

SEQ ID NO: 690420 - RNA, 18 nt, Artificial Sequence
  Synthetic
uacuccgcucugccuuuu

SEQ ID NO: 690421 - RNA, 19 nt, Artificial Sequence
  Synthetic
uuacuccgcucugccuuuu

SEQ ID NO: 690422 - RNA, 20 nt, Artificial Sequence
  Synthetic
auuacuccgcucugccuuuu

SEQ ID NO: 690423 - RNA, 21 nt, Artificial Sequence
  Synthetic
aauuacuccgcucugccuuuu

SEQ ID NO: 690424 - RNA, 22 nt, Artificial Sequence
  Synthetic
caauuacuccgcucugccuuuu

SEQ ID NO: 690425 - RNA, 23 nt, Artificial Sequence
  Synthetic
acaauuacuccgcucugccuuuu

SEQ ID NO: 690426 - RNA, 24 nt, Artificial Sequence
  Synthetic
aacaauuacuccgcucugccuuuu

SEQ ID NO: 690427 - RNA, 18 nt, Artificial Sequence
  Synthetic
gaaggaguugugccuuuu

SEQ ID NO: 690428 - RNA, 19 nt, Artificial Sequence
  Synthetic
ugaaggaguugugccuuuu

SEQ ID NO: 690429 - RNA, 20 nt, Artificial Sequence
  Synthetic
cugaaggaguugugccuuuu

SEQ ID NO: 690430 - RNA, 21 nt, Artificial Sequence
  Synthetic
ccugaaggaguugugccuuuu

SEQ ID NO: 690431 - RNA, 22 nt, Artificial Sequence
  Synthetic
accugaaggaguugugccuuuu

SEQ ID NO: 690432 - RNA, 23 nt, Artificial Sequence
  Synthetic
uaccugaaggaguugugccuuuu

SEQ ID NO: 690433 - RNA, 24 nt, Artificial Sequence
  Synthetic
auaccugaaggaguugugccuuuu

SEQ ID NO: 690434 - RNA, 18 nt, Artificial Sequence
  Synthetic
caaaaagugaauccuuuu

SEQ ID NO: 690435 - RNA, 19 nt, Artificial Sequence
  Synthetic
acaaaaagugaauccuuuu

SEQ ID NO: 690436 - RNA, 20 nt, Artificial Sequence
  Synthetic
aacaaaaagugaauccuuuu

SEQ ID NO: 690437 - RNA, 21 nt, Artificial Sequence
  Synthetic
aaacaaaaagugaauccuuuu

SEQ ID NO: 690438 - RNA, 22 nt, Artificial Sequence
  Synthetic
caaacaaaaagugaauccuuuu

SEQ ID NO: 690439 - RNA, 23 nt, Artificial Sequence
  Synthetic
acaaacaaaaagugaauccuuuu

SEQ ID NO: 690440 - RNA, 24 nt, Artificial Sequence
  Synthetic
uacaaacaaaaagugaauccuuuu

SEQ ID NO: 690441 - RNA, 18 nt, Artificial Sequence
  Synthetic
aaaauucaacauccuuuu

SEQ ID NO: 690442 - RNA, 19 nt, Artificial Sequence
  Synthetic
caaaauucaacauccuuuu

SEQ ID NO: 690443 - RNA, 20 nt, Artificial Sequence
  Synthetic
acaaaauucaacauccuuuu

SEQ ID NO: 690444 - RNA, 21 nt, Artificial Sequence
  Synthetic
gacaaaauucaacauccuuuu

SEQ ID NO: 690445 - RNA, 22 nt, Artificial Sequence
  Synthetic
ugacaaaauucaacauccuuuu

SEQ ID NO: 690446 - RNA, 23 nt, Artificial Sequence
  Synthetic
uugacaaaauucaacauccuuuu

SEQ ID NO: 690447 - RNA, 24 nt, Artificial Sequence
  Synthetic
uuugacaaaauucaacauccuuuu

SEQ ID NO: 690448 - RNA, 18 nt, Artificial Sequence
  Synthetic
gaggcacauucuccuuuu

SEQ ID NO: 690449 - RNA, 19 nt, Artificial Sequence
  Synthetic
ugaggcacauucuccuuuu

SEQ ID NO: 690450 - RNA, 20 nt, Artificial Sequence
  Synthetic
cugaggcacauucuccuuuu

SEQ ID NO: 690451 - RNA, 21 nt, Artificial Sequence
  Synthetic
ucugaggcacauucuccuuuu

SEQ ID NO: 690452 - RNA, 22 nt, Artificial Sequence
  Synthetic
aucugaggcacauucuccuuuu

SEQ ID NO: 690453 - RNA, 23 nt, Artificial Sequence
  Synthetic
uaucugaggcacauucuccuuuu

SEQ ID NO: 690454 - RNA, 24 nt, Artificial Sequence
  Synthetic
auaucugaggcacauucuccuuuu

SEQ ID NO: 690455 - RNA, 18 nt, Artificial Sequence
  Synthetic
caaagucucaguccuuuu

SEQ ID NO: 690456 - RNA, 19 nt, Artificial Sequence
  Synthetic
ucaaagucucaguccuuuu

SEQ ID NO: 690457 - RNA, 20 nt, Artificial Sequence
  Synthetic
cucaaagucucaguccuuuu

SEQ ID NO: 690458 - RNA, 21 nt, Artificial Sequence
  Synthetic
ccucaaagucucaguccuuuu

SEQ ID NO: 690459 - RNA, 22 nt, Artificial Sequence
  Synthetic
cccucaaagucucaguccuuuu

SEQ ID NO: 690460 - RNA, 23 nt, Artificial Sequence
  Synthetic
ucccucaaagucucaguccuuuu

SEQ ID NO: 690461 - RNA, 24 nt, Artificial Sequence
  Synthetic
uucccucaaagucucaguccuuuu

SEQ ID NO: 690462 - RNA, 18 nt, Artificial Sequence
  Synthetic
uuggauuaguguccuuuu

SEQ ID NO: 690463 - RNA, 19 nt, Artificial Sequence
  Synthetic
auuggauuaguguccuuuu

SEQ ID NO: 690464 - RNA, 20 nt, Artificial Sequence
  Synthetic
aauuggauuaguguccuuuu

SEQ ID NO: 690465 - RNA, 21 nt, Artificial Sequence
  Synthetic
uaauuggauuaguguccuuuu

SEQ ID NO: 690466 - RNA, 22 nt, Artificial Sequence
  Synthetic
auaauuggauuaguguccuuuu

SEQ ID NO: 690467 - RNA, 23 nt, Artificial Sequence
  Synthetic
cauaauuggauuaguguccuuuu

SEQ ID NO: 690468 - RNA, 24 nt, Artificial Sequence
  Synthetic
ccauaauuggauuaguguccuuuu

SEQ ID NO: 690469 - RNA, 18 nt, Artificial Sequence
  Synthetic
ggauaguguauuccuuuu

SEQ ID NO: 690470 - RNA, 19 nt, Artificial Sequence
  Synthetic
aggauaguguauuccuuuu

SEQ ID NO: 690471 - RNA, 20 nt, Artificial Sequence
  Synthetic
gaggauaguguauuccuuuu

SEQ ID NO: 690472 - RNA, 21 nt, Artificial Sequence
  Synthetic
ugaggauaguguauuccuuuu

SEQ ID NO: 690473 - RNA, 22 nt, Artificial Sequence
  Synthetic
cugaggauaguguauuccuuuu

SEQ ID NO: 690474 - RNA, 23 nt, Artificial Sequence
  Synthetic
ccugaggauaguguauuccuuuu

SEQ ID NO: 690475 - RNA, 24 nt, Artificial Sequence
  Synthetic
accugaggauaguguauuccuuuu

SEQ ID NO: 690476 - RNA, 18 nt, Artificial Sequence
  Synthetic
cuagccuguguuccuuuu

SEQ ID NO: 690477 - RNA, 19 nt, Artificial Sequence
  Synthetic
gcuagccuguguuccuuuu

SEQ ID NO: 690478 - RNA, 20 nt, Artificial Sequence
  Synthetic
ugcuagccuguguuccuuuu

SEQ ID NO: 690479 - RNA, 21 nt, Artificial Sequence
  Synthetic
uugcuagccuguguuccuuuu

SEQ ID NO: 690480 - RNA, 22 nt, Artificial Sequence
  Synthetic
cuugcuagccuguguuccuuuu

SEQ ID NO: 690481 - RNA, 23 nt, Artificial Sequence
  Synthetic
ccuugcuagccuguguuccuuuu

SEQ ID NO: 690482 - RNA, 24 nt, Artificial Sequence
  Synthetic
gccuugcuagccuguguuccuuuu

SEQ ID NO: 690483 - RNA, 18 nt, Artificial Sequence
  Synthetic
auccuuuuauuuccuuuu

SEQ ID NO: 690484 - RNA, 19 nt, Artificial Sequence
  Synthetic
uauccuuuuauuuccuuuu

SEQ ID NO: 690485 - RNA, 20 nt, Artificial Sequence
  Synthetic
auauccuuuuauuuccuuuu

SEQ ID NO: 690486 - RNA, 21 nt, Artificial Sequence
  Synthetic
uauauccuuuuauuuccuuuu

SEQ ID NO: 690487 - RNA, 22 nt, Artificial Sequence
  Synthetic
guauauccuuuuauuuccuuuu

SEQ ID NO: 690488 - RNA, 23 nt, Artificial Sequence
  Synthetic
cguauauccuuuuauuuccuuuu

SEQ ID NO: 690489 - RNA, 24 nt, Artificial Sequence
  Synthetic
acguauauccuuuuauuuccuuuu

SEQ ID NO: 690490 - RNA, 18 nt, Artificial Sequence
  Synthetic
uuuugauguuuuccuuuu

SEQ ID NO: 690491 - RNA, 19 nt, Artificial Sequence
  Synthetic
uuuuugauguuuuccuuuu

SEQ ID NO: 690492 - RNA, 20 nt, Artificial Sequence
  Synthetic
cuuuuugauguuuuccuuuu

SEQ ID NO: 690493 - RNA, 21 nt, Artificial Sequence
  Synthetic
acuuuuugauguuuuccuuuu

SEQ ID NO: 690494 - RNA, 22 nt, Artificial Sequence
  Synthetic
cacuuuuugauguuuuccuuuu

SEQ ID NO: 690495 - RNA, 23 nt, Artificial Sequence
  Synthetic
ucacuuuuugauguuuuccuuuu

SEQ ID NO: 690496 - RNA, 24 nt, Artificial Sequence
  Synthetic
uucacuuuuugauguuuuccuuuu

SEQ ID NO: 690497 - RNA, 18 nt, Artificial Sequence
  Synthetic
uucaaaggacaagcuuuu

SEQ ID NO: 690498 - RNA, 19 nt, Artificial Sequence
  Synthetic
guucaaaggacaagcuuuu

SEQ ID NO: 690499 - RNA, 20 nt, Artificial Sequence
  Synthetic
gguucaaaggacaagcuuuu

SEQ ID NO: 690500 - RNA, 21 nt, Artificial Sequence
  Synthetic
ggguucaaaggacaagcuuuu

SEQ ID NO: 690501 - RNA, 22 nt, Artificial Sequence
  Synthetic
aggguucaaaggacaagcuuuu

SEQ ID NO: 690502 - RNA, 23 nt, Artificial Sequence
  Synthetic
uaggguucaaaggacaagcuuuu

SEQ ID NO: 690503 - RNA, 24 nt, Artificial Sequence
  Synthetic
uuaggguucaaaggacaagcuuuu

SEQ ID NO: 690504 - RNA, 18 nt, Artificial Sequence
  Synthetic
ggaaucugucaagcuuuu

SEQ ID NO: 690505 - RNA, 19 nt, Artificial Sequence
  Synthetic
aggaaucugucaagcuuuu

SEQ ID NO: 690506 - RNA, 20 nt, Artificial Sequence
  Synthetic
caggaaucugucaagcuuuu

SEQ ID NO: 690507 - RNA, 21 nt, Artificial Sequence
  Synthetic
acaggaaucugucaagcuuuu

SEQ ID NO: 690508 - RNA, 22 nt, Artificial Sequence
  Synthetic
uacaggaaucugucaagcuuuu

SEQ ID NO: 690509 - RNA, 23 nt, Artificial Sequence
  Synthetic
guacaggaaucugucaagcuuuu

SEQ ID NO: 690510 - RNA, 24 nt, Artificial Sequence
  Synthetic
aguacaggaaucugucaagcuuuu

SEQ ID NO: 690511 - RNA, 18 nt, Artificial Sequence
  Synthetic
gauuaucucuaagcuuuu

SEQ ID NO: 690512 - RNA, 19 nt, Artificial Sequence
  Synthetic
agauuaucucuaagcuuuu

SEQ ID NO: 690513 - RNA, 20 nt, Artificial Sequence
  Synthetic
cagauuaucucuaagcuuuu

SEQ ID NO: 690514 - RNA, 21 nt, Artificial Sequence
  Synthetic
acagauuaucucuaagcuuuu

SEQ ID NO: 690515 - RNA, 22 nt, Artificial Sequence
  Synthetic
gacagauuaucucuaagcuuuu

SEQ ID NO: 690516 - RNA, 23 nt, Artificial Sequence
  Synthetic
agacagauuaucucuaagcuuuu

SEQ ID NO: 690517 - RNA, 24 nt, Artificial Sequence
  Synthetic
uagacagauuaucucuaagcuuuu

SEQ ID NO: 690518 - RNA, 18 nt, Artificial Sequence
  Synthetic
aacaacccugcagcuuuu

SEQ ID NO: 690519 - RNA, 19 nt, Artificial Sequence
  Synthetic
caacaacccugcagcuuuu

SEQ ID NO: 690520 - RNA, 20 nt, Artificial Sequence
  Synthetic
ccaacaacccugcagcuuuu

SEQ ID NO: 690521 - RNA, 21 nt, Artificial Sequence
  Synthetic
cccaacaacccugcagcuuuu

SEQ ID NO: 690522 - RNA, 22 nt, Artificial Sequence
  Synthetic
ccccaacaacccugcagcuuuu

SEQ ID NO: 690523 - RNA, 23 nt, Artificial Sequence
  Synthetic
cccccaacaacccugcagcuuuu

SEQ ID NO: 690524 - RNA, 24 nt, Artificial Sequence
  Synthetic
ucccccaacaacccugcagcuuuu

SEQ ID NO: 690525 - RNA, 18 nt, Artificial Sequence
  Synthetic
uaaaauugugcagcuuuu

SEQ ID NO: 690526 - RNA, 19 nt, Artificial Sequence
  Synthetic
auaaaauugugcagcuuuu

SEQ ID NO: 690527 - RNA, 20 nt, Artificial Sequence
  Synthetic
uauaaaauugugcagcuuuu

SEQ ID NO: 690528 - RNA, 21 nt, Artificial Sequence
  Synthetic
auauaaaauugugcagcuuuu

SEQ ID NO: 690529 - RNA, 22 nt, Artificial Sequence
  Synthetic
aauauaaaauugugcagcuuuu

SEQ ID NO: 690530 - RNA, 23 nt, Artificial Sequence
  Synthetic
aaauauaaaauugugcagcuuuu

SEQ ID NO: 690531 - RNA, 24 nt, Artificial Sequence
  Synthetic
gaaauauaaaauugugcagcuuuu

SEQ ID NO: 690532 - RNA, 18 nt, Artificial Sequence
  Synthetic
ccuuagcugauagcuuuu

SEQ ID NO: 690533 - RNA, 19 nt, Artificial Sequence
  Synthetic
uccuuagcugauagcuuuu

SEQ ID NO: 690534 - RNA, 20 nt, Artificial Sequence
  Synthetic
uuccuuagcugauagcuuuu

SEQ ID NO: 690535 - RNA, 21 nt, Artificial Sequence
  Synthetic
auuccuuagcugauagcuuuu

SEQ ID NO: 690536 - RNA, 22 nt, Artificial Sequence
  Synthetic
cauuccuuagcugauagcuuuu

SEQ ID NO: 690537 - RNA, 23 nt, Artificial Sequence
  Synthetic
gcauuccuuagcugauagcuuuu

SEQ ID NO: 690538 - RNA, 24 nt, Artificial Sequence
  Synthetic
ugcauuccuuagcugauagcuuuu

SEQ ID NO: 690539 - RNA, 18 nt, Artificial Sequence
  Synthetic
uuaagaaaauacgcuuuu

SEQ ID NO: 690540 - RNA, 19 nt, Artificial Sequence
  Synthetic
auuaagaaaauacgcuuuu

SEQ ID NO: 690541 - RNA, 20 nt, Artificial Sequence
  Synthetic
uauuaagaaaauacgcuuuu

SEQ ID NO: 690542 - RNA, 21 nt, Artificial Sequence
  Synthetic
cuauuaagaaaauacgcuuuu

SEQ ID NO: 690543 - RNA, 22 nt, Artificial Sequence
  Synthetic
ucuauuaagaaaauacgcuuuu

SEQ ID NO: 690544 - RNA, 23 nt, Artificial Sequence
  Synthetic
aucuauuaagaaaauacgcuuuu

SEQ ID NO: 690545 - RNA, 24 nt, Artificial Sequence
  Synthetic
aaucuauuaagaaaauacgcuuuu

SEQ ID NO: 690546 - RNA, 18 nt, Artificial Sequence
  Synthetic
auagaaaauuaugcuuuu

SEQ ID NO: 690547 - RNA, 19 nt, Artificial Sequence
  Synthetic
uauagaaaauuaugcuuuu

SEQ ID NO: 690548 - RNA, 20 nt, Artificial Sequence
  Synthetic
cuauagaaaauuaugcuuuu

SEQ ID NO: 690549 - RNA, 21 nt, Artificial Sequence
  Synthetic
ucuauagaaaauuaugcuuuu

SEQ ID NO: 690550 - RNA, 22 nt, Artificial Sequence
  Synthetic
gucuauagaaaauuaugcuuuu

SEQ ID NO: 690551 - RNA, 23 nt, Artificial Sequence
  Synthetic
agucuauagaaaauuaugcuuuu

SEQ ID NO: 690552 - RNA, 24 nt, Artificial Sequence
  Synthetic
aagucuauagaaaauuaugcuuuu

SEQ ID NO: 690553 - RNA, 18 nt, Artificial Sequence
  Synthetic
ugaaaagcaccugcuuuu

SEQ ID NO: 690554 - RNA, 19 nt, Artificial Sequence
  Synthetic
augaaaagcaccugcuuuu

SEQ ID NO: 690555 - RNA, 20 nt, Artificial Sequence
  Synthetic
gaugaaaagcaccugcuuuu

SEQ ID NO: 690556 - RNA, 21 nt, Artificial Sequence
  Synthetic
ggaugaaaagcaccugcuuuu

SEQ ID NO: 690557 - RNA, 22 nt, Artificial Sequence
  Synthetic
aggaugaaaagcaccugcuuuu

SEQ ID NO: 690558 - RNA, 23 nt, Artificial Sequence
  Synthetic
gaggaugaaaagcaccugcuuuu

SEQ ID NO: 690559 - RNA, 24 nt, Artificial Sequence
  Synthetic
agaggaugaaaagcaccugcuuuu

SEQ ID NO: 690560 - RNA, 18 nt, Artificial Sequence
  Synthetic
uuuuuugcaauugcuuuu

SEQ ID NO: 690561 - RNA, 19 nt, Artificial Sequence
  Synthetic
uuuuuuugcaauugcuuuu

SEQ ID NO: 690562 - RNA, 20 nt, Artificial Sequence
  Synthetic
uuuuuuuugcaauugcuuuu

SEQ ID NO: 690563 - RNA, 21 nt, Artificial Sequence
  Synthetic
uuuuuuuuugcaauugcuuuu

SEQ ID NO: 690564 - RNA, 22 nt, Artificial Sequence
  Synthetic
uuuuuuuuuugcaauugcuuuu

SEQ ID NO: 690565 - RNA, 23 nt, Artificial Sequence
  Synthetic
uuuuuuuuuuugcaauugcuuuu

SEQ ID NO: 690566 - RNA, 24 nt, Artificial Sequence
  Synthetic
uuuuuuuuuuuugcaauugcuuuu

SEQ ID NO: 690567 - RNA, 18 nt, Artificial Sequence
  Synthetic
cgacagacacuugcuuuu

SEQ ID NO: 690568 - RNA, 19 nt, Artificial Sequence
  Synthetic
ucgacagacacuugcuuuu

SEQ ID NO: 690569 - RNA, 20 nt, Artificial Sequence
  Synthetic
cucgacagacacuugcuuuu

SEQ ID NO: 690570 - RNA, 21 nt, Artificial Sequence
  Synthetic
ucucgacagacacuugcuuuu

SEQ ID NO: 690571 - RNA, 22 nt, Artificial Sequence
  Synthetic
aucucgacagacacuugcuuuu

SEQ ID NO: 690572 - RNA, 23 nt, Artificial Sequence
  Synthetic
caucucgacagacacuugcuuuu

SEQ ID NO: 690573 - RNA, 24 nt, Artificial Sequence
  Synthetic
acaucucgacagacacuugcuuuu

SEQ ID NO: 690574 - RNA, 18 nt, Artificial Sequence
  Synthetic
ucuguuaagcuugcuuuu

SEQ ID NO: 690575 - RNA, 19 nt, Artificial Sequence
  Synthetic
aucuguuaagcuugcuuuu

SEQ ID NO: 690576 - RNA, 20 nt, Artificial Sequence
  Synthetic
aaucuguuaagcuugcuuuu

SEQ ID NO: 690577 - RNA, 21 nt, Artificial Sequence
  Synthetic
gaaucuguuaagcuugcuuuu

SEQ ID NO: 690578 - RNA, 22 nt, Artificial Sequence
  Synthetic
agaaucuguuaagcuugcuuuu

SEQ ID NO: 690579 - RNA, 23 nt, Artificial Sequence
  Synthetic
aagaaucuguuaagcuugcuuuu

SEQ ID NO: 690580 - RNA, 24 nt, Artificial Sequence
  Synthetic
uaagaaucuguuaagcuugcuuuu

SEQ ID NO: 690581 - RNA, 18 nt, Artificial Sequence
  Synthetic
uuuguuacauuugcuuuu

SEQ ID NO: 690582 - RNA, 19 nt, Artificial Sequence
  Synthetic
uuuuguuacauuugcuuuu

SEQ ID NO: 690583 - RNA, 20 nt, Artificial Sequence
  Synthetic
guuuuguuacauuugcuuuu

SEQ ID NO: 690584 - RNA, 21 nt, Artificial Sequence
  Synthetic
gguuuuguuacauuugcuuuu

SEQ ID NO: 690585 - RNA, 22 nt, Artificial Sequence
  Synthetic
ugguuuuguuacauuugcuuuu

SEQ ID NO: 690586 - RNA, 23 nt, Artificial Sequence
  Synthetic
uugguuuuguuacauuugcuuuu

SEQ ID NO: 690587 - RNA, 24 nt, Artificial Sequence
  Synthetic
uuugguuuuguuacauuugcuuuu

SEQ ID NO: 690588 - RNA, 18 nt, Artificial Sequence
  Synthetic
uguuuguuuuuugcuuuu

SEQ ID NO: 690589 - RNA, 19 nt, Artificial Sequence
  Synthetic
guguuuguuuuuugcuuuu

SEQ ID NO: 690590 - RNA, 20 nt, Artificial Sequence
  Synthetic
cguguuuguuuuuugcuuuu

SEQ ID NO: 690591 - RNA, 21 nt, Artificial Sequence
  Synthetic
gcguguuuguuuuuugcuuuu

SEQ ID NO: 690592 - RNA, 22 nt, Artificial Sequence
  Synthetic
ugcguguuuguuuuuugcuuuu

SEQ ID NO: 690593 - RNA, 23 nt, Artificial Sequence
  Synthetic
uugcguguuuguuuuuugcuuuu

SEQ ID NO: 690594 - RNA, 24 nt, Artificial Sequence
  Synthetic
uuugcguguuuguuuuuugcuuuu

SEQ ID NO: 690595 - RNA, 18 nt, Artificial Sequence
  Synthetic
acuacauaaaaaucuuuu

SEQ ID NO: 690596 - RNA, 19 nt, Artificial Sequence
  Synthetic
cacuacauaaaaaucuuuu

SEQ ID NO: 690597 - RNA, 20 nt, Artificial Sequence
  Synthetic
acacuacauaaaaaucuuuu

SEQ ID NO: 690598 - RNA, 21 nt, Artificial Sequence
  Synthetic
cacacuacauaaaaaucuuuu

SEQ ID NO: 690599 - RNA, 22 nt, Artificial Sequence
  Synthetic
acacacuacauaaaaaucuuuu

SEQ ID NO: 690600 - RNA, 23 nt, Artificial Sequence
  Synthetic
cacacacuacauaaaaaucuuuu

SEQ ID NO: 690601 - RNA, 24 nt, Artificial Sequence
  Synthetic
ucacacacuacauaaaaaucuuuu

SEQ ID NO: 690602 - RNA, 18 nt, Artificial Sequence
  Synthetic
guuaccuacuuaucuuuu

SEQ ID NO: 690603 - RNA, 19 nt, Artificial Sequence
  Synthetic
aguuaccuacuuaucuuuu

SEQ ID NO: 690604 - RNA, 20 nt, Artificial Sequence
  Synthetic
gaguuaccuacuuaucuuuu

SEQ ID NO: 690605 - RNA, 21 nt, Artificial Sequence
  Synthetic
agaguuaccuacuuaucuuuu

SEQ ID NO: 690606 - RNA, 22 nt, Artificial Sequence
  Synthetic
gagaguuaccuacuuaucuuuu

SEQ ID NO: 690607 - RNA, 23 nt, Artificial Sequence
  Synthetic
agagaguuaccuacuuaucuuuu

SEQ ID NO: 690608 - RNA, 24 nt, Artificial Sequence
  Synthetic
aagagaguuaccuacuuaucuuuu

SEQ ID NO: 690609 - RNA, 18 nt, Artificial Sequence
  Synthetic
auaaagcucuuaucuuuu

SEQ ID NO: 690610 - RNA, 19 nt, Artificial Sequence
  Synthetic
gauaaagcucuuaucuuuu

SEQ ID NO: 690611 - RNA, 20 nt, Artificial Sequence
  Synthetic
agauaaagcucuuaucuuuu

SEQ ID NO: 690612 - RNA, 21 nt, Artificial Sequence
  Synthetic
cagauaaagcucuuaucuuuu

SEQ ID NO: 690613 - RNA, 22 nt, Artificial Sequence
  Synthetic
ucagauaaagcucuuaucuuuu

SEQ ID NO: 690614 - RNA, 23 nt, Artificial Sequence
  Synthetic
uucagauaaagcucuuaucuuuu

SEQ ID NO: 690615 - RNA, 24 nt, Artificial Sequence
  Synthetic
uuucagauaaagcucuuaucuuuu

SEQ ID NO: 690616 - RNA, 18 nt, Artificial Sequence
  Synthetic
cuaaaguauuacucuuuu

SEQ ID NO: 690617 - RNA, 19 nt, Artificial Sequence
  Synthetic
ucuaaaguauuacucuuuu

SEQ ID NO: 690618 - RNA, 20 nt, Artificial Sequence
  Synthetic
aucuaaaguauuacucuuuu

SEQ ID NO: 690619 - RNA, 21 nt, Artificial Sequence
  Synthetic
aaucuaaaguauuacucuuuu

SEQ ID NO: 690620 - RNA, 22 nt, Artificial Sequence
  Synthetic
aaaucuaaaguauuacucuuuu

SEQ ID NO: 690621 - RNA, 23 nt, Artificial Sequence
  Synthetic
caaaucuaaaguauuacucuuuu

SEQ ID NO: 690622 - RNA, 24 nt, Artificial Sequence
  Synthetic
acaaaucuaaaguauuacucuuuu

SEQ ID NO: 690623 - RNA, 18 nt, Artificial Sequence
  Synthetic
acugcuagauccucuuuu

SEQ ID NO: 690624 - RNA, 19 nt, Artificial Sequence
  Synthetic
aacugcuagauccucuuuu

SEQ ID NO: 690625 - RNA, 20 nt, Artificial Sequence
  Synthetic
aaacugcuagauccucuuuu

SEQ ID NO: 690626 - RNA, 21 nt, Artificial Sequence
  Synthetic
gaaacugcuagauccucuuuu

SEQ ID NO: 690627 - RNA, 22 nt, Artificial Sequence
  Synthetic
agaaacugcuagauccucuuuu

SEQ ID NO: 690628 - RNA, 23 nt, Artificial Sequence
  Synthetic
uagaaacugcuagauccucuuuu

SEQ ID NO: 690629 - RNA, 24 nt, Artificial Sequence
  Synthetic
auagaaacugcuagauccucuuuu

SEQ ID NO: 690630 - RNA, 18 nt, Artificial Sequence
  Synthetic
aucauucacagcucuuuu

SEQ ID NO: 690631 - RNA, 19 nt, Artificial Sequence
  Synthetic
uaucauucacagcucuuuu

SEQ ID NO: 690632 - RNA, 20 nt, Artificial Sequence
  Synthetic
auaucauucacagcucuuuu

SEQ ID NO: 690633 - RNA, 21 nt, Artificial Sequence
  Synthetic
gauaucauucacagcucuuuu

SEQ ID NO: 690634 - RNA, 22 nt, Artificial Sequence
  Synthetic
ugauaucauucacagcucuuuu

SEQ ID NO: 690635 - RNA, 23 nt, Artificial Sequence
  Synthetic
gugauaucauucacagcucuuuu

SEQ ID NO: 690636 - RNA, 24 nt, Artificial Sequence
  Synthetic
ugugauaucauucacagcucuuuu

SEQ ID NO: 690637 - RNA, 18 nt, Artificial Sequence
  Synthetic
gcaaggugaugcucuuuu

SEQ ID NO: 690638 - RNA, 19 nt, Artificial Sequence
  Synthetic
agcaaggugaugcucuuuu

SEQ ID NO: 690639 - RNA, 20 nt, Artificial Sequence
  Synthetic
cagcaaggugaugcucuuuu

SEQ ID NO: 690640 - RNA, 21 nt, Artificial Sequence
  Synthetic
acagcaaggugaugcucuuuu

SEQ ID NO: 690641 - RNA, 22 nt, Artificial Sequence
  Synthetic
cacagcaaggugaugcucuuuu

SEQ ID NO: 690642 - RNA, 23 nt, Artificial Sequence
  Synthetic
gcacagcaaggugaugcucuuuu

SEQ ID NO: 690643 - RNA, 24 nt, Artificial Sequence
  Synthetic
ugcacagcaaggugaugcucuuuu

SEQ ID NO: 690644 - RNA, 18 nt, Artificial Sequence
  Synthetic
acaggcugacucucuuuu

SEQ ID NO: 690645 - RNA, 19 nt, Artificial Sequence
  Synthetic
gacaggcugacucucuuuu

SEQ ID NO: 690646 - RNA, 20 nt, Artificial Sequence
  Synthetic
ggacaggcugacucucuuuu

SEQ ID NO: 690647 - RNA, 21 nt, Artificial Sequence
  Synthetic
aggacaggcugacucucuuuu

SEQ ID NO: 690648 - RNA, 22 nt, Artificial Sequence
  Synthetic
aaggacaggcugacucucuuuu

SEQ ID NO: 690649 - RNA, 23 nt, Artificial Sequence
  Synthetic
aaaggacaggcugacucucuuuu

SEQ ID NO: 690650 - RNA, 24 nt, Artificial Sequence
  Synthetic
caaaggacaggcugacucucuuuu

SEQ ID NO: 690651 - RNA, 18 nt, Artificial Sequence
  Synthetic
gcuuuuaguaugucuuuu

SEQ ID NO: 690652 - RNA, 19 nt, Artificial Sequence
  Synthetic
ggcuuuuaguaugucuuuu

SEQ ID NO: 690653 - RNA, 20 nt, Artificial Sequence
  Synthetic
aggcuuuuaguaugucuuuu

SEQ ID NO: 690654 - RNA, 21 nt, Artificial Sequence
  Synthetic
caggcuuuuaguaugucuuuu

SEQ ID NO: 690655 - RNA, 22 nt, Artificial Sequence
  Synthetic
ucaggcuuuuaguaugucuuuu

SEQ ID NO: 690656 - RNA, 23 nt, Artificial Sequence
  Synthetic
cucaggcuuuuaguaugucuuuu

SEQ ID NO: 690657 - RNA, 24 nt, Artificial Sequence
  Synthetic
gcucaggcuuuuaguaugucuuuu

SEQ ID NO: 690658 - RNA, 18 nt, Artificial Sequence
  Synthetic
auuaaacaucugucuuuu

SEQ ID NO: 690659 - RNA, 19 nt, Artificial Sequence
  Synthetic
aauuaaacaucugucuuuu

SEQ ID NO: 690660 - RNA, 20 nt, Artificial Sequence
  Synthetic
gaauuaaacaucugucuuuu

SEQ ID NO: 690661 - RNA, 21 nt, Artificial Sequence
  Synthetic
ugaauuaaacaucugucuuuu

SEQ ID NO: 690662 - RNA, 22 nt, Artificial Sequence
  Synthetic
augaauuaaacaucugucuuuu

SEQ ID NO: 690663 - RNA, 23 nt, Artificial Sequence
  Synthetic
aaugaauuaaacaucugucuuuu

SEQ ID NO: 690664 - RNA, 24 nt, Artificial Sequence
  Synthetic
uaaugaauuaaacaucugucuuuu

SEQ ID NO: 690665 - RNA, 18 nt, Artificial Sequence
  Synthetic
uuuguuuuguugucuuuu

SEQ ID NO: 690666 - RNA, 19 nt, Artificial Sequence
  Synthetic
uuuuguuuuguugucuuuu

SEQ ID NO: 690667 - RNA, 20 nt, Artificial Sequence
  Synthetic
uuuuuguuuuguugucuuuu

SEQ ID NO: 690668 - RNA, 21 nt, Artificial Sequence
  Synthetic
uuuuuuguuuuguugucuuuu

SEQ ID NO: 690669 - RNA, 22 nt, Artificial Sequence
  Synthetic
auuuuuuguuuuguugucuuuu

SEQ ID NO: 690670 - RNA, 23 nt, Artificial Sequence
  Synthetic
aauuuuuuguuuuguugucuuuu

SEQ ID NO: 690671 - RNA, 24 nt, Artificial Sequence
  Synthetic
aaauuuuuuguuuuguugucuuuu

SEQ ID NO: 690672 - RNA, 18 nt, Artificial Sequence
  Synthetic
aucuuaucauauucuuuu

SEQ ID NO: 690673 - RNA, 19 nt, Artificial Sequence
  Synthetic
caucuuaucauauucuuuu

SEQ ID NO: 690674 - RNA, 20 nt, Artificial Sequence
  Synthetic
ccaucuuaucauauucuuuu

SEQ ID NO: 690675 - RNA, 21 nt, Artificial Sequence
  Synthetic
accaucuuaucauauucuuuu

SEQ ID NO: 690676 - RNA, 22 nt, Artificial Sequence
  Synthetic
aaccaucuuaucauauucuuuu

SEQ ID NO: 690677 - RNA, 23 nt, Artificial Sequence
  Synthetic
aaaccaucuuaucauauucuuuu

SEQ ID NO: 690678 - RNA, 24 nt, Artificial Sequence
  Synthetic
uaaaccaucuuaucauauucuuuu

SEQ ID NO: 690679 - RNA, 18 nt, Artificial Sequence
  Synthetic
auuuguacaucuucuuuu

SEQ ID NO: 690680 - RNA, 19 nt, Artificial Sequence
  Synthetic
uauuuguacaucuucuuuu

SEQ ID NO: 690681 - RNA, 20 nt, Artificial Sequence
  Synthetic
cuauuuguacaucuucuuuu

SEQ ID NO: 690682 - RNA, 21 nt, Artificial Sequence
  Synthetic
gcuauuuguacaucuucuuuu

SEQ ID NO: 690683 - RNA, 22 nt, Artificial Sequence
  Synthetic
agcuauuuguacaucuucuuuu

SEQ ID NO: 690684 - RNA, 23 nt, Artificial Sequence
  Synthetic
uagcuauuuguacaucuucuuuu

SEQ ID NO: 690685 - RNA, 24 nt, Artificial Sequence
  Synthetic
uuagcuauuuguacaucuucuuuu

SEQ ID NO: 690686 - RNA, 18 nt, Artificial Sequence
  Synthetic
gcguguauaucuucuuuu

SEQ ID NO: 690687 - RNA, 19 nt, Artificial Sequence
  Synthetic
ugcguguauaucuucuuuu

SEQ ID NO: 690688 - RNA, 20 nt, Artificial Sequence
  Synthetic
cugcguguauaucuucuuuu

SEQ ID NO: 690689 - RNA, 21 nt, Artificial Sequence
  Synthetic
gcugcguguauaucuucuuuu

SEQ ID NO: 690690 - RNA, 22 nt, Artificial Sequence
  Synthetic
ggcugcguguauaucuucuuuu

SEQ ID NO: 690691 - RNA, 23 nt, Artificial Sequence
  Synthetic
uggcugcguguauaucuucuuuu

SEQ ID NO: 690692 - RNA, 24 nt, Artificial Sequence
  Synthetic
uuggcugcguguauaucuucuuuu

SEQ ID NO: 690693 - RNA, 18 nt, Artificial Sequence
  Synthetic
acauaaaugucuucuuuu

SEQ ID NO: 690694 - RNA, 19 nt, Artificial Sequence
  Synthetic
cacauaaaugucuucuuuu

SEQ ID NO: 690695 - RNA, 20 nt, Artificial Sequence
  Synthetic
ccacauaaaugucuucuuuu

SEQ ID NO: 690696 - RNA, 21 nt, Artificial Sequence
  Synthetic
gccacauaaaugucuucuuuu

SEQ ID NO: 690697 - RNA, 22 nt, Artificial Sequence
  Synthetic
ggccacauaaaugucuucuuuu

SEQ ID NO: 690698 - RNA, 23 nt, Artificial Sequence
  Synthetic
uggccacauaaaugucuucuuuu

SEQ ID NO: 690699 - RNA, 24 nt, Artificial Sequence
  Synthetic
uuggccacauaaaugucuucuuuu

SEQ ID NO: 690700 - RNA, 22 nt, Artificial Sequence
  Synthetic
ggcugcauaaaugucuucuuuu

SEQ ID NO: 690701 - RNA, 23 nt, Artificial Sequence
  Synthetic
uggcugcauaaaugucuucuuuu

SEQ ID NO: 690702 - RNA, 24 nt, Artificial Sequence
  Synthetic
uuggcugcauaaaugucuucuuuu

SEQ ID NO: 690703 - RNA, 18 nt, Artificial Sequence
  Synthetic
acccguuugucuucuuuu

SEQ ID NO: 690704 - RNA, 19 nt, Artificial Sequence
  Synthetic
cacccguuugucuucuuuu

SEQ ID NO: 690705 - RNA, 20 nt, Artificial Sequence
  Synthetic
ccacccguuugucuucuuuu

SEQ ID NO: 690706 - RNA, 21 nt, Artificial Sequence
  Synthetic
gccacccguuugucuucuuuu

SEQ ID NO: 690707 - RNA, 22 nt, Artificial Sequence
  Synthetic
agccacccguuugucuucuuuu

SEQ ID NO: 690708 - RNA, 23 nt, Artificial Sequence
  Synthetic
uagccacccguuugucuucuuuu

SEQ ID NO: 690709 - RNA, 24 nt, Artificial Sequence
  Synthetic
uuagccacccguuugucuucuuuu

SEQ ID NO: 690710 - RNA, 18 nt, Artificial Sequence
  Synthetic
uaggcauccaguucuuuu

SEQ ID NO: 690711 - RNA, 19 nt, Artificial Sequence
  Synthetic
cuaggcauccaguucuuuu

SEQ ID NO: 690712 - RNA, 20 nt, Artificial Sequence
  Synthetic
acuaggcauccaguucuuuu

SEQ ID NO: 690713 - RNA, 21 nt, Artificial Sequence
  Synthetic
uacuaggcauccaguucuuuu

SEQ ID NO: 690714 - RNA, 22 nt, Artificial Sequence
  Synthetic
uuacuaggcauccaguucuuuu

SEQ ID NO: 690715 - RNA, 23 nt, Artificial Sequence
  Synthetic
cuuacuaggcauccaguucuuuu

SEQ ID NO: 690716 - RNA, 24 nt, Artificial Sequence
  Synthetic
ucuuacuaggcauccaguucuuuu

SEQ ID NO: 690717 - RNA, 18 nt, Artificial Sequence
  Synthetic
uggauuaucuguucuuuu

SEQ ID NO: 690718 - RNA, 19 nt, Artificial Sequence
  Synthetic
uuggauuaucuguucuuuu

SEQ ID NO: 690719 - RNA, 20 nt, Artificial Sequence
  Synthetic
auuggauuaucuguucuuuu

SEQ ID NO: 690720 - RNA, 21 nt, Artificial Sequence
  Synthetic
uauuggauuaucuguucuuuu

SEQ ID NO: 690721 - RNA, 22 nt, Artificial Sequence
  Synthetic
cuauuggauuaucuguucuuuu

SEQ ID NO: 690722 - RNA, 23 nt, Artificial Sequence
  Synthetic
ucuauuggauuaucuguucuuuu

SEQ ID NO: 690723 - RNA, 24 nt, Artificial Sequence
  Synthetic
uucuauuggauuaucuguucuuuu

SEQ ID NO: 690724 - RNA, 18 nt, Artificial Sequence
  Synthetic
aaaauuuaacuuucuuuu

SEQ ID NO: 690725 - RNA, 19 nt, Artificial Sequence
  Synthetic
gaaaauuuaacuuucuuuu

SEQ ID NO: 690726 - RNA, 20 nt, Artificial Sequence
  Synthetic
agaaaauuuaacuuucuuuu

SEQ ID NO: 690727 - RNA, 21 nt, Artificial Sequence
  Synthetic
cagaaaauuuaacuuucuuuu

SEQ ID NO: 690728 - RNA, 22 nt, Artificial Sequence
  Synthetic
acagaaaauuuaacuuucuuuu

SEQ ID NO: 690729 - RNA, 23 nt, Artificial Sequence
  Synthetic
cacagaaaauuuaacuuucuuuu

SEQ ID NO: 690730 - RNA, 24 nt, Artificial Sequence
  Synthetic
acacagaaaauuuaacuuucuuuu

SEQ ID NO: 690731 - RNA, 18 nt, Artificial Sequence
  Synthetic
ucuugcucucuuucuuuu

SEQ ID NO: 690732 - RNA, 19 nt, Artificial Sequence
  Synthetic
cucuugcucucuuucuuuu

SEQ ID NO: 690733 - RNA, 20 nt, Artificial Sequence
  Synthetic
gcucuugcucucuuucuuuu

SEQ ID NO: 690734 - RNA, 21 nt, Artificial Sequence
  Synthetic
ugcucuugcucucuuucuuuu

SEQ ID NO: 690735 - RNA, 22 nt, Artificial Sequence
  Synthetic
uugcucuugcucucuuucuuuu

SEQ ID NO: 690736 - RNA, 23 nt, Artificial Sequence
  Synthetic
cuugcucuugcucucuuucuuuu

SEQ ID NO: 690737 - RNA, 24 nt, Artificial Sequence
  Synthetic
ucuugcucuugcucucuuucuuuu

SEQ ID NO: 690738 - RNA, 18 nt, Artificial Sequence
  Synthetic
uaucugaaacaaaguuuu

SEQ ID NO: 690739 - RNA, 19 nt, Artificial Sequence
  Synthetic
auaucugaaacaaaguuuu

SEQ ID NO: 690740 - RNA, 20 nt, Artificial Sequence
  Synthetic
aauaucugaaacaaaguuuu

SEQ ID NO: 690741 - RNA, 21 nt, Artificial Sequence
  Synthetic
aaauaucugaaacaaaguuuu

SEQ ID NO: 690742 - RNA, 22 nt, Artificial Sequence
  Synthetic
gaaauaucugaaacaaaguuuu

SEQ ID NO: 690743 - RNA, 23 nt, Artificial Sequence
  Synthetic
ugaaauaucugaaacaaaguuuu

SEQ ID NO: 690744 - RNA, 24 nt, Artificial Sequence
  Synthetic
uugaaauaucugaaacaaaguuuu

SEQ ID NO: 690745 - RNA, 18 nt, Artificial Sequence
  Synthetic
ccaccgaaccaaaguuuu

SEQ ID NO: 690746 - RNA, 19 nt, Artificial Sequence
  Synthetic
accaccgaaccaaaguuuu

SEQ ID NO: 690747 - RNA, 20 nt, Artificial Sequence
  Synthetic
aaccaccgaaccaaaguuuu

SEQ ID NO: 690748 - RNA, 21 nt, Artificial Sequence
  Synthetic
aaaccaccgaaccaaaguuuu

SEQ ID NO: 690749 - RNA, 22 nt, Artificial Sequence
  Synthetic
caaaccaccgaaccaaaguuuu

SEQ ID NO: 690750 - RNA, 23 nt, Artificial Sequence
  Synthetic
acaaaccaccgaaccaaaguuuu

SEQ ID NO: 690751 - RNA, 24 nt, Artificial Sequence
  Synthetic
cacaaaccaccgaaccaaaguuuu

SEQ ID NO: 690752 - RNA, 18 nt, Artificial Sequence
  Synthetic
ucuuuccuaacaaguuuu

SEQ ID NO: 690753 - RNA, 19 nt, Artificial Sequence
  Synthetic
aucuuuccuaacaaguuuu

SEQ ID NO: 690754 - RNA, 20 nt, Artificial Sequence
  Synthetic
gaucuuuccuaacaaguuuu

SEQ ID NO: 690755 - RNA, 21 nt, Artificial Sequence
  Synthetic
ggaucuuuccuaacaaguuuu

SEQ ID NO: 690756 - RNA, 22 nt, Artificial Sequence
  Synthetic
uggaucuuuccuaacaaguuuu

SEQ ID NO: 690757 - RNA, 23 nt, Artificial Sequence
  Synthetic
guggaucuuuccuaacaaguuuu

SEQ ID NO: 690758 - RNA, 24 nt, Artificial Sequence
  Synthetic
aguggaucuuuccuaacaaguuuu

SEQ ID NO: 690759 - RNA, 18 nt, Artificial Sequence
  Synthetic
agacgacuaggaaguuuu

SEQ ID NO: 690760 - RNA, 19 nt, Artificial Sequence
  Synthetic
aagacgacuaggaaguuuu

SEQ ID NO: 690761 - RNA, 20 nt, Artificial Sequence
  Synthetic
aaagacgacuaggaaguuuu

SEQ ID NO: 690762 - RNA, 21 nt, Artificial Sequence
  Synthetic
gaaagacgacuaggaaguuuu

SEQ ID NO: 690763 - RNA, 22 nt, Artificial Sequence
  Synthetic
ugaaagacgacuaggaaguuuu

SEQ ID NO: 690764 - RNA, 23 nt, Artificial Sequence
  Synthetic
uugaaagacgacuaggaaguuuu

SEQ ID NO: 690765 - RNA, 24 nt, Artificial Sequence
  Synthetic
uuugaaagacgacuaggaaguuuu

SEQ ID NO: 690766 - RNA, 18 nt, Artificial Sequence
  Synthetic
auaauacagugaaguuuu

SEQ ID NO: 690767 - RNA, 19 nt, Artificial Sequence
  Synthetic
aauaauacagugaaguuuu

SEQ ID NO: 690768 - RNA, 20 nt, Artificial Sequence
  Synthetic
aaauaauacagugaaguuuu

SEQ ID NO: 690769 - RNA, 21 nt, Artificial Sequence
  Synthetic
aaaauaauacagugaaguuuu

SEQ ID NO: 690770 - RNA, 22 nt, Artificial Sequence
  Synthetic
aaaaauaauacagugaaguuuu

SEQ ID NO: 690771 - RNA, 23 nt, Artificial Sequence
  Synthetic
uaaaaauaauacagugaaguuuu

SEQ ID NO: 690772 - RNA, 24 nt, Artificial Sequence
  Synthetic
uuaaaaauaauacagugaaguuuu

SEQ ID NO: 690773 - RNA, 18 nt, Artificial Sequence
  Synthetic
acuauucagugaaguuuu

SEQ ID NO: 690774 - RNA, 19 nt, Artificial Sequence
  Synthetic
aacuauucagugaaguuuu

SEQ ID NO: 690775 - RNA, 20 nt, Artificial Sequence
  Synthetic
aaacuauucagugaaguuuu

SEQ ID NO: 690776 - RNA, 21 nt, Artificial Sequence
  Synthetic
aaaacuauucagugaaguuuu

SEQ ID NO: 690777 - RNA, 22 nt, Artificial Sequence
  Synthetic
uaaaacuauucagugaaguuuu

SEQ ID NO: 690778 - RNA, 23 nt, Artificial Sequence
  Synthetic
uuaaaacuauucagugaaguuuu

SEQ ID NO: 690779 - RNA, 24 nt, Artificial Sequence
  Synthetic
uuuaaaacuauucagugaaguuuu

SEQ ID NO: 690780 - RNA, 18 nt, Artificial Sequence
  Synthetic
uuuacaccuguaaguuuu

SEQ ID NO: 690781 - RNA, 19 nt, Artificial Sequence
  Synthetic
uuuuacaccuguaaguuuu

SEQ ID NO: 690782 - RNA, 20 nt, Artificial Sequence
  Synthetic
auuuuacaccuguaaguuuu

SEQ ID NO: 690783 - RNA, 21 nt, Artificial Sequence
  Synthetic
cauuuuacaccuguaaguuuu

SEQ ID NO: 690784 - RNA, 22 nt, Artificial Sequence
  Synthetic
acauuuuacaccuguaaguuuu

SEQ ID NO: 690785 - RNA, 23 nt, Artificial Sequence
  Synthetic
uacauuuuacaccuguaaguuuu

SEQ ID NO: 690786 - RNA, 24 nt, Artificial Sequence
  Synthetic
auacauuuuacaccuguaaguuuu

SEQ ID NO: 690787 - RNA, 18 nt, Artificial Sequence
  Synthetic
acaucagacuacaguuuu

SEQ ID NO: 690788 - RNA, 19 nt, Artificial Sequence
  Synthetic
aacaucagacuacaguuuu

SEQ ID NO: 690789 - RNA, 20 nt, Artificial Sequence
  Synthetic
caacaucagacuacaguuuu

SEQ ID NO: 690790 - RNA, 21 nt, Artificial Sequence
  Synthetic
gcaacaucagacuacaguuuu

SEQ ID NO: 690791 - RNA, 22 nt, Artificial Sequence
  Synthetic
ugcaacaucagacuacaguuuu

SEQ ID NO: 690792 - RNA, 23 nt, Artificial Sequence
  Synthetic
cugcaacaucagacuacaguuuu

SEQ ID NO: 690793 - RNA, 24 nt, Artificial Sequence
  Synthetic
acugcaacaucagacuacaguuuu

SEQ ID NO: 690794 - RNA, 18 nt, Artificial Sequence
  Synthetic
ucagaugugaccaguuuu

SEQ ID NO: 690795 - RNA, 19 nt, Artificial Sequence
  Synthetic
gucagaugugaccaguuuu

SEQ ID NO: 690796 - RNA, 20 nt, Artificial Sequence
  Synthetic
agucagaugugaccaguuuu

SEQ ID NO: 690797 - RNA, 21 nt, Artificial Sequence
  Synthetic
gagucagaugugaccaguuuu

SEQ ID NO: 690798 - RNA, 22 nt, Artificial Sequence
  Synthetic
agagucagaugugaccaguuuu

SEQ ID NO: 690799 - RNA, 23 nt, Artificial Sequence
  Synthetic
uagagucagaugugaccaguuuu

SEQ ID NO: 690800 - RNA, 24 nt, Artificial Sequence
  Synthetic
auagagucagaugugaccaguuuu

SEQ ID NO: 690801 - RNA, 18 nt, Artificial Sequence
  Synthetic
aauccaggagccaguuuu

SEQ ID NO: 690802 - RNA, 19 nt, Artificial Sequence
  Synthetic
gaauccaggagccaguuuu

SEQ ID NO: 690803 - RNA, 20 nt, Artificial Sequence
  Synthetic
ugaauccaggagccaguuuu

SEQ ID NO: 690804 - RNA, 21 nt, Artificial Sequence
  Synthetic
augaauccaggagccaguuuu

SEQ ID NO: 690805 - RNA, 22 nt, Artificial Sequence
  Synthetic
aaugaauccaggagccaguuuu

SEQ ID NO: 690806 - RNA, 23 nt, Artificial Sequence
  Synthetic
caaugaauccaggagccaguuuu

SEQ ID NO: 690807 - RNA, 24 nt, Artificial Sequence
  Synthetic
ucaaugaauccaggagccaguuuu

SEQ ID NO: 690808 - RNA, 18 nt, Artificial Sequence
  Synthetic
uuuugcucuaucaguuuu

SEQ ID NO: 690809 - RNA, 19 nt, Artificial Sequence
  Synthetic
auuuugcucuaucaguuuu

SEQ ID NO: 690810 - RNA, 20 nt, Artificial Sequence
  Synthetic
uauuuugcucuaucaguuuu

SEQ ID NO: 690811 - RNA, 21 nt, Artificial Sequence
  Synthetic
uuauuuugcucuaucaguuuu

SEQ ID NO: 690812 - RNA, 22 nt, Artificial Sequence
  Synthetic
cuuauuuugcucuaucaguuuu

SEQ ID NO: 690813 - RNA, 23 nt, Artificial Sequence
  Synthetic
ccuuauuuugcucuaucaguuuu

SEQ ID NO: 690814 - RNA, 24 nt, Artificial Sequence
  Synthetic
uccuuauuuugcucuaucaguuuu

SEQ ID NO: 690815 - RNA, 18 nt, Artificial Sequence
  Synthetic
uucaggcaauucaguuuu

SEQ ID NO: 690816 - RNA, 19 nt, Artificial Sequence
  Synthetic
uuucaggcaauucaguuuu

SEQ ID NO: 690817 - RNA, 20 nt, Artificial Sequence
  Synthetic
uuuucaggcaauucaguuuu

SEQ ID NO: 690818 - RNA, 21 nt, Artificial Sequence
  Synthetic
uuuuucaggcaauucaguuuu

SEQ ID NO: 690819 - RNA, 22 nt, Artificial Sequence
  Synthetic
uuuuuucaggcaauucaguuuu

SEQ ID NO: 690820 - RNA, 23 nt, Artificial Sequence
  Synthetic
uuuuuuucaggcaauucaguuuu

SEQ ID NO: 690821 - RNA, 24 nt, Artificial Sequence
  Synthetic
uuuuuuuucaggcaauucaguuuu

SEQ ID NO: 690822 - RNA, 18 nt, Artificial Sequence
  Synthetic
cuccuuccguucaguuuu

SEQ ID NO: 690823 - RNA, 19 nt, Artificial Sequence
  Synthetic
ucuccuuccguucaguuuu

SEQ ID NO: 690824 - RNA, 20 nt, Artificial Sequence
  Synthetic
gucuccuuccguucaguuuu

SEQ ID NO: 690825 - RNA, 21 nt, Artificial Sequence
  Synthetic
ugucuccuuccguucaguuuu

SEQ ID NO: 690826 - RNA, 22 nt, Artificial Sequence
  Synthetic
uugucuccuuccguucaguuuu

SEQ ID NO: 690827 - RNA, 23 nt, Artificial Sequence
  Synthetic
guugucuccuuccguucaguuuu

SEQ ID NO: 690828 - RNA, 24 nt, Artificial Sequence
  Synthetic
cguugucuccuuccguucaguuuu

SEQ ID NO: 690829 - RNA, 18 nt, Artificial Sequence
  Synthetic
aauucuguuuucaguuuu

SEQ ID NO: 690830 - RNA, 19 nt, Artificial Sequence
  Synthetic
uaauucuguuuucaguuuu

SEQ ID NO: 690831 - RNA, 20 nt, Artificial Sequence
  Synthetic
guaauucuguuuucaguuuu

SEQ ID NO: 690832 - RNA, 21 nt, Artificial Sequence
  Synthetic
gguaauucuguuuucaguuuu

SEQ ID NO: 690833 - RNA, 22 nt, Artificial Sequence
  Synthetic
ugguaauucuguuuucaguuuu

SEQ ID NO: 690834 - RNA, 23 nt, Artificial Sequence
  Synthetic
augguaauucuguuuucaguuuu

SEQ ID NO: 690835 - RNA, 24 nt, Artificial Sequence
  Synthetic
uaugguaauucuguuuucaguuuu

SEQ ID NO: 690836 - RNA, 18 nt, Artificial Sequence
  Synthetic
gucgauagccugaguuuu

SEQ ID NO: 690837 - RNA, 19 nt, Artificial Sequence
  Synthetic
ggucgauagccugaguuuu

SEQ ID NO: 690838 - RNA, 20 nt, Artificial Sequence
  Synthetic
aggucgauagccugaguuuu

SEQ ID NO: 690839 - RNA, 21 nt, Artificial Sequence
  Synthetic
uaggucgauagccugaguuuu

SEQ ID NO: 690840 - RNA, 22 nt, Artificial Sequence
  Synthetic
guaggucgauagccugaguuuu

SEQ ID NO: 690841 - RNA, 23 nt, Artificial Sequence
  Synthetic
gguaggucgauagccugaguuuu

SEQ ID NO: 690842 - RNA, 24 nt, Artificial Sequence
  Synthetic
ugguaggucgauagccugaguuuu

SEQ ID NO: 690843 - RNA, 18 nt, Artificial Sequence
  Synthetic
gaaugauugcugaguuuu

SEQ ID NO: 690844 - RNA, 19 nt, Artificial Sequence
  Synthetic
cgaaugauugcugaguuuu

SEQ ID NO: 690845 - RNA, 20 nt, Artificial Sequence
  Synthetic
acgaaugauugcugaguuuu

SEQ ID NO: 690846 - RNA, 21 nt, Artificial Sequence
  Synthetic
aacgaaugauugcugaguuuu

SEQ ID NO: 690847 - RNA, 22 nt, Artificial Sequence
  Synthetic
aaacgaaugauugcugaguuuu

SEQ ID NO: 690848 - RNA, 23 nt, Artificial Sequence
  Synthetic
uaaacgaaugauugcugaguuuu

SEQ ID NO: 690849 - RNA, 24 nt, Artificial Sequence
  Synthetic
uuaaacgaaugauugcugaguuuu

SEQ ID NO: 690850 - RNA, 18 nt, Artificial Sequence
  Synthetic
cuauacuuuaauaguuuu

SEQ ID NO: 690851 - RNA, 19 nt, Artificial Sequence
  Synthetic
ccuauacuuuaauaguuuu

SEQ ID NO: 690852 - RNA, 20 nt, Artificial Sequence
  Synthetic
accuauacuuuaauaguuuu

SEQ ID NO: 690853 - RNA, 21 nt, Artificial Sequence
  Synthetic
caccuauacuuuaauaguuuu

SEQ ID NO: 690854 - RNA, 22 nt, Artificial Sequence
  Synthetic
ucaccuauacuuuaauaguuuu

SEQ ID NO: 690855 - RNA, 23 nt, Artificial Sequence
  Synthetic
gucaccuauacuuuaauaguuuu

SEQ ID NO: 690856 - RNA, 24 nt, Artificial Sequence
  Synthetic
ggucaccuauacuuuaauaguuuu

SEQ ID NO: 690857 - RNA, 18 nt, Artificial Sequence
  Synthetic
gaugauaaagcuaguuuu

SEQ ID NO: 690858 - RNA, 19 nt, Artificial Sequence
  Synthetic
ugaugauaaagcuaguuuu

SEQ ID NO: 690859 - RNA, 20 nt, Artificial Sequence
  Synthetic
uugaugauaaagcuaguuuu

SEQ ID NO: 690860 - RNA, 21 nt, Artificial Sequence
  Synthetic
uuugaugauaaagcuaguuuu

SEQ ID NO: 690861 - RNA, 22 nt, Artificial Sequence
  Synthetic
uuuugaugauaaagcuaguuuu

SEQ ID NO: 690862 - RNA, 23 nt, Artificial Sequence
  Synthetic
guuuugaugauaaagcuaguuuu

SEQ ID NO: 690863 - RNA, 24 nt, Artificial Sequence
  Synthetic
aguuuugaugauaaagcuaguuuu

SEQ ID NO: 690864 - RNA, 18 nt, Artificial Sequence
  Synthetic
uccaaaaguauuaguuuu

SEQ ID NO: 690865 - RNA, 19 nt, Artificial Sequence
  Synthetic
uuccaaaaguauuaguuuu

SEQ ID NO: 690866 - RNA, 20 nt, Artificial Sequence
  Synthetic
uuuccaaaaguauuaguuuu

SEQ ID NO: 690867 - RNA, 21 nt, Artificial Sequence
  Synthetic
uuuuccaaaaguauuaguuuu

SEQ ID NO: 690868 - RNA, 22 nt, Artificial Sequence
  Synthetic
auuuuccaaaaguauuaguuuu

SEQ ID NO: 690869 - RNA, 23 nt, Artificial Sequence
  Synthetic
uauuuuccaaaaguauuaguuuu

SEQ ID NO: 690870 - RNA, 24 nt, Artificial Sequence
  Synthetic
cuauuuuccaaaaguauuaguuuu

SEQ ID NO: 690871 - RNA, 18 nt, Artificial Sequence
  Synthetic
agacuuagacuuaguuuu

SEQ ID NO: 690872 - RNA, 19 nt, Artificial Sequence
  Synthetic
aagacuuagacuuaguuuu

SEQ ID NO: 690873 - RNA, 20 nt, Artificial Sequence
  Synthetic
gaagacuuagacuuaguuuu

SEQ ID NO: 690874 - RNA, 21 nt, Artificial Sequence
  Synthetic
agaagacuuagacuuaguuuu

SEQ ID NO: 690875 - RNA, 22 nt, Artificial Sequence
  Synthetic
cagaagacuuagacuuaguuuu

SEQ ID NO: 690876 - RNA, 23 nt, Artificial Sequence
  Synthetic
ucagaagacuuagacuuaguuuu

SEQ ID NO: 690877 - RNA, 24 nt, Artificial Sequence
  Synthetic
uucagaagacuuagacuuaguuuu

SEQ ID NO: 690878 - RNA, 18 nt, Artificial Sequence
  Synthetic
ccuuuggauuuuaguuuu

SEQ ID NO: 690879 - RNA, 19 nt, Artificial Sequence
  Synthetic
gccuuuggauuuuaguuuu

SEQ ID NO: 690880 - RNA, 20 nt, Artificial Sequence
  Synthetic
ugccuuuggauuuuaguuuu

SEQ ID NO: 690881 - RNA, 21 nt, Artificial Sequence
  Synthetic
gugccuuuggauuuuaguuuu

SEQ ID NO: 690882 - RNA, 22 nt, Artificial Sequence
  Synthetic
ugugccuuuggauuuuaguuuu

SEQ ID NO: 690883 - RNA, 23 nt, Artificial Sequence
  Synthetic
augugccuuuggauuuuaguuuu

SEQ ID NO: 690884 - RNA, 24 nt, Artificial Sequence
  Synthetic
uaugugccuuuggauuuuaguuuu

SEQ ID NO: 690885 - RNA, 18 nt, Artificial Sequence
  Synthetic
uauuaguaguuacguuuu

SEQ ID NO: 690886 - RNA, 19 nt, Artificial Sequence
  Synthetic
cuauuaguaguuacguuuu

SEQ ID NO: 690887 - RNA, 20 nt, Artificial Sequence
  Synthetic
ccuauuaguaguuacguuuu

SEQ ID NO: 690888 - RNA, 21 nt, Artificial Sequence
  Synthetic
gccuauuaguaguuacguuuu

SEQ ID NO: 690889 - RNA, 22 nt, Artificial Sequence
  Synthetic
agccuauuaguaguuacguuuu

SEQ ID NO: 690890 - RNA, 23 nt, Artificial Sequence
  Synthetic
uagccuauuaguaguuacguuuu

SEQ ID NO: 690891 - RNA, 24 nt, Artificial Sequence
  Synthetic
guagccuauuaguaguuacguuuu

SEQ ID NO: 690892 - RNA, 18 nt, Artificial Sequence
  Synthetic
cuguaaucucagcguuuu

SEQ ID NO: 690893 - RNA, 19 nt, Artificial Sequence
  Synthetic
ccuguaaucucagcguuuu

SEQ ID NO: 690894 - RNA, 20 nt, Artificial Sequence
  Synthetic
accuguaaucucagcguuuu

SEQ ID NO: 690895 - RNA, 21 nt, Artificial Sequence
  Synthetic
caccuguaaucucagcguuuu

SEQ ID NO: 690896 - RNA, 22 nt, Artificial Sequence
  Synthetic
acaccuguaaucucagcguuuu

SEQ ID NO: 690897 - RNA, 23 nt, Artificial Sequence
  Synthetic
cacaccuguaaucucagcguuuu

SEQ ID NO: 690898 - RNA, 24 nt, Artificial Sequence
  Synthetic
ucacaccuguaaucucagcguuuu

SEQ ID NO: 690899 - RNA, 18 nt, Artificial Sequence
  Synthetic
ggggacaaaauucguuuu

SEQ ID NO: 690900 - RNA, 19 nt, Artificial Sequence
  Synthetic
uggggacaaaauucguuuu

SEQ ID NO: 690901 - RNA, 20 nt, Artificial Sequence
  Synthetic
auggggacaaaauucguuuu

SEQ ID NO: 690902 - RNA, 21 nt, Artificial Sequence
  Synthetic
cauggggacaaaauucguuuu

SEQ ID NO: 690903 - RNA, 22 nt, Artificial Sequence
  Synthetic
ucauggggacaaaauucguuuu

SEQ ID NO: 690904 - RNA, 23 nt, Artificial Sequence
  Synthetic
uucauggggacaaaauucguuuu

SEQ ID NO: 690905 - RNA, 24 nt, Artificial Sequence
  Synthetic
uuucauggggacaaaauucguuuu

SEQ ID NO: 690906 - RNA, 18 nt, Artificial Sequence
  Synthetic
cauugauuugaagguuuu

SEQ ID NO: 690907 - RNA, 19 nt, Artificial Sequence
  Synthetic
acauugauuugaagguuuu

SEQ ID NO: 690908 - RNA, 20 nt, Artificial Sequence
  Synthetic
cacauugauuugaagguuuu

SEQ ID NO: 690909 - RNA, 21 nt, Artificial Sequence
  Synthetic
ccacauugauuugaagguuuu

SEQ ID NO: 690910 - RNA, 22 nt, Artificial Sequence
  Synthetic
accacauugauuugaagguuuu

SEQ ID NO: 690911 - RNA, 23 nt, Artificial Sequence
  Synthetic
gaccacauugauuugaagguuuu

SEQ ID NO: 690912 - RNA, 24 nt, Artificial Sequence
  Synthetic
ugaccacauugauuugaagguuuu

SEQ ID NO: 690913 - RNA, 18 nt, Artificial Sequence
  Synthetic
acauaaaaauaagguuuu

SEQ ID NO: 690914 - RNA, 19 nt, Artificial Sequence
  Synthetic
uacauaaaaauaagguuuu

SEQ ID NO: 690915 - RNA, 20 nt, Artificial Sequence
  Synthetic
cuacauaaaaauaagguuuu

SEQ ID NO: 690916 - RNA, 21 nt, Artificial Sequence
  Synthetic
acuacauaaaaauaagguuuu

SEQ ID NO: 690917 - RNA, 22 nt, Artificial Sequence
  Synthetic
uacuacauaaaaauaagguuuu

SEQ ID NO: 690918 - RNA, 23 nt, Artificial Sequence
  Synthetic
auacuacauaaaaauaagguuuu

SEQ ID NO: 690919 - RNA, 24 nt, Artificial Sequence
  Synthetic
uauacuacauaaaaauaagguuuu

SEQ ID NO: 690920 - RNA, 18 nt, Artificial Sequence
  Synthetic
ucucaucucuaagguuuu

SEQ ID NO: 690921 - RNA, 19 nt, Artificial Sequence
  Synthetic
aucucaucucuaagguuuu

SEQ ID NO: 690922 - RNA, 20 nt, Artificial Sequence
  Synthetic
gaucucaucucuaagguuuu

SEQ ID NO: 690923 - RNA, 21 nt, Artificial Sequence
  Synthetic
ugaucucaucucuaagguuuu

SEQ ID NO: 690924 - RNA, 22 nt, Artificial Sequence
  Synthetic
gugaucucaucucuaagguuuu

SEQ ID NO: 690925 - RNA, 23 nt, Artificial Sequence
  Synthetic
ugugaucucaucucuaagguuuu

SEQ ID NO: 690926 - RNA, 24 nt, Artificial Sequence
  Synthetic
uugugaucucaucucuaagguuuu

SEQ ID NO: 690927 - RNA, 18 nt, Artificial Sequence
  Synthetic
ggguccaaaacagguuuu

SEQ ID NO: 690928 - RNA, 19 nt, Artificial Sequence
  Synthetic
gggguccaaaacagguuuu

SEQ ID NO: 690929 - RNA, 20 nt, Artificial Sequence
  Synthetic
agggguccaaaacagguuuu

SEQ ID NO: 690930 - RNA, 21 nt, Artificial Sequence
  Synthetic
uagggguccaaaacagguuuu

SEQ ID NO: 690931 - RNA, 22 nt, Artificial Sequence
  Synthetic
auagggguccaaaacagguuuu

SEQ ID NO: 690932 - RNA, 23 nt, Artificial Sequence
  Synthetic
uauagggguccaaaacagguuuu

SEQ ID NO: 690933 - RNA, 24 nt, Artificial Sequence
  Synthetic
guauagggguccaaaacagguuuu

SEQ ID NO: 690934 - RNA, 18 nt, Artificial Sequence
  Synthetic
ggaucuacuacagguuuu

SEQ ID NO: 690935 - RNA, 19 nt, Artificial Sequence
  Synthetic
gggaucuacuacagguuuu

SEQ ID NO: 690936 - RNA, 20 nt, Artificial Sequence
  Synthetic
ggggaucuacuacagguuuu

SEQ ID NO: 690937 - RNA, 21 nt, Artificial Sequence
  Synthetic
aggggaucuacuacagguuuu

SEQ ID NO: 690938 - RNA, 22 nt, Artificial Sequence
  Synthetic
gaggggaucuacuacagguuuu

SEQ ID NO: 690939 - RNA, 23 nt, Artificial Sequence
  Synthetic
agaggggaucuacuacagguuuu

SEQ ID NO: 690940 - RNA, 24 nt, Artificial Sequence
  Synthetic
uagaggggaucuacuacagguuuu

SEQ ID NO: 690941 - RNA, 18 nt, Artificial Sequence
  Synthetic
gaagaaguuacagguuuu

SEQ ID NO: 690942 - RNA, 19 nt, Artificial Sequence
  Synthetic
agaagaaguuacagguuuu

SEQ ID NO: 690943 - RNA, 20 nt, Artificial Sequence
  Synthetic
uagaagaaguuacagguuuu

SEQ ID NO: 690944 - RNA, 21 nt, Artificial Sequence
  Synthetic
uuagaagaaguuacagguuuu

SEQ ID NO: 690945 - RNA, 22 nt, Artificial Sequence
  Synthetic
auuagaagaaguuacagguuuu

SEQ ID NO: 690946 - RNA, 23 nt, Artificial Sequence
  Synthetic
uauuagaagaaguuacagguuuu

SEQ ID NO: 690947 - RNA, 24 nt, Artificial Sequence
  Synthetic
cuauuagaagaaguuacagguuuu

SEQ ID NO: 690948 - RNA, 18 nt, Artificial Sequence
  Synthetic
gaauacugcccagguuuu

SEQ ID NO: 690949 - RNA, 19 nt, Artificial Sequence
  Synthetic
ugaauacugcccagguuuu

SEQ ID NO: 690950 - RNA, 20 nt, Artificial Sequence
  Synthetic
cugaauacugcccagguuuu

SEQ ID NO: 690951 - RNA, 21 nt, Artificial Sequence
  Synthetic
acugaauacugcccagguuuu

SEQ ID NO: 690952 - RNA, 22 nt, Artificial Sequence
  Synthetic
cacugaauacugcccagguuuu

SEQ ID NO: 690953 - RNA, 23 nt, Artificial Sequence
  Synthetic
ucacugaauacugcccagguuuu

SEQ ID NO: 690954 - RNA, 24 nt, Artificial Sequence
  Synthetic
cucacugaauacugcccagguuuu

SEQ ID NO: 690955 - RNA, 18 nt, Artificial Sequence
  Synthetic
uuuuugauuucagguuuu

SEQ ID NO: 690956 - RNA, 19 nt, Artificial Sequence
  Synthetic
guuuuugauuucagguuuu

SEQ ID NO: 690957 - RNA, 20 nt, Artificial Sequence
  Synthetic
aguuuuugauuucagguuuu

SEQ ID NO: 690958 - RNA, 21 nt, Artificial Sequence
  Synthetic
aaguuuuugauuucagguuuu

SEQ ID NO: 690959 - RNA, 22 nt, Artificial Sequence
  Synthetic
aaaguuuuugauuucagguuuu

SEQ ID NO: 690960 - RNA, 23 nt, Artificial Sequence
  Synthetic
caaaguuuuugauuucagguuuu

SEQ ID NO: 690961 - RNA, 24 nt, Artificial Sequence
  Synthetic
gcaaaguuuuugauuucagguuuu

SEQ ID NO: 690962 - RNA, 18 nt, Artificial Sequence
  Synthetic
cgcaaauguugagguuuu

SEQ ID NO: 690963 - RNA, 19 nt, Artificial Sequence
  Synthetic
acgcaaauguugagguuuu

SEQ ID NO: 690964 - RNA, 20 nt, Artificial Sequence
  Synthetic
gacgcaaauguugagguuuu

SEQ ID NO: 690965 - RNA, 21 nt, Artificial Sequence
  Synthetic
agacgcaaauguugagguuuu

SEQ ID NO: 690966 - RNA, 22 nt, Artificial Sequence
  Synthetic
aagacgcaaauguugagguuuu

SEQ ID NO: 690967 - RNA, 23 nt, Artificial Sequence
  Synthetic
uaagacgcaaauguugagguuuu

SEQ ID NO: 690968 - RNA, 24 nt, Artificial Sequence
  Synthetic
uuaagacgcaaauguugagguuuu

SEQ ID NO: 690969 - RNA, 18 nt, Artificial Sequence
  Synthetic
acuuauuaacuagguuuu

SEQ ID NO: 690970 - RNA, 19 nt, Artificial Sequence
  Synthetic
uacuuauuaacuagguuuu

SEQ ID NO: 690971 - RNA, 20 nt, Artificial Sequence
  Synthetic
guacuuauuaacuagguuuu

SEQ ID NO: 690972 - RNA, 21 nt, Artificial Sequence
  Synthetic
aguacuuauuaacuagguuuu

SEQ ID NO: 690973 - RNA, 22 nt, Artificial Sequence
  Synthetic
aaguacuuauuaacuagguuuu

SEQ ID NO: 690974 - RNA, 23 nt, Artificial Sequence
  Synthetic
aaaguacuuauuaacuagguuuu

SEQ ID NO: 690975 - RNA, 24 nt, Artificial Sequence
  Synthetic
uaaaguacuuauuaacuagguuuu

SEQ ID NO: 690976 - RNA, 18 nt, Artificial Sequence
  Synthetic
gaucuucugcuagguuuu

SEQ ID NO: 690977 - RNA, 19 nt, Artificial Sequence
  Synthetic
ggaucuucugcuagguuuu

SEQ ID NO: 690978 - RNA, 20 nt, Artificial Sequence
  Synthetic
gggaucuucugcuagguuuu

SEQ ID NO: 690979 - RNA, 21 nt, Artificial Sequence
  Synthetic
agggaucuucugcuagguuuu

SEQ ID NO: 690980 - RNA, 22 nt, Artificial Sequence
  Synthetic
aagggaucuucugcuagguuuu

SEQ ID NO: 690981 - RNA, 23 nt, Artificial Sequence
  Synthetic
caagggaucuucugcuagguuuu

SEQ ID NO: 690982 - RNA, 24 nt, Artificial Sequence
  Synthetic
ucaagggaucuucugcuagguuuu

SEQ ID NO: 690983 - RNA, 18 nt, Artificial Sequence
  Synthetic
gagggccagguagguuuu

SEQ ID NO: 690984 - RNA, 19 nt, Artificial Sequence
  Synthetic
ggagggccagguagguuuu

SEQ ID NO: 690985 - RNA, 20 nt, Artificial Sequence
  Synthetic
aggagggccagguagguuuu

SEQ ID NO: 690986 - RNA, 21 nt, Artificial Sequence
  Synthetic
gaggagggccagguagguuuu

SEQ ID NO: 690987 - RNA, 22 nt, Artificial Sequence
  Synthetic
agaggagggccagguagguuuu

SEQ ID NO: 690988 - RNA, 23 nt, Artificial Sequence
  Synthetic
cagaggagggccagguagguuuu

SEQ ID NO: 690989 - RNA, 24 nt, Artificial Sequence
  Synthetic
gcagaggagggccagguagguuuu

SEQ ID NO: 690990 - RNA, 18 nt, Artificial Sequence
  Synthetic
agaucaaguguagguuuu

SEQ ID NO: 690991 - RNA, 19 nt, Artificial Sequence
  Synthetic
cagaucaaguguagguuuu

SEQ ID NO: 690992 - RNA, 20 nt, Artificial Sequence
  Synthetic
acagaucaaguguagguuuu

SEQ ID NO: 690993 - RNA, 21 nt, Artificial Sequence
  Synthetic
uacagaucaaguguagguuuu

SEQ ID NO: 690994 - RNA, 22 nt, Artificial Sequence
  Synthetic
uuacagaucaaguguagguuuu

SEQ ID NO: 690995 - RNA, 23 nt, Artificial Sequence
  Synthetic
uuuacagaucaaguguagguuuu

SEQ ID NO: 690996 - RNA, 24 nt, Artificial Sequence
  Synthetic
auuuacagaucaaguguagguuuu

SEQ ID NO: 690997 - RNA, 18 nt, Artificial Sequence
  Synthetic
uacuauguguuagguuuu

SEQ ID NO: 690998 - RNA, 19 nt, Artificial Sequence
  Synthetic
uuacuauguguuagguuuu

SEQ ID NO: 690999 - RNA, 20 nt, Artificial Sequence
  Synthetic
auuacuauguguuagguuuu

SEQ ID NO: 691000 - RNA, 21 nt, Artificial Sequence
  Synthetic
gauuacuauguguuagguuuu

SEQ ID NO: 691001 - RNA, 22 nt, Artificial Sequence
  Synthetic
ugauuacuauguguuagguuuu

SEQ ID NO: 691002 - RNA, 23 nt, Artificial Sequence
  Synthetic
uugauuacuauguguuagguuuu

SEQ ID NO: 691003 - RNA, 24 nt, Artificial Sequence
  Synthetic
auugauuacuauguguuagguuuu

SEQ ID NO: 691004 - RNA, 18 nt, Artificial Sequence
  Synthetic
aaguggauaggcgguuuu

SEQ ID NO: 691005 - RNA, 19 nt, Artificial Sequence
  Synthetic
uaaguggauaggcgguuuu

SEQ ID NO: 691006 - RNA, 20 nt, Artificial Sequence
  Synthetic
guaaguggauaggcgguuuu

SEQ ID NO: 691007 - RNA, 21 nt, Artificial Sequence
  Synthetic
gguaaguggauaggcgguuuu

SEQ ID NO: 691008 - RNA, 22 nt, Artificial Sequence
  Synthetic
ggguaaguggauaggcgguuuu

SEQ ID NO: 691009 - RNA, 23 nt, Artificial Sequence
  Synthetic
aggguaaguggauaggcgguuuu

SEQ ID NO: 691010 - RNA, 24 nt, Artificial Sequence
  Synthetic
uaggguaaguggauaggcgguuuu

SEQ ID NO: 691011 - RNA, 18 nt, Artificial Sequence
  Synthetic
uauuucauuuuggguuuu

SEQ ID NO: 691012 - RNA, 19 nt, Artificial Sequence
  Synthetic
uuauuucauuuuggguuuu

SEQ ID NO: 691013 - RNA, 20 nt, Artificial Sequence
  Synthetic
cuuauuucauuuuggguuuu

SEQ ID NO: 691014 - RNA, 21 nt, Artificial Sequence
  Synthetic
ucuuauuucauuuuggguuuu

SEQ ID NO: 691015 - RNA, 22 nt, Artificial Sequence
  Synthetic
uucuuauuucauuuuggguuuu

SEQ ID NO: 691016 - RNA, 23 nt, Artificial Sequence
  Synthetic
cuucuuauuucauuuuggguuuu

SEQ ID NO: 691017 - RNA, 24 nt, Artificial Sequence
  Synthetic
acuucuuauuucauuuuggguuuu

SEQ ID NO: 691018 - RNA, 18 nt, Artificial Sequence
  Synthetic
aguaaggugaaugguuuu

SEQ ID NO: 691019 - RNA, 19 nt, Artificial Sequence
  Synthetic
uaguaaggugaaugguuuu

SEQ ID NO: 691020 - RNA, 20 nt, Artificial Sequence
  Synthetic
cuaguaaggugaaugguuuu

SEQ ID NO: 691021 - RNA, 21 nt, Artificial Sequence
  Synthetic
ccuaguaaggugaaugguuuu

SEQ ID NO: 691022 - RNA, 22 nt, Artificial Sequence
  Synthetic
accuaguaaggugaaugguuuu

SEQ ID NO: 691023 - RNA, 23 nt, Artificial Sequence
  Synthetic
aaccuaguaaggugaaugguuuu

SEQ ID NO: 691024 - RNA, 24 nt, Artificial Sequence
  Synthetic
aaaccuaguaaggugaaugguuuu

SEQ ID NO: 691025 - RNA, 18 nt, Artificial Sequence
  Synthetic
uuuugacauccugguuuu

SEQ ID NO: 691026 - RNA, 19 nt, Artificial Sequence
  Synthetic
auuuugacauccugguuuu

SEQ ID NO: 691027 - RNA, 20 nt, Artificial Sequence
  Synthetic
gauuuugacauccugguuuu

SEQ ID NO: 691028 - RNA, 21 nt, Artificial Sequence
  Synthetic
agauuuugacauccugguuuu

SEQ ID NO: 691029 - RNA, 22 nt, Artificial Sequence
  Synthetic
cagauuuugacauccugguuuu

SEQ ID NO: 691030 - RNA, 23 nt, Artificial Sequence
  Synthetic
ccagauuuugacauccugguuuu

SEQ ID NO: 691031 - RNA, 24 nt, Artificial Sequence
  Synthetic
uccagauuuugacauccugguuuu

SEQ ID NO: 691032 - RNA, 18 nt, Artificial Sequence
  Synthetic
cuucucuaagcugguuuu

SEQ ID NO: 691033 - RNA, 19 nt, Artificial Sequence
  Synthetic
acuucucuaagcugguuuu

SEQ ID NO: 691034 - RNA, 20 nt, Artificial Sequence
  Synthetic
aacuucucuaagcugguuuu

SEQ ID NO: 691035 - RNA, 21 nt, Artificial Sequence
  Synthetic
caacuucucuaagcugguuuu

SEQ ID NO: 691036 - RNA, 22 nt, Artificial Sequence
  Synthetic
gcaacuucucuaagcugguuuu

SEQ ID NO: 691037 - RNA, 23 nt, Artificial Sequence
  Synthetic
ugcaacuucucuaagcugguuuu

SEQ ID NO: 691038 - RNA, 24 nt, Artificial Sequence
  Synthetic
augcaacuucucuaagcugguuuu

SEQ ID NO: 691039 - RNA, 18 nt, Artificial Sequence
  Synthetic
aauccaggagcugguuuu

SEQ ID NO: 691040 - RNA, 19 nt, Artificial Sequence
  Synthetic
gaauccaggagcugguuuu

SEQ ID NO: 691041 - RNA, 20 nt, Artificial Sequence
  Synthetic
ugaauccaggagcugguuuu

SEQ ID NO: 691042 - RNA, 21 nt, Artificial Sequence
  Synthetic
augaauccaggagcugguuuu

SEQ ID NO: 691043 - RNA, 22 nt, Artificial Sequence
  Synthetic
aaugaauccaggagcugguuuu

SEQ ID NO: 691044 - RNA, 23 nt, Artificial Sequence
  Synthetic
caaugaauccaggagcugguuuu

SEQ ID NO: 691045 - RNA, 24 nt, Artificial Sequence
  Synthetic
ucaaugaauccaggagcugguuuu

SEQ ID NO: 691046 - RNA, 18 nt, Artificial Sequence
  Synthetic
uuuuggugucgugguuuu

SEQ ID NO: 691047 - RNA, 19 nt, Artificial Sequence
  Synthetic
auuuuggugucgugguuuu

SEQ ID NO: 691048 - RNA, 20 nt, Artificial Sequence
  Synthetic
gauuuuggugucgugguuuu

SEQ ID NO: 691049 - RNA, 21 nt, Artificial Sequence
  Synthetic
agauuuuggugucgugguuuu

SEQ ID NO: 691050 - RNA, 22 nt, Artificial Sequence
  Synthetic
uagauuuuggugucgugguuuu

SEQ ID NO: 691051 - RNA, 23 nt, Artificial Sequence
  Synthetic
guagauuuuggugucgugguuuu

SEQ ID NO: 691052 - RNA, 24 nt, Artificial Sequence
  Synthetic
aguagauuuuggugucgugguuuu

SEQ ID NO: 691053 - RNA, 18 nt, Artificial Sequence
  Synthetic
uguaccccuggugguuuu

SEQ ID NO: 691054 - RNA, 19 nt, Artificial Sequence
  Synthetic
uuguaccccuggugguuuu

SEQ ID NO: 691055 - RNA, 20 nt, Artificial Sequence
  Synthetic
uuuguaccccuggugguuuu

SEQ ID NO: 691056 - RNA, 21 nt, Artificial Sequence
  Synthetic
cuuuguaccccuggugguuuu

SEQ ID NO: 691057 - RNA, 22 nt, Artificial Sequence
  Synthetic
ccuuuguaccccuggugguuuu

SEQ ID NO: 691058 - RNA, 23 nt, Artificial Sequence
  Synthetic
cccuuuguaccccuggugguuuu

SEQ ID NO: 691059 - RNA, 24 nt, Artificial Sequence
  Synthetic
ucccuuuguaccccuggugguuuu

SEQ ID NO: 691060 - RNA, 18 nt, Artificial Sequence
  Synthetic
aagauaaguugugguuuu

SEQ ID NO: 691061 - RNA, 19 nt, Artificial Sequence
  Synthetic
aaagauaaguugugguuuu

SEQ ID NO: 691062 - RNA, 20 nt, Artificial Sequence
  Synthetic
caaagauaaguugugguuuu

SEQ ID NO: 691063 - RNA, 21 nt, Artificial Sequence
  Synthetic
acaaagauaaguugugguuuu

SEQ ID NO: 691064 - RNA, 22 nt, Artificial Sequence
  Synthetic
cacaaagauaaguugugguuuu

SEQ ID NO: 691065 - RNA, 23 nt, Artificial Sequence
  Synthetic
gcacaaagauaaguugugguuuu

SEQ ID NO: 691066 - RNA, 24 nt, Artificial Sequence
  Synthetic
agcacaaagauaaguugugguuuu

SEQ ID NO: 691067 - RNA, 18 nt, Artificial Sequence
  Synthetic
aaacuaaaaguugguuuu

SEQ ID NO: 691068 - RNA, 19 nt, Artificial Sequence
  Synthetic
aaaacuaaaaguugguuuu

SEQ ID NO: 691069 - RNA, 20 nt, Artificial Sequence
  Synthetic
uaaaacuaaaaguugguuuu

SEQ ID NO: 691070 - RNA, 21 nt, Artificial Sequence
  Synthetic
auaaaacuaaaaguugguuuu

SEQ ID NO: 691071 - RNA, 22 nt, Artificial Sequence
  Synthetic
aauaaaacuaaaaguugguuuu

SEQ ID NO: 691072 - RNA, 23 nt, Artificial Sequence
  Synthetic
caauaaaacuaaaaguugguuuu

SEQ ID NO: 691073 - RNA, 24 nt, Artificial Sequence
  Synthetic
ucaauaaaacuaaaaguugguuuu

SEQ ID NO: 691074 - RNA, 18 nt, Artificial Sequence
  Synthetic
uugaguaagaaauguuuu

SEQ ID NO: 691075 - RNA, 19 nt, Artificial Sequence
  Synthetic
auugaguaagaaauguuuu

SEQ ID NO: 691076 - RNA, 20 nt, Artificial Sequence
  Synthetic
cauugaguaagaaauguuuu

SEQ ID NO: 691077 - RNA, 21 nt, Artificial Sequence
  Synthetic
acauugaguaagaaauguuuu

SEQ ID NO: 691078 - RNA, 22 nt, Artificial Sequence
  Synthetic
aacauugaguaagaaauguuuu

SEQ ID NO: 691079 - RNA, 23 nt, Artificial Sequence
  Synthetic
aaacauugaguaagaaauguuuu

SEQ ID NO: 691080 - RNA, 24 nt, Artificial Sequence
  Synthetic
uaaacauugaguaagaaauguuuu

SEQ ID NO: 691081 - RNA, 18 nt, Artificial Sequence
  Synthetic
uuccuaaaauaauguuuu

SEQ ID NO: 691082 - RNA, 19 nt, Artificial Sequence
  Synthetic
uuuccuaaaauaauguuuu

SEQ ID NO: 691083 - RNA, 20 nt, Artificial Sequence
  Synthetic
uuuuccuaaaauaauguuuu

SEQ ID NO: 691084 - RNA, 21 nt, Artificial Sequence
  Synthetic
uuuuuccuaaaauaauguuuu

SEQ ID NO: 691085 - RNA, 22 nt, Artificial Sequence
  Synthetic
auuuuuccuaaaauaauguuuu

SEQ ID NO: 691086 - RNA, 23 nt, Artificial Sequence
  Synthetic
aauuuuuccuaaaauaauguuuu

SEQ ID NO: 691087 - RNA, 24 nt, Artificial Sequence
  Synthetic
uaauuuuuccuaaaauaauguuuu

SEQ ID NO: 691088 - RNA, 18 nt, Artificial Sequence
  Synthetic
ggaaggaaugcauguuuu

SEQ ID NO: 691089 - RNA, 19 nt, Artificial Sequence
  Synthetic
aggaaggaaugcauguuuu

SEQ ID NO: 691090 - RNA, 20 nt, Artificial Sequence
  Synthetic
aaggaaggaaugcauguuuu

SEQ ID NO: 691091 - RNA, 21 nt, Artificial Sequence
  Synthetic
gaaggaaggaaugcauguuuu

SEQ ID NO: 691092 - RNA, 22 nt, Artificial Sequence
  Synthetic
ugaaggaaggaaugcauguuuu

SEQ ID NO: 691093 - RNA, 23 nt, Artificial Sequence
  Synthetic
augaaggaaggaaugcauguuuu

SEQ ID NO: 691094 - RNA, 24 nt, Artificial Sequence
  Synthetic
aaugaaggaaggaaugcauguuuu

SEQ ID NO: 691095 - RNA, 18 nt, Artificial Sequence
  Synthetic
aaaaguaucucauguuuu

SEQ ID NO: 691096 - RNA, 19 nt, Artificial Sequence
  Synthetic
aaaaaguaucucauguuuu

SEQ ID NO: 691097 - RNA, 20 nt, Artificial Sequence
  Synthetic
caaaaaguaucucauguuuu

SEQ ID NO: 691098 - RNA, 21 nt, Artificial Sequence
  Synthetic
acaaaaaguaucucauguuuu

SEQ ID NO: 691099 - RNA, 22 nt, Artificial Sequence
  Synthetic
cacaaaaaguaucucauguuuu

SEQ ID NO: 691100 - RNA, 23 nt, Artificial Sequence
  Synthetic
ucacaaaaaguaucucauguuuu

SEQ ID NO: 691101 - RNA, 24 nt, Artificial Sequence
  Synthetic
gucacaaaaaguaucucauguuuu

SEQ ID NO: 691102 - RNA, 18 nt, Artificial Sequence
  Synthetic
gauuucaaaauauguuuu

SEQ ID NO: 691103 - RNA, 19 nt, Artificial Sequence
  Synthetic
ugauuucaaaauauguuuu

SEQ ID NO: 691104 - RNA, 20 nt, Artificial Sequence
  Synthetic
gugauuucaaaauauguuuu

SEQ ID NO: 691105 - RNA, 21 nt, Artificial Sequence
  Synthetic
ggugauuucaaaauauguuuu

SEQ ID NO: 691106 - RNA, 22 nt, Artificial Sequence
  Synthetic
aggugauuucaaaauauguuuu

SEQ ID NO: 691107 - RNA, 23 nt, Artificial Sequence
  Synthetic
aaggugauuucaaaauauguuuu

SEQ ID NO: 691108 - RNA, 24 nt, Artificial Sequence
  Synthetic
aaaggugauuucaaaauauguuuu

SEQ ID NO: 691109 - RNA, 18 nt, Artificial Sequence
  Synthetic
aauuacaauauauguuuu

SEQ ID NO: 691110 - RNA, 19 nt, Artificial Sequence
  Synthetic
caauuacaauauauguuuu

SEQ ID NO: 691111 - RNA, 20 nt, Artificial Sequence
  Synthetic
ucaauuacaauauauguuuu

SEQ ID NO: 691112 - RNA, 21 nt, Artificial Sequence
  Synthetic
uucaauuacaauauauguuuu

SEQ ID NO: 691113 - RNA, 22 nt, Artificial Sequence
  Synthetic
uuucaauuacaauauauguuuu

SEQ ID NO: 691114 - RNA, 23 nt, Artificial Sequence
  Synthetic
cuuucaauuacaauauauguuuu

SEQ ID NO: 691115 - RNA, 24 nt, Artificial Sequence
  Synthetic
ucuuucaauuacaauauauguuuu

SEQ ID NO: 691116 - RNA, 18 nt, Artificial Sequence
  Synthetic
caaccuaagcuauguuuu

SEQ ID NO: 691117 - RNA, 19 nt, Artificial Sequence
  Synthetic
acaaccuaagcuauguuuu

SEQ ID NO: 691118 - RNA, 20 nt, Artificial Sequence
  Synthetic
uacaaccuaagcuauguuuu

SEQ ID NO: 691119 - RNA, 21 nt, Artificial Sequence
  Synthetic
uuacaaccuaagcuauguuuu

SEQ ID NO: 691120 - RNA, 22 nt, Artificial Sequence
  Synthetic
guuacaaccuaagcuauguuuu

SEQ ID NO: 691121 - RNA, 23 nt, Artificial Sequence
  Synthetic
aguuacaaccuaagcuauguuuu

SEQ ID NO: 691122 - RNA, 24 nt, Artificial Sequence
  Synthetic
uaguuacaaccuaagcuauguuuu

SEQ ID NO: 691123 - RNA, 18 nt, Artificial Sequence
  Synthetic
agaaaaaaauuauguuuu

SEQ ID NO: 691124 - RNA, 19 nt, Artificial Sequence
  Synthetic
gagaaaaaaauuauguuuu

SEQ ID NO: 691125 - RNA, 20 nt, Artificial Sequence
  Synthetic
agagaaaaaaauuauguuuu

SEQ ID NO: 691126 - RNA, 21 nt, Artificial Sequence
  Synthetic
gagagaaaaaaauuauguuuu

SEQ ID NO: 691127 - RNA, 22 nt, Artificial Sequence
  Synthetic
agagagaaaaaaauuauguuuu

SEQ ID NO: 691128 - RNA, 23 nt, Artificial Sequence
  Synthetic
gagagagaaaaaaauuauguuuu

SEQ ID NO: 691129 - RNA, 24 nt, Artificial Sequence
  Synthetic
ggagagagaaaaaaauuauguuuu

SEQ ID NO: 691130 - RNA, 18 nt, Artificial Sequence
  Synthetic
aauguuugcgacuguuuu

SEQ ID NO: 691131 - RNA, 19 nt, Artificial Sequence
  Synthetic
gaauguuugcgacuguuuu

SEQ ID NO: 691132 - RNA, 20 nt, Artificial Sequence
  Synthetic
agaauguuugcgacuguuuu

SEQ ID NO: 691133 - RNA, 21 nt, Artificial Sequence
  Synthetic
gagaauguuugcgacuguuuu

SEQ ID NO: 691134 - RNA, 22 nt, Artificial Sequence
  Synthetic
agagaauguuugcgacuguuuu

SEQ ID NO: 691135 - RNA, 23 nt, Artificial Sequence
  Synthetic
gagagaauguuugcgacuguuuu

SEQ ID NO: 691136 - RNA, 24 nt, Artificial Sequence
  Synthetic
agagagaauguuugcgacuguuuu

SEQ ID NO: 691137 - RNA, 18 nt, Artificial Sequence
  Synthetic
uauagccaauacuguuuu

SEQ ID NO: 691138 - RNA, 19 nt, Artificial Sequence
  Synthetic
auauagccaauacuguuuu

SEQ ID NO: 691139 - RNA, 20 nt, Artificial Sequence
  Synthetic
aauauagccaauacuguuuu

SEQ ID NO: 691140 - RNA, 21 nt, Artificial Sequence
  Synthetic
aaauauagccaauacuguuuu

SEQ ID NO: 691141 - RNA, 22 nt, Artificial Sequence
  Synthetic
aaaauauagccaauacuguuuu

SEQ ID NO: 691142 - RNA, 23 nt, Artificial Sequence
  Synthetic
gaaaauauagccaauacuguuuu

SEQ ID NO: 691143 - RNA, 24 nt, Artificial Sequence
  Synthetic
agaaaauauagccaauacuguuuu

SEQ ID NO: 691144 - RNA, 18 nt, Artificial Sequence
  Synthetic
uaggggagauccuguuuu

SEQ ID NO: 691145 - RNA, 19 nt, Artificial Sequence
  Synthetic
guaggggagauccuguuuu

SEQ ID NO: 691146 - RNA, 20 nt, Artificial Sequence
  Synthetic
aguaggggagauccuguuuu

SEQ ID NO: 691147 - RNA, 21 nt, Artificial Sequence
  Synthetic
gaguaggggagauccuguuuu

SEQ ID NO: 691148 - RNA, 22 nt, Artificial Sequence
  Synthetic
ggaguaggggagauccuguuuu

SEQ ID NO: 691149 - RNA, 23 nt, Artificial Sequence
  Synthetic
aggaguaggggagauccuguuuu

SEQ ID NO: 691150 - RNA, 24 nt, Artificial Sequence
  Synthetic
uaggaguaggggagauccuguuuu

SEQ ID NO: 691151 - RNA, 18 nt, Artificial Sequence
  Synthetic
ugugaggacagcuguuuu

SEQ ID NO: 691152 - RNA, 19 nt, Artificial Sequence
  Synthetic
cugugaggacagcuguuuu

SEQ ID NO: 691153 - RNA, 20 nt, Artificial Sequence
  Synthetic
acugugaggacagcuguuuu

SEQ ID NO: 691154 - RNA, 21 nt, Artificial Sequence
  Synthetic
cacugugaggacagcuguuuu

SEQ ID NO: 691155 - RNA, 22 nt, Artificial Sequence
  Synthetic
ccacugugaggacagcuguuuu

SEQ ID NO: 691156 - RNA, 23 nt, Artificial Sequence
  Synthetic
uccacugugaggacagcuguuuu

SEQ ID NO: 691157 - RNA, 24 nt, Artificial Sequence
  Synthetic
cuccacugugaggacagcuguuuu

SEQ ID NO: 691158 - RNA, 18 nt, Artificial Sequence
  Synthetic
caaguagcucgcuguuuu

SEQ ID NO: 691159 - RNA, 19 nt, Artificial Sequence
  Synthetic
gcaaguagcucgcuguuuu

SEQ ID NO: 691160 - RNA, 20 nt, Artificial Sequence
  Synthetic
agcaaguagcucgcuguuuu

SEQ ID NO: 691161 - RNA, 21 nt, Artificial Sequence
  Synthetic
aagcaaguagcucgcuguuuu

SEQ ID NO: 691162 - RNA, 22 nt, Artificial Sequence
  Synthetic
aaagcaaguagcucgcuguuuu

SEQ ID NO: 691163 - RNA, 23 nt, Artificial Sequence
  Synthetic
caaagcaaguagcucgcuguuuu

SEQ ID NO: 691164 - RNA, 24 nt, Artificial Sequence
  Synthetic
gcaaagcaaguagcucgcuguuuu

SEQ ID NO: 691165 - RNA, 18 nt, Artificial Sequence
  Synthetic
augagacguaucuguuuu

SEQ ID NO: 691166 - RNA, 19 nt, Artificial Sequence
  Synthetic
uaugagacguaucuguuuu

SEQ ID NO: 691167 - RNA, 20 nt, Artificial Sequence
  Synthetic
cuaugagacguaucuguuuu

SEQ ID NO: 691168 - RNA, 21 nt, Artificial Sequence
  Synthetic
ccuaugagacguaucuguuuu

SEQ ID NO: 691169 - RNA, 22 nt, Artificial Sequence
  Synthetic
accuaugagacguaucuguuuu

SEQ ID NO: 691170 - RNA, 23 nt, Artificial Sequence
  Synthetic
caccuaugagacguaucuguuuu

SEQ ID NO: 691171 - RNA, 24 nt, Artificial Sequence
  Synthetic
ucaccuaugagacguaucuguuuu

SEQ ID NO: 691172 - RNA, 18 nt, Artificial Sequence
  Synthetic
acccuccuggucuguuuu

SEQ ID NO: 691173 - RNA, 19 nt, Artificial Sequence
  Synthetic
gacccuccuggucuguuuu

SEQ ID NO: 691174 - RNA, 20 nt, Artificial Sequence
  Synthetic
cgacccuccuggucuguuuu

SEQ ID NO: 691175 - RNA, 21 nt, Artificial Sequence
  Synthetic
acgacccuccuggucuguuuu

SEQ ID NO: 691176 - RNA, 22 nt, Artificial Sequence
  Synthetic
cacgacccuccuggucuguuuu

SEQ ID NO: 691177 - RNA, 23 nt, Artificial Sequence
  Synthetic
ccacgacccuccuggucuguuuu

SEQ ID NO: 691178 - RNA, 24 nt, Artificial Sequence
  Synthetic
uccacgacccuccuggucuguuuu

SEQ ID NO: 691179 - RNA, 18 nt, Artificial Sequence
  Synthetic
aaguggccauucuguuuu

SEQ ID NO: 691180 - RNA, 19 nt, Artificial Sequence
  Synthetic
uaaguggccauucuguuuu

SEQ ID NO: 691181 - RNA, 20 nt, Artificial Sequence
  Synthetic
cuaaguggccauucuguuuu

SEQ ID NO: 691182 - RNA, 21 nt, Artificial Sequence
  Synthetic
ucuaaguggccauucuguuuu

SEQ ID NO: 691183 - RNA, 22 nt, Artificial Sequence
  Synthetic
uucuaaguggccauucuguuuu

SEQ ID NO: 691184 - RNA, 23 nt, Artificial Sequence
  Synthetic
auucuaaguggccauucuguuuu

SEQ ID NO: 691185 - RNA, 24 nt, Artificial Sequence
  Synthetic
uauucuaaguggccauucuguuuu

SEQ ID NO: 691186 - RNA, 18 nt, Artificial Sequence
  Synthetic
augaaucauggguguuuu

SEQ ID NO: 691187 - RNA, 19 nt, Artificial Sequence
  Synthetic
gaugaaucauggguguuuu

SEQ ID NO: 691188 - RNA, 20 nt, Artificial Sequence
  Synthetic
agaugaaucauggguguuuu

SEQ ID NO: 691189 - RNA, 21 nt, Artificial Sequence
  Synthetic
aagaugaaucauggguguuuu

SEQ ID NO: 691190 - RNA, 22 nt, Artificial Sequence
  Synthetic
aaagaugaaucauggguguuuu

SEQ ID NO: 691191 - RNA, 23 nt, Artificial Sequence
  Synthetic
aaaagaugaaucauggguguuuu

SEQ ID NO: 691192 - RNA, 24 nt, Artificial Sequence
  Synthetic
uaaaagaugaaucauggguguuuu

SEQ ID NO: 691193 - RNA, 18 nt, Artificial Sequence
  Synthetic
gcuuguaugugguguuuu

SEQ ID NO: 691194 - RNA, 19 nt, Artificial Sequence
  Synthetic
agcuuguaugugguguuuu

SEQ ID NO: 691195 - RNA, 20 nt, Artificial Sequence
  Synthetic
uagcuuguaugugguguuuu

SEQ ID NO: 691196 - RNA, 21 nt, Artificial Sequence
  Synthetic
guagcuuguaugugguguuuu

SEQ ID NO: 691197 - RNA, 22 nt, Artificial Sequence
  Synthetic
aguagcuuguaugugguguuuu

SEQ ID NO: 691198 - RNA, 23 nt, Artificial Sequence
  Synthetic
uaguagcuuguaugugguguuuu

SEQ ID NO: 691199 - RNA, 24 nt, Artificial Sequence
  Synthetic
guaguagcuuguaugugguguuuu

SEQ ID NO: 691200 - RNA, 18 nt, Artificial Sequence
  Synthetic
uccaagcgcauguguuuu

SEQ ID NO: 691201 - RNA, 19 nt, Artificial Sequence
  Synthetic
uuccaagcgcauguguuuu

SEQ ID NO: 691202 - RNA, 20 nt, Artificial Sequence
  Synthetic
uuuccaagcgcauguguuuu

SEQ ID NO: 691203 - RNA, 21 nt, Artificial Sequence
  Synthetic
uuuuccaagcgcauguguuuu

SEQ ID NO: 691204 - RNA, 22 nt, Artificial Sequence
  Synthetic
cuuuuccaagcgcauguguuuu

SEQ ID NO: 691205 - RNA, 23 nt, Artificial Sequence
  Synthetic
gcuuuuccaagcgcauguguuuu

SEQ ID NO: 691206 - RNA, 24 nt, Artificial Sequence
  Synthetic
ugcuuuuccaagcgcauguguuuu

SEQ ID NO: 691207 - RNA, 18 nt, Artificial Sequence
  Synthetic
ucuagauuucuguguuuu

SEQ ID NO: 691208 - RNA, 19 nt, Artificial Sequence
  Synthetic
cucuagauuucuguguuuu

SEQ ID NO: 691209 - RNA, 20 nt, Artificial Sequence
  Synthetic
acucuagauuucuguguuuu

SEQ ID NO: 691210 - RNA, 21 nt, Artificial Sequence
  Synthetic
aacucuagauuucuguguuuu

SEQ ID NO: 691211 - RNA, 22 nt, Artificial Sequence
  Synthetic
caacucuagauuucuguguuuu

SEQ ID NO: 691212 - RNA, 23 nt, Artificial Sequence
  Synthetic
ucaacucuagauuucuguguuuu

SEQ ID NO: 691213 - RNA, 24 nt, Artificial Sequence
  Synthetic
gucaacucuagauuucuguguuuu

SEQ ID NO: 691214 - RNA, 18 nt, Artificial Sequence
  Synthetic
gauaaucacgcuuguuuu

SEQ ID NO: 691215 - RNA, 19 nt, Artificial Sequence
  Synthetic
ggauaaucacgcuuguuuu

SEQ ID NO: 691216 - RNA, 20 nt, Artificial Sequence
  Synthetic
uggauaaucacgcuuguuuu

SEQ ID NO: 691217 - RNA, 21 nt, Artificial Sequence
  Synthetic
auggauaaucacgcuuguuuu

SEQ ID NO: 691218 - RNA, 22 nt, Artificial Sequence
  Synthetic
aauggauaaucacgcuuguuuu

SEQ ID NO: 691219 - RNA, 23 nt, Artificial Sequence
  Synthetic
uaauggauaaucacgcuuguuuu

SEQ ID NO: 691220 - RNA, 24 nt, Artificial Sequence
  Synthetic
auaauggauaaucacgcuuguuuu

SEQ ID NO: 691221 - RNA, 18 nt, Artificial Sequence
  Synthetic
uuuaucuuuauuuguuuu

SEQ ID NO: 691222 - RNA, 19 nt, Artificial Sequence
  Synthetic
cuuuaucuuuauuuguuuu

SEQ ID NO: 691223 - RNA, 20 nt, Artificial Sequence
  Synthetic
acuuuaucuuuauuuguuuu

SEQ ID NO: 691224 - RNA, 21 nt, Artificial Sequence
  Synthetic
aacuuuaucuuuauuuguuuu

SEQ ID NO: 691225 - RNA, 22 nt, Artificial Sequence
  Synthetic
gaacuuuaucuuuauuuguuuu

SEQ ID NO: 691226 - RNA, 23 nt, Artificial Sequence
  Synthetic
agaacuuuaucuuuauuuguuuu

SEQ ID NO: 691227 - RNA, 24 nt, Artificial Sequence
  Synthetic
cagaacuuuaucuuuauuuguuuu

SEQ ID NO: 691228 - RNA, 18 nt, Artificial Sequence
  Synthetic
aauuguuuuauuuguuuu

SEQ ID NO: 691229 - RNA, 19 nt, Artificial Sequence
  Synthetic
gaauuguuuuauuuguuuu

SEQ ID NO: 691230 - RNA, 20 nt, Artificial Sequence
  Synthetic
ugaauuguuuuauuuguuuu

SEQ ID NO: 691231 - RNA, 21 nt, Artificial Sequence
  Synthetic
cugaauuguuuuauuuguuuu

SEQ ID NO: 691232 - RNA, 22 nt, Artificial Sequence
  Synthetic
ucugaauuguuuuauuuguuuu

SEQ ID NO: 691233 - RNA, 23 nt, Artificial Sequence
  Synthetic
uucugaauuguuuuauuuguuuu

SEQ ID NO: 691234 - RNA, 24 nt, Artificial Sequence
  Synthetic
uuucugaauuguuuuauuuguuuu

SEQ ID NO: 691235 - RNA, 18 nt, Artificial Sequence
  Synthetic
uuaucauaauuuuguuuu

SEQ ID NO: 691236 - RNA, 19 nt, Artificial Sequence
  Synthetic
guuaucauaauuuuguuuu

SEQ ID NO: 691237 - RNA, 20 nt, Artificial Sequence
  Synthetic
cguuaucauaauuuuguuuu

SEQ ID NO: 691238 - RNA, 21 nt, Artificial Sequence
  Synthetic
acguuaucauaauuuuguuuu

SEQ ID NO: 691239 - RNA, 22 nt, Artificial Sequence
  Synthetic
aacguuaucauaauuuuguuuu

SEQ ID NO: 691240 - RNA, 23 nt, Artificial Sequence
  Synthetic
caacguuaucauaauuuuguuuu

SEQ ID NO: 691241 - RNA, 24 nt, Artificial Sequence
  Synthetic
acaacguuaucauaauuuuguuuu

SEQ ID NO: 691242 - RNA, 18 nt, Artificial Sequence
  Synthetic
aguauaggauuuuguuuu

SEQ ID NO: 691243 - RNA, 19 nt, Artificial Sequence
  Synthetic
caguauaggauuuuguuuu

SEQ ID NO: 691244 - RNA, 20 nt, Artificial Sequence
  Synthetic
gcaguauaggauuuuguuuu

SEQ ID NO: 691245 - RNA, 21 nt, Artificial Sequence
  Synthetic
ugcaguauaggauuuuguuuu

SEQ ID NO: 691246 - RNA, 22 nt, Artificial Sequence
  Synthetic
uugcaguauaggauuuuguuuu

SEQ ID NO: 691247 - RNA, 23 nt, Artificial Sequence
  Synthetic
guugcaguauaggauuuuguuuu

SEQ ID NO: 691248 - RNA, 24 nt, Artificial Sequence
  Synthetic
uguugcaguauaggauuuuguuuu

SEQ ID NO: 691249 - RNA, 18 nt, Artificial Sequence
  Synthetic
gauuugauauuuuguuuu

SEQ ID NO: 691250 - RNA, 19 nt, Artificial Sequence
  Synthetic
ugauuugauauuuuguuuu

SEQ ID NO: 691251 - RNA, 20 nt, Artificial Sequence
  Synthetic
augauuugauauuuuguuuu

SEQ ID NO: 691252 - RNA, 21 nt, Artificial Sequence
  Synthetic
aaugauuugauauuuuguuuu

SEQ ID NO: 691253 - RNA, 22 nt, Artificial Sequence
  Synthetic
uaaugauuugauauuuuguuuu

SEQ ID NO: 691254 - RNA, 23 nt, Artificial Sequence
  Synthetic
uuaaugauuugauauuuuguuuu

SEQ ID NO: 691255 - RNA, 24 nt, Artificial Sequence
  Synthetic
cuuaaugauuugauauuuuguuuu

SEQ ID NO: 691256 - RNA, 18 nt, Artificial Sequence
  Synthetic
agauuaauacaaauuuuu

SEQ ID NO: 691257 - RNA, 19 nt, Artificial Sequence
  Synthetic
aagauuaauacaaauuuuu

SEQ ID NO: 691258 - RNA, 20 nt, Artificial Sequence
  Synthetic
aaagauuaauacaaauuuuu

SEQ ID NO: 691259 - RNA, 21 nt, Artificial Sequence
  Synthetic
caaagauuaauacaaauuuuu

SEQ ID NO: 691260 - RNA, 22 nt, Artificial Sequence
  Synthetic
ccaaagauuaauacaaauuuuu

SEQ ID NO: 691261 - RNA, 23 nt, Artificial Sequence
  Synthetic
accaaagauuaauacaaauuuuu

SEQ ID NO: 691262 - RNA, 24 nt, Artificial Sequence
  Synthetic
aaccaaagauuaauacaaauuuuu

SEQ ID NO: 691263 - RNA, 18 nt, Artificial Sequence
  Synthetic
cucaauuugucaauuuuu

SEQ ID NO: 691264 - RNA, 19 nt, Artificial Sequence
  Synthetic
ccucaauuugucaauuuuu

SEQ ID NO: 691265 - RNA, 20 nt, Artificial Sequence
  Synthetic
uccucaauuugucaauuuuu

SEQ ID NO: 691266 - RNA, 21 nt, Artificial Sequence
  Synthetic
auccucaauuugucaauuuuu

SEQ ID NO: 691267 - RNA, 22 nt, Artificial Sequence
  Synthetic
aauccucaauuugucaauuuuu

SEQ ID NO: 691268 - RNA, 23 nt, Artificial Sequence
  Synthetic
gaauccucaauuugucaauuuuu

SEQ ID NO: 691269 - RNA, 24 nt, Artificial Sequence
  Synthetic
ugaauccucaauuugucaauuuuu

SEQ ID NO: 691270 - RNA, 18 nt, Artificial Sequence
  Synthetic
uuuuauuugucaauuuuu

SEQ ID NO: 691271 - RNA, 19 nt, Artificial Sequence
  Synthetic
uuuuuauuugucaauuuuu

SEQ ID NO: 691272 - RNA, 20 nt, Artificial Sequence
  Synthetic
auuuuuauuugucaauuuuu

SEQ ID NO: 691273 - RNA, 21 nt, Artificial Sequence
  Synthetic
aauuuuuauuugucaauuuuu

SEQ ID NO: 691274 - RNA, 22 nt, Artificial Sequence
  Synthetic
caauuuuuauuugucaauuuuu

SEQ ID NO: 691275 - RNA, 23 nt, Artificial Sequence
  Synthetic
acaauuuuuauuugucaauuuuu

SEQ ID NO: 691276 - RNA, 24 nt, Artificial Sequence
  Synthetic
uacaauuuuuauuugucaauuuuu

SEQ ID NO: 691277 - RNA, 18 nt, Artificial Sequence
  Synthetic
uacaagaguucaauuuuu

SEQ ID NO: 691278 - RNA, 19 nt, Artificial Sequence
  Synthetic
guacaagaguucaauuuuu

SEQ ID NO: 691279 - RNA, 20 nt, Artificial Sequence
  Synthetic
uguacaagaguucaauuuuu

SEQ ID NO: 691280 - RNA, 21 nt, Artificial Sequence
  Synthetic
cuguacaagaguucaauuuuu

SEQ ID NO: 691281 - RNA, 22 nt, Artificial Sequence
  Synthetic
ucuguacaagaguucaauuuuu

SEQ ID NO: 691282 - RNA, 23 nt, Artificial Sequence
  Synthetic
cucuguacaagaguucaauuuuu

SEQ ID NO: 691283 - RNA, 24 nt, Artificial Sequence
  Synthetic
ucucuguacaagaguucaauuuuu

SEQ ID NO: 691284 - RNA, 18 nt, Artificial Sequence
  Synthetic
aaguucuaaagaauuuuu

SEQ ID NO: 691285 - RNA, 19 nt, Artificial Sequence
  Synthetic
caaguucuaaagaauuuuu

SEQ ID NO: 691286 - RNA, 20 nt, Artificial Sequence
  Synthetic
acaaguucuaaagaauuuuu

SEQ ID NO: 691287 - RNA, 21 nt, Artificial Sequence
  Synthetic
uacaaguucuaaagaauuuuu

SEQ ID NO: 691288 - RNA, 22 nt, Artificial Sequence
  Synthetic
guacaaguucuaaagaauuuuu

SEQ ID NO: 691289 - RNA, 23 nt, Artificial Sequence
  Synthetic
uguacaaguucuaaagaauuuuu

SEQ ID NO: 691290 - RNA, 24 nt, Artificial Sequence
  Synthetic
auguacaaguucuaaagaauuuuu

SEQ ID NO: 691291 - RNA, 18 nt, Artificial Sequence
  Synthetic
ggggguuugagaauuuuu

SEQ ID NO: 691292 - RNA, 19 nt, Artificial Sequence
  Synthetic
uggggguuugagaauuuuu

SEQ ID NO: 691293 - RNA, 20 nt, Artificial Sequence
  Synthetic
cuggggguuugagaauuuuu

SEQ ID NO: 691294 - RNA, 21 nt, Artificial Sequence
  Synthetic
gcuggggguuugagaauuuuu

SEQ ID NO: 691295 - RNA, 22 nt, Artificial Sequence
  Synthetic
agcuggggguuugagaauuuuu

SEQ ID NO: 691296 - RNA, 23 nt, Artificial Sequence
  Synthetic
aagcuggggguuugagaauuuuu

SEQ ID NO: 691297 - RNA, 24 nt, Artificial Sequence
  Synthetic
uaagcuggggguuugagaauuuuu

SEQ ID NO: 691298 - RNA, 18 nt, Artificial Sequence
  Synthetic
aaaauuaauagaauuuuu

SEQ ID NO: 691299 - RNA, 19 nt, Artificial Sequence
  Synthetic
gaaaauuaauagaauuuuu

SEQ ID NO: 691300 - RNA, 20 nt, Artificial Sequence
  Synthetic
ugaaaauuaauagaauuuuu

SEQ ID NO: 691301 - RNA, 21 nt, Artificial Sequence
  Synthetic
cugaaaauuaauagaauuuuu

SEQ ID NO: 691302 - RNA, 22 nt, Artificial Sequence
  Synthetic
acugaaaauuaauagaauuuuu

SEQ ID NO: 691303 - RNA, 23 nt, Artificial Sequence
  Synthetic
uacugaaaauuaauagaauuuuu

SEQ ID NO: 691304 - RNA, 24 nt, Artificial Sequence
  Synthetic
auacugaaaauuaauagaauuuuu

SEQ ID NO: 691305 - RNA, 18 nt, Artificial Sequence
  Synthetic
uuugaaagacacauuuuu

SEQ ID NO: 691306 - RNA, 19 nt, Artificial Sequence
  Synthetic
uuuugaaagacacauuuuu

SEQ ID NO: 691307 - RNA, 20 nt, Artificial Sequence
  Synthetic
auuuugaaagacacauuuuu

SEQ ID NO: 691308 - RNA, 21 nt, Artificial Sequence
  Synthetic
uauuuugaaagacacauuuuu

SEQ ID NO: 691309 - RNA, 22 nt, Artificial Sequence
  Synthetic
auauuuugaaagacacauuuuu

SEQ ID NO: 691310 - RNA, 23 nt, Artificial Sequence
  Synthetic
aauauuuugaaagacacauuuuu

SEQ ID NO: 691311 - RNA, 24 nt, Artificial Sequence
  Synthetic
uaauauuuugaaagacacauuuuu

SEQ ID NO: 691312 - RNA, 18 nt, Artificial Sequence
  Synthetic
accuaaugacacauuuuu

SEQ ID NO: 691313 - RNA, 19 nt, Artificial Sequence
  Synthetic
caccuaaugacacauuuuu

SEQ ID NO: 691314 - RNA, 20 nt, Artificial Sequence
  Synthetic
ucaccuaaugacacauuuuu

SEQ ID NO: 691315 - RNA, 21 nt, Artificial Sequence
  Synthetic
aucaccuaaugacacauuuuu

SEQ ID NO: 691316 - RNA, 22 nt, Artificial Sequence
  Synthetic
aaucaccuaaugacacauuuuu

SEQ ID NO: 691317 - RNA, 23 nt, Artificial Sequence
  Synthetic
aaaucaccuaaugacacauuuuu

SEQ ID NO: 691318 - RNA, 24 nt, Artificial Sequence
  Synthetic
aaaaucaccuaaugacacauuuuu

SEQ ID NO: 691319 - RNA, 18 nt, Artificial Sequence
  Synthetic
caaaauaccuccauuuuu

SEQ ID NO: 691320 - RNA, 19 nt, Artificial Sequence
  Synthetic
gcaaaauaccuccauuuuu

SEQ ID NO: 691321 - RNA, 20 nt, Artificial Sequence
  Synthetic
ugcaaaauaccuccauuuuu

SEQ ID NO: 691322 - RNA, 21 nt, Artificial Sequence
  Synthetic
augcaaaauaccuccauuuuu

SEQ ID NO: 691323 - RNA, 22 nt, Artificial Sequence
  Synthetic
aaugcaaaauaccuccauuuuu

SEQ ID NO: 691324 - RNA, 23 nt, Artificial Sequence
  Synthetic
caaugcaaaauaccuccauuuuu

SEQ ID NO: 691325 - RNA, 24 nt, Artificial Sequence
  Synthetic
ucaaugcaaaauaccuccauuuuu

SEQ ID NO: 691326 - RNA, 18 nt, Artificial Sequence
  Synthetic
agagcuaaaagcauuuuu

SEQ ID NO: 691327 - RNA, 19 nt, Artificial Sequence
  Synthetic
aagagcuaaaagcauuuuu

SEQ ID NO: 691328 - RNA, 20 nt, Artificial Sequence
  Synthetic
aaagagcuaaaagcauuuuu

SEQ ID NO: 691329 - RNA, 21 nt, Artificial Sequence
  Synthetic
uaaagagcuaaaagcauuuuu

SEQ ID NO: 691330 - RNA, 22 nt, Artificial Sequence
  Synthetic
uuaaagagcuaaaagcauuuuu

SEQ ID NO: 691331 - RNA, 23 nt, Artificial Sequence
  Synthetic
cuuaaagagcuaaaagcauuuuu

SEQ ID NO: 691332 - RNA, 24 nt, Artificial Sequence
  Synthetic
acuuaaagagcuaaaagcauuuuu

SEQ ID NO: 691333 - RNA, 18 nt, Artificial Sequence
  Synthetic
caugcaacaagcauuuuu

SEQ ID NO: 691334 - RNA, 19 nt, Artificial Sequence
  Synthetic
gcaugcaacaagcauuuuu

SEQ ID NO: 691335 - RNA, 20 nt, Artificial Sequence
  Synthetic
ggcaugcaacaagcauuuuu

SEQ ID NO: 691336 - RNA, 21 nt, Artificial Sequence
  Synthetic
aggcaugcaacaagcauuuuu

SEQ ID NO: 691337 - RNA, 22 nt, Artificial Sequence
  Synthetic
caggcaugcaacaagcauuuuu

SEQ ID NO: 691338 - RNA, 23 nt, Artificial Sequence
  Synthetic
acaggcaugcaacaagcauuuuu

SEQ ID NO: 691339 - RNA, 24 nt, Artificial Sequence
  Synthetic
uacaggcaugcaacaagcauuuuu

SEQ ID NO: 691340 - RNA, 18 nt, Artificial Sequence
  Synthetic
agagcugagagcauuuuu

SEQ ID NO: 691341 - RNA, 19 nt, Artificial Sequence
  Synthetic
gagagcugagagcauuuuu

SEQ ID NO: 691342 - RNA, 20 nt, Artificial Sequence
  Synthetic
ugagagcugagagcauuuuu

SEQ ID NO: 691343 - RNA, 21 nt, Artificial Sequence
  Synthetic
uugagagcugagagcauuuuu

SEQ ID NO: 691344 - RNA, 22 nt, Artificial Sequence
  Synthetic
cuugagagcugagagcauuuuu

SEQ ID NO: 691345 - RNA, 23 nt, Artificial Sequence
  Synthetic
acuugagagcugagagcauuuuu

SEQ ID NO: 691346 - RNA, 24 nt, Artificial Sequence
  Synthetic
aacuugagagcugagagcauuuuu

SEQ ID NO: 691347 - RNA, 18 nt, Artificial Sequence
  Synthetic
caucgucguugcauuuuu

SEQ ID NO: 691348 - RNA, 19 nt, Artificial Sequence
  Synthetic
gcaucgucguugcauuuuu

SEQ ID NO: 691349 - RNA, 20 nt, Artificial Sequence
  Synthetic
ggcaucgucguugcauuuuu

SEQ ID NO: 691350 - RNA, 21 nt, Artificial Sequence
  Synthetic
uggcaucgucguugcauuuuu

SEQ ID NO: 691351 - RNA, 22 nt, Artificial Sequence
  Synthetic
uuggcaucgucguugcauuuuu

SEQ ID NO: 691352 - RNA, 23 nt, Artificial Sequence
  Synthetic
auuggcaucgucguugcauuuuu

SEQ ID NO: 691353 - RNA, 24 nt, Artificial Sequence
  Synthetic
cauuggcaucgucguugcauuuuu

SEQ ID NO: 691354 - RNA, 18 nt, Artificial Sequence
  Synthetic
ccuagauccaucauuuuu

SEQ ID NO: 691355 - RNA, 19 nt, Artificial Sequence
  Synthetic
accuagauccaucauuuuu

SEQ ID NO: 691356 - RNA, 20 nt, Artificial Sequence
  Synthetic
uaccuagauccaucauuuuu

SEQ ID NO: 691357 - RNA, 21 nt, Artificial Sequence
  Synthetic
uuaccuagauccaucauuuuu

SEQ ID NO: 691358 - RNA, 22 nt, Artificial Sequence
  Synthetic
uuuaccuagauccaucauuuuu

SEQ ID NO: 691359 - RNA, 23 nt, Artificial Sequence
  Synthetic
uuuuaccuagauccaucauuuuu

SEQ ID NO: 691360 - RNA, 24 nt, Artificial Sequence
  Synthetic
cuuuuaccuagauccaucauuuuu

SEQ ID NO: 691361 - RNA, 18 nt, Artificial Sequence
  Synthetic
acuaucacuaucauuuuu

SEQ ID NO: 691362 - RNA, 19 nt, Artificial Sequence
  Synthetic
aacuaucacuaucauuuuu

SEQ ID NO: 691363 - RNA, 20 nt, Artificial Sequence
  Synthetic
aaacuaucacuaucauuuuu

SEQ ID NO: 691364 - RNA, 21 nt, Artificial Sequence
  Synthetic
aaaacuaucacuaucauuuuu

SEQ ID NO: 691365 - RNA, 22 nt, Artificial Sequence
  Synthetic
uaaaacuaucacuaucauuuuu

SEQ ID NO: 691366 - RNA, 23 nt, Artificial Sequence
  Synthetic
auaaaacuaucacuaucauuuuu

SEQ ID NO: 691367 - RNA, 24 nt, Artificial Sequence
  Synthetic
aauaaaacuaucacuaucauuuuu

SEQ ID NO: 691368 - RNA, 18 nt, Artificial Sequence
  Synthetic
uaauuucuccucauuuuu

SEQ ID NO: 691369 - RNA, 19 nt, Artificial Sequence
  Synthetic
auaauuucuccucauuuuu

SEQ ID NO: 691370 - RNA, 20 nt, Artificial Sequence
  Synthetic
gauaauuucuccucauuuuu

SEQ ID NO: 691371 - RNA, 21 nt, Artificial Sequence
  Synthetic
ggauaauuucuccucauuuuu

SEQ ID NO: 691372 - RNA, 22 nt, Artificial Sequence
  Synthetic
uggauaauuucuccucauuuuu

SEQ ID NO: 691373 - RNA, 23 nt, Artificial Sequence
  Synthetic
cuggauaauuucuccucauuuuu

SEQ ID NO: 691374 - RNA, 24 nt, Artificial Sequence
  Synthetic
ucuggauaauuucuccucauuuuu

SEQ ID NO: 691375 - RNA, 18 nt, Artificial Sequence
  Synthetic
caacugcuauagauuuuu

SEQ ID NO: 691376 - RNA, 19 nt, Artificial Sequence
  Synthetic
ccaacugcuauagauuuuu

SEQ ID NO: 691377 - RNA, 20 nt, Artificial Sequence
  Synthetic
gccaacugcuauagauuuuu

SEQ ID NO: 691378 - RNA, 21 nt, Artificial Sequence
  Synthetic
ggccaacugcuauagauuuuu

SEQ ID NO: 691379 - RNA, 22 nt, Artificial Sequence
  Synthetic
uggccaacugcuauagauuuuu

SEQ ID NO: 691380 - RNA, 23 nt, Artificial Sequence
  Synthetic
uuggccaacugcuauagauuuuu

SEQ ID NO: 691381 - RNA, 24 nt, Artificial Sequence
  Synthetic
uuuggccaacugcuauagauuuuu

SEQ ID NO: 691382 - RNA, 18 nt, Artificial Sequence
  Synthetic
ucucaauggaggauuuuu

SEQ ID NO: 691383 - RNA, 19 nt, Artificial Sequence
  Synthetic
uucucaauggaggauuuuu

SEQ ID NO: 691384 - RNA, 20 nt, Artificial Sequence
  Synthetic
cuucucaauggaggauuuuu

SEQ ID NO: 691385 - RNA, 21 nt, Artificial Sequence
  Synthetic
ucuucucaauggaggauuuuu

SEQ ID NO: 691386 - RNA, 22 nt, Artificial Sequence
  Synthetic
aucuucucaauggaggauuuuu

SEQ ID NO: 691387 - RNA, 23 nt, Artificial Sequence
  Synthetic
aaucuucucaauggaggauuuuu

SEQ ID NO: 691388 - RNA, 24 nt, Artificial Sequence
  Synthetic
gaaucuucucaauggaggauuuuu

SEQ ID NO: 691389 - RNA, 18 nt, Artificial Sequence
  Synthetic
uaagacaagcggauuuuu

SEQ ID NO: 691390 - RNA, 19 nt, Artificial Sequence
  Synthetic
uuaagacaagcggauuuuu

SEQ ID NO: 691391 - RNA, 20 nt, Artificial Sequence
  Synthetic
auuaagacaagcggauuuuu

SEQ ID NO: 691392 - RNA, 21 nt, Artificial Sequence
  Synthetic
cauuaagacaagcggauuuuu

SEQ ID NO: 691393 - RNA, 22 nt, Artificial Sequence
  Synthetic
ucauuaagacaagcggauuuuu

SEQ ID NO: 691394 - RNA, 23 nt, Artificial Sequence
  Synthetic
aucauuaagacaagcggauuuuu

SEQ ID NO: 691395 - RNA, 24 nt, Artificial Sequence
  Synthetic
caucauuaagacaagcggauuuuu

SEQ ID NO: 691396 - RNA, 18 nt, Artificial Sequence
  Synthetic
uuggccugagugauuuuu

SEQ ID NO: 691397 - RNA, 19 nt, Artificial Sequence
  Synthetic
cuuggccugagugauuuuu

SEQ ID NO: 691398 - RNA, 20 nt, Artificial Sequence
  Synthetic
acuuggccugagugauuuuu

SEQ ID NO: 691399 - RNA, 21 nt, Artificial Sequence
  Synthetic
aacuuggccugagugauuuuu

SEQ ID NO: 691400 - RNA, 22 nt, Artificial Sequence
  Synthetic
aaacuuggccugagugauuuuu

SEQ ID NO: 691401 - RNA, 23 nt, Artificial Sequence
  Synthetic
gaaacuuggccugagugauuuuu

SEQ ID NO: 691402 - RNA, 24 nt, Artificial Sequence
  Synthetic
agaaacuuggccugagugauuuuu

SEQ ID NO: 691403 - RNA, 18 nt, Artificial Sequence
  Synthetic
gacauguuugugauuuuu

SEQ ID NO: 691404 - RNA, 19 nt, Artificial Sequence
  Synthetic
agacauguuugugauuuuu

SEQ ID NO: 691405 - RNA, 20 nt, Artificial Sequence
  Synthetic
gagacauguuugugauuuuu

SEQ ID NO: 691406 - RNA, 21 nt, Artificial Sequence
  Synthetic
agagacauguuugugauuuuu

SEQ ID NO: 691407 - RNA, 22 nt, Artificial Sequence
  Synthetic
aagagacauguuugugauuuuu

SEQ ID NO: 691408 - RNA, 23 nt, Artificial Sequence
  Synthetic
caagagacauguuugugauuuuu

SEQ ID NO: 691409 - RNA, 24 nt, Artificial Sequence
  Synthetic
ucaagagacauguuugugauuuuu

SEQ ID NO: 691410 - RNA, 18 nt, Artificial Sequence
  Synthetic
gaauuucucuugauuuuu

SEQ ID NO: 691411 - RNA, 19 nt, Artificial Sequence
  Synthetic
ggaauuucucuugauuuuu

SEQ ID NO: 691412 - RNA, 20 nt, Artificial Sequence
  Synthetic
uggaauuucucuugauuuuu

SEQ ID NO: 691413 - RNA, 21 nt, Artificial Sequence
  Synthetic
auggaauuucucuugauuuuu

SEQ ID NO: 691414 - RNA, 22 nt, Artificial Sequence
  Synthetic
aauggaauuucucuugauuuuu

SEQ ID NO: 691415 - RNA, 23 nt, Artificial Sequence
  Synthetic
aaauggaauuucucuugauuuuu

SEQ ID NO: 691416 - RNA, 24 nt, Artificial Sequence
  Synthetic
aaaauggaauuucucuugauuuuu

SEQ ID NO: 691417 - RNA, 18 nt, Artificial Sequence
  Synthetic
uaugagcuacauauuuuu

SEQ ID NO: 691418 - RNA, 19 nt, Artificial Sequence
  Synthetic
uuaugagcuacauauuuuu

SEQ ID NO: 691419 - RNA, 20 nt, Artificial Sequence
  Synthetic
cuuaugagcuacauauuuuu

SEQ ID NO: 691420 - RNA, 21 nt, Artificial Sequence
  Synthetic
ucuuaugagcuacauauuuuu

SEQ ID NO: 691421 - RNA, 22 nt, Artificial Sequence
  Synthetic
cucuuaugagcuacauauuuuu

SEQ ID NO: 691422 - RNA, 23 nt, Artificial Sequence
  Synthetic
ucucuuaugagcuacauauuuuu

SEQ ID NO: 691423 - RNA, 24 nt, Artificial Sequence
  Synthetic
aucucuuaugagcuacauauuuuu

SEQ ID NO: 691424 - RNA, 18 nt, Artificial Sequence
  Synthetic
aaaaagggagauauuuuu

SEQ ID NO: 691425 - RNA, 19 nt, Artificial Sequence
  Synthetic
gaaaaagggagauauuuuu

SEQ ID NO: 691426 - RNA, 20 nt, Artificial Sequence
  Synthetic
agaaaaagggagauauuuuu

SEQ ID NO: 691427 - RNA, 21 nt, Artificial Sequence
  Synthetic
gagaaaaagggagauauuuuu

SEQ ID NO: 691428 - RNA, 22 nt, Artificial Sequence
  Synthetic
ugagaaaaagggagauauuuuu

SEQ ID NO: 691429 - RNA, 23 nt, Artificial Sequence
  Synthetic
augagaaaaagggagauauuuuu

SEQ ID NO: 691430 - RNA, 24 nt, Artificial Sequence
  Synthetic
gaugagaaaaagggagauauuuuu

SEQ ID NO: 691431 - RNA, 18 nt, Artificial Sequence
  Synthetic
ccaaacaaggauauuuuu

SEQ ID NO: 691432 - RNA, 19 nt, Artificial Sequence
  Synthetic
uccaaacaaggauauuuuu

SEQ ID NO: 691433 - RNA, 20 nt, Artificial Sequence
  Synthetic
auccaaacaaggauauuuuu

SEQ ID NO: 691434 - RNA, 21 nt, Artificial Sequence
  Synthetic
uauccaaacaaggauauuuuu

SEQ ID NO: 691435 - RNA, 22 nt, Artificial Sequence
  Synthetic
uuauccaaacaaggauauuuuu

SEQ ID NO: 691436 - RNA, 23 nt, Artificial Sequence
  Synthetic
auuauccaaacaaggauauuuuu

SEQ ID NO: 691437 - RNA, 24 nt, Artificial Sequence
  Synthetic
uauuauccaaacaaggauauuuuu

SEQ ID NO: 691438 - RNA, 18 nt, Artificial Sequence
  Synthetic
uauucauuuuauauuuuu

SEQ ID NO: 691439 - RNA, 19 nt, Artificial Sequence
  Synthetic
auauucauuuuauauuuuu

SEQ ID NO: 691440 - RNA, 20 nt, Artificial Sequence
  Synthetic
cauauucauuuuauauuuuu

SEQ ID NO: 691441 - RNA, 21 nt, Artificial Sequence
  Synthetic
acauauucauuuuauauuuuu

SEQ ID NO: 691442 - RNA, 22 nt, Artificial Sequence
  Synthetic
cacauauucauuuuauauuuuu

SEQ ID NO: 691443 - RNA, 23 nt, Artificial Sequence
  Synthetic
acacauauucauuuuauauuuuu

SEQ ID NO: 691444 - RNA, 24 nt, Artificial Sequence
  Synthetic
uacacauauucauuuuauauuuuu

SEQ ID NO: 691445 - RNA, 18 nt, Artificial Sequence
  Synthetic
aguggcucuacuauuuuu

SEQ ID NO: 691446 - RNA, 19 nt, Artificial Sequence
  Synthetic
caguggcucuacuauuuuu

SEQ ID NO: 691447 - RNA, 20 nt, Artificial Sequence
  Synthetic
ccaguggcucuacuauuuuu

SEQ ID NO: 691448 - RNA, 21 nt, Artificial Sequence
  Synthetic
uccaguggcucuacuauuuuu

SEQ ID NO: 691449 - RNA, 22 nt, Artificial Sequence
  Synthetic
auccaguggcucuacuauuuuu

SEQ ID NO: 691450 - RNA, 23 nt, Artificial Sequence
  Synthetic
aauccaguggcucuacuauuuuu

SEQ ID NO: 691451 - RNA, 24 nt, Artificial Sequence
  Synthetic
gaauccaguggcucuacuauuuuu

SEQ ID NO: 691452 - RNA, 18 nt, Artificial Sequence
  Synthetic
cuguguuuuccuauuuuu

SEQ ID NO: 691453 - RNA, 19 nt, Artificial Sequence
  Synthetic
ccuguguuuuccuauuuuu

SEQ ID NO: 691454 - RNA, 20 nt, Artificial Sequence
  Synthetic
uccuguguuuuccuauuuuu

SEQ ID NO: 691455 - RNA, 21 nt, Artificial Sequence
  Synthetic
uuccuguguuuuccuauuuuu

SEQ ID NO: 691456 - RNA, 22 nt, Artificial Sequence
  Synthetic
uuuccuguguuuuccuauuuuu

SEQ ID NO: 691457 - RNA, 23 nt, Artificial Sequence
  Synthetic
uuuuccuguguuuuccuauuuuu

SEQ ID NO: 691458 - RNA, 24 nt, Artificial Sequence
  Synthetic
uuuuuccuguguuuuccuauuuuu

SEQ ID NO: 691459 - RNA, 18 nt, Artificial Sequence
  Synthetic
ccuuucucuucuauuuuu

SEQ ID NO: 691460 - RNA, 19 nt, Artificial Sequence
  Synthetic
uccuuucucuucuauuuuu

SEQ ID NO: 691461 - RNA, 20 nt, Artificial Sequence
  Synthetic
uuccuuucucuucuauuuuu

SEQ ID NO: 691462 - RNA, 21 nt, Artificial Sequence
  Synthetic
guuccuuucucuucuauuuuu

SEQ ID NO: 691463 - RNA, 22 nt, Artificial Sequence
  Synthetic
uguuccuuucucuucuauuuuu

SEQ ID NO: 691464 - RNA, 23 nt, Artificial Sequence
  Synthetic
guguuccuuucucuucuauuuuu

SEQ ID NO: 691465 - RNA, 24 nt, Artificial Sequence
  Synthetic
aguguuccuuucucuucuauuuuu

SEQ ID NO: 691466 - RNA, 18 nt, Artificial Sequence
  Synthetic
ucauugaauaguauuuuu

SEQ ID NO: 691467 - RNA, 19 nt, Artificial Sequence
  Synthetic
cucauugaauaguauuuuu

SEQ ID NO: 691468 - RNA, 20 nt, Artificial Sequence
  Synthetic
acucauugaauaguauuuuu

SEQ ID NO: 691469 - RNA, 21 nt, Artificial Sequence
  Synthetic
aacucauugaauaguauuuuu

SEQ ID NO: 691470 - RNA, 22 nt, Artificial Sequence
  Synthetic
aaacucauugaauaguauuuuu

SEQ ID NO: 691471 - RNA, 23 nt, Artificial Sequence
  Synthetic
gaaacucauugaauaguauuuuu

SEQ ID NO: 691472 - RNA, 24 nt, Artificial Sequence
  Synthetic
agaaacucauugaauaguauuuuu

SEQ ID NO: 691473 - RNA, 18 nt, Artificial Sequence
  Synthetic
aucuuuguucguauuuuu

SEQ ID NO: 691474 - RNA, 19 nt, Artificial Sequence
  Synthetic
aaucuuuguucguauuuuu

SEQ ID NO: 691475 - RNA, 20 nt, Artificial Sequence
  Synthetic
aaaucuuuguucguauuuuu

SEQ ID NO: 691476 - RNA, 21 nt, Artificial Sequence
  Synthetic
aaaaucuuuguucguauuuuu

SEQ ID NO: 691477 - RNA, 22 nt, Artificial Sequence
  Synthetic
aaaaaucuuuguucguauuuuu

SEQ ID NO: 691478 - RNA, 23 nt, Artificial Sequence
  Synthetic
uaaaaaucuuuguucguauuuuu

SEQ ID NO: 691479 - RNA, 24 nt, Artificial Sequence
  Synthetic
uuaaaaaucuuuguucguauuuuu

SEQ ID NO: 691480 - RNA, 18 nt, Artificial Sequence
  Synthetic
uaugcauaauguauuuuu

SEQ ID NO: 691481 - RNA, 19 nt, Artificial Sequence
  Synthetic
uuaugcauaauguauuuuu

SEQ ID NO: 691482 - RNA, 20 nt, Artificial Sequence
  Synthetic
uuuaugcauaauguauuuuu

SEQ ID NO: 691483 - RNA, 21 nt, Artificial Sequence
  Synthetic
guuuaugcauaauguauuuuu

SEQ ID NO: 691484 - RNA, 22 nt, Artificial Sequence
  Synthetic
aguuuaugcauaauguauuuuu

SEQ ID NO: 691485 - RNA, 23 nt, Artificial Sequence
  Synthetic
aaguuuaugcauaauguauuuuu

SEQ ID NO: 691486 - RNA, 24 nt, Artificial Sequence
  Synthetic
caaguuuaugcauaauguauuuuu

SEQ ID NO: 691487 - RNA, 18 nt, Artificial Sequence
  Synthetic
caagggaaucuuauuuuu

SEQ ID NO: 691488 - RNA, 19 nt, Artificial Sequence
  Synthetic
acaagggaaucuuauuuuu

SEQ ID NO: 691489 - RNA, 20 nt, Artificial Sequence
  Synthetic
aacaagggaaucuuauuuuu

SEQ ID NO: 691490 - RNA, 21 nt, Artificial Sequence
  Synthetic
uaacaagggaaucuuauuuuu

SEQ ID NO: 691491 - RNA, 22 nt, Artificial Sequence
  Synthetic
uuaacaagggaaucuuauuuuu

SEQ ID NO: 691492 - RNA, 23 nt, Artificial Sequence
  Synthetic
auuaacaagggaaucuuauuuuu

SEQ ID NO: 691493 - RNA, 24 nt, Artificial Sequence
  Synthetic
uauuaacaagggaaucuuauuuuu

SEQ ID NO: 691494 - RNA, 18 nt, Artificial Sequence
  Synthetic
aaauguuuaguuauuuuu

SEQ ID NO: 691495 - RNA, 19 nt, Artificial Sequence
  Synthetic
aaaauguuuaguuauuuuu

SEQ ID NO: 691496 - RNA, 20 nt, Artificial Sequence
  Synthetic
caaaauguuuaguuauuuuu

SEQ ID NO: 691497 - RNA, 21 nt, Artificial Sequence
  Synthetic
ccaaaauguuuaguuauuuuu

SEQ ID NO: 691498 - RNA, 22 nt, Artificial Sequence
  Synthetic
gccaaaauguuuaguuauuuuu

SEQ ID NO: 691499 - RNA, 23 nt, Artificial Sequence
  Synthetic
ugccaaaauguuuaguuauuuuu

SEQ ID NO: 691500 - RNA, 24 nt, Artificial Sequence
  Synthetic
augccaaaauguuuaguuauuuuu

SEQ ID NO: 691501 - RNA, 18 nt, Artificial Sequence
  Synthetic
uuauuuuaauuuauuuuu

SEQ ID NO: 691502 - RNA, 19 nt, Artificial Sequence
  Synthetic
uuuauuuuaauuuauuuuu

SEQ ID NO: 691503 - RNA, 20 nt, Artificial Sequence
  Synthetic
uuuuauuuuaauuuauuuuu

SEQ ID NO: 691504 - RNA, 21 nt, Artificial Sequence
  Synthetic
auuuuauuuuaauuuauuuuu

SEQ ID NO: 691505 - RNA, 22 nt, Artificial Sequence
  Synthetic
uauuuuauuuuaauuuauuuuu

SEQ ID NO: 691506 - RNA, 23 nt, Artificial Sequence
  Synthetic
uuauuuuauuuuaauuuauuuuu

SEQ ID NO: 691507 - RNA, 24 nt, Artificial Sequence
  Synthetic
uuuauuuuauuuuaauuuauuuuu

SEQ ID NO: 691508 - RNA, 18 nt, Artificial Sequence
  Synthetic
guguugagauuuauuuuu

SEQ ID NO: 691509 - RNA, 19 nt, Artificial Sequence
  Synthetic
uguguugagauuuauuuuu

SEQ ID NO: 691510 - RNA, 20 nt, Artificial Sequence
  Synthetic
cuguguugagauuuauuuuu

SEQ ID NO: 691511 - RNA, 21 nt, Artificial Sequence
  Synthetic
ucuguguugagauuuauuuuu

SEQ ID NO: 691512 - RNA, 22 nt, Artificial Sequence
  Synthetic
cucuguguugagauuuauuuuu

SEQ ID NO: 691513 - RNA, 23 nt, Artificial Sequence
  Synthetic
acucuguguugagauuuauuuuu

SEQ ID NO: 691514 - RNA, 24 nt, Artificial Sequence
  Synthetic
aacucuguguugagauuuauuuuu

SEQ ID NO: 691515 - RNA, 18 nt, Artificial Sequence
  Synthetic
auuaaugguuuuauuuuu

SEQ ID NO: 691516 - RNA, 19 nt, Artificial Sequence
  Synthetic
cauuaaugguuuuauuuuu

SEQ ID NO: 691517 - RNA, 20 nt, Artificial Sequence
  Synthetic
acauuaaugguuuuauuuuu

SEQ ID NO: 691518 - RNA, 21 nt, Artificial Sequence
  Synthetic
cacauuaaugguuuuauuuuu

SEQ ID NO: 691519 - RNA, 22 nt, Artificial Sequence
  Synthetic
acacauuaaugguuuuauuuuu

SEQ ID NO: 691520 - RNA, 23 nt, Artificial Sequence
  Synthetic
gacacauuaaugguuuuauuuuu

SEQ ID NO: 691521 - RNA, 24 nt, Artificial Sequence
  Synthetic
ggacacauuaaugguuuuauuuuu

SEQ ID NO: 691522 - RNA, 18 nt, Artificial Sequence
  Synthetic
ggaaaaguuuuuauuuuu

SEQ ID NO: 691523 - RNA, 19 nt, Artificial Sequence
  Synthetic
aggaaaaguuuuuauuuuu

SEQ ID NO: 691524 - RNA, 20 nt, Artificial Sequence
  Synthetic
aaggaaaaguuuuuauuuuu

SEQ ID NO: 691525 - RNA, 21 nt, Artificial Sequence
  Synthetic
aaaggaaaaguuuuuauuuuu

SEQ ID NO: 691526 - RNA, 22 nt, Artificial Sequence
  Synthetic
caaaggaaaaguuuuuauuuuu

SEQ ID NO: 691527 - RNA, 23 nt, Artificial Sequence
  Synthetic
acaaaggaaaaguuuuuauuuuu

SEQ ID NO: 691528 - RNA, 24 nt, Artificial Sequence
  Synthetic
cacaaaggaaaaguuuuuauuuuu

SEQ ID NO: 691529 - RNA, 18 nt, Artificial Sequence
  Synthetic
uuuuuauuuuuuauuuuu

SEQ ID NO: 691530 - RNA, 19 nt, Artificial Sequence
  Synthetic
uuuuuuauuuuuuauuuuu

SEQ ID NO: 691531 - RNA, 20 nt, Artificial Sequence
  Synthetic
uuuuuuuauuuuuuauuuuu

SEQ ID NO: 691532 - RNA, 21 nt, Artificial Sequence
  Synthetic
uuuuuuuuauuuuuuauuuuu

SEQ ID NO: 691533 - RNA, 22 nt, Artificial Sequence
  Synthetic
uuuuuuuuuauuuuuuauuuuu

SEQ ID NO: 691534 - RNA, 23 nt, Artificial Sequence
  Synthetic
cuuuuuuuuuauuuuuuauuuuu

SEQ ID NO: 691535 - RNA, 24 nt, Artificial Sequence
  Synthetic
ucuuuuuuuuuauuuuuuauuuuu

SEQ ID NO: 691536 - RNA, 18 nt, Artificial Sequence
  Synthetic
ggaaaaauccaacuuuuu

SEQ ID NO: 691537 - RNA, 19 nt, Artificial Sequence
  Synthetic
aggaaaaauccaacuuuuu

SEQ ID NO: 691538 - RNA, 20 nt, Artificial Sequence
  Synthetic
caggaaaaauccaacuuuuu

SEQ ID NO: 691539 - RNA, 21 nt, Artificial Sequence
  Synthetic
ccaggaaaaauccaacuuuuu

SEQ ID NO: 691540 - RNA, 22 nt, Artificial Sequence
  Synthetic
uccaggaaaaauccaacuuuuu

SEQ ID NO: 691541 - RNA, 23 nt, Artificial Sequence
  Synthetic
guccaggaaaaauccaacuuuuu

SEQ ID NO: 691542 - RNA, 24 nt, Artificial Sequence
  Synthetic
aguccaggaaaaauccaacuuuuu

SEQ ID NO: 691543 - RNA, 18 nt, Artificial Sequence
  Synthetic
cagaggcaucaacuuuuu

SEQ ID NO: 691544 - RNA, 19 nt, Artificial Sequence
  Synthetic
acagaggcaucaacuuuuu

SEQ ID NO: 691545 - RNA, 20 nt, Artificial Sequence
  Synthetic
aacagaggcaucaacuuuuu

SEQ ID NO: 691546 - RNA, 21 nt, Artificial Sequence
  Synthetic
uaacagaggcaucaacuuuuu

SEQ ID NO: 691547 - RNA, 22 nt, Artificial Sequence
  Synthetic
uuaacagaggcaucaacuuuuu

SEQ ID NO: 691548 - RNA, 23 nt, Artificial Sequence
  Synthetic
uuuaacagaggcaucaacuuuuu

SEQ ID NO: 691549 - RNA, 24 nt, Artificial Sequence
  Synthetic
guuuaacagaggcaucaacuuuuu

SEQ ID NO: 691550 - RNA, 18 nt, Artificial Sequence
  Synthetic
cucucaugagaacuuuuu

SEQ ID NO: 691551 - RNA, 19 nt, Artificial Sequence
  Synthetic
ucucucaugagaacuuuuu

SEQ ID NO: 691552 - RNA, 20 nt, Artificial Sequence
  Synthetic
uucucucaugagaacuuuuu

SEQ ID NO: 691553 - RNA, 21 nt, Artificial Sequence
  Synthetic
auucucucaugagaacuuuuu

SEQ ID NO: 691554 - RNA, 22 nt, Artificial Sequence
  Synthetic
uauucucucaugagaacuuuuu

SEQ ID NO: 691555 - RNA, 23 nt, Artificial Sequence
  Synthetic
auauucucucaugagaacuuuuu

SEQ ID NO: 691556 - RNA, 24 nt, Artificial Sequence
  Synthetic
aauauucucucaugagaacuuuuu

SEQ ID NO: 691557 - RNA, 18 nt, Artificial Sequence
  Synthetic
cacuggacggaacuuuuu

SEQ ID NO: 691558 - RNA, 19 nt, Artificial Sequence
  Synthetic
ccacuggacggaacuuuuu

SEQ ID NO: 691559 - RNA, 20 nt, Artificial Sequence
  Synthetic
accacuggacggaacuuuuu

SEQ ID NO: 691560 - RNA, 21 nt, Artificial Sequence
  Synthetic
gaccacuggacggaacuuuuu

SEQ ID NO: 691561 - RNA, 22 nt, Artificial Sequence
  Synthetic
agaccacuggacggaacuuuuu

SEQ ID NO: 691562 - RNA, 23 nt, Artificial Sequence
  Synthetic
uagaccacuggacggaacuuuuu

SEQ ID NO: 691563 - RNA, 24 nt, Artificial Sequence
  Synthetic
uuagaccacuggacggaacuuuuu

SEQ ID NO: 691564 - RNA, 18 nt, Artificial Sequence
  Synthetic
aucugcucuucacuuuuu

SEQ ID NO: 691565 - RNA, 19 nt, Artificial Sequence
  Synthetic
caucugcucuucacuuuuu

SEQ ID NO: 691566 - RNA, 20 nt, Artificial Sequence
  Synthetic
ccaucugcucuucacuuuuu

SEQ ID NO: 691567 - RNA, 21 nt, Artificial Sequence
  Synthetic
uccaucugcucuucacuuuuu

SEQ ID NO: 691568 - RNA, 22 nt, Artificial Sequence
  Synthetic
cuccaucugcucuucacuuuuu

SEQ ID NO: 691569 - RNA, 23 nt, Artificial Sequence
  Synthetic
acuccaucugcucuucacuuuuu

SEQ ID NO: 691570 - RNA, 24 nt, Artificial Sequence
  Synthetic
aacuccaucugcucuucacuuuuu

SEQ ID NO: 691571 - RNA, 18 nt, Artificial Sequence
  Synthetic
uccaccuuuucacuuuuu

SEQ ID NO: 691572 - RNA, 19 nt, Artificial Sequence
  Synthetic
uuccaccuuuucacuuuuu

SEQ ID NO: 691573 - RNA, 20 nt, Artificial Sequence
  Synthetic
auuccaccuuuucacuuuuu

SEQ ID NO: 691574 - RNA, 21 nt, Artificial Sequence
  Synthetic
uauuccaccuuuucacuuuuu

SEQ ID NO: 691575 - RNA, 22 nt, Artificial Sequence
  Synthetic
auauuccaccuuuucacuuuuu

SEQ ID NO: 691576 - RNA, 23 nt, Artificial Sequence
  Synthetic
uauauuccaccuuuucacuuuuu

SEQ ID NO: 691577 - RNA, 24 nt, Artificial Sequence
  Synthetic
uuauauuccaccuuuucacuuuuu

SEQ ID NO: 691578 - RNA, 18 nt, Artificial Sequence
  Synthetic
aauguugagagacuuuuu

SEQ ID NO: 691579 - RNA, 19 nt, Artificial Sequence
  Synthetic
uaauguugagagacuuuuu

SEQ ID NO: 691580 - RNA, 20 nt, Artificial Sequence
  Synthetic
cuaauguugagagacuuuuu

SEQ ID NO: 691581 - RNA, 21 nt, Artificial Sequence
  Synthetic
ccuaauguugagagacuuuuu

SEQ ID NO: 691582 - RNA, 22 nt, Artificial Sequence
  Synthetic
accuaauguugagagacuuuuu

SEQ ID NO: 691583 - RNA, 23 nt, Artificial Sequence
  Synthetic
uaccuaauguugagagacuuuuu

SEQ ID NO: 691584 - RNA, 24 nt, Artificial Sequence
  Synthetic
cuaccuaauguugagagacuuuuu

SEQ ID NO: 691585 - RNA, 18 nt, Artificial Sequence
  Synthetic
gagccucaguuacuuuuu

SEQ ID NO: 691586 - RNA, 19 nt, Artificial Sequence
  Synthetic
ugagccucaguuacuuuuu

SEQ ID NO: 691587 - RNA, 20 nt, Artificial Sequence
  Synthetic
augagccucaguuacuuuuu

SEQ ID NO: 691588 - RNA, 21 nt, Artificial Sequence
  Synthetic
uaugagccucaguuacuuuuu

SEQ ID NO: 691589 - RNA, 22 nt, Artificial Sequence
  Synthetic
cuaugagccucaguuacuuuuu

SEQ ID NO: 691590 - RNA, 23 nt, Artificial Sequence
  Synthetic
ucuaugagccucaguuacuuuuu

SEQ ID NO: 691591 - RNA, 24 nt, Artificial Sequence
  Synthetic
aucuaugagccucaguuacuuuuu

SEQ ID NO: 691592 - RNA, 18 nt, Artificial Sequence
  Synthetic
uaaaugacaucccuuuuu

SEQ ID NO: 691593 - RNA, 19 nt, Artificial Sequence
  Synthetic
uuaaaugacaucccuuuuu

SEQ ID NO: 691594 - RNA, 20 nt, Artificial Sequence
  Synthetic
auuaaaugacaucccuuuuu

SEQ ID NO: 691595 - RNA, 21 nt, Artificial Sequence
  Synthetic
gauuaaaugacaucccuuuuu

SEQ ID NO: 691596 - RNA, 22 nt, Artificial Sequence
  Synthetic
ugauuaaaugacaucccuuuuu

SEQ ID NO: 691597 - RNA, 23 nt, Artificial Sequence
  Synthetic
cugauuaaaugacaucccuuuuu

SEQ ID NO: 691598 - RNA, 24 nt, Artificial Sequence
  Synthetic
acugauuaaaugacaucccuuuuu

SEQ ID NO: 691599 - RNA, 18 nt, Artificial Sequence
  Synthetic
gacaaaauuugccuuuuu

SEQ ID NO: 691600 - RNA, 19 nt, Artificial Sequence
  Synthetic
agacaaaauuugccuuuuu

SEQ ID NO: 691601 - RNA, 20 nt, Artificial Sequence
  Synthetic
cagacaaaauuugccuuuuu

SEQ ID NO: 691602 - RNA, 21 nt, Artificial Sequence
  Synthetic
acagacaaaauuugccuuuuu

SEQ ID NO: 691603 - RNA, 22 nt, Artificial Sequence
  Synthetic
aacagacaaaauuugccuuuuu

SEQ ID NO: 691604 - RNA, 23 nt, Artificial Sequence
  Synthetic
aaacagacaaaauuugccuuuuu

SEQ ID NO: 691605 - RNA, 24 nt, Artificial Sequence
  Synthetic
caaacagacaaaauuugccuuuuu

SEQ ID NO: 691606 - RNA, 18 nt, Artificial Sequence
  Synthetic
acuaagcauguccuuuuu

SEQ ID NO: 691607 - RNA, 19 nt, Artificial Sequence
  Synthetic
aacuaagcauguccuuuuu

SEQ ID NO: 691608 - RNA, 20 nt, Artificial Sequence
  Synthetic
uaacuaagcauguccuuuuu

SEQ ID NO: 691609 - RNA, 21 nt, Artificial Sequence
  Synthetic
guaacuaagcauguccuuuuu

SEQ ID NO: 691610 - RNA, 22 nt, Artificial Sequence
  Synthetic
uguaacuaagcauguccuuuuu

SEQ ID NO: 691611 - RNA, 23 nt, Artificial Sequence
  Synthetic
uuguaacuaagcauguccuuuuu

SEQ ID NO: 691612 - RNA, 24 nt, Artificial Sequence
  Synthetic
cuuguaacuaagcauguccuuuuu

SEQ ID NO: 691613 - RNA, 18 nt, Artificial Sequence
  Synthetic
uccuuuuauuuccuuuuu

SEQ ID NO: 691614 - RNA, 19 nt, Artificial Sequence
  Synthetic
auccuuuuauuuccuuuuu

SEQ ID NO: 691615 - RNA, 20 nt, Artificial Sequence
  Synthetic
uauccuuuuauuuccuuuuu

SEQ ID NO: 691616 - RNA, 21 nt, Artificial Sequence
  Synthetic
auauccuuuuauuuccuuuuu

SEQ ID NO: 691617 - RNA, 22 nt, Artificial Sequence
  Synthetic
uauauccuuuuauuuccuuuuu

SEQ ID NO: 691618 - RNA, 23 nt, Artificial Sequence
  Synthetic
guauauccuuuuauuuccuuuuu

SEQ ID NO: 691619 - RNA, 24 nt, Artificial Sequence
  Synthetic
cguauauccuuuuauuuccuuuuu

SEQ ID NO: 691620 - RNA, 18 nt, Artificial Sequence
  Synthetic
uuuuagacccagcuuuuu

SEQ ID NO: 691621 - RNA, 19 nt, Artificial Sequence
  Synthetic
auuuuagacccagcuuuuu

SEQ ID NO: 691622 - RNA, 20 nt, Artificial Sequence
  Synthetic
uauuuuagacccagcuuuuu

SEQ ID NO: 691623 - RNA, 21 nt, Artificial Sequence
  Synthetic
cuauuuuagacccagcuuuuu

SEQ ID NO: 691624 - RNA, 22 nt, Artificial Sequence
  Synthetic
ccuauuuuagacccagcuuuuu

SEQ ID NO: 691625 - RNA, 23 nt, Artificial Sequence
  Synthetic
gccuauuuuagacccagcuuuuu

SEQ ID NO: 691626 - RNA, 24 nt, Artificial Sequence
  Synthetic
ugccuauuuuagacccagcuuuuu

SEQ ID NO: 691627 - RNA, 18 nt, Artificial Sequence
  Synthetic
uaccucauucagcuuuuu

SEQ ID NO: 691628 - RNA, 19 nt, Artificial Sequence
  Synthetic
cuaccucauucagcuuuuu

SEQ ID NO: 691629 - RNA, 20 nt, Artificial Sequence
  Synthetic
ccuaccucauucagcuuuuu

SEQ ID NO: 691630 - RNA, 21 nt, Artificial Sequence
  Synthetic
gccuaccucauucagcuuuuu

SEQ ID NO: 691631 - RNA, 22 nt, Artificial Sequence
  Synthetic
ugccuaccucauucagcuuuuu

SEQ ID NO: 691632 - RNA, 23 nt, Artificial Sequence
  Synthetic
cugccuaccucauucagcuuuuu

SEQ ID NO: 691633 - RNA, 24 nt, Artificial Sequence
  Synthetic
acugccuaccucauucagcuuuuu

SEQ ID NO: 691634 - RNA, 18 nt, Artificial Sequence
  Synthetic
uaagaaaauacgcuuuuu

SEQ ID NO: 691635 - RNA, 19 nt, Artificial Sequence
  Synthetic
uuaagaaaauacgcuuuuu

SEQ ID NO: 691636 - RNA, 20 nt, Artificial Sequence
  Synthetic
auuaagaaaauacgcuuuuu

SEQ ID NO: 691637 - RNA, 21 nt, Artificial Sequence
  Synthetic
uauuaagaaaauacgcuuuuu

SEQ ID NO: 691638 - RNA, 22 nt, Artificial Sequence
  Synthetic
cuauuaagaaaauacgcuuuuu

SEQ ID NO: 691639 - RNA, 23 nt, Artificial Sequence
  Synthetic
ucuauuaagaaaauacgcuuuuu

SEQ ID NO: 691640 - RNA, 24 nt, Artificial Sequence
  Synthetic
aucuauuaagaaaauacgcuuuuu

SEQ ID NO: 691641 - RNA, 18 nt, Artificial Sequence
  Synthetic
auaaagcaaaggcuuuuu

SEQ ID NO: 691642 - RNA, 19 nt, Artificial Sequence
  Synthetic
aauaaagcaaaggcuuuuu

SEQ ID NO: 691643 - RNA, 20 nt, Artificial Sequence
  Synthetic
aaauaaagcaaaggcuuuuu

SEQ ID NO: 691644 - RNA, 21 nt, Artificial Sequence
  Synthetic
aaaauaaagcaaaggcuuuuu

SEQ ID NO: 691645 - RNA, 22 nt, Artificial Sequence
  Synthetic
gaaaauaaagcaaaggcuuuuu

SEQ ID NO: 691646 - RNA, 23 nt, Artificial Sequence
  Synthetic
agaaaauaaagcaaaggcuuuuu

SEQ ID NO: 691647 - RNA, 24 nt, Artificial Sequence
  Synthetic
gagaaaauaaagcaaaggcuuuuu

SEQ ID NO: 691648 - RNA, 18 nt, Artificial Sequence
  Synthetic
uaauauuauaaucuuuuu

SEQ ID NO: 691649 - RNA, 19 nt, Artificial Sequence
  Synthetic
auaauauuauaaucuuuuu

SEQ ID NO: 691650 - RNA, 20 nt, Artificial Sequence
  Synthetic
cauaauauuauaaucuuuuu

SEQ ID NO: 691651 - RNA, 21 nt, Artificial Sequence
  Synthetic
acauaauauuauaaucuuuuu

SEQ ID NO: 691652 - RNA, 22 nt, Artificial Sequence
  Synthetic
uacauaauauuauaaucuuuuu

SEQ ID NO: 691653 - RNA, 23 nt, Artificial Sequence
  Synthetic
auacauaauauuauaaucuuuuu

SEQ ID NO: 691654 - RNA, 24 nt, Artificial Sequence
  Synthetic
aauacauaauauuauaaucuuuuu

SEQ ID NO: 691655 - RNA, 18 nt, Artificial Sequence
  Synthetic
accuucaugcaucuuuuu

SEQ ID NO: 691656 - RNA, 19 nt, Artificial Sequence
  Synthetic
uaccuucaugcaucuuuuu

SEQ ID NO: 691657 - RNA, 20 nt, Artificial Sequence
  Synthetic
uuaccuucaugcaucuuuuu

SEQ ID NO: 691658 - RNA, 21 nt, Artificial Sequence
  Synthetic
uuuaccuucaugcaucuuuuu

SEQ ID NO: 691659 - RNA, 22 nt, Artificial Sequence
  Synthetic
auuuaccuucaugcaucuuuuu

SEQ ID NO: 691660 - RNA, 23 nt, Artificial Sequence
  Synthetic
aauuuaccuucaugcaucuuuuu

SEQ ID NO: 691661 - RNA, 24 nt, Artificial Sequence
  Synthetic
uaauuuaccuucaugcaucuuuuu

SEQ ID NO: 691662 - RNA, 18 nt, Artificial Sequence
  Synthetic
ucuucccuaacucuuuuu

SEQ ID NO: 691663 - RNA, 19 nt, Artificial Sequence
  Synthetic
uucuucccuaacucuuuuu

SEQ ID NO: 691664 - RNA, 20 nt, Artificial Sequence
  Synthetic
auucuucccuaacucuuuuu

SEQ ID NO: 691665 - RNA, 21 nt, Artificial Sequence
  Synthetic
aauucuucccuaacucuuuuu

SEQ ID NO: 691666 - RNA, 22 nt, Artificial Sequence
  Synthetic
aaauucuucccuaacucuuuuu

SEQ ID NO: 691667 - RNA, 23 nt, Artificial Sequence
  Synthetic
uaaauucuucccuaacucuuuuu

SEQ ID NO: 691668 - RNA, 24 nt, Artificial Sequence
  Synthetic
auaaauucuucccuaacucuuuuu

SEQ ID NO: 691669 - RNA, 18 nt, Artificial Sequence
  Synthetic
ccuccuuguucucuuuuu

SEQ ID NO: 691670 - RNA, 19 nt, Artificial Sequence
  Synthetic
uccuccuuguucucuuuuu

SEQ ID NO: 691671 - RNA, 20 nt, Artificial Sequence
  Synthetic
uuccuccuuguucucuuuuu

SEQ ID NO: 691672 - RNA, 21 nt, Artificial Sequence
  Synthetic
cuuccuccuuguucucuuuuu

SEQ ID NO: 691673 - RNA, 22 nt, Artificial Sequence
  Synthetic
ccuuccuccuuguucucuuuuu

SEQ ID NO: 691674 - RNA, 23 nt, Artificial Sequence
  Synthetic
uccuuccuccuuguucucuuuuu

SEQ ID NO: 691675 - RNA, 24 nt, Artificial Sequence
  Synthetic
auccuuccuccuuguucucuuuuu

SEQ ID NO: 691676 - RNA, 18 nt, Artificial Sequence
  Synthetic
ucuuaucauauucuuuuu

SEQ ID NO: 691677 - RNA, 19 nt, Artificial Sequence
  Synthetic
aucuuaucauauucuuuuu

SEQ ID NO: 691678 - RNA, 20 nt, Artificial Sequence
  Synthetic
caucuuaucauauucuuuuu

SEQ ID NO: 691679 - RNA, 21 nt, Artificial Sequence
  Synthetic
ccaucuuaucauauucuuuuu

SEQ ID NO: 691680 - RNA, 22 nt, Artificial Sequence
  Synthetic
accaucuuaucauauucuuuuu

SEQ ID NO: 691681 - RNA, 23 nt, Artificial Sequence
  Synthetic
aaccaucuuaucauauucuuuuu

SEQ ID NO: 691682 - RNA, 24 nt, Artificial Sequence
  Synthetic
aaaccaucuuaucauauucuuuuu

SEQ ID NO: 691683 - RNA, 18 nt, Artificial Sequence
  Synthetic
uuauauuuuauucuuuuu

SEQ ID NO: 691684 - RNA, 19 nt, Artificial Sequence
  Synthetic
uuuauauuuuauucuuuuu

SEQ ID NO: 691685 - RNA, 20 nt, Artificial Sequence
  Synthetic
uuuuauauuuuauucuuuuu

SEQ ID NO: 691686 - RNA, 21 nt, Artificial Sequence
  Synthetic
guuuuauauuuuauucuuuuu

SEQ ID NO: 691687 - RNA, 22 nt, Artificial Sequence
  Synthetic
aguuuuauauuuuauucuuuuu

SEQ ID NO: 691688 - RNA, 23 nt, Artificial Sequence
  Synthetic
uaguuuuauauuuuauucuuuuu

SEQ ID NO: 691689 - RNA, 24 nt, Artificial Sequence
  Synthetic
uuaguuuuauauuuuauucuuuuu

SEQ ID NO: 691690 - RNA, 18 nt, Artificial Sequence
  Synthetic
gggauaucauuucuuuuu

SEQ ID NO: 691691 - RNA, 19 nt, Artificial Sequence
  Synthetic
ugggauaucauuucuuuuu

SEQ ID NO: 691692 - RNA, 20 nt, Artificial Sequence
  Synthetic
gugggauaucauuucuuuuu

SEQ ID NO: 691693 - RNA, 21 nt, Artificial Sequence
  Synthetic
ugugggauaucauuucuuuuu

SEQ ID NO: 691694 - RNA, 22 nt, Artificial Sequence
  Synthetic
cugugggauaucauuucuuuuu

SEQ ID NO: 691695 - RNA, 23 nt, Artificial Sequence
  Synthetic
ccugugggauaucauuucuuuuu

SEQ ID NO: 691696 - RNA, 24 nt, Artificial Sequence
  Synthetic
uccugugggauaucauuucuuuuu

SEQ ID NO: 691697 - RNA, 18 nt, Artificial Sequence
  Synthetic
auguucaauuuucuuuuu

SEQ ID NO: 691698 - RNA, 19 nt, Artificial Sequence
  Synthetic
aauguucaauuuucuuuuu

SEQ ID NO: 691699 - RNA, 20 nt, Artificial Sequence
  Synthetic
aaauguucaauuuucuuuuu

SEQ ID NO: 691700 - RNA, 21 nt, Artificial Sequence
  Synthetic
caaauguucaauuuucuuuuu

SEQ ID NO: 691701 - RNA, 22 nt, Artificial Sequence
  Synthetic
ucaaauguucaauuuucuuuuu

SEQ ID NO: 691702 - RNA, 23 nt, Artificial Sequence
  Synthetic
aucaaauguucaauuuucuuuuu

SEQ ID NO: 691703 - RNA, 24 nt, Artificial Sequence
  Synthetic
aaucaaauguucaauuuucuuuuu

SEQ ID NO: 691704 - RNA, 18 nt, Artificial Sequence
  Synthetic
uaucagaauuuucuuuuu

SEQ ID NO: 691705 - RNA, 19 nt, Artificial Sequence
  Synthetic
guaucagaauuuucuuuuu

SEQ ID NO: 691706 - RNA, 20 nt, Artificial Sequence
  Synthetic
gguaucagaauuuucuuuuu

SEQ ID NO: 691707 - RNA, 21 nt, Artificial Sequence
  Synthetic
agguaucagaauuuucuuuuu

SEQ ID NO: 691708 - RNA, 22 nt, Artificial Sequence
  Synthetic
uagguaucagaauuuucuuuuu

SEQ ID NO: 691709 - RNA, 23 nt, Artificial Sequence
  Synthetic
cuagguaucagaauuuucuuuuu

SEQ ID NO: 691710 - RNA, 24 nt, Artificial Sequence
  Synthetic
ccuagguaucagaauuuucuuuuu

SEQ ID NO: 691711 - RNA, 18 nt, Artificial Sequence
  Synthetic
uuuuuuuuuuuucuuuuu

SEQ ID NO: 691712 - RNA, 19 nt, Artificial Sequence
  Synthetic
cuuuuuuuuuuuucuuuuu

SEQ ID NO: 691713 - RNA, 20 nt, Artificial Sequence
  Synthetic
ucuuuuuuuuuuuucuuuuu

SEQ ID NO: 691714 - RNA, 21 nt, Artificial Sequence
  Synthetic
aucuuuuuuuuuuuucuuuuu

SEQ ID NO: 691715 - RNA, 22 nt, Artificial Sequence
  Synthetic
aaucuuuuuuuuuuuucuuuuu

SEQ ID NO: 691716 - RNA, 23 nt, Artificial Sequence
  Synthetic
aaaucuuuuuuuuuuuucuuuuu

SEQ ID NO: 691717 - RNA, 24 nt, Artificial Sequence
  Synthetic
aaaaucuuuuuuuuuuuucuuuuu

SEQ ID NO: 691718 - RNA, 18 nt, Artificial Sequence
  Synthetic
cauauuacuaaaguuuuu

SEQ ID NO: 691719 - RNA, 19 nt, Artificial Sequence
  Synthetic
acauauuacuaaaguuuuu

SEQ ID NO: 691720 - RNA, 20 nt, Artificial Sequence
  Synthetic
uacauauuacuaaaguuuuu

SEQ ID NO: 691721 - RNA, 21 nt, Artificial Sequence
  Synthetic
guacauauuacuaaaguuuuu

SEQ ID NO: 691722 - RNA, 22 nt, Artificial Sequence
  Synthetic
aguacauauuacuaaaguuuuu

SEQ ID NO: 691723 - RNA, 23 nt, Artificial Sequence
  Synthetic
uaguacauauuacuaaaguuuuu

SEQ ID NO: 691724 - RNA, 24 nt, Artificial Sequence
  Synthetic
uuaguacauauuacuaaaguuuuu

SEQ ID NO: 691725 - RNA, 18 nt, Artificial Sequence
  Synthetic
uucaauccacaaguuuuu

SEQ ID NO: 691726 - RNA, 19 nt, Artificial Sequence
  Synthetic
cuucaauccacaaguuuuu

SEQ ID NO: 691727 - RNA, 20 nt, Artificial Sequence
  Synthetic
ucuucaauccacaaguuuuu

SEQ ID NO: 691728 - RNA, 21 nt, Artificial Sequence
  Synthetic
gucuucaauccacaaguuuuu

SEQ ID NO: 691729 - RNA, 22 nt, Artificial Sequence
  Synthetic
cgucuucaauccacaaguuuuu

SEQ ID NO: 691730 - RNA, 23 nt, Artificial Sequence
  Synthetic
gcgucuucaauccacaaguuuuu

SEQ ID NO: 691731 - RNA, 24 nt, Artificial Sequence
  Synthetic
agcgucuucaauccacaaguuuuu

SEQ ID NO: 691732 - RNA, 18 nt, Artificial Sequence
  Synthetic
aauagaacgucaguuuuu

SEQ ID NO: 691733 - RNA, 19 nt, Artificial Sequence
  Synthetic
aaauagaacgucaguuuuu

SEQ ID NO: 691734 - RNA, 20 nt, Artificial Sequence
  Synthetic
aaaauagaacgucaguuuuu

SEQ ID NO: 691735 - RNA, 21 nt, Artificial Sequence
  Synthetic
gaaaauagaacgucaguuuuu

SEQ ID NO: 691736 - RNA, 22 nt, Artificial Sequence
  Synthetic
ugaaaauagaacgucaguuuuu

SEQ ID NO: 691737 - RNA, 23 nt, Artificial Sequence
  Synthetic
uugaaaauagaacgucaguuuuu

SEQ ID NO: 691738 - RNA, 24 nt, Artificial Sequence
  Synthetic
uuugaaaauagaacgucaguuuuu

SEQ ID NO: 691739 - RNA, 18 nt, Artificial Sequence
  Synthetic
uaaccuugaagaguuuuu

SEQ ID NO: 691740 - RNA, 19 nt, Artificial Sequence
  Synthetic
cuaaccuugaagaguuuuu

SEQ ID NO: 691741 - RNA, 20 nt, Artificial Sequence
  Synthetic
ucuaaccuugaagaguuuuu

SEQ ID NO: 691742 - RNA, 21 nt, Artificial Sequence
  Synthetic
uucuaaccuugaagaguuuuu

SEQ ID NO: 691743 - RNA, 22 nt, Artificial Sequence
  Synthetic
uuucuaaccuugaagaguuuuu

SEQ ID NO: 691744 - RNA, 23 nt, Artificial Sequence
  Synthetic
guuucuaaccuugaagaguuuuu

SEQ ID NO: 691745 - RNA, 24 nt, Artificial Sequence
  Synthetic
uguuucuaaccuugaagaguuuuu

SEQ ID NO: 691746 - RNA, 18 nt, Artificial Sequence
  Synthetic
gaacaauuaugaguuuuu

SEQ ID NO: 691747 - RNA, 19 nt, Artificial Sequence
  Synthetic
agaacaauuaugaguuuuu

SEQ ID NO: 691748 - RNA, 20 nt, Artificial Sequence
  Synthetic
gagaacaauuaugaguuuuu

SEQ ID NO: 691749 - RNA, 21 nt, Artificial Sequence
  Synthetic
ggagaacaauuaugaguuuuu

SEQ ID NO: 691750 - RNA, 22 nt, Artificial Sequence
  Synthetic
uggagaacaauuaugaguuuuu

SEQ ID NO: 691751 - RNA, 23 nt, Artificial Sequence
  Synthetic
uuggagaacaauuaugaguuuuu

SEQ ID NO: 691752 - RNA, 24 nt, Artificial Sequence
  Synthetic
auuggagaacaauuaugaguuuuu

SEQ ID NO: 691753 - RNA, 18 nt, Artificial Sequence
  Synthetic
auucuauuaugaguuuuu

SEQ ID NO: 691754 - RNA, 19 nt, Artificial Sequence
  Synthetic
cauucuauuaugaguuuuu

SEQ ID NO: 691755 - RNA, 20 nt, Artificial Sequence
  Synthetic
ucauucuauuaugaguuuuu

SEQ ID NO: 691756 - RNA, 21 nt, Artificial Sequence
  Synthetic
cucauucuauuaugaguuuuu

SEQ ID NO: 691757 - RNA, 22 nt, Artificial Sequence
  Synthetic
ucucauucuauuaugaguuuuu

SEQ ID NO: 691758 - RNA, 23 nt, Artificial Sequence
  Synthetic
cucucauucuauuaugaguuuuu

SEQ ID NO: 691759 - RNA, 24 nt, Artificial Sequence
  Synthetic
ucucucauucuauuaugaguuuuu

SEQ ID NO: 691760 - RNA, 18 nt, Artificial Sequence
  Synthetic
gaccaguucuacguuuuu

SEQ ID NO: 691761 - RNA, 19 nt, Artificial Sequence
  Synthetic
cgaccaguucuacguuuuu

SEQ ID NO: 691762 - RNA, 20 nt, Artificial Sequence
  Synthetic
ucgaccaguucuacguuuuu

SEQ ID NO: 691763 - RNA, 21 nt, Artificial Sequence
  Synthetic
cucgaccaguucuacguuuuu

SEQ ID NO: 691764 - RNA, 22 nt, Artificial Sequence
  Synthetic
ccucgaccaguucuacguuuuu

SEQ ID NO: 691765 - RNA, 23 nt, Artificial Sequence
  Synthetic
uccucgaccaguucuacguuuuu

SEQ ID NO: 691766 - RNA, 24 nt, Artificial Sequence
  Synthetic
uuccucgaccaguucuacguuuuu

SEQ ID NO: 691767 - RNA, 18 nt, Artificial Sequence
  Synthetic
gguaaguuaugcguuuuu

SEQ ID NO: 691768 - RNA, 19 nt, Artificial Sequence
  Synthetic
ugguaaguuaugcguuuuu

SEQ ID NO: 691769 - RNA, 20 nt, Artificial Sequence
  Synthetic
uugguaaguuaugcguuuuu

SEQ ID NO: 691770 - RNA, 21 nt, Artificial Sequence
  Synthetic
auugguaaguuaugcguuuuu

SEQ ID NO: 691771 - RNA, 22 nt, Artificial Sequence
  Synthetic
aauugguaaguuaugcguuuuu

SEQ ID NO: 691772 - RNA, 23 nt, Artificial Sequence
  Synthetic
aaauugguaaguuaugcguuuuu

SEQ ID NO: 691773 - RNA, 24 nt, Artificial Sequence
  Synthetic
aaaauugguaaguuaugcguuuuu

SEQ ID NO: 691774 - RNA, 18 nt, Artificial Sequence
  Synthetic
ucaccuuacaagguuuuu

SEQ ID NO: 691775 - RNA, 19 nt, Artificial Sequence
  Synthetic
cucaccuuacaagguuuuu

SEQ ID NO: 691776 - RNA, 20 nt, Artificial Sequence
  Synthetic
gcucaccuuacaagguuuuu

SEQ ID NO: 691777 - RNA, 21 nt, Artificial Sequence
  Synthetic
agcucaccuuacaagguuuuu

SEQ ID NO: 691778 - RNA, 22 nt, Artificial Sequence
  Synthetic
aagcucaccuuacaagguuuuu

SEQ ID NO: 691779 - RNA, 23 nt, Artificial Sequence
  Synthetic
aaagcucaccuuacaagguuuuu

SEQ ID NO: 691780 - RNA, 24 nt, Artificial Sequence
  Synthetic
gaaagcucaccuuacaagguuuuu

SEQ ID NO: 691781 - RNA, 18 nt, Artificial Sequence
  Synthetic
gguccaaaacagguuuuu

SEQ ID NO: 691782 - RNA, 19 nt, Artificial Sequence
  Synthetic
ggguccaaaacagguuuuu

SEQ ID NO: 691783 - RNA, 20 nt, Artificial Sequence
  Synthetic
gggguccaaaacagguuuuu

SEQ ID NO: 691784 - RNA, 21 nt, Artificial Sequence
  Synthetic
agggguccaaaacagguuuuu

SEQ ID NO: 691785 - RNA, 22 nt, Artificial Sequence
  Synthetic
uagggguccaaaacagguuuuu

SEQ ID NO: 691786 - RNA, 23 nt, Artificial Sequence
  Synthetic
auagggguccaaaacagguuuuu

SEQ ID NO: 691787 - RNA, 24 nt, Artificial Sequence
  Synthetic
uauagggguccaaaacagguuuuu

SEQ ID NO: 691788 - RNA, 18 nt, Artificial Sequence
  Synthetic
caaacuuccaggguuuuu

SEQ ID NO: 691789 - RNA, 19 nt, Artificial Sequence
  Synthetic
gcaaacuuccaggguuuuu

SEQ ID NO: 691790 - RNA, 20 nt, Artificial Sequence
  Synthetic
ugcaaacuuccaggguuuuu

SEQ ID NO: 691791 - RNA, 21 nt, Artificial Sequence
  Synthetic
cugcaaacuuccaggguuuuu

SEQ ID NO: 691792 - RNA, 22 nt, Artificial Sequence
  Synthetic
gcugcaaacuuccaggguuuuu

SEQ ID NO: 691793 - RNA, 23 nt, Artificial Sequence
  Synthetic
ggcugcaaacuuccaggguuuuu

SEQ ID NO: 691794 - RNA, 24 nt, Artificial Sequence
  Synthetic
uggcugcaaacuuccaggguuuuu

SEQ ID NO: 691795 - RNA, 18 nt, Artificial Sequence
  Synthetic
gauaacugcaggguuuuu

SEQ ID NO: 691796 - RNA, 19 nt, Artificial Sequence
  Synthetic
ugauaacugcaggguuuuu

SEQ ID NO: 691797 - RNA, 20 nt, Artificial Sequence
  Synthetic
augauaacugcaggguuuuu

SEQ ID NO: 691798 - RNA, 21 nt, Artificial Sequence
  Synthetic
uaugauaacugcaggguuuuu

SEQ ID NO: 691799 - RNA, 22 nt, Artificial Sequence
  Synthetic
auaugauaacugcaggguuuuu

SEQ ID NO: 691800 - RNA, 23 nt, Artificial Sequence
  Synthetic
uauaugauaacugcaggguuuuu

SEQ ID NO: 691801 - RNA, 24 nt, Artificial Sequence
  Synthetic
auauaugauaacugcaggguuuuu

SEQ ID NO: 691802 - RNA, 18 nt, Artificial Sequence
  Synthetic
caggaaaugaugguuuuu

SEQ ID NO: 691803 - RNA, 19 nt, Artificial Sequence
  Synthetic
ucaggaaaugaugguuuuu

SEQ ID NO: 691804 - RNA, 20 nt, Artificial Sequence
  Synthetic
uucaggaaaugaugguuuuu

SEQ ID NO: 691805 - RNA, 21 nt, Artificial Sequence
  Synthetic
uuucaggaaaugaugguuuuu

SEQ ID NO: 691806 - RNA, 22 nt, Artificial Sequence
  Synthetic
cuuucaggaaaugaugguuuuu

SEQ ID NO: 691807 - RNA, 23 nt, Artificial Sequence
  Synthetic
acuuucaggaaaugaugguuuuu

SEQ ID NO: 691808 - RNA, 24 nt, Artificial Sequence
  Synthetic
gacuuucaggaaaugaugguuuuu

SEQ ID NO: 691809 - RNA, 18 nt, Artificial Sequence
  Synthetic
gaagggcacuugguuuuu

SEQ ID NO: 691810 - RNA, 19 nt, Artificial Sequence
  Synthetic
ugaagggcacuugguuuuu

SEQ ID NO: 691811 - RNA, 20 nt, Artificial Sequence
  Synthetic
uugaagggcacuugguuuuu

SEQ ID NO: 691812 - RNA, 21 nt, Artificial Sequence
  Synthetic
cuugaagggcacuugguuuuu

SEQ ID NO: 691813 - RNA, 22 nt, Artificial Sequence
  Synthetic
acuugaagggcacuugguuuuu

SEQ ID NO: 691814 - RNA, 23 nt, Artificial Sequence
  Synthetic
cacuugaagggcacuugguuuuu

SEQ ID NO: 691815 - RNA, 24 nt, Artificial Sequence
  Synthetic
gcacuugaagggcacuugguuuuu

SEQ ID NO: 691816 - RNA, 18 nt, Artificial Sequence
  Synthetic
uccuaaaauaauguuuuu

SEQ ID NO: 691817 - RNA, 19 nt, Artificial Sequence
  Synthetic
uuccuaaaauaauguuuuu

SEQ ID NO: 691818 - RNA, 20 nt, Artificial Sequence
  Synthetic
uuuccuaaaauaauguuuuu

SEQ ID NO: 691819 - RNA, 21 nt, Artificial Sequence
  Synthetic
uuuuccuaaaauaauguuuuu

SEQ ID NO: 691820 - RNA, 22 nt, Artificial Sequence
  Synthetic
uuuuuccuaaaauaauguuuuu

SEQ ID NO: 691821 - RNA, 23 nt, Artificial Sequence
  Synthetic
auuuuuccuaaaauaauguuuuu

SEQ ID NO: 691822 - RNA, 24 nt, Artificial Sequence
  Synthetic
aauuuuuccuaaaauaauguuuuu

SEQ ID NO: 691823 - RNA, 18 nt, Artificial Sequence
  Synthetic
uuaagaauuuauguuuuu

SEQ ID NO: 691824 - RNA, 19 nt, Artificial Sequence
  Synthetic
guuaagaauuuauguuuuu

SEQ ID NO: 691825 - RNA, 20 nt, Artificial Sequence
  Synthetic
uguuaagaauuuauguuuuu

SEQ ID NO: 691826 - RNA, 21 nt, Artificial Sequence
  Synthetic
cuguuaagaauuuauguuuuu

SEQ ID NO: 691827 - RNA, 22 nt, Artificial Sequence
  Synthetic
ucuguuaagaauuuauguuuuu

SEQ ID NO: 691828 - RNA, 23 nt, Artificial Sequence
  Synthetic
uucuguuaagaauuuauguuuuu

SEQ ID NO: 691829 - RNA, 24 nt, Artificial Sequence
  Synthetic
uuucuguuaagaauuuauguuuuu

SEQ ID NO: 691830 - RNA, 18 nt, Artificial Sequence
  Synthetic
uacauccuuuauguuuuu

SEQ ID NO: 691831 - RNA, 19 nt, Artificial Sequence
  Synthetic
uuacauccuuuauguuuuu

SEQ ID NO: 691832 - RNA, 20 nt, Artificial Sequence
  Synthetic
uuuacauccuuuauguuuuu

SEQ ID NO: 691833 - RNA, 21 nt, Artificial Sequence
  Synthetic
guuuacauccuuuauguuuuu

SEQ ID NO: 691834 - RNA, 22 nt, Artificial Sequence
  Synthetic
aguuuacauccuuuauguuuuu

SEQ ID NO: 691835 - RNA, 23 nt, Artificial Sequence
  Synthetic
aaguuuacauccuuuauguuuuu

SEQ ID NO: 691836 - RNA, 24 nt, Artificial Sequence
  Synthetic
aaaguuuacauccuuuauguuuuu

SEQ ID NO: 691837 - RNA, 18 nt, Artificial Sequence
  Synthetic
aauuagguuuauguuuuu

SEQ ID NO: 691838 - RNA, 19 nt, Artificial Sequence
  Synthetic
caauuagguuuauguuuuu

SEQ ID NO: 691839 - RNA, 20 nt, Artificial Sequence
  Synthetic
acaauuagguuuauguuuuu

SEQ ID NO: 691840 - RNA, 21 nt, Artificial Sequence
  Synthetic
aacaauuagguuuauguuuuu

SEQ ID NO: 691841 - RNA, 22 nt, Artificial Sequence
  Synthetic
gaacaauuagguuuauguuuuu

SEQ ID NO: 691842 - RNA, 23 nt, Artificial Sequence
  Synthetic
agaacaauuagguuuauguuuuu

SEQ ID NO: 691843 - RNA, 24 nt, Artificial Sequence
  Synthetic
cagaacaauuagguuuauguuuuu

SEQ ID NO: 691844 - RNA, 18 nt, Artificial Sequence
  Synthetic
aacaauaucccuguuuuu

SEQ ID NO: 691845 - RNA, 19 nt, Artificial Sequence
  Synthetic
caacaauaucccuguuuuu

SEQ ID NO: 691846 - RNA, 20 nt, Artificial Sequence
  Synthetic
acaacaauaucccuguuuuu

SEQ ID NO: 691847 - RNA, 21 nt, Artificial Sequence
  Synthetic
aacaacaauaucccuguuuuu

SEQ ID NO: 691848 - RNA, 22 nt, Artificial Sequence
  Synthetic
gaacaacaauaucccuguuuuu

SEQ ID NO: 691849 - RNA, 23 nt, Artificial Sequence
  Synthetic
agaacaacaauaucccuguuuuu

SEQ ID NO: 691850 - RNA, 24 nt, Artificial Sequence
  Synthetic
uagaacaacaauaucccuguuuuu

SEQ ID NO: 691851 - RNA, 18 nt, Artificial Sequence
  Synthetic
cugucauccaguguuuuu

SEQ ID NO: 691852 - RNA, 19 nt, Artificial Sequence
  Synthetic
acugucauccaguguuuuu

SEQ ID NO: 691853 - RNA, 20 nt, Artificial Sequence
  Synthetic
aacugucauccaguguuuuu

SEQ ID NO: 691854 - RNA, 21 nt, Artificial Sequence
  Synthetic
uaacugucauccaguguuuuu

SEQ ID NO: 691855 - RNA, 22 nt, Artificial Sequence
  Synthetic
guaacugucauccaguguuuuu

SEQ ID NO: 691856 - RNA, 23 nt, Artificial Sequence
  Synthetic
aguaacugucauccaguguuuuu

SEQ ID NO: 691857 - RNA, 24 nt, Artificial Sequence
  Synthetic
caguaacugucauccaguguuuuu

SEQ ID NO: 691858 - RNA, 18 nt, Artificial Sequence
  Synthetic
acugaaaaauguguuuuu

SEQ ID NO: 691859 - RNA, 19 nt, Artificial Sequence
  Synthetic
aacugaaaaauguguuuuu

SEQ ID NO: 691860 - RNA, 20 nt, Artificial Sequence
  Synthetic
gaacugaaaaauguguuuuu

SEQ ID NO: 691861 - RNA, 21 nt, Artificial Sequence
  Synthetic
ugaacugaaaaauguguuuuu

SEQ ID NO: 691862 - RNA, 22 nt, Artificial Sequence
  Synthetic
augaacugaaaaauguguuuuu

SEQ ID NO: 691863 - RNA, 23 nt, Artificial Sequence
  Synthetic
caugaacugaaaaauguguuuuu

SEQ ID NO: 691864 - RNA, 24 nt, Artificial Sequence
  Synthetic
acaugaacugaaaaauguguuuuu

SEQ ID NO: 691865 - RNA, 18 nt, Artificial Sequence
  Synthetic
caacuuuugguuguuuuu

SEQ ID NO: 691866 - RNA, 19 nt, Artificial Sequence
  Synthetic
gcaacuuuugguuguuuuu

SEQ ID NO: 691867 - RNA, 20 nt, Artificial Sequence
  Synthetic
cgcaacuuuugguuguuuuu

SEQ ID NO: 691868 - RNA, 21 nt, Artificial Sequence
  Synthetic
ucgcaacuuuugguuguuuuu

SEQ ID NO: 691869 - RNA, 22 nt, Artificial Sequence
  Synthetic
aucgcaacuuuugguuguuuuu

SEQ ID NO: 691870 - RNA, 23 nt, Artificial Sequence
  Synthetic
uaucgcaacuuuugguuguuuuu

SEQ ID NO: 691871 - RNA, 24 nt, Artificial Sequence
  Synthetic
cuaucgcaacuuuugguuguuuuu

SEQ ID NO: 691872 - RNA, 18 nt, Artificial Sequence
  Synthetic
uuuuguuuguuuguuuuu

SEQ ID NO: 691873 - RNA, 19 nt, Artificial Sequence
  Synthetic
guuuuguuuguuuguuuuu

SEQ ID NO: 691874 - RNA, 20 nt, Artificial Sequence
  Synthetic
gguuuuguuuguuuguuuuu

SEQ ID NO: 691875 - RNA, 21 nt, Artificial Sequence
  Synthetic
agguuuuguuuguuuguuuuu

SEQ ID NO: 691876 - RNA, 22 nt, Artificial Sequence
  Synthetic
cagguuuuguuuguuuguuuuu

SEQ ID NO: 691877 - RNA, 23 nt, Artificial Sequence
  Synthetic
acagguuuuguuuguuuguuuuu

SEQ ID NO: 691878 - RNA, 24 nt, Artificial Sequence
  Synthetic
cacagguuuuguuuguuuguuuuu

SEQ ID NO: 691879 - RNA, 18 nt, Artificial Sequence
  Synthetic
cugcugcuuuuuguuuuu

SEQ ID NO: 691880 - RNA, 19 nt, Artificial Sequence
  Synthetic
gcugcugcuuuuuguuuuu

SEQ ID NO: 691881 - RNA, 20 nt, Artificial Sequence
  Synthetic
agcugcugcuuuuuguuuuu

SEQ ID NO: 691882 - RNA, 21 nt, Artificial Sequence
  Synthetic
gagcugcugcuuuuuguuuuu

SEQ ID NO: 691883 - RNA, 22 nt, Artificial Sequence
  Synthetic
agagcugcugcuuuuuguuuuu

SEQ ID NO: 691884 - RNA, 23 nt, Artificial Sequence
  Synthetic
cagagcugcugcuuuuuguuuuu

SEQ ID NO: 691885 - RNA, 24 nt, Artificial Sequence
  Synthetic
ucagagcugcugcuuuuuguuuuu

SEQ ID NO: 691886 - RNA, 18 nt, Artificial Sequence
  Synthetic
ugauuucgaaaauuuuuu

SEQ ID NO: 691887 - RNA, 19 nt, Artificial Sequence
  Synthetic
augauuucgaaaauuuuuu

SEQ ID NO: 691888 - RNA, 20 nt, Artificial Sequence
  Synthetic
gaugauuucgaaaauuuuuu

SEQ ID NO: 691889 - RNA, 21 nt, Artificial Sequence
  Synthetic
agaugauuucgaaaauuuuuu

SEQ ID NO: 691890 - RNA, 22 nt, Artificial Sequence
  Synthetic
aagaugauuucgaaaauuuuuu

SEQ ID NO: 691891 - RNA, 23 nt, Artificial Sequence
  Synthetic
aaagaugauuucgaaaauuuuuu

SEQ ID NO: 691892 - RNA, 24 nt, Artificial Sequence
  Synthetic
aaaagaugauuucgaaaauuuuuu

SEQ ID NO: 691893 - RNA, 18 nt, Artificial Sequence
  Synthetic
aucccucauaaauuuuuu

SEQ ID NO: 691894 - RNA, 19 nt, Artificial Sequence
  Synthetic
uaucccucauaaauuuuuu

SEQ ID NO: 691895 - RNA, 20 nt, Artificial Sequence
  Synthetic
uuaucccucauaaauuuuuu

SEQ ID NO: 691896 - RNA, 21 nt, Artificial Sequence
  Synthetic
auuaucccucauaaauuuuuu

SEQ ID NO: 691897 - RNA, 22 nt, Artificial Sequence
  Synthetic
uauuaucccucauaaauuuuuu

SEQ ID NO: 691898 - RNA, 23 nt, Artificial Sequence
  Synthetic
auauuaucccucauaaauuuuuu

SEQ ID NO: 691899 - RNA, 24 nt, Artificial Sequence
  Synthetic
uauauuaucccucauaaauuuuuu

SEQ ID NO: 691900 - RNA, 18 nt, Artificial Sequence
  Synthetic
aaaaccucacaauuuuuu

SEQ ID NO: 691901 - RNA, 19 nt, Artificial Sequence
  Synthetic
aaaaaccucacaauuuuuu

SEQ ID NO: 691902 - RNA, 20 nt, Artificial Sequence
  Synthetic
uaaaaaccucacaauuuuuu

SEQ ID NO: 691903 - RNA, 21 nt, Artificial Sequence
  Synthetic
auaaaaaccucacaauuuuuu

SEQ ID NO: 691904 - RNA, 22 nt, Artificial Sequence
  Synthetic
uauaaaaaccucacaauuuuuu

SEQ ID NO: 691905 - RNA, 23 nt, Artificial Sequence
  Synthetic
uuauaaaaaccucacaauuuuuu

SEQ ID NO: 691906 - RNA, 24 nt, Artificial Sequence
  Synthetic
guuauaaaaaccucacaauuuuuu

SEQ ID NO: 691907 - RNA, 18 nt, Artificial Sequence
  Synthetic
uauguccuugaauuuuuu

SEQ ID NO: 691908 - RNA, 19 nt, Artificial Sequence
  Synthetic
guauguccuugaauuuuuu

SEQ ID NO: 691909 - RNA, 20 nt, Artificial Sequence
  Synthetic
uguauguccuugaauuuuuu

SEQ ID NO: 691910 - RNA, 21 nt, Artificial Sequence
  Synthetic
uuguauguccuugaauuuuuu

SEQ ID NO: 691911 - RNA, 22 nt, Artificial Sequence
  Synthetic
uuuguauguccuugaauuuuuu

SEQ ID NO: 691912 - RNA, 23 nt, Artificial Sequence
  Synthetic
uuuuguauguccuugaauuuuuu

SEQ ID NO: 691913 - RNA, 24 nt, Artificial Sequence
  Synthetic
auuuuguauguccuugaauuuuuu

SEQ ID NO: 691914 - RNA, 18 nt, Artificial Sequence
  Synthetic
ucucuaaccuaauuuuuu

SEQ ID NO: 691915 - RNA, 19 nt, Artificial Sequence
  Synthetic
uucucuaaccuaauuuuuu

SEQ ID NO: 691916 - RNA, 20 nt, Artificial Sequence
  Synthetic
guucucuaaccuaauuuuuu

SEQ ID NO: 691917 - RNA, 21 nt, Artificial Sequence
  Synthetic
aguucucuaaccuaauuuuuu

SEQ ID NO: 691918 - RNA, 22 nt, Artificial Sequence
  Synthetic
uaguucucuaaccuaauuuuuu

SEQ ID NO: 691919 - RNA, 23 nt, Artificial Sequence
  Synthetic
uuaguucucuaaccuaauuuuuu

SEQ ID NO: 691920 - RNA, 24 nt, Artificial Sequence
  Synthetic
auuaguucucuaaccuaauuuuuu

SEQ ID NO: 691921 - RNA, 18 nt, Artificial Sequence
  Synthetic
uucuuucucuaauuuuuu

SEQ ID NO: 691922 - RNA, 19 nt, Artificial Sequence
  Synthetic
cuucuuucucuaauuuuuu

SEQ ID NO: 691923 - RNA, 20 nt, Artificial Sequence
  Synthetic
acuucuuucucuaauuuuuu

SEQ ID NO: 691924 - RNA, 21 nt, Artificial Sequence
  Synthetic
uacuucuuucucuaauuuuuu

SEQ ID NO: 691925 - RNA, 22 nt, Artificial Sequence
  Synthetic
auacuucuuucucuaauuuuuu

SEQ ID NO: 691926 - RNA, 23 nt, Artificial Sequence
  Synthetic
uauacuucuuucucuaauuuuuu

SEQ ID NO: 691927 - RNA, 24 nt, Artificial Sequence
  Synthetic
uuauacuucuuucucuaauuuuuu

SEQ ID NO: 691928 - RNA, 18 nt, Artificial Sequence
  Synthetic
gagcugagagcauuuuuu

SEQ ID NO: 691929 - RNA, 19 nt, Artificial Sequence
  Synthetic
agagcugagagcauuuuuu

SEQ ID NO: 691930 - RNA, 20 nt, Artificial Sequence
  Synthetic
gagagcugagagcauuuuuu

SEQ ID NO: 691931 - RNA, 21 nt, Artificial Sequence
  Synthetic
ugagagcugagagcauuuuuu

SEQ ID NO: 691932 - RNA, 22 nt, Artificial Sequence
  Synthetic
uugagagcugagagcauuuuuu

SEQ ID NO: 691933 - RNA, 23 nt, Artificial Sequence
  Synthetic
cuugagagcugagagcauuuuuu

SEQ ID NO: 691934 - RNA, 24 nt, Artificial Sequence
  Synthetic
acuugagagcugagagcauuuuuu

SEQ ID NO: 691935 - RNA, 18 nt, Artificial Sequence
  Synthetic
uuaguaugaagauuuuuu

SEQ ID NO: 691936 - RNA, 19 nt, Artificial Sequence
  Synthetic
uuuaguaugaagauuuuuu

SEQ ID NO: 691937 - RNA, 20 nt, Artificial Sequence
  Synthetic
uuuuaguaugaagauuuuuu

SEQ ID NO: 691938 - RNA, 21 nt, Artificial Sequence
  Synthetic
cuuuuaguaugaagauuuuuu

SEQ ID NO: 691939 - RNA, 22 nt, Artificial Sequence
  Synthetic
ucuuuuaguaugaagauuuuuu

SEQ ID NO: 691940 - RNA, 23 nt, Artificial Sequence
  Synthetic
aucuuuuaguaugaagauuuuuu

SEQ ID NO: 691941 - RNA, 24 nt, Artificial Sequence
  Synthetic
caucuuuuaguaugaagauuuuuu

SEQ ID NO: 691942 - RNA, 18 nt, Artificial Sequence
  Synthetic
ucucaugagaacuuuuuu

SEQ ID NO: 691943 - RNA, 19 nt, Artificial Sequence
  Synthetic
cucucaugagaacuuuuuu

SEQ ID NO: 691944 - RNA, 20 nt, Artificial Sequence
  Synthetic
ucucucaugagaacuuuuuu

SEQ ID NO: 691945 - RNA, 21 nt, Artificial Sequence
  Synthetic
uucucucaugagaacuuuuuu

SEQ ID NO: 691946 - RNA, 22 nt, Artificial Sequence
  Synthetic
auucucucaugagaacuuuuuu

SEQ ID NO: 691947 - RNA, 23 nt, Artificial Sequence
  Synthetic
uauucucucaugagaacuuuuuu

SEQ ID NO: 691948 - RNA, 24 nt, Artificial Sequence
  Synthetic
auauucucucaugagaacuuuuuu

SEQ ID NO: 691949 - RNA, 18 nt, Artificial Sequence
  Synthetic
acuggacggaacuuuuuu

SEQ ID NO: 691950 - RNA, 19 nt, Artificial Sequence
  Synthetic
cacuggacggaacuuuuuu

SEQ ID NO: 691951 - RNA, 20 nt, Artificial Sequence
  Synthetic
ccacuggacggaacuuuuuu

SEQ ID NO: 691952 - RNA, 21 nt, Artificial Sequence
  Synthetic
accacuggacggaacuuuuuu

SEQ ID NO: 691953 - RNA, 22 nt, Artificial Sequence
  Synthetic
gaccacuggacggaacuuuuuu

SEQ ID NO: 691954 - RNA, 23 nt, Artificial Sequence
  Synthetic
agaccacuggacggaacuuuuuu

SEQ ID NO: 691955 - RNA, 24 nt, Artificial Sequence
  Synthetic
uagaccacuggacggaacuuuuuu

SEQ ID NO: 691956 - RNA, 18 nt, Artificial Sequence
  Synthetic
uagacauuuagcuuuuuu

SEQ ID NO: 691957 - RNA, 19 nt, Artificial Sequence
  Synthetic
uuagacauuuagcuuuuuu

SEQ ID NO: 691958 - RNA, 20 nt, Artificial Sequence
  Synthetic
uuuagacauuuagcuuuuuu

SEQ ID NO: 691959 - RNA, 21 nt, Artificial Sequence
  Synthetic
auuuagacauuuagcuuuuuu

SEQ ID NO: 691960 - RNA, 22 nt, Artificial Sequence
  Synthetic
cauuuagacauuuagcuuuuuu

SEQ ID NO: 691961 - RNA, 23 nt, Artificial Sequence
  Synthetic
acauuuagacauuuagcuuuuuu

SEQ ID NO: 691962 - RNA, 24 nt, Artificial Sequence
  Synthetic
uacauuuagacauuuagcuuuuuu

SEQ ID NO: 691963 - RNA, 18 nt, Artificial Sequence
  Synthetic
agaaguuuugucuuuuuu

SEQ ID NO: 691964 - RNA, 19 nt, Artificial Sequence
  Synthetic
uagaaguuuugucuuuuuu

SEQ ID NO: 691965 - RNA, 20 nt, Artificial Sequence
  Synthetic
cuagaaguuuugucuuuuuu

SEQ ID NO: 691966 - RNA, 21 nt, Artificial Sequence
  Synthetic
ucuagaaguuuugucuuuuuu

SEQ ID NO: 691967 - RNA, 22 nt, Artificial Sequence
  Synthetic
uucuagaaguuuugucuuuuuu

SEQ ID NO: 691968 - RNA, 23 nt, Artificial Sequence
  Synthetic
guucuagaaguuuugucuuuuuu

SEQ ID NO: 691969 - RNA, 24 nt, Artificial Sequence
  Synthetic
uguucuagaaguuuugucuuuuuu

SEQ ID NO: 691970 - RNA, 18 nt, Artificial Sequence
  Synthetic
aaaugaguuuucuuuuuu

SEQ ID NO: 691971 - RNA, 19 nt, Artificial Sequence
  Synthetic
aaaaugaguuuucuuuuuu

SEQ ID NO: 691972 - RNA, 20 nt, Artificial Sequence
  Synthetic
aaaaaugaguuuucuuuuuu

SEQ ID NO: 691973 - RNA, 21 nt, Artificial Sequence
  Synthetic
gaaaaaugaguuuucuuuuuu

SEQ ID NO: 691974 - RNA, 22 nt, Artificial Sequence
  Synthetic
agaaaaaugaguuuucuuuuuu

SEQ ID NO: 691975 - RNA, 23 nt, Artificial Sequence
  Synthetic
aagaaaaaugaguuuucuuuuuu

SEQ ID NO: 691976 - RNA, 24 nt, Artificial Sequence
  Synthetic
uaagaaaaaugaguuuucuuuuuu

SEQ ID NO: 691977 - RNA, 18 nt, Artificial Sequence
  Synthetic
uucuguuuucaguuuuuu

SEQ ID NO: 691978 - RNA, 19 nt, Artificial Sequence
  Synthetic
auucuguuuucaguuuuuu

SEQ ID NO: 691979 - RNA, 20 nt, Artificial Sequence
  Synthetic
aauucuguuuucaguuuuuu

SEQ ID NO: 691980 - RNA, 21 nt, Artificial Sequence
  Synthetic
uaauucuguuuucaguuuuuu

SEQ ID NO: 691981 - RNA, 22 nt, Artificial Sequence
  Synthetic
guaauucuguuuucaguuuuuu

SEQ ID NO: 691982 - RNA, 23 nt, Artificial Sequence
  Synthetic
gguaauucuguuuucaguuuuuu

SEQ ID NO: 691983 - RNA, 24 nt, Artificial Sequence
  Synthetic
ugguaauucuguuuucaguuuuuu

SEQ ID NO: 691984 - RNA, 18 nt, Artificial Sequence
  Synthetic
uuuuguuuuuuguuuuuu

SEQ ID NO: 691985 - RNA, 19 nt, Artificial Sequence
  Synthetic
uuuuuguuuuuuguuuuuu

SEQ ID NO: 691986 - RNA, 20 nt, Artificial Sequence
  Synthetic
uuuuuuguuuuuuguuuuuu

SEQ ID NO: 691987 - RNA, 21 nt, Artificial Sequence
  Synthetic
uuuuuuuguuuuuuguuuuuu

SEQ ID NO: 691988 - RNA, 22 nt, Artificial Sequence
  Synthetic
uuuuuuuuguuuuuuguuuuuu

SEQ ID NO: 691989 - RNA, 23 nt, Artificial Sequence
  Synthetic
uuuuuuuuuguuuuuuguuuuuu

SEQ ID NO: 691990 - RNA, 24 nt, Artificial Sequence
  Synthetic
auuuuuuuuuguuuuuuguuuuuu

SEQ ID NO: 691991 - RNA, 18 nt, Artificial Sequence
  Synthetic
aauuuuuaaaauuuuuuu

SEQ ID NO: 691992 - RNA, 19 nt, Artificial Sequence
  Synthetic
uaauuuuuaaaauuuuuuu

SEQ ID NO: 691993 - RNA, 20 nt, Artificial Sequence
  Synthetic
auaauuuuuaaaauuuuuuu

SEQ ID NO: 691994 - RNA, 21 nt, Artificial Sequence
  Synthetic
gauaauuuuuaaaauuuuuuu

SEQ ID NO: 691995 - RNA, 22 nt, Artificial Sequence
  Synthetic
agauaauuuuuaaaauuuuuuu

SEQ ID NO: 691996 - RNA, 23 nt, Artificial Sequence
  Synthetic
cagauaauuuuuaaaauuuuuuu

SEQ ID NO: 691997 - RNA, 24 nt, Artificial Sequence
  Synthetic
ccagauaauuuuuaaaauuuuuuu

SEQ ID NO: 691998 - RNA, 18 nt, Artificial Sequence
  Synthetic
ugaaagacacauuuuuuu

SEQ ID NO: 691999 - RNA, 19 nt, Artificial Sequence
  Synthetic
uugaaagacacauuuuuuu

SEQ ID NO: 692000 - RNA, 20 nt, Artificial Sequence
  Synthetic
uuugaaagacacauuuuuuu

SEQ ID NO: 692001 - RNA, 21 nt, Artificial Sequence
  Synthetic
uuuugaaagacacauuuuuuu

SEQ ID NO: 692002 - RNA, 22 nt, Artificial Sequence
  Synthetic
auuuugaaagacacauuuuuuu

SEQ ID NO: 692003 - RNA, 23 nt, Artificial Sequence
  Synthetic
uauuuugaaagacacauuuuuuu

SEQ ID NO: 692004 - RNA, 24 nt, Artificial Sequence
  Synthetic
auauuuugaaagacacauuuuuuu

SEQ ID NO: 692005 - RNA, 18 nt, Artificial Sequence
  Synthetic
auuuucuucgauuuuuuu

SEQ ID NO: 692006 - RNA, 19 nt, Artificial Sequence
  Synthetic
gauuuucuucgauuuuuuu

SEQ ID NO: 692007 - RNA, 20 nt, Artificial Sequence
  Synthetic
ugauuuucuucgauuuuuuu

SEQ ID NO: 692008 - RNA, 21 nt, Artificial Sequence
  Synthetic
cugauuuucuucgauuuuuuu

SEQ ID NO: 692009 - RNA, 22 nt, Artificial Sequence
  Synthetic
gcugauuuucuucgauuuuuuu

SEQ ID NO: 692010 - RNA, 23 nt, Artificial Sequence
  Synthetic
agcugauuuucuucgauuuuuuu

SEQ ID NO: 692011 - RNA, 24 nt, Artificial Sequence
  Synthetic
aagcugauuuucuucgauuuuuuu

SEQ ID NO: 692012 - RNA, 18 nt, Artificial Sequence
  Synthetic
uguauuucugauuuuuuu

SEQ ID NO: 692013 - RNA, 19 nt, Artificial Sequence
  Synthetic
uuguauuucugauuuuuuu

SEQ ID NO: 692014 - RNA, 20 nt, Artificial Sequence
  Synthetic
auuguauuucugauuuuuuu

SEQ ID NO: 692015 - RNA, 21 nt, Artificial Sequence
  Synthetic
aauuguauuucugauuuuuuu

SEQ ID NO: 692016 - RNA, 22 nt, Artificial Sequence
  Synthetic
uaauuguauuucugauuuuuuu

SEQ ID NO: 692017 - RNA, 23 nt, Artificial Sequence
  Synthetic
uuaauuguauuucugauuuuuuu

SEQ ID NO: 692018 - RNA, 24 nt, Artificial Sequence
  Synthetic
uuuaauuguauuucugauuuuuuu

SEQ ID NO: 692019 - RNA, 18 nt, Artificial Sequence
  Synthetic
uacacuucuacuuuuuuu

SEQ ID NO: 692020 - RNA, 19 nt, Artificial Sequence
  Synthetic
guacacuucuacuuuuuuu

SEQ ID NO: 692021 - RNA, 20 nt, Artificial Sequence
  Synthetic
aguacacuucuacuuuuuuu

SEQ ID NO: 692022 - RNA, 21 nt, Artificial Sequence
  Synthetic
aaguacacuucuacuuuuuuu

SEQ ID NO: 692023 - RNA, 22 nt, Artificial Sequence
  Synthetic
caaguacacuucuacuuuuuuu

SEQ ID NO: 692024 - RNA, 23 nt, Artificial Sequence
  Synthetic
ucaaguacacuucuacuuuuuuu

SEQ ID NO: 692025 - RNA, 24 nt, Artificial Sequence
  Synthetic
uucaaguacacuucuacuuuuuuu

SEQ ID NO: 692026 - RNA, 18 nt, Artificial Sequence
  Synthetic
ugaaguuuuacuuuuuuu

SEQ ID NO: 692027 - RNA, 19 nt, Artificial Sequence
  Synthetic
augaaguuuuacuuuuuuu

SEQ ID NO: 692028 - RNA, 20 nt, Artificial Sequence
  Synthetic
gaugaaguuuuacuuuuuuu

SEQ ID NO: 692029 - RNA, 21 nt, Artificial Sequence
  Synthetic
agaugaaguuuuacuuuuuuu

SEQ ID NO: 692030 - RNA, 22 nt, Artificial Sequence
  Synthetic
cagaugaaguuuuacuuuuuuu

SEQ ID NO: 692031 - RNA, 23 nt, Artificial Sequence
  Synthetic
acagaugaaguuuuacuuuuuuu

SEQ ID NO: 692032 - RNA, 24 nt, Artificial Sequence
  Synthetic
gacagaugaaguuuuacuuuuuuu

SEQ ID NO: 692033 - RNA, 18 nt, Artificial Sequence
  Synthetic
acaacauucucuuuuuuu

SEQ ID NO: 692034 - RNA, 19 nt, Artificial Sequence
  Synthetic
aacaacauucucuuuuuuu

SEQ ID NO: 692035 - RNA, 20 nt, Artificial Sequence
  Synthetic
uaacaacauucucuuuuuuu

SEQ ID NO: 692036 - RNA, 21 nt, Artificial Sequence
  Synthetic
uuaacaacauucucuuuuuuu

SEQ ID NO: 692037 - RNA, 22 nt, Artificial Sequence
  Synthetic
uuuaacaacauucucuuuuuuu

SEQ ID NO: 692038 - RNA, 23 nt, Artificial Sequence
  Synthetic
cuuuaacaacauucucuuuuuuu

SEQ ID NO: 692039 - RNA, 24 nt, Artificial Sequence
  Synthetic
ucuuuaacaacauucucuuuuuuu

SEQ ID NO: 692040 - RNA, 18 nt, Artificial Sequence
  Synthetic
uuuucuucuucuuuuuuu

SEQ ID NO: 692041 - RNA, 19 nt, Artificial Sequence
  Synthetic
cuuuucuucuucuuuuuuu

SEQ ID NO: 692042 - RNA, 20 nt, Artificial Sequence
  Synthetic
ucuuuucuucuucuuuuuuu

SEQ ID NO: 692043 - RNA, 21 nt, Artificial Sequence
  Synthetic
uucuuuucuucuucuuuuuuu

SEQ ID NO: 692044 - RNA, 22 nt, Artificial Sequence
  Synthetic
guucuuuucuucuucuuuuuuu

SEQ ID NO: 692045 - RNA, 23 nt, Artificial Sequence
  Synthetic
uguucuuuucuucuucuuuuuuu

SEQ ID NO: 692046 - RNA, 24 nt, Artificial Sequence
  Synthetic
auguucuuuucuucuucuuuuuuu

SEQ ID NO: 692047 - RNA, 18 nt, Artificial Sequence
  Synthetic
uuuuuuuuuucuuuuuuu

SEQ ID NO: 692048 - RNA, 19 nt, Artificial Sequence
  Synthetic
uuuuuuuuuuucuuuuuuu

SEQ ID NO: 692049 - RNA, 20 nt, Artificial Sequence
  Synthetic
uuuuuuuuuuuucuuuuuuu

SEQ ID NO: 692050 - RNA, 21 nt, Artificial Sequence
  Synthetic
uuuuuuuuuuuuucuuuuuuu

SEQ ID NO: 692051 - RNA, 22 nt, Artificial Sequence
  Synthetic
uuuuuuuuuuuuuucuuuuuuu

SEQ ID NO: 692052 - RNA, 23 nt, Artificial Sequence
  Synthetic
guuuuuuuuuuuuuucuuuuuuu

SEQ ID NO: 692053 - RNA, 24 nt, Artificial Sequence
  Synthetic
uguuuuuuuuuuuuuucuuuuuuu

SEQ ID NO: 692054 - RNA, 18 nt, Artificial Sequence
  Synthetic
ccugaauauaguuuuuuu

SEQ ID NO: 692055 - RNA, 19 nt, Artificial Sequence
  Synthetic
accugaauauaguuuuuuu

SEQ ID NO: 692056 - RNA, 20 nt, Artificial Sequence
  Synthetic
uaccugaauauaguuuuuuu

SEQ ID NO: 692057 - RNA, 21 nt, Artificial Sequence
  Synthetic
uuaccugaauauaguuuuuuu

SEQ ID NO: 692058 - RNA, 22 nt, Artificial Sequence
  Synthetic
auuaccugaauauaguuuuuuu

SEQ ID NO: 692059 - RNA, 23 nt, Artificial Sequence
  Synthetic
uauuaccugaauauaguuuuuuu

SEQ ID NO: 692060 - RNA, 24 nt, Artificial Sequence
  Synthetic
uuauuaccugaauauaguuuuuuu

SEQ ID NO: 692061 - RNA, 18 nt, Artificial Sequence
  Synthetic
auuuauuuaauuuuuuuu

SEQ ID NO: 692062 - RNA, 19 nt, Artificial Sequence
  Synthetic
uauuuauuuaauuuuuuuu

SEQ ID NO: 692063 - RNA, 20 nt, Artificial Sequence
  Synthetic
uuauuuauuuaauuuuuuuu

SEQ ID NO: 692064 - RNA, 21 nt, Artificial Sequence
  Synthetic
uuuauuuauuuaauuuuuuuu

SEQ ID NO: 692065 - RNA, 22 nt, Artificial Sequence
  Synthetic
auuuauuuauuuaauuuuuuuu

SEQ ID NO: 692066 - RNA, 23 nt, Artificial Sequence
  Synthetic
uauuuauuuauuuaauuuuuuuu

SEQ ID NO: 692067 - RNA, 24 nt, Artificial Sequence
  Synthetic
uuauuuauuuauuuaauuuuuuuu

SEQ ID NO: 692068 - RNA, 18 nt, Artificial Sequence
  Synthetic
cuucucuacauuuuuuuu

SEQ ID NO: 692069 - RNA, 19 nt, Artificial Sequence
  Synthetic
acuucucuacauuuuuuuu

SEQ ID NO: 692070 - RNA, 20 nt, Artificial Sequence
  Synthetic
cacuucucuacauuuuuuuu

SEQ ID NO: 692071 - RNA, 21 nt, Artificial Sequence
  Synthetic
ccacuucucuacauuuuuuuu

SEQ ID NO: 692072 - RNA, 22 nt, Artificial Sequence
  Synthetic
accacuucucuacauuuuuuuu

SEQ ID NO: 692073 - RNA, 23 nt, Artificial Sequence
  Synthetic
aaccacuucucuacauuuuuuuu

SEQ ID NO: 692074 - RNA, 24 nt, Artificial Sequence
  Synthetic
gaaccacuucucuacauuuuuuuu

SEQ ID NO: 692075 - RNA, 18 nt, Artificial Sequence
  Synthetic
cuuucuuuucuuuuuuuu

SEQ ID NO: 692076 - RNA, 19 nt, Artificial Sequence
  Synthetic
ucuuucuuuucuuuuuuuu

SEQ ID NO: 692077 - RNA, 20 nt, Artificial Sequence
  Synthetic
uucuuucuuuucuuuuuuuu

SEQ ID NO: 692078 - RNA, 21 nt, Artificial Sequence
  Synthetic
uuucuuucuuuucuuuuuuuu

SEQ ID NO: 692079 - RNA, 22 nt, Artificial Sequence
  Synthetic
cuuucuuucuuuucuuuuuuuu

SEQ ID NO: 692080 - RNA, 23 nt, Artificial Sequence
  Synthetic
acuuucuuucuuuucuuuuuuuu

SEQ ID NO: 692081 - RNA, 24 nt, Artificial Sequence
  Synthetic
uacuuucuuucuuuucuuuuuuuu

SEQ ID NO: 692082 - RNA, 18 nt, Artificial Sequence
  Synthetic
gaacacuaaguuuuuuuu

SEQ ID NO: 692083 - RNA, 19 nt, Artificial Sequence
  Synthetic
agaacacuaaguuuuuuuu

SEQ ID NO: 692084 - RNA, 20 nt, Artificial Sequence
  Synthetic
uagaacacuaaguuuuuuuu

SEQ ID NO: 692085 - RNA, 21 nt, Artificial Sequence
  Synthetic
auagaacacuaaguuuuuuuu

SEQ ID NO: 692086 - RNA, 22 nt, Artificial Sequence
  Synthetic
gauagaacacuaaguuuuuuuu

SEQ ID NO: 692087 - RNA, 23 nt, Artificial Sequence
  Synthetic
ugauagaacacuaaguuuuuuuu

SEQ ID NO: 692088 - RNA, 24 nt, Artificial Sequence
  Synthetic
cugauagaacacuaaguuuuuuuu

SEQ ID NO: 692089 - RNA, 18 nt, Artificial Sequence
  Synthetic
ugaaugucaguuuuuuuu

SEQ ID NO: 692090 - RNA, 19 nt, Artificial Sequence
  Synthetic
augaaugucaguuuuuuuu

SEQ ID NO: 692091 - RNA, 20 nt, Artificial Sequence
  Synthetic
aaugaaugucaguuuuuuuu

SEQ ID NO: 692092 - RNA, 21 nt, Artificial Sequence
  Synthetic
gaaugaaugucaguuuuuuuu

SEQ ID NO: 692093 - RNA, 22 nt, Artificial Sequence
  Synthetic
agaaugaaugucaguuuuuuuu

SEQ ID NO: 692094 - RNA, 23 nt, Artificial Sequence
  Synthetic
gagaaugaaugucaguuuuuuuu

SEQ ID NO: 692095 - RNA, 24 nt, Artificial Sequence
  Synthetic
agagaaugaaugucaguuuuuuuu

SEQ ID NO: 692096 - RNA, 18 nt, Artificial Sequence
  Synthetic
uauuuucuuguuuuuuuu

SEQ ID NO: 692097 - RNA, 19 nt, Artificial Sequence
  Synthetic
auauuuucuuguuuuuuuu

SEQ ID NO: 692098 - RNA, 20 nt, Artificial Sequence
  Synthetic
aauauuuucuuguuuuuuuu

SEQ ID NO: 692099 - RNA, 21 nt, Artificial Sequence
  Synthetic
uaauauuuucuuguuuuuuuu

SEQ ID NO: 692100 - RNA, 22 nt, Artificial Sequence
  Synthetic
cuaauauuuucuuguuuuuuuu

SEQ ID NO: 692101 - RNA, 23 nt, Artificial Sequence
  Synthetic
ucuaauauuuucuuguuuuuuuu

SEQ ID NO: 692102 - RNA, 24 nt, Artificial Sequence
  Synthetic
uucuaauauuuucuuguuuuuuuu

SEQ ID NO: 692103 - RNA, 18 nt, Artificial Sequence
  Synthetic
guuuguuuuguuuuuuuu

SEQ ID NO: 692104 - RNA, 19 nt, Artificial Sequence
  Synthetic
uguuuguuuuguuuuuuuu

SEQ ID NO: 692105 - RNA, 20 nt, Artificial Sequence
  Synthetic
uuguuuguuuuguuuuuuuu

SEQ ID NO: 692106 - RNA, 21 nt, Artificial Sequence
  Synthetic
uuuguuuguuuuguuuuuuuu

SEQ ID NO: 692107 - RNA, 22 nt, Artificial Sequence
  Synthetic
guuuguuuguuuuguuuuuuuu

SEQ ID NO: 692108 - RNA, 23 nt, Artificial Sequence
  Synthetic
uguuuguuuguuuuguuuuuuuu

SEQ ID NO: 692109 - RNA, 24 nt, Artificial Sequence
  Synthetic
uuguuuguuuguuuuguuuuuuuu

SEQ ID NO: 692110 - RNA, 18 nt, Artificial Sequence
  Synthetic
uuuacagcauuuuuuuuu

SEQ ID NO: 692111 - RNA, 19 nt, Artificial Sequence
  Synthetic
uuuuacagcauuuuuuuuu

SEQ ID NO: 692112 - RNA, 20 nt, Artificial Sequence
  Synthetic
auuuuacagcauuuuuuuuu

SEQ ID NO: 692113 - RNA, 21 nt, Artificial Sequence
  Synthetic
uauuuuacagcauuuuuuuuu

SEQ ID NO: 692114 - RNA, 22 nt, Artificial Sequence
  Synthetic
auauuuuacagcauuuuuuuuu

SEQ ID NO: 692115 - RNA, 23 nt, Artificial Sequence
  Synthetic
uauauuuuacagcauuuuuuuuu

SEQ ID NO: 692116 - RNA, 24 nt, Artificial Sequence
  Synthetic
auauauuuuacagcauuuuuuuuu

SEQ ID NO: 692117 - RNA, 18 nt, Artificial Sequence
  Synthetic
cuaugcuguuuuuuuuuu

SEQ ID NO: 692118 - RNA, 19 nt, Artificial Sequence
  Synthetic
ccuaugcuguuuuuuuuuu

SEQ ID NO: 692119 - RNA, 20 nt, Artificial Sequence
  Synthetic
accuaugcuguuuuuuuuuu

SEQ ID NO: 692120 - RNA, 21 nt, Artificial Sequence
  Synthetic
gaccuaugcuguuuuuuuuuu

SEQ ID NO: 692121 - RNA, 22 nt, Artificial Sequence
  Synthetic
ggaccuaugcuguuuuuuuuuu

SEQ ID NO: 692122 - RNA, 23 nt, Artificial Sequence
  Synthetic
aggaccuaugcuguuuuuuuuuu

SEQ ID NO: 692123 - RNA, 24 nt, Artificial Sequence
  Synthetic
aaggaccuaugcuguuuuuuuuuu

SEQ ID NO: 692124 - RNA, 18 nt, Artificial Sequence
  Synthetic
cccuaaauuuuuuuuuuu

SEQ ID NO: 692125 - RNA, 19 nt, Artificial Sequence
  Synthetic
ccccuaaauuuuuuuuuuu

SEQ ID NO: 692126 - RNA, 20 nt, Artificial Sequence
  Synthetic
cccccuaaauuuuuuuuuuu

SEQ ID NO: 692127 - RNA, 21 nt, Artificial Sequence
  Synthetic
ucccccuaaauuuuuuuuuuu

SEQ ID NO: 692128 - RNA, 22 nt, Artificial Sequence
  Synthetic
uucccccuaaauuuuuuuuuuu

SEQ ID NO: 692129 - RNA, 23 nt, Artificial Sequence
  Synthetic
uuucccccuaaauuuuuuuuuuu

SEQ ID NO: 692130 - RNA, 24 nt, Artificial Sequence
  Synthetic
uuuucccccuaaauuuuuuuuuuu

SEQ ID NO: 692131 - RNA, 18 nt, Artificial Sequence
  Synthetic
ucuuuccuuuuuuuuuuu

SEQ ID NO: 692132 - RNA, 19 nt, Artificial Sequence
  Synthetic
uucuuuccuuuuuuuuuuu

SEQ ID NO: 692133 - RNA, 20 nt, Artificial Sequence
  Synthetic
uuucuuuccuuuuuuuuuuu

SEQ ID NO: 692134 - RNA, 21 nt, Artificial Sequence
  Synthetic
uuuucuuuccuuuuuuuuuuu

SEQ ID NO: 692135 - RNA, 22 nt, Artificial Sequence
  Synthetic
cuuuucuuuccuuuuuuuuuuu

SEQ ID NO: 692136 - RNA, 23 nt, Artificial Sequence
  Synthetic
ucuuuucuuuccuuuuuuuuuuu

SEQ ID NO: 692137 - RNA, 24 nt, Artificial Sequence
  Synthetic
uucuuuucuuuccuuuuuuuuuuu

SEQ ID NO: 692138 - RNA, 18 nt, Artificial Sequence
  Synthetic
aaugacuuuuuuuuuuuu

SEQ ID NO: 692139 - RNA, 19 nt, Artificial Sequence
  Synthetic
gaaugacuuuuuuuuuuuu

SEQ ID NO: 692140 - RNA, 20 nt, Artificial Sequence
  Synthetic
agaaugacuuuuuuuuuuuu

SEQ ID NO: 692141 - RNA, 21 nt, Artificial Sequence
  Synthetic
gagaaugacuuuuuuuuuuuu

SEQ ID NO: 692142 - RNA, 22 nt, Artificial Sequence
  Synthetic
ugagaaugacuuuuuuuuuuuu

SEQ ID NO: 692143 - RNA, 23 nt, Artificial Sequence
  Synthetic
augagaaugacuuuuuuuuuuuu

SEQ ID NO: 692144 - RNA, 24 nt, Artificial Sequence
  Synthetic
caugagaaugacuuuuuuuuuuuu

SEQ ID NO: 692145 - RNA, 18 nt, Artificial Sequence
  Synthetic
ucuuucuuuuuuuuuuuu

SEQ ID NO: 692146 - RNA, 19 nt, Artificial Sequence
  Synthetic
uucuuucuuuuuuuuuuuu

SEQ ID NO: 692147 - RNA, 20 nt, Artificial Sequence
  Synthetic
uuucuuucuuuuuuuuuuuu

SEQ ID NO: 692148 - RNA, 21 nt, Artificial Sequence
  Synthetic
cuuucuuucuuuuuuuuuuuu

SEQ ID NO: 692149 - RNA, 22 nt, Artificial Sequence
  Synthetic
ucuuucuuucuuuuuuuuuuuu

SEQ ID NO: 692150 - RNA, 23 nt, Artificial Sequence
  Synthetic
uucuuucuuucuuuuuuuuuuuu

SEQ ID NO: 692151 - RNA, 24 nt, Artificial Sequence
  Synthetic
uuucuuucuuucuuuuuuuuuuuu

SEQ ID NO: 692152 - RNA, 20 nt, Artificial Sequence
  Synthetic
cagagaauuuuuuuuuuuuu

SEQ ID NO: 692153 - RNA, 21 nt, Artificial Sequence
  Synthetic
gcagagaauuuuuuuuuuuuu

SEQ ID NO: 692154 - RNA, 22 nt, Artificial Sequence
  Synthetic
ugcagagaauuuuuuuuuuuuu

SEQ ID NO: 692155 - RNA, 23 nt, Artificial Sequence
  Synthetic
augcagagaauuuuuuuuuuuuu

SEQ ID NO: 692156 - RNA, 24 nt, Artificial Sequence
  Synthetic
aaugcagagaauuuuuuuuuuuuu

SEQ ID NO: 692157 - RNA, 18 nt, Artificial Sequence
  Synthetic
acacauuuuuuuuuuuuu

SEQ ID NO: 692158 - RNA, 19 nt, Artificial Sequence
  Synthetic
aacacauuuuuuuuuuuuu

SEQ ID NO: 692159 - RNA, 20 nt, Artificial Sequence
  Synthetic
uaacacauuuuuuuuuuuuu

SEQ ID NO: 692160 - RNA, 21 nt, Artificial Sequence
  Synthetic
uuaacacauuuuuuuuuuuuu

SEQ ID NO: 692161 - RNA, 22 nt, Artificial Sequence
  Synthetic
guuaacacauuuuuuuuuuuuu

SEQ ID NO: 692162 - RNA, 23 nt, Artificial Sequence
  Synthetic
uguuaacacauuuuuuuuuuuuu

SEQ ID NO: 692163 - RNA, 24 nt, Artificial Sequence
  Synthetic
cuguuaacacauuuuuuuuuuuuu

SEQ ID NO: 692164 - RNA, 18 nt, Artificial Sequence
  Synthetic
uuuuguuuuuuuuuuuuu

SEQ ID NO: 692165 - RNA, 19 nt, Artificial Sequence
  Synthetic
uuuuuguuuuuuuuuuuuu

SEQ ID NO: 692166 - RNA, 20 nt, Artificial Sequence
  Synthetic
uuuuuuguuuuuuuuuuuuu

SEQ ID NO: 692167 - RNA, 21 nt, Artificial Sequence
  Synthetic
uuuuuuuguuuuuuuuuuuuu

SEQ ID NO: 692168 - RNA, 22 nt, Artificial Sequence
  Synthetic
uuuuuuuuguuuuuuuuuuuuu

SEQ ID NO: 692169 - RNA, 23 nt, Artificial Sequence
  Synthetic
uuuuuuuuuguuuuuuuuuuuuu

SEQ ID NO: 692170 - RNA, 24 nt, Artificial Sequence
  Synthetic
uuuuuuuuuuguuuuuuuuuuuuu

SEQ ID NO: 692171 - RNA, 18 nt, Artificial Sequence
  Synthetic
ccacuuuuuuuuuuuuuu

SEQ ID NO: 692172 - RNA, 19 nt, Artificial Sequence
  Synthetic
accacuuuuuuuuuuuuuu

SEQ ID NO: 692173 - RNA, 20 nt, Artificial Sequence
  Synthetic
uaccacuuuuuuuuuuuuuu

SEQ ID NO: 692174 - RNA, 21 nt, Artificial Sequence
  Synthetic
uuaccacuuuuuuuuuuuuuu

SEQ ID NO: 692175 - RNA, 22 nt, Artificial Sequence
  Synthetic
auuaccacuuuuuuuuuuuuuu

SEQ ID NO: 692176 - RNA, 23 nt, Artificial Sequence
  Synthetic
aauuaccacuuuuuuuuuuuuuu

SEQ ID NO: 692177 - RNA, 24 nt, Artificial Sequence
  Synthetic
caauuaccacuuuuuuuuuuuuuu

SEQ ID NO: 692178 - RNA, 18 nt, Artificial Sequence
  Synthetic
aaucuuuuuuuuuuuuuu

SEQ ID NO: 692179 - RNA, 19 nt, Artificial Sequence
  Synthetic
uaaucuuuuuuuuuuuuuu

SEQ ID NO: 692180 - RNA, 20 nt, Artificial Sequence
  Synthetic
uuaaucuuuuuuuuuuuuuu

SEQ ID NO: 692181 - RNA, 21 nt, Artificial Sequence
  Synthetic
uuuaaucuuuuuuuuuuuuuu

SEQ ID NO: 692182 - RNA, 22 nt, Artificial Sequence
  Synthetic
auuuaaucuuuuuuuuuuuuuu

SEQ ID NO: 692183 - RNA, 23 nt, Artificial Sequence
  Synthetic
gauuuaaucuuuuuuuuuuuuuu

SEQ ID NO: 692184 - RNA, 24 nt, Artificial Sequence
  Synthetic
ugauuuaaucuuuuuuuuuuuuuu

SEQ ID NO: 692185 - RNA, 18 nt, Artificial Sequence
  Synthetic
auucuuuuuuuuuuuuuu

SEQ ID NO: 692186 - RNA, 19 nt, Artificial Sequence
  Synthetic
uauucuuuuuuuuuuuuuu

SEQ ID NO: 692187 - RNA, 20 nt, Artificial Sequence
  Synthetic
auauucuuuuuuuuuuuuuu

SEQ ID NO: 692188 - RNA, 21 nt, Artificial Sequence
  Synthetic
aauauucuuuuuuuuuuuuuu

SEQ ID NO: 692189 - RNA, 22 nt, Artificial Sequence
  Synthetic
gaauauucuuuuuuuuuuuuuu

SEQ ID NO: 692190 - RNA, 23 nt, Artificial Sequence
  Synthetic
ggaauauucuuuuuuuuuuuuuu

SEQ ID NO: 692191 - RNA, 24 nt, Artificial Sequence
  Synthetic
gggaauauucuuuuuuuuuuuuuu

SEQ ID NO: 692192 - RNA, 18 nt, Artificial Sequence
  Synthetic
uuucuuuuuuuuuuuuuu

SEQ ID NO: 692193 - RNA, 19 nt, Artificial Sequence
  Synthetic
uuuucuuuuuuuuuuuuuu

SEQ ID NO: 692194 - RNA, 20 nt, Artificial Sequence
  Synthetic
uuuuucuuuuuuuuuuuuuu

SEQ ID NO: 692195 - RNA, 21 nt, Artificial Sequence
  Synthetic
cuuuuucuuuuuuuuuuuuuu

SEQ ID NO: 692196 - RNA, 22 nt, Artificial Sequence
  Synthetic
ucuuuuucuuuuuuuuuuuuuu

SEQ ID NO: 692197 - RNA, 23 nt, Artificial Sequence
  Synthetic
uucuuuuucuuuuuuuuuuuuuu

SEQ ID NO: 692198 - RNA, 24 nt, Artificial Sequence
  Synthetic
uuucuuuuucuuuuuuuuuuuuuu

SEQ ID NO: 692199 - RNA, 18 nt, Artificial Sequence
  Synthetic
uuguuuuuuuuuuuuuuu

SEQ ID NO: 692200 - RNA, 19 nt, Artificial Sequence
  Synthetic
uuuguuuuuuuuuuuuuuu

SEQ ID NO: 692201 - RNA, 20 nt, Artificial Sequence
  Synthetic
uuuuguuuuuuuuuuuuuuu

SEQ ID NO: 692202 - RNA, 21 nt, Artificial Sequence
  Synthetic
auuuuguuuuuuuuuuuuuuu

SEQ ID NO: 692203 - RNA, 22 nt, Artificial Sequence
  Synthetic
uauuuuguuuuuuuuuuuuuuu

SEQ ID NO: 692204 - RNA, 23 nt, Artificial Sequence
  Synthetic
auauuuuguuuuuuuuuuuuuuu

SEQ ID NO: 692205 - RNA, 24 nt, Artificial Sequence
  Synthetic
uauauuuuguuuuuuuuuuuuuuu

SEQ ID NO: 692206 - RNA, 18 nt, Artificial Sequence
  Synthetic
aauuuuuuuuuuuuuuuu

SEQ ID NO: 692207 - RNA, 19 nt, Artificial Sequence
  Synthetic
uaauuuuuuuuuuuuuuuu

SEQ ID NO: 692208 - RNA, 20 nt, Artificial Sequence
  Synthetic
auaauuuuuuuuuuuuuuuu

SEQ ID NO: 692209 - RNA, 21 nt, Artificial Sequence
  Synthetic
cauaauuuuuuuuuuuuuuuu

SEQ ID NO: 692210 - RNA, 22 nt, Artificial Sequence
  Synthetic
acauaauuuuuuuuuuuuuuuu

SEQ ID NO: 692211 - RNA, 23 nt, Artificial Sequence
  Synthetic
gacauaauuuuuuuuuuuuuuuu

SEQ ID NO: 692212 - RNA, 24 nt, Artificial Sequence
  Synthetic
ugacauaauuuuuuuuuuuuuuuu

SEQ ID NO: 692213 - RNA, 18 nt, Artificial Sequence
  Synthetic
ucuuuuuuuuuuuuuuuu

SEQ ID NO: 692214 - RNA, 19 nt, Artificial Sequence
  Synthetic
uucuuuuuuuuuuuuuuuu

SEQ ID NO: 692215 - RNA, 20 nt, Artificial Sequence
  Synthetic
cuucuuuuuuuuuuuuuuuu

SEQ ID NO: 692216 - RNA, 21 nt, Artificial Sequence
  Synthetic
ucuucuuuuuuuuuuuuuuuu

SEQ ID NO: 692217 - RNA, 22 nt, Artificial Sequence
  Synthetic
uucuucuuuuuuuuuuuuuuuu

SEQ ID NO: 692218 - RNA, 23 nt, Artificial Sequence
  Synthetic
uuucuucuuuuuuuuuuuuuuuu

SEQ ID NO: 692219 - RNA, 24 nt, Artificial Sequence
  Synthetic
auuucuucuuuuuuuuuuuuuuuu

SEQ ID NO: 692220 - RNA, 18 nt, Artificial Sequence
  Synthetic
cuuuuuuuuuuuuuuuuu

SEQ ID NO: 692221 - RNA, 19 nt, Artificial Sequence
  Synthetic
ucuuuuuuuuuuuuuuuuu

SEQ ID NO: 692222 - RNA, 20 nt, Artificial Sequence
  Synthetic
cucuuuuuuuuuuuuuuuuu

SEQ ID NO: 692223 - RNA, 21 nt, Artificial Sequence
  Synthetic
gcucuuuuuuuuuuuuuuuuu

SEQ ID NO: 692224 - RNA, 22 nt, Artificial Sequence
  Synthetic
ugcucuuuuuuuuuuuuuuuuu

SEQ ID NO: 692225 - RNA, 23 nt, Artificial Sequence
  Synthetic
cugcucuuuuuuuuuuuuuuuuu

SEQ ID NO: 692226 - RNA, 24 nt, Artificial Sequence
  Synthetic
acugcucuuuuuuuuuuuuuuuuu

SEQ ID NO: 692227 - RNA, 18 nt, Artificial Sequence
  Synthetic
uuuuuuuuuuuuuuuuuu

SEQ ID NO: 692228 - RNA, 19 nt, Artificial Sequence
  Synthetic
auuuuuuuuuuuuuuuuuu

SEQ ID NO: 692229 - RNA, 20 nt, Artificial Sequence
  Synthetic
aauuuuuuuuuuuuuuuuuu

SEQ ID NO: 692230 - RNA, 21 nt, Artificial Sequence
  Synthetic
caauuuuuuuuuuuuuuuuuu

SEQ ID NO: 692231 - RNA, 22 nt, Artificial Sequence
  Synthetic
ucaauuuuuuuuuuuuuuuuuu

SEQ ID NO: 692232 - RNA, 23 nt, Artificial Sequence
  Synthetic
cucaauuuuuuuuuuuuuuuuuu

SEQ ID NO: 692233 - RNA, 24 nt, Artificial Sequence
  Synthetic
acucaauuuuuuuuuuuuuuuuuu

SEQ ID NO: 692234 - RNA, 20 nt, Artificial Sequence
  Synthetic
uauuuuuuuuuuuuuuuuuu

SEQ ID NO: 692235 - RNA, 21 nt, Artificial Sequence
  Synthetic
guauuuuuuuuuuuuuuuuuu

SEQ ID NO: 692236 - RNA, 22 nt, Artificial Sequence
  Synthetic
aguauuuuuuuuuuuuuuuuuu

SEQ ID NO: 692237 - RNA, 23 nt, Artificial Sequence
  Synthetic
uaguauuuuuuuuuuuuuuuuuu

SEQ ID NO: 692238 - RNA, 24 nt, Artificial Sequence
  Synthetic
uuaguauuuuuuuuuuuuuuuuuu

SEQ ID NO: 692239 - RNA, 19 nt, Artificial Sequence
  Synthetic
cuuuuuuuuuuuuuuuuuu

SEQ ID NO: 692240 - RNA, 20 nt, Artificial Sequence
  Synthetic
ucuuuuuuuuuuuuuuuuuu

SEQ ID NO: 692241 - RNA, 21 nt, Artificial Sequence
  Synthetic
uucuuuuuuuuuuuuuuuuuu

SEQ ID NO: 692242 - RNA, 22 nt, Artificial Sequence
  Synthetic
uuucuuuuuuuuuuuuuuuuuu

SEQ ID NO: 692243 - RNA, 23 nt, Artificial Sequence
  Synthetic
uuuucuuuuuuuuuuuuuuuuuu

SEQ ID NO: 692244 - RNA, 24 nt, Artificial Sequence
  Synthetic
uuuuucuuuuuuuuuuuuuuuuuu

SEQ ID NO: 692245 - RNA, 22 nt, Artificial Sequence
  Synthetic
ccuuuuuuuuuuuuuuuuuuuu

SEQ ID NO: 692246 - RNA, 23 nt, Artificial Sequence
  Synthetic
cccuuuuuuuuuuuuuuuuuuuu

SEQ ID NO: 692247 - RNA, 24 nt, Artificial Sequence
  Synthetic
acccuuuuuuuuuuuuuuuuuuuu

SEQ ID NO: 692248 - RNA, 23 nt, Artificial Sequence
  Synthetic
auuuuuuuuuuuuuuuuuuuuuu

SEQ ID NO: 692249 - RNA, 24 nt, Artificial Sequence
  Synthetic
aauuuuuuuuuuuuuuuuuuuuuu

SEQ ID NO: 692250 - RNA, 23 nt, Artificial Sequence
  Synthetic
cuuuuuuuuuuuuuuuuuuuuuu

SEQ ID NO: 692251 - RNA, 24 nt, Artificial Sequence
  Synthetic
ucuuuuuuuuuuuuuuuuuuuuuu

SEQ ID NO: 692252 - RNA, 24 nt, Artificial Sequence
  Synthetic
uuuuuuuuuuuuuuuuuuuuuuuu

SEQ ID NO: 692253 - RNA, 17 nt, Artificial Sequence
  Synthetic
gcuagucguuacaaaaa

SEQ ID NO: 692254 - RNA, 17 nt, Artificial Sequence
  Synthetic
gguaacaugguccaaaa

SEQ ID NO: 692255 - RNA, 17 nt, Artificial Sequence
  Synthetic
ggcucgcuuauagaaaa

SEQ ID NO: 692256 - RNA, 17 nt, Artificial Sequence
  Synthetic
gacuggcuuaucgaaaa

SEQ ID NO: 692257 - RNA, 17 nt, Artificial Sequence
  Synthetic
gaucgcuuaguggcaaa

SEQ ID NO: 692258 - RNA, 17 nt, Artificial Sequence
  Synthetic
gcccgaggcacaucaaa

SEQ ID NO: 692259 - RNA, 17 nt, Artificial Sequence
  Synthetic
gcuguauagccccgaaa

SEQ ID NO: 692260 - RNA, 17 nt, Artificial Sequence
  Synthetic
guuauacuggcccgaaa

SEQ ID NO: 692261 - RNA, 17 nt, Artificial Sequence
  Synthetic
ggcuggucauccggaaa

SEQ ID NO: 692262 - RNA, 17 nt, Artificial Sequence
  Synthetic
gccucccuaaugggaaa

SEQ ID NO: 692263 - RNA, 17 nt, Artificial Sequence
  Synthetic
gccauuugcgagauaaa

SEQ ID NO: 692264 - RNA, 17 nt, Artificial Sequence
  Synthetic
gucauacuccguauaaa

SEQ ID NO: 692265 - RNA, 17 nt, Artificial Sequence
  Synthetic
gaccgaaaagcacuaaa

SEQ ID NO: 692266 - RNA, 17 nt, Artificial Sequence
  Synthetic
gacgagccaaggcuaaa

SEQ ID NO: 692267 - RNA, 17 nt, Artificial Sequence
  Synthetic
guacggacugugcuaaa

SEQ ID NO: 692268 - RNA, 17 nt, Artificial Sequence
  Synthetic
gccugcugcguaguaaa

SEQ ID NO: 692269 - RNA, 17 nt, Artificial Sequence
  Synthetic
gucucgaacuugaacaa

SEQ ID NO: 692270 - RNA, 17 nt, Artificial Sequence
  Synthetic
ggacuagguuguaacaa

SEQ ID NO: 692271 - RNA, 17 nt, Artificial Sequence
  Synthetic
gacggguccagacacaa

SEQ ID NO: 692272 - RNA, 17 nt, Artificial Sequence
  Synthetic
gucaagaguuaguacaa

SEQ ID NO: 692273 - RNA, 17 nt, Artificial Sequence
  Synthetic
gaaaaacguccuuacaa

SEQ ID NO: 692274 - RNA, 17 nt, Artificial Sequence
  Synthetic
ggaucuauuuguaccaa

SEQ ID NO: 692275 - RNA, 17 nt, Artificial Sequence
  Synthetic
guccuaauagaccccaa

SEQ ID NO: 692276 - RNA, 17 nt, Artificial Sequence
  Synthetic
guaucgacacacagcaa

SEQ ID NO: 692277 - RNA, 17 nt, Artificial Sequence
  Synthetic
guuggcauaaccaucaa

SEQ ID NO: 692278 - RNA, 17 nt, Artificial Sequence
  Synthetic
gccacaucgcauaucaa

SEQ ID NO: 692279 - RNA, 17 nt, Artificial Sequence
  Synthetic
ggugcaaaguuccucaa

SEQ ID NO: 692280 - RNA, 17 nt, Artificial Sequence
  Synthetic
gcaaaugcgguauucaa

SEQ ID NO: 692281 - RNA, 17 nt, Artificial Sequence
  Synthetic
gauacgcuugaguucaa

SEQ ID NO: 692282 - RNA, 17 nt, Artificial Sequence
  Synthetic
gcgcuauauuauuucaa

SEQ ID NO: 692283 - RNA, 17 nt, Artificial Sequence
  Synthetic
gcuagauaaaacgagaa

SEQ ID NO: 692284 - RNA, 17 nt, Artificial Sequence
  Synthetic
gcuugugaaaucgagaa

SEQ ID NO: 692285 - RNA, 17 nt, Artificial Sequence
  Synthetic
gcucuaugggauuagaa

SEQ ID NO: 692286 - RNA, 17 nt, Artificial Sequence
  Synthetic
guggaugucaggacgaa

SEQ ID NO: 692287 - RNA, 17 nt, Artificial Sequence
  Synthetic
gagccuaguuauacgaa

SEQ ID NO: 692288 - RNA, 17 nt, Artificial Sequence
  Synthetic
guggaggcaguuacgaa

SEQ ID NO: 692289 - RNA, 17 nt, Artificial Sequence
  Synthetic
ggcuuuauagcugcgaa

SEQ ID NO: 692290 - RNA, 17 nt, Artificial Sequence
  Synthetic
guuugaaugucugcgaa

SEQ ID NO: 692291 - RNA, 17 nt, Artificial Sequence
  Synthetic
gucuuaacaagaucgaa

SEQ ID NO: 692292 - RNA, 17 nt, Artificial Sequence
  Synthetic
gcuaucacguaggggaa

SEQ ID NO: 692293 - RNA, 17 nt, Artificial Sequence
  Synthetic
gaagcccguaaauggaa

SEQ ID NO: 692294 - RNA, 17 nt, Artificial Sequence
  Synthetic
gcucgaagagguuggaa

SEQ ID NO: 692295 - RNA, 17 nt, Artificial Sequence
  Synthetic
gcucaaucugauaugaa

SEQ ID NO: 692296 - RNA, 17 nt, Artificial Sequence
  Synthetic
ggacuggggcuaaauaa

SEQ ID NO: 692297 - RNA, 17 nt, Artificial Sequence
  Synthetic
gagccaguaccgaauaa

SEQ ID NO: 692298 - RNA, 17 nt, Artificial Sequence
  Synthetic
gcagggguugagcauaa

SEQ ID NO: 692299 - RNA, 17 nt, Artificial Sequence
  Synthetic
gcacgauagugucauaa

SEQ ID NO: 692300 - RNA, 17 nt, Artificial Sequence
  Synthetic
gacaaugacugguauaa

SEQ ID NO: 692301 - RNA, 17 nt, Artificial Sequence
  Synthetic
ggguguuagagaacuaa

SEQ ID NO: 692302 - RNA, 17 nt, Artificial Sequence
  Synthetic
ggucccacugucacuaa

SEQ ID NO: 692303 - RNA, 17 nt, Artificial Sequence
  Synthetic
gcuaccucacauacuaa

SEQ ID NO: 692304 - RNA, 17 nt, Artificial Sequence
  Synthetic
gguuacuugauaccuaa

SEQ ID NO: 692305 - RNA, 17 nt, Artificial Sequence
  Synthetic
gaucaccgcauagcuaa

SEQ ID NO: 692306 - RNA, 17 nt, Artificial Sequence
  Synthetic
gcauuugaaaccgcuaa

SEQ ID NO: 692307 - RNA, 17 nt, Artificial Sequence
  Synthetic
guauguuggccugcuaa

SEQ ID NO: 692308 - RNA, 17 nt, Artificial Sequence
  Synthetic
guagcucagagugcuaa

SEQ ID NO: 692309 - RNA, 17 nt, Artificial Sequence
  Synthetic
gugaaacgagagucuaa

SEQ ID NO: 692310 - RNA, 17 nt, Artificial Sequence
  Synthetic
gucaacacugcccguaa

SEQ ID NO: 692311 - RNA, 17 nt, Artificial Sequence
  Synthetic
gcuacacuuucucguaa

SEQ ID NO: 692312 - RNA, 17 nt, Artificial Sequence
  Synthetic
guaucccagagguguaa

SEQ ID NO: 692313 - RNA, 17 nt, Artificial Sequence
  Synthetic
guuauuccaaccauuaa

SEQ ID NO: 692314 - RNA, 17 nt, Artificial Sequence
  Synthetic
ggugcaugaaaccuuaa

SEQ ID NO: 692315 - RNA, 17 nt, Artificial Sequence
  Synthetic
ggucaagagagccuuaa

SEQ ID NO: 692316 - RNA, 17 nt, Artificial Sequence
  Synthetic
gauggacgauuucuuaa

SEQ ID NO: 692317 - RNA, 17 nt, Artificial Sequence
  Synthetic
gacuguagguguguuaa

SEQ ID NO: 692318 - RNA, 17 nt, Artificial Sequence
  Synthetic
gaaccgccaaaauuuaa

SEQ ID NO: 692319 - RNA, 17 nt, Artificial Sequence
  Synthetic
gccgcucuucggaaaca

SEQ ID NO: 692320 - RNA, 17 nt, Artificial Sequence
  Synthetic
ggaauggcacguaaaca

SEQ ID NO: 692321 - RNA, 17 nt, Artificial Sequence
  Synthetic
guguugcaaccccaaca

SEQ ID NO: 692322 - RNA, 17 nt, Artificial Sequence
  Synthetic
gccguaucuuuagaaca

SEQ ID NO: 692323 - RNA, 17 nt, Artificial Sequence
  Synthetic
gcggggaauuaauaaca

SEQ ID NO: 692324 - RNA, 17 nt, Artificial Sequence
  Synthetic
ggcugucgacauuaaca

SEQ ID NO: 692325 - RNA, 17 nt, Artificial Sequence
  Synthetic
gaacguacauauuaaca

SEQ ID NO: 692326 - RNA, 17 nt, Artificial Sequence
  Synthetic
guuacuaccguuuaaca

SEQ ID NO: 692327 - RNA, 17 nt, Artificial Sequence
  Synthetic
gacuguagguagccaca

SEQ ID NO: 692328 - RNA, 17 nt, Artificial Sequence
  Synthetic
guucauaguaguccaca

SEQ ID NO: 692329 - RNA, 17 nt, Artificial Sequence
  Synthetic
ggcaaaccggugucaca

SEQ ID NO: 692330 - RNA, 17 nt, Artificial Sequence
  Synthetic
gucguagcagauugaca

SEQ ID NO: 692331 - RNA, 17 nt, Artificial Sequence
  Synthetic
gcauaaccgcaacuaca

SEQ ID NO: 692332 - RNA, 17 nt, Artificial Sequence
  Synthetic
gauauaggaccacuaca

SEQ ID NO: 692333 - RNA, 17 nt, Artificial Sequence
  Synthetic
gguucauuagaccuaca

SEQ ID NO: 692334 - RNA, 17 nt, Artificial Sequence
  Synthetic
guaacguagacauuaca

SEQ ID NO: 692335 - RNA, 17 nt, Artificial Sequence
  Synthetic
gccccuacaucauuaca

SEQ ID NO: 692336 - RNA, 17 nt, Artificial Sequence
  Synthetic
ggucuaaguaacuuaca

SEQ ID NO: 692337 - RNA, 17 nt, Artificial Sequence
  Synthetic
gcuacacguaauuuaca

SEQ ID NO: 692338 - RNA, 17 nt, Artificial Sequence
  Synthetic
guucgauccuugaacca

SEQ ID NO: 692339 - RNA, 17 nt, Artificial Sequence
  Synthetic
gucaauauaugcgacca

SEQ ID NO: 692340 - RNA, 17 nt, Artificial Sequence
  Synthetic
gcaugcauaauugacca

SEQ ID NO: 692341 - RNA, 17 nt, Artificial Sequence
  Synthetic
guucuuaccuaauacca

SEQ ID NO: 692342 - RNA, 17 nt, Artificial Sequence
  Synthetic
gaguguuauuaguacca

SEQ ID NO: 692343 - RNA, 17 nt, Artificial Sequence
  Synthetic
gcgaauuuuccuuacca

SEQ ID NO: 692344 - RNA, 17 nt, Artificial Sequence
  Synthetic
gcacagaucuacuccca

SEQ ID NO: 692345 - RNA, 17 nt, Artificial Sequence
  Synthetic
gucguauuguugugcca

SEQ ID NO: 692346 - RNA, 17 nt, Artificial Sequence
  Synthetic
guagucacguggaucca

SEQ ID NO: 692347 - RNA, 17 nt, Artificial Sequence
  Synthetic
guagguaauccucucca

SEQ ID NO: 692348 - RNA, 17 nt, Artificial Sequence
  Synthetic
gauauaaacagcgucca

SEQ ID NO: 692349 - RNA, 17 nt, Artificial Sequence
  Synthetic
guugcccauacuuucca

SEQ ID NO: 692350 - RNA, 17 nt, Artificial Sequence
  Synthetic
gcgcucagugaaaagca

SEQ ID NO: 692351 - RNA, 17 nt, Artificial Sequence
  Synthetic
gauaugcucucucagca

SEQ ID NO: 692352 - RNA, 17 nt, Artificial Sequence
  Synthetic
gaguuagaacacuagca

SEQ ID NO: 692353 - RNA, 17 nt, Artificial Sequence
  Synthetic
guaacaauauuuacgca

SEQ ID NO: 692354 - RNA, 17 nt, Artificial Sequence
  Synthetic
gcaaguauucucccgca

SEQ ID NO: 692355 - RNA, 17 nt, Artificial Sequence
  Synthetic
gauuggacugucucgca

SEQ ID NO: 692356 - RNA, 17 nt, Artificial Sequence
  Synthetic
ggcaaacuaucaaugca

SEQ ID NO: 692357 - RNA, 17 nt, Artificial Sequence
  Synthetic
gauaugagacccaugca

SEQ ID NO: 692358 - RNA, 17 nt, Artificial Sequence
  Synthetic
gguacggaauggaugca

SEQ ID NO: 692359 - RNA, 17 nt, Artificial Sequence
  Synthetic
guacagcuacugaauca

SEQ ID NO: 692360 - RNA, 17 nt, Artificial Sequence
  Synthetic
gauaggcaggguaauca

SEQ ID NO: 692361 - RNA, 17 nt, Artificial Sequence
  Synthetic
ggaugucuaauuaauca

SEQ ID NO: 692362 - RNA, 17 nt, Artificial Sequence
  Synthetic
gcuacggguguacauca

SEQ ID NO: 692363 - RNA, 17 nt, Artificial Sequence
  Synthetic
gggagguacucucauca

SEQ ID NO: 692364 - RNA, 17 nt, Artificial Sequence
  Synthetic
gcauuaaccguguauca

SEQ ID NO: 692365 - RNA, 17 nt, Artificial Sequence
  Synthetic
guaccaauaucuuauca

SEQ ID NO: 692366 - RNA, 17 nt, Artificial Sequence
  Synthetic
gcacucacgaaaccuca

SEQ ID NO: 692367 - RNA, 17 nt, Artificial Sequence
  Synthetic
gaccauugaggcccuca

SEQ ID NO: 692368 - RNA, 17 nt, Artificial Sequence
  Synthetic
gaucguggucauccuca

SEQ ID NO: 692369 - RNA, 17 nt, Artificial Sequence
  Synthetic
gcugcuuagucuaguca

SEQ ID NO: 692370 - RNA, 17 nt, Artificial Sequence
  Synthetic
ggagugcauuuccguca

SEQ ID NO: 692371 - RNA, 17 nt, Artificial Sequence
  Synthetic
ggccgcucaggguguca

SEQ ID NO: 692372 - RNA, 17 nt, Artificial Sequence
  Synthetic
guuaggucacgcauuca

SEQ ID NO: 692373 - RNA, 17 nt, Artificial Sequence
  Synthetic
ggcucauagccacuuca

SEQ ID NO: 692374 - RNA, 17 nt, Artificial Sequence
  Synthetic
guacacaaggccguuca

SEQ ID NO: 692375 - RNA, 17 nt, Artificial Sequence
  Synthetic
ggccucgauuucguuca

SEQ ID NO: 692376 - RNA, 17 nt, Artificial Sequence
  Synthetic
gacagucgaaagguuca

SEQ ID NO: 692377 - RNA, 17 nt, Artificial Sequence
  Synthetic
ggaacucgacuaaaaga

SEQ ID NO: 692378 - RNA, 17 nt, Artificial Sequence
  Synthetic
guagggcccguuaaaga

SEQ ID NO: 692379 - RNA, 17 nt, Artificial Sequence
  Synthetic
gaucaagaccgguaaga

SEQ ID NO: 692380 - RNA, 17 nt, Artificial Sequence
  Synthetic
guuacgaccuugacaga

SEQ ID NO: 692381 - RNA, 17 nt, Artificial Sequence
  Synthetic
ggcccuuaguauccaga

SEQ ID NO: 692382 - RNA, 17 nt, Artificial Sequence
  Synthetic
gcuaguacuaauugaga

SEQ ID NO: 692383 - RNA, 17 nt, Artificial Sequence
  Synthetic
gcuugcucaauaauaga

SEQ ID NO: 692384 - RNA, 17 nt, Artificial Sequence
  Synthetic
gcguuuagacacauaga

SEQ ID NO: 692385 - RNA, 17 nt, Artificial Sequence
  Synthetic
guagccccuacccuaga

SEQ ID NO: 692386 - RNA, 17 nt, Artificial Sequence
  Synthetic
gccauuuggcggguaga

SEQ ID NO: 692387 - RNA, 17 nt, Artificial Sequence
  Synthetic
ggaggaacucguuuaga

SEQ ID NO: 692388 - RNA, 17 nt, Artificial Sequence
  Synthetic
ggaagcacguauuacga

SEQ ID NO: 692389 - RNA, 17 nt, Artificial Sequence
  Synthetic
gauuucagaguuuacga

SEQ ID NO: 692390 - RNA, 17 nt, Artificial Sequence
  Synthetic
guagcaaacagaaccga

SEQ ID NO: 692391 - RNA, 17 nt, Artificial Sequence
  Synthetic
gacccgaacagaaccga

SEQ ID NO: 692392 - RNA, 17 nt, Artificial Sequence
  Synthetic
gccccaauauacaccga

SEQ ID NO: 692393 - RNA, 17 nt, Artificial Sequence
  Synthetic
ggugaauuagcacccga

SEQ ID NO: 692394 - RNA, 17 nt, Artificial Sequence
  Synthetic
ggaaaaauugugcccga

SEQ ID NO: 692395 - RNA, 17 nt, Artificial Sequence
  Synthetic
gcacaggaaugggccga

SEQ ID NO: 692396 - RNA, 17 nt, Artificial Sequence
  Synthetic
gcucacuaacauggcga

SEQ ID NO: 692397 - RNA, 17 nt, Artificial Sequence
  Synthetic
gcgagguuucugcucga

SEQ ID NO: 692398 - RNA, 17 nt, Artificial Sequence
  Synthetic
gauaaguggaaguucga

SEQ ID NO: 692399 - RNA, 17 nt, Artificial Sequence
  Synthetic
gcugcguaguaaaagga

SEQ ID NO: 692400 - RNA, 17 nt, Artificial Sequence
  Synthetic
gagucaccucaauagga

SEQ ID NO: 692401 - RNA, 17 nt, Artificial Sequence
  Synthetic
gccgguaaucuguagga

SEQ ID NO: 692402 - RNA, 17 nt, Artificial Sequence
  Synthetic
gugucacuuauugcgga

SEQ ID NO: 692403 - RNA, 17 nt, Artificial Sequence
  Synthetic
gauucaggccaaucgga

SEQ ID NO: 692404 - RNA, 17 nt, Artificial Sequence
  Synthetic
gaucaacagauacggga

SEQ ID NO: 692405 - RNA, 17 nt, Artificial Sequence
  Synthetic
ggcguuuguauggggga

SEQ ID NO: 692406 - RNA, 17 nt, Artificial Sequence
  Synthetic
guguauuggccugggga

SEQ ID NO: 692407 - RNA, 17 nt, Artificial Sequence
  Synthetic
gcacaccauaauuggga

SEQ ID NO: 692408 - RNA, 17 nt, Artificial Sequence
  Synthetic
gucugcuuaacuaugga

SEQ ID NO: 692409 - RNA, 17 nt, Artificial Sequence
  Synthetic
gcccuuacuauacugga

SEQ ID NO: 692410 - RNA, 17 nt, Artificial Sequence
  Synthetic
ggguggguaacccauga

SEQ ID NO: 692411 - RNA, 17 nt, Artificial Sequence
  Synthetic
gggcacucaacgcauga

SEQ ID NO: 692412 - RNA, 17 nt, Artificial Sequence
  Synthetic
gaucucucugacgauga

SEQ ID NO: 692413 - RNA, 17 nt, Artificial Sequence
  Synthetic
gaccacgcuauugauga

SEQ ID NO: 692414 - RNA, 17 nt, Artificial Sequence
  Synthetic
gaucuagcauaaccuga

SEQ ID NO: 692415 - RNA, 17 nt, Artificial Sequence
  Synthetic
gucaugccuaacucuga

SEQ ID NO: 692416 - RNA, 17 nt, Artificial Sequence
  Synthetic
guuuaagucuaagguga

SEQ ID NO: 692417 - RNA, 17 nt, Artificial Sequence
  Synthetic
ggcuaguuacggcuuga

SEQ ID NO: 692418 - RNA, 17 nt, Artificial Sequence
  Synthetic
guauuggacacucuuga

SEQ ID NO: 692419 - RNA, 17 nt, Artificial Sequence
  Synthetic
gacuaagcagcaguuga

SEQ ID NO: 692420 - RNA, 17 nt, Artificial Sequence
  Synthetic
guguuaacaaacguuga

SEQ ID NO: 692421 - RNA, 17 nt, Artificial Sequence
  Synthetic
guaacuagcacuguuga

SEQ ID NO: 692422 - RNA, 17 nt, Artificial Sequence
  Synthetic
gccgauucugaggaaua

SEQ ID NO: 692423 - RNA, 17 nt, Artificial Sequence
  Synthetic
gcgucuuaacuauaaua

SEQ ID NO: 692424 - RNA, 17 nt, Artificial Sequence
  Synthetic
gaccuucgucuauaaua

SEQ ID NO: 692425 - RNA, 17 nt, Artificial Sequence
  Synthetic
gggcacaaccuaacaua

SEQ ID NO: 692426 - RNA, 17 nt, Artificial Sequence
  Synthetic
guaggccauaggacaua

SEQ ID NO: 692427 - RNA, 17 nt, Artificial Sequence
  Synthetic
gagugucaugauccaua

SEQ ID NO: 692428 - RNA, 17 nt, Artificial Sequence
  Synthetic
gucguuuagggaucaua

SEQ ID NO: 692429 - RNA, 17 nt, Artificial Sequence
  Synthetic
gacuaagccuuuggaua

SEQ ID NO: 692430 - RNA, 17 nt, Artificial Sequence
  Synthetic
ggcuuauccucuugaua

SEQ ID NO: 692431 - RNA, 17 nt, Artificial Sequence
  Synthetic
gccacugugcuccuaua

SEQ ID NO: 692432 - RNA, 17 nt, Artificial Sequence
  Synthetic
guccaccuuagaguaua

SEQ ID NO: 692433 - RNA, 17 nt, Artificial Sequence
  Synthetic
guguaacguggcuuaua

SEQ ID NO: 692434 - RNA, 17 nt, Artificial Sequence
  Synthetic
guuagggcuccuuuaua

SEQ ID NO: 692435 - RNA, 17 nt, Artificial Sequence
  Synthetic
gccaaccccuaagacua

SEQ ID NO: 692436 - RNA, 17 nt, Artificial Sequence
  Synthetic
gcaacuacaagggacua

SEQ ID NO: 692437 - RNA, 17 nt, Artificial Sequence
  Synthetic
gcacccucuggauacua

SEQ ID NO: 692438 - RNA, 17 nt, Artificial Sequence
  Synthetic
ggaauagguaucaccua

SEQ ID NO: 692439 - RNA, 17 nt, Artificial Sequence
  Synthetic
gucucccacaugaccua

SEQ ID NO: 692440 - RNA, 17 nt, Artificial Sequence
  Synthetic
guugccaaaauccccua

SEQ ID NO: 692441 - RNA, 17 nt, Artificial Sequence
  Synthetic
gauaucagguuucccua

SEQ ID NO: 692442 - RNA, 17 nt, Artificial Sequence
  Synthetic
gacuuuuaagaggccua

SEQ ID NO: 692443 - RNA, 17 nt, Artificial Sequence
  Synthetic
gucaaguagaaugccua

SEQ ID NO: 692444 - RNA, 17 nt, Artificial Sequence
  Synthetic
gucuaucuuauugccua

SEQ ID NO: 692445 - RNA, 17 nt, Artificial Sequence
  Synthetic
guggguguauuugccua

SEQ ID NO: 692446 - RNA, 17 nt, Artificial Sequence
  Synthetic
gcuagcuaggggagcua

SEQ ID NO: 692447 - RNA, 17 nt, Artificial Sequence
  Synthetic
guggcaaguuggagcua

SEQ ID NO: 692448 - RNA, 17 nt, Artificial Sequence
  Synthetic
gaaugcaaaggacgcua

SEQ ID NO: 692449 - RNA, 17 nt, Artificial Sequence
  Synthetic
gcuguagccugacgcua

SEQ ID NO: 692450 - RNA, 17 nt, Artificial Sequence
  Synthetic
guucaaagauuacgcua

SEQ ID NO: 692451 - RNA, 17 nt, Artificial Sequence
  Synthetic
gaacucuuccaccgcua

SEQ ID NO: 692452 - RNA, 17 nt, Artificial Sequence
  Synthetic
gcaucgauagcaugcua

SEQ ID NO: 692453 - RNA, 17 nt, Artificial Sequence
  Synthetic
gggggcacaaggaucua

SEQ ID NO: 692454 - RNA, 17 nt, Artificial Sequence
  Synthetic
gucguaacauauaucua

SEQ ID NO: 692455 - RNA, 17 nt, Artificial Sequence
  Synthetic
guaggcguuuggcucua

SEQ ID NO: 692456 - RNA, 17 nt, Artificial Sequence
  Synthetic
guuggauaaccagucua

SEQ ID NO: 692457 - RNA, 17 nt, Artificial Sequence
  Synthetic
gugucuucgauugucua

SEQ ID NO: 692458 - RNA, 17 nt, Artificial Sequence
  Synthetic
gcccgggaauagaagua

SEQ ID NO: 692459 - RNA, 17 nt, Artificial Sequence
  Synthetic
gacggaagcuagcagua

SEQ ID NO: 692460 - RNA, 17 nt, Artificial Sequence
  Synthetic
gccccuuauuaggagua

SEQ ID NO: 692461 - RNA, 17 nt, Artificial Sequence
  Synthetic
gugagccggaaugagua

SEQ ID NO: 692462 - RNA, 17 nt, Artificial Sequence
  Synthetic
guaggccgaaacuagua

SEQ ID NO: 692463 - RNA, 17 nt, Artificial Sequence
  Synthetic
gaucguagacauuagua

SEQ ID NO: 692464 - RNA, 17 nt, Artificial Sequence
  Synthetic
guggcaauuacaacgua

SEQ ID NO: 692465 - RNA, 17 nt, Artificial Sequence
  Synthetic
gaguugauaagcacgua

SEQ ID NO: 692466 - RNA, 17 nt, Artificial Sequence
  Synthetic
gcauuaucaaucacgua

SEQ ID NO: 692467 - RNA, 17 nt, Artificial Sequence
  Synthetic
guuucccccgggacgua

SEQ ID NO: 692468 - RNA, 17 nt, Artificial Sequence
  Synthetic
gccugcaacgcuacgua

SEQ ID NO: 692469 - RNA, 17 nt, Artificial Sequence
  Synthetic
gguguaauccuaaggua

SEQ ID NO: 692470 - RNA, 17 nt, Artificial Sequence
  Synthetic
gugguguucgggaggua

SEQ ID NO: 692471 - RNA, 17 nt, Artificial Sequence
  Synthetic
gagaguaacaucuggua

SEQ ID NO: 692472 - RNA, 17 nt, Artificial Sequence
  Synthetic
gcucacucuucgaugua

SEQ ID NO: 692473 - RNA, 17 nt, Artificial Sequence
  Synthetic
gcaauccaaaggaugua

SEQ ID NO: 692474 - RNA, 17 nt, Artificial Sequence
  Synthetic
ggcgaccuugggaugua

SEQ ID NO: 692475 - RNA, 17 nt, Artificial Sequence
  Synthetic
gcuugcugguuagugua

SEQ ID NO: 692476 - RNA, 17 nt, Artificial Sequence
  Synthetic
ggcuaugccuuugugua

SEQ ID NO: 692477 - RNA, 17 nt, Artificial Sequence
  Synthetic
gguugccauacauugua

SEQ ID NO: 692478 - RNA, 17 nt, Artificial Sequence
  Synthetic
gcaucagagccauugua

SEQ ID NO: 692479 - RNA, 17 nt, Artificial Sequence
  Synthetic
gccuuguauccuuugua

SEQ ID NO: 692480 - RNA, 17 nt, Artificial Sequence
  Synthetic
gauagggacguaaauua

SEQ ID NO: 692481 - RNA, 17 nt, Artificial Sequence
  Synthetic
gcguagugugcagauua

SEQ ID NO: 692482 - RNA, 17 nt, Artificial Sequence
  Synthetic
gguaaaacacgagauua

SEQ ID NO: 692483 - RNA, 17 nt, Artificial Sequence
  Synthetic
gaguuggcucgggauua

SEQ ID NO: 692484 - RNA, 17 nt, Artificial Sequence
  Synthetic
ggccagaagagcuauua

SEQ ID NO: 692485 - RNA, 17 nt, Artificial Sequence
  Synthetic
guaggaucuauaccuua

SEQ ID NO: 692486 - RNA, 17 nt, Artificial Sequence
  Synthetic
gucuuacuuaggaguua

SEQ ID NO: 692487 - RNA, 17 nt, Artificial Sequence
  Synthetic
gugguuguuaucuguua

SEQ ID NO: 692488 - RNA, 17 nt, Artificial Sequence
  Synthetic
ggagcgagacaaauuua

SEQ ID NO: 692489 - RNA, 17 nt, Artificial Sequence
  Synthetic
gccauacaaagccuuua

SEQ ID NO: 692490 - RNA, 17 nt, Artificial Sequence
  Synthetic
gcggcauuucuaguuua

SEQ ID NO: 692491 - RNA, 17 nt, Artificial Sequence
  Synthetic
gguucugaagucguuua

SEQ ID NO: 692492 - RNA, 17 nt, Artificial Sequence
  Synthetic
gguaacgcauagguuua

SEQ ID NO: 692493 - RNA, 17 nt, Artificial Sequence
  Synthetic
gcuccccaagcauuuua

SEQ ID NO: 692494 - RNA, 17 nt, Artificial Sequence
  Synthetic
gucucuccacgcuuuua

SEQ ID NO: 692495 - RNA, 17 nt, Artificial Sequence
  Synthetic
ggacaggaugcguuuua

SEQ ID NO: 692496 - RNA, 17 nt, Artificial Sequence
  Synthetic
gggccagguagguuuua

SEQ ID NO: 692497 - RNA, 17 nt, Artificial Sequence
  Synthetic
gcgacuugguuguuuua

SEQ ID NO: 692498 - RNA, 17 nt, Artificial Sequence
  Synthetic
gaguagcuccuuaaaac

SEQ ID NO: 692499 - RNA, 17 nt, Artificial Sequence
  Synthetic
gaauggcugcgucaaac

SEQ ID NO: 692500 - RNA, 17 nt, Artificial Sequence
  Synthetic
gcaguuauccuauaaac

SEQ ID NO: 692501 - RNA, 17 nt, Artificial Sequence
  Synthetic
gcaaacguggguacaac

SEQ ID NO: 692502 - RNA, 17 nt, Artificial Sequence
  Synthetic
gguaagucgugaccaac

SEQ ID NO: 692503 - RNA, 17 nt, Artificial Sequence
  Synthetic
guggaaccuaagucaac

SEQ ID NO: 692504 - RNA, 17 nt, Artificial Sequence
  Synthetic
gguggugccgauucaac

SEQ ID NO: 692505 - RNA, 17 nt, Artificial Sequence
  Synthetic
gggccgugucuaagaac

SEQ ID NO: 692506 - RNA, 17 nt, Artificial Sequence
  Synthetic
gaggguaaauggcgaac

SEQ ID NO: 692507 - RNA, 17 nt, Artificial Sequence
  Synthetic
ggaccucuccaaugaac

SEQ ID NO: 692508 - RNA, 17 nt, Artificial Sequence
  Synthetic
gugcuuauacuaugaac

SEQ ID NO: 692509 - RNA, 17 nt, Artificial Sequence
  Synthetic
gcaacgcugaucugaac

SEQ ID NO: 692510 - RNA, 17 nt, Artificial Sequence
  Synthetic
gcuacguucaauugaac

SEQ ID NO: 692511 - RNA, 17 nt, Artificial Sequence
  Synthetic
gcauguacgauaauaac

SEQ ID NO: 692512 - RNA, 17 nt, Artificial Sequence
  Synthetic
ggcggggaauuaauaac

SEQ ID NO: 692513 - RNA, 17 nt, Artificial Sequence
  Synthetic
gcuauccugauccuaac

SEQ ID NO: 692514 - RNA, 17 nt, Artificial Sequence
  Synthetic
gauauaucacagcuaac

SEQ ID NO: 692515 - RNA, 17 nt, Artificial Sequence
  Synthetic
gcuuuguguaagguaac

SEQ ID NO: 692516 - RNA, 17 nt, Artificial Sequence
  Synthetic
ggagcgcagaauuuaac

SEQ ID NO: 692517 - RNA, 17 nt, Artificial Sequence
  Synthetic
gcguacaaguguuuaac

SEQ ID NO: 692518 - RNA, 17 nt, Artificial Sequence
  Synthetic
gcugaguacgugaacac

SEQ ID NO: 692519 - RNA, 17 nt, Artificial Sequence
  Synthetic
guacacaguucuaacac

SEQ ID NO: 692520 - RNA, 17 nt, Artificial Sequence
  Synthetic
gugcaguagcaacacac

SEQ ID NO: 692521 - RNA, 17 nt, Artificial Sequence
  Synthetic
ggagucucaugacacac

SEQ ID NO: 692522 - RNA, 17 nt, Artificial Sequence
  Synthetic
gugugccauacgcacac

SEQ ID NO: 692523 - RNA, 17 nt, Artificial Sequence
  Synthetic
gcuugcaagcuauacac

SEQ ID NO: 692524 - RNA, 17 nt, Artificial Sequence
  Synthetic
gaagugaauuacuacac

SEQ ID NO: 692525 - RNA, 17 nt, Artificial Sequence
  Synthetic
gauuaaauaggguacac

SEQ ID NO: 692526 - RNA, 17 nt, Artificial Sequence
  Synthetic
gguauuugagguaccac

SEQ ID NO: 692527 - RNA, 17 nt, Artificial Sequence
  Synthetic
gcuaaugacuaucccac

SEQ ID NO: 692528 - RNA, 17 nt, Artificial Sequence
  Synthetic
gaucauuaaucggccac

SEQ ID NO: 692529 - RNA, 17 nt, Artificial Sequence
  Synthetic
gagcaggcuuguagcac

SEQ ID NO: 692530 - RNA, 17 nt, Artificial Sequence
  Synthetic
gcaacaaaaccuggcac

SEQ ID NO: 692531 - RNA, 17 nt, Artificial Sequence
  Synthetic
gucauaacaguuggcac

SEQ ID NO: 692532 - RNA, 17 nt, Artificial Sequence
  Synthetic
ggcugacuagugaucac

SEQ ID NO: 692533 - RNA, 17 nt, Artificial Sequence
  Synthetic
ggcgccaugcucuucac

SEQ ID NO: 692534 - RNA, 17 nt, Artificial Sequence
  Synthetic
guuagauacaaacagac

SEQ ID NO: 692535 - RNA, 17 nt, Artificial Sequence
  Synthetic
guuauauguacccagac

SEQ ID NO: 692536 - RNA, 17 nt, Artificial Sequence
  Synthetic
guaacugacuggcagac

SEQ ID NO: 692537 - RNA, 17 nt, Artificial Sequence
  Synthetic
guagaacucccuuagac

SEQ ID NO: 692538 - RNA, 17 nt, Artificial Sequence
  Synthetic
guguuucgaaacaggac

SEQ ID NO: 692539 - RNA, 17 nt, Artificial Sequence
  Synthetic
guccugccgaacaggac

SEQ ID NO: 692540 - RNA, 17 nt, Artificial Sequence
  Synthetic
guccucgugguagggac

SEQ ID NO: 692541 - RNA, 17 nt, Artificial Sequence
  Synthetic
gauuaucugcccaugac

SEQ ID NO: 692542 - RNA, 17 nt, Artificial Sequence
  Synthetic
gggauccuaguuaugac

SEQ ID NO: 692543 - RNA, 17 nt, Artificial Sequence
  Synthetic
guaaaacuuauccugac

SEQ ID NO: 692544 - RNA, 17 nt, Artificial Sequence
  Synthetic
gcucaucauauggugac

SEQ ID NO: 692545 - RNA, 17 nt, Artificial Sequence
  Synthetic
gguugucaauaacauac

SEQ ID NO: 692546 - RNA, 17 nt, Artificial Sequence
  Synthetic
gguauuauaguacauac

SEQ ID NO: 692547 - RNA, 17 nt, Artificial Sequence
  Synthetic
gcauuccuccaccauac

SEQ ID NO: 692548 - RNA, 17 nt, Artificial Sequence
  Synthetic
gguucacacggauauac

SEQ ID NO: 692549 - RNA, 17 nt, Artificial Sequence
  Synthetic
gacuagugcuacuauac

SEQ ID NO: 692550 - RNA, 17 nt, Artificial Sequence
  Synthetic
ggagccuguaaguauac

SEQ ID NO: 692551 - RNA, 17 nt, Artificial Sequence
  Synthetic
gacuaaucagguuauac

SEQ ID NO: 692552 - RNA, 17 nt, Artificial Sequence
  Synthetic
ggauauaggaccacuac

SEQ ID NO: 692553 - RNA, 17 nt, Artificial Sequence
  Synthetic
gggcgagguguuacuac

SEQ ID NO: 692554 - RNA, 17 nt, Artificial Sequence
  Synthetic
gcguuagaauugccuac

SEQ ID NO: 692555 - RNA, 17 nt, Artificial Sequence
  Synthetic
guucaaucgguagcuac

SEQ ID NO: 692556 - RNA, 17 nt, Artificial Sequence
  Synthetic
gcauauacguuuucuac

SEQ ID NO: 692557 - RNA, 17 nt, Artificial Sequence
  Synthetic
guagccacagggaguac

SEQ ID NO: 692558 - RNA, 17 nt, Artificial Sequence
  Synthetic
gcaaucgcuauagguac

SEQ ID NO: 692559 - RNA, 17 nt, Artificial Sequence
  Synthetic
gaauugacacuagguac

SEQ ID NO: 692560 - RNA, 17 nt, Artificial Sequence
  Synthetic
gcaauuuaaguggguac

SEQ ID NO: 692561 - RNA, 17 nt, Artificial Sequence
  Synthetic
guugucauagauuguac

SEQ ID NO: 692562 - RNA, 17 nt, Artificial Sequence
  Synthetic
gacaaggacgauuguac

SEQ ID NO: 692563 - RNA, 17 nt, Artificial Sequence
  Synthetic
gccauccuacagauuac

SEQ ID NO: 692564 - RNA, 17 nt, Artificial Sequence
  Synthetic
ggagagcaucagauuac

SEQ ID NO: 692565 - RNA, 17 nt, Artificial Sequence
  Synthetic
gauggguucacacuuac

SEQ ID NO: 692566 - RNA, 17 nt, Artificial Sequence
  Synthetic
ggauccaguauacuuac

SEQ ID NO: 692567 - RNA, 17 nt, Artificial Sequence
  Synthetic
gccgguuuuauaguuac

SEQ ID NO: 692568 - RNA, 17 nt, Artificial Sequence
  Synthetic
guuguguuacucguuac

SEQ ID NO: 692569 - RNA, 17 nt, Artificial Sequence
  Synthetic
gauccagaucaauuuac

SEQ ID NO: 692570 - RNA, 17 nt, Artificial Sequence
  Synthetic
ggcuacacguaauuuac

SEQ ID NO: 692571 - RNA, 17 nt, Artificial Sequence
  Synthetic
gccaagcgccuauuuac

SEQ ID NO: 692572 - RNA, 17 nt, Artificial Sequence
  Synthetic
gugaacuugguguuuac

SEQ ID NO: 692573 - RNA, 17 nt, Artificial Sequence
  Synthetic
guacuccucacaaaacc

SEQ ID NO: 692574 - RNA, 17 nt, Artificial Sequence
  Synthetic
ggacaacacacuaaacc

SEQ ID NO: 692575 - RNA, 17 nt, Artificial Sequence
  Synthetic
gugcauuuaguugaacc

SEQ ID NO: 692576 - RNA, 17 nt, Artificial Sequence
  Synthetic
ggacacuuuaccuaacc

SEQ ID NO: 692577 - RNA, 17 nt, Artificial Sequence
  Synthetic
guugaaucggcaccacc

SEQ ID NO: 692578 - RNA, 17 nt, Artificial Sequence
  Synthetic
gaccagguccguccacc

SEQ ID NO: 692579 - RNA, 17 nt, Artificial Sequence
  Synthetic
guuagggaugaagcacc

SEQ ID NO: 692580 - RNA, 17 nt, Artificial Sequence
  Synthetic
gucaacaaucagucacc

SEQ ID NO: 692581 - RNA, 17 nt, Artificial Sequence
  Synthetic
gucaguuuuuagucacc

SEQ ID NO: 692582 - RNA, 17 nt, Artificial Sequence
  Synthetic
guaucaucuacaagacc

SEQ ID NO: 692583 - RNA, 17 nt, Artificial Sequence
  Synthetic
gauacagugucucgacc

SEQ ID NO: 692584 - RNA, 17 nt, Artificial Sequence
  Synthetic
ggggaugucuuaggacc

SEQ ID NO: 692585 - RNA, 17 nt, Artificial Sequence
  Synthetic
gacuuucuaaguggacc

SEQ ID NO: 692586 - RNA, 17 nt, Artificial Sequence
  Synthetic
ggcaugcauaauugacc

SEQ ID NO: 692587 - RNA, 17 nt, Artificial Sequence
  Synthetic
ggaaucucucaaauacc

SEQ ID NO: 692588 - RNA, 17 nt, Artificial Sequence
  Synthetic
gacaggcuagacauacc

SEQ ID NO: 692589 - RNA, 17 nt, Artificial Sequence
  Synthetic
gagcaugaugaucuacc

SEQ ID NO: 692590 - RNA, 17 nt, Artificial Sequence
  Synthetic
gguaguaaaauucuacc

SEQ ID NO: 692591 - RNA, 17 nt, Artificial Sequence
  Synthetic
gucaacuaacggguacc

SEQ ID NO: 692592 - RNA, 17 nt, Artificial Sequence
  Synthetic
ggagugguguaauuacc

SEQ ID NO: 692593 - RNA, 17 nt, Artificial Sequence
  Synthetic
gguuuggaccaacaccc

SEQ ID NO: 692594 - RNA, 17 nt, Artificial Sequence
  Synthetic
gcucuuuaggcuuaccc

SEQ ID NO: 692595 - RNA, 17 nt, Artificial Sequence
  Synthetic
guccaagcaucgccccc

SEQ ID NO: 692596 - RNA, 17 nt, Artificial Sequence
  Synthetic
gucuaaugaaguagccc

SEQ ID NO: 692597 - RNA, 17 nt, Artificial Sequence
  Synthetic
guuggaauaguuagccc

SEQ ID NO: 692598 - RNA, 17 nt, Artificial Sequence
  Synthetic
gaaguaacccauauccc

SEQ ID NO: 692599 - RNA, 17 nt, Artificial Sequence
  Synthetic
gugcugcaaaaucuccc

SEQ ID NO: 692600 - RNA, 17 nt, Artificial Sequence
  Synthetic
ggaccuuagcaucagcc

SEQ ID NO: 692601 - RNA, 17 nt, Artificial Sequence
  Synthetic
ggcuuauaucuggagcc

SEQ ID NO: 692602 - RNA, 17 nt, Artificial Sequence
  Synthetic
gagcucgugauugagcc

SEQ ID NO: 692603 - RNA, 17 nt, Artificial Sequence
  Synthetic
gaauaacuugcauagcc

SEQ ID NO: 692604 - RNA, 17 nt, Artificial Sequence
  Synthetic
gacacggagagauagcc

SEQ ID NO: 692605 - RNA, 17 nt, Artificial Sequence
  Synthetic
ggggccauucaagcgcc

SEQ ID NO: 692606 - RNA, 17 nt, Artificial Sequence
  Synthetic
gauacuaacuaggggcc

SEQ ID NO: 692607 - RNA, 17 nt, Artificial Sequence
  Synthetic
guaacgaggaacuggcc

SEQ ID NO: 692608 - RNA, 17 nt, Artificial Sequence
  Synthetic
gauauaucuaggaugcc

SEQ ID NO: 692609 - RNA, 17 nt, Artificial Sequence
  Synthetic
gcacugcacgcuaugcc

SEQ ID NO: 692610 - RNA, 17 nt, Artificial Sequence
  Synthetic
gcagguccacgacugcc

SEQ ID NO: 692611 - RNA, 17 nt, Artificial Sequence
  Synthetic
gauugacuucggcugcc

SEQ ID NO: 692612 - RNA, 17 nt, Artificial Sequence
  Synthetic
gcuaguuuuaguuugcc

SEQ ID NO: 692613 - RNA, 17 nt, Artificial Sequence
  Synthetic
ggguguuggacaaaucc

SEQ ID NO: 692614 - RNA, 17 nt, Artificial Sequence
  Synthetic
gaauggacuacuaaucc

SEQ ID NO: 692615 - RNA, 17 nt, Artificial Sequence
  Synthetic
gcggacgggacagaucc

SEQ ID NO: 692616 - RNA, 17 nt, Artificial Sequence
  Synthetic
gcuauccguggggaucc

SEQ ID NO: 692617 - RNA, 17 nt, Artificial Sequence
  Synthetic
gccuauaaguuugaucc

SEQ ID NO: 692618 - RNA, 17 nt, Artificial Sequence
  Synthetic
gccguugguugauaucc

SEQ ID NO: 692619 - RNA, 17 nt, Artificial Sequence
  Synthetic
gagagauggaucuaucc

SEQ ID NO: 692620 - RNA, 17 nt, Artificial Sequence
  Synthetic
guaacugccucaacucc

SEQ ID NO: 692621 - RNA, 17 nt, Artificial Sequence
  Synthetic
gacccgaaggacccucc

SEQ ID NO: 692622 - RNA, 17 nt, Artificial Sequence
  Synthetic
gcaaguuaguguagucc

SEQ ID NO: 692623 - RNA, 17 nt, Artificial Sequence
  Synthetic
gaacauauagguggucc

SEQ ID NO: 692624 - RNA, 17 nt, Artificial Sequence
  Synthetic
gucaucaggagaauucc

SEQ ID NO: 692625 - RNA, 17 nt, Artificial Sequence
  Synthetic
ggaauacucucgauucc

SEQ ID NO: 692626 - RNA, 17 nt, Artificial Sequence
  Synthetic
gucgagugauuucuucc

SEQ ID NO: 692627 - RNA, 17 nt, Artificial Sequence
  Synthetic
gcccaaaaucguguucc

SEQ ID NO: 692628 - RNA, 17 nt, Artificial Sequence
  Synthetic
gccaccuaaagguuucc

SEQ ID NO: 692629 - RNA, 17 nt, Artificial Sequence
  Synthetic
gugcaguguguuaaagc

SEQ ID NO: 692630 - RNA, 17 nt, Artificial Sequence
  Synthetic
guauggaccuuguaagc

SEQ ID NO: 692631 - RNA, 17 nt, Artificial Sequence
  Synthetic
guaccgggaugaacagc

SEQ ID NO: 692632 - RNA, 17 nt, Artificial Sequence
  Synthetic
gaacuauucagcacagc

SEQ ID NO: 692633 - RNA, 17 nt, Artificial Sequence
  Synthetic
gccaacgaaggcacagc

SEQ ID NO: 692634 - RNA, 17 nt, Artificial Sequence
  Synthetic
gcaaacaacgagacagc

SEQ ID NO: 692635 - RNA, 17 nt, Artificial Sequence
  Synthetic
gguaucggauaggcagc

SEQ ID NO: 692636 - RNA, 17 nt, Artificial Sequence
  Synthetic
gguagucuagcaagagc

SEQ ID NO: 692637 - RNA, 17 nt, Artificial Sequence
  Synthetic
gauuaaccaaucagagc

SEQ ID NO: 692638 - RNA, 17 nt, Artificial Sequence
  Synthetic
gaauuugguuuaugagc

SEQ ID NO: 692639 - RNA, 17 nt, Artificial Sequence
  Synthetic
gccaagauuccccuagc

SEQ ID NO: 692640 - RNA, 17 nt, Artificial Sequence
  Synthetic
ggcauuaugucgguagc

SEQ ID NO: 692641 - RNA, 17 nt, Artificial Sequence
  Synthetic
gcuggcaucccccccgc

SEQ ID NO: 692642 - RNA, 17 nt, Artificial Sequence
  Synthetic
gggggcuuugcugccgc

SEQ ID NO: 692643 - RNA, 17 nt, Artificial Sequence
  Synthetic
gcaguugccggugccgc

SEQ ID NO: 692644 - RNA, 17 nt, Artificial Sequence
  Synthetic
gcaguguuaguaagcgc

SEQ ID NO: 692645 - RNA, 17 nt, Artificial Sequence
  Synthetic
gaacugcaccucaucgc

SEQ ID NO: 692646 - RNA, 17 nt, Artificial Sequence
  Synthetic
ggaggucccaggaucgc

SEQ ID NO: 692647 - RNA, 17 nt, Artificial Sequence
  Synthetic
gcaccaccuacagucgc

SEQ ID NO: 692648 - RNA, 17 nt, Artificial Sequence
  Synthetic
gugauagugcuacaggc

SEQ ID NO: 692649 - RNA, 17 nt, Artificial Sequence
  Synthetic
gauucaagcuaugcggc

SEQ ID NO: 692650 - RNA, 17 nt, Artificial Sequence
  Synthetic
ggccuguccuguucggc

SEQ ID NO: 692651 - RNA, 17 nt, Artificial Sequence
  Synthetic
guaauuggcccaugggc

SEQ ID NO: 692652 - RNA, 17 nt, Artificial Sequence
  Synthetic
gagcccuacaucugggc

SEQ ID NO: 692653 - RNA, 17 nt, Artificial Sequence
  Synthetic
gccguaguagggugggc

SEQ ID NO: 692654 - RNA, 17 nt, Artificial Sequence
  Synthetic
gcaaaacuacucauggc

SEQ ID NO: 692655 - RNA, 17 nt, Artificial Sequence
  Synthetic
ggguuugcugccguggc

SEQ ID NO: 692656 - RNA, 17 nt, Artificial Sequence
  Synthetic
gagucaggcaauuuggc

SEQ ID NO: 692657 - RNA, 17 nt, Artificial Sequence
  Synthetic
guacgaacuccuuuggc

SEQ ID NO: 692658 - RNA, 17 nt, Artificial Sequence
  Synthetic
gcugccaaucuaaaugc

SEQ ID NO: 692659 - RNA, 17 nt, Artificial Sequence
  Synthetic
gauaguauacucaaugc

SEQ ID NO: 692660 - RNA, 17 nt, Artificial Sequence
  Synthetic
gaaacaaaucgagaugc

SEQ ID NO: 692661 - RNA, 17 nt, Artificial Sequence
  Synthetic
gacauagccugcgaugc

SEQ ID NO: 692662 - RNA, 17 nt, Artificial Sequence
  Synthetic
gggcuaacguggacugc

SEQ ID NO: 692663 - RNA, 17 nt, Artificial Sequence
  Synthetic
gaagcuaucuuuacugc

SEQ ID NO: 692664 - RNA, 17 nt, Artificial Sequence
  Synthetic
gcuagcugaucaucugc

SEQ ID NO: 692665 - RNA, 17 nt, Artificial Sequence
  Synthetic
guaaucggugggucugc

SEQ ID NO: 692666 - RNA, 17 nt, Artificial Sequence
  Synthetic
ggguuauucagaugugc

SEQ ID NO: 692667 - RNA, 17 nt, Artificial Sequence
  Synthetic
guuauuauugccugugc

SEQ ID NO: 692668 - RNA, 17 nt, Artificial Sequence
  Synthetic
gucucccgucacauugc

SEQ ID NO: 692669 - RNA, 17 nt, Artificial Sequence
  Synthetic
gcuaugugcuuacuugc

SEQ ID NO: 692670 - RNA, 17 nt, Artificial Sequence
  Synthetic
gggggaaaaccucuugc

SEQ ID NO: 692671 - RNA, 17 nt, Artificial Sequence
  Synthetic
gccuuacguagcguugc

SEQ ID NO: 692672 - RNA, 17 nt, Artificial Sequence
  Synthetic
ggguugaggucacaauc

SEQ ID NO: 692673 - RNA, 17 nt, Artificial Sequence
  Synthetic
gcaagugaaguucaauc

SEQ ID NO: 692674 - RNA, 17 nt, Artificial Sequence
  Synthetic
gcgcgcaaaaauuaauc

SEQ ID NO: 692675 - RNA, 17 nt, Artificial Sequence
  Synthetic
guagauuacaguacauc

SEQ ID NO: 692676 - RNA, 17 nt, Artificial Sequence
  Synthetic
gacagcuugcgaccauc

SEQ ID NO: 692677 - RNA, 17 nt, Artificial Sequence
  Synthetic
gauaccuaguggccauc

SEQ ID NO: 692678 - RNA, 17 nt, Artificial Sequence
  Synthetic
gaugcuuacuguccauc

SEQ ID NO: 692679 - RNA, 17 nt, Artificial Sequence
  Synthetic
gggugauccuuagcauc

SEQ ID NO: 692680 - RNA, 17 nt, Artificial Sequence
  Synthetic
ggaagacaauaugcauc

SEQ ID NO: 692681 - RNA, 17 nt, Artificial Sequence
  Synthetic
guaguccauuuugcauc

SEQ ID NO: 692682 - RNA, 17 nt, Artificial Sequence
  Synthetic
gccucacauacaucauc

SEQ ID NO: 692683 - RNA, 17 nt, Artificial Sequence
  Synthetic
gaucauccuuacucauc

SEQ ID NO: 692684 - RNA, 17 nt, Artificial Sequence
  Synthetic
gccuguaauuauucauc

SEQ ID NO: 692685 - RNA, 17 nt, Artificial Sequence
  Synthetic
gauugcacugguucauc

SEQ ID NO: 692686 - RNA, 17 nt, Artificial Sequence
  Synthetic
gaguguugcuccagauc

SEQ ID NO: 692687 - RNA, 17 nt, Artificial Sequence
  Synthetic
gacguagcagugggauc

SEQ ID NO: 692688 - RNA, 17 nt, Artificial Sequence
  Synthetic
ggagcuuuaugcauauc

SEQ ID NO: 692689 - RNA, 17 nt, Artificial Sequence
  Synthetic
gcuauuuaagugauauc

SEQ ID NO: 692690 - RNA, 17 nt, Artificial Sequence
  Synthetic
gugcucccuuauauauc

SEQ ID NO: 692691 - RNA, 17 nt, Artificial Sequence
  Synthetic
gagauagggguuauauc

SEQ ID NO: 692692 - RNA, 17 nt, Artificial Sequence
  Synthetic
gcuccaguggaacuauc

SEQ ID NO: 692693 - RNA, 17 nt, Artificial Sequence
  Synthetic
ggugacaaggcacuauc

SEQ ID NO: 692694 - RNA, 17 nt, Artificial Sequence
  Synthetic
gcauugaguauacuauc

SEQ ID NO: 692695 - RNA, 17 nt, Artificial Sequence
  Synthetic
gcuggagucuugguauc

SEQ ID NO: 692696 - RNA, 17 nt, Artificial Sequence
  Synthetic
gcaucuacguccuuauc

SEQ ID NO: 692697 - RNA, 17 nt, Artificial Sequence
  Synthetic
guauaaaggcacaacuc

SEQ ID NO: 692698 - RNA, 17 nt, Artificial Sequence
  Synthetic
gucccuugcugcaacuc

SEQ ID NO: 692699 - RNA, 17 nt, Artificial Sequence
  Synthetic
gugcuaaggauucacuc

SEQ ID NO: 692700 - RNA, 17 nt, Artificial Sequence
  Synthetic
gauuaggugagagacuc

SEQ ID NO: 692701 - RNA, 17 nt, Artificial Sequence
  Synthetic
ggucacgauauagacuc

SEQ ID NO: 692702 - RNA, 17 nt, Artificial Sequence
  Synthetic
gccucgaaaugauacuc

SEQ ID NO: 692703 - RNA, 17 nt, Artificial Sequence
  Synthetic
ggaguaauucgguacuc

SEQ ID NO: 692704 - RNA, 17 nt, Artificial Sequence
  Synthetic
gcgauucuggguuacuc

SEQ ID NO: 692705 - RNA, 17 nt, Artificial Sequence
  Synthetic
guccuccauuacaccuc

SEQ ID NO: 692706 - RNA, 17 nt, Artificial Sequence
  Synthetic
gauaggguagagcccuc

SEQ ID NO: 692707 - RNA, 17 nt, Artificial Sequence
  Synthetic
gagcaaugugggcccuc

SEQ ID NO: 692708 - RNA, 17 nt, Artificial Sequence
  Synthetic
gcguuauccacagccuc

SEQ ID NO: 692709 - RNA, 17 nt, Artificial Sequence
  Synthetic
gucuucuauauagccuc

SEQ ID NO: 692710 - RNA, 17 nt, Artificial Sequence
  Synthetic
gucccgcagucugccuc

SEQ ID NO: 692711 - RNA, 17 nt, Artificial Sequence
  Synthetic
guagucuauaauuccuc

SEQ ID NO: 692712 - RNA, 17 nt, Artificial Sequence
  Synthetic
gucauacaauacagcuc

SEQ ID NO: 692713 - RNA, 17 nt, Artificial Sequence
  Synthetic
gccggugcaugcugcuc

SEQ ID NO: 692714 - RNA, 17 nt, Artificial Sequence
  Synthetic
ggcaugguauauugcuc

SEQ ID NO: 692715 - RNA, 17 nt, Artificial Sequence
  Synthetic
gagcgauccacucucuc

SEQ ID NO: 692716 - RNA, 17 nt, Artificial Sequence
  Synthetic
gacgauaagggagucuc

SEQ ID NO: 692717 - RNA, 17 nt, Artificial Sequence
  Synthetic
gcuguaaaaguggucuc

SEQ ID NO: 692718 - RNA, 17 nt, Artificial Sequence
  Synthetic
ggucguguaauauucuc

SEQ ID NO: 692719 - RNA, 17 nt, Artificial Sequence
  Synthetic
guaccuauagucuucuc

SEQ ID NO: 692720 - RNA, 17 nt, Artificial Sequence
  Synthetic
gacugguucggcaaguc

SEQ ID NO: 692721 - RNA, 17 nt, Artificial Sequence
  Synthetic
gcguaacaugcagaguc

SEQ ID NO: 692722 - RNA, 17 nt, Artificial Sequence
  Synthetic
ggcuguagcaacuaguc

SEQ ID NO: 692723 - RNA, 17 nt, Artificial Sequence
  Synthetic
guggcaugaaaguaguc

SEQ ID NO: 692724 - RNA, 17 nt, Artificial Sequence
  Synthetic
gugguacuaucuuaguc

SEQ ID NO: 692725 - RNA, 17 nt, Artificial Sequence
  Synthetic
guggcaauaacaacguc

SEQ ID NO: 692726 - RNA, 17 nt, Artificial Sequence
  Synthetic
gugacucauuacagguc

SEQ ID NO: 692727 - RNA, 17 nt, Artificial Sequence
  Synthetic
guuagggaaaucagguc

SEQ ID NO: 692728 - RNA, 17 nt, Artificial Sequence
  Synthetic
gcuuuucauaguagguc

SEQ ID NO: 692729 - RNA, 17 nt, Artificial Sequence
  Synthetic
gauguauuuuaccgguc

SEQ ID NO: 692730 - RNA, 17 nt, Artificial Sequence
  Synthetic
gaaagcgguaguggguc

SEQ ID NO: 692731 - RNA, 17 nt, Artificial Sequence
  Synthetic
ggauuguauggccuguc

SEQ ID NO: 692732 - RNA, 17 nt, Artificial Sequence
  Synthetic
gcucuaggcucucuguc

SEQ ID NO: 692733 - RNA, 17 nt, Artificial Sequence
  Synthetic
guacuauuccguuuguc

SEQ ID NO: 692734 - RNA, 17 nt, Artificial Sequence
  Synthetic
guucagcaugacaauuc

SEQ ID NO: 692735 - RNA, 17 nt, Artificial Sequence
  Synthetic
gggaaaauacggaauuc

SEQ ID NO: 692736 - RNA, 17 nt, Artificial Sequence
  Synthetic
gaagccgagugacauuc

SEQ ID NO: 692737 - RNA, 17 nt, Artificial Sequence
  Synthetic
guuaggaucgcugauuc

SEQ ID NO: 692738 - RNA, 17 nt, Artificial Sequence
  Synthetic
gggguugcuagugauuc

SEQ ID NO: 692739 - RNA, 17 nt, Artificial Sequence
  Synthetic
guaucucauucguauuc

SEQ ID NO: 692740 - RNA, 17 nt, Artificial Sequence
  Synthetic
guaguaugcaguuauuc

SEQ ID NO: 692741 - RNA, 17 nt, Artificial Sequence
  Synthetic
gacugauguauaacuuc

SEQ ID NO: 692742 - RNA, 17 nt, Artificial Sequence
  Synthetic
gguaguugucgcacuuc

SEQ ID NO: 692743 - RNA, 17 nt, Artificial Sequence
  Synthetic
gccgauguauaaucuuc

SEQ ID NO: 692744 - RNA, 17 nt, Artificial Sequence
  Synthetic
gccacguauuccaguuc

SEQ ID NO: 692745 - RNA, 17 nt, Artificial Sequence
  Synthetic
guucucgauugaauuuc

SEQ ID NO: 692746 - RNA, 17 nt, Artificial Sequence
  Synthetic
gcggggcuuuugcuuuc

SEQ ID NO: 692747 - RNA, 17 nt, Artificial Sequence
  Synthetic
gugaaccuucgucuuuc

SEQ ID NO: 692748 - RNA, 17 nt, Artificial Sequence
  Synthetic
gcgucacucuucacaag

SEQ ID NO: 692749 - RNA, 17 nt, Artificial Sequence
  Synthetic
ggcaaccuuuauacaag

SEQ ID NO: 692750 - RNA, 17 nt, Artificial Sequence
  Synthetic
guuagcuaaccaccaag

SEQ ID NO: 692751 - RNA, 17 nt, Artificial Sequence
  Synthetic
guuuuaaccccugcaag

SEQ ID NO: 692752 - RNA, 17 nt, Artificial Sequence
  Synthetic
gagguccacaucucaag

SEQ ID NO: 692753 - RNA, 17 nt, Artificial Sequence
  Synthetic
guaaugcuuucgagaag

SEQ ID NO: 692754 - RNA, 17 nt, Artificial Sequence
  Synthetic
ggcguaauauugcgaag

SEQ ID NO: 692755 - RNA, 17 nt, Artificial Sequence
  Synthetic
gcuuauguuuucggaag

SEQ ID NO: 692756 - RNA, 17 nt, Artificial Sequence
  Synthetic
gcuggguacuccauaag

SEQ ID NO: 692757 - RNA, 17 nt, Artificial Sequence
  Synthetic
gguacauuucgcauaag

SEQ ID NO: 692758 - RNA, 17 nt, Artificial Sequence
  Synthetic
gacuuacgguuaaacag

SEQ ID NO: 692759 - RNA, 17 nt, Artificial Sequence
  Synthetic
gacuauuucauguccag

SEQ ID NO: 692760 - RNA, 17 nt, Artificial Sequence
  Synthetic
gaaguagcucgaggcag

SEQ ID NO: 692761 - RNA, 17 nt, Artificial Sequence
  Synthetic
gaugcaacgcaaugcag

SEQ ID NO: 692762 - RNA, 17 nt, Artificial Sequence
  Synthetic
guacguuucuacaucag

SEQ ID NO: 692763 - RNA, 17 nt, Artificial Sequence
  Synthetic
guugcguugggucucag

SEQ ID NO: 692764 - RNA, 17 nt, Artificial Sequence
  Synthetic
ggcccgcguggucucag

SEQ ID NO: 692765 - RNA, 17 nt, Artificial Sequence
  Synthetic
gaacuaccaugugucag

SEQ ID NO: 692766 - RNA, 17 nt, Artificial Sequence
  Synthetic
guguuagaggguuucag

SEQ ID NO: 692767 - RNA, 17 nt, Artificial Sequence
  Synthetic
ggcacucaccaaaagag

SEQ ID NO: 692768 - RNA, 17 nt, Artificial Sequence
  Synthetic
gagcuaaauauccagag

SEQ ID NO: 692769 - RNA, 17 nt, Artificial Sequence
  Synthetic
gugaucguggauacgag

SEQ ID NO: 692770 - RNA, 17 nt, Artificial Sequence
  Synthetic
gguugaaucacuacgag

SEQ ID NO: 692771 - RNA, 17 nt, Artificial Sequence
  Synthetic
ggccauauauucccgag

SEQ ID NO: 692772 - RNA, 17 nt, Artificial Sequence
  Synthetic
gccagccgaccaaugag

SEQ ID NO: 692773 - RNA, 17 nt, Artificial Sequence
  Synthetic
gcccgaucauuauugag

SEQ ID NO: 692774 - RNA, 17 nt, Artificial Sequence
  Synthetic
ggcaagucuaccuugag

SEQ ID NO: 692775 - RNA, 17 nt, Artificial Sequence
  Synthetic
gauuaacacaucuugag

SEQ ID NO: 692776 - RNA, 17 nt, Artificial Sequence
  Synthetic
guagucaguugguugag

SEQ ID NO: 692777 - RNA, 17 nt, Artificial Sequence
  Synthetic
ggggccacugcgaauag

SEQ ID NO: 692778 - RNA, 17 nt, Artificial Sequence
  Synthetic
guggcucgaaggaauag

SEQ ID NO: 692779 - RNA, 17 nt, Artificial Sequence
  Synthetic
guggagagcuuccauag

SEQ ID NO: 692780 - RNA, 17 nt, Artificial Sequence
  Synthetic
gggucuuacucucauag

SEQ ID NO: 692781 - RNA, 17 nt, Artificial Sequence
  Synthetic
ggggcuacaucauauag

SEQ ID NO: 692782 - RNA, 17 nt, Artificial Sequence
  Synthetic
gcacaagaacuaccuag

SEQ ID NO: 692783 - RNA, 17 nt, Artificial Sequence
  Synthetic
guaaccgauagagcuag

SEQ ID NO: 692784 - RNA, 17 nt, Artificial Sequence
  Synthetic
guaucuuauguggcuag

SEQ ID NO: 692785 - RNA, 17 nt, Artificial Sequence
  Synthetic
gucauaguacauucuag

SEQ ID NO: 692786 - RNA, 17 nt, Artificial Sequence
  Synthetic
gcaauauauacccguag

SEQ ID NO: 692787 - RNA, 17 nt, Artificial Sequence
  Synthetic
guccaaacuguuuguag

SEQ ID NO: 692788 - RNA, 17 nt, Artificial Sequence
  Synthetic
ggaggacugucaauuag

SEQ ID NO: 692789 - RNA, 17 nt, Artificial Sequence
  Synthetic
guauccuagagacuuag

SEQ ID NO: 692790 - RNA, 17 nt, Artificial Sequence
  Synthetic
gguggucaaccccuuag

SEQ ID NO: 692791 - RNA, 17 nt, Artificial Sequence
  Synthetic
guugcucguaauguuag

SEQ ID NO: 692792 - RNA, 17 nt, Artificial Sequence
  Synthetic
ggggcuauucuguuuag

SEQ ID NO: 692793 - RNA, 17 nt, Artificial Sequence
  Synthetic
gguacuauaugaaaacg

SEQ ID NO: 692794 - RNA, 17 nt, Artificial Sequence
  Synthetic
gagugugcaagcaaacg

SEQ ID NO: 692795 - RNA, 17 nt, Artificial Sequence
  Synthetic
gaaugguaaugcaaacg

SEQ ID NO: 692796 - RNA, 17 nt, Artificial Sequence
  Synthetic
gcuacugaagggaaacg

SEQ ID NO: 692797 - RNA, 17 nt, Artificial Sequence
  Synthetic
gugucaggaagccaacg

SEQ ID NO: 692798 - RNA, 17 nt, Artificial Sequence
  Synthetic
gugaguaauguauaacg

SEQ ID NO: 692799 - RNA, 17 nt, Artificial Sequence
  Synthetic
gauguggacuaguaacg

SEQ ID NO: 692800 - RNA, 17 nt, Artificial Sequence
  Synthetic
ggacuuaguaggacacg

SEQ ID NO: 692801 - RNA, 17 nt, Artificial Sequence
  Synthetic
gugcaugacuugacacg

SEQ ID NO: 692802 - RNA, 17 nt, Artificial Sequence
  Synthetic
guagcauacuuuacacg

SEQ ID NO: 692803 - RNA, 17 nt, Artificial Sequence
  Synthetic
gccucuuagugcgcacg

SEQ ID NO: 692804 - RNA, 17 nt, Artificial Sequence
  Synthetic
gaaaauaguaacucacg

SEQ ID NO: 692805 - RNA, 17 nt, Artificial Sequence
  Synthetic
gucuugauaccaagacg

SEQ ID NO: 692806 - RNA, 17 nt, Artificial Sequence
  Synthetic
ggagacaauaucauacg

SEQ ID NO: 692807 - RNA, 17 nt, Artificial Sequence
  Synthetic
guuagcaucaauauacg

SEQ ID NO: 692808 - RNA, 17 nt, Artificial Sequence
  Synthetic
ggaaggaagccuauacg

SEQ ID NO: 692809 - RNA, 17 nt, Artificial Sequence
  Synthetic
gguccugaaaugcuacg

SEQ ID NO: 692810 - RNA, 17 nt, Artificial Sequence
  Synthetic
gcuaaaugcaacuuacg

SEQ ID NO: 692811 - RNA, 17 nt, Artificial Sequence
  Synthetic
gaugaagguaucuuacg

SEQ ID NO: 692812 - RNA, 17 nt, Artificial Sequence
  Synthetic
gcuaauauccuaaaccg

SEQ ID NO: 692813 - RNA, 17 nt, Artificial Sequence
  Synthetic
ggccccaauauacaccg

SEQ ID NO: 692814 - RNA, 17 nt, Artificial Sequence
  Synthetic
gagcuuauacaagaccg

SEQ ID NO: 692815 - RNA, 17 nt, Artificial Sequence
  Synthetic
ggcuuggcauaggaccg

SEQ ID NO: 692816 - RNA, 17 nt, Artificial Sequence
  Synthetic
gaucccucagauuaccg

SEQ ID NO: 692817 - RNA, 17 nt, Artificial Sequence
  Synthetic
guuaagcuguucccccg

SEQ ID NO: 692818 - RNA, 17 nt, Artificial Sequence
  Synthetic
guuuagaauguaucccg

SEQ ID NO: 692819 - RNA, 17 nt, Artificial Sequence
  Synthetic
gaggaccuuacgucccg

SEQ ID NO: 692820 - RNA, 17 nt, Artificial Sequence
  Synthetic
ggaacuaguaagagccg

SEQ ID NO: 692821 - RNA, 17 nt, Artificial Sequence
  Synthetic
gauacuaauuagagccg

SEQ ID NO: 692822 - RNA, 17 nt, Artificial Sequence
  Synthetic
gcaauagccaauugccg

SEQ ID NO: 692823 - RNA, 17 nt, Artificial Sequence
  Synthetic
gaucuucaucaacuccg

SEQ ID NO: 692824 - RNA, 17 nt, Artificial Sequence
  Synthetic
gcuuuguggauacuccg

SEQ ID NO: 692825 - RNA, 17 nt, Artificial Sequence
  Synthetic
gccaacuguuagaagcg

SEQ ID NO: 692826 - RNA, 17 nt, Artificial Sequence
  Synthetic
guguuaacugcuuggcg

SEQ ID NO: 692827 - RNA, 17 nt, Artificial Sequence
  Synthetic
gaauccaucuguuggcg

SEQ ID NO: 692828 - RNA, 17 nt, Artificial Sequence
  Synthetic
gaguggauagaccugcg

SEQ ID NO: 692829 - RNA, 17 nt, Artificial Sequence
  Synthetic
ggcuuucaaauagugcg

SEQ ID NO: 692830 - RNA, 17 nt, Artificial Sequence
  Synthetic
ggauugguaauuuaucg

SEQ ID NO: 692831 - RNA, 17 nt, Artificial Sequence
  Synthetic
gcucauucaugcacucg

SEQ ID NO: 692832 - RNA, 17 nt, Artificial Sequence
  Synthetic
gaaucugcuuucacucg

SEQ ID NO: 692833 - RNA, 17 nt, Artificial Sequence
  Synthetic
gagcaguuugcaccucg

SEQ ID NO: 692834 - RNA, 17 nt, Artificial Sequence
  Synthetic
gggagucccauuucucg

SEQ ID NO: 692835 - RNA, 17 nt, Artificial Sequence
  Synthetic
guaccuugacuuucucg

SEQ ID NO: 692836 - RNA, 17 nt, Artificial Sequence
  Synthetic
gauugccuaggaagucg

SEQ ID NO: 692837 - RNA, 17 nt, Artificial Sequence
  Synthetic
gcgguguuaaguagucg

SEQ ID NO: 692838 - RNA, 17 nt, Artificial Sequence
  Synthetic
gggugcuucauuggucg

SEQ ID NO: 692839 - RNA, 17 nt, Artificial Sequence
  Synthetic
ggccacuuuguuuuucg

SEQ ID NO: 692840 - RNA, 17 nt, Artificial Sequence
  Synthetic
guaaugucgacauaagg

SEQ ID NO: 692841 - RNA, 17 nt, Artificial Sequence
  Synthetic
gcaccugauguaucagg

SEQ ID NO: 692842 - RNA, 17 nt, Artificial Sequence
  Synthetic
gucgacuagcucugagg

SEQ ID NO: 692843 - RNA, 17 nt, Artificial Sequence
  Synthetic
guacuaacucccauagg

SEQ ID NO: 692844 - RNA, 17 nt, Artificial Sequence
  Synthetic
gaggacugucaauuagg

SEQ ID NO: 692845 - RNA, 17 nt, Artificial Sequence
  Synthetic
gggcgaaguguguuagg

SEQ ID NO: 692846 - RNA, 17 nt, Artificial Sequence
  Synthetic
gaaacauuauaagacgg

SEQ ID NO: 692847 - RNA, 17 nt, Artificial Sequence
  Synthetic
ggagacguaauugacgg

SEQ ID NO: 692848 - RNA, 17 nt, Artificial Sequence
  Synthetic
guggaagacuuugacgg

SEQ ID NO: 692849 - RNA, 17 nt, Artificial Sequence
  Synthetic
gacuaucggugaaccgg

SEQ ID NO: 692850 - RNA, 17 nt, Artificial Sequence
  Synthetic
ggguggauuacccccgg

SEQ ID NO: 692851 - RNA, 17 nt, Artificial Sequence
  Synthetic
gagcuaaguaacuccgg

SEQ ID NO: 692852 - RNA, 17 nt, Artificial Sequence
  Synthetic
ggcaaagcuuugugcgg

SEQ ID NO: 692853 - RNA, 17 nt, Artificial Sequence
  Synthetic
guguugaccuuugucgg

SEQ ID NO: 692854 - RNA, 17 nt, Artificial Sequence
  Synthetic
gcauaagaacucuucgg

SEQ ID NO: 692855 - RNA, 17 nt, Artificial Sequence
  Synthetic
guuagacuggaguucgg

SEQ ID NO: 692856 - RNA, 17 nt, Artificial Sequence
  Synthetic
ggacguuuaaauuucgg

SEQ ID NO: 692857 - RNA, 17 nt, Artificial Sequence
  Synthetic
gcaacuucucgugaggg

SEQ ID NO: 692858 - RNA, 17 nt, Artificial Sequence
  Synthetic
gaugaugacgguuaggg

SEQ ID NO: 692859 - RNA, 17 nt, Artificial Sequence
  Synthetic
gguaucuaagaccuggg

SEQ ID NO: 692860 - RNA, 17 nt, Artificial Sequence
  Synthetic
guguuaaacaaguuggg

SEQ ID NO: 692861 - RNA, 17 nt, Artificial Sequence
  Synthetic
gcuagucuucuguuggg

SEQ ID NO: 692862 - RNA, 17 nt, Artificial Sequence
  Synthetic
ggagggaucggccaugg

SEQ ID NO: 692863 - RNA, 17 nt, Artificial Sequence
  Synthetic
gaggcuacgcuugaugg

SEQ ID NO: 692864 - RNA, 17 nt, Artificial Sequence
  Synthetic
gcuacgguaucauaugg

SEQ ID NO: 692865 - RNA, 17 nt, Artificial Sequence
  Synthetic
gcgggaaggucauaugg

SEQ ID NO: 692866 - RNA, 17 nt, Artificial Sequence
  Synthetic
gccuuacucgaguaugg

SEQ ID NO: 692867 - RNA, 17 nt, Artificial Sequence
  Synthetic
gcgcagaauuuaacugg

SEQ ID NO: 692868 - RNA, 17 nt, Artificial Sequence
  Synthetic
gguuaguuuacuacugg

SEQ ID NO: 692869 - RNA, 17 nt, Artificial Sequence
  Synthetic
ggauuuccgccagcugg

SEQ ID NO: 692870 - RNA, 17 nt, Artificial Sequence
  Synthetic
guugccggugccgcugg

SEQ ID NO: 692871 - RNA, 17 nt, Artificial Sequence
  Synthetic
gcugguauauucucugg

SEQ ID NO: 692872 - RNA, 17 nt, Artificial Sequence
  Synthetic
gggcauacacuaugugg

SEQ ID NO: 692873 - RNA, 17 nt, Artificial Sequence
  Synthetic
guagggcuuauacuugg

SEQ ID NO: 692874 - RNA, 17 nt, Artificial Sequence
  Synthetic
ggagaggucuagcaaug

SEQ ID NO: 692875 - RNA, 17 nt, Artificial Sequence
  Synthetic
gcuugaugaggcuaaug

SEQ ID NO: 692876 - RNA, 17 nt, Artificial Sequence
  Synthetic
gguaaggacuguacaug

SEQ ID NO: 692877 - RNA, 17 nt, Artificial Sequence
  Synthetic
gcgaacaggagagcaug

SEQ ID NO: 692878 - RNA, 17 nt, Artificial Sequence
  Synthetic
gauauaucauccucaug

SEQ ID NO: 692879 - RNA, 17 nt, Artificial Sequence
  Synthetic
gccaauuaacguagaug

SEQ ID NO: 692880 - RNA, 17 nt, Artificial Sequence
  Synthetic
gcuuuaugcuuucgaug

SEQ ID NO: 692881 - RNA, 17 nt, Artificial Sequence
  Synthetic
guaauguagcccauaug

SEQ ID NO: 692882 - RNA, 17 nt, Artificial Sequence
  Synthetic
gugccuauauuaguaug

SEQ ID NO: 692883 - RNA, 17 nt, Artificial Sequence
  Synthetic
gaggauacgugauuaug

SEQ ID NO: 692884 - RNA, 17 nt, Artificial Sequence
  Synthetic
gcacggacuguaaacug

SEQ ID NO: 692885 - RNA, 17 nt, Artificial Sequence
  Synthetic
gcuaaguaguaacacug

SEQ ID NO: 692886 - RNA, 17 nt, Artificial Sequence
  Synthetic
guuucgucagaugacug

SEQ ID NO: 692887 - RNA, 17 nt, Artificial Sequence
  Synthetic
gugaacgaaucugacug

SEQ ID NO: 692888 - RNA, 17 nt, Artificial Sequence
  Synthetic
gcgugauaugcagccug

SEQ ID NO: 692889 - RNA, 17 nt, Artificial Sequence
  Synthetic
gaauaguucacugccug

SEQ ID NO: 692890 - RNA, 17 nt, Artificial Sequence
  Synthetic
gacguaaugcuuuccug

SEQ ID NO: 692891 - RNA, 17 nt, Artificial Sequence
  Synthetic
gcgcaccuagcaagcug

SEQ ID NO: 692892 - RNA, 17 nt, Artificial Sequence
  Synthetic
gccuaucgggacagcug

SEQ ID NO: 692893 - RNA, 17 nt, Artificial Sequence
  Synthetic
gggaguuuagucagcug

SEQ ID NO: 692894 - RNA, 17 nt, Artificial Sequence
  Synthetic
gcugccacgguaaucug

SEQ ID NO: 692895 - RNA, 17 nt, Artificial Sequence
  Synthetic
gguagcauaagcgucug

SEQ ID NO: 692896 - RNA, 17 nt, Artificial Sequence
  Synthetic
gugaagugucgcaagug

SEQ ID NO: 692897 - RNA, 17 nt, Artificial Sequence
  Synthetic
ggucguugaaagcagug

SEQ ID NO: 692898 - RNA, 17 nt, Artificial Sequence
  Synthetic
guacuaucacagcagug

SEQ ID NO: 692899 - RNA, 17 nt, Artificial Sequence
  Synthetic
gguuauccuaauccgug

SEQ ID NO: 692900 - RNA, 17 nt, Artificial Sequence
  Synthetic
gcuucucaguucgcgug

SEQ ID NO: 692901 - RNA, 17 nt, Artificial Sequence
  Synthetic
gugcuaaaaggaucgug

SEQ ID NO: 692902 - RNA, 17 nt, Artificial Sequence
  Synthetic
gcaguuugagcggggug

SEQ ID NO: 692903 - RNA, 17 nt, Artificial Sequence
  Synthetic
gcuuuagacggugggug

SEQ ID NO: 692904 - RNA, 17 nt, Artificial Sequence
  Synthetic
gcgcguuuaggcuggug

SEQ ID NO: 692905 - RNA, 17 nt, Artificial Sequence
  Synthetic
ggccguaaagguuggug

SEQ ID NO: 692906 - RNA, 17 nt, Artificial Sequence
  Synthetic
gaguacuggccuaugug

SEQ ID NO: 692907 - RNA, 17 nt, Artificial Sequence
  Synthetic
gcuuaacgggaagugug

SEQ ID NO: 692908 - RNA, 17 nt, Artificial Sequence
  Synthetic
ggggagucauuaaauug

SEQ ID NO: 692909 - RNA, 17 nt, Artificial Sequence
  Synthetic
gaccuuagaaucaauug

SEQ ID NO: 692910 - RNA, 17 nt, Artificial Sequence
  Synthetic
guaaagacgaggaauug

SEQ ID NO: 692911 - RNA, 17 nt, Artificial Sequence
  Synthetic
gguaucaacguuaauug

SEQ ID NO: 692912 - RNA, 17 nt, Artificial Sequence
  Synthetic
ggggucauaaaacauug

SEQ ID NO: 692913 - RNA, 17 nt, Artificial Sequence
  Synthetic
gaccuugacugacauug

SEQ ID NO: 692914 - RNA, 17 nt, Artificial Sequence
  Synthetic
gucucuaggauacauug

SEQ ID NO: 692915 - RNA, 17 nt, Artificial Sequence
  Synthetic
gaguaaaaucggcauug

SEQ ID NO: 692916 - RNA, 17 nt, Artificial Sequence
  Synthetic
guauagcugcuauauug

SEQ ID NO: 692917 - RNA, 17 nt, Artificial Sequence
  Synthetic
gaucugcccguauauug

SEQ ID NO: 692918 - RNA, 17 nt, Artificial Sequence
  Synthetic
ggucccugugccuauug

SEQ ID NO: 692919 - RNA, 17 nt, Artificial Sequence
  Synthetic
gggcuaguuacggcuug

SEQ ID NO: 692920 - RNA, 17 nt, Artificial Sequence
  Synthetic
gaaaauccguagucuug

SEQ ID NO: 692921 - RNA, 17 nt, Artificial Sequence
  Synthetic
gcuguacuacaugguug

SEQ ID NO: 692922 - RNA, 17 nt, Artificial Sequence
  Synthetic
gacguaauuaugguuug

SEQ ID NO: 692923 - RNA, 17 nt, Artificial Sequence
  Synthetic
ggcgaacgacauaaaau

SEQ ID NO: 692924 - RNA, 17 nt, Artificial Sequence
  Synthetic
gggcucuacuaccaaau

SEQ ID NO: 692925 - RNA, 17 nt, Artificial Sequence
  Synthetic
guauacgauugggaaau

SEQ ID NO: 692926 - RNA, 17 nt, Artificial Sequence
  Synthetic
guguagauggccuaaau

SEQ ID NO: 692927 - RNA, 17 nt, Artificial Sequence
  Synthetic
ggugacuccuagacaau

SEQ ID NO: 692928 - RNA, 17 nt, Artificial Sequence
  Synthetic
gccucuaaguguacaau

SEQ ID NO: 692929 - RNA, 17 nt, Artificial Sequence
  Synthetic
guggauaacugcccaau

SEQ ID NO: 692930 - RNA, 17 nt, Artificial Sequence
  Synthetic
ggcuaggacuugccaau

SEQ ID NO: 692931 - RNA, 17 nt, Artificial Sequence
  Synthetic
guagcacacaaugcaau

SEQ ID NO: 692932 - RNA, 17 nt, Artificial Sequence
  Synthetic
gcaccggcaacugcaau

SEQ ID NO: 692933 - RNA, 17 nt, Artificial Sequence
  Synthetic
gagagacguuuaucaau

SEQ ID NO: 692934 - RNA, 17 nt, Artificial Sequence
  Synthetic
gcaacucccggcagaau

SEQ ID NO: 692935 - RNA, 17 nt, Artificial Sequence
  Synthetic
gugcgagaccugagaau

SEQ ID NO: 692936 - RNA, 17 nt, Artificial Sequence
  Synthetic
gauacuuaaaagcgaau

SEQ ID NO: 692937 - RNA, 17 nt, Artificial Sequence
  Synthetic
ggcaaccaacugggaau

SEQ ID NO: 692938 - RNA, 17 nt, Artificial Sequence
  Synthetic
gugucagcgcuaugaau

SEQ ID NO: 692939 - RNA, 17 nt, Artificial Sequence
  Synthetic
gcgguguaggauugaau

SEQ ID NO: 692940 - RNA, 17 nt, Artificial Sequence
  Synthetic
guugaggccuccauaau

SEQ ID NO: 692941 - RNA, 17 nt, Artificial Sequence
  Synthetic
ggcuaauguagcauaau

SEQ ID NO: 692942 - RNA, 17 nt, Artificial Sequence
  Synthetic
ggaaccuucaucauaau

SEQ ID NO: 692943 - RNA, 17 nt, Artificial Sequence
  Synthetic
gccucagugcucauaau

SEQ ID NO: 692944 - RNA, 17 nt, Artificial Sequence
  Synthetic
gaaccugcuaauauaau

SEQ ID NO: 692945 - RNA, 17 nt, Artificial Sequence
  Synthetic
gaaccacgugauauaau

SEQ ID NO: 692946 - RNA, 17 nt, Artificial Sequence
  Synthetic
ggcgucaucauccuaau

SEQ ID NO: 692947 - RNA, 17 nt, Artificial Sequence
  Synthetic
guuaagguuaagcuaau

SEQ ID NO: 692948 - RNA, 17 nt, Artificial Sequence
  Synthetic
guacuucaguagcuaau

SEQ ID NO: 692949 - RNA, 17 nt, Artificial Sequence
  Synthetic
gaagcccgugaaguaau

SEQ ID NO: 692950 - RNA, 17 nt, Artificial Sequence
  Synthetic
ggauaugucguuuuaau

SEQ ID NO: 692951 - RNA, 17 nt, Artificial Sequence
  Synthetic
ggcauguacgauaacau

SEQ ID NO: 692952 - RNA, 17 nt, Artificial Sequence
  Synthetic
ggcagaacuucuaacau

SEQ ID NO: 692953 - RNA, 17 nt, Artificial Sequence
  Synthetic
gcgaagggacaacacau

SEQ ID NO: 692954 - RNA, 17 nt, Artificial Sequence
  Synthetic
guauuuaccuacuacau

SEQ ID NO: 692955 - RNA, 17 nt, Artificial Sequence
  Synthetic
gauugucuauggcccau

SEQ ID NO: 692956 - RNA, 17 nt, Artificial Sequence
  Synthetic
guuucaaacacggccau

SEQ ID NO: 692957 - RNA, 17 nt, Artificial Sequence
  Synthetic
guguugcauguaagcau

SEQ ID NO: 692958 - RNA, 17 nt, Artificial Sequence
  Synthetic
ggggcaauguaggucau

SEQ ID NO: 692959 - RNA, 17 nt, Artificial Sequence
  Synthetic
gaagggacagcguucau

SEQ ID NO: 692960 - RNA, 17 nt, Artificial Sequence
  Synthetic
gccacucaaugguucau

SEQ ID NO: 692961 - RNA, 17 nt, Artificial Sequence
  Synthetic
gugaccuggccuaagau

SEQ ID NO: 692962 - RNA, 17 nt, Artificial Sequence
  Synthetic
guaaucguaaaucagau

SEQ ID NO: 692963 - RNA, 17 nt, Artificial Sequence
  Synthetic
gcgguauagugagagau

SEQ ID NO: 692964 - RNA, 17 nt, Artificial Sequence
  Synthetic
gaugucuaaccugagau

SEQ ID NO: 692965 - RNA, 17 nt, Artificial Sequence
  Synthetic
gccaacggcagauagau

SEQ ID NO: 692966 - RNA, 17 nt, Artificial Sequence
  Synthetic
guaccaaaaucuacgau

SEQ ID NO: 692967 - RNA, 17 nt, Artificial Sequence
  Synthetic
gucugcucuacuucgau

SEQ ID NO: 692968 - RNA, 17 nt, Artificial Sequence
  Synthetic
gguaagaauuuuucgau

SEQ ID NO: 692969 - RNA, 17 nt, Artificial Sequence
  Synthetic
gaaucucccccgaggau

SEQ ID NO: 692970 - RNA, 17 nt, Artificial Sequence
  Synthetic
gaugauacugguaggau

SEQ ID NO: 692971 - RNA, 17 nt, Artificial Sequence
  Synthetic
gauguuauauucgggau

SEQ ID NO: 692972 - RNA, 17 nt, Artificial Sequence
  Synthetic
guuaucgaguaaaugau

SEQ ID NO: 692973 - RNA, 17 nt, Artificial Sequence
  Synthetic
gcaacacugcucaugau

SEQ ID NO: 692974 - RNA, 17 nt, Artificial Sequence
  Synthetic
gucuuaccggucuugau

SEQ ID NO: 692975 - RNA, 17 nt, Artificial Sequence
  Synthetic
gggcucaguuaguugau

SEQ ID NO: 692976 - RNA, 17 nt, Artificial Sequence
  Synthetic
gauccuuguugguugau

SEQ ID NO: 692977 - RNA, 17 nt, Artificial Sequence
  Synthetic
gauucgguuuauuugau

SEQ ID NO: 692978 - RNA, 17 nt, Artificial Sequence
  Synthetic
gauauggccgugaauau

SEQ ID NO: 692979 - RNA, 17 nt, Artificial Sequence
  Synthetic
gugugaguuaggcauau

SEQ ID NO: 692980 - RNA, 17 nt, Artificial Sequence
  Synthetic
gaacccuaugcagauau

SEQ ID NO: 692981 - RNA, 17 nt, Artificial Sequence
  Synthetic
gcaugacaacgggauau

SEQ ID NO: 692982 - RNA, 17 nt, Artificial Sequence
  Synthetic
gugccagagaagacuau

SEQ ID NO: 692983 - RNA, 17 nt, Artificial Sequence
  Synthetic
gaagaauaggugccuau

SEQ ID NO: 692984 - RNA, 17 nt, Artificial Sequence
  Synthetic
gucguaguacuuccuau

SEQ ID NO: 692985 - RNA, 17 nt, Artificial Sequence
  Synthetic
gcaacgagcuuugcuau

SEQ ID NO: 692986 - RNA, 17 nt, Artificial Sequence
  Synthetic
gucuguccauggucuau

SEQ ID NO: 692987 - RNA, 17 nt, Artificial Sequence
  Synthetic
gcggcagauggaaguau

SEQ ID NO: 692988 - RNA, 17 nt, Artificial Sequence
  Synthetic
ggcugauugacuaguau

SEQ ID NO: 692989 - RNA, 17 nt, Artificial Sequence
  Synthetic
ggugucauuaaugguau

SEQ ID NO: 692990 - RNA, 17 nt, Artificial Sequence
  Synthetic
gauugcaucuacuguau

SEQ ID NO: 692991 - RNA, 17 nt, Artificial Sequence
  Synthetic
gauggagugugcauuau

SEQ ID NO: 692992 - RNA, 17 nt, Artificial Sequence
  Synthetic
ggcuugccuaaacuuau

SEQ ID NO: 692993 - RNA, 17 nt, Artificial Sequence
  Synthetic
gguguucaccuauuuau

SEQ ID NO: 692994 - RNA, 17 nt, Artificial Sequence
  Synthetic
gacgcuucaugguuuau

SEQ ID NO: 692995 - RNA, 17 nt, Artificial Sequence
  Synthetic
ggguacggaagaaaacu

SEQ ID NO: 692996 - RNA, 17 nt, Artificial Sequence
  Synthetic
guggugccgauucaacu

SEQ ID NO: 692997 - RNA, 17 nt, Artificial Sequence
  Synthetic
guguaccaacaauaacu

SEQ ID NO: 692998 - RNA, 17 nt, Artificial Sequence
  Synthetic
gaagccuugacauaacu

SEQ ID NO: 692999 - RNA, 17 nt, Artificial Sequence
  Synthetic
gccuaagcagguuaacu

SEQ ID NO: 693000 - RNA, 17 nt, Artificial Sequence
  Synthetic
gaacgaacucugacacu

SEQ ID NO: 693001 - RNA, 17 nt, Artificial Sequence
  Synthetic
gcaauuuugggcgcacu

SEQ ID NO: 693002 - RNA, 17 nt, Artificial Sequence
  Synthetic
gagcucuaaguaauacu

SEQ ID NO: 693003 - RNA, 17 nt, Artificial Sequence
  Synthetic
gauuuguagagcauacu

SEQ ID NO: 693004 - RNA, 17 nt, Artificial Sequence
  Synthetic
gacgcccacuggauacu

SEQ ID NO: 693005 - RNA, 17 nt, Artificial Sequence
  Synthetic
guucacacggauauacu

SEQ ID NO: 693006 - RNA, 17 nt, Artificial Sequence
  Synthetic
gccgcuaaagauguacu

SEQ ID NO: 693007 - RNA, 17 nt, Artificial Sequence
  Synthetic
guugacgaaccuguacu

SEQ ID NO: 693008 - RNA, 17 nt, Artificial Sequence
  Synthetic
gguagcaacacguuacu

SEQ ID NO: 693009 - RNA, 17 nt, Artificial Sequence
  Synthetic
ggguggacuauuuuacu

SEQ ID NO: 693010 - RNA, 17 nt, Artificial Sequence
  Synthetic
gacacuuuaccuaaccu

SEQ ID NO: 693011 - RNA, 17 nt, Artificial Sequence
  Synthetic
gcacuuaguacacaccu

SEQ ID NO: 693012 - RNA, 17 nt, Artificial Sequence
  Synthetic
gcagguaucuaagaccu

SEQ ID NO: 693013 - RNA, 17 nt, Artificial Sequence
  Synthetic
gaucuguugggcgaccu

SEQ ID NO: 693014 - RNA, 17 nt, Artificial Sequence
  Synthetic
guucacccuguauaccu

SEQ ID NO: 693015 - RNA, 17 nt, Artificial Sequence
  Synthetic
gcaagaauacucuaccu

SEQ ID NO: 693016 - RNA, 17 nt, Artificial Sequence
  Synthetic
gacauuccggaguaccu

SEQ ID NO: 693017 - RNA, 17 nt, Artificial Sequence
  Synthetic
gcagagacuacguaccu

SEQ ID NO: 693018 - RNA, 17 nt, Artificial Sequence
  Synthetic
gaauggcaagcguaccu

SEQ ID NO: 693019 - RNA, 17 nt, Artificial Sequence
  Synthetic
gauaaguagguguaccu

SEQ ID NO: 693020 - RNA, 17 nt, Artificial Sequence
  Synthetic
guugauaguuguacccu

SEQ ID NO: 693021 - RNA, 17 nt, Artificial Sequence
  Synthetic
gugucauauaauggccu

SEQ ID NO: 693022 - RNA, 17 nt, Artificial Sequence
  Synthetic
gagggauaggugauccu

SEQ ID NO: 693023 - RNA, 17 nt, Artificial Sequence
  Synthetic
ggaagaagcgaacuccu

SEQ ID NO: 693024 - RNA, 17 nt, Artificial Sequence
  Synthetic
guagaugagcaaacgcu

SEQ ID NO: 693025 - RNA, 17 nt, Artificial Sequence
  Synthetic
gccuguaaauaggcgcu

SEQ ID NO: 693026 - RNA, 17 nt, Artificial Sequence
  Synthetic
gcagccauucgacggcu

SEQ ID NO: 693027 - RNA, 17 nt, Artificial Sequence
  Synthetic
gaacugaauucccggcu

SEQ ID NO: 693028 - RNA, 17 nt, Artificial Sequence
  Synthetic
gaccgguaaagugggcu

SEQ ID NO: 693029 - RNA, 17 nt, Artificial Sequence
  Synthetic
ggguugcaaguugggcu

SEQ ID NO: 693030 - RNA, 17 nt, Artificial Sequence
  Synthetic
gguaauugacccuggcu

SEQ ID NO: 693031 - RNA, 17 nt, Artificial Sequence
  Synthetic
ggguguugggcuaugcu

SEQ ID NO: 693032 - RNA, 17 nt, Artificial Sequence
  Synthetic
ggauauaaggcacugcu

SEQ ID NO: 693033 - RNA, 17 nt, Artificial Sequence
  Synthetic
guauacgucuaaaaucu

SEQ ID NO: 693034 - RNA, 17 nt, Artificial Sequence
  Synthetic
gugccccauaauaaucu

SEQ ID NO: 693035 - RNA, 17 nt, Artificial Sequence
  Synthetic
gguacuguucuuaaucu

SEQ ID NO: 693036 - RNA, 17 nt, Artificial Sequence
  Synthetic
gcaggagcccuacaucu

SEQ ID NO: 693037 - RNA, 17 nt, Artificial Sequence
  Synthetic
ggucguaacauauaucu

SEQ ID NO: 693038 - RNA, 17 nt, Artificial Sequence
  Synthetic
gaguaauucgguacucu

SEQ ID NO: 693039 - RNA, 17 nt, Artificial Sequence
  Synthetic
guagcacagcuaugucu

SEQ ID NO: 693040 - RNA, 17 nt, Artificial Sequence
  Synthetic
gcuaacguaacuugucu

SEQ ID NO: 693041 - RNA, 17 nt, Artificial Sequence
  Synthetic
gcuuaaugagccauucu

SEQ ID NO: 693042 - RNA, 17 nt, Artificial Sequence
  Synthetic
gggcacccaucuauucu

SEQ ID NO: 693043 - RNA, 17 nt, Artificial Sequence
  Synthetic
guaguugucgcacuucu

SEQ ID NO: 693044 - RNA, 17 nt, Artificial Sequence
  Synthetic
gugacucggcaucuucu

SEQ ID NO: 693045 - RNA, 17 nt, Artificial Sequence
  Synthetic
ggccgaguaacuguucu

SEQ ID NO: 693046 - RNA, 17 nt, Artificial Sequence
  Synthetic
guaguacuccuauuucu

SEQ ID NO: 693047 - RNA, 17 nt, Artificial Sequence
  Synthetic
gagaagaccgguaaagu

SEQ ID NO: 693048 - RNA, 17 nt, Artificial Sequence
  Synthetic
gaaaccuucaccgaagu

SEQ ID NO: 693049 - RNA, 17 nt, Artificial Sequence
  Synthetic
gcuaucaagcuggaagu

SEQ ID NO: 693050 - RNA, 17 nt, Artificial Sequence
  Synthetic
ggaguauugguauaagu

SEQ ID NO: 693051 - RNA, 17 nt, Artificial Sequence
  Synthetic
guuagaccuuaguaagu

SEQ ID NO: 693052 - RNA, 17 nt, Artificial Sequence
  Synthetic
gccaacucguccccagu

SEQ ID NO: 693053 - RNA, 17 nt, Artificial Sequence
  Synthetic
gcccgcguggucucagu

SEQ ID NO: 693054 - RNA, 17 nt, Artificial Sequence
  Synthetic
gugacagacgaaggagu

SEQ ID NO: 693055 - RNA, 17 nt, Artificial Sequence
  Synthetic
ggcaucugucuaugagu

SEQ ID NO: 693056 - RNA, 17 nt, Artificial Sequence
  Synthetic
ggaugcugcgggauagu

SEQ ID NO: 693057 - RNA, 17 nt, Artificial Sequence
  Synthetic
gcgccugacacuauagu

SEQ ID NO: 693058 - RNA, 17 nt, Artificial Sequence
  Synthetic
guuuguaccuggcuagu

SEQ ID NO: 693059 - RNA, 17 nt, Artificial Sequence
  Synthetic
guucacggguugcuagu

SEQ ID NO: 693060 - RNA, 17 nt, Artificial Sequence
  Synthetic
guaccuuaugccguagu

SEQ ID NO: 693061 - RNA, 17 nt, Artificial Sequence
  Synthetic
guauaacuguauaacgu

SEQ ID NO: 693062 - RNA, 17 nt, Artificial Sequence
  Synthetic
ggcauguuauuccacgu

SEQ ID NO: 693063 - RNA, 17 nt, Artificial Sequence
  Synthetic
guacggagcuaucacgu

SEQ ID NO: 693064 - RNA, 17 nt, Artificial Sequence
  Synthetic
guugcaaacacauacgu

SEQ ID NO: 693065 - RNA, 17 nt, Artificial Sequence
  Synthetic
gaccaagauacauacgu

SEQ ID NO: 693066 - RNA, 17 nt, Artificial Sequence
  Synthetic
ggccagaagagcaccgu

SEQ ID NO: 693067 - RNA, 17 nt, Artificial Sequence
  Synthetic
ggacguuguuagaccgu

SEQ ID NO: 693068 - RNA, 17 nt, Artificial Sequence
  Synthetic
gggcagaauauuaccgu

SEQ ID NO: 693069 - RNA, 17 nt, Artificial Sequence
  Synthetic
guuccguucugagccgu

SEQ ID NO: 693070 - RNA, 17 nt, Artificial Sequence
  Synthetic
guugugacagcggccgu

SEQ ID NO: 693071 - RNA, 17 nt, Artificial Sequence
  Synthetic
gcccaucuaucugccgu

SEQ ID NO: 693072 - RNA, 17 nt, Artificial Sequence
  Synthetic
gaacuaaaagcauccgu

SEQ ID NO: 693073 - RNA, 17 nt, Artificial Sequence
  Synthetic
gcaggaaaguuaaucgu

SEQ ID NO: 693074 - RNA, 17 nt, Artificial Sequence
  Synthetic
gccaaauacaugaucgu

SEQ ID NO: 693075 - RNA, 17 nt, Artificial Sequence
  Synthetic
gaaguaaugugauucgu

SEQ ID NO: 693076 - RNA, 17 nt, Artificial Sequence
  Synthetic
ggaagggccguaaaggu

SEQ ID NO: 693077 - RNA, 17 nt, Artificial Sequence
  Synthetic
gcacaccuuauuaaggu

SEQ ID NO: 693078 - RNA, 17 nt, Artificial Sequence
  Synthetic
gugcaagcaaacgaggu

SEQ ID NO: 693079 - RNA, 17 nt, Artificial Sequence
  Synthetic
gcugguauauacuaggu

SEQ ID NO: 693080 - RNA, 17 nt, Artificial Sequence
  Synthetic
gggcgcagaagcacggu

SEQ ID NO: 693081 - RNA, 17 nt, Artificial Sequence
  Synthetic
gcuaaagggauaucggu

SEQ ID NO: 693082 - RNA, 17 nt, Artificial Sequence
  Synthetic
gaagaaagcucacgggu

SEQ ID NO: 693083 - RNA, 17 nt, Artificial Sequence
  Synthetic
gacauacuucuucgggu

SEQ ID NO: 693084 - RNA, 17 nt, Artificial Sequence
  Synthetic
ggccuaggacaaauggu

SEQ ID NO: 693085 - RNA, 17 nt, Artificial Sequence
  Synthetic
gccacguuacacauggu

SEQ ID NO: 693086 - RNA, 17 nt, Artificial Sequence
  Synthetic
gaaccccgcucgauggu

SEQ ID NO: 693087 - RNA, 17 nt, Artificial Sequence
  Synthetic
ggugcuccuaauauggu

SEQ ID NO: 693088 - RNA, 17 nt, Artificial Sequence
  Synthetic
gcagcaaacuugcuggu

SEQ ID NO: 693089 - RNA, 17 nt, Artificial Sequence
  Synthetic
gcucauugaaucguggu

SEQ ID NO: 693090 - RNA, 17 nt, Artificial Sequence
  Synthetic
gucccuaucuuuguggu

SEQ ID NO: 693091 - RNA, 17 nt, Artificial Sequence
  Synthetic
gcacgcauuacauuggu

SEQ ID NO: 693092 - RNA, 17 nt, Artificial Sequence
  Synthetic
gguggguugcgcuuggu

SEQ ID NO: 693093 - RNA, 17 nt, Artificial Sequence
  Synthetic
guacaugacaucuuggu

SEQ ID NO: 693094 - RNA, 17 nt, Artificial Sequence
  Synthetic
guugaaagcuauuuggu

SEQ ID NO: 693095 - RNA, 17 nt, Artificial Sequence
  Synthetic
guauaguccuucaaugu

SEQ ID NO: 693096 - RNA, 17 nt, Artificial Sequence
  Synthetic
gacucuagguagaaugu

SEQ ID NO: 693097 - RNA, 17 nt, Artificial Sequence
  Synthetic
gaucgcccuguucaugu

SEQ ID NO: 693098 - RNA, 17 nt, Artificial Sequence
  Synthetic
gaaacugaauucgaugu

SEQ ID NO: 693099 - RNA, 17 nt, Artificial Sequence
  Synthetic
gggcgaccuugggaugu

SEQ ID NO: 693100 - RNA, 17 nt, Artificial Sequence
  Synthetic
ggcauugcgugguaugu

SEQ ID NO: 693101 - RNA, 17 nt, Artificial Sequence
  Synthetic
gcgugucccucuuaugu

SEQ ID NO: 693102 - RNA, 17 nt, Artificial Sequence
  Synthetic
gcguuacucguuacugu

SEQ ID NO: 693103 - RNA, 17 nt, Artificial Sequence
  Synthetic
guaaaguggcaaucugu

SEQ ID NO: 693104 - RNA, 17 nt, Artificial Sequence
  Synthetic
ggcuuaacgggaagugu

SEQ ID NO: 693105 - RNA, 17 nt, Artificial Sequence
  Synthetic
ggcccuuuugagagugu

SEQ ID NO: 693106 - RNA, 17 nt, Artificial Sequence
  Synthetic
gccgaaaucgcaguugu

SEQ ID NO: 693107 - RNA, 17 nt, Artificial Sequence
  Synthetic
gauauaacucccguugu

SEQ ID NO: 693108 - RNA, 17 nt, Artificial Sequence
  Synthetic
ggccucccguuuuuugu

SEQ ID NO: 693109 - RNA, 17 nt, Artificial Sequence
  Synthetic
gucucgcuccauuaauu

SEQ ID NO: 693110 - RNA, 17 nt, Artificial Sequence
  Synthetic
gucguuccuguaacauu

SEQ ID NO: 693111 - RNA, 17 nt, Artificial Sequence
  Synthetic
gcuuaugaugccgcauu

SEQ ID NO: 693112 - RNA, 17 nt, Artificial Sequence
  Synthetic
gcaaguucugcugcauu

SEQ ID NO: 693113 - RNA, 17 nt, Artificial Sequence
  Synthetic
ggaagcuauauacgauu

SEQ ID NO: 693114 - RNA, 17 nt, Artificial Sequence
  Synthetic
gagggauguauacgauu

SEQ ID NO: 693115 - RNA, 17 nt, Artificial Sequence
  Synthetic
ggaccuuacauccgauu

SEQ ID NO: 693116 - RNA, 17 nt, Artificial Sequence
  Synthetic
gaggaugguuuucgauu

SEQ ID NO: 693117 - RNA, 17 nt, Artificial Sequence
  Synthetic
ggugaaccuuuaggauu

SEQ ID NO: 693118 - RNA, 17 nt, Artificial Sequence
  Synthetic
guauaguucaagugauu

SEQ ID NO: 693119 - RNA, 17 nt, Artificial Sequence
  Synthetic
ggggugauaaggugauu

SEQ ID NO: 693120 - RNA, 17 nt, Artificial Sequence
  Synthetic
gucucacguacuugauu

SEQ ID NO: 693121 - RNA, 17 nt, Artificial Sequence
  Synthetic
gucacccacuagauauu

SEQ ID NO: 693122 - RNA, 17 nt, Artificial Sequence
  Synthetic
ggccaucucuagauauu

SEQ ID NO: 693123 - RNA, 17 nt, Artificial Sequence
  Synthetic
gcugucguuuaccuauu

SEQ ID NO: 693124 - RNA, 17 nt, Artificial Sequence
  Synthetic
ggggaccguuaucuauu

SEQ ID NO: 693125 - RNA, 17 nt, Artificial Sequence
  Synthetic
guucuauaucguuuauu

SEQ ID NO: 693126 - RNA, 17 nt, Artificial Sequence
  Synthetic
gcguaucucguuuuauu

SEQ ID NO: 693127 - RNA, 17 nt, Artificial Sequence
  Synthetic
guacccaagucuaacuu

SEQ ID NO: 693128 - RNA, 17 nt, Artificial Sequence
  Synthetic
gacauaguggguaacuu

SEQ ID NO: 693129 - RNA, 17 nt, Artificial Sequence
  Synthetic
gcauuacuacaacacuu

SEQ ID NO: 693130 - RNA, 17 nt, Artificial Sequence
  Synthetic
gauaauaaaacgcacuu

SEQ ID NO: 693131 - RNA, 17 nt, Artificial Sequence
  Synthetic
guuagauuuaacgacuu

SEQ ID NO: 693132 - RNA, 17 nt, Artificial Sequence
  Synthetic
ggggucuauuaggacuu

SEQ ID NO: 693133 - RNA, 17 nt, Artificial Sequence
  Synthetic
gcacccacuuaguacuu

SEQ ID NO: 693134 - RNA, 17 nt, Artificial Sequence
  Synthetic
guaacucuacuacccuu

SEQ ID NO: 693135 - RNA, 17 nt, Artificial Sequence
  Synthetic
guacuggcuuaccccuu

SEQ ID NO: 693136 - RNA, 17 nt, Artificial Sequence
  Synthetic
gucuuuuucuacgccuu

SEQ ID NO: 693137 - RNA, 17 nt, Artificial Sequence
  Synthetic
gaguauucacaugccuu

SEQ ID NO: 693138 - RNA, 17 nt, Artificial Sequence
  Synthetic
gguguugggugacgcuu

SEQ ID NO: 693139 - RNA, 17 nt, Artificial Sequence
  Synthetic
ggagcauuguuucgcuu

SEQ ID NO: 693140 - RNA, 17 nt, Artificial Sequence
  Synthetic
gguccacuaagaggcuu

SEQ ID NO: 693141 - RNA, 17 nt, Artificial Sequence
  Synthetic
gaggcuuaacaaugcuu

SEQ ID NO: 693142 - RNA, 17 nt, Artificial Sequence
  Synthetic
gauggccccuuaugcuu

SEQ ID NO: 693143 - RNA, 17 nt, Artificial Sequence
  Synthetic
ggaacuaguuauugcuu

SEQ ID NO: 693144 - RNA, 17 nt, Artificial Sequence
  Synthetic
gcacuaggcuaaaucuu

SEQ ID NO: 693145 - RNA, 17 nt, Artificial Sequence
  Synthetic
gguguaauagauaucuu

SEQ ID NO: 693146 - RNA, 17 nt, Artificial Sequence
  Synthetic
gaucggugauuacucuu

SEQ ID NO: 693147 - RNA, 17 nt, Artificial Sequence
  Synthetic
gacuagcaguuagucuu

SEQ ID NO: 693148 - RNA, 17 nt, Artificial Sequence
  Synthetic
gcccgguacaauuucuu

SEQ ID NO: 693149 - RNA, 17 nt, Artificial Sequence
  Synthetic
ggcaauaucuacaaguu

SEQ ID NO: 693150 - RNA, 17 nt, Artificial Sequence
  Synthetic
guuagacaggucaaguu

SEQ ID NO: 693151 - RNA, 17 nt, Artificial Sequence
  Synthetic
gacugucuaacacaguu

SEQ ID NO: 693152 - RNA, 17 nt, Artificial Sequence
  Synthetic
gcagccacaagguaguu

SEQ ID NO: 693153 - RNA, 17 nt, Artificial Sequence
  Synthetic
gaauuauucuuaacguu

SEQ ID NO: 693154 - RNA, 17 nt, Artificial Sequence
  Synthetic
gucucuuaaaguacguu

SEQ ID NO: 693155 - RNA, 17 nt, Artificial Sequence
  Synthetic
ggugacaaaaucccguu

SEQ ID NO: 693156 - RNA, 17 nt, Artificial Sequence
  Synthetic
gugucagaguauccguu

SEQ ID NO: 693157 - RNA, 17 nt, Artificial Sequence
  Synthetic
guaugagagcaggcguu

SEQ ID NO: 693158 - RNA, 17 nt, Artificial Sequence
  Synthetic
gagauuuaguaggcguu

SEQ ID NO: 693159 - RNA, 17 nt, Artificial Sequence
  Synthetic
gacauccacucuagguu

SEQ ID NO: 693160 - RNA, 17 nt, Artificial Sequence
  Synthetic
gucccuuuguguagguu

SEQ ID NO: 693161 - RNA, 17 nt, Artificial Sequence
  Synthetic
gucuuagugcaaggguu

SEQ ID NO: 693162 - RNA, 17 nt, Artificial Sequence
  Synthetic
guaucaagcuaaggguu

SEQ ID NO: 693163 - RNA, 17 nt, Artificial Sequence
  Synthetic
guugagucauagggguu

SEQ ID NO: 693164 - RNA, 17 nt, Artificial Sequence
  Synthetic
guccuucggguccuguu

SEQ ID NO: 693165 - RNA, 17 nt, Artificial Sequence
  Synthetic
gccuuucgaauaguguu

SEQ ID NO: 693166 - RNA, 17 nt, Artificial Sequence
  Synthetic
gucagcucgggcaauuu

SEQ ID NO: 693167 - RNA, 17 nt, Artificial Sequence
  Synthetic
guguccauaggggauuu

SEQ ID NO: 693168 - RNA, 17 nt, Artificial Sequence
  Synthetic
gcuuguuaccuaacuuu

SEQ ID NO: 693169 - RNA, 17 nt, Artificial Sequence
  Synthetic
gaaggacauaccacuuu

SEQ ID NO: 693170 - RNA, 17 nt, Artificial Sequence
  Synthetic
gauacccuacagccuuu

SEQ ID NO: 693171 - RNA, 17 nt, Artificial Sequence
  Synthetic
guucaaagcccgccuuu

SEQ ID NO: 693172 - RNA, 17 nt, Artificial Sequence
  Synthetic
ggucagcaccuuaguuu

SEQ ID NO: 693173 - RNA, 17 nt, Artificial Sequence
  Synthetic
guugggacauacgguuu

SEQ ID NO: 693174 - RNA, 17 nt, Artificial Sequence
  Synthetic
gcuacaucaagguguuu

SEQ ID NO: 693175 - RNA, 17 nt, Artificial Sequence
  Synthetic
gggcguaguacacuuuu

SEQ ID NO: 693176 - RNA, 17 nt, Artificial Sequence
  Synthetic
gagcgacuaauaguuuu

SEQ ID NO: 693177 - RNA, 17 nt, Artificial Sequence
  Synthetic
ggcaccaauaugguuuu

SEQ ID NO: 693178 - RNA, 20 nt, Artificial Sequence
  Synthetic
ggauguagcuacuggaaaaa

SEQ ID NO: 693179 - RNA, 20 nt, Artificial Sequence
  Synthetic
guccccuucggccgucaaaa

SEQ ID NO: 693180 - RNA, 20 nt, Artificial Sequence
  Synthetic
gaauggcuggcccgagaaaa

SEQ ID NO: 693181 - RNA, 20 nt, Artificial Sequence
  Synthetic
gggggcucgcuuauagaaaa

SEQ ID NO: 693182 - RNA, 20 nt, Artificial Sequence
  Synthetic
gcaacugcagugcaggaaaa

SEQ ID NO: 693183 - RNA, 20 nt, Artificial Sequence
  Synthetic
ggcauguaaacguaggaaaa

SEQ ID NO: 693184 - RNA, 20 nt, Artificial Sequence
  Synthetic
gcugcaugcguaugugaaaa

SEQ ID NO: 693185 - RNA, 20 nt, Artificial Sequence
  Synthetic
gcucaacgaguuaguuaaaa

SEQ ID NO: 693186 - RNA, 20 nt, Artificial Sequence
  Synthetic
guccaguaugacuggacaaa

SEQ ID NO: 693187 - RNA, 20 nt, Artificial Sequence
  Synthetic
gggaacaugcuaaauacaaa

SEQ ID NO: 693188 - RNA, 20 nt, Artificial Sequence
  Synthetic
gugugacuuaaaguuacaaa

SEQ ID NO: 693189 - RNA, 20 nt, Artificial Sequence
  Synthetic
gagugccagaaccuaccaaa

SEQ ID NO: 693190 - RNA, 20 nt, Artificial Sequence
  Synthetic
gauuacagaacccuagcaaa

SEQ ID NO: 693191 - RNA, 20 nt, Artificial Sequence
  Synthetic
gcaucugucgguaaugcaaa

SEQ ID NO: 693192 - RNA, 20 nt, Artificial Sequence
  Synthetic
gccuauaguaagugugcaaa

SEQ ID NO: 693193 - RNA, 20 nt, Artificial Sequence
  Synthetic
gcuucuggcccuccaucaaa

SEQ ID NO: 693194 - RNA, 20 nt, Artificial Sequence
  Synthetic
guacucgauaaauugucaaa

SEQ ID NO: 693195 - RNA, 20 nt, Artificial Sequence
  Synthetic
gucuuaaggucgauuucaaa

SEQ ID NO: 693196 - RNA, 20 nt, Artificial Sequence
  Synthetic
guauagauccuacuuucaaa

SEQ ID NO: 693197 - RNA, 20 nt, Artificial Sequence
  Synthetic
guaucugggcuauaaagaaa

SEQ ID NO: 693198 - RNA, 20 nt, Artificial Sequence
  Synthetic
guaguauugauucucagaaa

SEQ ID NO: 693199 - RNA, 20 nt, Artificial Sequence
  Synthetic
ggcaguuaaguccguagaaa

SEQ ID NO: 693200 - RNA, 20 nt, Artificial Sequence
  Synthetic
gaucaaugaauuuggcgaaa

SEQ ID NO: 693201 - RNA, 20 nt, Artificial Sequence
  Synthetic
guacuuggugauauaggaaa

SEQ ID NO: 693202 - RNA, 20 nt, Artificial Sequence
  Synthetic
gaaggcuggucauccggaaa

SEQ ID NO: 693203 - RNA, 20 nt, Artificial Sequence
  Synthetic
gucccuggccuuuauggaaa

SEQ ID NO: 693204 - RNA, 20 nt, Artificial Sequence
  Synthetic
guagcaucuaaugcuggaaa

SEQ ID NO: 693205 - RNA, 20 nt, Artificial Sequence
  Synthetic
gauucggugucaggaugaaa

SEQ ID NO: 693206 - RNA, 20 nt, Artificial Sequence
  Synthetic
guagcacggagagacugaaa

SEQ ID NO: 693207 - RNA, 20 nt, Artificial Sequence
  Synthetic
gguuucccuacggggugaaa

SEQ ID NO: 693208 - RNA, 20 nt, Artificial Sequence
  Synthetic
gguguacuguagaguugaaa

SEQ ID NO: 693209 - RNA, 20 nt, Artificial Sequence
  Synthetic
gcccugauagguuuuugaaa

SEQ ID NO: 693210 - RNA, 20 nt, Artificial Sequence
  Synthetic
gaggccauuugcgagauaaa

SEQ ID NO: 693211 - RNA, 20 nt, Artificial Sequence
  Synthetic
ggccauucauaacugauaaa

SEQ ID NO: 693212 - RNA, 20 nt, Artificial Sequence
  Synthetic
guugucauacuccguauaaa

SEQ ID NO: 693213 - RNA, 20 nt, Artificial Sequence
  Synthetic
gaguauguuggccugcuaaa

SEQ ID NO: 693214 - RNA, 20 nt, Artificial Sequence
  Synthetic
ggcucuaucugcccaguaaa

SEQ ID NO: 693215 - RNA, 20 nt, Artificial Sequence
  Synthetic
guguucaguugcaugguaaa

SEQ ID NO: 693216 - RNA, 20 nt, Artificial Sequence
  Synthetic
guuccauuguggcuauuaaa

SEQ ID NO: 693217 - RNA, 20 nt, Artificial Sequence
  Synthetic
ggucucucugaauugaacaa

SEQ ID NO: 693218 - RNA, 20 nt, Artificial Sequence
  Synthetic
gcugcuaaugggagacacaa

SEQ ID NO: 693219 - RNA, 20 nt, Artificial Sequence
  Synthetic
ggucagauugaguuccacaa

SEQ ID NO: 693220 - RNA, 20 nt, Artificial Sequence
  Synthetic
gaauaguuccagcgucacaa

SEQ ID NO: 693221 - RNA, 20 nt, Artificial Sequence
  Synthetic
gugcgggcuagacgcgacaa

SEQ ID NO: 693222 - RNA, 20 nt, Artificial Sequence
  Synthetic
gagggcccauucagggacaa

SEQ ID NO: 693223 - RNA, 20 nt, Artificial Sequence
  Synthetic
guguuaaguccucuaaccaa

SEQ ID NO: 693224 - RNA, 20 nt, Artificial Sequence
  Synthetic
gaguguaaggaccucaccaa

SEQ ID NO: 693225 - RNA, 20 nt, Artificial Sequence
  Synthetic
gauugcuauggauuugccaa

SEQ ID NO: 693226 - RNA, 20 nt, Artificial Sequence
  Synthetic
gauauuuccuacgaauccaa

SEQ ID NO: 693227 - RNA, 20 nt, Artificial Sequence
  Synthetic
gcucuuaaaaccuuuuccaa

SEQ ID NO: 693228 - RNA, 20 nt, Artificial Sequence
  Synthetic
gagaagacuugcgaaagcaa

SEQ ID NO: 693229 - RNA, 20 nt, Artificial Sequence
  Synthetic
gucugaaaaauagguggcaa

SEQ ID NO: 693230 - RNA, 20 nt, Artificial Sequence
  Synthetic
gauugguccaaacuuggcaa

SEQ ID NO: 693231 - RNA, 20 nt, Artificial Sequence
  Synthetic
gcaggauaauuccagugcaa

SEQ ID NO: 693232 - RNA, 20 nt, Artificial Sequence
  Synthetic
ggucuucaaccucagugcaa

SEQ ID NO: 693233 - RNA, 20 nt, Artificial Sequence
  Synthetic
gugucuuucguuugaaucaa

SEQ ID NO: 693234 - RNA, 20 nt, Artificial Sequence
  Synthetic
gggauaggcaggguaaucaa

SEQ ID NO: 693235 - RNA, 20 nt, Artificial Sequence
  Synthetic
gagguuggcauaaccaucaa

SEQ ID NO: 693236 - RNA, 20 nt, Artificial Sequence
  Synthetic
guuauuuccccuagcaucaa

SEQ ID NO: 693237 - RNA, 20 nt, Artificial Sequence
  Synthetic
gaugccacaucgcauaucaa

SEQ ID NO: 693238 - RNA, 20 nt, Artificial Sequence
  Synthetic
gggacugucaucacuaucaa

SEQ ID NO: 693239 - RNA, 20 nt, Artificial Sequence
  Synthetic
gccauuaucgcucuuaucaa

SEQ ID NO: 693240 - RNA, 20 nt, Artificial Sequence
  Synthetic
ggcuauccaagaaaccucaa

SEQ ID NO: 693241 - RNA, 20 nt, Artificial Sequence
  Synthetic
gagcauaguggagaccucaa

SEQ ID NO: 693242 - RNA, 20 nt, Artificial Sequence
  Synthetic
ggguaguagccccuucucaa

SEQ ID NO: 693243 - RNA, 20 nt, Artificial Sequence
  Synthetic
guuccacuaggccuucucaa

SEQ ID NO: 693244 - RNA, 20 nt, Artificial Sequence
  Synthetic
ggcauagugacaaaagucaa

SEQ ID NO: 693245 - RNA, 20 nt, Artificial Sequence
  Synthetic
gguucacuuugcuucgucaa

SEQ ID NO: 693246 - RNA, 20 nt, Artificial Sequence
  Synthetic
gcuuaguaccaggaauucaa

SEQ ID NO: 693247 - RNA, 20 nt, Artificial Sequence
  Synthetic
guuauaguauuaagcuucaa

SEQ ID NO: 693248 - RNA, 20 nt, Artificial Sequence
  Synthetic
ggcguuccuaaguuuuucaa

SEQ ID NO: 693249 - RNA, 20 nt, Artificial Sequence
  Synthetic
gcucccccacacaaaaagaa

SEQ ID NO: 693250 - RNA, 20 nt, Artificial Sequence
  Synthetic
gaaauaggggcgguaaagaa

SEQ ID NO: 693251 - RNA, 20 nt, Artificial Sequence
  Synthetic
gcuauacucaacuucaagaa

SEQ ID NO: 693252 - RNA, 20 nt, Artificial Sequence
  Synthetic
gggcaugucaaaauuaagaa

SEQ ID NO: 693253 - RNA, 20 nt, Artificial Sequence
  Synthetic
gcaaauuaaugacuugagaa

SEQ ID NO: 693254 - RNA, 20 nt, Artificial Sequence
  Synthetic
gagagauuauaaccauagaa

SEQ ID NO: 693255 - RNA, 20 nt, Artificial Sequence
  Synthetic
gucccuaggcaugucuagaa

SEQ ID NO: 693256 - RNA, 20 nt, Artificial Sequence
  Synthetic
ggauauuagcuugaguagaa

SEQ ID NO: 693257 - RNA, 20 nt, Artificial Sequence
  Synthetic
ggaguacauaauaguuagaa

SEQ ID NO: 693258 - RNA, 20 nt, Artificial Sequence
  Synthetic
gguguuugaaugucugcgaa

SEQ ID NO: 693259 - RNA, 20 nt, Artificial Sequence
  Synthetic
gucgucaauacuuaauggaa

SEQ ID NO: 693260 - RNA, 20 nt, Artificial Sequence
  Synthetic
guauuggccuggggauggaa

SEQ ID NO: 693261 - RNA, 20 nt, Artificial Sequence
  Synthetic
gucucaaccccaaucuggaa

SEQ ID NO: 693262 - RNA, 20 nt, Artificial Sequence
  Synthetic
gcaguuguauguagguggaa

SEQ ID NO: 693263 - RNA, 20 nt, Artificial Sequence
  Synthetic
gaucuccacaaguguuggaa

SEQ ID NO: 693264 - RNA, 20 nt, Artificial Sequence
  Synthetic
gcauuaaaccggucaaugaa

SEQ ID NO: 693265 - RNA, 20 nt, Artificial Sequence
  Synthetic
guagguaccaaauccaugaa

SEQ ID NO: 693266 - RNA, 20 nt, Artificial Sequence
  Synthetic
gguauagguaccaucaugaa

SEQ ID NO: 693267 - RNA, 20 nt, Artificial Sequence
  Synthetic
gucaauuggcagguacugaa

SEQ ID NO: 693268 - RNA, 20 nt, Artificial Sequence
  Synthetic
gucacgaaacaaugauugaa

SEQ ID NO: 693269 - RNA, 20 nt, Artificial Sequence
  Synthetic
gguauaaauaugcgcuugaa

SEQ ID NO: 693270 - RNA, 20 nt, Artificial Sequence
  Synthetic
gauauucucuacuaguugaa

SEQ ID NO: 693271 - RNA, 20 nt, Artificial Sequence
  Synthetic
gugaagugggaguguuugaa

SEQ ID NO: 693272 - RNA, 20 nt, Artificial Sequence
  Synthetic
gcagucccaaugcccaauaa

SEQ ID NO: 693273 - RNA, 20 nt, Artificial Sequence
  Synthetic
guuuucauauaguaccauaa

SEQ ID NO: 693274 - RNA, 20 nt, Artificial Sequence
  Synthetic
gacagcuaaagggagcauaa

SEQ ID NO: 693275 - RNA, 20 nt, Artificial Sequence
  Synthetic
guaauuugccagggucauaa

SEQ ID NO: 693276 - RNA, 20 nt, Artificial Sequence
  Synthetic
ggguugcuuaaacacgauaa

SEQ ID NO: 693277 - RNA, 20 nt, Artificial Sequence
  Synthetic
gggcuacacaggauggauaa

SEQ ID NO: 693278 - RNA, 20 nt, Artificial Sequence
  Synthetic
ggcccugaaggucaauauaa

SEQ ID NO: 693279 - RNA, 20 nt, Artificial Sequence
  Synthetic
gcaugacggauaaacuauaa

SEQ ID NO: 693280 - RNA, 20 nt, Artificial Sequence
  Synthetic
gaaaaggcauaaccguauaa

SEQ ID NO: 693281 - RNA, 20 nt, Artificial Sequence
  Synthetic
guaccugaccagaauuauaa

SEQ ID NO: 693282 - RNA, 20 nt, Artificial Sequence
  Synthetic
gcaaugucaugggcaacuaa

SEQ ID NO: 693283 - RNA, 20 nt, Artificial Sequence
  Synthetic
gggaacaauuuaugcacuaa

SEQ ID NO: 693284 - RNA, 20 nt, Artificial Sequence
  Synthetic
gaugggguugagcagacuaa

SEQ ID NO: 693285 - RNA, 20 nt, Artificial Sequence
  Synthetic
ggcucacaucuaaugacuaa

SEQ ID NO: 693286 - RNA, 20 nt, Artificial Sequence
  Synthetic
gucagcucucucuugacuaa

SEQ ID NO: 693287 - RNA, 20 nt, Artificial Sequence
  Synthetic
gaccacauauccuacccuaa

SEQ ID NO: 693288 - RNA, 20 nt, Artificial Sequence
  Synthetic
gauaaacaugucaucccuaa

SEQ ID NO: 693289 - RNA, 20 nt, Artificial Sequence
  Synthetic
gaguuacuguucuucccuaa

SEQ ID NO: 693290 - RNA, 20 nt, Artificial Sequence
  Synthetic
gcuacucugggagcuccuaa

SEQ ID NO: 693291 - RNA, 20 nt, Artificial Sequence
  Synthetic
guucauuaaagcgaagcuaa

SEQ ID NO: 693292 - RNA, 20 nt, Artificial Sequence
  Synthetic
gcuucagugagauggucuaa

SEQ ID NO: 693293 - RNA, 20 nt, Artificial Sequence
  Synthetic
gccgucaugcuaauuucuaa

SEQ ID NO: 693294 - RNA, 20 nt, Artificial Sequence
  Synthetic
gaacuuguacauuguaguaa

SEQ ID NO: 693295 - RNA, 20 nt, Artificial Sequence
  Synthetic
gguuuuggacaucaugguaa

SEQ ID NO: 693296 - RNA, 20 nt, Artificial Sequence
  Synthetic
gcuagacacgucguugguaa

SEQ ID NO: 693297 - RNA, 20 nt, Artificial Sequence
  Synthetic
guuuugaggcgguuugguaa

SEQ ID NO: 693298 - RNA, 20 nt, Artificial Sequence
  Synthetic
gacagugccgugaucuguaa

SEQ ID NO: 693299 - RNA, 20 nt, Artificial Sequence
  Synthetic
gaauuccggauacauuguaa

SEQ ID NO: 693300 - RNA, 20 nt, Artificial Sequence
  Synthetic
guccuaccauuaucaauuaa

SEQ ID NO: 693301 - RNA, 20 nt, Artificial Sequence
  Synthetic
guuccucagugcguaauuaa

SEQ ID NO: 693302 - RNA, 20 nt, Artificial Sequence
  Synthetic
gcauucguaaauguacuuaa

SEQ ID NO: 693303 - RNA, 20 nt, Artificial Sequence
  Synthetic
ggguaaucuaagacccuuaa

SEQ ID NO: 693304 - RNA, 20 nt, Artificial Sequence
  Synthetic
guuggucaagagagccuuaa

SEQ ID NO: 693305 - RNA, 20 nt, Artificial Sequence
  Synthetic
gauuccuaccugaagcuuaa

SEQ ID NO: 693306 - RNA, 20 nt, Artificial Sequence
  Synthetic
gacucuucuacugugcuuaa

SEQ ID NO: 693307 - RNA, 20 nt, Artificial Sequence
  Synthetic
gucuauuagcauaaucuuaa

SEQ ID NO: 693308 - RNA, 20 nt, Artificial Sequence
  Synthetic
gagagcaguaagugucuuaa

SEQ ID NO: 693309 - RNA, 20 nt, Artificial Sequence
  Synthetic
guuuucuacacuauaguuaa

SEQ ID NO: 693310 - RNA, 20 nt, Artificial Sequence
  Synthetic
gcauuugagucaaguguuaa

SEQ ID NO: 693311 - RNA, 20 nt, Artificial Sequence
  Synthetic
guauuucagagccgcuuuaa

SEQ ID NO: 693312 - RNA, 20 nt, Artificial Sequence
  Synthetic
guugaaucuacugucuuuaa

SEQ ID NO: 693313 - RNA, 20 nt, Artificial Sequence
  Synthetic
guguagcauaaucaguuuaa

SEQ ID NO: 693314 - RNA, 20 nt, Artificial Sequence
  Synthetic
gugcccucuucugcguuuaa

SEQ ID NO: 693315 - RNA, 20 nt, Artificial Sequence
  Synthetic
gccaacagaguaccuuuuaa

SEQ ID NO: 693316 - RNA, 20 nt, Artificial Sequence
  Synthetic
gcaaggaguccgggacaaca

SEQ ID NO: 693317 - RNA, 20 nt, Artificial Sequence
  Synthetic
gcucaaucguugccccaaca

SEQ ID NO: 693318 - RNA, 20 nt, Artificial Sequence
  Synthetic
gcuugaguagaauggcaaca

SEQ ID NO: 693319 - RNA, 20 nt, Artificial Sequence
  Synthetic
gagcucccccgcaaagaaca

SEQ ID NO: 693320 - RNA, 20 nt, Artificial Sequence
  Synthetic
guauuugaagccugagaaca

SEQ ID NO: 693321 - RNA, 20 nt, Artificial Sequence
  Synthetic
ggcaguuaccgaacauaaca

SEQ ID NO: 693322 - RNA, 20 nt, Artificial Sequence
  Synthetic
gcuggcugucgacauuaaca

SEQ ID NO: 693323 - RNA, 20 nt, Artificial Sequence
  Synthetic
gggguuacuaccguuuaaca

SEQ ID NO: 693324 - RNA, 20 nt, Artificial Sequence
  Synthetic
guaaauauaguuaggacaca

SEQ ID NO: 693325 - RNA, 20 nt, Artificial Sequence
  Synthetic
ggcaggauaaauuggacaca

SEQ ID NO: 693326 - RNA, 20 nt, Artificial Sequence
  Synthetic
ggaaagugcugaaugccaca

SEQ ID NO: 693327 - RNA, 20 nt, Artificial Sequence
  Synthetic
gaucagagauuggaugcaca

SEQ ID NO: 693328 - RNA, 20 nt, Artificial Sequence
  Synthetic
ggacucacaaacccgucaca

SEQ ID NO: 693329 - RNA, 20 nt, Artificial Sequence
  Synthetic
gcuuguagcacugguucaca

SEQ ID NO: 693330 - RNA, 20 nt, Artificial Sequence
  Synthetic
gaguuuauuggcacaagaca

SEQ ID NO: 693331 - RNA, 20 nt, Artificial Sequence
  Synthetic
gucuauuuguuagauagaca

SEQ ID NO: 693332 - RNA, 20 nt, Artificial Sequence
  Synthetic
ggagaguacaaauugcgaca

SEQ ID NO: 693333 - RNA, 20 nt, Artificial Sequence
  Synthetic
gccaaggccauuauaugaca

SEQ ID NO: 693334 - RNA, 20 nt, Artificial Sequence
  Synthetic
ggguugaugauagccugaca

SEQ ID NO: 693335 - RNA, 20 nt, Artificial Sequence
  Synthetic
gagcaaccagugucaauaca

SEQ ID NO: 693336 - RNA, 20 nt, Artificial Sequence
  Synthetic
gguccccuacaaaggauaca

SEQ ID NO: 693337 - RNA, 20 nt, Artificial Sequence
  Synthetic
ggggauauaggaccacuaca

SEQ ID NO: 693338 - RNA, 20 nt, Artificial Sequence
  Synthetic
gaggcgaaacauauacuaca

SEQ ID NO: 693339 - RNA, 20 nt, Artificial Sequence
  Synthetic
gccagagggaauuaccuaca

SEQ ID NO: 693340 - RNA, 20 nt, Artificial Sequence
  Synthetic
gugcguuagaauugccuaca

SEQ ID NO: 693341 - RNA, 20 nt, Artificial Sequence
  Synthetic
gagagaguaguuugccuaca

SEQ ID NO: 693342 - RNA, 20 nt, Artificial Sequence
  Synthetic
gaaucacuggguauccuaca

SEQ ID NO: 693343 - RNA, 20 nt, Artificial Sequence
  Synthetic
gcccguucauacuagcuaca

SEQ ID NO: 693344 - RNA, 20 nt, Artificial Sequence
  Synthetic
gauaauggaucgugucuaca

SEQ ID NO: 693345 - RNA, 20 nt, Artificial Sequence
  Synthetic
gaguuggugagugcaguaca

SEQ ID NO: 693346 - RNA, 20 nt, Artificial Sequence
  Synthetic
guacgcaugugacuuguaca

SEQ ID NO: 693347 - RNA, 20 nt, Artificial Sequence
  Synthetic
gaaucuacuugacucuuaca

SEQ ID NO: 693348 - RNA, 20 nt, Artificial Sequence
  Synthetic
guuauaccauacaaccacca

SEQ ID NO: 693349 - RNA, 20 nt, Artificial Sequence
  Synthetic
gcgugugacuccaggcacca

SEQ ID NO: 693350 - RNA, 20 nt, Artificial Sequence
  Synthetic
guacaauaugaggaagacca

SEQ ID NO: 693351 - RNA, 20 nt, Artificial Sequence
  Synthetic
ggagaagguauauaagacca

SEQ ID NO: 693352 - RNA, 20 nt, Artificial Sequence
  Synthetic
gcagucaauauaugcgacca

SEQ ID NO: 693353 - RNA, 20 nt, Artificial Sequence
  Synthetic
gagguucuuaccuaauacca

SEQ ID NO: 693354 - RNA, 20 nt, Artificial Sequence
  Synthetic
gaucacugcacuaaaaccca

SEQ ID NO: 693355 - RNA, 20 nt, Artificial Sequence
  Synthetic
gggucuucugagugaaccca

SEQ ID NO: 693356 - RNA, 20 nt, Artificial Sequence
  Synthetic
gcaauucaauauauaaccca

SEQ ID NO: 693357 - RNA, 20 nt, Artificial Sequence
  Synthetic
gcucucugucugguagccca

SEQ ID NO: 693358 - RNA, 20 nt, Artificial Sequence
  Synthetic
gguaguacaggaguugccca

SEQ ID NO: 693359 - RNA, 20 nt, Artificial Sequence
  Synthetic
ggagcacagaucuacuccca

SEQ ID NO: 693360 - RNA, 20 nt, Artificial Sequence
  Synthetic
gguuuucucgugacgagcca

SEQ ID NO: 693361 - RNA, 20 nt, Artificial Sequence
  Synthetic
gcagguacacuaugcugcca

SEQ ID NO: 693362 - RNA, 20 nt, Artificial Sequence
  Synthetic
gaccauacaucaucgugcca

SEQ ID NO: 693363 - RNA, 20 nt, Artificial Sequence
  Synthetic
guauaucugggccaaaucca

SEQ ID NO: 693364 - RNA, 20 nt, Artificial Sequence
  Synthetic
gccacgccugguuacaucca

SEQ ID NO: 693365 - RNA, 20 nt, Artificial Sequence
  Synthetic
gggaagaguaauuucaucca

SEQ ID NO: 693366 - RNA, 20 nt, Artificial Sequence
  Synthetic
gggccuucuuuuguggucca

SEQ ID NO: 693367 - RNA, 20 nt, Artificial Sequence
  Synthetic
guacagguuuggugauucca

SEQ ID NO: 693368 - RNA, 20 nt, Artificial Sequence
  Synthetic
ggaacuauguguagcuucca

SEQ ID NO: 693369 - RNA, 20 nt, Artificial Sequence
  Synthetic
gagguugcuacagaguucca

SEQ ID NO: 693370 - RNA, 20 nt, Artificial Sequence
  Synthetic
guaguugcccauacuuucca

SEQ ID NO: 693371 - RNA, 20 nt, Artificial Sequence
  Synthetic
ggaugacuccccuuuuucca

SEQ ID NO: 693372 - RNA, 20 nt, Artificial Sequence
  Synthetic
gcuccgcaccugacaaagca

SEQ ID NO: 693373 - RNA, 20 nt, Artificial Sequence
  Synthetic
ggcugcgagugcugaaagca

SEQ ID NO: 693374 - RNA, 20 nt, Artificial Sequence
  Synthetic
gagguggagaucauccagca

SEQ ID NO: 693375 - RNA, 20 nt, Artificial Sequence
  Synthetic
gugagggaauaugaucagca

SEQ ID NO: 693376 - RNA, 20 nt, Artificial Sequence
  Synthetic
guggaagacgaauaucagca

SEQ ID NO: 693377 - RNA, 20 nt, Artificial Sequence
  Synthetic
ggcuauugagaccaagagca

SEQ ID NO: 693378 - RNA, 20 nt, Artificial Sequence
  Synthetic
gauuccuccugaauagagca

SEQ ID NO: 693379 - RNA, 20 nt, Artificial Sequence
  Synthetic
gcuuuuaacacuauagagca

SEQ ID NO: 693380 - RNA, 20 nt, Artificial Sequence
  Synthetic
guaauucuuaugguagagca

SEQ ID NO: 693381 - RNA, 20 nt, Artificial Sequence
  Synthetic
gcaagcguccaugaauagca

SEQ ID NO: 693382 - RNA, 20 nt, Artificial Sequence
  Synthetic
gcuagaggggauauauagca

SEQ ID NO: 693383 - RNA, 20 nt, Artificial Sequence
  Synthetic
gagaaacucacaagguagca

SEQ ID NO: 693384 - RNA, 20 nt, Artificial Sequence
  Synthetic
gcuuauccauggggguagca

SEQ ID NO: 693385 - RNA, 20 nt, Artificial Sequence
  Synthetic
gguaaaugagauuguacgca

SEQ ID NO: 693386 - RNA, 20 nt, Artificial Sequence
  Synthetic
guguccuugccucaaaggca

SEQ ID NO: 693387 - RNA, 20 nt, Artificial Sequence
  Synthetic
ggacccuccacuagcaggca

SEQ ID NO: 693388 - RNA, 20 nt, Artificial Sequence
  Synthetic
gcuacuuuuaugacgaggca

SEQ ID NO: 693389 - RNA, 20 nt, Artificial Sequence
  Synthetic
gcuuguacucuacauaggca

SEQ ID NO: 693390 - RNA, 20 nt, Artificial Sequence
  Synthetic
gaugaauuggauaaggggca

SEQ ID NO: 693391 - RNA, 20 nt, Artificial Sequence
  Synthetic
gcaccacgcuaagauuggca

SEQ ID NO: 693392 - RNA, 20 nt, Artificial Sequence
  Synthetic
ggccuacuguuuaaaaugca

SEQ ID NO: 693393 - RNA, 20 nt, Artificial Sequence
  Synthetic
gcucacuaugaaagaaugca

SEQ ID NO: 693394 - RNA, 20 nt, Artificial Sequence
  Synthetic
gaaacggcguuuacuaugca

SEQ ID NO: 693395 - RNA, 20 nt, Artificial Sequence
  Synthetic
guaacagcucuacuguugca

SEQ ID NO: 693396 - RNA, 20 nt, Artificial Sequence
  Synthetic
gacaacguugguccgaauca

SEQ ID NO: 693397 - RNA, 20 nt, Artificial Sequence
  Synthetic
gauuuuguucgacauaauca

SEQ ID NO: 693398 - RNA, 20 nt, Artificial Sequence
  Synthetic
gaaauccaccgaaguaauca

SEQ ID NO: 693399 - RNA, 20 nt, Artificial Sequence
  Synthetic
gcgaaagcuauuaaagauca

SEQ ID NO: 693400 - RNA, 20 nt, Artificial Sequence
  Synthetic
ggacuagcgggucaauauca

SEQ ID NO: 693401 - RNA, 20 nt, Artificial Sequence
  Synthetic
ggcacguauaaugaguauca

SEQ ID NO: 693402 - RNA, 20 nt, Artificial Sequence
  Synthetic
guucaaggaucgaacacuca

SEQ ID NO: 693403 - RNA, 20 nt, Artificial Sequence
  Synthetic
gauuauagcguuuacacuca

SEQ ID NO: 693404 - RNA, 20 nt, Artificial Sequence
  Synthetic
gacauuuauaaagccacuca

SEQ ID NO: 693405 - RNA, 20 nt, Artificial Sequence
  Synthetic
ggguacgugucauccacuca

SEQ ID NO: 693406 - RNA, 20 nt, Artificial Sequence
  Synthetic
guaaaaaggacgcccccuca

SEQ ID NO: 693407 - RNA, 20 nt, Artificial Sequence
  Synthetic
ggagggagcgcuacagcuca

SEQ ID NO: 693408 - RNA, 20 nt, Artificial Sequence
  Synthetic
ggucaaacgguuauagcuca

SEQ ID NO: 693409 - RNA, 20 nt, Artificial Sequence
  Synthetic
guuagguuauucuaggcuca

SEQ ID NO: 693410 - RNA, 20 nt, Artificial Sequence
  Synthetic
guuuacuagagcacaucuca

SEQ ID NO: 693411 - RNA, 20 nt, Artificial Sequence
  Synthetic
gcaaacaggguuguaaguca

SEQ ID NO: 693412 - RNA, 20 nt, Artificial Sequence
  Synthetic
gaaucccguggauucaguca

SEQ ID NO: 693413 - RNA, 20 nt, Artificial Sequence
  Synthetic
gcauauauacucacagguca

SEQ ID NO: 693414 - RNA, 20 nt, Artificial Sequence
  Synthetic
guucagugucaagucuguca

SEQ ID NO: 693415 - RNA, 20 nt, Artificial Sequence
  Synthetic
gaccuagauaaucaaauuca

SEQ ID NO: 693416 - RNA, 20 nt, Artificial Sequence
  Synthetic
ggagggagagggcccauuca

SEQ ID NO: 693417 - RNA, 20 nt, Artificial Sequence
  Synthetic
gacgguaugacuuagauuca

SEQ ID NO: 693418 - RNA, 20 nt, Artificial Sequence
  Synthetic
gucacugggauucauauuca

SEQ ID NO: 693419 - RNA, 20 nt, Artificial Sequence
  Synthetic
gacuggguuuuaucacuuca

SEQ ID NO: 693420 - RNA, 20 nt, Artificial Sequence
  Synthetic
gucaaagucacuggacuuca

SEQ ID NO: 693421 - RNA, 20 nt, Artificial Sequence
  Synthetic
guaggacuuuauaagcuuca

SEQ ID NO: 693422 - RNA, 20 nt, Artificial Sequence
  Synthetic
gagcguaagacccagcuuca

SEQ ID NO: 693423 - RNA, 20 nt, Artificial Sequence
  Synthetic
guuagcucucucuacguuca

SEQ ID NO: 693424 - RNA, 20 nt, Artificial Sequence
  Synthetic
gcagacagucgaaagguuca

SEQ ID NO: 693425 - RNA, 20 nt, Artificial Sequence
  Synthetic
gccuaggauugagaauuuca

SEQ ID NO: 693426 - RNA, 20 nt, Artificial Sequence
  Synthetic
gucuuucguauauccuuuca

SEQ ID NO: 693427 - RNA, 20 nt, Artificial Sequence
  Synthetic
gauacgcagauccaguuuca

SEQ ID NO: 693428 - RNA, 20 nt, Artificial Sequence
  Synthetic
guugaagugcuaaacaaaga

SEQ ID NO: 693429 - RNA, 20 nt, Artificial Sequence
  Synthetic
guucccgauacagauaaaga

SEQ ID NO: 693430 - RNA, 20 nt, Artificial Sequence
  Synthetic
gaugguaccuugaguaaaga

SEQ ID NO: 693431 - RNA, 20 nt, Artificial Sequence
  Synthetic
guaucauuggaaguccaaga

SEQ ID NO: 693432 - RNA, 20 nt, Artificial Sequence
  Synthetic
gacuaaguagaauuccaaga

SEQ ID NO: 693433 - RNA, 20 nt, Artificial Sequence
  Synthetic
gccuguauaacuuggcaaga

SEQ ID NO: 693434 - RNA, 20 nt, Artificial Sequence
  Synthetic
ggcccuauauugauugaaga

SEQ ID NO: 693435 - RNA, 20 nt, Artificial Sequence
  Synthetic
gacaaauguugucaauaaga

SEQ ID NO: 693436 - RNA, 20 nt, Artificial Sequence
  Synthetic
gaacuggaugccuaguaaga

SEQ ID NO: 693437 - RNA, 20 nt, Artificial Sequence
  Synthetic
gacguuauccaauauuaaga

SEQ ID NO: 693438 - RNA, 20 nt, Artificial Sequence
  Synthetic
gaucauucauggcacacaga

SEQ ID NO: 693439 - RNA, 20 nt, Artificial Sequence
  Synthetic
ggcaugggauuguggacaga

SEQ ID NO: 693440 - RNA, 20 nt, Artificial Sequence
  Synthetic
ggucaaagaauggcuacaga

SEQ ID NO: 693441 - RNA, 20 nt, Artificial Sequence
  Synthetic
gugucagaaggaaucccaga

SEQ ID NO: 693442 - RNA, 20 nt, Artificial Sequence
  Synthetic
guguaucugcggagagcaga

SEQ ID NO: 693443 - RNA, 20 nt, Artificial Sequence
  Synthetic
ggucaacguguaggggcaga

SEQ ID NO: 693444 - RNA, 20 nt, Artificial Sequence
  Synthetic
guaaacuaucacaaaucaga

SEQ ID NO: 693445 - RNA, 20 nt, Artificial Sequence
  Synthetic
gaaccaugcaguucaucaga

SEQ ID NO: 693446 - RNA, 20 nt, Artificial Sequence
  Synthetic
gcuuggugaaugguaucaga

SEQ ID NO: 693447 - RNA, 20 nt, Artificial Sequence
  Synthetic
gacaagacucgugacucaga

SEQ ID NO: 693448 - RNA, 20 nt, Artificial Sequence
  Synthetic
gcccauuaucuaaucucaga

SEQ ID NO: 693449 - RNA, 20 nt, Artificial Sequence
  Synthetic
ggugguggagucaucucaga

SEQ ID NO: 693450 - RNA, 20 nt, Artificial Sequence
  Synthetic
gggcuguaggcauucucaga

SEQ ID NO: 693451 - RNA, 20 nt, Artificial Sequence
  Synthetic
guccucuaagcuucuucaga

SEQ ID NO: 693452 - RNA, 20 nt, Artificial Sequence
  Synthetic
ggauaccguguacguucaga

SEQ ID NO: 693453 - RNA, 20 nt, Artificial Sequence
  Synthetic
gugcuaucuaauaucagaga

SEQ ID NO: 693454 - RNA, 20 nt, Artificial Sequence
  Synthetic
gccaucugggcaauacgaga

SEQ ID NO: 693455 - RNA, 20 nt, Artificial Sequence
  Synthetic
gauuggcuagccacuggaga

SEQ ID NO: 693456 - RNA, 20 nt, Artificial Sequence
  Synthetic
gcacucuuaucucaaugaga

SEQ ID NO: 693457 - RNA, 20 nt, Artificial Sequence
  Synthetic
gcccaaggccaaagaugaga

SEQ ID NO: 693458 - RNA, 20 nt, Artificial Sequence
  Synthetic
guuuacuccccacggugaga

SEQ ID NO: 693459 - RNA, 20 nt, Artificial Sequence
  Synthetic
guguagguuuaugggugaga

SEQ ID NO: 693460 - RNA, 20 nt, Artificial Sequence
  Synthetic
gcggcuaguacuaauugaga

SEQ ID NO: 693461 - RNA, 20 nt, Artificial Sequence
  Synthetic
gacaaguaaaucaguugaga

SEQ ID NO: 693462 - RNA, 20 nt, Artificial Sequence
  Synthetic
gucaccuaaggccagcuaga

SEQ ID NO: 693463 - RNA, 20 nt, Artificial Sequence
  Synthetic
gcaagugaacaggagcuaga

SEQ ID NO: 693464 - RNA, 20 nt, Artificial Sequence
  Synthetic
gcagaguucuagccaguaga

SEQ ID NO: 693465 - RNA, 20 nt, Artificial Sequence
  Synthetic
gcagaccaaagcauaguaga

SEQ ID NO: 693466 - RNA, 20 nt, Artificial Sequence
  Synthetic
gcacaacaguaaaacguaga

SEQ ID NO: 693467 - RNA, 20 nt, Artificial Sequence
  Synthetic
ggcagucauaggcccuuaga

SEQ ID NO: 693468 - RNA, 20 nt, Artificial Sequence
  Synthetic
ggucauaugguggguuuaga

SEQ ID NO: 693469 - RNA, 20 nt, Artificial Sequence
  Synthetic
gcuuucuacacuuuacacga

SEQ ID NO: 693470 - RNA, 20 nt, Artificial Sequence
  Synthetic
gguacaaacacaguauacga

SEQ ID NO: 693471 - RNA, 20 nt, Artificial Sequence
  Synthetic
gcguuuccuaauuuauacga

SEQ ID NO: 693472 - RNA, 20 nt, Artificial Sequence
  Synthetic
gauucuuaagaaguuaccga

SEQ ID NO: 693473 - RNA, 20 nt, Artificial Sequence
  Synthetic
gauauaugcagaaugggcga

SEQ ID NO: 693474 - RNA, 20 nt, Artificial Sequence
  Synthetic
gaaauacacuuggggugcga

SEQ ID NO: 693475 - RNA, 20 nt, Artificial Sequence
  Synthetic
gacucaguccugccuugcga

SEQ ID NO: 693476 - RNA, 20 nt, Artificial Sequence
  Synthetic
ggagaagacauaccagucga

SEQ ID NO: 693477 - RNA, 20 nt, Artificial Sequence
  Synthetic
gacauaaaauagguugucga

SEQ ID NO: 693478 - RNA, 20 nt, Artificial Sequence
  Synthetic
gguaggggucauauauucga

SEQ ID NO: 693479 - RNA, 20 nt, Artificial Sequence
  Synthetic
guugagauugcaacaaagga

SEQ ID NO: 693480 - RNA, 20 nt, Artificial Sequence
  Synthetic
gaagcuuucucuagccagga

SEQ ID NO: 693481 - RNA, 20 nt, Artificial Sequence
  Synthetic
gcucuagcggaauagcagga

SEQ ID NO: 693482 - RNA, 20 nt, Artificial Sequence
  Synthetic
gucaacgggguacaugagga

SEQ ID NO: 693483 - RNA, 20 nt, Artificial Sequence
  Synthetic
gccguaaagguuggugagga

SEQ ID NO: 693484 - RNA, 20 nt, Artificial Sequence
  Synthetic
gcacucucuuguugugagga

SEQ ID NO: 693485 - RNA, 20 nt, Artificial Sequence
  Synthetic
gaauaagaauucguugagga

SEQ ID NO: 693486 - RNA, 20 nt, Artificial Sequence
  Synthetic
gcugugucacuuauugcgga

SEQ ID NO: 693487 - RNA, 20 nt, Artificial Sequence
  Synthetic
gaugauucaggccaaucgga

SEQ ID NO: 693488 - RNA, 20 nt, Artificial Sequence
  Synthetic
gggauuaacggggucaggga

SEQ ID NO: 693489 - RNA, 20 nt, Artificial Sequence
  Synthetic
guaaaacacgagauuaggga

SEQ ID NO: 693490 - RNA, 20 nt, Artificial Sequence
  Synthetic
guauucaaguagcagcggga

SEQ ID NO: 693491 - RNA, 20 nt, Artificial Sequence
  Synthetic
guuuugguuuucccucggga

SEQ ID NO: 693492 - RNA, 20 nt, Artificial Sequence
  Synthetic
gauaauccacucacagggga

SEQ ID NO: 693493 - RNA, 20 nt, Artificial Sequence
  Synthetic
guuuugagcuauuuagggga

SEQ ID NO: 693494 - RNA, 20 nt, Artificial Sequence
  Synthetic
guaucaaggacagacgggga

SEQ ID NO: 693495 - RNA, 20 nt, Artificial Sequence
  Synthetic
gauuaacuugauauggggga

SEQ ID NO: 693496 - RNA, 20 nt, Artificial Sequence
  Synthetic
gauguguauuggccugggga

SEQ ID NO: 693497 - RNA, 20 nt, Artificial Sequence
  Synthetic
gauagucauagaguugggga

SEQ ID NO: 693498 - RNA, 20 nt, Artificial Sequence
  Synthetic
gcuagauauugcacauggga

SEQ ID NO: 693499 - RNA, 20 nt, Artificial Sequence
  Synthetic
ggacuuaaguccaucuggga

SEQ ID NO: 693500 - RNA, 20 nt, Artificial Sequence
  Synthetic
gucagcaccuuaguuuggga

SEQ ID NO: 693501 - RNA, 20 nt, Artificial Sequence
  Synthetic
gcuagcuggucccagaugga

SEQ ID NO: 693502 - RNA, 20 nt, Artificial Sequence
  Synthetic
ggagccugucccuauaugga

SEQ ID NO: 693503 - RNA, 20 nt, Artificial Sequence
  Synthetic
gacuaacuuagaccacugga

SEQ ID NO: 693504 - RNA, 20 nt, Artificial Sequence
  Synthetic
gaugagagaguuugccugga

SEQ ID NO: 693505 - RNA, 20 nt, Artificial Sequence
  Synthetic
gauugcuuaaucccucugga

SEQ ID NO: 693506 - RNA, 20 nt, Artificial Sequence
  Synthetic
gcuuuauucaacuaagugga

SEQ ID NO: 693507 - RNA, 20 nt, Artificial Sequence
  Synthetic
gcuauucaugguagggugga

SEQ ID NO: 693508 - RNA, 20 nt, Artificial Sequence
  Synthetic
gacuuaauucaauuugugga

SEQ ID NO: 693509 - RNA, 20 nt, Artificial Sequence
  Synthetic
guacacaaucuugcauugga

SEQ ID NO: 693510 - RNA, 20 nt, Artificial Sequence
  Synthetic
gucagcucgaagagguugga

SEQ ID NO: 693511 - RNA, 20 nt, Artificial Sequence
  Synthetic
gugccuucguuggcaaauga

SEQ ID NO: 693512 - RNA, 20 nt, Artificial Sequence
  Synthetic
gguuggagccccuugaauga

SEQ ID NO: 693513 - RNA, 20 nt, Artificial Sequence
  Synthetic
gccuuuuuauuucgccauga

SEQ ID NO: 693514 - RNA, 20 nt, Artificial Sequence
  Synthetic
ggcagcuagcuaggccauga

SEQ ID NO: 693515 - RNA, 20 nt, Artificial Sequence
  Synthetic
guagauguggaaaacgauga

SEQ ID NO: 693516 - RNA, 20 nt, Artificial Sequence
  Synthetic
gggauuaugacuuucuauga

SEQ ID NO: 693517 - RNA, 20 nt, Artificial Sequence
  Synthetic
guacuagaucaacauuauga

SEQ ID NO: 693518 - RNA, 20 nt, Artificial Sequence
  Synthetic
gguuguaacaagucaacuga

SEQ ID NO: 693519 - RNA, 20 nt, Artificial Sequence
  Synthetic
gacgguuggguagauacuga

SEQ ID NO: 693520 - RNA, 20 nt, Artificial Sequence
  Synthetic
gagcuaauagacacuccuga

SEQ ID NO: 693521 - RNA, 20 nt, Artificial Sequence
  Synthetic
gauaccauucaccaagcuga

SEQ ID NO: 693522 - RNA, 20 nt, Artificial Sequence
  Synthetic
gcuaaacaguuugaagcuga

SEQ ID NO: 693523 - RNA, 20 nt, Artificial Sequence
  Synthetic
guacaucgcugugcugcuga

SEQ ID NO: 693524 - RNA, 20 nt, Artificial Sequence
  Synthetic
ggccaaagacugucuucuga

SEQ ID NO: 693525 - RNA, 20 nt, Artificial Sequence
  Synthetic
gcggcaucauaagcaaguga

SEQ ID NO: 693526 - RNA, 20 nt, Artificial Sequence
  Synthetic
guacuaaacauagauaguga

SEQ ID NO: 693527 - RNA, 20 nt, Artificial Sequence
  Synthetic
gccacacaaaacuaccguga

SEQ ID NO: 693528 - RNA, 20 nt, Artificial Sequence
  Synthetic
ggaaccaaacccacucguga

SEQ ID NO: 693529 - RNA, 20 nt, Artificial Sequence
  Synthetic
gccaccgucuguggagguga

SEQ ID NO: 693530 - RNA, 20 nt, Artificial Sequence
  Synthetic
gaucagguucugaaggguga

SEQ ID NO: 693531 - RNA, 20 nt, Artificial Sequence
  Synthetic
gaacggcuugacuacuguga

SEQ ID NO: 693532 - RNA, 20 nt, Artificial Sequence
  Synthetic
guuuagcagcacagaauuga

SEQ ID NO: 693533 - RNA, 20 nt, Artificial Sequence
  Synthetic
gacaagcaucuaguaauuga

SEQ ID NO: 693534 - RNA, 20 nt, Artificial Sequence
  Synthetic
guaagcccgaucauuauuga

SEQ ID NO: 693535 - RNA, 20 nt, Artificial Sequence
  Synthetic
gcuuugccucaguuuauuga

SEQ ID NO: 693536 - RNA, 20 nt, Artificial Sequence
  Synthetic
ggagugauugagaaacuuga

SEQ ID NO: 693537 - RNA, 20 nt, Artificial Sequence
  Synthetic
gugcagguaaaagagguuga

SEQ ID NO: 693538 - RNA, 20 nt, Artificial Sequence
  Synthetic
gggcugcacguauugguuga

SEQ ID NO: 693539 - RNA, 20 nt, Artificial Sequence
  Synthetic
ggacugcaaggaaguguuga

SEQ ID NO: 693540 - RNA, 20 nt, Artificial Sequence
  Synthetic
guugaaagugggguuguuga

SEQ ID NO: 693541 - RNA, 20 nt, Artificial Sequence
  Synthetic
guccaaucacgacauuuuga

SEQ ID NO: 693542 - RNA, 20 nt, Artificial Sequence
  Synthetic
ggaacaaggucuguaaaaua

SEQ ID NO: 693543 - RNA, 20 nt, Artificial Sequence
  Synthetic
gaacacuagaugcccaaaua

SEQ ID NO: 693544 - RNA, 20 nt, Artificial Sequence
  Synthetic
ggagcaagacucaaccaaua

SEQ ID NO: 693545 - RNA, 20 nt, Artificial Sequence
  Synthetic
guccaucaaacagcccaaua

SEQ ID NO: 693546 - RNA, 20 nt, Artificial Sequence
  Synthetic
guucaaaugcucauagaaua

SEQ ID NO: 693547 - RNA, 20 nt, Artificial Sequence
  Synthetic
gaagccgauucugaggaaua

SEQ ID NO: 693548 - RNA, 20 nt, Artificial Sequence
  Synthetic
guugacagugguccauaaua

SEQ ID NO: 693549 - RNA, 20 nt, Artificial Sequence
  Synthetic
gauuacugcgguuuauaaua

SEQ ID NO: 693550 - RNA, 20 nt, Artificial Sequence
  Synthetic
gaagauagacacuguuaaua

SEQ ID NO: 693551 - RNA, 20 nt, Artificial Sequence
  Synthetic
gcucucuugaccaacccaua

SEQ ID NO: 693552 - RNA, 20 nt, Artificial Sequence
  Synthetic
gcgaugaugaauaaagcaua

SEQ ID NO: 693553 - RNA, 20 nt, Artificial Sequence
  Synthetic
guaagcucgaaggaagcaua

SEQ ID NO: 693554 - RNA, 20 nt, Artificial Sequence
  Synthetic
gcccacccuacuacggcaua

SEQ ID NO: 693555 - RNA, 20 nt, Artificial Sequence
  Synthetic
guggguuuagagggugcaua

SEQ ID NO: 693556 - RNA, 20 nt, Artificial Sequence
  Synthetic
gaagucguuuagggaucaua

SEQ ID NO: 693557 - RNA, 20 nt, Artificial Sequence
  Synthetic
gaaagucuaccucuaucaua

SEQ ID NO: 693558 - RNA, 20 nt, Artificial Sequence
  Synthetic
guuuggaaagacaccagaua

SEQ ID NO: 693559 - RNA, 20 nt, Artificial Sequence
  Synthetic
guaagauaccuucaucgaua

SEQ ID NO: 693560 - RNA, 20 nt, Artificial Sequence
  Synthetic
gaguuuuauaugugucgaua

SEQ ID NO: 693561 - RNA, 20 nt, Artificial Sequence
  Synthetic
gugaugauacugguaggaua

SEQ ID NO: 693562 - RNA, 20 nt, Artificial Sequence
  Synthetic
ggguaacaaaagggcugaua

SEQ ID NO: 693563 - RNA, 20 nt, Artificial Sequence
  Synthetic
gcucuuaaauggaagauaua

SEQ ID NO: 693564 - RNA, 20 nt, Artificial Sequence
  Synthetic
ggauuaaucgcacauauaua

SEQ ID NO: 693565 - RNA, 20 nt, Artificial Sequence
  Synthetic
guugugcuaccaacuauaua

SEQ ID NO: 693566 - RNA, 20 nt, Artificial Sequence
  Synthetic
gacagccagauggguauaua

SEQ ID NO: 693567 - RNA, 20 nt, Artificial Sequence
  Synthetic
gcauaaggcaagccuguaua

SEQ ID NO: 693568 - RNA, 20 nt, Artificial Sequence
  Synthetic
guuauacucaaaugguuaua

SEQ ID NO: 693569 - RNA, 20 nt, Artificial Sequence
  Synthetic
guugauuuaauggugaacua

SEQ ID NO: 693570 - RNA, 20 nt, Artificial Sequence
  Synthetic
gccagggggaggaauaacua

SEQ ID NO: 693571 - RNA, 20 nt, Artificial Sequence
  Synthetic
gaaccauaauauccuaacua

SEQ ID NO: 693572 - RNA, 20 nt, Artificial Sequence
  Synthetic
gcuaaaaccaccccacacua

SEQ ID NO: 693573 - RNA, 20 nt, Artificial Sequence
  Synthetic
gcuaaauaacacuuucacua

SEQ ID NO: 693574 - RNA, 20 nt, Artificial Sequence
  Synthetic
gauuugccucagaaagacua

SEQ ID NO: 693575 - RNA, 20 nt, Artificial Sequence
  Synthetic
guguaaguucuacgagacua

SEQ ID NO: 693576 - RNA, 20 nt, Artificial Sequence
  Synthetic
guagcauaucuuuuggacua

SEQ ID NO: 693577 - RNA, 20 nt, Artificial Sequence
  Synthetic
guuacuucucauugugacua

SEQ ID NO: 693578 - RNA, 20 nt, Artificial Sequence
  Synthetic
gauaugucagaagucuacua

SEQ ID NO: 693579 - RNA, 20 nt, Artificial Sequence
  Synthetic
gugacacucaggcauuacua

SEQ ID NO: 693580 - RNA, 20 nt, Artificial Sequence
  Synthetic
gacacaaccugugguuacua

SEQ ID NO: 693581 - RNA, 20 nt, Artificial Sequence
  Synthetic
gcuggaauagguaucaccua

SEQ ID NO: 693582 - RNA, 20 nt, Artificial Sequence
  Synthetic
gauaaguuaggguuuaccua

SEQ ID NO: 693583 - RNA, 20 nt, Artificial Sequence
  Synthetic
gacacauucauuucccccua

SEQ ID NO: 693584 - RNA, 20 nt, Artificial Sequence
  Synthetic
gcauauacuuacuuccccua

SEQ ID NO: 693585 - RNA, 20 nt, Artificial Sequence
  Synthetic
gauuacuagagagagcccua

SEQ ID NO: 693586 - RNA, 20 nt, Artificial Sequence
  Synthetic
gcguucaucauguugcccua

SEQ ID NO: 693587 - RNA, 20 nt, Artificial Sequence
  Synthetic
gcuauguuaacccuucccua

SEQ ID NO: 693588 - RNA, 20 nt, Artificial Sequence
  Synthetic
gaugauaucagguuucccua

SEQ ID NO: 693589 - RNA, 20 nt, Artificial Sequence
  Synthetic
gaggacuuuuaagaggccua

SEQ ID NO: 693590 - RNA, 20 nt, Artificial Sequence
  Synthetic
gaguuaucaauaauugccua

SEQ ID NO: 693591 - RNA, 20 nt, Artificial Sequence
  Synthetic
gaugucuaucuuauugccua

SEQ ID NO: 693592 - RNA, 20 nt, Artificial Sequence
  Synthetic
gucaaugguucugacagcua

SEQ ID NO: 693593 - RNA, 20 nt, Artificial Sequence
  Synthetic
gucaauauuccaaccagcua

SEQ ID NO: 693594 - RNA, 20 nt, Artificial Sequence
  Synthetic
gcaucuuaaacgagcagcua

SEQ ID NO: 693595 - RNA, 20 nt, Artificial Sequence
  Synthetic
ggaccaacacccuggagcua

SEQ ID NO: 693596 - RNA, 20 nt, Artificial Sequence
  Synthetic
gagccaaucuaaaugagcua

SEQ ID NO: 693597 - RNA, 20 nt, Artificial Sequence
  Synthetic
gacaaaaaaugaauacgcua

SEQ ID NO: 693598 - RNA, 20 nt, Artificial Sequence
  Synthetic
gacuguugauagcauggcua

SEQ ID NO: 693599 - RNA, 20 nt, Artificial Sequence
  Synthetic
gaagcaucgauagcaugcua

SEQ ID NO: 693600 - RNA, 20 nt, Artificial Sequence
  Synthetic
gcgauuaauccggagugcua

SEQ ID NO: 693601 - RNA, 20 nt, Artificial Sequence
  Synthetic
ggaacauuguagaauugcua

SEQ ID NO: 693602 - RNA, 20 nt, Artificial Sequence
  Synthetic
guuaucaguaaggaaaucua

SEQ ID NO: 693603 - RNA, 20 nt, Artificial Sequence
  Synthetic
gguaccuacuagucuaucua

SEQ ID NO: 693604 - RNA, 20 nt, Artificial Sequence
  Synthetic
gaucucacuugaaaacucua

SEQ ID NO: 693605 - RNA, 20 nt, Artificial Sequence
  Synthetic
guaacauccagaagccucua

SEQ ID NO: 693606 - RNA, 20 nt, Artificial Sequence
  Synthetic
gauguguauuauguucucua

SEQ ID NO: 693607 - RNA, 20 nt, Artificial Sequence
  Synthetic
guaugugaaacgagagucua

SEQ ID NO: 693608 - RNA, 20 nt, Artificial Sequence
  Synthetic
gcaauucagaaaugcgucua

SEQ ID NO: 693609 - RNA, 20 nt, Artificial Sequence
  Synthetic
guacuaugauagagugucua

SEQ ID NO: 693610 - RNA, 20 nt, Artificial Sequence
  Synthetic
gaucaaagagggauauucua

SEQ ID NO: 693611 - RNA, 20 nt, Artificial Sequence
  Synthetic
guuuuugauccacccuucua

SEQ ID NO: 693612 - RNA, 20 nt, Artificial Sequence
  Synthetic
ggagcccgggaauagaagua

SEQ ID NO: 693613 - RNA, 20 nt, Artificial Sequence
  Synthetic
guccauccaggggaacagua

SEQ ID NO: 693614 - RNA, 20 nt, Artificial Sequence
  Synthetic
gucaagguaguuugucagua

SEQ ID NO: 693615 - RNA, 20 nt, Artificial Sequence
  Synthetic
guccuuacuggugaagagua

SEQ ID NO: 693616 - RNA, 20 nt, Artificial Sequence
  Synthetic
gcaaaaucugaucuagagua

SEQ ID NO: 693617 - RNA, 20 nt, Artificial Sequence
  Synthetic
gugauuaacacagccgagua

SEQ ID NO: 693618 - RNA, 20 nt, Artificial Sequence
  Synthetic
gaacgugccuuacucgagua

SEQ ID NO: 693619 - RNA, 20 nt, Artificial Sequence
  Synthetic
ggggccccuuauuaggagua

SEQ ID NO: 693620 - RNA, 20 nt, Artificial Sequence
  Synthetic
guauagcaguuuuaggagua

SEQ ID NO: 693621 - RNA, 20 nt, Artificial Sequence
  Synthetic
ggaucagacccugaugagua

SEQ ID NO: 693622 - RNA, 20 nt, Artificial Sequence
  Synthetic
ggagugucaucaauauagua

SEQ ID NO: 693623 - RNA, 20 nt, Artificial Sequence
  Synthetic
guuagcuccuuaaucuagua

SEQ ID NO: 693624 - RNA, 20 nt, Artificial Sequence
  Synthetic
gcgcugugcucagauuagua

SEQ ID NO: 693625 - RNA, 20 nt, Artificial Sequence
  Synthetic
gccgaaggcaauucuuagua

SEQ ID NO: 693626 - RNA, 20 nt, Artificial Sequence
  Synthetic
gcgaugcuguggauuuagua

SEQ ID NO: 693627 - RNA, 20 nt, Artificial Sequence
  Synthetic
gaggguccaagacuuuagua

SEQ ID NO: 693628 - RNA, 20 nt, Artificial Sequence
  Synthetic
gauggaaguauugggacgua

SEQ ID NO: 693629 - RNA, 20 nt, Artificial Sequence
  Synthetic
gacaaaguacagcauacgua

SEQ ID NO: 693630 - RNA, 20 nt, Artificial Sequence
  Synthetic
guuuauaucauaagagcgua

SEQ ID NO: 693631 - RNA, 20 nt, Artificial Sequence
  Synthetic
gaccauuugacguuaaggua

SEQ ID NO: 693632 - RNA, 20 nt, Artificial Sequence
  Synthetic
gauagcaaucaacaucggua

SEQ ID NO: 693633 - RNA, 20 nt, Artificial Sequence
  Synthetic
guuugcugaugaauggggua

SEQ ID NO: 693634 - RNA, 20 nt, Artificial Sequence
  Synthetic
gcucuacuucuuaaauggua

SEQ ID NO: 693635 - RNA, 20 nt, Artificial Sequence
  Synthetic
guuuaauuuagagccuggua

SEQ ID NO: 693636 - RNA, 20 nt, Artificial Sequence
  Synthetic
gcuaucuaacuauguuggua

SEQ ID NO: 693637 - RNA, 20 nt, Artificial Sequence
  Synthetic
gugcuucagacaaaacugua

SEQ ID NO: 693638 - RNA, 20 nt, Artificial Sequence
  Synthetic
gaggaauacagcaggcugua

SEQ ID NO: 693639 - RNA, 20 nt, Artificial Sequence
  Synthetic
gguaccaacuugcugcugua

SEQ ID NO: 693640 - RNA, 20 nt, Artificial Sequence
  Synthetic
ggguccuggccauaucugua

SEQ ID NO: 693641 - RNA, 20 nt, Artificial Sequence
  Synthetic
gagacuuaaaacgcagugua

SEQ ID NO: 693642 - RNA, 20 nt, Artificial Sequence
  Synthetic
gcaacucaguaaagagugua

SEQ ID NO: 693643 - RNA, 20 nt, Artificial Sequence
  Synthetic
guucuuggggucaacgugua

SEQ ID NO: 693644 - RNA, 20 nt, Artificial Sequence
  Synthetic
gaucuggagaugcaauugua

SEQ ID NO: 693645 - RNA, 20 nt, Artificial Sequence
  Synthetic
gcucugcuaaaucaauugua

SEQ ID NO: 693646 - RNA, 20 nt, Artificial Sequence
  Synthetic
gcugcaucagagccauugua

SEQ ID NO: 693647 - RNA, 20 nt, Artificial Sequence
  Synthetic
gacugaaguuggccauugua

SEQ ID NO: 693648 - RNA, 20 nt, Artificial Sequence
  Synthetic
gaauaccucuuugaguugua

SEQ ID NO: 693649 - RNA, 20 nt, Artificial Sequence
  Synthetic
gugauaccuuggugguugua

SEQ ID NO: 693650 - RNA, 20 nt, Artificial Sequence
  Synthetic
gagaccugguugguguugua

SEQ ID NO: 693651 - RNA, 20 nt, Artificial Sequence
  Synthetic
gaggauacacucuaaaauua

SEQ ID NO: 693652 - RNA, 20 nt, Artificial Sequence
  Synthetic
gggcuggcagaugcacauua

SEQ ID NO: 693653 - RNA, 20 nt, Artificial Sequence
  Synthetic
gggugggaggcaugacauua

SEQ ID NO: 693654 - RNA, 20 nt, Artificial Sequence
  Synthetic
guagguaaaacacgagauua

SEQ ID NO: 693655 - RNA, 20 nt, Artificial Sequence
  Synthetic
gacgaguuggcucgggauua

SEQ ID NO: 693656 - RNA, 20 nt, Artificial Sequence
  Synthetic
gacccaagauaagaugauua

SEQ ID NO: 693657 - RNA, 20 nt, Artificial Sequence
  Synthetic
gcugucucaaaugacuauua

SEQ ID NO: 693658 - RNA, 20 nt, Artificial Sequence
  Synthetic
gguuuuugcacaccuuauua

SEQ ID NO: 693659 - RNA, 20 nt, Artificial Sequence
  Synthetic
gaacacccaacucuuuauua

SEQ ID NO: 693660 - RNA, 20 nt, Artificial Sequence
  Synthetic
gcgacuccauuacaaacuua

SEQ ID NO: 693661 - RNA, 20 nt, Artificial Sequence
  Synthetic
gaggaggcccaucaaacuua

SEQ ID NO: 693662 - RNA, 20 nt, Artificial Sequence
  Synthetic
gugccaccuagguugccuua

SEQ ID NO: 693663 - RNA, 20 nt, Artificial Sequence
  Synthetic
gcucaaucacgagcuccuua

SEQ ID NO: 693664 - RNA, 20 nt, Artificial Sequence
  Synthetic
ggauuccuaccugaagcuua

SEQ ID NO: 693665 - RNA, 20 nt, Artificial Sequence
  Synthetic
ggauuuuagagaagagcuua

SEQ ID NO: 693666 - RNA, 20 nt, Artificial Sequence
  Synthetic
gacagacgaaaaugugcuua

SEQ ID NO: 693667 - RNA, 20 nt, Artificial Sequence
  Synthetic
ggaugauauagagccucuua

SEQ ID NO: 693668 - RNA, 20 nt, Artificial Sequence
  Synthetic
ggcuuaaauccuaagucuua

SEQ ID NO: 693669 - RNA, 20 nt, Artificial Sequence
  Synthetic
guuuguccuugagcuucuua

SEQ ID NO: 693670 - RNA, 20 nt, Artificial Sequence
  Synthetic
ggacugcugacaggaaguua

SEQ ID NO: 693671 - RNA, 20 nt, Artificial Sequence
  Synthetic
gccaauaauuaagccaguua

SEQ ID NO: 693672 - RNA, 20 nt, Artificial Sequence
  Synthetic
gucccaaacugugcacguua

SEQ ID NO: 693673 - RNA, 20 nt, Artificial Sequence
  Synthetic
gcuaaagcuucuuauuguua

SEQ ID NO: 693674 - RNA, 20 nt, Artificial Sequence
  Synthetic
gaaaggauccgaacuuguua

SEQ ID NO: 693675 - RNA, 20 nt, Artificial Sequence
  Synthetic
ggucccaucauuguuauuua

SEQ ID NO: 693676 - RNA, 20 nt, Artificial Sequence
  Synthetic
gggcuuguuaccuaacuuua

SEQ ID NO: 693677 - RNA, 20 nt, Artificial Sequence
  Synthetic
ggguguaagaaauuacuuua

SEQ ID NO: 693678 - RNA, 20 nt, Artificial Sequence
  Synthetic
ggauaucaugcaggccuuua

SEQ ID NO: 693679 - RNA, 20 nt, Artificial Sequence
  Synthetic
gcguuuuauuaaccucuuua

SEQ ID NO: 693680 - RNA, 20 nt, Artificial Sequence
  Synthetic
guaccuuguaguccauuuua

SEQ ID NO: 693681 - RNA, 20 nt, Artificial Sequence
  Synthetic
gaguggucaacccacuuuua

SEQ ID NO: 693682 - RNA, 20 nt, Artificial Sequence
  Synthetic
ggucgauagccugaguuuua

SEQ ID NO: 693683 - RNA, 20 nt, Artificial Sequence
  Synthetic
guuaguuacccaggguuuua

SEQ ID NO: 693684 - RNA, 20 nt, Artificial Sequence
  Synthetic
gaggcgacuugguuguuuua

SEQ ID NO: 693685 - RNA, 20 nt, Artificial Sequence
  Synthetic
ggguccaaaacagguuuuua

SEQ ID NO: 693686 - RNA, 20 nt, Artificial Sequence
  Synthetic
gcuauauggccauucaaaac

SEQ ID NO: 693687 - RNA, 20 nt, Artificial Sequence
  Synthetic
guuucggguucucagaaaac

SEQ ID NO: 693688 - RNA, 20 nt, Artificial Sequence
  Synthetic
gguaugggucacaguaaaac

SEQ ID NO: 693689 - RNA, 20 nt, Artificial Sequence
  Synthetic
gaaagucaguggccacaaac

SEQ ID NO: 693690 - RNA, 20 nt, Artificial Sequence
  Synthetic
gacuguaucuaaucacaaac

SEQ ID NO: 693691 - RNA, 20 nt, Artificial Sequence
  Synthetic
gucgaauggcugcgucaaac

SEQ ID NO: 693692 - RNA, 20 nt, Artificial Sequence
  Synthetic
gaacaacuguggugagaaac

SEQ ID NO: 693693 - RNA, 20 nt, Artificial Sequence
  Synthetic
guaggguagggggaugaaac

SEQ ID NO: 693694 - RNA, 20 nt, Artificial Sequence
  Synthetic
ggucaggugacuggugaaac

SEQ ID NO: 693695 - RNA, 20 nt, Artificial Sequence
  Synthetic
guuagucauugcauauaaac

SEQ ID NO: 693696 - RNA, 20 nt, Artificial Sequence
  Synthetic
gcucuguaaacucuauaaac

SEQ ID NO: 693697 - RNA, 20 nt, Artificial Sequence
  Synthetic
guacuuccuucauagacaac

SEQ ID NO: 693698 - RNA, 20 nt, Artificial Sequence
  Synthetic
gucaauggcaaauguacaac

SEQ ID NO: 693699 - RNA, 20 nt, Artificial Sequence
  Synthetic
gauuagcagaguugaccaac

SEQ ID NO: 693700 - RNA, 20 nt, Artificial Sequence
  Synthetic
gcauguguugcaaccccaac

SEQ ID NO: 693701 - RNA, 20 nt, Artificial Sequence
  Synthetic
gcaaauuucugaacuccaac

SEQ ID NO: 693702 - RNA, 20 nt, Artificial Sequence
  Synthetic
gguuuaggacugcuuccaac

SEQ ID NO: 693703 - RNA, 20 nt, Artificial Sequence
  Synthetic
gguuaaaauguuuuugcaac

SEQ ID NO: 693704 - RNA, 20 nt, Artificial Sequence
  Synthetic
gcaauaacgauggaaucaac

SEQ ID NO: 693705 - RNA, 20 nt, Artificial Sequence
  Synthetic
gaucucauggucuagucaac

SEQ ID NO: 693706 - RNA, 20 nt, Artificial Sequence
  Synthetic
gaccucuuugucacgucaac

SEQ ID NO: 693707 - RNA, 20 nt, Artificial Sequence
  Synthetic
gaaccaaguuacuuuucaac

SEQ ID NO: 693708 - RNA, 20 nt, Artificial Sequence
  Synthetic
gcugggccgugucuaagaac

SEQ ID NO: 693709 - RNA, 20 nt, Artificial Sequence
  Synthetic
gacagcaaugacuacagaac

SEQ ID NO: 693710 - RNA, 20 nt, Artificial Sequence
  Synthetic
gcuccaauggguaagagaac

SEQ ID NO: 693711 - RNA, 20 nt, Artificial Sequence
  Synthetic
gaaucacccaacuagagaac

SEQ ID NO: 693712 - RNA, 20 nt, Artificial Sequence
  Synthetic
gguugcagguccugccgaac

SEQ ID NO: 693713 - RNA, 20 nt, Artificial Sequence
  Synthetic
gccaguacugcuugccgaac

SEQ ID NO: 693714 - RNA, 20 nt, Artificial Sequence
  Synthetic
gguuuuuugcuugggggaac

SEQ ID NO: 693715 - RNA, 20 nt, Artificial Sequence
  Synthetic
gaugugcuuauacuaugaac

SEQ ID NO: 693716 - RNA, 20 nt, Artificial Sequence
  Synthetic
gaaggcggggaauuaauaac

SEQ ID NO: 693717 - RNA, 20 nt, Artificial Sequence
  Synthetic
ggauggauaauggacauaac

SEQ ID NO: 693718 - RNA, 20 nt, Artificial Sequence
  Synthetic
gagaaguguaaauucauaac

SEQ ID NO: 693719 - RNA, 20 nt, Artificial Sequence
  Synthetic
gagcguaaagacuugauaac

SEQ ID NO: 693720 - RNA, 20 nt, Artificial Sequence
  Synthetic
gcuugaggugugaauauaac

SEQ ID NO: 693721 - RNA, 20 nt, Artificial Sequence
  Synthetic
gagcugcuuguagcuauaac

SEQ ID NO: 693722 - RNA, 20 nt, Artificial Sequence
  Synthetic
ggugauuguuuuacaguaac

SEQ ID NO: 693723 - RNA, 20 nt, Artificial Sequence
  Synthetic
gaaccuggccaggcauuaac

SEQ ID NO: 693724 - RNA, 20 nt, Artificial Sequence
  Synthetic
gaguccuacugauuguuaac

SEQ ID NO: 693725 - RNA, 20 nt, Artificial Sequence
  Synthetic
gucagauauucagcaaacac

SEQ ID NO: 693726 - RNA, 20 nt, Artificial Sequence
  Synthetic
ggaucauguuuugugaacac

SEQ ID NO: 693727 - RNA, 20 nt, Artificial Sequence
  Synthetic
gauacugacuacuaccacac

SEQ ID NO: 693728 - RNA, 20 nt, Artificial Sequence
  Synthetic
gaagcucggaaaccucacac

SEQ ID NO: 693729 - RNA, 20 nt, Artificial Sequence
  Synthetic
gcauauguucauagucacac

SEQ ID NO: 693730 - RNA, 20 nt, Artificial Sequence
  Synthetic
gcaaaugcgaguugucacac

SEQ ID NO: 693731 - RNA, 20 nt, Artificial Sequence
  Synthetic
guagacacuguacaggacac

SEQ ID NO: 693732 - RNA, 20 nt, Artificial Sequence
  Synthetic
gaaaauuuaagcggugacac

SEQ ID NO: 693733 - RNA, 20 nt, Artificial Sequence
  Synthetic
gaaugggagucaguugacac

SEQ ID NO: 693734 - RNA, 20 nt, Artificial Sequence
  Synthetic
gcacugaaaagggugaccac

SEQ ID NO: 693735 - RNA, 20 nt, Artificial Sequence
  Synthetic
guugguauuugagguaccac

SEQ ID NO: 693736 - RNA, 20 nt, Artificial Sequence
  Synthetic
gaggauuggguuuuuaccac

SEQ ID NO: 693737 - RNA, 20 nt, Artificial Sequence
  Synthetic
guccuuauuaucugggccac

SEQ ID NO: 693738 - RNA, 20 nt, Artificial Sequence
  Synthetic
ggauaaaaguugaacagcac

SEQ ID NO: 693739 - RNA, 20 nt, Artificial Sequence
  Synthetic
gucugguuuaauagcagcac

SEQ ID NO: 693740 - RNA, 20 nt, Artificial Sequence
  Synthetic
gguccucugauuaucagcac

SEQ ID NO: 693741 - RNA, 20 nt, Artificial Sequence
  Synthetic
gacuacaauuaacucagcac

SEQ ID NO: 693742 - RNA, 20 nt, Artificial Sequence
  Synthetic
ggagucauaacaguuggcac

SEQ ID NO: 693743 - RNA, 20 nt, Artificial Sequence
  Synthetic
ggaucagagauuggaugcac

SEQ ID NO: 693744 - RNA, 20 nt, Artificial Sequence
  Synthetic
ggauggcaagcaagcugcac

SEQ ID NO: 693745 - RNA, 20 nt, Artificial Sequence
  Synthetic
guucacaggggugagugcac

SEQ ID NO: 693746 - RNA, 20 nt, Artificial Sequence
  Synthetic
gggcugcuuccaacaaucac

SEQ ID NO: 693747 - RNA, 20 nt, Artificial Sequence
  Synthetic
guuuggcuaaucuuaaucac

SEQ ID NO: 693748 - RNA, 20 nt, Artificial Sequence
  Synthetic
guuacaugcauuugcaucac

SEQ ID NO: 693749 - RNA, 20 nt, Artificial Sequence
  Synthetic
gcuuauauugaggcuaucac

SEQ ID NO: 693750 - RNA, 20 nt, Artificial Sequence
  Synthetic
gucuucuggauaguccucac

SEQ ID NO: 693751 - RNA, 20 nt, Artificial Sequence
  Synthetic
gguccuucaacaaugcucac

SEQ ID NO: 693752 - RNA, 20 nt, Artificial Sequence
  Synthetic
gucuguuuuagucaagucac

SEQ ID NO: 693753 - RNA, 20 nt, Artificial Sequence
  Synthetic
gagaagccuaacuaagucac

SEQ ID NO: 693754 - RNA, 20 nt, Artificial Sequence
  Synthetic
guccccaaguaaauugucac

SEQ ID NO: 693755 - RNA, 20 nt, Artificial Sequence
  Synthetic
gucuaaauauagaaguucac

SEQ ID NO: 693756 - RNA, 20 nt, Artificial Sequence
  Synthetic
gcuauuuaauggugguucac

SEQ ID NO: 693757 - RNA, 20 nt, Artificial Sequence
  Synthetic
ggacgaugauucaaaaagac

SEQ ID NO: 693758 - RNA, 20 nt, Artificial Sequence
  Synthetic
gguaaucauccugaccagac

SEQ ID NO: 693759 - RNA, 20 nt, Artificial Sequence
  Synthetic
gagguuauauguacccagac

SEQ ID NO: 693760 - RNA, 20 nt, Artificial Sequence
  Synthetic
gauauggcuuucgagcagac

SEQ ID NO: 693761 - RNA, 20 nt, Artificial Sequence
  Synthetic
gguaaggaaaauucgcagac

SEQ ID NO: 693762 - RNA, 20 nt, Artificial Sequence
  Synthetic
guuguggacuaugaagagac

SEQ ID NO: 693763 - RNA, 20 nt, Artificial Sequence
  Synthetic
gacuagcucugugaagagac

SEQ ID NO: 693764 - RNA, 20 nt, Artificial Sequence
  Synthetic
gagaugagaucacaauagac

SEQ ID NO: 693765 - RNA, 20 nt, Artificial Sequence
  Synthetic
gaguauucagauuuauagac

SEQ ID NO: 693766 - RNA, 20 nt, Artificial Sequence
  Synthetic
gaaccagauuugagaacgac

SEQ ID NO: 693767 - RNA, 20 nt, Artificial Sequence
  Synthetic
gagagauuuaaaagaccgac

SEQ ID NO: 693768 - RNA, 20 nt, Artificial Sequence
  Synthetic
gaauaugaggauacaucgac

SEQ ID NO: 693769 - RNA, 20 nt, Artificial Sequence
  Synthetic
gguuaggcuuggcauaggac

SEQ ID NO: 693770 - RNA, 20 nt, Artificial Sequence
  Synthetic
gugaacacuaacaaacggac

SEQ ID NO: 693771 - RNA, 20 nt, Artificial Sequence
  Synthetic
guuuggugauucuuacggac

SEQ ID NO: 693772 - RNA, 20 nt, Artificial Sequence
  Synthetic
ggaccaagacuuagauggac

SEQ ID NO: 693773 - RNA, 20 nt, Artificial Sequence
  Synthetic
gaaucccucagucuauggac

SEQ ID NO: 693774 - RNA, 20 nt, Artificial Sequence
  Synthetic
gacaaggcagugauuuggac

SEQ ID NO: 693775 - RNA, 20 nt, Artificial Sequence
  Synthetic
gggaguauacacuaaaugac

SEQ ID NO: 693776 - RNA, 20 nt, Artificial Sequence
  Synthetic
gggaguaggguucuaaugac

SEQ ID NO: 693777 - RNA, 20 nt, Artificial Sequence
  Synthetic
ggcauagguaaugacaugac

SEQ ID NO: 693778 - RNA, 20 nt, Artificial Sequence
  Synthetic
guggaugcugauuacaugac

SEQ ID NO: 693779 - RNA, 20 nt, Artificial Sequence
  Synthetic
gcaugaaugacuuucaugac

SEQ ID NO: 693780 - RNA, 20 nt, Artificial Sequence
  Synthetic
guacuucugccuuaucugac

SEQ ID NO: 693781 - RNA, 20 nt, Artificial Sequence
  Synthetic
gguaguuuaucugcucugac

SEQ ID NO: 693782 - RNA, 20 nt, Artificial Sequence
  Synthetic
guuuagaagggguaagugac

SEQ ID NO: 693783 - RNA, 20 nt, Artificial Sequence
  Synthetic
guugagacggugugggugac

SEQ ID NO: 693784 - RNA, 20 nt, Artificial Sequence
  Synthetic
gggaauuuuugcauugugac

SEQ ID NO: 693785 - RNA, 20 nt, Artificial Sequence
  Synthetic
gcacuuacgaauggcuugac

SEQ ID NO: 693786 - RNA, 20 nt, Artificial Sequence
  Synthetic
gagcuuucagagagguugac

SEQ ID NO: 693787 - RNA, 20 nt, Artificial Sequence
  Synthetic
gguaguagggcuagaaauac

SEQ ID NO: 693788 - RNA, 20 nt, Artificial Sequence
  Synthetic
gucugucgguguggaaauac

SEQ ID NO: 693789 - RNA, 20 nt, Artificial Sequence
  Synthetic
gcuaguuggcuaugaaauac

SEQ ID NO: 693790 - RNA, 20 nt, Artificial Sequence
  Synthetic
gcagguugucaauaacauac

SEQ ID NO: 693791 - RNA, 20 nt, Artificial Sequence
  Synthetic
gccaacaucugugaugauac

SEQ ID NO: 693792 - RNA, 20 nt, Artificial Sequence
  Synthetic
guaaaugccuauauugauac

SEQ ID NO: 693793 - RNA, 20 nt, Artificial Sequence
  Synthetic
gaagacuaaucagguuauac

SEQ ID NO: 693794 - RNA, 20 nt, Artificial Sequence
  Synthetic
gcuagaaaaguggaaacuac

SEQ ID NO: 693795 - RNA, 20 nt, Artificial Sequence
  Synthetic
guuuaugaggauguagcuac

SEQ ID NO: 693796 - RNA, 20 nt, Artificial Sequence
  Synthetic
gcauuaacauugcaaucuac

SEQ ID NO: 693797 - RNA, 20 nt, Artificial Sequence
  Synthetic
ggauuuucucugagaucuac

SEQ ID NO: 693798 - RNA, 20 nt, Artificial Sequence
  Synthetic
gaugcucagauuagcucuac

SEQ ID NO: 693799 - RNA, 20 nt, Artificial Sequence
  Synthetic
ggcaauauaugccgaaguac

SEQ ID NO: 693800 - RNA, 20 nt, Artificial Sequence
  Synthetic
gccuguucggcaagcaguac

SEQ ID NO: 693801 - RNA, 20 nt, Artificial Sequence
  Synthetic
ggcuuuacaacucauaguac

SEQ ID NO: 693802 - RNA, 20 nt, Artificial Sequence
  Synthetic
gaaaacgucuaguauaguac

SEQ ID NO: 693803 - RNA, 20 nt, Artificial Sequence
  Synthetic
gagugcagggguuguaguac

SEQ ID NO: 693804 - RNA, 20 nt, Artificial Sequence
  Synthetic
gauccagguaguauacguac

SEQ ID NO: 693805 - RNA, 20 nt, Artificial Sequence
  Synthetic
gcugcaaucgcuauagguac

SEQ ID NO: 693806 - RNA, 20 nt, Artificial Sequence
  Synthetic
gagaaacugucuagggguac

SEQ ID NO: 693807 - RNA, 20 nt, Artificial Sequence
  Synthetic
gauauugguagacacuguac

SEQ ID NO: 693808 - RNA, 20 nt, Artificial Sequence
  Synthetic
gauccaagugacacgauuac

SEQ ID NO: 693809 - RNA, 20 nt, Artificial Sequence
  Synthetic
gcccgaaugcacccuuuuac

SEQ ID NO: 693810 - RNA, 20 nt, Artificial Sequence
  Synthetic
gguaggaaggcuccaaaacc

SEQ ID NO: 693811 - RNA, 20 nt, Artificial Sequence
  Synthetic
gacaauguaacuucaaaacc

SEQ ID NO: 693812 - RNA, 20 nt, Artificial Sequence
  Synthetic
gaauagaguacuuccaaacc

SEQ ID NO: 693813 - RNA, 20 nt, Artificial Sequence
  Synthetic
gcuguuacuguaaagaaacc

SEQ ID NO: 693814 - RNA, 20 nt, Artificial Sequence
  Synthetic
gagaaucucugagggaaacc

SEQ ID NO: 693815 - RNA, 20 nt, Artificial Sequence
  Synthetic
gguuggccauuacauaaacc

SEQ ID NO: 693816 - RNA, 20 nt, Artificial Sequence
  Synthetic
guuaaucauaguccuaaacc

SEQ ID NO: 693817 - RNA, 20 nt, Artificial Sequence
  Synthetic
ggcauuauaguuaguaaacc

SEQ ID NO: 693818 - RNA, 20 nt, Artificial Sequence
  Synthetic
gguagacaaagaccucaacc

SEQ ID NO: 693819 - RNA, 20 nt, Artificial Sequence
  Synthetic
ggggguaaaggcaaggaacc

SEQ ID NO: 693820 - RNA, 20 nt, Artificial Sequence
  Synthetic
guaugugcuuagaaugaacc

SEQ ID NO: 693821 - RNA, 20 nt, Artificial Sequence
  Synthetic
guaugaacaccugaugaacc

SEQ ID NO: 693822 - RNA, 20 nt, Artificial Sequence
  Synthetic
guccucacaguggaguaacc

SEQ ID NO: 693823 - RNA, 20 nt, Artificial Sequence
  Synthetic
ggugaauuauccugaacacc

SEQ ID NO: 693824 - RNA, 20 nt, Artificial Sequence
  Synthetic
ggaaacuaaagcaagccacc

SEQ ID NO: 693825 - RNA, 20 nt, Artificial Sequence
  Synthetic
guagaccagguccguccacc

SEQ ID NO: 693826 - RNA, 20 nt, Artificial Sequence
  Synthetic
gucacauuuggugaagcacc

SEQ ID NO: 693827 - RNA, 20 nt, Artificial Sequence
  Synthetic
gauuaaugaacgugcgcacc

SEQ ID NO: 693828 - RNA, 20 nt, Artificial Sequence
  Synthetic
guuaagggaaauguugcacc

SEQ ID NO: 693829 - RNA, 20 nt, Artificial Sequence
  Synthetic
gcuaaagcuuuacuaucacc

SEQ ID NO: 693830 - RNA, 20 nt, Artificial Sequence
  Synthetic
gcgugagucuggaccagacc

SEQ ID NO: 693831 - RNA, 20 nt, Artificial Sequence
  Synthetic
gugagcauuguugaaggacc

SEQ ID NO: 693832 - RNA, 20 nt, Artificial Sequence
  Synthetic
gauaacugcccaauaggacc

SEQ ID NO: 693833 - RNA, 20 nt, Artificial Sequence
  Synthetic
gcaucuugugcauagugacc

SEQ ID NO: 693834 - RNA, 20 nt, Artificial Sequence
  Synthetic
gcuacaagggcuaaaauacc

SEQ ID NO: 693835 - RNA, 20 nt, Artificial Sequence
  Synthetic
gcaaugaaugugguaauacc

SEQ ID NO: 693836 - RNA, 20 nt, Artificial Sequence
  Synthetic
gccaacaugucuaccauacc

SEQ ID NO: 693837 - RNA, 20 nt, Artificial Sequence
  Synthetic
gaauccugcagguucauacc

SEQ ID NO: 693838 - RNA, 20 nt, Artificial Sequence
  Synthetic
gcuccaaaaagguagcuacc

SEQ ID NO: 693839 - RNA, 20 nt, Artificial Sequence
  Synthetic
ggggagcaugaugaucuacc

SEQ ID NO: 693840 - RNA, 20 nt, Artificial Sequence
  Synthetic
gaugguaguaaaauucuacc

SEQ ID NO: 693841 - RNA, 20 nt, Artificial Sequence
  Synthetic
gauuaaucugaaugaguacc

SEQ ID NO: 693842 - RNA, 20 nt, Artificial Sequence
  Synthetic
gauggagugguguaauuacc

SEQ ID NO: 693843 - RNA, 20 nt, Artificial Sequence
  Synthetic
gaauccgggcaaggguuacc

SEQ ID NO: 693844 - RNA, 20 nt, Artificial Sequence
  Synthetic
ggucuauucuuaggagaccc

SEQ ID NO: 693845 - RNA, 20 nt, Artificial Sequence
  Synthetic
gccagccuauggaaugaccc

SEQ ID NO: 693846 - RNA, 20 nt, Artificial Sequence
  Synthetic
guaggcagcacaccauaccc

SEQ ID NO: 693847 - RNA, 20 nt, Artificial Sequence
  Synthetic
guagaaggugcaggcuaccc

SEQ ID NO: 693848 - RNA, 20 nt, Artificial Sequence
  Synthetic
ggccuaggguggauuacccc

SEQ ID NO: 693849 - RNA, 20 nt, Artificial Sequence
  Synthetic
guuguccaagcaucgccccc

SEQ ID NO: 693850 - RNA, 20 nt, Artificial Sequence
  Synthetic
guccuacauuuuuggccccc

SEQ ID NO: 693851 - RNA, 20 nt, Artificial Sequence
  Synthetic
gauuucaaacggguagcccc

SEQ ID NO: 693852 - RNA, 20 nt, Artificial Sequence
  Synthetic
ggugucuaaugaaguagccc

SEQ ID NO: 693853 - RNA, 20 nt, Artificial Sequence
  Synthetic
gaagugaucauauuuagccc

SEQ ID NO: 693854 - RNA, 20 nt, Artificial Sequence
  Synthetic
gcaaaaccaauacagggccc

SEQ ID NO: 693855 - RNA, 20 nt, Artificial Sequence
  Synthetic
gggugaaaauucugaugccc

SEQ ID NO: 693856 - RNA, 20 nt, Artificial Sequence
  Synthetic
gaaaguuguuacucuauccc

SEQ ID NO: 693857 - RNA, 20 nt, Artificial Sequence
  Synthetic
gucugagacucacuuauccc

SEQ ID NO: 693858 - RNA, 20 nt, Artificial Sequence
  Synthetic
gaaugccuucauguacuccc

SEQ ID NO: 693859 - RNA, 20 nt, Artificial Sequence
  Synthetic
ggguuguaagauucucuccc

SEQ ID NO: 693860 - RNA, 20 nt, Artificial Sequence
  Synthetic
guccugcagauaaagguccc

SEQ ID NO: 693861 - RNA, 20 nt, Artificial Sequence
  Synthetic
gucuccuuacuucuauuccc

SEQ ID NO: 693862 - RNA, 20 nt, Artificial Sequence
  Synthetic
ggauauagcuaaaauuuccc

SEQ ID NO: 693863 - RNA, 20 nt, Artificial Sequence
  Synthetic
gucccacaguauccaaagcc

SEQ ID NO: 693864 - RNA, 20 nt, Artificial Sequence
  Synthetic
gccaaagauagugugaagcc

SEQ ID NO: 693865 - RNA, 20 nt, Artificial Sequence
  Synthetic
gcaaaguauuauggacagcc

SEQ ID NO: 693866 - RNA, 20 nt, Artificial Sequence
  Synthetic
ggguugcgugauaugcagcc

SEQ ID NO: 693867 - RNA, 20 nt, Artificial Sequence
  Synthetic
gauaacuucuagucauagcc

SEQ ID NO: 693868 - RNA, 20 nt, Artificial Sequence
  Synthetic
ggaaguagguagcaguagcc

SEQ ID NO: 693869 - RNA, 20 nt, Artificial Sequence
  Synthetic
gccacauuaaaguuguagcc

SEQ ID NO: 693870 - RNA, 20 nt, Artificial Sequence
  Synthetic
guaaaagaagucauuacgcc

SEQ ID NO: 693871 - RNA, 20 nt, Artificial Sequence
  Synthetic
gaaggggccauucaagcgcc

SEQ ID NO: 693872 - RNA, 20 nt, Artificial Sequence
  Synthetic
guaaagacuugugugaggcc

SEQ ID NO: 693873 - RNA, 20 nt, Artificial Sequence
  Synthetic
gggguaauccacccuaggcc

SEQ ID NO: 693874 - RNA, 20 nt, Artificial Sequence
  Synthetic
ggccauccccuguuaaugcc

SEQ ID NO: 693875 - RNA, 20 nt, Artificial Sequence
  Synthetic
gggucucagaugaggaugcc

SEQ ID NO: 693876 - RNA, 20 nt, Artificial Sequence
  Synthetic
guauucuuaacauggaugcc

SEQ ID NO: 693877 - RNA, 20 nt, Artificial Sequence
  Synthetic
ggcuuucacuauaauaugcc

SEQ ID NO: 693878 - RNA, 20 nt, Artificial Sequence
  Synthetic
gcagaaaauuuaaggcugcc

SEQ ID NO: 693879 - RNA, 20 nt, Artificial Sequence
  Synthetic
guagauugacuucggcugcc

SEQ ID NO: 693880 - RNA, 20 nt, Artificial Sequence
  Synthetic
gcuauuacuccuaccgugcc

SEQ ID NO: 693881 - RNA, 20 nt, Artificial Sequence
  Synthetic
gucucaccuuuugacuugcc

SEQ ID NO: 693882 - RNA, 20 nt, Artificial Sequence
  Synthetic
guagcuaguuuuaguuugcc

SEQ ID NO: 693883 - RNA, 20 nt, Artificial Sequence
  Synthetic
gugcaauugugauugaaucc

SEQ ID NO: 693884 - RNA, 20 nt, Artificial Sequence
  Synthetic
gugcgauggggucuuaaucc

SEQ ID NO: 693885 - RNA, 20 nt, Artificial Sequence
  Synthetic
guaggugaacugagacaucc

SEQ ID NO: 693886 - RNA, 20 nt, Artificial Sequence
  Synthetic
gcauguuagcugagccaucc

SEQ ID NO: 693887 - RNA, 20 nt, Artificial Sequence
  Synthetic
gccgcugcccaaugccaucc

SEQ ID NO: 693888 - RNA, 20 nt, Artificial Sequence
  Synthetic
gccuaggccucaucucaucc

SEQ ID NO: 693889 - RNA, 20 nt, Artificial Sequence
  Synthetic
gacagguucuaccuuuaucc

SEQ ID NO: 693890 - RNA, 20 nt, Artificial Sequence
  Synthetic
gagaaucaauauuugacucc

SEQ ID NO: 693891 - RNA, 20 nt, Artificial Sequence
  Synthetic
gucaacguauagaguacucc

SEQ ID NO: 693892 - RNA, 20 nt, Artificial Sequence
  Synthetic
gcgucuagauuucaaccucc

SEQ ID NO: 693893 - RNA, 20 nt, Artificial Sequence
  Synthetic
guccagugcaauggugcucc

SEQ ID NO: 693894 - RNA, 20 nt, Artificial Sequence
  Synthetic
gcuccaauaguggucagucc

SEQ ID NO: 693895 - RNA, 20 nt, Artificial Sequence
  Synthetic
gacaacucacagugacgucc

SEQ ID NO: 693896 - RNA, 20 nt, Artificial Sequence
  Synthetic
gccuacucugaaaauggucc

SEQ ID NO: 693897 - RNA, 20 nt, Artificial Sequence
  Synthetic
guuuauucuagcccuggucc

SEQ ID NO: 693898 - RNA, 20 nt, Artificial Sequence
  Synthetic
gaaguuaaauggguaugucc

SEQ ID NO: 693899 - RNA, 20 nt, Artificial Sequence
  Synthetic
gaacuauucacaagcugucc

SEQ ID NO: 693900 - RNA, 20 nt, Artificial Sequence
  Synthetic
gaugguuuggauauacuucc

SEQ ID NO: 693901 - RNA, 20 nt, Artificial Sequence
  Synthetic
gcuaaaguucguugccuucc

SEQ ID NO: 693902 - RNA, 20 nt, Artificial Sequence
  Synthetic
gugauauagaaugagcuucc

SEQ ID NO: 693903 - RNA, 20 nt, Artificial Sequence
  Synthetic
gcuuggcggagauugcuucc

SEQ ID NO: 693904 - RNA, 20 nt, Artificial Sequence
  Synthetic
ggcauugaugcaaaucuucc

SEQ ID NO: 693905 - RNA, 20 nt, Artificial Sequence
  Synthetic
gaaagacaauguauggaagc

SEQ ID NO: 693906 - RNA, 20 nt, Artificial Sequence
  Synthetic
guuuccuguaggagcuaagc

SEQ ID NO: 693907 - RNA, 20 nt, Artificial Sequence
  Synthetic
gucaagauuggucuuuaagc

SEQ ID NO: 693908 - RNA, 20 nt, Artificial Sequence
  Synthetic
gguucaccgauagucacagc

SEQ ID NO: 693909 - RNA, 20 nt, Artificial Sequence
  Synthetic
gcgguaaagaagggcccagc

SEQ ID NO: 693910 - RNA, 20 nt, Artificial Sequence
  Synthetic
gaaacuuauuccaaagcagc

SEQ ID NO: 693911 - RNA, 20 nt, Artificial Sequence
  Synthetic
gaccaauacauauuggcagc

SEQ ID NO: 693912 - RNA, 20 nt, Artificial Sequence
  Synthetic
gaacagggcuuaaauucagc

SEQ ID NO: 693913 - RNA, 20 nt, Artificial Sequence
  Synthetic
guucuaaagcuccaaagagc

SEQ ID NO: 693914 - RNA, 20 nt, Artificial Sequence
  Synthetic
gguggggucaguuagagagc

SEQ ID NO: 693915 - RNA, 20 nt, Artificial Sequence
  Synthetic
gggauuacacaaaauagagc

SEQ ID NO: 693916 - RNA, 20 nt, Artificial Sequence
  Synthetic
gcuuuccccuaccaucgagc

SEQ ID NO: 693917 - RNA, 20 nt, Artificial Sequence
  Synthetic
gcauuuauaggaugaggagc

SEQ ID NO: 693918 - RNA, 20 nt, Artificial Sequence
  Synthetic
gaacaagucuuuauaugagc

SEQ ID NO: 693919 - RNA, 20 nt, Artificial Sequence
  Synthetic
guuaucuuagcaagcugagc

SEQ ID NO: 693920 - RNA, 20 nt, Artificial Sequence
  Synthetic
guaguaauccuaaauugagc

SEQ ID NO: 693921 - RNA, 20 nt, Artificial Sequence
  Synthetic
gccuauaacauaauaauagc

SEQ ID NO: 693922 - RNA, 20 nt, Artificial Sequence
  Synthetic
ggcgccaagauuccccuagc

SEQ ID NO: 693923 - RNA, 20 nt, Artificial Sequence
  Synthetic
gauugcaagcuucagcuagc

SEQ ID NO: 693924 - RNA, 20 nt, Artificial Sequence
  Synthetic
gaguuucauucagagcuagc

SEQ ID NO: 693925 - RNA, 20 nt, Artificial Sequence
  Synthetic
gagauaaacugaaguguagc

SEQ ID NO: 693926 - RNA, 20 nt, Artificial Sequence
  Synthetic
gucaagauguucauuguagc

SEQ ID NO: 693927 - RNA, 20 nt, Artificial Sequence
  Synthetic
gagcuuauccaguuauuagc

SEQ ID NO: 693928 - RNA, 20 nt, Artificial Sequence
  Synthetic
gucuucuggaauaucuuagc

SEQ ID NO: 693929 - RNA, 20 nt, Artificial Sequence
  Synthetic
guacaaaugucugauuuagc

SEQ ID NO: 693930 - RNA, 20 nt, Artificial Sequence
  Synthetic
gcggaaguaaaauauuuagc

SEQ ID NO: 693931 - RNA, 20 nt, Artificial Sequence
  Synthetic
gguaccaaagaauauaacgc

SEQ ID NO: 693932 - RNA, 20 nt, Artificial Sequence
  Synthetic
guacagcauguuacuaacgc

SEQ ID NO: 693933 - RNA, 20 nt, Artificial Sequence
  Synthetic
ggguuuccaucaggggacgc

SEQ ID NO: 693934 - RNA, 20 nt, Artificial Sequence
  Synthetic
guuugagaauucccuggcgc

SEQ ID NO: 693935 - RNA, 20 nt, Artificial Sequence
  Synthetic
gauugauuggacugucucgc

SEQ ID NO: 693936 - RNA, 20 nt, Artificial Sequence
  Synthetic
guacucuacauaggcaaggc

SEQ ID NO: 693937 - RNA, 20 nt, Artificial Sequence
  Synthetic
gaauuuuacagggaucaggc

SEQ ID NO: 693938 - RNA, 20 nt, Artificial Sequence
  Synthetic
gguaaagacuugugugaggc

SEQ ID NO: 693939 - RNA, 20 nt, Artificial Sequence
  Synthetic
gaaugagaauucuccuaggc

SEQ ID NO: 693940 - RNA, 20 nt, Artificial Sequence
  Synthetic
gggcuagacgcgacaacggc

SEQ ID NO: 693941 - RNA, 20 nt, Artificial Sequence
  Synthetic
gccuuuguuuagaguacggc

SEQ ID NO: 693942 - RNA, 20 nt, Artificial Sequence
  Synthetic
guaaacuguauagaaccggc

SEQ ID NO: 693943 - RNA, 20 nt, Artificial Sequence
  Synthetic
gcaguguguuaaagcagggc

SEQ ID NO: 693944 - RNA, 20 nt, Artificial Sequence
  Synthetic
gacugagcccaacaccgggc

SEQ ID NO: 693945 - RNA, 20 nt, Artificial Sequence
  Synthetic
gauuggagccacuggugggc

SEQ ID NO: 693946 - RNA, 20 nt, Artificial Sequence
  Synthetic
guaaauggaggcaguauggc

SEQ ID NO: 693947 - RNA, 20 nt, Artificial Sequence
  Synthetic
gaucuguuauaagccuuggc

SEQ ID NO: 693948 - RNA, 20 nt, Artificial Sequence
  Synthetic
guaauugacccuggcuuggc

SEQ ID NO: 693949 - RNA, 20 nt, Artificial Sequence
  Synthetic
gcugagucaggcaauuuggc

SEQ ID NO: 693950 - RNA, 20 nt, Artificial Sequence
  Synthetic
gaaacccugaacgcuuuggc

SEQ ID NO: 693951 - RNA, 20 nt, Artificial Sequence
  Synthetic
gacaaucgaagacacaaugc

SEQ ID NO: 693952 - RNA, 20 nt, Artificial Sequence
  Synthetic
gucaccuuuuguucuaaugc

SEQ ID NO: 693953 - RNA, 20 nt, Artificial Sequence
  Synthetic
gaaagauaugagacccaugc

SEQ ID NO: 693954 - RNA, 20 nt, Artificial Sequence
  Synthetic
ggucaggaacugucugaugc

SEQ ID NO: 693955 - RNA, 20 nt, Artificial Sequence
  Synthetic
ggacuagggaguaccuaugc

SEQ ID NO: 693956 - RNA, 20 nt, Artificial Sequence
  Synthetic
gagauuguacagggguaugc

SEQ ID NO: 693957 - RNA, 20 nt, Artificial Sequence
  Synthetic
gggaagaaacaguagacugc

SEQ ID NO: 693958 - RNA, 20 nt, Artificial Sequence
  Synthetic
gggauugauuuaaauacugc

SEQ ID NO: 693959 - RNA, 20 nt, Artificial Sequence
  Synthetic
gaauacgaaugagauacugc

SEQ ID NO: 693960 - RNA, 20 nt, Artificial Sequence
  Synthetic
ggcauucugcuagauacugc

SEQ ID NO: 693961 - RNA, 20 nt, Artificial Sequence
  Synthetic
gcacauucacguauuacugc

SEQ ID NO: 693962 - RNA, 20 nt, Artificial Sequence
  Synthetic
gcaaagacaacaaacccugc

SEQ ID NO: 693963 - RNA, 20 nt, Artificial Sequence
  Synthetic
gucgauauuuuugucccugc

SEQ ID NO: 693964 - RNA, 20 nt, Artificial Sequence
  Synthetic
gcucgggcugguuagccugc

SEQ ID NO: 693965 - RNA, 20 nt, Artificial Sequence
  Synthetic
gcucaugguugaggagcugc

SEQ ID NO: 693966 - RNA, 20 nt, Artificial Sequence
  Synthetic
gccaccaucgaacaugcugc

SEQ ID NO: 693967 - RNA, 20 nt, Artificial Sequence
  Synthetic
guccugggaccuuuaucugc

SEQ ID NO: 693968 - RNA, 20 nt, Artificial Sequence
  Synthetic
gagacauuaugaggcucugc

SEQ ID NO: 693969 - RNA, 20 nt, Artificial Sequence
  Synthetic
gggcuuuuucuguagucugc

SEQ ID NO: 693970 - RNA, 20 nt, Artificial Sequence
  Synthetic
gugacugaaagucucagugc

SEQ ID NO: 693971 - RNA, 20 nt, Artificial Sequence
  Synthetic
gucuacggcaggugaugugc

SEQ ID NO: 693972 - RNA, 20 nt, Artificial Sequence
  Synthetic
gcauuuauuacguguugugc

SEQ ID NO: 693973 - RNA, 20 nt, Artificial Sequence
  Synthetic
gaauaugcuaacuaaauugc

SEQ ID NO: 693974 - RNA, 20 nt, Artificial Sequence
  Synthetic
gcuagguauuaauuaauugc

SEQ ID NO: 693975 - RNA, 20 nt, Artificial Sequence
  Synthetic
ggaggccaugcaaauauugc

SEQ ID NO: 693976 - RNA, 20 nt, Artificial Sequence
  Synthetic
gcuaguuugcaugcaguugc

SEQ ID NO: 693977 - RNA, 20 nt, Artificial Sequence
  Synthetic
guggcacuucuucauguugc

SEQ ID NO: 693978 - RNA, 20 nt, Artificial Sequence
  Synthetic
guauggcauauuggcuuugc

SEQ ID NO: 693979 - RNA, 20 nt, Artificial Sequence
  Synthetic
ggcgauggcauacacaaauc

SEQ ID NO: 693980 - RNA, 20 nt, Artificial Sequence
  Synthetic
gagaacgcuaguuauaaauc

SEQ ID NO: 693981 - RNA, 20 nt, Artificial Sequence
  Synthetic
ggguacaacuaucaacaauc

SEQ ID NO: 693982 - RNA, 20 nt, Artificial Sequence
  Synthetic
gaaguaccuauaacccaauc

SEQ ID NO: 693983 - RNA, 20 nt, Artificial Sequence
  Synthetic
gcugcaagugaaguucaauc

SEQ ID NO: 693984 - RNA, 20 nt, Artificial Sequence
  Synthetic
gucaauauuacgugagaauc

SEQ ID NO: 693985 - RNA, 20 nt, Artificial Sequence
  Synthetic
gugugaauauaacuggaauc

SEQ ID NO: 693986 - RNA, 20 nt, Artificial Sequence
  Synthetic
ggauuuuguucgacauaauc

SEQ ID NO: 693987 - RNA, 20 nt, Artificial Sequence
  Synthetic
gcacguaaggaaggauaauc

SEQ ID NO: 693988 - RNA, 20 nt, Artificial Sequence
  Synthetic
gacacugucccagucuaauc

SEQ ID NO: 693989 - RNA, 20 nt, Artificial Sequence
  Synthetic
gauucuugcugucauuaauc

SEQ ID NO: 693990 - RNA, 20 nt, Artificial Sequence
  Synthetic
guauuuaucuucagcacauc

SEQ ID NO: 693991 - RNA, 20 nt, Artificial Sequence
  Synthetic
gaaucgugguuggcuacauc

SEQ ID NO: 693992 - RNA, 20 nt, Artificial Sequence
  Synthetic
gcugaacuagagagaccauc

SEQ ID NO: 693993 - RNA, 20 nt, Artificial Sequence
  Synthetic
guagacagcuugcgaccauc

SEQ ID NO: 693994 - RNA, 20 nt, Artificial Sequence
  Synthetic
guuucucgguaguaaucauc

SEQ ID NO: 693995 - RNA, 20 nt, Artificial Sequence
  Synthetic
gauuuucugucaccaucauc

SEQ ID NO: 693996 - RNA, 20 nt, Artificial Sequence
  Synthetic
gacuuacucugaagaucauc

SEQ ID NO: 693997 - RNA, 20 nt, Artificial Sequence
  Synthetic
guagauugcacugguucauc

SEQ ID NO: 693998 - RNA, 20 nt, Artificial Sequence
  Synthetic
ggucugaaagccuccagauc

SEQ ID NO: 693999 - RNA, 20 nt, Artificial Sequence
  Synthetic
gauaccuuucuaugcagauc

SEQ ID NO: 694000 - RNA, 20 nt, Artificial Sequence
  Synthetic
guguauacuugugagagauc

SEQ ID NO: 694001 - RNA, 20 nt, Artificial Sequence
  Synthetic
gaacucugugcacauagauc

SEQ ID NO: 694002 - RNA, 20 nt, Artificial Sequence
  Synthetic
gaauacuaugagucaggauc

SEQ ID NO: 694003 - RNA, 20 nt, Artificial Sequence
  Synthetic
gaagugcugaggguaggauc

SEQ ID NO: 694004 - RNA, 20 nt, Artificial Sequence
  Synthetic
ggagaauacugagggugauc

SEQ ID NO: 694005 - RNA, 20 nt, Artificial Sequence
  Synthetic
ggagguguuagacauugauc

SEQ ID NO: 694006 - RNA, 20 nt, Artificial Sequence
  Synthetic
ggucagauuugacuaauauc

SEQ ID NO: 694007 - RNA, 20 nt, Artificial Sequence
  Synthetic
ggugcuauuuaagugauauc

SEQ ID NO: 694008 - RNA, 20 nt, Artificial Sequence
  Synthetic
gaauuuacauaagaucuauc

SEQ ID NO: 694009 - RNA, 20 nt, Artificial Sequence
  Synthetic
gaucuguacuagcugguauc

SEQ ID NO: 694010 - RNA, 20 nt, Artificial Sequence
  Synthetic
gacacugaaauugcuguauc

SEQ ID NO: 694011 - RNA, 20 nt, Artificial Sequence
  Synthetic
gggaccuuucuuguuguauc

SEQ ID NO: 694012 - RNA, 20 nt, Artificial Sequence
  Synthetic
gguccauuacacagguuauc

SEQ ID NO: 694013 - RNA, 20 nt, Artificial Sequence
  Synthetic
gaccucuuacuauauuuauc

SEQ ID NO: 694014 - RNA, 20 nt, Artificial Sequence
  Synthetic
gguacucaguuuccaaacuc

SEQ ID NO: 694015 - RNA, 20 nt, Artificial Sequence
  Synthetic
gguuccucaucauaccacuc

SEQ ID NO: 694016 - RNA, 20 nt, Artificial Sequence
  Synthetic
gggaaacuccaaaaggacuc

SEQ ID NO: 694017 - RNA, 20 nt, Artificial Sequence
  Synthetic
ggggaaaccuccugcuacuc

SEQ ID NO: 694018 - RNA, 20 nt, Artificial Sequence
  Synthetic
gacaguuggcuucaguacuc

SEQ ID NO: 694019 - RNA, 20 nt, Artificial Sequence
  Synthetic
gcuacaaguuggaauuacuc

SEQ ID NO: 694020 - RNA, 20 nt, Artificial Sequence
  Synthetic
ggaaguacaauuucaaccuc

SEQ ID NO: 694021 - RNA, 20 nt, Artificial Sequence
  Synthetic
gacggagcaguuugcaccuc

SEQ ID NO: 694022 - RNA, 20 nt, Artificial Sequence
  Synthetic
gccaagaugucuucuaccuc

SEQ ID NO: 694023 - RNA, 20 nt, Artificial Sequence
  Synthetic
guuccacauucaauuaccuc

SEQ ID NO: 694024 - RNA, 20 nt, Artificial Sequence
  Synthetic
guauaauauggaacacccuc

SEQ ID NO: 694025 - RNA, 20 nt, Artificial Sequence
  Synthetic
gguaaaaaggacgcccccuc

SEQ ID NO: 694026 - RNA, 20 nt, Artificial Sequence
  Synthetic
ggguuuuaaagacuguccuc

SEQ ID NO: 694027 - RNA, 20 nt, Artificial Sequence
  Synthetic
gcuuuauccuuagguuccuc

SEQ ID NO: 694028 - RNA, 20 nt, Artificial Sequence
  Synthetic
ggcgguuugacaguuuccuc

SEQ ID NO: 694029 - RNA, 20 nt, Artificial Sequence
  Synthetic
gagcauauauguaaaagcuc

SEQ ID NO: 694030 - RNA, 20 nt, Artificial Sequence
  Synthetic
gguguuuggacauuaagcuc

SEQ ID NO: 694031 - RNA, 20 nt, Artificial Sequence
  Synthetic
guacaucuaggagggagcuc

SEQ ID NO: 694032 - RNA, 20 nt, Artificial Sequence
  Synthetic
gggucaaacgguuauagcuc

SEQ ID NO: 694033 - RNA, 20 nt, Artificial Sequence
  Synthetic
guauuuucuugcaggggcuc

SEQ ID NO: 694034 - RNA, 20 nt, Artificial Sequence
  Synthetic
gcaagccuucagccaaucuc

SEQ ID NO: 694035 - RNA, 20 nt, Artificial Sequence
  Synthetic
gaaaguuaacguucacucuc

SEQ ID NO: 694036 - RNA, 20 nt, Artificial Sequence
  Synthetic
gcauugugucagaagcucuc

SEQ ID NO: 694037 - RNA, 20 nt, Artificial Sequence
  Synthetic
gccuaucaauuagagcucuc

SEQ ID NO: 694038 - RNA, 20 nt, Artificial Sequence
  Synthetic
ggaugcaugaagauugucuc

SEQ ID NO: 694039 - RNA, 20 nt, Artificial Sequence
  Synthetic
gauggucguguaauauucuc

SEQ ID NO: 694040 - RNA, 20 nt, Artificial Sequence
  Synthetic
ggagcuaagagguaguucuc

SEQ ID NO: 694041 - RNA, 20 nt, Artificial Sequence
  Synthetic
gcaccuagaccccuguucuc

SEQ ID NO: 694042 - RNA, 20 nt, Artificial Sequence
  Synthetic
gaguaggggugugauuucuc

SEQ ID NO: 694043 - RNA, 20 nt, Artificial Sequence
  Synthetic
gcaccuuuccuuggcaaguc

SEQ ID NO: 694044 - RNA, 20 nt, Artificial Sequence
  Synthetic
ggaacucaguuacuuaaguc

SEQ ID NO: 694045 - RNA, 20 nt, Artificial Sequence
  Synthetic
guuaaauggcauuuuaaguc

SEQ ID NO: 694046 - RNA, 20 nt, Artificial Sequence
  Synthetic
gcuuaugaucucgaagaguc

SEQ ID NO: 694047 - RNA, 20 nt, Artificial Sequence
  Synthetic
ggacaugugcacuaggaguc

SEQ ID NO: 694048 - RNA, 20 nt, Artificial Sequence
  Synthetic
gguaacugagcauaugaguc

SEQ ID NO: 694049 - RNA, 20 nt, Artificial Sequence
  Synthetic
gugcugauaaacuaauaguc

SEQ ID NO: 694050 - RNA, 20 nt, Artificial Sequence
  Synthetic
ggaugcaagaaacuuuaguc

SEQ ID NO: 694051 - RNA, 20 nt, Artificial Sequence
  Synthetic
gauuauacacuagguucguc

SEQ ID NO: 694052 - RNA, 20 nt, Artificial Sequence
  Synthetic
guuugauagacaagaagguc

SEQ ID NO: 694053 - RNA, 20 nt, Artificial Sequence
  Synthetic
gcaaugaaaugccuaagguc

SEQ ID NO: 694054 - RNA, 20 nt, Artificial Sequence
  Synthetic
gcagaguguauuaaaugguc

SEQ ID NO: 694055 - RNA, 20 nt, Artificial Sequence
  Synthetic
gauauccugguuauuugguc

SEQ ID NO: 694056 - RNA, 20 nt, Artificial Sequence
  Synthetic
gcauauauaugguucauguc

SEQ ID NO: 694057 - RNA, 20 nt, Artificial Sequence
  Synthetic
gugcaccauuuuauacuguc

SEQ ID NO: 694058 - RNA, 20 nt, Artificial Sequence
  Synthetic
gguucagugucaagucuguc

SEQ ID NO: 694059 - RNA, 20 nt, Artificial Sequence
  Synthetic
gaaugguagacauaaguguc

SEQ ID NO: 694060 - RNA, 20 nt, Artificial Sequence
  Synthetic
gucuggcuaaacuuaguguc

SEQ ID NO: 694061 - RNA, 20 nt, Artificial Sequence
  Synthetic
ggguuauacucaacuguguc

SEQ ID NO: 694062 - RNA, 20 nt, Artificial Sequence
  Synthetic
gagcacauaaugagcuuguc

SEQ ID NO: 694063 - RNA, 20 nt, Artificial Sequence
  Synthetic
ggcuuugucacgugguuguc

SEQ ID NO: 694064 - RNA, 20 nt, Artificial Sequence
  Synthetic
gcagccucucgagauuuguc

SEQ ID NO: 694065 - RNA, 20 nt, Artificial Sequence
  Synthetic
gagugguguugaccuuuguc

SEQ ID NO: 694066 - RNA, 20 nt, Artificial Sequence
  Synthetic
gaagcaagaacgauaaauuc

SEQ ID NO: 694067 - RNA, 20 nt, Artificial Sequence
  Synthetic
guagacuuagaauggaauuc

SEQ ID NO: 694068 - RNA, 20 nt, Artificial Sequence
  Synthetic
ggauucccccacuaacauuc

SEQ ID NO: 694069 - RNA, 20 nt, Artificial Sequence
  Synthetic
gacugacaacuuucacauuc

SEQ ID NO: 694070 - RNA, 20 nt, Artificial Sequence
  Synthetic
guagaagccgagugacauuc

SEQ ID NO: 694071 - RNA, 20 nt, Artificial Sequence
  Synthetic
gaaaagcuguaccuacauuc

SEQ ID NO: 694072 - RNA, 20 nt, Artificial Sequence
  Synthetic
ggucugaggccuugccauuc

SEQ ID NO: 694073 - RNA, 20 nt, Artificial Sequence
  Synthetic
guaagugaccuuacucauuc

SEQ ID NO: 694074 - RNA, 20 nt, Artificial Sequence
  Synthetic
gggacggauuaacuucauuc

SEQ ID NO: 694075 - RNA, 20 nt, Artificial Sequence
  Synthetic
gauagcauuuuugaugauuc

SEQ ID NO: 694076 - RNA, 20 nt, Artificial Sequence
  Synthetic
gcuugauaguagauauauuc

SEQ ID NO: 694077 - RNA, 20 nt, Artificial Sequence
  Synthetic
gguuuacugaugaaguauuc

SEQ ID NO: 694078 - RNA, 20 nt, Artificial Sequence
  Synthetic
gcaguaucucauucguauuc

SEQ ID NO: 694079 - RNA, 20 nt, Artificial Sequence
  Synthetic
ggcuugauaccuuaaacuuc

SEQ ID NO: 694080 - RNA, 20 nt, Artificial Sequence
  Synthetic
ggauaugucuuuucaacuuc

SEQ ID NO: 694081 - RNA, 20 nt, Artificial Sequence
  Synthetic
guugguaguugucgcacuuc

SEQ ID NO: 694082 - RNA, 20 nt, Artificial Sequence
  Synthetic
ggaugagcggaggagacuuc

SEQ ID NO: 694083 - RNA, 20 nt, Artificial Sequence
  Synthetic
guuauagaacaugugacuuc

SEQ ID NO: 694084 - RNA, 20 nt, Artificial Sequence
  Synthetic
gcacgcaauuauuaaccuuc

SEQ ID NO: 694085 - RNA, 20 nt, Artificial Sequence
  Synthetic
gugcaacccuuuuguccuuc

SEQ ID NO: 694086 - RNA, 20 nt, Artificial Sequence
  Synthetic
ggaguguaagacauagcuuc

SEQ ID NO: 694087 - RNA, 20 nt, Artificial Sequence
  Synthetic
gacugcugugggauaucuuc

SEQ ID NO: 694088 - RNA, 20 nt, Artificial Sequence
  Synthetic
gaguuguacagcuacucuuc

SEQ ID NO: 694089 - RNA, 20 nt, Artificial Sequence
  Synthetic
gcuucaucaagauccucuuc

SEQ ID NO: 694090 - RNA, 20 nt, Artificial Sequence
  Synthetic
gcguugguucagcccaguuc

SEQ ID NO: 694091 - RNA, 20 nt, Artificial Sequence
  Synthetic
gagucuuaagccuccaguuc

SEQ ID NO: 694092 - RNA, 20 nt, Artificial Sequence
  Synthetic
gguuuccaggacucuaguuc

SEQ ID NO: 694093 - RNA, 20 nt, Artificial Sequence
  Synthetic
gcaugccuguuaauacguuc

SEQ ID NO: 694094 - RNA, 20 nt, Artificial Sequence
  Synthetic
ggaggugagggugcucguuc

SEQ ID NO: 694095 - RNA, 20 nt, Artificial Sequence
  Synthetic
guagagaaacgguuagguuc

SEQ ID NO: 694096 - RNA, 20 nt, Artificial Sequence
  Synthetic
gaauuagcacccgaugguuc

SEQ ID NO: 694097 - RNA, 20 nt, Artificial Sequence
  Synthetic
ggacgauaacgaaaauguuc

SEQ ID NO: 694098 - RNA, 20 nt, Artificial Sequence
  Synthetic
gucaauggggacaaauguuc

SEQ ID NO: 694099 - RNA, 20 nt, Artificial Sequence
  Synthetic
guagauuuggaguaauguuc

SEQ ID NO: 694100 - RNA, 20 nt, Artificial Sequence
  Synthetic
gguuuucaagcagacuguuc

SEQ ID NO: 694101 - RNA, 20 nt, Artificial Sequence
  Synthetic
gcucgaaaagcucuuauuuc

SEQ ID NO: 694102 - RNA, 20 nt, Artificial Sequence
  Synthetic
ggugaugcuagguuuauuuc

SEQ ID NO: 694103 - RNA, 20 nt, Artificial Sequence
  Synthetic
gauauguuggugcacguuuc

SEQ ID NO: 694104 - RNA, 20 nt, Artificial Sequence
  Synthetic
gugaauguggauacgguuuc

SEQ ID NO: 694105 - RNA, 20 nt, Artificial Sequence
  Synthetic
ggggaucuaacaaguguuuc

SEQ ID NO: 694106 - RNA, 20 nt, Artificial Sequence
  Synthetic
ggguuaauggcauuuguuuc

SEQ ID NO: 694107 - RNA, 20 nt, Artificial Sequence
  Synthetic
gguuaagcuaauugguuuuc

SEQ ID NO: 694108 - RNA, 20 nt, Artificial Sequence
  Synthetic
gaugaaucauggguguuuuc

SEQ ID NO: 694109 - RNA, 20 nt, Artificial Sequence
  Synthetic
gaggaaguaugccacaaaag

SEQ ID NO: 694110 - RNA, 20 nt, Artificial Sequence
  Synthetic
ggcuuaucucuguaacaaag

SEQ ID NO: 694111 - RNA, 20 nt, Artificial Sequence
  Synthetic
guagccuagagaugacaaag

SEQ ID NO: 694112 - RNA, 20 nt, Artificial Sequence
  Synthetic
gaccuguugacgugacaaag

SEQ ID NO: 694113 - RNA, 20 nt, Artificial Sequence
  Synthetic
guuuagugcggaguacaaag

SEQ ID NO: 694114 - RNA, 20 nt, Artificial Sequence
  Synthetic
gauauucagccagcccaaag

SEQ ID NO: 694115 - RNA, 20 nt, Artificial Sequence
  Synthetic
ggagacuaaugauugcaaag

SEQ ID NO: 694116 - RNA, 20 nt, Artificial Sequence
  Synthetic
gcauccguggggaccgaaag

SEQ ID NO: 694117 - RNA, 20 nt, Artificial Sequence
  Synthetic
gaaaacguauaugcugaaag

SEQ ID NO: 694118 - RNA, 20 nt, Artificial Sequence
  Synthetic
gacguagguauaauugaaag

SEQ ID NO: 694119 - RNA, 20 nt, Artificial Sequence
  Synthetic
gcaauuaauuggcaauaaag

SEQ ID NO: 694120 - RNA, 20 nt, Artificial Sequence
  Synthetic
ggccuagaaauacgauaaag

SEQ ID NO: 694121 - RNA, 20 nt, Artificial Sequence
  Synthetic
ggguauauggugagcuaaag

SEQ ID NO: 694122 - RNA, 20 nt, Artificial Sequence
  Synthetic
gauccacaagagugcuaaag

SEQ ID NO: 694123 - RNA, 20 nt, Artificial Sequence
  Synthetic
gaauuggccauaagguaaag

SEQ ID NO: 694124 - RNA, 20 nt, Artificial Sequence
  Synthetic
gguugauauaauaccacaag

SEQ ID NO: 694125 - RNA, 20 nt, Artificial Sequence
  Synthetic
gaacuaggaacauguacaag

SEQ ID NO: 694126 - RNA, 20 nt, Artificial Sequence
  Synthetic
gagcaagcacacuaaccaag

SEQ ID NO: 694127 - RNA, 20 nt, Artificial Sequence
  Synthetic
ggcaugcuaugauacccaag

SEQ ID NO: 694128 - RNA, 20 nt, Artificial Sequence
  Synthetic
gguaucauuggaaguccaag

SEQ ID NO: 694129 - RNA, 20 nt, Artificial Sequence
  Synthetic
guaagggcuaucuaugcaag

SEQ ID NO: 694130 - RNA, 20 nt, Artificial Sequence
  Synthetic
gaaguuuuaaccccugcaag

SEQ ID NO: 694131 - RNA, 20 nt, Artificial Sequence
  Synthetic
gcacucccuaauaaaagaag

SEQ ID NO: 694132 - RNA, 20 nt, Artificial Sequence
  Synthetic
gguagacuaggcuacagaag

SEQ ID NO: 694133 - RNA, 20 nt, Artificial Sequence
  Synthetic
gggugcaucgacuccagaag

SEQ ID NO: 694134 - RNA, 20 nt, Artificial Sequence
  Synthetic
gaucugacgcaguccagaag

SEQ ID NO: 694135 - RNA, 20 nt, Artificial Sequence
  Synthetic
gguauacagggccauagaag

SEQ ID NO: 694136 - RNA, 20 nt, Artificial Sequence
  Synthetic
gcaaccgaagguagccgaag

SEQ ID NO: 694137 - RNA, 20 nt, Artificial Sequence
  Synthetic
gcaucuccagauuaaggaag

SEQ ID NO: 694138 - RNA, 20 nt, Artificial Sequence
  Synthetic
gugagguacaacugaggaag

SEQ ID NO: 694139 - RNA, 20 nt, Artificial Sequence
  Synthetic
gaguaaacccuauggggaag

SEQ ID NO: 694140 - RNA, 20 nt, Artificial Sequence
  Synthetic
gacucuuccuacaguggaag

SEQ ID NO: 694141 - RNA, 20 nt, Artificial Sequence
  Synthetic
gccacguagacaauuggaag

SEQ ID NO: 694142 - RNA, 20 nt, Artificial Sequence
  Synthetic
ggaugcuuagcuaagugaag

SEQ ID NO: 694143 - RNA, 20 nt, Artificial Sequence
  Synthetic
gagcagguacggguuugaag

SEQ ID NO: 694144 - RNA, 20 nt, Artificial Sequence
  Synthetic
gcauaaugacuucacauaag

SEQ ID NO: 694145 - RNA, 20 nt, Artificial Sequence
  Synthetic
gccacgggaauuuccauaag

SEQ ID NO: 694146 - RNA, 20 nt, Artificial Sequence
  Synthetic
gccagcuaugugagcauaag

SEQ ID NO: 694147 - RNA, 20 nt, Artificial Sequence
  Synthetic
gggaggcuuguccuucuaag

SEQ ID NO: 694148 - RNA, 20 nt, Artificial Sequence
  Synthetic
gagcaaagcuaaagcguaag

SEQ ID NO: 694149 - RNA, 20 nt, Artificial Sequence
  Synthetic
gggucagaauuuuagguaag

SEQ ID NO: 694150 - RNA, 20 nt, Artificial Sequence
  Synthetic
guaucaggaguuaugguaag

SEQ ID NO: 694151 - RNA, 20 nt, Artificial Sequence
  Synthetic
guuccacauagaucuguaag

SEQ ID NO: 694152 - RNA, 20 nt, Artificial Sequence
  Synthetic
guuuacaagaccuguguaag

SEQ ID NO: 694153 - RNA, 20 nt, Artificial Sequence
  Synthetic
gagauauugcgacaauuaag

SEQ ID NO: 694154 - RNA, 20 nt, Artificial Sequence
  Synthetic
gugccacauaccauauuaag

SEQ ID NO: 694155 - RNA, 20 nt, Artificial Sequence
  Synthetic
gcaucauggagcuaaaacag

SEQ ID NO: 694156 - RNA, 20 nt, Artificial Sequence
  Synthetic
gggucccucgcagcuaacag

SEQ ID NO: 694157 - RNA, 20 nt, Artificial Sequence
  Synthetic
gugacugaaaucauucacag

SEQ ID NO: 694158 - RNA, 20 nt, Artificial Sequence
  Synthetic
gcuuuaaaagagcuagacag

SEQ ID NO: 694159 - RNA, 20 nt, Artificial Sequence
  Synthetic
guacugcagauaauauacag

SEQ ID NO: 694160 - RNA, 20 nt, Artificial Sequence
  Synthetic
gggauauaggaccacuacag

SEQ ID NO: 694161 - RNA, 20 nt, Artificial Sequence
  Synthetic
gccugggacacggaguacag

SEQ ID NO: 694162 - RNA, 20 nt, Artificial Sequence
  Synthetic
gucccucuuaccugguacag

SEQ ID NO: 694163 - RNA, 20 nt, Artificial Sequence
  Synthetic
guauaaucucuauaaaccag

SEQ ID NO: 694164 - RNA, 20 nt, Artificial Sequence
  Synthetic
gauggauauggaagguccag

SEQ ID NO: 694165 - RNA, 20 nt, Artificial Sequence
  Synthetic
ggugacuauuucauguccag

SEQ ID NO: 694166 - RNA, 20 nt, Artificial Sequence
  Synthetic
guucuggguucaauuuccag

SEQ ID NO: 694167 - RNA, 20 nt, Artificial Sequence
  Synthetic
gguacaaacucaucaagcag

SEQ ID NO: 694168 - RNA, 20 nt, Artificial Sequence
  Synthetic
gggucaacguguaggggcag

SEQ ID NO: 694169 - RNA, 20 nt, Artificial Sequence
  Synthetic
gaguaagauuaccuuugcag

SEQ ID NO: 694170 - RNA, 20 nt, Artificial Sequence
  Synthetic
gaaccuugaugauaccucag

SEQ ID NO: 694171 - RNA, 20 nt, Artificial Sequence
  Synthetic
gaaacucggaaugugcucag

SEQ ID NO: 694172 - RNA, 20 nt, Artificial Sequence
  Synthetic
ggguaaaaguagcaagucag

SEQ ID NO: 694173 - RNA, 20 nt, Artificial Sequence
  Synthetic
guggcacuuuauuuauucag

SEQ ID NO: 694174 - RNA, 20 nt, Artificial Sequence
  Synthetic
gugagaugauuucccuucag

SEQ ID NO: 694175 - RNA, 20 nt, Artificial Sequence
  Synthetic
gaagcacguauggccuucag

SEQ ID NO: 694176 - RNA, 20 nt, Artificial Sequence
  Synthetic
gcagguauauccaacaagag

SEQ ID NO: 694177 - RNA, 20 nt, Artificial Sequence
  Synthetic
gcgugcccagucaacaagag

SEQ ID NO: 694178 - RNA, 20 nt, Artificial Sequence
  Synthetic
guacaguaguaucccaagag

SEQ ID NO: 694179 - RNA, 20 nt, Artificial Sequence
  Synthetic
guuuccauguuuccgaagag

SEQ ID NO: 694180 - RNA, 20 nt, Artificial Sequence
  Synthetic
guuggaacacacaaagagag

SEQ ID NO: 694181 - RNA, 20 nt, Artificial Sequence
  Synthetic
gccuuguaauccaaagagag

SEQ ID NO: 694182 - RNA, 20 nt, Artificial Sequence
  Synthetic
gaggggaccacuaaugagag

SEQ ID NO: 694183 - RNA, 20 nt, Artificial Sequence
  Synthetic
gaccauaugugaucauagag

SEQ ID NO: 694184 - RNA, 20 nt, Artificial Sequence
  Synthetic
gaaauuggacaucccuagag

SEQ ID NO: 694185 - RNA, 20 nt, Artificial Sequence
  Synthetic
guucacacuuacggguagag

SEQ ID NO: 694186 - RNA, 20 nt, Artificial Sequence
  Synthetic
gaucaaguuagaugguagag

SEQ ID NO: 694187 - RNA, 20 nt, Artificial Sequence
  Synthetic
guagguugaaucacuacgag

SEQ ID NO: 694188 - RNA, 20 nt, Artificial Sequence
  Synthetic
gagaagacauaccagucgag

SEQ ID NO: 694189 - RNA, 20 nt, Artificial Sequence
  Synthetic
guaagacauagcuucaggag

SEQ ID NO: 694190 - RNA, 20 nt, Artificial Sequence
  Synthetic
gcuucucuauauuucaggag

SEQ ID NO: 694191 - RNA, 20 nt, Artificial Sequence
  Synthetic
gaauuguucuagccacggag

SEQ ID NO: 694192 - RNA, 20 nt, Artificial Sequence
  Synthetic
gcucagaaccacguauggag

SEQ ID NO: 694193 - RNA, 20 nt, Artificial Sequence
  Synthetic
ggcuaacaugguaacuggag

SEQ ID NO: 694194 - RNA, 20 nt, Artificial Sequence
  Synthetic
gacauuugaaucgacuggag

SEQ ID NO: 694195 - RNA, 20 nt, Artificial Sequence
  Synthetic
gacguggaagccuacuggag

SEQ ID NO: 694196 - RNA, 20 nt, Artificial Sequence
  Synthetic
ggaguaaacgugaauaugag

SEQ ID NO: 694197 - RNA, 20 nt, Artificial Sequence
  Synthetic
gguagguacaucauggugag

SEQ ID NO: 694198 - RNA, 20 nt, Artificial Sequence
  Synthetic
gguaauauuuaaguugugag

SEQ ID NO: 694199 - RNA, 20 nt, Artificial Sequence
  Synthetic
gcaaccuaugaaccauugag

SEQ ID NO: 694200 - RNA, 20 nt, Artificial Sequence
  Synthetic
guuagccauguuucauugag

SEQ ID NO: 694201 - RNA, 20 nt, Artificial Sequence
  Synthetic
ggggauuaacacaucuugag

SEQ ID NO: 694202 - RNA, 20 nt, Artificial Sequence
  Synthetic
gugguagucaguugguugag

SEQ ID NO: 694203 - RNA, 20 nt, Artificial Sequence
  Synthetic
ggcaugguagccugaaauag

SEQ ID NO: 694204 - RNA, 20 nt, Artificial Sequence
  Synthetic
gacacaugguaguucaauag

SEQ ID NO: 694205 - RNA, 20 nt, Artificial Sequence
  Synthetic
gauguugggagaaguaauag

SEQ ID NO: 694206 - RNA, 20 nt, Artificial Sequence
  Synthetic
gucugaauaaugauuaauag

SEQ ID NO: 694207 - RNA, 20 nt, Artificial Sequence
  Synthetic
guucagggaaggugccauag

SEQ ID NO: 694208 - RNA, 20 nt, Artificial Sequence
  Synthetic
gugaaguggucaauucauag

SEQ ID NO: 694209 - RNA, 20 nt, Artificial Sequence
  Synthetic
gugagggcaaaaaaugauag

SEQ ID NO: 694210 - RNA, 20 nt, Artificial Sequence
  Synthetic
ggauuuguugaauuugauag

SEQ ID NO: 694211 - RNA, 20 nt, Artificial Sequence
  Synthetic
gaaggggcuacaucauauag

SEQ ID NO: 694212 - RNA, 20 nt, Artificial Sequence
  Synthetic
gccuauaucaaauaguauag

SEQ ID NO: 694213 - RNA, 20 nt, Artificial Sequence
  Synthetic
ggacuugccaauggguauag

SEQ ID NO: 694214 - RNA, 20 nt, Artificial Sequence
  Synthetic
gucuucgaaucugcuuauag

SEQ ID NO: 694215 - RNA, 20 nt, Artificial Sequence
  Synthetic
gucugauugacucggacuag

SEQ ID NO: 694216 - RNA, 20 nt, Artificial Sequence
  Synthetic
gugugcaucaaauuaccuag

SEQ ID NO: 694217 - RNA, 20 nt, Artificial Sequence
  Synthetic
gcuguaaccgauagagcuag

SEQ ID NO: 694218 - RNA, 20 nt, Artificial Sequence
  Synthetic
gauagucacaaguuagcuag

SEQ ID NO: 694219 - RNA, 20 nt, Artificial Sequence
  Synthetic
gaccaacccuagcaaucuag

SEQ ID NO: 694220 - RNA, 20 nt, Artificial Sequence
  Synthetic
gccaacugccacuggucuag

SEQ ID NO: 694221 - RNA, 20 nt, Artificial Sequence
  Synthetic
ggccauugucuuaauucuag

SEQ ID NO: 694222 - RNA, 20 nt, Artificial Sequence
  Synthetic
guguugacagaucaaaguag

SEQ ID NO: 694223 - RNA, 20 nt, Artificial Sequence
  Synthetic
guaccuaggcaaacaaguag

SEQ ID NO: 694224 - RNA, 20 nt, Artificial Sequence
  Synthetic
gguaauuaaaugugucguag

SEQ ID NO: 694225 - RNA, 20 nt, Artificial Sequence
  Synthetic
gcaaagacacaacgagguag

SEQ ID NO: 694226 - RNA, 20 nt, Artificial Sequence
  Synthetic
gauucuauaaguagcgguag

SEQ ID NO: 694227 - RNA, 20 nt, Artificial Sequence
  Synthetic
gcauaugacucaaaggguag

SEQ ID NO: 694228 - RNA, 20 nt, Artificial Sequence
  Synthetic
guauagccccgaaaugguag

SEQ ID NO: 694229 - RNA, 20 nt, Artificial Sequence
  Synthetic
gggagaguaacaucugguag

SEQ ID NO: 694230 - RNA, 20 nt, Artificial Sequence
  Synthetic
guaugaaaggcuguauguag

SEQ ID NO: 694231 - RNA, 20 nt, Artificial Sequence
  Synthetic
guaccaacuugcugcuguag

SEQ ID NO: 694232 - RNA, 20 nt, Artificial Sequence
  Synthetic
ggcuaagguacugagauuag

SEQ ID NO: 694233 - RNA, 20 nt, Artificial Sequence
  Synthetic
gucauagcgcuccuacuuag

SEQ ID NO: 694234 - RNA, 20 nt, Artificial Sequence
  Synthetic
gaaaccucaacgguccuuag

SEQ ID NO: 694235 - RNA, 20 nt, Artificial Sequence
  Synthetic
gaaguugcucguaauguuag

SEQ ID NO: 694236 - RNA, 20 nt, Artificial Sequence
  Synthetic
guuagggcgaaguguguuag

SEQ ID NO: 694237 - RNA, 20 nt, Artificial Sequence
  Synthetic
guaguugacaauaaauuuag

SEQ ID NO: 694238 - RNA, 20 nt, Artificial Sequence
  Synthetic
guguaauuggcaguauuuag

SEQ ID NO: 694239 - RNA, 20 nt, Artificial Sequence
  Synthetic
gauuuugucaaaagcaaacg

SEQ ID NO: 694240 - RNA, 20 nt, Artificial Sequence
  Synthetic
gagaccgaaggaacuaaacg

SEQ ID NO: 694241 - RNA, 20 nt, Artificial Sequence
  Synthetic
ggaaaacagagaacccaacg

SEQ ID NO: 694242 - RNA, 20 nt, Artificial Sequence
  Synthetic
gacgucuauuuccuccaacg

SEQ ID NO: 694243 - RNA, 20 nt, Artificial Sequence
  Synthetic
gaauggggauuauuggaacg

SEQ ID NO: 694244 - RNA, 20 nt, Artificial Sequence
  Synthetic
ggugugaguaauguauaacg

SEQ ID NO: 694245 - RNA, 20 nt, Artificial Sequence
  Synthetic
gcuagccagucccuaccacg

SEQ ID NO: 694246 - RNA, 20 nt, Artificial Sequence
  Synthetic
gcauaacguucauuugcacg

SEQ ID NO: 694247 - RNA, 20 nt, Artificial Sequence
  Synthetic
ggcaucaaauggauuucacg

SEQ ID NO: 694248 - RNA, 20 nt, Artificial Sequence
  Synthetic
guuuuaccuucagggagacg

SEQ ID NO: 694249 - RNA, 20 nt, Artificial Sequence
  Synthetic
ggugaaagugacuuaggacg

SEQ ID NO: 694250 - RNA, 20 nt, Artificial Sequence
  Synthetic
gagaaaaacaugcuaauacg

SEQ ID NO: 694251 - RNA, 20 nt, Artificial Sequence
  Synthetic
guuaagauccuuaugauacg

SEQ ID NO: 694252 - RNA, 20 nt, Artificial Sequence
  Synthetic
gcaaaaguuuggauuauacg

SEQ ID NO: 694253 - RNA, 20 nt, Artificial Sequence
  Synthetic
gagcuaaaagcauuuuuacg

SEQ ID NO: 694254 - RNA, 20 nt, Artificial Sequence
  Synthetic
guccuaagucacuuucaccg

SEQ ID NO: 694255 - RNA, 20 nt, Artificial Sequence
  Synthetic
ggggagcuuauacaagaccg

SEQ ID NO: 694256 - RNA, 20 nt, Artificial Sequence
  Synthetic
gcaucuuauucacuuuaccg

SEQ ID NO: 694257 - RNA, 20 nt, Artificial Sequence
  Synthetic
gcagaggaccuuacgucccg

SEQ ID NO: 694258 - RNA, 20 nt, Artificial Sequence
  Synthetic
guauaaguugacccuucccg

SEQ ID NO: 694259 - RNA, 20 nt, Artificial Sequence
  Synthetic
guguuagcggccaggagccg

SEQ ID NO: 694260 - RNA, 20 nt, Artificial Sequence
  Synthetic
gguguuuaguacuuauuccg

SEQ ID NO: 694261 - RNA, 20 nt, Artificial Sequence
  Synthetic
gggggccauguguauuuccg

SEQ ID NO: 694262 - RNA, 20 nt, Artificial Sequence
  Synthetic
gggaaacuuguugcuuuccg

SEQ ID NO: 694263 - RNA, 20 nt, Artificial Sequence
  Synthetic
gaaacagcuuuuggcccgcg

SEQ ID NO: 694264 - RNA, 20 nt, Artificial Sequence
  Synthetic
gugaagaguaucucugggcg

SEQ ID NO: 694265 - RNA, 20 nt, Artificial Sequence
  Synthetic
ggucauuauuccaaacugcg

SEQ ID NO: 694266 - RNA, 20 nt, Artificial Sequence
  Synthetic
gcuaguugagcagugcugcg

SEQ ID NO: 694267 - RNA, 20 nt, Artificial Sequence
  Synthetic
gaagggacaucagcuacucg

SEQ ID NO: 694268 - RNA, 20 nt, Artificial Sequence
  Synthetic
guucuuuuucaccuuacucg

SEQ ID NO: 694269 - RNA, 20 nt, Artificial Sequence
  Synthetic
gauuucaacaagacaccucg

SEQ ID NO: 694270 - RNA, 20 nt, Artificial Sequence
  Synthetic
gguucuguuugccuaagucg

SEQ ID NO: 694271 - RNA, 20 nt, Artificial Sequence
  Synthetic
gugaaugauacacaucgucg

SEQ ID NO: 694272 - RNA, 20 nt, Artificial Sequence
  Synthetic
gaaaaacguagaacuggucg

SEQ ID NO: 694273 - RNA, 20 nt, Artificial Sequence
  Synthetic
gguuagauuucuagaguucg

SEQ ID NO: 694274 - RNA, 20 nt, Artificial Sequence
  Synthetic
gaauuaggcacuccgaaagg

SEQ ID NO: 694275 - RNA, 20 nt, Artificial Sequence
  Synthetic
gauacuucuccauggaaagg

SEQ ID NO: 694276 - RNA, 20 nt, Artificial Sequence
  Synthetic
ggagauaucuuucagcaagg
